United States Patent Application Publication US 2011/0191912 A1 - sequence listing, part 26

SEQ ID NO: 148865 - DNA, 7 bp, Unknown
  misc_feature (1)..( 7): Result.004 file - promoters60/5666614
tttctct

SEQ ID NO: 148866 - DNA, 6 bp, Unknown
  misc_feature (1)..( 6): Result.004 file - promoters60/5666614
tatttt

SEQ ID NO: 148867 - DNA, 6 bp, Unknown
  misc_feature (1)..( 6): Result.004 file - promoters60/5666614
tatttt

SEQ ID NO: 148868 - DNA, 9 bp, Unknown
  misc_feature (1)..( 9): Result.004 file - promoters60/5666614
gacaaatac

SEQ ID NO: 148869 - DNA, 9 bp, Unknown
  misc_feature (1)..( 9): Result.004 file - promoters60/5666614
gacaattac

SEQ ID NO: 148870 - DNA, 6 bp, Unknown
  misc_feature (1)..( 6): Result.004 file - promoters60/5666614
caattt

SEQ ID NO: 148871 - DNA, 6 bp, Unknown
  misc_feature (1)..( 6): Result.004 file - promoters60/5667152
caattt

SEQ ID NO: 148872 - DNA, 8 bp, Unknown
  misc_feature (1)..( 8): Result.004 file - promoters60/5667152
cggtataa

SEQ ID NO: 148873 - DNA, 8 bp, Unknown
  misc_feature (1)..( 8): Result.004 file - promoters60/5667152
cggtctaa

SEQ ID NO: 148874 - DNA, 8 bp, Unknown
  misc_feature (1)..( 8): Result.004 file - promoters60/5667152
aaaaaatc

SEQ ID NO: 148875 - DNA, 8 bp, Unknown
  misc_feature (1)..( 8): Result.004 file - promoters60/5667152
aaaacatc

SEQ ID NO: 148876 - DNA, 8 bp, Unknown
  misc_feature (1)..( 8): Result.004 file - promoters60/5667152
acaaaatt

SEQ ID NO: 148877 - DNA, 8 bp, Unknown
  misc_feature (1)..( 8): Result.004 file - promoters60/5667152
acaacatt

SEQ ID NO: 148878 - DNA, 7 bp, Unknown
  misc_feature (1)..( 7): Result.004 file - promoters60/5667152
agaaatg

SEQ ID NO: 148879 - DNA, 7 bp, Unknown
  misc_feature (1)..( 7): Result.004 file - promoters60/5667152
agacatg

SEQ ID NO: 148880 - DNA, 7 bp, Unknown
  misc_feature (1)..( 7): Result.004 file - promoters60/5667152
agttaag

SEQ ID NO: 148881 - DNA, 7 bp, Unknown
  misc_feature (1)..( 7): Result.004 file - promoters60/5667152
agtgaag

SEQ ID NO: 148882 - DNA, 8 bp, Unknown
  misc_feature (1)..( 8): Result.004 file - promoters60/5667152
tggtttgt

SEQ ID NO: 148883 - DNA, 8 bp, Unknown
  misc_feature (1)..( 8): Result.004 file - promoters60/5667152
tggtctgt

SEQ ID NO: 148884 - DNA, 7 bp, Unknown
  misc_feature (1)..( 7): Result.004 file - promoters60/5667152
ttattcg

SEQ ID NO: 148885 - DNA, 7 bp, Unknown
  misc_feature (1)..( 7): Result.004 file - promoters60/5667152
ttattcg

SEQ ID NO: 148886 - DNA, 7 bp, Unknown
  misc_feature (1)..( 7): Result.004 file - promoters60/5667152
ttgaatc

SEQ ID NO: 148887 - DNA, 7 bp, Unknown
  misc_feature (1)..( 7): Result.004 file - promoters60/5667152
ttggatc

SEQ ID NO: 148888 - DNA, 9 bp, Unknown
  misc_feature (1)..( 9): Result.004 file - promoters60/5667152
atcatattt

SEQ ID NO: 148889 - DNA, 9 bp, Unknown
  misc_feature (1)..( 9): Result.004 file - promoters60/5667152
atcaaattt

SEQ ID NO: 148890 - DNA, 7 bp, Unknown
  misc_feature (1)..( 7): Result.004 file - promoters60/5667152
tttcttc

SEQ ID NO: 148891 - DNA, 7 bp, Unknown
  misc_feature (1)..( 7): Result.004 file - promoters60/5667152
tttcttc

SEQ ID NO: 148892 - DNA, 6 bp, Unknown
  misc_feature (1)..( 6): Result.004 file - promoters60/5667152
gttgta

SEQ ID NO: 148893 - DNA, 6 bp, Unknown
  misc_feature (1)..( 6): Result.004 file - promoters60/5667152
gttgta

SEQ ID NO: 148894 - DNA, 7 bp, Unknown
  misc_feature (1)..( 7): Result.004 file - promoters60/5667152
gaccaga

SEQ ID NO: 148895 - DNA, 7 bp, Unknown
  misc_feature (1)..( 7): Result.004 file - promoters60/5667570
gaccaga

SEQ ID NO: 148896 - DNA, 7 bp, Unknown
  misc_feature (1)..( 7): Result.004 file - promoters60/5667570
aatgaat

SEQ ID NO: 148897 - DNA, 7 bp, Unknown
  misc_feature (1)..( 7): Result.004 file - promoters60/5667570
aattaat

SEQ ID NO: 148898 - DNA, 7 bp, Unknown
  misc_feature (1)..( 7): Result.004 file - promoters60/5667570
atattta

SEQ ID NO: 148899 - DNA, 7 bp, Unknown
  misc_feature (1)..( 7): Result.004 file - promoters60/5667570
ataatta

SEQ ID NO: 148900 - DNA, 7 bp, Unknown
  misc_feature (1)..( 7): Result.004 file - promoters60/5667570
ttacaga

SEQ ID NO: 148901 - DNA, 7 bp, Unknown
  misc_feature (1)..( 7): Result.004 file - promoters60/5667570
ttaaaga

SEQ ID NO: 148902 - DNA, 7 bp, Unknown
  misc_feature (1)..( 7): Result.004 file - promoters60/5667570
aaaatta

SEQ ID NO: 148903 - DNA, 7 bp, Unknown
  misc_feature (1)..( 7): Result.004 file - promoters60/5667570
aaaatta

SEQ ID NO: 148904 - DNA, 8 bp, Unknown
  misc_feature (1)..( 8): Result.004 file - promoters60/5667570
tatttaat

SEQ ID NO: 148905 - DNA, 8 bp, Unknown
  misc_feature (1)..( 8): Result.004 file - promoters60/5667570
tatttaat

SEQ ID NO: 148906 - DNA, 9 bp, Unknown
  misc_feature (1)..( 9): Result.004 file - promoters60/5667570
tttaaaata

SEQ ID NO: 148907 - DNA, 9 bp, Unknown
  misc_feature (1)..( 9): Result.004 file - promoters60/5667570
ttttaaata

SEQ ID NO: 148908 - DNA, 6 bp, Unknown
  misc_feature (1)..( 6): Result.004 file - promoters60/5667570
taataa

SEQ ID NO: 148909 - DNA, 6 bp, Unknown
  misc_feature (1)..( 6): Result.004 file - promoters60/5667570
taataa

SEQ ID NO: 148910 - DNA, 7 bp, Unknown
  misc_feature (1)..( 7): Result.004 file - promoters60/5667570
aaataag

SEQ ID NO: 148911 - DNA, 7 bp, Unknown
  misc_feature (1)..( 7): Result.004 file - promoters60/5667570
aaaaaag

SEQ ID NO: 148912 - DNA, 8 bp, Unknown
  misc_feature (1)..( 8): Result.004 file - promoters60/5667570
aaacaaat

SEQ ID NO: 148913 - DNA, 8 bp, Unknown
  misc_feature (1)..( 8): Result.004 file - promoters60/5667570
aaagaaat

SEQ ID NO: 148914 - DNA, 8 bp, Unknown
  misc_feature (1)..( 8): Result.004 file - promoters60/5667570
ataagaaa

SEQ ID NO: 148915 - DNA, 8 bp, Unknown
  misc_feature (1)..( 8): Result.004 file - promoters60/5667570
ataagaaa

SEQ ID NO: 148916 - DNA, 11 bp, Unknown
  misc_feature (1)..( 11): Result.004 file - promoters60/5667570
caaaataagaa

SEQ ID NO: 148917 - DNA, 11 bp, Unknown
  misc_feature (1)..( 11): Result.004 file - promoters60/5667570
caaaattcttt

SEQ ID NO: 148918 - DNA, 11 bp, Unknown
  misc_feature (1)..( 11): Result.004 file - promoters60/5667570
caaaaaaaaaa

SEQ ID NO: 148919 - DNA, 9 bp, Unknown
  misc_feature (1)..( 9): Result.004 file - promoters60/5667570
acttgtttt

SEQ ID NO: 148920 - DNA, 9 bp, Unknown
  misc_feature (1)..( 9): Result.004 file - promoters60/5667570
tggtgtttt

SEQ ID NO: 148921 - DNA, 9 bp, Unknown
  misc_feature (1)..( 9): Result.004 file - promoters60/5667570
tggggtttt

SEQ ID NO: 148922 - DNA, 11 bp, Unknown
  misc_feature (1)..( 11): Result.004 file - promoters60/5667570
tatatataaac

SEQ ID NO: 148923 - DNA, 11 bp, Unknown
  misc_feature (1)..( 11): Result.004 file - promoters60/5667570
tatatataaac

SEQ ID NO: 148924 - DNA, 7 bp, Unknown
  misc_feature (1)..( 7): Result.004 file - promoters60/5667570
ttcccaa

SEQ ID NO: 148925 - DNA, 7 bp, Unknown
  misc_feature (1)..( 7): Result.004 file - promoters60/5667570
ttcccaa

SEQ ID NO: 148926 - DNA, 6 bp, Unknown
  misc_feature (1)..( 6): Result.004 file - promoters60/5667570
ctgttg

SEQ ID NO: 148927 - DNA, 6 bp, Unknown
  misc_feature (1)..( 6): Result.004 file - promoters60/5667570
ctgttg

SEQ ID NO: 148928 - DNA, 7 bp, Unknown
  misc_feature (1)..( 7): Result.004 file - promoters60/5667570
ttgaaat

SEQ ID NO: 148929 - DNA, 7 bp, Unknown
  misc_feature (1)..( 7): Result.004 file - promoters60/5667570
ttgtaat

SEQ ID NO: 148930 - DNA, 6 bp, Unknown
  misc_feature (1)..( 6): Result.004 file - promoters60/5667570
aaatta

SEQ ID NO: 148931 - DNA, 6 bp, Unknown
  misc_feature (1)..( 6): Result.004 file - promoters60/5667570
aaatta

SEQ ID NO: 148932 - DNA, 7 bp, Unknown
  misc_feature (1)..( 7): Result.004 file - promoters60/5667570
cttattt

SEQ ID NO: 148933 - DNA, 7 bp, Unknown
  misc_feature (1)..( 7): Result.004 file - promoters60/5667570
ctttttt

SEQ ID NO: 148934 - DNA, 8 bp, Unknown
  misc_feature (1)..( 8): Result.004 file - promoters60/5667570
tttcaaaa

SEQ ID NO: 148935 - DNA, 8 bp, Unknown
  misc_feature (1)..( 8): Result.004 file - promoters60/5667570
ttttaaaa

SEQ ID NO: 148936 - DNA, 7 bp, Unknown
  misc_feature (1)..( 7): Result.004 file - promoters60/5667570
aaattta

SEQ ID NO: 148937 - DNA, 7 bp, Unknown
  misc_feature (1)..( 7): Result.004 file - promoters60/5667570
aaattta

SEQ ID NO: 148938 - DNA, 7 bp, Unknown
  misc_feature (1)..( 7): Result.004 file - promoters60/5667570
acctaaa

SEQ ID NO: 148939 - DNA, 7 bp, Unknown
  misc_feature (1)..( 7): Result.004 file - promoters60/5667570
acccaaa

SEQ ID NO: 148940 - DNA, 6 bp, Unknown
  misc_feature (1)..( 6): Result.004 file - promoters60/5667570
tctcat

SEQ ID NO: 148941 - DNA, 6 bp, Unknown
  misc_feature (1)..( 6): Result.004 file - promoters60/5667570
tctcat

SEQ ID NO: 148942 - DNA, 7 bp, Unknown
  misc_feature (1)..( 7): Result.004 file - promoters60/5667570
ttgccaa

SEQ ID NO: 148943 - DNA, 7 bp, Unknown
  misc_feature (1)..( 7): Result.004 file - promoters60/5667570
ttgtcaa

SEQ ID NO: 148944 - DNA, 6 bp, Unknown
  misc_feature (1)..( 6): Result.004 file - promoters60/5667570
tttatt

SEQ ID NO: 148945 - DNA, 6 bp, Unknown
  misc_feature (1)..( 6): Result.004 file - promoters60/5667570
tttatt

SEQ ID NO: 148946 - DNA, 6 bp, Unknown
  misc_feature (1)..( 6): Result.004 file - promoters60/5667570
taattt

SEQ ID NO: 148947 - DNA, 6 bp, Unknown
  misc_feature (1)..( 6): Result.004 file - promoters60/5667570
taattt

SEQ ID NO: 148948 - DNA, 7 bp, Unknown
  misc_feature (1)..( 7): Result.004 file - promoters60/5667570
aaagagg

SEQ ID NO: 148949 - DNA, 7 bp, Unknown
  misc_feature (1)..( 7): Result.004 file - promoters60/5667570
aaaaagg

SEQ ID NO: 148950 - DNA, 7 bp, Unknown
  misc_feature (1)..( 7): Result.004 file - promoters60/5667570
gctaaaa

SEQ ID NO: 148951 - DNA, 7 bp, Unknown
  misc_feature (1)..( 7): Result.004 file - promoters60/5667588
gctcaaa

SEQ ID NO: 148952 - DNA, 8 bp, Unknown
  misc_feature (1)..( 8): Result.004 file - promoters60/5667588
caataatt

SEQ ID NO: 148953 - DNA, 8 bp, Unknown
  misc_feature (1)..( 8): Result.004 file - promoters60/5667588
caatcatt

SEQ ID NO: 148954 - DNA, 9 bp, Unknown
  misc_feature (1)..( 9): Result.004 file - promoters60/5667588
attattatt

SEQ ID NO: 148955 - DNA, 9 bp, Unknown
  misc_feature (1)..( 9): Result.004 file - promoters60/5667588
atttttatt

SEQ ID NO: 148956 - DNA, 10 bp, Unknown
  misc_feature (1)..( 10): Result.004 file - promoters60/5667588
tatctaagtg

SEQ ID NO: 148957 - DNA, 10 bp, Unknown
  misc_feature (1)..( 10): Result.004 file - promoters60/5667588
gttctacgtg

SEQ ID NO: 148958 - DNA, 10 bp, Unknown
  misc_feature (1)..( 10): Result.004 file - promoters60/5667588
tatataaaca

SEQ ID NO: 148959 - DNA, 6 bp, Unknown
  misc_feature (1)..( 6): Result.004 file - promoters60/5667588
ttaaca

SEQ ID NO: 148960 - DNA, 6 bp, Unknown
  misc_feature (1)..( 6): Result.004 file - promoters60/5667588
ttaaca

SEQ ID NO: 148961 - DNA, 8 bp, Unknown
  misc_feature (1)..( 8): Result.004 file - promoters60/5667588
ccttccac

SEQ ID NO: 148962 - DNA, 8 bp, Unknown
  misc_feature (1)..( 8): Result.004 file - promoters60/5667588
cctaccac

SEQ ID NO: 148963 - DNA, 8 bp, Unknown
  misc_feature (1)..( 8): Result.004 file - promoters60/5667588
actatata

SEQ ID NO: 148964 - DNA, 8 bp, Unknown
  misc_feature (1)..( 8): Result.004 file - promoters60/5667588
actctata

SEQ ID NO: 148965 - DNA, 8 bp, Unknown
  misc_feature (1)..( 8): Result.004 file - promoters60/5667588
gttatata

SEQ ID NO: 148966 - DNA, 8 bp, Unknown
  misc_feature (1)..( 8): Result.004 file - promoters60/5667588
ttattttt

SEQ ID NO: 148967 - DNA, 8 bp, Unknown
  misc_feature (1)..( 8): Result.004 file - promoters60/5667588
ttattttt

SEQ ID NO: 148968 - DNA, 6 bp, Unknown
  misc_feature (1)..( 6): Result.004 file - promoters60/5667588
aattat

SEQ ID NO: 148969 - DNA, 6 bp, Unknown
  misc_feature (1)..( 6): Result.004 file - promoters60/5667588
aattat

SEQ ID NO: 148970 - DNA, 6 bp, Unknown
  misc_feature (1)..( 6): Result.004 file - promoters60/5667588
gagttt

SEQ ID NO: 148971 - DNA, 6 bp, Unknown
  misc_feature (1)..( 6): Result.004 file - promoters60/5667588
gagttt

SEQ ID NO: 148972 - DNA, 6 bp, Unknown
  misc_feature (1)..( 6): Result.004 file - promoters60/5667588
attttt

SEQ ID NO: 148973 - DNA, 6 bp, Unknown
  misc_feature (1)..( 6): Result.004 file - promoters60/5667588
attttt

SEQ ID NO: 148974 - DNA, 7 bp, Unknown
  misc_feature (1)..( 7): Result.004 file - promoters60/5667588
tttttat

SEQ ID NO: 148975 - DNA, 7 bp, Unknown
  misc_feature (1)..( 7): Result.004 file - promoters60/5667588
tttttat

SEQ ID NO: 148976 - DNA, 9 bp, Unknown
  misc_feature (1)..( 9): Result.004 file - promoters60/5667588
aaaaatatc

SEQ ID NO: 148977 - DNA, 9 bp, Unknown
  misc_feature (1)..( 9): Result.004 file - promoters60/5667588
aaacatatc

SEQ ID NO: 148978 - DNA, 6 bp, Unknown
  misc_feature (1)..( 6): Result.004 file - promoters60/5667588
acacca

SEQ ID NO: 148979 - DNA, 6 bp, Unknown
  misc_feature (1)..( 6): Result.004 file - promoters60/5667588
acacca

SEQ ID NO: 148980 - DNA, 6 bp, Unknown
  misc_feature (1)..( 6): Result.004 file - promoters60/5667588
tcaaga

SEQ ID NO: 148981 - DNA, 6 bp, Unknown
  misc_feature (1)..( 6): Result.004 file - promoters60/5667588
tcaaga

SEQ ID NO: 148982 - DNA, 6 bp, Unknown
  misc_feature (1)..( 6): Result.004 file - promoters60/5667588
atagcc

SEQ ID NO: 148983 - DNA, 6 bp, Unknown
  misc_feature (1)..( 6): Result.004 file - promoters60/5667588
atagcc

SEQ ID NO: 148984 - DNA, 6 bp, Unknown
  misc_feature (1)..( 6): Result.004 file - promoters60/5667588
aaaaat

SEQ ID NO: 148985 - DNA, 6 bp, Unknown
  misc_feature (1)..( 6): Result.004 file - promoters60/5667588
aaaaat

SEQ ID NO: 148986 - DNA, 7 bp, Unknown
  misc_feature (1)..( 7): Result.004 file - promoters60/5667588
aattgta

SEQ ID NO: 148987 - DNA, 7 bp, Unknown
  misc_feature (1)..( 7): Result.004 file - promoters60/5667588
aatagta

SEQ ID NO: 148988 - DNA, 6 bp, Unknown
  misc_feature (1)..( 6): Result.004 file - promoters60/5667588
taaagg

SEQ ID NO: 148989 - DNA, 6 bp, Unknown
  misc_feature (1)..( 6): Result.004 file - promoters60/5667588
taaagg

SEQ ID NO: 148990 - DNA, 9 bp, Unknown
  misc_feature (1)..( 9): Result.004 file - promoters60/5667588
aaaaatgaa

SEQ ID NO: 148991 - DNA, 9 bp, Unknown
  misc_feature (1)..( 9): Result.004 file - promoters60/5667588
aaaactgaa

SEQ ID NO: 148992 - DNA, 9 bp, Unknown
  misc_feature (1)..( 9): Result.004 file - promoters60/5667588
aaaacattt

SEQ ID NO: 148993 - DNA, 9 bp, Unknown
  misc_feature (1)..( 9): Result.004 file - promoters60/5667588
aaaacattt

SEQ ID NO: 148994 - DNA, 9 bp, Unknown
  misc_feature (1)..( 9): Result.004 file - promoters60/5667588
tcacgaaaa

SEQ ID NO: 148995 - DNA, 9 bp, Unknown
  misc_feature (1)..( 9): Result.004 file - promoters60/5667588
tcacgaaaa

SEQ ID NO: 148996 - DNA, 7 bp, Unknown
  misc_feature (1)..( 7): Result.004 file - promoters60/5667588
ttccgaa

SEQ ID NO: 148997 - DNA, 7 bp, Unknown
  misc_feature (1)..( 7): Result.004 file - promoters60/5667685
ttccgaa

SEQ ID NO: 148998 - DNA, 7 bp, Unknown
  misc_feature (1)..( 7): Result.004 file - promoters60/5667685
attgatt

SEQ ID NO: 148999 - DNA, 7 bp, Unknown
  misc_feature (1)..( 7): Result.004 file - promoters60/5667685
attgatt

SEQ ID NO: 149000 - DNA, 10 bp, Unknown
  misc_feature (1)..( 10): Result.004 file - promoters60/5667685
ttgtaaccaa

SEQ ID NO: 149001 - DNA, 10 bp, Unknown
  misc_feature (1)..( 10): Result.004 file - promoters60/5667685
ttggaactgc

SEQ ID NO: 149002 - DNA, 10 bp, Unknown
  misc_feature (1)..( 10): Result.004 file - promoters60/5667685
aagtaaacaa

SEQ ID NO: 149003 - DNA, 8 bp, Unknown
  misc_feature (1)..( 8): Result.004 file - promoters60/5667685
ctataatt

SEQ ID NO: 149004 - DNA, 8 bp, Unknown
  misc_feature (1)..( 8): Result.004 file - promoters60/5667685
ctagaatt

SEQ ID NO: 149005 - DNA, 6 bp, Unknown
  misc_feature (1)..( 6): Result.004 file - promoters60/5667685
atcttc

SEQ ID NO: 149006 - DNA, 6 bp, Unknown
  misc_feature (1)..( 6): Result.004 file - promoters60/5667685
atcttc

SEQ ID NO: 149007 - DNA, 8 bp, Unknown
  misc_feature (1)..( 8): Result.004 file - promoters60/5667685
tttcgaaa

SEQ ID NO: 149008 - DNA, 8 bp, Unknown
  misc_feature (1)..( 8): Result.004 file - promoters60/5667685
tttggaaa

SEQ ID NO: 149009 - DNA, 6 bp, Unknown
  misc_feature (1)..( 6): Result.004 file - promoters60/5667685
tcactt

SEQ ID NO: 149010 - DNA, 6 bp, Unknown
  misc_feature (1)..( 6): Result.004 file - promoters60/5667685
tcactt

SEQ ID NO: 149011 - DNA, 6 bp, Unknown
  misc_feature (1)..( 6): Result.004 file - promoters60/5667685
aaaaat

SEQ ID NO: 149012 - DNA, 6 bp, Unknown
  misc_feature (1)..( 6): Result.004 file - promoters60/5667685
aaaaat

SEQ ID NO: 149013 - DNA, 8 bp, Unknown
  misc_feature (1)..( 8): Result.004 file - promoters60/5667685
ccttttca

SEQ ID NO: 149014 - DNA, 8 bp, Unknown
  misc_feature (1)..( 8): Result.004 file - promoters60/5667685
ttttttca

SEQ ID NO: 149015 - DNA, 8 bp, Unknown
  misc_feature (1)..( 8): Result.004 file - promoters60/5667685
ttttttcc

SEQ ID NO: 149016 - DNA, 6 bp, Unknown
  misc_feature (1)..( 6): Result.004 file - promoters60/5667685
tttaat

SEQ ID NO: 149017 - DNA, 6 bp, Unknown
  misc_feature (1)..( 6): Result.004 file - promoters60/5667685
tttaat

SEQ ID NO: 149018 - DNA, 10 bp, Unknown
  misc_feature (1)..( 10): Result.004 file - promoters60/5667685
accaataatg

SEQ ID NO: 149019 - DNA, 10 bp, Unknown
  misc_feature (1)..( 10): Result.004 file - promoters60/5667685
accaaaaatg

SEQ ID NO: 149020 - DNA, 6 bp, Unknown
  misc_feature (1)..( 6): Result.004 file - promoters60/5667685
acaaaa

SEQ ID NO: 149021 - DNA, 6 bp, Unknown
  misc_feature (1)..( 6): Result.004 file - promoters60/5667685
acaaaa

SEQ ID NO: 149022 - DNA, 6 bp, Unknown
  misc_feature (1)..( 6): Result.004 file - promoters60/5667685
aataaa

SEQ ID NO: 149023 - DNA, 6 bp, Unknown
  misc_feature (1)..( 6): Result.004 file - promoters60/5667685
aataaa

SEQ ID NO: 149024 - DNA, 7 bp, Unknown
  misc_feature (1)..( 7): Result.004 file - promoters60/5667685
taagaat

SEQ ID NO: 149025 - DNA, 7 bp, Unknown
  misc_feature (1)..( 7): Result.004 file - promoters60/5667685
taaaaat

SEQ ID NO: 149026 - DNA, 6 bp, Unknown
  misc_feature (1)..( 6): Result.004 file - promoters60/5667685
actaac

SEQ ID NO: 149027 - DNA, 6 bp, Unknown
  misc_feature (1)..( 6): Result.004 file - promoters60/5667685
actaac

SEQ ID NO: 149028 - DNA, 8 bp, Unknown
  misc_feature (1)..( 8): Result.004 file - promoters60/5667685
tgatacta

SEQ ID NO: 149029 - DNA, 8 bp, Unknown
  misc_feature (1)..( 8): Result.004 file - promoters60/5667685
tgaaacta

SEQ ID NO: 149030 - DNA, 6 bp, Unknown
  misc_feature (1)..( 6): Result.004 file - promoters60/5667685
aaatct

SEQ ID NO: 149031 - DNA, 6 bp, Unknown
  misc_feature (1)..( 6): Result.004 file - promoters60/5667685
aaatct

SEQ ID NO: 149032 - DNA, 7 bp, Unknown
  misc_feature (1)..( 7): Result.004 file - promoters60/5667685
cttcaat

SEQ ID NO: 149033 - DNA, 7 bp, Unknown
  misc_feature (1)..( 7): Result.004 file - promoters60/5667685
cttaaat

SEQ ID NO: 149034 - DNA, 9 bp, Unknown
  misc_feature (1)..( 9): Result.004 file - promoters60/5667685
aactttttt

SEQ ID NO: 149035 - DNA, 9 bp, Unknown
  misc_feature (1)..( 9): Result.004 file - promoters60/5667685
aactttttt

SEQ ID NO: 149036 - DNA, 7 bp, Unknown
  misc_feature (1)..( 7): Result.004 file - promoters60/5667685
atataat

SEQ ID NO: 149037 - DNA, 7 bp, Unknown
  misc_feature (1)..( 7): Result.004 file - promoters60/5667685
ataaaat

SEQ ID NO: 149038 - DNA, 6 bp, Unknown
  misc_feature (1)..( 6): Result.004 file - promoters60/5667685
cttttt

SEQ ID NO: 149039 - DNA, 6 bp, Unknown
  misc_feature (1)..( 6): Result.004 file - promoters60/5667685
cttttt

SEQ ID NO: 149040 - DNA, 7 bp, Unknown
  misc_feature (1)..( 7): Result.004 file - promoters60/5667685
taagcca

SEQ ID NO: 149041 - DNA, 7 bp, Unknown
  misc_feature (1)..( 7): Result.004 file - promoters60/5667685
taaacca

SEQ ID NO: 149042 - DNA, 7 bp, Unknown
  misc_feature (1)..( 7): Result.004 file - promoters60/5667685
aagttaa

SEQ ID NO: 149043 - DNA, 7 bp, Unknown
  misc_feature (1)..( 7): Result.004 file - promoters60/5667685
aagttaa

SEQ ID NO: 149044 - DNA, 6 bp, Unknown
  misc_feature (1)..( 6): Result.004 file - promoters60/5667685
tgaaaa

SEQ ID NO: 149045 - DNA, 6 bp, Unknown
  misc_feature (1)..( 6): Result.004 file - promoters60/5667685
tgaaaa

SEQ ID NO: 149046 - DNA, 8 bp, Unknown
  misc_feature (1)..( 8): Result.004 file - promoters60/5667685
gatgcaag

SEQ ID NO: 149047 - DNA, 8 bp, Unknown
  misc_feature (1)..( 8): Result.004 file - promoters60/5667720
gatggaag

SEQ ID NO: 149048 - DNA, 10 bp, Unknown
  misc_feature (1)..( 10): Result.004 file - promoters60/5667720
taatttgttt

SEQ ID NO: 149049 - DNA, 10 bp, Unknown
  misc_feature (1)..( 10): Result.004 file - promoters60/5667720
aaatttgctc

SEQ ID NO: 149050 - DNA, 10 bp, Unknown
  misc_feature (1)..( 10): Result.004 file - promoters60/5667720
taatttacag

SEQ ID NO: 149051 - DNA, 10 bp, Unknown
  misc_feature (1)..( 10): Result.004 file - promoters60/5667720
ttattttttt

SEQ ID NO: 149052 - DNA, 10 bp, Unknown
  misc_feature (1)..( 10): Result.004 file - promoters60/5667720
aaatttctga

SEQ ID NO: 149053 - DNA, 10 bp, Unknown
  misc_feature (1)..( 10): Result.004 file - promoters60/5667720
ctgttttttt

SEQ ID NO: 149054 - DNA, 10 bp, Unknown
  misc_feature (1)..( 10): Result.004 file - promoters60/5667720
tgctttttct

SEQ ID NO: 149055 - DNA, 12 bp, Unknown
  misc_feature (1)..( 12): Result.004 file - promoters60/5667720
gaacattataca

SEQ ID NO: 149056 - DNA, 12 bp, Unknown
  misc_feature (1)..( 12): Result.004 file - promoters60/5667720
taacatttcgtt

SEQ ID NO: 149057 - DNA, 12 bp, Unknown
  misc_feature (1)..( 12): Result.004 file - promoters60/5667720
gaaaatttacct

SEQ ID NO: 149058 - DNA, 12 bp, Unknown
  misc_feature (1)..( 12): Result.004 file - promoters60/5667720
ctacaatataag

SEQ ID NO: 149059 - DNA, 12 bp, Unknown
  misc_feature (1)..( 12): Result.004 file - promoters60/5667720
aaaactttctta

SEQ ID NO: 149060 - DNA, 12 bp, Unknown
  misc_feature (1)..( 12): Result.004 file - promoters60/5667720
ctaaattttata

SEQ ID NO: 149061 - DNA, 12 bp, Unknown
  misc_feature (1)..( 12): Result.004 file - promoters60/5667720
atcacttcctta

SEQ ID NO: 149062 - DNA, 8 bp, Unknown
  misc_feature (1)..( 8): Result.004 file - promoters60/5667720
atttgttt

SEQ ID NO: 149063 - DNA, 8 bp, Unknown
  misc_feature (1)..( 8): Result.004 file - promoters60/5667720
gttttttt

SEQ ID NO: 149064 - DNA, 8 bp, Unknown
  misc_feature (1)..( 8): Result.004 file - promoters60/5667720
cttttttt

SEQ ID NO: 149065 - DNA, 8 bp, Unknown
  misc_feature (1)..( 8): Result.004 file - promoters60/5667720
attttttt

SEQ ID NO: 149066 - DNA, 8 bp, Unknown
  misc_feature (1)..( 8): Result.004 file - promoters60/5667720
ctttttat

SEQ ID NO: 149067 - DNA, 8 bp, Unknown
  misc_feature (1)..( 8): Result.004 file - promoters60/5667720
gtttttct

SEQ ID NO: 149068 - DNA, 10 bp, Unknown
  misc_feature (1)..( 10): Result.004 file - promoters60/5667720
gtataaattg

SEQ ID NO: 149069 - DNA, 10 bp, Unknown
  misc_feature (1)..( 10): Result.004 file - promoters60/5667720
gtataaataa

SEQ ID NO: 149070 - DNA, 10 bp, Unknown
  misc_feature (1)..( 10): Result.004 file - promoters60/5667720
ctataaattg

SEQ ID NO: 149071 - DNA, 10 bp, Unknown
  misc_feature (1)..( 10): Result.004 file - promoters60/5667720
atataaatat

SEQ ID NO: 149072 - DNA, 10 bp, Unknown
  misc_feature (1)..( 10): Result.004 file - promoters60/5667720
ctatatatat

SEQ ID NO: 149073 - DNA, 10 bp, Unknown
  misc_feature (1)..( 10): Result.004 file - promoters60/5667737
ctataaatat

SEQ ID NO: 149074 - DNA, 8 bp, Unknown
  misc_feature (1)..( 8): Result.004 file - promoters60/5667737
ctacaaca

SEQ ID NO: 149075 - DNA, 8 bp, Unknown
  misc_feature (1)..( 8): Result.004 file - promoters60/5667737
ctacaaag

SEQ ID NO: 149076 - DNA, 8 bp, Unknown
  misc_feature (1)..( 8): Result.004 file - promoters60/5667737
ctagaaat

SEQ ID NO: 149077 - DNA, 8 bp, Unknown
  misc_feature (1)..( 8): Result.004 file - promoters60/5667737
ctaaaaag

SEQ ID NO: 149078 - DNA, 14 bp, Unknown
  misc_feature (1)..( 14): Result.004 file - promoters60/5667737
caacaaaaaccaaa

SEQ ID NO: 149079 - DNA, 14 bp, Unknown
  misc_feature (1)..( 14): Result.004 file - promoters60/5667737
ctacaaagaccaaa

SEQ ID NO: 149080 - DNA, 14 bp, Unknown
  misc_feature (1)..( 14): Result.004 file - promoters60/5667737
ctagaaattctatt

SEQ ID NO: 149081 - DNA, 14 bp, Unknown
  misc_feature (1)..( 14): Result.004 file - promoters60/5667741
ctaaaaagtatttt

SEQ ID NO: 149082 - DNA, 6 bp, Unknown
  misc_feature (1)..( 6): Result.004 file - promoters60/5667741
gtttct

SEQ ID NO: 149083 - DNA, 6 bp, Unknown
  misc_feature (1)..( 6): Result.004 file - promoters60/5667741
gtttct

SEQ ID NO: 149084 - DNA, 6 bp, Unknown
  misc_feature (1)..( 6): Result.004 file - promoters60/5667741
tctgtt

SEQ ID NO: 149085 - DNA, 6 bp, Unknown
  misc_feature (1)..( 6): Result.004 file - promoters60/5667741
tctgtt

SEQ ID NO: 149086 - DNA, 7 bp, Unknown
  misc_feature (1)..( 7): Result.004 file - promoters60/5667741
ttcttca

SEQ ID NO: 149087 - DNA, 7 bp, Unknown
  misc_feature (1)..( 7): Result.004 file - promoters60/5667741
ttcttca

SEQ ID NO: 149088 - DNA, 9 bp, Unknown
  misc_feature (1)..( 9): Result.004 file - promoters60/5667741
ctggtatat

SEQ ID NO: 149089 - DNA, 9 bp, Unknown
  misc_feature (1)..( 9): Result.004 file - promoters60/5667741
ctgctatat

SEQ ID NO: 149090 - DNA, 7 bp, Unknown
  misc_feature (1)..( 7): Result.004 file - promoters60/5667741
ttcattt

SEQ ID NO: 149091 - DNA, 7 bp, Unknown
  misc_feature (1)..( 7): Result.004 file - promoters60/5667741
ttctttt

SEQ ID NO: 149092 - DNA, 9 bp, Unknown
  misc_feature (1)..( 9): Result.004 file - promoters60/5667741
gtttttctt

SEQ ID NO: 149093 - DNA, 9 bp, Unknown
  misc_feature (1)..( 9): Result.004 file - promoters60/5667741
gttcttctt

SEQ ID NO: 149094 - DNA, 7 bp, Unknown
  misc_feature (1)..( 7): Result.004 file - promoters60/5667741
gaaaaaa

SEQ ID NO: 149095 - DNA, 7 bp, Unknown
  misc_feature (1)..( 7): Result.004 file - promoters60/5667741
gaagaaa

SEQ ID NO: 149096 - DNA, 7 bp, Unknown
  misc_feature (1)..( 7): Result.004 file - promoters60/5667741
gctgctg

SEQ ID NO: 149097 - DNA, 7 bp, Unknown
  misc_feature (1)..( 7): Result.004 file - promoters60/5667741
gctgctg

SEQ ID NO: 149098 - DNA, 6 bp, Unknown
  misc_feature (1)..( 6): Result.004 file - promoters60/5667741
tgttct

SEQ ID NO: 149099 - DNA, 6 bp, Unknown
  misc_feature (1)..( 6): Result.004 file - promoters60/5667741
tgttct

SEQ ID NO: 149100 - DNA, 9 bp, Unknown
  misc_feature (1)..( 9): Result.004 file - promoters60/5667741
tttaagtct

SEQ ID NO: 149101 - DNA, 9 bp, Unknown
  misc_feature (1)..( 9): Result.004 file - promoters60/5667741
tttaactct

SEQ ID NO: 149102 - DNA, 8 bp, Unknown
  misc_feature (1)..( 8): Result.004 file - promoters60/5667741
gtctacga

SEQ ID NO: 149103 - DNA, 8 bp, Unknown
  misc_feature (1)..( 8): Result.004 file - promoters60/5667741
gtcttcga

SEQ ID NO: 149104 - DNA, 8 bp, Unknown
  misc_feature (1)..( 8): Result.004 file - promoters60/5667741
aatcaagt

SEQ ID NO: 149105 - DNA, 8 bp, Unknown
  misc_feature (1)..( 8): Result.004 file - promoters60/5667741
aattaagt

SEQ ID NO: 149106 - DNA, 9 bp, Unknown
  misc_feature (1)..( 9): Result.004 file - promoters60/5667741
tgggcccat

SEQ ID NO: 149107 - DNA, 9 bp, Unknown
  misc_feature (1)..( 9): Result.004 file - promoters60/5667741
tgggcccat

SEQ ID NO: 149108 - DNA, 6 bp, Unknown
  misc_feature (1)..( 6): Result.004 file - promoters60/5667741
cgtcct

SEQ ID NO: 149109 - DNA, 6 bp, Unknown
  misc_feature (1)..( 6): Result.004 file - promoters60/5667741
cgtcct

SEQ ID NO: 149110 - DNA, 9 bp, Unknown
  misc_feature (1)..( 9): Result.004 file - promoters60/5667741
ttttgtgtt

SEQ ID NO: 149111 - DNA, 9 bp, Unknown
  misc_feature (1)..( 9): Result.004 file - promoters60/5667741
ttttgtgtt

SEQ ID NO: 149112 - DNA, 7 bp, Unknown
  misc_feature (1)..( 7): Result.004 file - promoters60/5667741
ttttgag

SEQ ID NO: 149113 - DNA, 7 bp, Unknown
  misc_feature (1)..( 7): Result.004 file - promoters60/5667766
ttttgag

SEQ ID NO: 149114 - DNA, 6 bp, Unknown
  misc_feature (1)..( 6): Result.004 file - promoters60/5667766
ttacta

SEQ ID NO: 149115 - DNA, 6 bp, Unknown
  misc_feature (1)..( 6): Result.004 file - promoters60/5667766
ttacta

SEQ ID NO: 149116 - DNA, 9 bp, Unknown
  misc_feature (1)..( 9): Result.004 file - promoters60/5667766
tttttaaaa

SEQ ID NO: 149117 - DNA, 9 bp, Unknown
  misc_feature (1)..( 9): Result.004 file - promoters60/5667766
tttgtaaaa

SEQ ID NO: 149118 - DNA, 8 bp, Unknown
  misc_feature (1)..( 8): Result.004 file - promoters60/5667766
aaatccat

SEQ ID NO: 149119 - DNA, 8 bp, Unknown
  misc_feature (1)..( 8): Result.004 file - promoters60/5667766
aaaaccat

SEQ ID NO: 149120 - DNA, 6 bp, Unknown
  misc_feature (1)..( 6): Result.004 file - promoters60/5667766
atctct

SEQ ID NO: 149121 - DNA, 6 bp, Unknown
  misc_feature (1)..( 6): Result.004 file - promoters60/5667766
atctct

SEQ ID NO: 149122 - DNA, 8 bp, Unknown
  misc_feature (1)..( 8): Result.004 file - promoters60/5667766
gatattaa

SEQ ID NO: 149123 - DNA, 8 bp, Unknown
  misc_feature (1)..( 8): Result.004 file - promoters60/5667766
gatgttaa

SEQ ID NO: 149124 - DNA, 6 bp, Unknown
  misc_feature (1)..( 6): Result.004 file - promoters60/5667766
atattc

SEQ ID NO: 149125 - DNA, 6 bp, Unknown
  misc_feature (1)..( 6): Result.004 file - promoters60/5667766
atattc

SEQ ID NO: 149126 - DNA, 8 bp, Unknown
  misc_feature (1)..( 8): Result.004 file - promoters60/5667766
cattcgga

SEQ ID NO: 149127 - DNA, 8 bp, Unknown
  misc_feature (1)..( 8): Result.004 file - promoters60/5667766
catttgga

SEQ ID NO: 149128 - DNA, 7 bp, Unknown
  misc_feature (1)..( 7): Result.004 file - promoters60/5667766
accttaa

SEQ ID NO: 149129 - DNA, 7 bp, Unknown
  misc_feature (1)..( 7): Result.004 file - promoters60/5667766
accataa

SEQ ID NO: 149130 - DNA, 7 bp, Unknown
  misc_feature (1)..( 7): Result.004 file - promoters60/5667766
caataaa

SEQ ID NO: 149131 - DNA, 7 bp, Unknown
  misc_feature (1)..( 7): Result.004 file - promoters60/5667766
caacaaa

SEQ ID NO: 149132 - DNA, 6 bp, Unknown
  misc_feature (1)..( 6): Result.004 file - promoters60/5667766
gaatgg

SEQ ID NO: 149133 - DNA, 6 bp, Unknown
  misc_feature (1)..( 6): Result.004 file - promoters60/5667766
gaatgg

SEQ ID NO: 149134 - DNA, 9 bp, Unknown
  misc_feature (1)..( 9): Result.004 file - promoters60/5667766
atttttgtt

SEQ ID NO: 149135 - DNA, 9 bp, Unknown
  misc_feature (1)..( 9): Result.004 file - promoters60/5667766
attgttgtt

SEQ ID NO: 149136 - DNA, 6 bp, Unknown
  misc_feature (1)..( 6): Result.004 file - promoters60/5667766
cgaaac

SEQ ID NO: 149137 - DNA, 6 bp, Unknown
  misc_feature (1)..( 6): Result.004 file - promoters60/5667766
cgaaac

SEQ ID NO: 149138 - DNA, 7 bp, Unknown
  misc_feature (1)..( 7): Result.004 file - promoters60/5667766
aaaactt

SEQ ID NO: 149139 - DNA, 7 bp, Unknown
  misc_feature (1)..( 7): Result.004 file - promoters60/5667785
aaacctt

SEQ ID NO: 149140 - DNA, 7 bp, Unknown
  misc_feature (1)..( 7): Result.004 file - promoters60/5667785
actaatt

SEQ ID NO: 149141 - DNA, 7 bp, Unknown
  misc_feature (1)..( 7): Result.004 file - promoters60/5667785
actgatt

SEQ ID NO: 149142 - DNA, 6 bp, Unknown
  misc_feature (1)..( 6): Result.004 file - promoters60/5667785
caaaaa

SEQ ID NO: 149143 - DNA, 6 bp, Unknown
  misc_feature (1)..( 6): Result.004 file - promoters60/5667785
caaaaa

SEQ ID NO: 149144 - DNA, 8 bp, Unknown
  misc_feature (1)..( 8): Result.004 file - promoters60/5667785
aaaagtat

SEQ ID NO: 149145 - DNA, 8 bp, Unknown
  misc_feature (1)..( 8): Result.004 file - promoters60/5667785
aaaaatat

SEQ ID NO: 149146 - DNA, 7 bp, Unknown
  misc_feature (1)..( 7): Result.004 file - promoters60/5667785
aaacata

SEQ ID NO: 149147 - DNA, 7 bp, Unknown
  misc_feature (1)..( 7): Result.004 file - promoters60/5667785
aaagata

SEQ ID NO: 149148 - DNA, 7 bp, Unknown
  misc_feature (1)..( 7): Result.004 file - promoters60/5667785
attaatg

SEQ ID NO: 149149 - DNA, 7 bp, Unknown
  misc_feature (1)..( 7): Result.004 file - promoters60/5667785
attaatg

SEQ ID NO: 149150 - DNA, 7 bp, Unknown
  misc_feature (1)..( 7): Result.004 file - promoters60/5667785
ttctaaa

SEQ ID NO: 149151 - DNA, 7 bp, Unknown
  misc_feature (1)..( 7): Result.004 file - promoters60/5667785
ttccaaa

SEQ ID NO: 149152 - DNA, 6 bp, Unknown
  misc_feature (1)..( 6): Result.004 file - promoters60/5667785
ccaaac

SEQ ID NO: 149153 - DNA, 6 bp, Unknown
  misc_feature (1)..( 6): Result.004 file - promoters60/5667785
ccaaac

SEQ ID NO: 149154 - DNA, 6 bp, Unknown
  misc_feature (1)..( 6): Result.004 file - promoters60/5667785
ggtttt

SEQ ID NO: 149155 - DNA, 6 bp, Unknown
  misc_feature (1)..( 6): Result.004 file - promoters60/5667785
ggtttt

SEQ ID NO: 149156 - DNA, 6 bp, Unknown
  misc_feature (1)..( 6): Result.004 file - promoters60/5667785
ttaatt

SEQ ID NO: 149157 - DNA, 6 bp, Unknown
  misc_feature (1)..( 6): Result.004 file - promoters60/5667785
ttaatt

SEQ ID NO: 149158 - DNA, 8 bp, Unknown
  misc_feature (1)..( 8): Result.004 file - promoters60/5667785
gttagtat

SEQ ID NO: 149159 - DNA, 8 bp, Unknown
  misc_feature (1)..( 8): Result.004 file - promoters60/5667785
gttcgtat

SEQ ID NO: 149160 - DNA, 6 bp, Unknown
  misc_feature (1)..( 6): Result.004 file - promoters60/5667785
ttggcg

SEQ ID NO: 149161 - DNA, 6 bp, Unknown
  misc_feature (1)..( 6): Result.004 file - promoters60/5667785
ttggcg

SEQ ID NO: 149162 - DNA, 7 bp, Unknown
  misc_feature (1)..( 7): Result.004 file - promoters60/5667785
atattta

SEQ ID NO: 149163 - DNA, 7 bp, Unknown
  misc_feature (1)..( 7): Result.004 file - promoters60/5667814
atattta

SEQ ID NO: 149164 - DNA, 10 bp, Unknown
  misc_feature (1)..( 10): Result.004 file - promoters60/5667814
gaagaaaaaa

SEQ ID NO: 149165 - DNA, 10 bp, Unknown
  misc_feature (1)..( 10): Result.004 file - promoters60/5667814
gaacaaaacc

SEQ ID NO: 149166 - DNA, 10 bp, Unknown
  misc_feature (1)..( 10): Result.004 file - promoters60/5667814
caacaaaaaa

SEQ ID NO: 149167 - DNA, 10 bp, Unknown
  misc_feature (1)..( 10): Result.004 file - promoters60/5667814
gcgcaaaaaa

SEQ ID NO: 149168 - DNA, 11 bp, Unknown
  misc_feature (1)..( 11): Result.004 file - promoters60/5667814
aaattgaaact

SEQ ID NO: 149169 - DNA, 11 bp, Unknown
  misc_feature (1)..( 11): Result.004 file - promoters60/5667814
attttgatact

SEQ ID NO: 149170 - DNA, 11 bp, Unknown
  misc_feature (1)..( 11): Result.004 file - promoters60/5667814
aaatcgaagaa

SEQ ID NO: 149171 - DNA, 11 bp, Unknown
  misc_feature (1)..( 11): Result.004 file - promoters60/5667814
ccgttgataaa

SEQ ID NO: 149172 - DNA, 8 bp, Unknown
  misc_feature (1)..( 8): Result.004 file - promoters60/5667814
gaaaaaag

SEQ ID NO: 149173 - DNA, 8 bp, Unknown
  misc_feature (1)..( 8): Result.004 file - promoters60/5667814
caaaaaac

SEQ ID NO: 149174 - DNA, 8 bp, Unknown
  misc_feature (1)..( 8): Result.004 file - promoters60/5667814
caaaaaag

SEQ ID NO: 149175 - DNA, 8 bp, Unknown
  misc_feature (1)..( 8): Result.004 file - promoters60/5667822
caaaaatc

SEQ ID NO: 149176 - DNA, 11 bp, Unknown
  misc_feature (1)..( 11): Result.004 file - promoters60/5667822
attttttcttt

SEQ ID NO: 149177 - DNA, 11 bp, Unknown
  misc_feature (1)..( 11): Result.004 file - promoters60/5667822
tcattttgttt

SEQ ID NO: 149178 - DNA, 11 bp, Unknown
  misc_feature (1)..( 11): Result.004 file - promoters60/5667822
caattttgccg

SEQ ID NO: 149179 - DNA, 11 bp, Unknown
  misc_feature (1)..( 11): Result.004 file - promoters60/5667822
caattttcact

SEQ ID NO: 149180 - DNA, 8 bp, Unknown
  misc_feature (1)..( 8): Result.004 file - promoters60/5667822
ctttttac

SEQ ID NO: 149181 - DNA, 8 bp, Unknown
  misc_feature (1)..( 8): Result.004 file - promoters60/5667822
ctttttat

SEQ ID NO: 149182 - DNA, 8 bp, Unknown
  misc_feature (1)..( 8): Result.004 file - promoters60/5667822
agttttac

SEQ ID NO: 149183 - DNA, 8 bp, Unknown
  misc_feature (1)..( 8): Result.004 file - promoters60/5667822
atttttaa

SEQ ID NO: 149184 - DNA, 8 bp, Unknown
  misc_feature (1)..( 8): Result.004 file - promoters60/5667822
atttgtac

SEQ ID NO: 149185 - DNA, 10 bp, Unknown
  misc_feature (1)..( 10): Result.004 file - promoters60/5667822
atatattatt

SEQ ID NO: 149186 - DNA, 10 bp, Unknown
  misc_feature (1)..( 10): Result.004 file - promoters60/5667822
atattttatt

SEQ ID NO: 149187 - DNA, 10 bp, Unknown
  misc_feature (1)..( 10): Result.004 file - promoters60/5667822
ataaattgaa

SEQ ID NO: 149188 - DNA, 10 bp, Unknown
  misc_feature (1)..( 10): Result.004 file - promoters60/5667822
aaaaattgaa

SEQ ID NO: 149189 - DNA, 15 bp, Unknown
  misc_feature (1)..( 15): Result.004 file - promoters60/5667822
aatgtttattaaaaa

SEQ ID NO: 149190 - DNA, 15 bp, Unknown
  misc_feature (1)..( 15): Result.004 file - promoters60/5667822
caaatttcttaaaag

SEQ ID NO: 149191 - DNA, 15 bp, Unknown
  misc_feature (1)..( 15): Result.004 file - promoters60/5667822
aattttttttaatta

SEQ ID NO: 149192 - DNA, 15 bp, Unknown
  misc_feature (1)..( 15): Result.004 file - promoters60/5667822
agcccaaattaaaaa

SEQ ID NO: 149193 - DNA, 10 bp, Unknown
  misc_feature (1)..( 10): Result.004 file - promoters60/5667822
gtatatttta

SEQ ID NO: 149194 - DNA, 10 bp, Unknown
  misc_feature (1)..( 10): Result.004 file - promoters60/5667822
ttatgttttt

SEQ ID NO: 149195 - DNA, 10 bp, Unknown
  misc_feature (1)..( 10): Result.004 file - promoters60/5667822
gtaaattttg

SEQ ID NO: 149196 - DNA, 10 bp, Unknown
  misc_feature (1)..( 10): Result.004 file - promoters60/5667822
gttgattttg

SEQ ID NO: 149197 - DNA, 10 bp, Unknown
  misc_feature (1)..( 10): Result.004 file - promoters60/5667822
tctgttagat

SEQ ID NO: 149198 - DNA, 10 bp, Unknown
  misc_feature (1)..( 10): Result.004 file - promoters60/5667822
tttgttagtt

SEQ ID NO: 149199 - DNA, 10 bp, Unknown
  misc_feature (1)..( 10): Result.004 file - promoters60/5667822
accgtttgat

SEQ ID NO: 149200 - DNA, 10 bp, Unknown
  misc_feature (1)..( 10): Result.004 file - promoters60/5667822
ttttttatat

SEQ ID NO: 149201 - DNA, 10 bp, Unknown
  misc_feature (1)..( 10): Result.004 file - promoters60/5667822
tggaaaaaaa

SEQ ID NO: 149202 - DNA, 10 bp, Unknown
  misc_feature (1)..( 10): Result.004 file - promoters60/5667822
ttcaaaaaaa

SEQ ID NO: 149203 - DNA, 10 bp, Unknown
  misc_feature (1)..( 10): Result.004 file - promoters60/5667822
tataaaaaat

SEQ ID NO: 149204 - DNA, 10 bp, Unknown
  misc_feature (1)..( 10): Result.004 file - promoters60/5667822
cttaaaaaat

SEQ ID NO: 149205 - DNA, 10 bp, Unknown
  misc_feature (1)..( 10): Result.004 file - promoters60/5667822
tatacaaaag

SEQ ID NO: 149206 - DNA, 7 bp, Unknown
  misc_feature (1)..( 7): Result.004 file - promoters60/5667822
cataaaa

SEQ ID NO: 149207 - DNA, 7 bp, Unknown
  misc_feature (1)..( 7): Result.004 file - promoters60/5667822
tataaaa

SEQ ID NO: 149208 - DNA, 7 bp, Unknown
  misc_feature (1)..( 7): Result.004 file - promoters60/5667822
gataaaa

SEQ ID NO: 149209 - DNA, 7 bp, Unknown
  misc_feature (1)..( 7): Result.004 file - promoters60/5667822
tatcaaa

SEQ ID NO: 149210 - DNA, 11 bp, Unknown
  misc_feature (1)..( 11): Result.004 file - promoters60/5667822
tttattttgtt

SEQ ID NO: 149211 - DNA, 11 bp, Unknown
  misc_feature (1)..( 11): Result.004 file - promoters60/5667822
attaatttctc

SEQ ID NO: 149212 - DNA, 11 bp, Unknown
  misc_feature (1)..( 11): Result.004 file - promoters60/5667822
ctttttttttt

SEQ ID NO: 149213 - DNA, 11 bp, Unknown
  misc_feature (1)..( 11): Result.004 file - promoters60/5667822
atttatattga

SEQ ID NO: 149214 - DNA, 10 bp, Unknown
  misc_feature (1)..( 10): Result.004 file - promoters60/5667822
gttgactttg

SEQ ID NO: 149215 - DNA, 10 bp, Unknown
  misc_feature (1)..( 10): Result.004 file - promoters60/5667822
cttggcttgc

SEQ ID NO: 149216 - DNA, 10 bp, Unknown
  misc_feature (1)..( 10): Result.004 file - promoters60/5667822
attgaatttg

SEQ ID NO: 149217 - DNA, 10 bp, Unknown
  misc_feature (1)..( 10): Result.004 file - promoters60/5667822
attgaagttt

SEQ ID NO: 149218 - DNA, 9 bp, Unknown
  misc_feature (1)..( 9): Result.004 file - promoters60/5667822
ttattttaa

SEQ ID NO: 149219 - DNA, 9 bp, Unknown
  misc_feature (1)..( 9): Result.004 file - promoters60/5667822
ttattctaa

SEQ ID NO: 149220 - DNA, 9 bp, Unknown
  misc_feature (1)..( 9): Result.004 file - promoters60/5667822
ctattttaa

SEQ ID NO: 149221 - DNA, 9 bp, Unknown
  misc_feature (1)..( 9): Result.004 file - promoters60/5667849
atatattat

SEQ ID NO: 149222 - DNA, 10 bp, Unknown
  misc_feature (1)..( 10): Result.004 file - promoters60/5667849
caaaattaat

SEQ ID NO: 149223 - DNA, 10 bp, Unknown
  misc_feature (1)..( 10): Result.004 file - promoters60/5667849
aaaaattctc

SEQ ID NO: 149224 - DNA, 10 bp, Unknown
  misc_feature (1)..( 10): Result.004 file - promoters60/5667849
taaaattttc

SEQ ID NO: 149225 - DNA, 11 bp, Unknown
  misc_feature (1)..( 11): Result.004 file - promoters60/5667849
taataatttgc

SEQ ID NO: 149226 - DNA, 11 bp, Unknown
  misc_feature (1)..( 11): Result.004 file - promoters60/5667849
ggcaaactctc

SEQ ID NO: 149227 - DNA, 11 bp, Unknown
  misc_feature (1)..( 11): Result.004 file - promoters60/5667849
cacaaattttt

SEQ ID NO: 149228 - DNA, 13 bp, Unknown
  misc_feature (1)..( 13): Result.004 file - promoters60/5667849
cgaaaaaagtttc

SEQ ID NO: 149229 - DNA, 13 bp, Unknown
  misc_feature (1)..( 13): Result.004 file - promoters60/5667849
atccattagtttc

SEQ ID NO: 149230 - DNA, 13 bp, Unknown
  misc_feature (1)..( 13): Result.004 file - promoters60/5667849
accaaaatgtttg

SEQ ID NO: 149231 - DNA, 13 bp, Unknown
  misc_feature (1)..( 13): Result.004 file - promoters60/5667849
atccattggtttt

SEQ ID NO: 149232 - DNA, 13 bp, Unknown
  misc_feature (1)..( 13): Result.004 file - promoters60/5667849
tggcattggctta

SEQ ID NO: 149233 - DNA, 13 bp, Unknown
  misc_feature (1)..( 13): Result.004 file - promoters60/5667849
ttttaatattttt

SEQ ID NO: 149234 - DNA, 10 bp, Unknown
  misc_feature (1)..( 10): Result.004 file - promoters60/5667849
gtatttatat

SEQ ID NO: 149235 - DNA, 10 bp, Unknown
  misc_feature (1)..( 10): Result.004 file - promoters60/5667849
ctatatataa

SEQ ID NO: 149236 - DNA, 10 bp, Unknown
  misc_feature (1)..( 10): Result.004 file - promoters60/5667849
ttatttatga

SEQ ID NO: 149237 - DNA, 10 bp, Unknown
  misc_feature (1)..( 10): Result.004 file - promoters60/5667849
ttataaataa

SEQ ID NO: 149238 - DNA, 10 bp, Unknown
  misc_feature (1)..( 10): Result.004 file - promoters60/5667849
ctatatatta

SEQ ID NO: 149239 - DNA, 10 bp, Unknown
  misc_feature (1)..( 10): Result.004 file - promoters60/5668073
ttataaaaag

SEQ ID NO: 149240 - DNA, 8 bp, Unknown
  misc_feature (1)..( 8): Result.004 file - promoters60/5668073
tttgattg

SEQ ID NO: 149241 - DNA, 8 bp, Unknown
  misc_feature (1)..( 8): Result.004 file - promoters60/5668073
tttgtttg

SEQ ID NO: 149242 - DNA, 8 bp, Unknown
  misc_feature (1)..( 8): Result.004 file - promoters60/5668085
tttgatag

SEQ ID NO: 149243 - DNA, 6 bp, Unknown
  misc_feature (1)..( 6): Result.004 file - promoters60/5668085
acacca

SEQ ID NO: 149244 - DNA, 6 bp, Unknown
  misc_feature (1)..( 6): Result.004 file - promoters60/5668085
acacca

SEQ ID NO: 149245 - DNA, 6 bp, Unknown
  misc_feature (1)..( 6): Result.004 file - promoters60/5668085
gcatgg

SEQ ID NO: 149246 - DNA, 6 bp, Unknown
  misc_feature (1)..( 6): Result.004 file - promoters60/5668085
gcatgg

SEQ ID NO: 149247 - DNA, 6 bp, Unknown
  misc_feature (1)..( 6): Result.004 file - promoters60/5668085
tggtat

SEQ ID NO: 149248 - DNA, 6 bp, Unknown
  misc_feature (1)..( 6): Result.004 file - promoters60/5668085
tggtat

SEQ ID NO: 149249 - DNA, 6 bp, Unknown
  misc_feature (1)..( 6): Result.004 file - promoters60/5668085
acaata

SEQ ID NO: 149250 - DNA, 6 bp, Unknown
  misc_feature (1)..( 6): Result.004 file - promoters60/5668085
acaata

SEQ ID NO: 149251 - DNA, 6 bp, Unknown
  misc_feature (1)..( 6): Result.004 file - promoters60/5668085
gttgtg

SEQ ID NO: 149252 - DNA, 6 bp, Unknown
  misc_feature (1)..( 6): Result.004 file - promoters60/5668085
gttgtg

SEQ ID NO: 149253 - DNA, 7 bp, Unknown
  misc_feature (1)..( 7): Result.004 file - promoters60/5668085
tgtggat

SEQ ID NO: 149254 - DNA, 7 bp, Unknown
  misc_feature (1)..( 7): Result.004 file - promoters60/5668085
tgttgat

SEQ ID NO: 149255 - DNA, 8 bp, Unknown
  misc_feature (1)..( 8): Result.004 file - promoters60/5668085
tttagctt

SEQ ID NO: 149256 - DNA, 8 bp, Unknown
  misc_feature (1)..( 8): Result.004 file - promoters60/5668085
tttatctt

SEQ ID NO: 149257 - DNA, 6 bp, Unknown
  misc_feature (1)..( 6): Result.004 file - promoters60/5668085
gaatta

SEQ ID NO: 149258 - DNA, 6 bp, Unknown
  misc_feature (1)..( 6): Result.004 file - promoters60/5668085
gaatta

SEQ ID NO: 149259 - DNA, 6 bp, Unknown
  misc_feature (1)..( 6): Result.004 file - promoters60/5668085
gcggaa

SEQ ID NO: 149260 - DNA, 6 bp, Unknown
  misc_feature (1)..( 6): Result.004 file - promoters60/5668085
gcggaa

SEQ ID NO: 149261 - DNA, 6 bp, Unknown
  misc_feature (1)..( 6): Result.004 file - promoters60/5668085
aaagaa

SEQ ID NO: 149262 - DNA, 6 bp, Unknown
  misc_feature (1)..( 6): Result.004 file - promoters60/5668085
aaagaa

SEQ ID NO: 149263 - DNA, 7 bp, Unknown
  misc_feature (1)..( 7): Result.004 file - promoters60/5668085
tattttc

SEQ ID NO: 149264 - DNA, 7 bp, Unknown
  misc_feature (1)..( 7): Result.004 file - promoters60/5668085
tatcttc

SEQ ID NO: 149265 - DNA, 6 bp, Unknown
  misc_feature (1)..( 6): Result.004 file - promoters60/5668085
tccttg

SEQ ID NO: 149266 - DNA, 6 bp, Unknown
  misc_feature (1)..( 6): Result.004 file - promoters60/5668085
tccttg

SEQ ID NO: 149267 - DNA, 7 bp, Unknown
  misc_feature (1)..( 7): Result.004 file - promoters60/5668085
gatatat

SEQ ID NO: 149268 - DNA, 7 bp, Unknown
  misc_feature (1)..( 7): Result.004 file - promoters60/5668101
gatgtat

SEQ ID NO: 149269 - DNA, 9 bp, Unknown
  misc_feature (1)..( 9): Result.004 file - promoters60/5668101
tataatttg

SEQ ID NO: 149270 - DNA, 9 bp, Unknown
  misc_feature (1)..( 9): Result.004 file - promoters60/5668101
tataatttg

SEQ ID NO: 149271 - DNA, 6 bp, Unknown
  misc_feature (1)..( 6): Result.004 file - promoters60/5668101
attcat

SEQ ID NO: 149272 - DNA, 6 bp, Unknown
  misc_feature (1)..( 6): Result.004 file - promoters60/5668101
attcat

SEQ ID NO: 149273 - DNA, 7 bp, Unknown
  misc_feature (1)..( 7): Result.004 file - promoters60/5668101
ttagaat

SEQ ID NO: 149274 - DNA, 7 bp, Unknown
  misc_feature (1)..( 7): Result.004 file - promoters60/5668101
ttacaat

SEQ ID NO: 149275 - DNA, 7 bp, Unknown
  misc_feature (1)..( 7): Result.004 file - promoters60/5668101
aatctat

SEQ ID NO: 149276 - DNA, 7 bp, Unknown
  misc_feature (1)..( 7): Result.004 file - promoters60/5668101
aatatat

SEQ ID NO: 149277 - DNA, 8 bp, Unknown
  misc_feature (1)..( 8): Result.004 file - promoters60/5668101
tttatgtt

SEQ ID NO: 149278 - DNA, 8 bp, Unknown
  misc_feature (1)..( 8): Result.004 file - promoters60/5668101
tttatgtt

SEQ ID NO: 149279 - DNA, 6 bp, Unknown
  misc_feature (1)..( 6): Result.004 file - promoters60/5668101
taagtt

SEQ ID NO: 149280 - DNA, 6 bp, Unknown
  misc_feature (1)..( 6): Result.004 file - promoters60/5668101
taagtt

SEQ ID NO: 149281 - DNA, 12 bp, Unknown
  misc_feature (1)..( 12): Result.004 file - promoters60/5668101
cttgtaaccaca

SEQ ID NO: 149282 - DNA, 12 bp, Unknown
  misc_feature (1)..( 12): Result.004 file - promoters60/5668101
cttttaactaca

SEQ ID NO: 149283 - DNA, 6 bp, Unknown
  misc_feature (1)..( 6): Result.004 file - promoters60/5668101
ttaata

SEQ ID NO: 149284 - DNA, 6 bp, Unknown
  misc_feature (1)..( 6): Result.004 file - promoters60/5668101
ttaata

SEQ ID NO: 149285 - DNA, 7 bp, Unknown
  misc_feature (1)..( 7): Result.004 file - promoters60/5668101
tatatgt

SEQ ID NO: 149286 - DNA, 7 bp, Unknown
  misc_feature (1)..( 7): Result.004 file - promoters60/5668101
tatttgt

SEQ ID NO: 149287 - DNA, 9 bp, Unknown
  misc_feature (1)..( 9): Result.004 file - promoters60/5668101
ctaagaaac

SEQ ID NO: 149288 - DNA, 9 bp, Unknown
  misc_feature (1)..( 9): Result.004 file - promoters60/5668101
ctaaaaaac

SEQ ID NO: 149289 - DNA, 6 bp, Unknown
  misc_feature (1)..( 6): Result.004 file - promoters60/5668101
aaaaat

SEQ ID NO: 149290 - DNA, 6 bp, Unknown
  misc_feature (1)..( 6): Result.004 file - promoters60/5668101
aaaaat

SEQ ID NO: 149291 - DNA, 6 bp, Unknown
  misc_feature (1)..( 6): Result.004 file - promoters60/5668101
atacaa

SEQ ID NO: 149292 - DNA, 6 bp, Unknown
  misc_feature (1)..( 6): Result.004 file - promoters60/5668101
atacaa

SEQ ID NO: 149293 - DNA, 6 bp, Unknown
  misc_feature (1)..( 6): Result.004 file - promoters60/5668101
gttttt

SEQ ID NO: 149294 - DNA, 6 bp, Unknown
  misc_feature (1)..( 6): Result.004 file - promoters60/5668101
gttttt

SEQ ID NO: 149295 - DNA, 7 bp, Unknown
  misc_feature (1)..( 7): Result.004 file - promoters60/5668101
tttttag

SEQ ID NO: 149296 - DNA, 7 bp, Unknown
  misc_feature (1)..( 7): Result.004 file - promoters60/5668101
tttttag

SEQ ID NO: 149297 - DNA, 6 bp, Unknown
  misc_feature (1)..( 6): Result.004 file - promoters60/5668101
aaagaa

SEQ ID NO: 149298 - DNA, 6 bp, Unknown
  misc_feature (1)..( 6): Result.004 file - promoters60/5668101
aaagaa

SEQ ID NO: 149299 - DNA, 7 bp, Unknown
  misc_feature (1)..( 7): Result.004 file - promoters60/5668101
aaaaata

SEQ ID NO: 149300 - DNA, 7 bp, Unknown
  misc_feature (1)..( 7): Result.004 file - promoters60/5668101
aaacata

SEQ ID NO: 149301 - DNA, 6 bp, Unknown
  misc_feature (1)..( 6): Result.004 file - promoters60/5668101
atcaaa

SEQ ID NO: 149302 - DNA, 6 bp, Unknown
  misc_feature (1)..( 6): Result.004 file - promoters60/5668101
atcaaa

SEQ ID NO: 149303 - DNA, 8 bp, Unknown
  misc_feature (1)..( 8): Result.004 file - promoters60/5668101
atcatatt

SEQ ID NO: 149304 - DNA, 8 bp, Unknown
  misc_feature (1)..( 8): Result.004 file - promoters60/5668101
atcagatt

SEQ ID NO: 149305 - DNA, 6 bp, Unknown
  misc_feature (1)..( 6): Result.004 file - promoters60/5668101
atgtca

SEQ ID NO: 149306 - DNA, 6 bp, Unknown
  misc_feature (1)..( 6): Result.004 file - promoters60/5668101
atgtca

SEQ ID NO: 149307 - DNA, 7 bp, Unknown
  misc_feature (1)..( 7): Result.004 file - promoters60/5668101
tgactct

SEQ ID NO: 149308 - DNA, 7 bp, Unknown
  misc_feature (1)..( 7): Result.004 file - promoters60/5668101
tgattct

SEQ ID NO: 149309 - DNA, 7 bp, Unknown
  misc_feature (1)..( 7): Result.004 file - promoters60/5668101
ttgcaaa

SEQ ID NO: 149310 - DNA, 7 bp, Unknown
  misc_feature (1)..( 7): Result.004 file - promoters60/5668101
ttgcaaa

SEQ ID NO: 149311 - DNA, 6 bp, Unknown
  misc_feature (1)..( 6): Result.004 file - promoters60/5668101
atatct

SEQ ID NO: 149312 - DNA, 6 bp, Unknown
  misc_feature (1)..( 6): Result.004 file - promoters60/5668101
atatct

SEQ ID NO: 149313 - DNA, 6 bp, Unknown
  misc_feature (1)..( 6): Result.004 file - promoters60/5668101
ttattt

SEQ ID NO: 149314 - DNA, 6 bp, Unknown
  misc_feature (1)..( 6): Result.004 file - promoters60/5668101
ttattt

SEQ ID NO: 149315 - DNA, 7 bp, Unknown
  misc_feature (1)..( 7): Result.004 file - promoters60/5668101
ttgatta

SEQ ID NO: 149316 - DNA, 7 bp, Unknown
  misc_feature (1)..( 7): Result.004 file - promoters60/5668111
ttggtta

SEQ ID NO: 149317 - DNA, 10 bp, Unknown
  misc_feature (1)..( 10): Result.004 file - promoters60/5668111
agaaaaatca

SEQ ID NO: 149318 - DNA, 10 bp, Unknown
  misc_feature (1)..( 10): Result.004 file - promoters60/5668111
tgcaaaatcg

SEQ ID NO: 149319 - DNA, 10 bp, Unknown
  misc_feature (1)..( 10): Result.004 file - promoters60/5668111
acaaaaatcg

SEQ ID NO: 149320 - DNA, 10 bp, Unknown
  misc_feature (1)..( 10): Result.004 file - promoters60/5668111
tcataaatcg

SEQ ID NO: 149321 - DNA, 10 bp, Unknown
  misc_feature (1)..( 10): Result.004 file - promoters60/5668111
tgcaaaatta

SEQ ID NO: 149322 - DNA, 8 bp, Unknown
  misc_feature (1)..( 8): Result.004 file - promoters60/5668111
taatcaaa

SEQ ID NO: 149323 - DNA, 8 bp, Unknown
  misc_feature (1)..( 8): Result.004 file - promoters60/5668111
taaacaaa

SEQ ID NO: 149324 - DNA, 8 bp, Unknown
  misc_feature (1)..( 8): Result.004 file - promoters60/5668111
aaatcaat

SEQ ID NO: 149325 - DNA, 8 bp, Unknown
  misc_feature (1)..( 8): Result.004 file - promoters60/5668111
aaaaccaa

SEQ ID NO: 149326 - DNA, 11 bp, Unknown
  misc_feature (1)..( 11): Result.004 file - promoters60/5668111
tttatattatt

SEQ ID NO: 149327 - DNA, 11 bp, Unknown
  misc_feature (1)..( 11): Result.004 file - promoters60/5668111
tttattttatt

SEQ ID NO: 149328 - DNA, 11 bp, Unknown
  misc_feature (1)..( 11): Result.004 file - promoters60/5668111
tacataatata

SEQ ID NO: 149329 - DNA, 11 bp, Unknown
  misc_feature (1)..( 11): Result.004 file - promoters60/5668111
ggctttttatt

SEQ ID NO: 149330 - DNA, 11 bp, Unknown
  misc_feature (1)..( 11): Result.004 file - promoters60/5668111
cttttaatata

SEQ ID NO: 149331 - DNA, 9 bp, Unknown
  misc_feature (1)..( 9): Result.004 file - promoters60/5668111
aaaaaccct

SEQ ID NO: 149332 - DNA, 9 bp, Unknown
  misc_feature (1)..( 9): Result.004 file - promoters60/5668111
taaaaccct

SEQ ID NO: 149333 - DNA, 9 bp, Unknown
  misc_feature (1)..( 9): Result.004 file - promoters60/5668111
agaaaccct

SEQ ID NO: 149334 - DNA, 9 bp, Unknown
  misc_feature (1)..( 9): Result.004 file - promoters60/5668111
taaaaccga

SEQ ID NO: 149335 - DNA, 8 bp, Unknown
  misc_feature (1)..( 8): Result.004 file - promoters60/5668111
tcacaaaa

SEQ ID NO: 149336 - DNA, 8 bp, Unknown
  misc_feature (1)..( 8): Result.004 file - promoters60/5668111
gtacaaaa

SEQ ID NO: 149337 - DNA, 8 bp, Unknown
  misc_feature (1)..( 8): Result.004 file - promoters60/5668111
tcataaat

SEQ ID NO: 149338 - DNA, 8 bp, Unknown
  misc_feature (1)..( 8): Result.004 file - promoters60/5668111
tgacaaaa

SEQ ID NO: 149339 - DNA, 9 bp, Unknown
  misc_feature (1)..( 9): Result.004 file - promoters60/5668111
gaaaaatca

SEQ ID NO: 149340 - DNA, 9 bp, Unknown
  misc_feature (1)..( 9): Result.004 file - promoters60/5668111
gaaaaagct

SEQ ID NO: 149341 - DNA, 9 bp, Unknown
  misc_feature (1)..( 9): Result.004 file - promoters60/5668111
gaacaatta

SEQ ID NO: 149342 - DNA, 9 bp, Unknown
  misc_feature (1)..( 9): Result.004 file - promoters60/5668294
taacgatta

SEQ ID NO: 149343 - DNA, 10 bp, Unknown
  misc_feature (1)..( 10): Result.004 file - promoters60/5668294
tgacaataca

SEQ ID NO: 149344 - DNA, 10 bp, Unknown
  misc_feature (1)..( 10): Result.004 file - promoters60/5668294
tgacaaaatg

SEQ ID NO: 149345 - DNA, 10 bp, Unknown
  misc_feature (1)..( 10): Result.004 file - promoters60/5668294
tgaaaaaaaa

SEQ ID NO: 149346 - DNA, 10 bp, Unknown
  misc_feature (1)..( 10): Result.004 file - promoters60/5668294
ctaaaagaaa

SEQ ID NO: 149347 - DNA, 10 bp, Unknown
  misc_feature (1)..( 10): Result.004 file - promoters60/5668294
tgtcaaattt

SEQ ID NO: 149348 - DNA, 10 bp, Unknown
  misc_feature (1)..( 10): Result.004 file - promoters60/5668294
agtcaaatat

SEQ ID NO: 149349 - DNA, 10 bp, Unknown
  misc_feature (1)..( 10): Result.004 file - promoters60/5668294
tgtcaatcag

SEQ ID NO: 149350 - DNA, 11 bp, Unknown
  misc_feature (1)..( 11): Result.004 file - promoters60/5668294
acgaaatccat

SEQ ID NO: 149351 - DNA, 11 bp, Unknown
  misc_feature (1)..( 11): Result.004 file - promoters60/5668294
acgaaattagt

SEQ ID NO: 149352 - DNA, 11 bp, Unknown
  misc_feature (1)..( 11): Result.004 file - promoters60/5668294
acgaaacaaag

SEQ ID NO: 149353 - DNA, 11 bp, Unknown
  misc_feature (1)..( 11): Result.004 file - promoters60/5668294
cagaaattttt

SEQ ID NO: 149354 - DNA, 11 bp, Unknown
  misc_feature (1)..( 11): Result.004 file - promoters60/5668294
aggaaaataga

SEQ ID NO: 149355 - DNA, 11 bp, Unknown
  misc_feature (1)..( 11): Result.004 file - promoters60/5668294
ctaaaagtttt

SEQ ID NO: 149356 - DNA, 13 bp, Unknown
  misc_feature (1)..( 13): Result.004 file - promoters60/5668294
gtagaagaaagaa

SEQ ID NO: 149357 - DNA, 13 bp, Unknown
  misc_feature (1)..( 13): Result.004 file - promoters60/5668294
cctgaagaacagg

SEQ ID NO: 149358 - DNA, 13 bp, Unknown
  misc_feature (1)..( 13): Result.004 file - promoters60/5668294
atagaacaaacgc

SEQ ID NO: 149359 - DNA, 13 bp, Unknown
  misc_feature (1)..( 13): Result.004 file - promoters60/5668294
atcaaagaaacaa

SEQ ID NO: 149360 - DNA, 13 bp, Unknown
  misc_feature (1)..( 13): Result.004 file - promoters60/5668294
caagaagaaaaaa

SEQ ID NO: 149361 - DNA, 14 bp, Unknown
  misc_feature (1)..( 14): Result.004 file - promoters60/5668294
aaggtagataaatt

SEQ ID NO: 149362 - DNA, 10 bp, Unknown
  misc_feature (1)..( 10): Result.004 file - promoters60/5668294
tccacaaaac

SEQ ID NO: 149363 - DNA, 10 bp, Unknown
  misc_feature (1)..( 10): Result.004 file - promoters60/5668294
tacacaaagt

SEQ ID NO: 149364 - DNA, 10 bp, Unknown
  misc_feature (1)..( 10): Result.004 file - promoters60/5668294
tactcaaaag

SEQ ID NO: 149365 - DNA, 10 bp, Unknown
  misc_feature (1)..( 10): Result.004 file - promoters60/5668294
aacacaaatt

SEQ ID NO: 149366 - DNA, 11 bp, Unknown
  misc_feature (1)..( 11): Result.004 file - promoters60/5668294
aagtcagaaga

SEQ ID NO: 149367 - DNA, 11 bp, Unknown
  misc_feature (1)..( 11): Result.004 file - promoters60/5668317
aacaccaatca

SEQ ID NO: 149368 - DNA, 10 bp, Unknown
  misc_feature (1)..( 10): Result.004 file - promoters60/5668317
aagaaattaa

SEQ ID NO: 149369 - DNA, 10 bp, Unknown
  misc_feature (1)..( 10): Result.004 file - promoters60/5668317
aagacattta

SEQ ID NO: 149370 - DNA, 10 bp, Unknown
  misc_feature (1)..( 10): Result.004 file - promoters60/5668317
tgtaaattaa

SEQ ID NO: 149371 - DNA, 8 bp, Unknown
  misc_feature (1)..( 8): Result.004 file - promoters60/5668317
caaactta

SEQ ID NO: 149372 - DNA, 8 bp, Unknown
  misc_feature (1)..( 8): Result.004 file - promoters60/5668317
gaaacttt

SEQ ID NO: 149373 - DNA, 8 bp, Unknown
  misc_feature (1)..( 8): Result.004 file - promoters60/5668317
gaatcttt

SEQ ID NO: 149374 - DNA, 8 bp, Unknown
  misc_feature (1)..( 8): Result.004 file - promoters60/5668317
tttggttc

SEQ ID NO: 149375 - DNA, 8 bp, Unknown
  misc_feature (1)..( 8): Result.004 file - promoters60/5668317
tttgcttc

SEQ ID NO: 149376 - DNA, 8 bp, Unknown
  misc_feature (1)..( 8): Result.004 file - promoters60/5668317
tatgcttc

SEQ ID NO: 149377 - DNA, 7 bp, Unknown
  misc_feature (1)..( 7): Result.004 file - promoters60/5668317
ttgtgtg

SEQ ID NO: 149378 - DNA, 7 bp, Unknown
  misc_feature (1)..( 7): Result.004 file - promoters60/5668317
gtgtgtg

SEQ ID NO: 149379 - DNA, 7 bp, Unknown
  misc_feature (1)..( 7): Result.004 file - promoters60/5668317
gtgagtg

SEQ ID NO: 149380 - DNA, 7 bp, Unknown
  misc_feature (1)..( 7): Result.004 file - promoters60/5668317
gaaaaaa

SEQ ID NO: 149381 - DNA, 7 bp, Unknown
  misc_feature (1)..( 7): Result.004 file - promoters60/5668317
gaagaaa

SEQ ID NO: 149382 - DNA, 7 bp, Unknown
  misc_feature (1)..( 7): Result.004 file - promoters60/5668317
gaacaaa

SEQ ID NO: 149383 - DNA, 13 bp, Unknown
  misc_feature (1)..( 13): Result.004 file - promoters60/5668317
gaaacaaagaaac

SEQ ID NO: 149384 - DNA, 13 bp, Unknown
  misc_feature (1)..( 13): Result.004 file - promoters60/5668317
gaaagaaagaaac

SEQ ID NO: 149385 - DNA, 13 bp, Unknown
  misc_feature (1)..( 13): Result.004 file - promoters60/5668325
tgaacaaatgtgt

SEQ ID NO: 149386 - DNA, 9 bp, Unknown
  misc_feature (1)..( 9): Result.004 file - promoters60/5668325
aatgcttca

SEQ ID NO: 149387 - DNA, 9 bp, Unknown
  misc_feature (1)..( 9): Result.004 file - promoters60/5668325
gatgattca

SEQ ID NO: 149388 - DNA, 9 bp, Unknown
  misc_feature (1)..( 9): Result.004 file - promoters60/5668325
gataattga

SEQ ID NO: 149389 - DNA, 6 bp, Unknown
  misc_feature (1)..( 6): Result.004 file - promoters60/5668325
tcaaat

SEQ ID NO: 149390 - DNA, 6 bp, Unknown
  misc_feature (1)..( 6): Result.004 file - promoters60/5668325
tcaaat

SEQ ID NO: 149391 - DNA, 7 bp, Unknown
  misc_feature (1)..( 7): Result.004 file - promoters60/5668325
tggattt

SEQ ID NO: 149392 - DNA, 7 bp, Unknown
  misc_feature (1)..( 7): Result.004 file - promoters60/5668325
tggcttt

SEQ ID NO: 149393 - DNA, 7 bp, Unknown
  misc_feature (1)..( 7): Result.004 file - promoters60/5668325
tgcagag

SEQ ID NO: 149394 - DNA, 7 bp, Unknown
  misc_feature (1)..( 7): Result.004 file - promoters60/5668325
tgctgag

SEQ ID NO: 149395 - DNA, 7 bp, Unknown
  misc_feature (1)..( 7): Result.004 file - promoters60/5668325
atatatt

SEQ ID NO: 149396 - DNA, 7 bp, Unknown
  misc_feature (1)..( 7): Result.004 file - promoters60/5668325
ataaatt

SEQ ID NO: 149397 - DNA, 8 bp, Unknown
  misc_feature (1)..( 8): Result.004 file - promoters60/5668325
tttgtatt

SEQ ID NO: 149398 - DNA, 8 bp, Unknown
  misc_feature (1)..( 8): Result.004 file - promoters60/5668325
tttggatt

SEQ ID NO: 149399 - DNA, 8 bp, Unknown
  misc_feature (1)..( 8): Result.004 file - promoters60/5668325
tttggaga

SEQ ID NO: 149400 - DNA, 6 bp, Unknown
  misc_feature (1)..( 6): Result.004 file - promoters60/5668325
aagatt

SEQ ID NO: 149401 - DNA, 6 bp, Unknown
  misc_feature (1)..( 6): Result.004 file - promoters60/5668325
aagatt

SEQ ID NO: 149402 - DNA, 6 bp, Unknown
  misc_feature (1)..( 6): Result.004 file - promoters60/5668325
ggtgaa

SEQ ID NO: 149403 - DNA, 6 bp, Unknown
  misc_feature (1)..( 6): Result.004 file - promoters60/5668325
ggtgaa

SEQ ID NO: 149404 - DNA, 7 bp, Unknown
  misc_feature (1)..( 7): Result.004 file - promoters60/5668325
tttgata

SEQ ID NO: 149405 - DNA, 7 bp, Unknown
  misc_feature (1)..( 7): Result.004 file - promoters60/5668325
tttgata

SEQ ID NO: 149406 - DNA, 6 bp, Unknown
  misc_feature (1)..( 6): Result.004 file - promoters60/5668325
gaaagt

SEQ ID NO: 149407 - DNA, 6 bp, Unknown
  misc_feature (1)..( 6): Result.004 file - promoters60/5668325
gaaagt

SEQ ID NO: 149408 - DNA, 9 bp, Unknown
  misc_feature (1)..( 9): Result.004 file - promoters60/5668325
ttttaccag

SEQ ID NO: 149409 - DNA, 9 bp, Unknown
  misc_feature (1)..( 9): Result.004 file - promoters60/5668329
tttgaccag

SEQ ID NO: 149410 - DNA, 15 bp, Unknown
  misc_feature (1)..( 15): Result.004 file - promoters60/5668329
ctaattatgtatcaa

SEQ ID NO: 149411 - DNA, 15 bp, Unknown
  misc_feature (1)..( 15): Result.004 file - promoters60/5668329
aataatatatataga

SEQ ID NO: 149412 - DNA, 15 bp, Unknown
  misc_feature (1)..( 15): Result.004 file - promoters60/5668329
caaaatctataaacg

SEQ ID NO: 149413 - DNA, 15 bp, Unknown
  misc_feature (1)..( 15): Result.004 file - promoters60/5668352
caaaacctacaaacg

SEQ ID NO: 149414 - DNA, 11 bp, Unknown
  misc_feature (1)..( 11): Result.004 file - promoters60/5668352
agtaatataaa

SEQ ID NO: 149415 - DNA, 11 bp, Unknown
  misc_feature (1)..( 11): Result.004 file - promoters60/5668352
agtaacatatg

SEQ ID NO: 149416 - DNA, 11 bp, Unknown
  misc_feature (1)..( 11): Result.004 file - promoters60/5668352
gtttatataaa

SEQ ID NO: 149417 - DNA, 7 bp, Unknown
  misc_feature (1)..( 7): Result.004 file - promoters60/5668352
gaaaaaa

SEQ ID NO: 149418 - DNA, 7 bp, Unknown
  misc_feature (1)..( 7): Result.004 file - promoters60/5668352
gaataaa

SEQ ID NO: 149419 - DNA, 7 bp, Unknown
  misc_feature (1)..( 7): Result.004 file - promoters60/5668352
gaagaaa

SEQ ID NO: 149420 - DNA, 11 bp, Unknown
  misc_feature (1)..( 11): Result.004 file - promoters60/5668352
tatcttcaact

SEQ ID NO: 149421 - DNA, 11 bp, Unknown
  misc_feature (1)..( 11): Result.004 file - promoters60/5668352
tttctttaact

SEQ ID NO: 149422 - DNA, 11 bp, Unknown
  misc_feature (1)..( 11): Result.004 file - promoters60/5668359
tttttttatgg

SEQ ID NO: 149423 - DNA, 8 bp, Unknown
  misc_feature (1)..( 8): Result.004 file - promoters60/5668359
atggatgt

SEQ ID NO: 149424 - DNA, 8 bp, Unknown
  misc_feature (1)..( 8): Result.004 file - promoters60/5668359
atggattt

SEQ ID NO: 149425 - DNA, 8 bp, Unknown
  misc_feature (1)..( 8): Result.004 file - promoters60/5668359
ttggattt

SEQ ID NO: 149426 - DNA, 6 bp, Unknown
  misc_feature (1)..( 6): Result.004 file - promoters60/5668359
ggtgtt

SEQ ID NO: 149427 - DNA, 6 bp, Unknown
  misc_feature (1)..( 6): Result.004 file - promoters60/5668359
ggtgtt

SEQ ID NO: 149428 - DNA, 9 bp, Unknown
  misc_feature (1)..( 9): Result.004 file - promoters60/5668359
agaacagaa

SEQ ID NO: 149429 - DNA, 9 bp, Unknown
  misc_feature (1)..( 9): Result.004 file - promoters60/5668359
agaagagaa

SEQ ID NO: 149430 - DNA, 11 bp, Unknown
  misc_feature (1)..( 11): Result.004 file - promoters60/5668359
agtatcctgtt

SEQ ID NO: 149431 - DNA, 11 bp, Unknown
  misc_feature (1)..( 11): Result.004 file - promoters60/5668359
agtgtccagtt

SEQ ID NO: 149432 - DNA, 7 bp, Unknown
  misc_feature (1)..( 7): Result.004 file - promoters60/5668359
tgcaaat

SEQ ID NO: 149433 - DNA, 7 bp, Unknown
  misc_feature (1)..( 7): Result.004 file - promoters60/5668359
tgctaat

SEQ ID NO: 149434 - DNA, 13 bp, Unknown
  misc_feature (1)..( 13): Result.004 file - promoters60/5668359
ttgaatcaatatt

SEQ ID NO: 149435 - DNA, 13 bp, Unknown
  misc_feature (1)..( 13): Result.004 file - promoters60/5668359
ttgattcaaaatt

SEQ ID NO: 149436 - DNA, 6 bp, Unknown
  misc_feature (1)..( 6): Result.004 file - promoters60/5668359
aagatt

SEQ ID NO: 149437 - DNA, 6 bp, Unknown
  misc_feature (1)..( 6): Result.004 file - promoters60/5668359
aagatt

SEQ ID NO: 149438 - DNA, 6 bp, Unknown
  misc_feature (1)..( 6): Result.004 file - promoters60/5668359
ttggtt

SEQ ID NO: 149439 - DNA, 6 bp, Unknown
  misc_feature (1)..( 6): Result.004 file - promoters60/5668359
ttggtt

SEQ ID NO: 149440 - DNA, 6 bp, Unknown
  misc_feature (1)..( 6): Result.004 file - promoters60/5668359
ttaacc

SEQ ID NO: 149441 - DNA, 6 bp, Unknown
  misc_feature (1)..( 6): Result.004 file - promoters60/5668359
ttaacc

SEQ ID NO: 149442 - DNA, 7 bp, Unknown
  misc_feature (1)..( 7): Result.004 file - promoters60/5668359
ctcactc

SEQ ID NO: 149443 - DNA, 7 bp, Unknown
  misc_feature (1)..( 7): Result.004 file - promoters60/5668359
ctcgctc

SEQ ID NO: 149444 - DNA, 6 bp, Unknown
  misc_feature (1)..( 6): Result.004 file - promoters60/5668359
atttct

SEQ ID NO: 149445 - DNA, 6 bp, Unknown
  misc_feature (1)..( 6): Result.004 file - promoters60/5668367
atttct

SEQ ID NO: 149446 - DNA, 13 bp, Unknown
  misc_feature (1)..( 13): Result.004 file - promoters60/5668367
gagaaccacattt

SEQ ID NO: 149447 - DNA, 13 bp, Unknown
  misc_feature (1)..( 13): Result.004 file - promoters60/5668367
gaggaccaaatta

SEQ ID NO: 149448 - DNA, 13 bp, Unknown
  misc_feature (1)..( 13): Result.004 file - promoters60/5668367
tcaacataaatta

SEQ ID NO: 149449 - DNA, 9 bp, Unknown
  misc_feature (1)..( 9): Result.004 file - promoters60/5668367
gattctaaa

SEQ ID NO: 149450 - DNA, 9 bp, Unknown
  misc_feature (1)..( 9): Result.004 file - promoters60/5668367
ttttcaaaa

SEQ ID NO: 149451 - DNA, 9 bp, Unknown
  misc_feature (1)..( 9): Result.004 file - promoters60/5668367
ttttttaaa

SEQ ID NO: 149452 - DNA, 9 bp, Unknown
  misc_feature (1)..( 9): Result.004 file - promoters60/5668367
gaaatatag

SEQ ID NO: 149453 - DNA, 9 bp, Unknown
  misc_feature (1)..( 9): Result.004 file - promoters60/5668367
acaatttag

SEQ ID NO: 149454 - DNA, 9 bp, Unknown
  misc_feature (1)..( 9): Result.004 file - promoters60/5668367
acattttaa

SEQ ID NO: 149455 - DNA, 9 bp, Unknown
  misc_feature (1)..( 9): Result.004 file - promoters60/5668367
gaaaaattt

SEQ ID NO: 149456 - DNA, 9 bp, Unknown
  misc_feature (1)..( 9): Result.004 file - promoters60/5668367
gaaaaacaa

SEQ ID NO: 149457 - DNA, 9 bp, Unknown
  misc_feature (1)..( 9): Result.004 file - promoters60/5668367
taaacattt

SEQ ID NO: 149458 - DNA, 7 bp, Unknown
  misc_feature (1)..( 7): Result.004 file - promoters60/5668367
catgatc

SEQ ID NO: 149459 - DNA, 7 bp, Unknown
  misc_feature (1)..( 7): Result.004 file - promoters60/5668367
catgatt

SEQ ID NO: 149460 - DNA, 7 bp, Unknown
  misc_feature (1)..( 7): Result.004 file - promoters60/5668367
aatgatc

SEQ ID NO: 149461 - DNA, 7 bp, Unknown
  misc_feature (1)..( 7): Result.004 file - promoters60/5668367
tgagttt

SEQ ID NO: 149462 - DNA, 7 bp, Unknown
  misc_feature (1)..( 7): Result.004 file - promoters60/5668367
tgatttt

SEQ ID NO: 149463 - DNA, 7 bp, Unknown
  misc_feature (1)..( 7): Result.004 file - promoters60/5668367
aatatag

SEQ ID NO: 149464 - DNA, 7 bp, Unknown
  misc_feature (1)..( 7): Result.004 file - promoters60/5668367
aatttag

SEQ ID NO: 149465 - DNA, 6 bp, Unknown
  misc_feature (1)..( 6): Result.004 file - promoters60/5668367
ataata

SEQ ID NO: 149466 - DNA, 6 bp, Unknown
  misc_feature (1)..( 6): Result.004 file - promoters60/5668367
ataata

SEQ ID NO: 149467 - DNA, 9 bp, Unknown
  misc_feature (1)..( 9): Result.004 file - promoters60/5668367
tccacaaac

SEQ ID NO: 149468 - DNA, 9 bp, Unknown
  misc_feature (1)..( 9): Result.004 file - promoters60/5668367
tccaaaaac

SEQ ID NO: 149469 - DNA, 11 bp, Unknown
  misc_feature (1)..( 11): Result.004 file - promoters60/5668367
ataaattcatc

SEQ ID NO: 149470 - DNA, 11 bp, Unknown
  misc_feature (1)..( 11): Result.004 file - promoters60/5668367
ataaatacatc

SEQ ID NO: 149471 - DNA, 11 bp, Unknown
  misc_feature (1)..( 11): Result.004 file - promoters60/5668367
ataaatacatc

SEQ ID NO: 149472 - DNA, 9 bp, Unknown
  misc_feature (1)..( 9): Result.004 file - promoters60/5668367
atttttttc

SEQ ID NO: 149473 - DNA, 9 bp, Unknown
  misc_feature (1)..( 9): Result.004 file - promoters60/5668367
attattttc

SEQ ID NO: 149474 - DNA, 7 bp, Unknown
  misc_feature (1)..( 7): Result.004 file - promoters60/5668367
tatttat

SEQ ID NO: 149475 - DNA, 7 bp, Unknown
  misc_feature (1)..( 7): Result.004 file - promoters60/5668367
tatatat

SEQ ID NO: 149476 - DNA, 8 bp, Unknown
  misc_feature (1)..( 8): Result.004 file - promoters60/5668367
ttttctat

SEQ ID NO: 149477 - DNA, 8 bp, Unknown
  misc_feature (1)..( 8): Result.004 file - promoters60/5668367
ttttatat

SEQ ID NO: 149478 - DNA, 7 bp, Unknown
  misc_feature (1)..( 7): Result.004 file - promoters60/5668367
atagtat

SEQ ID NO: 149479 - DNA, 7 bp, Unknown
  misc_feature (1)..( 7): Result.004 file - promoters60/5668367
ataatat

SEQ ID NO: 149480 - DNA, 14 bp, Unknown
  misc_feature (1)..( 14): Result.004 file - promoters60/5668367
ctaaattaacattt

SEQ ID NO: 149481 - DNA, 14 bp, Unknown
  misc_feature (1)..( 14): Result.004 file - promoters60/5668367
tttttataacattt

SEQ ID NO: 149482 - DNA, 14 bp, Unknown
  misc_feature (1)..( 14): Result.004 file - promoters60/5668367
tttttataccattc

SEQ ID NO: 149483 - DNA, 8 bp, Unknown
  misc_feature (1)..( 8): Result.004 file - promoters60/5668367
atttgttt

SEQ ID NO: 149484 - DNA, 8 bp, Unknown
  misc_feature (1)..( 8): Result.004 file - promoters60/5668367
ttttattt

SEQ ID NO: 149485 - DNA, 8 bp, Unknown
  misc_feature (1)..( 8): Result.004 file - promoters60/5668367
ttttatac

SEQ ID NO: 149486 - DNA, 7 bp, Unknown
  misc_feature (1)..( 7): Result.004 file - promoters60/5668367
tttaagc

SEQ ID NO: 149487 - DNA, 7 bp, Unknown
  misc_feature (1)..( 7): Result.004 file - promoters60/5668367
tttaagc

SEQ ID NO: 149488 - DNA, 8 bp, Unknown
  misc_feature (1)..( 8): Result.004 file - promoters60/5668367
tttcatga

SEQ ID NO: 149489 - DNA, 8 bp, Unknown
  misc_feature (1)..( 8): Result.004 file - promoters60/5668367
tttcttga

SEQ ID NO: 149490 - DNA, 8 bp, Unknown
  misc_feature (1)..( 8): Result.004 file - promoters60/5668367
attattga

SEQ ID NO: 149491 - DNA, 8 bp, Unknown
  misc_feature (1)..( 8): Result.004 file - promoters60/5668367
attcttga

SEQ ID NO: 149492 - DNA, 9 bp, Unknown
  misc_feature (1)..( 9): Result.004 file - promoters60/5668367
taagtaatt

SEQ ID NO: 149493 - DNA, 9 bp, Unknown
  misc_feature (1)..( 9): Result.004 file - promoters60/5668367
taattaatt

SEQ ID NO: 149494 - DNA, 7 bp, Unknown
  misc_feature (1)..( 7): Result.004 file - promoters60/5668367
acataaa

SEQ ID NO: 149495 - DNA, 7 bp, Unknown
  misc_feature (1)..( 7): Result.004 file - promoters60/5668367
acagaaa

SEQ ID NO: 149496 - DNA, 6 bp, Unknown
  misc_feature (1)..( 6): Result.004 file - promoters60/5668367
attctt

SEQ ID NO: 149497 - DNA, 6 bp, Unknown
  misc_feature (1)..( 6): Result.004 file - promoters60/5668367
attctt

SEQ ID NO: 149498 - DNA, 7 bp, Unknown
  misc_feature (1)..( 7): Result.004 file - promoters60/5668367
aaactat

SEQ ID NO: 149499 - DNA, 7 bp, Unknown
  misc_feature (1)..( 7): Result.004 file - promoters60/5668367
aaattat

SEQ ID NO: 149500 - DNA, 7 bp, Unknown
  misc_feature (1)..( 7): Result.004 file - promoters60/5668367
agatttt

SEQ ID NO: 149501 - DNA, 7 bp, Unknown
  misc_feature (1)..( 7): Result.004 file - promoters60/5668367
agatttt

SEQ ID NO: 149502 - DNA, 6 bp, Unknown
  misc_feature (1)..( 6): Result.004 file - promoters60/5668367
atttta

SEQ ID NO: 149503 - DNA, 6 bp, Unknown
  misc_feature (1)..( 6): Result.004 file - promoters60/5668367
atttta

SEQ ID NO: 149504 - DNA, 7 bp, Unknown
  misc_feature (1)..( 7): Result.004 file - promoters60/5668367
ttaaaat

SEQ ID NO: 149505 - DNA, 7 bp, Unknown
  misc_feature (1)..( 7): Result.004 file - promoters60/5668367
ttaaaat

SEQ ID NO: 149506 - DNA, 6 bp, Unknown
  misc_feature (1)..( 6): Result.004 file - promoters60/5668367
gttttc

SEQ ID NO: 149507 - DNA, 6 bp, Unknown
  misc_feature (1)..( 6): Result.004 file - promoters60/5668367
gttttc

SEQ ID NO: 149508 - DNA, 6 bp, Unknown
  misc_feature (1)..( 6): Result.004 file - promoters60/5668367
aaaatt

SEQ ID NO: 149509 - DNA, 6 bp, Unknown
  misc_feature (1)..( 6): Result.004 file - promoters60/5668367
aaaatt

SEQ ID NO: 149510 - DNA, 7 bp, Unknown
  misc_feature (1)..( 7): Result.004 file - promoters60/5668367
atttaat

SEQ ID NO: 149511 - DNA, 7 bp, Unknown
  misc_feature (1)..( 7): Result.004 file - promoters60/5668367
attgaat

SEQ ID NO: 149512 - DNA, 6 bp, Unknown
  misc_feature (1)..( 6): Result.004 file - promoters60/5668367
actttt

SEQ ID NO: 149513 - DNA, 6 bp, Unknown
  misc_feature (1)..( 6): Result.004 file - promoters60/5668367
actttt

SEQ ID NO: 149514 - DNA, 8 bp, Unknown
  misc_feature (1)..( 8): Result.004 file - promoters60/5668367
aaacaaaa

SEQ ID NO: 149515 - DNA, 8 bp, Unknown
  misc_feature (1)..( 8): Result.004 file - promoters60/5668367
aaacaaaa

SEQ ID NO: 149516 - DNA, 8 bp, Unknown
  misc_feature (1)..( 8): Result.004 file - promoters60/5668367
gaaataca

SEQ ID NO: 149517 - DNA, 8 bp, Unknown
  misc_feature (1)..( 8): Result.004 file - promoters60/5668367
gaaagaca

SEQ ID NO: 149518 - DNA, 7 bp, Unknown
  misc_feature (1)..( 7): Result.004 file - promoters60/5668367
aaaagtc

SEQ ID NO: 149519 - DNA, 7 bp, Unknown
  misc_feature (1)..( 7): Result.004 file - promoters60/5668367
aaaagtc

SEQ ID NO: 149520 - DNA, 8 bp, Unknown
  misc_feature (1)..( 8): Result.004 file - promoters60/5668367
aaggaaga

SEQ ID NO: 149521 - DNA, 8 bp, Unknown
  misc_feature (1)..( 8): Result.004 file - promoters60/5668367
aagtaaga

SEQ ID NO: 149522 - DNA, 27 bp, Unknown
  misc_feature (1)..( 27): Result.004 file - promoters60/5668367
gtcaacaaacgatggctatacaacaag

SEQ ID NO: 149523 - DNA, 27 bp, Unknown
  misc_feature (1)..( 27): Result.004 file - promoters60/5668375
gtcaacaaacgttggctatacaacaag

SEQ ID NO: 149524 - DNA, 8 bp, Unknown
  misc_feature (1)..( 8): Result.004 file - promoters60/5668375
gtttgaaa

SEQ ID NO: 149525 - DNA, 8 bp, Unknown
  misc_feature (1)..( 8): Result.004 file - promoters60/5668375
ttttgaat

SEQ ID NO: 149526 - DNA, 8 bp, Unknown
  misc_feature (1)..( 8): Result.004 file - promoters60/5668375
atttcaaa

SEQ ID NO: 149527 - DNA, 8 bp, Unknown
  misc_feature (1)..( 8): Result.004 file - promoters60/5668375
tttttaat

SEQ ID NO: 149528 - DNA, 9 bp, Unknown
  misc_feature (1)..( 9): Result.004 file - promoters60/5668375
tttttcttc

SEQ ID NO: 149529 - DNA, 9 bp, Unknown
  misc_feature (1)..( 9): Result.004 file - promoters60/5668375
tttttctat

SEQ ID NO: 149530 - DNA, 9 bp, Unknown
  misc_feature (1)..( 9): Result.004 file - promoters60/5668375
cttttctgg

SEQ ID NO: 149531 - DNA, 9 bp, Unknown
  misc_feature (1)..( 9): Result.004 file - promoters60/5668427
ttttccttc

SEQ ID NO: 149532 - DNA, 15 bp, Unknown
  misc_feature (1)..( 15): Result.004 file - promoters60/5668427
tttggggtttgattc

SEQ ID NO: 149533 - DNA, 15 bp, Unknown
  misc_feature (1)..( 15): Result.004 file - promoters60/5668427
tttgggattttctta

SEQ ID NO: 149534 - DNA, 15 bp, Unknown
  misc_feature (1)..( 15): Result.004 file - promoters60/5668427
cctctggtttgcttc

SEQ ID NO: 149535 - DNA, 9 bp, Unknown
  misc_feature (1)..( 9): Result.004 file - promoters60/5668427
taatctggt

SEQ ID NO: 149536 - DNA, 9 bp, Unknown
  misc_feature (1)..( 9): Result.004 file - promoters60/5668427
taatctgat

SEQ ID NO: 149537 - DNA, 9 bp, Unknown
  misc_feature (1)..( 9): Result.004 file - promoters60/5668427
tgatccgat

SEQ ID NO: 149538 - DNA, 7 bp, Unknown
  misc_feature (1)..( 7): Result.004 file - promoters60/5668427
tacattc

SEQ ID NO: 149539 - DNA, 7 bp, Unknown
  misc_feature (1)..( 7): Result.004 file - promoters60/5668427
tacatta

SEQ ID NO: 149540 - DNA, 7 bp, Unknown
  misc_feature (1)..( 7): Result.004 file - promoters60/5668427
gacatta

SEQ ID NO: 149541 - DNA, 8 bp, Unknown
  misc_feature (1)..( 8): Result.004 file - promoters60/5668427
tcaggtta

SEQ ID NO: 149542 - DNA, 8 bp, Unknown
  misc_feature (1)..( 8): Result.004 file - promoters60/5668427
tcaggttg

SEQ ID NO: 149543 - DNA, 8 bp, Unknown
  misc_feature (1)..( 8): Result.004 file - promoters60/5668435
tcatgttg

SEQ ID NO: 149544 - DNA, 10 bp, Unknown
  misc_feature (1)..( 10): Result.004 file - promoters60/5668435
tatatactta

SEQ ID NO: 149545 - DNA, 10 bp, Unknown
  misc_feature (1)..( 10): Result.004 file - promoters60/5668435
aatacactag

SEQ ID NO: 149546 - DNA, 10 bp, Unknown
  misc_feature (1)..( 10): Result.004 file - promoters60/5668435
tatatatata

SEQ ID NO: 149547 - DNA, 10 bp, Unknown
  misc_feature (1)..( 10): Result.004 file - promoters60/5668435
tatatagata

SEQ ID NO: 149548 - DNA, 10 bp, Unknown
  misc_feature (1)..( 10): Result.004 file - promoters60/5668435
tatataaact

SEQ ID NO: 149549 - DNA, 10 bp, Unknown
  misc_feature (1)..( 10): Result.004 file - promoters60/5668454
aataaaaagc

SEQ ID NO: 149550 - DNA, 9 bp, Unknown
  misc_feature (1)..( 9): Result.004 file - promoters60/5668454
tcttaatta

SEQ ID NO: 149551 - DNA, 9 bp, Unknown
  misc_feature (1)..( 9): Result.004 file - promoters60/5668454
atttaattc

SEQ ID NO: 149552 - DNA, 9 bp, Unknown
  misc_feature (1)..( 9): Result.004 file - promoters60/5668454
tcttaatct

SEQ ID NO: 149553 - DNA, 9 bp, Unknown
  misc_feature (1)..( 9): Result.004 file - promoters60/5668454
atttattta

SEQ ID NO: 149554 - DNA, 11 bp, Unknown
  misc_feature (1)..( 11): Result.004 file - promoters60/5668454
aaataaattct

SEQ ID NO: 149555 - DNA, 11 bp, Unknown
  misc_feature (1)..( 11): Result.004 file - promoters60/5668454
atacaaaatct

SEQ ID NO: 149556 - DNA, 11 bp, Unknown
  misc_feature (1)..( 11): Result.004 file - promoters60/5668454
aaaaaaattcc

SEQ ID NO: 149557 - DNA, 11 bp, Unknown
  misc_feature (1)..( 11): Result.004 file - promoters60/5668454
taatatatttt

SEQ ID NO: 149558 - DNA, 7 bp, Unknown
  misc_feature (1)..( 7): Result.004 file - promoters60/5668454
atctaaa

SEQ ID NO: 149559 - DNA, 7 bp, Unknown
  misc_feature (1)..( 7): Result.004 file - promoters60/5668454
ttctaaa

SEQ ID NO: 149560 - DNA, 7 bp, Unknown
  misc_feature (1)..( 7): Result.004 file - promoters60/5668454
ttctaaa

SEQ ID NO: 149561 - DNA, 7 bp, Unknown
  misc_feature (1)..( 7): Result.004 file - promoters60/5668457
ttctaac

SEQ ID NO: 149562 - DNA, 6 bp, Unknown
  misc_feature (1)..( 6): Result.004 file - promoters60/5668457
aaccct

SEQ ID NO: 149563 - DNA, 6 bp, Unknown
  misc_feature (1)..( 6): Result.004 file - promoters60/5668457
aaccct

SEQ ID NO: 149564 - DNA, 6 bp, Unknown
  misc_feature (1)..( 6): Result.004 file - promoters60/5668457
gaattt

SEQ ID NO: 149565 - DNA, 6 bp, Unknown
  misc_feature (1)..( 6): Result.004 file - promoters60/5668457
gaattt

SEQ ID NO: 149566 - DNA, 8 bp, Unknown
  misc_feature (1)..( 8): Result.004 file - promoters60/5668457
acataagt

SEQ ID NO: 149567 - DNA, 8 bp, Unknown
  misc_feature (1)..( 8): Result.004 file - promoters60/5668457
acatgagt

SEQ ID NO: 149568 - DNA, 6 bp, Unknown
  misc_feature (1)..( 6): Result.004 file - promoters60/5668457
aaaaaa

SEQ ID NO: 149569 - DNA, 6 bp, Unknown
  misc_feature (1)..( 6): Result.004 file - promoters60/5668457
aaaaaa

SEQ ID NO: 149570 - DNA, 7 bp, Unknown
  misc_feature (1)..( 7): Result.004 file - promoters60/5668457
gtttcta

SEQ ID NO: 149571 - DNA, 7 bp, Unknown
  misc_feature (1)..( 7): Result.004 file - promoters60/5668457
gttacta

SEQ ID NO: 149572 - DNA, 6 bp, Unknown
  misc_feature (1)..( 6): Result.004 file - promoters60/5668457
caaatt

SEQ ID NO: 149573 - DNA, 6 bp, Unknown
  misc_feature (1)..( 6): Result.004 file - promoters60/5668457
caaatt

SEQ ID NO: 149574 - DNA, 6 bp, Unknown
  misc_feature (1)..( 6): Result.004 file - promoters60/5668457
tattac

SEQ ID NO: 149575 - DNA, 6 bp, Unknown
  misc_feature (1)..( 6): Result.004 file - promoters60/5668457
tattac

SEQ ID NO: 149576 - DNA, 6 bp, Unknown
  misc_feature (1)..( 6): Result.004 file - promoters60/5668457
aaaact

SEQ ID NO: 149577 - DNA, 6 bp, Unknown
  misc_feature (1)..( 6): Result.004 file - promoters60/5668457
aaaact

SEQ ID NO: 149578 - DNA, 6 bp, Unknown
  misc_feature (1)..( 6): Result.004 file - promoters60/5668457
ttttgg

SEQ ID NO: 149579 - DNA, 6 bp, Unknown
  misc_feature (1)..( 6): Result.004 file - promoters60/5668457
ttttgg

SEQ ID NO: 149580 - DNA, 6 bp, Unknown
  misc_feature (1)..( 6): Result.004 file - promoters60/5668457
ggcttc

SEQ ID NO: 149581 - DNA, 6 bp, Unknown
  misc_feature (1)..( 6): Result.004 file - promoters60/5668457
ggcttc

SEQ ID NO: 149582 - DNA, 8 bp, Unknown
  misc_feature (1)..( 8): Result.004 file - promoters60/5668457
tttatata

SEQ ID NO: 149583 - DNA, 8 bp, Unknown
  misc_feature (1)..( 8): Result.004 file - promoters60/5668457
tttctata

SEQ ID NO: 149584 - DNA, 6 bp, Unknown
  misc_feature (1)..( 6): Result.004 file - promoters60/5668457
ggttga

SEQ ID NO: 149585 - DNA, 6 bp, Unknown
  misc_feature (1)..( 6): Result.004 file - promoters60/5668457
ggttga

SEQ ID NO: 149586 - DNA, 6 bp, Unknown
  misc_feature (1)..( 6): Result.004 file - promoters60/5668457
atgcaa

SEQ ID NO: 149587 - DNA, 6 bp, Unknown
  misc_feature (1)..( 6): Result.004 file - promoters60/5668457
atgcaa

SEQ ID NO: 149588 - DNA, 9 bp, Unknown
  misc_feature (1)..( 9): Result.004 file - promoters60/5668457
atgtttact

SEQ ID NO: 149589 - DNA, 9 bp, Unknown
  misc_feature (1)..( 9): Result.004 file - promoters60/5668457
atggttact

SEQ ID NO: 149590 - DNA, 9 bp, Unknown
  misc_feature (1)..( 9): Result.004 file - promoters60/5668457
agcccaaag

SEQ ID NO: 149591 - DNA, 9 bp, Unknown
  misc_feature (1)..( 9): Result.004 file - promoters60/5668469
agccccaag

SEQ ID NO: 149592 - DNA, 12 bp, Unknown
  misc_feature (1)..( 12): Result.004 file - promoters60/5668469
ttcttcatttat

SEQ ID NO: 149593 - DNA, 12 bp, Unknown
  misc_feature (1)..( 12): Result.004 file - promoters60/5668469
ccaatcatatat

SEQ ID NO: 149594 - DNA, 12 bp, Unknown
  misc_feature (1)..( 12): Result.004 file - promoters60/5668469
tataaaatttat

SEQ ID NO: 149595 - DNA, 12 bp, Unknown
  misc_feature (1)..( 12): Result.004 file - promoters60/5668469
ttcttctttttt

SEQ ID NO: 149596 - DNA, 12 bp, Unknown
  misc_feature (1)..( 12): Result.004 file - promoters60/5668469
gaccaaaattac

SEQ ID NO: 149597 - DNA, 9 bp, Unknown
  misc_feature (1)..( 9): Result.004 file - promoters60/5668469
aataacttt

SEQ ID NO: 149598 - DNA, 9 bp, Unknown
  misc_feature (1)..( 9): Result.004 file - promoters60/5668469
aatcactac

SEQ ID NO: 149599 - DNA, 9 bp, Unknown
  misc_feature (1)..( 9): Result.004 file - promoters60/5668469
tatatctta

SEQ ID NO: 149600 - DNA, 9 bp, Unknown
  misc_feature (1)..( 9): Result.004 file - promoters60/5668469
ttgatctta

SEQ ID NO: 149601 - DNA, 10 bp, Unknown
  misc_feature (1)..( 10): Result.004 file - promoters60/5668469
atataaaata

SEQ ID NO: 149602 - DNA, 10 bp, Unknown
  misc_feature (1)..( 10): Result.004 file - promoters60/5668469
gaatacaatt

SEQ ID NO: 149603 - DNA, 10 bp, Unknown
  misc_feature (1)..( 10): Result.004 file - promoters60/5668469
cagtaaaata

SEQ ID NO: 149604 - DNA, 10 bp, Unknown
  misc_feature (1)..( 10): Result.004 file - promoters60/5668469
cagtaaaaaa

SEQ ID NO: 149605 - DNA, 7 bp, Unknown
  misc_feature (1)..( 7): Result.004 file - promoters60/5668469
tttctta

SEQ ID NO: 149606 - DNA, 7 bp, Unknown
  misc_feature (1)..( 7): Result.004 file - promoters60/5668469
tttgtta

SEQ ID NO: 149607 - DNA, 7 bp, Unknown
  misc_feature (1)..( 7): Result.004 file - promoters60/5668469
tttgtta

SEQ ID NO: 149608 - DNA, 7 bp, Unknown
  misc_feature (1)..( 7): Result.004 file - promoters60/5668469
tttatta

SEQ ID NO: 149609 - DNA, 9 bp, Unknown
  misc_feature (1)..( 9): Result.004 file - promoters60/5668469
aaaattaag

SEQ ID NO: 149610 - DNA, 9 bp, Unknown
  misc_feature (1)..( 9): Result.004 file - promoters60/5668469
aaaaataat

SEQ ID NO: 149611 - DNA, 9 bp, Unknown
  misc_feature (1)..( 9): Result.004 file - promoters60/5668469
ataatgaag

SEQ ID NO: 149612 - DNA, 9 bp, Unknown
  misc_feature (1)..( 9): Result.004 file - promoters60/5668473
taaaatatt

SEQ ID NO: 149613 - DNA, 7 bp, Unknown
  misc_feature (1)..( 7): Result.004 file - promoters60/5668473
cacttta

SEQ ID NO: 149614 - DNA, 7 bp, Unknown
  misc_feature (1)..( 7): Result.004 file - promoters60/5668473
cacttta

SEQ ID NO: 149615 - DNA, 8 bp, Unknown
  misc_feature (1)..( 8): Result.004 file - promoters60/5668473
aaactcac

SEQ ID NO: 149616 - DNA, 8 bp, Unknown
  misc_feature (1)..( 8): Result.004 file - promoters60/5668473
aaaatcac

SEQ ID NO: 149617 - DNA, 6 bp, Unknown
  misc_feature (1)..( 6): Result.004 file - promoters60/5668473
atttgg

SEQ ID NO: 149618 - DNA, 6 bp, Unknown
  misc_feature (1)..( 6): Result.004 file - promoters60/5668473
atttgg

SEQ ID NO: 149619 - DNA, 6 bp, Unknown
  misc_feature (1)..( 6): Result.004 file - promoters60/5668473
aaaact

SEQ ID NO: 149620 - DNA, 6 bp, Unknown
  misc_feature (1)..( 6): Result.004 file - promoters60/5668473
aaaact

SEQ ID NO: 149621 - DNA, 6 bp, Unknown
  misc_feature (1)..( 6): Result.004 file - promoters60/5668473
cgtggc

SEQ ID NO: 149622 - DNA, 6 bp, Unknown
  misc_feature (1)..( 6): Result.004 file - promoters60/5668473
cgtggc

SEQ ID NO: 149623 - DNA, 7 bp, Unknown
  misc_feature (1)..( 7): Result.004 file - promoters60/5668473
agtatgt

SEQ ID NO: 149624 - DNA, 7 bp, Unknown
  misc_feature (1)..( 7): Result.004 file - promoters60/5668473
agtttgt

SEQ ID NO: 149625 - DNA, 8 bp, Unknown
  misc_feature (1)..( 8): Result.004 file - promoters60/5668473
taagactc

SEQ ID NO: 149626 - DNA, 8 bp, Unknown
  misc_feature (1)..( 8): Result.004 file - promoters60/5668473
taatactc

SEQ ID NO: 149627 - DNA, 7 bp, Unknown
  misc_feature (1)..( 7): Result.004 file - promoters60/5668473
tttagag

SEQ ID NO: 149628 - DNA, 7 bp, Unknown
  misc_feature (1)..( 7): Result.004 file - promoters60/5668473
ttttgag

SEQ ID NO: 149629 - DNA, 6 bp, Unknown
  misc_feature (1)..( 6): Result.004 file - promoters60/5668473
aacgtt

SEQ ID NO: 149630 - DNA, 6 bp, Unknown
  misc_feature (1)..( 6): Result.004 file - promoters60/5668473
aacgtt

SEQ ID NO: 149631 - DNA, 6 bp, Unknown
  misc_feature (1)..( 6): Result.004 file - promoters60/5668473
ggatca

SEQ ID NO: 149632 - DNA, 6 bp, Unknown
  misc_feature (1)..( 6): Result.004 file - promoters60/5668473
ggatca

SEQ ID NO: 149633 - DNA, 6 bp, Unknown
  misc_feature (1)..( 6): Result.004 file - promoters60/5668473
actaaa

SEQ ID NO: 149634 - DNA, 6 bp, Unknown
  misc_feature (1)..( 6): Result.004 file - promoters60/5668473
actaaa

SEQ ID NO: 149635 - DNA, 6 bp, Unknown
  misc_feature (1)..( 6): Result.004 file - promoters60/5668473
aaaatt

SEQ ID NO: 149636 - DNA, 6 bp, Unknown
  misc_feature (1)..( 6): Result.004 file - promoters60/5668473
aaaatt

SEQ ID NO: 149637 - DNA, 7 bp, Unknown
  misc_feature (1)..( 7): Result.004 file - promoters60/5668473
aatttta

SEQ ID NO: 149638 - DNA, 7 bp, Unknown
  misc_feature (1)..( 7): Result.004 file - promoters60/5668473
aatctta

SEQ ID NO: 149639 - DNA, 6 bp, Unknown
  misc_feature (1)..( 6): Result.004 file - promoters60/5668473
ttaaaa

SEQ ID NO: 149640 - DNA, 6 bp, Unknown
  misc_feature (1)..( 6): Result.004 file - promoters60/5668473
ttaaaa

SEQ ID NO: 149641 - DNA, 7 bp, Unknown
  misc_feature (1)..( 7): Result.004 file - promoters60/5668473
aatttaa

SEQ ID NO: 149642 - DNA, 7 bp, Unknown
  misc_feature (1)..( 7): Result.004 file - promoters60/5668473
aatataa

SEQ ID NO: 149643 - DNA, 10 bp, Unknown
  misc_feature (1)..( 10): Result.004 file - promoters60/5668473
ttttaaactt

SEQ ID NO: 149644 - DNA, 10 bp, Unknown
  misc_feature (1)..( 10): Result.004 file - promoters60/5668473
ttttgaactt

SEQ ID NO: 149645 - DNA, 6 bp, Unknown
  misc_feature (1)..( 6): Result.004 file - promoters60/5668473
aagccc

SEQ ID NO: 149646 - DNA, 6 bp, Unknown
  misc_feature (1)..( 6): Result.004 file - promoters60/5668493
aagccc

SEQ ID NO: 149647 - DNA, 9 bp, Unknown
  misc_feature (1)..( 9): Result.004 file - promoters60/5668493
aaatattag

SEQ ID NO: 149648 - DNA, 9 bp, Unknown
  misc_feature (1)..( 9): Result.004 file - promoters60/5668493
gaatattta

SEQ ID NO: 149649 - DNA, 9 bp, Unknown
  misc_feature (1)..( 9): Result.004 file - promoters60/5668493
aaatatttt

SEQ ID NO: 149650 - DNA, 9 bp, Unknown
  misc_feature (1)..( 9): Result.004 file - promoters60/5668493
aaaaattga

SEQ ID NO: 149651 - DNA, 9 bp, Unknown
  misc_feature (1)..( 9): Result.004 file - promoters60/5668493
ttatatttc

SEQ ID NO: 149652 - DNA, 9 bp, Unknown
  misc_feature (1)..( 9): Result.004 file - promoters60/5668493
tcaaattga

SEQ ID NO: 149653 - DNA, 19 bp, Unknown
  misc_feature (1)..( 19): Result.004 file - promoters60/5668493
caaaatgaacgacacgaag

SEQ ID NO: 149654 - DNA, 19 bp, Unknown
  misc_feature (1)..( 19): Result.004 file - promoters60/5668493
caagtccaacgaaacgatt

SEQ ID NO: 149655 - DNA, 19 bp, Unknown
  misc_feature (1)..( 19): Result.004 file - promoters60/5668493
tagagaatgagaatcgaat

SEQ ID NO: 149656 - DNA, 19 bp, Unknown
  misc_feature (1)..( 19): Result.004 file - promoters60/5668493
actcatgtggttatcaaat

SEQ ID NO: 149657 - DNA, 19 bp, Unknown
  misc_feature (1)..( 19): Result.004 file - promoters60/5668493
caagcccaaagaataaaaa

SEQ ID NO: 149658 - DNA, 19 bp, Unknown
  misc_feature (1)..( 19): Result.004 file - promoters60/5668505
tgcagtgaaaaaattatca

SEQ ID NO: 149659 - DNA, 9 bp, Unknown
  misc_feature (1)..( 9): Result.004 file - promoters60/5668505
gttattttt

SEQ ID NO: 149660 - DNA, 9 bp, Unknown
  misc_feature (1)..( 9): Result.004 file - promoters60/5668505
cttatttaa

SEQ ID NO: 149661 - DNA, 9 bp, Unknown
  misc_feature (1)..( 9): Result.004 file - promoters60/5668505
tatattttg

SEQ ID NO: 149662 - DNA, 12 bp, Unknown
  misc_feature (1)..( 12): Result.004 file - promoters60/5668505
tatgctaagaag

SEQ ID NO: 149663 - DNA, 12 bp, Unknown
  misc_feature (1)..( 12): Result.004 file - promoters60/5668505
tatgataataat

SEQ ID NO: 149664 - DNA, 12 bp, Unknown
  misc_feature (1)..( 12): Result.004 file - promoters60/5668505
aatgaaaataaa

SEQ ID NO: 149665 - DNA, 12 bp, Unknown
  misc_feature (1)..( 12): Result.004 file - promoters60/5668505
gctttcaataaa

SEQ ID NO: 149666 - DNA, 9 bp, Unknown
  misc_feature (1)..( 9): Result.004 file - promoters60/5668505
taagaagct

SEQ ID NO: 149667 - DNA, 9 bp, Unknown
  misc_feature (1)..( 9): Result.004 file - promoters60/5668505
taagaatat

SEQ ID NO: 149668 - DNA, 9 bp, Unknown
  misc_feature (1)..( 9): Result.004 file - promoters60/5668505
aaagaatat

SEQ ID NO: 149669 - DNA, 8 bp, Unknown
  misc_feature (1)..( 8): Result.004 file - promoters60/5668505
gttttttt

SEQ ID NO: 149670 - DNA, 8 bp, Unknown
  misc_feature (1)..( 8): Result.004 file - promoters60/5668505
atttgttt

SEQ ID NO: 149671 - DNA, 8 bp, Unknown
  misc_feature (1)..( 8): Result.004 file - promoters60/5668505
attagttt

SEQ ID NO: 149672 - DNA, 12 bp, Unknown
  misc_feature (1)..( 12): Result.004 file - promoters60/5668505
ttgcaattttat

SEQ ID NO: 149673 - DNA, 12 bp, Unknown
  misc_feature (1)..( 12): Result.004 file - promoters60/5668505
ttccaaatttca

SEQ ID NO: 149674 - DNA, 12 bp, Unknown
  misc_feature (1)..( 12): Result.004 file - promoters60/5668505
gttgaaatttta

SEQ ID NO: 149675 - DNA, 7 bp, Unknown
  misc_feature (1)..( 7): Result.004 file - promoters60/5668505
atatttt

SEQ ID NO: 149676 - DNA, 7 bp, Unknown
  misc_feature (1)..( 7): Result.004 file - promoters60/5668505
ataattt

SEQ ID NO: 149677 - DNA, 7 bp, Unknown
  misc_feature (1)..( 7): Result.004 file - promoters60/5668505
ttatttt

SEQ ID NO: 149678 - DNA, 9 bp, Unknown
  misc_feature (1)..( 9): Result.004 file - promoters60/5668505
aaagaaccg

SEQ ID NO: 149679 - DNA, 9 bp, Unknown
  misc_feature (1)..( 9): Result.004 file - promoters60/5668505
aaagaatat

SEQ ID NO: 149680 - DNA, 9 bp, Unknown
  misc_feature (1)..( 9): Result.004 file - promoters60/5668505
taagaatat

SEQ ID NO: 149681 - DNA, 10 bp, Unknown
  misc_feature (1)..( 10): Result.004 file - promoters60/5668505
acatacaaaa

SEQ ID NO: 149682 - DNA, 10 bp, Unknown
  misc_feature (1)..( 10): Result.004 file - promoters60/5668505
ggatataaat

SEQ ID NO: 149683 - DNA, 10 bp, Unknown
  misc_feature (1)..( 10): Result.004 file - promoters60/5668505
ggatatgaat

SEQ ID NO: 149684 - DNA, 8 bp, Unknown
  misc_feature (1)..( 8): Result.004 file - promoters60/5668505
aaattgtc

SEQ ID NO: 149685 - DNA, 8 bp, Unknown
  misc_feature (1)..( 8): Result.004 file - promoters60/5668505
aaattggg

SEQ ID NO: 149686 - DNA, 8 bp, Unknown
  misc_feature (1)..( 8): Result.004 file - promoters60/5668505
caatcgtc

SEQ ID NO: 149687 - DNA, 8 bp, Unknown
  misc_feature (1)..( 8): Result.004 file - promoters60/5668505
gctaaaac

SEQ ID NO: 149688 - DNA, 8 bp, Unknown
  misc_feature (1)..( 8): Result.004 file - promoters60/5668505
aataaaac

SEQ ID NO: 149689 - DNA, 8 bp, Unknown
  misc_feature (1)..( 8): Result.004 file - promoters60/5668509
aataaaat

SEQ ID NO: 149690 - DNA, 9 bp, Unknown
  misc_feature (1)..( 9): Result.004 file - promoters60/5668509
gaaaatatt

SEQ ID NO: 149691 - DNA, 9 bp, Unknown
  misc_feature (1)..( 9): Result.004 file - promoters60/5668509
aaaaataag

SEQ ID NO: 149692 - DNA, 9 bp, Unknown
  misc_feature (1)..( 9): Result.004 file - promoters60/5668509
aaaaattaa

SEQ ID NO: 149693 - DNA, 9 bp, Unknown
  misc_feature (1)..( 9): Result.004 file - promoters60/5668509
aaacatatt

SEQ ID NO: 149694 - DNA, 9 bp, Unknown
  misc_feature (1)..( 9): Result.004 file - promoters60/5668509
acaaataaa

SEQ ID NO: 149695 - DNA, 9 bp, Unknown
  misc_feature (1)..( 9): Result.004 file - promoters60/5668509
taaaatttc

SEQ ID NO: 149696 - DNA, 9 bp, Unknown
  misc_feature (1)..( 9): Result.004 file - promoters60/5668509
caaaattga

SEQ ID NO: 149697 - DNA, 12 bp, Unknown
  misc_feature (1)..( 12): Result.004 file - promoters60/5668509
aaaataaataaa

SEQ ID NO: 149698 - DNA, 12 bp, Unknown
  misc_feature (1)..( 12): Result.004 file - promoters60/5668509
ttaataaagcta

SEQ ID NO: 149699 - DNA, 12 bp, Unknown
  misc_feature (1)..( 12): Result.004 file - promoters60/5668509
aaaattaatatt

SEQ ID NO: 149700 - DNA, 12 bp, Unknown
  misc_feature (1)..( 12): Result.004 file - promoters60/5668509
tatgttaacaaa

SEQ ID NO: 149701 - DNA, 12 bp, Unknown
  misc_feature (1)..( 12): Result.004 file - promoters60/5668509
gagataatattt

SEQ ID NO: 149702 - DNA, 12 bp, Unknown
  misc_feature (1)..( 12): Result.004 file - promoters60/5668509
attataaaatac

SEQ ID NO: 149703 - DNA, 8 bp, Unknown
  misc_feature (1)..( 8): Result.004 file - promoters60/5668509
aaaacaaa

SEQ ID NO: 149704 - DNA, 8 bp, Unknown
  misc_feature (1)..( 8): Result.004 file - promoters60/5668509
aaaaaaaa

SEQ ID NO: 149705 - DNA, 8 bp, Unknown
  misc_feature (1)..( 8): Result.004 file - promoters60/5668509
taaataaa

SEQ ID NO: 149706 - DNA, 8 bp, Unknown
  misc_feature (1)..( 8): Result.004 file - promoters60/5668509
caaacaaa

SEQ ID NO: 149707 - DNA, 8 bp, Unknown
  misc_feature (1)..( 8): Result.004 file - promoters60/5668509
taaaaaaa

SEQ ID NO: 149708 - DNA, 8 bp, Unknown
  misc_feature (1)..( 8): Result.004 file - promoters60/5668509
gaaataga

SEQ ID NO: 149709 - DNA, 8 bp, Unknown
  misc_feature (1)..( 8): Result.004 file - promoters60/5668509
aaaacgac

SEQ ID NO: 149710 - DNA, 13 bp, Unknown
  misc_feature (1)..( 13): Result.004 file - promoters60/5668509
aattgggactaaa

SEQ ID NO: 149711 - DNA, 13 bp, Unknown
  misc_feature (1)..( 13): Result.004 file - promoters60/5668509
tatttggataaaa

SEQ ID NO: 149712 - DNA, 13 bp, Unknown
  misc_feature (1)..( 13): Result.004 file - promoters60/5668509
cctttgaataaaa

SEQ ID NO: 149713 - DNA, 13 bp, Unknown
  misc_feature (1)..( 13): Result.004 file - promoters60/5668509
aattaaaaaggaa

SEQ ID NO: 149714 - DNA, 13 bp, Unknown
  misc_feature (1)..( 13): Result.004 file - promoters60/5668509
gctttgaacatta

SEQ ID NO: 149715 - DNA, 13 bp, Unknown
  misc_feature (1)..( 13): Result.004 file - promoters60/5668509
aaggtcaataaat

SEQ ID NO: 149716 - DNA, 13 bp, Unknown
  misc_feature (1)..( 13): Result.004 file - promoters60/5668509
ttttaaaaaactt

SEQ ID NO: 149717 - DNA, 11 bp, Unknown
  misc_feature (1)..( 11): Result.004 file - promoters60/5668509
ttacaaaacta

SEQ ID NO: 149718 - DNA, 11 bp, Unknown
  misc_feature (1)..( 11): Result.004 file - promoters60/5668509
atacaaaaaaa

SEQ ID NO: 149719 - DNA, 11 bp, Unknown
  misc_feature (1)..( 11): Result.004 file - promoters60/5668509
tcacaaaagac

SEQ ID NO: 149720 - DNA, 11 bp, Unknown
  misc_feature (1)..( 11): Result.004 file - promoters60/5668509
tcccaaaaata

SEQ ID NO: 149721 - DNA, 11 bp, Unknown
  misc_feature (1)..( 11): Result.004 file - promoters60/5668509
tcctaaaatca

SEQ ID NO: 149722 - DNA, 11 bp, Unknown
  misc_feature (1)..( 11): Result.004 file - promoters60/5668509
aaataaacata

SEQ ID NO: 149723 - DNA, 11 bp, Unknown
  misc_feature (1)..( 11): Result.004 file - promoters60/5668509
acccaaaattg

SEQ ID NO: 149724 - DNA, 13 bp, Unknown
  misc_feature (1)..( 13): Result.004 file - promoters60/5668509
atattattagtag

SEQ ID NO: 149725 - DNA, 13 bp, Unknown
  misc_feature (1)..( 13): Result.004 file - promoters60/5668509
atattattagcct

SEQ ID NO: 149726 - DNA, 13 bp, Unknown
  misc_feature (1)..( 13): Result.004 file - promoters60/5668509
ttattatattgag

SEQ ID NO: 149727 - DNA, 13 bp, Unknown
  misc_feature (1)..( 13): Result.004 file - promoters60/5668509
atataattatttt

SEQ ID NO: 149728 - DNA, 13 bp, Unknown
  misc_feature (1)..( 13): Result.004 file - promoters60/5668509
gattaattctttt

SEQ ID NO: 149729 - DNA, 14 bp, Unknown
  misc_feature (1)..( 14): Result.004 file - promoters60/5668509
cgtttacttcaaaa

SEQ ID NO: 149730 - DNA, 12 bp, Unknown
  misc_feature (1)..( 12): Result.004 file - promoters60/5668509
ccattatatata

SEQ ID NO: 149731 - DNA, 12 bp, Unknown
  misc_feature (1)..( 12): Result.004 file - promoters60/5668509
cgcctatatata

SEQ ID NO: 149732 - DNA, 12 bp, Unknown
  misc_feature (1)..( 12): Result.004 file - promoters60/5668509
tccttataaata

SEQ ID NO: 149733 - DNA, 12 bp, Unknown
  misc_feature (1)..( 12): Result.004 file - promoters60/5668509
tccctataaatt

SEQ ID NO: 149734 - DNA, 12 bp, Unknown
  misc_feature (1)..( 12): Result.004 file - promoters60/5668509
gtgagatataat

SEQ ID NO: 149735 - DNA, 12 bp, Unknown
  misc_feature (1)..( 12): Result.004 file - promoters60/5668509
gccttaaaaacc

SEQ ID NO: 149736 - DNA, 12 bp, Unknown
  misc_feature (1)..( 12): Result.004 file - promoters60/5668509
cctttaaaaaag

SEQ ID NO: 149737 - DNA, 7 bp, Unknown
  misc_feature (1)..( 7): Result.004 file - promoters60/5668509
taagatt

SEQ ID NO: 149738 - DNA, 7 bp, Unknown
  misc_feature (1)..( 7): Result.004 file - promoters60/5668509
taaaatt

SEQ ID NO: 149739 - DNA, 7 bp, Unknown
  misc_feature (1)..( 7): Result.004 file - promoters60/5668509
taaaatt

SEQ ID NO: 149740 - DNA, 7 bp, Unknown
  misc_feature (1)..( 7): Result.004 file - promoters60/5668509
aaaaatt

SEQ ID NO: 149741 - DNA, 8 bp, Unknown
  misc_feature (1)..( 8): Result.004 file - promoters60/5668509
taacaatt

SEQ ID NO: 149742 - DNA, 8 bp, Unknown
  misc_feature (1)..( 8): Result.004 file - promoters60/5668509
ccaaaatt

SEQ ID NO: 149743 - DNA, 11 bp, Unknown
  misc_feature (1)..( 11): Result.004 file - promoters60/5668509
tccctataaat

SEQ ID NO: 149744 - DNA, 11 bp, Unknown
  misc_feature (1)..( 11): Result.004 file - promoters60/5668509
cgcctatatat

SEQ ID NO: 149745 - DNA, 12 bp, Unknown
  misc_feature (1)..( 12): Result.004 file - promoters60/5668509
atccttataaat

SEQ ID NO: 149746 - DNA, 12 bp, Unknown
  misc_feature (1)..( 12): Result.004 file - promoters60/5668509
atcctttttagt

SEQ ID NO: 149747 - DNA, 12 bp, Unknown
  misc_feature (1)..( 12): Result.004 file - promoters60/5668509
cgccttaaaaac

SEQ ID NO: 149748 - DNA, 12 bp, Unknown
  misc_feature (1)..( 12): Result.004 file - promoters60/5668529
gcctttaaaaaa

SEQ ID NO: 149749 - DNA, 8 bp, Unknown
  misc_feature (1)..( 8): Result.004 file - promoters60/5668529
ccgtatct

SEQ ID NO: 149750 - DNA, 8 bp, Unknown
  misc_feature (1)..( 8): Result.004 file - promoters60/5668529
tcgtctct

SEQ ID NO: 149751 - DNA, 8 bp, Unknown
  misc_feature (1)..( 8): Result.004 file - promoters60/5668529
ccgtttct

SEQ ID NO: 149752 - DNA, 8 bp, Unknown
  misc_feature (1)..( 8): Result.004 file - promoters60/5668529
tatcctct

SEQ ID NO: 149753 - DNA, 11 bp, Unknown
  misc_feature (1)..( 11): Result.004 file - promoters60/5668529
aaccgttgact

SEQ ID NO: 149754 - DNA, 11 bp, Unknown
  misc_feature (1)..( 11): Result.004 file - promoters60/5668529
ttaagttgact

SEQ ID NO: 149755 - DNA, 11 bp, Unknown
  misc_feature (1)..( 11): Result.004 file - promoters60/5668529
aaatattgact

SEQ ID NO: 149756 - DNA, 11 bp, Unknown
  misc_feature (1)..( 11): Result.004 file - promoters60/5668529
ttaatttgaca

SEQ ID NO: 149757 - DNA, 10 bp, Unknown
  misc_feature (1)..( 10): Result.004 file - promoters60/5668529
ttcatatgca

SEQ ID NO: 149758 - DNA, 10 bp, Unknown
  misc_feature (1)..( 10): Result.004 file - promoters60/5668529
ttcttatgtt

SEQ ID NO: 149759 - DNA, 10 bp, Unknown
  misc_feature (1)..( 10): Result.004 file - promoters60/5668529
ttattatgtt

SEQ ID NO: 149760 - DNA, 10 bp, Unknown
  misc_feature (1)..( 10): Result.004 file - promoters60/5668529
tgattatgtg

SEQ ID NO: 149761 - DNA, 16 bp, Unknown
  misc_feature (1)..( 16): Result.004 file - promoters60/5668529
tctcttcttcattgaa

SEQ ID NO: 149762 - DNA, 16 bp, Unknown
  misc_feature (1)..( 16): Result.004 file - promoters60/5668529
tcttttctctctataa

SEQ ID NO: 149763 - DNA, 16 bp, Unknown
  misc_feature (1)..( 16): Result.004 file - promoters60/5668529
acttttgtctatataa

SEQ ID NO: 149764 - DNA, 16 bp, Unknown
  misc_feature (1)..( 16): Result.004 file - promoters60/5668529
gcttatcttttataat

SEQ ID NO: 149765 - DNA, 8 bp, Unknown
  misc_feature (1)..( 8): Result.004 file - promoters60/5668529
aaaattat

SEQ ID NO: 149766 - DNA, 8 bp, Unknown
  misc_feature (1)..( 8): Result.004 file - promoters60/5668529
aaaattaa

SEQ ID NO: 149767 - DNA, 8 bp, Unknown
  misc_feature (1)..( 8): Result.004 file - promoters60/5668529
aataataa

SEQ ID NO: 149768 - DNA, 8 bp, Unknown
  misc_feature (1)..( 8): Result.004 file - promoters60/5668529
aaaaatag

SEQ ID NO: 149769 - DNA, 8 bp, Unknown
  misc_feature (1)..( 8): Result.004 file - promoters60/5668529
aaacatag

SEQ ID NO: 149770 - DNA, 10 bp, Unknown
  misc_feature (1)..( 10): Result.004 file - promoters60/5668529
tggaagtata

SEQ ID NO: 149771 - DNA, 10 bp, Unknown
  misc_feature (1)..( 10): Result.004 file - promoters60/5668529
aacaagtata

SEQ ID NO: 149772 - DNA, 10 bp, Unknown
  misc_feature (1)..( 10): Result.004 file - promoters60/5668529
tttgagtata

SEQ ID NO: 149773 - DNA, 10 bp, Unknown
  misc_feature (1)..( 10): Result.004 file - promoters60/5668529
aacaagtaag

SEQ ID NO: 149774 - DNA, 11 bp, Unknown
  misc_feature (1)..( 11): Result.004 file - promoters60/5668529
tgaccatgctt

SEQ ID NO: 149775 - DNA, 11 bp, Unknown
  misc_feature (1)..( 11): Result.004 file - promoters60/5668529
tgaccatcatt

SEQ ID NO: 149776 - DNA, 11 bp, Unknown
  misc_feature (1)..( 11): Result.004 file - promoters60/5668529
acaccataatt

SEQ ID NO: 149777 - DNA, 11 bp, Unknown
  misc_feature (1)..( 11): Result.004 file - promoters60/5668529
acacgataagg

SEQ ID NO: 149778 - DNA, 8 bp, Unknown
  misc_feature (1)..( 8): Result.004 file - promoters60/5668529
taaatatt

SEQ ID NO: 149779 - DNA, 8 bp, Unknown
  misc_feature (1)..( 8): Result.004 file - promoters60/5668529
taaatagg

SEQ ID NO: 149780 - DNA, 8 bp, Unknown
  misc_feature (1)..( 8): Result.004 file - promoters60/5668529
caaacatt

SEQ ID NO: 149781 - DNA, 8 bp, Unknown
  misc_feature (1)..( 8): Result.004 file - promoters60/5668533
caaatatt

SEQ ID NO: 149782 - DNA, 10 bp, Unknown
  misc_feature (1)..( 10): Result.004 file - promoters60/5668533
ttcttagtac

SEQ ID NO: 149783 - DNA, 10 bp, Unknown
  misc_feature (1)..( 10): Result.004 file - promoters60/5668533
ttcttaagga

SEQ ID NO: 149784 - DNA, 10 bp, Unknown
  misc_feature (1)..( 10): Result.004 file - promoters60/5668533
ttcataaatc

SEQ ID NO: 149785 - DNA, 11 bp, Unknown
  misc_feature (1)..( 11): Result.004 file - promoters60/5668533
gtacataaaac

SEQ ID NO: 149786 - DNA, 11 bp, Unknown
  misc_feature (1)..( 11): Result.004 file - promoters60/5668533
gtccttaataa

SEQ ID NO: 149787 - DNA, 11 bp, Unknown
  misc_feature (1)..( 11): Result.004 file - promoters60/5668537
atcattaatcc

SEQ ID NO: 149788 - DNA, 13 bp, Unknown
  misc_feature (1)..( 13): Result.004 file - promoters60/5668537
caatgttttctca

SEQ ID NO: 149789 - DNA, 13 bp, Unknown
  misc_feature (1)..( 13): Result.004 file - promoters60/5668537
caatattttatca

SEQ ID NO: 149790 - DNA, 13 bp, Unknown
  misc_feature (1)..( 13): Result.004 file - promoters60/5668537
aattattttctta

SEQ ID NO: 149791 - DNA, 11 bp, Unknown
  misc_feature (1)..( 11): Result.004 file - promoters60/5668537
ggagctaaaat

SEQ ID NO: 149792 - DNA, 11 bp, Unknown
  misc_feature (1)..( 11): Result.004 file - promoters60/5668537
ttttctacaat

SEQ ID NO: 149793 - DNA, 11 bp, Unknown
  misc_feature (1)..( 11): Result.004 file - promoters60/5668537
ttttctaaaat

SEQ ID NO: 149794 - DNA, 7 bp, Unknown
  misc_feature (1)..( 7): Result.004 file - promoters60/5668537
ataattc

SEQ ID NO: 149795 - DNA, 7 bp, Unknown
  misc_feature (1)..( 7): Result.004 file - promoters60/5668537
ataattt

SEQ ID NO: 149796 - DNA, 7 bp, Unknown
  misc_feature (1)..( 7): Result.004 file - promoters60/5668537
gtaattc

SEQ ID NO: 149797 - DNA, 9 bp, Unknown
  misc_feature (1)..( 9): Result.004 file - promoters60/5668537
tattttggc

SEQ ID NO: 149798 - DNA, 9 bp, Unknown
  misc_feature (1)..( 9): Result.004 file - promoters60/5668537
tatttttac

SEQ ID NO: 149799 - DNA, 9 bp, Unknown
  misc_feature (1)..( 9): Result.004 file - promoters60/5668537
aattttttt

SEQ ID NO: 149800 - DNA, 8 bp, Unknown
  misc_feature (1)..( 8): Result.004 file - promoters60/5668537
actgtatt

SEQ ID NO: 149801 - DNA, 8 bp, Unknown
  misc_feature (1)..( 8): Result.004 file - promoters60/5668537
actgtatt

SEQ ID NO: 149802 - DNA, 8 bp, Unknown
  misc_feature (1)..( 8): Result.004 file - promoters60/5668537
tactcaat

SEQ ID NO: 149803 - DNA, 8 bp, Unknown
  misc_feature (1)..( 8): Result.004 file - promoters60/5668537
tacttaat

SEQ ID NO: 149804 - DNA, 7 bp, Unknown
  misc_feature (1)..( 7): Result.004 file - promoters60/5668537
gtacata

SEQ ID NO: 149805 - DNA, 7 bp, Unknown
  misc_feature (1)..( 7): Result.004 file - promoters60/5668537
gtatata

SEQ ID NO: 149806 - DNA, 6 bp, Unknown
  misc_feature (1)..( 6): Result.004 file - promoters60/5668537
ttctta

SEQ ID NO: 149807 - DNA, 6 bp, Unknown
  misc_feature (1)..( 6): Result.004 file - promoters60/5668537
ttctta

SEQ ID NO: 149808 - DNA, 7 bp, Unknown
  misc_feature (1)..( 7): Result.004 file - promoters60/5668537
tgttaat

SEQ ID NO: 149809 - DNA, 7 bp, Unknown
  misc_feature (1)..( 7): Result.004 file - promoters60/5668537
tgtcaat

SEQ ID NO: 149810 - DNA, 6 bp, Unknown
  misc_feature (1)..( 6): Result.004 file - promoters60/5668537
tttcct

SEQ ID NO: 149811 - DNA, 6 bp, Unknown
  misc_feature (1)..( 6): Result.004 file - promoters60/5668537
tttcct

SEQ ID NO: 149812 - DNA, 6 bp, Unknown
  misc_feature (1)..( 6): Result.004 file - promoters60/5668537
ctacat

SEQ ID NO: 149813 - DNA, 6 bp, Unknown
  misc_feature (1)..( 6): Result.004 file - promoters60/5668537
ctacat

SEQ ID NO: 149814 - DNA, 8 bp, Unknown
  misc_feature (1)..( 8): Result.004 file - promoters60/5668537
gaaacgac

SEQ ID NO: 149815 - DNA, 8 bp, Unknown
  misc_feature (1)..( 8): Result.004 file - promoters60/5668537
gaaatgac

SEQ ID NO: 149816 - DNA, 12 bp, Unknown
  misc_feature (1)..( 12): Result.004 file - promoters60/5668537
tagatttattaa

SEQ ID NO: 149817 - DNA, 12 bp, Unknown
  misc_feature (1)..( 12): Result.004 file - promoters60/5668537
tagaattactaa

SEQ ID NO: 149818 - DNA, 7 bp, Unknown
  misc_feature (1)..( 7): Result.004 file - promoters60/5668537
taataat

SEQ ID NO: 149819 - DNA, 7 bp, Unknown
  misc_feature (1)..( 7): Result.004 file - promoters60/5668537
taataat

SEQ ID NO: 149820 - DNA, 6 bp, Unknown
  misc_feature (1)..( 6): Result.004 file - promoters60/5668537
aatttt

SEQ ID NO: 149821 - DNA, 6 bp, Unknown
  misc_feature (1)..( 6): Result.004 file - promoters60/5668537
aatttt

SEQ ID NO: 149822 - DNA, 7 bp, Unknown
  misc_feature (1)..( 7): Result.004 file - promoters60/5668537
tatccaa

SEQ ID NO: 149823 - DNA, 7 bp, Unknown
  misc_feature (1)..( 7): Result.004 file - promoters60/5668537
tatacaa

SEQ ID NO: 149824 - DNA, 7 bp, Unknown
  misc_feature (1)..( 7): Result.004 file - promoters60/5668537
tataatt

SEQ ID NO: 149825 - DNA, 7 bp, Unknown
  misc_feature (1)..( 7): Result.004 file - promoters60/5668537
tatgatt

SEQ ID NO: 149826 - DNA, 6 bp, Unknown
  misc_feature (1)..( 6): Result.004 file - promoters60/5668537
aaaaaa

SEQ ID NO: 149827 - DNA, 6 bp, Unknown
  misc_feature (1)..( 6): Result.004 file - promoters60/5668537
aaaaaa

SEQ ID NO: 149828 - DNA, 8 bp, Unknown
  misc_feature (1)..( 8): Result.004 file - promoters60/5668537
taaatttc

SEQ ID NO: 149829 - DNA, 8 bp, Unknown
  misc_feature (1)..( 8): Result.004 file - promoters60/5668537
taactttc

SEQ ID NO: 149830 - DNA, 7 bp, Unknown
  misc_feature (1)..( 7): Result.004 file - promoters60/5668537
aagagaa

SEQ ID NO: 149831 - DNA, 7 bp, Unknown
  misc_feature (1)..( 7): Result.004 file - promoters60/5668537
aagtgaa

SEQ ID NO: 149832 - DNA, 8 bp, Unknown
  misc_feature (1)..( 8): Result.004 file - promoters60/5668537
atggcttg

SEQ ID NO: 149833 - DNA, 8 bp, Unknown
  misc_feature (1)..( 8): Result.004 file - promoters60/5668541
atgggttg

SEQ ID NO: 149834 - DNA, 8 bp, Unknown
  misc_feature (1)..( 8): Result.004 file - promoters60/5668541
ctttcatg

SEQ ID NO: 149835 - DNA, 8 bp, Unknown
  misc_feature (1)..( 8): Result.004 file - promoters60/5668541
cttccatg

SEQ ID NO: 149836 - DNA, 6 bp, Unknown
  misc_feature (1)..( 6): Result.004 file - promoters60/5668541
ataatc

SEQ ID NO: 149837 - DNA, 6 bp, Unknown
  misc_feature (1)..( 6): Result.004 file - promoters60/5668541
ataatc

SEQ ID NO: 149838 - DNA, 6 bp, Unknown
  misc_feature (1)..( 6): Result.004 file - promoters60/5668541
aatttg

SEQ ID NO: 149839 - DNA, 6 bp, Unknown
  misc_feature (1)..( 6): Result.004 file - promoters60/5668541
aatttg

SEQ ID NO: 149840 - DNA, 8 bp, Unknown
  misc_feature (1)..( 8): Result.004 file - promoters60/5668541
cactgata

SEQ ID NO: 149841 - DNA, 8 bp, Unknown
  misc_feature (1)..( 8): Result.004 file - promoters60/5668541
cactgact

SEQ ID NO: 149842 - DNA, 8 bp, Unknown
  misc_feature (1)..( 8): Result.004 file - promoters60/5668541
tacttact

SEQ ID NO: 149843 - DNA, 7 bp, Unknown
  misc_feature (1)..( 7): Result.004 file - promoters60/5668541
tccaaaa

SEQ ID NO: 149844 - DNA, 7 bp, Unknown
  misc_feature (1)..( 7): Result.004 file - promoters60/5668541
tccaaaa

SEQ ID NO: 149845 - DNA, 7 bp, Unknown
  misc_feature (1)..( 7): Result.004 file - promoters60/5668541
ctccaga

SEQ ID NO: 149846 - DNA, 7 bp, Unknown
  misc_feature (1)..( 7): Result.004 file - promoters60/5668541
ctcaaga

SEQ ID NO: 149847 - DNA, 6 bp, Unknown
  misc_feature (1)..( 6): Result.004 file - promoters60/5668541
aaaaaa

SEQ ID NO: 149848 - DNA, 6 bp, Unknown
  misc_feature (1)..( 6): Result.004 file - promoters60/5668541
aaaaaa

SEQ ID NO: 149849 - DNA, 7 bp, Unknown
  misc_feature (1)..( 7): Result.004 file - promoters60/5668541
tttgaaa

SEQ ID NO: 149850 - DNA, 7 bp, Unknown
  misc_feature (1)..( 7): Result.004 file - promoters60/5668541
tttaaaa

SEQ ID NO: 149851 - DNA, 8 bp, Unknown
  misc_feature (1)..( 8): Result.004 file - promoters60/5668541
ttggattt

SEQ ID NO: 149852 - DNA, 8 bp, Unknown
  misc_feature (1)..( 8): Result.004 file - promoters60/5668541
ttgaattt

SEQ ID NO: 149853 - DNA, 6 bp, Unknown
  misc_feature (1)..( 6): Result.004 file - promoters60/5668541
ttttgg

SEQ ID NO: 149854 - DNA, 6 bp, Unknown
  misc_feature (1)..( 6): Result.004 file - promoters60/5668541
ttttgg

SEQ ID NO: 149855 - DNA, 7 bp, Unknown
  misc_feature (1)..( 7): Result.004 file - promoters60/5668541
tttgttt

SEQ ID NO: 149856 - DNA, 7 bp, Unknown
  misc_feature (1)..( 7): Result.004 file - promoters60/5668541
ttttttt

SEQ ID NO: 149857 - DNA, 6 bp, Unknown
  misc_feature (1)..( 6): Result.004 file - promoters60/5668541
tactgc

SEQ ID NO: 149858 - DNA, 6 bp, Unknown
  misc_feature (1)..( 6): Result.004 file - promoters60/5668541
tactgc

SEQ ID NO: 149859 - DNA, 6 bp, Unknown
  misc_feature (1)..( 6): Result.004 file - promoters60/5668541
gatctg

SEQ ID NO: 149860 - DNA, 6 bp, Unknown
  misc_feature (1)..( 6): Result.004 file - promoters60/5668541
gatctg

SEQ ID NO: 149861 - DNA, 6 bp, Unknown
  misc_feature (1)..( 6): Result.004 file - promoters60/5668541
tgaatt

SEQ ID NO: 149862 - DNA, 6 bp, Unknown
  misc_feature (1)..( 6): Result.004 file - promoters60/5668541
tgaatt

SEQ ID NO: 149863 - DNA, 6 bp, Unknown
  misc_feature (1)..( 6): Result.004 file - promoters60/5668541
aaccga

SEQ ID NO: 149864 - DNA, 6 bp, Unknown
  misc_feature (1)..( 6): Result.004 file - promoters60/5668541
aaccga

SEQ ID NO: 149865 - DNA, 7 bp, Unknown
  misc_feature (1)..( 7): Result.004 file - promoters60/5668541
cgtcaga

SEQ ID NO: 149866 - DNA, 7 bp, Unknown
  misc_feature (1)..( 7): Result.004 file - promoters60/5668541
cgtcaga

SEQ ID NO: 149867 - DNA, 6 bp, Unknown
  misc_feature (1)..( 6): Result.004 file - promoters60/5668541
cagact

SEQ ID NO: 149868 - DNA, 6 bp, Unknown
  misc_feature (1)..( 6): Result.004 file - promoters60/5668541
cagact

SEQ ID NO: 149869 - DNA, 6 bp, Unknown
  misc_feature (1)..( 6): Result.004 file - promoters60/5668541
tggttt

SEQ ID NO: 149870 - DNA, 6 bp, Unknown
  misc_feature (1)..( 6): Result.004 file - promoters60/5668541
tggttt

SEQ ID NO: 149871 - DNA, 7 bp, Unknown
  misc_feature (1)..( 7): Result.004 file - promoters60/5668541
agaatgt

SEQ ID NO: 149872 - DNA, 7 bp, Unknown
  misc_feature (1)..( 7): Result.004 file - promoters60/5668547
agattgt

SEQ ID NO: 149873 - DNA, 10 bp, Unknown
  misc_feature (1)..( 10): Result.004 file - promoters60/5668547
ttgtggctga

SEQ ID NO: 149874 - DNA, 10 bp, Unknown
  misc_feature (1)..( 10): Result.004 file - promoters60/5668547
atgtgggtga

SEQ ID NO: 149875 - DNA, 10 bp, Unknown
  misc_feature (1)..( 10): Result.004 file - promoters60/5668547
atgtggtcat

SEQ ID NO: 149876 - DNA, 9 bp, Unknown
  misc_feature (1)..( 9): Result.004 file - promoters60/5668547
gtgtcctct

SEQ ID NO: 149877 - DNA, 9 bp, Unknown
  misc_feature (1)..( 9): Result.004 file - promoters60/5668547
tcttcctct

SEQ ID NO: 149878 - DNA, 9 bp, Unknown
  misc_feature (1)..( 9): Result.004 file - promoters60/5668547
gtgtgctct

SEQ ID NO: 149879 - DNA, 8 bp, Unknown
  misc_feature (1)..( 8): Result.004 file - promoters60/5668547
gtttcttt

SEQ ID NO: 149880 - DNA, 8 bp, Unknown
  misc_feature (1)..( 8): Result.004 file - promoters60/5668547
ttttcttc

SEQ ID NO: 149881 - DNA, 9 bp, Unknown
  misc_feature (1)..( 9): Result.004 file - promoters60/5668547
ttttccttc

SEQ ID NO: 149882 - DNA, 8 bp, Unknown
  misc_feature (1)..( 8): Result.004 file - promoters60/5668547
tgtctctc

SEQ ID NO: 149883 - DNA, 8 bp, Unknown
  misc_feature (1)..( 8): Result.004 file - promoters60/5668547
tgtttcta

SEQ ID NO: 149884 - DNA, 8 bp, Unknown
  misc_feature (1)..( 8): Result.004 file - promoters60/5668547
cgttgcta

SEQ ID NO: 149885 - DNA, 7 bp, Unknown
  misc_feature (1)..( 7): Result.004 file - promoters60/5668547
ccgtgga

SEQ ID NO: 149886 - DNA, 7 bp, Unknown
  misc_feature (1)..( 7): Result.004 file - promoters60/5668547
acgtgga

SEQ ID NO: 149887 - DNA, 7 bp, Unknown
  misc_feature (1)..( 7): Result.004 file - promoters60/5668547
acgtggc

SEQ ID NO: 149888 - DNA, 7 bp, Unknown
  misc_feature (1)..( 7): Result.004 file - promoters60/5668547
gctaaaa

SEQ ID NO: 149889 - DNA, 7 bp, Unknown
  misc_feature (1)..( 7): Result.004 file - promoters60/5668547
gctgaaa

SEQ ID NO: 149890 - DNA, 7 bp, Unknown
  misc_feature (1)..( 7): Result.004 file - promoters60/5668566
tctgaaa

SEQ ID NO: 149891 - DNA, 13 bp, Unknown
  misc_feature (1)..( 13): Result.004 file - promoters60/5668566
ttcgtttccttaa

SEQ ID NO: 149892 - DNA, 13 bp, Unknown
  misc_feature (1)..( 13): Result.004 file - promoters60/5668566
ttcctttcttaat

SEQ ID NO: 149893 - DNA, 13 bp, Unknown
  misc_feature (1)..( 13): Result.004 file - promoters60/5668566
gaccttttttaat

SEQ ID NO: 149894 - DNA, 11 bp, Unknown
  misc_feature (1)..( 11): Result.004 file - promoters60/5668566
gtttccttaat

SEQ ID NO: 149895 - DNA, 11 bp, Unknown
  misc_feature (1)..( 11): Result.004 file - promoters60/5668566
cctttcttaat

SEQ ID NO: 149896 - DNA, 11 bp, Unknown
  misc_feature (1)..( 11): Result.004 file - promoters60/5668566
ccttttttaat

SEQ ID NO: 149897 - DNA, 6 bp, Unknown
  misc_feature (1)..( 6): Result.004 file - promoters60/5668566
aaatta

SEQ ID NO: 149898 - DNA, 6 bp, Unknown
  misc_feature (1)..( 6): Result.004 file - promoters60/5668566
aaatta

SEQ ID NO: 149899 - DNA, 6 bp, Unknown
  misc_feature (1)..( 6): Result.004 file - promoters60/5668566
aattag

SEQ ID NO: 149900 - DNA, 6 bp, Unknown
  misc_feature (1)..( 6): Result.004 file - promoters60/5668566
aattag

SEQ ID NO: 149901 - DNA, 6 bp, Unknown
  misc_feature (1)..( 6): Result.004 file - promoters60/5668566
tgcaaa

SEQ ID NO: 149902 - DNA, 6 bp, Unknown
  misc_feature (1)..( 6): Result.004 file - promoters60/5668566
tgcaaa

SEQ ID NO: 149903 - DNA, 7 bp, Unknown
  misc_feature (1)..( 7): Result.004 file - promoters60/5668566
attaaaa

SEQ ID NO: 149904 - DNA, 7 bp, Unknown
  misc_feature (1)..( 7): Result.004 file - promoters60/5668566
atttaaa

SEQ ID NO: 149905 - DNA, 8 bp, Unknown
  misc_feature (1)..( 8): Result.004 file - promoters60/5668566
agtaacac

SEQ ID NO: 149906 - DNA, 8 bp, Unknown
  misc_feature (1)..( 8): Result.004 file - promoters60/5668566
agtcacac

SEQ ID NO: 149907 - DNA, 7 bp, Unknown
  misc_feature (1)..( 7): Result.004 file - promoters60/5668566
atatagt

SEQ ID NO: 149908 - DNA, 7 bp, Unknown
  misc_feature (1)..( 7): Result.004 file - promoters60/5668566
atatagt

SEQ ID NO: 149909 - DNA, 7 bp, Unknown
  misc_feature (1)..( 7): Result.004 file - promoters60/5668566
ttttata

SEQ ID NO: 149910 - DNA, 7 bp, Unknown
  misc_feature (1)..( 7): Result.004 file - promoters60/5668566
tttaata

SEQ ID NO: 149911 - DNA, 6 bp, Unknown
  misc_feature (1)..( 6): Result.004 file - promoters60/5668566
ttaatt

SEQ ID NO: 149912 - DNA, 6 bp, Unknown
  misc_feature (1)..( 6): Result.004 file - promoters60/5668566
ttaatt

SEQ ID NO: 149913 - DNA, 7 bp, Unknown
  misc_feature (1)..( 7): Result.004 file - promoters60/5668566
aatcatt

SEQ ID NO: 149914 - DNA, 7 bp, Unknown
  misc_feature (1)..( 7): Result.004 file - promoters60/5668566
aatgatt

SEQ ID NO: 149915 - DNA, 6 bp, Unknown
  misc_feature (1)..( 6): Result.004 file - promoters60/5668566
gcttta

SEQ ID NO: 149916 - DNA, 6 bp, Unknown
  misc_feature (1)..( 6): Result.004 file - promoters60/5668566
gcttta

SEQ ID NO: 149917 - DNA, 8 bp, Unknown
  misc_feature (1)..( 8): Result.004 file - promoters60/5668566
ggtcttaa

SEQ ID NO: 149918 - DNA, 8 bp, Unknown
  misc_feature (1)..( 8): Result.004 file - promoters60/5668566
ggtcataa

SEQ ID NO: 149919 - DNA, 7 bp, Unknown
  misc_feature (1)..( 7): Result.004 file - promoters60/5668566
gttctct

SEQ ID NO: 149920 - DNA, 7 bp, Unknown
  misc_feature (1)..( 7): Result.004 file - promoters60/5668592
gttatct

SEQ ID NO: 149921 - DNA, 9 bp, Unknown
  misc_feature (1)..( 9): Result.004 file - promoters60/5668592
tgagctgtt

SEQ ID NO: 149922 - DNA, 9 bp, Unknown
  misc_feature (1)..( 9): Result.004 file - promoters60/5668592
tgatctgtt

SEQ ID NO: 149923 - DNA, 8 bp, Unknown
  misc_feature (1)..( 8): Result.004 file - promoters60/5668592
attacttc

SEQ ID NO: 149924 - DNA, 8 bp, Unknown
  misc_feature (1)..( 8): Result.004 file - promoters60/5668592
atttcttc

SEQ ID NO: 149925 - DNA, 7 bp, Unknown
  misc_feature (1)..( 7): Result.004 file - promoters60/5668592
agcaaat

SEQ ID NO: 149926 - DNA, 7 bp, Unknown
  misc_feature (1)..( 7): Result.004 file - promoters60/5668592
agctaat

SEQ ID NO: 149927 - DNA, 9 bp, Unknown
  misc_feature (1)..( 9): Result.004 file - promoters60/5668592
aaataagct

SEQ ID NO: 149928 - DNA, 9 bp, Unknown
  misc_feature (1)..( 9): Result.004 file - promoters60/5668592
aaaaaagct

SEQ ID NO: 149929 - DNA, 7 bp, Unknown
  misc_feature (1)..( 7): Result.004 file - promoters60/5668592
taaaggg

SEQ ID NO: 149930 - DNA, 7 bp, Unknown
  misc_feature (1)..( 7): Result.004 file - promoters60/5668592
taaaggg

SEQ ID NO: 149931 - DNA, 6 bp, Unknown
  misc_feature (1)..( 6): Result.004 file - promoters60/5668592
tgtctc

SEQ ID NO: 149932 - DNA, 6 bp, Unknown
  misc_feature (1)..( 6): Result.004 file - promoters60/5668592
tgtctc

SEQ ID NO: 149933 - DNA, 6 bp, Unknown
  misc_feature (1)..( 6): Result.004 file - promoters60/5668592
cctctg

SEQ ID NO: 149934 - DNA, 6 bp, Unknown
  misc_feature (1)..( 6): Result.004 file - promoters60/5668592
cctctg

SEQ ID NO: 149935 - DNA, 7 bp, Unknown
  misc_feature (1)..( 7): Result.004 file - promoters60/5668592
gtgacat

SEQ ID NO: 149936 - DNA, 7 bp, Unknown
  misc_feature (1)..( 7): Result.004 file - promoters60/5668592
gtgacat

SEQ ID NO: 149937 - DNA, 7 bp, Unknown
  misc_feature (1)..( 7): Result.004 file - promoters60/5668592
taacaat

SEQ ID NO: 149938 - DNA, 7 bp, Unknown
  misc_feature (1)..( 7): Result.004 file - promoters60/5668592
taataat

SEQ ID NO: 149939 - DNA, 6 bp, Unknown
  misc_feature (1)..( 6): Result.004 file - promoters60/5668592
tgtttc

SEQ ID NO: 149940 - DNA, 6 bp, Unknown
  misc_feature (1)..( 6): Result.004 file - promoters60/5668592
tgtttc

SEQ ID NO: 149941 - DNA, 6 bp, Unknown
  misc_feature (1)..( 6): Result.004 file - promoters60/5668592
ggtccc

SEQ ID NO: 149942 - DNA, 6 bp, Unknown
  misc_feature (1)..( 6): Result.004 file - promoters60/5668592
ggtccc

SEQ ID NO: 149943 - DNA, 6 bp, Unknown
  misc_feature (1)..( 6): Result.004 file - promoters60/5668592
tattat

SEQ ID NO: 149944 - DNA, 6 bp, Unknown
  misc_feature (1)..( 6): Result.004 file - promoters60/5668592
tattat

SEQ ID NO: 149945 - DNA, 7 bp, Unknown
  misc_feature (1)..( 7): Result.004 file - promoters60/5668592
tacatat

SEQ ID NO: 149946 - DNA, 7 bp, Unknown
  misc_feature (1)..( 7): Result.004 file - promoters60/5668592
tacttat

SEQ ID NO: 149947 - DNA, 6 bp, Unknown
  misc_feature (1)..( 6): Result.004 file - promoters60/5668592
attctt

SEQ ID NO: 149948 - DNA, 6 bp, Unknown
  misc_feature (1)..( 6): Result.004 file - promoters60/5668592
attctt

SEQ ID NO: 149949 - DNA, 10 bp, Unknown
  misc_feature (1)..( 10): Result.004 file - promoters60/5668592
taataaaaat

SEQ ID NO: 149950 - DNA, 10 bp, Unknown
  misc_feature (1)..( 10): Result.004 file - promoters60/5668592
taataataat

SEQ ID NO: 149951 - DNA, 8 bp, Unknown
  misc_feature (1)..( 8): Result.004 file - promoters60/5668592
caaaacta

SEQ ID NO: 149952 - DNA, 8 bp, Unknown
  misc_feature (1)..( 8): Result.004 file - promoters60/5668592
caaaacta

SEQ ID NO: 149953 - DNA, 6 bp, Unknown
  misc_feature (1)..( 6): Result.004 file - promoters60/5668592
aacttc

SEQ ID NO: 149954 - DNA, 6 bp, Unknown
  misc_feature (1)..( 6): Result.004 file - promoters60/5668592
aacttc

SEQ ID NO: 149955 - DNA, 7 bp, Unknown
  misc_feature (1)..( 7): Result.004 file - promoters60/5668592
tcaaggt

SEQ ID NO: 149956 - DNA, 7 bp, Unknown
  misc_feature (1)..( 7): Result.004 file - promoters60/5668592
tcaaggt

SEQ ID NO: 149957 - DNA, 7 bp, Unknown
  misc_feature (1)..( 7): Result.004 file - promoters60/5668592
attttga

SEQ ID NO: 149958 - DNA, 7 bp, Unknown
  misc_feature (1)..( 7): Result.004 file - promoters60/5668629
attatga

SEQ ID NO: 149959 - DNA, 9 bp, Unknown
  misc_feature (1)..( 9): Result.004 file - promoters60/5668629
aaaaatgaa

SEQ ID NO: 149960 - DNA, 9 bp, Unknown
  misc_feature (1)..( 9): Result.004 file - promoters60/5668629
aaaaaagaa

SEQ ID NO: 149961 - DNA, 8 bp, Unknown
  misc_feature (1)..( 8): Result.004 file - promoters60/5668629
aaagtgat

SEQ ID NO: 149962 - DNA, 9 bp, Unknown
  misc_feature (1)..( 9): Result.004 file - promoters60/5668629
gaaaaaggg

SEQ ID NO: 149963 - DNA, 13 bp, Unknown
  misc_feature (1)..( 13): Result.004 file - promoters60/5668629
cacgtgtaagaac

SEQ ID NO: 149964 - DNA, 13 bp, Unknown
  misc_feature (1)..( 13): Result.004 file - promoters60/5668629
cctgtgtaaaatt

SEQ ID NO: 149965 - DNA, 13 bp, Unknown
  misc_feature (1)..( 13): Result.004 file - promoters60/5668629
cacgtataatttg

SEQ ID NO: 149966 - DNA, 13 bp, Unknown
  misc_feature (1)..( 13): Result.004 file - promoters60/5668629
tccttataaattg

SEQ ID NO: 149967 - DNA, 12 bp, Unknown
  misc_feature (1)..( 12): Result.004 file - promoters60/5668629
attcttttatca

SEQ ID NO: 149968 - DNA, 12 bp, Unknown
  misc_feature (1)..( 12): Result.004 file - promoters60/5668629
ttgtttttgtca

SEQ ID NO: 149969 - DNA, 12 bp, Unknown
  misc_feature (1)..( 12): Result.004 file - promoters60/5668629
tcaattttataa

SEQ ID NO: 149970 - DNA, 12 bp, Unknown
  misc_feature (1)..( 12): Result.004 file - promoters60/5668629
ctaattttgtat

SEQ ID NO: 149971 - DNA, 12 bp, Unknown
  misc_feature (1)..( 12): Result.004 file - promoters60/5668629
tcaatcttattg

SEQ ID NO: 149972 - DNA, 12 bp, Unknown
  misc_feature (1)..( 12): Result.004 file - promoters60/5668629
aatatcttaaac

SEQ ID NO: 149973 - DNA, 8 bp, Unknown
  misc_feature (1)..( 8): Result.004 file - promoters60/5668629
atataata

SEQ ID NO: 149974 - DNA, 8 bp, Unknown
  misc_feature (1)..( 8): Result.004 file - promoters60/5668629
ttattata

SEQ ID NO: 149975 - DNA, 8 bp, Unknown
  misc_feature (1)..( 8): Result.004 file - promoters60/5668629
atataata

SEQ ID NO: 149976 - DNA, 8 bp, Unknown
  misc_feature (1)..( 8): Result.004 file - promoters60/5668629
atataaaa

SEQ ID NO: 149977 - DNA, 10 bp, Unknown
  misc_feature (1)..( 10): Result.004 file - promoters60/5668629
ttaattttta

SEQ ID NO: 149978 - DNA, 10 bp, Unknown
  misc_feature (1)..( 10): Result.004 file - promoters60/5668629
tcaattttat

SEQ ID NO: 149979 - DNA, 10 bp, Unknown
  misc_feature (1)..( 10): Result.004 file - promoters60/5668629
ttaattttct

SEQ ID NO: 149980 - DNA, 10 bp, Unknown
  misc_feature (1)..( 10): Result.004 file - promoters60/5668629
tcaatcttat

SEQ ID NO: 149981 - DNA, 9 bp, Unknown
  misc_feature (1)..( 9): Result.004 file - promoters60/5668629
aatttttat

SEQ ID NO: 149982 - DNA, 9 bp, Unknown
  misc_feature (1)..( 9): Result.004 file - promoters60/5668629
caattttat

SEQ ID NO: 149983 - DNA, 10 bp, Unknown
  misc_feature (1)..( 10): Result.004 file - promoters60/5668629
aattttctat

SEQ ID NO: 149984 - DNA, 10 bp, Unknown
  misc_feature (1)..( 10): Result.004 file - promoters60/5668629
tcaatcttat

SEQ ID NO: 149985 - DNA, 7 bp, Unknown
  misc_feature (1)..( 7): Result.004 file - promoters60/5668629
cttcaaa

SEQ ID NO: 149986 - DNA, 7 bp, Unknown
  misc_feature (1)..( 7): Result.004 file - promoters60/5668629
ctttaaa

SEQ ID NO: 149987 - DNA, 7 bp, Unknown
  misc_feature (1)..( 7): Result.004 file - promoters60/5668629
ttttaaa

SEQ ID NO: 149988 - DNA, 8 bp, Unknown
  misc_feature (1)..( 8): Result.004 file - promoters60/5668629
atttgaaa

SEQ ID NO: 149989 - DNA, 8 bp, Unknown
  misc_feature (1)..( 8): Result.004 file - promoters60/5668629
tatttcaa

SEQ ID NO: 149990 - DNA, 8 bp, Unknown
  misc_feature (1)..( 8): Result.004 file - promoters60/5668629
tatttcta

SEQ ID NO: 149991 - DNA, 8 bp, Unknown
  misc_feature (1)..( 8): Result.004 file - promoters60/5668629
aattgcaa

SEQ ID NO: 149992 - DNA, 8 bp, Unknown
  misc_feature (1)..( 8): Result.004 file - promoters60/5668748
tatctctt

SEQ ID NO: 149993 - DNA, 10 bp, Unknown
  misc_feature (1)..( 10): Result.004 file - promoters60/5668748
aaccaaaatg

SEQ ID NO: 149994 - DNA, 10 bp, Unknown
  misc_feature (1)..( 10): Result.004 file - promoters60/5668748
aactaaaaat

SEQ ID NO: 149995 - DNA, 10 bp, Unknown
  misc_feature (1)..( 10): Result.004 file - promoters60/5668748
tttcaaaata

SEQ ID NO: 149996 - DNA, 10 bp, Unknown
  misc_feature (1)..( 10): Result.004 file - promoters60/5668748
gaaaaaaata

SEQ ID NO: 149997 - DNA, 14 bp, Unknown
  misc_feature (1)..( 14): Result.004 file - promoters60/5668748
acattaatatgaga

SEQ ID NO: 149998 - DNA, 14 bp, Unknown
  misc_feature (1)..( 14): Result.004 file - promoters60/5668748
acaataatagtata

SEQ ID NO: 149999 - DNA, 14 bp, Unknown
  misc_feature (1)..( 14): Result.004 file - promoters60/5668748
ctgataaaatgcta

SEQ ID NO: 150000 - DNA, 14 bp, Unknown
  misc_feature (1)..( 14): Result.004 file - promoters60/5668748
aagataaaacttta

SEQ ID NO: 150001 - DNA, 8 bp, Unknown
  misc_feature (1)..( 8): Result.004 file - promoters60/5668748
taaaaata

SEQ ID NO: 150002 - DNA, 8 bp, Unknown
  misc_feature (1)..( 8): Result.004 file - promoters60/5668748
ataaaata

SEQ ID NO: 150003 - DNA, 8 bp, Unknown
  misc_feature (1)..( 8): Result.004 file - promoters60/5668748
gaaaaatg

SEQ ID NO: 150004 - DNA, 8 bp, Unknown
  misc_feature (1)..( 8): Result.004 file - promoters60/5668748
ataaaatg

SEQ ID NO: 150005 - DNA, 9 bp, Unknown
  misc_feature (1)..( 9): Result.004 file - promoters60/5668748
tgagaaact

SEQ ID NO: 150006 - DNA, 9 bp, Unknown
  misc_feature (1)..( 9): Result.004 file - promoters60/5668748
tgataaaat

SEQ ID NO: 150007 - DNA, 9 bp, Unknown
  misc_feature (1)..( 9): Result.004 file - promoters60/5668748
gtataaaat

SEQ ID NO: 150008 - DNA, 9 bp, Unknown
  misc_feature (1)..( 9): Result.004 file - promoters60/5668748
agataaaac

SEQ ID NO: 150009 - DNA, 9 bp, Unknown
  misc_feature (1)..( 9): Result.004 file - promoters60/5668748
aaaaatata

SEQ ID NO: 150010 - DNA, 9 bp, Unknown
  misc_feature (1)..( 9): Result.004 file - promoters60/5668748
aaaaaaata

SEQ ID NO: 150011 - DNA, 9 bp, Unknown
  misc_feature (1)..( 9): Result.004 file - promoters60/5668748
caaaatatg

SEQ ID NO: 150012 - DNA, 10 bp, Unknown
  misc_feature (1)..( 10): Result.004 file - promoters60/5668748
tatatttatt

SEQ ID NO: 150013 - DNA, 10 bp, Unknown
  misc_feature (1)..( 10): Result.004 file - promoters60/5668748
tatttttcct

SEQ ID NO: 150014 - DNA, 10 bp, Unknown
  misc_feature (1)..( 10): Result.004 file - promoters60/5668818
aatttttcct

SEQ ID NO: 150015 - DNA, 8 bp, Unknown
  misc_feature (1)..( 8): Result.004 file - promoters60/5668818
ttaattta

SEQ ID NO: 150016 - DNA, 8 bp, Unknown
  misc_feature (1)..( 8): Result.004 file - promoters60/5668818
ataattta

SEQ ID NO: 150017 - DNA, 8 bp, Unknown
  misc_feature (1)..( 8): Result.004 file - promoters60/5668818
atagttta

SEQ ID NO: 150018 - DNA, 10 bp, Unknown
  misc_feature (1)..( 10): Result.004 file - promoters60/5668818
tcagaataag

SEQ ID NO: 150019 - DNA, 10 bp, Unknown
  misc_feature (1)..( 10): Result.004 file - promoters60/5668818
tcataattta

SEQ ID NO: 150020 - DNA, 10 bp, Unknown
  misc_feature (1)..( 10): Result.004 file - promoters60/5668818
cgatagttta

SEQ ID NO: 150021 - DNA, 10 bp, Unknown
  misc_feature (1)..( 10): Result.004 file - promoters60/5668818
aaataattcc

SEQ ID NO: 150022 - DNA, 9 bp, Unknown
  misc_feature (1)..( 9): Result.004 file - promoters60/5668818
ggttttatt

SEQ ID NO: 150023 - DNA, 9 bp, Unknown
  misc_feature (1)..( 9): Result.004 file - promoters60/5668818
agttttatt

SEQ ID NO: 150024 - DNA, 9 bp, Unknown
  misc_feature (1)..( 9): Result.004 file - promoters60/5668818
agttttaac

SEQ ID NO: 150025 - DNA, 8 bp, Unknown
  misc_feature (1)..( 8): Result.004 file - promoters60/5668818
aatagtca

SEQ ID NO: 150026 - DNA, 8 bp, Unknown
  misc_feature (1)..( 8): Result.004 file - promoters60/5668818
tatattca

SEQ ID NO: 150027 - DNA, 8 bp, Unknown
  misc_feature (1)..( 8): Result.004 file - promoters60/5668818
tatcttct

SEQ ID NO: 150028 - DNA, 12 bp, Unknown
  misc_feature (1)..( 12): Result.004 file - promoters60/5668818
ctcctataaatt

SEQ ID NO: 150029 - DNA, 12 bp, Unknown
  misc_feature (1)..( 12): Result.004 file - promoters60/5668818
ctcttatatatt

SEQ ID NO: 150030 - DNA, 12 bp, Unknown
  misc_feature (1)..( 12): Result.004 file - promoters60/5668818
tgtctatatata

SEQ ID NO: 150031 - DNA, 12 bp, Unknown
  misc_feature (1)..( 12): Result.004 file - promoters60/5668818
aatcaaaaaaag

SEQ ID NO: 150032 - DNA, 12 bp, Unknown
  misc_feature (1)..( 12): Result.004 file - promoters60/5668818
aattaaacaaag

SEQ ID NO: 150033 - DNA, 12 bp, Unknown
  misc_feature (1)..( 12): Result.004 file - promoters60/5668818
atttaaacgtaa

SEQ ID NO: 150034 - DNA, 12 bp, Unknown
  misc_feature (1)..( 12): Result.004 file - promoters60/5668818
aaaaaaacaaat

SEQ ID NO: 150035 - DNA, 9 bp, Unknown
  misc_feature (1)..( 9): Result.004 file - promoters60/5668818
attttattt

SEQ ID NO: 150036 - DNA, 9 bp, Unknown
  misc_feature (1)..( 9): Result.004 file - promoters60/5668818
tctttattt

SEQ ID NO: 150037 - DNA, 9 bp, Unknown
  misc_feature (1)..( 9): Result.004 file - promoters60/5668818
attttatct

SEQ ID NO: 150038 - DNA, 10 bp, Unknown
  misc_feature (1)..( 10): Result.004 file - promoters60/5668818
ttttattttt

SEQ ID NO: 150039 - DNA, 10 bp, Unknown
  misc_feature (1)..( 10): Result.004 file - promoters60/5668818
atttattttt

SEQ ID NO: 150040 - DNA, 10 bp, Unknown
  misc_feature (1)..( 10): Result.004 file - promoters60/5668818
atttataatt

SEQ ID NO: 150041 - DNA, 11 bp, Unknown
  misc_feature (1)..( 11): Result.004 file - promoters60/5668818
ttaagtattat

SEQ ID NO: 150042 - DNA, 11 bp, Unknown
  misc_feature (1)..( 11): Result.004 file - promoters60/5668818
ttaaggattaa

SEQ ID NO: 150043 - DNA, 11 bp, Unknown
  misc_feature (1)..( 11): Result.004 file - promoters60/5668836
ttctagattaa

SEQ ID NO: 150044 - DNA, 8 bp, Unknown
  misc_feature (1)..( 8): Result.004 file - promoters60/5668836
ctttccga

SEQ ID NO: 150045 - DNA, 8 bp, Unknown
  misc_feature (1)..( 8): Result.004 file - promoters60/5668836
cttttcga

SEQ ID NO: 150046 - DNA, 9 bp, Unknown
  misc_feature (1)..( 9): Result.004 file - promoters60/5668836
aaatttaag

SEQ ID NO: 150047 - DNA, 9 bp, Unknown
  misc_feature (1)..( 9): Result.004 file - promoters60/5668836
aaatttaag

SEQ ID NO: 150048 - DNA, 9 bp, Unknown
  misc_feature (1)..( 9): Result.004 file - promoters60/5668836
aaatttatt

SEQ ID NO: 150049 - DNA, 7 bp, Unknown
  misc_feature (1)..( 7): Result.004 file - promoters60/5668836
attttat

SEQ ID NO: 150050 - DNA, 7 bp, Unknown
  misc_feature (1)..( 7): Result.004 file - promoters60/5668836
gttttat

SEQ ID NO: 150051 - DNA, 7 bp, Unknown
  misc_feature (1)..( 7): Result.004 file - promoters60/5668836
attttaa

SEQ ID NO: 150052 - DNA, 9 bp, Unknown
  misc_feature (1)..( 9): Result.004 file - promoters60/5668836
aaaaataag

SEQ ID NO: 150053 - DNA, 9 bp, Unknown
  misc_feature (1)..( 9): Result.004 file - promoters60/5668836
aaaattaaa

SEQ ID NO: 150054 - DNA, 9 bp, Unknown
  misc_feature (1)..( 9): Result.004 file - promoters60/5668836
tcgattaaa

SEQ ID NO: 150055 - DNA, 9 bp, Unknown
  misc_feature (1)..( 9): Result.004 file - promoters60/5668836
taataattt

SEQ ID NO: 150056 - DNA, 9 bp, Unknown
  misc_feature (1)..( 9): Result.004 file - promoters60/5668836
taaaaattt

SEQ ID NO: 150057 - DNA, 9 bp, Unknown
  misc_feature (1)..( 9): Result.004 file - promoters60/5668836
gagtagcca

SEQ ID NO: 150058 - DNA, 9 bp, Unknown
  misc_feature (1)..( 9): Result.004 file - promoters60/5668836
aagtaacca

SEQ ID NO: 150059 - DNA, 9 bp, Unknown
  misc_feature (1)..( 9): Result.004 file - promoters60/5668836
aaggaacaa

SEQ ID NO: 150060 - DNA, 7 bp, Unknown
  misc_feature (1)..( 7): Result.004 file - promoters60/5668836
aaattaa

SEQ ID NO: 150061 - DNA, 7 bp, Unknown
  misc_feature (1)..( 7): Result.004 file - promoters60/5668836
aaactaa

SEQ ID NO: 150062 - DNA, 6 bp, Unknown
  misc_feature (1)..( 6): Result.004 file - promoters60/5668836
ataatg

SEQ ID NO: 150063 - DNA, 6 bp, Unknown
  misc_feature (1)..( 6): Result.004 file - promoters60/5668836
ataatg

SEQ ID NO: 150064 - DNA, 7 bp, Unknown
  misc_feature (1)..( 7): Result.004 file - promoters60/5668836
tattaaa

SEQ ID NO: 150065 - DNA, 7 bp, Unknown
  misc_feature (1)..( 7): Result.004 file - promoters60/5668836
tattaaa

SEQ ID NO: 150066 - DNA, 7 bp, Unknown
  misc_feature (1)..( 7): Result.004 file - promoters60/5668836
cgaaaat

SEQ ID NO: 150067 - DNA, 7 bp, Unknown
  misc_feature (1)..( 7): Result.004 file - promoters60/5668836
cgataat

SEQ ID NO: 150068 - DNA, 6 bp, Unknown
  misc_feature (1)..( 6): Result.004 file - promoters60/5668836
atattt

SEQ ID NO: 150069 - DNA, 6 bp, Unknown
  misc_feature (1)..( 6): Result.004 file - promoters60/5668836
atattt

SEQ ID NO: 150070 - DNA, 7 bp, Unknown
  misc_feature (1)..( 7): Result.004 file - promoters60/5668836
tttggca

SEQ ID NO: 150071 - DNA, 7 bp, Unknown
  misc_feature (1)..( 7): Result.004 file - promoters60/5668836
tttagca

SEQ ID NO: 150072 - DNA, 7 bp, Unknown
  misc_feature (1)..( 7): Result.004 file - promoters60/5668836
tcattta

SEQ ID NO: 150073 - DNA, 7 bp, Unknown
  misc_feature (1)..( 7): Result.004 file - promoters60/5668860
tcactta

SEQ ID NO: 150074 - DNA, 9 bp, Unknown
  misc_feature (1)..( 9): Result.004 file - promoters60/5668860
gtgaagatt

SEQ ID NO: 150075 - DNA, 9 bp, Unknown
  misc_feature (1)..( 9): Result.004 file - promoters60/5668860
gtgtagatt

SEQ ID NO: 150076 - DNA, 8 bp, Unknown
  misc_feature (1)..( 8): Result.004 file - promoters60/5668860
catagatt

SEQ ID NO: 150077 - DNA, 8 bp, Unknown
  misc_feature (1)..( 8): Result.004 file - promoters60/5668860
catcgatt

SEQ ID NO: 150078 - DNA, 6 bp, Unknown
  misc_feature (1)..( 6): Result.004 file - promoters60/5668860
taaatt

SEQ ID NO: 150079 - DNA, 6 bp, Unknown
  misc_feature (1)..( 6): Result.004 file - promoters60/5668860
taaatt

SEQ ID NO: 150080 - DNA, 7 bp, Unknown
  misc_feature (1)..( 7): Result.004 file - promoters60/5668860
ttttaat

SEQ ID NO: 150081 - DNA, 7 bp, Unknown
  misc_feature (1)..( 7): Result.004 file - promoters60/5668860
tttaaat

SEQ ID NO: 150082 - DNA, 8 bp, Unknown
  misc_feature (1)..( 8): Result.004 file - promoters60/5668860
ttttattt

SEQ ID NO: 150083 - DNA, 8 bp, Unknown
  misc_feature (1)..( 8): Result.004 file - promoters60/5668860
tttgattt

SEQ ID NO: 150084 - DNA, 8 bp, Unknown
  misc_feature (1)..( 8): Result.004 file - promoters60/5668860
ataaagat

SEQ ID NO: 150085 - DNA, 8 bp, Unknown
  misc_feature (1)..( 8): Result.004 file - promoters60/5668860
ataaggat

SEQ ID NO: 150086 - DNA, 8 bp, Unknown
  misc_feature (1)..( 8): Result.004 file - promoters60/5668860
gataataa

SEQ ID NO: 150087 - DNA, 8 bp, Unknown
  misc_feature (1)..( 8): Result.004 file - promoters60/5668860
gataataa

SEQ ID NO: 150088 - DNA, 7 bp, Unknown
  misc_feature (1)..( 7): Result.004 file - promoters60/5668860
aatagtt

SEQ ID NO: 150089 - DNA, 7 bp, Unknown
  misc_feature (1)..( 7): Result.004 file - promoters60/5668860
aatggtt

SEQ ID NO: 150090 - DNA, 6 bp, Unknown
  misc_feature (1)..( 6): Result.004 file - promoters60/5668860
aatact

SEQ ID NO: 150091 - DNA, 6 bp, Unknown
  misc_feature (1)..( 6): Result.004 file - promoters60/5668860
aatact

SEQ ID NO: 150092 - DNA, 6 bp, Unknown
  misc_feature (1)..( 6): Result.004 file - promoters60/5668860
gaagaa

SEQ ID NO: 150093 - DNA, 6 bp, Unknown
  misc_feature (1)..( 6): Result.004 file - promoters60/5668860
gaagaa

SEQ ID NO: 150094 - DNA, 6 bp, Unknown
  misc_feature (1)..( 6): Result.004 file - promoters60/5668860
ttgcaa

SEQ ID NO: 150095 - DNA, 6 bp, Unknown
  misc_feature (1)..( 6): Result.004 file - promoters60/5668860
ttgcaa

SEQ ID NO: 150096 - DNA, 6 bp, Unknown
  misc_feature (1)..( 6): Result.004 file - promoters60/5668860
aaaaaa

SEQ ID NO: 150097 - DNA, 6 bp, Unknown
  misc_feature (1)..( 6): Result.004 file - promoters60/5668860
aaaaaa

SEQ ID NO: 150098 - DNA, 6 bp, Unknown
  misc_feature (1)..( 6): Result.004 file - promoters60/5668860
tctcta

SEQ ID NO: 150099 - DNA, 6 bp, Unknown
  misc_feature (1)..( 6): Result.004 file - promoters60/5668860
tctcta

SEQ ID NO: 150100 - DNA, 7 bp, Unknown
  misc_feature (1)..( 7): Result.004 file - promoters60/5668860
agtattc

SEQ ID NO: 150101 - DNA, 7 bp, Unknown
  misc_feature (1)..( 7): Result.004 file - promoters60/5668860
agtcttc

SEQ ID NO: 150102 - DNA, 7 bp, Unknown
  misc_feature (1)..( 7): Result.004 file - promoters60/5668860
aaaagaa

SEQ ID NO: 150103 - DNA, 7 bp, Unknown
  misc_feature (1)..( 7): Result.004 file - promoters60/5668860
aaaggaa

SEQ ID NO: 150104 - DNA, 7 bp, Unknown
  misc_feature (1)..( 7): Result.004 file - promoters60/5668860
aatattg

SEQ ID NO: 150105 - DNA, 7 bp, Unknown
  misc_feature (1)..( 7): Result.004 file - promoters60/5668860
aatgttg

SEQ ID NO: 150106 - DNA, 7 bp, Unknown
  misc_feature (1)..( 7): Result.004 file - promoters60/5668860
tttttgt

SEQ ID NO: 150107 - DNA, 7 bp, Unknown
  misc_feature (1)..( 7): Result.004 file - promoters60/5668860
tttgtgt

SEQ ID NO: 150108 - DNA, 6 bp, Unknown
  misc_feature (1)..( 6): Result.004 file - promoters60/5668860
gctttt

SEQ ID NO: 150109 - DNA, 6 bp, Unknown
  misc_feature (1)..( 6): Result.004 file - promoters60/5668860
gctttt

SEQ ID NO: 150110 - DNA, 6 bp, Unknown
  misc_feature (1)..( 6): Result.004 file - promoters60/5668860
aattta

SEQ ID NO: 150111 - DNA, 6 bp, Unknown
  misc_feature (1)..( 6): Result.004 file - promoters60/5668882
aattta

SEQ ID NO: 150112 - DNA, 7 bp, Unknown
  misc_feature (1)..( 7): Result.004 file - promoters60/5668882
tttgtta

SEQ ID NO: 150113 - DNA, 7 bp, Unknown
  misc_feature (1)..( 7): Result.004 file - promoters60/5668882
tttctta

SEQ ID NO: 150114 - DNA, 7 bp, Unknown
  misc_feature (1)..( 7): Result.004 file - promoters60/5668882
tttgatc

SEQ ID NO: 150115 - DNA, 7 bp, Unknown
  misc_feature (1)..( 7): Result.004 file - promoters60/5668882
tttaatc

SEQ ID NO: 150116 - DNA, 7 bp, Unknown
  misc_feature (1)..( 7): Result.004 file - promoters60/5668882
aaatcat

SEQ ID NO: 150117 - DNA, 7 bp, Unknown
  misc_feature (1)..( 7): Result.004 file - promoters60/5668882
aaaacat

SEQ ID NO: 150118 - DNA, 8 bp, Unknown
  misc_feature (1)..( 8): Result.004 file - promoters60/5668882
atatgaaa

SEQ ID NO: 150119 - DNA, 8 bp, Unknown
  misc_feature (1)..( 8): Result.004 file - promoters60/5668882
ataagaaa

SEQ ID NO: 150120 - DNA, 8 bp, Unknown
  misc_feature (1)..( 8): Result.004 file - promoters60/5668882
acaagaaa

SEQ ID NO: 150121 - DNA, 9 bp, Unknown
  misc_feature (1)..( 9): Result.004 file - promoters60/5668882
ctttcatgt

SEQ ID NO: 150122 - DNA, 9 bp, Unknown
  misc_feature (1)..( 9): Result.004 file - promoters60/5668882
cttacatgt

SEQ ID NO: 150123 - DNA, 9 bp, Unknown
  misc_feature (1)..( 9): Result.004 file - promoters60/5668882
ttagtaatt

SEQ ID NO: 150124 - DNA, 9 bp, Unknown
  misc_feature (1)..( 9): Result.004 file - promoters60/5668882
ctagttatt

SEQ ID NO: 150125 - DNA, 9 bp, Unknown
  misc_feature (1)..( 9): Result.004 file - promoters60/5668882
ctagtttac

SEQ ID NO: 150126 - DNA, 7 bp, Unknown
  misc_feature (1)..( 7): Result.004 file - promoters60/5668882
tttaatt

SEQ ID NO: 150127 - DNA, 7 bp, Unknown
  misc_feature (1)..( 7): Result.004 file - promoters60/5668882
tttcatt

SEQ ID NO: 150128 - DNA, 6 bp, Unknown
  misc_feature (1)..( 6): Result.004 file - promoters60/5668882
atatat

SEQ ID NO: 150129 - DNA, 6 bp, Unknown
  misc_feature (1)..( 6): Result.004 file - promoters60/5668882
atatat

SEQ ID NO: 150130 - DNA, 6 bp, Unknown
  misc_feature (1)..( 6): Result.004 file - promoters60/5668882
atatta

SEQ ID NO: 150131 - DNA, 6 bp, Unknown
  misc_feature (1)..( 6): Result.004 file - promoters60/5668882
atatta

SEQ ID NO: 150132 - DNA, 8 bp, Unknown
  misc_feature (1)..( 8): Result.004 file - promoters60/5668882
acggcaaa

SEQ ID NO: 150133 - DNA, 8 bp, Unknown
  misc_feature (1)..( 8): Result.004 file - promoters60/5668882
acgacaaa

SEQ ID NO: 150134 - DNA, 8 bp, Unknown
  misc_feature (1)..( 8): Result.004 file - promoters60/5668882
atttattt

SEQ ID NO: 150135 - DNA, 8 bp, Unknown
  misc_feature (1)..( 8): Result.004 file - promoters60/5668882
attttttt

SEQ ID NO: 150136 - DNA, 7 bp, Unknown
  misc_feature (1)..( 7): Result.004 file - promoters60/5668882
tgtttaa

SEQ ID NO: 150137 - DNA, 7 bp, Unknown
  misc_feature (1)..( 7): Result.004 file - promoters60/5668882
tgtttaa

SEQ ID NO: 150138 - DNA, 8 bp, Unknown
  misc_feature (1)..( 8): Result.004 file - promoters60/5668882
tatcttct

SEQ ID NO: 150139 - DNA, 8 bp, Unknown
  misc_feature (1)..( 8): Result.004 file - promoters60/5668882
tattttct

SEQ ID NO: 150140 - DNA, 7 bp, Unknown
  misc_feature (1)..( 7): Result.004 file - promoters60/5668882
taggtta

SEQ ID NO: 150141 - DNA, 7 bp, Unknown
  misc_feature (1)..( 7): Result.004 file - promoters60/5668882
tagttta

SEQ ID NO: 150142 - DNA, 9 bp, Unknown
  misc_feature (1)..( 9): Result.004 file - promoters60/5668882
aaagtcaaa

SEQ ID NO: 150143 - DNA, 9 bp, Unknown
  misc_feature (1)..( 9): Result.004 file - promoters60/5668882
aaagttaaa

SEQ ID NO: 150144 - DNA, 7 bp, Unknown
  misc_feature (1)..( 7): Result.004 file - promoters60/5668882
cattaaa

SEQ ID NO: 150145 - DNA, 7 bp, Unknown
  misc_feature (1)..( 7): Result.004 file - promoters60/5668882
catcaaa

SEQ ID NO: 150146 - DNA, 8 bp, Unknown
  misc_feature (1)..( 8): Result.004 file - promoters60/5668882
gaagccca

SEQ ID NO: 150147 - DNA, 8 bp, Unknown
  misc_feature (1)..( 8): Result.004 file - promoters60/5668897
gaagccca

SEQ ID NO: 150148 - DNA, 14 bp, Unknown
  misc_feature (1)..( 14): Result.004 file - promoters60/5668897
taaaaatctgagta

SEQ ID NO: 150149 - DNA, 14 bp, Unknown
  misc_feature (1)..( 14): Result.004 file - promoters60/5668897
aaaaaattgaaact

SEQ ID NO: 150150 - DNA, 14 bp, Unknown
  misc_feature (1)..( 14): Result.004 file - promoters60/5668897
taaaaagcgaacaa

SEQ ID NO: 150151 - DNA, 14 bp, Unknown
  misc_feature (1)..( 14): Result.004 file - promoters60/5668897
ataaaatatttaaa

SEQ ID NO: 150152 - DNA, 14 bp, Unknown
  misc_feature (1)..( 14): Result.004 file - promoters60/5668897
caaaaatattgggt

SEQ ID NO: 150153 - DNA, 14 bp, Unknown
  misc_feature (1)..( 14): Result.004 file - promoters60/5668903
tgaaactataatag

SEQ ID NO: 150154 - DNA, 6 bp, Unknown
  misc_feature (1)..( 6): Result.004 file - promoters60/5668903
ataata

SEQ ID NO: 150155 - DNA, 6 bp, Unknown
  misc_feature (1)..( 6): Result.004 file - promoters60/5668903
ataata

SEQ ID NO: 150156 - DNA, 8 bp, Unknown
  misc_feature (1)..( 8): Result.004 file - promoters60/5668903
agacttta

SEQ ID NO: 150157 - DNA, 8 bp, Unknown
  misc_feature (1)..( 8): Result.004 file - promoters60/5668903
agaatttg

SEQ ID NO: 150158 - DNA, 8 bp, Unknown
  misc_feature (1)..( 8): Result.004 file - promoters60/5668903
cgaatttg

SEQ ID NO: 150159 - DNA, 9 bp, Unknown
  misc_feature (1)..( 9): Result.004 file - promoters60/5668903
tttaatttg

SEQ ID NO: 150160 - DNA, 9 bp, Unknown
  misc_feature (1)..( 9): Result.004 file - promoters60/5668903
tttgattgt

SEQ ID NO: 150161 - DNA, 9 bp, Unknown
  misc_feature (1)..( 9): Result.004 file - promoters60/5668903
tttcatttg

SEQ ID NO: 150162 - DNA, 7 bp, Unknown
  misc_feature (1)..( 7): Result.004 file - promoters60/5668903
aaacaat

SEQ ID NO: 150163 - DNA, 7 bp, Unknown
  misc_feature (1)..( 7): Result.004 file - promoters60/5668903
aaaaaat

SEQ ID NO: 150164 - DNA, 8 bp, Unknown
  misc_feature (1)..( 8): Result.004 file - promoters60/5668903
tggcacta

SEQ ID NO: 150165 - DNA, 8 bp, Unknown
  misc_feature (1)..( 8): Result.004 file - promoters60/5668903
tggctcta

SEQ ID NO: 150166 - DNA, 6 bp, Unknown
  misc_feature (1)..( 6): Result.004 file - promoters60/5668903
aaacga

SEQ ID NO: 150167 - DNA, 6 bp, Unknown
  misc_feature (1)..( 6): Result.004 file - promoters60/5668903
aaacga

SEQ ID NO: 150168 - DNA, 9 bp, Unknown
  misc_feature (1)..( 9): Result.004 file - promoters60/5668903
ataataaaa

SEQ ID NO: 150169 - DNA, 9 bp, Unknown
  misc_feature (1)..( 9): Result.004 file - promoters60/5668903
atagtaaaa

SEQ ID NO: 150170 - DNA, 11 bp, Unknown
  misc_feature (1)..( 11): Result.004 file - promoters60/5668903
aaaaaaataaa

SEQ ID NO: 150171 - DNA, 11 bp, Unknown
  misc_feature (1)..( 11): Result.004 file - promoters60/5668903
aaagaaaaaaa

SEQ ID NO: 150172 - DNA, 7 bp, Unknown
  misc_feature (1)..( 7): Result.004 file - promoters60/5668903
ttatata

SEQ ID NO: 150173 - DNA, 7 bp, Unknown
  misc_feature (1)..( 7): Result.004 file - promoters60/5668903
ttatata

SEQ ID NO: 150174 - DNA, 9 bp, Unknown
  misc_feature (1)..( 9): Result.004 file - promoters60/5668903
cttccacaa

SEQ ID NO: 150175 - DNA, 9 bp, Unknown
  misc_feature (1)..( 9): Result.004 file - promoters60/5668903
cttccacaa

SEQ ID NO: 150176 - DNA, 7 bp, Unknown
  misc_feature (1)..( 7): Result.004 file - promoters60/5668903
tatcatt

SEQ ID NO: 150177 - DNA, 7 bp, Unknown
  misc_feature (1)..( 7): Result.004 file - promoters60/5668903
tatgatt

SEQ ID NO: 150178 - DNA, 7 bp, Unknown
  misc_feature (1)..( 7): Result.004 file - promoters60/5668903
ttagatc

SEQ ID NO: 150179 - DNA, 7 bp, Unknown
  misc_feature (1)..( 7): Result.004 file - promoters60/5668903
ttatatc

SEQ ID NO: 150180 - DNA, 6 bp, Unknown
  misc_feature (1)..( 6): Result.004 file - promoters60/5668903
catttg

SEQ ID NO: 150181 - DNA, 6 bp, Unknown
  misc_feature (1)..( 6): Result.004 file - promoters60/5668926
catttg

SEQ ID NO: 150182 - DNA, 7 bp, Unknown
  misc_feature (1)..( 7): Result.004 file - promoters60/5668926
taatttt

SEQ ID NO: 150183 - DNA, 7 bp, Unknown
  misc_feature (1)..( 7): Result.004 file - promoters60/5668926
taatttt

SEQ ID NO: 150184 - DNA, 7 bp, Unknown
  misc_feature (1)..( 7): Result.004 file - promoters60/5668926
gtagaaa

SEQ ID NO: 150185 - DNA, 7 bp, Unknown
  misc_feature (1)..( 7): Result.004 file - promoters60/5668926
gtataaa

SEQ ID NO: 150186 - DNA, 9 bp, Unknown
  misc_feature (1)..( 9): Result.004 file - promoters60/5668926
ctaaattct

SEQ ID NO: 150187 - DNA, 9 bp, Unknown
  misc_feature (1)..( 9): Result.004 file - promoters60/5668926
ctaaagtct

SEQ ID NO: 150188 - DNA, 6 bp, Unknown
  misc_feature (1)..( 6): Result.004 file - promoters60/5668926
tttggt

SEQ ID NO: 150189 - DNA, 6 bp, Unknown
  misc_feature (1)..( 6): Result.004 file - promoters60/5668926
tttggt

SEQ ID NO: 150190 - DNA, 9 bp, Unknown
  misc_feature (1)..( 9): Result.004 file - promoters60/5668926
aattaatat

SEQ ID NO: 150191 - DNA, 9 bp, Unknown
  misc_feature (1)..( 9): Result.004 file - promoters60/5668926
aatgaatat

SEQ ID NO: 150192 - DNA, 6 bp, Unknown
  misc_feature (1)..( 6): Result.004 file - promoters60/5668926
atataa

SEQ ID NO: 150193 - DNA, 6 bp, Unknown
  misc_feature (1)..( 6): Result.004 file - promoters60/5668926
atataa

SEQ ID NO: 150194 - DNA, 8 bp, Unknown
  misc_feature (1)..( 8): Result.004 file - promoters60/5668926
catttaaa

SEQ ID NO: 150195 - DNA, 8 bp, Unknown
  misc_feature (1)..( 8): Result.004 file - promoters60/5668926
gatttaat

SEQ ID NO: 150196 - DNA, 8 bp, Unknown
  misc_feature (1)..( 8): Result.004 file - promoters60/5668926
cattaaaa

SEQ ID NO: 150197 - DNA, 7 bp, Unknown
  misc_feature (1)..( 7): Result.004 file - promoters60/5668926
tttgaat

SEQ ID NO: 150198 - DNA, 7 bp, Unknown
  misc_feature (1)..( 7): Result.004 file - promoters60/5668926
tttgaat

SEQ ID NO: 150199 - DNA, 12 bp, Unknown
  misc_feature (1)..( 12): Result.004 file - promoters60/5668926
caaactgtgaaa

SEQ ID NO: 150200 - DNA, 12 bp, Unknown
  misc_feature (1)..( 12): Result.004 file - promoters60/5668926
aaaaatgtgaaa

SEQ ID NO: 150201 - DNA, 12 bp, Unknown
  misc_feature (1)..( 12): Result.004 file - promoters60/5668926
aaaaataatttt

SEQ ID NO: 150202 - DNA, 7 bp, Unknown
  misc_feature (1)..( 7): Result.004 file - promoters60/5668926
aatctaa

SEQ ID NO: 150203 - DNA, 7 bp, Unknown
  misc_feature (1)..( 7): Result.004 file - promoters60/5668926
aatttaa

SEQ ID NO: 150204 - DNA, 11 bp, Unknown
  misc_feature (1)..( 11): Result.004 file - promoters60/5668926
ccaaatttggt

SEQ ID NO: 150205 - DNA, 11 bp, Unknown
  misc_feature (1)..( 11): Result.004 file - promoters60/5668926
ccaattttaag

SEQ ID NO: 150206 - DNA, 11 bp, Unknown
  misc_feature (1)..( 11): Result.004 file - promoters60/5668926
attattctaag

SEQ ID NO: 150207 - DNA, 8 bp, Unknown
  misc_feature (1)..( 8): Result.004 file - promoters60/5668926
aatataaa

SEQ ID NO: 150208 - DNA, 8 bp, Unknown
  misc_feature (1)..( 8): Result.004 file - promoters60/5668926
aatagaaa

SEQ ID NO: 150209 - DNA, 9 bp, Unknown
  misc_feature (1)..( 9): Result.004 file - promoters60/5668926
tatataata

SEQ ID NO: 150210 - DNA, 9 bp, Unknown
  misc_feature (1)..( 9): Result.004 file - promoters60/5668926
tataaaata

SEQ ID NO: 150211 - DNA, 6 bp, Unknown
  misc_feature (1)..( 6): Result.004 file - promoters60/5668926
cccaaa

SEQ ID NO: 150212 - DNA, 6 bp, Unknown
  misc_feature (1)..( 6): Result.004 file - promoters60/5668926
cccaaa

SEQ ID NO: 150213 - DNA, 6 bp, Unknown
  misc_feature (1)..( 6): Result.004 file - promoters60/5668926
attttt

SEQ ID NO: 150214 - DNA, 6 bp, Unknown
  misc_feature (1)..( 6): Result.004 file - promoters60/5668926
attttt

SEQ ID NO: 150215 - DNA, 8 bp, Unknown
  misc_feature (1)..( 8): Result.004 file - promoters60/5668926
ttttaata

SEQ ID NO: 150216 - DNA, 8 bp, Unknown
  misc_feature (1)..( 8): Result.004 file - promoters60/5668926
ttttaata

SEQ ID NO: 150217 - DNA, 10 bp, Unknown
  misc_feature (1)..( 10): Result.004 file - promoters60/5668926
tatctgagaa

SEQ ID NO: 150218 - DNA, 10 bp, Unknown
  misc_feature (1)..( 10): Result.004 file - promoters60/5668926
tatcttagaa

SEQ ID NO: 150219 - DNA, 10 bp, Unknown
  misc_feature (1)..( 10): Result.004 file - promoters60/5668926
agtctatata

SEQ ID NO: 150220 - DNA, 10 bp, Unknown
  misc_feature (1)..( 10): Result.004 file - promoters60/5668926
agtctctata

SEQ ID NO: 150221 - DNA, 7 bp, Unknown
  misc_feature (1)..( 7): Result.004 file - promoters60/5668926
tgatatg

SEQ ID NO: 150222 - DNA, 7 bp, Unknown
  misc_feature (1)..( 7): Result.004 file - promoters60/5668926
tgaaatg

SEQ ID NO: 150223 - DNA, 6 bp, Unknown
  misc_feature (1)..( 6): Result.004 file - promoters60/5668926
aacatt

SEQ ID NO: 150224 - DNA, 6 bp, Unknown
  misc_feature (1)..( 6): Result.004 file - promoters60/5668926
aacatt

SEQ ID NO: 150225 - DNA, 7 bp, Unknown
  misc_feature (1)..( 7): Result.004 file - promoters60/5668926
tctcttt

SEQ ID NO: 150226 - DNA, 7 bp, Unknown
  misc_feature (1)..( 7): Result.004 file - promoters60/5668926
tctgttt

SEQ ID NO: 150227 - DNA, 8 bp, Unknown
  misc_feature (1)..( 8): Result.004 file - promoters60/5668926
cttcttct

SEQ ID NO: 150228 - DNA, 8 bp, Unknown
  misc_feature (1)..( 8): Result.004 file - promoters60/5668951
cttcctct

SEQ ID NO: 150229 - DNA, 8 bp, Unknown
  misc_feature (1)..( 8): Result.004 file - promoters60/5668951
caaaccaa

SEQ ID NO: 150230 - DNA, 8 bp, Unknown
  misc_feature (1)..( 8): Result.004 file - promoters60/5668951
caaaacaa

SEQ ID NO: 150231 - DNA, 8 bp, Unknown
  misc_feature (1)..( 8): Result.004 file - promoters60/5668951
aaaaacaa

SEQ ID NO: 150232 - DNA, 8 bp, Unknown
  misc_feature (1)..( 8): Result.004 file - promoters60/5668951
taaaccaa

SEQ ID NO: 150233 - DNA, 8 bp, Unknown
  misc_feature (1)..( 8): Result.004 file - promoters60/5668951
tttcaatt

SEQ ID NO: 150234 - DNA, 8 bp, Unknown
  misc_feature (1)..( 8): Result.004 file - promoters60/5668951
attcaatg

SEQ ID NO: 150235 - DNA, 8 bp, Unknown
  misc_feature (1)..( 8): Result.004 file - promoters60/5668951
ttttaatt

SEQ ID NO: 150236 - DNA, 8 bp, Unknown
  misc_feature (1)..( 8): Result.004 file - promoters60/5668951
attcaact

SEQ ID NO: 150237 - DNA, 7 bp, Unknown
  misc_feature (1)..( 7): Result.004 file - promoters60/5668951
cttttct

SEQ ID NO: 150238 - DNA, 7 bp, Unknown
  misc_feature (1)..( 7): Result.004 file - promoters60/5668951
cttatct

SEQ ID NO: 150239 - DNA, 7 bp, Unknown
  misc_feature (1)..( 7): Result.004 file - promoters60/5668951
gttatct

SEQ ID NO: 150240 - DNA, 15 bp, Unknown
  misc_feature (1)..( 15): Result.004 file - promoters60/5668951
actaaaataactcac

SEQ ID NO: 150241 - DNA, 15 bp, Unknown
  misc_feature (1)..( 15): Result.004 file - promoters60/5668951
acagaaataaatcac

SEQ ID NO: 150242 - DNA, 15 bp, Unknown
  misc_feature (1)..( 15): Result.004 file - promoters60/5668974
acacaaatatgccaa

SEQ ID NO: 150243 - DNA, 9 bp, Unknown
  misc_feature (1)..( 9): Result.004 file - promoters60/5668974
gtctttttt

SEQ ID NO: 150244 - DNA, 9 bp, Unknown
  misc_feature (1)..( 9): Result.004 file - promoters60/5668974
ttctgtttg

SEQ ID NO: 150245 - DNA, 9 bp, Unknown
  misc_feature (1)..( 9): Result.004 file - promoters60/5668974
aactttttt

SEQ ID NO: 150246 - DNA, 9 bp, Unknown
  misc_feature (1)..( 9): Result.004 file - promoters60/5668974
ttcttttca

SEQ ID NO: 150247 - DNA, 9 bp, Unknown
  misc_feature (1)..( 9): Result.004 file - promoters60/5668974
aacttttgc

SEQ ID NO: 150248 - DNA, 9 bp, Unknown
  misc_feature (1)..( 9): Result.004 file - promoters60/5668974
aaatttttt

SEQ ID NO: 150249 - DNA, 9 bp, Unknown
  misc_feature (1)..( 9): Result.004 file - promoters60/5668974
aaactttaa

SEQ ID NO: 150250 - DNA, 9 bp, Unknown
  misc_feature (1)..( 9): Result.004 file - promoters60/5668974
tgatttttt

SEQ ID NO: 150251 - DNA, 9 bp, Unknown
  misc_feature (1)..( 9): Result.004 file - promoters60/5668974
gaattttaa

SEQ ID NO: 150252 - DNA, 10 bp, Unknown
  misc_feature (1)..( 10): Result.004 file - promoters60/5668974
atatttattt

SEQ ID NO: 150253 - DNA, 12 bp, Unknown
  misc_feature (1)..( 12): Result.004 file - promoters60/5668974
atcaaaatgttt

SEQ ID NO: 150254 - DNA, 12 bp, Unknown
  misc_feature (1)..( 12): Result.004 file - promoters60/5668974
aaaaaaatgctg

SEQ ID NO: 150255 - DNA, 12 bp, Unknown
  misc_feature (1)..( 12): Result.004 file - promoters60/5668974
actgaaatattt

SEQ ID NO: 150256 - DNA, 12 bp, Unknown
  misc_feature (1)..( 12): Result.004 file - promoters60/5668974
atccaaattcac

SEQ ID NO: 150257 - DNA, 12 bp, Unknown
  misc_feature (1)..( 12): Result.004 file - promoters60/5668974
ttttacatattt

SEQ ID NO: 150258 - DNA, 10 bp, Unknown
  misc_feature (1)..( 10): Result.004 file - promoters60/5668974
agcaagttac

SEQ ID NO: 150259 - DNA, 10 bp, Unknown
  misc_feature (1)..( 10): Result.004 file - promoters60/5668974
accaaattac

SEQ ID NO: 150260 - DNA, 10 bp, Unknown
  misc_feature (1)..( 10): Result.004 file - promoters60/5668974
ggcaatttaa

SEQ ID NO: 150261 - DNA, 10 bp, Unknown
  misc_feature (1)..( 10): Result.004 file - promoters60/5668974
ggcaatattt

SEQ ID NO: 150262 - DNA, 10 bp, Unknown
  misc_feature (1)..( 10): Result.004 file - promoters60/5668974
aacaattttt

SEQ ID NO: 150263 - DNA, 13 bp, Unknown
  misc_feature (1)..( 13): Result.004 file - promoters60/5668974
atataccaaacta

SEQ ID NO: 150264 - DNA, 13 bp, Unknown
  misc_feature (1)..( 13): Result.004 file - promoters60/5668974
aaataacaatata

SEQ ID NO: 150265 - DNA, 13 bp, Unknown
  misc_feature (1)..( 13): Result.004 file - promoters60/5668974
taataatatgatt

SEQ ID NO: 150266 - DNA, 13 bp, Unknown
  misc_feature (1)..( 13): Result.004 file - promoters60/5668974
ttataccaaaata

SEQ ID NO: 150267 - DNA, 13 bp, Unknown
  misc_feature (1)..( 13): Result.004 file - promoters60/5668990
gaatcacataatt

SEQ ID NO: 150268 - DNA, 11 bp, Unknown
  misc_feature (1)..( 11): Result.004 file - promoters60/5668990
tagattttgtt

SEQ ID NO: 150269 - DNA, 11 bp, Unknown
  misc_feature (1)..( 11): Result.004 file - promoters60/5668990
tagagtttaga

SEQ ID NO: 150270 - DNA, 11 bp, Unknown
  misc_feature (1)..( 11): Result.004 file - promoters60/5668990
aaccgtttgat

SEQ ID NO: 150271 - DNA, 11 bp, Unknown
  misc_feature (1)..( 11): Result.004 file - promoters60/5668990
cagatttagat

SEQ ID NO: 150272 - DNA, 9 bp, Unknown
  misc_feature (1)..( 9): Result.004 file - promoters60/5668990
acgtagtat

SEQ ID NO: 150273 - DNA, 9 bp, Unknown
  misc_feature (1)..( 9): Result.004 file - promoters60/5668990
ttgtagtat

SEQ ID NO: 150274 - DNA, 9 bp, Unknown
  misc_feature (1)..( 9): Result.004 file - promoters60/5668990
tcgtggtag

SEQ ID NO: 150275 - DNA, 9 bp, Unknown
  misc_feature (1)..( 9): Result.004 file - promoters60/5669010
ttgaagttt

SEQ ID NO: 150276 - DNA, 7 bp, Unknown
  misc_feature (1)..( 7): Result.004 file - promoters60/5669010
ctcgtga

SEQ ID NO: 150277 - DNA, 7 bp, Unknown
  misc_feature (1)..( 7): Result.004 file - promoters60/5669010
ctcatga

SEQ ID NO: 150278 - DNA, 7 bp, Unknown
  misc_feature (1)..( 7): Result.004 file - promoters60/5669010
aagaaaa

SEQ ID NO: 150279 - DNA, 7 bp, Unknown
  misc_feature (1)..( 7): Result.004 file - promoters60/5669010
aagtaaa

SEQ ID NO: 150280 - DNA, 8 bp, Unknown
  misc_feature (1)..( 8): Result.004 file - promoters60/5669010
atgaaaat

SEQ ID NO: 150281 - DNA, 8 bp, Unknown
  misc_feature (1)..( 8): Result.004 file - promoters60/5669010
atgtaaat

SEQ ID NO: 150282 - DNA, 6 bp, Unknown
  misc_feature (1)..( 6): Result.004 file - promoters60/5669010
tgttac

SEQ ID NO: 150283 - DNA, 6 bp, Unknown
  misc_feature (1)..( 6): Result.004 file - promoters60/5669010
tgttac

SEQ ID NO: 150284 - DNA, 8 bp, Unknown
  misc_feature (1)..( 8): Result.004 file - promoters60/5669010
tttataaa

SEQ ID NO: 150285 - DNA, 8 bp, Unknown
  misc_feature (1)..( 8): Result.004 file - promoters60/5669010
tttttaaa

SEQ ID NO: 150286 - DNA, 7 bp, Unknown
  misc_feature (1)..( 7): Result.004 file - promoters60/5669010
cccgtct

SEQ ID NO: 150287 - DNA, 7 bp, Unknown
  misc_feature (1)..( 7): Result.004 file - promoters60/5669010
cccatct

SEQ ID NO: 150288 - DNA, 7 bp, Unknown
  misc_feature (1)..( 7): Result.004 file - promoters60/5669010
tgtttat

SEQ ID NO: 150289 - DNA, 7 bp, Unknown
  misc_feature (1)..( 7): Result.004 file - promoters60/5669010
tgtctat

SEQ ID NO: 150290 - DNA, 7 bp, Unknown
  misc_feature (1)..( 7): Result.004 file - promoters60/5669010
ttgcttg

SEQ ID NO: 150291 - DNA, 7 bp, Unknown
  misc_feature (1)..( 7): Result.004 file - promoters60/5669010
ttggttg

SEQ ID NO: 150292 - DNA, 6 bp, Unknown
  misc_feature (1)..( 6): Result.004 file - promoters60/5669010
tgattt

SEQ ID NO: 150293 - DNA, 6 bp, Unknown
  misc_feature (1)..( 6): Result.004 file - promoters60/5669010
tgattt

SEQ ID NO: 150294 - DNA, 6 bp, Unknown
  misc_feature (1)..( 6): Result.004 file - promoters60/5669010
ttgtgt

SEQ ID NO: 150295 - DNA, 6 bp, Unknown
  misc_feature (1)..( 6): Result.004 file - promoters60/5669010
ttgtgt

SEQ ID NO: 150296 - DNA, 6 bp, Unknown
  misc_feature (1)..( 6): Result.004 file - promoters60/5669010
tcttct

SEQ ID NO: 150297 - DNA, 6 bp, Unknown
  misc_feature (1)..( 6): Result.004 file - promoters60/5669013
tcttct

SEQ ID NO: 150298 - DNA, 8 bp, Unknown
  misc_feature (1)..( 8): Result.004 file - promoters60/5669013
aaatcttt

SEQ ID NO: 150299 - DNA, 8 bp, Unknown
  misc_feature (1)..( 8): Result.004 file - promoters60/5669013
aaatattt

SEQ ID NO: 150300 - DNA, 9 bp, Unknown
  misc_feature (1)..( 9): Result.004 file - promoters60/5669013
aaattctct

SEQ ID NO: 150301 - DNA, 9 bp, Unknown
  misc_feature (1)..( 9): Result.004 file - promoters60/5669013
atattatat

SEQ ID NO: 150302 - DNA, 9 bp, Unknown
  misc_feature (1)..( 9): Result.004 file - promoters60/5669013
gtattataa

SEQ ID NO: 150303 - DNA, 9 bp, Unknown
  misc_feature (1)..( 9): Result.004 file - promoters60/5669508
atactatat

SEQ ID NO: 150304 - DNA, 11 bp, Unknown
  misc_feature (1)..( 11): Result.004 file - promoters60/5669508
cttgtttatat

SEQ ID NO: 150305 - DNA, 11 bp, Unknown
  misc_feature (1)..( 11): Result.004 file - promoters60/5669508
tttggttacaa

SEQ ID NO: 150306 - DNA, 11 bp, Unknown
  misc_feature (1)..( 11): Result.004 file - promoters60/5669508
cgagtttattt

SEQ ID NO: 150307 - DNA, 11 bp, Unknown
  misc_feature (1)..( 11): Result.004 file - promoters60/5669508
cttgtttactg

SEQ ID NO: 150308 - DNA, 11 bp, Unknown
  misc_feature (1)..( 11): Result.004 file - promoters60/5669508
acggtttgctg

SEQ ID NO: 150309 - DNA, 11 bp, Unknown
  misc_feature (1)..( 11): Result.004 file - promoters60/5669546
attttttttat

SEQ ID NO: 150310 - DNA, 7 bp, Unknown
  misc_feature (1)..( 7): Result.004 file - promoters60/5669546
gttcctt

SEQ ID NO: 150311 - DNA, 7 bp, Unknown
  misc_feature (1)..( 7): Result.004 file - promoters60/5669546
gtttctt

SEQ ID NO: 150312 - DNA, 7 bp, Unknown
  misc_feature (1)..( 7): Result.004 file - promoters60/5669546
gttcctc

SEQ ID NO: 150313 - DNA, 8 bp, Unknown
  misc_feature (1)..( 8): Result.004 file - promoters60/5669546
aaatgtta

SEQ ID NO: 150314 - DNA, 8 bp, Unknown
  misc_feature (1)..( 8): Result.004 file - promoters60/5669546
aaaagttt

SEQ ID NO: 150315 - DNA, 8 bp, Unknown
  misc_feature (1)..( 8): Result.004 file - promoters60/5669546
caatttta

SEQ ID NO: 150316 - DNA, 7 bp, Unknown
  misc_feature (1)..( 7): Result.004 file - promoters60/5669546
gttgatt

SEQ ID NO: 150317 - DNA, 7 bp, Unknown
  misc_feature (1)..( 7): Result.004 file - promoters60/5669546
gttgatg

SEQ ID NO: 150318 - DNA, 7 bp, Unknown
  misc_feature (1)..( 7): Result.004 file - promoters60/5669546
gttaatt

SEQ ID NO: 150319 - DNA, 8 bp, Unknown
  misc_feature (1)..( 8): Result.004 file - promoters60/5669546
cgacatgt

SEQ ID NO: 150320 - DNA, 8 bp, Unknown
  misc_feature (1)..( 8): Result.004 file - promoters60/5669546
cgacatta

SEQ ID NO: 150321 - DNA, 8 bp, Unknown
  misc_feature (1)..( 8): Result.004 file - promoters60/5669546
cgacatgt

SEQ ID NO: 150322 - DNA, 8 bp, Unknown
  misc_feature (1)..( 8): Result.004 file - promoters60/5669546
acacatgt

SEQ ID NO: 150323 - DNA, 6 bp, Unknown
  misc_feature (1)..( 6): Result.004 file - promoters60/5669546
acatgt

SEQ ID NO: 150324 - DNA, 6 bp, Unknown
  misc_feature (1)..( 6): Result.004 file - promoters60/5669546
acatgt

SEQ ID NO: 150325 - DNA, 6 bp, Unknown
  misc_feature (1)..( 6): Result.004 file - promoters60/5670300
acatgt

SEQ ID NO: 150326 - DNA, 8 bp, Unknown
  misc_feature (1)..( 8): Result.004 file - promoters60/5670300
caataaaa

SEQ ID NO: 150327 - DNA, 8 bp, Unknown
  misc_feature (1)..( 8): Result.004 file - promoters60/5670300
caaaaaaa

SEQ ID NO: 150328 - DNA, 6 bp, Unknown
  misc_feature (1)..( 6): Result.004 file - promoters60/5670300
aaaaca

SEQ ID NO: 150329 - DNA, 6 bp, Unknown
  misc_feature (1)..( 6): Result.004 file - promoters60/5670300
aaaaca

SEQ ID NO: 150330 - DNA, 8 bp, Unknown
  misc_feature (1)..( 8): Result.004 file - promoters60/5670300
gaattaaa

SEQ ID NO: 150331 - DNA, 8 bp, Unknown
  misc_feature (1)..( 8): Result.004 file - promoters60/5670300
gaaataaa

SEQ ID NO: 150332 - DNA, 7 bp, Unknown
  misc_feature (1)..( 7): Result.004 file - promoters60/5670300
caaattt

SEQ ID NO: 150333 - DNA, 7 bp, Unknown
  misc_feature (1)..( 7): Result.004 file - promoters60/5670300
caatttt

SEQ ID NO: 150334 - DNA, 6 bp, Unknown
  misc_feature (1)..( 6): Result.004 file - promoters60/5670300
ttaaaa

SEQ ID NO: 150335 - DNA, 6 bp, Unknown
  misc_feature (1)..( 6): Result.004 file - promoters60/5670300
ttaaaa

SEQ ID NO: 150336 - DNA, 6 bp, Unknown
  misc_feature (1)..( 6): Result.004 file - promoters60/5670300
gtaacg

SEQ ID NO: 150337 - DNA, 6 bp, Unknown
  misc_feature (1)..( 6): Result.004 file - promoters60/5670300
gtaacg

SEQ ID NO: 150338 - DNA, 7 bp, Unknown
  misc_feature (1)..( 7): Result.004 file - promoters60/5670300
gtggtta

SEQ ID NO: 150339 - DNA, 7 bp, Unknown
  misc_feature (1)..( 7): Result.004 file - promoters60/5670300
gtgttta

SEQ ID NO: 150340 - DNA, 10 bp, Unknown
  misc_feature (1)..( 10): Result.004 file - promoters60/5670300
tacgtgtcaa

SEQ ID NO: 150341 - DNA, 10 bp, Unknown
  misc_feature (1)..( 10): Result.004 file - promoters60/5670300
cacgtgtcat

SEQ ID NO: 150342 - DNA, 10 bp, Unknown
  misc_feature (1)..( 10): Result.004 file - promoters60/5670300
tacgtgtcaa

SEQ ID NO: 150343 - DNA, 20 bp, Unknown
  misc_feature (1)..( 20): Result.004 file - promoters60/5670300
ttggttattgcttcaccgcc

SEQ ID NO: 150344 - DNA, 20 bp, Unknown
  misc_feature (1)..( 20): Result.004 file - promoters60/5670300
ttagctattgcttcaccgcc

SEQ ID NO: 150345 - DNA, 20 bp, Unknown
  misc_feature (1)..( 20): Result.004 file - promoters60/5670300
ttggctattgcttccacgcc

SEQ ID NO: 150346 - DNA, 22 bp, Unknown
  misc_feature (1)..( 22): Result.004 file - promoters60/5670300
tctcgtgaccgactcgtcctcg

SEQ ID NO: 150347 - DNA, 22 bp, Unknown
  misc_feature (1)..( 22): Result.004 file - promoters60/5670300
gacctagtcgtcctcgtctttt

SEQ ID NO: 150348 - DNA, 22 bp, Unknown
  misc_feature (1)..( 22): Result.004 file - promoters60/5670300
gaccgagtcgtcctcgtctttt

SEQ ID NO: 150349 - DNA, 19 bp, Unknown
  misc_feature (1)..( 19): Result.004 file - promoters60/5670300
ttcttcttctataaattaa

SEQ ID NO: 150350 - DNA, 19 bp, Unknown
  misc_feature (1)..( 19): Result.004 file - promoters60/5670300
ttcttcttctataaaacaa

SEQ ID NO: 150351 - DNA, 19 bp, Unknown
  misc_feature (1)..( 19): Result.004 file - promoters60/5670300
ttttgcttctataaatcaa

SEQ ID NO: 150352 - DNA, 6 bp, Unknown
  misc_feature (1)..( 6): Result.004 file - promoters60/5670300
gcttct

SEQ ID NO: 150353 - DNA, 6 bp, Unknown
  misc_feature (1)..( 6): Result.004 file - promoters60/5670300
gcttct

SEQ ID NO: 150354 - DNA, 8 bp, Unknown
  misc_feature (1)..( 8): Result.004 file - promoters60/5670300
ttctggcc

SEQ ID NO: 150355 - DNA, 8 bp, Unknown
  misc_feature (1)..( 8): Result.004 file - promoters60/5670300
ttcttgcc

SEQ ID NO: 150356 - DNA, 7 bp, Unknown
  misc_feature (1)..( 7): Result.004 file - promoters60/5670300
tacatat

SEQ ID NO: 150357 - DNA, 7 bp, Unknown
  misc_feature (1)..( 7): Result.004 file - promoters60/5670300
tacttat

SEQ ID NO: 150358 - DNA, 15 bp, Unknown
  misc_feature (1)..( 15): Result.004 file - promoters60/5670300
cgccttagctttctc

SEQ ID NO: 150359 - DNA, 15 bp, Unknown
  misc_feature (1)..( 15): Result.004 file - promoters60/5670300
cgccttagctttctc

SEQ ID NO: 150360 - DNA, 15 bp, Unknown
  misc_feature (1)..( 15): Result.004 file - promoters60/5670300
cgccttagctttctc

SEQ ID NO: 150361 - DNA, 6 bp, Unknown
  misc_feature (1)..( 6): Result.004 file - promoters60/5670300
tttttt

SEQ ID NO: 150362 - DNA, 6 bp, Unknown
  misc_feature (1)..( 6): Result.004 file - promoters60/5670300
tttttt

SEQ ID NO: 150363 - DNA, 9 bp, Unknown
  misc_feature (1)..( 9): Result.004 file - promoters60/5670300
acaaaaagg

SEQ ID NO: 150364 - DNA, 9 bp, Unknown
  misc_feature (1)..( 9): Result.004 file - promoters60/5670300
acacaaagg

SEQ ID NO: 150365 - DNA, 7 bp, Unknown
  misc_feature (1)..( 7): Result.004 file - promoters60/5670300
acgaaga

SEQ ID NO: 150366 - DNA, 7 bp, Unknown
  misc_feature (1)..( 7): Result.004 file - promoters60/5670300
acgcaga

SEQ ID NO: 150367 - DNA, 6 bp, Unknown
  misc_feature (1)..( 6): Result.004 file - promoters60/5670300
gttcaa

SEQ ID NO: 150368 - DNA, 6 bp, Unknown
  misc_feature (1)..( 6): Result.004 file - promoters60/5670300
gttcaa

SEQ ID NO: 150369 - DNA, 6 bp, Unknown
  misc_feature (1)..( 6): Result.004 file - promoters60/5670300
gtatat

SEQ ID NO: 150370 - DNA, 6 bp, Unknown
  misc_feature (1)..( 6): Result.004 file - promoters60/5670300
gtatat

SEQ ID NO: 150371 - DNA, 9 bp, Unknown
  misc_feature (1)..( 9): Result.004 file - promoters60/5670300
atcttatga

SEQ ID NO: 150372 - DNA, 9 bp, Unknown
  misc_feature (1)..( 9): Result.004 file - promoters60/5670300
atctaatga

SEQ ID NO: 150373 - DNA, 6 bp, Unknown
  misc_feature (1)..( 6): Result.004 file - promoters60/5670300
tcagta

SEQ ID NO: 150374 - DNA, 6 bp, Unknown
  misc_feature (1)..( 6): Result.004 file - promoters60/5670300
tcagta

SEQ ID NO: 150375 - DNA, 6 bp, Unknown
  misc_feature (1)..( 6): Result.004 file - promoters60/5670300
aacaac

SEQ ID NO: 150376 - DNA, 6 bp, Unknown
  misc_feature (1)..( 6): Result.004 file - promoters60/5670300
aacaac

SEQ ID NO: 150377 - DNA, 15 bp, Unknown
  misc_feature (1)..( 15): Result.004 file - promoters60/5670300
aatacccaaagagct

SEQ ID NO: 150378 - DNA, 15 bp, Unknown
  misc_feature (1)..( 15): Result.004 file - promoters60/5670680
aatacccaaagagct

SEQ ID NO: 150379 - DNA, 7 bp, Unknown
  misc_feature (1)..( 7): Result.004 file - promoters60/5670680
tatgttc

SEQ ID NO: 150380 - DNA, 7 bp, Unknown
  misc_feature (1)..( 7): Result.004 file - promoters60/5670680
tatgttc

SEQ ID NO: 150381 - DNA, 7 bp, Unknown
  misc_feature (1)..( 7): Result.004 file - promoters60/5670680
gttttag

SEQ ID NO: 150382 - DNA, 7 bp, Unknown
  misc_feature (1)..( 7): Result.004 file - promoters60/5670680
gttctag

SEQ ID NO: 150383 - DNA, 8 bp, Unknown
  misc_feature (1)..( 8): Result.004 file - promoters60/5670680
ataagata

SEQ ID NO: 150384 - DNA, 8 bp, Unknown
  misc_feature (1)..( 8): Result.004 file - promoters60/5670680
ataatata

SEQ ID NO: 150385 - DNA, 8 bp, Unknown
  misc_feature (1)..( 8): Result.004 file - promoters60/5670680
atatgatt

SEQ ID NO: 150386 - DNA, 6 bp, Unknown
  misc_feature (1)..( 6): Result.004 file - promoters60/5670680
ttttaa

SEQ ID NO: 150387 - DNA, 6 bp, Unknown
  misc_feature (1)..( 6): Result.004 file - promoters60/5670680
ttttaa

SEQ ID NO: 150388 - DNA, 8 bp, Unknown
  misc_feature (1)..( 8): Result.004 file - promoters60/5670680
aaaaaatg

SEQ ID NO: 150389 - DNA, 8 bp, Unknown
  misc_feature (1)..( 8): Result.004 file - promoters60/5670680
aaaatatg

SEQ ID NO: 150390 - DNA, 6 bp, Unknown
  misc_feature (1)..( 6): Result.004 file - promoters60/5670680
agaaat

SEQ ID NO: 150391 - DNA, 6 bp, Unknown
  misc_feature (1)..( 6): Result.004 file - promoters60/5670680
agaaat

SEQ ID NO: 150392 - DNA, 7 bp, Unknown
  misc_feature (1)..( 7): Result.004 file - promoters60/5670680
ataagat

SEQ ID NO: 150393 - DNA, 7 bp, Unknown
  misc_feature (1)..( 7): Result.004 file - promoters60/5670680
ataagat

SEQ ID NO: 150394 - DNA, 9 bp, Unknown
  misc_feature (1)..( 9): Result.004 file - promoters60/5670680
caagacaat

SEQ ID NO: 150395 - DNA, 9 bp, Unknown
  misc_feature (1)..( 9): Result.004 file - promoters60/5670680
caagataat

SEQ ID NO: 150396 - DNA, 6 bp, Unknown
  misc_feature (1)..( 6): Result.004 file - promoters60/5670680
atagta

SEQ ID NO: 150397 - DNA, 6 bp, Unknown
  misc_feature (1)..( 6): Result.004 file - promoters60/5670680
atagta

SEQ ID NO: 150398 - DNA, 6 bp, Unknown
  misc_feature (1)..( 6): Result.004 file - promoters60/5670680
gaaaaa

SEQ ID NO: 150399 - DNA, 6 bp, Unknown
  misc_feature (1)..( 6): Result.004 file - promoters60/5670680
gaaaaa

SEQ ID NO: 150400 - DNA, 8 bp, Unknown
  misc_feature (1)..( 8): Result.004 file - promoters60/5670680
tgatggtg

SEQ ID NO: 150401 - DNA, 8 bp, Unknown
  misc_feature (1)..( 8): Result.004 file - promoters60/5670680
tgaaggtg

SEQ ID NO: 150402 - DNA, 8 bp, Unknown
  misc_feature (1)..( 8): Result.004 file - promoters60/5670680
aaatgttt

SEQ ID NO: 150403 - DNA, 8 bp, Unknown
  misc_feature (1)..( 8): Result.004 file - promoters60/5670680
aaatattt

SEQ ID NO: 150404 - DNA, 9 bp, Unknown
  misc_feature (1)..( 9): Result.004 file - promoters60/5670680
caagctcta

SEQ ID NO: 150405 - DNA, 9 bp, Unknown
  misc_feature (1)..( 9): Result.004 file - promoters60/5670680
caatctcta

SEQ ID NO: 150406 - DNA, 8 bp, Unknown
  misc_feature (1)..( 8): Result.004 file - promoters60/5670680
attttcat

SEQ ID NO: 150407 - DNA, 8 bp, Unknown
  misc_feature (1)..( 8): Result.004 file - promoters60/5670680
attttcat

SEQ ID NO: 150408 - DNA, 8 bp, Unknown
  misc_feature (1)..( 8): Result.004 file - promoters60/5670680
attttttt

SEQ ID NO: 150409 - DNA, 8 bp, Unknown
  misc_feature (1)..( 8): Result.004 file - promoters60/5670680
attttttt

SEQ ID NO: 150410 - DNA, 6 bp, Unknown
  misc_feature (1)..( 6): Result.004 file - promoters60/5670680
tcatat

SEQ ID NO: 150411 - DNA, 6 bp, Unknown
  misc_feature (1)..( 6): Result.004 file - promoters60/5670680
tcatat

SEQ ID NO: 150412 - DNA, 6 bp, Unknown
  misc_feature (1)..( 6): Result.004 file - promoters60/5670680
agaaaa

SEQ ID NO: 150413 - DNA, 6 bp, Unknown
  misc_feature (1)..( 6): Result.004 file - promoters60/5670680
agaaaa

SEQ ID NO: 150414 - DNA, 6 bp, Unknown
  misc_feature (1)..( 6): Result.004 file - promoters60/5670680
tttcaa

SEQ ID NO: 150415 - DNA, 6 bp, Unknown
  misc_feature (1)..( 6): Result.004 file - promoters60/5670680
tttcaa

SEQ ID NO: 150416 - DNA, 8 bp, Unknown
  misc_feature (1)..( 8): Result.004 file - promoters60/5670680
atcaaaat

SEQ ID NO: 150417 - DNA, 8 bp, Unknown
  misc_feature (1)..( 8): Result.004 file - promoters60/5670784
atcacaat

SEQ ID NO: 150418 - DNA, 8 bp, Unknown
  misc_feature (1)..( 8): Result.004 file - promoters60/5670784
attaccaa

SEQ ID NO: 150419 - DNA, 8 bp, Unknown
  misc_feature (1)..( 8): Result.004 file - promoters60/5670784
attaacaa

SEQ ID NO: 150420 - DNA, 7 bp, Unknown
  misc_feature (1)..( 7): Result.004 file - promoters60/5670784
aagaaag

SEQ ID NO: 150421 - DNA, 7 bp, Unknown
  misc_feature (1)..( 7): Result.004 file - promoters60/5670784
aagcaag

SEQ ID NO: 150422 - DNA, 8 bp, Unknown
  misc_feature (1)..( 8): Result.004 file - promoters60/5670784
agatgttc

SEQ ID NO: 150423 - DNA, 8 bp, Unknown
  misc_feature (1)..( 8): Result.004 file - promoters60/5670784
agaggttc

SEQ ID NO: 150424 - DNA, 7 bp, Unknown
  misc_feature (1)..( 7): Result.004 file - promoters60/5670784
actggtg

SEQ ID NO: 150425 - DNA, 7 bp, Unknown
  misc_feature (1)..( 7): Result.004 file - promoters60/5670784
acttgtg

SEQ ID NO: 150426 - DNA, 6 bp, Unknown
  misc_feature (1)..( 6): Result.004 file - promoters60/5670784
catcaa

SEQ ID NO: 150427 - DNA, 6 bp, Unknown
  misc_feature (1)..( 6): Result.004 file - promoters60/5670784
catcaa

SEQ ID NO: 150428 - DNA, 6 bp, Unknown
  misc_feature (1)..( 6): Result.004 file - promoters60/5670784
tatgat

SEQ ID NO: 150429 - DNA, 6 bp, Unknown
  misc_feature (1)..( 6): Result.004 file - promoters60/5670784
tatgat

SEQ ID NO: 150430 - DNA, 9 bp, Unknown
  misc_feature (1)..( 9): Result.004 file - promoters60/5670784
aatgcaaac

SEQ ID NO: 150431 - DNA, 9 bp, Unknown
  misc_feature (1)..( 9): Result.004 file - promoters60/5670784
aatccaaac

SEQ ID NO: 150432 - DNA, 9 bp, Unknown
  misc_feature (1)..( 9): Result.004 file - promoters60/5670784
tttaaaagc

SEQ ID NO: 150433 - DNA, 9 bp, Unknown
  misc_feature (1)..( 9): Result.004 file - promoters60/5670784
tttacaagc

SEQ ID NO: 150434 - DNA, 7 bp, Unknown
  misc_feature (1)..( 7): Result.004 file - promoters60/5670784
aaactga

SEQ ID NO: 150435 - DNA, 7 bp, Unknown
  misc_feature (1)..( 7): Result.004 file - promoters60/5670784
aaattga

SEQ ID NO: 150436 - DNA, 8 bp, Unknown
  misc_feature (1)..( 8): Result.004 file - promoters60/5670784
atttattt

SEQ ID NO: 150437 - DNA, 8 bp, Unknown
  misc_feature (1)..( 8): Result.004 file - promoters60/5670784
attttttt

SEQ ID NO: 150438 - DNA, 8 bp, Unknown
  misc_feature (1)..( 8): Result.004 file - promoters60/5670784
aatagtta

SEQ ID NO: 150439 - DNA, 8 bp, Unknown
  misc_feature (1)..( 8): Result.004 file - promoters60/5670784
aatagtta

SEQ ID NO: 150440 - DNA, 9 bp, Unknown
  misc_feature (1)..( 9): Result.004 file - promoters60/5670784
gttttggct

SEQ ID NO: 150441 - DNA, 9 bp, Unknown
  misc_feature (1)..( 9): Result.004 file - promoters60/5670784
gttttcgct

SEQ ID NO: 150442 - DNA, 6 bp, Unknown
  misc_feature (1)..( 6): Result.004 file - promoters60/5670784
ttaaca

SEQ ID NO: 150443 - DNA, 6 bp, Unknown
  misc_feature (1)..( 6): Result.004 file - promoters60/5670784
ttaaca

SEQ ID NO: 150444 - DNA, 6 bp, Unknown
  misc_feature (1)..( 6): Result.004 file - promoters60/5670784
agatta

SEQ ID NO: 150445 - DNA, 6 bp, Unknown
  misc_feature (1)..( 6): Result.004 file - promoters60/5670784
agatta

SEQ ID NO: 150446 - DNA, 7 bp, Unknown
  misc_feature (1)..( 7): Result.004 file - promoters60/5670784
atcaagc

SEQ ID NO: 150447 - DNA, 7 bp, Unknown
  misc_feature (1)..( 7): Result.004 file - promoters60/5670784
atccagc

SEQ ID NO: 150448 - DNA, 7 bp, Unknown
  misc_feature (1)..( 7): Result.004 file - promoters60/5670784
gtacacc

SEQ ID NO: 150449 - DNA, 7 bp, Unknown
  misc_feature (1)..( 7): Result.004 file - promoters60/5670784
gtaaacc

SEQ ID NO: 150450 - DNA, 6 bp, Unknown
  misc_feature (1)..( 6): Result.004 file - promoters60/5670784
ctgatt

SEQ ID NO: 150451 - DNA, 6 bp, Unknown
  misc_feature (1)..( 6): Result.004 file - promoters60/5670809
ctgatt

SEQ ID NO: 150452 - DNA, 9 bp, Unknown
  misc_feature (1)..( 9): Result.004 file - promoters60/5670809
tcccaaaaa

SEQ ID NO: 150453 - DNA, 9 bp, Unknown
  misc_feature (1)..( 9): Result.004 file - promoters60/5670809
tgacaaaaa

SEQ ID NO: 150454 - DNA, 9 bp, Unknown
  misc_feature (1)..( 9): Result.004 file - promoters60/5670809
tgataaaag

SEQ ID NO: 150455 - DNA, 8 bp, Unknown
  misc_feature (1)..( 8): Result.004 file - promoters60/5670809
agaagagc

SEQ ID NO: 150456 - DNA, 8 bp, Unknown
  misc_feature (1)..( 8): Result.004 file - promoters60/5670809
agacgagg

SEQ ID NO: 150457 - DNA, 8 bp, Unknown
  misc_feature (1)..( 8): Result.004 file - promoters60/5670809
ctaagagc

SEQ ID NO: 150458 - DNA, 9 bp, Unknown
  misc_feature (1)..( 9): Result.004 file - promoters60/5670809
caaaatctt

SEQ ID NO: 150459 - DNA, 9 bp, Unknown
  misc_feature (1)..( 9): Result.004 file - promoters60/5670809
taaaaactt

SEQ ID NO: 150460 - DNA, 9 bp, Unknown
  misc_feature (1)..( 9): Result.004 file - promoters60/5670809
taaaaaaga

SEQ ID NO: 150461 - DNA, 8 bp, Unknown
  misc_feature (1)..( 8): Result.004 file - promoters60/5670809
gcaagtgc

SEQ ID NO: 150462 - DNA, 8 bp, Unknown
  misc_feature (1)..( 8): Result.004 file - promoters60/5670809
gcatgtga

SEQ ID NO: 150463 - DNA, 8 bp, Unknown
  misc_feature (1)..( 8): Result.004 file - promoters60/5671204
atatgtga

SEQ ID NO: 150464 - DNA, 12 bp, Unknown
  misc_feature (1)..( 12): Result.004 file - promoters60/5671204
cttttcaaaaaa

SEQ ID NO: 150465 - DNA, 12 bp, Unknown
  misc_feature (1)..( 12): Result.004 file - promoters60/5671204
ctttttaaatgg

SEQ ID NO: 150466 - DNA, 12 bp, Unknown
  misc_feature (1)..( 12): Result.004 file - promoters60/5671204
gctatcaacaaa

SEQ ID NO: 150467 - DNA, 12 bp, Unknown
  misc_feature (1)..( 12): Result.004 file - promoters60/5671204
atttataaggcc

SEQ ID NO: 150468 - DNA, 12 bp, Unknown
  misc_feature (1)..( 12): Result.004 file - promoters60/5671204
cttttttgaata

SEQ ID NO: 150469 - DNA, 12 bp, Unknown
  misc_feature (1)..( 12): Result.004 file - promoters60/5671204
attgataggtgc

SEQ ID NO: 150470 - DNA, 11 bp, Unknown
  misc_feature (1)..( 11): Result.004 file - promoters60/5671204
acacaaaaata

SEQ ID NO: 150471 - DNA, 11 bp, Unknown
  misc_feature (1)..( 11): Result.004 file - promoters60/5671204
cctcaaaaaag

SEQ ID NO: 150472 - DNA, 11 bp, Unknown
  misc_feature (1)..( 11): Result.004 file - promoters60/5671204
gaacaaaaaaa

SEQ ID NO: 150473 - DNA, 11 bp, Unknown
  misc_feature (1)..( 11): Result.004 file - promoters60/5671204
acacacaaagt

SEQ ID NO: 150474 - DNA, 11 bp, Unknown
  misc_feature (1)..( 11): Result.004 file - promoters60/5671204
cacgaaaaaag

SEQ ID NO: 150475 - DNA, 11 bp, Unknown
  misc_feature (1)..( 11): Result.004 file - promoters60/5671204
aaactaaaacg

SEQ ID NO: 150476 - DNA, 11 bp, Unknown
  misc_feature (1)..( 11): Result.004 file - promoters60/5671204
aaacacaagaa

SEQ ID NO: 150477 - DNA, 11 bp, Unknown
  misc_feature (1)..( 11): Result.004 file - promoters60/5671204
caacacaaaaa

SEQ ID NO: 150478 - DNA, 11 bp, Unknown
  misc_feature (1)..( 11): Result.004 file - promoters60/5671204
aaacacaagaa

SEQ ID NO: 150479 - DNA, 11 bp, Unknown
  misc_feature (1)..( 11): Result.004 file - promoters60/5671204
gaacaaaaaaa

SEQ ID NO: 150480 - DNA, 11 bp, Unknown
  misc_feature (1)..( 11): Result.004 file - promoters60/5671204
acacacaaagt

SEQ ID NO: 150481 - DNA, 11 bp, Unknown
  misc_feature (1)..( 11): Result.004 file - promoters60/5671204
tcacacgaaaa

SEQ ID NO: 150482 - DNA, 11 bp, Unknown
  misc_feature (1)..( 11): Result.004 file - promoters60/5671318
aaactaaaacg

SEQ ID NO: 150483 - DNA, 13 bp, Unknown
  misc_feature (1)..( 13): Result.004 file - promoters60/5671318
tttataaaaccct

SEQ ID NO: 150484 - DNA, 13 bp, Unknown
  misc_feature (1)..( 13): Result.004 file - promoters60/5671318
actattaaagccg

SEQ ID NO: 150485 - DNA, 13 bp, Unknown
  misc_feature (1)..( 13): Result.004 file - promoters60/5671318
tatataaatggcc

SEQ ID NO: 150486 - DNA, 13 bp, Unknown
  misc_feature (1)..( 13): Result.004 file - promoters60/5671318
tatataaatccct

SEQ ID NO: 150487 - DNA, 13 bp, Unknown
  misc_feature (1)..( 13): Result.004 file - promoters60/5671318
attatttaaggcc

SEQ ID NO: 150488 - DNA, 13 bp, Unknown
  misc_feature (1)..( 13): Result.004 file - promoters60/5671318
gtggttaaagctt

SEQ ID NO: 150489 - DNA, 13 bp, Unknown
  misc_feature (1)..( 13): Result.004 file - promoters60/5671318
tatataaagttcc

SEQ ID NO: 150490 - DNA, 12 bp, Unknown
  misc_feature (1)..( 12): Result.004 file - promoters60/5671318
aggaggaagaag

SEQ ID NO: 150491 - DNA, 12 bp, Unknown
  misc_feature (1)..( 12): Result.004 file - promoters60/5671318
ggatagaaaaag

SEQ ID NO: 150492 - DNA, 12 bp, Unknown
  misc_feature (1)..( 12): Result.004 file - promoters60/5671318
ttatataaaata

SEQ ID NO: 150493 - DNA, 12 bp, Unknown
  misc_feature (1)..( 12): Result.004 file - promoters60/5671318
ttatatagtcaa

SEQ ID NO: 150494 - DNA, 12 bp, Unknown
  misc_feature (1)..( 12): Result.004 file - promoters60/5671318
ctatatacgcat

SEQ ID NO: 150495 - DNA, 12 bp, Unknown
  misc_feature (1)..( 12): Result.004 file - promoters60/5671318
ctatgtagatgt

SEQ ID NO: 150496 - DNA, 14 bp, Unknown
  misc_feature (1)..( 14): Result.004 file - promoters60/5671318
ataattttatatat

SEQ ID NO: 150497 - DNA, 14 bp, Unknown
  misc_feature (1)..( 14): Result.004 file - promoters60/5671318
ctaattctataaca

SEQ ID NO: 150498 - DNA, 14 bp, Unknown
  misc_feature (1)..( 14): Result.004 file - promoters60/5671318
atagtttctcttct

SEQ ID NO: 150499 - DNA, 14 bp, Unknown
  misc_feature (1)..( 14): Result.004 file - promoters60/5671318
aaaattatataaga

SEQ ID NO: 150500 - DNA, 14 bp, Unknown
  misc_feature (1)..( 14): Result.004 file - promoters60/5671318
tcgtttgtattatt

SEQ ID NO: 150501 - DNA, 14 bp, Unknown
  misc_feature (1)..( 14): Result.004 file - promoters60/5671338
cagctgatataatc

SEQ ID NO: 150502 - DNA, 9 bp, Unknown
  misc_feature (1)..( 9): Result.004 file - promoters60/5671338
tgaaatttt

SEQ ID NO: 150503 - DNA, 9 bp, Unknown
  misc_feature (1)..( 9): Result.004 file - promoters60/5671338
tttaatttt

SEQ ID NO: 150504 - DNA, 9 bp, Unknown
  misc_feature (1)..( 9): Result.004 file - promoters60/5671338
tgaaacttt

SEQ ID NO: 150505 - DNA, 10 bp, Unknown
  misc_feature (1)..( 10): Result.004 file - promoters60/5671338
tttaatgaat

SEQ ID NO: 150506 - DNA, 10 bp, Unknown
  misc_feature (1)..( 10): Result.004 file - promoters60/5671338
tttaattttt

SEQ ID NO: 150507 - DNA, 10 bp, Unknown
  misc_feature (1)..( 10): Result.004 file - promoters60/5671338
tttaatgaat

SEQ ID NO: 150508 - DNA, 10 bp, Unknown
  misc_feature (1)..( 10): Result.004 file - promoters60/5671338
tattttaaaa

SEQ ID NO: 150509 - DNA, 10 bp, Unknown
  misc_feature (1)..( 10): Result.004 file - promoters60/5671338
tatgttaaat

SEQ ID NO: 150510 - DNA, 10 bp, Unknown
  misc_feature (1)..( 10): Result.004 file - promoters60/5671338
agagttaaaa

SEQ ID NO: 150511 - DNA, 8 bp, Unknown
  misc_feature (1)..( 8): Result.004 file - promoters60/5671338
caaaatta

SEQ ID NO: 150512 - DNA, 8 bp, Unknown
  misc_feature (1)..( 8): Result.004 file - promoters60/5671338
caacatta

SEQ ID NO: 150513 - DNA, 9 bp, Unknown
  misc_feature (1)..( 9): Result.004 file - promoters60/5671338
taataattc

SEQ ID NO: 150514 - DNA, 10 bp, Unknown
  misc_feature (1)..( 10): Result.004 file - promoters60/5671338
gtaaatgtaa

SEQ ID NO: 150515 - DNA, 10 bp, Unknown
  misc_feature (1)..( 10): Result.004 file - promoters60/5671338
caaaatttaa

SEQ ID NO: 150516 - DNA, 10 bp, Unknown
  misc_feature (1)..( 10): Result.004 file - promoters60/5671338
gtaaatgtca

SEQ ID NO: 150517 - DNA, 8 bp, Unknown
  misc_feature (1)..( 8): Result.004 file - promoters60/5671338
ttttcggt

SEQ ID NO: 150518 - DNA, 8 bp, Unknown
  misc_feature (1)..( 8): Result.004 file - promoters60/5671338
attttggt

SEQ ID NO: 150519 - DNA, 8 bp, Unknown
  misc_feature (1)..( 8): Result.004 file - promoters60/5671347
attttgga

SEQ ID NO: 150520 - DNA, 9 bp, Unknown
  misc_feature (1)..( 9): Result.004 file - promoters60/5671347
ttttgtttt

SEQ ID NO: 150521 - DNA, 9 bp, Unknown
  misc_feature (1)..( 9): Result.004 file - promoters60/5671347
cattgttta

SEQ ID NO: 150522 - DNA, 9 bp, Unknown
  misc_feature (1)..( 9): Result.004 file - promoters60/5671347
aattgtttt

SEQ ID NO: 150523 - DNA, 9 bp, Unknown
  misc_feature (1)..( 9): Result.004 file - promoters60/5671347
cattgttga

SEQ ID NO: 150524 - DNA, 9 bp, Unknown
  misc_feature (1)..( 9): Result.004 file - promoters60/5671710
gcttgatga

SEQ ID NO: 150525 - DNA, 9 bp, Unknown
  misc_feature (1)..( 9): Result.004 file - promoters60/5671710
gaaaaagag

SEQ ID NO: 150526 - DNA, 9 bp, Unknown
  misc_feature (1)..( 9): Result.004 file - promoters60/5671710
taaaaagaa

SEQ ID NO: 150527 - DNA, 9 bp, Unknown
  misc_feature (1)..( 9): Result.004 file - promoters60/5671710
gtgaaagag

SEQ ID NO: 150528 - DNA, 9 bp, Unknown
  misc_feature (1)..( 9): Result.004 file - promoters60/5671710
taaatagat

SEQ ID NO: 150529 - DNA, 9 bp, Unknown
  misc_feature (1)..( 9): Result.004 file - promoters60/5671710
taaaaatgt

SEQ ID NO: 150530 - DNA, 10 bp, Unknown
  misc_feature (1)..( 10): Result.004 file - promoters60/5671710
aattttcaat

SEQ ID NO: 150531 - DNA, 10 bp, Unknown
  misc_feature (1)..( 10): Result.004 file - promoters60/5671710
gatttacaag

SEQ ID NO: 150532 - DNA, 10 bp, Unknown
  misc_feature (1)..( 10): Result.004 file - promoters60/5671710
gatttaagtt

SEQ ID NO: 150533 - DNA, 10 bp, Unknown
  misc_feature (1)..( 10): Result.004 file - promoters60/5671710
acaatacaag

SEQ ID NO: 150534 - DNA, 10 bp, Unknown
  misc_feature (1)..( 10): Result.004 file - promoters60/5671955
gatttaccgg

SEQ ID NO: 150535 - DNA, 9 bp, Unknown
  misc_feature (1)..( 9): Result.004 file - promoters60/5671955
taattttac

SEQ ID NO: 150536 - DNA, 9 bp, Unknown
  misc_feature (1)..( 9): Result.004 file - promoters60/5671955
gaatattac

SEQ ID NO: 150537 - DNA, 9 bp, Unknown
  misc_feature (1)..( 9): Result.004 file - promoters60/5671955
taatttact

SEQ ID NO: 150538 - DNA, 6 bp, Unknown
  misc_feature (1)..( 6): Result.004 file - promoters60/5671955
cagaca

SEQ ID NO: 150539 - DNA, 6 bp, Unknown
  misc_feature (1)..( 6): Result.004 file - promoters60/5671955
cagaca

SEQ ID NO: 150540 - DNA, 9 bp, Unknown
  misc_feature (1)..( 9): Result.004 file - promoters60/5671955
caaataaaa

SEQ ID NO: 150541 - DNA, 9 bp, Unknown
  misc_feature (1)..( 9): Result.004 file - promoters60/5671955
caattaaaa

SEQ ID NO: 150542 - DNA, 10 bp, Unknown
  misc_feature (1)..( 10): Result.004 file - promoters60/5671955
atattagaaa

SEQ ID NO: 150543 - DNA, 7 bp, Unknown
  misc_feature (1)..( 7): Result.004 file - promoters60/5671955
atgcgtc

SEQ ID NO: 150544 - DNA, 7 bp, Unknown
  misc_feature (1)..( 7): Result.004 file - promoters60/5671955
atgcgtc

SEQ ID NO: 150545 - DNA, 6 bp, Unknown
  misc_feature (1)..( 6): Result.004 file - promoters60/5671955
ctcaga

SEQ ID NO: 150546 - DNA, 6 bp, Unknown
  misc_feature (1)..( 6): Result.004 file - promoters60/5671955
ctcaga

SEQ ID NO: 150547 - DNA, 7 bp, Unknown
  misc_feature (1)..( 7): Result.004 file - promoters60/5671955
attttaa

SEQ ID NO: 150548 - DNA, 7 bp, Unknown
  misc_feature (1)..( 7): Result.004 file - promoters60/5671955
attttaa

SEQ ID NO: 150549 - DNA, 6 bp, Unknown
  misc_feature (1)..( 6): Result.004 file - promoters60/5671955
tttctt

SEQ ID NO: 150550 - DNA, 6 bp, Unknown
  misc_feature (1)..( 6): Result.004 file - promoters60/5671955
tttctt

SEQ ID NO: 150551 - DNA, 6 bp, Unknown
  misc_feature (1)..( 6): Result.004 file - promoters60/5671955
gaaaaa

SEQ ID NO: 150552 - DNA, 6 bp, Unknown
  misc_feature (1)..( 6): Result.004 file - promoters60/5671955
gaaaaa

SEQ ID NO: 150553 - DNA, 8 bp, Unknown
  misc_feature (1)..( 8): Result.004 file - promoters60/5671955
aatagtaa

SEQ ID NO: 150554 - DNA, 8 bp, Unknown
  misc_feature (1)..( 8): Result.004 file - promoters60/5671955
aataataa

SEQ ID NO: 150555 - DNA, 6 bp, Unknown
  misc_feature (1)..( 6): Result.004 file - promoters60/5671955
aaagga

SEQ ID NO: 150556 - DNA, 6 bp, Unknown
  misc_feature (1)..( 6): Result.004 file - promoters60/5671955
aaagga

SEQ ID NO: 150557 - DNA, 7 bp, Unknown
  misc_feature (1)..( 7): Result.004 file - promoters60/5671955
aacgaag

SEQ ID NO: 150558 - DNA, 7 bp, Unknown
  misc_feature (1)..( 7): Result.004 file - promoters60/5671955
aacaaag

SEQ ID NO: 150559 - DNA, 8 bp, Unknown
  misc_feature (1)..( 8): Result.004 file - promoters60/5671955
attttttt

SEQ ID NO: 150560 - DNA, 8 bp, Unknown
  misc_feature (1)..( 8): Result.004 file - promoters60/5671955
atttattt

SEQ ID NO: 150561 - DNA, 11 bp, Unknown
  misc_feature (1)..( 11): Result.004 file - promoters60/5671955
tactgttttag

SEQ ID NO: 150562 - DNA, 11 bp, Unknown
  misc_feature (1)..( 11): Result.004 file - promoters60/5671955
tactgtattag

SEQ ID NO: 150563 - DNA, 6 bp, Unknown
  misc_feature (1)..( 6): Result.004 file - promoters60/5671955
tataat

SEQ ID NO: 150564 - DNA, 6 bp, Unknown
  misc_feature (1)..( 6): Result.004 file - promoters60/5671955
tataat

SEQ ID NO: 150565 - DNA, 8 bp, Unknown
  misc_feature (1)..( 8): Result.004 file - promoters60/5671955
taatatta

SEQ ID NO: 150566 - DNA, 8 bp, Unknown
  misc_feature (1)..( 8): Result.004 file - promoters60/5672093
taatctta

SEQ ID NO: 150567 - DNA, 8 bp, Unknown
  misc_feature (1)..( 8): Result.004 file - promoters60/5672093
gaaaaaaa

SEQ ID NO: 150568 - DNA, 8 bp, Unknown
  misc_feature (1)..( 8): Result.004 file - promoters60/5672093
gaaaaaag

SEQ ID NO: 150569 - DNA, 9 bp, Unknown
  misc_feature (1)..( 9): Result.004 file - promoters60/5672093
caaacaaat

SEQ ID NO: 150570 - DNA, 9 bp, Unknown
  misc_feature (1)..( 9): Result.004 file - promoters60/5672093
caaagaaag

SEQ ID NO: 150571 - DNA, 9 bp, Unknown
  misc_feature (1)..( 9): Result.004 file - promoters60/5672093
caaaaaaaa

SEQ ID NO: 150572 - DNA, 9 bp, Unknown
  misc_feature (1)..( 9): Result.004 file - promoters60/5672093
caaacacaa

SEQ ID NO: 150573 - DNA, 9 bp, Unknown
  misc_feature (1)..( 9): Result.004 file - promoters60/5672093
caacgaata

SEQ ID NO: 150574 - DNA, 12 bp, Unknown
  misc_feature (1)..( 12): Result.004 file - promoters60/5672093
acaatgggctgg

SEQ ID NO: 150575 - DNA, 12 bp, Unknown
  misc_feature (1)..( 12): Result.004 file - promoters60/5672093
caaatgggccta

SEQ ID NO: 150576 - DNA, 12 bp, Unknown
  misc_feature (1)..( 12): Result.004 file - promoters60/5672093
gaaataggccca

SEQ ID NO: 150577 - DNA, 12 bp, Unknown
  misc_feature (1)..( 12): Result.004 file - promoters60/5672093
taaaaaggccca

SEQ ID NO: 150578 - DNA, 12 bp, Unknown
  misc_feature (1)..( 12): Result.004 file - promoters60/5672093
taaaaaatatct

SEQ ID NO: 150579 - DNA, 12 bp, Unknown
  misc_feature (1)..( 12): Result.004 file - promoters60/5672093
ccaaacggctag

SEQ ID NO: 150580 - DNA, 14 bp, Unknown
  misc_feature (1)..( 14): Result.004 file - promoters60/5672093
agtttcaaagaaag

SEQ ID NO: 150581 - DNA, 14 bp, Unknown
  misc_feature (1)..( 14): Result.004 file - promoters60/5672093
tctttcaaaatttg

SEQ ID NO: 150582 - DNA, 14 bp, Unknown
  misc_feature (1)..( 14): Result.004 file - promoters60/5672093
cctatcaaacaaat

SEQ ID NO: 150583 - DNA, 14 bp, Unknown
  misc_feature (1)..( 14): Result.004 file - promoters60/5672093
aaggtcatagacac

SEQ ID NO: 150584 - DNA, 14 bp, Unknown
  misc_feature (1)..( 14): Result.004 file - promoters60/5672093
aaaaaaaaacgaat

SEQ ID NO: 150585 - DNA, 14 bp, Unknown
  misc_feature (1)..( 14): Result.004 file - promoters60/5672093
attataaaattgta

SEQ ID NO: 150586 - DNA, 14 bp, Unknown
  misc_feature (1)..( 14): Result.004 file - promoters60/5672842
attgtaagtgtaaa

SEQ ID NO: 150587 - DNA, 9 bp, Unknown
  misc_feature (1)..( 9): Result.004 file - promoters60/5672842
gtatatata

SEQ ID NO: 150588 - DNA, 9 bp, Unknown
  misc_feature (1)..( 9): Result.004 file - promoters60/5672842
gtatataaa

SEQ ID NO: 150589 - DNA, 9 bp, Unknown
  misc_feature (1)..( 9): Result.004 file - promoters60/5672842
atatataaa

SEQ ID NO: 150590 - DNA, 9 bp, Unknown
  misc_feature (1)..( 9): Result.004 file - promoters60/5672842
atatataaa

SEQ ID NO: 150591 - DNA, 9 bp, Unknown
  misc_feature (1)..( 9): Result.004 file - promoters60/5672842
atatatata

SEQ ID NO: 150592 - DNA, 9 bp, Unknown
  misc_feature (1)..( 9): Result.004 file - promoters60/5672842
ccatataaa

SEQ ID NO: 150593 - DNA, 10 bp, Unknown
  misc_feature (1)..( 10): Result.004 file - promoters60/5672842
tttcgtaatt

SEQ ID NO: 150594 - DNA, 10 bp, Unknown
  misc_feature (1)..( 10): Result.004 file - promoters60/5672842
tttagtaata

SEQ ID NO: 150595 - DNA, 10 bp, Unknown
  misc_feature (1)..( 10): Result.004 file - promoters60/5672842
actcgtgatt

SEQ ID NO: 150596 - DNA, 10 bp, Unknown
  misc_feature (1)..( 10): Result.004 file - promoters60/5672842
tttagtgagt

SEQ ID NO: 150597 - DNA, 10 bp, Unknown
  misc_feature (1)..( 10): Result.004 file - promoters60/5672842
attagagaga

SEQ ID NO: 150598 - DNA, 10 bp, Unknown
  misc_feature (1)..( 10): Result.004 file - promoters60/5673124
attagtgaat

SEQ ID NO: 150599 - DNA, 8 bp, Unknown
  misc_feature (1)..( 8): Result.004 file - promoters60/5673124
ccaataag

SEQ ID NO: 150600 - DNA, 8 bp, Unknown
  misc_feature (1)..( 8): Result.004 file - promoters60/5673124
tcaataag

SEQ ID NO: 150601 - DNA, 8 bp, Unknown
  misc_feature (1)..( 8): Result.004 file - promoters60/5673124
ccaataca

SEQ ID NO: 150602 - DNA, 8 bp, Unknown
  misc_feature (1)..( 8): Result.004 file - promoters60/5673124
acgtgatg

SEQ ID NO: 150603 - DNA, 8 bp, Unknown
  misc_feature (1)..( 8): Result.004 file - promoters60/5673124
acgttatg

SEQ ID NO: 150604 - DNA, 8 bp, Unknown
  misc_feature (1)..( 8): Result.004 file - promoters60/5673124
acgatatc

SEQ ID NO: 150605 - DNA, 10 bp, Unknown
  misc_feature (1)..( 10): Result.004 file - promoters60/5673124
ggtttatttt

SEQ ID NO: 150606 - DNA, 10 bp, Unknown
  misc_feature (1)..( 10): Result.004 file - promoters60/5673124
ggtttattca

SEQ ID NO: 150607 - DNA, 10 bp, Unknown
  misc_feature (1)..( 10): Result.004 file - promoters60/5673124
attttatttt

SEQ ID NO: 150608 - DNA, 13 bp, Unknown
  misc_feature (1)..( 13): Result.004 file - promoters60/5673124
tttaatttaaatg

SEQ ID NO: 150609 - DNA, 13 bp, Unknown
  misc_feature (1)..( 13): Result.004 file - promoters60/5673124
tttgattccttgt

SEQ ID NO: 150610 - DNA, 13 bp, Unknown
  misc_feature (1)..( 13): Result.004 file - promoters60/5673124
gatgactccatgt

SEQ ID NO: 150611 - DNA, 9 bp, Unknown
  misc_feature (1)..( 9): Result.004 file - promoters60/5673124
agctttttg

SEQ ID NO: 150612 - DNA, 9 bp, Unknown
  misc_feature (1)..( 9): Result.004 file - promoters60/5673124
aacttgttg

SEQ ID NO: 150613 - DNA, 9 bp, Unknown
  misc_feature (1)..( 9): Result.004 file - promoters60/5673650
aacctgtgt

SEQ ID NO: 150614 - DNA, 12 bp, Unknown
  misc_feature (1)..( 12): Result.004 file - promoters60/5673650
tattgttacaaa

SEQ ID NO: 150615 - DNA, 12 bp, Unknown
  misc_feature (1)..( 12): Result.004 file - promoters60/5673650
aatttttacttt

SEQ ID NO: 150616 - DNA, 12 bp, Unknown
  misc_feature (1)..( 12): Result.004 file - promoters60/5673650
tattgtgtatgt

SEQ ID NO: 150617 - DNA, 12 bp, Unknown
  misc_feature (1)..( 12): Result.004 file - promoters60/5673674
aatttatacttt

SEQ ID NO: 150618 - DNA, 10 bp, Unknown
  misc_feature (1)..( 10): Result.004 file - promoters60/5673674
gaataaaatc

SEQ ID NO: 150619 - DNA, 10 bp, Unknown
  misc_feature (1)..( 10): Result.004 file - promoters60/5673674
aaatcaaacc

SEQ ID NO: 150620 - DNA, 10 bp, Unknown
  misc_feature (1)..( 10): Result.004 file - promoters60/5673674
taataaataa

SEQ ID NO: 150621 - DNA, 11 bp, Unknown
  misc_feature (1)..( 11): Result.004 file - promoters60/5673674
aaactcaaact

SEQ ID NO: 150622 - DNA, 11 bp, Unknown
  misc_feature (1)..( 11): Result.004 file - promoters60/5673674
cttatcaaacc

SEQ ID NO: 150623 - DNA, 8 bp, Unknown
  misc_feature (1)..( 8): Result.004 file - promoters60/5673674
aaagaata

SEQ ID NO: 150624 - DNA, 8 bp, Unknown
  misc_feature (1)..( 8): Result.004 file - promoters60/5673674
aaagaagt

SEQ ID NO: 150625 - DNA, 8 bp, Unknown
  misc_feature (1)..( 8): Result.004 file - promoters60/5673674
taagtata

SEQ ID NO: 150626 - DNA, 8 bp, Unknown
  misc_feature (1)..( 8): Result.004 file - promoters60/5673674
aaataagg

SEQ ID NO: 150627 - DNA, 9 bp, Unknown
  misc_feature (1)..( 9): Result.004 file - promoters60/5673674
aaacgaacc

SEQ ID NO: 150628 - DNA, 10 bp, Unknown
  misc_feature (1)..( 10): Result.004 file - promoters60/5673674
agaaagaaat

SEQ ID NO: 150629 - DNA, 10 bp, Unknown
  misc_feature (1)..( 10): Result.004 file - promoters60/5673674
atgaagaaat

SEQ ID NO: 150630 - DNA, 11 bp, Unknown
  misc_feature (1)..( 11): Result.004 file - promoters60/5673674
tagaacgaaca

SEQ ID NO: 150631 - DNA, 11 bp, Unknown
  misc_feature (1)..( 11): Result.004 file - promoters60/5673674
atcaaagaatc

SEQ ID NO: 150632 - DNA, 11 bp, Unknown
  misc_feature (1)..( 11): Result.004 file - promoters60/5673674
tgtaaagaaaa

SEQ ID NO: 150633 - DNA, 11 bp, Unknown
  misc_feature (1)..( 11): Result.004 file - promoters60/5673674
attaaacaaaa

SEQ ID NO: 150634 - DNA, 10 bp, Unknown
  misc_feature (1)..( 10): Result.004 file - promoters60/5673674
tataaaaacg

SEQ ID NO: 150635 - DNA, 10 bp, Unknown
  misc_feature (1)..( 10): Result.004 file - promoters60/5673674
tataaatatg

SEQ ID NO: 150636 - DNA, 10 bp, Unknown
  misc_feature (1)..( 10): Result.004 file - promoters60/5673674
gataaaaaca

SEQ ID NO: 150637 - DNA, 10 bp, Unknown
  misc_feature (1)..( 10): Result.004 file - promoters60/5673674
aataaatact

SEQ ID NO: 150638 - DNA, 10 bp, Unknown
  misc_feature (1)..( 10): Result.004 file - promoters60/5673674
ttgaaatcaa

SEQ ID NO: 150639 - DNA, 9 bp, Unknown
  misc_feature (1)..( 9): Result.004 file - promoters60/5673674
gatgtgata

SEQ ID NO: 150640 - DNA, 9 bp, Unknown
  misc_feature (1)..( 9): Result.004 file - promoters60/5673674
gatgtgtcc

SEQ ID NO: 150641 - DNA, 8 bp, Unknown
  misc_feature (1)..( 8): Result.004 file - promoters60/5673674
atgtgatt

SEQ ID NO: 150642 - DNA, 9 bp, Unknown
  misc_feature (1)..( 9): Result.004 file - promoters60/5673674
cttgtaatt

SEQ ID NO: 150643 - DNA, 9 bp, Unknown
  misc_feature (1)..( 9): Result.004 file - promoters60/5673674
ttataaaat

SEQ ID NO: 150644 - DNA, 9 bp, Unknown
  misc_feature (1)..( 9): Result.004 file - promoters60/5673674
ttatcaaac

SEQ ID NO: 150645 - DNA, 9 bp, Unknown
  misc_feature (1)..( 9): Result.004 file - promoters60/5673674
ccgtcaaac

SEQ ID NO: 150646 - DNA, 9 bp, Unknown
  misc_feature (1)..( 9): Result.004 file - promoters60/5673674
ttatcatat

SEQ ID NO: 150647 - DNA, 12 bp, Unknown
  misc_feature (1)..( 12): Result.004 file - promoters60/5673674
atcttcttgtaa

SEQ ID NO: 150648 - DNA, 12 bp, Unknown
  misc_feature (1)..( 12): Result.004 file - promoters60/5673674
ttcctcttttaa

SEQ ID NO: 150649 - DNA, 12 bp, Unknown
  misc_feature (1)..( 12): Result.004 file - promoters60/5673674
ttcttcttttgt

SEQ ID NO: 150650 - DNA, 12 bp, Unknown
  misc_feature (1)..( 12): Result.004 file - promoters60/5674194
tttatctattgt

SEQ ID NO: 150651 - DNA, 9 bp, Unknown
  misc_feature (1)..( 9): Result.004 file - promoters60/5674194
aaataaatt

SEQ ID NO: 150652 - DNA, 9 bp, Unknown
  misc_feature (1)..( 9): Result.004 file - promoters60/5674194
caatacatt

SEQ ID NO: 150653 - DNA, 9 bp, Unknown
  misc_feature (1)..( 9): Result.004 file - promoters60/5674194
taaaaaaag

SEQ ID NO: 150654 - DNA, 9 bp, Unknown
  misc_feature (1)..( 9): Result.004 file - promoters60/5674194
aaacaaaaa

SEQ ID NO: 150655 - DNA, 9 bp, Unknown
  misc_feature (1)..( 9): Result.004 file - promoters60/5674194
gaatacata

SEQ ID NO: 150656 - DNA, 9 bp, Unknown
  misc_feature (1)..( 9): Result.004 file - promoters60/5674530
gaatacaca

SEQ ID NO: 150657 - DNA, 7 bp, Unknown
  misc_feature (1)..( 7): Result.004 file - promoters60/5674530
acaaata

SEQ ID NO: 150658 - DNA, 7 bp, Unknown
  misc_feature (1)..( 7): Result.004 file - promoters60/5674530
acaaata

SEQ ID NO: 150659 - DNA, 9 bp, Unknown
  misc_feature (1)..( 9): Result.004 file - promoters60/5674530
gaagttaca

SEQ ID NO: 150660 - DNA, 9 bp, Unknown
  misc_feature (1)..( 9): Result.004 file - promoters60/5674530
ttagtaaca

SEQ ID NO: 150661 - DNA, 9 bp, Unknown
  misc_feature (1)..( 9): Result.004 file - promoters60/5674530
ttattaatt

SEQ ID NO: 150662 - DNA, 6 bp, Unknown
  misc_feature (1)..( 6): Result.004 file - promoters60/5674530
aaaaat

SEQ ID NO: 150663 - DNA, 6 bp, Unknown
  misc_feature (1)..( 6): Result.004 file - promoters60/5674530
aaaaat

SEQ ID NO: 150664 - DNA, 8 bp, Unknown
  misc_feature (1)..( 8): Result.004 file - promoters60/5674530
tctaaaat

SEQ ID NO: 150665 - DNA, 8 bp, Unknown
  misc_feature (1)..( 8): Result.004 file - promoters60/5674530
tctaaaat

SEQ ID NO: 150666 - DNA, 6 bp, Unknown
  misc_feature (1)..( 6): Result.004 file - promoters60/5674530
aacaca

SEQ ID NO: 150667 - DNA, 6 bp, Unknown
  misc_feature (1)..( 6): Result.004 file - promoters60/5674530
aacaca

SEQ ID NO: 150668 - DNA, 8 bp, Unknown
  misc_feature (1)..( 8): Result.004 file - promoters60/5674530
acacctgt

SEQ ID NO: 150669 - DNA, 8 bp, Unknown
  misc_feature (1)..( 8): Result.004 file - promoters60/5674530
acacgtgt

SEQ ID NO: 150670 - DNA, 8 bp, Unknown
  misc_feature (1)..( 8): Result.004 file - promoters60/5674530
aaaaaaaa

SEQ ID NO: 150671 - DNA, 8 bp, Unknown
  misc_feature (1)..( 8): Result.004 file - promoters60/5674530
aaaaaaaa

SEQ ID NO: 150672 - DNA, 8 bp, Unknown
  misc_feature (1)..( 8): Result.004 file - promoters60/5674530
agaacaaa

SEQ ID NO: 150673 - DNA, 8 bp, Unknown
  misc_feature (1)..( 8): Result.004 file - promoters60/5674530
atgaagtt

SEQ ID NO: 150674 - DNA, 8 bp, Unknown
  misc_feature (1)..( 8): Result.004 file - promoters60/5674530
atgatgtt

SEQ ID NO: 150675 - DNA, 9 bp, Unknown
  misc_feature (1)..( 9): Result.004 file - promoters60/5674530
ccaaataaa

SEQ ID NO: 150676 - DNA, 9 bp, Unknown
  misc_feature (1)..( 9): Result.004 file - promoters60/5674530
ccaaataaa

SEQ ID NO: 150677 - DNA, 9 bp, Unknown
  misc_feature (1)..( 9): Result.004 file - promoters60/5674530
aaaaataac

SEQ ID NO: 150678 - DNA, 6 bp, Unknown
  misc_feature (1)..( 6): Result.004 file - promoters60/5674530
catgaa

SEQ ID NO: 150679 - DNA, 6 bp, Unknown
  misc_feature (1)..( 6): Result.004 file - promoters60/5674530
catgaa

SEQ ID NO: 150680 - DNA, 8 bp, Unknown
  misc_feature (1)..( 8): Result.004 file - promoters60/5674530
acttaaat

SEQ ID NO: 150681 - DNA, 8 bp, Unknown
  misc_feature (1)..( 8): Result.004 file - promoters60/5674530
acttaaat

SEQ ID NO: 150682 - DNA, 9 bp, Unknown
  misc_feature (1)..( 9): Result.004 file - promoters60/5674530
aaaaaggag

SEQ ID NO: 150683 - DNA, 9 bp, Unknown
  misc_feature (1)..( 9): Result.004 file - promoters60/5674530
aaaatggag

SEQ ID NO: 150684 - DNA, 7 bp, Unknown
  misc_feature (1)..( 7): Result.004 file - promoters60/5674530
aagcaaa

SEQ ID NO: 150685 - DNA, 7 bp, Unknown
  misc_feature (1)..( 7): Result.004 file - promoters60/5674530
aaggaaa

SEQ ID NO: 150686 - DNA, 8 bp, Unknown
  misc_feature (1)..( 8): Result.004 file - promoters60/5674530
tgtttaca

SEQ ID NO: 150687 - DNA, 8 bp, Unknown
  misc_feature (1)..( 8): Result.004 file - promoters60/5674530
tgtctaca

SEQ ID NO: 150688 - DNA, 7 bp, Unknown
  misc_feature (1)..( 7): Result.004 file - promoters60/5674530
tagaaaa

SEQ ID NO: 150689 - DNA, 7 bp, Unknown
  misc_feature (1)..( 7): Result.004 file - promoters60/5674530
taggaaa

SEQ ID NO: 150690 - DNA, 6 bp, Unknown
  misc_feature (1)..( 6): Result.004 file - promoters60/5674530
aaatca

SEQ ID NO: 150691 - DNA, 6 bp, Unknown
  misc_feature (1)..( 6): Result.004 file - promoters60/5674530
aaatca

SEQ ID NO: 150692 - DNA, 9 bp, Unknown
  misc_feature (1)..( 9): Result.004 file - promoters60/5674530
caatcaaaa

SEQ ID NO: 150693 - DNA, 9 bp, Unknown
  misc_feature (1)..( 9): Result.004 file - promoters60/5674626
caaacaaaa

SEQ ID NO: 150694 - DNA, 9 bp, Unknown
  misc_feature (1)..( 9): Result.004 file - promoters60/5674626
gattacgaa

SEQ ID NO: 150695 - DNA, 9 bp, Unknown
  misc_feature (1)..( 9): Result.004 file - promoters60/5674626
gattaccaa

SEQ ID NO: 150696 - DNA, 9 bp, Unknown
  misc_feature (1)..( 9): Result.004 file - promoters60/5674626
tattaacaa

SEQ ID NO: 150697 - DNA, 7 bp, Unknown
  misc_feature (1)..( 7): Result.004 file - promoters60/5674626
gaatatg

SEQ ID NO: 150698 - DNA, 7 bp, Unknown
  misc_feature (1)..( 7): Result.004 file - promoters60/5674626
gaagatg

SEQ ID NO: 150699 - DNA, 6 bp, Unknown
  misc_feature (1)..( 6): Result.004 file - promoters60/5674626
ttaaaa

SEQ ID NO: 150700 - DNA, 6 bp, Unknown
  misc_feature (1)..( 6): Result.004 file - promoters60/5674626
ttaaaa

SEQ ID NO: 150701 - DNA, 7 bp, Unknown
  misc_feature (1)..( 7): Result.004 file - promoters60/5674626
aaaatca

SEQ ID NO: 150702 - DNA, 7 bp, Unknown
  misc_feature (1)..( 7): Result.004 file - promoters60/5674626
aaactca

SEQ ID NO: 150703 - DNA, 6 bp, Unknown
  misc_feature (1)..( 6): Result.004 file - promoters60/5674626
atatgt

SEQ ID NO: 150704 - DNA, 6 bp, Unknown
  misc_feature (1)..( 6): Result.004 file - promoters60/5674626
atatgt

SEQ ID NO: 150705 - DNA, 6 bp, Unknown
  misc_feature (1)..( 6): Result.004 file - promoters60/5674626
ttgaag

SEQ ID NO: 150706 - DNA, 6 bp, Unknown
  misc_feature (1)..( 6): Result.004 file - promoters60/5674626
ttgaag

SEQ ID NO: 150707 - DNA, 7 bp, Unknown
  misc_feature (1)..( 7): Result.004 file - promoters60/5674626
gaatttg

SEQ ID NO: 150708 - DNA, 7 bp, Unknown
  misc_feature (1)..( 7): Result.004 file - promoters60/5674626
gaaattg

SEQ ID NO: 150709 - DNA, 6 bp, Unknown
  misc_feature (1)..( 6): Result.004 file - promoters60/5674626
tgatat

SEQ ID NO: 150710 - DNA, 6 bp, Unknown
  misc_feature (1)..( 6): Result.004 file - promoters60/5674626
tgatat

SEQ ID NO: 150711 - DNA, 6 bp, Unknown
  misc_feature (1)..( 6): Result.004 file - promoters60/5674626
atataa

SEQ ID NO: 150712 - DNA, 6 bp, Unknown
  misc_feature (1)..( 6): Result.004 file - promoters60/5674626
atataa

SEQ ID NO: 150713 - DNA, 6 bp, Unknown
  misc_feature (1)..( 6): Result.004 file - promoters60/5674626
tatttt

SEQ ID NO: 150714 - DNA, 6 bp, Unknown
  misc_feature (1)..( 6): Result.004 file - promoters60/5674626
tatttt

SEQ ID NO: 150715 - DNA, 7 bp, Unknown
  misc_feature (1)..( 7): Result.004 file - promoters60/5674626
tttattg

SEQ ID NO: 150716 - DNA, 7 bp, Unknown
  misc_feature (1)..( 7): Result.004 file - promoters60/5674626
tttattg

SEQ ID NO: 150717 - DNA, 6 bp, Unknown
  misc_feature (1)..( 6): Result.004 file - promoters60/5674626
aatatt

SEQ ID NO: 150718 - DNA, 6 bp, Unknown
  misc_feature (1)..( 6): Result.004 file - promoters60/5674626
aatatt

SEQ ID NO: 150719 - DNA, 7 bp, Unknown
  misc_feature (1)..( 7): Result.004 file - promoters60/5674626
aataaat

SEQ ID NO: 150720 - DNA, 7 bp, Unknown
  misc_feature (1)..( 7): Result.004 file - promoters60/5674626
aatcaat

SEQ ID NO: 150721 - DNA, 7 bp, Unknown
  misc_feature (1)..( 7): Result.004 file - promoters60/5674626
ttagaag

SEQ ID NO: 150722 - DNA, 7 bp, Unknown
  misc_feature (1)..( 7): Result.004 file - promoters60/5674626
ttaaaag

SEQ ID NO: 150723 - DNA, 6 bp, Unknown
  misc_feature (1)..( 6): Result.004 file - promoters60/5674626
ttggat

SEQ ID NO: 150724 - DNA, 6 bp, Unknown
  misc_feature (1)..( 6): Result.004 file - promoters60/5674626
ttggat

SEQ ID NO: 150725 - DNA, 7 bp, Unknown
  misc_feature (1)..( 7): Result.004 file - promoters60/5674626
atttcca

SEQ ID NO: 150726 - DNA, 7 bp, Unknown
  misc_feature (1)..( 7): Result.004 file - promoters60/5674626
attccca

SEQ ID NO: 150727 - DNA, 6 bp, Unknown
  misc_feature (1)..( 6): Result.004 file - promoters60/5674626
atccaa

SEQ ID NO: 150728 - DNA, 6 bp, Unknown
  misc_feature (1)..( 6): Result.004 file - promoters60/5674626
atccaa

SEQ ID NO: 150729 - DNA, 7 bp, Unknown
  misc_feature (1)..( 7): Result.004 file - promoters60/5674626
attaccg

SEQ ID NO: 150730 - DNA, 7 bp, Unknown
  misc_feature (1)..( 7): Result.004 file - promoters60/5674626
atttccg

SEQ ID NO: 150731 - DNA, 7 bp, Unknown
  misc_feature (1)..( 7): Result.004 file - promoters60/5674626
gcttaaa

SEQ ID NO: 150732 - DNA, 7 bp, Unknown
  misc_feature (1)..( 7): Result.004 file - promoters60/5674626
gctaaaa

SEQ ID NO: 150733 - DNA, 7 bp, Unknown
  misc_feature (1)..( 7): Result.004 file - promoters60/5674626
aaggatt

SEQ ID NO: 150734 - DNA, 7 bp, Unknown
  misc_feature (1)..( 7): Result.004 file - promoters60/5674666
aaggatt

SEQ ID NO: 150735 - DNA, 10 bp, Unknown
  misc_feature (1)..( 10): Result.004 file - promoters60/5674666
gtaatcaatc

SEQ ID NO: 150736 - DNA, 10 bp, Unknown
  misc_feature (1)..( 10): Result.004 file - promoters60/5674666
aaaatgaatt

SEQ ID NO: 150737 - DNA, 10 bp, Unknown
  misc_feature (1)..( 10): Result.004 file - promoters60/5674666
taaaagaaac

SEQ ID NO: 150738 - DNA, 10 bp, Unknown
  misc_feature (1)..( 10): Result.004 file - promoters60/5674666
aaaacgaatg

SEQ ID NO: 150739 - DNA, 10 bp, Unknown
  misc_feature (1)..( 10): Result.004 file - promoters60/5674666
ccaaagaaag

SEQ ID NO: 150740 - DNA, 10 bp, Unknown
  misc_feature (1)..( 10): Result.004 file - promoters60/5674666
aaaaaaaatc

SEQ ID NO: 150741 - DNA, 10 bp, Unknown
  misc_feature (1)..( 10): Result.004 file - promoters60/5674666
acaaggaaag

SEQ ID NO: 150742 - DNA, 12 bp, Unknown
  misc_feature (1)..( 12): Result.004 file - promoters60/5674666
aaaacaaaaatt

SEQ ID NO: 150743 - DNA, 12 bp, Unknown
  misc_feature (1)..( 12): Result.004 file - promoters60/5674666
aaaacagaaatt

SEQ ID NO: 150744 - DNA, 12 bp, Unknown
  misc_feature (1)..( 12): Result.004 file - promoters60/5674666
tattgaaaaatc

SEQ ID NO: 150745 - DNA, 12 bp, Unknown
  misc_feature (1)..( 12): Result.004 file - promoters60/5674666
agtaaaaaaatg

SEQ ID NO: 150746 - DNA, 12 bp, Unknown
  misc_feature (1)..( 12): Result.004 file - promoters60/5674666
cgccaaaagaca

SEQ ID NO: 150747 - DNA, 12 bp, Unknown
  misc_feature (1)..( 12): Result.004 file - promoters60/5674666
tcttgagaaacc

SEQ ID NO: 150748 - DNA, 13 bp, Unknown
  misc_feature (1)..( 13): Result.004 file - promoters60/5674666
cttagactatata

SEQ ID NO: 150749 - DNA, 13 bp, Unknown
  misc_feature (1)..( 13): Result.004 file - promoters60/5674666
acaagactaaaga

SEQ ID NO: 150750 - DNA, 12 bp, Unknown
  misc_feature (1)..( 12): Result.004 file - promoters60/5674666
taagacaaaaga

SEQ ID NO: 150751 - DNA, 13 bp, Unknown
  misc_feature (1)..( 13): Result.004 file - promoters60/5674666
aaatgacgttctt

SEQ ID NO: 150752 - DNA, 13 bp, Unknown
  misc_feature (1)..( 13): Result.004 file - promoters60/5674666
aaatgaatggggc

SEQ ID NO: 150753 - DNA, 13 bp, Unknown
  misc_feature (1)..( 13): Result.004 file - promoters60/5674666
aaaataaatttag

SEQ ID NO: 150754 - DNA, 9 bp, Unknown
  misc_feature (1)..( 9): Result.004 file - promoters60/5674666
tttataaaa

SEQ ID NO: 150755 - DNA, 9 bp, Unknown
  misc_feature (1)..( 9): Result.004 file - promoters60/5674666
tttctaatg

SEQ ID NO: 150756 - DNA, 9 bp, Unknown
  misc_feature (1)..( 9): Result.004 file - promoters60/5674666
catataaaa

SEQ ID NO: 150757 - DNA, 9 bp, Unknown
  misc_feature (1)..( 9): Result.004 file - promoters60/5674666
tctattaaa

SEQ ID NO: 150758 - DNA, 9 bp, Unknown
  misc_feature (1)..( 9): Result.004 file - promoters60/5674666
tatacaaaa

SEQ ID NO: 150759 - DNA, 9 bp, Unknown
  misc_feature (1)..( 9): Result.004 file - promoters60/5675330
tatccaaag

SEQ ID NO: 150760 - DNA, 7 bp, Unknown
  misc_feature (1)..( 7): Result.004 file - promoters60/5675330
caacaga

SEQ ID NO: 150761 - DNA, 7 bp, Unknown
  misc_feature (1)..( 7): Result.004 file - promoters60/5675330
caagaga

SEQ ID NO: 150762 - DNA, 10 bp, Unknown
  misc_feature (1)..( 10): Result.004 file - promoters60/5675330
tttttggtga

SEQ ID NO: 150763 - DNA, 10 bp, Unknown
  misc_feature (1)..( 10): Result.004 file - promoters60/5675330
tttgtggtaa

SEQ ID NO: 150764 - DNA, 10 bp, Unknown
  misc_feature (1)..( 10): Result.004 file - promoters60/5675330
agtgttgtaa

SEQ ID NO: 150765 - DNA, 6 bp, Unknown
  misc_feature (1)..( 6): Result.004 file - promoters60/5675330
catgtt

SEQ ID NO: 150766 - DNA, 6 bp, Unknown
  misc_feature (1)..( 6): Result.004 file - promoters60/5675330
catgtt

SEQ ID NO: 150767 - DNA, 6 bp, Unknown
  misc_feature (1)..( 6): Result.004 file - promoters60/5675330
catgtt

SEQ ID NO: 150768 - DNA, 6 bp, Unknown
  misc_feature (1)..( 6): Result.004 file - promoters60/5675330
attgag

SEQ ID NO: 150769 - DNA, 6 bp, Unknown
  misc_feature (1)..( 6): Result.004 file - promoters60/5675330
attgag

SEQ ID NO: 150770 - DNA, 7 bp, Unknown
  misc_feature (1)..( 7): Result.004 file - promoters60/5675330
tacggga

SEQ ID NO: 150771 - DNA, 7 bp, Unknown
  misc_feature (1)..( 7): Result.004 file - promoters60/5675330
taccgga

SEQ ID NO: 150772 - DNA, 8 bp, Unknown
  misc_feature (1)..( 8): Result.004 file - promoters60/5675330
aaacagtt

SEQ ID NO: 150773 - DNA, 8 bp, Unknown
  misc_feature (1)..( 8): Result.004 file - promoters60/5675330
aaacagtt

SEQ ID NO: 150774 - DNA, 8 bp, Unknown
  misc_feature (1)..( 8): Result.004 file - promoters60/5675330
tcaagaag

SEQ ID NO: 150775 - DNA, 8 bp, Unknown
  misc_feature (1)..( 8): Result.004 file - promoters60/5675330
tcaggaag

SEQ ID NO: 150776 - DNA, 6 bp, Unknown
  misc_feature (1)..( 6): Result.004 file - promoters60/5675330
atctgc

SEQ ID NO: 150777 - DNA, 6 bp, Unknown
  misc_feature (1)..( 6): Result.004 file - promoters60/5675330
atctgc

SEQ ID NO: 150778 - DNA, 6 bp, Unknown
  misc_feature (1)..( 6): Result.004 file - promoters60/5675330
tttagt

SEQ ID NO: 150779 - DNA, 6 bp, Unknown
  misc_feature (1)..( 6): Result.004 file - promoters60/5675330
tttagt

SEQ ID NO: 150780 - DNA, 7 bp, Unknown
  misc_feature (1)..( 7): Result.004 file - promoters60/5675330
atgattt

SEQ ID NO: 150781 - DNA, 7 bp, Unknown
  misc_feature (1)..( 7): Result.004 file - promoters60/5675330
atggttt

SEQ ID NO: 150782 - DNA, 7 bp, Unknown
  misc_feature (1)..( 7): Result.004 file - promoters60/5675330
gaagttg

SEQ ID NO: 150783 - DNA, 7 bp, Unknown
  misc_feature (1)..( 7): Result.004 file - promoters60/5675330
gaatttg

SEQ ID NO: 150784 - DNA, 6 bp, Unknown
  misc_feature (1)..( 6): Result.004 file - promoters60/5675330
tgttat

SEQ ID NO: 150785 - DNA, 6 bp, Unknown
  misc_feature (1)..( 6): Result.004 file - promoters60/5675330
tgttat

SEQ ID NO: 150786 - DNA, 6 bp, Unknown
  misc_feature (1)..( 6): Result.004 file - promoters60/5675330
aatatc

SEQ ID NO: 150787 - DNA, 6 bp, Unknown
  misc_feature (1)..( 6): Result.004 file - promoters60/5675330
aatatc

SEQ ID NO: 150788 - DNA, 8 bp, Unknown
  misc_feature (1)..( 8): Result.004 file - promoters60/5675330
tgttggaa

SEQ ID NO: 150789 - DNA, 8 bp, Unknown
  misc_feature (1)..( 8): Result.004 file - promoters60/5675330
tgttggaa

SEQ ID NO: 150790 - DNA, 6 bp, Unknown
  misc_feature (1)..( 6): Result.004 file - promoters60/5675330
ggaaaa

SEQ ID NO: 150791 - DNA, 6 bp, Unknown
  misc_feature (1)..( 6): Result.004 file - promoters60/5675330
ggaaaa

SEQ ID NO: 150792 - DNA, 7 bp, Unknown
  misc_feature (1)..( 7): Result.004 file - promoters60/5675330
aaatgtt

SEQ ID NO: 150793 - DNA, 7 bp, Unknown
  misc_feature (1)..( 7): Result.004 file - promoters60/5675628
aaatgtt

SEQ ID NO: 150794 - DNA, 11 bp, Unknown
  misc_feature (1)..( 11): Result.004 file - promoters60/5675628
aacacaaatta

SEQ ID NO: 150795 - DNA, 11 bp, Unknown
  misc_feature (1)..( 11): Result.004 file - promoters60/5675628
aactcaaatga

SEQ ID NO: 150796 - DNA, 11 bp, Unknown
  misc_feature (1)..( 11): Result.004 file - promoters60/5675628
cccactaattt

SEQ ID NO: 150797 - DNA, 11 bp, Unknown
  misc_feature (1)..( 11): Result.004 file - promoters60/5675628
ttatgtaattt

SEQ ID NO: 150798 - DNA, 12 bp, Unknown
  misc_feature (1)..( 12): Result.004 file - promoters60/5675628
ggttctatggaa

SEQ ID NO: 150799 - DNA, 12 bp, Unknown
  misc_feature (1)..( 12): Result.004 file - promoters60/5675628
ctttccatggct

SEQ ID NO: 150800 - DNA, 12 bp, Unknown
  misc_feature (1)..( 12): Result.004 file - promoters60/5675628
tgtgccattgct

SEQ ID NO: 150801 - DNA, 12 bp, Unknown
  misc_feature (1)..( 12): Result.004 file - promoters60/5675628
tgtaccattgtt

SEQ ID NO: 150802 - DNA, 7 bp, Unknown
  misc_feature (1)..( 7): Result.004 file - promoters60/5675628
tctctgt

SEQ ID NO: 150803 - DNA, 7 bp, Unknown
  misc_feature (1)..( 7): Result.004 file - promoters60/5675628
tctttgt

SEQ ID NO: 150804 - DNA, 7 bp, Unknown
  misc_feature (1)..( 7): Result.004 file - promoters60/5675628
gctttgt

SEQ ID NO: 150805 - DNA, 7 bp, Unknown
  misc_feature (1)..( 7): Result.004 file - promoters60/5676027
actttgt

SEQ ID NO: 150806 - DNA, 8 bp, Unknown
  misc_feature (1)..( 8): Result.004 file - promoters60/5676027
tttcttaa

SEQ ID NO: 150807 - DNA, 8 bp, Unknown
  misc_feature (1)..( 8): Result.004 file - promoters60/5676027
ttttttat

SEQ ID NO: 150808 - DNA, 8 bp, Unknown
  misc_feature (1)..( 8): Result.004 file - promoters60/5676027
atttgtat

SEQ ID NO: 150809 - DNA, 9 bp, Unknown
  misc_feature (1)..( 9): Result.004 file - promoters60/5676027
taatttcaa

SEQ ID NO: 150810 - DNA, 9 bp, Unknown
  misc_feature (1)..( 9): Result.004 file - promoters60/5676027
taatttcca

SEQ ID NO: 150811 - DNA, 9 bp, Unknown
  misc_feature (1)..( 9): Result.004 file - promoters60/5676027
aaatttcaa

SEQ ID NO: 150812 - DNA, 9 bp, Unknown
  misc_feature (1)..( 9): Result.004 file - promoters60/5676027
gaatgtcag

SEQ ID NO: 150813 - DNA, 8 bp, Unknown
  misc_feature (1)..( 8): Result.004 file - promoters60/5676027
caatctta

SEQ ID NO: 150814 - DNA, 8 bp, Unknown
  misc_feature (1)..( 8): Result.004 file - promoters60/5676027
aaatttta

SEQ ID NO: 150815 - DNA, 8 bp, Unknown
  misc_feature (1)..( 8): Result.004 file - promoters60/5676027
aaatttgt

SEQ ID NO: 150816 - DNA, 13 bp, Unknown
  misc_feature (1)..( 13): Result.004 file - promoters60/5676027
aaattatttaaat

SEQ ID NO: 150817 - DNA, 13 bp, Unknown
  misc_feature (1)..( 13): Result.004 file - promoters60/5676027
caagtatataaac

SEQ ID NO: 150818 - DNA, 13 bp, Unknown
  misc_feature (1)..( 13): Result.004 file - promoters60/5676027
caagaatatacat

SEQ ID NO: 150819 - DNA, 13 bp, Unknown
  misc_feature (1)..( 13): Result.004 file - promoters60/5676027
atcatagacaaga

SEQ ID NO: 150820 - DNA, 8 bp, Unknown
  misc_feature (1)..( 8): Result.004 file - promoters60/5676027
gaataatt

SEQ ID NO: 150821 - DNA, 8 bp, Unknown
  misc_feature (1)..( 8): Result.004 file - promoters60/5676027
caattatt

SEQ ID NO: 150822 - DNA, 8 bp, Unknown
  misc_feature (1)..( 8): Result.004 file - promoters60/5676027
caaatata

SEQ ID NO: 150823 - DNA, 8 bp, Unknown
  misc_feature (1)..( 8): Result.004 file - promoters60/5676027
atttatat

SEQ ID NO: 150824 - DNA, 8 bp, Unknown
  misc_feature (1)..( 8): Result.004 file - promoters60/5676027
atttgtat

SEQ ID NO: 150825 - DNA, 8 bp, Unknown
  misc_feature (1)..( 8): Result.004 file - promoters60/5676160
ttttttat

SEQ ID NO: 150826 - DNA, 12 bp, Unknown
  misc_feature (1)..( 12): Result.004 file - promoters60/5676160
aagtaaattttc

SEQ ID NO: 150827 - DNA, 12 bp, Unknown
  misc_feature (1)..( 12): Result.004 file - promoters60/5676160
aagcaaattttc

SEQ ID NO: 150828 - DNA, 12 bp, Unknown
  misc_feature (1)..( 12): Result.004 file - promoters60/5676160
agtataattttg

SEQ ID NO: 150829 - DNA, 12 bp, Unknown
  misc_feature (1)..( 12): Result.004 file - promoters60/5676160
acactaattttt

SEQ ID NO: 150830 - DNA, 13 bp, Unknown
  misc_feature (1)..( 13): Result.004 file - promoters60/5676160
atcatatataaac

SEQ ID NO: 150831 - DNA, 13 bp, Unknown
  misc_feature (1)..( 13): Result.004 file - promoters60/5676160
agcatatattagt

SEQ ID NO: 150832 - DNA, 13 bp, Unknown
  misc_feature (1)..( 13): Result.004 file - promoters60/5676160
ttcatttataaac

SEQ ID NO: 150833 - DNA, 13 bp, Unknown
  misc_feature (1)..( 13): Result.004 file - promoters60/5676160
ttctttttgagct

SEQ ID NO: 150834 - DNA, 13 bp, Unknown
  misc_feature (1)..( 13): Result.004 file - promoters60/5676521
cgcgcttacaaaa

SEQ ID NO: 150835 - DNA, 6 bp, Unknown
  misc_feature (1)..( 6): Result.004 file - promoters60/5676521
tcttct

SEQ ID NO: 150836 - DNA, 6 bp, Unknown
  misc_feature (1)..( 6): Result.004 file - promoters60/5676521
tcttct

SEQ ID NO: 150837 - DNA, 9 bp, Unknown
  misc_feature (1)..( 9): Result.004 file - promoters60/5676521
aaaaaagaa

SEQ ID NO: 150838 - DNA, 9 bp, Unknown
  misc_feature (1)..( 9): Result.004 file - promoters60/5676521
aaaaaggaa

SEQ ID NO: 150839 - DNA, 8 bp, Unknown
  misc_feature (1)..( 8): Result.004 file - promoters60/5676521
ttggtttg

SEQ ID NO: 150840 - DNA, 8 bp, Unknown
  misc_feature (1)..( 8): Result.004 file - promoters60/5676521
ttgatttg

SEQ ID NO: 150841 - DNA, 8 bp, Unknown
  misc_feature (1)..( 8): Result.004 file - promoters60/5676521
tcttttag

SEQ ID NO: 150842 - DNA, 8 bp, Unknown
  misc_feature (1)..( 8): Result.004 file - promoters60/5676521
tcttatag

SEQ ID NO: 150843 - DNA, 7 bp, Unknown
  misc_feature (1)..( 7): Result.004 file - promoters60/5676521
ttacttc

SEQ ID NO: 150844 - DNA, 7 bp, Unknown
  misc_feature (1)..( 7): Result.004 file - promoters60/5676521
ttacttc

SEQ ID NO: 150845 - DNA, 6 bp, Unknown
  misc_feature (1)..( 6): Result.004 file - promoters60/5676521
gtgaaa

SEQ ID NO: 150846 - DNA, 6 bp, Unknown
  misc_feature (1)..( 6): Result.004 file - promoters60/5676521
gtgaaa

SEQ ID NO: 150847 - DNA, 7 bp, Unknown
  misc_feature (1)..( 7): Result.004 file - promoters60/5676521
aaaagaa

SEQ ID NO: 150848 - DNA, 7 bp, Unknown
  misc_feature (1)..( 7): Result.004 file - promoters60/5676521
aaaggaa

SEQ ID NO: 150849 - DNA, 7 bp, Unknown
  misc_feature (1)..( 7): Result.004 file - promoters60/5676521
aaaccca

SEQ ID NO: 150850 - DNA, 7 bp, Unknown
  misc_feature (1)..( 7): Result.004 file - promoters60/5676521
aaatcca

SEQ ID NO: 150851 - DNA, 7 bp, Unknown
  misc_feature (1)..( 7): Result.004 file - promoters60/5676521
ccgcaaa

SEQ ID NO: 150852 - DNA, 7 bp, Unknown
  misc_feature (1)..( 7): Result.004 file - promoters60/5676521
ccgaaaa

SEQ ID NO: 150853 - DNA, 6 bp, Unknown
  misc_feature (1)..( 6): Result.004 file - promoters60/5676521
ttgtga

SEQ ID NO: 150854 - DNA, 6 bp, Unknown
  misc_feature (1)..( 6): Result.004 file - promoters60/5676521
ttgtga

SEQ ID NO: 150855 - DNA, 6 bp, Unknown
  misc_feature (1)..( 6): Result.004 file - promoters60/5676521
gagatc

SEQ ID NO: 150856 - DNA, 6 bp, Unknown
  misc_feature (1)..( 6): Result.004 file - promoters60/5676521
gagatc

SEQ ID NO: 150857 - DNA, 6 bp, Unknown
  misc_feature (1)..( 6): Result.004 file - promoters60/5676521
gtgttt

SEQ ID NO: 150858 - DNA, 6 bp, Unknown
  misc_feature (1)..( 6): Result.004 file - promoters60/5676521
gtgttt

SEQ ID NO: 150859 - DNA, 8 bp, Unknown
  misc_feature (1)..( 8): Result.004 file - promoters60/5676521
cttcttat

SEQ ID NO: 150860 - DNA, 8 bp, Unknown
  misc_feature (1)..( 8): Result.004 file - promoters60/5676521
cttattat

SEQ ID NO: 150861 - DNA, 10 bp, Unknown
  misc_feature (1)..( 10): Result.004 file - promoters60/5676521
gatgttcttc

SEQ ID NO: 150862 - DNA, 10 bp, Unknown
  misc_feature (1)..( 10): Result.004 file - promoters60/5676647
gatcttcttc

SEQ ID NO: 150863 - DNA, 9 bp, Unknown
  misc_feature (1)..( 9): Result.004 file - promoters60/5676647
aacctaatt

SEQ ID NO: 150864 - DNA, 9 bp, Unknown
  misc_feature (1)..( 9): Result.004 file - promoters60/5676647
aacctatta

SEQ ID NO: 150865 - DNA, 9 bp, Unknown
  misc_feature (1)..( 9): Result.004 file - promoters60/5676647
caccaatta

SEQ ID NO: 150866 - DNA, 6 bp, Unknown
  misc_feature (1)..( 6): Result.004 file - promoters60/5676647
cgactg

SEQ ID NO: 150867 - DNA, 6 bp, Unknown
  misc_feature (1)..( 6): Result.004 file - promoters60/5676647
cgactg

SEQ ID NO: 150868 - DNA, 7 bp, Unknown
  misc_feature (1)..( 7): Result.004 file - promoters60/5676647
ttttttt

SEQ ID NO: 150869 - DNA, 7 bp, Unknown
  misc_feature (1)..( 7): Result.004 file - promoters60/5676647
tttattt

SEQ ID NO: 150870 - DNA, 6 bp, Unknown
  misc_feature (1)..( 6): Result.004 file - promoters60/5676647
tatttt

SEQ ID NO: 150871 - DNA, 6 bp, Unknown
  misc_feature (1)..( 6): Result.004 file - promoters60/5676647
tatttt

SEQ ID NO: 150872 - DNA, 7 bp, Unknown
  misc_feature (1)..( 7): Result.004 file - promoters60/5676647
aaagtga

SEQ ID NO: 150873 - DNA, 7 bp, Unknown
  misc_feature (1)..( 7): Result.004 file - promoters60/5676647
aaattga

SEQ ID NO: 150874 - DNA, 10 bp, Unknown
  misc_feature (1)..( 10): Result.004 file - promoters60/5676647
gaatatcttt

SEQ ID NO: 150875 - DNA, 10 bp, Unknown
  misc_feature (1)..( 10): Result.004 file - promoters60/5676647
gaatatcttt

SEQ ID NO: 150876 - DNA, 7 bp, Unknown
  misc_feature (1)..( 7): Result.004 file - promoters60/5676647
aagtggt

SEQ ID NO: 150877 - DNA, 7 bp, Unknown
  misc_feature (1)..( 7): Result.004 file - promoters60/5676647
aagaggt

SEQ ID NO: 150878 - DNA, 7 bp, Unknown
  misc_feature (1)..( 7): Result.004 file - promoters60/5676647
cttatta

SEQ ID NO: 150879 - DNA, 7 bp, Unknown
  misc_feature (1)..( 7): Result.004 file - promoters60/5676647
cttttta

SEQ ID NO: 150880 - DNA, 9 bp, Unknown
  misc_feature (1)..( 9): Result.004 file - promoters60/5676647
taaaaatga

SEQ ID NO: 150881 - DNA, 9 bp, Unknown
  misc_feature (1)..( 9): Result.004 file - promoters60/5676647
taaaaatga

SEQ ID NO: 150882 - DNA, 6 bp, Unknown
  misc_feature (1)..( 6): Result.004 file - promoters60/5676647
aggaaa

SEQ ID NO: 150883 - DNA, 6 bp, Unknown
  misc_feature (1)..( 6): Result.004 file - promoters60/5676647
aggaaa

SEQ ID NO: 150884 - DNA, 6 bp, Unknown
  misc_feature (1)..( 6): Result.004 file - promoters60/5676647
gacaac

SEQ ID NO: 150885 - DNA, 6 bp, Unknown
  misc_feature (1)..( 6): Result.004 file - promoters60/5676647
gacaac

SEQ ID NO: 150886 - DNA, 7 bp, Unknown
  misc_feature (1)..( 7): Result.004 file - promoters60/5676647
aatcatc

SEQ ID NO: 150887 - DNA, 7 bp, Unknown
  misc_feature (1)..( 7): Result.004 file - promoters60/5677029
aatcatc

SEQ ID NO: 150888 - DNA, 7 bp, Unknown
  misc_feature (1)..( 7): Result.004 file - promoters60/5677029
tttgtaa

SEQ ID NO: 150889 - DNA, 7 bp, Unknown
  misc_feature (1)..( 7): Result.004 file - promoters60/5677029
attgtaa

SEQ ID NO: 150890 - DNA, 7 bp, Unknown
  misc_feature (1)..( 7): Result.004 file - promoters60/5677029
tttgtaa

SEQ ID NO: 150891 - DNA, 7 bp, Unknown
  misc_feature (1)..( 7): Result.004 file - promoters60/5677029
attataa

SEQ ID NO: 150892 - DNA, 11 bp, Unknown
  misc_feature (1)..( 11): Result.004 file - promoters60/5677029
taaaagtaata

SEQ ID NO: 150893 - DNA, 11 bp, Unknown
  misc_feature (1)..( 11): Result.004 file - promoters60/5677029
taaaagtatat

SEQ ID NO: 150894 - DNA, 11 bp, Unknown
  misc_feature (1)..( 11): Result.004 file - promoters60/5677029
ctcaagtatat

SEQ ID NO: 150895 - DNA, 11 bp, Unknown
  misc_feature (1)..( 11): Result.004 file - promoters60/5677029
actttgtatat

SEQ ID NO: 150896 - DNA, 10 bp, Unknown
  misc_feature (1)..( 10): Result.004 file - promoters60/5677029
ataatgaatt

SEQ ID NO: 150897 - DNA, 10 bp, Unknown
  misc_feature (1)..( 10): Result.004 file - promoters60/5677029
tatatgaatt

SEQ ID NO: 150898 - DNA, 9 bp, Unknown
  misc_feature (1)..( 9): Result.004 file - promoters60/5677029
aaatgaata

SEQ ID NO: 150899 - DNA, 10 bp, Unknown
  misc_feature (1)..( 10): Result.004 file - promoters60/5677029
aaactgatta

SEQ ID NO: 150900 - DNA, 9 bp, Unknown
  misc_feature (1)..( 9): Result.004 file - promoters60/5677029
tattatata

SEQ ID NO: 150901 - DNA, 9 bp, Unknown
  misc_feature (1)..( 9): Result.004 file - promoters60/5677029
gtttatata

SEQ ID NO: 150902 - DNA, 9 bp, Unknown
  misc_feature (1)..( 9): Result.004 file - promoters60/5677029
tattataaa

SEQ ID NO: 150903 - DNA, 9 bp, Unknown
  misc_feature (1)..( 9): Result.004 file - promoters60/5677029
gattgtaat

SEQ ID NO: 150904 - DNA, 7 bp, Unknown
  misc_feature (1)..( 7): Result.004 file - promoters60/5677029
attgtaa

SEQ ID NO: 150905 - DNA, 7 bp, Unknown
  misc_feature (1)..( 7): Result.004 file - promoters60/5677029
attataa

SEQ ID NO: 150906 - DNA, 7 bp, Unknown
  misc_feature (1)..( 7): Result.004 file - promoters60/5677029
attgtaa

SEQ ID NO: 150907 - DNA, 7 bp, Unknown
  misc_feature (1)..( 7): Result.004 file - promoters60/5677029
attataa

SEQ ID NO: 150908 - DNA, 11 bp, Unknown
  misc_feature (1)..( 11): Result.004 file - promoters60/5677029
attgcgtattt

SEQ ID NO: 150909 - DNA, 11 bp, Unknown
  misc_feature (1)..( 11): Result.004 file - promoters60/5677029
attgtgtattt

SEQ ID NO: 150910 - DNA, 11 bp, Unknown
  misc_feature (1)..( 11): Result.004 file - promoters60/5677029
tttgtatataa

SEQ ID NO: 150911 - DNA, 11 bp, Unknown
  misc_feature (1)..( 11): Result.004 file - promoters60/5677029
caagtatattg

SEQ ID NO: 150912 - DNA, 8 bp, Unknown
  misc_feature (1)..( 8): Result.004 file - promoters60/5677029
aagtatat

SEQ ID NO: 150913 - DNA, 8 bp, Unknown
  misc_feature (1)..( 8): Result.004 file - promoters60/5677029
ttgtatat

SEQ ID NO: 150914 - DNA, 8 bp, Unknown
  misc_feature (1)..( 8): Result.004 file - promoters60/5677029
ttgtgtat

SEQ ID NO: 150915 - DNA, 8 bp, Unknown
  misc_feature (1)..( 8): Result.004 file - promoters60/5677230
aagtatat

SEQ ID NO: 150916 - DNA, 6 bp, Unknown
  misc_feature (1)..( 6): Result.004 file - promoters60/5677230
tgtgga

SEQ ID NO: 150917 - DNA, 6 bp, Unknown
  misc_feature (1)..( 6): Result.004 file - promoters60/5677230
tgtgga

SEQ ID NO: 150918 - DNA, 6 bp, Unknown
  misc_feature (1)..( 6): Result.004 file - promoters60/5677230
gacatt

SEQ ID NO: 150919 - DNA, 6 bp, Unknown
  misc_feature (1)..( 6): Result.004 file - promoters60/5677230
gacatt

SEQ ID NO: 150920 - DNA, 7 bp, Unknown
  misc_feature (1)..( 7): Result.004 file - promoters60/5677230
aaggaaa

SEQ ID NO: 150921 - DNA, 7 bp, Unknown
  misc_feature (1)..( 7): Result.004 file - promoters60/5677230
aagtaaa

SEQ ID NO: 150922 - DNA, 7 bp, Unknown
  misc_feature (1)..( 7): Result.004 file - promoters60/5677230
gagtaaa

SEQ ID NO: 150923 - DNA, 6 bp, Unknown
  misc_feature (1)..( 6): Result.004 file - promoters60/5677230
tttgga

SEQ ID NO: 150924 - DNA, 6 bp, Unknown
  misc_feature (1)..( 6): Result.004 file - promoters60/5677230
tttgga

SEQ ID NO: 150925 - DNA, 7 bp, Unknown
  misc_feature (1)..( 7): Result.004 file - promoters60/5677230
aaaatat

SEQ ID NO: 150926 - DNA, 7 bp, Unknown
  misc_feature (1)..( 7): Result.004 file - promoters60/5677230
aaaataa

SEQ ID NO: 150927 - DNA, 7 bp, Unknown
  misc_feature (1)..( 7): Result.004 file - promoters60/5677230
gaaatat

SEQ ID NO: 150928 - DNA, 6 bp, Unknown
  misc_feature (1)..( 6): Result.004 file - promoters60/5677230
agaatt

SEQ ID NO: 150929 - DNA, 6 bp, Unknown
  misc_feature (1)..( 6): Result.004 file - promoters60/5677230
agaatt

SEQ ID NO: 150930 - DNA, 7 bp, Unknown
  misc_feature (1)..( 7): Result.004 file - promoters60/5677230
ttttgaa

SEQ ID NO: 150931 - DNA, 7 bp, Unknown
  misc_feature (1)..( 7): Result.004 file - promoters60/5677230
tttcgaa

SEQ ID NO: 150932 - DNA, 6 bp, Unknown
  misc_feature (1)..( 6): Result.004 file - promoters60/5677230
tttgtt

SEQ ID NO: 150933 - DNA, 6 bp, Unknown
  misc_feature (1)..( 6): Result.004 file - promoters60/5677230
tttgtt

SEQ ID NO: 150934 - DNA, 6 bp, Unknown
  misc_feature (1)..( 6): Result.004 file - promoters60/5677230
accgtc

SEQ ID NO: 150935 - DNA, 6 bp, Unknown
  misc_feature (1)..( 6): Result.004 file - promoters60/5677230
accgtc

SEQ ID NO: 150936 - DNA, 7 bp, Unknown
  misc_feature (1)..( 7): Result.004 file - promoters60/5677230
aatcggg

SEQ ID NO: 150937 - DNA, 7 bp, Unknown
  misc_feature (1)..( 7): Result.004 file - promoters60/5677230
aattggg

SEQ ID NO: 150938 - DNA, 8 bp, Unknown
  misc_feature (1)..( 8): Result.004 file - promoters60/5677230
gaaagaaa

SEQ ID NO: 150939 - DNA, 8 bp, Unknown
  misc_feature (1)..( 8): Result.004 file - promoters60/5677230
gaaacaaa

SEQ ID NO: 150940 - DNA, 10 bp, Unknown
  misc_feature (1)..( 10): Result.004 file - promoters60/5677230
ggaaaagaaa

SEQ ID NO: 150941 - DNA, 10 bp, Unknown
  misc_feature (1)..( 10): Result.004 file - promoters60/5677230
ggaaatgaaa

SEQ ID NO: 150942 - DNA, 7 bp, Unknown
  misc_feature (1)..( 7): Result.004 file - promoters60/5677230
cccacta

SEQ ID NO: 150943 - DNA, 7 bp, Unknown
  misc_feature (1)..( 7): Result.004 file - promoters60/5677230
cccacta

SEQ ID NO: 150944 - DNA, 9 bp, Unknown
  misc_feature (1)..( 9): Result.004 file - promoters60/5677230
aaagaaaag

SEQ ID NO: 150945 - DNA, 9 bp, Unknown
  misc_feature (1)..( 9): Result.004 file - promoters60/5677230
aaagtaaag

SEQ ID NO: 150946 - DNA, 7 bp, Unknown
  misc_feature (1)..( 7): Result.004 file - promoters60/5677230
gtatata

SEQ ID NO: 150947 - DNA, 7 bp, Unknown
  misc_feature (1)..( 7): Result.004 file - promoters60/5677240
gtatata

SEQ ID NO: 150948 - DNA, 11 bp, Unknown
  misc_feature (1)..( 11): Result.004 file - promoters60/5677240
cctgttcttgt

SEQ ID NO: 150949 - DNA, 11 bp, Unknown
  misc_feature (1)..( 11): Result.004 file - promoters60/5677240
taagttgttgt

SEQ ID NO: 150950 - DNA, 11 bp, Unknown
  misc_feature (1)..( 11): Result.004 file - promoters60/5677240
taaattgtctt

SEQ ID NO: 150951 - DNA, 7 bp, Unknown
  misc_feature (1)..( 7): Result.004 file - promoters60/5677240
taccaaa

SEQ ID NO: 150952 - DNA, 7 bp, Unknown
  misc_feature (1)..( 7): Result.004 file - promoters60/5677240
tacaaaa

SEQ ID NO: 150953 - DNA, 8 bp, Unknown
  misc_feature (1)..( 8): Result.004 file - promoters60/5677240
aaaaggaa

SEQ ID NO: 150954 - DNA, 8 bp, Unknown
  misc_feature (1)..( 8): Result.004 file - promoters60/5677240
aaaatgaa

SEQ ID NO: 150955 - DNA, 8 bp, Unknown
  misc_feature (1)..( 8): Result.004 file - promoters60/5677240
aaaatcaa

SEQ ID NO: 150956 - DNA, 8 bp, Unknown
  misc_feature (1)..( 8): Result.004 file - promoters60/5677240
aaaatcaa

SEQ ID NO: 150957 - DNA, 6 bp, Unknown
  misc_feature (1)..( 6): Result.004 file - promoters60/5677240
tcatct

SEQ ID NO: 150958 - DNA, 6 bp, Unknown
  misc_feature (1)..( 6): Result.004 file - promoters60/5677240
tcatct

SEQ ID NO: 150959 - DNA, 7 bp, Unknown
  misc_feature (1)..( 7): Result.004 file - promoters60/5677240
gttttga

SEQ ID NO: 150960 - DNA, 7 bp, Unknown
  misc_feature (1)..( 7): Result.004 file - promoters60/5677240
gttttgg

SEQ ID NO: 150961 - DNA, 7 bp, Unknown
  misc_feature (1)..( 7): Result.004 file - promoters60/5677240
attttgg

SEQ ID NO: 150962 - DNA, 9 bp, Unknown
  misc_feature (1)..( 9): Result.004 file - promoters60/5677240
taaagattt

SEQ ID NO: 150963 - DNA, 9 bp, Unknown
  misc_feature (1)..( 9): Result.004 file - promoters60/5677240
taaaaattt

SEQ ID NO: 150964 - DNA, 6 bp, Unknown
  misc_feature (1)..( 6): Result.004 file - promoters60/5677240
ttatta

SEQ ID NO: 150965 - DNA, 6 bp, Unknown
  misc_feature (1)..( 6): Result.004 file - promoters60/5677240
ttatta

SEQ ID NO: 150966 - DNA, 8 bp, Unknown
  misc_feature (1)..( 8): Result.004 file - promoters60/5677240
aaaataag

SEQ ID NO: 150967 - DNA, 8 bp, Unknown
  misc_feature (1)..( 8): Result.004 file - promoters60/5677240
aaactaag

SEQ ID NO: 150968 - DNA, 6 bp, Unknown
  misc_feature (1)..( 6): Result.004 file - promoters60/5677240
atagat

SEQ ID NO: 150969 - DNA, 6 bp, Unknown
  misc_feature (1)..( 6): Result.004 file - promoters60/5677240
atagat

SEQ ID NO: 150970 - DNA, 7 bp, Unknown
  misc_feature (1)..( 7): Result.004 file - promoters60/5677240
agatata

SEQ ID NO: 150971 - DNA, 7 bp, Unknown
  misc_feature (1)..( 7): Result.004 file - promoters60/5677240
agagata

SEQ ID NO: 150972 - DNA, 6 bp, Unknown
  misc_feature (1)..( 6): Result.004 file - promoters60/5677240
taagat

SEQ ID NO: 150973 - DNA, 6 bp, Unknown
  misc_feature (1)..( 6): Result.004 file - promoters60/5677240
taagat

SEQ ID NO: 150974 - DNA, 6 bp, Unknown
  misc_feature (1)..( 6): Result.004 file - promoters60/5677240
aaagaa

SEQ ID NO: 150975 - DNA, 6 bp, Unknown
  misc_feature (1)..( 6): Result.004 file - promoters60/5677240
aaagaa

SEQ ID NO: 150976 - DNA, 12 bp, Unknown
  misc_feature (1)..( 12): Result.004 file - promoters60/5677240
aaaaacaaaaca

SEQ ID NO: 150977 - DNA, 12 bp, Unknown
  misc_feature (1)..( 12): Result.004 file - promoters60/5677240
aaacacaataca

SEQ ID NO: 150978 - DNA, 6 bp, Unknown
  misc_feature (1)..( 6): Result.004 file - promoters60/5677240
aaaaat

SEQ ID NO: 150979 - DNA, 6 bp, Unknown
  misc_feature (1)..( 6): Result.004 file - promoters60/5677240
aaaaat

SEQ ID NO: 150980 - DNA, 6 bp, Unknown
  misc_feature (1)..( 6): Result.004 file - promoters60/5677240
taaccc

SEQ ID NO: 150981 - DNA, 6 bp, Unknown
  misc_feature (1)..( 6): Result.004 file - promoters60/5677274
taaccc

SEQ ID NO: 150982 - DNA, 14 bp, Unknown
  misc_feature (1)..( 14): Result.004 file - promoters60/5677274
gttcgcctagattt

SEQ ID NO: 150983 - DNA, 14 bp, Unknown
  misc_feature (1)..( 14): Result.004 file - promoters60/5677274
cattggttagcttt

SEQ ID NO: 150984 - DNA, 13 bp, Unknown
  misc_feature (1)..( 13): Result.004 file - promoters60/5677274
ttattttaactta

SEQ ID NO: 150985 - DNA, 14 bp, Unknown
  misc_feature (1)..( 14): Result.004 file - promoters60/5677274
attctttgaactta

SEQ ID NO: 150986 - DNA, 14 bp, Unknown
  misc_feature (1)..( 14): Result.004 file - promoters60/5677274
aacattataacgta

SEQ ID NO: 150987 - DNA, 14 bp, Unknown
  misc_feature (1)..( 14): Result.004 file - promoters60/5677274
gttctttgcttcat

SEQ ID NO: 150988 - DNA, 15 bp, Unknown
  misc_feature (1)..( 15): Result.004 file - promoters60/5677274
atgcctttattcttt

SEQ ID NO: 150989 - DNA, 8 bp, Unknown
  misc_feature (1)..( 8): Result.004 file - promoters60/5677274
tcatatag

SEQ ID NO: 150990 - DNA, 8 bp, Unknown
  misc_feature (1)..( 8): Result.004 file - promoters60/5677274
acatttag

SEQ ID NO: 150991 - DNA, 8 bp, Unknown
  misc_feature (1)..( 8): Result.004 file - promoters60/5677274
acatttct

SEQ ID NO: 150992 - DNA, 8 bp, Unknown
  misc_feature (1)..( 8): Result.004 file - promoters60/5677274
acagttac

SEQ ID NO: 150993 - DNA, 8 bp, Unknown
  misc_feature (1)..( 8): Result.004 file - promoters60/5677274
ccatttct

SEQ ID NO: 150994 - DNA, 11 bp, Unknown
  misc_feature (1)..( 11): Result.004 file - promoters60/5677274
taggaatttgg

SEQ ID NO: 150995 - DNA, 11 bp, Unknown
  misc_feature (1)..( 11): Result.004 file - promoters60/5677274
acataatttgt

SEQ ID NO: 150996 - DNA, 11 bp, Unknown
  misc_feature (1)..( 11): Result.004 file - promoters60/5677274
tctagatttgg

SEQ ID NO: 150997 - DNA, 11 bp, Unknown
  misc_feature (1)..( 11): Result.004 file - promoters60/5677274
ttagaatttgg

SEQ ID NO: 150998 - DNA, 11 bp, Unknown
  misc_feature (1)..( 11): Result.004 file - promoters60/5677274
acatagtttca

SEQ ID NO: 150999 - DNA, 11 bp, Unknown
  misc_feature (1)..( 11): Result.004 file - promoters60/5677274
caaagatttga

SEQ ID NO: 151000 - DNA, 11 bp, Unknown
  misc_feature (1)..( 11): Result.004 file - promoters60/5677274
accttagaatt

SEQ ID NO: 151001 - DNA, 11 bp, Unknown
  misc_feature (1)..( 11): Result.004 file - promoters60/5677274
attttataatt

SEQ ID NO: 151002 - DNA, 11 bp, Unknown
  misc_feature (1)..( 11): Result.004 file - promoters60/5677274
ttctttgaact

SEQ ID NO: 151003 - DNA, 11 bp, Unknown
  misc_feature (1)..( 11): Result.004 file - promoters60/5677274
acattataacg

SEQ ID NO: 151004 - DNA, 11 bp, Unknown
  misc_feature (1)..( 11): Result.004 file - promoters60/5677274
ttctttgcttc

SEQ ID NO: 151005 - DNA, 9 bp, Unknown
  misc_feature (1)..( 9): Result.004 file - promoters60/5677274
agatatttt

SEQ ID NO: 151006 - DNA, 9 bp, Unknown
  misc_feature (1)..( 9): Result.004 file - promoters60/5677274
aaatattta

SEQ ID NO: 151007 - DNA, 9 bp, Unknown
  misc_feature (1)..( 9): Result.004 file - promoters60/5677274
aaaaattcc

SEQ ID NO: 151008 - DNA, 9 bp, Unknown
  misc_feature (1)..( 9): Result.004 file - promoters60/5677274
agataatta

SEQ ID NO: 151009 - DNA, 9 bp, Unknown
  misc_feature (1)..( 9): Result.004 file - promoters60/5677274
agaaaatct

SEQ ID NO: 151010 - DNA, 11 bp, Unknown
  misc_feature (1)..( 11): Result.004 file - promoters60/5677274
tgaaacataaa

SEQ ID NO: 151011 - DNA, 11 bp, Unknown
  misc_feature (1)..( 11): Result.004 file - promoters60/5677274
ttcaacataat

SEQ ID NO: 151012 - DNA, 11 bp, Unknown
  misc_feature (1)..( 11): Result.004 file - promoters60/5677274
tgacacataac

SEQ ID NO: 151013 - DNA, 11 bp, Unknown
  misc_feature (1)..( 11): Result.004 file - promoters60/5677274
tagtacatata

SEQ ID NO: 151014 - DNA, 11 bp, Unknown
  misc_feature (1)..( 11): Result.004 file - promoters60/5677286
atcaacaaaat

SEQ ID NO: 151015 - DNA, 9 bp, Unknown
  misc_feature (1)..( 9): Result.004 file - promoters60/5677286
tctcaaact

SEQ ID NO: 151016 - DNA, 9 bp, Unknown
  misc_feature (1)..( 9): Result.004 file - promoters60/5677286
tctaaaaag

SEQ ID NO: 151017 - DNA, 9 bp, Unknown
  misc_feature (1)..( 9): Result.004 file - promoters60/5677286
tatcatact

SEQ ID NO: 151018 - DNA, 8 bp, Unknown
  misc_feature (1)..( 8): Result.004 file - promoters60/5677286
gagcaaaa

SEQ ID NO: 151019 - DNA, 8 bp, Unknown
  misc_feature (1)..( 8): Result.004 file - promoters60/5677286
gagaaaaa

SEQ ID NO: 151020 - DNA, 8 bp, Unknown
  misc_feature (1)..( 8): Result.004 file - promoters60/5677333
gagcaatg

SEQ ID NO: 151021 - DNA, 6 bp, Unknown
  misc_feature (1)..( 6): Result.004 file - promoters60/5677333
ttgtca

SEQ ID NO: 151022 - DNA, 6 bp, Unknown
  misc_feature (1)..( 6): Result.004 file - promoters60/5677333
ttgtca

SEQ ID NO: 151023 - DNA, 9 bp, Unknown
  misc_feature (1)..( 9): Result.004 file - promoters60/5677333
agatttctg

SEQ ID NO: 151024 - DNA, 9 bp, Unknown
  misc_feature (1)..( 9): Result.004 file - promoters60/5677333
agagttctg

SEQ ID NO: 151025 - DNA, 8 bp, Unknown
  misc_feature (1)..( 8): Result.004 file - promoters60/5677333
ctgtacaa

SEQ ID NO: 151026 - DNA, 8 bp, Unknown
  misc_feature (1)..( 8): Result.004 file - promoters60/5677333
ctgtacaa

SEQ ID NO: 151027 - DNA, 6 bp, Unknown
  misc_feature (1)..( 6): Result.004 file - promoters60/5677333
ccaaga

SEQ ID NO: 151028 - DNA, 6 bp, Unknown
  misc_feature (1)..( 6): Result.004 file - promoters60/5677333
ccaaga

SEQ ID NO: 151029 - DNA, 6 bp, Unknown
  misc_feature (1)..( 6): Result.004 file - promoters60/5677333
ggttga

SEQ ID NO: 151030 - DNA, 6 bp, Unknown
  misc_feature (1)..( 6): Result.004 file - promoters60/5677344
ggttga

SEQ ID NO: 151031 - DNA, 10 bp, Unknown
  misc_feature (1)..( 10): Result.004 file - promoters60/5677344
caaaaataag

SEQ ID NO: 151032 - DNA, 10 bp, Unknown
  misc_feature (1)..( 10): Result.004 file - promoters60/5677344
aaaaaatcgt

SEQ ID NO: 151033 - DNA, 10 bp, Unknown
  misc_feature (1)..( 10): Result.004 file - promoters60/5677344
taaacatatt

SEQ ID NO: 151034 - DNA, 10 bp, Unknown
  misc_feature (1)..( 10): Result.004 file - promoters60/5677344
ccaaaataaa

SEQ ID NO: 151035 - DNA, 10 bp, Unknown
  misc_feature (1)..( 10): Result.004 file - promoters60/5677344
tcaaattaaa

SEQ ID NO: 151036 - DNA, 10 bp, Unknown
  misc_feature (1)..( 10): Result.004 file - promoters60/5677344
ctaaaatcaa

SEQ ID NO: 151037 - DNA, 10 bp, Unknown
  misc_feature (1)..( 10): Result.004 file - promoters60/5677344
ccaaaattga

SEQ ID NO: 151038 - DNA, 10 bp, Unknown
  misc_feature (1)..( 10): Result.004 file - promoters60/5677344
gacaaataaa

SEQ ID NO: 151039 - DNA, 9 bp, Unknown
  misc_feature (1)..( 9): Result.004 file - promoters60/5677344
taagattag

SEQ ID NO: 151040 - DNA, 9 bp, Unknown
  misc_feature (1)..( 9): Result.004 file - promoters60/5677344
taaaattcc

SEQ ID NO: 151041 - DNA, 9 bp, Unknown
  misc_feature (1)..( 9): Result.004 file - promoters60/5677344
taaaatttc

SEQ ID NO: 151042 - DNA, 9 bp, Unknown
  misc_feature (1)..( 9): Result.004 file - promoters60/5677344
taaaatttt

SEQ ID NO: 151043 - DNA, 9 bp, Unknown
  misc_feature (1)..( 9): Result.004 file - promoters60/5677344
caaaattga

SEQ ID NO: 151044 - DNA, 9 bp, Unknown
  misc_feature (1)..( 9): Result.004 file - promoters60/5677344
taaaataac

SEQ ID NO: 151045 - DNA, 9 bp, Unknown
  misc_feature (1)..( 9): Result.004 file - promoters60/5677344
tcaaattaa

SEQ ID NO: 151046 - DNA, 11 bp, Unknown
  misc_feature (1)..( 11): Result.004 file - promoters60/5677344
atttatttcgg

SEQ ID NO: 151047 - DNA, 11 bp, Unknown
  misc_feature (1)..( 11): Result.004 file - promoters60/5677344
attcattttaa

SEQ ID NO: 151048 - DNA, 11 bp, Unknown
  misc_feature (1)..( 11): Result.004 file - promoters60/5677344
ttttattctat

SEQ ID NO: 151049 - DNA, 12 bp, Unknown
  misc_feature (1)..( 12): Result.004 file - promoters60/5677344
ggtcaatttgaa

SEQ ID NO: 151050 - DNA, 12 bp, Unknown
  misc_feature (1)..( 12): Result.004 file - promoters60/5677344
atttcatttcca

SEQ ID NO: 151051 - DNA, 12 bp, Unknown
  misc_feature (1)..( 12): Result.004 file - promoters60/5677344
tacaaatatgaa

SEQ ID NO: 151052 - DNA, 16 bp, Unknown
  misc_feature (1)..( 16): Result.004 file - promoters60/5677344
ggaaaaaaaagacaaa

SEQ ID NO: 151053 - DNA, 16 bp, Unknown
  misc_feature (1)..( 16): Result.004 file - promoters60/5677344
aaaaaaagaagaaaaa

SEQ ID NO: 151054 - DNA, 16 bp, Unknown
  misc_feature (1)..( 16): Result.004 file - promoters60/5677344
aaaccaaaacgacgtc

SEQ ID NO: 151055 - DNA, 16 bp, Unknown
  misc_feature (1)..( 16): Result.004 file - promoters60/5677344
attagaaacagacttc

SEQ ID NO: 151056 - DNA, 16 bp, Unknown
  misc_feature (1)..( 16): Result.004 file - promoters60/5677344
atttgaattggtattt

SEQ ID NO: 151057 - DNA, 16 bp, Unknown
  misc_feature (1)..( 16): Result.004 file - promoters60/5677344
attacaaatatgaaaa

SEQ ID NO: 151058 - DNA, 16 bp, Unknown
  misc_feature (1)..( 16): Result.004 file - promoters60/5677344
tagtcaaacaaatgtt

SEQ ID NO: 151059 - DNA, 10 bp, Unknown
  misc_feature (1)..( 10): Result.004 file - promoters60/5677344
caaaaataag

SEQ ID NO: 151060 - DNA, 10 bp, Unknown
  misc_feature (1)..( 10): Result.004 file - promoters60/5677344
gacaaataaa

SEQ ID NO: 151061 - DNA, 10 bp, Unknown
  misc_feature (1)..( 10): Result.004 file - promoters60/5677344
ccaaaataaa

SEQ ID NO: 151062 - DNA, 10 bp, Unknown
  misc_feature (1)..( 10): Result.004 file - promoters60/5677344
tcaaattaaa

SEQ ID NO: 151063 - DNA, 10 bp, Unknown
  misc_feature (1)..( 10): Result.004 file - promoters60/5677344
ccaaaatcag

SEQ ID NO: 151064 - DNA, 10 bp, Unknown
  misc_feature (1)..( 10): Result.004 file - promoters60/5677344
gacaaataaa

SEQ ID NO: 151065 - DNA, 10 bp, Unknown
  misc_feature (1)..( 10): Result.004 file - promoters60/5677344
tttctagggt

SEQ ID NO: 151066 - DNA, 10 bp, Unknown
  misc_feature (1)..( 10): Result.004 file - promoters60/5677344
tttctatgtg

SEQ ID NO: 151067 - DNA, 10 bp, Unknown
  misc_feature (1)..( 10): Result.004 file - promoters60/5677344
tttttataat

SEQ ID NO: 151068 - DNA, 10 bp, Unknown
  misc_feature (1)..( 10): Result.004 file - promoters60/5677344
tttgtatcca

SEQ ID NO: 151069 - DNA, 10 bp, Unknown
  misc_feature (1)..( 10): Result.004 file - promoters60/5677344
aatttattgt

SEQ ID NO: 151070 - DNA, 10 bp, Unknown
  misc_feature (1)..( 10): Result.004 file - promoters60/5677484
tatttattta

SEQ ID NO: 151071 - DNA, 7 bp, Unknown
  misc_feature (1)..( 7): Result.004 file - promoters60/5677484
attaaat

SEQ ID NO: 151072 - DNA, 7 bp, Unknown
  misc_feature (1)..( 7): Result.004 file - promoters60/5677484
attaaat

SEQ ID NO: 151073 - DNA, 8 bp, Unknown
  misc_feature (1)..( 8): Result.004 file - promoters60/5677484
tgaaaaaa

SEQ ID NO: 151074 - DNA, 8 bp, Unknown
  misc_feature (1)..( 8): Result.004 file - promoters60/5677484
tgagaaaa

SEQ ID NO: 151075 - DNA, 8 bp, Unknown
  misc_feature (1)..( 8): Result.004 file - promoters60/5677484
attcttta

SEQ ID NO: 151076 - DNA, 8 bp, Unknown
  misc_feature (1)..( 8): Result.004 file - promoters60/5677484
attttttt

SEQ ID NO: 151077 - DNA, 8 bp, Unknown
  misc_feature (1)..( 8): Result.004 file - promoters60/5677484
tctcttta

SEQ ID NO: 151078 - DNA, 9 bp, Unknown
  misc_feature (1)..( 9): Result.004 file - promoters60/5677484
tcatattta

SEQ ID NO: 151079 - DNA, 9 bp, Unknown
  misc_feature (1)..( 9): Result.004 file - promoters60/5677484
tcatattaa

SEQ ID NO: 151080 - DNA, 9 bp, Unknown
  misc_feature (1)..( 9): Result.004 file - promoters60/5677484
ccatattta

SEQ ID NO: 151081 - DNA, 7 bp, Unknown
  misc_feature (1)..( 7): Result.004 file - promoters60/5677484
aaactaa

SEQ ID NO: 151082 - DNA, 7 bp, Unknown
  misc_feature (1)..( 7): Result.004 file - promoters60/5677484
aaaataa

SEQ ID NO: 151083 - DNA, 6 bp, Unknown
  misc_feature (1)..( 6): Result.004 file - promoters60/5677484
ttaatt

SEQ ID NO: 151084 - DNA, 6 bp, Unknown
  misc_feature (1)..( 6): Result.004 file - promoters60/5677484
ttaatt

SEQ ID NO: 151085 - DNA, 8 bp, Unknown
  misc_feature (1)..( 8): Result.004 file - promoters60/5677484
atgacata

SEQ ID NO: 151086 - DNA, 8 bp, Unknown
  misc_feature (1)..( 8): Result.004 file - promoters60/5677484
atgaaata

SEQ ID NO: 151087 - DNA, 6 bp, Unknown
  misc_feature (1)..( 6): Result.004 file - promoters60/5677484
ataaat

SEQ ID NO: 151088 - DNA, 6 bp, Unknown
  misc_feature (1)..( 6): Result.004 file - promoters60/5677484
ataaat

SEQ ID NO: 151089 - DNA, 6 bp, Unknown
  misc_feature (1)..( 6): Result.004 file - promoters60/5677484
taaatt

SEQ ID NO: 151090 - DNA, 6 bp, Unknown
  misc_feature (1)..( 6): Result.004 file - promoters60/5677484
taaatt

SEQ ID NO: 151091 - DNA, 6 bp, Unknown
  misc_feature (1)..( 6): Result.004 file - promoters60/5677484
ttatta

SEQ ID NO: 151092 - DNA, 6 bp, Unknown
  misc_feature (1)..( 6): Result.004 file - promoters60/5677484
ttatta

SEQ ID NO: 151093 - DNA, 8 bp, Unknown
  misc_feature (1)..( 8): Result.004 file - promoters60/5677484
taaactat

SEQ ID NO: 151094 - DNA, 8 bp, Unknown
  misc_feature (1)..( 8): Result.004 file - promoters60/5677484
taaaatat

SEQ ID NO: 151095 - DNA, 6 bp, Unknown
  misc_feature (1)..( 6): Result.004 file - promoters60/5677484
aacttt

SEQ ID NO: 151096 - DNA, 6 bp, Unknown
  misc_feature (1)..( 6): Result.004 file - promoters60/5677484
aacttt

SEQ ID NO: 151097 - DNA, 9 bp, Unknown
  misc_feature (1)..( 9): Result.004 file - promoters60/5677484
aaaaattaa

SEQ ID NO: 151098 - DNA, 9 bp, Unknown
  misc_feature (1)..( 9): Result.004 file - promoters60/5677484
aaaaagtaa

SEQ ID NO: 151099 - DNA, 6 bp, Unknown
  misc_feature (1)..( 6): Result.004 file - promoters60/5677484
tttaaa

SEQ ID NO: 151100 - DNA, 6 bp, Unknown
  misc_feature (1)..( 6): Result.004 file - promoters60/5677484
tttaaa

SEQ ID NO: 151101 - DNA, 13 bp, Unknown
  misc_feature (1)..( 13): Result.004 file - promoters60/5677484
ttttgcacttttt

SEQ ID NO: 151102 - DNA, 13 bp, Unknown
  misc_feature (1)..( 13): Result.004 file - promoters60/5677484
tttttcactattt

SEQ ID NO: 151103 - DNA, 7 bp, Unknown
  misc_feature (1)..( 7): Result.004 file - promoters60/5677484
aacgtaa

SEQ ID NO: 151104 - DNA, 7 bp, Unknown
  misc_feature (1)..( 7): Result.004 file - promoters60/5677484
aacttaa

SEQ ID NO: 151105 - DNA, 6 bp, Unknown
  misc_feature (1)..( 6): Result.004 file - promoters60/5677484
tgggcc

SEQ ID NO: 151106 - DNA, 6 bp, Unknown
  misc_feature (1)..( 6): Result.004 file - promoters60/5677484
tgggcc

SEQ ID NO: 151107 - DNA, 7 bp, Unknown
  misc_feature (1)..( 7): Result.004 file - promoters60/5677484
tctcgaa

SEQ ID NO: 151108 - DNA, 7 bp, Unknown
  misc_feature (1)..( 7): Result.004 file - promoters60/5677484
tcttgaa

SEQ ID NO: 151109 - DNA, 8 bp, Unknown
  misc_feature (1)..( 8): Result.004 file - promoters60/5677484
tttcattt

SEQ ID NO: 151110 - DNA, 8 bp, Unknown
  misc_feature (1)..( 8): Result.004 file - promoters60/5677484
ttttattt

SEQ ID NO: 151111 - DNA, 7 bp, Unknown
  misc_feature (1)..( 7): Result.004 file - promoters60/5677484
aataata

SEQ ID NO: 151112 - DNA, 7 bp, Unknown
  misc_feature (1)..( 7): Result.004 file - promoters60/5677484
aatgata

SEQ ID NO: 151113 - DNA, 6 bp, Unknown
  misc_feature (1)..( 6): Result.004 file - promoters60/5677484
tatttg

SEQ ID NO: 151114 - DNA, 6 bp, Unknown
  misc_feature (1)..( 6): Result.004 file - promoters60/5677484
tatttg

SEQ ID NO: 151115 - DNA, 7 bp, Unknown
  misc_feature (1)..( 7): Result.004 file - promoters60/5677484
caaaatt

SEQ ID NO: 151116 - DNA, 7 bp, Unknown
  misc_feature (1)..( 7): Result.004 file - promoters60/5680986
caaaatt

SEQ ID NO: 151117 - DNA, 8 bp, Unknown
  misc_feature (1)..( 8): Result.004 file - promoters60/5680986
attttaga

SEQ ID NO: 151118 - DNA, 8 bp, Unknown
  misc_feature (1)..( 8): Result.004 file - promoters60/5680986
ttttcaga

SEQ ID NO: 151119 - DNA, 8 bp, Unknown
  misc_feature (1)..( 8): Result.004 file - promoters60/5680986
attctaga

SEQ ID NO: 151120 - DNA, 8 bp, Unknown
  misc_feature (1)..( 8): Result.004 file - promoters60/5681068
ttttcacc

SEQ ID NO: 151121 - DNA, 6 bp, Unknown
  misc_feature (1)..( 6): Result.004 file - promoters60/5681068
cgtgga

SEQ ID NO: 151122 - DNA, 6 bp, Unknown
  misc_feature (1)..( 6): Result.004 file - promoters60/5681068
cgtgga

SEQ ID NO: 151123 - DNA, 7 bp, Unknown
  misc_feature (1)..( 7): Result.004 file - promoters60/5681068
gctaaaa

SEQ ID NO: 151124 - DNA, 7 bp, Unknown
  misc_feature (1)..( 7): Result.004 file - promoters60/5681068
gctgaaa

SEQ ID NO: 151125 - DNA, 7 bp, Unknown
  misc_feature (1)..( 7): Result.004 file - promoters60/5681068
tctgaaa

SEQ ID NO: 151126 - DNA, 6 bp, Unknown
  misc_feature (1)..( 6): Result.004 file - promoters60/5681068
attcaa

SEQ ID NO: 151127 - DNA, 6 bp, Unknown
  misc_feature (1)..( 6): Result.004 file - promoters60/5681068
attcaa

SEQ ID NO: 151128 - DNA, 9 bp, Unknown
  misc_feature (1)..( 9): Result.004 file - promoters60/5681068
tttggattt

SEQ ID NO: 151129 - DNA, 9 bp, Unknown
  misc_feature (1)..( 9): Result.004 file - promoters60/5681068
ttttgattt

SEQ ID NO: 151130 - DNA, 8 bp, Unknown
  misc_feature (1)..( 8): Result.004 file - promoters60/5681068
cacaccgt

SEQ ID NO: 151131 - DNA, 8 bp, Unknown
  misc_feature (1)..( 8): Result.004 file - promoters60/5681068
cacatcgt

SEQ ID NO: 151132 - DNA, 7 bp, Unknown
  misc_feature (1)..( 7): Result.004 file - promoters60/5681068
gtggatt

SEQ ID NO: 151133 - DNA, 7 bp, Unknown
  misc_feature (1)..( 7): Result.004 file - promoters60/5681068
gtgaatt

SEQ ID NO: 151134 - DNA, 6 bp, Unknown
  misc_feature (1)..( 6): Result.004 file - promoters60/5681068
ccgttg

SEQ ID NO: 151135 - DNA, 6 bp, Unknown
  misc_feature (1)..( 6): Result.004 file - promoters60/5681068
ccgttg

SEQ ID NO: 151136 - DNA, 6 bp, Unknown
  misc_feature (1)..( 6): Result.004 file - promoters60/5681068
atcgta

SEQ ID NO: 151137 - DNA, 6 bp, Unknown
  misc_feature (1)..( 6): Result.004 file - promoters60/5681068
atcgta

SEQ ID NO: 151138 - DNA, 6 bp, Unknown
  misc_feature (1)..( 6): Result.004 file - promoters60/5681068
agtcga

SEQ ID NO: 151139 - DNA, 6 bp, Unknown
  misc_feature (1)..( 6): Result.004 file - promoters60/5681068
agtcga

SEQ ID NO: 151140 - DNA, 9 bp, Unknown
  misc_feature (1)..( 9): Result.004 file - promoters60/5681068
gtgtcctct

SEQ ID NO: 151141 - DNA, 9 bp, Unknown
  misc_feature (1)..( 9): Result.004 file - promoters60/5681068
gtgtgctct

SEQ ID NO: 151142 - DNA, 6 bp, Unknown
  misc_feature (1)..( 6): Result.004 file - promoters60/5681068
aaccgt

SEQ ID NO: 151143 - DNA, 6 bp, Unknown
  misc_feature (1)..( 6): Result.004 file - promoters60/5681068
aaccgt

SEQ ID NO: 151144 - DNA, 7 bp, Unknown
  misc_feature (1)..( 7): Result.004 file - promoters60/5681068
aatacaa

SEQ ID NO: 151145 - DNA, 7 bp, Unknown
  misc_feature (1)..( 7): Result.004 file - promoters60/5681068
aatgcaa

SEQ ID NO: 151146 - DNA, 7 bp, Unknown
  misc_feature (1)..( 7): Result.004 file - promoters60/5681068
agatagg

SEQ ID NO: 151147 - DNA, 7 bp, Unknown
  misc_feature (1)..( 7): Result.004 file - promoters60/5681068
agaaagg

SEQ ID NO: 151148 - DNA, 7 bp, Unknown
  misc_feature (1)..( 7): Result.004 file - promoters60/5681068
ttgaaga

SEQ ID NO: 151149 - DNA, 7 bp, Unknown
  misc_feature (1)..( 7): Result.004 file - promoters60/5681068
ttgcaga

SEQ ID NO: 151150 - DNA, 7 bp, Unknown
  misc_feature (1)..( 7): Result.004 file - promoters60/5681068
cgtggat

SEQ ID NO: 151151 - DNA, 7 bp, Unknown
  misc_feature (1)..( 7): Result.004 file - promoters60/5681068
cgtggat

SEQ ID NO: 151152 - DNA, 7 bp, Unknown
  misc_feature (1)..( 7): Result.004 file - promoters60/5681068
catcgag

SEQ ID NO: 151153 - DNA, 7 bp, Unknown
  misc_feature (1)..( 7): Result.004 file - promoters60/5681068
cattgag

SEQ ID NO: 151154 - DNA, 6 bp, Unknown
  misc_feature (1)..( 6): Result.004 file - promoters60/5681068
atcgga

SEQ ID NO: 151155 - DNA, 6 bp, Unknown
  misc_feature (1)..( 6): Result.004 file - promoters60/5681068
atcgga

SEQ ID NO: 151156 - DNA, 8 bp, Unknown
  misc_feature (1)..( 8): Result.004 file - promoters60/5681068
gtaagttt

SEQ ID NO: 151157 - DNA, 8 bp, Unknown
  misc_feature (1)..( 8): Result.004 file - promoters60/5681068
gtacgttt

SEQ ID NO: 151158 - DNA, 7 bp, Unknown
  misc_feature (1)..( 7): Result.004 file - promoters60/5681068
ctacaca

SEQ ID NO: 151159 - DNA, 7 bp, Unknown
  misc_feature (1)..( 7): Result.004 file - promoters60/5681157
ctaaaca

SEQ ID NO: 151160 - DNA, 6 bp, Unknown
  misc_feature (1)..( 6): Result.004 file - promoters60/5681157
acacaa

SEQ ID NO: 151161 - DNA, 6 bp, Unknown
  misc_feature (1)..( 6): Result.004 file - promoters60/5681157
acacaa

SEQ ID NO: 151162 - DNA, 10 bp, Unknown
  misc_feature (1)..( 10): Result.004 file - promoters60/5681157
accttaaaaa

SEQ ID NO: 151163 - DNA, 10 bp, Unknown
  misc_feature (1)..( 10): Result.004 file - promoters60/5681157
catttaaaat

SEQ ID NO: 151164 - DNA, 10 bp, Unknown
  misc_feature (1)..( 10): Result.004 file - promoters60/5681157
accttaaaaa

SEQ ID NO: 151165 - DNA, 8 bp, Unknown
  misc_feature (1)..( 8): Result.004 file - promoters60/5681157
ctacaaaa

SEQ ID NO: 151166 - DNA, 8 bp, Unknown
  misc_feature (1)..( 8): Result.004 file - promoters60/5681157
ctagaaaa

SEQ ID NO: 151167 - DNA, 7 bp, Unknown
  misc_feature (1)..( 7): Result.004 file - promoters60/5681157
aaataaa

SEQ ID NO: 151168 - DNA, 7 bp, Unknown
  misc_feature (1)..( 7): Result.004 file - promoters60/5681157
aaataac

SEQ ID NO: 151169 - DNA, 8 bp, Unknown
  misc_feature (1)..( 8): Result.004 file - promoters60/5681157
aaattaaa

SEQ ID NO: 151170 - DNA, 6 bp, Unknown
  misc_feature (1)..( 6): Result.004 file - promoters60/5681157
ttaaaa

SEQ ID NO: 151171 - DNA, 6 bp, Unknown
  misc_feature (1)..( 6): Result.004 file - promoters60/5681157
ttaaaa

SEQ ID NO: 151172 - DNA, 6 bp, Unknown
  misc_feature (1)..( 6): Result.004 file - promoters60/5681157
ttaaaa

SEQ ID NO: 151173 - DNA, 8 bp, Unknown
  misc_feature (1)..( 8): Result.004 file - promoters60/5681157
aaaaccat

SEQ ID NO: 151174 - DNA, 8 bp, Unknown
  misc_feature (1)..( 8): Result.004 file - promoters60/5681157
taaaccat

SEQ ID NO: 151175 - DNA, 8 bp, Unknown
  misc_feature (1)..( 8): Result.004 file - promoters60/5681157
taaaccta

SEQ ID NO: 151176 - DNA, 12 bp, Unknown
  misc_feature (1)..( 12): Result.004 file - promoters60/5681157
ataaaccaaaaa

SEQ ID NO: 151177 - DNA, 12 bp, Unknown
  misc_feature (1)..( 12): Result.004 file - promoters60/5681157
accattcaaaaa

SEQ ID NO: 151178 - DNA, 12 bp, Unknown
  misc_feature (1)..( 12): Result.004 file - promoters60/5681157
ataaacctaaat

SEQ ID NO: 151179 - DNA, 7 bp, Unknown
  misc_feature (1)..( 7): Result.004 file - promoters60/5681157
tcaaatt

SEQ ID NO: 151180 - DNA, 7 bp, Unknown
  misc_feature (1)..( 7): Result.004 file - promoters60/5681157
tcaaatt

SEQ ID NO: 151181 - DNA, 9 bp, Unknown
  misc_feature (1)..( 9): Result.004 file - promoters60/5681157
attaccaat

SEQ ID NO: 151182 - DNA, 9 bp, Unknown
  misc_feature (1)..( 9): Result.004 file - promoters60/5681157
attagcaat

SEQ ID NO: 151183 - DNA, 6 bp, Unknown
  misc_feature (1)..( 6): Result.004 file - promoters60/5681157
ggatcc

SEQ ID NO: 151184 - DNA, 6 bp, Unknown
  misc_feature (1)..( 6): Result.004 file - promoters60/5681157
ggatcc

SEQ ID NO: 151185 - DNA, 7 bp, Unknown
  misc_feature (1)..( 7): Result.004 file - promoters60/5681157
tataaat

SEQ ID NO: 151186 - DNA, 7 bp, Unknown
  misc_feature (1)..( 7): Result.004 file - promoters60/5681157
tattaat

SEQ ID NO: 151187 - DNA, 7 bp, Unknown
  misc_feature (1)..( 7): Result.004 file - promoters60/5681157
ttggaaa

SEQ ID NO: 151188 - DNA, 7 bp, Unknown
  misc_feature (1)..( 7): Result.004 file - promoters60/5681157
ttgtaaa

SEQ ID NO: 151189 - DNA, 6 bp, Unknown
  misc_feature (1)..( 6): Result.004 file - promoters60/5681157
aaataa

SEQ ID NO: 151190 - DNA, 6 bp, Unknown
  misc_feature (1)..( 6): Result.004 file - promoters60/5681157
aaataa

SEQ ID NO: 151191 - DNA, 6 bp, Unknown
  misc_feature (1)..( 6): Result.004 file - promoters60/5681157
ttaaaa

SEQ ID NO: 151192 - DNA, 6 bp, Unknown
  misc_feature (1)..( 6): Result.004 file - promoters60/5681157
ttaaaa

SEQ ID NO: 151193 - DNA, 7 bp, Unknown
  misc_feature (1)..( 7): Result.004 file - promoters60/5681157
aaagcct

SEQ ID NO: 151194 - DNA, 7 bp, Unknown
  misc_feature (1)..( 7): Result.004 file - promoters60/5681157
aaaacct

SEQ ID NO: 151195 - DNA, 6 bp, Unknown
  misc_feature (1)..( 6): Result.004 file - promoters60/5681157
ttaaaa

SEQ ID NO: 151196 - DNA, 6 bp, Unknown
  misc_feature (1)..( 6): Result.004 file - promoters60/5681157
ttaaaa

SEQ ID NO: 151197 - DNA, 6 bp, Unknown
  misc_feature (1)..( 6): Result.004 file - promoters60/5681157
ttaaaa

SEQ ID NO: 151198 - DNA, 7 bp, Unknown
  misc_feature (1)..( 7): Result.004 file - promoters60/5681157
aaaccta

SEQ ID NO: 151199 - DNA, 7 bp, Unknown
  misc_feature (1)..( 7): Result.004 file - promoters60/5681157
aaatcta

SEQ ID NO: 151200 - DNA, 9 bp, Unknown
  misc_feature (1)..( 9): Result.004 file - promoters60/5681157
aaaatatga

SEQ ID NO: 151201 - DNA, 9 bp, Unknown
  misc_feature (1)..( 9): Result.004 file - promoters60/5681157
aaaataaac

SEQ ID NO: 151202 - DNA, 9 bp, Unknown
  misc_feature (1)..( 9): Result.004 file - promoters60/5681157
aaattaaac

SEQ ID NO: 151203 - DNA, 6 bp, Unknown
  misc_feature (1)..( 6): Result.004 file - promoters60/5681157
ccaaaa

SEQ ID NO: 151204 - DNA, 6 bp, Unknown
  misc_feature (1)..( 6): Result.004 file - promoters60/5681157
ccaaaa

SEQ ID NO: 151205 - DNA, 6 bp, Unknown
  misc_feature (1)..( 6): Result.004 file - promoters60/5681157
ccaaaa

SEQ ID NO: 151206 - DNA, 6 bp, Unknown
  misc_feature (1)..( 6): Result.004 file - promoters60/5681157
ccaaaa

SEQ ID NO: 151207 - DNA, 7 bp, Unknown
  misc_feature (1)..( 7): Result.004 file - promoters60/5681157
aaattca

SEQ ID NO: 151208 - DNA, 7 bp, Unknown
  misc_feature (1)..( 7): Result.004 file - promoters60/5681157
aaaatca

SEQ ID NO: 151209 - DNA, 7 bp, Unknown
  misc_feature (1)..( 7): Result.004 file - promoters60/5681157
tcataaa

SEQ ID NO: 151210 - DNA, 7 bp, Unknown
  misc_feature (1)..( 7): Result.004 file - promoters60/5681157
tcataaa

SEQ ID NO: 151211 - DNA, 10 bp, Unknown
  misc_feature (1)..( 10): Result.004 file - promoters60/5681157
caataattca

SEQ ID NO: 151212 - DNA, 10 bp, Unknown
  misc_feature (1)..( 10): Result.004 file - promoters60/5681157
caaaaattca

SEQ ID NO: 151213 - DNA, 10 bp, Unknown
  misc_feature (1)..( 10): Result.004 file - promoters60/5681157
aatgtattat

SEQ ID NO: 151214 - DNA, 10 bp, Unknown
  misc_feature (1)..( 10): Result.004 file - promoters60/5681157
tttgtaatat

SEQ ID NO: 151215 - DNA, 10 bp, Unknown
  misc_feature (1)..( 10): Result.004 file - promoters60/5681157
tttttaaaaa

SEQ ID NO: 151216 - DNA, 7 bp, Unknown
  misc_feature (1)..( 7): Result.004 file - promoters60/5681157
aattggt

SEQ ID NO: 151217 - DNA, 7 bp, Unknown
  misc_feature (1)..( 7): Result.004 file - promoters60/5681157
aattggt

SEQ ID NO: 151218 - DNA, 6 bp, Unknown
  misc_feature (1)..( 6): Result.004 file - promoters60/5681157
atatga

SEQ ID NO: 151219 - DNA, 6 bp, Unknown
  misc_feature (1)..( 6): Result.004 file - promoters60/5681157
atatga

SEQ ID NO: 151220 - DNA, 15 bp, Unknown
  misc_feature (1)..( 15): Result.004 file - promoters60/5681157
ttttttttgttttcc

SEQ ID NO: 151221 - DNA, 15 bp, Unknown
  misc_feature (1)..( 15): Result.004 file - promoters60/5681157
ttttctttcttttcc

SEQ ID NO: 151222 - DNA, 7 bp, Unknown
  misc_feature (1)..( 7): Result.004 file - promoters60/5681157
acacaat

SEQ ID NO: 151223 - DNA, 7 bp, Unknown
  misc_feature (1)..( 7): Result.004 file - promoters60/5681157
acacaat

SEQ ID NO: 151224 - DNA, 7 bp, Unknown
  misc_feature (1)..( 7): Result.004 file - promoters60/5681157
caaaaat

SEQ ID NO: 151225 - DNA, 7 bp, Unknown
  misc_feature (1)..( 7): Result.004 file - promoters60/5681157
caataat

SEQ ID NO: 151226 - DNA, 6 bp, Unknown
  misc_feature (1)..( 6): Result.004 file - promoters60/5681157
gttttt

SEQ ID NO: 151227 - DNA, 6 bp, Unknown
  misc_feature (1)..( 6): Result.004 file - promoters60/5681157
gttttt

SEQ ID NO: 151228 - DNA, 7 bp, Unknown
  misc_feature (1)..( 7): Result.004 file - promoters60/5681157
tattatt

SEQ ID NO: 151229 - DNA, 7 bp, Unknown
  misc_feature (1)..( 7): Result.004 file - promoters60/5681157
tattatt

SEQ ID NO: 151230 - DNA, 9 bp, Unknown
  misc_feature (1)..( 9): Result.004 file - promoters60/5681157
tcatatttt

SEQ ID NO: 151231 - DNA, 9 bp, Unknown
  misc_feature (1)..( 9): Result.004 file - promoters60/5681157
tcatacttt

SEQ ID NO: 151232 - DNA, 8 bp, Unknown
  misc_feature (1)..( 8): Result.004 file - promoters60/5681157
gttacatc

SEQ ID NO: 151233 - DNA, 8 bp, Unknown
  misc_feature (1)..( 8): Result.004 file - promoters60/5753942
gttaaatc

SEQ ID NO: 151234 - DNA, 9 bp, Unknown
  misc_feature (1)..( 9): Result.004 file - promoters60/5753942
acaattgta

SEQ ID NO: 151235 - DNA, 9 bp, Unknown
  misc_feature (1)..( 9): Result.004 file - promoters60/5753942
tacattgta

SEQ ID NO: 151236 - DNA, 9 bp, Unknown
  misc_feature (1)..( 9): Result.004 file - promoters60/5753942
caaattgta

SEQ ID NO: 151237 - DNA, 9 bp, Unknown
  misc_feature (1)..( 9): Result.004 file - promoters60/5753942
taccttgtt

SEQ ID NO: 151238 - DNA, 9 bp, Unknown
  misc_feature (1)..( 9): Result.004 file - promoters60/5753942
caaacaaaa

SEQ ID NO: 151239 - DNA, 9 bp, Unknown
  misc_feature (1)..( 9): Result.004 file - promoters60/5753942
gaaacaaag

SEQ ID NO: 151240 - DNA, 9 bp, Unknown
  misc_feature (1)..( 9): Result.004 file - promoters60/5753942
taaagaaaa

SEQ ID NO: 151241 - DNA, 9 bp, Unknown
  misc_feature (1)..( 9): Result.004 file - promoters60/5753942
caatcaaat

SEQ ID NO: 151242 - DNA, 9 bp, Unknown
  misc_feature (1)..( 9): Result.004 file - promoters60/5753942
caaccaaca

SEQ ID NO: 151243 - DNA, 8 bp, Unknown
  misc_feature (1)..( 8): Result.004 file - promoters60/5753942
tttcaggg

SEQ ID NO: 151244 - DNA, 8 bp, Unknown
  misc_feature (1)..( 8): Result.004 file - promoters60/5753942
ttttaggc

SEQ ID NO: 151245 - DNA, 8 bp, Unknown
  misc_feature (1)..( 8): Result.004 file - promoters60/5753942
atttgggc

SEQ ID NO: 151246 - DNA, 8 bp, Unknown
  misc_feature (1)..( 8): Result.004 file - promoters60/5753942
atttggat

SEQ ID NO: 151247 - DNA, 8 bp, Unknown
  misc_feature (1)..( 8): Result.004 file - promoters60/5753942
aatttggt

SEQ ID NO: 151248 - DNA, 8 bp, Unknown
  misc_feature (1)..( 8): Result.004 file - promoters60/5753942
tatttgga

SEQ ID NO: 151249 - DNA, 8 bp, Unknown
  misc_feature (1)..( 8): Result.004 file - promoters60/5753942
aatttggg

SEQ ID NO: 151250 - DNA, 9 bp, Unknown
  misc_feature (1)..( 9): Result.004 file - promoters60/5753942
attttaggc

SEQ ID NO: 151251 - DNA, 11 bp, Unknown
  misc_feature (1)..( 11): Result.004 file - promoters60/5753942
tttgtgttttt

SEQ ID NO: 151252 - DNA, 11 bp, Unknown
  misc_feature (1)..( 11): Result.004 file - promoters60/5753942
gatgtcttttt

SEQ ID NO: 151253 - DNA, 11 bp, Unknown
  misc_feature (1)..( 11): Result.004 file - promoters60/5753942
tttgggttcct

SEQ ID NO: 151254 - DNA, 11 bp, Unknown
  misc_feature (1)..( 11): Result.004 file - promoters60/5754134
tttggggttaa

SEQ ID NO: 151255 - DNA, 12 bp, Unknown
  misc_feature (1)..( 12): Result.004 file - promoters60/5754134
gcaatctggatg

SEQ ID NO: 151256 - DNA, 12 bp, Unknown
  misc_feature (1)..( 12): Result.004 file - promoters60/5754134
tgggcctgcatg

SEQ ID NO: 151257 - DNA, 12 bp, Unknown
  misc_feature (1)..( 12): Result.004 file - promoters60/5754134
gaaatatggata

SEQ ID NO: 151258 - DNA, 12 bp, Unknown
  misc_feature (1)..( 12): Result.004 file - promoters60/5754134
gaggtcttgatt

SEQ ID NO: 151259 - DNA, 12 bp, Unknown
  misc_feature (1)..( 12): Result.004 file - promoters60/5754265
gaaatatgacac

SEQ ID NO: 151260 - DNA, 12 bp, Unknown
  misc_feature (1)..( 12): Result.004 file - promoters60/5754265
tttaattagtcc

SEQ ID NO: 151261 - DNA, 12 bp, Unknown
  misc_feature (1)..( 12): Result.004 file - promoters60/5754265
gttatttatttt

SEQ ID NO: 151262 - DNA, 12 bp, Unknown
  misc_feature (1)..( 12): Result.004 file - promoters60/5754265
tttaatcaatca

SEQ ID NO: 151263 - DNA, 13 bp, Unknown
  misc_feature (1)..( 13): Result.004 file - promoters60/5754265
ctaaatataaacc

SEQ ID NO: 151264 - DNA, 13 bp, Unknown
  misc_feature (1)..( 13): Result.004 file - promoters60/5754265
agagatttactca

SEQ ID NO: 151265 - DNA, 13 bp, Unknown
  misc_feature (1)..( 13): Result.004 file - promoters60/5754265
gaataactttatc

SEQ ID NO: 151266 - DNA, 13 bp, Unknown
  misc_feature (1)..( 13): Result.004 file - promoters60/5754265
acctaacttttga

SEQ ID NO: 151267 - DNA, 13 bp, Unknown
  misc_feature (1)..( 13): Result.004 file - promoters60/5754265
caatcacttcatc

SEQ ID NO: 151268 - DNA, 13 bp, Unknown
  misc_feature (1)..( 13): Result.004 file - promoters60/5754265
atataactctgca

SEQ ID NO: 151269 - DNA, 13 bp, Unknown
  misc_feature (1)..( 13): Result.004 file - promoters60/5754269
caaacacacattt

SEQ ID NO: 151270 - DNA, 7 bp, Unknown
  misc_feature (1)..( 7): Result.004 file - promoters60/5754269
aatttaa

SEQ ID NO: 151271 - DNA, 7 bp, Unknown
  misc_feature (1)..( 7): Result.004 file - promoters60/5754269
aatttac

SEQ ID NO: 151272 - DNA, 7 bp, Unknown
  misc_feature (1)..( 7): Result.004 file - promoters60/5754269
aatttac

SEQ ID NO: 151273 - DNA, 9 bp, Unknown
  misc_feature (1)..( 9): Result.004 file - promoters60/5754269
aaatgttgc

SEQ ID NO: 151274 - DNA, 9 bp, Unknown
  misc_feature (1)..( 9): Result.004 file - promoters60/5754269
aaatgtgaa

SEQ ID NO: 151275 - DNA, 9 bp, Unknown
  misc_feature (1)..( 9): Result.004 file - promoters60/5754273
caatgtgaa

SEQ ID NO: 151276 - DNA, 11 bp, Unknown
  misc_feature (1)..( 11): Result.004 file - promoters60/5754273
ttagactatat

SEQ ID NO: 151277 - DNA, 11 bp, Unknown
  misc_feature (1)..( 11): Result.004 file - promoters60/5754273
ttaaactaatt

SEQ ID NO: 151278 - DNA, 11 bp, Unknown
  misc_feature (1)..( 11): Result.004 file - promoters60/5754273
aacaactaatt

SEQ ID NO: 151279 - DNA, 11 bp, Unknown
  misc_feature (1)..( 11): Result.004 file - promoters60/5754273
aagaactaaac

SEQ ID NO: 151280 - DNA, 12 bp, Unknown
  misc_feature (1)..( 12): Result.004 file - promoters60/5754273
agagatctaggg

SEQ ID NO: 151281 - DNA, 12 bp, Unknown
  misc_feature (1)..( 12): Result.004 file - promoters60/5754273
cagagacatcaa

SEQ ID NO: 151282 - DNA, 13 bp, Unknown
  misc_feature (1)..( 13): Result.004 file - promoters60/5754273
taggcccaacaaa

SEQ ID NO: 151283 - DNA, 13 bp, Unknown
  misc_feature (1)..( 13): Result.004 file - promoters60/5754273
aaggcccaaaact

SEQ ID NO: 151284 - DNA, 13 bp, Unknown
  misc_feature (1)..( 13): Result.004 file - promoters60/5754273
atggcccagtaaa

SEQ ID NO: 151285 - DNA, 13 bp, Unknown
  misc_feature (1)..( 13): Result.004 file - promoters60/5754273
aaagcccaaaact

SEQ ID NO: 151286 - DNA, 13 bp, Unknown
  misc_feature (1)..( 13): Result.004 file - promoters60/5754273
tcggcccaccggc

SEQ ID NO: 151287 - DNA, 13 bp, Unknown
  misc_feature (1)..( 13): Result.004 file - promoters60/5754273
aaagcccattata

SEQ ID NO: 151288 - DNA, 13 bp, Unknown
  misc_feature (1)..( 13): Result.004 file - promoters60/5754273
aaagcccattaaa

SEQ ID NO: 151289 - DNA, 13 bp, Unknown
  misc_feature (1)..( 13): Result.004 file - promoters60/5754273
aataaaaattcaa

SEQ ID NO: 151290 - DNA, 13 bp, Unknown
  misc_feature (1)..( 13): Result.004 file - promoters60/5754273
tgaaaaaatagtt

SEQ ID NO: 151291 - DNA, 13 bp, Unknown
  misc_feature (1)..( 13): Result.004 file - promoters60/5754273
caaaaaaattgtg

SEQ ID NO: 151292 - DNA, 14 bp, Unknown
  misc_feature (1)..( 14): Result.004 file - promoters60/5754273
ttcataaaatacaa

SEQ ID NO: 151293 - DNA, 13 bp, Unknown
  misc_feature (1)..( 13): Result.004 file - promoters60/5754273
cttaaagatatta

SEQ ID NO: 151294 - DNA, 14 bp, Unknown
  misc_feature (1)..( 14): Result.004 file - promoters60/5754273
tcaaacaaatacat

SEQ ID NO: 151295 - DNA, 12 bp, Unknown
  misc_feature (1)..( 12): Result.004 file - promoters60/5754273
ttcaaaaactga

SEQ ID NO: 151296 - DNA, 12 bp, Unknown
  misc_feature (1)..( 12): Result.004 file - promoters60/5754273
ttcaaaaaaatt

SEQ ID NO: 151297 - DNA, 12 bp, Unknown
  misc_feature (1)..( 12): Result.004 file - promoters60/5754273
cataaaatacaa

SEQ ID NO: 151298 - DNA, 12 bp, Unknown
  misc_feature (1)..( 12): Result.004 file - promoters60/5754273
atgaaaaaatag

SEQ ID NO: 151299 - DNA, 13 bp, Unknown
  misc_feature (1)..( 13): Result.004 file - promoters60/5754273
cttaaagatatta

SEQ ID NO: 151300 - DNA, 13 bp, Unknown
  misc_feature (1)..( 13): Result.004 file - promoters60/5754276
gtcaaacaaatac

SEQ ID NO: 151301 - DNA, 9 bp, Unknown
  misc_feature (1)..( 9): Result.004 file - promoters60/5754276
aattgatga

SEQ ID NO: 151302 - DNA, 9 bp, Unknown
  misc_feature (1)..( 9): Result.004 file - promoters60/5754276
atttggtga

SEQ ID NO: 151303 - DNA, 9 bp, Unknown
  misc_feature (1)..( 9): Result.004 file - promoters60/5754276
aatcgatct

SEQ ID NO: 151304 - DNA, 7 bp, Unknown
  misc_feature (1)..( 7): Result.004 file - promoters60/5754276
ataaatc

SEQ ID NO: 151305 - DNA, 7 bp, Unknown
  misc_feature (1)..( 7): Result.004 file - promoters60/5754276
atatatc

SEQ ID NO: 151306 - DNA, 8 bp, Unknown
  misc_feature (1)..( 8): Result.004 file - promoters60/5754276
atgaataa

SEQ ID NO: 151307 - DNA, 8 bp, Unknown
  misc_feature (1)..( 8): Result.004 file - promoters60/5754276
atgcataa

SEQ ID NO: 151308 - DNA, 7 bp, Unknown
  misc_feature (1)..( 7): Result.004 file - promoters60/5754276
ctaattg

SEQ ID NO: 151309 - DNA, 7 bp, Unknown
  misc_feature (1)..( 7): Result.004 file - promoters60/5754276
ctatttg

SEQ ID NO: 151310 - DNA, 6 bp, Unknown
  misc_feature (1)..( 6): Result.004 file - promoters60/5754276
tagcta

SEQ ID NO: 151311 - DNA, 6 bp, Unknown
  misc_feature (1)..( 6): Result.004 file - promoters60/5754276
tagcta

SEQ ID NO: 151312 - DNA, 7 bp, Unknown
  misc_feature (1)..( 7): Result.004 file - promoters60/5754276
tcaattt

SEQ ID NO: 151313 - DNA, 7 bp, Unknown
  misc_feature (1)..( 7): Result.004 file - promoters60/5754276
tcagttt

SEQ ID NO: 151314 - DNA, 6 bp, Unknown
  misc_feature (1)..( 6): Result.004 file - promoters60/5754276
atctcg

SEQ ID NO: 151315 - DNA, 6 bp, Unknown
  misc_feature (1)..( 6): Result.004 file - promoters60/5754276
atctcg

SEQ ID NO: 151316 - DNA, 6 bp, Unknown
  misc_feature (1)..( 6): Result.004 file - promoters60/5754276
ctaaat

SEQ ID NO: 151317 - DNA, 6 bp, Unknown
  misc_feature (1)..( 6): Result.004 file - promoters60/5754276
ctaaat

SEQ ID NO: 151318 - DNA, 9 bp, Unknown
  misc_feature (1)..( 9): Result.004 file - promoters60/5754276
aattaaaaa

SEQ ID NO: 151319 - DNA, 9 bp, Unknown
  misc_feature (1)..( 9): Result.004 file - promoters60/5754276
aattgaaaa

SEQ ID NO: 151320 - DNA, 9 bp, Unknown
  misc_feature (1)..( 9): Result.004 file - promoters60/5754276
cttttgtat

SEQ ID NO: 151321 - DNA, 9 bp, Unknown
  misc_feature (1)..( 9): Result.004 file - promoters60/5754276
cttttttat

SEQ ID NO: 151322 - DNA, 6 bp, Unknown
  misc_feature (1)..( 6): Result.004 file - promoters60/5754276
aaaaga

SEQ ID NO: 151323 - DNA, 6 bp, Unknown
  misc_feature (1)..( 6): Result.004 file - promoters60/5754276
aaaaga

SEQ ID NO: 151324 - DNA, 6 bp, Unknown
  misc_feature (1)..( 6): Result.004 file - promoters60/5754276
aataat

SEQ ID NO: 151325 - DNA, 6 bp, Unknown
  misc_feature (1)..( 6): Result.004 file - promoters60/5754276
aataat

SEQ ID NO: 151326 - DNA, 8 bp, Unknown
  misc_feature (1)..( 8): Result.004 file - promoters60/5754276
aaacatgt

SEQ ID NO: 151327 - DNA, 8 bp, Unknown
  misc_feature (1)..( 8): Result.004 file - promoters60/5754276
aaacatgt

SEQ ID NO: 151328 - DNA, 9 bp, Unknown
  misc_feature (1)..( 9): Result.004 file - promoters60/5754276
tttatttga

SEQ ID NO: 151329 - DNA, 9 bp, Unknown
  misc_feature (1)..( 9): Result.004 file - promoters60/5754276
tttgtttca

SEQ ID NO: 151330 - DNA, 9 bp, Unknown
  misc_feature (1)..( 9): Result.004 file - promoters60/5754276
tctatttgt

SEQ ID NO: 151331 - DNA, 6 bp, Unknown
  misc_feature (1)..( 6): Result.004 file - promoters60/5754276
actatt

SEQ ID NO: 151332 - DNA, 6 bp, Unknown
  misc_feature (1)..( 6): Result.004 file - promoters60/5754276
actatt

SEQ ID NO: 151333 - DNA, 8 bp, Unknown
  misc_feature (1)..( 8): Result.004 file - promoters60/5754276
tcttttat

SEQ ID NO: 151334 - DNA, 8 bp, Unknown
  misc_feature (1)..( 8): Result.004 file - promoters60/5754276
tctcttat

SEQ ID NO: 151335 - DNA, 6 bp, Unknown
  misc_feature (1)..( 6): Result.004 file - promoters60/5754276
tttgta

SEQ ID NO: 151336 - DNA, 6 bp, Unknown
  misc_feature (1)..( 6): Result.004 file - promoters60/5754276
tttgta

SEQ ID NO: 151337 - DNA, 6 bp, Unknown
  misc_feature (1)..( 6): Result.004 file - promoters60/5754276
tcactc

SEQ ID NO: 151338 - DNA, 6 bp, Unknown
  misc_feature (1)..( 6): Result.004 file - promoters60/5754280
tcactc

SEQ ID NO: 151339 - DNA, 11 bp, Unknown
  misc_feature (1)..( 11): Result.004 file - promoters60/5754280
cgtatatataa

SEQ ID NO: 151340 - DNA, 11 bp, Unknown
  misc_feature (1)..( 11): Result.004 file - promoters60/5754280
tttatatagat

SEQ ID NO: 151341 - DNA, 11 bp, Unknown
  misc_feature (1)..( 11): Result.004 file - promoters60/5754280
gttaaatagca

SEQ ID NO: 151342 - DNA, 11 bp, Unknown
  misc_feature (1)..( 11): Result.004 file - promoters60/5754280
aataaaaagca

SEQ ID NO: 151343 - DNA, 11 bp, Unknown
  misc_feature (1)..( 11): Result.004 file - promoters60/5754280
tttaaattgaa

SEQ ID NO: 151344 - DNA, 11 bp, Unknown
  misc_feature (1)..( 11): Result.004 file - promoters60/5754280
gttaaaatcgt

SEQ ID NO: 151345 - DNA, 11 bp, Unknown
  misc_feature (1)..( 11): Result.004 file - promoters60/5754419
aatataaaggt

SEQ ID NO: 151346 - DNA, 14 bp, Unknown
  misc_feature (1)..( 14): Result.004 file - promoters60/5754419
tctcagtgattttg

SEQ ID NO: 151347 - DNA, 14 bp, Unknown
  misc_feature (1)..( 14): Result.004 file - promoters60/5754419
atacaatgatattg

SEQ ID NO: 151348 - DNA, 14 bp, Unknown
  misc_feature (1)..( 14): Result.004 file - promoters60/5754419
ttgtaataataact

SEQ ID NO: 151349 - DNA, 14 bp, Unknown
  misc_feature (1)..( 14): Result.004 file - promoters60/5754419
aaataattatacag

SEQ ID NO: 151350 - DNA, 14 bp, Unknown
  misc_feature (1)..( 14): Result.004 file - promoters60/5754419
ataaaatgttatgc

SEQ ID NO: 151351 - DNA, 14 bp, Unknown
  misc_feature (1)..( 14): Result.004 file - promoters60/5754419
cgttattaataaat

SEQ ID NO: 151352 - DNA, 9 bp, Unknown
  misc_feature (1)..( 9): Result.004 file - promoters60/5754419
tgttctctc

SEQ ID NO: 151353 - DNA, 9 bp, Unknown
  misc_feature (1)..( 9): Result.004 file - promoters60/5754419
agctctctc

SEQ ID NO: 151354 - DNA, 9 bp, Unknown
  misc_feature (1)..( 9): Result.004 file - promoters60/5754419
gtttctctc

SEQ ID NO: 151355 - DNA, 9 bp, Unknown
  misc_feature (1)..( 9): Result.004 file - promoters60/5754419
ctttctctt

SEQ ID NO: 151356 - DNA, 9 bp, Unknown
  misc_feature (1)..( 9): Result.004 file - promoters60/5754419
agcgctctg

SEQ ID NO: 151357 - DNA, 9 bp, Unknown
  misc_feature (1)..( 9): Result.004 file - promoters60/5754419
atttgtctt

SEQ ID NO: 151358 - DNA, 10 bp, Unknown
  misc_feature (1)..( 10): Result.004 file - promoters60/5754419
aaataattat

SEQ ID NO: 151359 - DNA, 10 bp, Unknown
  misc_feature (1)..( 10): Result.004 file - promoters60/5754419
aaataagtaa

SEQ ID NO: 151360 - DNA, 10 bp, Unknown
  misc_feature (1)..( 10): Result.004 file - promoters60/5754419
aaaaaaaagt

SEQ ID NO: 151361 - DNA, 10 bp, Unknown
  misc_feature (1)..( 10): Result.004 file - promoters60/5754419
aaatgtttgc

SEQ ID NO: 151362 - DNA, 10 bp, Unknown
  misc_feature (1)..( 10): Result.004 file - promoters60/5754461
caatgttctt

SEQ ID NO: 151363 - DNA, 7 bp, Unknown
  misc_feature (1)..( 7): Result.004 file - promoters60/5754461
gaattca

SEQ ID NO: 151364 - DNA, 7 bp, Unknown
  misc_feature (1)..( 7): Result.004 file - promoters60/5754461
gaattct

SEQ ID NO: 151365 - DNA, 7 bp, Unknown
  misc_feature (1)..( 7): Result.004 file - promoters60/5754461
gaaatca

SEQ ID NO: 151366 - DNA, 7 bp, Unknown
  misc_feature (1)..( 7): Result.004 file - promoters60/5754461
aaattca

SEQ ID NO: 151367 - DNA, 12 bp, Unknown
  misc_feature (1)..( 12): Result.004 file - promoters60/5754461
cccaaaataatt

SEQ ID NO: 151368 - DNA, 12 bp, Unknown
  misc_feature (1)..( 12): Result.004 file - promoters60/5754461
aataaaataaac

SEQ ID NO: 151369 - DNA, 12 bp, Unknown
  misc_feature (1)..( 12): Result.004 file - promoters60/5754461
cccaaactaacc

SEQ ID NO: 151370 - DNA, 12 bp, Unknown
  misc_feature (1)..( 12): Result.004 file - promoters60/5755107
agaaaattaatt

SEQ ID NO: 151371 - DNA, 7 bp, Unknown
  misc_feature (1)..( 7): Result.004 file - promoters60/5755107
atgtttc

SEQ ID NO: 151372 - DNA, 7 bp, Unknown
  misc_feature (1)..( 7): Result.004 file - promoters60/5755107
gtgtttc

SEQ ID NO: 151373 - DNA, 7 bp, Unknown
  misc_feature (1)..( 7): Result.004 file - promoters60/5755107
gtgttta

SEQ ID NO: 151374 - DNA, 7 bp, Unknown
  misc_feature (1)..( 7): Result.004 file - promoters60/5755107
ggttttg

SEQ ID NO: 151375 - DNA, 7 bp, Unknown
  misc_feature (1)..( 7): Result.004 file - promoters60/5755107
ggtttta

SEQ ID NO: 151376 - DNA, 7 bp, Unknown
  misc_feature (1)..( 7): Result.004 file - promoters60/5755107
tgttttg

SEQ ID NO: 151377 - DNA, 6 bp, Unknown
  misc_feature (1)..( 6): Result.004 file - promoters60/5755107
attgga

SEQ ID NO: 151378 - DNA, 6 bp, Unknown
  misc_feature (1)..( 6): Result.004 file - promoters60/5755107
attgga

SEQ ID NO: 151379 - DNA, 6 bp, Unknown
  misc_feature (1)..( 6): Result.004 file - promoters60/5755107
attgga

SEQ ID NO: 151380 - DNA, 11 bp, Unknown
  misc_feature (1)..( 11): Result.004 file - promoters60/5755107
acaattcagcc

SEQ ID NO: 151381 - DNA, 11 bp, Unknown
  misc_feature (1)..( 11): Result.004 file - promoters60/5755107
acaattaagcc

SEQ ID NO: 151382 - DNA, 11 bp, Unknown
  misc_feature (1)..( 11): Result.004 file - promoters60/5755107
ggaatgaagat

SEQ ID NO: 151383 - DNA, 7 bp, Unknown
  misc_feature (1)..( 7): Result.004 file - promoters60/5755107
tttgata

SEQ ID NO: 151384 - DNA, 7 bp, Unknown
  misc_feature (1)..( 7): Result.004 file - promoters60/5755107
tttcata

SEQ ID NO: 151385 - DNA, 7 bp, Unknown
  misc_feature (1)..( 7): Result.004 file - promoters60/5755107
tttcatt

SEQ ID NO: 151386 - DNA, 7 bp, Unknown
  misc_feature (1)..( 7): Result.004 file - promoters60/5755107
aaacaat

SEQ ID NO: 151387 - DNA, 7 bp, Unknown
  misc_feature (1)..( 7): Result.004 file - promoters60/5755107
aaagaat

SEQ ID NO: 151388 - DNA, 7 bp, Unknown
  misc_feature (1)..( 7): Result.004 file - promoters60/5755846
aaataat

SEQ ID NO: 151389 - DNA, 10 bp, Unknown
  misc_feature (1)..( 10): Result.004 file - promoters60/5755846
ctttgatcaa

SEQ ID NO: 151390 - DNA, 10 bp, Unknown
  misc_feature (1)..( 10): Result.004 file - promoters60/5755846
attttatcaa

SEQ ID NO: 151391 - DNA, 10 bp, Unknown
  misc_feature (1)..( 10): Result.004 file - promoters60/5755846
atttgatctc

SEQ ID NO: 151392 - DNA, 10 bp, Unknown
  misc_feature (1)..( 10): Result.004 file - promoters60/5755846
gtatgatcaa

SEQ ID NO: 151393 - DNA, 10 bp, Unknown
  misc_feature (1)..( 10): Result.004 file - promoters60/5755846
attgtatgat

SEQ ID NO: 151394 - DNA, 9 bp, Unknown
  misc_feature (1)..( 9): Result.004 file - promoters60/5755846
aattttgat

SEQ ID NO: 151395 - DNA, 9 bp, Unknown
  misc_feature (1)..( 9): Result.004 file - promoters60/5755846
ttgtttgat

SEQ ID NO: 151396 - DNA, 9 bp, Unknown
  misc_feature (1)..( 9): Result.004 file - promoters60/5755846
aatgttgaa

SEQ ID NO: 151397 - DNA, 9 bp, Unknown
  misc_feature (1)..( 9): Result.004 file - promoters60/5755846
aatggtgat

SEQ ID NO: 151398 - DNA, 13 bp, Unknown
  misc_feature (1)..( 13): Result.004 file - promoters60/5755846
ctctaaaacaaaa

SEQ ID NO: 151399 - DNA, 13 bp, Unknown
  misc_feature (1)..( 13): Result.004 file - promoters60/5755846
tgtccaaacaaag

SEQ ID NO: 151400 - DNA, 14 bp, Unknown
  misc_feature (1)..( 14): Result.004 file - promoters60/5755846
tgacattacataat

SEQ ID NO: 151401 - DNA, 14 bp, Unknown
  misc_feature (1)..( 14): Result.004 file - promoters60/5755846
ctctgaaacatatg

SEQ ID NO: 151402 - DNA, 14 bp, Unknown
  misc_feature (1)..( 14): Result.004 file - promoters60/5755846
ttcttaaagaataa

SEQ ID NO: 151403 - DNA, 15 bp, Unknown
  misc_feature (1)..( 15): Result.004 file - promoters60/5755846
taaaatttatggttt

SEQ ID NO: 151404 - DNA, 15 bp, Unknown
  misc_feature (1)..( 15): Result.004 file - promoters60/5755846
taaagttttgtgttt

SEQ ID NO: 151405 - DNA, 16 bp, Unknown
  misc_feature (1)..( 16): Result.004 file - promoters60/5755846
ataagctttctgtttc

SEQ ID NO: 151406 - DNA, 16 bp, Unknown
  misc_feature (1)..( 16): Result.004 file - promoters60/5755846
aatttttttttgttta

SEQ ID NO: 151407 - DNA, 9 bp, Unknown
  misc_feature (1)..( 9): Result.004 file - promoters60/5755846
aaatataat

SEQ ID NO: 151408 - DNA, 9 bp, Unknown
  misc_feature (1)..( 9): Result.004 file - promoters60/5755846
aaatttaaa

SEQ ID NO: 151409 - DNA, 9 bp, Unknown
  misc_feature (1)..( 9): Result.004 file - promoters60/5755846
gactttaaa

SEQ ID NO: 151410 - DNA, 9 bp, Unknown
  misc_feature (1)..( 9): Result.004 file - promoters60/5755846
taatttttt

SEQ ID NO: 151411 - DNA, 9 bp, Unknown
  misc_feature (1)..( 9): Result.004 file - promoters60/5755846
ttattgttt

SEQ ID NO: 151412 - DNA, 11 bp, Unknown
  misc_feature (1)..( 11): Result.004 file - promoters60/5755846
ttttgtatgta

SEQ ID NO: 151413 - DNA, 11 bp, Unknown
  misc_feature (1)..( 11): Result.004 file - promoters60/5755846
atttgtatagt

SEQ ID NO: 151414 - DNA, 11 bp, Unknown
  misc_feature (1)..( 11): Result.004 file - promoters60/5755846
ttttgttgttg

SEQ ID NO: 151415 - DNA, 11 bp, Unknown
  misc_feature (1)..( 11): Result.004 file - promoters60/5755846
ctttgttgttg

SEQ ID NO: 151416 - DNA, 11 bp, Unknown
  misc_feature (1)..( 11): Result.004 file - promoters60/5755846
ggtttaacata

SEQ ID NO: 151417 - DNA, 11 bp, Unknown
  misc_feature (1)..( 11): Result.004 file - promoters60/5755846
tgtttaatttt

SEQ ID NO: 151418 - DNA, 11 bp, Unknown
  misc_feature (1)..( 11): Result.004 file - promoters60/5755846
attttactttt

SEQ ID NO: 151419 - DNA, 11 bp, Unknown
  misc_feature (1)..( 11): Result.004 file - promoters60/5756166
cttttcaatat

SEQ ID NO: 151420 - DNA, 9 bp, Unknown
  misc_feature (1)..( 9): Result.004 file - promoters60/5756166
aaattgtaa

SEQ ID NO: 151421 - DNA, 9 bp, Unknown
  misc_feature (1)..( 9): Result.004 file - promoters60/5756166
aaagtgttt

SEQ ID NO: 151422 - DNA, 9 bp, Unknown
  misc_feature (1)..( 9): Result.004 file - promoters60/5756166
acattttaa

SEQ ID NO: 151423 - DNA, 9 bp, Unknown
  misc_feature (1)..( 9): Result.004 file - promoters60/5756166
ctagttttt

SEQ ID NO: 151424 - DNA, 13 bp, Unknown
  misc_feature (1)..( 13): Result.004 file - promoters60/5756166
gttacaatgttta

SEQ ID NO: 151425 - DNA, 13 bp, Unknown
  misc_feature (1)..( 13): Result.004 file - promoters60/5756166
gttacaacgttta

SEQ ID NO: 151426 - DNA, 13 bp, Unknown
  misc_feature (1)..( 13): Result.004 file - promoters60/5756166
gatacaatggtaa

SEQ ID NO: 151427 - DNA, 13 bp, Unknown
  misc_feature (1)..( 13): Result.004 file - promoters60/5756166
attaaaatttatt

SEQ ID NO: 151428 - DNA, 8 bp, Unknown
  misc_feature (1)..( 8): Result.004 file - promoters60/5756166
tttcattc

SEQ ID NO: 151429 - DNA, 8 bp, Unknown
  misc_feature (1)..( 8): Result.004 file - promoters60/5756166
tttaattt

SEQ ID NO: 151430 - DNA, 8 bp, Unknown
  misc_feature (1)..( 8): Result.004 file - promoters60/5756166
attcattt

SEQ ID NO: 151431 - DNA, 9 bp, Unknown
  misc_feature (1)..( 9): Result.004 file - promoters60/5756166
tttcaattt

SEQ ID NO: 151432 - DNA, 10 bp, Unknown
  misc_feature (1)..( 10): Result.004 file - promoters60/5756166
attcatttta

SEQ ID NO: 151433 - DNA, 10 bp, Unknown
  misc_feature (1)..( 10): Result.004 file - promoters60/5756166
tttaatttta

SEQ ID NO: 151434 - DNA, 10 bp, Unknown
  misc_feature (1)..( 10): Result.004 file - promoters60/5756166
attcattttt

SEQ ID NO: 151435 - DNA, 10 bp, Unknown
  misc_feature (1)..( 10): Result.004 file - promoters60/5756166
tttcaatttg

SEQ ID NO: 151436 - DNA, 10 bp, Unknown
  misc_feature (1)..( 10): Result.004 file - promoters60/5756166
ctctctaaaa

SEQ ID NO: 151437 - DNA, 10 bp, Unknown
  misc_feature (1)..( 10): Result.004 file - promoters60/5756166
tcttcttaaa

SEQ ID NO: 151438 - DNA, 10 bp, Unknown
  misc_feature (1)..( 10): Result.004 file - promoters60/5756166
tcttgttaat

SEQ ID NO: 151439 - DNA, 10 bp, Unknown
  misc_feature (1)..( 10): Result.004 file - promoters60/5756489
acctcttaat

SEQ ID NO: 151440 - DNA, 6 bp, Unknown
  misc_feature (1)..( 6): Result.004 file - promoters60/5756489
ttcaaa

SEQ ID NO: 151441 - DNA, 6 bp, Unknown
  misc_feature (1)..( 6): Result.004 file - promoters60/5756489
ttcaaa

SEQ ID NO: 151442 - DNA, 8 bp, Unknown
  misc_feature (1)..( 8): Result.004 file - promoters60/5756489
gttgattt

SEQ ID NO: 151443 - DNA, 8 bp, Unknown
  misc_feature (1)..( 8): Result.004 file - promoters60/5756489
gttcattt

SEQ ID NO: 151444 - DNA, 8 bp, Unknown
  misc_feature (1)..( 8): Result.004 file - promoters60/5756489
ctcttccc

SEQ ID NO: 151445 - DNA, 8 bp, Unknown
  misc_feature (1)..( 8): Result.004 file - promoters60/5756489
ctcatccc

SEQ ID NO: 151446 - DNA, 6 bp, Unknown
  misc_feature (1)..( 6): Result.004 file - promoters60/5756489
actaat

SEQ ID NO: 151447 - DNA, 6 bp, Unknown
  misc_feature (1)..( 6): Result.004 file - promoters60/5756489
actaat

SEQ ID NO: 151448 - DNA, 6 bp, Unknown
  misc_feature (1)..( 6): Result.004 file - promoters60/5756489
atttac

SEQ ID NO: 151449 - DNA, 6 bp, Unknown
  misc_feature (1)..( 6): Result.004 file - promoters60/5756489
atttac

SEQ ID NO: 151450 - DNA, 6 bp, Unknown
  misc_feature (1)..( 6): Result.004 file - promoters60/5756489
gttatc

SEQ ID NO: 151451 - DNA, 6 bp, Unknown
  misc_feature (1)..( 6): Result.004 file - promoters60/5756489
gttatc

SEQ ID NO: 151452 - DNA, 7 bp, Unknown
  misc_feature (1)..( 7): Result.004 file - promoters60/5756489
attgtaa

SEQ ID NO: 151453 - DNA, 7 bp, Unknown
  misc_feature (1)..( 7): Result.004 file - promoters60/5756489
attttaa

SEQ ID NO: 151454 - DNA, 6 bp, Unknown
  misc_feature (1)..( 6): Result.004 file - promoters60/5756489
tgtaat

SEQ ID NO: 151455 - DNA, 6 bp, Unknown
  misc_feature (1)..( 6): Result.004 file - promoters60/5756489
tgtaat

SEQ ID NO: 151456 - DNA, 6 bp, Unknown
  misc_feature (1)..( 6): Result.004 file - promoters60/5756489
atacaa

SEQ ID NO: 151457 - DNA, 6 bp, Unknown
  misc_feature (1)..( 6): Result.004 file - promoters60/5756489
atacaa

SEQ ID NO: 151458 - DNA, 6 bp, Unknown
  misc_feature (1)..( 6): Result.004 file - promoters60/5756489
tttaca

SEQ ID NO: 151459 - DNA, 6 bp, Unknown
  misc_feature (1)..( 6): Result.004 file - promoters60/5756489
tttaca

SEQ ID NO: 151460 - DNA, 7 bp, Unknown
  misc_feature (1)..( 7): Result.004 file - promoters60/5756489
aaactct

SEQ ID NO: 151461 - DNA, 7 bp, Unknown
  misc_feature (1)..( 7): Result.004 file - promoters60/5756489
aaaatct

SEQ ID NO: 151462 - DNA, 7 bp, Unknown
  misc_feature (1)..( 7): Result.004 file - promoters60/5756489
actaaac

SEQ ID NO: 151463 - DNA, 7 bp, Unknown
  misc_feature (1)..( 7): Result.004 file - promoters60/5756489
actaaac

SEQ ID NO: 151464 - DNA, 7 bp, Unknown
  misc_feature (1)..( 7): Result.004 file - promoters60/5756489
ccaaata

SEQ ID NO: 151465 - DNA, 7 bp, Unknown
  misc_feature (1)..( 7): Result.004 file - promoters60/5756489
ccaaata

SEQ ID NO: 151466 - DNA, 6 bp, Unknown
  misc_feature (1)..( 6): Result.004 file - promoters60/5756489
ttattc

SEQ ID NO: 151467 - DNA, 6 bp, Unknown
  misc_feature (1)..( 6): Result.004 file - promoters60/5758021
ttattc

SEQ ID NO: 151468 - DNA, 12 bp, Unknown
  misc_feature (1)..( 12): Result.004 file - promoters60/5758021
tcttatgatttg

SEQ ID NO: 151469 - DNA, 12 bp, Unknown
  misc_feature (1)..( 12): Result.004 file - promoters60/5758021
tcttaggattca

SEQ ID NO: 151470 - DNA, 12 bp, Unknown
  misc_feature (1)..( 12): Result.004 file - promoters60/5758021
ttccatgttttt

SEQ ID NO: 151471 - DNA, 12 bp, Unknown
  misc_feature (1)..( 12): Result.004 file - promoters60/5758021
gtctatgctttg

SEQ ID NO: 151472 - DNA, 10 bp, Unknown
  misc_feature (1)..( 10): Result.004 file - promoters60/5758021
gttcaaaaaa

SEQ ID NO: 151473 - DNA, 10 bp, Unknown
  misc_feature (1)..( 10): Result.004 file - promoters60/5758021
attcaaaaag

SEQ ID NO: 151474 - DNA, 11 bp, Unknown
  misc_feature (1)..( 11): Result.004 file - promoters60/5758021
gttgaaagaaa

SEQ ID NO: 151475 - DNA, 11 bp, Unknown
  misc_feature (1)..( 11): Result.004 file - promoters60/5758021
ttttaaaaaaa

SEQ ID NO: 151476 - DNA, 7 bp, Unknown
  misc_feature (1)..( 7): Result.004 file - promoters60/5758021
atgggcc

SEQ ID NO: 151477 - DNA, 7 bp, Unknown
  misc_feature (1)..( 7): Result.004 file - promoters60/5758021
atgggcc

SEQ ID NO: 151478 - DNA, 7 bp, Unknown
  misc_feature (1)..( 7): Result.004 file - promoters60/5758021
ttgggcc

SEQ ID NO: 151479 - DNA, 7 bp, Unknown
  misc_feature (1)..( 7): Result.004 file - promoters60/5758021
ttgggcc

SEQ ID NO: 151480 - DNA, 11 bp, Unknown
  misc_feature (1)..( 11): Result.004 file - promoters60/5758021
atcattttttt

SEQ ID NO: 151481 - DNA, 11 bp, Unknown
  misc_feature (1)..( 11): Result.004 file - promoters60/5758021
aaaatttttct

SEQ ID NO: 151482 - DNA, 11 bp, Unknown
  misc_feature (1)..( 11): Result.004 file - promoters60/5758021
agaattttttt

SEQ ID NO: 151483 - DNA, 11 bp, Unknown
  misc_feature (1)..( 11): Result.004 file - promoters60/5759305
aaaatttgttt

SEQ ID NO: 151484 - DNA, 6 bp, Unknown
  misc_feature (1)..( 6): Result.004 file - promoters60/5759305
aatact

SEQ ID NO: 151485 - DNA, 6 bp, Unknown
  misc_feature (1)..( 6): Result.004 file - promoters60/5759305
aatact

SEQ ID NO: 151486 - DNA, 8 bp, Unknown
  misc_feature (1)..( 8): Result.004 file - promoters60/5759305
atatataa

SEQ ID NO: 151487 - DNA, 8 bp, Unknown
  misc_feature (1)..( 8): Result.004 file - promoters60/5759305
atagatat

SEQ ID NO: 151488 - DNA, 8 bp, Unknown
  misc_feature (1)..( 8): Result.004 file - promoters60/5759305
ttatataa

SEQ ID NO: 151489 - DNA, 11 bp, Unknown
  misc_feature (1)..( 11): Result.004 file - promoters60/5759305
tttgtttgttt

SEQ ID NO: 151490 - DNA, 11 bp, Unknown
  misc_feature (1)..( 11): Result.004 file - promoters60/5759305
tttctttattt

SEQ ID NO: 151491 - DNA, 7 bp, Unknown
  misc_feature (1)..( 7): Result.004 file - promoters60/5759305
attatca

SEQ ID NO: 151492 - DNA, 7 bp, Unknown
  misc_feature (1)..( 7): Result.004 file - promoters60/5759305
attctca

SEQ ID NO: 151493 - DNA, 7 bp, Unknown
  misc_feature (1)..( 7): Result.004 file - promoters60/5759305
tagaaaa

SEQ ID NO: 151494 - DNA, 7 bp, Unknown
  misc_feature (1)..( 7): Result.004 file - promoters60/5759305
tagaaaa

SEQ ID NO: 151495 - DNA, 7 bp, Unknown
  misc_feature (1)..( 7): Result.004 file - promoters60/5759305
atgtatg

SEQ ID NO: 151496 - DNA, 7 bp, Unknown
  misc_feature (1)..( 7): Result.004 file - promoters60/5759305
atggatg

SEQ ID NO: 151497 - DNA, 12 bp, Unknown
  misc_feature (1)..( 12): Result.004 file - promoters60/5759305
ttttgcaatttt

SEQ ID NO: 151498 - DNA, 12 bp, Unknown
  misc_feature (1)..( 12): Result.004 file - promoters60/5759305
taaggcaaattt

SEQ ID NO: 151499 - DNA, 12 bp, Unknown
  misc_feature (1)..( 12): Result.004 file - promoters60/5759305
taagccaaacgc

SEQ ID NO: 151500 - DNA, 8 bp, Unknown
  misc_feature (1)..( 8): Result.004 file - promoters60/5759305
tattgaaa

SEQ ID NO: 151501 - DNA, 8 bp, Unknown
  misc_feature (1)..( 8): Result.004 file - promoters60/5759305
tattaaaa

SEQ ID NO: 151502 - DNA, 10 bp, Unknown
  misc_feature (1)..( 10): Result.004 file - promoters60/5759305
tttatacaat

SEQ ID NO: 151503 - DNA, 10 bp, Unknown
  misc_feature (1)..( 10): Result.004 file - promoters60/5759305
tttatataat

SEQ ID NO: 151504 - DNA, 6 bp, Unknown
  misc_feature (1)..( 6): Result.004 file - promoters60/5759305
agaaaa

SEQ ID NO: 151505 - DNA, 6 bp, Unknown
  misc_feature (1)..( 6): Result.004 file - promoters60/5759305
agaaaa

SEQ ID NO: 151506 - DNA, 8 bp, Unknown
  misc_feature (1)..( 8): Result.004 file - promoters60/5759305
aaataata

SEQ ID NO: 151507 - DNA, 8 bp, Unknown
  misc_feature (1)..( 8): Result.004 file - promoters60/5759305
aaaaaata

SEQ ID NO: 151508 - DNA, 6 bp, Unknown
  misc_feature (1)..( 6): Result.004 file - promoters60/5759305
ctaaac

SEQ ID NO: 151509 - DNA, 6 bp, Unknown
  misc_feature (1)..( 6): Result.004 file - promoters60/5759305
ctaaac

SEQ ID NO: 151510 - DNA, 6 bp, Unknown
  misc_feature (1)..( 6): Result.004 file - promoters60/5759305
caaaat

SEQ ID NO: 151511 - DNA, 6 bp, Unknown
  misc_feature (1)..( 6): Result.004 file - promoters60/5759305
caaaat

SEQ ID NO: 151512 - DNA, 6 bp, Unknown
  misc_feature (1)..( 6): Result.004 file - promoters60/5759305
ccatac

SEQ ID NO: 151513 - DNA, 6 bp, Unknown
  misc_feature (1)..( 6): Result.004 file - promoters60/5759305
ccatac

SEQ ID NO: 151514 - DNA, 6 bp, Unknown
  misc_feature (1)..( 6): Result.004 file - promoters60/5759305
cacgtg

SEQ ID NO: 151515 - DNA, 6 bp, Unknown
  misc_feature (1)..( 6): Result.004 file - promoters60/5759305
cacgtg

SEQ ID NO: 151516 - DNA, 8 bp, Unknown
  misc_feature (1)..( 8): Result.004 file - promoters60/5759305
atgtcagc

SEQ ID NO: 151517 - DNA, 8 bp, Unknown
  misc_feature (1)..( 8): Result.004 file - promoters60/5759305
atgccagc

SEQ ID NO: 151518 - DNA, 7 bp, Unknown
  misc_feature (1)..( 7): Result.004 file - promoters60/5759305
gtgggat

SEQ ID NO: 151519 - DNA, 7 bp, Unknown
  misc_feature (1)..( 7): Result.004 file - promoters60/5759305
gtgagat

SEQ ID NO: 151520 - DNA, 7 bp, Unknown
  misc_feature (1)..( 7): Result.004 file - promoters60/5759305
gaagaga

SEQ ID NO: 151521 - DNA, 7 bp, Unknown
  misc_feature (1)..( 7): Result.004 file - promoters60/5773091
gaagaga

SEQ ID NO: 151522 - DNA, 9 bp, Unknown
  misc_feature (1)..( 9): Result.004 file - promoters60/5773091
atttgttag

SEQ ID NO: 151523 - DNA, 9 bp, Unknown
  misc_feature (1)..( 9): Result.004 file - promoters60/5773091
gtttgttgt

SEQ ID NO: 151524 - DNA, 9 bp, Unknown
  misc_feature (1)..( 9): Result.004 file - promoters60/5773091
ttttgttgt

SEQ ID NO: 151525 - DNA, 9 bp, Unknown
  misc_feature (1)..( 9): Result.004 file - promoters60/5773091
ttttgttcc

SEQ ID NO: 151526 - DNA, 10 bp, Unknown
  misc_feature (1)..( 10): Result.004 file - promoters60/5773091
tttatgtatt

SEQ ID NO: 151527 - DNA, 10 bp, Unknown
  misc_feature (1)..( 10): Result.004 file - promoters60/5773091
gaattgttcc

SEQ ID NO: 151528 - DNA, 12 bp, Unknown
  misc_feature (1)..( 12): Result.004 file - promoters60/5773091
atatatacttag

SEQ ID NO: 151529 - DNA, 12 bp, Unknown
  misc_feature (1)..( 12): Result.004 file - promoters60/5773091
ttatatagataa

SEQ ID NO: 151530 - DNA, 12 bp, Unknown
  misc_feature (1)..( 12): Result.004 file - promoters60/5773091
atataaagataa

SEQ ID NO: 151531 - DNA, 12 bp, Unknown
  misc_feature (1)..( 12): Result.004 file - promoters60/5773091
ctatataaaagc

SEQ ID NO: 151532 - DNA, 12 bp, Unknown
  misc_feature (1)..( 12): Result.004 file - promoters60/5773091
ctatttaaagct

SEQ ID NO: 151533 - DNA, 12 bp, Unknown
  misc_feature (1)..( 12): Result.004 file - promoters60/5773759
aattttaaattc

SEQ ID NO: 151534 - DNA, 10 bp, Unknown
  misc_feature (1)..( 10): Result.004 file - promoters60/5773759
ctttatttag

SEQ ID NO: 151535 - DNA, 10 bp, Unknown
  misc_feature (1)..( 10): Result.004 file - promoters60/5773759
ctttttttta

SEQ ID NO: 151536 - DNA, 10 bp, Unknown
  misc_feature (1)..( 10): Result.004 file - promoters60/5773759
acatatttag

SEQ ID NO: 151537 - DNA, 8 bp, Unknown
  misc_feature (1)..( 8): Result.004 file - promoters60/5773759
tttcgcat

SEQ ID NO: 151538 - DNA, 8 bp, Unknown
  misc_feature (1)..( 8): Result.004 file - promoters60/5773759
aatcgcat

SEQ ID NO: 151539 - DNA, 8 bp, Unknown
  misc_feature (1)..( 8): Result.004 file - promoters60/5773759
aatggcaa

SEQ ID NO: 151540 - DNA, 9 bp, Unknown
  misc_feature (1)..( 9): Result.004 file - promoters60/5773759
gtattttat

SEQ ID NO: 151541 - DNA, 9 bp, Unknown
  misc_feature (1)..( 9): Result.004 file - promoters60/5773759
aaattttaa

SEQ ID NO: 151542 - DNA, 9 bp, Unknown
  misc_feature (1)..( 9): Result.004 file - promoters60/5773759
aaactttaa

SEQ ID NO: 151543 - DNA, 12 bp, Unknown
  misc_feature (1)..( 12): Result.004 file - promoters60/5773759
tttaacaataag

SEQ ID NO: 151544 - DNA, 12 bp, Unknown
  misc_feature (1)..( 12): Result.004 file - promoters60/5773759
cttagcaataaa

SEQ ID NO: 151545 - DNA, 12 bp, Unknown
  misc_feature (1)..( 12): Result.004 file - promoters60/5773772
tttagcaaaaag

SEQ ID NO: 151546 - DNA, 8 bp, Unknown
  misc_feature (1)..( 8): Result.004 file - promoters60/5773772
gatttttt

SEQ ID NO: 151547 - DNA, 8 bp, Unknown
  misc_feature (1)..( 8): Result.004 file - promoters60/5773772
gatctttt

SEQ ID NO: 151548 - DNA, 8 bp, Unknown
  misc_feature (1)..( 8): Result.004 file - promoters60/5773772
agtttttt

SEQ ID NO: 151549 - DNA, 8 bp, Unknown
  misc_feature (1)..( 8): Result.004 file - promoters60/5773772
gatcttat

SEQ ID NO: 151550 - DNA, 9 bp, Unknown
  misc_feature (1)..( 9): Result.004 file - promoters60/5773772
aatcataaa

SEQ ID NO: 151551 - DNA, 9 bp, Unknown
  misc_feature (1)..( 9): Result.004 file - promoters60/5773772
aattatatt

SEQ ID NO: 151552 - DNA, 9 bp, Unknown
  misc_feature (1)..( 9): Result.004 file - promoters60/5773772
ctttacatt

SEQ ID NO: 151553 - DNA, 6 bp, Unknown
  misc_feature (1)..( 6): Result.004 file - promoters60/5773772
tacatt

SEQ ID NO: 151554 - DNA, 6 bp, Unknown
  misc_feature (1)..( 6): Result.004 file - promoters60/5773772
attttt

SEQ ID NO: 151555 - DNA, 6 bp, Unknown
  misc_feature (1)..( 6): Result.004 file - promoters60/5773772
attttt

SEQ ID NO: 151556 - DNA, 6 bp, Unknown
  misc_feature (1)..( 6): Result.004 file - promoters60/5773772
attttt

SEQ ID NO: 151557 - DNA, 6 bp, Unknown
  misc_feature (1)..( 6): Result.004 file - promoters60/5773772
attttt

SEQ ID NO: 151558 - DNA, 11 bp, Unknown
  misc_feature (1)..( 11): Result.004 file - promoters60/5773772
ttgattgagta

SEQ ID NO: 151559 - DNA, 11 bp, Unknown
  misc_feature (1)..( 11): Result.004 file - promoters60/5773772
ttgattcacat

SEQ ID NO: 151560 - DNA, 11 bp, Unknown
  misc_feature (1)..( 11): Result.004 file - promoters60/5773772
ttgattttcat

SEQ ID NO: 151561 - DNA, 11 bp, Unknown
  misc_feature (1)..( 11): Result.004 file - promoters60/5774545
ttgatacacat

SEQ ID NO: 151562 - DNA, 8 bp, Unknown
  misc_feature (1)..( 8): Result.004 file - promoters60/5774545
tctttact

SEQ ID NO: 151563 - DNA, 8 bp, Unknown
  misc_feature (1)..( 8): Result.004 file - promoters60/5774545
tcttcact

SEQ ID NO: 151564 - DNA, 6 bp, Unknown
  misc_feature (1)..( 6): Result.004 file - promoters60/5774545
tctaat

SEQ ID NO: 151565 - DNA, 6 bp, Unknown
  misc_feature (1)..( 6): Result.004 file - promoters60/5774545
tctaat

SEQ ID NO: 151566 - DNA, 6 bp, Unknown
  misc_feature (1)..( 6): Result.004 file - promoters60/5774545
acaagt

SEQ ID NO: 151567 - DNA, 6 bp, Unknown
  misc_feature (1)..( 6): Result.004 file - promoters60/5774545
acaagt

SEQ ID NO: 151568 - DNA, 7 bp, Unknown
  misc_feature (1)..( 7): Result.004 file - promoters60/5774545
aattcgc

SEQ ID NO: 151569 - DNA, 7 bp, Unknown
  misc_feature (1)..( 7): Result.004 file - promoters60/5774545
aatccgc

SEQ ID NO: 151570 - DNA, 10 bp, Unknown
  misc_feature (1)..( 10): Result.004 file - promoters60/5774545
tgatcttgat

SEQ ID NO: 151571 - DNA, 10 bp, Unknown
  misc_feature (1)..( 10): Result.004 file - promoters60/5774545
tgagcttgat

SEQ ID NO: 151572 - DNA, 6 bp, Unknown
  misc_feature (1)..( 6): Result.004 file - promoters60/5774545
tcaaaa

SEQ ID NO: 151573 - DNA, 6 bp, Unknown
  misc_feature (1)..( 6): Result.004 file - promoters60/5774545
tcaaaa

SEQ ID NO: 151574 - DNA, 6 bp, Unknown
  misc_feature (1)..( 6): Result.004 file - promoters60/5774545
aaaacc

SEQ ID NO: 151575 - DNA, 6 bp, Unknown
  misc_feature (1)..( 6): Result.004 file - promoters60/5774545
aaaacc

SEQ ID NO: 151576 - DNA, 8 bp, Unknown
  misc_feature (1)..( 8): Result.004 file - promoters60/5774545
tattatat

SEQ ID NO: 151577 - DNA, 8 bp, Unknown
  misc_feature (1)..( 8): Result.004 file - promoters60/5774545
tatgataa

SEQ ID NO: 151578 - DNA, 8 bp, Unknown
  misc_feature (1)..( 8): Result.004 file - promoters60/5774545
ggttatat

SEQ ID NO: 151579 - DNA, 8 bp, Unknown
  misc_feature (1)..( 8): Result.004 file - promoters60/5774545
tttataaa

SEQ ID NO: 151580 - DNA, 8 bp, Unknown
  misc_feature (1)..( 8): Result.004 file - promoters60/5774545
tttctaag

SEQ ID NO: 151581 - DNA, 8 bp, Unknown
  misc_feature (1)..( 8): Result.004 file - promoters60/5774545
aatataaa

SEQ ID NO: 151582 - DNA, 8 bp, Unknown
  misc_feature (1)..( 8): Result.004 file - promoters60/5774545
tctacgtc

SEQ ID NO: 151583 - DNA, 8 bp, Unknown
  misc_feature (1)..( 8): Result.004 file - promoters60/5774545
tctccgtc

SEQ ID NO: 151584 - DNA, 7 bp, Unknown
  misc_feature (1)..( 7): Result.004 file - promoters60/5774545
tcagcac

SEQ ID NO: 151585 - DNA, 7 bp, Unknown
  misc_feature (1)..( 7): Result.004 file - promoters60/5774545
tcaccac

SEQ ID NO: 151586 - DNA, 7 bp, Unknown
  misc_feature (1)..( 7): Result.004 file - promoters60/5774545
aatgtat

SEQ ID NO: 151587 - DNA, 7 bp, Unknown
  misc_feature (1)..( 7): Result.004 file - promoters60/5774545
aatttat

SEQ ID NO: 151588 - DNA, 6 bp, Unknown
  misc_feature (1)..( 6): Result.004 file - promoters60/5774545
tgtctt

SEQ ID NO: 151589 - DNA, 6 bp, Unknown
  misc_feature (1)..( 6): Result.004 file - promoters60/5774545
tgtctt

SEQ ID NO: 151590 - DNA, 8 bp, Unknown
  misc_feature (1)..( 8): Result.004 file - promoters60/5774545
atcagtgt

SEQ ID NO: 151591 - DNA, 8 bp, Unknown
  misc_feature (1)..( 8): Result.004 file - promoters60/5776417
atcaatgt

SEQ ID NO: 151592 - DNA, 12 bp, Unknown
  misc_feature (1)..( 12): Result.004 file - promoters60/5776417
ctttagttttgt

SEQ ID NO: 151593 - DNA, 12 bp, Unknown
  misc_feature (1)..( 12): Result.004 file - promoters60/5776417
tgttagttcaaa

SEQ ID NO: 151594 - DNA, 12 bp, Unknown
  misc_feature (1)..( 12): Result.004 file - promoters60/5776417
ttttacttttaa

SEQ ID NO: 151595 - DNA, 12 bp, Unknown
  misc_feature (1)..( 12): Result.004 file - promoters60/5776417
ttttatttttgt

SEQ ID NO: 151596 - DNA, 12 bp, Unknown
  misc_feature (1)..( 12): Result.004 file - promoters60/5776417
tttttcttgagt

SEQ ID NO: 151597 - DNA, 12 bp, Unknown
  misc_feature (1)..( 12): Result.004 file - promoters60/5776417
ttgttgttggtt

SEQ ID NO: 151598 - DNA, 12 bp, Unknown
  misc_feature (1)..( 12): Result.004 file - promoters60/5776417
ggtttgttgttg

SEQ ID NO: 151599 - DNA, 11 bp, Unknown
  misc_feature (1)..( 11): Result.004 file - promoters60/5776417
tttagttttgt

SEQ ID NO: 151600 - DNA, 11 bp, Unknown
  misc_feature (1)..( 11): Result.004 file - promoters60/5776417
aaaagtttttg

SEQ ID NO: 151601 - DNA, 11 bp, Unknown
  misc_feature (1)..( 11): Result.004 file - promoters60/5776417
tttacttttaa

SEQ ID NO: 151602 - DNA, 11 bp, Unknown
  misc_feature (1)..( 11): Result.004 file - promoters60/5776417
tttatttttgt

SEQ ID NO: 151603 - DNA, 11 bp, Unknown
  misc_feature (1)..( 11): Result.004 file - promoters60/5776417
tagggtttttt

SEQ ID NO: 151604 - DNA, 12 bp, Unknown
  misc_feature (1)..( 12): Result.004 file - promoters60/5776417
gtttgttgttgg

SEQ ID NO: 151605 - DNA, 13 bp, Unknown
  misc_feature (1)..( 13): Result.004 file - promoters60/5776417
tttagttttgtaa

SEQ ID NO: 151606 - DNA, 13 bp, Unknown
  misc_feature (1)..( 13): Result.004 file - promoters60/5776417
aaagtttttgtaa

SEQ ID NO: 151607 - DNA, 13 bp, Unknown
  misc_feature (1)..( 13): Result.004 file - promoters60/5776417
tttatttttgttg

SEQ ID NO: 151608 - DNA, 13 bp, Unknown
  misc_feature (1)..( 13): Result.004 file - promoters60/5776417
gggttttttcttg

SEQ ID NO: 151609 - DNA, 13 bp, Unknown
  misc_feature (1)..( 13): Result.004 file - promoters60/5776417
gggtttgttgttg

SEQ ID NO: 151610 - DNA, 13 bp, Unknown
  misc_feature (1)..( 13): Result.004 file - promoters60/5776425
caaatttttactt

SEQ ID NO: 151611 - DNA, 13 bp, Unknown
  misc_feature (1)..( 13): Result.004 file - promoters60/5776425
ctaaaatagtaaa

SEQ ID NO: 151612 - DNA, 13 bp, Unknown
  misc_feature (1)..( 13): Result.004 file - promoters60/5776425
aaataattgtata

SEQ ID NO: 151613 - DNA, 13 bp, Unknown
  misc_feature (1)..( 13): Result.004 file - promoters60/5776425
tcatatttgtata

SEQ ID NO: 151614 - DNA, 13 bp, Unknown
  misc_feature (1)..( 13): Result.004 file - promoters60/5776425
aaagaattgaaca

SEQ ID NO: 151615 - DNA, 10 bp, Unknown
  misc_feature (1)..( 10): Result.004 file - promoters60/5776425
gaaaaagata

SEQ ID NO: 151616 - DNA, 10 bp, Unknown
  misc_feature (1)..( 10): Result.004 file - promoters60/5776425
gaaatagatt

SEQ ID NO: 151617 - DNA, 10 bp, Unknown
  misc_feature (1)..( 10): Result.004 file - promoters60/5776425
ttagtagatt

SEQ ID NO: 151618 - DNA, 10 bp, Unknown
  misc_feature (1)..( 10): Result.004 file - promoters60/5776425
tatataaatt

SEQ ID NO: 151619 - DNA, 10 bp, Unknown
  misc_feature (1)..( 10): Result.004 file - promoters60/5776425
ttactaaaat

SEQ ID NO: 151620 - DNA, 10 bp, Unknown
  misc_feature (1)..( 10): Result.004 file - promoters60/5776425
ttattaattt

SEQ ID NO: 151621 - DNA, 11 bp, Unknown
  misc_feature (1)..( 11): Result.004 file - promoters60/5776425
gaactgaaaga

SEQ ID NO: 151622 - DNA, 11 bp, Unknown
  misc_feature (1)..( 11): Result.004 file - promoters60/5776545
ttgtataaatt

SEQ ID NO: 151623 - DNA, 9 bp, Unknown
  misc_feature (1)..( 9): Result.004 file - promoters60/5776545
cttgtattt

SEQ ID NO: 151624 - DNA, 9 bp, Unknown
  misc_feature (1)..( 9): Result.004 file - promoters60/5776545
tttgtatta

SEQ ID NO: 151625 - DNA, 9 bp, Unknown
  misc_feature (1)..( 9): Result.004 file - promoters60/5776545
tttttattt

SEQ ID NO: 151626 - DNA, 9 bp, Unknown
  misc_feature (1)..( 9): Result.004 file - promoters60/5776545
tttttactt

SEQ ID NO: 151627 - DNA, 9 bp, Unknown
  misc_feature (1)..( 9): Result.004 file - promoters60/5776545
ttttttttt

SEQ ID NO: 151628 - DNA, 9 bp, Unknown
  misc_feature (1)..( 9): Result.004 file - promoters60/5776545
tttttataa

SEQ ID NO: 151629 - DNA, 20 bp, Unknown
  misc_feature (1)..( 20): Result.004 file - promoters60/5776545
cacgttagcaaagcagctat

SEQ ID NO: 151630 - DNA, 20 bp, Unknown
  misc_feature (1)..( 20): Result.004 file - promoters60/5776545
taagatagcaacacgagatt

SEQ ID NO: 151631 - DNA, 20 bp, Unknown
  misc_feature (1)..( 20): Result.004 file - promoters60/5776545
acttttaacaaaacaattca

SEQ ID NO: 151632 - DNA, 21 bp, Unknown
  misc_feature (1)..( 21): Result.004 file - promoters60/5776545
ggttcaaacgaaaccaaaact

SEQ ID NO: 151633 - DNA, 21 bp, Unknown
  misc_feature (1)..( 21): Result.004 file - promoters60/5776545
ctttttacagttttgtattat

SEQ ID NO: 151634 - DNA, 21 bp, Unknown
  misc_feature (1)..( 21): Result.004 file - promoters60/5776545
acaaagaacttaatttttttt

SEQ ID NO: 151635 - DNA, 21 bp, Unknown
  misc_feature (1)..( 21): Result.004 file - promoters60/5776545
atttttataactaattgaacc

SEQ ID NO: 151636 - DNA, 11 bp, Unknown
  misc_feature (1)..( 11): Result.004 file - promoters60/5776545
taaataattaa

SEQ ID NO: 151637 - DNA, 11 bp, Unknown
  misc_feature (1)..( 11): Result.004 file - promoters60/5776545
gaaataacaaa

SEQ ID NO: 151638 - DNA, 11 bp, Unknown
  misc_feature (1)..( 11): Result.004 file - promoters60/5776545
aaaataaattg

SEQ ID NO: 151639 - DNA, 11 bp, Unknown
  misc_feature (1)..( 11): Result.004 file - promoters60/5776545
caaaaaaaatt

SEQ ID NO: 151640 - DNA, 11 bp, Unknown
  misc_feature (1)..( 11): Result.004 file - promoters60/5776545
caaaaatactt

SEQ ID NO: 151641 - DNA, 11 bp, Unknown
  misc_feature (1)..( 11): Result.004 file - promoters60/5776545
caaaacattga

SEQ ID NO: 151642 - DNA, 11 bp, Unknown
  misc_feature (1)..( 11): Result.004 file - promoters60/5776545
gacataaattt

SEQ ID NO: 151643 - DNA, 11 bp, Unknown
  misc_feature (1)..( 11): Result.004 file - promoters60/5776545
tgataaaataa

SEQ ID NO: 151644 - DNA, 11 bp, Unknown
  misc_feature (1)..( 11): Result.004 file - promoters60/5776545
ttcaaaaatac

SEQ ID NO: 151645 - DNA, 11 bp, Unknown
  misc_feature (1)..( 11): Result.004 file - promoters60/5776545
tctagaaataa

SEQ ID NO: 151646 - DNA, 11 bp, Unknown
  misc_feature (1)..( 11): Result.004 file - promoters60/5776545
aaaaaaaatta

SEQ ID NO: 151647 - DNA, 11 bp, Unknown
  misc_feature (1)..( 11): Result.004 file - promoters60/5776545
tataaaaattt

SEQ ID NO: 151648 - DNA, 12 bp, Unknown
  misc_feature (1)..( 12): Result.004 file - promoters60/5776545
ctcaaaacattg

SEQ ID NO: 151649 - DNA, 13 bp, Unknown
  misc_feature (1)..( 13): Result.004 file - promoters60/5776545
ccttgattaattt

SEQ ID NO: 151650 - DNA, 13 bp, Unknown
  misc_feature (1)..( 13): Result.004 file - promoters60/5776545
atgtaatttattt

SEQ ID NO: 151651 - DNA, 13 bp, Unknown
  misc_feature (1)..( 13): Result.004 file - promoters60/5776545
gtttgattaaaat

SEQ ID NO: 151652 - DNA, 13 bp, Unknown
  misc_feature (1)..( 13): Result.004 file - promoters60/5776545
aagttattaatga

SEQ ID NO: 151653 - DNA, 13 bp, Unknown
  misc_feature (1)..( 13): Result.004 file - promoters60/5776545
gtgaaatatatgc

SEQ ID NO: 151654 - DNA, 13 bp, Unknown
  misc_feature (1)..( 13): Result.004 file - promoters60/5776545
aacctatatataa

SEQ ID NO: 151655 - DNA, 13 bp, Unknown
  misc_feature (1)..( 13): Result.004 file - promoters60/5776545
gttggatagcttc

SEQ ID NO: 151656 - DNA, 10 bp, Unknown
  misc_feature (1)..( 10): Result.004 file - promoters60/5776545
ctttttaaag

SEQ ID NO: 151657 - DNA, 10 bp, Unknown
  misc_feature (1)..( 10): Result.004 file - promoters60/5776545
cttattaaag

SEQ ID NO: 151658 - DNA, 10 bp, Unknown
  misc_feature (1)..( 10): Result.004 file - promoters60/5776545
acttttaaca

SEQ ID NO: 151659 - DNA, 10 bp, Unknown
  misc_feature (1)..( 10): Result.004 file - promoters60/5776545
aattttaaaa

SEQ ID NO: 151660 - DNA, 10 bp, Unknown
  misc_feature (1)..( 10): Result.004 file - promoters60/5776545
ctttttacag

SEQ ID NO: 151661 - DNA, 10 bp, Unknown
  misc_feature (1)..( 10): Result.004 file - promoters50/1006957
atttttataa

SEQ ID NO: 151662 - DNA, 10 bp, Unknown
  misc_feature (1)..( 10): Result.004 file - promoters50/1006957
caaagtagag

SEQ ID NO: 151663 - DNA, 10 bp, Unknown
  misc_feature (1)..( 10): Result.004 file - promoters50/1006957
caaactaggc

SEQ ID NO: 151664 - DNA, 10 bp, Unknown
  misc_feature (1)..( 10): Result.004 file - promoters50/1006957
aaaacaaggc

SEQ ID NO: 151665 - DNA, 8 bp, Unknown
  misc_feature (1)..( 8): Result.004 file - promoters50/1006957
aaaaggaa

SEQ ID NO: 151666 - DNA, 8 bp, Unknown
  misc_feature (1)..( 8): Result.004 file - promoters50/1006957
gaaaggag

SEQ ID NO: 151667 - DNA, 8 bp, Unknown
  misc_feature (1)..( 8): Result.004 file - promoters50/1006965
gaaaagag

SEQ ID NO: 151668 - DNA, 9 bp, Unknown
  misc_feature (1)..( 9): Result.004 file - promoters50/1006965
cttgaagat

SEQ ID NO: 151669 - DNA, 9 bp, Unknown
  misc_feature (1)..( 9): Result.004 file - promoters50/1006965
cttggagat

SEQ ID NO: 151670 - DNA, 9 bp, Unknown
  misc_feature (1)..( 9): Result.004 file - promoters50/1006965
cgtgaagat

SEQ ID NO: 151671 - DNA, 7 bp, Unknown
  misc_feature (1)..( 7): Result.004 file - promoters50/1006965
caaaatc

SEQ ID NO: 151672 - DNA, 7 bp, Unknown
  misc_feature (1)..( 7): Result.004 file - promoters50/1006965
aaaaatc

SEQ ID NO: 151673 - DNA, 7 bp, Unknown
  misc_feature (1)..( 7): Result.004 file - promoters50/1007014
aaaaata

SEQ ID NO: 151674 - DNA, 10 bp, Unknown
  misc_feature (1)..( 10): Result.004 file - promoters50/1007014
gctaaacaag

SEQ ID NO: 151675 - DNA, 10 bp, Unknown
  misc_feature (1)..( 10): Result.004 file - promoters50/1007014
actaaaaaag

SEQ ID NO: 151676 - DNA, 10 bp, Unknown
  misc_feature (1)..( 10): Result.004 file - promoters50/1007030
acttaaaatt

SEQ ID NO: 151677 - DNA, 15 bp, Unknown
  misc_feature (1)..( 15): Result.004 file - promoters50/1007030
gggaagataaacata

SEQ ID NO: 151678 - DNA, 15 bp, Unknown
  misc_feature (1)..( 15): Result.004 file - promoters50/1007030
tcgaaaatatacagt

SEQ ID NO: 151679 - DNA, 15 bp, Unknown
  misc_feature (1)..( 15): Result.004 file - promoters50/1007030
tataaagtatttaaa

SEQ ID NO: 151680 - DNA, 15 bp, Unknown
  misc_feature (1)..( 15): Result.004 file - promoters50/1007030
tcgataatgaagaga

SEQ ID NO: 151681 - DNA, 15 bp, Unknown
  misc_feature (1)..( 15): Result.004 file - promoters50/1007030
tatattatatagagt

SEQ ID NO: 151682 - DNA, 15 bp, Unknown
  misc_feature (1)..( 15): Result.004 file - promoters50/1007030
aagaatttataaatt

SEQ ID NO: 151683 - DNA, 15 bp, Unknown
  misc_feature (1)..( 15): Result.004 file - promoters50/1007030
atccttatctagatt

SEQ ID NO: 151684 - DNA, 13 bp, Unknown
  misc_feature (1)..( 13): Result.004 file - promoters50/1007030
atcaaataataaa

SEQ ID NO: 151685 - DNA, 13 bp, Unknown
  misc_feature (1)..( 13): Result.004 file - promoters50/1007030
attttataatata

SEQ ID NO: 151686 - DNA, 13 bp, Unknown
  misc_feature (1)..( 13): Result.004 file - promoters50/1007030
tataaatagtaaa

SEQ ID NO: 151687 - DNA, 13 bp, Unknown
  misc_feature (1)..( 13): Result.004 file - promoters50/1007030
atcaaataatata

SEQ ID NO: 151688 - DNA, 13 bp, Unknown
  misc_feature (1)..( 13): Result.004 file - promoters50/1007030
ttgagatagtact

SEQ ID NO: 151689 - DNA, 13 bp, Unknown
  misc_feature (1)..( 13): Result.004 file - promoters50/1007030
aaaggataaaata

SEQ ID NO: 151690 - DNA, 13 bp, Unknown
  misc_feature (1)..( 13): Result.004 file - promoters50/1007030
aataaatagcggg

SEQ ID NO: 151691 - DNA, 13 bp, Unknown
  misc_feature (1)..( 13): Result.004 file - promoters50/1007030
tataaataattat

SEQ ID NO: 151692 - DNA, 13 bp, Unknown
  misc_feature (1)..( 13): Result.004 file - promoters50/1007030
tataaatagtaaa

SEQ ID NO: 151693 - DNA, 13 bp, Unknown
  misc_feature (1)..( 13): Result.004 file - promoters50/1007030
ttgagatagtact

SEQ ID NO: 151694 - DNA, 13 bp, Unknown
  misc_feature (1)..( 13): Result.004 file - promoters50/1007030
tataaaaagttta

SEQ ID NO: 151695 - DNA, 13 bp, Unknown
  misc_feature (1)..( 13): Result.004 file - promoters50/1007030
tatgaaaaggata

SEQ ID NO: 151696 - DNA, 10 bp, Unknown
  misc_feature (1)..( 10): Result.004 file - promoters50/1007030
aatctgcttc

SEQ ID NO: 151697 - DNA, 10 bp, Unknown
  misc_feature (1)..( 10): Result.004 file - promoters50/1007030
aatctgatgt

SEQ ID NO: 151698 - DNA, 10 bp, Unknown
  misc_feature (1)..( 10): Result.004 file - promoters50/1007030
aatcttcttc

SEQ ID NO: 151699 - DNA, 10 bp, Unknown
  misc_feature (1)..( 10): Result.004 file - promoters50/1007030
aatttgaaaa

SEQ ID NO: 151700 - DNA, 10 bp, Unknown
  misc_feature (1)..( 10): Result.004 file - promoters50/1007030
agtttaaaaa

SEQ ID NO: 151701 - DNA, 10 bp, Unknown
  misc_feature (1)..( 10): Result.004 file - promoters50/1007030
aaaaaaagaa

SEQ ID NO: 151702 - DNA, 12 bp, Unknown
  misc_feature (1)..( 12): Result.004 file - promoters50/1007030
tattcacattta

SEQ ID NO: 151703 - DNA, 12 bp, Unknown
  misc_feature (1)..( 12): Result.004 file - promoters50/1007030
ttatcaaattta

SEQ ID NO: 151704 - DNA, 12 bp, Unknown
  misc_feature (1)..( 12): Result.004 file - promoters50/1007030
ttatgaaacaga

SEQ ID NO: 151705 - DNA, 12 bp, Unknown
  misc_feature (1)..( 12): Result.004 file - promoters50/1007030
gttcaaaaatta

SEQ ID NO: 151706 - DNA, 12 bp, Unknown
  misc_feature (1)..( 12): Result.004 file - promoters50/1007030
caaaaaaaatac

SEQ ID NO: 151707 - DNA, 12 bp, Unknown
  misc_feature (1)..( 12): Result.004 file - promoters50/1007030
gacgaaaaatgt

SEQ ID NO: 151708 - DNA, 10 bp, Unknown
  misc_feature (1)..( 10): Result.004 file - promoters50/1007030
cttctttgca

SEQ ID NO: 151709 - DNA, 10 bp, Unknown
  misc_feature (1)..( 10): Result.004 file - promoters50/1007030
cttttttaaa

SEQ ID NO: 151710 - DNA, 10 bp, Unknown
  misc_feature (1)..( 10): Result.004 file - promoters50/1007030
ctttataaaa

SEQ ID NO: 151711 - DNA, 10 bp, Unknown
  misc_feature (1)..( 10): Result.004 file - promoters50/1007030
atttgttacc

SEQ ID NO: 151712 - DNA, 10 bp, Unknown
  misc_feature (1)..( 10): Result.004 file - promoters50/1007030
atttgtatcg

SEQ ID NO: 151713 - DNA, 9 bp, Unknown
  misc_feature (1)..( 9): Result.004 file - promoters50/1007030
agtataaaa

SEQ ID NO: 151714 - DNA, 10 bp, Unknown
  misc_feature (1)..( 10): Result.004 file - promoters50/1007030
actaaaataa

SEQ ID NO: 151715 - DNA, 10 bp, Unknown
  misc_feature (1)..( 10): Result.004 file - promoters50/1007030
ttagaaataa

SEQ ID NO: 151716 - DNA, 10 bp, Unknown
  misc_feature (1)..( 10): Result.004 file - promoters50/1007030
aaaaaaatac

SEQ ID NO: 151717 - DNA, 10 bp, Unknown
  misc_feature (1)..( 10): Result.004 file - promoters50/1007030
gtcaaagtaa

SEQ ID NO: 151718 - DNA, 10 bp, Unknown
  misc_feature (1)..( 10): Result.004 file - promoters50/1007030
actaaaatat

SEQ ID NO: 151719 - DNA, 10 bp, Unknown
  misc_feature (1)..( 10): Result.004 file - promoters50/1007030
tcaaaaatta

SEQ ID NO: 151720 - DNA, 8 bp, Unknown
  misc_feature (1)..( 8): Result.004 file - promoters50/1007030
taaaaaaa

SEQ ID NO: 151721 - DNA, 8 bp, Unknown
  misc_feature (1)..( 8): Result.004 file - promoters50/1007030
aaaaaaaa

SEQ ID NO: 151722 - DNA, 8 bp, Unknown
  misc_feature (1)..( 8): Result.004 file - promoters50/1007030
taaaaaac

SEQ ID NO: 151723 - DNA, 8 bp, Unknown
  misc_feature (1)..( 8): Result.004 file - promoters50/1007030
taaaaatt

SEQ ID NO: 151724 - DNA, 8 bp, Unknown
  misc_feature (1)..( 8): Result.004 file - promoters50/1007030
aaaatatt

SEQ ID NO: 151725 - DNA, 8 bp, Unknown
  misc_feature (1)..( 8): Result.004 file - promoters50/1007058
caaaaatt

SEQ ID NO: 151726 - DNA, 8 bp, Unknown
  misc_feature (1)..( 8): Result.004 file - promoters50/1007058
ggtttgat

SEQ ID NO: 151727 - DNA, 8 bp, Unknown
  misc_feature (1)..( 8): Result.004 file - promoters50/1007058
ggtatgat

SEQ ID NO: 151728 - DNA, 8 bp, Unknown
  misc_feature (1)..( 8): Result.004 file - promoters50/1007092
tgtatgaa

SEQ ID NO: 151729 - DNA, 9 bp, Unknown
  misc_feature (1)..( 9): Result.004 file - promoters50/1007092
atatctttt

SEQ ID NO: 151730 - DNA, 9 bp, Unknown
  misc_feature (1)..( 9): Result.004 file - promoters50/1007092
atatttttt

SEQ ID NO: 151731 - DNA, 9 bp, Unknown
  misc_feature (1)..( 9): Result.004 file - promoters50/1007092
aagtttttg

SEQ ID NO: 151732 - DNA, 8 bp, Unknown
  misc_feature (1)..( 8): Result.004 file - promoters50/1007092
aattgatc

SEQ ID NO: 151733 - DNA, 8 bp, Unknown
  misc_feature (1)..( 8): Result.004 file - promoters50/1007092
aattgatt

SEQ ID NO: 151734 - DNA, 8 bp, Unknown
  misc_feature (1)..( 8): Result.004 file - promoters50/1007139
gattcatt

SEQ ID NO: 151735 - DNA, 11 bp, Unknown
  misc_feature (1)..( 11): Result.004 file - promoters50/1007139
cccccacaaaa

SEQ ID NO: 151736 - DNA, 11 bp, Unknown
  misc_feature (1)..( 11): Result.004 file - promoters50/1007139
ttttaacaaaa

SEQ ID NO: 151737 - DNA, 11 bp, Unknown
  misc_feature (1)..( 11): Result.004 file - promoters50/1007139
gtataataaag

SEQ ID NO: 151738 - DNA, 12 bp, Unknown
  misc_feature (1)..( 12): Result.004 file - promoters50/1007139
tttcaaccaaaa

SEQ ID NO: 151739 - DNA, 9 bp, Unknown
  misc_feature (1)..( 9): Result.004 file - promoters50/1007139
aaagttcaa

SEQ ID NO: 151740 - DNA, 9 bp, Unknown
  misc_feature (1)..( 9): Result.004 file - promoters50/1007139
aaagttttg

SEQ ID NO: 151741 - DNA, 9 bp, Unknown
  misc_feature (1)..( 9): Result.004 file - promoters50/1007139
caagatcat

SEQ ID NO: 151742 - DNA, 9 bp, Unknown
  misc_feature (1)..( 9): Result.004 file - promoters50/1007139
caagttttg

SEQ ID NO: 151743 - DNA, 10 bp, Unknown
  misc_feature (1)..( 10): Result.004 file - promoters50/1007139
taatttatca

SEQ ID NO: 151744 - DNA, 10 bp, Unknown
  misc_feature (1)..( 10): Result.004 file - promoters50/1007139
aaatatatgt

SEQ ID NO: 151745 - DNA, 11 bp, Unknown
  misc_feature (1)..( 11): Result.004 file - promoters50/1007139
ttgatatatac

SEQ ID NO: 151746 - DNA, 11 bp, Unknown
  misc_feature (1)..( 11): Result.004 file - promoters50/1007152
gaattatatgt

SEQ ID NO: 151747 - DNA, 10 bp, Unknown
  misc_feature (1)..( 10): Result.004 file - promoters50/1007152
attttgattt

SEQ ID NO: 151748 - DNA, 10 bp, Unknown
  misc_feature (1)..( 10): Result.004 file - promoters50/1007152
attttgatta

SEQ ID NO: 151749 - DNA, 10 bp, Unknown
  misc_feature (1)..( 10): Result.004 file - promoters50/1007152
aaattgattt

SEQ ID NO: 151750 - DNA, 10 bp, Unknown
  misc_feature (1)..( 10): Result.004 file - promoters50/1007152
atttttattg

SEQ ID NO: 151751 - DNA, 10 bp, Unknown
  misc_feature (1)..( 10): Result.004 file - promoters50/1007152
gttttgacta

SEQ ID NO: 151752 - DNA, 10 bp, Unknown
  misc_feature (1)..( 10): Result.004 file - promoters50/1007152
cttttgaagt

SEQ ID NO: 151753 - DNA, 10 bp, Unknown
  misc_feature (1)..( 10): Result.004 file - promoters50/1007152
cctttgacca

SEQ ID NO: 151754 - DNA, 11 bp, Unknown
  misc_feature (1)..( 11): Result.004 file - promoters50/1007152
atctctaaacc

SEQ ID NO: 151755 - DNA, 11 bp, Unknown
  misc_feature (1)..( 11): Result.004 file - promoters50/1007152
gtctttaaacg

SEQ ID NO: 151756 - DNA, 11 bp, Unknown
  misc_feature (1)..( 11): Result.004 file - promoters50/1007152
tgcttcaaaca

SEQ ID NO: 151757 - DNA, 11 bp, Unknown
  misc_feature (1)..( 11): Result.004 file - promoters50/1007152
tatttcaaaaa

SEQ ID NO: 151758 - DNA, 11 bp, Unknown
  misc_feature (1)..( 11): Result.004 file - promoters50/1007152
tcttctaaaat

SEQ ID NO: 151759 - DNA, 12 bp, Unknown
  misc_feature (1)..( 12): Result.004 file - promoters50/1007152
atttcacaaatt

SEQ ID NO: 151760 - DNA, 13 bp, Unknown
  misc_feature (1)..( 13): Result.004 file - promoters50/1007152
tcatcttcaaaat

SEQ ID NO: 151761 - DNA, 10 bp, Unknown
  misc_feature (1)..( 10): Result.004 file - promoters50/1007152
gcttcaaaca

SEQ ID NO: 151762 - DNA, 10 bp, Unknown
  misc_feature (1)..( 10): Result.004 file - promoters50/1007152
tcttcaaaat

SEQ ID NO: 151763 - DNA, 10 bp, Unknown
  misc_feature (1)..( 10): Result.004 file - promoters50/1007152
tctttaaacg

SEQ ID NO: 151764 - DNA, 10 bp, Unknown
  misc_feature (1)..( 10): Result.004 file - promoters50/1007152
atttcaaaaa

SEQ ID NO: 151765 - DNA, 11 bp, Unknown
  misc_feature (1)..( 11): Result.004 file - promoters50/1007152
tcttctaaaat

SEQ ID NO: 151766 - DNA, 12 bp, Unknown
  misc_feature (1)..( 12): Result.004 file - promoters50/1007187
atttcacaaatt

SEQ ID NO: 151767 - DNA, 6 bp, Unknown
  misc_feature (1)..( 6): Result.004 file - promoters50/1007187
aatttt

SEQ ID NO: 151768 - DNA, 6 bp, Unknown
  misc_feature (1)..( 6): Result.004 file - promoters50/1007187
aatttt

SEQ ID NO: 151769 - DNA, 6 bp, Unknown
  misc_feature (1)..( 6): Result.004 file - promoters50/1007187
aatttt

SEQ ID NO: 151770 - DNA, 9 bp, Unknown
  misc_feature (1)..( 9): Result.004 file - promoters50/1007187
aatttattt

SEQ ID NO: 151771 - DNA, 9 bp, Unknown
  misc_feature (1)..( 9): Result.004 file - promoters50/1007187
aatttattt

SEQ ID NO: 151772 - DNA, 9 bp, Unknown
  misc_feature (1)..( 9): Result.004 file - promoters50/1007187
gatttatta

SEQ ID NO: 151773 - DNA, 9 bp, Unknown
  misc_feature (1)..( 9): Result.004 file - promoters50/1007187
aatattgca

SEQ ID NO: 151774 - DNA, 9 bp, Unknown
  misc_feature (1)..( 9): Result.004 file - promoters50/1007187
aatattttt

SEQ ID NO: 151775 - DNA, 9 bp, Unknown
  misc_feature (1)..( 9): Result.004 file - promoters50/1007187
aattttttt

SEQ ID NO: 151776 - DNA, 9 bp, Unknown
  misc_feature (1)..( 9): Result.004 file - promoters50/1007187
tgttaatct

SEQ ID NO: 151777 - DNA, 9 bp, Unknown
  misc_feature (1)..( 9): Result.004 file - promoters50/1007187
acttaatct

SEQ ID NO: 151778 - DNA, 9 bp, Unknown
  misc_feature (1)..( 9): Result.004 file - promoters50/1007187
tgttaatag

SEQ ID NO: 151779 - DNA, 7 bp, Unknown
  misc_feature (1)..( 7): Result.004 file - promoters50/1007187
tttttct

SEQ ID NO: 151780 - DNA, 7 bp, Unknown
  misc_feature (1)..( 7): Result.004 file - promoters50/1007187
tttttct

SEQ ID NO: 151781 - DNA, 7 bp, Unknown
  misc_feature (1)..( 7): Result.004 file - promoters50/1007258
gttttct

SEQ ID NO: 151782 - DNA, 8 bp, Unknown
  misc_feature (1)..( 8): Result.004 file - promoters50/1007258
atttattt

SEQ ID NO: 151783 - DNA, 8 bp, Unknown
  misc_feature (1)..( 8): Result.004 file - promoters50/1007258
attaatta

SEQ ID NO: 151784 - DNA, 8 bp, Unknown
  misc_feature (1)..( 8): Result.004 file - promoters50/1007258
cttaatta

SEQ ID NO: 151785 - DNA, 7 bp, Unknown
  misc_feature (1)..( 7): Result.004 file - promoters50/1007258
atttact

SEQ ID NO: 151786 - DNA, 7 bp, Unknown
  misc_feature (1)..( 7): Result.004 file - promoters50/1007258
atttaca

SEQ ID NO: 151787 - DNA, 7 bp, Unknown
  misc_feature (1)..( 7): Result.004 file - promoters50/1007258
ttttaca

SEQ ID NO: 151788 - DNA, 7 bp, Unknown
  misc_feature (1)..( 7): Result.004 file - promoters50/1007258
atttaat

SEQ ID NO: 151789 - DNA, 7 bp, Unknown
  misc_feature (1)..( 7): Result.004 file - promoters50/1007258
gtttaat

SEQ ID NO: 151790 - DNA, 7 bp, Unknown
  misc_feature (1)..( 7): Result.004 file - promoters50/1007258
gtttaac

SEQ ID NO: 151791 - DNA, 11 bp, Unknown
  misc_feature (1)..( 11): Result.004 file - promoters50/1007258
tctctaactaa

SEQ ID NO: 151792 - DNA, 11 bp, Unknown
  misc_feature (1)..( 11): Result.004 file - promoters50/1007258
gttctaagtaa

SEQ ID NO: 151793 - DNA, 11 bp, Unknown
  misc_feature (1)..( 11): Result.004 file - promoters50/1007258
gttttaaaatg

SEQ ID NO: 151794 - DNA, 7 bp, Unknown
  misc_feature (1)..( 7): Result.004 file - promoters50/1007258
tttttgt

SEQ ID NO: 151795 - DNA, 7 bp, Unknown
  misc_feature (1)..( 7): Result.004 file - promoters50/1007258
cttttgt

SEQ ID NO: 151796 - DNA, 7 bp, Unknown
  misc_feature (1)..( 7): Result.004 file - promoters50/1007258
tttttga

SEQ ID NO: 151797 - DNA, 7 bp, Unknown
  misc_feature (1)..( 7): Result.004 file - promoters50/1007258
gttttaa

SEQ ID NO: 151798 - DNA, 7 bp, Unknown
  misc_feature (1)..( 7): Result.004 file - promoters50/1007258
tttttaa

SEQ ID NO: 151799 - DNA, 8 bp, Unknown
  misc_feature (1)..( 8): Result.004 file - promoters50/1007258
tttgttag

SEQ ID NO: 151800 - DNA, 10 bp, Unknown
  misc_feature (1)..( 10): Result.004 file - promoters50/1007258
ttatattttt

SEQ ID NO: 151801 - DNA, 10 bp, Unknown
  misc_feature (1)..( 10): Result.004 file - promoters50/1007258
ttcgattttt

SEQ ID NO: 151802 - DNA, 10 bp, Unknown
  misc_feature (1)..( 10): Result.004 file - promoters50/1007258
ttacattttc

SEQ ID NO: 151803 - DNA, 8 bp, Unknown
  misc_feature (1)..( 8): Result.004 file - promoters50/1007258
ttttgtca

SEQ ID NO: 151804 - DNA, 8 bp, Unknown
  misc_feature (1)..( 8): Result.004 file - promoters50/1007258
ttttgttt

SEQ ID NO: 151805 - DNA, 8 bp, Unknown
  misc_feature (1)..( 8): Result.004 file - promoters50/1007269
ttttggtt

SEQ ID NO: 151806 - DNA, 13 bp, Unknown
  misc_feature (1)..( 13): Result.004 file - promoters50/1007269
gaaacgttttata

SEQ ID NO: 151807 - DNA, 13 bp, Unknown
  misc_feature (1)..( 13): Result.004 file - promoters50/1007269
tattcgttttgta

SEQ ID NO: 151808 - DNA, 13 bp, Unknown
  misc_feature (1)..( 13): Result.004 file - promoters50/1007269
taaaagtttaaaa

SEQ ID NO: 151809 - DNA, 13 bp, Unknown
  misc_feature (1)..( 13): Result.004 file - promoters50/1007269
tatttgttttctc

SEQ ID NO: 151810 - DNA, 13 bp, Unknown
  misc_feature (1)..( 13): Result.004 file - promoters50/1007269
atattgtcttctt

SEQ ID NO: 151811 - DNA, 13 bp, Unknown
  misc_feature (1)..( 13): Result.004 file - promoters50/1007269
aagacgtcatctt

SEQ ID NO: 151812 - DNA, 13 bp, Unknown
  misc_feature (1)..( 13): Result.004 file - promoters50/1007269
aaaatttgaaacg

SEQ ID NO: 151813 - DNA, 13 bp, Unknown
  misc_feature (1)..( 13): Result.004 file - promoters50/1007269
tgcagctgatacg

SEQ ID NO: 151814 - DNA, 13 bp, Unknown
  misc_feature (1)..( 13): Result.004 file - promoters50/1007269
cttcttttaaaat

SEQ ID NO: 151815 - DNA, 13 bp, Unknown
  misc_feature (1)..( 13): Result.004 file - promoters50/1007269
aaaagtttaaaat

SEQ ID NO: 151816 - DNA, 13 bp, Unknown
  misc_feature (1)..( 13): Result.004 file - promoters50/1007269
taaatcttaaaac

SEQ ID NO: 151817 - DNA, 13 bp, Unknown
  misc_feature (1)..( 13): Result.004 file - promoters50/1007269
taaattttggtta

SEQ ID NO: 151818 - DNA, 11 bp, Unknown
  misc_feature (1)..( 11): Result.004 file - promoters50/1007269
taaattttctc

SEQ ID NO: 151819 - DNA, 11 bp, Unknown
  misc_feature (1)..( 11): Result.004 file - promoters50/1007269
cttattatctt

SEQ ID NO: 151820 - DNA, 11 bp, Unknown
  misc_feature (1)..( 11): Result.004 file - promoters50/1007269
aaggttttcta

SEQ ID NO: 151821 - DNA, 11 bp, Unknown
  misc_feature (1)..( 11): Result.004 file - promoters50/1007269
cttagtattta

SEQ ID NO: 151822 - DNA, 11 bp, Unknown
  misc_feature (1)..( 11): Result.004 file - promoters50/1007269
gtttctttcta

SEQ ID NO: 151823 - DNA, 11 bp, Unknown
  misc_feature (1)..( 11): Result.004 file - promoters50/1007269
cttaggattaa

SEQ ID NO: 151824 - DNA, 9 bp, Unknown
  misc_feature (1)..( 9): Result.004 file - promoters50/1007269
aaaaaagat

SEQ ID NO: 151825 - DNA, 9 bp, Unknown
  misc_feature (1)..( 9): Result.004 file - promoters50/1007269
gaaaaagtc

SEQ ID NO: 151826 - DNA, 10 bp, Unknown
  misc_feature (1)..( 10): Result.004 file - promoters50/1007269
taaaatagat

SEQ ID NO: 151827 - DNA, 10 bp, Unknown
  misc_feature (1)..( 10): Result.004 file - promoters50/1007269
ttaaacagtt

SEQ ID NO: 151828 - DNA, 10 bp, Unknown
  misc_feature (1)..( 10): Result.004 file - promoters50/1007269
gttaatagac

SEQ ID NO: 151829 - DNA, 10 bp, Unknown
  misc_feature (1)..( 10): Result.004 file - promoters50/1007273
aacaaaagtc

SEQ ID NO: 151830 - DNA, 11 bp, Unknown
  misc_feature (1)..( 11): Result.004 file - promoters50/1007273
tggaaaagaaa

SEQ ID NO: 151831 - DNA, 11 bp, Unknown
  misc_feature (1)..( 11): Result.004 file - promoters50/1007273
tctaaaagatt

SEQ ID NO: 151832 - DNA, 11 bp, Unknown
  misc_feature (1)..( 11): Result.004 file - promoters50/1007273
cggagaagata

SEQ ID NO: 151833 - DNA, 11 bp, Unknown
  misc_feature (1)..( 11): Result.004 file - promoters50/1007273
tatcaaacaaa

SEQ ID NO: 151834 - DNA, 11 bp, Unknown
  misc_feature (1)..( 11): Result.004 file - promoters50/1007273
ggataaagatg

SEQ ID NO: 151835 - DNA, 11 bp, Unknown
  misc_feature (1)..( 11): Result.004 file - promoters50/1007273
ggataaacatg

SEQ ID NO: 151836 - DNA, 8 bp, Unknown
  misc_feature (1)..( 8): Result.004 file - promoters50/1007273
cttaaatg

SEQ ID NO: 151837 - DNA, 8 bp, Unknown
  misc_feature (1)..( 8): Result.004 file - promoters50/1007273
cttgaatc

SEQ ID NO: 151838 - DNA, 8 bp, Unknown
  misc_feature (1)..( 8): Result.004 file - promoters50/1007273
cttaaaat

SEQ ID NO: 151839 - DNA, 8 bp, Unknown
  misc_feature (1)..( 8): Result.004 file - promoters50/1007273
attggatc

SEQ ID NO: 151840 - DNA, 8 bp, Unknown
  misc_feature (1)..( 8): Result.004 file - promoters50/1007273
attggatc

SEQ ID NO: 151841 - DNA, 8 bp, Unknown
  misc_feature (1)..( 8): Result.004 file - promoters50/1007286
tttgtatc

SEQ ID NO: 151842 - DNA, 8 bp, Unknown
  misc_feature (1)..( 8): Result.004 file - promoters50/1007286
attttgtt

SEQ ID NO: 151843 - DNA, 8 bp, Unknown
  misc_feature (1)..( 8): Result.004 file - promoters50/1007286
gttttgta

SEQ ID NO: 151844 - DNA, 8 bp, Unknown
  misc_feature (1)..( 8): Result.004 file - promoters50/1007286
attttgtt

SEQ ID NO: 151845 - DNA, 14 bp, Unknown
  misc_feature (1)..( 14): Result.004 file - promoters50/1007286
aactgattgacacg

SEQ ID NO: 151846 - DNA, 14 bp, Unknown
  misc_feature (1)..( 14): Result.004 file - promoters50/1007286
aactcattttctta

SEQ ID NO: 151847 - DNA, 14 bp, Unknown
  misc_feature (1)..( 14): Result.004 file - promoters50/1007286
ctctctttttatta

SEQ ID NO: 151848 - DNA, 8 bp, Unknown
  misc_feature (1)..( 8): Result.004 file - promoters50/1007286
aattaata

SEQ ID NO: 151849 - DNA, 8 bp, Unknown
  misc_feature (1)..( 8): Result.004 file - promoters50/1007286
gatttata

SEQ ID NO: 151850 - DNA, 8 bp, Unknown
  misc_feature (1)..( 8): Result.004 file - promoters50/1007289
tttttatt

SEQ ID NO: 151851 - DNA, 12 bp, Unknown
  misc_feature (1)..( 12): Result.004 file - promoters50/1007289
ttcaatgataat

SEQ ID NO: 151852 - DNA, 12 bp, Unknown
  misc_feature (1)..( 12): Result.004 file - promoters50/1007289
aataattataaa

SEQ ID NO: 151853 - DNA, 12 bp, Unknown
  misc_feature (1)..( 12): Result.004 file - promoters50/1007289
ttcaatgactca

SEQ ID NO: 151854 - DNA, 12 bp, Unknown
  misc_feature (1)..( 12): Result.004 file - promoters50/1007289
gtgaattattcc

SEQ ID NO: 151855 - DNA, 12 bp, Unknown
  misc_feature (1)..( 12): Result.004 file - promoters50/1007289
ctatattataac

SEQ ID NO: 151856 - DNA, 12 bp, Unknown
  misc_feature (1)..( 12): Result.004 file - promoters50/1007289
tcaaataataaa

SEQ ID NO: 151857 - DNA, 12 bp, Unknown
  misc_feature (1)..( 12): Result.004 file - promoters50/1007289
atgaaatatgtc

SEQ ID NO: 151858 - DNA, 9 bp, Unknown
  misc_feature (1)..( 9): Result.004 file - promoters50/1007289
gataatacc

SEQ ID NO: 151859 - DNA, 9 bp, Unknown
  misc_feature (1)..( 9): Result.004 file - promoters50/1007289
aataatata

SEQ ID NO: 151860 - DNA, 9 bp, Unknown
  misc_feature (1)..( 9): Result.004 file - promoters50/1007289
tatattata

SEQ ID NO: 151861 - DNA, 9 bp, Unknown
  misc_feature (1)..( 9): Result.004 file - promoters50/1007289
tattttata

SEQ ID NO: 151862 - DNA, 9 bp, Unknown
  misc_feature (1)..( 9): Result.004 file - promoters50/1007289
aattatata

SEQ ID NO: 151863 - DNA, 9 bp, Unknown
  misc_feature (1)..( 9): Result.004 file - promoters50/1007289
aataataaa

SEQ ID NO: 151864 - DNA, 15 bp, Unknown
  misc_feature (1)..( 15): Result.004 file - promoters50/1007289
tatatcaatttgttt

SEQ ID NO: 151865 - DNA, 15 bp, Unknown
  misc_feature (1)..( 15): Result.004 file - promoters50/1007289
ccaatcaattttaaa

SEQ ID NO: 151866 - DNA, 14 bp, Unknown
  misc_feature (1)..( 14): Result.004 file - promoters50/1007289
ttaccaatttgtta

SEQ ID NO: 151867 - DNA, 15 bp, Unknown
  misc_feature (1)..( 15): Result.004 file - promoters50/1007289
tataacaacaaaaat

SEQ ID NO: 151868 - DNA, 15 bp, Unknown
  misc_feature (1)..( 15): Result.004 file - promoters50/1007289
atatttactttttta

SEQ ID NO: 151869 - DNA, 7 bp, Unknown
  misc_feature (1)..( 7): Result.004 file - promoters50/1007289
ttttttt

SEQ ID NO: 151870 - DNA, 15 bp, Unknown
  misc_feature (1)..( 15): Result.004 file - promoters50/1007289
gctgctaatttttgg

SEQ ID NO: 151871 - DNA, 10 bp, Unknown
  misc_feature (1)..( 10): Result.004 file - promoters50/1007289
ggatttgtat

SEQ ID NO: 151872 - DNA, 11 bp, Unknown
  misc_feature (1)..( 11): Result.004 file - promoters50/1007289
tattcaatgat

SEQ ID NO: 151873 - DNA, 11 bp, Unknown
  misc_feature (1)..( 11): Result.004 file - promoters50/1007289
tattccatgca

SEQ ID NO: 151874 - DNA, 11 bp, Unknown
  misc_feature (1)..( 11): Result.004 file - promoters50/1007289
acttcaatgac

SEQ ID NO: 151875 - DNA, 11 bp, Unknown
  misc_feature (1)..( 11): Result.004 file - promoters50/1007289
aattaaataaa

SEQ ID NO: 151876 - DNA, 11 bp, Unknown
  misc_feature (1)..( 11): Result.004 file - promoters50/1007289
atataaataat

SEQ ID NO: 151877 - DNA, 11 bp, Unknown
  misc_feature (1)..( 11): Result.004 file - promoters50/1007289
catcaaataat

SEQ ID NO: 151878 - DNA, 9 bp, Unknown
  misc_feature (1)..( 9): Result.004 file - promoters50/1007289
cgataaagc

SEQ ID NO: 151879 - DNA, 9 bp, Unknown
  misc_feature (1)..( 9): Result.004 file - promoters50/1007289
aaataaagt

SEQ ID NO: 151880 - DNA, 9 bp, Unknown
  misc_feature (1)..( 9): Result.004 file - promoters50/1007289
ctaaaaaaa

SEQ ID NO: 151881 - DNA, 9 bp, Unknown
  misc_feature (1)..( 9): Result.004 file - promoters50/1007289
aaataaacc

SEQ ID NO: 151882 - DNA, 9 bp, Unknown
  misc_feature (1)..( 9): Result.004 file - promoters50/1007289
aaaaaaaaa

SEQ ID NO: 151883 - DNA, 9 bp, Unknown
  misc_feature (1)..( 9): Result.004 file - promoters50/1007289
taattaagt

SEQ ID NO: 151884 - DNA, 9 bp, Unknown
  misc_feature (1)..( 9): Result.004 file - promoters50/1007289
aatcataaa

SEQ ID NO: 151885 - DNA, 9 bp, Unknown
  misc_feature (1)..( 9): Result.004 file - promoters50/1007289
aatcagaaa

SEQ ID NO: 151886 - DNA, 9 bp, Unknown
  misc_feature (1)..( 9): Result.004 file - promoters50/1007289
aattatata

SEQ ID NO: 151887 - DNA, 9 bp, Unknown
  misc_feature (1)..( 9): Result.004 file - promoters50/1007289
aattatttt

SEQ ID NO: 151888 - DNA, 9 bp, Unknown
  misc_feature (1)..( 9): Result.004 file - promoters50/1007289
tattttata

SEQ ID NO: 151889 - DNA, 9 bp, Unknown
  misc_feature (1)..( 9): Result.004 file - promoters50/1007370
aataataaa

SEQ ID NO: 151890 - DNA, 12 bp, Unknown
  misc_feature (1)..( 12): Result.004 file - promoters50/1007370
caacaatgtaca

SEQ ID NO: 151891 - DNA, 12 bp, Unknown
  misc_feature (1)..( 12): Result.004 file - promoters50/1007370
caataatttaca

SEQ ID NO: 151892 - DNA, 12 bp, Unknown
  misc_feature (1)..( 12): Result.004 file - promoters50/1007370
tgaaaatttata

SEQ ID NO: 151893 - DNA, 12 bp, Unknown
  misc_feature (1)..( 12): Result.004 file - promoters50/1007370
aaatcatttttt

SEQ ID NO: 151894 - DNA, 12 bp, Unknown
  misc_feature (1)..( 12): Result.004 file - promoters50/1007370
gcttaattcatt

SEQ ID NO: 151895 - DNA, 12 bp, Unknown
  misc_feature (1)..( 12): Result.004 file - promoters50/1007554
taatcattaacc

SEQ ID NO: 151896 - DNA, 9 bp, Unknown
  misc_feature (1)..( 9): Result.004 file - promoters50/1007554
ttttacaaa

SEQ ID NO: 151897 - DNA, 9 bp, Unknown
  misc_feature (1)..( 9): Result.004 file - promoters50/1007554
tttcacaat

SEQ ID NO: 151898 - DNA, 9 bp, Unknown
  misc_feature (1)..( 9): Result.004 file - promoters50/1007554
gaatacaaa

SEQ ID NO: 151899 - DNA, 9 bp, Unknown
  misc_feature (1)..( 9): Result.004 file - promoters50/1007554
cgttaaaaa

SEQ ID NO: 151900 - DNA, 9 bp, Unknown
  misc_feature (1)..( 9): Result.004 file - promoters50/1007554
tatcacaag

SEQ ID NO: 151901 - DNA, 9 bp, Unknown
  misc_feature (1)..( 9): Result.004 file - promoters50/1007554
tataacaat

SEQ ID NO: 151902 - DNA, 11 bp, Unknown
  misc_feature (1)..( 11): Result.004 file - promoters50/1007554
tataattttaa

SEQ ID NO: 151903 - DNA, 11 bp, Unknown
  misc_feature (1)..( 11): Result.004 file - promoters50/1007554
tttaattttat

SEQ ID NO: 151904 - DNA, 11 bp, Unknown
  misc_feature (1)..( 11): Result.004 file - promoters50/1007554
tttgattgaat

SEQ ID NO: 151905 - DNA, 11 bp, Unknown
  misc_feature (1)..( 11): Result.004 file - promoters50/1007554
aatgagtgata

SEQ ID NO: 151906 - DNA, 11 bp, Unknown
  misc_feature (1)..( 11): Result.004 file - promoters50/1007554
tggctttttat

SEQ ID NO: 151907 - DNA, 11 bp, Unknown
  misc_feature (1)..( 11): Result.004 file - promoters50/1007554
agcatttttaa

SEQ ID NO: 151908 - DNA, 8 bp, Unknown
  misc_feature (1)..( 8): Result.004 file - promoters50/1007554
aaattatt

SEQ ID NO: 151909 - DNA, 8 bp, Unknown
  misc_feature (1)..( 8): Result.004 file - promoters50/1007554
aaaatata

SEQ ID NO: 151910 - DNA, 8 bp, Unknown
  misc_feature (1)..( 8): Result.004 file - promoters50/1007554
aaaattgt

SEQ ID NO: 151911 - DNA, 8 bp, Unknown
  misc_feature (1)..( 8): Result.004 file - promoters50/1007554
taattatt

SEQ ID NO: 151912 - DNA, 8 bp, Unknown
  misc_feature (1)..( 8): Result.004 file - promoters50/1007554
aaattaat

SEQ ID NO: 151913 - DNA, 8 bp, Unknown
  misc_feature (1)..( 8): Result.004 file - promoters50/1007554
aaaataaa

SEQ ID NO: 151914 - DNA, 13 bp, Unknown
  misc_feature (1)..( 13): Result.004 file - promoters50/1007554
tcatataattatc

SEQ ID NO: 151915 - DNA, 13 bp, Unknown
  misc_feature (1)..( 13): Result.004 file - promoters50/1007554
atatataataaat

SEQ ID NO: 151916 - DNA, 13 bp, Unknown
  misc_feature (1)..( 13): Result.004 file - promoters50/1007554
tcatataacaatt

SEQ ID NO: 151917 - DNA, 13 bp, Unknown
  misc_feature (1)..( 13): Result.004 file - promoters50/1007554
tttaataacaaat

SEQ ID NO: 151918 - DNA, 13 bp, Unknown
  misc_feature (1)..( 13): Result.004 file - promoters50/1007554
aattattatactt

SEQ ID NO: 151919 - DNA, 13 bp, Unknown
  misc_feature (1)..( 13): Result.004 file - promoters50/1007576
aaaaataaataga

SEQ ID NO: 151920 - DNA, 10 bp, Unknown
  misc_feature (1)..( 10): Result.004 file - promoters50/1007576
ctggaatatg

SEQ ID NO: 151921 - DNA, 10 bp, Unknown
  misc_feature (1)..( 10): Result.004 file - promoters50/1007576
ctggaaaatg

SEQ ID NO: 151922 - DNA, 10 bp, Unknown
  misc_feature (1)..( 10): Result.004 file - promoters50/1007639
agggaaaagg

SEQ ID NO: 151923 - DNA, 17 bp, Unknown
  misc_feature (1)..( 17): Result.004 file - promoters50/1007639
taattgacaaaaacaaa

SEQ ID NO: 151924 - DNA, 17 bp, Unknown
  misc_feature (1)..( 17): Result.004 file - promoters50/1007639
tcacagaggaaaacata

SEQ ID NO: 151925 - DNA, 17 bp, Unknown
  misc_feature (1)..( 17): Result.004 file - promoters50/1007639
ctatgatttaaaatata

SEQ ID NO: 151926 - DNA, 17 bp, Unknown
  misc_feature (1)..( 17): Result.004 file - promoters50/1007639
ttgaagtgaaaattatg

SEQ ID NO: 151927 - DNA, 17 bp, Unknown
  misc_feature (1)..( 17): Result.004 file - promoters50/1007639
tattatttcaaatgaca

SEQ ID NO: 151928 - DNA, 17 bp, Unknown
  misc_feature (1)..( 17): Result.004 file - promoters50/1007639
tattacagtatatcatt

SEQ ID NO: 151929 - DNA, 10 bp, Unknown
  misc_feature (1)..( 10): Result.004 file - promoters50/1007639
atacagactt

SEQ ID NO: 151930 - DNA, 10 bp, Unknown
  misc_feature (1)..( 10): Result.004 file - promoters50/1007639
atacaaactt

SEQ ID NO: 151931 - DNA, 10 bp, Unknown
  misc_feature (1)..( 10): Result.004 file - promoters50/1007639
ataaaaaagc

SEQ ID NO: 151932 - DNA, 10 bp, Unknown
  misc_feature (1)..( 10): Result.004 file - promoters50/1007639
ataaaaacac

SEQ ID NO: 151933 - DNA, 10 bp, Unknown
  misc_feature (1)..( 10): Result.004 file - promoters50/1007639
ctgaaaacaa

SEQ ID NO: 151934 - DNA, 10 bp, Unknown
  misc_feature (1)..( 10): Result.004 file - promoters50/1007639
aacaaaacaa

SEQ ID NO: 151935 - DNA, 10 bp, Unknown
  misc_feature (1)..( 10): Result.004 file - promoters50/1007639
agaaaaacaa

SEQ ID NO: 151936 - DNA, 10 bp, Unknown
  misc_feature (1)..( 10): Result.004 file - promoters50/1007639
gtaacaacaa

SEQ ID NO: 151937 - DNA, 16 bp, Unknown
  misc_feature (1)..( 16): Result.004 file - promoters50/1007639
ttatagaaatataaat

SEQ ID NO: 151938 - DNA, 16 bp, Unknown
  misc_feature (1)..( 16): Result.004 file - promoters50/1007639
aacaataaatatcttt

SEQ ID NO: 151939 - DNA, 16 bp, Unknown
  misc_feature (1)..( 16): Result.004 file - promoters50/1007639
aaacagagatataaat

SEQ ID NO: 151940 - DNA, 16 bp, Unknown
  misc_feature (1)..( 16): Result.004 file - promoters50/1007639
agtggttcatataagt

SEQ ID NO: 151941 - DNA, 16 bp, Unknown
  misc_feature (1)..( 16): Result.004 file - promoters50/1007639
ttgcagagaatgtata

SEQ ID NO: 151942 - DNA, 16 bp, Unknown
  misc_feature (1)..( 16): Result.004 file - promoters50/1007639
ttgctgagcttattta

SEQ ID NO: 151943 - DNA, 13 bp, Unknown
  misc_feature (1)..( 13): Result.004 file - promoters50/1007639
agcgttttctgtt

SEQ ID NO: 151944 - DNA, 13 bp, Unknown
  misc_feature (1)..( 13): Result.004 file - promoters50/1007639
tttgttttctaac

SEQ ID NO: 151945 - DNA, 13 bp, Unknown
  misc_feature (1)..( 13): Result.004 file - promoters50/1007639
agaatttttgtag

SEQ ID NO: 151946 - DNA, 13 bp, Unknown
  misc_feature (1)..( 13): Result.004 file - promoters50/1007639
tgtttttgctgat

SEQ ID NO: 151947 - DNA, 13 bp, Unknown
  misc_feature (1)..( 13): Result.004 file - promoters50/1007639
agagtttgtattc

SEQ ID NO: 151948 - DNA, 13 bp, Unknown
  misc_feature (1)..( 13): Result.004 file - promoters50/1007639
aatatttgagcgg

SEQ ID NO: 151949 - DNA, 10 bp, Unknown
  misc_feature (1)..( 10): Result.004 file - promoters50/1007639
tgtttggtac

SEQ ID NO: 151950 - DNA, 10 bp, Unknown
  misc_feature (1)..( 10): Result.004 file - promoters50/1007639
agttttgtat

SEQ ID NO: 151951 - DNA, 10 bp, Unknown
  misc_feature (1)..( 10): Result.004 file - promoters50/1007639
atttttgtag

SEQ ID NO: 151952 - DNA, 10 bp, Unknown
  misc_feature (1)..( 10): Result.004 file - promoters50/1007639
tgtttgatta

SEQ ID NO: 151953 - DNA, 10 bp, Unknown
  misc_feature (1)..( 10): Result.004 file - promoters50/1007639
agattgaaga

SEQ ID NO: 151954 - DNA, 10 bp, Unknown
  misc_feature (1)..( 10): Result.004 file - promoters50/1007639
aagatgaaga

SEQ ID NO: 151955 - DNA, 14 bp, Unknown
  misc_feature (1)..( 14): Result.004 file - promoters50/1007639
ataacattggtgtc

SEQ ID NO: 151956 - DNA, 14 bp, Unknown
  misc_feature (1)..( 14): Result.004 file - promoters50/1007639
atatcattcttttg

SEQ ID NO: 151957 - DNA, 14 bp, Unknown
  misc_feature (1)..( 14): Result.004 file - promoters50/1007639
ctatgatttaaaat

SEQ ID NO: 151958 - DNA, 14 bp, Unknown
  misc_feature (1)..( 14): Result.004 file - promoters50/1007639
tgatgattttcatt

SEQ ID NO: 151959 - DNA, 14 bp, Unknown
  misc_feature (1)..( 14): Result.004 file - promoters50/1007639
ttattatttcaaat

SEQ ID NO: 151960 - DNA, 14 bp, Unknown
  misc_feature (1)..( 14): Result.004 file - promoters50/1007639
gagtcattcgaata

SEQ ID NO: 151961 - DNA, 10 bp, Unknown
  misc_feature (1)..( 10): Result.004 file - promoters50/1007639
agaaacaatg

SEQ ID NO: 151962 - DNA, 10 bp, Unknown
  misc_feature (1)..( 10): Result.004 file - promoters50/1007639
aaaaacaaag

SEQ ID NO: 151963 - DNA, 10 bp, Unknown
  misc_feature (1)..( 10): Result.004 file - promoters50/1007639
caaaacaatt

SEQ ID NO: 151964 - DNA, 10 bp, Unknown
  misc_feature (1)..( 10): Result.004 file - promoters50/1007639
gaaaacaaat

SEQ ID NO: 151965 - DNA, 10 bp, Unknown
  misc_feature (1)..( 10): Result.004 file - promoters50/1007639
aaaaacacaa

SEQ ID NO: 151966 - DNA, 10 bp, Unknown
  misc_feature (1)..( 10): Result.004 file - promoters50/1007675
ggtaacaaca

SEQ ID NO: 151967 - DNA, 12 bp, Unknown
  misc_feature (1)..( 12): Result.004 file - promoters50/1007675
tacaaagggata

SEQ ID NO: 151968 - DNA, 12 bp, Unknown
  misc_feature (1)..( 12): Result.004 file - promoters50/1007675
aataaatggaaa

SEQ ID NO: 151969 - DNA, 12 bp, Unknown
  misc_feature (1)..( 12): Result.004 file - promoters50/1007675
tatatatgtgat

SEQ ID NO: 151970 - DNA, 12 bp, Unknown
  misc_feature (1)..( 12): Result.004 file - promoters50/1007675
aatatatgtaaa

SEQ ID NO: 151971 - DNA, 9 bp, Unknown
  misc_feature (1)..( 9): Result.004 file - promoters50/1007675
taaagaaag

SEQ ID NO: 151972 - DNA, 9 bp, Unknown
  misc_feature (1)..( 9): Result.004 file - promoters50/1007675
aaaaaaaaa

SEQ ID NO: 151973 - DNA, 9 bp, Unknown
  misc_feature (1)..( 9): Result.004 file - promoters50/1007675
cctagaaag

SEQ ID NO: 151974 - DNA, 9 bp, Unknown
  misc_feature (1)..( 9): Result.004 file - promoters50/1007675
taaaaaaaa

SEQ ID NO: 151975 - DNA, 9 bp, Unknown
  misc_feature (1)..( 9): Result.004 file - promoters50/1007675
aaaacaaaa

SEQ ID NO: 151976 - DNA, 10 bp, Unknown
  misc_feature (1)..( 10): Result.004 file - promoters50/1007675
ctataaagaa

SEQ ID NO: 151977 - DNA, 10 bp, Unknown
  misc_feature (1)..( 10): Result.004 file - promoters50/1007675
ctagaaagtc

SEQ ID NO: 151978 - DNA, 10 bp, Unknown
  misc_feature (1)..( 10): Result.004 file - promoters50/1007675
ttaaaaaaaa

SEQ ID NO: 151979 - DNA, 10 bp, Unknown
  misc_feature (1)..( 10): Result.004 file - promoters50/1007675
acaaaaaaaa

SEQ ID NO: 151980 - DNA, 9 bp, Unknown
  misc_feature (1)..( 9): Result.004 file - promoters50/1007675
tttataaaa

SEQ ID NO: 151981 - DNA, 9 bp, Unknown
  misc_feature (1)..( 9): Result.004 file - promoters50/1007675
catataaat

SEQ ID NO: 151982 - DNA, 9 bp, Unknown
  misc_feature (1)..( 9): Result.004 file - promoters50/1007675
tatataaag

SEQ ID NO: 151983 - DNA, 9 bp, Unknown
  misc_feature (1)..( 9): Result.004 file - promoters50/1007731
tctataaaa

SEQ ID NO: 151984 - DNA, 6 bp, Unknown
  misc_feature (1)..( 6): Result.004 file - promoters50/1007731
atttac

SEQ ID NO: 151985 - DNA, 6 bp, Unknown
  misc_feature (1)..( 6): Result.004 file - promoters50/1007731
atttac

SEQ ID NO: 151986 - DNA, 6 bp, Unknown
  misc_feature (1)..( 6): Result.004 file - promoters50/1007756
atttac

SEQ ID NO: 151987 - DNA, 13 bp, Unknown
  misc_feature (1)..( 13): Result.004 file - promoters50/1007756
aaccggttaaatc

SEQ ID NO: 151988 - DNA, 13 bp, Unknown
  misc_feature (1)..( 13): Result.004 file - promoters50/1007756
aacctgtttgttg

SEQ ID NO: 151989 - DNA, 13 bp, Unknown
  misc_feature (1)..( 13): Result.004 file - promoters50/1007773
actctgtttcttg

SEQ ID NO: 151990 - DNA, 8 bp, Unknown
  misc_feature (1)..( 8): Result.004 file - promoters50/1007773
gaaagagg

SEQ ID NO: 151991 - DNA, 8 bp, Unknown
  misc_feature (1)..( 8): Result.004 file - promoters50/1007773
gaaaaagg

SEQ ID NO: 151992 - DNA, 8 bp, Unknown
  misc_feature (1)..( 8): Result.004 file - promoters50/1007791
gaaaaacc

SEQ ID NO: 151993 - DNA, 9 bp, Unknown
  misc_feature (1)..( 9): Result.004 file - promoters50/1007791
attgtttat

SEQ ID NO: 151994 - DNA, 9 bp, Unknown
  misc_feature (1)..( 9): Result.004 file - promoters50/1007791
ggtgtgtat

SEQ ID NO: 151995 - DNA, 9 bp, Unknown
  misc_feature (1)..( 9): Result.004 file - promoters50/1007791
attcttttg

SEQ ID NO: 151996 - DNA, 9 bp, Unknown
  misc_feature (1)..( 9): Result.004 file - promoters50/1007791
aagctttct

SEQ ID NO: 151997 - DNA, 9 bp, Unknown
  misc_feature (1)..( 9): Result.004 file - promoters50/1007791
ttgctttct

SEQ ID NO: 151998 - DNA, 9 bp, Unknown
  misc_feature (1)..( 9): Result.004 file - promoters50/1007791
ttggtttag

SEQ ID NO: 151999 - DNA, 10 bp, Unknown
  misc_feature (1)..( 10): Result.004 file - promoters50/1007791
caaagttctt

SEQ ID NO: 152000 - DNA, 10 bp, Unknown
  misc_feature (1)..( 10): Result.004 file - promoters50/1007791
caatgttgaa

SEQ ID NO: 152001 - DNA, 10 bp, Unknown
  misc_feature (1)..( 10): Result.004 file - promoters50/1007791
ttatggtgaa

SEQ ID NO: 152002 - DNA, 10 bp, Unknown
  misc_feature (1)..( 10): Result.004 file - promoters50/1007791
aacaactttt

SEQ ID NO: 152003 - DNA, 10 bp, Unknown
  misc_feature (1)..( 10): Result.004 file - promoters50/1007791
aacacctttt

SEQ ID NO: 152004 - DNA, 10 bp, Unknown
  misc_feature (1)..( 10): Result.004 file - promoters50/1007791
tacaactcca

SEQ ID NO: 152005 - DNA, 7 bp, Unknown
  misc_feature (1)..( 7): Result.004 file - promoters50/1007791
aaagttt

SEQ ID NO: 152006 - DNA, 7 bp, Unknown
  misc_feature (1)..( 7): Result.004 file - promoters50/1007791
aaagttt

SEQ ID NO: 152007 - DNA, 7 bp, Unknown
  misc_feature (1)..( 7): Result.004 file - promoters50/1007791
aaaggtt

SEQ ID NO: 152008 - DNA, 8 bp, Unknown
  misc_feature (1)..( 8): Result.004 file - promoters50/1007791
gttttgtg

SEQ ID NO: 152009 - DNA, 8 bp, Unknown
  misc_feature (1)..( 8): Result.004 file - promoters50/1007791
cttttgta

SEQ ID NO: 152010 - DNA, 8 bp, Unknown
  misc_feature (1)..( 8): Result.004 file - promoters50/1007795
gtttagtg

SEQ ID NO: 152011 - DNA, 12 bp, Unknown
  misc_feature (1)..( 12): Result.004 file - promoters50/1007795
actatttaaaag

SEQ ID NO: 152012 - DNA, 12 bp, Unknown
  misc_feature (1)..( 12): Result.004 file - promoters50/1007795
catatataaatt

SEQ ID NO: 152013 - DNA, 12 bp, Unknown
  misc_feature (1)..( 12): Result.004 file - promoters50/1007795
actttttttttt

SEQ ID NO: 152014 - DNA, 12 bp, Unknown
  misc_feature (1)..( 12): Result.004 file - promoters50/1007795
ttcatattaatt

SEQ ID NO: 152015 - DNA, 12 bp, Unknown
  misc_feature (1)..( 12): Result.004 file - promoters50/1007795
tctttttgttgt

SEQ ID NO: 152016 - DNA, 12 bp, Unknown
  misc_feature (1)..( 12): Result.004 file - promoters50/1007795
tattcatatttg

SEQ ID NO: 152017 - DNA, 11 bp, Unknown
  misc_feature (1)..( 11): Result.004 file - promoters50/1007795
tataaattttt

SEQ ID NO: 152018 - DNA, 11 bp, Unknown
  misc_feature (1)..( 11): Result.004 file - promoters50/1007795
atcaaatttat

SEQ ID NO: 152019 - DNA, 11 bp, Unknown
  misc_feature (1)..( 11): Result.004 file - promoters50/1007795
taaaaatttgg

SEQ ID NO: 152020 - DNA, 11 bp, Unknown
  misc_feature (1)..( 11): Result.004 file - promoters50/1007795
tgtaaattttg

SEQ ID NO: 152021 - DNA, 11 bp, Unknown
  misc_feature (1)..( 11): Result.004 file - promoters50/1007795
taaaaataaac

SEQ ID NO: 152022 - DNA, 11 bp, Unknown
  misc_feature (1)..( 11): Result.004 file - promoters50/1007795
agaaaattcaa

SEQ ID NO: 152023 - DNA, 11 bp, Unknown
  misc_feature (1)..( 11): Result.004 file - promoters50/1007795
gaaaaaaaaga

SEQ ID NO: 152024 - DNA, 8 bp, Unknown
  misc_feature (1)..( 8): Result.004 file - promoters50/1007795
aaaataaa

SEQ ID NO: 152025 - DNA, 8 bp, Unknown
  misc_feature (1)..( 8): Result.004 file - promoters50/1007795
taaataaa

SEQ ID NO: 152026 - DNA, 8 bp, Unknown
  misc_feature (1)..( 8): Result.004 file - promoters50/1007795
aaaatatg

SEQ ID NO: 152027 - DNA, 9 bp, Unknown
  misc_feature (1)..( 9): Result.004 file - promoters50/1007795
ataatgaaa

SEQ ID NO: 152028 - DNA, 9 bp, Unknown
  misc_feature (1)..( 9): Result.004 file - promoters50/1007795
aaaaatact

SEQ ID NO: 152029 - DNA, 9 bp, Unknown
  misc_feature (1)..( 9): Result.004 file - promoters50/1007795
aaaaataaa

SEQ ID NO: 152030 - DNA, 9 bp, Unknown
  misc_feature (1)..( 9): Result.004 file - promoters50/1007795
taaaagaaa

SEQ ID NO: 152031 - DNA, 13 bp, Unknown
  misc_feature (1)..( 13): Result.004 file - promoters50/1007795
tatattgattttc

SEQ ID NO: 152032 - DNA, 13 bp, Unknown
  misc_feature (1)..( 13): Result.004 file - promoters50/1007795
gtatttgatttga

SEQ ID NO: 152033 - DNA, 13 bp, Unknown
  misc_feature (1)..( 13): Result.004 file - promoters50/1007795
tatatttatttgg

SEQ ID NO: 152034 - DNA, 13 bp, Unknown
  misc_feature (1)..( 13): Result.004 file - promoters50/1007795
catgatgattttg

SEQ ID NO: 152035 - DNA, 13 bp, Unknown
  misc_feature (1)..( 13): Result.004 file - promoters50/1007795
gaagaacattttg

SEQ ID NO: 152036 - DNA, 13 bp, Unknown
  misc_feature (1)..( 13): Result.004 file - promoters50/1007795
gtttatgatttat

SEQ ID NO: 152037 - DNA, 13 bp, Unknown
  misc_feature (1)..( 13): Result.004 file - promoters50/1007795
gtgataaaatagt

SEQ ID NO: 152038 - DNA, 13 bp, Unknown
  misc_feature (1)..( 13): Result.004 file - promoters50/1007795
gatttaaaatgtt

SEQ ID NO: 152039 - DNA, 13 bp, Unknown
  misc_feature (1)..( 13): Result.004 file - promoters50/1007795
ttcataaaaaaaa

SEQ ID NO: 152040 - DNA, 13 bp, Unknown
  misc_feature (1)..( 13): Result.004 file - promoters50/1007795
tatttacaatgtt

SEQ ID NO: 152041 - DNA, 13 bp, Unknown
  misc_feature (1)..( 13): Result.004 file - promoters50/1007795
tgattaacatttg

SEQ ID NO: 152042 - DNA, 13 bp, Unknown
  misc_feature (1)..( 13): Result.004 file - promoters50/1007795
tatttatttggat

SEQ ID NO: 152043 - DNA, 16 bp, Unknown
  misc_feature (1)..( 16): Result.004 file - promoters50/1007795
aaatttatattgattt

SEQ ID NO: 152044 - DNA, 16 bp, Unknown
  misc_feature (1)..( 16): Result.004 file - promoters50/1007795
agttttgtattatcaa

SEQ ID NO: 152045 - DNA, 16 bp, Unknown
  misc_feature (1)..( 16): Result.004 file - promoters50/1007795
gatactatatttattt

SEQ ID NO: 152046 - DNA, 16 bp, Unknown
  misc_feature (1)..( 16): Result.004 file - promoters50/1007795
tatcataaatttattt

SEQ ID NO: 152047 - DNA, 16 bp, Unknown
  misc_feature (1)..( 16): Result.004 file - promoters50/1007795
agtttggtatttgatt

SEQ ID NO: 152048 - DNA, 16 bp, Unknown
  misc_feature (1)..( 16): Result.004 file - promoters50/1007795
attttggtcaaaggcc

SEQ ID NO: 152049 - DNA, 16 bp, Unknown
  misc_feature (1)..( 16): Result.004 file - promoters50/1007795
cgtttatgatttatcg

SEQ ID NO: 152050 - DNA, 14 bp, Unknown
  misc_feature (1)..( 14): Result.004 file - promoters50/1007795
actaattttattta

SEQ ID NO: 152051 - DNA, 14 bp, Unknown
  misc_feature (1)..( 14): Result.004 file - promoters50/1007795
attaatttgtttta

SEQ ID NO: 152052 - DNA, 14 bp, Unknown
  misc_feature (1)..( 14): Result.004 file - promoters50/1007795
ttaaatttacgctc

SEQ ID NO: 152053 - DNA, 14 bp, Unknown
  misc_feature (1)..( 14): Result.004 file - promoters50/1007795
ataaatttatttat

SEQ ID NO: 152054 - DNA, 14 bp, Unknown
  misc_feature (1)..( 14): Result.004 file - promoters50/1007795
attgattttctaaa

SEQ ID NO: 152055 - DNA, 14 bp, Unknown
  misc_feature (1)..( 14): Result.004 file - promoters50/1007795
cttaattcttttta

SEQ ID NO: 152056 - DNA, 14 bp, Unknown
  misc_feature (1)..( 14): Result.004 file - promoters50/1007795
ataaatatgaatcg

SEQ ID NO: 152057 - DNA, 10 bp, Unknown
  misc_feature (1)..( 10): Result.004 file - promoters50/1007795
aactaatttt

SEQ ID NO: 152058 - DNA, 10 bp, Unknown
  misc_feature (1)..( 10): Result.004 file - promoters50/1007795
tgtaaatttt

SEQ ID NO: 152059 - DNA, 10 bp, Unknown
  misc_feature (1)..( 10): Result.004 file - promoters50/1007795
taaaaatttg

SEQ ID NO: 152060 - DNA, 10 bp, Unknown
  misc_feature (1)..( 10): Result.004 file - promoters50/1007795
taaaaataaa

SEQ ID NO: 152061 - DNA, 10 bp, Unknown
  misc_feature (1)..( 10): Result.004 file - promoters50/1007795
agaaaattca

SEQ ID NO: 152062 - DNA, 10 bp, Unknown
  misc_feature (1)..( 10): Result.004 file - promoters50/1007795
gaaaaaaaag

SEQ ID NO: 152063 - DNA, 11 bp, Unknown
  misc_feature (1)..( 11): Result.004 file - promoters50/1007795
aaaatatcaaa

SEQ ID NO: 152064 - DNA, 11 bp, Unknown
  misc_feature (1)..( 11): Result.004 file - promoters50/1007795
aaaatacttac

SEQ ID NO: 152065 - DNA, 11 bp, Unknown
  misc_feature (1)..( 11): Result.004 file - promoters50/1007795
aaaatatgaaa

SEQ ID NO: 152066 - DNA, 11 bp, Unknown
  misc_feature (1)..( 11): Result.004 file - promoters50/1007795
aaaataaacta

SEQ ID NO: 152067 - DNA, 11 bp, Unknown
  misc_feature (1)..( 11): Result.004 file - promoters50/1007795
aaaaaaaagac

SEQ ID NO: 152068 - DNA, 11 bp, Unknown
  misc_feature (1)..( 11): Result.004 file - promoters50/1007795
aaaagaaagaa

SEQ ID NO: 152069 - DNA, 14 bp, Unknown
  misc_feature (1)..( 14): Result.004 file - promoters50/1007795
atttaaaatgttag

SEQ ID NO: 152070 - DNA, 14 bp, Unknown
  misc_feature (1)..( 14): Result.004 file - promoters50/1007795
ttgtataattttat

SEQ ID NO: 152071 - DNA, 14 bp, Unknown
  misc_feature (1)..( 14): Result.004 file - promoters50/1007795
atttacaatgttgc

SEQ ID NO: 152072 - DNA, 14 bp, Unknown
  misc_feature (1)..( 14): Result.004 file - promoters50/1007795
aaagttgattaaca

SEQ ID NO: 152073 - DNA, 14 bp, Unknown
  misc_feature (1)..( 14): Result.004 file - promoters50/1007795
tacgtttatgattt

SEQ ID NO: 152074 - DNA, 14 bp, Unknown
  misc_feature (1)..( 14): Result.004 file - promoters50/1007802
atactatatttatt

SEQ ID NO: 152075 - DNA, 13 bp, Unknown
  misc_feature (1)..( 13): Result.004 file - promoters50/1007802
gataaaatttgat

SEQ ID NO: 152076 - DNA, 13 bp, Unknown
  misc_feature (1)..( 13): Result.004 file - promoters50/1007802
gatataatttata

SEQ ID NO: 152077 - DNA, 13 bp, Unknown
  misc_feature (1)..( 13): Result.004 file - promoters50/1007802
tgagaaatttccc

SEQ ID NO: 152078 - DNA, 13 bp, Unknown
  misc_feature (1)..( 13): Result.004 file - promoters50/1007802
gaattaatttgtg

SEQ ID NO: 152079 - DNA, 13 bp, Unknown
  misc_feature (1)..( 13): Result.004 file - promoters50/1007802
gtcaaaatgtgtg

SEQ ID NO: 152080 - DNA, 13 bp, Unknown
  misc_feature (1)..( 13): Result.004 file - promoters50/1007831
tccttacttttgt

SEQ ID NO: 152081 - DNA, 12 bp, Unknown
  misc_feature (1)..( 12): Result.004 file - promoters50/1007831
cttaaataattg

SEQ ID NO: 152082 - DNA, 12 bp, Unknown
  misc_feature (1)..( 12): Result.004 file - promoters50/1007831
gttatatataaa

SEQ ID NO: 152083 - DNA, 12 bp, Unknown
  misc_feature (1)..( 12): Result.004 file - promoters50/1007831
tttaaataatta

SEQ ID NO: 152084 - DNA, 12 bp, Unknown
  misc_feature (1)..( 12): Result.004 file - promoters50/1007831
aaaaaataattg

SEQ ID NO: 152085 - DNA, 12 bp, Unknown
  misc_feature (1)..( 12): Result.004 file - promoters50/1007831
gctatatatttt

SEQ ID NO: 152086 - DNA, 12 bp, Unknown
  misc_feature (1)..( 12): Result.004 file - promoters50/1007831
tttcaatttttt

SEQ ID NO: 152087 - DNA, 14 bp, Unknown
  misc_feature (1)..( 14): Result.004 file - promoters50/1007831
cttattcattttag

SEQ ID NO: 152088 - DNA, 14 bp, Unknown
  misc_feature (1)..( 14): Result.004 file - promoters50/1007831
ctttttcattttta

SEQ ID NO: 152089 - DNA, 14 bp, Unknown
  misc_feature (1)..( 14): Result.004 file - promoters50/1007831
tacgaccattttcg

SEQ ID NO: 152090 - DNA, 14 bp, Unknown
  misc_feature (1)..( 14): Result.004 file - promoters50/1007831
agtggagattatcg

SEQ ID NO: 152091 - DNA, 14 bp, Unknown
  misc_feature (1)..( 14): Result.004 file - promoters50/1007831
catatacattttgt

SEQ ID NO: 152092 - DNA, 14 bp, Unknown
  misc_feature (1)..( 14): Result.004 file - promoters50/1007831
aactttctttttaa

SEQ ID NO: 152093 - DNA, 14 bp, Unknown
  misc_feature (1)..( 14): Result.004 file - promoters50/1007831
gaaactctcttctc

SEQ ID NO: 152094 - DNA, 12 bp, Unknown
  misc_feature (1)..( 12): Result.004 file - promoters50/1007831
ctttaaagatgc

SEQ ID NO: 152095 - DNA, 12 bp, Unknown
  misc_feature (1)..( 12): Result.004 file - promoters50/1007831
cataaaagatcg

SEQ ID NO: 152096 - DNA, 12 bp, Unknown
  misc_feature (1)..( 12): Result.004 file - promoters50/1007831
catacaagaaaa

SEQ ID NO: 152097 - DNA, 12 bp, Unknown
  misc_feature (1)..( 12): Result.004 file - promoters50/1007831
attacaaaaaaa

SEQ ID NO: 152098 - DNA, 12 bp, Unknown
  misc_feature (1)..( 12): Result.004 file - promoters50/1007831
ccttaaaaatgg

SEQ ID NO: 152099 - DNA, 12 bp, Unknown
  misc_feature (1)..( 12): Result.004 file - promoters50/1007967
ttaacaaaagtc

SEQ ID NO: 152100 - DNA, 11 bp, Unknown
  misc_feature (1)..( 11): Result.004 file - promoters50/1007967
ttaatttcaac

SEQ ID NO: 152101 - DNA, 11 bp, Unknown
  misc_feature (1)..( 11): Result.004 file - promoters50/1007967
aaaatttgaac

SEQ ID NO: 152102 - DNA, 11 bp, Unknown
  misc_feature (1)..( 11): Result.004 file - promoters50/1007967
tcaatttcaca

SEQ ID NO: 152103 - DNA, 11 bp, Unknown
  misc_feature (1)..( 11): Result.004 file - promoters50/1007967
acaatgtgaaa

SEQ ID NO: 152104 - DNA, 11 bp, Unknown
  misc_feature (1)..( 11): Result.004 file - promoters50/1007967
aaaattttaaa

SEQ ID NO: 152105 - DNA, 11 bp, Unknown
  misc_feature (1)..( 11): Result.004 file - promoters50/1008070
gcaatatgatt

SEQ ID NO: 152106 - DNA, 11 bp, Unknown
  misc_feature (1)..( 11): Result.004 file - promoters50/1008070
ccactatataa

SEQ ID NO: 152107 - DNA, 11 bp, Unknown
  misc_feature (1)..( 11): Result.004 file - promoters50/1008070
cttttatatat

SEQ ID NO: 152108 - DNA, 11 bp, Unknown
  misc_feature (1)..( 11): Result.004 file - promoters50/1008070
cacatatatat

SEQ ID NO: 152109 - DNA, 11 bp, Unknown
  misc_feature (1)..( 11): Result.004 file - promoters50/1008070
gtgagatataa

SEQ ID NO: 152110 - DNA, 11 bp, Unknown
  misc_feature (1)..( 11): Result.004 file - promoters50/1008070
ccattatatat

SEQ ID NO: 152111 - DNA, 11 bp, Unknown
  misc_feature (1)..( 11): Result.004 file - promoters50/1008070
tgtttatatca

SEQ ID NO: 152112 - DNA, 11 bp, Unknown
  misc_feature (1)..( 11): Result.004 file - promoters50/1008070
cctttatattc

SEQ ID NO: 152113 - DNA, 14 bp, Unknown
  misc_feature (1)..( 14): Result.004 file - promoters50/1008070
tattgcatttttaa

SEQ ID NO: 152114 - DNA, 14 bp, Unknown
  misc_feature (1)..( 14): Result.004 file - promoters50/1008070
atttgaattttcct

SEQ ID NO: 152115 - DNA, 14 bp, Unknown
  misc_feature (1)..( 14): Result.004 file - promoters50/1008070
catttcatatgttt

SEQ ID NO: 152116 - DNA, 14 bp, Unknown
  misc_feature (1)..( 14): Result.004 file - promoters50/1008070
tttttaatttgtgt

SEQ ID NO: 152117 - DNA, 14 bp, Unknown
  misc_feature (1)..( 14): Result.004 file - promoters50/1008070
ccattactttactc

SEQ ID NO: 152118 - DNA, 14 bp, Unknown
  misc_feature (1)..( 14): Result.004 file - promoters50/1008070
tttttagtttgtgt

SEQ ID NO: 152119 - DNA, 14 bp, Unknown
  misc_feature (1)..( 14): Result.004 file - promoters50/1008070
caacaactatacaa

SEQ ID NO: 152120 - DNA, 11 bp, Unknown
  misc_feature (1)..( 11): Result.004 file - promoters50/1008070
taaaaataatc

SEQ ID NO: 152121 - DNA, 11 bp, Unknown
  misc_feature (1)..( 11): Result.004 file - promoters50/1008070
caaaattaaaa

SEQ ID NO: 152122 - DNA, 11 bp, Unknown
  misc_feature (1)..( 11): Result.004 file - promoters50/1008070
taaatataaag

SEQ ID NO: 152123 - DNA, 11 bp, Unknown
  misc_feature (1)..( 11): Result.004 file - promoters50/1008070
caaatatttga

SEQ ID NO: 152124 - DNA, 11 bp, Unknown
  misc_feature (1)..( 11): Result.004 file - promoters50/1008070
gggatatgaag

SEQ ID NO: 152125 - DNA, 11 bp, Unknown
  misc_feature (1)..( 11): Result.004 file - promoters50/1008070
acaacatttat

SEQ ID NO: 152126 - DNA, 11 bp, Unknown
  misc_feature (1)..( 11): Result.004 file - promoters50/1008070
ttaatataaac

SEQ ID NO: 152127 - DNA, 9 bp, Unknown
  misc_feature (1)..( 9): Result.004 file - promoters50/1008070
caaaataaa

SEQ ID NO: 152128 - DNA, 9 bp, Unknown
  misc_feature (1)..( 9): Result.004 file - promoters50/1008070
gaaaaaaaa

SEQ ID NO: 152129 - DNA, 9 bp, Unknown
  misc_feature (1)..( 9): Result.004 file - promoters50/1008070
taaaaaaaa

SEQ ID NO: 152130 - DNA, 9 bp, Unknown
  misc_feature (1)..( 9): Result.004 file - promoters50/1008070
caaaattga

SEQ ID NO: 152131 - DNA, 9 bp, Unknown
  misc_feature (1)..( 9): Result.004 file - promoters50/1008070
gaaaatatt

SEQ ID NO: 152132 - DNA, 9 bp, Unknown
  misc_feature (1)..( 9): Result.004 file - promoters50/1008070
taaaaaaaa

SEQ ID NO: 152133 - DNA, 9 bp, Unknown
  misc_feature (1)..( 9): Result.004 file - promoters50/1008070
aaactgaac

SEQ ID NO: 152134 - DNA, 9 bp, Unknown
  misc_feature (1)..( 9): Result.004 file - promoters50/1008070
taactgatt

SEQ ID NO: 152135 - DNA, 9 bp, Unknown
  misc_feature (1)..( 9): Result.004 file - promoters50/1008070
aaaatgaaa

SEQ ID NO: 152136 - DNA, 9 bp, Unknown
  misc_feature (1)..( 9): Result.004 file - promoters50/1008070
aaactcatt

SEQ ID NO: 152137 - DNA, 9 bp, Unknown
  misc_feature (1)..( 9): Result.004 file - promoters50/1008070
ggactaatt

SEQ ID NO: 152138 - DNA, 9 bp, Unknown
  misc_feature (1)..( 9): Result.004 file - promoters50/1008109
tcaatcaaa

SEQ ID NO: 152139 - DNA, 14 bp, Unknown
  misc_feature (1)..( 14): Result.004 file - promoters50/1008109
tcttaataatgttt

SEQ ID NO: 152140 - DNA, 14 bp, Unknown
  misc_feature (1)..( 14): Result.004 file - promoters50/1008109
atttcataatgaaa

SEQ ID NO: 152141 - DNA, 14 bp, Unknown
  misc_feature (1)..( 14): Result.004 file - promoters50/1008109
gtttcaaaattaaa

SEQ ID NO: 152142 - DNA, 14 bp, Unknown
  misc_feature (1)..( 14): Result.004 file - promoters50/1008109
gtttcatgtccttt

SEQ ID NO: 152143 - DNA, 14 bp, Unknown
  misc_feature (1)..( 14): Result.004 file - promoters50/1008148
ctcgctaaataaaa

SEQ ID NO: 152144 - DNA, 12 bp, Unknown
  misc_feature (1)..( 12): Result.004 file - promoters50/1008148
taaatataaata

SEQ ID NO: 152145 - DNA, 12 bp, Unknown
  misc_feature (1)..( 12): Result.004 file - promoters50/1008148
agaataaaaatt

SEQ ID NO: 152146 - DNA, 12 bp, Unknown
  misc_feature (1)..( 12): Result.004 file - promoters50/1008148
tcgttattaata

SEQ ID NO: 152147 - DNA, 12 bp, Unknown
  misc_feature (1)..( 12): Result.004 file - promoters50/1008148
cttataaaaaaa

SEQ ID NO: 152148 - DNA, 12 bp, Unknown
  misc_feature (1)..( 12): Result.004 file - promoters50/1008148
tacataataatg

SEQ ID NO: 152149 - DNA, 12 bp, Unknown
  misc_feature (1)..( 12): Result.004 file - promoters50/1008148
tgaataattaaa

SEQ ID NO: 152150 - DNA, 12 bp, Unknown
  misc_feature (1)..( 12): Result.004 file - promoters50/1008183
tgagtaaattga

SEQ ID NO: 152151 - DNA, 8 bp, Unknown
  misc_feature (1)..( 8): Result.004 file - promoters50/1008183
ctttcact

SEQ ID NO: 152152 - DNA, 8 bp, Unknown
  misc_feature (1)..( 8): Result.004 file - promoters50/1008183
ctttcagg

SEQ ID NO: 152153 - DNA, 8 bp, Unknown
  misc_feature (1)..( 8): Result.004 file - promoters50/1008218
ttttaagg

SEQ ID NO: 152154 - DNA, 13 bp, Unknown
  misc_feature (1)..( 13): Result.004 file - promoters50/1008218
aattaatgtattt

SEQ ID NO: 152155 - DNA, 13 bp, Unknown
  misc_feature (1)..( 13): Result.004 file - promoters50/1008218
gacaaatgtatgg

SEQ ID NO: 152156 - DNA, 13 bp, Unknown
  misc_feature (1)..( 13): Result.004 file - promoters50/1008218
atttattgttgcg

SEQ ID NO: 152157 - DNA, 13 bp, Unknown
  misc_feature (1)..( 13): Result.004 file - promoters50/1008218
aagttttgtgttt

SEQ ID NO: 152158 - DNA, 13 bp, Unknown
  misc_feature (1)..( 13): Result.004 file - promoters50/1008218
attttatgtttca

SEQ ID NO: 152159 - DNA, 13 bp, Unknown
  misc_feature (1)..( 13): Result.004 file - promoters50/1008218
attatatgtaaac

SEQ ID NO: 152160 - DNA, 10 bp, Unknown
  misc_feature (1)..( 10): Result.004 file - promoters50/1008218
aggttcatat

SEQ ID NO: 152161 - DNA, 10 bp, Unknown
  misc_feature (1)..( 10): Result.004 file - promoters50/1008218
tggttcatta

SEQ ID NO: 152162 - DNA, 10 bp, Unknown
  misc_feature (1)..( 10): Result.004 file - promoters50/1008218
gtgttaatag

SEQ ID NO: 152163 - DNA, 10 bp, Unknown
  misc_feature (1)..( 10): Result.004 file - promoters50/1008218
aggttcagaa

SEQ ID NO: 152164 - DNA, 10 bp, Unknown
  misc_feature (1)..( 10): Result.004 file - promoters50/1008218
tatttaatag

SEQ ID NO: 152165 - DNA, 10 bp, Unknown
  misc_feature (1)..( 10): Result.004 file - promoters50/1008226
ttgtttagac

SEQ ID NO: 152166 - DNA, 13 bp, Unknown
  misc_feature (1)..( 13): Result.004 file - promoters50/1008226
ttaaaaacagaaa

SEQ ID NO: 152167 - DNA, 13 bp, Unknown
  misc_feature (1)..( 13): Result.004 file - promoters50/1008226
ccaaaaaccgtga

SEQ ID NO: 152168 - DNA, 13 bp, Unknown
  misc_feature (1)..( 13): Result.004 file - promoters50/1008226
aaaaaaacaaaaa

SEQ ID NO: 152169 - DNA, 13 bp, Unknown
  misc_feature (1)..( 13): Result.004 file - promoters50/1008226
ttaaaaaaatata

SEQ ID NO: 152170 - DNA, 13 bp, Unknown
  misc_feature (1)..( 13): Result.004 file - promoters50/1008226
ttaaaaagtaaat

SEQ ID NO: 152171 - DNA, 13 bp, Unknown
  misc_feature (1)..( 13): Result.004 file - promoters50/1008226
ttacaaagcccta

SEQ ID NO: 152172 - DNA, 12 bp, Unknown
  misc_feature (1)..( 12): Result.004 file - promoters50/1008226
aaaaacagaaat

SEQ ID NO: 152173 - DNA, 12 bp, Unknown
  misc_feature (1)..( 12): Result.004 file - promoters50/1008226
atccacagaaaa

SEQ ID NO: 152174 - DNA, 12 bp, Unknown
  misc_feature (1)..( 12): Result.004 file - promoters50/1008226
aaaaacaaaaaa

SEQ ID NO: 152175 - DNA, 12 bp, Unknown
  misc_feature (1)..( 12): Result.004 file - promoters50/1008226
ttctttaaaaaa

SEQ ID NO: 152176 - DNA, 12 bp, Unknown
  misc_feature (1)..( 12): Result.004 file - promoters50/1008226
gatgttaaaaag

SEQ ID NO: 152177 - DNA, 12 bp, Unknown
  misc_feature (1)..( 12): Result.004 file - promoters50/1008226
taaattacaaag

SEQ ID NO: 152178 - DNA, 12 bp, Unknown
  misc_feature (1)..( 12): Result.004 file - promoters50/1008226
aataaatattgt

SEQ ID NO: 152179 - DNA, 12 bp, Unknown
  misc_feature (1)..( 12): Result.004 file - promoters50/1008226
aatacatatttg

SEQ ID NO: 152180 - DNA, 12 bp, Unknown
  misc_feature (1)..( 12): Result.004 file - promoters50/1008226
aattaataagcc

SEQ ID NO: 152181 - DNA, 12 bp, Unknown
  misc_feature (1)..( 12): Result.004 file - promoters50/1008226
aacacatatctc

SEQ ID NO: 152182 - DNA, 12 bp, Unknown
  misc_feature (1)..( 12): Result.004 file - promoters50/1008226
ttctcatgtctc

SEQ ID NO: 152183 - DNA, 12 bp, Unknown
  misc_feature (1)..( 12): Result.004 file - promoters50/1008226
aaaaagtaaatt

SEQ ID NO: 152184 - DNA, 12 bp, Unknown
  misc_feature (1)..( 12): Result.004 file - promoters50/1008319
caaaagtttggt

SEQ ID NO: 152185 - DNA, 10 bp, Unknown
  misc_feature (1)..( 10): Result.004 file - promoters50/1008319
caaagacaaa

SEQ ID NO: 152186 - DNA, 10 bp, Unknown
  misc_feature (1)..( 10): Result.004 file - promoters50/1008319
taaaaacatt

SEQ ID NO: 152187 - DNA, 10 bp, Unknown
  misc_feature (1)..( 10): Result.004 file - promoters50/1008319
aaaaaaccgt

SEQ ID NO: 152188 - DNA, 10 bp, Unknown
  misc_feature (1)..( 10): Result.004 file - promoters50/1008319
taaaaaatcc

SEQ ID NO: 152189 - DNA, 10 bp, Unknown
  misc_feature (1)..( 10): Result.004 file - promoters50/1008319
gaagaacaaa

SEQ ID NO: 152190 - DNA, 10 bp, Unknown
  misc_feature (1)..( 10): Result.004 file - promoters50/1008319
caaaaaaggg

SEQ ID NO: 152191 - DNA, 10 bp, Unknown
  misc_feature (1)..( 10): Result.004 file - promoters50/1008319
tttttatttt

SEQ ID NO: 152192 - DNA, 10 bp, Unknown
  misc_feature (1)..( 10): Result.004 file - promoters50/1008319
tttatattga

SEQ ID NO: 152193 - DNA, 10 bp, Unknown
  misc_feature (1)..( 10): Result.004 file - promoters50/1008319
attttgtttt

SEQ ID NO: 152194 - DNA, 10 bp, Unknown
  misc_feature (1)..( 10): Result.004 file - promoters50/1008319
cttaaattcc

SEQ ID NO: 152195 - DNA, 10 bp, Unknown
  misc_feature (1)..( 10): Result.004 file - promoters50/1008319
tctaaaatct

SEQ ID NO: 152196 - DNA, 10 bp, Unknown
  misc_feature (1)..( 10): Result.004 file - promoters50/1008324
tgtttgttct

SEQ ID NO: 152197 - DNA, 12 bp, Unknown
  misc_feature (1)..( 12): Result.004 file - promoters50/1008324
gatatgttcgcg

SEQ ID NO: 152198 - DNA, 12 bp, Unknown
  misc_feature (1)..( 12): Result.004 file - promoters50/1008324
gatatgttttgg

SEQ ID NO: 152199 - DNA, 12 bp, Unknown
  misc_feature (1)..( 12): Result.004 file - promoters50/1008324
gatatgataatg

SEQ ID NO: 152200 - DNA, 12 bp, Unknown
  misc_feature (1)..( 12): Result.004 file - promoters50/1008334
tctatgctttgg

SEQ ID NO: 152201 - DNA, 9 bp, Unknown
  misc_feature (1)..( 9): Result.004 file - promoters50/1008334
tttaagagt

SEQ ID NO: 152202 - DNA, 9 bp, Unknown
  misc_feature (1)..( 9): Result.004 file - promoters50/1008334
tacaagagt

SEQ ID NO: 152203 - DNA, 9 bp, Unknown
  misc_feature (1)..( 9): Result.004 file - promoters50/1008397
tttcagaga

SEQ ID NO: 152204 - DNA, 7 bp, Unknown
  misc_feature (1)..( 7): Result.004 file - promoters50/1008397
gctttta

SEQ ID NO: 152205 - DNA, 7 bp, Unknown
  misc_feature (1)..( 7): Result.004 file - promoters50/1008397
gcttttc

SEQ ID NO: 152206 - DNA, 7 bp, Unknown
  misc_feature (1)..( 7): Result.004 file - promoters50/1008397
actttta

SEQ ID NO: 152207 - DNA, 9 bp, Unknown
  misc_feature (1)..( 9): Result.004 file - promoters50/1008397
gaatcttat

SEQ ID NO: 152208 - DNA, 9 bp, Unknown
  misc_feature (1)..( 9): Result.004 file - promoters50/1008397
gaatattaa

SEQ ID NO: 152209 - DNA, 9 bp, Unknown
  misc_feature (1)..( 9): Result.004 file - promoters50/1008397
gaagcttaa

SEQ ID NO: 152210 - DNA, 9 bp, Unknown
  misc_feature (1)..( 9): Result.004 file - promoters50/1008397
tgataataa

SEQ ID NO: 152211 - DNA, 8 bp, Unknown
  misc_feature (1)..( 8): Result.004 file - promoters50/1008397
ttatcaaa

SEQ ID NO: 152212 - DNA, 8 bp, Unknown
  misc_feature (1)..( 8): Result.004 file - promoters50/1008397
ttatcaaa

SEQ ID NO: 152213 - DNA, 8 bp, Unknown
  misc_feature (1)..( 8): Result.004 file - promoters50/1008397
gtatcaat

SEQ ID NO: 152214 - DNA, 10 bp, Unknown
  misc_feature (1)..( 10): Result.004 file - promoters50/1008397
caataatgag

SEQ ID NO: 152215 - DNA, 10 bp, Unknown
  misc_feature (1)..( 10): Result.004 file - promoters50/1008397
caaaaatttg

SEQ ID NO: 152216 - DNA, 10 bp, Unknown
  misc_feature (1)..( 10): Result.004 file - promoters50/1008425
ataaaatttt

SEQ ID NO: 152217 - DNA, 8 bp, Unknown
  misc_feature (1)..( 8): Result.004 file - promoters50/1008425
cttctgaa

SEQ ID NO: 152218 - DNA, 8 bp, Unknown
  misc_feature (1)..( 8): Result.004 file - promoters50/1008425
cttttgaa

SEQ ID NO: 152219 - DNA, 8 bp, Unknown
  misc_feature (1)..( 8): Result.004 file - promoters50/1008425
attttgag

SEQ ID NO: 152220 - DNA, 10 bp, Unknown
  misc_feature (1)..( 10): Result.004 file - promoters50/1008425
caaatacatt

SEQ ID NO: 152221 - DNA, 10 bp, Unknown
  misc_feature (1)..( 10): Result.004 file - promoters50/1008425
taaatacatt

SEQ ID NO: 152222 - DNA, 10 bp, Unknown
  misc_feature (1)..( 10): Result.004 file - promoters50/1008432
caaaaacaac

SEQ ID NO: 152223 - DNA, 12 bp, Unknown
  misc_feature (1)..( 12): Result.004 file - promoters50/1008432
gcaaaaggtata

SEQ ID NO: 152224 - DNA, 12 bp, Unknown
  misc_feature (1)..( 12): Result.004 file - promoters50/1008432
gtaaatggtttt

SEQ ID NO: 152225 - DNA, 12 bp, Unknown
  misc_feature (1)..( 12): Result.004 file - promoters50/1008432
cgaaaaggatcg

SEQ ID NO: 152226 - DNA, 12 bp, Unknown
  misc_feature (1)..( 12): Result.004 file - promoters50/1008432
gcaaaagcaaaa

SEQ ID NO: 152227 - DNA, 12 bp, Unknown
  misc_feature (1)..( 12): Result.004 file - promoters50/1008432
tataattgttag

SEQ ID NO: 152228 - DNA, 9 bp, Unknown
  misc_feature (1)..( 9): Result.004 file - promoters50/1008432
gatgatttg

SEQ ID NO: 152229 - DNA, 12 bp, Unknown
  misc_feature (1)..( 12): Result.004 file - promoters50/1008432
ttatatgttttt

SEQ ID NO: 152230 - DNA, 15 bp, Unknown
  misc_feature (1)..( 15): Result.004 file - promoters50/1008432
gattgttttaataaa

SEQ ID NO: 152231 - DNA, 15 bp, Unknown
  misc_feature (1)..( 15): Result.004 file - promoters50/1008432
tatttttttttcaaa

SEQ ID NO: 152232 - DNA, 15 bp, Unknown
  misc_feature (1)..( 15): Result.004 file - promoters50/1008432
accggttttattaaa

SEQ ID NO: 152233 - DNA, 15 bp, Unknown
  misc_feature (1)..( 15): Result.004 file - promoters50/1008432
catttttatcccttc

SEQ ID NO: 152234 - DNA, 15 bp, Unknown
  misc_feature (1)..( 15): Result.004 file - promoters50/1008432
tattttaaaaataaa

SEQ ID NO: 152235 - DNA, 15 bp, Unknown
  misc_feature (1)..( 15): Result.004 file - promoters50/1008432
aattaaagcccacga

SEQ ID NO: 152236 - DNA, 13 bp, Unknown
  misc_feature (1)..( 13): Result.004 file - promoters50/1008432
ttttaataaaaat

SEQ ID NO: 152237 - DNA, 13 bp, Unknown
  misc_feature (1)..( 13): Result.004 file - promoters50/1008432
agtcgataaaatt

SEQ ID NO: 152238 - DNA, 13 bp, Unknown
  misc_feature (1)..( 13): Result.004 file - promoters50/1008432
atataattaaagc

SEQ ID NO: 152239 - DNA, 13 bp, Unknown
  misc_feature (1)..( 13): Result.004 file - promoters50/1008432
gtattttaaaaat

SEQ ID NO: 152240 - DNA, 13 bp, Unknown
  misc_feature (1)..( 13): Result.004 file - promoters50/1008432
gttttattaaatg

SEQ ID NO: 152241 - DNA, 13 bp, Unknown
  misc_feature (1)..( 13): Result.004 file - promoters50/1008432
tttttatcccttc

SEQ ID NO: 152242 - DNA, 13 bp, Unknown
  misc_feature (1)..( 13): Result.004 file - promoters50/1008443
tttttttcaaagg

SEQ ID NO: 152243 - DNA, 12 bp, Unknown
  misc_feature (1)..( 12): Result.004 file - promoters50/1008443
gataaatattca

SEQ ID NO: 152244 - DNA, 12 bp, Unknown
  misc_feature (1)..( 12): Result.004 file - promoters50/1008443
ataaaaaatttt

SEQ ID NO: 152245 - DNA, 12 bp, Unknown
  misc_feature (1)..( 12): Result.004 file - promoters50/1008443
atataaaatggt

SEQ ID NO: 152246 - DNA, 12 bp, Unknown
  misc_feature (1)..( 12): Result.004 file - promoters50/1008443
attccaaatttt

SEQ ID NO: 152247 - DNA, 12 bp, Unknown
  misc_feature (1)..( 12): Result.004 file - promoters50/1008443
agaaaaaaaaaa

SEQ ID NO: 152248 - DNA, 12 bp, Unknown
  misc_feature (1)..( 12): Result.004 file - promoters50/1008443
agaagaaacaaa

SEQ ID NO: 152249 - DNA, 11 bp, Unknown
  misc_feature (1)..( 11): Result.004 file - promoters50/1008443
tattcaactat

SEQ ID NO: 152250 - DNA, 11 bp, Unknown
  misc_feature (1)..( 11): Result.004 file - promoters50/1008443
aattcaaaaag

SEQ ID NO: 152251 - DNA, 11 bp, Unknown
  misc_feature (1)..( 11): Result.004 file - promoters50/1008443
tgttcaaaaaa

SEQ ID NO: 152252 - DNA, 11 bp, Unknown
  misc_feature (1)..( 11): Result.004 file - promoters50/1008443
aaaaaaaaaaa

SEQ ID NO: 152253 - DNA, 11 bp, Unknown
  misc_feature (1)..( 11): Result.004 file - promoters50/1008443
tctataaaaaa

SEQ ID NO: 152254 - DNA, 11 bp, Unknown
  misc_feature (1)..( 11): Result.004 file - promoters50/1008487
aattccaaatt

SEQ ID NO: 152255 - DNA, 7 bp, Unknown
  misc_feature (1)..( 7): Result.004 file - promoters50/1008487
caattac

SEQ ID NO: 152256 - DNA, 7 bp, Unknown
  misc_feature (1)..( 7): Result.004 file - promoters50/1008487
caattac

SEQ ID NO: 152257 - DNA, 7 bp, Unknown
  misc_feature (1)..( 7): Result.004 file - promoters50/1008491
aaattac

SEQ ID NO: 152258 - DNA, 9 bp, Unknown
  misc_feature (1)..( 9): Result.004 file - promoters50/1008491
gaaataaaa

SEQ ID NO: 152259 - DNA, 9 bp, Unknown
  misc_feature (1)..( 9): Result.004 file - promoters50/1008491
aaaatcaaa

SEQ ID NO: 152260 - DNA, 9 bp, Unknown
  misc_feature (1)..( 9): Result.004 file - promoters50/1008491
taaatactc

SEQ ID NO: 152261 - DNA, 8 bp, Unknown
  misc_feature (1)..( 8): Result.004 file - promoters50/1008491
aaaaactt

SEQ ID NO: 152262 - DNA, 8 bp, Unknown
  misc_feature (1)..( 8): Result.004 file - promoters50/1008491
tcaaactt

SEQ ID NO: 152263 - DNA, 9 bp, Unknown
  misc_feature (1)..( 9): Result.004 file - promoters50/1008534
taaatactc

SEQ ID NO: 152264 - DNA, 13 bp, Unknown
  misc_feature (1)..( 13): Result.004 file - promoters50/1008534
ggttttgagagag

SEQ ID NO: 152265 - DNA, 13 bp, Unknown
  misc_feature (1)..( 13): Result.004 file - promoters50/1008534
cattttgagaact

SEQ ID NO: 152266 - DNA, 13 bp, Unknown
  misc_feature (1)..( 13): Result.004 file - promoters50/1008534
aattttggttttg

SEQ ID NO: 152267 - DNA, 13 bp, Unknown
  misc_feature (1)..( 13): Result.004 file - promoters50/1008534
tattctgaatagt

SEQ ID NO: 152268 - DNA, 13 bp, Unknown
  misc_feature (1)..( 13): Result.004 file - promoters50/1008534
tttcttggttcaa

SEQ ID NO: 152269 - DNA, 13 bp, Unknown
  misc_feature (1)..( 13): Result.004 file - promoters50/1008573
aatcttgtttttg

SEQ ID NO: 152270 - DNA, 14 bp, Unknown
  misc_feature (1)..( 14): Result.004 file - promoters50/1008573
ttttcttttcatat

SEQ ID NO: 152271 - DNA, 14 bp, Unknown
  misc_feature (1)..( 14): Result.004 file - promoters50/1008573
ctgatttttaataa

SEQ ID NO: 152272 - DNA, 14 bp, Unknown
  misc_feature (1)..( 14): Result.004 file - promoters50/1008573
tttttttttcacta

SEQ ID NO: 152273 - DNA, 14 bp, Unknown
  misc_feature (1)..( 14): Result.004 file - promoters50/1008573
gaggcaattcatat

SEQ ID NO: 152274 - DNA, 14 bp, Unknown
  misc_feature (1)..( 14): Result.004 file - promoters50/1008573
ttacaatttcactc

SEQ ID NO: 152275 - DNA, 14 bp, Unknown
  misc_feature (1)..( 14): Result.004 file - promoters50/1008573
ttgaactttctaaa

SEQ ID NO: 152276 - DNA, 14 bp, Unknown
  misc_feature (1)..( 14): Result.004 file - promoters50/1008573
tcttattttatgta

SEQ ID NO: 152277 - DNA, 11 bp, Unknown
  misc_feature (1)..( 11): Result.004 file - promoters50/1008573
ctgattttgta

SEQ ID NO: 152278 - DNA, 11 bp, Unknown
  misc_feature (1)..( 11): Result.004 file - promoters50/1008573
cttattatgtt

SEQ ID NO: 152279 - DNA, 11 bp, Unknown
  misc_feature (1)..( 11): Result.004 file - promoters50/1008573
tgtattgtgtt

SEQ ID NO: 152280 - DNA, 11 bp, Unknown
  misc_feature (1)..( 11): Result.004 file - promoters50/1008573
gagattgtgag

SEQ ID NO: 152281 - DNA, 11 bp, Unknown
  misc_feature (1)..( 11): Result.004 file - promoters50/1008573
tgtataatgtt

SEQ ID NO: 152282 - DNA, 11 bp, Unknown
  misc_feature (1)..( 11): Result.004 file - promoters50/1008573
aatattaatat

SEQ ID NO: 152283 - DNA, 12 bp, Unknown
  misc_feature (1)..( 12): Result.004 file - promoters50/1008573
gttatcaatcag

SEQ ID NO: 152284 - DNA, 15 bp, Unknown
  misc_feature (1)..( 15): Result.004 file - promoters50/1008573
ttcctaattttgcat

SEQ ID NO: 152285 - DNA, 15 bp, Unknown
  misc_feature (1)..( 15): Result.004 file - promoters50/1008573
accaaaatattgtta

SEQ ID NO: 152286 - DNA, 15 bp, Unknown
  misc_feature (1)..( 15): Result.004 file - promoters50/1008573
tttaaaatatatttt

SEQ ID NO: 152287 - DNA, 15 bp, Unknown
  misc_feature (1)..( 15): Result.004 file - promoters50/1008573
ttatgtatattgtta

SEQ ID NO: 152288 - DNA, 15 bp, Unknown
  misc_feature (1)..( 15): Result.004 file - promoters50/1008573
ttataaatgtatttc

SEQ ID NO: 152289 - DNA, 15 bp, Unknown
  misc_feature (1)..( 15): Result.004 file - promoters50/1008673
tttacaatggaagtt

SEQ ID NO: 152290 - DNA, 11 bp, Unknown
  misc_feature (1)..( 11): Result.004 file - promoters50/1008673
tgtttttaatg

SEQ ID NO: 152291 - DNA, 11 bp, Unknown
  misc_feature (1)..( 11): Result.004 file - promoters50/1008673
attttttaatt

SEQ ID NO: 152292 - DNA, 11 bp, Unknown
  misc_feature (1)..( 11): Result.004 file - promoters50/1008673
tgtttttgttc

SEQ ID NO: 152293 - DNA, 11 bp, Unknown
  misc_feature (1)..( 11): Result.004 file - promoters50/1008673
tatttttttct

SEQ ID NO: 152294 - DNA, 11 bp, Unknown
  misc_feature (1)..( 11): Result.004 file - promoters50/1008732
atgttttattt

SEQ ID NO: 152295 - DNA, 10 bp, Unknown
  misc_feature (1)..( 10): Result.004 file - promoters50/1008732
tatagatgta

SEQ ID NO: 152296 - DNA, 10 bp, Unknown
  misc_feature (1)..( 10): Result.004 file - promoters50/1008732
aataaatgac

SEQ ID NO: 152297 - DNA, 10 bp, Unknown
  misc_feature (1)..( 10): Result.004 file - promoters50/1008732
aaaaaaaaaa

SEQ ID NO: 152298 - DNA, 10 bp, Unknown
  misc_feature (1)..( 10): Result.004 file - promoters50/1008732
gaaaaataaa

SEQ ID NO: 152299 - DNA, 10 bp, Unknown
  misc_feature (1)..( 10): Result.004 file - promoters50/1008732
ttaaaatatt

SEQ ID NO: 152300 - DNA, 10 bp, Unknown
  misc_feature (1)..( 10): Result.004 file - promoters50/1008732
agataataaa

SEQ ID NO: 152301 - DNA, 12 bp, Unknown
  misc_feature (1)..( 12): Result.004 file - promoters50/1008732
taaagtaattta

SEQ ID NO: 152302 - DNA, 12 bp, Unknown
  misc_feature (1)..( 12): Result.004 file - promoters50/1008732
aacagtagtttc

SEQ ID NO: 152303 - DNA, 12 bp, Unknown
  misc_feature (1)..( 12): Result.004 file - promoters50/1008732
aaaaataaacta

SEQ ID NO: 152304 - DNA, 12 bp, Unknown
  misc_feature (1)..( 12): Result.004 file - promoters50/1008732
ttgttgagtttc

SEQ ID NO: 152305 - DNA, 12 bp, Unknown
  misc_feature (1)..( 12): Result.004 file - promoters50/1008732
gaaaaaaaaaaa

SEQ ID NO: 152306 - DNA, 12 bp, Unknown
  misc_feature (1)..( 12): Result.004 file - promoters50/1008732
taaaatattcga

SEQ ID NO: 152307 - DNA, 12 bp, Unknown
  misc_feature (1)..( 12): Result.004 file - promoters50/1008759
gataataaataa

SEQ ID NO: 152308 - DNA, 8 bp, Unknown
  misc_feature (1)..( 8): Result.004 file - promoters50/1008759
atcatttt

SEQ ID NO: 152309 - DNA, 8 bp, Unknown
  misc_feature (1)..( 8): Result.004 file - promoters50/1008759
atcctttg

SEQ ID NO: 152310 - DNA, 8 bp, Unknown
  misc_feature (1)..( 8): Result.004 file - promoters50/1008769
tacatttt

SEQ ID NO: 152311 - DNA, 9 bp, Unknown
  misc_feature (1)..( 9): Result.004 file - promoters50/1008769
ataaagtca

SEQ ID NO: 152312 - DNA, 9 bp, Unknown
  misc_feature (1)..( 9): Result.004 file - promoters50/1008769
gtaaactca

SEQ ID NO: 152313 - DNA, 9 bp, Unknown
  misc_feature (1)..( 9): Result.004 file - promoters50/1008769
gtacactat

SEQ ID NO: 152314 - DNA, 11 bp, Unknown
  misc_feature (1)..( 11): Result.004 file - promoters50/1008769
atgaatttttt

SEQ ID NO: 152315 - DNA, 11 bp, Unknown
  misc_feature (1)..( 11): Result.004 file - promoters50/1008769
atgaatcttta

SEQ ID NO: 152316 - DNA, 9 bp, Unknown
  misc_feature (1)..( 9): Result.004 file - promoters50/1008769
ttctttttt

SEQ ID NO: 152317 - DNA, 7 bp, Unknown
  misc_feature (1)..( 7): Result.004 file - promoters50/1008769
aattttt

SEQ ID NO: 152318 - DNA, 7 bp, Unknown
  misc_feature (1)..( 7): Result.004 file - promoters50/1008769
tattttt

SEQ ID NO: 152319 - DNA, 7 bp, Unknown
  misc_feature (1)..( 7): Result.004 file - promoters50/1008769
aattttg

SEQ ID NO: 152320 - DNA, 10 bp, Unknown
  misc_feature (1)..( 10): Result.004 file - promoters50/1008769
aaagaacact

SEQ ID NO: 152321 - DNA, 10 bp, Unknown
  misc_feature (1)..( 10): Result.004 file - promoters50/1008769
taagtacact

SEQ ID NO: 152322 - DNA, 10 bp, Unknown
  misc_feature (1)..( 10): Result.004 file - promoters50/1008769
ttggtaaact

SEQ ID NO: 152323 - DNA, 10 bp, Unknown
  misc_feature (1)..( 10): Result.004 file - promoters50/1008769
taagtaatgt

SEQ ID NO: 152324 - DNA, 8 bp, Unknown
  misc_feature (1)..( 8): Result.004 file - promoters50/1008769
atggttta

SEQ ID NO: 152325 - DNA, 8 bp, Unknown
  misc_feature (1)..( 8): Result.004 file - promoters50/1008769
atgttttc

SEQ ID NO: 152326 - DNA, 8 bp, Unknown
  misc_feature (1)..( 8): Result.004 file - promoters50/1008787
ctggttta

SEQ ID NO: 152327 - DNA, 11 bp, Unknown
  misc_feature (1)..( 11): Result.004 file - promoters50/1008787
gcatacaaata

SEQ ID NO: 152328 - DNA, 11 bp, Unknown
  misc_feature (1)..( 11): Result.004 file - promoters50/1008787
gcatacagata

SEQ ID NO: 152329 - DNA, 11 bp, Unknown
  misc_feature (1)..( 11): Result.004 file - promoters50/1008787
caaaaagaata

SEQ ID NO: 152330 - DNA, 11 bp, Unknown
  misc_feature (1)..( 11): Result.004 file - promoters50/1008787
caatacaaata

SEQ ID NO: 152331 - DNA, 11 bp, Unknown
  misc_feature (1)..( 11): Result.004 file - promoters50/1008787
acataaagatt

SEQ ID NO: 152332 - DNA, 11 bp, Unknown
  misc_feature (1)..( 11): Result.004 file - promoters50/1008791
gtttaaaaatt

SEQ ID NO: 152333 - DNA, 11 bp, Unknown
  misc_feature (1)..( 11): Result.004 file - promoters50/1008791
taagggtagaa

SEQ ID NO: 152334 - DNA, 11 bp, Unknown
  misc_feature (1)..( 11): Result.004 file - promoters50/1008791
taacggtagaa

SEQ ID NO: 152335 - DNA, 11 bp, Unknown
  misc_feature (1)..( 11): Result.004 file - promoters50/1008791
aaagggttgta

SEQ ID NO: 152336 - DNA, 11 bp, Unknown
  misc_feature (1)..( 11): Result.004 file - promoters50/1008791
taaccgtaata

SEQ ID NO: 152337 - DNA, 10 bp, Unknown
  misc_feature (1)..( 10): Result.004 file - promoters50/1008791
aactcataac

SEQ ID NO: 152338 - DNA, 10 bp, Unknown
  misc_feature (1)..( 10): Result.004 file - promoters50/1008791
aacccatctc

SEQ ID NO: 152339 - DNA, 10 bp, Unknown
  misc_feature (1)..( 10): Result.004 file - promoters50/1008808
tccccctctc

SEQ ID NO: 152340 - DNA, 11 bp, Unknown
  misc_feature (1)..( 11): Result.004 file - promoters50/1008808
gcctatggtta

SEQ ID NO: 152341 - DNA, 11 bp, Unknown
  misc_feature (1)..( 11): Result.004 file - promoters50/1008808
agaaatgatta

SEQ ID NO: 152342 - DNA, 11 bp, Unknown
  misc_feature (1)..( 11): Result.004 file - promoters50/1008808
ttaaaggatta

SEQ ID NO: 152343 - DNA, 11 bp, Unknown
  misc_feature (1)..( 11): Result.004 file - promoters50/1008808
gaaaaagatgg

SEQ ID NO: 152344 - DNA, 11 bp, Unknown
  misc_feature (1)..( 11): Result.004 file - promoters50/1008808
aaaaatgtgaa

SEQ ID NO: 152345 - DNA, 11 bp, Unknown
  misc_feature (1)..( 11): Result.004 file - promoters50/1008813
ggacaagctgg

SEQ ID NO: 152346 - DNA, 6 bp, Unknown
  misc_feature (1)..( 6): Result.004 file - promoters50/1008813
ttcaaa

SEQ ID NO: 152347 - DNA, 6 bp, Unknown
  misc_feature (1)..( 6): Result.004 file - promoters50/1008813
ttcaaa

SEQ ID NO: 152348 - DNA, 6 bp, Unknown
  misc_feature (1)..( 6): Result.004 file - promoters50/1008813
ttcaaa

SEQ ID NO: 152349 - DNA, 10 bp, Unknown
  misc_feature (1)..( 10): Result.004 file - promoters50/1008813
aaaaaattat

SEQ ID NO: 152350 - DNA, 10 bp, Unknown
  misc_feature (1)..( 10): Result.004 file - promoters50/1008813
aaaaaaatat

SEQ ID NO: 152351 - DNA, 10 bp, Unknown
  misc_feature (1)..( 10): Result.004 file - promoters50/1008816
tcaaatatat

SEQ ID NO: 152352 - DNA, 13 bp, Unknown
  misc_feature (1)..( 13): Result.004 file - promoters50/1008816
cgaataaaaaaaa

SEQ ID NO: 152353 - DNA, 13 bp, Unknown
  misc_feature (1)..( 13): Result.004 file - promoters50/1008816
cgattaataaaaa

SEQ ID NO: 152354 - DNA, 13 bp, Unknown
  misc_feature (1)..( 13): Result.004 file - promoters50/1008816
atatttatatagt

SEQ ID NO: 152355 - DNA, 10 bp, Unknown
  misc_feature (1)..( 10): Result.004 file - promoters50/1008816
atattttctt

SEQ ID NO: 152356 - DNA, 10 bp, Unknown
  misc_feature (1)..( 10): Result.004 file - promoters50/1008816
atatttttta

SEQ ID NO: 152357 - DNA, 10 bp, Unknown
  misc_feature (1)..( 10): Result.004 file - promoters50/1008836
caatttgtta

SEQ ID NO: 152358 - DNA, 11 bp, Unknown
  misc_feature (1)..( 11): Result.004 file - promoters50/1008836
atatttttatg

SEQ ID NO: 152359 - DNA, 11 bp, Unknown
  misc_feature (1)..( 11): Result.004 file - promoters50/1008836
atatttttata

SEQ ID NO: 152360 - DNA, 11 bp, Unknown
  misc_feature (1)..( 11): Result.004 file - promoters50/1008836
gaaattttatg

SEQ ID NO: 152361 - DNA, 11 bp, Unknown
  misc_feature (1)..( 11): Result.004 file - promoters50/1008836
acatttttttc

SEQ ID NO: 152362 - DNA, 11 bp, Unknown
  misc_feature (1)..( 11): Result.004 file - promoters50/1008836
ttttttttaac

SEQ ID NO: 152363 - DNA, 11 bp, Unknown
  misc_feature (1)..( 11): Result.004 file - promoters50/1008836
caaattttatt

SEQ ID NO: 152364 - DNA, 11 bp, Unknown
  misc_feature (1)..( 11): Result.004 file - promoters50/1008836
ttattttttgg

SEQ ID NO: 152365 - DNA, 13 bp, Unknown
  misc_feature (1)..( 13): Result.004 file - promoters50/1008836
ttcaaaagattta

SEQ ID NO: 152366 - DNA, 13 bp, Unknown
  misc_feature (1)..( 13): Result.004 file - promoters50/1008836
atcaaaaaaagaa

SEQ ID NO: 152367 - DNA, 13 bp, Unknown
  misc_feature (1)..( 13): Result.004 file - promoters50/1008836
aacaaaagaaaaa

SEQ ID NO: 152368 - DNA, 13 bp, Unknown
  misc_feature (1)..( 13): Result.004 file - promoters50/1008836
aggaaaaaaaaaa

SEQ ID NO: 152369 - DNA, 13 bp, Unknown
  misc_feature (1)..( 13): Result.004 file - promoters50/1008836
aacaatagaggtt

SEQ ID NO: 152370 - DNA, 13 bp, Unknown
  misc_feature (1)..( 13): Result.004 file - promoters50/1008836
tgtcaaacatata

SEQ ID NO: 152371 - DNA, 12 bp, Unknown
  misc_feature (1)..( 12): Result.004 file - promoters50/1008836
caaaagatttat

SEQ ID NO: 152372 - DNA, 12 bp, Unknown
  misc_feature (1)..( 12): Result.004 file - promoters50/1008836
aaaaagaattta

SEQ ID NO: 152373 - DNA, 12 bp, Unknown
  misc_feature (1)..( 12): Result.004 file - promoters50/1008836
caaaagaaaaaa

SEQ ID NO: 152374 - DNA, 12 bp, Unknown
  misc_feature (1)..( 12): Result.004 file - promoters50/1008836
gaaaaattcaac

SEQ ID NO: 152375 - DNA, 12 bp, Unknown
  misc_feature (1)..( 12): Result.004 file - promoters50/1008836
gaaaaaaaaaat

SEQ ID NO: 152376 - DNA, 12 bp, Unknown
  misc_feature (1)..( 12): Result.004 file - promoters50/1008836
tcaaacatatac

SEQ ID NO: 152377 - DNA, 11 bp, Unknown
  misc_feature (1)..( 11): Result.004 file - promoters50/1008836
gactaattaaa

SEQ ID NO: 152378 - DNA, 11 bp, Unknown
  misc_feature (1)..( 11): Result.004 file - promoters50/1008836
attaaatgaaa

SEQ ID NO: 152379 - DNA, 11 bp, Unknown
  misc_feature (1)..( 11): Result.004 file - promoters50/1008836
taaaaattaat

SEQ ID NO: 152380 - DNA, 11 bp, Unknown
  misc_feature (1)..( 11): Result.004 file - promoters50/1008836
ttgtaaataat

SEQ ID NO: 152381 - DNA, 11 bp, Unknown
  misc_feature (1)..( 11): Result.004 file - promoters50/1008836
cttaaatttag

SEQ ID NO: 152382 - DNA, 11 bp, Unknown
  misc_feature (1)..( 11): Result.004 file - promoters50/1008836
tgtgaatctaa

SEQ ID NO: 152383 - DNA, 11 bp, Unknown
  misc_feature (1)..( 11): Result.004 file - promoters50/1008836
atataaatata

SEQ ID NO: 152384 - DNA, 17 bp, Unknown
  misc_feature (1)..( 17): Result.004 file - promoters50/1008836
aaatttttaaacattgt

SEQ ID NO: 152385 - DNA, 17 bp, Unknown
  misc_feature (1)..( 17): Result.004 file - promoters50/1008836
aaagtaaaaaacatctt

SEQ ID NO: 152386 - DNA, 17 bp, Unknown
  misc_feature (1)..( 17): Result.004 file - promoters50/1008836
aaatttttaaatatttt

SEQ ID NO: 152387 - DNA, 17 bp, Unknown
  misc_feature (1)..( 17): Result.004 file - promoters50/1008836
cttgttttaatgcgatt

SEQ ID NO: 152388 - DNA, 17 bp, Unknown
  misc_feature (1)..( 17): Result.004 file - promoters50/1008836
ttagtcatcaatattct

SEQ ID NO: 152389 - DNA, 17 bp, Unknown
  misc_feature (1)..( 17): Result.004 file - promoters50/1008836
acatgaagatatattta

SEQ ID NO: 152390 - DNA, 17 bp, Unknown
  misc_feature (1)..( 17): Result.004 file - promoters50/1008836
gtcattttattcataac

SEQ ID NO: 152391 - DNA, 17 bp, Unknown
  misc_feature (1)..( 17): Result.004 file - promoters50/1008836
ttcatattatccatata

SEQ ID NO: 152392 - DNA, 11 bp, Unknown
  misc_feature (1)..( 11): Result.004 file - promoters50/1008836
acattgtccat

SEQ ID NO: 152393 - DNA, 11 bp, Unknown
  misc_feature (1)..( 11): Result.004 file - promoters50/1008836
taattatccaa

SEQ ID NO: 152394 - DNA, 11 bp, Unknown
  misc_feature (1)..( 11): Result.004 file - promoters50/1008836
atattatccat

SEQ ID NO: 152395 - DNA, 11 bp, Unknown
  misc_feature (1)..( 11): Result.004 file - promoters50/1008836
gatatgtacat

SEQ ID NO: 152396 - DNA, 11 bp, Unknown
  misc_feature (1)..( 11): Result.004 file - promoters50/1008836
taaatattttt

SEQ ID NO: 152397 - DNA, 11 bp, Unknown
  misc_feature (1)..( 11): Result.004 file - promoters50/1008836
cgattttaatg

SEQ ID NO: 152398 - DNA, 11 bp, Unknown
  misc_feature (1)..( 11): Result.004 file - promoters50/1008836
tcaatattctt

SEQ ID NO: 152399 - DNA, 11 bp, Unknown
  misc_feature (1)..( 11): Result.004 file - promoters50/1008836
tcattttattc

SEQ ID NO: 152400 - DNA, 9 bp, Unknown
  misc_feature (1)..( 9): Result.004 file - promoters50/1008836
tccaaattg

SEQ ID NO: 152401 - DNA, 9 bp, Unknown
  misc_feature (1)..( 9): Result.004 file - promoters50/1008836
tccaaataa

SEQ ID NO: 152402 - DNA, 9 bp, Unknown
  misc_feature (1)..( 9): Result.004 file - promoters50/1008836
aacaaatta

SEQ ID NO: 152403 - DNA, 9 bp, Unknown
  misc_feature (1)..( 9): Result.004 file - promoters50/1008836
gacaaatat

SEQ ID NO: 152404 - DNA, 9 bp, Unknown
  misc_feature (1)..( 9): Result.004 file - promoters50/1008836
tacatattg

SEQ ID NO: 152405 - DNA, 9 bp, Unknown
  misc_feature (1)..( 9): Result.004 file - promoters50/1008836
aggaaatta

SEQ ID NO: 152406 - DNA, 8 bp, Unknown
  misc_feature (1)..( 8): Result.004 file - promoters50/1008836
gttataaa

SEQ ID NO: 152407 - DNA, 8 bp, Unknown
  misc_feature (1)..( 8): Result.004 file - promoters50/1008836
tatataaa

SEQ ID NO: 152408 - DNA, 8 bp, Unknown
  misc_feature (1)..( 8): Result.004 file - promoters50/1008836
tatataaa

SEQ ID NO: 152409 - DNA, 8 bp, Unknown
  misc_feature (1)..( 8): Result.004 file - promoters50/1008836
tttataaa

SEQ ID NO: 152410 - DNA, 8 bp, Unknown
  misc_feature (1)..( 8): Result.004 file - promoters50/1008836
tatataaa

SEQ ID NO: 152411 - DNA, 8 bp, Unknown
  misc_feature (1)..( 8): Result.004 file - promoters50/1008836
tttatatc

SEQ ID NO: 152412 - DNA, 8 bp, Unknown
  misc_feature (1)..( 8): Result.004 file - promoters50/1008836
gctataaa

SEQ ID NO: 152413 - DNA, 14 bp, Unknown
  misc_feature (1)..( 14): Result.004 file - promoters50/1008836
taaatctgaaaata

SEQ ID NO: 152414 - DNA, 14 bp, Unknown
  misc_feature (1)..( 14): Result.004 file - promoters50/1008836
taaatttgaaaaga

SEQ ID NO: 152415 - DNA, 14 bp, Unknown
  misc_feature (1)..( 14): Result.004 file - promoters50/1008836
ctctgtagaagata

SEQ ID NO: 152416 - DNA, 14 bp, Unknown
  misc_feature (1)..( 14): Result.004 file - promoters50/1008836
cttctttgcaaatt

SEQ ID NO: 152417 - DNA, 14 bp, Unknown
  misc_feature (1)..( 14): Result.004 file - promoters50/1008836
tgtttttgaactta

SEQ ID NO: 152418 - DNA, 14 bp, Unknown
  misc_feature (1)..( 14): Result.004 file - promoters50/1008836
agtttttgatattg

SEQ ID NO: 152419 - DNA, 10 bp, Unknown
  misc_feature (1)..( 10): Result.004 file - promoters50/1008836
atttatatga

SEQ ID NO: 152420 - DNA, 10 bp, Unknown
  misc_feature (1)..( 10): Result.004 file - promoters50/1008836
atttttattt

SEQ ID NO: 152421 - DNA, 10 bp, Unknown
  misc_feature (1)..( 10): Result.004 file - promoters50/1008836
cgtttcattg

SEQ ID NO: 152422 - DNA, 10 bp, Unknown
  misc_feature (1)..( 10): Result.004 file - promoters50/1008836
atttttttca

SEQ ID NO: 152423 - DNA, 10 bp, Unknown
  misc_feature (1)..( 10): Result.004 file - promoters50/1008836
cttttttttt

SEQ ID NO: 152424 - DNA, 10 bp, Unknown
  misc_feature (1)..( 10): Result.004 file - promoters50/1008836
tgtttcaaat

SEQ ID NO: 152425 - DNA, 10 bp, Unknown
  misc_feature (1)..( 10): Result.004 file - promoters50/1008836
agtttaaaaa

SEQ ID NO: 152426 - DNA, 10 bp, Unknown
  misc_feature (1)..( 10): Result.004 file - promoters50/1008836
tagtaaaaaa

SEQ ID NO: 152427 - DNA, 10 bp, Unknown
  misc_feature (1)..( 10): Result.004 file - promoters50/1008836
aaagaaaaaa

SEQ ID NO: 152428 - DNA, 10 bp, Unknown
  misc_feature (1)..( 10): Result.004 file - promoters50/1008836
ttttaacaaa

SEQ ID NO: 152429 - DNA, 10 bp, Unknown
  misc_feature (1)..( 10): Result.004 file - promoters50/1008836
tctgaaaaac

SEQ ID NO: 152430 - DNA, 10 bp, Unknown
  misc_feature (1)..( 10): Result.004 file - promoters50/1008836
gtttaaaaaa

SEQ ID NO: 152431 - DNA, 10 bp, Unknown
  misc_feature (1)..( 10): Result.004 file - promoters50/1008836
ttttaacatc

SEQ ID NO: 152432 - DNA, 11 bp, Unknown
  misc_feature (1)..( 11): Result.004 file - promoters50/1008836
cttttaaagtt

SEQ ID NO: 152433 - DNA, 11 bp, Unknown
  misc_feature (1)..( 11): Result.004 file - promoters50/1008836
agtttaaaaaa

SEQ ID NO: 152434 - DNA, 11 bp, Unknown
  misc_feature (1)..( 11): Result.004 file - promoters50/1008836
attttaacatc

SEQ ID NO: 152435 - DNA, 11 bp, Unknown
  misc_feature (1)..( 11): Result.004 file - promoters50/1008836
gtttcaaatag

SEQ ID NO: 152436 - DNA, 11 bp, Unknown
  misc_feature (1)..( 11): Result.004 file - promoters50/1008836
gtttcattgac

SEQ ID NO: 152437 - DNA, 11 bp, Unknown
  misc_feature (1)..( 11): Result.004 file - promoters50/1008889
tttttaacaaa

SEQ ID NO: 152438 - DNA, 8 bp, Unknown
  misc_feature (1)..( 8): Result.004 file - promoters50/1008889
atttgttt

SEQ ID NO: 152439 - DNA, 8 bp, Unknown
  misc_feature (1)..( 8): Result.004 file - promoters50/1008889
attttttt

SEQ ID NO: 152440 - DNA, 8 bp, Unknown
  misc_feature (1)..( 8): Result.004 file - promoters50/1008889
atttttag

SEQ ID NO: 152441 - DNA, 8 bp, Unknown
  misc_feature (1)..( 8): Result.004 file - promoters50/1008889
aaaattaa

SEQ ID NO: 152442 - DNA, 8 bp, Unknown
  misc_feature (1)..( 8): Result.004 file - promoters50/1008889
taaattat

SEQ ID NO: 152443 - DNA, 8 bp, Unknown
  misc_feature (1)..( 8): Result.004 file - promoters50/1009030
taaaatat

SEQ ID NO: 152444 - DNA, 11 bp, Unknown
  misc_feature (1)..( 11): Result.004 file - promoters50/1009030
gctcatgtata

SEQ ID NO: 152445 - DNA, 11 bp, Unknown
  misc_feature (1)..( 11): Result.004 file - promoters50/1009030
aatcatgtggg

SEQ ID NO: 152446 - DNA, 11 bp, Unknown
  misc_feature (1)..( 11): Result.004 file - promoters50/1009030
tctcttgtaat

SEQ ID NO: 152447 - DNA, 11 bp, Unknown
  misc_feature (1)..( 11): Result.004 file - promoters50/1009030
gctgatgtttg

SEQ ID NO: 152448 - DNA, 11 bp, Unknown
  misc_feature (1)..( 11): Result.004 file - promoters50/1009030
aaaattgtaat

SEQ ID NO: 152449 - DNA, 11 bp, Unknown
  misc_feature (1)..( 11): Result.004 file - promoters50/1009030
actcttggaat

SEQ ID NO: 152450 - DNA, 17 bp, Unknown
  misc_feature (1)..( 17): Result.004 file - promoters50/1009030
taatacctaaataataa

SEQ ID NO: 152451 - DNA, 17 bp, Unknown
  misc_feature (1)..( 17): Result.004 file - promoters50/1009030
atttatgtaattaaatc

SEQ ID NO: 152452 - DNA, 17 bp, Unknown
  misc_feature (1)..( 17): Result.004 file - promoters50/1009030
atgggcctgaatcatat

SEQ ID NO: 152453 - DNA, 17 bp, Unknown
  misc_feature (1)..( 17): Result.004 file - promoters50/1009030
ttgggccagaacacggt

SEQ ID NO: 152454 - DNA, 17 bp, Unknown
  misc_feature (1)..( 17): Result.004 file - promoters50/1009030
ttgggccaagccgtatt

SEQ ID NO: 152455 - DNA, 17 bp, Unknown
  misc_feature (1)..( 17): Result.004 file - promoters50/1009053
gtaaagtgaagtcatat

SEQ ID NO: 152456 - DNA, 11 bp, Unknown
  misc_feature (1)..( 11): Result.004 file - promoters50/1009053
tatattaaata

SEQ ID NO: 152457 - DNA, 11 bp, Unknown
  misc_feature (1)..( 11): Result.004 file - promoters50/1009053
tatattttttt

SEQ ID NO: 152458 - DNA, 11 bp, Unknown
  misc_feature (1)..( 11): Result.004 file - promoters50/1009053
gatattttttt

SEQ ID NO: 152459 - DNA, 12 bp, Unknown
  misc_feature (1)..( 12): Result.004 file - promoters50/1009053
atgttttcaata

SEQ ID NO: 152460 - DNA, 12 bp, Unknown
  misc_feature (1)..( 12): Result.004 file - promoters50/1009053
atttttttaata

SEQ ID NO: 152461 - DNA, 12 bp, Unknown
  misc_feature (1)..( 12): Result.004 file - promoters50/1009068
atattttttttt

SEQ ID NO: 152462 - DNA, 12 bp, Unknown
  misc_feature (1)..( 12): Result.004 file - promoters50/1009068
aaaaattcttga

SEQ ID NO: 152463 - DNA, 12 bp, Unknown
  misc_feature (1)..( 12): Result.004 file - promoters50/1009068
aaagatttttga

SEQ ID NO: 152464 - DNA, 12 bp, Unknown
  misc_feature (1)..( 12): Result.004 file - promoters50/1009068
aaaaatgaagaa

SEQ ID NO: 152465 - DNA, 8 bp, Unknown
  misc_feature (1)..( 8): Result.004 file - promoters50/1009068
aaaaccaa

SEQ ID NO: 152466 - DNA, 8 bp, Unknown
  misc_feature (1)..( 8): Result.004 file - promoters50/1009068
aaaagcaa

SEQ ID NO: 152467 - DNA, 8 bp, Unknown
  misc_feature (1)..( 8): Result.004 file - promoters50/1009068
aaaaccca

SEQ ID NO: 152468 - DNA, 11 bp, Unknown
  misc_feature (1)..( 11): Result.004 file - promoters50/1009068
aaattatgcaa

SEQ ID NO: 152469 - DNA, 11 bp, Unknown
  misc_feature (1)..( 11): Result.004 file - promoters50/1009068
aaactatacaa

SEQ ID NO: 152470 - DNA, 11 bp, Unknown
  misc_feature (1)..( 11): Result.004 file - promoters50/1009086
gaaaaatacaa

SEQ ID NO: 152471 - DNA, 7 bp, Unknown
  misc_feature (1)..( 7): Result.004 file - promoters50/1009086
aaaattg

SEQ ID NO: 152472 - DNA, 7 bp, Unknown
  misc_feature (1)..( 7): Result.004 file - promoters50/1009086
caaattg

SEQ ID NO: 152473 - DNA, 8 bp, Unknown
  misc_feature (1)..( 8): Result.004 file - promoters50/1009086
caaacttg

SEQ ID NO: 152474 - DNA, 8 bp, Unknown
  misc_feature (1)..( 8): Result.004 file - promoters50/1009086
acatattg

SEQ ID NO: 152475 - DNA, 13 bp, Unknown
  misc_feature (1)..( 13): Result.004 file - promoters50/1009086
cataaatttgata

SEQ ID NO: 152476 - DNA, 13 bp, Unknown
  misc_feature (1)..( 13): Result.004 file - promoters50/1009086
aaagaatatgatg

SEQ ID NO: 152477 - DNA, 13 bp, Unknown
  misc_feature (1)..( 13): Result.004 file - promoters50/1009086
aatagatttgagg

SEQ ID NO: 152478 - DNA, 13 bp, Unknown
  misc_feature (1)..( 13): Result.004 file - promoters50/1009086
aataaaattgata

SEQ ID NO: 152479 - DNA, 13 bp, Unknown
  misc_feature (1)..( 13): Result.004 file - promoters50/1009086
aataaactctgta

SEQ ID NO: 152480 - DNA, 10 bp, Unknown
  misc_feature (1)..( 10): Result.004 file - promoters50/1009086
ataaaacaaa

SEQ ID NO: 152481 - DNA, 10 bp, Unknown
  misc_feature (1)..( 10): Result.004 file - promoters50/1009086
ataagacatg

SEQ ID NO: 152482 - DNA, 10 bp, Unknown
  misc_feature (1)..( 10): Result.004 file - promoters50/1009086
gtaacacaaa

SEQ ID NO: 152483 - DNA, 10 bp, Unknown
  misc_feature (1)..( 10): Result.004 file - promoters50/1009112
atacaacaat

SEQ ID NO: 152484 - DNA, 15 bp, Unknown
  misc_feature (1)..( 15): Result.004 file - promoters50/1009112
tataaaaacaatttt

SEQ ID NO: 152485 - DNA, 15 bp, Unknown
  misc_feature (1)..( 15): Result.004 file - promoters50/1009112
tataaactaattatg

SEQ ID NO: 152486 - DNA, 15 bp, Unknown
  misc_feature (1)..( 15): Result.004 file - promoters50/1009112
cataaaccaataatg

SEQ ID NO: 152487 - DNA, 8 bp, Unknown
  misc_feature (1)..( 8): Result.004 file - promoters50/1009112
taactaaa

SEQ ID NO: 152488 - DNA, 8 bp, Unknown
  misc_feature (1)..( 8): Result.004 file - promoters50/1009112
taactaaa

SEQ ID NO: 152489 - DNA, 8 bp, Unknown
  misc_feature (1)..( 8): Result.004 file - promoters50/1009112
ctactaaa

SEQ ID NO: 152490 - DNA, 10 bp, Unknown
  misc_feature (1)..( 10): Result.004 file - promoters50/1009112
attttattta

SEQ ID NO: 152491 - DNA, 10 bp, Unknown
  misc_feature (1)..( 10): Result.004 file - promoters50/1009112
gtttcattgt

SEQ ID NO: 152492 - DNA, 10 bp, Unknown
  misc_feature (1)..( 10): Result.004 file - promoters50/1009112
atttcattta

SEQ ID NO: 152493 - DNA, 10 bp, Unknown
  misc_feature (1)..( 10): Result.004 file - promoters50/1009112
ttaaaaaact

SEQ ID NO: 152494 - DNA, 10 bp, Unknown
  misc_feature (1)..( 10): Result.004 file - promoters50/1009112
ttaaaacgta

SEQ ID NO: 152495 - DNA, 10 bp, Unknown
  misc_feature (1)..( 10): Result.004 file - promoters50/1009112
ataaaatgta

SEQ ID NO: 152496 - DNA, 12 bp, Unknown
  misc_feature (1)..( 12): Result.004 file - promoters50/1009112
gagaaataaaaa

SEQ ID NO: 152497 - DNA, 12 bp, Unknown
  misc_feature (1)..( 12): Result.004 file - promoters50/1009112
gttaaattaaaa

SEQ ID NO: 152498 - DNA, 12 bp, Unknown
  misc_feature (1)..( 12): Result.004 file - promoters50/1009112
gttagatttaga

SEQ ID NO: 152499 - DNA, 8 bp, Unknown
  misc_feature (1)..( 8): Result.004 file - promoters50/1009112
aattaaat

SEQ ID NO: 152500 - DNA, 8 bp, Unknown
  misc_feature (1)..( 8): Result.004 file - promoters50/1009112
aataaaac

SEQ ID NO: 152501 - DNA, 8 bp, Unknown
  misc_feature (1)..( 8): Result.004 file - promoters50/1009112
actaaaac

SEQ ID NO: 152502 - DNA, 9 bp, Unknown
  misc_feature (1)..( 9): Result.004 file - promoters50/1009112
tttttaaaa

SEQ ID NO: 152503 - DNA, 9 bp, Unknown
  misc_feature (1)..( 9): Result.004 file - promoters50/1009112
atttcaaag

SEQ ID NO: 152504 - DNA, 9 bp, Unknown
  misc_feature (1)..( 9): Result.004 file - promoters50/1009112
ttttgaaat

SEQ ID NO: 152505 - DNA, 9 bp, Unknown
  misc_feature (1)..( 9): Result.004 file - promoters50/1009112
acttgtaat

SEQ ID NO: 152506 - DNA, 14 bp, Unknown
  misc_feature (1)..( 14): Result.004 file - promoters50/1009112
taaaaacaataata

SEQ ID NO: 152507 - DNA, 14 bp, Unknown
  misc_feature (1)..( 14): Result.004 file - promoters50/1009112
ataaaccaataatg

SEQ ID NO: 152508 - DNA, 14 bp, Unknown
  misc_feature (1)..( 14): Result.004 file - promoters50/1009112
ataaactaattatg

SEQ ID NO: 152509 - DNA, 8 bp, Unknown
  misc_feature (1)..( 8): Result.004 file - promoters50/1009112
gataataa

SEQ ID NO: 152510 - DNA, 8 bp, Unknown
  misc_feature (1)..( 8): Result.004 file - promoters50/1009112
aatattaa

SEQ ID NO: 152511 - DNA, 8 bp, Unknown
  misc_feature (1)..( 8): Result.004 file - promoters50/1009112
attattat

SEQ ID NO: 152512 - DNA, 9 bp, Unknown
  misc_feature (1)..( 9): Result.004 file - promoters50/1009112
aaaactgta

SEQ ID NO: 152513 - DNA, 9 bp, Unknown
  misc_feature (1)..( 9): Result.004 file - promoters50/1009112
taaaatgta

SEQ ID NO: 152514 - DNA, 9 bp, Unknown
  misc_feature (1)..( 9): Result.004 file - promoters50/1009112
taaaacgta

SEQ ID NO: 152515 - DNA, 8 bp, Unknown
  misc_feature (1)..( 8): Result.004 file - promoters50/1009112
gaaaatta

SEQ ID NO: 152516 - DNA, 8 bp, Unknown
  misc_feature (1)..( 8): Result.004 file - promoters50/1009112
gaagattt

SEQ ID NO: 152517 - DNA, 9 bp, Unknown
  misc_feature (1)..( 9): Result.004 file - promoters50/1009136
acagagtta

SEQ ID NO: 152518 - DNA, 11 bp, Unknown
  misc_feature (1)..( 11): Result.004 file - promoters50/1009136
cattttcaatt

SEQ ID NO: 152519 - DNA, 11 bp, Unknown
  misc_feature (1)..( 11): Result.004 file - promoters50/1009136
ttgattcaatg

SEQ ID NO: 152520 - DNA, 11 bp, Unknown
  misc_feature (1)..( 11): Result.004 file - promoters50/1009136
tgattttaatt

SEQ ID NO: 152521 - DNA, 11 bp, Unknown
  misc_feature (1)..( 11): Result.004 file - promoters50/1009136
ataattcaact

SEQ ID NO: 152522 - DNA, 11 bp, Unknown
  misc_feature (1)..( 11): Result.004 file - promoters50/1009136
ataaatcaaga

SEQ ID NO: 152523 - DNA, 11 bp, Unknown
  misc_feature (1)..( 11): Result.004 file - promoters50/1009136
aactttaaata

SEQ ID NO: 152524 - DNA, 10 bp, Unknown
  misc_feature (1)..( 10): Result.004 file - promoters50/1009136
aatttttata

SEQ ID NO: 152525 - DNA, 10 bp, Unknown
  misc_feature (1)..( 10): Result.004 file - promoters50/1009136
catttatata

SEQ ID NO: 152526 - DNA, 10 bp, Unknown
  misc_feature (1)..( 10): Result.004 file - promoters50/1009136
gatttttagt

SEQ ID NO: 152527 - DNA, 10 bp, Unknown
  misc_feature (1)..( 10): Result.004 file - promoters50/1009136
aatttatata

SEQ ID NO: 152528 - DNA, 10 bp, Unknown
  misc_feature (1)..( 10): Result.004 file - promoters50/1009136
actttaaata

SEQ ID NO: 152529 - DNA, 10 bp, Unknown
  misc_feature (1)..( 10): Result.004 file - promoters50/1009136
gattttaatt

SEQ ID NO: 152530 - DNA, 10 bp, Unknown
  misc_feature (1)..( 10): Result.004 file - promoters50/1009136
ttatagatat

SEQ ID NO: 152531 - DNA, 10 bp, Unknown
  misc_feature (1)..( 10): Result.004 file - promoters50/1009136
atataaataa

SEQ ID NO: 152532 - DNA, 10 bp, Unknown
  misc_feature (1)..( 10): Result.004 file - promoters50/1009136
atataattca

SEQ ID NO: 152533 - DNA, 10 bp, Unknown
  misc_feature (1)..( 10): Result.004 file - promoters50/1009136
caaaaaataa

SEQ ID NO: 152534 - DNA, 10 bp, Unknown
  misc_feature (1)..( 10): Result.004 file - promoters50/1009136
ctttaaatac

SEQ ID NO: 152535 - DNA, 10 bp, Unknown
  misc_feature (1)..( 10): Result.004 file - promoters50/1009136
attttaatta

SEQ ID NO: 152536 - DNA, 15 bp, Unknown
  misc_feature (1)..( 15): Result.004 file - promoters50/1009136
ttaatcataattaac

SEQ ID NO: 152537 - DNA, 15 bp, Unknown
  misc_feature (1)..( 15): Result.004 file - promoters50/1009136
tcaattatattcata

SEQ ID NO: 152538 - DNA, 15 bp, Unknown
  misc_feature (1)..( 15): Result.004 file - promoters50/1009136
gtaaacatggctaca

SEQ ID NO: 152539 - DNA, 15 bp, Unknown
  misc_feature (1)..( 15): Result.004 file - promoters50/1009136
gtaaacatgaaagag

SEQ ID NO: 152540 - DNA, 15 bp, Unknown
  misc_feature (1)..( 15): Result.004 file - promoters50/1009136
aatttcatttatatc

SEQ ID NO: 152541 - DNA, 15 bp, Unknown
  misc_feature (1)..( 15): Result.004 file - promoters50/1009136
aaataattttccttt

SEQ ID NO: 152542 - DNA, 11 bp, Unknown
  misc_feature (1)..( 11): Result.004 file - promoters50/1009136
attatgttata

SEQ ID NO: 152543 - DNA, 11 bp, Unknown
  misc_feature (1)..( 11): Result.004 file - promoters50/1009136
tatattttagg

SEQ ID NO: 152544 - DNA, 11 bp, Unknown
  misc_feature (1)..( 11): Result.004 file - promoters50/1009136
aaaattatagg

SEQ ID NO: 152545 - DNA, 11 bp, Unknown
  misc_feature (1)..( 11): Result.004 file - promoters50/1009136
tagattctagc

SEQ ID NO: 152546 - DNA, 11 bp, Unknown
  misc_feature (1)..( 11): Result.004 file - promoters50/1009136
aaaaatatatc

SEQ ID NO: 152547 - DNA, 11 bp, Unknown
  misc_feature (1)..( 11): Result.004 file - promoters50/1009136
actaaaataac

SEQ ID NO: 152548 - DNA, 11 bp, Unknown
  misc_feature (1)..( 11): Result.004 file - promoters50/1009136
gaattatactt

SEQ ID NO: 152549 - DNA, 11 bp, Unknown
  misc_feature (1)..( 11): Result.004 file - promoters50/1009136
gaaatataaat

SEQ ID NO: 152550 - DNA, 11 bp, Unknown
  misc_feature (1)..( 11): Result.004 file - promoters50/1009136
taattatgtta

SEQ ID NO: 152551 - DNA, 11 bp, Unknown
  misc_feature (1)..( 11): Result.004 file - promoters50/1009136
ggtatataatt

SEQ ID NO: 152552 - DNA, 11 bp, Unknown
  misc_feature (1)..( 11): Result.004 file - promoters50/1009136
aaaaaataatt

SEQ ID NO: 152553 - DNA, 11 bp, Unknown
  misc_feature (1)..( 11): Result.004 file - promoters50/1009136
taaatacaatt

SEQ ID NO: 152554 - DNA, 13 bp, Unknown
  misc_feature (1)..( 13): Result.004 file - promoters50/1009136
ccaaattagacat

SEQ ID NO: 152555 - DNA, 13 bp, Unknown
  misc_feature (1)..( 13): Result.004 file - promoters50/1009136
aaaaattatagga

SEQ ID NO: 152556 - DNA, 13 bp, Unknown
  misc_feature (1)..( 13): Result.004 file - promoters50/1009136
ccacattagttgt

SEQ ID NO: 152557 - DNA, 13 bp, Unknown
  misc_feature (1)..( 13): Result.004 file - promoters50/1009136
gaaaaatatatca

SEQ ID NO: 152558 - DNA, 13 bp, Unknown
  misc_feature (1)..( 13): Result.004 file - promoters50/1009136
cagaaataaatca

SEQ ID NO: 152559 - DNA, 13 bp, Unknown
  misc_feature (1)..( 13): Result.004 file - promoters50/1009136
ctaaaataactca

SEQ ID NO: 152560 - DNA, 14 bp, Unknown
  misc_feature (1)..( 14): Result.004 file - promoters50/1009136
catctatatatatc

SEQ ID NO: 152561 - DNA, 14 bp, Unknown
  misc_feature (1)..( 14): Result.004 file - promoters50/1009136
tccttatttatacc

SEQ ID NO: 152562 - DNA, 14 bp, Unknown
  misc_feature (1)..( 14): Result.004 file - promoters50/1009136
tcagtataaataag

SEQ ID NO: 152563 - DNA, 14 bp, Unknown
  misc_feature (1)..( 14): Result.004 file - promoters50/1009136
catttatatgtatc

SEQ ID NO: 152564 - DNA, 14 bp, Unknown
  misc_feature (1)..( 14): Result.004 file - promoters50/1009136
tacttatattaatt

SEQ ID NO: 152565 - DNA, 14 bp, Unknown
  misc_feature (1)..( 14): Result.004 file - promoters50/1009142
cccctataaaagga

SEQ ID NO: 152566 - DNA, 13 bp, Unknown
  misc_feature (1)..( 13): Result.004 file - promoters50/1009142
ggaagtgaatggc

SEQ ID NO: 152567 - DNA, 13 bp, Unknown
  misc_feature (1)..( 13): Result.004 file - promoters50/1009142
aaaagtaaatcat

SEQ ID NO: 152568 - DNA, 13 bp, Unknown
  misc_feature (1)..( 13): Result.004 file - promoters50/1009142
ggcagtgaacggc

SEQ ID NO: 152569 - DNA, 13 bp, Unknown
  misc_feature (1)..( 13): Result.004 file - promoters50/1009142
taaagtgaagtca

SEQ ID NO: 152570 - DNA, 13 bp, Unknown
  misc_feature (1)..( 13): Result.004 file - promoters50/1009142
aaaagagaagaaa

SEQ ID NO: 152571 - DNA, 13 bp, Unknown
  misc_feature (1)..( 13): Result.004 file - promoters50/1009142
aaaagtattagtg

SEQ ID NO: 152572 - DNA, 13 bp, Unknown
  misc_feature (1)..( 13): Result.004 file - promoters50/1009142
aaaagagagtttg

SEQ ID NO: 152573 - DNA, 17 bp, Unknown
  misc_feature (1)..( 17): Result.004 file - promoters50/1009142
ataatgctaagacgagt

SEQ ID NO: 152574 - DNA, 17 bp, Unknown
  misc_feature (1)..( 17): Result.004 file - promoters50/1009142
tgtatggtaagacaaaa

SEQ ID NO: 152575 - DNA, 17 bp, Unknown
  misc_feature (1)..( 17): Result.004 file - promoters50/1009142
ataccaagaagaaaaaa

SEQ ID NO: 152576 - DNA, 17 bp, Unknown
  misc_feature (1)..( 17): Result.004 file - promoters50/1009142
tatatgtaaacaaaggt

SEQ ID NO: 152577 - DNA, 17 bp, Unknown
  misc_feature (1)..( 17): Result.004 file - promoters50/1009142
tgtatggttggttcatt

SEQ ID NO: 152578 - DNA, 17 bp, Unknown
  misc_feature (1)..( 17): Result.004 file - promoters50/1009142
agtttccaacgaagccg

SEQ ID NO: 152579 - DNA, 14 bp, Unknown
  misc_feature (1)..( 14): Result.004 file - promoters50/1009142
atcgttttttgtgc

SEQ ID NO: 152580 - DNA, 14 bp, Unknown
  misc_feature (1)..( 14): Result.004 file - promoters50/1009142
gtatctttttgtgc

SEQ ID NO: 152581 - DNA, 14 bp, Unknown
  misc_feature (1)..( 14): Result.004 file - promoters50/1009142
actgaattttgttt

SEQ ID NO: 152582 - DNA, 14 bp, Unknown
  misc_feature (1)..( 14): Result.004 file - promoters50/1009142
gctaaattatgtta

SEQ ID NO: 152583 - DNA, 14 bp, Unknown
  misc_feature (1)..( 14): Result.004 file - promoters50/1009142
tcacctttttaaat

SEQ ID NO: 152584 - DNA, 14 bp, Unknown
  misc_feature (1)..( 14): Result.004 file - promoters50/1009142
atagaaatatgttt

SEQ ID NO: 152585 - DNA, 14 bp, Unknown
  misc_feature (1)..( 14): Result.004 file - promoters50/1009169
gctaagttatcaaa

SEQ ID NO: 152586 - DNA, 7 bp, Unknown
  misc_feature (1)..( 7): Result.004 file - promoters50/1009169
gtataaa

SEQ ID NO: 152587 - DNA, 7 bp, Unknown
  misc_feature (1)..( 7): Result.004 file - promoters50/1009169
atataaa

SEQ ID NO: 152588 - DNA, 7 bp, Unknown
  misc_feature (1)..( 7): Result.004 file - promoters50/1009207
atatacc

SEQ ID NO: 152589 - DNA, 7 bp, Unknown
  misc_feature (1)..( 7): Result.004 file - promoters50/1009207
gatcaat

SEQ ID NO: 152590 - DNA, 7 bp, Unknown
  misc_feature (1)..( 7): Result.004 file - promoters50/1009207
tatcaat

SEQ ID NO: 152591 - DNA, 7 bp, Unknown
  misc_feature (1)..( 7): Result.004 file - promoters50/1009207
tataaat

SEQ ID NO: 152592 - DNA, 10 bp, Unknown
  misc_feature (1)..( 10): Result.004 file - promoters50/1009207
taaaacacca

SEQ ID NO: 152593 - DNA, 10 bp, Unknown
  misc_feature (1)..( 10): Result.004 file - promoters50/1009207
taaaacatta

SEQ ID NO: 152594 - DNA, 10 bp, Unknown
  misc_feature (1)..( 10): Result.004 file - promoters50/1009207
gaaaaaatta

SEQ ID NO: 152595 - DNA, 10 bp, Unknown
  misc_feature (1)..( 10): Result.004 file - promoters50/1009207
caaaatgata

SEQ ID NO: 152596 - DNA, 10 bp, Unknown
  misc_feature (1)..( 10): Result.004 file - promoters50/1009207
aaaaattata

SEQ ID NO: 152597 - DNA, 11 bp, Unknown
  misc_feature (1)..( 11): Result.004 file - promoters50/1009211
aaaacattact

SEQ ID NO: 152598 - DNA, 10 bp, Unknown
  misc_feature (1)..( 10): Result.004 file - promoters50/1009211
tactttaata

SEQ ID NO: 152599 - DNA, 10 bp, Unknown
  misc_feature (1)..( 10): Result.004 file - promoters50/1009211
tactataaat

SEQ ID NO: 152600 - DNA, 10 bp, Unknown
  misc_feature (1)..( 10): Result.004 file - promoters50/1009211
cactataaaa

SEQ ID NO: 152601 - DNA, 10 bp, Unknown
  misc_feature (1)..( 10): Result.004 file - promoters50/1009211
gccttaaata

SEQ ID NO: 152602 - DNA, 11 bp, Unknown
  misc_feature (1)..( 11): Result.004 file - promoters50/1009211
atttatgaatc

SEQ ID NO: 152603 - DNA, 11 bp, Unknown
  misc_feature (1)..( 11): Result.004 file - promoters50/1009211
ctttataaaac

SEQ ID NO: 152604 - DNA, 13 bp, Unknown
  misc_feature (1)..( 13): Result.004 file - promoters50/1009211
cttcagattcagg

SEQ ID NO: 152605 - DNA, 13 bp, Unknown
  misc_feature (1)..( 13): Result.004 file - promoters50/1009211
caaaagaatcagt

SEQ ID NO: 152606 - DNA, 13 bp, Unknown
  misc_feature (1)..( 13): Result.004 file - promoters50/1009211
aaactgaaccagt

SEQ ID NO: 152607 - DNA, 13 bp, Unknown
  misc_feature (1)..( 13): Result.004 file - promoters50/1009211
tcaaataattctc

SEQ ID NO: 152608 - DNA, 13 bp, Unknown
  misc_feature (1)..( 13): Result.004 file - promoters50/1009211
tcaattaatcttt

SEQ ID NO: 152609 - DNA, 13 bp, Unknown
  misc_feature (1)..( 13): Result.004 file - promoters50/1009258
caaaacaattcaa

SEQ ID NO: 152610 - DNA, 13 bp, Unknown
  misc_feature (1)..( 13): Result.004 file - promoters50/1009258
tgattattctctc

SEQ ID NO: 152611 - DNA, 13 bp, Unknown
  misc_feature (1)..( 13): Result.004 file - promoters50/1009258
tgtgtcgtctctc

SEQ ID NO: 152612 - DNA, 13 bp, Unknown
  misc_feature (1)..( 13): Result.004 file - promoters50/1009276
tgataattctcta

SEQ ID NO: 152613 - DNA, 8 bp, Unknown
  misc_feature (1)..( 8): Result.004 file - promoters50/1009276
caaaaata

SEQ ID NO: 152614 - DNA, 8 bp, Unknown
  misc_feature (1)..( 8): Result.004 file - promoters50/1009276
caataatt

SEQ ID NO: 152615 - DNA, 8 bp, Unknown
  misc_feature (1)..( 8): Result.004 file - promoters50/1009276
aaaagata

SEQ ID NO: 152616 - DNA, 9 bp, Unknown
  misc_feature (1)..( 9): Result.004 file - promoters50/1009276
atttacaca

SEQ ID NO: 152617 - DNA, 9 bp, Unknown
  misc_feature (1)..( 9): Result.004 file - promoters50/1009276
atttaccaa

SEQ ID NO: 152618 - DNA, 9 bp, Unknown
  misc_feature (1)..( 9): Result.004 file - promoters50/1009276
cttttccaa

SEQ ID NO: 152619 - DNA, 7 bp, Unknown
  misc_feature (1)..( 7): Result.004 file - promoters50/1009276
ttcaaat

SEQ ID NO: 152620 - DNA, 7 bp, Unknown
  misc_feature (1)..( 7): Result.004 file - promoters50/1009276
ttcaaaa

SEQ ID NO: 152621 - DNA, 7 bp, Unknown
  misc_feature (1)..( 7): Result.004 file - promoters50/1009276
gtcaaaa

SEQ ID NO: 152622 - DNA, 9 bp, Unknown
  misc_feature (1)..( 9): Result.004 file - promoters50/1009276
aaatttgac

SEQ ID NO: 152623 - DNA, 9 bp, Unknown
  misc_feature (1)..( 9): Result.004 file - promoters50/1009276
aaaattgac

SEQ ID NO: 152624 - DNA, 9 bp, Unknown
  misc_feature (1)..( 9): Result.004 file - promoters50/1009335
taaattgat

SEQ ID NO: 152625 - DNA, 9 bp, Unknown
  misc_feature (1)..( 9): Result.004 file - promoters50/1009335
tatgattct

SEQ ID NO: 152626 - DNA, 9 bp, Unknown
  misc_feature (1)..( 9): Result.004 file - promoters50/1009335
tatgaatct

SEQ ID NO: 152627 - DNA, 9 bp, Unknown
  misc_feature (1)..( 9): Result.004 file - promoters50/1009335
gatgattgt

SEQ ID NO: 152628 - DNA, 11 bp, Unknown
  misc_feature (1)..( 11): Result.004 file - promoters50/1009335
acctttaacca

SEQ ID NO: 152629 - DNA, 11 bp, Unknown
  misc_feature (1)..( 11): Result.004 file - promoters50/1009335
acctttgacca

SEQ ID NO: 152630 - DNA, 11 bp, Unknown
  misc_feature (1)..( 11): Result.004 file - promoters50/1009335
cacttcaactt

SEQ ID NO: 152631 - DNA, 11 bp, Unknown
  misc_feature (1)..( 11): Result.004 file - promoters50/1009335
tctgttgaccg

SEQ ID NO: 152632 - DNA, 8 bp, Unknown
  misc_feature (1)..( 8): Result.004 file - promoters50/1009335
agtaaatg

SEQ ID NO: 152633 - DNA, 8 bp, Unknown
  misc_feature (1)..( 8): Result.004 file - promoters50/1009335
attaaatg

SEQ ID NO: 152634 - DNA, 8 bp, Unknown
  misc_feature (1)..( 8): Result.004 file - promoters50/1009335
agtaaatc

SEQ ID NO: 152635 - DNA, 10 bp, Unknown
  misc_feature (1)..( 10): Result.004 file - promoters50/1009335
tataggttct

SEQ ID NO: 152636 - DNA, 10 bp, Unknown
  misc_feature (1)..( 10): Result.004 file - promoters50/1009335
tataagttaa

SEQ ID NO: 152637 - DNA, 10 bp, Unknown
  misc_feature (1)..( 10): Result.004 file - promoters50/1009335
tattagttaa

SEQ ID NO: 152638 - DNA, 12 bp, Unknown
  misc_feature (1)..( 12): Result.004 file - promoters50/1009335
cttcttagagga

SEQ ID NO: 152639 - DNA, 12 bp, Unknown
  misc_feature (1)..( 12): Result.004 file - promoters50/1009335
cttattagttaa

SEQ ID NO: 152640 - DNA, 12 bp, Unknown
  misc_feature (1)..( 12): Result.004 file - promoters50/1009354
aatataagttaa

SEQ ID NO: 152641 - DNA, 7 bp, Unknown
  misc_feature (1)..( 7): Result.004 file - promoters50/1009354
gattcta

SEQ ID NO: 152642 - DNA, 7 bp, Unknown
  misc_feature (1)..( 7): Result.004 file - promoters50/1009354
gattctt

SEQ ID NO: 152643 - DNA, 7 bp, Unknown
  misc_feature (1)..( 7): Result.004 file - promoters50/1009354
gatactt

SEQ ID NO: 152644 - DNA, 8 bp, Unknown
  misc_feature (1)..( 8): Result.004 file - promoters50/1009354
taagaaat

SEQ ID NO: 152645 - DNA, 8 bp, Unknown
  misc_feature (1)..( 8): Result.004 file - promoters50/1009354
taagaact

SEQ ID NO: 152646 - DNA, 8 bp, Unknown
  misc_feature (1)..( 8): Result.004 file - promoters50/1009426
gaagaact

SEQ ID NO: 152647 - DNA, 9 bp, Unknown
  misc_feature (1)..( 9): Result.004 file - promoters50/1009426
ctattatta

SEQ ID NO: 152648 - DNA, 9 bp, Unknown
  misc_feature (1)..( 9): Result.004 file - promoters50/1009426
ctattattt

SEQ ID NO: 152649 - DNA, 9 bp, Unknown
  misc_feature (1)..( 9): Result.004 file - promoters50/1009426
ttattgtta

SEQ ID NO: 152650 - DNA, 7 bp, Unknown
  misc_feature (1)..( 7): Result.004 file - promoters50/1009426
tctcttg

SEQ ID NO: 152651 - DNA, 7 bp, Unknown
  misc_feature (1)..( 7): Result.004 file - promoters50/1009426
tctcttg

SEQ ID NO: 152652 - DNA, 7 bp, Unknown
  misc_feature (1)..( 7): Result.004 file - promoters50/1009426
tcttttg

SEQ ID NO: 152653 - DNA, 10 bp, Unknown
  misc_feature (1)..( 10): Result.004 file - promoters50/1009426
tttctatata

SEQ ID NO: 152654 - DNA, 10 bp, Unknown
  misc_feature (1)..( 10): Result.004 file - promoters50/1009426
cttctatata

SEQ ID NO: 152655 - DNA, 10 bp, Unknown
  misc_feature (1)..( 10): Result.004 file - promoters50/1009430
tttctatata

SEQ ID NO: 152656 - DNA, 10 bp, Unknown
  misc_feature (1)..( 10): Result.004 file - promoters50/1009430
gataatttta

SEQ ID NO: 152657 - DNA, 10 bp, Unknown
  misc_feature (1)..( 10): Result.004 file - promoters50/1009430
aatatttttc

SEQ ID NO: 152658 - DNA, 10 bp, Unknown
  misc_feature (1)..( 10): Result.004 file - promoters50/1009430
aatattttat

SEQ ID NO: 152659 - DNA, 10 bp, Unknown
  misc_feature (1)..( 10): Result.004 file - promoters50/1009430
aatatgttaa

SEQ ID NO: 152660 - DNA, 10 bp, Unknown
  misc_feature (1)..( 10): Result.004 file - promoters50/1009430
attttatata

SEQ ID NO: 152661 - DNA, 10 bp, Unknown
  misc_feature (1)..( 10): Result.004 file - promoters50/1009430
ctcttaaata

SEQ ID NO: 152662 - DNA, 10 bp, Unknown
  misc_feature (1)..( 10): Result.004 file - promoters50/1009430
ctctgaaaca

SEQ ID NO: 152663 - DNA, 10 bp, Unknown
  misc_feature (1)..( 10): Result.004 file - promoters50/1009430
agcttgaatc

SEQ ID NO: 152664 - DNA, 10 bp, Unknown
  misc_feature (1)..( 10): Result.004 file - promoters50/1009430
agacaatttt

SEQ ID NO: 152665 - DNA, 10 bp, Unknown
  misc_feature (1)..( 10): Result.004 file - promoters50/1009430
agaaaatttc

SEQ ID NO: 152666 - DNA, 10 bp, Unknown
  misc_feature (1)..( 10): Result.004 file - promoters50/1009430
tcaaagttct

SEQ ID NO: 152667 - DNA, 10 bp, Unknown
  misc_feature (1)..( 10): Result.004 file - promoters50/1009430
aaaaaattcc

SEQ ID NO: 152668 - DNA, 12 bp, Unknown
  misc_feature (1)..( 12): Result.004 file - promoters50/1009430
taatagttatgt

SEQ ID NO: 152669 - DNA, 12 bp, Unknown
  misc_feature (1)..( 12): Result.004 file - promoters50/1009430
ttataattatgt

SEQ ID NO: 152670 - DNA, 12 bp, Unknown
  misc_feature (1)..( 12): Result.004 file - promoters50/1009430
aaataattatac

SEQ ID NO: 152671 - DNA, 12 bp, Unknown
  misc_feature (1)..( 12): Result.004 file - promoters50/1009437
ttaaaatctcta

SEQ ID NO: 152672 - DNA, 7 bp, Unknown
  misc_feature (1)..( 7): Result.004 file - promoters50/1009437
ctagaag

SEQ ID NO: 152673 - DNA, 7 bp, Unknown
  misc_feature (1)..( 7): Result.004 file - promoters50/1009437
ctagaat

SEQ ID NO: 152674 - DNA, 7 bp, Unknown
  misc_feature (1)..( 7): Result.004 file - promoters50/1009437
ctataat

SEQ ID NO: 152675 - DNA, 8 bp, Unknown
  misc_feature (1)..( 8): Result.004 file - promoters50/1009437
gttggttt

SEQ ID NO: 152676 - DNA, 8 bp, Unknown
  misc_feature (1)..( 8): Result.004 file - promoters50/1009437
tttgattt

SEQ ID NO: 152677 - DNA, 8 bp, Unknown
  misc_feature (1)..( 8): Result.004 file - promoters50/1009437
ttttattt

SEQ ID NO: 152678 - DNA, 7 bp, Unknown
  misc_feature (1)..( 7): Result.004 file - promoters50/1009437
gtttttt

SEQ ID NO: 152679 - DNA, 7 bp, Unknown
  misc_feature (1)..( 7): Result.004 file - promoters50/1009437
ctttttt

SEQ ID NO: 152680 - DNA, 7 bp, Unknown
  misc_feature (1)..( 7): Result.004 file - promoters50/1009437
cttcttt

SEQ ID NO: 152681 - DNA, 7 bp, Unknown
  misc_feature (1)..( 7): Result.004 file - promoters50/1009437
tttctta

SEQ ID NO: 152682 - DNA, 7 bp, Unknown
  misc_feature (1)..( 7): Result.004 file - promoters50/1009437
tttcttt

SEQ ID NO: 152683 - DNA, 7 bp, Unknown
  misc_feature (1)..( 7): Result.004 file - promoters50/1009520
cttcttt

SEQ ID NO: 152684 - DNA, 10 bp, Unknown
  misc_feature (1)..( 10): Result.004 file - promoters50/1009520
aaatatataa

SEQ ID NO: 152685 - DNA, 10 bp, Unknown
  misc_feature (1)..( 10): Result.004 file - promoters50/1009520
gcatatatta

SEQ ID NO: 152686 - DNA, 10 bp, Unknown
  misc_feature (1)..( 10): Result.004 file - promoters50/1009520
taatataaag

SEQ ID NO: 152687 - DNA, 10 bp, Unknown
  misc_feature (1)..( 10): Result.004 file - promoters50/1009520
gtatatatat

SEQ ID NO: 152688 - DNA, 10 bp, Unknown
  misc_feature (1)..( 10): Result.004 file - promoters50/1009520
tcttatataa

SEQ ID NO: 152689 - DNA, 10 bp, Unknown
  misc_feature (1)..( 10): Result.004 file - promoters50/1009528
tcttctattt

SEQ ID NO: 152690 - DNA, 9 bp, Unknown
  misc_feature (1)..( 9): Result.004 file - promoters50/1009528
gtttatttg

SEQ ID NO: 152691 - DNA, 9 bp, Unknown
  misc_feature (1)..( 9): Result.004 file - promoters50/1009528
gtttatccc

SEQ ID NO: 152692 - DNA, 9 bp, Unknown
  misc_feature (1)..( 9): Result.004 file - promoters50/1009528
ctttaaccc

SEQ ID NO: 152693 - DNA, 6 bp, Unknown
  misc_feature (1)..( 6): Result.004 file - promoters50/1009528
acatac

SEQ ID NO: 152694 - DNA, 6 bp, Unknown
  misc_feature (1)..( 6): Result.004 file - promoters50/1009528
acatac

SEQ ID NO: 152695 - DNA, 6 bp, Unknown
  misc_feature (1)..( 6): Result.004 file - promoters50/1009616
acatac

SEQ ID NO: 152696 - DNA, 13 bp, Unknown
  misc_feature (1)..( 13): Result.004 file - promoters50/1009616
aaagtataaacac

SEQ ID NO: 152697 - DNA, 13 bp, Unknown
  misc_feature (1)..( 13): Result.004 file - promoters50/1009616
aaagtctaataca

SEQ ID NO: 152698 - DNA, 14 bp, Unknown
  misc_feature (1)..( 14): Result.004 file - promoters50/1009616
tatatattaacaca

SEQ ID NO: 152699 - DNA, 14 bp, Unknown
  misc_feature (1)..( 14): Result.004 file - promoters50/1009616
aaaatctacgcata

SEQ ID NO: 152700 - DNA, 14 bp, Unknown
  misc_feature (1)..( 14): Result.004 file - promoters50/1009616
caaatatacaaaaa

SEQ ID NO: 152701 - DNA, 14 bp, Unknown
  misc_feature (1)..( 14): Result.004 file - promoters50/1009616
caaatatgtttctt

SEQ ID NO: 152702 - DNA, 20 bp, Unknown
  misc_feature (1)..( 20): Result.004 file - promoters50/1009616
acactaaaatagtttttttt

SEQ ID NO: 152703 - DNA, 20 bp, Unknown
  misc_feature (1)..( 20): Result.004 file - promoters50/1009616
acacttaaaaagtctttttt

SEQ ID NO: 152704 - DNA, 20 bp, Unknown
  misc_feature (1)..( 20): Result.004 file - promoters50/1009616
tgagatcaaaagtgaaaaca

SEQ ID NO: 152705 - DNA, 20 bp, Unknown
  misc_feature (1)..( 20): Result.004 file - promoters50/1009616
aaaattaaaaagaatacaaa

SEQ ID NO: 152706 - DNA, 20 bp, Unknown
  misc_feature (1)..( 20): Result.004 file - promoters50/1009616
aagcccatattatcttttaa

SEQ ID NO: 152707 - DNA, 20 bp, Unknown
  misc_feature (1)..( 20): Result.004 file - promoters50/1009616
atatataaaaatttttctgt

SEQ ID NO: 152708 - DNA, 20 bp, Unknown
  misc_feature (1)..( 20): Result.004 file - promoters50/1009616
caaccaaaataaaccgaggt

SEQ ID NO: 152709 - DNA, 10 bp, Unknown
  misc_feature (1)..( 10): Result.004 file - promoters50/1009616
ttaaacaaaa

SEQ ID NO: 152710 - DNA, 10 bp, Unknown
  misc_feature (1)..( 10): Result.004 file - promoters50/1009616
ctaaacaaaa

SEQ ID NO: 152711 - DNA, 10 bp, Unknown
  misc_feature (1)..( 10): Result.004 file - promoters50/1009616
gtaaccaaat

SEQ ID NO: 152712 - DNA, 10 bp, Unknown
  misc_feature (1)..( 10): Result.004 file - promoters50/1009616
ctagacagag

SEQ ID NO: 152713 - DNA, 10 bp, Unknown
  misc_feature (1)..( 10): Result.004 file - promoters50/1009616
atagacacaa

SEQ ID NO: 152714 - DNA, 10 bp, Unknown
  misc_feature (1)..( 10): Result.004 file - promoters50/1009616
tcaaacacta

SEQ ID NO: 152715 - DNA, 11 bp, Unknown
  misc_feature (1)..( 11): Result.004 file - promoters50/1009616
ttaatattttt

SEQ ID NO: 152716 - DNA, 11 bp, Unknown
  misc_feature (1)..( 11): Result.004 file - promoters50/1009616
ttactattttt

SEQ ID NO: 152717 - DNA, 11 bp, Unknown
  misc_feature (1)..( 11): Result.004 file - promoters50/1009616
gtaataattta

SEQ ID NO: 152718 - DNA, 11 bp, Unknown
  misc_feature (1)..( 11): Result.004 file - promoters50/1009616
ttaatgtttgc

SEQ ID NO: 152719 - DNA, 11 bp, Unknown
  misc_feature (1)..( 11): Result.004 file - promoters50/1009616
ctaataacaac

SEQ ID NO: 152720 - DNA, 11 bp, Unknown
  misc_feature (1)..( 11): Result.004 file - promoters50/1009654
gtaataacaga

SEQ ID NO: 152721 - DNA, 8 bp, Unknown
  misc_feature (1)..( 8): Result.004 file - promoters50/1009654
actaaatc

SEQ ID NO: 152722 - DNA, 8 bp, Unknown
  misc_feature (1)..( 8): Result.004 file - promoters50/1009654
aataaatc

SEQ ID NO: 152723 - DNA, 8 bp, Unknown
  misc_feature (1)..( 8): Result.004 file - promoters50/1009654
aataaata

SEQ ID NO: 152724 - DNA, 7 bp, Unknown
  misc_feature (1)..( 7): Result.004 file - promoters50/1009654
aactaag

SEQ ID NO: 152725 - DNA, 7 bp, Unknown
  misc_feature (1)..( 7): Result.004 file - promoters50/1009654
aactaaa

SEQ ID NO: 152726 - DNA, 7 bp, Unknown
  misc_feature (1)..( 7): Result.004 file - promoters50/1009654
gactaaa

SEQ ID NO: 152727 - DNA, 7 bp, Unknown
  misc_feature (1)..( 7): Result.004 file - promoters50/1009654
taaaaga

SEQ ID NO: 152728 - DNA, 7 bp, Unknown
  misc_feature (1)..( 7): Result.004 file - promoters50/1009654
taaaagg

SEQ ID NO: 152729 - DNA, 7 bp, Unknown
  misc_feature (1)..( 7): Result.004 file - promoters50/1009654
aaaaaga

SEQ ID NO: 152730 - DNA, 9 bp, Unknown
  misc_feature (1)..( 9): Result.004 file - promoters50/1009654
aaaaaagaa

SEQ ID NO: 152731 - DNA, 9 bp, Unknown
  misc_feature (1)..( 9): Result.004 file - promoters50/1009654
aaaaaaaga

SEQ ID NO: 152732 - DNA, 10 bp, Unknown
  misc_feature (1)..( 10): Result.004 file - promoters50/1009654
aaagaaagaa

SEQ ID NO: 152733 - DNA, 8 bp, Unknown
  misc_feature (1)..( 8): Result.004 file - promoters50/1009654
atttgaat

SEQ ID NO: 152734 - DNA, 8 bp, Unknown
  misc_feature (1)..( 8): Result.004 file - promoters50/1009654
atttaaat

SEQ ID NO: 152735 - DNA, 8 bp, Unknown
  misc_feature (1)..( 8): Result.004 file - promoters50/1009654
atttgaat

SEQ ID NO: 152736 - DNA, 6 bp, Unknown
  misc_feature (1)..( 6): Result.004 file - promoters50/1009654
aaattt

SEQ ID NO: 152737 - DNA, 6 bp, Unknown
  misc_feature (1)..( 6): Result.004 file - promoters50/1009654
aaattt

SEQ ID NO: 152738 - DNA, 6 bp, Unknown
  misc_feature (1)..( 6): Result.004 file - promoters50/1009654
aaattt

SEQ ID NO: 152739 - DNA, 8 bp, Unknown
  misc_feature (1)..( 8): Result.004 file - promoters50/1009654
ggactaat

SEQ ID NO: 152740 - DNA, 8 bp, Unknown
  misc_feature (1)..( 8): Result.004 file - promoters50/1009654
ggactaaa

SEQ ID NO: 152741 - DNA, 8 bp, Unknown
  misc_feature (1)..( 8): Result.004 file - promoters50/1009654
caactaaa

SEQ ID NO: 152742 - DNA, 7 bp, Unknown
  misc_feature (1)..( 7): Result.004 file - promoters50/1009654
ataaaag

SEQ ID NO: 152743 - DNA, 7 bp, Unknown
  misc_feature (1)..( 7): Result.004 file - promoters50/1009654
atataag

SEQ ID NO: 152744 - DNA, 7 bp, Unknown
  misc_feature (1)..( 7): Result.004 file - promoters50/1009686
ataaaag

SEQ ID NO: 152745 - DNA, 8 bp, Unknown
  misc_feature (1)..( 8): Result.004 file - promoters50/1009686
attcagtt

SEQ ID NO: 152746 - DNA, 8 bp, Unknown
  misc_feature (1)..( 8): Result.004 file - promoters50/1009686
attaagtc

SEQ ID NO: 152747 - DNA, 8 bp, Unknown
  misc_feature (1)..( 8): Result.004 file - promoters50/1009693
gttaagtc

SEQ ID NO: 152748 - DNA, 14 bp, Unknown
  misc_feature (1)..( 14): Result.004 file - promoters50/1009693
atttgaaaaaacaa

SEQ ID NO: 152749 - DNA, 14 bp, Unknown
  misc_feature (1)..( 14): Result.004 file - promoters50/1009693
acaccaaaaaacaa

SEQ ID NO: 152750 - DNA, 14 bp, Unknown
  misc_feature (1)..( 14): Result.004 file - promoters50/1009693
tcatatcaaaccaa

SEQ ID NO: 152751 - DNA, 14 bp, Unknown
  misc_feature (1)..( 14): Result.004 file - promoters50/1009693
ttttcaaaaaagtt

SEQ ID NO: 152752 - DNA, 14 bp, Unknown
  misc_feature (1)..( 14): Result.004 file - promoters50/1009693
atatgagaaaatta

SEQ ID NO: 152753 - DNA, 14 bp, Unknown
  misc_feature (1)..( 14): Result.004 file - promoters50/1009693
ttttccaaattgta

SEQ ID NO: 152754 - DNA, 14 bp, Unknown
  misc_feature (1)..( 14): Result.004 file - promoters50/1009693
cgtaaataaatagt

SEQ ID NO: 152755 - DNA, 12 bp, Unknown
  misc_feature (1)..( 12): Result.004 file - promoters50/1009693
aaagtcatattt

SEQ ID NO: 152756 - DNA, 12 bp, Unknown
  misc_feature (1)..( 12): Result.004 file - promoters50/1009693
caagtaatatca

SEQ ID NO: 152757 - DNA, 12 bp, Unknown
  misc_feature (1)..( 12): Result.004 file - promoters50/1009693
taagacattttt

SEQ ID NO: 152758 - DNA, 12 bp, Unknown
  misc_feature (1)..( 12): Result.004 file - promoters50/1009693
tttttcatatta

SEQ ID NO: 152759 - DNA, 12 bp, Unknown
  misc_feature (1)..( 12): Result.004 file - promoters50/1009693
caaaaaatctca

SEQ ID NO: 152760 - DNA, 12 bp, Unknown
  misc_feature (1)..( 12): Result.004 file - promoters50/1009693
caagaaatcaga

SEQ ID NO: 152761 - DNA, 12 bp, Unknown
  misc_feature (1)..( 12): Result.004 file - promoters50/1009693
caagaaaatcct

SEQ ID NO: 152762 - DNA, 8 bp, Unknown
  misc_feature (1)..( 8): Result.004 file - promoters50/1009693
aaatttga

SEQ ID NO: 152763 - DNA, 8 bp, Unknown
  misc_feature (1)..( 8): Result.004 file - promoters50/1009693
gaatttgt

SEQ ID NO: 152764 - DNA, 8 bp, Unknown
  misc_feature (1)..( 8): Result.004 file - promoters50/1009693
taattttt

SEQ ID NO: 152765 - DNA, 8 bp, Unknown
  misc_feature (1)..( 8): Result.004 file - promoters50/1009693
aaagttgt

SEQ ID NO: 152766 - DNA, 9 bp, Unknown
  misc_feature (1)..( 9): Result.004 file - promoters50/1009693
aaatgtttt

SEQ ID NO: 152767 - DNA, 9 bp, Unknown
  misc_feature (1)..( 9): Result.004 file - promoters50/1009693
aaatgttgg

SEQ ID NO: 152768 - DNA, 15 bp, Unknown
  misc_feature (1)..( 15): Result.004 file - promoters50/1009693
aattaaatgttttat

SEQ ID NO: 152769 - DNA, 15 bp, Unknown
  misc_feature (1)..( 15): Result.004 file - promoters50/1009693
gatttgatgtcttat

SEQ ID NO: 152770 - DNA, 15 bp, Unknown
  misc_feature (1)..( 15): Result.004 file - promoters50/1009693
aattaaatatttata

SEQ ID NO: 152771 - DNA, 15 bp, Unknown
  misc_feature (1)..( 15): Result.004 file - promoters50/1009693
tattaaatataaaat

SEQ ID NO: 152772 - DNA, 15 bp, Unknown
  misc_feature (1)..( 15): Result.004 file - promoters50/1009693
gtgaaaataatataa

SEQ ID NO: 152773 - DNA, 15 bp, Unknown
  misc_feature (1)..( 15): Result.004 file - promoters50/1009693
agatccgtattaacc

SEQ ID NO: 152774 - DNA, 11 bp, Unknown
  misc_feature (1)..( 11): Result.004 file - promoters50/1009693
ctaaattttat

SEQ ID NO: 152775 - DNA, 11 bp, Unknown
  misc_feature (1)..( 11): Result.004 file - promoters50/1009693
ataaattattt

SEQ ID NO: 152776 - DNA, 11 bp, Unknown
  misc_feature (1)..( 11): Result.004 file - promoters50/1009693
ttaaattatta

SEQ ID NO: 152777 - DNA, 11 bp, Unknown
  misc_feature (1)..( 11): Result.004 file - promoters50/1009693
atatatttgac

SEQ ID NO: 152778 - DNA, 11 bp, Unknown
  misc_feature (1)..( 11): Result.004 file - promoters50/1009693
taaaattagat

SEQ ID NO: 152779 - DNA, 11 bp, Unknown
  misc_feature (1)..( 11): Result.004 file - promoters50/1009693
tgaaatcattt

SEQ ID NO: 152780 - DNA, 11 bp, Unknown
  misc_feature (1)..( 11): Result.004 file - promoters50/1009693
aaaaaaactaa

SEQ ID NO: 152781 - DNA, 11 bp, Unknown
  misc_feature (1)..( 11): Result.004 file - promoters50/1009693
tgtgaaaataa

SEQ ID NO: 152782 - DNA, 11 bp, Unknown
  misc_feature (1)..( 11): Result.004 file - promoters50/1009693
caagaaaatcc

SEQ ID NO: 152783 - DNA, 11 bp, Unknown
  misc_feature (1)..( 11): Result.004 file - promoters50/1009693
aaacaaattaa

SEQ ID NO: 152784 - DNA, 11 bp, Unknown
  misc_feature (1)..( 11): Result.004 file - promoters50/1009693
tcaaaaaatct

SEQ ID NO: 152785 - DNA, 11 bp, Unknown
  misc_feature (1)..( 11): Result.004 file - promoters50/1009752
caagaaatcag

SEQ ID NO: 152786 - DNA, 7 bp, Unknown
  misc_feature (1)..( 7): Result.004 file - promoters50/1009752
taaaaat

SEQ ID NO: 152787 - DNA, 7 bp, Unknown
  misc_feature (1)..( 7): Result.004 file - promoters50/1009752
taacaat

SEQ ID NO: 152788 - DNA, 7 bp, Unknown
  misc_feature (1)..( 7): Result.004 file - promoters50/1009754
taacaac

SEQ ID NO: 152789 - DNA, 8 bp, Unknown
  misc_feature (1)..( 8): Result.004 file - promoters50/1009754
agataaat

SEQ ID NO: 152790 - DNA, 8 bp, Unknown
  misc_feature (1)..( 8): Result.004 file - promoters50/1009754
agataatt

SEQ ID NO: 152791 - DNA, 8 bp, Unknown
  misc_feature (1)..( 8): Result.004 file - promoters50/1009780
agacaatt

SEQ ID NO: 152792 - DNA, 11 bp, Unknown
  misc_feature (1)..( 11): Result.004 file - promoters50/1009780
tttttagaaaa

SEQ ID NO: 152793 - DNA, 11 bp, Unknown
  misc_feature (1)..( 11): Result.004 file - promoters50/1009780
ttttcagataa

SEQ ID NO: 152794 - DNA, 12 bp, Unknown
  misc_feature (1)..( 12): Result.004 file - promoters50/1009780
tttgttataaaa

SEQ ID NO: 152795 - DNA, 11 bp, Unknown
  misc_feature (1)..( 11): Result.004 file - promoters50/1009780
tgaaaaatgtt

SEQ ID NO: 152796 - DNA, 11 bp, Unknown
  misc_feature (1)..( 11): Result.004 file - promoters50/1009780
gataaaacgtt

SEQ ID NO: 152797 - DNA, 11 bp, Unknown
  misc_feature (1)..( 11): Result.004 file - promoters50/1009780
tgataaataat

SEQ ID NO: 152798 - DNA, 7 bp, Unknown
  misc_feature (1)..( 7): Result.004 file - promoters50/1009780
ttcaaat

SEQ ID NO: 152799 - DNA, 7 bp, Unknown
  misc_feature (1)..( 7): Result.004 file - promoters50/1009780
ttctaat

SEQ ID NO: 152800 - DNA, 7 bp, Unknown
  misc_feature (1)..( 7): Result.004 file - promoters50/1009822
ttttaaa

SEQ ID NO: 152801 - DNA, 7 bp, Unknown
  misc_feature (1)..( 7): Result.004 file - promoters50/1009822
cttttct

SEQ ID NO: 152802 - DNA, 7 bp, Unknown
  misc_feature (1)..( 7): Result.004 file - promoters50/1009822
cttctct

SEQ ID NO: 152803 - DNA, 7 bp, Unknown
  misc_feature (1)..( 7): Result.004 file - promoters50/1009822
cttctcc

SEQ ID NO: 152804 - DNA, 6 bp, Unknown
  misc_feature (1)..( 6): Result.004 file - promoters50/1009822
ttctca

SEQ ID NO: 152805 - DNA, 6 bp, Unknown
  misc_feature (1)..( 6): Result.004 file - promoters50/1009822
ttctca

SEQ ID NO: 152806 - DNA, 6 bp, Unknown
  misc_feature (1)..( 6): Result.004 file - promoters50/1009822
ttctca

SEQ ID NO: 152807 - DNA, 8 bp, Unknown
  misc_feature (1)..( 8): Result.004 file - promoters50/1009822
attctcca

SEQ ID NO: 152808 - DNA, 8 bp, Unknown
  misc_feature (1)..( 8): Result.004 file - promoters50/1009822
cttctcca

SEQ ID NO: 152809 - DNA, 8 bp, Unknown
  misc_feature (1)..( 8): Result.004 file - promoters50/1009854
cttctcta

SEQ ID NO: 152810 - DNA, 10 bp, Unknown
  misc_feature (1)..( 10): Result.004 file - promoters50/1009854
aaataaaaca

SEQ ID NO: 152811 - DNA, 10 bp, Unknown
  misc_feature (1)..( 10): Result.004 file - promoters50/1009854
aaagaaaaca

SEQ ID NO: 152812 - DNA, 10 bp, Unknown
  misc_feature (1)..( 10): Result.004 file - promoters50/1009854
aaagaaagaa

SEQ ID NO: 152813 - DNA, 10 bp, Unknown
  misc_feature (1)..( 10): Result.004 file - promoters50/1009854
tcataaaaaa

SEQ ID NO: 152814 - DNA, 10 bp, Unknown
  misc_feature (1)..( 10): Result.004 file - promoters50/1009854
gaagaaatga

SEQ ID NO: 152815 - DNA, 13 bp, Unknown
  misc_feature (1)..( 13): Result.004 file - promoters50/1009854
ttcattaacaaat

SEQ ID NO: 152816 - DNA, 13 bp, Unknown
  misc_feature (1)..( 13): Result.004 file - promoters50/1009854
aaaaagaaccaat

SEQ ID NO: 152817 - DNA, 13 bp, Unknown
  misc_feature (1)..( 13): Result.004 file - promoters50/1009854
attcataaaaaaa

SEQ ID NO: 152818 - DNA, 13 bp, Unknown
  misc_feature (1)..( 13): Result.004 file - promoters50/1009854
tgacagaaaaaag

SEQ ID NO: 152819 - DNA, 13 bp, Unknown
  misc_feature (1)..( 13): Result.004 file - promoters50/1009854
tgagagaagaaat

SEQ ID NO: 152820 - DNA, 11 bp, Unknown
  misc_feature (1)..( 11): Result.004 file - promoters50/1009854
aaaacatatct

SEQ ID NO: 152821 - DNA, 11 bp, Unknown
  misc_feature (1)..( 11): Result.004 file - promoters50/1009854
taaatatattt

SEQ ID NO: 152822 - DNA, 11 bp, Unknown
  misc_feature (1)..( 11): Result.004 file - promoters50/1009854
aaaaaatagtc

SEQ ID NO: 152823 - DNA, 11 bp, Unknown
  misc_feature (1)..( 11): Result.004 file - promoters50/1009854
aaaaaagaata

SEQ ID NO: 152824 - DNA, 11 bp, Unknown
  misc_feature (1)..( 11): Result.004 file - promoters50/1009861
ccaatagattt

SEQ ID NO: 152825 - DNA, 8 bp, Unknown
  misc_feature (1)..( 8): Result.004 file - promoters50/1009861
attataat

SEQ ID NO: 152826 - DNA, 8 bp, Unknown
  misc_feature (1)..( 8): Result.004 file - promoters50/1009861
attttaat

SEQ ID NO: 152827 - DNA, 8 bp, Unknown
  misc_feature (1)..( 8): Result.004 file - promoters50/1009861
tttataag

SEQ ID NO: 152828 - DNA, 8 bp, Unknown
  misc_feature (1)..( 8): Result.004 file - promoters50/1009861
cttttaat

SEQ ID NO: 152829 - DNA, 13 bp, Unknown
  misc_feature (1)..( 13): Result.004 file - promoters50/1009861
cattatacatatt

SEQ ID NO: 152830 - DNA, 13 bp, Unknown
  misc_feature (1)..( 13): Result.004 file - promoters50/1009861
agctatatatacc

SEQ ID NO: 152831 - DNA, 13 bp, Unknown
  misc_feature (1)..( 13): Result.004 file - promoters50/1009861
cattatacgttta

SEQ ID NO: 152832 - DNA, 13 bp, Unknown
  misc_feature (1)..( 13): Result.004 file - promoters50/1009861
cgttttacttatt

SEQ ID NO: 152833 - DNA, 10 bp, Unknown
  misc_feature (1)..( 10): Result.004 file - promoters50/1009861
acataattaa

SEQ ID NO: 152834 - DNA, 10 bp, Unknown
  misc_feature (1)..( 10): Result.004 file - promoters50/1009861
ttttaattaa

SEQ ID NO: 152835 - DNA, 10 bp, Unknown
  misc_feature (1)..( 10): Result.004 file - promoters50/1009861
gaataaataa

SEQ ID NO: 152836 - DNA, 10 bp, Unknown
  misc_feature (1)..( 10): Result.004 file - promoters50/1009861
ttttcattca

SEQ ID NO: 152837 - DNA, 10 bp, Unknown
  misc_feature (1)..( 10): Result.004 file - promoters50/1009861
gaaaaataag

SEQ ID NO: 152838 - DNA, 10 bp, Unknown
  misc_feature (1)..( 10): Result.004 file - promoters50/1009861
caaaaatagc

SEQ ID NO: 152839 - DNA, 10 bp, Unknown
  misc_feature (1)..( 10): Result.004 file - promoters50/1009861
taaaaaaaag

SEQ ID NO: 152840 - DNA, 10 bp, Unknown
  misc_feature (1)..( 10): Result.004 file - promoters50/1009875
taataaatcg

SEQ ID NO: 152841 - DNA, 9 bp, Unknown
  misc_feature (1)..( 9): Result.004 file - promoters50/1009875
tttcaaaaa

SEQ ID NO: 152842 - DNA, 9 bp, Unknown
  misc_feature (1)..( 9): Result.004 file - promoters50/1009875
tttcaagga

SEQ ID NO: 152843 - DNA, 9 bp, Unknown
  misc_feature (1)..( 9): Result.004 file - promoters50/1009875
ttttaaaaa

SEQ ID NO: 152844 - DNA, 9 bp, Unknown
  misc_feature (1)..( 9): Result.004 file - promoters50/1009875
attcaaact

SEQ ID NO: 152845 - DNA, 9 bp, Unknown
  misc_feature (1)..( 9): Result.004 file - promoters50/1009875
attcaacat

SEQ ID NO: 152846 - DNA, 9 bp, Unknown
  misc_feature (1)..( 9): Result.004 file - promoters50/1009875
tttcatcat

SEQ ID NO: 152847 - DNA, 13 bp, Unknown
  misc_feature (1)..( 13): Result.004 file - promoters50/1009875
aagcaagaaaaag

SEQ ID NO: 152848 - DNA, 13 bp, Unknown
  misc_feature (1)..( 13): Result.004 file - promoters50/1009875
aagcaataaaagt

SEQ ID NO: 152849 - DNA, 13 bp, Unknown
  misc_feature (1)..( 13): Result.004 file - promoters50/1009875
cgacaacaaaaag

SEQ ID NO: 152850 - DNA, 10 bp, Unknown
  misc_feature (1)..( 10): Result.004 file - promoters50/1009875
caagaaaaag

SEQ ID NO: 152851 - DNA, 10 bp, Unknown
  misc_feature (1)..( 10): Result.004 file - promoters50/1009875
cgtcaaaaag

SEQ ID NO: 152852 - DNA, 10 bp, Unknown
  misc_feature (1)..( 10): Result.004 file - promoters50/1009875
caacaaaaag

SEQ ID NO: 152853 - DNA, 10 bp, Unknown
  misc_feature (1)..( 10): Result.004 file - promoters50/1009875
agggtctaaa

SEQ ID NO: 152854 - DNA, 10 bp, Unknown
  misc_feature (1)..( 10): Result.004 file - promoters50/1009875
aacgtcaaaa

SEQ ID NO: 152855 - DNA, 10 bp, Unknown
  misc_feature (1)..( 10): Result.004 file - promoters50/1009875
aacgacaaca

SEQ ID NO: 152856 - DNA, 9 bp, Unknown
  misc_feature (1)..( 9): Result.004 file - promoters50/1009875
ctttatttt

SEQ ID NO: 152857 - DNA, 9 bp, Unknown
  misc_feature (1)..( 9): Result.004 file - promoters50/1009875
cattatttt

SEQ ID NO: 152858 - DNA, 9 bp, Unknown
  misc_feature (1)..( 9): Result.004 file - promoters50/1009910
catgattaa

SEQ ID NO: 152859 - DNA, 12 bp, Unknown
  misc_feature (1)..( 12): Result.004 file - promoters50/1009910
ctaattatcaaa

SEQ ID NO: 152860 - DNA, 12 bp, Unknown
  misc_feature (1)..( 12): Result.004 file - promoters50/1009910
ctaatttttaca

SEQ ID NO: 152861 - DNA, 12 bp, Unknown
  misc_feature (1)..( 12): Result.004 file - promoters50/1009910
ataattttgctg

SEQ ID NO: 152862 - DNA, 13 bp, Unknown
  misc_feature (1)..( 13): Result.004 file - promoters50/1009910
tagaatttttttc

SEQ ID NO: 152863 - DNA, 13 bp, Unknown
  misc_feature (1)..( 13): Result.004 file - promoters50/1009910
atagatttttttt

SEQ ID NO: 152864 - DNA, 13 bp, Unknown
  misc_feature (1)..( 13): Result.004 file - promoters50/1009910
atagcttttcaat

SEQ ID NO: 152865 - DNA, 9 bp, Unknown
  misc_feature (1)..( 9): Result.004 file - promoters50/1009910
caattatta

SEQ ID NO: 152866 - DNA, 9 bp, Unknown
  misc_feature (1)..( 9): Result.004 file - promoters50/1009910
taattttta

SEQ ID NO: 152867 - DNA, 9 bp, Unknown
  misc_feature (1)..( 9): Result.004 file - promoters50/1009910
caaatatac

SEQ ID NO: 152868 - DNA, 9 bp, Unknown
  misc_feature (1)..( 9): Result.004 file - promoters50/1009910
gaatttttt

SEQ ID NO: 152869 - DNA, 9 bp, Unknown
  misc_feature (1)..( 9): Result.004 file - promoters50/1009910
taattttgc

SEQ ID NO: 152870 - DNA, 9 bp, Unknown
  misc_feature (1)..( 9): Result.004 file - promoters50/1009910
agatttttt

SEQ ID NO: 152871 - DNA, 14 bp, Unknown
  misc_feature (1)..( 14): Result.004 file - promoters50/1009910
tttaaaaaagacaa

SEQ ID NO: 152872 - DNA, 14 bp, Unknown
  misc_feature (1)..( 14): Result.004 file - promoters50/1009910
cttaaaaagtagtt

SEQ ID NO: 152873 - DNA, 14 bp, Unknown
  misc_feature (1)..( 14): Result.004 file - promoters50/1009910
cctaaaaatagaaa

SEQ ID NO: 152874 - DNA, 14 bp, Unknown
  misc_feature (1)..( 14): Result.004 file - promoters50/1009910
cttaaagaactgtt

SEQ ID NO: 152875 - DNA, 15 bp, Unknown
  misc_feature (1)..( 15): Result.004 file - promoters50/1009910
tatgaaaattagata

SEQ ID NO: 152876 - DNA, 15 bp, Unknown
  misc_feature (1)..( 15): Result.004 file - promoters50/1009910
agtcaaaattaaata

SEQ ID NO: 152877 - DNA, 15 bp, Unknown
  misc_feature (1)..( 15): Result.004 file - promoters50/1009910
gttacataattcctt

SEQ ID NO: 152878 - DNA, 11 bp, Unknown
  misc_feature (1)..( 11): Result.004 file - promoters50/1009910
caataaaatca

SEQ ID NO: 152879 - DNA, 11 bp, Unknown
  misc_feature (1)..( 11): Result.004 file - promoters50/1009910
caataacaaat

SEQ ID NO: 152880 - DNA, 12 bp, Unknown
  misc_feature (1)..( 12): Result.004 file - promoters50/1009910
aaattaaataac

SEQ ID NO: 152881 - DNA, 12 bp, Unknown
  misc_feature (1)..( 12): Result.004 file - promoters50/1009910
aaaatcacacaa

SEQ ID NO: 152882 - DNA, 12 bp, Unknown
  misc_feature (1)..( 12): Result.004 file - promoters50/1009910
aaaattagatat

SEQ ID NO: 152883 - DNA, 12 bp, Unknown
  misc_feature (1)..( 12): Result.004 file - promoters50/1009910
ttagttacataa

SEQ ID NO: 152884 - DNA, 11 bp, Unknown
  misc_feature (1)..( 11): Result.004 file - promoters50/1009910
tatttaaatga

SEQ ID NO: 152885 - DNA, 11 bp, Unknown
  misc_feature (1)..( 11): Result.004 file - promoters50/1009910
ttttttaatca

SEQ ID NO: 152886 - DNA, 11 bp, Unknown
  misc_feature (1)..( 11): Result.004 file - promoters50/1009910
tagttatatga

SEQ ID NO: 152887 - DNA, 11 bp, Unknown
  misc_feature (1)..( 11): Result.004 file - promoters50/1009910
aattgaaaagg

SEQ ID NO: 152888 - DNA, 11 bp, Unknown
  misc_feature (1)..( 11): Result.004 file - promoters50/1009910
tatttgacttc

SEQ ID NO: 152889 - DNA, 11 bp, Unknown
  misc_feature (1)..( 11): Result.004 file - promoters50/1009910
gttttgacatt

SEQ ID NO: 152890 - DNA, 11 bp, Unknown
  misc_feature (1)..( 11): Result.004 file - promoters50/1009910
aatttaaaatt

SEQ ID NO: 152891 - DNA, 14 bp, Unknown
  misc_feature (1)..( 14): Result.004 file - promoters50/1009910
aataaaatcattag

SEQ ID NO: 152892 - DNA, 14 bp, Unknown
  misc_feature (1)..( 14): Result.004 file - promoters50/1009910
ctgaaaatcacaca

SEQ ID NO: 152893 - DNA, 14 bp, Unknown
  misc_feature (1)..( 14): Result.004 file - promoters50/1009910
aattaaataaccaa

SEQ ID NO: 152894 - DNA, 14 bp, Unknown
  misc_feature (1)..( 14): Result.004 file - promoters50/1009910
aataacaaatgttc

SEQ ID NO: 152895 - DNA, 14 bp, Unknown
  misc_feature (1)..( 14): Result.004 file - promoters50/1009910
atgaaaattagata

SEQ ID NO: 152896 - DNA, 14 bp, Unknown
  misc_feature (1)..( 14): Result.004 file - promoters50/1009930
agttacataattcc

SEQ ID NO: 152897 - DNA, 9 bp, Unknown
  misc_feature (1)..( 9): Result.004 file - promoters50/1009930
ccatttctg

SEQ ID NO: 152898 - DNA, 9 bp, Unknown
  misc_feature (1)..( 9): Result.004 file - promoters50/1009930
tcatatctg

SEQ ID NO: 152899 - DNA, 9 bp, Unknown
  misc_feature (1)..( 9): Result.004 file - promoters50/1009930
tcatattta

SEQ ID NO: 152900 - DNA, 8 bp, Unknown
  misc_feature (1)..( 8): Result.004 file - promoters50/1009930
tttaaatt

SEQ ID NO: 152901 - DNA, 8 bp, Unknown
  misc_feature (1)..( 8): Result.004 file - promoters50/1009930
tttacatt

SEQ ID NO: 152902 - DNA, 8 bp, Unknown
  misc_feature (1)..( 8): Result.004 file - promoters50/1009930
tttcaatc

SEQ ID NO: 152903 - DNA, 7 bp, Unknown
  misc_feature (1)..( 7): Result.004 file - promoters50/1009930
taacact

SEQ ID NO: 152904 - DNA, 7 bp, Unknown
  misc_feature (1)..( 7): Result.004 file - promoters50/1009930
aaacact

SEQ ID NO: 152905 - DNA, 7 bp, Unknown
  misc_feature (1)..( 7): Result.004 file - promoters50/1009930
aaacact

SEQ ID NO: 152906 - DNA, 9 bp, Unknown
  misc_feature (1)..( 9): Result.004 file - promoters50/1009930
aatttattt

SEQ ID NO: 152907 - DNA, 9 bp, Unknown
  misc_feature (1)..( 9): Result.004 file - promoters50/1009930
ttcttattt

SEQ ID NO: 152908 - DNA, 9 bp, Unknown
  misc_feature (1)..( 9): Result.004 file - promoters50/1009930
aatctattg

SEQ ID NO: 152909 - DNA, 9 bp, Unknown
  misc_feature (1)..( 9): Result.004 file - promoters50/1009930
ttacattag

SEQ ID NO: 152910 - DNA, 9 bp, Unknown
  misc_feature (1)..( 9): Result.004 file - promoters50/1009930
taacattag

SEQ ID NO: 152911 - DNA, 9 bp, Unknown
  misc_feature (1)..( 9): Result.004 file - promoters50/1009930
ttatatttt

SEQ ID NO: 152912 - DNA, 8 bp, Unknown
  misc_feature (1)..( 8): Result.004 file - promoters50/1009930
ttatgatc

SEQ ID NO: 152913 - DNA, 8 bp, Unknown
  misc_feature (1)..( 8): Result.004 file - promoters50/1009930
ttatgaac

SEQ ID NO: 152914 - DNA, 8 bp, Unknown
  misc_feature (1)..( 8): Result.004 file - promoters50/1009930
atatcatc

SEQ ID NO: 152915 - DNA, 9 bp, Unknown
  misc_feature (1)..( 9): Result.004 file - promoters50/1009930
caaataatt

SEQ ID NO: 152916 - DNA, 9 bp, Unknown
  misc_feature (1)..( 9): Result.004 file - promoters50/1009930
caaataatt

SEQ ID NO: 152917 - DNA, 9 bp, Unknown
  misc_feature (1)..( 9): Result.004 file - promoters50/1009941
tcaataata

SEQ ID NO: 152918 - DNA, 11 bp, Unknown
  misc_feature (1)..( 11): Result.004 file - promoters50/1009941
aaaattctcaa

SEQ ID NO: 152919 - DNA, 11 bp, Unknown
  misc_feature (1)..( 11): Result.004 file - promoters50/1009941
gcaattctgac

SEQ ID NO: 152920 - DNA, 12 bp, Unknown
  misc_feature (1)..( 12): Result.004 file - promoters50/1009941
gaaagttcatca

SEQ ID NO: 152921 - DNA, 12 bp, Unknown
  misc_feature (1)..( 12): Result.004 file - promoters50/1009941
tttcattgtcaa

SEQ ID NO: 152922 - DNA, 12 bp, Unknown
  misc_feature (1)..( 12): Result.004 file - promoters50/1009941
aaaaattatcac

SEQ ID NO: 152923 - DNA, 12 bp, Unknown
  misc_feature (1)..( 12): Result.004 file - promoters50/1009955
tgtggttatcaa

SEQ ID NO: 152924 - DNA, 7 bp, Unknown
  misc_feature (1)..( 7): Result.004 file - promoters50/1009955
tggaaag

SEQ ID NO: 152925 - DNA, 7 bp, Unknown
  misc_feature (1)..( 7): Result.004 file - promoters50/1009955
tggcaag

SEQ ID NO: 152926 - DNA, 7 bp, Unknown
  misc_feature (1)..( 7): Result.004 file - promoters50/1009955
cggaaag

SEQ ID NO: 152927 - DNA, 6 bp, Unknown
  misc_feature (1)..( 6): Result.004 file - promoters50/1009955
cttctg

SEQ ID NO: 152928 - DNA, 6 bp, Unknown
  misc_feature (1)..( 6): Result.004 file - promoters50/1009955
cttctg

SEQ ID NO: 152929 - DNA, 6 bp, Unknown
  misc_feature (1)..( 6): Result.004 file - promoters50/1009999
cttctg

SEQ ID NO: 152930 - DNA, 11 bp, Unknown
  misc_feature (1)..( 11): Result.004 file - promoters50/1009999
aattgtttgtt

SEQ ID NO: 152931 - DNA, 11 bp, Unknown
  misc_feature (1)..( 11): Result.004 file - promoters50/1009999
atttgtttagt

SEQ ID NO: 152932 - DNA, 11 bp, Unknown
  misc_feature (1)..( 11): Result.004 file - promoters50/1009999
gattgttagtt

SEQ ID NO: 152933 - DNA, 11 bp, Unknown
  misc_feature (1)..( 11): Result.004 file - promoters50/1009999
tattcttttat

SEQ ID NO: 152934 - DNA, 11 bp, Unknown
  misc_feature (1)..( 11): Result.004 file - promoters50/1009999
aattatttttc

SEQ ID NO: 152935 - DNA, 12 bp, Unknown
  misc_feature (1)..( 12): Result.004 file - promoters50/1009999
aaatgtatagta

SEQ ID NO: 152936 - DNA, 17 bp, Unknown
  misc_feature (1)..( 17): Result.004 file - promoters50/1009999
gagataaaaagattgat

SEQ ID NO: 152937 - DNA, 17 bp, Unknown
  misc_feature (1)..( 17): Result.004 file - promoters50/1009999
ttggtcaaaagaaaata

SEQ ID NO: 152938 - DNA, 17 bp, Unknown
  misc_feature (1)..( 17): Result.004 file - promoters50/1009999
aagaaaaaaagaaaaaa

SEQ ID NO: 152939 - DNA, 17 bp, Unknown
  misc_feature (1)..( 17): Result.004 file - promoters50/1009999
caagtttaaagaaaaaa

SEQ ID NO: 152940 - DNA, 17 bp, Unknown
  misc_feature (1)..( 17): Result.004 file - promoters50/1009999
tcacaaaaaataatatt

SEQ ID NO: 152941 - DNA, 17 bp, Unknown
  misc_feature (1)..( 17): Result.004 file - promoters50/1009999
aaggaaaaaaggttcaa

SEQ ID NO: 152942 - DNA, 13 bp, Unknown
  misc_feature (1)..( 13): Result.004 file - promoters50/1009999
cttgtacaaagta

SEQ ID NO: 152943 - DNA, 13 bp, Unknown
  misc_feature (1)..( 13): Result.004 file - promoters50/1009999
ttcgtaaaaattt

SEQ ID NO: 152944 - DNA, 13 bp, Unknown
  misc_feature (1)..( 13): Result.004 file - promoters50/1009999
ggtctaaatattt

SEQ ID NO: 152945 - DNA, 13 bp, Unknown
  misc_feature (1)..( 13): Result.004 file - promoters50/1009999
gtactaaatgtat

SEQ ID NO: 152946 - DNA, 13 bp, Unknown
  misc_feature (1)..( 13): Result.004 file - promoters50/1009999
agttctaatattt

SEQ ID NO: 152947 - DNA, 13 bp, Unknown
  misc_feature (1)..( 13): Result.004 file - promoters50/1009999
ggtctgaatatga

SEQ ID NO: 152948 - DNA, 13 bp, Unknown
  misc_feature (1)..( 13): Result.004 file - promoters50/1009999
atacgaaagattg

SEQ ID NO: 152949 - DNA, 13 bp, Unknown
  misc_feature (1)..( 13): Result.004 file - promoters50/1009999
gaaacaaagattt

SEQ ID NO: 152950 - DNA, 13 bp, Unknown
  misc_feature (1)..( 13): Result.004 file - promoters50/1009999
agataaaaagatt

SEQ ID NO: 152951 - DNA, 13 bp, Unknown
  misc_feature (1)..( 13): Result.004 file - promoters50/1009999
ttataaaacaatt

SEQ ID NO: 152952 - DNA, 13 bp, Unknown
  misc_feature (1)..( 13): Result.004 file - promoters50/1009999
aaagaaaaaaaga

SEQ ID NO: 152953 - DNA, 13 bp, Unknown
  misc_feature (1)..( 13): Result.004 file - promoters50/1009999
aaagaaaaaatgt

SEQ ID NO: 152954 - DNA, 13 bp, Unknown
  misc_feature (1)..( 13): Result.004 file - promoters50/1009999
tcacaaaaaataa

SEQ ID NO: 152955 - DNA, 13 bp, Unknown
  misc_feature (1)..( 13): Result.004 file - promoters50/1009999
gaaggaaaaaagg

SEQ ID NO: 152956 - DNA, 13 bp, Unknown
  misc_feature (1)..( 13): Result.004 file - promoters50/1009999
aaagtaattgttt

SEQ ID NO: 152957 - DNA, 13 bp, Unknown
  misc_feature (1)..( 13): Result.004 file - promoters50/1009999
gtactaaatgtat

SEQ ID NO: 152958 - DNA, 13 bp, Unknown
  misc_feature (1)..( 13): Result.004 file - promoters50/1009999
gcctttattcttt

SEQ ID NO: 152959 - DNA, 13 bp, Unknown
  misc_feature (1)..( 13): Result.004 file - promoters50/1009999
tacacaattattt

SEQ ID NO: 152960 - DNA, 13 bp, Unknown
  misc_feature (1)..( 13): Result.004 file - promoters50/1009999
ggtctaaatattt

SEQ ID NO: 152961 - DNA, 13 bp, Unknown
  misc_feature (1)..( 13): Result.004 file - promoters50/1009999
ggtctgaatatga

SEQ ID NO: 152962 - DNA, 13 bp, Unknown
  misc_feature (1)..( 13): Result.004 file - promoters50/1009999
aaactgatagaat

SEQ ID NO: 152963 - DNA, 13 bp, Unknown
  misc_feature (1)..( 13): Result.004 file - promoters50/1009999
tcatcgatcgaaa

SEQ ID NO: 152964 - DNA, 13 bp, Unknown
  misc_feature (1)..( 13): Result.004 file - promoters50/1009999
aaattgagagatt

SEQ ID NO: 152965 - DNA, 13 bp, Unknown
  misc_feature (1)..( 13): Result.004 file - promoters50/1009999
cggtagatattta

SEQ ID NO: 152966 - DNA, 13 bp, Unknown
  misc_feature (1)..( 13): Result.004 file - promoters50/1009999
gggcagatactta

SEQ ID NO: 152967 - DNA, 13 bp, Unknown
  misc_feature (1)..( 13): Result.004 file - promoters50/1010019
ttggggagagacc

SEQ ID NO: 152968 - DNA, 7 bp, Unknown
  misc_feature (1)..( 7): Result.004 file - promoters50/1010019
caagaac

SEQ ID NO: 152969 - DNA, 7 bp, Unknown
  misc_feature (1)..( 7): Result.004 file - promoters50/1010019
caaaaac

SEQ ID NO: 152970 - DNA, 7 bp, Unknown
  misc_feature (1)..( 7): Result.004 file - promoters50/1010025
caaaaag

SEQ ID NO: 152971 - DNA, 8 bp, Unknown
  misc_feature (1)..( 8): Result.004 file - promoters50/1010025
atattttc

SEQ ID NO: 152972 - DNA, 8 bp, Unknown
  misc_feature (1)..( 8): Result.004 file - promoters50/1010025
atatcttc

SEQ ID NO: 152973 - DNA, 8 bp, Unknown
  misc_feature (1)..( 8): Result.004 file - promoters50/1010025
ttatcttt

SEQ ID NO: 152974 - DNA, 8 bp, Unknown
  misc_feature (1)..( 8): Result.004 file - promoters50/1010025
atatttca

SEQ ID NO: 152975 - DNA, 8 bp, Unknown
  misc_feature (1)..( 8): Result.004 file - promoters50/1010055
atatcttc

SEQ ID NO: 152976 - DNA, 10 bp, Unknown
  misc_feature (1)..( 10): Result.004 file - promoters50/1010055
aaacaaacgt

SEQ ID NO: 152977 - DNA, 10 bp, Unknown
  misc_feature (1)..( 10): Result.004 file - promoters50/1010055
aaacaaatgt

SEQ ID NO: 152978 - DNA, 10 bp, Unknown
  misc_feature (1)..( 10): Result.004 file - promoters50/1010055
aaaaaaagaa

SEQ ID NO: 152979 - DNA, 10 bp, Unknown
  misc_feature (1)..( 10): Result.004 file - promoters50/1010055
aaacaaatta

SEQ ID NO: 152980 - DNA, 10 bp, Unknown
  misc_feature (1)..( 10): Result.004 file - promoters50/1010055
aaaaaaaaga

SEQ ID NO: 152981 - DNA, 10 bp, Unknown
  misc_feature (1)..( 10): Result.004 file - promoters50/1010055
taactaattt

SEQ ID NO: 152982 - DNA, 10 bp, Unknown
  misc_feature (1)..( 10): Result.004 file - promoters50/1010055
taactgattt

SEQ ID NO: 152983 - DNA, 11 bp, Unknown
  misc_feature (1)..( 11): Result.004 file - promoters50/1010055
atattattagt

SEQ ID NO: 152984 - DNA, 11 bp, Unknown
  misc_feature (1)..( 11): Result.004 file - promoters50/1010055
ttattatattg

SEQ ID NO: 152985 - DNA, 11 bp, Unknown
  misc_feature (1)..( 11): Result.004 file - promoters50/1010055
atataattatt

SEQ ID NO: 152986 - DNA, 11 bp, Unknown
  misc_feature (1)..( 11): Result.004 file - promoters50/1010055
aaattatttac

SEQ ID NO: 152987 - DNA, 11 bp, Unknown
  misc_feature (1)..( 11): Result.004 file - promoters50/1010055
taatgattttg

SEQ ID NO: 152988 - DNA, 11 bp, Unknown
  misc_feature (1)..( 11): Result.004 file - promoters50/1010055
taattcttttc

SEQ ID NO: 152989 - DNA, 11 bp, Unknown
  misc_feature (1)..( 11): Result.004 file - promoters50/1010055
ttatcatttta

SEQ ID NO: 152990 - DNA, 10 bp, Unknown
  misc_feature (1)..( 10): Result.004 file - promoters50/1010055
actacatatt

SEQ ID NO: 152991 - DNA, 10 bp, Unknown
  misc_feature (1)..( 10): Result.004 file - promoters50/1010055
taaacatatt

SEQ ID NO: 152992 - DNA, 10 bp, Unknown
  misc_feature (1)..( 10): Result.004 file - promoters50/1010055
tcaacatata

SEQ ID NO: 152993 - DNA, 10 bp, Unknown
  misc_feature (1)..( 10): Result.004 file - promoters50/1010055
caaaaataag

SEQ ID NO: 152994 - DNA, 10 bp, Unknown
  misc_feature (1)..( 10): Result.004 file - promoters50/1010055
agtaaataat

SEQ ID NO: 152995 - DNA, 10 bp, Unknown
  misc_feature (1)..( 10): Result.004 file - promoters50/1010055
caaaaaaggt

SEQ ID NO: 152996 - DNA, 10 bp, Unknown
  misc_feature (1)..( 10): Result.004 file - promoters50/1010055
aaaatattaa

SEQ ID NO: 152997 - DNA, 10 bp, Unknown
  misc_feature (1)..( 10): Result.004 file - promoters50/1010055
caaagattta

SEQ ID NO: 152998 - DNA, 10 bp, Unknown
  misc_feature (1)..( 10): Result.004 file - promoters50/1010055
taaataataa

SEQ ID NO: 152999 - DNA, 10 bp, Unknown
  misc_feature (1)..( 10): Result.004 file - promoters50/1010055
aaaataagat

SEQ ID NO: 153000 - DNA, 10 bp, Unknown
  misc_feature (1)..( 10): Result.004 file - promoters50/1010055
taaacatatt

SEQ ID NO: 153001 - DNA, 10 bp, Unknown
  misc_feature (1)..( 10): Result.004 file - promoters50/1010055
ttaacaaaaa

SEQ ID NO: 153002 - DNA, 13 bp, Unknown
  misc_feature (1)..( 13): Result.004 file - promoters50/1010055
aatatttcatttc

SEQ ID NO: 153003 - DNA, 13 bp, Unknown
  misc_feature (1)..( 13): Result.004 file - promoters50/1010055
agtatatcacaaa

SEQ ID NO: 153004 - DNA, 13 bp, Unknown
  misc_feature (1)..( 13): Result.004 file - promoters50/1010055
tctttttcttttc

SEQ ID NO: 153005 - DNA, 13 bp, Unknown
  misc_feature (1)..( 13): Result.004 file - promoters50/1010055
agaatttttagta

SEQ ID NO: 153006 - DNA, 13 bp, Unknown
  misc_feature (1)..( 13): Result.004 file - promoters50/1010055
tttatttccttca

SEQ ID NO: 153007 - DNA, 13 bp, Unknown
  misc_feature (1)..( 13): Result.004 file - promoters50/1010055
tttatttcggtaa

SEQ ID NO: 153008 - DNA, 13 bp, Unknown
  misc_feature (1)..( 13): Result.004 file - promoters50/1010065
tggatttttggtg

SEQ ID NO: 153009 - DNA, 9 bp, Unknown
  misc_feature (1)..( 9): Result.004 file - promoters50/1010065
taaacatgc

SEQ ID NO: 153010 - DNA, 9 bp, Unknown
  misc_feature (1)..( 9): Result.004 file - promoters50/1010065
taaacaaat

SEQ ID NO: 153011 - DNA, 9 bp, Unknown
  misc_feature (1)..( 9): Result.004 file - promoters50/1010065
taaaaaaat

SEQ ID NO: 153012 - DNA, 8 bp, Unknown
  misc_feature (1)..( 8): Result.004 file - promoters50/1010065
attattta

SEQ ID NO: 153013 - DNA, 8 bp, Unknown
  misc_feature (1)..( 8): Result.004 file - promoters50/1010065
atttttta

SEQ ID NO: 153014 - DNA, 8 bp, Unknown
  misc_feature (1)..( 8): Result.004 file - promoters50/1010065
attttttt

SEQ ID NO: 153015 - DNA, 9 bp, Unknown
  misc_feature (1)..( 9): Result.004 file - promoters50/1010065
tatataaac

SEQ ID NO: 153016 - DNA, 9 bp, Unknown
  misc_feature (1)..( 9): Result.004 file - promoters50/1010065
tataaaaaa

SEQ ID NO: 153017 - DNA, 9 bp, Unknown
  misc_feature (1)..( 9): Result.004 file - promoters50/1010065
taaacaaat

SEQ ID NO: 153018 - DNA, 10 bp, Unknown
  misc_feature (1)..( 10): Result.004 file - promoters50/1010065
atacaaaaca

SEQ ID NO: 153019 - DNA, 10 bp, Unknown
  misc_feature (1)..( 10): Result.004 file - promoters50/1010065
acacaaaaca

SEQ ID NO: 153020 - DNA, 10 bp, Unknown
  misc_feature (1)..( 10): Result.004 file - promoters50/1010065
acacaaacaa

SEQ ID NO: 153021 - DNA, 8 bp, Unknown
  misc_feature (1)..( 8): Result.004 file - promoters50/1010065
tttaaaaa

SEQ ID NO: 153022 - DNA, 8 bp, Unknown
  misc_feature (1)..( 8): Result.004 file - promoters50/1010065
attacaaa

SEQ ID NO: 153023 - DNA, 8 bp, Unknown
  misc_feature (1)..( 8): Result.004 file - promoters50/1010068
attacaac

SEQ ID NO: 153024 - DNA, 10 bp, Unknown
  misc_feature (1)..( 10): Result.004 file - promoters50/1010068
gattaggcgt

SEQ ID NO: 153025 - DNA, 10 bp, Unknown
  misc_feature (1)..( 10): Result.004 file - promoters50/1010068
tattcggcta

SEQ ID NO: 153026 - DNA, 10 bp, Unknown
  misc_feature (1)..( 10): Result.004 file - promoters50/1010094
tattctgcta

SEQ ID NO: 153027 - DNA, 16 bp, Unknown
  misc_feature (1)..( 16): Result.004 file - promoters50/1010094
tacatacagatccacg

SEQ ID NO: 153028 - DNA, 16 bp, Unknown
  misc_feature (1)..( 16): Result.004 file - promoters50/1010094
aagatagagatagtca

SEQ ID NO: 153029 - DNA, 16 bp, Unknown
  misc_feature (1)..( 16): Result.004 file - promoters50/1010094
cacaaacaagaaaaac

SEQ ID NO: 153030 - DNA, 16 bp, Unknown
  misc_feature (1)..( 16): Result.004 file - promoters50/1010094
tagatagacaaaacaa

SEQ ID NO: 153031 - DNA, 16 bp, Unknown
  misc_feature (1)..( 16): Result.004 file - promoters50/1010094
aacatagacgaaacaa

SEQ ID NO: 153032 - DNA, 16 bp, Unknown
  misc_feature (1)..( 16): Result.004 file - promoters50/1010094
cacaaaacatccttaa

SEQ ID NO: 153033 - DNA, 16 bp, Unknown
  misc_feature (1)..( 16): Result.004 file - promoters50/1010094
atcataaaagttttat

SEQ ID NO: 153034 - DNA, 12 bp, Unknown
  misc_feature (1)..( 12): Result.004 file - promoters50/1010094
ttggttttgaga

SEQ ID NO: 153035 - DNA, 12 bp, Unknown
  misc_feature (1)..( 12): Result.004 file - promoters50/1010094
ctctttttgata

SEQ ID NO: 153036 - DNA, 12 bp, Unknown
  misc_feature (1)..( 12): Result.004 file - promoters50/1010094
gaatttttgcga

SEQ ID NO: 153037 - DNA, 12 bp, Unknown
  misc_feature (1)..( 12): Result.004 file - promoters50/1010094
ataattttatat

SEQ ID NO: 153038 - DNA, 12 bp, Unknown
  misc_feature (1)..( 12): Result.004 file - promoters50/1010094
gaacttttaatc

SEQ ID NO: 153039 - DNA, 12 bp, Unknown
  misc_feature (1)..( 12): Result.004 file - promoters50/1010094
aaacatttgaac

SEQ ID NO: 153040 - DNA, 12 bp, Unknown
  misc_feature (1)..( 12): Result.004 file - promoters50/1010094
taacatatgact

SEQ ID NO: 153041 - DNA, 12 bp, Unknown
  misc_feature (1)..( 12): Result.004 file - promoters50/1010094
ttagatatgata

SEQ ID NO: 153042 - DNA, 8 bp, Unknown
  misc_feature (1)..( 8): Result.004 file - promoters50/1010094
ataataaa

SEQ ID NO: 153043 - DNA, 8 bp, Unknown
  misc_feature (1)..( 8): Result.004 file - promoters50/1010094
atactaaa

SEQ ID NO: 153044 - DNA, 8 bp, Unknown
  misc_feature (1)..( 8): Result.004 file - promoters50/1010094
gtaataat

SEQ ID NO: 153045 - DNA, 8 bp, Unknown
  misc_feature (1)..( 8): Result.004 file - promoters50/1010094
ttacgaaa

SEQ ID NO: 153046 - DNA, 8 bp, Unknown
  misc_feature (1)..( 8): Result.004 file - promoters50/1010094
ctaccaaa

SEQ ID NO: 153047 - DNA, 8 bp, Unknown
  misc_feature (1)..( 8): Result.004 file - promoters50/1010094
ataataat

SEQ ID NO: 153048 - DNA, 10 bp, Unknown
  misc_feature (1)..( 10): Result.004 file - promoters50/1010094
taacgtttgg

SEQ ID NO: 153049 - DNA, 10 bp, Unknown
  misc_feature (1)..( 10): Result.004 file - promoters50/1010094
gaacttttaa

SEQ ID NO: 153050 - DNA, 10 bp, Unknown
  misc_feature (1)..( 10): Result.004 file - promoters50/1010094
aaacatttga

SEQ ID NO: 153051 - DNA, 10 bp, Unknown
  misc_feature (1)..( 10): Result.004 file - promoters50/1010094
gaatttttgc

SEQ ID NO: 153052 - DNA, 10 bp, Unknown
  misc_feature (1)..( 10): Result.004 file - promoters50/1010094
taacatatga

SEQ ID NO: 153053 - DNA, 10 bp, Unknown
  misc_feature (1)..( 10): Result.004 file - promoters50/1010094
ttagatatga

SEQ ID NO: 153054 - DNA, 10 bp, Unknown
  misc_feature (1)..( 10): Result.004 file - promoters50/1010094
taattttata

SEQ ID NO: 153055 - DNA, 12 bp, Unknown
  misc_feature (1)..( 12): Result.004 file - promoters50/1010094
aaaaattaaaac

SEQ ID NO: 153056 - DNA, 12 bp, Unknown
  misc_feature (1)..( 12): Result.004 file - promoters50/1010094
caaacttataag

SEQ ID NO: 153057 - DNA, 12 bp, Unknown
  misc_feature (1)..( 12): Result.004 file - promoters50/1010094
aacaattaaata

SEQ ID NO: 153058 - DNA, 12 bp, Unknown
  misc_feature (1)..( 12): Result.004 file - promoters50/1010094
caaacttgtcaa

SEQ ID NO: 153059 - DNA, 12 bp, Unknown
  misc_feature (1)..( 12): Result.004 file - promoters50/1010094
attcgttacata

SEQ ID NO: 153060 - DNA, 12 bp, Unknown
  misc_feature (1)..( 12): Result.004 file - promoters50/1010094
ttttgttccatt

SEQ ID NO: 153061 - DNA, 9 bp, Unknown
  misc_feature (1)..( 9): Result.004 file - promoters50/1010094
gatatgatt

SEQ ID NO: 153062 - DNA, 9 bp, Unknown
  misc_feature (1)..( 9): Result.004 file - promoters50/1010094
catatgaaa

SEQ ID NO: 153063 - DNA, 9 bp, Unknown
  misc_feature (1)..( 9): Result.004 file - promoters50/1010094
tgtataatt

SEQ ID NO: 153064 - DNA, 9 bp, Unknown
  misc_feature (1)..( 9): Result.004 file - promoters50/1010094
gatatgata

SEQ ID NO: 153065 - DNA, 9 bp, Unknown
  misc_feature (1)..( 9): Result.004 file - promoters50/1010094
gttatcaaa

SEQ ID NO: 153066 - DNA, 9 bp, Unknown
  misc_feature (1)..( 9): Result.004 file - promoters50/1010094
catatgact

SEQ ID NO: 153067 - DNA, 11 bp, Unknown
  misc_feature (1)..( 11): Result.004 file - promoters50/1010094
tagtcaaacga

SEQ ID NO: 153068 - DNA, 11 bp, Unknown
  misc_feature (1)..( 11): Result.004 file - promoters50/1010094
tagacaaaaca

SEQ ID NO: 153069 - DNA, 11 bp, Unknown
  misc_feature (1)..( 11): Result.004 file - promoters50/1010094
tccacaaaaca

SEQ ID NO: 153070 - DNA, 11 bp, Unknown
  misc_feature (1)..( 11): Result.004 file - promoters50/1010094
gagaaaaaaca

SEQ ID NO: 153071 - DNA, 11 bp, Unknown
  misc_feature (1)..( 11): Result.004 file - promoters50/1010094
ttcacaaacaa

SEQ ID NO: 153072 - DNA, 11 bp, Unknown
  misc_feature (1)..( 11): Result.004 file - promoters50/1010094
ttatcaaaacc

SEQ ID NO: 153073 - DNA, 13 bp, Unknown
  misc_feature (1)..( 13): Result.004 file - promoters50/1010094
tagtcaaacgatt

SEQ ID NO: 153074 - DNA, 13 bp, Unknown
  misc_feature (1)..( 13): Result.004 file - promoters50/1010094
agacaaaacaatt

SEQ ID NO: 153075 - DNA, 13 bp, Unknown
  misc_feature (1)..( 13): Result.004 file - promoters50/1010094
ccacaaaacatcc

SEQ ID NO: 153076 - DNA, 13 bp, Unknown
  misc_feature (1)..( 13): Result.004 file - promoters50/1010094
ttcacaaacaaga

SEQ ID NO: 153077 - DNA, 13 bp, Unknown
  misc_feature (1)..( 13): Result.004 file - promoters50/1010094
agaaaaaacatag

SEQ ID NO: 153078 - DNA, 13 bp, Unknown
  misc_feature (1)..( 13): Result.004 file - promoters50/1010115
tatcaaaaccgtt

SEQ ID NO: 153079 - DNA, 10 bp, Unknown
  misc_feature (1)..( 10): Result.004 file - promoters50/1010115
atttaaagct

SEQ ID NO: 153080 - DNA, 10 bp, Unknown
  misc_feature (1)..( 10): Result.004 file - promoters50/1010115
ttttcaagtt

SEQ ID NO: 153081 - DNA, 10 bp, Unknown
  misc_feature (1)..( 10): Result.004 file - promoters50/1010115
attgaaagat

SEQ ID NO: 153082 - DNA, 11 bp, Unknown
  misc_feature (1)..( 11): Result.004 file - promoters50/1010115
ggtctcacgtt

SEQ ID NO: 153083 - DNA, 11 bp, Unknown
  misc_feature (1)..( 11): Result.004 file - promoters50/1010115
ttttccaaagt

SEQ ID NO: 153084 - DNA, 11 bp, Unknown
  misc_feature (1)..( 11): Result.004 file - promoters50/1010115
aagtccaaata

SEQ ID NO: 153085 - DNA, 12 bp, Unknown
  misc_feature (1)..( 12): Result.004 file - promoters50/1010115
ttgagattacta

SEQ ID NO: 153086 - DNA, 12 bp, Unknown
  misc_feature (1)..( 12): Result.004 file - promoters50/1010115
tcgagaatacat

SEQ ID NO: 153087 - DNA, 12 bp, Unknown
  misc_feature (1)..( 12): Result.004 file - promoters50/1010115
tcgataattgat

SEQ ID NO: 153088 - DNA, 12 bp, Unknown
  misc_feature (1)..( 12): Result.004 file - promoters50/1010115
tgtataatttac

SEQ ID NO: 153089 - DNA, 12 bp, Unknown
  misc_feature (1)..( 12): Result.004 file - promoters50/1010115
tgaataatttgc

SEQ ID NO: 153090 - DNA, 12 bp, Unknown
  misc_feature (1)..( 12): Result.004 file - promoters50/1010163
ctaaaaatacat

SEQ ID NO: 153091 - DNA, 7 bp, Unknown
  misc_feature (1)..( 7): Result.004 file - promoters50/1010163
gagaaac

SEQ ID NO: 153092 - DNA, 7 bp, Unknown
  misc_feature (1)..( 7): Result.004 file - promoters50/1010163
cagaaac

SEQ ID NO: 153093 - DNA, 7 bp, Unknown
  misc_feature (1)..( 7): Result.004 file - promoters50/1010170
gagcaac

SEQ ID NO: 153094 - DNA, 12 bp, Unknown
  misc_feature (1)..( 12): Result.004 file - promoters50/1010170
aaagtttcctct

SEQ ID NO: 153095 - DNA, 12 bp, Unknown
  misc_feature (1)..( 12): Result.004 file - promoters50/1010170
aaattttcttct

SEQ ID NO: 153096 - DNA, 12 bp, Unknown
  misc_feature (1)..( 12): Result.004 file - promoters50/1010170
agattatctttc

SEQ ID NO: 153097 - DNA, 8 bp, Unknown
  misc_feature (1)..( 8): Result.004 file - promoters50/1010170
tttgaata

SEQ ID NO: 153098 - DNA, 8 bp, Unknown
  misc_feature (1)..( 8): Result.004 file - promoters50/1010170
tttgcata

SEQ ID NO: 153099 - DNA, 8 bp, Unknown
  misc_feature (1)..( 8): Result.004 file - promoters50/1010201
tttgcatg

SEQ ID NO: 153100 - DNA, 9 bp, Unknown
  misc_feature (1)..( 9): Result.004 file - promoters50/1010201
gactaagat

SEQ ID NO: 153101 - DNA, 9 bp, Unknown
  misc_feature (1)..( 9): Result.004 file - promoters50/1010201
tgctaagat

SEQ ID NO: 153102 - DNA, 9 bp, Unknown
  misc_feature (1)..( 9): Result.004 file - promoters50/1010201
gaccaagaa

SEQ ID NO: 153103 - DNA, 9 bp, Unknown
  misc_feature (1)..( 9): Result.004 file - promoters50/1010201
ttcaaaaaa

SEQ ID NO: 153104 - DNA, 9 bp, Unknown
  misc_feature (1)..( 9): Result.004 file - promoters50/1010201
ttcaaaatt

SEQ ID NO: 153105 - DNA, 9 bp, Unknown
  misc_feature (1)..( 9): Result.004 file - promoters50/1010209
accaaaatc

SEQ ID NO: 153106 - DNA, 11 bp, Unknown
  misc_feature (1)..( 11): Result.004 file - promoters50/1010209
cacacacatgc

SEQ ID NO: 153107 - DNA, 11 bp, Unknown
  misc_feature (1)..( 11): Result.004 file - promoters50/1010209
gcaacaaatgc

SEQ ID NO: 153108 - DNA, 11 bp, Unknown
  misc_feature (1)..( 11): Result.004 file - promoters50/1010209
cacacccatac

SEQ ID NO: 153109 - DNA, 13 bp, Unknown
  misc_feature (1)..( 13): Result.004 file - promoters50/1010209
taggaaatgtatt

SEQ ID NO: 153110 - DNA, 13 bp, Unknown
  misc_feature (1)..( 13): Result.004 file - promoters50/1010209
aaataaatttatt

SEQ ID NO: 153111 - DNA, 13 bp, Unknown
  misc_feature (1)..( 13): Result.004 file - promoters50/1010346
aaacaaattaggg

SEQ ID NO: 153112 - DNA, 10 bp, Unknown
  misc_feature (1)..( 10): Result.004 file - promoters50/1010346
tataaaaaat

SEQ ID NO: 153113 - DNA, 10 bp, Unknown
  misc_feature (1)..( 10): Result.004 file - promoters50/1010346
ggaaaaaaat

SEQ ID NO: 153114 - DNA, 10 bp, Unknown
  misc_feature (1)..( 10): Result.004 file - promoters50/1010346
tatacaaaag

SEQ ID NO: 153115 - DNA, 10 bp, Unknown
  misc_feature (1)..( 10): Result.004 file - promoters50/1010346
agtaagaaag

SEQ ID NO: 153116 - DNA, 10 bp, Unknown
  misc_feature (1)..( 10): Result.004 file - promoters50/1010346
gccaaaaaag

SEQ ID NO: 153117 - DNA, 10 bp, Unknown
  misc_feature (1)..( 10): Result.004 file - promoters50/1010346
tcaacaaaat

SEQ ID NO: 153118 - DNA, 11 bp, Unknown
  misc_feature (1)..( 11): Result.004 file - promoters50/1010346
atttatattga

SEQ ID NO: 153119 - DNA, 11 bp, Unknown
  misc_feature (1)..( 11): Result.004 file - promoters50/1010346
ctttttatttt

SEQ ID NO: 153120 - DNA, 11 bp, Unknown
  misc_feature (1)..( 11): Result.004 file - promoters50/1010346
tcttaaattcc

SEQ ID NO: 153121 - DNA, 11 bp, Unknown
  misc_feature (1)..( 11): Result.004 file - promoters50/1010346
taataacttat

SEQ ID NO: 153122 - DNA, 11 bp, Unknown
  misc_feature (1)..( 11): Result.004 file - promoters50/1010346
ctttttaccag

SEQ ID NO: 153123 - DNA, 11 bp, Unknown
  misc_feature (1)..( 11): Result.004 file - promoters50/1010346
atttgtacgtc

SEQ ID NO: 153124 - DNA, 11 bp, Unknown
  misc_feature (1)..( 11): Result.004 file - promoters50/1010346
gattttgtttt

SEQ ID NO: 153125 - DNA, 9 bp, Unknown
  misc_feature (1)..( 9): Result.004 file - promoters50/1010346
aaaaaccgt

SEQ ID NO: 153126 - DNA, 9 bp, Unknown
  misc_feature (1)..( 9): Result.004 file - promoters50/1010346
aaaaacatt

SEQ ID NO: 153127 - DNA, 9 bp, Unknown
  misc_feature (1)..( 9): Result.004 file - promoters50/1010346
aaaaaaggg

SEQ ID NO: 153128 - DNA, 9 bp, Unknown
  misc_feature (1)..( 9): Result.004 file - promoters50/1010346
aagaacaaa

SEQ ID NO: 153129 - DNA, 9 bp, Unknown
  misc_feature (1)..( 9): Result.004 file - promoters50/1010346
aaaaaaagt

SEQ ID NO: 153130 - DNA, 9 bp, Unknown
  misc_feature (1)..( 9): Result.004 file - promoters50/1010357
aaaaaaata

SEQ ID NO: 153131 - DNA, 11 bp, Unknown
  misc_feature (1)..( 11): Result.004 file - promoters50/1010357
ttttatatttt

SEQ ID NO: 153132 - DNA, 11 bp, Unknown
  misc_feature (1)..( 11): Result.004 file - promoters50/1010357
ttttatgtttg

SEQ ID NO: 153133 - DNA, 11 bp, Unknown
  misc_feature (1)..( 11): Result.004 file - promoters50/1010357
gtttgtattta

SEQ ID NO: 153134 - DNA, 11 bp, Unknown
  misc_feature (1)..( 11): Result.004 file - promoters50/1010357
acatatataaa

SEQ ID NO: 153135 - DNA, 9 bp, Unknown
  misc_feature (1)..( 9): Result.004 file - promoters50/1010357
agtgacttc

SEQ ID NO: 153136 - DNA, 9 bp, Unknown
  misc_feature (1)..( 9): Result.004 file - promoters50/1010357
cgtgaattc

SEQ ID NO: 153137 - DNA, 9 bp, Unknown
  misc_feature (1)..( 9): Result.004 file - promoters50/1010357
cgtgaacat

SEQ ID NO: 153138 - DNA, 7 bp, Unknown
  misc_feature (1)..( 7): Result.004 file - promoters50/1010357
ttaaaaa

SEQ ID NO: 153139 - DNA, 7 bp, Unknown
  misc_feature (1)..( 7): Result.004 file - promoters50/1010357
ataaaaa

SEQ ID NO: 153140 - DNA, 7 bp, Unknown
  misc_feature (1)..( 7): Result.004 file - promoters50/1010367
ataaaat

SEQ ID NO: 153141 - DNA, 10 bp, Unknown
  misc_feature (1)..( 10): Result.004 file - promoters50/1010367
atttatttcg

SEQ ID NO: 153142 - DNA, 10 bp, Unknown
  misc_feature (1)..( 10): Result.004 file - promoters50/1010367
atttatgtcg

SEQ ID NO: 153143 - DNA, 10 bp, Unknown
  misc_feature (1)..( 10): Result.004 file - promoters50/1010367
ttttattcta

SEQ ID NO: 153144 - DNA, 10 bp, Unknown
  misc_feature (1)..( 10): Result.004 file - promoters50/1010367
ttttcttttc

SEQ ID NO: 153145 - DNA, 10 bp, Unknown
  misc_feature (1)..( 10): Result.004 file - promoters50/1010367
atttatggac

SEQ ID NO: 153146 - DNA, 10 bp, Unknown
  misc_feature (1)..( 10): Result.004 file - promoters50/1010367
atttttggtg

SEQ ID NO: 153147 - DNA, 10 bp, Unknown
  misc_feature (1)..( 10): Result.004 file - promoters50/1010367
aaagacaaac

SEQ ID NO: 153148 - DNA, 10 bp, Unknown
  misc_feature (1)..( 10): Result.004 file - promoters50/1010367
attaacaaac

SEQ ID NO: 153149 - DNA, 10 bp, Unknown
  misc_feature (1)..( 10): Result.004 file - promoters50/1010367
atttacaaac

SEQ ID NO: 153150 - DNA, 10 bp, Unknown
  misc_feature (1)..( 10): Result.004 file - promoters50/1010367
agttaaaaaa

SEQ ID NO: 153151 - DNA, 10 bp, Unknown
  misc_feature (1)..( 10): Result.004 file - promoters50/1010367
atttaaaatc

SEQ ID NO: 153152 - DNA, 10 bp, Unknown
  misc_feature (1)..( 10): Result.004 file - promoters50/1010367
gtttaaatta

SEQ ID NO: 153153 - DNA, 9 bp, Unknown
  misc_feature (1)..( 9): Result.004 file - promoters50/1010367
cccaaaaat

SEQ ID NO: 153154 - DNA, 9 bp, Unknown
  misc_feature (1)..( 9): Result.004 file - promoters50/1010367
tacaaaaaa

SEQ ID NO: 153155 - DNA, 9 bp, Unknown
  misc_feature (1)..( 9): Result.004 file - promoters50/1010367
cccaaaatt

SEQ ID NO: 153156 - DNA, 9 bp, Unknown
  misc_feature (1)..( 9): Result.004 file - promoters50/1010367
aacaaaaaa

SEQ ID NO: 153157 - DNA, 9 bp, Unknown
  misc_feature (1)..( 9): Result.004 file - promoters50/1010367
tacaaaact

SEQ ID NO: 153158 - DNA, 10 bp, Unknown
  misc_feature (1)..( 10): Result.004 file - promoters50/1010367
ttaaaataaa

SEQ ID NO: 153159 - DNA, 10 bp, Unknown
  misc_feature (1)..( 10): Result.004 file - promoters50/1010367
tccaaaattc

SEQ ID NO: 153160 - DNA, 16 bp, Unknown
  misc_feature (1)..( 16): Result.004 file - promoters50/1010367
agaccaatcacaacat

SEQ ID NO: 153161 - DNA, 16 bp, Unknown
  misc_feature (1)..( 16): Result.004 file - promoters50/1010367
aaaccaatgtttattt

SEQ ID NO: 153162 - DNA, 16 bp, Unknown
  misc_feature (1)..( 16): Result.004 file - promoters50/1010367
aaaacaagggacaagt

SEQ ID NO: 153163 - DNA, 16 bp, Unknown
  misc_feature (1)..( 16): Result.004 file - promoters50/1010367
ccaacaacaaaaaaag

SEQ ID NO: 153164 - DNA, 16 bp, Unknown
  misc_feature (1)..( 16): Result.004 file - promoters50/1010367
cccacaaaacgacgac

SEQ ID NO: 153165 - DNA, 16 bp, Unknown
  misc_feature (1)..( 16): Result.004 file - promoters50/1010367
caaccaactatccaaa

SEQ ID NO: 153166 - DNA, 9 bp, Unknown
  misc_feature (1)..( 9): Result.004 file - promoters50/1010367
caaaaacag

SEQ ID NO: 153167 - DNA, 9 bp, Unknown
  misc_feature (1)..( 9): Result.004 file - promoters50/1010367
caaaaaact

SEQ ID NO: 153168 - DNA, 9 bp, Unknown
  misc_feature (1)..( 9): Result.004 file - promoters50/1010367
caaaaatta

SEQ ID NO: 153169 - DNA, 9 bp, Unknown
  misc_feature (1)..( 9): Result.004 file - promoters50/1010367
aaaatatta

SEQ ID NO: 153170 - DNA, 9 bp, Unknown
  misc_feature (1)..( 9): Result.004 file - promoters50/1010367
caaagattt

SEQ ID NO: 153171 - DNA, 10 bp, Unknown
  misc_feature (1)..( 10): Result.004 file - promoters50/1010367
caataaaatt

SEQ ID NO: 153172 - DNA, 14 bp, Unknown
  misc_feature (1)..( 14): Result.004 file - promoters50/1010367
aatcacaacattgc

SEQ ID NO: 153173 - DNA, 14 bp, Unknown
  misc_feature (1)..( 14): Result.004 file - promoters50/1010367
gccaacaacaaaaa

SEQ ID NO: 153174 - DNA, 14 bp, Unknown
  misc_feature (1)..( 14): Result.004 file - promoters50/1010367
ctatccaaaattaa

SEQ ID NO: 153175 - DNA, 14 bp, Unknown
  misc_feature (1)..( 14): Result.004 file - promoters50/1010367
aacgacaaaacaag

SEQ ID NO: 153176 - DNA, 14 bp, Unknown
  misc_feature (1)..( 14): Result.004 file - promoters50/1010367
aacgaccataatta

SEQ ID NO: 153177 - DNA, 14 bp, Unknown
  misc_feature (1)..( 14): Result.004 file - promoters50/1010367
aacgacgacgttta

SEQ ID NO: 153178 - DNA, 10 bp, Unknown
  misc_feature (1)..( 10): Result.004 file - promoters50/1010367
caaaaataag

SEQ ID NO: 153179 - DNA, 10 bp, Unknown
  misc_feature (1)..( 10): Result.004 file - promoters50/1010367
tgaaaatatt

SEQ ID NO: 153180 - DNA, 10 bp, Unknown
  misc_feature (1)..( 10): Result.004 file - promoters50/1010367
ataaagtata

SEQ ID NO: 153181 - DNA, 10 bp, Unknown
  misc_feature (1)..( 10): Result.004 file - promoters50/1010367
taaaaattaa

SEQ ID NO: 153182 - DNA, 10 bp, Unknown
  misc_feature (1)..( 10): Result.004 file - promoters50/1010367
ccaaaattca

SEQ ID NO: 153183 - DNA, 10 bp, Unknown
  misc_feature (1)..( 10): Result.004 file - promoters50/1010367
ccaaaattga

SEQ ID NO: 153184 - DNA, 9 bp, Unknown
  misc_feature (1)..( 9): Result.004 file - promoters50/1010367
caaaaatta

SEQ ID NO: 153185 - DNA, 9 bp, Unknown
  misc_feature (1)..( 9): Result.004 file - promoters50/1010367
taaaaatta

SEQ ID NO: 153186 - DNA, 9 bp, Unknown
  misc_feature (1)..( 9): Result.004 file - promoters50/1010367
caaaaaact

SEQ ID NO: 153187 - DNA, 9 bp, Unknown
  misc_feature (1)..( 9): Result.004 file - promoters50/1010367
aaaatatta

SEQ ID NO: 153188 - DNA, 9 bp, Unknown
  misc_feature (1)..( 9): Result.004 file - promoters50/1010367
ccaaaattc

SEQ ID NO: 153189 - DNA, 9 bp, Unknown
  misc_feature (1)..( 9): Result.004 file - promoters50/1010367
ccaaaattg

SEQ ID NO: 153190 - DNA, 11 bp, Unknown
  misc_feature (1)..( 11): Result.004 file - promoters50/1010367
ataatgaatta

SEQ ID NO: 153191 - DNA, 11 bp, Unknown
  misc_feature (1)..( 11): Result.004 file - promoters50/1010367
taaataaattt

SEQ ID NO: 153192 - DNA, 11 bp, Unknown
  misc_feature (1)..( 11): Result.004 file - promoters50/1010367
aaagtgaattt

SEQ ID NO: 153193 - DNA, 11 bp, Unknown
  misc_feature (1)..( 11): Result.004 file - promoters50/1010367
aaaatgaaaaa

SEQ ID NO: 153194 - DNA, 11 bp, Unknown
  misc_feature (1)..( 11): Result.004 file - promoters50/1010367
taaattaatta

SEQ ID NO: 153195 - DNA, 11 bp, Unknown
  misc_feature (1)..( 11): Result.004 file - promoters50/1010367
taactgatttt

SEQ ID NO: 153196 - DNA, 11 bp, Unknown
  misc_feature (1)..( 11): Result.004 file - promoters50/1010373
caaattattta

SEQ ID NO: 153197 - DNA, 11 bp, Unknown
  misc_feature (1)..( 11): Result.004 file - promoters50/1010373
ttaatttacaa

SEQ ID NO: 153198 - DNA, 11 bp, Unknown
  misc_feature (1)..( 11): Result.004 file - promoters50/1010373
ttaattagatt

SEQ ID NO: 153199 - DNA, 11 bp, Unknown
  misc_feature (1)..( 11): Result.004 file - promoters50/1010373
ataatttacat

SEQ ID NO: 153200 - DNA, 11 bp, Unknown
  misc_feature (1)..( 11): Result.004 file - promoters50/1010373
ataaattacaa

SEQ ID NO: 153201 - DNA, 11 bp, Unknown
  misc_feature (1)..( 11): Result.004 file - promoters50/1010373
ttaaaatctta

SEQ ID NO: 153202 - DNA, 11 bp, Unknown
  misc_feature (1)..( 11): Result.004 file - promoters50/1010411
aaaatatacag

SEQ ID NO: 153203 - DNA, 8 bp, Unknown
  misc_feature (1)..( 8): Result.004 file - promoters50/1010411
aataattg

SEQ ID NO: 153204 - DNA, 8 bp, Unknown
  misc_feature (1)..( 8): Result.004 file - promoters50/1010411
aattattt

SEQ ID NO: 153205 - DNA, 8 bp, Unknown
  misc_feature (1)..( 8): Result.004 file - promoters50/1010411
catacttg

SEQ ID NO: 153206 - DNA, 9 bp, Unknown
  misc_feature (1)..( 9): Result.004 file - promoters50/1010411
tatgtttgc

SEQ ID NO: 153207 - DNA, 9 bp, Unknown
  misc_feature (1)..( 9): Result.004 file - promoters50/1010411
tatattttt

SEQ ID NO: 153208 - DNA, 9 bp, Unknown
  misc_feature (1)..( 9): Result.004 file - promoters50/1010411
ggtgtttgc

SEQ ID NO: 153209 - DNA, 8 bp, Unknown
  misc_feature (1)..( 8): Result.004 file - promoters50/1010411
aaaatgag

SEQ ID NO: 153210 - DNA, 8 bp, Unknown
  misc_feature (1)..( 8): Result.004 file - promoters50/1010411
aaagtgaa

SEQ ID NO: 153211 - DNA, 8 bp, Unknown
  misc_feature (1)..( 8): Result.004 file - promoters50/1010411
gaagagaa

SEQ ID NO: 153212 - DNA, 10 bp, Unknown
  misc_feature (1)..( 10): Result.004 file - promoters50/1010411
gtaatcgatg

SEQ ID NO: 153213 - DNA, 10 bp, Unknown
  misc_feature (1)..( 10): Result.004 file - promoters50/1010411
gtaattgatg

SEQ ID NO: 153214 - DNA, 10 bp, Unknown
  misc_feature (1)..( 10): Result.004 file - promoters50/1010411
ggacttgatg

SEQ ID NO: 153215 - DNA, 12 bp, Unknown
  misc_feature (1)..( 12): Result.004 file - promoters50/1010411
tagaattactaa

SEQ ID NO: 153216 - DNA, 12 bp, Unknown
  misc_feature (1)..( 12): Result.004 file - promoters50/1010411
tagatttattaa

SEQ ID NO: 153217 - DNA, 12 bp, Unknown
  misc_feature (1)..( 12): Result.004 file - promoters50/1010411
gctacttattct

SEQ ID NO: 153218 - DNA, 8 bp, Unknown
  misc_feature (1)..( 8): Result.004 file - promoters50/1010411
aattttaa

SEQ ID NO: 153219 - DNA, 8 bp, Unknown
  misc_feature (1)..( 8): Result.004 file - promoters50/1010411
aatttttt

SEQ ID NO: 153220 - DNA, 9 bp, Unknown
  misc_feature (1)..( 9): Result.004 file - promoters50/1010411
tattctttt

SEQ ID NO: 153221 - DNA, 12 bp, Unknown
  misc_feature (1)..( 12): Result.004 file - promoters50/1010411
tttttctaaaat

SEQ ID NO: 153222 - DNA, 12 bp, Unknown
  misc_feature (1)..( 12): Result.004 file - promoters50/1010411
gttttctacaat

SEQ ID NO: 153223 - DNA, 12 bp, Unknown
  misc_feature (1)..( 12): Result.004 file - promoters50/1010418
gttttctgcaca

SEQ ID NO: 153224 - DNA, 11 bp, Unknown
  misc_feature (1)..( 11): Result.004 file - promoters50/1010418
ccagaagagaa

SEQ ID NO: 153225 - DNA, 11 bp, Unknown
  misc_feature (1)..( 11): Result.004 file - promoters50/1010418
ccaaaagaaat

SEQ ID NO: 153226 - DNA, 11 bp, Unknown
  misc_feature (1)..( 11): Result.004 file - promoters50/1010418
tgggaagtgaa

SEQ ID NO: 153227 - DNA, 8 bp, Unknown
  misc_feature (1)..( 8): Result.004 file - promoters50/1010418
ggatagat

SEQ ID NO: 153228 - DNA, 8 bp, Unknown
  misc_feature (1)..( 8): Result.004 file - promoters50/1010418
ggaaagaa

SEQ ID NO: 153229 - DNA, 8 bp, Unknown
  misc_feature (1)..( 8): Result.004 file - promoters50/1010418
tgaaagaa

SEQ ID NO: 153230 - DNA, 7 bp, Unknown
  misc_feature (1)..( 7): Result.004 file - promoters50/1010418
gagtgat

SEQ ID NO: 153231 - DNA, 7 bp, Unknown
  misc_feature (1)..( 7): Result.004 file - promoters50/1010418
tagtgat

SEQ ID NO: 153232 - DNA, 7 bp, Unknown
  misc_feature (1)..( 7): Result.004 file - promoters50/1010418
tagcgat

SEQ ID NO: 153233 - DNA, 8 bp, Unknown
  misc_feature (1)..( 8): Result.004 file - promoters50/1010418
ggcctaaa

SEQ ID NO: 153234 - DNA, 8 bp, Unknown
  misc_feature (1)..( 8): Result.004 file - promoters50/1010418
ggcctaat

SEQ ID NO: 153235 - DNA, 8 bp, Unknown
  misc_feature (1)..( 8): Result.004 file - promoters50/1010425
ggcctaat

SEQ ID NO: 153236 - DNA, 11 bp, Unknown
  misc_feature (1)..( 11): Result.004 file - promoters50/1010425
gaagaaataca

SEQ ID NO: 153237 - DNA, 11 bp, Unknown
  misc_feature (1)..( 11): Result.004 file - promoters50/1010425
aatgaaaaaca

SEQ ID NO: 153238 - DNA, 11 bp, Unknown
  misc_feature (1)..( 11): Result.004 file - promoters50/1010425
taggaaaaatt

SEQ ID NO: 153239 - DNA, 11 bp, Unknown
  misc_feature (1)..( 11): Result.004 file - promoters50/1010425
aatgagaaagt

SEQ ID NO: 153240 - DNA, 10 bp, Unknown
  misc_feature (1)..( 10): Result.004 file - promoters50/1010425
actaatcagg

SEQ ID NO: 153241 - DNA, 10 bp, Unknown
  misc_feature (1)..( 10): Result.004 file - promoters50/1010425
cgaaattagg

SEQ ID NO: 153242 - DNA, 10 bp, Unknown
  misc_feature (1)..( 10): Result.004 file - promoters50/1010425
taaaattaaa

SEQ ID NO: 153243 - DNA, 10 bp, Unknown
  misc_feature (1)..( 10): Result.004 file - promoters50/1010429
taaaatttta

SEQ ID NO: 153244 - DNA, 10 bp, Unknown
  misc_feature (1)..( 10): Result.004 file - promoters50/1010429
gttatttatt

SEQ ID NO: 153245 - DNA, 10 bp, Unknown
  misc_feature (1)..( 10): Result.004 file - promoters50/1010429
gttattaatt

SEQ ID NO: 153246 - DNA, 10 bp, Unknown
  misc_feature (1)..( 10): Result.004 file - promoters50/1010429
taattttatt

SEQ ID NO: 153247 - DNA, 10 bp, Unknown
  misc_feature (1)..( 10): Result.004 file - promoters50/1010429
gttttttaat

SEQ ID NO: 153248 - DNA, 10 bp, Unknown
  misc_feature (1)..( 10): Result.004 file - promoters50/1010429
tttgtttaac

SEQ ID NO: 153249 - DNA, 10 bp, Unknown
  misc_feature (1)..( 10): Result.004 file - promoters50/1010429
tgcattaatg

SEQ ID NO: 153250 - DNA, 10 bp, Unknown
  misc_feature (1)..( 10): Result.004 file - promoters50/1010429
ctctttaatt

SEQ ID NO: 153251 - DNA, 14 bp, Unknown
  misc_feature (1)..( 14): Result.004 file - promoters50/1010429
tcaagcttatacaa

SEQ ID NO: 153252 - DNA, 14 bp, Unknown
  misc_feature (1)..( 14): Result.004 file - promoters50/1010429
aagcaattatacaa

SEQ ID NO: 153253 - DNA, 14 bp, Unknown
  misc_feature (1)..( 14): Result.004 file - promoters50/1010429
aattattcatacaa

SEQ ID NO: 153254 - DNA, 14 bp, Unknown
  misc_feature (1)..( 14): Result.004 file - promoters50/1010429
aaaaaatgatagca

SEQ ID NO: 153255 - DNA, 14 bp, Unknown
  misc_feature (1)..( 14): Result.004 file - promoters50/1010429
aaaaaatgataaga

SEQ ID NO: 153256 - DNA, 14 bp, Unknown
  misc_feature (1)..( 14): Result.004 file - promoters50/1010429
tgtcaactaaaaaa

SEQ ID NO: 153257 - DNA, 12 bp, Unknown
  misc_feature (1)..( 12): Result.004 file - promoters50/1010429
ttatacaaatcc

SEQ ID NO: 153258 - DNA, 12 bp, Unknown
  misc_feature (1)..( 12): Result.004 file - promoters50/1010429
aaatataaataa

SEQ ID NO: 153259 - DNA, 12 bp, Unknown
  misc_feature (1)..( 12): Result.004 file - promoters50/1010429
ttatataaacat

SEQ ID NO: 153260 - DNA, 12 bp, Unknown
  misc_feature (1)..( 12): Result.004 file - promoters50/1010429
gtatataaatag

SEQ ID NO: 153261 - DNA, 12 bp, Unknown
  misc_feature (1)..( 12): Result.004 file - promoters50/1010429
ttaagtaaaatc

SEQ ID NO: 153262 - DNA, 12 bp, Unknown
  misc_feature (1)..( 12): Result.004 file - promoters50/1010429
ttctataaaata

SEQ ID NO: 153263 - DNA, 12 bp, Unknown
  misc_feature (1)..( 12): Result.004 file - promoters50/1010429
tagtataaataa

SEQ ID NO: 153264 - DNA, 12 bp, Unknown
  misc_feature (1)..( 12): Result.004 file - promoters50/1010431
ttatatatagaa

SEQ ID NO: 153265 - DNA, 11 bp, Unknown
  misc_feature (1)..( 11): Result.004 file - promoters50/1010431
aattaaattta

SEQ ID NO: 153266 - DNA, 11 bp, Unknown
  misc_feature (1)..( 11): Result.004 file - promoters50/1010431
aattcaatttt

SEQ ID NO: 153267 - DNA, 11 bp, Unknown
  misc_feature (1)..( 11): Result.004 file - promoters50/1010431
tggtaaactta

SEQ ID NO: 153268 - DNA, 11 bp, Unknown
  misc_feature (1)..( 11): Result.004 file - promoters50/1010431
ttgtagactgg

SEQ ID NO: 153269 - DNA, 11 bp, Unknown
  misc_feature (1)..( 11): Result.004 file - promoters50/1010431
gcataatcttt

SEQ ID NO: 153270 - DNA, 11 bp, Unknown
  misc_feature (1)..( 11): Result.004 file - promoters50/1010491
tgttaaacttg

SEQ ID NO: 153271 - DNA, 11 bp, Unknown
  misc_feature (1)..( 11): Result.004 file - promoters50/1010491
aataaagaaaa

SEQ ID NO: 153272 - DNA, 11 bp, Unknown
  misc_feature (1)..( 11): Result.004 file - promoters50/1010491
taagaagtaaa

SEQ ID NO: 153273 - DNA, 11 bp, Unknown
  misc_feature (1)..( 11): Result.004 file - promoters50/1010491
tttaaagaaat

SEQ ID NO: 153274 - DNA, 11 bp, Unknown
  misc_feature (1)..( 11): Result.004 file - promoters50/1010491
gataaagaagt

SEQ ID NO: 153275 - DNA, 11 bp, Unknown
  misc_feature (1)..( 11): Result.004 file - promoters50/1010491
ttttaagttat

SEQ ID NO: 153276 - DNA, 11 bp, Unknown
  misc_feature (1)..( 11): Result.004 file - promoters50/1010491
tcttaagtcag

SEQ ID NO: 153277 - DNA, 10 bp, Unknown
  misc_feature (1)..( 10): Result.004 file - promoters50/1010491
catgctttta

SEQ ID NO: 153278 - DNA, 10 bp, Unknown
  misc_feature (1)..( 10): Result.004 file - promoters50/1010491
gatgtttttt

SEQ ID NO: 153279 - DNA, 10 bp, Unknown
  misc_feature (1)..( 10): Result.004 file - promoters50/1010491
tatgcatttt

SEQ ID NO: 153280 - DNA, 10 bp, Unknown
  misc_feature (1)..( 10): Result.004 file - promoters50/1010491
catgtttaat

SEQ ID NO: 153281 - DNA, 10 bp, Unknown
  misc_feature (1)..( 10): Result.004 file - promoters50/1010491
atgtcatttt

SEQ ID NO: 153282 - DNA, 10 bp, Unknown
  misc_feature (1)..( 10): Result.004 file - promoters50/1010524
catgttgcat

SEQ ID NO: 153283 - DNA, 9 bp, Unknown
  misc_feature (1)..( 9): Result.004 file - promoters50/1010524
acaaacata

SEQ ID NO: 153284 - DNA, 9 bp, Unknown
  misc_feature (1)..( 9): Result.004 file - promoters50/1010524
acaaacgtt

SEQ ID NO: 153285 - DNA, 9 bp, Unknown
  misc_feature (1)..( 9): Result.004 file - promoters50/1010524
tcaagcgtt

SEQ ID NO: 153286 - DNA, 8 bp, Unknown
  misc_feature (1)..( 8): Result.004 file - promoters50/1010524
gaacaaat

SEQ ID NO: 153287 - DNA, 8 bp, Unknown
  misc_feature (1)..( 8): Result.004 file - promoters50/1010524
taactaat

SEQ ID NO: 153288 - DNA, 8 bp, Unknown
  misc_feature (1)..( 8): Result.004 file - promoters50/1010524
taacaaag

SEQ ID NO: 153289 - DNA, 8 bp, Unknown
  misc_feature (1)..( 8): Result.004 file - promoters50/1010524
gaataaaa

SEQ ID NO: 153290 - DNA, 10 bp, Unknown
  misc_feature (1)..( 10): Result.004 file - promoters50/1010524
tattttgaaa

SEQ ID NO: 153291 - DNA, 10 bp, Unknown
  misc_feature (1)..( 10): Result.004 file - promoters50/1010524
ccttttgaaa

SEQ ID NO: 153292 - DNA, 10 bp, Unknown
  misc_feature (1)..( 10): Result.004 file - promoters50/1010524
tattttgttg

SEQ ID NO: 153293 - DNA, 10 bp, Unknown
  misc_feature (1)..( 10): Result.004 file - promoters50/1010524
ggttttgaat

SEQ ID NO: 153294 - DNA, 7 bp, Unknown
  misc_feature (1)..( 7): Result.004 file - promoters50/1010524
atatttt

SEQ ID NO: 153295 - DNA, 7 bp, Unknown
  misc_feature (1)..( 7): Result.004 file - promoters50/1010524
atattta

SEQ ID NO: 153296 - DNA, 7 bp, Unknown
  misc_feature (1)..( 7): Result.004 file - promoters50/1010524
atatttt

SEQ ID NO: 153297 - DNA, 7 bp, Unknown
  misc_feature (1)..( 7): Result.004 file - promoters50/1010524
aaaatta

SEQ ID NO: 153298 - DNA, 7 bp, Unknown
  misc_feature (1)..( 7): Result.004 file - promoters50/1010524
aaaattt

SEQ ID NO: 153299 - DNA, 7 bp, Unknown
  misc_feature (1)..( 7): Result.004 file - promoters50/1010524
aaacttt

SEQ ID NO: 153300 - DNA, 7 bp, Unknown
  misc_feature (1)..( 7): Result.004 file - promoters50/1010524
tacttgc

SEQ ID NO: 153301 - DNA, 7 bp, Unknown
  misc_feature (1)..( 7): Result.004 file - promoters50/1010524
tacttgt

SEQ ID NO: 153302 - DNA, 7 bp, Unknown
  misc_feature (1)..( 7): Result.004 file - promoters50/1010524
gacttgt

SEQ ID NO: 153303 - DNA, 11 bp, Unknown
  misc_feature (1)..( 11): Result.004 file - promoters50/1010524
taatatatcat

SEQ ID NO: 153304 - DNA, 11 bp, Unknown
  misc_feature (1)..( 11): Result.004 file - promoters50/1010524
aaatttatcat

SEQ ID NO: 153305 - DNA, 11 bp, Unknown
  misc_feature (1)..( 11): Result.004 file - promoters50/1010536
aaacttatttt

SEQ ID NO: 153306 - DNA, 9 bp, Unknown
  misc_feature (1)..( 9): Result.004 file - promoters50/1010536
tcacataga

SEQ ID NO: 153307 - DNA, 9 bp, Unknown
  misc_feature (1)..( 9): Result.004 file - promoters50/1010536
acacatacc

SEQ ID NO: 153308 - DNA, 9 bp, Unknown
  misc_feature (1)..( 9): Result.004 file - promoters50/1010536
tcaaataga

SEQ ID NO: 153309 - DNA, 9 bp, Unknown
  misc_feature (1)..( 9): Result.004 file - promoters50/1010562
taaaatagg

SEQ ID NO: 153310 - DNA, 10 bp, Unknown
  misc_feature (1)..( 10): Result.004 file - promoters50/1010562
gatatctttc

SEQ ID NO: 153311 - DNA, 10 bp, Unknown
  misc_feature (1)..( 10): Result.004 file - promoters50/1010562
tccatcattc

SEQ ID NO: 153312 - DNA, 10 bp, Unknown
  misc_feature (1)..( 10): Result.004 file - promoters50/1010562
tttatttttt

SEQ ID NO: 153313 - DNA, 10 bp, Unknown
  misc_feature (1)..( 10): Result.004 file - promoters50/1010562
cctattttta

SEQ ID NO: 153314 - DNA, 10 bp, Unknown
  misc_feature (1)..( 10): Result.004 file - promoters50/1010562
gatatattta

SEQ ID NO: 153315 - DNA, 10 bp, Unknown
  misc_feature (1)..( 10): Result.004 file - promoters50/1010562
ctgattgtta

SEQ ID NO: 153316 - DNA, 10 bp, Unknown
  misc_feature (1)..( 10): Result.004 file - promoters50/1010562
actaaagaag

SEQ ID NO: 153317 - DNA, 10 bp, Unknown
  misc_feature (1)..( 10): Result.004 file - promoters50/1010562
gctatagaaa

SEQ ID NO: 153318 - DNA, 10 bp, Unknown
  misc_feature (1)..( 10): Result.004 file - promoters50/1010562
caaaaataag

SEQ ID NO: 153319 - DNA, 10 bp, Unknown
  misc_feature (1)..( 10): Result.004 file - promoters50/1010562
actaaagaaa

SEQ ID NO: 153320 - DNA, 11 bp, Unknown
  misc_feature (1)..( 11): Result.004 file - promoters50/1010571
aggaaattaaa

SEQ ID NO: 153321 - DNA, 41 bp, Unknown; identical to SEQ ID NO: 100565
  misc_feature (1)..( 41): Result.004 file - promoters50/1010571

SEQ ID NO: 153322 - DNA, 41 bp, Unknown; identical to SEQ ID NO: 100566
  misc_feature (1)..( 41): Result.004 file - promoters50/1010571

SEQ ID NO: 153323 - DNA, 41 bp, Unknown
  misc_feature (1)..( 41): Result.004 file - promoters50/1010571
acgccattggtagcaaggtataaatttaatagcaatctgaa

SEQ ID NO: 153324 - DNA, 41 bp, Unknown
  misc_feature (1)..( 41): Result.004 file - promoters50/1010571
cacgtttttggtgttacaaataatttagaaagaaggtggat

SEQ ID NO: 153325 - DNA, 41 bp, Unknown
  misc_feature (1)..( 41): Result.004 file - promoters50/1010571
tcgtcgctggcttctagaaccatttttttattctgaaaaca

SEQ ID NO: 153326 - DNA, 41 bp, Unknown
  misc_feature (1)..( 41): Result.004 file - promoters50/1010594
cgtgtactcacttccattatcgatcgaatcatcaatttaat

SEQ ID NO: 153327 - DNA, 10 bp, Unknown
  misc_feature (1)..( 10): Result.004 file - promoters50/1010594
aaattgaaac

SEQ ID NO: 153328 - DNA, 10 bp, Unknown
  misc_feature (1)..( 10): Result.004 file - promoters50/1010594
cgtttgaaac

SEQ ID NO: 153329 - DNA, 10 bp, Unknown
  misc_feature (1)..( 10): Result.004 file - promoters50/1010625
aaaatgaatg

SEQ ID NO: 153330 - DNA, 9 bp, Unknown
  misc_feature (1)..( 9): Result.004 file - promoters50/1010625
tttcttttc

SEQ ID NO: 153331 - DNA, 9 bp, Unknown
  misc_feature (1)..( 9): Result.004 file - promoters50/1010625
gagcttttc

SEQ ID NO: 153332 - DNA, 9 bp, Unknown
  misc_feature (1)..( 9): Result.004 file - promoters50/1010625
tttattttt

SEQ ID NO: 153333 - DNA, 9 bp, Unknown
  misc_feature (1)..( 9): Result.004 file - promoters50/1010625
attatttaa

SEQ ID NO: 153334 - DNA, 12 bp, Unknown
  misc_feature (1)..( 12): Result.004 file - promoters50/1010625
gaaatctaaatc

SEQ ID NO: 153335 - DNA, 12 bp, Unknown
  misc_feature (1)..( 12): Result.004 file - promoters50/1010625
aaaatataaacg

SEQ ID NO: 153336 - DNA, 12 bp, Unknown
  misc_feature (1)..( 12): Result.004 file - promoters50/1010625
cttttcttaatc

SEQ ID NO: 153337 - DNA, 12 bp, Unknown
  misc_feature (1)..( 12): Result.004 file - promoters50/1010625
aaattatttttc

SEQ ID NO: 153338 - DNA, 7 bp, Unknown
  misc_feature (1)..( 7): Result.004 file - promoters50/1010625
tataaaa

SEQ ID NO: 153339 - DNA, 7 bp, Unknown
  misc_feature (1)..( 7): Result.004 file - promoters50/1010625
cataaaa

SEQ ID NO: 153340 - DNA, 7 bp, Unknown
  misc_feature (1)..( 7): Result.004 file - promoters50/1010625
catgaaa

SEQ ID NO: 153341 - DNA, 9 bp, Unknown
  misc_feature (1)..( 9): Result.004 file - promoters50/1010625
ataaagttt

SEQ ID NO: 153342 - DNA, 9 bp, Unknown
  misc_feature (1)..( 9): Result.004 file - promoters50/1010625
ataaacttt

SEQ ID NO: 153343 - DNA, 9 bp, Unknown
  misc_feature (1)..( 9): Result.004 file - promoters50/1010625
tgaaacttc

SEQ ID NO: 153344 - DNA, 8 bp, Unknown
  misc_feature (1)..( 8): Result.004 file - promoters50/1010625
agtgaaat

SEQ ID NO: 153345 - DNA, 8 bp, Unknown
  misc_feature (1)..( 8): Result.004 file - promoters50/1010625
catgaaat

SEQ ID NO: 153346 - DNA, 8 bp, Unknown
  misc_feature (1)..( 8): Result.004 file - promoters50/1010677
cataaaac

SEQ ID NO: 153347 - DNA, 11 bp, Unknown
  misc_feature (1)..( 11): Result.004 file - promoters50/1010677
tttgctttttt

SEQ ID NO: 153348 - DNA, 11 bp, Unknown
  misc_feature (1)..( 11): Result.004 file - promoters50/1010677
ttttcttttat

SEQ ID NO: 153349 - DNA, 11 bp, Unknown
  misc_feature (1)..( 11): Result.004 file - promoters50/1010693
gtgtctgttat

SEQ ID NO: 153350 - DNA, 12 bp, Unknown
  misc_feature (1)..( 12): Result.004 file - promoters50/1010693
ttttcattcatt

SEQ ID NO: 153351 - DNA, 12 bp, Unknown
  misc_feature (1)..( 12): Result.004 file - promoters50/1010693
attttatttgaa

SEQ ID NO: 153352 - DNA, 12 bp, Unknown
  misc_feature (1)..( 12): Result.004 file - promoters50/1010693
ttttaattaaaa

SEQ ID NO: 153353 - DNA, 12 bp, Unknown
  misc_feature (1)..( 12): Result.004 file - promoters50/1010693
ctttaatttttt

SEQ ID NO: 153354 - DNA, 12 bp, Unknown
  misc_feature (1)..( 12): Result.004 file - promoters50/1010693
aataaataacta

SEQ ID NO: 153355 - DNA, 12 bp, Unknown
  misc_feature (1)..( 12): Result.004 file - promoters50/1010693
aaaaaatatata

SEQ ID NO: 153356 - DNA, 17 bp, Unknown
  misc_feature (1)..( 17): Result.004 file - promoters50/1010693
ttttaattttaataaat

SEQ ID NO: 153357 - DNA, 17 bp, Unknown
  misc_feature (1)..( 17): Result.004 file - promoters50/1010693
gaaggtttttaaaagac

SEQ ID NO: 153358 - DNA, 17 bp, Unknown
  misc_feature (1)..( 17): Result.004 file - promoters50/1010693
cacggcttttaattttg

SEQ ID NO: 153359 - DNA, 17 bp, Unknown
  misc_feature (1)..( 17): Result.004 file - promoters50/1010693
tttattttttataagaa

SEQ ID NO: 153360 - DNA, 17 bp, Unknown
  misc_feature (1)..( 17): Result.004 file - promoters50/1010693
tcatttatttactttct

SEQ ID NO: 153361 - DNA, 17 bp, Unknown
  misc_feature (1)..( 17): Result.004 file - promoters50/1010693
acattgatataaaaaaa

SEQ ID NO: 153362 - DNA, 10 bp, Unknown
  misc_feature (1)..( 10): Result.004 file - promoters50/1010693
aaaactaaaa

SEQ ID NO: 153363 - DNA, 10 bp, Unknown
  misc_feature (1)..( 10): Result.004 file - promoters50/1010693
caaattaaaa

SEQ ID NO: 153364 - DNA, 10 bp, Unknown
  misc_feature (1)..( 10): Result.004 file - promoters50/1010693
gaaacaaaaa

SEQ ID NO: 153365 - DNA, 10 bp, Unknown
  misc_feature (1)..( 10): Result.004 file - promoters50/1010693
aaaattactt

SEQ ID NO: 153366 - DNA, 11 bp, Unknown
  misc_feature (1)..( 11): Result.004 file - promoters50/1010693
taatatttgtt

SEQ ID NO: 153367 - DNA, 11 bp, Unknown
  misc_feature (1)..( 11): Result.004 file - promoters50/1010710
ggaaacacaaa

SEQ ID NO: 153368 - DNA, 9 bp, Unknown
  misc_feature (1)..( 9): Result.004 file - promoters50/1010710
tattattac

SEQ ID NO: 153369 - DNA, 9 bp, Unknown
  misc_feature (1)..( 9): Result.004 file - promoters50/1010710
aattatttt

SEQ ID NO: 153370 - DNA, 9 bp, Unknown
  misc_feature (1)..( 9): Result.004 file - promoters50/1010747
aatgatttt

SEQ ID NO: 153371 - DNA, 11 bp, Unknown
  misc_feature (1)..( 11): Result.004 file - promoters50/1010747
ctttggaatag

SEQ ID NO: 153372 - DNA, 11 bp, Unknown
  misc_feature (1)..( 11): Result.004 file - promoters50/1010747
ctttggaataa

SEQ ID NO: 153373 - DNA, 11 bp, Unknown
  misc_feature (1)..( 11): Result.004 file - promoters50/1010747
aaaaagaataa

SEQ ID NO: 153374 - DNA, 9 bp, Unknown
  misc_feature (1)..( 9): Result.004 file - promoters50/1010747
aatgattga

SEQ ID NO: 153375 - DNA, 9 bp, Unknown
  misc_feature (1)..( 9): Result.004 file - promoters50/1010747
gatgatttg

SEQ ID NO: 153376 - DNA, 9 bp, Unknown
  misc_feature (1)..( 9): Result.004 file - promoters50/1010747
gataatttg

SEQ ID NO: 153377 - DNA, 9 bp, Unknown
  misc_feature (1)..( 9): Result.004 file - promoters50/1010747
tatatttta

SEQ ID NO: 153378 - DNA, 14 bp, Unknown
  misc_feature (1)..( 14): Result.004 file - promoters50/1010747
tgttatttacaaat

SEQ ID NO: 153379 - DNA, 14 bp, Unknown
  misc_feature (1)..( 14): Result.004 file - promoters50/1010747
aaataactacaaat

SEQ ID NO: 153380 - DNA, 14 bp, Unknown
  misc_feature (1)..( 14): Result.004 file - promoters50/1010747
aaaaaactaaaaag

SEQ ID NO: 153381 - DNA, 10 bp, Unknown
  misc_feature (1)..( 10): Result.004 file - promoters50/1010747
aaaatttatt

SEQ ID NO: 153382 - DNA, 10 bp, Unknown
  misc_feature (1)..( 10): Result.004 file - promoters50/1010747
ataattgatt

SEQ ID NO: 153383 - DNA, 10 bp, Unknown
  misc_feature (1)..( 10): Result.004 file - promoters50/1010747
aaaaattatt

SEQ ID NO: 153384 - DNA, 10 bp, Unknown
  misc_feature (1)..( 10): Result.004 file - promoters50/1010747
taaaatttat

SEQ ID NO: 153385 - DNA, 10 bp, Unknown
  misc_feature (1)..( 10): Result.004 file - promoters50/1010747
caaaattctc

SEQ ID NO: 153386 - DNA, 10 bp, Unknown
  misc_feature (1)..( 10): Result.004 file - promoters50/1010747
aaaaattatt

SEQ ID NO: 153387 - DNA, 9 bp, Unknown
  misc_feature (1)..( 9): Result.004 file - promoters50/1010747
tatttaaca

SEQ ID NO: 153388 - DNA, 9 bp, Unknown
  misc_feature (1)..( 9): Result.004 file - promoters50/1010747
tatttagaa

SEQ ID NO: 153389 - DNA, 9 bp, Unknown
  misc_feature (1)..( 9): Result.004 file - promoters50/1010770
gattttgaa

SEQ ID NO: 153390 - DNA, 11 bp, Unknown
  misc_feature (1)..( 11): Result.004 file - promoters50/1010770
cattaaattaa

SEQ ID NO: 153391 - DNA, 11 bp, Unknown
  misc_feature (1)..( 11): Result.004 file - promoters50/1010770
ttctaaatttc

SEQ ID NO: 153392 - DNA, 11 bp, Unknown
  misc_feature (1)..( 11): Result.004 file - promoters50/1010770
aattaaattgt

SEQ ID NO: 153393 - DNA, 11 bp, Unknown
  misc_feature (1)..( 11): Result.004 file - promoters50/1010770
ccagaaatttg

SEQ ID NO: 153394 - DNA, 11 bp, Unknown
  misc_feature (1)..( 11): Result.004 file - promoters50/1010770
aaagaaagtgt

SEQ ID NO: 153395 - DNA, 11 bp, Unknown
  misc_feature (1)..( 11): Result.004 file - promoters50/1010770
aattaaaatta

SEQ ID NO: 153396 - DNA, 11 bp, Unknown
  misc_feature (1)..( 11): Result.004 file - promoters50/1010770
tgagaaattga

SEQ ID NO: 153397 - DNA, 14 bp, Unknown
  misc_feature (1)..( 14): Result.004 file - promoters50/1010770
acttgtctacataa

SEQ ID NO: 153398 - DNA, 14 bp, Unknown
  misc_feature (1)..( 14): Result.004 file - promoters50/1010770
ttttgtttacgtgt

SEQ ID NO: 153399 - DNA, 14 bp, Unknown
  misc_feature (1)..( 14): Result.004 file - promoters50/1010770
ttttctttatcttt

SEQ ID NO: 153400 - DNA, 14 bp, Unknown
  misc_feature (1)..( 14): Result.004 file - promoters50/1010770
aattctttactttg

SEQ ID NO: 153401 - DNA, 14 bp, Unknown
  misc_feature (1)..( 14): Result.004 file - promoters50/1010770
atttgttgttgacg

SEQ ID NO: 153402 - DNA, 14 bp, Unknown
  misc_feature (1)..( 14): Result.004 file - promoters50/1010815
aatttgatacattg

SEQ ID NO: 153403 - DNA, 11 bp, Unknown
  misc_feature (1)..( 11): Result.004 file - promoters50/1010815
ctatatataaa

SEQ ID NO: 153404 - DNA, 11 bp, Unknown
  misc_feature (1)..( 11): Result.004 file - promoters50/1010815
gtatataaaga

SEQ ID NO: 153405 - DNA, 11 bp, Unknown
  misc_feature (1)..( 11): Result.004 file - promoters50/1010815
ctatatttata

SEQ ID NO: 153406 - DNA, 11 bp, Unknown
  misc_feature (1)..( 11): Result.004 file - promoters50/1010815
ccatataaaac

SEQ ID NO: 153407 - DNA, 11 bp, Unknown
  misc_feature (1)..( 11): Result.004 file - promoters50/1010815
ccatataaatt

SEQ ID NO: 153408 - DNA, 11 bp, Unknown
  misc_feature (1)..( 11): Result.004 file - promoters50/1010819
cactataaatt

SEQ ID NO: 153409 - DNA, 13 bp, Unknown
  misc_feature (1)..( 13): Result.004 file - promoters50/1010819
atcaccaagaatg

SEQ ID NO: 153410 - DNA, 13 bp, Unknown
  misc_feature (1)..( 13): Result.004 file - promoters50/1010819
tagtaaaagaatc

SEQ ID NO: 153411 - DNA, 13 bp, Unknown
  misc_feature (1)..( 13): Result.004 file - promoters50/1010819
ttctaaaagcatc

SEQ ID NO: 153412 - DNA, 13 bp, Unknown
  misc_feature (1)..( 13): Result.004 file - promoters50/1010819
aattaaaaaaatt

SEQ ID NO: 153413 - DNA, 13 bp, Unknown
  misc_feature (1)..( 13): Result.004 file - promoters50/1010819
ttctaaaatctta

SEQ ID NO: 153414 - DNA, 13 bp, Unknown
  misc_feature (1)..( 13): Result.004 file - promoters50/1010819
gtctaaattgggt

SEQ ID NO: 153415 - DNA, 13 bp, Unknown
  misc_feature (1)..( 13): Result.004 file - promoters50/1010819
taaagatagcatc

SEQ ID NO: 153416 - DNA, 13 bp, Unknown
  misc_feature (1)..( 13): Result.004 file - promoters50/1010836
ttctaaaataata

SEQ ID NO: 153417 - DNA, 13 bp, Unknown
  misc_feature (1)..( 13): Result.004 file - promoters50/1010836
gacttcaattgaa

SEQ ID NO: 153418 - DNA, 13 bp, Unknown
  misc_feature (1)..( 13): Result.004 file - promoters50/1010836
aaaatcaattgaa

SEQ ID NO: 153419 - DNA, 13 bp, Unknown
  misc_feature (1)..( 13): Result.004 file - promoters50/1010836
gaaagcaatcgaa

SEQ ID NO: 153420 - DNA, 13 bp, Unknown
  misc_feature (1)..( 13): Result.004 file - promoters50/1010836
aaaataaatagat

SEQ ID NO: 153421 - DNA, 13 bp, Unknown
  misc_feature (1)..( 13): Result.004 file - promoters50/1010836
agagtaaagagag

SEQ ID NO: 153422 - DNA, 13 bp, Unknown
  misc_feature (1)..( 13): Result.004 file - promoters50/1010836
ggaaaaaatacag

SEQ ID NO: 153423 - DNA, 9 bp, Unknown
  misc_feature (1)..( 9): Result.004 file - promoters50/1010836
tgaaaaatc

SEQ ID NO: 153424 - DNA, 9 bp, Unknown
  misc_feature (1)..( 9): Result.004 file - promoters50/1010836
cgaataata

SEQ ID NO: 153425 - DNA, 9 bp, Unknown
  misc_feature (1)..( 9): Result.004 file - promoters50/1010836
ggaaaaaat

SEQ ID NO: 153426 - DNA, 9 bp, Unknown
  misc_feature (1)..( 9): Result.004 file - promoters50/1010836
ccaaaaatc

SEQ ID NO: 153427 - DNA, 9 bp, Unknown
  misc_feature (1)..( 9): Result.004 file - promoters50/1010836
ataaatatc

SEQ ID NO: 153428 - DNA, 9 bp, Unknown
  misc_feature (1)..( 9): Result.004 file - promoters50/1010902
ggaaaagag

SEQ ID NO: 153429 - DNA, 8 bp, Unknown
  misc_feature (1)..( 8): Result.004 file - promoters50/1010902
aatgaatt

SEQ ID NO: 153430 - DNA, 8 bp, Unknown
  misc_feature (1)..( 8): Result.004 file - promoters50/1010902
gatggatt

SEQ ID NO: 153431 - DNA, 8 bp, Unknown
  misc_feature (1)..( 8): Result.004 file - promoters50/1010902
aataaatt

SEQ ID NO: 153432 - DNA, 8 bp, Unknown
  misc_feature (1)..( 8): Result.004 file - promoters50/1010902
atgcaaac

SEQ ID NO: 153433 - DNA, 8 bp, Unknown
  misc_feature (1)..( 8): Result.004 file - promoters50/1010902
atgaaaaa

SEQ ID NO: 153434 - DNA, 8 bp, Unknown
  misc_feature (1)..( 8): Result.004 file - promoters50/1010902
tggaaaaa

SEQ ID NO: 153435 - DNA, 8 bp, Unknown
  misc_feature (1)..( 8): Result.004 file - promoters50/1010902
aaaaaaca

SEQ ID NO: 153436 - DNA, 8 bp, Unknown
  misc_feature (1)..( 8): Result.004 file - promoters50/1010902
taaacaca

SEQ ID NO: 153437 - DNA, 8 bp, Unknown
  misc_feature (1)..( 8): Result.004 file - promoters50/1010971
taatcact

SEQ ID NO: 153438 - DNA, 8 bp, Unknown
  misc_feature (1)..( 8): Result.004 file - promoters50/1010971
tattatta

SEQ ID NO: 153439 - DNA, 8 bp, Unknown
  misc_feature (1)..( 8): Result.004 file - promoters50/1010971
tgttatta

SEQ ID NO: 153440 - DNA, 8 bp, Unknown
  misc_feature (1)..( 8): Result.004 file - promoters50/1010971
tatcattt

SEQ ID NO: 153441 - DNA, 8 bp, Unknown
  misc_feature (1)..( 8): Result.004 file - promoters50/1010971
ttttcaat

SEQ ID NO: 153442 - DNA, 8 bp, Unknown
  misc_feature (1)..( 8): Result.004 file - promoters50/1010971
ttttcatt

SEQ ID NO: 153443 - DNA, 8 bp, Unknown
  misc_feature (1)..( 8): Result.004 file - promoters50/1010971
gtttgatt

SEQ ID NO: 153444 - DNA, 9 bp, Unknown
  misc_feature (1)..( 9): Result.004 file - promoters50/1010971
aattaaatc

SEQ ID NO: 153445 - DNA, 9 bp, Unknown
  misc_feature (1)..( 9): Result.004 file - promoters50/1010971
tcttatatc

SEQ ID NO: 153446 - DNA, 9 bp, Unknown
  misc_feature (1)..( 9): Result.004 file - promoters50/1010971
aattaaaaa

SEQ ID NO: 153447 - DNA, 9 bp, Unknown
  misc_feature (1)..( 9): Result.004 file - promoters50/1010971
aatttaatt

SEQ ID NO: 153448 - DNA, 8 bp, Unknown
  misc_feature (1)..( 8): Result.004 file - promoters50/1010971
cctccttg

SEQ ID NO: 153449 - DNA, 8 bp, Unknown
  misc_feature (1)..( 8): Result.004 file - promoters50/1010971
tatccttg

SEQ ID NO: 153450 - DNA, 8 bp, Unknown
  misc_feature (1)..( 8): Result.004 file - promoters50/1010971
cctccttc

SEQ ID NO: 153451 - DNA, 13 bp, Unknown
  misc_feature (1)..( 13): Result.004 file - promoters50/1010971
aataatttgaacc

SEQ ID NO: 153452 - DNA, 13 bp, Unknown
  misc_feature (1)..( 13): Result.004 file - promoters50/1010971
aatcatttgaagc

SEQ ID NO: 153453 - DNA, 13 bp, Unknown
  misc_feature (1)..( 13): Result.004 file - promoters50/1010971
tcccatttggctt

SEQ ID NO: 153454 - DNA, 13 bp, Unknown
  misc_feature (1)..( 13): Result.004 file - promoters50/1010971
ttctcgttgaagc

SEQ ID NO: 153455 - DNA, 8 bp, Unknown
  misc_feature (1)..( 8): Result.004 file - promoters50/1010971
cttttttt

SEQ ID NO: 153456 - DNA, 8 bp, Unknown
  misc_feature (1)..( 8): Result.004 file - promoters50/1010971
atttgttt

SEQ ID NO: 153457 - DNA, 8 bp, Unknown
  misc_feature (1)..( 8): Result.004 file - promoters50/1010971
atttgtat

SEQ ID NO: 153458 - DNA, 8 bp, Unknown
  misc_feature (1)..( 8): Result.004 file - promoters50/1010971
tctccttt

SEQ ID NO: 153459 - DNA, 8 bp, Unknown
  misc_feature (1)..( 8): Result.004 file - promoters50/1010971
tgtccttt

SEQ ID NO: 153460 - DNA, 8 bp, Unknown
  misc_feature (1)..( 8): Result.004 file - promoters50/1010971
tctccttc

SEQ ID NO: 153461 - DNA, 13 bp, Unknown
  misc_feature (1)..( 13): Result.004 file - promoters50/1010971
atcaaaacctcct

SEQ ID NO: 153462 - DNA, 13 bp, Unknown
  misc_feature (1)..( 13): Result.004 file - promoters50/1010971
atcataacctagt

SEQ ID NO: 153463 - DNA, 13 bp, Unknown
  misc_feature (1)..( 13): Result.004 file - promoters50/1010993
tacaaaatctcct

SEQ ID NO: 153464 - DNA, 14 bp, Unknown
  misc_feature (1)..( 14): Result.004 file - promoters50/1010993
cactgccacaaata

SEQ ID NO: 153465 - DNA, 14 bp, Unknown
  misc_feature (1)..( 14): Result.004 file - promoters50/1010993
tttcttcacaaaat

SEQ ID NO: 153466 - DNA, 14 bp, Unknown
  misc_feature (1)..( 14): Result.004 file - promoters50/1010993
taatagtacagata

SEQ ID NO: 153467 - DNA, 14 bp, Unknown
  misc_feature (1)..( 14): Result.004 file - promoters50/1010993
tttattcccaattc

SEQ ID NO: 153468 - DNA, 15 bp, Unknown
  misc_feature (1)..( 15): Result.004 file - promoters50/1010993
gaaacacacacaatg

SEQ ID NO: 153469 - DNA, 15 bp, Unknown
  misc_feature (1)..( 15): Result.004 file - promoters50/1010993
taacagcacaatcct

SEQ ID NO: 153470 - DNA, 11 bp, Unknown
  misc_feature (1)..( 11): Result.004 file - promoters50/1010993
tattaaaaaga

SEQ ID NO: 153471 - DNA, 11 bp, Unknown
  misc_feature (1)..( 11): Result.004 file - promoters50/1010993
ttataaaaaac

SEQ ID NO: 153472 - DNA, 11 bp, Unknown
  misc_feature (1)..( 11): Result.004 file - promoters50/1010993
atttaaaagag

SEQ ID NO: 153473 - DNA, 11 bp, Unknown
  misc_feature (1)..( 11): Result.004 file - promoters50/1010993
gaggaaacaac

SEQ ID NO: 153474 - DNA, 11 bp, Unknown
  misc_feature (1)..( 11): Result.004 file - promoters50/1010993
tattaaccaca

SEQ ID NO: 153475 - DNA, 11 bp, Unknown
  misc_feature (1)..( 11): Result.004 file - promoters50/1010993
aattagaagtt

SEQ ID NO: 153476 - DNA, 11 bp, Unknown
  misc_feature (1)..( 11): Result.004 file - promoters50/1010993
tatagatttta

SEQ ID NO: 153477 - DNA, 11 bp, Unknown
  misc_feature (1)..( 11): Result.004 file - promoters50/1010993
tatagaatttg

SEQ ID NO: 153478 - DNA, 11 bp, Unknown
  misc_feature (1)..( 11): Result.004 file - promoters50/1010993
ccggaatttta

SEQ ID NO: 153479 - DNA, 11 bp, Unknown
  misc_feature (1)..( 11): Result.004 file - promoters50/1010993
tgtagatttct

SEQ ID NO: 153480 - DNA, 11 bp, Unknown
  misc_feature (1)..( 11): Result.004 file - promoters50/1010993
atgacaatttg

SEQ ID NO: 153481 - DNA, 11 bp, Unknown
  misc_feature (1)..( 11): Result.004 file - promoters50/1010993
aataaaatacc

SEQ ID NO: 153482 - DNA, 11 bp, Unknown
  misc_feature (1)..( 11): Result.004 file - promoters50/1010993
attaacataat

SEQ ID NO: 153483 - DNA, 11 bp, Unknown
  misc_feature (1)..( 11): Result.004 file - promoters50/1010993
attaacaattt

SEQ ID NO: 153484 - DNA, 11 bp, Unknown
  misc_feature (1)..( 11): Result.004 file - promoters50/1010993
attgacaaaat

SEQ ID NO: 153485 - DNA, 11 bp, Unknown
  misc_feature (1)..( 11): Result.004 file - promoters50/1010993
tatgagaaaac

SEQ ID NO: 153486 - DNA, 11 bp, Unknown
  misc_feature (1)..( 11): Result.004 file - promoters50/1010993
aaagagaaagg

SEQ ID NO: 153487 - DNA, 11 bp, Unknown
  misc_feature (1)..( 11): Result.004 file - promoters50/1011036
aatgtgaactt

SEQ ID NO: 153488 - DNA, 9 bp, Unknown
  misc_feature (1)..( 9): Result.004 file - promoters50/1011036
aatttgttc

SEQ ID NO: 153489 - DNA, 9 bp, Unknown
  misc_feature (1)..( 9): Result.004 file - promoters50/1011036
ttttttttc

SEQ ID NO: 153490 - DNA, 9 bp, Unknown
  misc_feature (1)..( 9): Result.004 file - promoters50/1011036
aatttgttt

SEQ ID NO: 153491 - DNA, 9 bp, Unknown
  misc_feature (1)..( 9): Result.004 file - promoters50/1011036
taatttgtt

SEQ ID NO: 153492 - DNA, 9 bp, Unknown
  misc_feature (1)..( 9): Result.004 file - promoters50/1011036
taatttcaa

SEQ ID NO: 153493 - DNA, 9 bp, Unknown
  misc_feature (1)..( 9): Result.004 file - promoters50/1011036
aaatttgtt

SEQ ID NO: 153494 - DNA, 7 bp, Unknown
  misc_feature (1)..( 7): Result.004 file - promoters50/1011036
agagaaa

SEQ ID NO: 153495 - DNA, 7 bp, Unknown
  misc_feature (1)..( 7): Result.004 file - promoters50/1011036
agaaaaa

SEQ ID NO: 153496 - DNA, 7 bp, Unknown
  misc_feature (1)..( 7): Result.004 file - promoters50/1011036
tgaaaaa

SEQ ID NO: 153497 - DNA, 8 bp, Unknown
  misc_feature (1)..( 8): Result.004 file - promoters50/1011036
attctttg

SEQ ID NO: 153498 - DNA, 8 bp, Unknown
  misc_feature (1)..( 8): Result.004 file - promoters50/1011036
attttttt

SEQ ID NO: 153499 - DNA, 8 bp, Unknown
  misc_feature (1)..( 8): Result.004 file - promoters50/1011041
gttttttt

SEQ ID NO: 153500 - DNA, 11 bp, Unknown
  misc_feature (1)..( 11): Result.004 file - promoters50/1011041
atttagaaaga

SEQ ID NO: 153501 - DNA, 11 bp, Unknown
  misc_feature (1)..( 11): Result.004 file - promoters50/1011041
tcgaagaaagc

SEQ ID NO: 153502 - DNA, 11 bp, Unknown
  misc_feature (1)..( 11): Result.004 file - promoters50/1011041
tttaagaaagt

SEQ ID NO: 153503 - DNA, 11 bp, Unknown
  misc_feature (1)..( 11): Result.004 file - promoters50/1011041
aagaagaaaat

SEQ ID NO: 153504 - DNA, 11 bp, Unknown
  misc_feature (1)..( 11): Result.004 file - promoters50/1011041
gcacagatgaa

SEQ ID NO: 153505 - DNA, 11 bp, Unknown
  misc_feature (1)..( 11): Result.004 file - promoters50/1011041
tttgagaaatg

SEQ ID NO: 153506 - DNA, 17 bp, Unknown
  misc_feature (1)..( 17): Result.004 file - promoters50/1011041
ttataaaaattgaaact

SEQ ID NO: 153507 - DNA, 17 bp, Unknown
  misc_feature (1)..( 17): Result.004 file - promoters50/1011041
agaagcaaatcgaagaa

SEQ ID NO: 153508 - DNA, 17 bp, Unknown
  misc_feature (1)..( 17): Result.004 file - promoters50/1011041
tatataaaatattttaa

SEQ ID NO: 153509 - DNA, 17 bp, Unknown
  misc_feature (1)..( 17): Result.004 file - promoters50/1011041
acagatgaatttaaagc

SEQ ID NO: 153510 - DNA, 17 bp, Unknown
  misc_feature (1)..( 17): Result.004 file - promoters50/1011041
aaatgtattttgatact

SEQ ID NO: 153511 - DNA, 17 bp, Unknown
  misc_feature (1)..( 17): Result.004 file - promoters50/1011041
attaaccaatattcaga

SEQ ID NO: 153512 - DNA, 17 bp, Unknown
  misc_feature (1)..( 17): Result.004 file - promoters50/1011085
agaagaaaatcccgaga

SEQ ID NO: 153513 - DNA, 9 bp, Unknown
  misc_feature (1)..( 9): Result.004 file - promoters50/1011085
tgaaagaat

SEQ ID NO: 153514 - DNA, 9 bp, Unknown
  misc_feature (1)..( 9): Result.004 file - promoters50/1011085
ccaaagaaa

SEQ ID NO: 153515 - DNA, 9 bp, Unknown
  misc_feature (1)..( 9): Result.004 file - promoters50/1011085
tgaaaaaat

SEQ ID NO: 153516 - DNA, 8 bp, Unknown
  misc_feature (1)..( 8): Result.004 file - promoters50/1011085
gatgtatt

SEQ ID NO: 153517 - DNA, 8 bp, Unknown
  misc_feature (1)..( 8): Result.004 file - promoters50/1011085
gatatata

SEQ ID NO: 153518 - DNA, 8 bp, Unknown
  misc_feature (1)..( 8): Result.004 file - promoters50/1011108
tatggatt

SEQ ID NO: 153519 - DNA, 8 bp, Unknown
  misc_feature (1)..( 8): Result.004 file - promoters50/1011108
tatctttt

SEQ ID NO: 153520 - DNA, 8 bp, Unknown
  misc_feature (1)..( 8): Result.004 file - promoters50/1011108
tatttttt

SEQ ID NO: 153521 - DNA, 8 bp, Unknown
  misc_feature (1)..( 8): Result.004 file - promoters50/1011108
gattgttt

SEQ ID NO: 153522 - DNA, 9 bp, Unknown
  misc_feature (1)..( 9): Result.004 file - promoters50/1011108
ttttgattc

SEQ ID NO: 153523 - DNA, 9 bp, Unknown
  misc_feature (1)..( 9): Result.004 file - promoters50/1011108
ttttaattg

SEQ ID NO: 153524 - DNA, 9 bp, Unknown
  misc_feature (1)..( 9): Result.004 file - promoters50/1011212
gtttgcttc

SEQ ID NO: 153525 - DNA, 13 bp, Unknown
  misc_feature (1)..( 13): Result.004 file - promoters50/1011212
acattctttctta

SEQ ID NO: 153526 - DNA, 13 bp, Unknown
  misc_feature (1)..( 13): Result.004 file - promoters50/1011212
tacatctatctta

SEQ ID NO: 153527 - DNA, 13 bp, Unknown
  misc_feature (1)..( 13): Result.004 file - promoters50/1011212
acattctttaaaa

SEQ ID NO: 153528 - DNA, 7 bp, Unknown
  misc_feature (1)..( 7): Result.004 file - promoters50/1011212
taatttt

SEQ ID NO: 153529 - DNA, 7 bp, Unknown
  misc_feature (1)..( 7): Result.004 file - promoters50/1011212
aaatttt

SEQ ID NO: 153530 - DNA, 7 bp, Unknown
  misc_feature (1)..( 7): Result.004 file - promoters50/1011250
taatttc

SEQ ID NO: 153531 - DNA, 9 bp, Unknown
  misc_feature (1)..( 9): Result.004 file - promoters50/1011250
cataaacca

SEQ ID NO: 153532 - DNA, 9 bp, Unknown
  misc_feature (1)..( 9): Result.004 file - promoters50/1011250
tatatacca

SEQ ID NO: 153533 - DNA, 9 bp, Unknown
  misc_feature (1)..( 9): Result.004 file - promoters50/1011250
cataaataa

SEQ ID NO: 153534 - DNA, 9 bp, Unknown
  misc_feature (1)..( 9): Result.004 file - promoters50/1011250
attaaccaa

SEQ ID NO: 153535 - DNA, 9 bp, Unknown
  misc_feature (1)..( 9): Result.004 file - promoters50/1011250
cttaaccaa

SEQ ID NO: 153536 - DNA, 9 bp, Unknown
  misc_feature (1)..( 9): Result.004 file - promoters50/1011250
attcacctc

SEQ ID NO: 153537 - DNA, 12 bp, Unknown
  misc_feature (1)..( 12): Result.004 file - promoters50/1011250
ttactaaaatta

SEQ ID NO: 153538 - DNA, 12 bp, Unknown
  misc_feature (1)..( 12): Result.004 file - promoters50/1011250
aatagaaattta

SEQ ID NO: 153539 - DNA, 12 bp, Unknown
  misc_feature (1)..( 12): Result.004 file - promoters50/1011250
accctaaattta

SEQ ID NO: 153540 - DNA, 12 bp, Unknown
  misc_feature (1)..( 12): Result.004 file - promoters50/1011250
ttactaaaatat

SEQ ID NO: 153541 - DNA, 7 bp, Unknown
  misc_feature (1)..( 7): Result.004 file - promoters50/1011250
gttgatt

SEQ ID NO: 153542 - DNA, 7 bp, Unknown
  misc_feature (1)..( 7): Result.004 file - promoters50/1011250
tttgatt

SEQ ID NO: 153543 - DNA, 7 bp, Unknown
  misc_feature (1)..( 7): Result.004 file - promoters50/1011250
ttttatt

SEQ ID NO: 153544 - DNA, 9 bp, Unknown
  misc_feature (1)..( 9): Result.004 file - promoters50/1011250
ttcaatgaa

SEQ ID NO: 153545 - DNA, 9 bp, Unknown
  misc_feature (1)..( 9): Result.004 file - promoters50/1011250
attaatgaa

SEQ ID NO: 153546 - DNA, 9 bp, Unknown
  misc_feature (1)..( 9): Result.004 file - promoters50/1011250
attactgat

SEQ ID NO: 153547 - DNA, 7 bp, Unknown
  misc_feature (1)..( 7): Result.004 file - promoters50/1011250
taattaa

SEQ ID NO: 153548 - DNA, 7 bp, Unknown
  misc_feature (1)..( 7): Result.004 file - promoters50/1011250
aaattaa

SEQ ID NO: 153549 - DNA, 7 bp, Unknown
  misc_feature (1)..( 7): Result.004 file - promoters50/1011258
taattat

SEQ ID NO: 153550 - DNA, 13 bp, Unknown
  misc_feature (1)..( 13): Result.004 file - promoters50/1011258
cagaaaagaagac

SEQ ID NO: 153551 - DNA, 13 bp, Unknown
  misc_feature (1)..( 13): Result.004 file - promoters50/1011258
cagaaaccctttc

SEQ ID NO: 153552 - DNA, 13 bp, Unknown
  misc_feature (1)..( 13): Result.004 file - promoters50/1011258
cagaaaagaaaaa

SEQ ID NO: 153553 - DNA, 13 bp, Unknown
  misc_feature (1)..( 13): Result.004 file - promoters50/1011258
accaaaagacaaa

SEQ ID NO: 153554 - DNA, 12 bp, Unknown
  misc_feature (1)..( 12): Result.004 file - promoters50/1011258
cctttcttgttt

SEQ ID NO: 153555 - DNA, 12 bp, Unknown
  misc_feature (1)..( 12): Result.004 file - promoters50/1011258
actttcttcttt

SEQ ID NO: 153556 - DNA, 12 bp, Unknown
  misc_feature (1)..( 12): Result.004 file - promoters50/1011258
cctttccttctt

SEQ ID NO: 153557 - DNA, 12 bp, Unknown
  misc_feature (1)..( 12): Result.004 file - promoters50/1011303
tcttcccttatc

SEQ ID NO: 153558 - DNA, 9 bp, Unknown
  misc_feature (1)..( 9): Result.004 file - promoters50/1011303
tcataaact

SEQ ID NO: 153559 - DNA, 9 bp, Unknown
  misc_feature (1)..( 9): Result.004 file - promoters50/1011303
tcaaaaact

SEQ ID NO: 153560 - DNA, 9 bp, Unknown
  misc_feature (1)..( 9): Result.004 file - promoters50/1011303
ttatatact

SEQ ID NO: 153561 - DNA, 9 bp, Unknown
  misc_feature (1)..( 9): Result.004 file - promoters50/1011303
tcaaaaatt

SEQ ID NO: 153562 - DNA, 9 bp, Unknown
  misc_feature (1)..( 9): Result.004 file - promoters50/1011303
gtataaaca

SEQ ID NO: 153563 - DNA, 9 bp, Unknown
  misc_feature (1)..( 9): Result.004 file - promoters50/1011337
acaacaaca

SEQ ID NO: 153564 - DNA, 8 bp, Unknown
  misc_feature (1)..( 8): Result.004 file - promoters50/1011337
gtctaata

SEQ ID NO: 153565 - DNA, 8 bp, Unknown
  misc_feature (1)..( 8): Result.004 file - promoters50/1011337
gtctaaat

SEQ ID NO: 153566 - DNA, 8 bp, Unknown
  misc_feature (1)..( 8): Result.004 file - promoters50/1011337
gtctaatt

SEQ ID NO: 153567 - DNA, 8 bp, Unknown
  misc_feature (1)..( 8): Result.004 file - promoters50/1011358
cactaatt

SEQ ID NO: 153568 - DNA, 11 bp, Unknown
  misc_feature (1)..( 11): Result.004 file - promoters50/1011358
tgattcttcga

SEQ ID NO: 153569 - DNA, 11 bp, Unknown
  misc_feature (1)..( 11): Result.004 file - promoters50/1011358
cgatacttgtc

SEQ ID NO: 153570 - DNA, 11 bp, Unknown
  misc_feature (1)..( 11): Result.004 file - promoters50/1011358
cgaaactggtc

SEQ ID NO: 153571 - DNA, 10 bp, Unknown
  misc_feature (1)..( 10): Result.004 file - promoters50/1011358
aagaactaga

SEQ ID NO: 153572 - DNA, 10 bp, Unknown
  misc_feature (1)..( 10): Result.004 file - promoters50/1011358
aagaactcat

SEQ ID NO: 153573 - DNA, 10 bp, Unknown
  misc_feature (1)..( 10): Result.004 file - promoters50/1011358
atgaagtcat

SEQ ID NO: 153574 - DNA, 12 bp, Unknown
  misc_feature (1)..( 12): Result.004 file - promoters50/1011358
aataatgatgat

SEQ ID NO: 153575 - DNA, 12 bp, Unknown
  misc_feature (1)..( 12): Result.004 file - promoters50/1011358
ttaaatgaagat

SEQ ID NO: 153576 - DNA, 12 bp, Unknown
  misc_feature (1)..( 12): Result.004 file - promoters50/1011358
ttacatgaacag

SEQ ID NO: 153577 - DNA, 12 bp, Unknown
  misc_feature (1)..( 12): Result.004 file - promoters50/1011358
gtacctgattac

SEQ ID NO: 153578 - DNA, 10 bp, Unknown
  misc_feature (1)..( 10): Result.004 file - promoters50/1011358
tgtggtccat

SEQ ID NO: 153579 - DNA, 10 bp, Unknown
  misc_feature (1)..( 10): Result.004 file - promoters50/1011358
agtgatccaa

SEQ ID NO: 153580 - DNA, 10 bp, Unknown
  misc_feature (1)..( 10): Result.004 file - promoters50/1011358
tgtggttcat

SEQ ID NO: 153581 - DNA, 9 bp, Unknown
  misc_feature (1)..( 9): Result.004 file - promoters50/1011358
aaacaaaaa

SEQ ID NO: 153582 - DNA, 9 bp, Unknown
  misc_feature (1)..( 9): Result.004 file - promoters50/1011358
aaagaaaaa

SEQ ID NO: 153583 - DNA, 9 bp, Unknown
  misc_feature (1)..( 9): Result.004 file - promoters50/1011485
aaagaaacc

SEQ ID NO: 153584 - DNA, 8 bp, Unknown
  misc_feature (1)..( 8): Result.004 file - promoters50/1011485
tcaaattt

SEQ ID NO: 153585 - DNA, 8 bp, Unknown
  misc_feature (1)..( 8): Result.004 file - promoters50/1011485
tcaaatca

SEQ ID NO: 153586 - DNA, 8 bp, Unknown
  misc_feature (1)..( 8): Result.004 file - promoters50/1011512
acaaatca

SEQ ID NO: 153587 - DNA, 8 bp, Unknown
  misc_feature (1)..( 8): Result.004 file - promoters50/1011512
gaaaaaaa

SEQ ID NO: 153588 - DNA, 8 bp, Unknown
  misc_feature (1)..( 8): Result.004 file - promoters50/1011512
gaaaaaat

SEQ ID NO: 153589 - DNA, 9 bp, Unknown
  misc_feature (1)..( 9): Result.004 file - promoters50/1011512
aaaacaaaa

SEQ ID NO: 153590 - DNA, 9 bp, Unknown
  misc_feature (1)..( 9): Result.004 file - promoters50/1011512
acagataac

SEQ ID NO: 153591 - DNA, 9 bp, Unknown
  misc_feature (1)..( 9): Result.004 file - promoters50/1011512
acaaataaa

SEQ ID NO: 153592 - DNA, 10 bp, Unknown
  misc_feature (1)..( 10): Result.004 file - promoters50/1011512
ttaaatgaat

SEQ ID NO: 153593 - DNA, 10 bp, Unknown
  misc_feature (1)..( 10): Result.004 file - promoters50/1011512
gaaaaaaaca

SEQ ID NO: 153594 - DNA, 10 bp, Unknown
  misc_feature (1)..( 10): Result.004 file - promoters50/1011512
ccacaaaaca

SEQ ID NO: 153595 - DNA, 10 bp, Unknown
  misc_feature (1)..( 10): Result.004 file - promoters50/1011516
aaagaaaaaa

SEQ ID NO: 153596 - DNA, 8 bp, Unknown
  misc_feature (1)..( 8): Result.004 file - promoters50/1011516
caatgaga

SEQ ID NO: 153597 - DNA, 8 bp, Unknown
  misc_feature (1)..( 8): Result.004 file - promoters50/1011516
gaatcaga

SEQ ID NO: 153598 - DNA, 8 bp, Unknown
  misc_feature (1)..( 8): Result.004 file - promoters50/1011516
caaagaga

SEQ ID NO: 153599 - DNA, 10 bp, Unknown
  misc_feature (1)..( 10): Result.004 file - promoters50/1011516
ttatcttagt

SEQ ID NO: 153600 - DNA, 10 bp, Unknown
  misc_feature (1)..( 10): Result.004 file - promoters50/1011516
ctatattaat

SEQ ID NO: 153601 - DNA, 10 bp, Unknown
  misc_feature (1)..( 10): Result.004 file - promoters50/1011556
ctataataat

SEQ ID NO: 153602 - DNA, 12 bp, Unknown
  misc_feature (1)..( 12): Result.004 file - promoters50/1011556
atttaattctca

SEQ ID NO: 153603 - DNA, 12 bp, Unknown
  misc_feature (1)..( 12): Result.004 file - promoters50/1011556
aattatttcgtt

SEQ ID NO: 153604 - DNA, 12 bp, Unknown
  misc_feature (1)..( 12): Result.004 file - promoters50/1011556
gtttgattagta

SEQ ID NO: 153605 - DNA, 12 bp, Unknown
  misc_feature (1)..( 12): Result.004 file - promoters50/1011556
gtataattcttt

SEQ ID NO: 153606 - DNA, 12 bp, Unknown
  misc_feature (1)..( 12): Result.004 file - promoters50/1011556
gtatcattctca

SEQ ID NO: 153607 - DNA, 12 bp, Unknown
  misc_feature (1)..( 12): Result.004 file - promoters50/1011560
ttttgatttgat

SEQ ID NO: 153608 - DNA, 10 bp, Unknown
  misc_feature (1)..( 10): Result.004 file - promoters50/1011560
gcttaccttc

SEQ ID NO: 153609 - DNA, 10 bp, Unknown
  misc_feature (1)..( 10): Result.004 file - promoters50/1011560
acttgcctca

SEQ ID NO: 153610 - DNA, 10 bp, Unknown
  misc_feature (1)..( 10): Result.004 file - promoters50/1011560
ttttgtctct

SEQ ID NO: 153611 - DNA, 10 bp, Unknown
  misc_feature (1)..( 10): Result.004 file - promoters50/1011560
acttgcacct

SEQ ID NO: 153612 - DNA, 10 bp, Unknown
  misc_feature (1)..( 10): Result.004 file - promoters50/1011585
tcctgtttct

SEQ ID NO: 153613 - DNA, 9 bp, Unknown
  misc_feature (1)..( 9): Result.004 file - promoters50/1011585
aaataaaac

SEQ ID NO: 153614 - DNA, 9 bp, Unknown
  misc_feature (1)..( 9): Result.004 file - promoters50/1011585
caatgaaac

SEQ ID NO: 153615 - DNA, 10 bp, Unknown
  misc_feature (1)..( 10): Result.004 file - promoters50/1011707
aaatcgaacc

SEQ ID NO: 153616 - DNA, 7 bp, Unknown
  misc_feature (1)..( 7): Result.004 file - promoters50/1011707
tttcttc

SEQ ID NO: 153617 - DNA, 7 bp, Unknown
  misc_feature (1)..( 7): Result.004 file - promoters50/1011707
tttctta

SEQ ID NO: 153618 - DNA, 7 bp, Unknown
  misc_feature (1)..( 7): Result.004 file - promoters50/1011707
gttcttc

SEQ ID NO: 153619 - DNA, 8 bp, Unknown
  misc_feature (1)..( 8): Result.004 file - promoters50/1011707
agtctgtc

SEQ ID NO: 153620 - DNA, 8 bp, Unknown
  misc_feature (1)..( 8): Result.004 file - promoters50/1011707
agtgtgtg

SEQ ID NO: 153621 - DNA, 8 bp, Unknown
  misc_feature (1)..( 8): Result.004 file - promoters50/1011780
cctgtgtg

SEQ ID NO: 153622 - DNA, 10 bp, Unknown
  misc_feature (1)..( 10): Result.004 file - promoters50/1011780
tcttggttgg

SEQ ID NO: 153623 - DNA, 10 bp, Unknown
  misc_feature (1)..( 10): Result.004 file - promoters50/1011780
gattgtttgt

SEQ ID NO: 153624 - DNA, 10 bp, Unknown
  misc_feature (1)..( 10): Result.004 file - promoters50/1011780
aattttttgg

SEQ ID NO: 153625 - DNA, 10 bp, Unknown
  misc_feature (1)..( 10): Result.004 file - promoters50/1011780
aatttttctg

SEQ ID NO: 153626 - DNA, 10 bp, Unknown
  misc_feature (1)..( 10): Result.004 file - promoters50/1011780
ttgtgtttga

SEQ ID NO: 153627 - DNA, 10 bp, Unknown
  misc_feature (1)..( 10): Result.004 file - promoters50/1011780
tatcgtttgt

SEQ ID NO: 153628 - DNA, 10 bp, Unknown
  misc_feature (1)..( 10): Result.004 file - promoters50/1011780
atgtgttttg

SEQ ID NO: 153629 - DNA, 15 bp, Unknown
  misc_feature (1)..( 15): Result.004 file - promoters50/1011780
tgaatctgctaatgt

SEQ ID NO: 153630 - DNA, 15 bp, Unknown
  misc_feature (1)..( 15): Result.004 file - promoters50/1011780
caattttgctaaaaa

SEQ ID NO: 153631 - DNA, 15 bp, Unknown
  misc_feature (1)..( 15): Result.004 file - promoters50/1011780
tgtttttgctgatgt

SEQ ID NO: 153632 - DNA, 15 bp, Unknown
  misc_feature (1)..( 15): Result.004 file - promoters50/1011780
accctttgatgattg

SEQ ID NO: 153633 - DNA, 15 bp, Unknown
  misc_feature (1)..( 15): Result.004 file - promoters50/1011780
ttattttgctaccga

SEQ ID NO: 153634 - DNA, 15 bp, Unknown
  misc_feature (1)..( 15): Result.004 file - promoters50/1011780
ttattttccaattcc

SEQ ID NO: 153635 - DNA, 11 bp, Unknown
  misc_feature (1)..( 11): Result.004 file - promoters50/1011780
ttacaaaaaaa

SEQ ID NO: 153636 - DNA, 11 bp, Unknown
  misc_feature (1)..( 11): Result.004 file - promoters50/1011780
tgacataaatt

SEQ ID NO: 153637 - DNA, 11 bp, Unknown
  misc_feature (1)..( 11): Result.004 file - promoters50/1011780
tttcaaaaata

SEQ ID NO: 153638 - DNA, 11 bp, Unknown
  misc_feature (1)..( 11): Result.004 file - promoters50/1011780
taaaataaatt

SEQ ID NO: 153639 - DNA, 11 bp, Unknown
  misc_feature (1)..( 11): Result.004 file - promoters50/1011780
tgacatatcta

SEQ ID NO: 153640 - DNA, 11 bp, Unknown
  misc_feature (1)..( 11): Result.004 file - promoters50/1011862
cttcaaaatta

SEQ ID NO: 153641 - DNA, 8 bp, Unknown
  misc_feature (1)..( 8): Result.004 file - promoters50/1011862
ctaaaaaa

SEQ ID NO: 153642 - DNA, 8 bp, Unknown
  misc_feature (1)..( 8): Result.004 file - promoters50/1011862
ctaaaaag

SEQ ID NO: 153643 - DNA, 8 bp, Unknown
  misc_feature (1)..( 8): Result.004 file - promoters50/1011862
ataaaaac

SEQ ID NO: 153644 - DNA, 9 bp, Unknown
  misc_feature (1)..( 9): Result.004 file - promoters50/1011862
ctaacaaac

SEQ ID NO: 153645 - DNA, 10 bp, Unknown
  misc_feature (1)..( 10): Result.004 file - promoters50/1011862
tggttacatt

SEQ ID NO: 153646 - DNA, 10 bp, Unknown
  misc_feature (1)..( 10): Result.004 file - promoters50/1011862
cagtttcatt

SEQ ID NO: 153647 - DNA, 10 bp, Unknown
  misc_feature (1)..( 10): Result.004 file - promoters50/1011862
cagattcgag

SEQ ID NO: 153648 - DNA, 10 bp, Unknown
  misc_feature (1)..( 10): Result.004 file - promoters50/1011862
caattttgta

SEQ ID NO: 153649 - DNA, 10 bp, Unknown
  misc_feature (1)..( 10): Result.004 file - promoters50/1011862
caattttgtt

SEQ ID NO: 153650 - DNA, 10 bp, Unknown
  misc_feature (1)..( 10): Result.004 file - promoters50/1011862
ggatttagtt

SEQ ID NO: 153651 - DNA, 9 bp, Unknown
  misc_feature (1)..( 9): Result.004 file - promoters50/1011862
gagaaagaa

SEQ ID NO: 153652 - DNA, 9 bp, Unknown
  misc_feature (1)..( 9): Result.004 file - promoters50/1011862
gagaaatga

SEQ ID NO: 153653 - DNA, 9 bp, Unknown
  misc_feature (1)..( 9): Result.004 file - promoters50/1011862
gaggaagaa

SEQ ID NO: 153654 - DNA, 10 bp, Unknown
  misc_feature (1)..( 10): Result.004 file - promoters50/1011862
aatcggttat

SEQ ID NO: 153655 - DNA, 10 bp, Unknown
  misc_feature (1)..( 10): Result.004 file - promoters50/1011862
tttcgtttat

SEQ ID NO: 153656 - DNA, 10 bp, Unknown
  misc_feature (1)..( 10): Result.004 file - promoters50/1011900
ttttgttgtt

SEQ ID NO: 153657 - DNA, 10 bp, Unknown
  misc_feature (1)..( 10): Result.004 file - promoters50/1011900
ttcatatctc

SEQ ID NO: 153658 - DNA, 10 bp, Unknown
  misc_feature (1)..( 10): Result.004 file - promoters50/1011900
accatatcca

SEQ ID NO: 153659 - DNA, 10 bp, Unknown
  misc_feature (1)..( 10): Result.004 file - promoters50/1011900
ggcatatcaa

SEQ ID NO: 153660 - DNA, 10 bp, Unknown
  misc_feature (1)..( 10): Result.004 file - promoters50/1011900
ccaatagcaa

SEQ ID NO: 153661 - DNA, 10 bp, Unknown
  misc_feature (1)..( 10): Result.004 file - promoters50/1011900
accttatcca

SEQ ID NO: 153662 - DNA, 10 bp, Unknown
  misc_feature (1)..( 10): Result.004 file - promoters50/1011923
tctatatccc

SEQ ID NO: 153663 - DNA, 15 bp, Unknown
  misc_feature (1)..( 15): Result.004 file - promoters50/1011923
taatcttcatgttgt

SEQ ID NO: 153664 - DNA, 15 bp, Unknown
  misc_feature (1)..( 15): Result.004 file - promoters50/1011923
atatgttcatgttct

SEQ ID NO: 153665 - DNA, 15 bp, Unknown
  misc_feature (1)..( 15): Result.004 file - promoters50/1011923
ggatcttcatgactc

SEQ ID NO: 153666 - DNA, 15 bp, Unknown
  misc_feature (1)..( 15): Result.004 file - promoters50/1011923
ttaaccacattttgt

SEQ ID NO: 153667 - DNA, 15 bp, Unknown
  misc_feature (1)..( 15): Result.004 file - promoters50/1011923
cgtttgtcaagttaa

SEQ ID NO: 153668 - DNA, 15 bp, Unknown
  misc_feature (1)..( 15): Result.004 file - promoters50/1011923
aacaactcatgtttt

SEQ ID NO: 153669 - DNA, 15 bp, Unknown
  misc_feature (1)..( 15): Result.004 file - promoters50/1011923
ttagccacattttgt

SEQ ID NO: 153670 - DNA, 14 bp, Unknown
  misc_feature (1)..( 14): Result.004 file - promoters50/1011923
tcattgtttaattt

SEQ ID NO: 153671 - DNA, 14 bp, Unknown
  misc_feature (1)..( 14): Result.004 file - promoters50/1011923
tcattttttaattt

SEQ ID NO: 153672 - DNA, 14 bp, Unknown
  misc_feature (1)..( 14): Result.004 file - promoters50/1011923
attaattgttattt

SEQ ID NO: 153673 - DNA, 14 bp, Unknown
  misc_feature (1)..( 14): Result.004 file - promoters50/1011923
tggaaagttaatta

SEQ ID NO: 153674 - DNA, 14 bp, Unknown
  misc_feature (1)..( 14): Result.004 file - promoters50/1011923
cgccgtttgaattt

SEQ ID NO: 153675 - DNA, 14 bp, Unknown
  misc_feature (1)..( 14): Result.004 file - promoters50/1011972
tattctgctaattt

SEQ ID NO: 153676 - DNA, 12 bp, Unknown
  misc_feature (1)..( 12): Result.004 file - promoters50/1011972
agtgtttcatat

SEQ ID NO: 153677 - DNA, 12 bp, Unknown
  misc_feature (1)..( 12): Result.004 file - promoters50/1011972
gccgtttgataa

SEQ ID NO: 153678 - DNA, 12 bp, Unknown
  misc_feature (1)..( 12): Result.004 file - promoters50/1011972
agtttttgatat

SEQ ID NO: 153679 - DNA, 12 bp, Unknown
  misc_feature (1)..( 12): Result.004 file - promoters50/1011972
attcttttatac

SEQ ID NO: 153680 - DNA, 12 bp, Unknown
  misc_feature (1)..( 12): Result.004 file - promoters50/1011972
tcattttgacat

SEQ ID NO: 153681 - DNA, 12 bp, Unknown
  misc_feature (1)..( 12): Result.004 file - promoters50/1011972
ggattttgctat

SEQ ID NO: 153682 - DNA, 13 bp, Unknown
  misc_feature (1)..( 13): Result.004 file - promoters50/1011972
agtaagatatttt

SEQ ID NO: 153683 - DNA, 13 bp, Unknown
  misc_feature (1)..( 13): Result.004 file - promoters50/1011972
tgaactctatttt

SEQ ID NO: 153684 - DNA, 13 bp, Unknown
  misc_feature (1)..( 13): Result.004 file - promoters50/1011972
aaaaatatattta

SEQ ID NO: 153685 - DNA, 13 bp, Unknown
  misc_feature (1)..( 13): Result.004 file - promoters50/1011972
tataaaatacttt

SEQ ID NO: 153686 - DNA, 13 bp, Unknown
  misc_feature (1)..( 13): Result.004 file - promoters50/1011972
aaaaaaatacatt

SEQ ID NO: 153687 - DNA, 13 bp, Unknown
  misc_feature (1)..( 13): Result.004 file - promoters50/1011972
ccaaaattacaaa

SEQ ID NO: 153688 - DNA, 14 bp, Unknown
  misc_feature (1)..( 14): Result.004 file - promoters50/1011972
tgactaattaacta

SEQ ID NO: 153689 - DNA, 14 bp, Unknown
  misc_feature (1)..( 14): Result.004 file - promoters50/1011972
atcctaatcaacaa

SEQ ID NO: 153690 - DNA, 14 bp, Unknown
  misc_feature (1)..( 14): Result.004 file - promoters50/1011972
aaactaattttagc

SEQ ID NO: 153691 - DNA, 14 bp, Unknown
  misc_feature (1)..( 14): Result.004 file - promoters50/1011972
ttagtcatcaatat

SEQ ID NO: 153692 - DNA, 14 bp, Unknown
  misc_feature (1)..( 14): Result.004 file - promoters50/1011972
atcttaatttcata

SEQ ID NO: 153693 - DNA, 14 bp, Unknown
  misc_feature (1)..( 14): Result.004 file - promoters50/1011972
catattatccatat

SEQ ID NO: 153694 - DNA, 10 bp, Unknown
  misc_feature (1)..( 10): Result.004 file - promoters50/1011972
atcttcatat

SEQ ID NO: 153695 - DNA, 10 bp, Unknown
  misc_feature (1)..( 10): Result.004 file - promoters50/1011972
atctacatat

SEQ ID NO: 153696 - DNA, 10 bp, Unknown
  misc_feature (1)..( 10): Result.004 file - promoters50/1011972
tactatataa

SEQ ID NO: 153697 - DNA, 10 bp, Unknown
  misc_feature (1)..( 10): Result.004 file - promoters50/1011972
aactataaat

SEQ ID NO: 153698 - DNA, 10 bp, Unknown
  misc_feature (1)..( 10): Result.004 file - promoters50/1011972
tcgtatatat

SEQ ID NO: 153699 - DNA, 10 bp, Unknown
  misc_feature (1)..( 10): Result.004 file - promoters50/1011972
atctataaaa

SEQ ID NO: 153700 - DNA, 12 bp, Unknown
  misc_feature (1)..( 12): Result.004 file - promoters50/1011972
ttcatataaata

SEQ ID NO: 153701 - DNA, 12 bp, Unknown
  misc_feature (1)..( 12): Result.004 file - promoters50/1011972
actatataaact

SEQ ID NO: 153702 - DNA, 12 bp, Unknown
  misc_feature (1)..( 12): Result.004 file - promoters50/1011972
taactataaata

SEQ ID NO: 153703 - DNA, 12 bp, Unknown
  misc_feature (1)..( 12): Result.004 file - promoters50/1011972
tatatataaata

SEQ ID NO: 153704 - DNA, 12 bp, Unknown
  misc_feature (1)..( 12): Result.004 file - promoters50/1011972
tctacatatcca

SEQ ID NO: 153705 - DNA, 12 bp, Unknown
  misc_feature (1)..( 12): Result.004 file - promoters50/1012052
aatctataaaaa

SEQ ID NO: 153706 - DNA, 14 bp, Unknown
  misc_feature (1)..( 14): Result.004 file - promoters50/1012052
aaaacatttgattt

SEQ ID NO: 153707 - DNA, 14 bp, Unknown
  misc_feature (1)..( 14): Result.004 file - promoters50/1012052
ttgggttttgtttt

SEQ ID NO: 153708 - DNA, 14 bp, Unknown
  misc_feature (1)..( 14): Result.004 file - promoters50/1012060
aaaaaattagatcg

SEQ ID NO: 153709 - DNA, 7 bp, Unknown
  misc_feature (1)..( 7): Result.004 file - promoters50/1012060
cttgttt

SEQ ID NO: 153710 - DNA, 7 bp, Unknown
  misc_feature (1)..( 7): Result.004 file - promoters50/1012060
cttcttt

SEQ ID NO: 153711 - DNA, 7 bp, Unknown
  misc_feature (1)..( 7): Result.004 file - promoters50/1012060
ctttttt

SEQ ID NO: 153712 - DNA, 7 bp, Unknown
  misc_feature (1)..( 7): Result.004 file - promoters50/1012060
tttcttt

SEQ ID NO: 153713 - DNA, 8 bp, Unknown
  misc_feature (1)..( 8): Result.004 file - promoters50/1012060
tttgattt

SEQ ID NO: 153714 - DNA, 8 bp, Unknown
  misc_feature (1)..( 8): Result.004 file - promoters50/1012060
tttgatgc

SEQ ID NO: 153715 - DNA, 8 bp, Unknown
  misc_feature (1)..( 8): Result.004 file - promoters50/1012060
attggttt

SEQ ID NO: 153716 - DNA, 8 bp, Unknown
  misc_feature (1)..( 8): Result.004 file - promoters50/1012060
gttggttt

SEQ ID NO: 153717 - DNA, 11 bp, Unknown
  misc_feature (1)..( 11): Result.004 file - promoters50/1012060
tatttgtttct

SEQ ID NO: 153718 - DNA, 11 bp, Unknown
  misc_feature (1)..( 11): Result.004 file - promoters50/1012060
gacaagtttct

SEQ ID NO: 153719 - DNA, 11 bp, Unknown
  misc_feature (1)..( 11): Result.004 file - promoters50/1012060
gaccagtttcc

SEQ ID NO: 153720 - DNA, 11 bp, Unknown
  misc_feature (1)..( 11): Result.004 file - promoters50/1012074
atacagtttaa

SEQ ID NO: 153721 - DNA, 12 bp, Unknown
  misc_feature (1)..( 12): Result.004 file - promoters50/1012074
ttttaataagag

SEQ ID NO: 153722 - DNA, 12 bp, Unknown
  misc_feature (1)..( 12): Result.004 file - promoters50/1012074
tttcaataaccg

SEQ ID NO: 153723 - DNA, 12 bp, Unknown
  misc_feature (1)..( 12): Result.004 file - promoters50/1012074
gtctaaaaagta

SEQ ID NO: 153724 - DNA, 12 bp, Unknown
  misc_feature (1)..( 12): Result.004 file - promoters50/1012074
actcaatatcaa

SEQ ID NO: 153725 - DNA, 12 bp, Unknown
  misc_feature (1)..( 12): Result.004 file - promoters50/1012074
agttaatttcat

SEQ ID NO: 153726 - DNA, 12 bp, Unknown
  misc_feature (1)..( 12): Result.004 file - promoters50/1012078
atctagaaattc

SEQ ID NO: 153727 - DNA, 15 bp, Unknown
  misc_feature (1)..( 15): Result.004 file - promoters50/1012078
tcgttatgatttctt

SEQ ID NO: 153728 - DNA, 15 bp, Unknown
  misc_feature (1)..( 15): Result.004 file - promoters50/1012078
gtgttataatttttt

SEQ ID NO: 153729 - DNA, 15 bp, Unknown
  misc_feature (1)..( 15): Result.004 file - promoters50/1012078
agtttatgcttttaa

SEQ ID NO: 153730 - DNA, 15 bp, Unknown
  misc_feature (1)..( 15): Result.004 file - promoters50/1012078
ttgttatgctggatc

SEQ ID NO: 153731 - DNA, 15 bp, Unknown
  misc_feature (1)..( 15): Result.004 file - promoters50/1012078
tcgctattccaccat

SEQ ID NO: 153732 - DNA, 15 bp, Unknown
  misc_feature (1)..( 15): Result.004 file - promoters50/1012078
gggttacaatttttt

SEQ ID NO: 153733 - DNA, 12 bp, Unknown
  misc_feature (1)..( 12): Result.004 file - promoters50/1012078
atatgagatagt

SEQ ID NO: 153734 - DNA, 12 bp, Unknown
  misc_feature (1)..( 12): Result.004 file - promoters50/1012078
tattgatataat

SEQ ID NO: 153735 - DNA, 12 bp, Unknown
  misc_feature (1)..( 12): Result.004 file - promoters50/1012078
atgtgatattaa

SEQ ID NO: 153736 - DNA, 12 bp, Unknown
  misc_feature (1)..( 12): Result.004 file - promoters50/1012078
tcttgttatgtt

SEQ ID NO: 153737 - DNA, 12 bp, Unknown
  misc_feature (1)..( 12): Result.004 file - promoters50/1012078
acttgtttcaat

SEQ ID NO: 153738 - DNA, 12 bp, Unknown
  misc_feature (1)..( 12): Result.004 file - promoters50/1012088
ttttgttttata

SEQ ID NO: 153739 - DNA, 9 bp, Unknown
  misc_feature (1)..( 9): Result.004 file - promoters50/1012088
atggtttaa

SEQ ID NO: 153740 - DNA, 9 bp, Unknown
  misc_feature (1)..( 9): Result.004 file - promoters50/1012088
atggttttg

SEQ ID NO: 153741 - DNA, 9 bp, Unknown
  misc_feature (1)..( 9): Result.004 file - promoters50/1012088
atgatttat

SEQ ID NO: 153742 - DNA, 7 bp, Unknown
  misc_feature (1)..( 7): Result.004 file - promoters50/1012088
gatctat

SEQ ID NO: 153743 - DNA, 14 bp, Unknown
  misc_feature (1)..( 14): Result.004 file - promoters50/1012088
atgtaacaatgaag

SEQ ID NO: 153744 - DNA, 14 bp, Unknown
  misc_feature (1)..( 14): Result.004 file - promoters50/1012088
ctgtttctatgaag

SEQ ID NO: 153745 - DNA, 14 bp, Unknown
  misc_feature (1)..( 14): Result.004 file - promoters50/1012088
ttttttctatgaac

SEQ ID NO: 153746 - DNA, 14 bp, Unknown
  misc_feature (1)..( 14): Result.004 file - promoters50/1012088
ttttttttattttt

SEQ ID NO: 153747 - DNA, 9 bp, Unknown
  misc_feature (1)..( 9): Result.004 file - promoters50/1012088
aaaatatat

SEQ ID NO: 153748 - DNA, 9 bp, Unknown
  misc_feature (1)..( 9): Result.004 file - promoters50/1012088
aaaatttat

SEQ ID NO: 153749 - DNA, 9 bp, Unknown
  misc_feature (1)..( 9): Result.004 file - promoters50/1012088
aaaagataa

SEQ ID NO: 153750 - DNA, 9 bp, Unknown
  misc_feature (1)..( 9): Result.004 file - promoters50/1012088
aaagtttat

SEQ ID NO: 153751 - DNA, 12 bp, Unknown
  misc_feature (1)..( 12): Result.004 file - promoters50/1012088
ccaacaaaaatc

SEQ ID NO: 153752 - DNA, 12 bp, Unknown
  misc_feature (1)..( 12): Result.004 file - promoters50/1012088
aaattaaagatc

SEQ ID NO: 153753 - DNA, 12 bp, Unknown
  misc_feature (1)..( 12): Result.004 file - promoters50/1012088
cttagaaaaatg

SEQ ID NO: 153754 - DNA, 12 bp, Unknown
  misc_feature (1)..( 12): Result.004 file - promoters50/1012088
ccaccaaagatt

SEQ ID NO: 153755 - DNA, 12 bp, Unknown
  misc_feature (1)..( 12): Result.004 file - promoters50/1012088
tagataaacctt

SEQ ID NO: 153756 - DNA, 10 bp, Unknown
  misc_feature (1)..( 10): Result.004 file - promoters50/1012088
aaaatatata

SEQ ID NO: 153757 - DNA, 10 bp, Unknown
  misc_feature (1)..( 10): Result.004 file - promoters50/1012088
ttaatgtatt

SEQ ID NO: 153758 - DNA, 10 bp, Unknown
  misc_feature (1)..( 10): Result.004 file - promoters50/1012088
gtgatatata

SEQ ID NO: 153759 - DNA, 10 bp, Unknown
  misc_feature (1)..( 10): Result.004 file - promoters50/1012088
aaaatataca

SEQ ID NO: 153760 - DNA, 12 bp, Unknown
  misc_feature (1)..( 12): Result.004 file - promoters50/1012088
ggtttaataaaa

SEQ ID NO: 153761 - DNA, 12 bp, Unknown
  misc_feature (1)..( 12): Result.004 file - promoters50/1012088
tatttaaaaaaa

SEQ ID NO: 153762 - DNA, 10 bp, Unknown
  misc_feature (1)..( 10): Result.004 file - promoters50/1012088
tttaaaaaaa

SEQ ID NO: 153763 - DNA, 12 bp, Unknown
  misc_feature (1)..( 12): Result.004 file - promoters50/1012088
cctttgaaaagc

SEQ ID NO: 153764 - DNA, 12 bp, Unknown
  misc_feature (1)..( 12): Result.004 file - promoters50/1012088
tatttcaaaatt

SEQ ID NO: 153765 - DNA, 13 bp, Unknown
  misc_feature (1)..( 13): Result.004 file - promoters50/1012088
ttttgtattcgag

SEQ ID NO: 153766 - DNA, 13 bp, Unknown
  misc_feature (1)..( 13): Result.004 file - promoters50/1012088
aacagtattcata

SEQ ID NO: 153767 - DNA, 13 bp, Unknown
  misc_feature (1)..( 13): Result.004 file - promoters50/1012088
ttttttatttttt

SEQ ID NO: 153768 - DNA, 13 bp, Unknown
  misc_feature (1)..( 13): Result.004 file - promoters50/1012088
gtttctatgaagc

SEQ ID NO: 153769 - DNA, 13 bp, Unknown
  misc_feature (1)..( 13): Result.004 file - promoters50/1012110
ccaaatattaata

SEQ ID NO: 153770 - DNA, 11 bp, Unknown
  misc_feature (1)..( 11): Result.004 file - promoters50/1012110
ccagaattaag

SEQ ID NO: 153771 - DNA, 11 bp, Unknown
  misc_feature (1)..( 11): Result.004 file - promoters50/1012110
ccataattagt

SEQ ID NO: 153772 - DNA, 11 bp, Unknown
  misc_feature (1)..( 11): Result.004 file - promoters50/1012110
atgtaattaag

SEQ ID NO: 153773 - DNA, 11 bp, Unknown
  misc_feature (1)..( 11): Result.004 file - promoters50/1012110
aaatacttaag

SEQ ID NO: 153774 - DNA, 10 bp, Unknown
  misc_feature (1)..( 10): Result.004 file - promoters50/1012110
tgtaaaaata

SEQ ID NO: 153775 - DNA, 10 bp, Unknown
  misc_feature (1)..( 10): Result.004 file - promoters50/1012110
agtaaaatta

SEQ ID NO: 153776 - DNA, 11 bp, Unknown
  misc_feature (1)..( 11): Result.004 file - promoters50/1012110
cttaagaatag

SEQ ID NO: 153777 - DNA, 11 bp, Unknown
  misc_feature (1)..( 11): Result.004 file - promoters50/1012110
tgtaaataaaa

SEQ ID NO: 153778 - DNA, 11 bp, Unknown
  misc_feature (1)..( 11): Result.004 file - promoters50/1012118
ggtacataatt

SEQ ID NO: 153779 - DNA, 8 bp, Unknown
  misc_feature (1)..( 8): Result.004 file - promoters50/1012118
aatgattc

SEQ ID NO: 153780 - DNA, 8 bp, Unknown
  misc_feature (1)..( 8): Result.004 file - promoters50/1012118
aattattt

SEQ ID NO: 153781 - DNA, 8 bp, Unknown
  misc_feature (1)..( 8): Result.004 file - promoters50/1012118
catttttt

SEQ ID NO: 153782 - DNA, 8 bp, Unknown
  misc_feature (1)..( 8): Result.004 file - promoters50/1012118
aatttttt

SEQ ID NO: 153783 - DNA, 11 bp, Unknown
  misc_feature (1)..( 11): Result.004 file - promoters50/1012118
aaaatattccg

SEQ ID NO: 153784 - DNA, 11 bp, Unknown
  misc_feature (1)..( 11): Result.004 file - promoters50/1012118
ccaataatccg

SEQ ID NO: 153785 - DNA, 11 bp, Unknown
  misc_feature (1)..( 11): Result.004 file - promoters50/1012118
tgaaaaattag

SEQ ID NO: 153786 - DNA, 11 bp, Unknown
  misc_feature (1)..( 11): Result.004 file - promoters50/1012118
tgaaaaaaaac

SEQ ID NO: 153787 - DNA, 8 bp, Unknown
  misc_feature (1)..( 8): Result.004 file - promoters50/1012118
aatattcc

SEQ ID NO: 153788 - DNA, 8 bp, Unknown
  misc_feature (1)..( 8): Result.004 file - promoters50/1012118
gatattcg

SEQ ID NO: 153789 - DNA, 8 bp, Unknown
  misc_feature (1)..( 8): Result.004 file - promoters50/1012118
gatattaa

SEQ ID NO: 153790 - DNA, 8 bp, Unknown
  misc_feature (1)..( 8): Result.004 file - promoters50/1012128
gttattcg

SEQ ID NO: 153791 - DNA, 17 bp, Unknown
  misc_feature (1)..( 17): Result.004 file - promoters50/1012128
gttcaaatcccacagtt

SEQ ID NO: 153792 - DNA, 17 bp, Unknown
  misc_feature (1)..( 17): Result.004 file - promoters50/1012128
tgtcaaattccacggtt

SEQ ID NO: 153793 - DNA, 17 bp, Unknown
  misc_feature (1)..( 17): Result.004 file - promoters50/1012128
tttcaaaatgtgttcat

SEQ ID NO: 153794 - DNA, 17 bp, Unknown
  misc_feature (1)..( 17): Result.004 file - promoters50/1012128
gatcaaatccgagccgg

SEQ ID NO: 153795 - DNA, 17 bp, Unknown
  misc_feature (1)..( 17): Result.004 file - promoters50/1012128
tgggccagaacacggta

SEQ ID NO: 153796 - DNA, 17 bp, Unknown
  misc_feature (1)..( 17): Result.004 file - promoters50/1012128
gattaaacaaacgacag

SEQ ID NO: 153797 - DNA, 9 bp, Unknown
  misc_feature (1)..( 9): Result.004 file - promoters50/1012128
aagaagaat

SEQ ID NO: 153798 - DNA, 9 bp, Unknown
  misc_feature (1)..( 9): Result.004 file - promoters50/1012128
aagcagaaa

SEQ ID NO: 153799 - DNA, 9 bp, Unknown
  misc_feature (1)..( 9): Result.004 file - promoters50/1012128
ttgaaaaat

SEQ ID NO: 153800 - DNA, 9 bp, Unknown
  misc_feature (1)..( 9): Result.004 file - promoters50/1012128
aagaagtgt

SEQ ID NO: 153801 - DNA, 9 bp, Unknown
  misc_feature (1)..( 9): Result.004 file - promoters50/1012128
tagacgaaa

SEQ ID NO: 153802 - DNA, 9 bp, Unknown
  misc_feature (1)..( 9): Result.004 file - promoters50/1012128
attcaaaat

SEQ ID NO: 153803 - DNA, 15 bp, Unknown
  misc_feature (1)..( 15): Result.004 file - promoters50/1012128
aggcccatttaagcc

SEQ ID NO: 153804 - DNA, 15 bp, Unknown
  misc_feature (1)..( 15): Result.004 file - promoters50/1012128
tactatatttaattt

SEQ ID NO: 153805 - DNA, 15 bp, Unknown
  misc_feature (1)..( 15): Result.004 file - promoters50/1012128
aagcccattaaagta

SEQ ID NO: 153806 - DNA, 15 bp, Unknown
  misc_feature (1)..( 15): Result.004 file - promoters50/1012128
ctgcccatttgattt

SEQ ID NO: 153807 - DNA, 15 bp, Unknown
  misc_feature (1)..( 15): Result.004 file - promoters50/1012128
tttgttatttatata

SEQ ID NO: 153808 - DNA, 15 bp, Unknown
  misc_feature (1)..( 15): Result.004 file - promoters50/1012128
aagcccaaagaataa

SEQ ID NO: 153809 - DNA, 16 bp, Unknown
  misc_feature (1)..( 16): Result.004 file - promoters50/1012128
caatatgtgcaacaag

SEQ ID NO: 153810 - DNA, 16 bp, Unknown
  misc_feature (1)..( 16): Result.004 file - promoters50/1012128
taatatgtaaaattaa

SEQ ID NO: 153811 - DNA, 16 bp, Unknown
  misc_feature (1)..( 16): Result.004 file - promoters50/1012128
tgatattataggaaga

SEQ ID NO: 153812 - DNA, 16 bp, Unknown
  misc_feature (1)..( 16): Result.004 file - promoters50/1012128
tgagattactaacact

SEQ ID NO: 153813 - DNA, 16 bp, Unknown
  misc_feature (1)..( 16): Result.004 file - promoters50/1012128
atttatgaaaaaaaaa

SEQ ID NO: 153814 - DNA, 16 bp, Unknown
  misc_feature (1)..( 16): Result.004 file - promoters50/1012132
gaaaaagaaaaaaaaa

SEQ ID NO: 153815 - DNA, 9 bp, Unknown
  misc_feature (1)..( 9): Result.004 file - promoters50/1012132
gaaagttag

SEQ ID NO: 153816 - DNA, 9 bp, Unknown
  misc_feature (1)..( 9): Result.004 file - promoters50/1012132
caaatttag

SEQ ID NO: 153817 - DNA, 9 bp, Unknown
  misc_feature (1)..( 9): Result.004 file - promoters50/1012132
gaaacttaa

SEQ ID NO: 153818 - DNA, 9 bp, Unknown
  misc_feature (1)..( 9): Result.004 file - promoters50/1012132
cttcaaaaa

SEQ ID NO: 153819 - DNA, 9 bp, Unknown
  misc_feature (1)..( 9): Result.004 file - promoters50/1012132
tttcaaatg

SEQ ID NO: 153820 - DNA, 9 bp, Unknown
  misc_feature (1)..( 9): Result.004 file - promoters50/1012132
tttcacatg

SEQ ID NO: 153821 - DNA, 11 bp, Unknown
  misc_feature (1)..( 11): Result.004 file - promoters50/1012132
tttatataaac

SEQ ID NO: 153822 - DNA, 11 bp, Unknown
  misc_feature (1)..( 11): Result.004 file - promoters50/1012132
ttaaaataaac

SEQ ID NO: 153823 - DNA, 11 bp, Unknown
  misc_feature (1)..( 11): Result.004 file - promoters50/1012132
ttacaataaat

SEQ ID NO: 153824 - DNA, 12 bp, Unknown
  misc_feature (1)..( 12): Result.004 file - promoters50/1012132
ctcttgaaattt

SEQ ID NO: 153825 - DNA, 12 bp, Unknown
  misc_feature (1)..( 12): Result.004 file - promoters50/1012132
aaaaataaattt

SEQ ID NO: 153826 - DNA, 12 bp, Unknown
  misc_feature (1)..( 12): Result.004 file - promoters50/1012132
aaaaataaattt

SEQ ID NO: 153827 - DNA, 12 bp, Unknown
  misc_feature (1)..( 12): Result.004 file - promoters50/1012132
gaaattttcgaa

SEQ ID NO: 153828 - DNA, 12 bp, Unknown
  misc_feature (1)..( 12): Result.004 file - promoters50/1012132
tttattttcgaa

SEQ ID NO: 153829 - DNA, 12 bp, Unknown
  misc_feature (1)..( 12): Result.004 file - promoters50/1012132
ttaatttgtcat

SEQ ID NO: 153830 - DNA, 10 bp, Unknown
  misc_feature (1)..( 10): Result.004 file - promoters50/1012132
aaaaactctg

SEQ ID NO: 153831 - DNA, 10 bp, Unknown
  misc_feature (1)..( 10): Result.004 file - promoters50/1012132
aaaaaatcta

SEQ ID NO: 153832 - DNA, 10 bp, Unknown
  misc_feature (1)..( 10): Result.004 file - promoters50/1012132
tccaaatcta

SEQ ID NO: 153833 - DNA, 8 bp, Unknown
  misc_feature (1)..( 8): Result.004 file - promoters50/1012132
gacttcat

SEQ ID NO: 153834 - DNA, 8 bp, Unknown
  misc_feature (1)..( 8): Result.004 file - promoters50/1012132
ttcttcat

SEQ ID NO: 153835 - DNA, 8 bp, Unknown
  misc_feature (1)..( 8): Result.004 file - promoters50/1012132
ttcttcat

SEQ ID NO: 153836 - DNA, 12 bp, Unknown
  misc_feature (1)..( 12): Result.004 file - promoters50/1012132
gtttttaacttt

SEQ ID NO: 153837 - DNA, 12 bp, Unknown
  misc_feature (1)..( 12): Result.004 file - promoters50/1012132
atttttaacttg

SEQ ID NO: 153838 - DNA, 12 bp, Unknown
  misc_feature (1)..( 12): Result.004 file - promoters50/1012132
aaaaataaattt

SEQ ID NO: 153839 - DNA, 12 bp, Unknown
  misc_feature (1)..( 12): Result.004 file - promoters50/1012132
aaaaataaattt

SEQ ID NO: 153840 - DNA, 8 bp, Unknown
  misc_feature (1)..( 8): Result.004 file - promoters50/1012132
tttatata

SEQ ID NO: 153841 - DNA, 8 bp, Unknown
  misc_feature (1)..( 8): Result.004 file - promoters50/1012132
tttatata

SEQ ID NO: 153842 - DNA, 8 bp, Unknown
  misc_feature (1)..( 8): Result.004 file - promoters50/1012132
tttatata

SEQ ID NO: 153843 - DNA, 13 bp, Unknown
  misc_feature (1)..( 13): Result.004 file - promoters50/1012132
ttaactttatata

SEQ ID NO: 153844 - DNA, 13 bp, Unknown
  misc_feature (1)..( 13): Result.004 file - promoters50/1012132
taaattttatata

SEQ ID NO: 153845 - DNA, 13 bp, Unknown
  misc_feature (1)..( 13): Result.004 file - promoters50/1012132
ataaatttatttt

SEQ ID NO: 153846 - DNA, 11 bp, Unknown
  misc_feature (1)..( 11): Result.004 file - promoters50/1012132
atatataacca

SEQ ID NO: 153847 - DNA, 11 bp, Unknown
  misc_feature (1)..( 11): Result.004 file - promoters50/1012132
ataaatactaa

SEQ ID NO: 153848 - DNA, 11 bp, Unknown
  misc_feature (1)..( 11): Result.004 file - promoters50/1012194
gtaaatagtaa

SEQ ID NO: 153849 - DNA, 9 bp, Unknown
  misc_feature (1)..( 9): Result.004 file - promoters50/1012194
taaaaaata

SEQ ID NO: 153850 - DNA, 9 bp, Unknown
  misc_feature (1)..( 9): Result.004 file - promoters50/1012194
taaaaaaaa

SEQ ID NO: 153851 - DNA, 9 bp, Unknown
  misc_feature (1)..( 9): Result.004 file - promoters50/1012194
caaataata

SEQ ID NO: 153852 - DNA, 9 bp, Unknown
  misc_feature (1)..( 9): Result.004 file - promoters50/1012194
taaatatat

SEQ ID NO: 153853 - DNA, 10 bp, Unknown
  misc_feature (1)..( 10): Result.004 file - promoters50/1012194
atagtttatg

SEQ ID NO: 153854 - DNA, 10 bp, Unknown
  misc_feature (1)..( 10): Result.004 file - promoters50/1012194
atatttttct

SEQ ID NO: 153855 - DNA, 10 bp, Unknown
  misc_feature (1)..( 10): Result.004 file - promoters50/1012194
ggatttatct

SEQ ID NO: 153856 - DNA, 10 bp, Unknown
  misc_feature (1)..( 10): Result.004 file - promoters50/1012194
atatataaat

SEQ ID NO: 153857 - DNA, 9 bp, Unknown
  misc_feature (1)..( 9): Result.004 file - promoters50/1012194
ttactaatt

SEQ ID NO: 153858 - DNA, 9 bp, Unknown
  misc_feature (1)..( 9): Result.004 file - promoters50/1012194
ttacttatt

SEQ ID NO: 153859 - DNA, 9 bp, Unknown
  misc_feature (1)..( 9): Result.004 file - promoters50/1012194
ttagtgtcg

SEQ ID NO: 153860 - DNA, 9 bp, Unknown
  misc_feature (1)..( 9): Result.004 file - promoters50/1012205
ttaattatg

SEQ ID NO: 153861 - DNA, 9 bp, Unknown
  misc_feature (1)..( 9): Result.004 file - promoters50/1012205
attataaaa

SEQ ID NO: 153862 - DNA, 9 bp, Unknown
  misc_feature (1)..( 9): Result.004 file - promoters50/1012205
attaaaaaa

SEQ ID NO: 153863 - DNA, 9 bp, Unknown
  misc_feature (1)..( 9): Result.004 file - promoters50/1012205
aatataaat

SEQ ID NO: 153864 - DNA, 9 bp, Unknown
  misc_feature (1)..( 9): Result.004 file - promoters50/1012205
atgacaaaa

SEQ ID NO: 153865 - DNA, 9 bp, Unknown
  misc_feature (1)..( 9): Result.004 file - promoters50/1012205
atgtcaaaa

SEQ ID NO: 153866 - DNA, 9 bp, Unknown
  misc_feature (1)..( 9): Result.004 file - promoters50/1012205
gggacaaat

SEQ ID NO: 153867 - DNA, 8 bp, Unknown
  misc_feature (1)..( 8): Result.004 file - promoters50/1012205
gtttaatt

SEQ ID NO: 153868 - DNA, 8 bp, Unknown
  misc_feature (1)..( 8): Result.004 file - promoters50/1012205
gttttatt

SEQ ID NO: 153869 - DNA, 8 bp, Unknown
  misc_feature (1)..( 8): Result.004 file - promoters50/1012205
tttttatt

SEQ ID NO: 153870 - DNA, 7 bp, Unknown
  misc_feature (1)..( 7): Result.004 file - promoters50/1012205
taagaaa

SEQ ID NO: 153871 - DNA, 7 bp, Unknown
  misc_feature (1)..( 7): Result.004 file - promoters50/1012205
taataaa

SEQ ID NO: 153872 - DNA, 7 bp, Unknown
  misc_feature (1)..( 7): Result.004 file - promoters50/1012205
aaataaa

SEQ ID NO: 153873 - DNA, 9 bp, Unknown
  misc_feature (1)..( 9): Result.004 file - promoters50/1012205
ttatcgtaa

SEQ ID NO: 153874 - DNA, 9 bp, Unknown
  misc_feature (1)..( 9): Result.004 file - promoters50/1012205
ttaccgtag

SEQ ID NO: 153875 - DNA, 9 bp, Unknown
  misc_feature (1)..( 9): Result.004 file - promoters50/1012205
atactgtag

SEQ ID NO: 153876 - DNA, 9 bp, Unknown
  misc_feature (1)..( 9): Result.004 file - promoters50/1012205
agtttttat

SEQ ID NO: 153877 - DNA, 9 bp, Unknown
  misc_feature (1)..( 9): Result.004 file - promoters50/1012205
agtttatat

SEQ ID NO: 153878 - DNA, 9 bp, Unknown
  misc_feature (1)..( 9): Result.004 file - promoters50/1012205
agtttaaaa

SEQ ID NO: 153879 - DNA, 8 bp, Unknown
  misc_feature (1)..( 8): Result.004 file - promoters50/1012205
aaatttag

SEQ ID NO: 153880 - DNA, 8 bp, Unknown
  misc_feature (1)..( 8): Result.004 file - promoters50/1012205
aaatttga

SEQ ID NO: 153881 - DNA, 8 bp, Unknown
  misc_feature (1)..( 8): Result.004 file - promoters50/1012205
gaatttga

SEQ ID NO: 153882 - DNA, 9 bp, Unknown
  misc_feature (1)..( 9): Result.004 file - promoters50/1012205
aaactttat

SEQ ID NO: 153883 - DNA, 9 bp, Unknown
  misc_feature (1)..( 9): Result.004 file - promoters50/1012205
aaattttat

SEQ ID NO: 153884 - DNA, 9 bp, Unknown
  misc_feature (1)..( 9): Result.004 file - promoters50/1012205
ttgttttat

SEQ ID NO: 153885 - DNA, 8 bp, Unknown
  misc_feature (1)..( 8): Result.004 file - promoters50/1012205
aaaactaa

SEQ ID NO: 153886 - DNA, 8 bp, Unknown
  misc_feature (1)..( 8): Result.004 file - promoters50/1012205
aaaagtaa

SEQ ID NO: 153887 - DNA, 8 bp, Unknown
  misc_feature (1)..( 8): Result.004 file - promoters50/1012219
taaactaa

SEQ ID NO: 153888 - DNA, 7 bp, Unknown
  misc_feature (1)..( 7): Result.004 file - promoters50/1012219
aaataaa

SEQ ID NO: 153889 - DNA, 7 bp, Unknown
  misc_feature (1)..( 7): Result.004 file - promoters50/1012219
aaacaaa

SEQ ID NO: 153890 - DNA, 7 bp, Unknown
  misc_feature (1)..( 7): Result.004 file - promoters50/1012219
aaagaaa

SEQ ID NO: 153891 - DNA, 9 bp, Unknown
  misc_feature (1)..( 9): Result.004 file - promoters50/1012219
aaaattatc

SEQ ID NO: 153892 - DNA, 9 bp, Unknown
  misc_feature (1)..( 9): Result.004 file - promoters50/1012219
aaatttatt

SEQ ID NO: 153893 - DNA, 9 bp, Unknown
  misc_feature (1)..( 9): Result.004 file - promoters50/1012219
gcattttct

SEQ ID NO: 153894 - DNA, 8 bp, Unknown
  misc_feature (1)..( 8): Result.004 file - promoters50/1012219
gatggatt

SEQ ID NO: 153895 - DNA, 8 bp, Unknown
  misc_feature (1)..( 8): Result.004 file - promoters50/1012219
catgtatt

SEQ ID NO: 153896 - DNA, 8 bp, Unknown
  misc_feature (1)..( 8): Result.004 file - promoters50/1012219
catctata

SEQ ID NO: 153897 - DNA, 11 bp, Unknown
  misc_feature (1)..( 11): Result.004 file - promoters50/1012219
agatttcgata

SEQ ID NO: 153898 - DNA, 11 bp, Unknown
  misc_feature (1)..( 11): Result.004 file - promoters50/1012219
agatttggatt

SEQ ID NO: 153899 - DNA, 11 bp, Unknown
  misc_feature (1)..( 11): Result.004 file - promoters50/1012219
caatatggatt

SEQ ID NO: 153900 - DNA, 11 bp, Unknown
  misc_feature (1)..( 11): Result.004 file - promoters50/1012219
atagaattttg

SEQ ID NO: 153901 - DNA, 11 bp, Unknown
  misc_feature (1)..( 11): Result.004 file - promoters50/1012219
ataaaatataa

SEQ ID NO: 153902 - DNA, 11 bp, Unknown
  misc_feature (1)..( 11): Result.004 file - promoters50/1012219
tcaaaattata

SEQ ID NO: 153903 - DNA, 8 bp, Unknown
  misc_feature (1)..( 8): Result.004 file - promoters50/1012219
ttattata

SEQ ID NO: 153904 - DNA, 8 bp, Unknown
  misc_feature (1)..( 8): Result.004 file - promoters50/1012219
aaattata

SEQ ID NO: 153905 - DNA, 8 bp, Unknown
  misc_feature (1)..( 8): Result.004 file - promoters50/1012245
aaaatata

SEQ ID NO: 153906 - DNA, 7 bp, Unknown
  misc_feature (1)..( 7): Result.004 file - promoters50/1012245
ttttggt

SEQ ID NO: 153907 - DNA, 7 bp, Unknown
  misc_feature (1)..( 7): Result.004 file - promoters50/1012245
ttttggt

SEQ ID NO: 153908 - DNA, 7 bp, Unknown
  misc_feature (1)..( 7): Result.004 file - promoters50/1012311
gtttggt

SEQ ID NO: 153909 - DNA, 10 bp, Unknown
  misc_feature (1)..( 10): Result.004 file - promoters50/1012311
cttgtctgat

SEQ ID NO: 153910 - DNA, 10 bp, Unknown
  misc_feature (1)..( 10): Result.004 file - promoters50/1012311
cttgtcatat

SEQ ID NO: 153911 - DNA, 10 bp, Unknown
  misc_feature (1)..( 10): Result.004 file - promoters50/1012311
gttgtccgat

SEQ ID NO: 153912 - DNA, 10 bp, Unknown
  misc_feature (1)..( 10): Result.004 file - promoters50/1012311
attgttatag

SEQ ID NO: 153913 - DNA, 9 bp, Unknown
  misc_feature (1)..( 9): Result.004 file - promoters50/1012311
atgtctcag

SEQ ID NO: 153914 - DNA, 9 bp, Unknown
  misc_feature (1)..( 9): Result.004 file - promoters50/1012311
ttgtatcag

SEQ ID NO: 153915 - DNA, 9 bp, Unknown
  misc_feature (1)..( 9): Result.004 file - promoters50/1012311
atgtttcaa

SEQ ID NO: 153916 - DNA, 9 bp, Unknown
  misc_feature (1)..( 9): Result.004 file - promoters50/1012311
atgtctcag

SEQ ID NO: 153917 - DNA, 38 bp, Unknown
  misc_feature (1)..( 38): Result.004 file - promoters50/1012311
atttatacccacatgatcatgtcttctaaccacaagtt

SEQ ID NO: 153918 - DNA, 38 bp, Unknown
  misc_feature (1)..( 38): Result.004 file - promoters50/1012311
attcatactcacatggtcatgtcttctcagttctcacc

SEQ ID NO: 153919 - DNA, 38 bp, Unknown
  misc_feature (1)..( 38): Result.004 file - promoters50/1012311
attcatacccacatgatcttgtcttctcaccataagtt

SEQ ID NO: 153920 - DNA, 38 bp, Unknown; identical to SEQ ID NO: 153917
  misc_feature (1)..( 38): Result.004 file - promoters50/1012311

SEQ ID NO: 153921 - DNA, 38 bp, Unknown
  misc_feature (1)..( 38): Result.004 file - promoters50/1012311
ctcacatggtcatgtcttctcagttctcaccatgtatg

SEQ ID NO: 153922 - DNA, 38 bp, Unknown; identical to SEQ ID NO: 153919
  misc_feature (1)..( 38): Result.004 file - promoters50/1012311

SEQ ID NO: 153923 - DNA, 17 bp, Unknown
  misc_feature (1)..( 17): Result.004 file - promoters50/1012311
tatagtccactagttga

SEQ ID NO: 153924 - DNA, 17 bp, Unknown
  misc_feature (1)..( 17): Result.004 file - promoters50/1012311
tttaatccacaagttga

SEQ ID NO: 153925 - DNA, 17 bp, Unknown
  misc_feature (1)..( 17): Result.004 file - promoters50/1012311
tatagtccacaagttga

SEQ ID NO: 153926 - DNA, 15 bp, Unknown
  misc_feature (1)..( 15): Result.004 file - promoters50/1012311
gacataattgattac

SEQ ID NO: 153927 - DNA, 15 bp, Unknown
  misc_feature (1)..( 15): Result.004 file - promoters50/1012311
aataagattgattgc

SEQ ID NO: 153928 - DNA, 15 bp, Unknown
  misc_feature (1)..( 15): Result.004 file - promoters50/1012311
gacataattgattac

SEQ ID NO: 153929 - DNA, 15 bp, Unknown
  misc_feature (1)..( 15): Result.004 file - promoters50/1012311
aacttgggaccatag

SEQ ID NO: 153930 - DNA, 15 bp, Unknown
  misc_feature (1)..( 15): Result.004 file - promoters50/1012311
aacttgggaccctta

SEQ ID NO: 153931 - DNA, 15 bp, Unknown
  misc_feature (1)..( 15): Result.004 file - promoters50/1012311
aacttgggaccctta

SEQ ID NO: 153932 - DNA, 35 bp, Unknown
  misc_feature (1)..( 35): Result.004 file - promoters50/1012311
aacctaatagtttctccttctatataatgaaacaa

SEQ ID NO: 153933 - DNA, 35 bp, Unknown
  misc_feature (1)..( 35): Result.004 file - promoters50/1012311
acaataatagtttctccttatatataatgaaacaa

SEQ ID NO: 153934 - DNA, 35 bp, Unknown; identical to SEQ ID NO: 153932
  misc_feature (1)..( 35): Result.004 file - promoters50/1012311

SEQ ID NO: 153935 - DNA, 13 bp, Unknown
  misc_feature (1)..( 13): Result.004 file - promoters50/1012311
tatcaacagcctc

SEQ ID NO: 153936 - DNA, 13 bp, Unknown
  misc_feature (1)..( 13): Result.004 file - promoters50/1012311
catcaacagcctc

SEQ ID NO: 153937 - DNA, 13 bp, Unknown
  misc_feature (1)..( 13): Result.004 file - promoters50/1012311
catcaaagggttt

SEQ ID NO: 153938 - DNA, 16 bp, Unknown
  misc_feature (1)..( 16): Result.004 file - promoters50/1012311
attcttcaataatgtc

SEQ ID NO: 153939 - DNA, 16 bp, Unknown
  misc_feature (1)..( 16): Result.004 file - promoters50/1012311
tttcttcaataatgtc

SEQ ID NO: 153940 - DNA, 16 bp, Unknown
  misc_feature (1)..( 16): Result.004 file - promoters50/1012311
atgtttcaagaaacac

SEQ ID NO: 153941 - DNA, 27 bp, Unknown
  misc_feature (1)..( 27): Result.004 file - promoters50/1012311
tcttgtcatataaatgtccatatagga

SEQ ID NO: 153942 - DNA, 27 bp, Unknown
  misc_feature (1)..( 27): Result.004 file - promoters50/1012311
tcttgtcatataaacgtccgtatagga

SEQ ID NO: 153943 - DNA, 27 bp, Unknown
  misc_feature (1)..( 27): Result.004 file - promoters50/1012311
tcgtgacatatgaacgttcttattaca

SEQ ID NO: 153944 - DNA, 10 bp, Unknown
  misc_feature (1)..( 10): Result.004 file - promoters50/1012311
atatatattt

SEQ ID NO: 153945 - DNA, 10 bp, Unknown
  misc_feature (1)..( 10): Result.004 file - promoters50/1012311
atatatgttt

SEQ ID NO: 153946 - DNA, 10 bp, Unknown
  misc_feature (1)..( 10): Result.004 file - promoters50/1012311
taataagttg

SEQ ID NO: 153947 - DNA, 8 bp, Unknown
  misc_feature (1)..( 8): Result.004 file - promoters50/1012311
ataagttg

SEQ ID NO: 153948 - DNA, 8 bp, Unknown
  misc_feature (1)..( 8): Result.004 file - promoters50/1012311
aaaagttg

SEQ ID NO: 153949 - DNA, 8 bp, Unknown
  misc_feature (1)..( 8): Result.004 file - promoters50/1012349
atatgttt

SEQ ID NO: 153950 - DNA, 12 bp, Unknown
  misc_feature (1)..( 12): Result.004 file - promoters50/1012349
tatctttaaaat

SEQ ID NO: 153951 - DNA, 12 bp, Unknown
  misc_feature (1)..( 12): Result.004 file - promoters50/1012349
ctactttaaccc

SEQ ID NO: 153952 - DNA, 12 bp, Unknown
  misc_feature (1)..( 12): Result.004 file - promoters50/1012349
ctactataaatc

SEQ ID NO: 153953 - DNA, 12 bp, Unknown
  misc_feature (1)..( 12): Result.004 file - promoters50/1012349
gagatataaata

SEQ ID NO: 153954 - DNA, 12 bp, Unknown
  misc_feature (1)..( 12): Result.004 file - promoters50/1012349
cccatatatata

SEQ ID NO: 153955 - DNA, 12 bp, Unknown
  misc_feature (1)..( 12): Result.004 file - promoters50/1012349
gagctatataag

SEQ ID NO: 153956 - DNA, 14 bp, Unknown
  misc_feature (1)..( 14): Result.004 file - promoters50/1012349
caaacgtttaggag

SEQ ID NO: 153957 - DNA, 14 bp, Unknown
  misc_feature (1)..( 14): Result.004 file - promoters50/1012349
taaaagtttgttat

SEQ ID NO: 153958 - DNA, 14 bp, Unknown
  misc_feature (1)..( 14): Result.004 file - promoters50/1012349
catacgtttttttt

SEQ ID NO: 153959 - DNA, 14 bp, Unknown
  misc_feature (1)..( 14): Result.004 file - promoters50/1012349
aacacgcttacgaa

SEQ ID NO: 153960 - DNA, 14 bp, Unknown
  misc_feature (1)..( 14): Result.004 file - promoters50/1012349
tttacatttgtctg

SEQ ID NO: 153961 - DNA, 14 bp, Unknown
  misc_feature (1)..( 14): Result.004 file - promoters50/1012388
taaaagtttgatat

SEQ ID NO: 153962 - DNA, 12 bp, Unknown
  misc_feature (1)..( 12): Result.004 file - promoters50/1012388
tgggagtgtaag

SEQ ID NO: 153963 - DNA, 12 bp, Unknown
  misc_feature (1)..( 12): Result.004 file - promoters50/1012388
aaaaagtttaaa

SEQ ID NO: 153964 - DNA, 12 bp, Unknown
  misc_feature (1)..( 12): Result.004 file - promoters50/1012388
tttgagtgtatc

SEQ ID NO: 153965 - DNA, 12 bp, Unknown
  misc_feature (1)..( 12): Result.004 file - promoters50/1012388
aaaaaatttgaa

SEQ ID NO: 153966 - DNA, 12 bp, Unknown
  misc_feature (1)..( 12): Result.004 file - promoters50/1012388
ccatcgtttaat

SEQ ID NO: 153967 - DNA, 12 bp, Unknown
  misc_feature (1)..( 12): Result.004 file - promoters50/1012397
tccaaataaaaa

SEQ ID NO: 153968 - DNA, 12 bp, Unknown
  misc_feature (1)..( 12): Result.004 file - promoters50/1012397
ttaatttattta

SEQ ID NO: 153969 - DNA, 12 bp, Unknown
  misc_feature (1)..( 12): Result.004 file - promoters50/1012397
gtaatttgtctg

SEQ ID NO: 153970 - DNA, 12 bp, Unknown
  misc_feature (1)..( 12): Result.004 file - promoters50/1012397
ataatttaatgc

SEQ ID NO: 153971 - DNA, 12 bp, Unknown
  misc_feature (1)..( 12): Result.004 file - promoters50/1012397
ttaattcattgt

SEQ ID NO: 153972 - DNA, 12 bp, Unknown
  misc_feature (1)..( 12): Result.004 file - promoters50/1012397
aaaatttattta

SEQ ID NO: 153973 - DNA, 12 bp, Unknown
  misc_feature (1)..( 12): Result.004 file - promoters50/1012397
tgaatccatcag

SEQ ID NO: 153974 - DNA, 13 bp, Unknown
  misc_feature (1)..( 13): Result.004 file - promoters50/1012397
aatttatttaatt

SEQ ID NO: 153975 - DNA, 13 bp, Unknown
  misc_feature (1)..( 13): Result.004 file - promoters50/1012397
ctgttacttagct

SEQ ID NO: 153976 - DNA, 13 bp, Unknown
  misc_feature (1)..( 13): Result.004 file - promoters50/1012397
aatcaattgaatc

SEQ ID NO: 153977 - DNA, 13 bp, Unknown
  misc_feature (1)..( 13): Result.004 file - promoters50/1012397
cgcttaattcatt

SEQ ID NO: 153978 - DNA, 13 bp, Unknown
  misc_feature (1)..( 13): Result.004 file - promoters50/1012397
aatttatttatat

SEQ ID NO: 153979 - DNA, 13 bp, Unknown
  misc_feature (1)..( 13): Result.004 file - promoters50/1012397
aatttaatgcatc

SEQ ID NO: 153980 - DNA, 16 bp, Unknown
  misc_feature (1)..( 16): Result.004 file - promoters50/1012397
aatttatcttcttttg

SEQ ID NO: 153981 - DNA, 16 bp, Unknown
  misc_feature (1)..( 16): Result.004 file - promoters50/1012397
catttctctgggttag

SEQ ID NO: 153982 - DNA, 16 bp, Unknown
  misc_feature (1)..( 16): Result.004 file - promoters50/1012397
aatttattttccaatt

SEQ ID NO: 153983 - DNA, 16 bp, Unknown
  misc_feature (1)..( 16): Result.004 file - promoters50/1012397
attttctctcctttat

SEQ ID NO: 153984 - DNA, 16 bp, Unknown
  misc_feature (1)..( 16): Result.004 file - promoters50/1012397
gaattattttgctacc

SEQ ID NO: 153985 - DNA, 16 bp, Unknown
  misc_feature (1)..( 16): Result.004 file - promoters50/1012397
aatttcttgagacgga

SEQ ID NO: 153986 - DNA, 13 bp, Unknown
  misc_feature (1)..( 13): Result.004 file - promoters50/1012397
tacttttccaatt

SEQ ID NO: 153987 - DNA, 8 bp, Unknown
  misc_feature (1)..( 8): Result.004 file - promoters50/1012397
taaacaag

SEQ ID NO: 153988 - DNA, 8 bp, Unknown
  misc_feature (1)..( 8): Result.004 file - promoters50/1012397
aaaataag

SEQ ID NO: 153989 - DNA, 8 bp, Unknown
  misc_feature (1)..( 8): Result.004 file - promoters50/1012397
taaccaaa

SEQ ID NO: 153990 - DNA, 8 bp, Unknown
  misc_feature (1)..( 8): Result.004 file - promoters50/1012397
aaaataaa

SEQ ID NO: 153991 - DNA, 8 bp, Unknown
  misc_feature (1)..( 8): Result.004 file - promoters50/1012397
aaactaaa

SEQ ID NO: 153992 - DNA, 8 bp, Unknown
  misc_feature (1)..( 8): Result.004 file - promoters50/1012397
ttaccaaa

SEQ ID NO: 153993 - DNA, 8 bp, Unknown
  misc_feature (1)..( 8): Result.004 file - promoters50/1012397
aattaaac

SEQ ID NO: 153994 - DNA, 8 bp, Unknown
  misc_feature (1)..( 8): Result.004 file - promoters50/1012397
aattaaag

SEQ ID NO: 153995 - DNA, 8 bp, Unknown
  misc_feature (1)..( 8): Result.004 file - promoters50/1012397
cattaaat

SEQ ID NO: 153996 - DNA, 8 bp, Unknown
  misc_feature (1)..( 8): Result.004 file - promoters50/1012397
cattatta

SEQ ID NO: 153997 - DNA, 8 bp, Unknown
  misc_feature (1)..( 8): Result.004 file - promoters50/1012397
aattaatc

SEQ ID NO: 153998 - DNA, 8 bp, Unknown
  misc_feature (1)..( 8): Result.004 file - promoters50/1012403
aattaacc

SEQ ID NO: 153999 - DNA, 11 bp, Unknown
  misc_feature (1)..( 11): Result.004 file - promoters50/1012403
tgtttcttttg

SEQ ID NO: 154000 - DNA, 11 bp, Unknown
  misc_feature (1)..( 11): Result.004 file - promoters50/1012403
aattttttttt

SEQ ID NO: 154001 - DNA, 11 bp, Unknown
  misc_feature (1)..( 11): Result.004 file - promoters50/1012403
tgtgtcttcct

SEQ ID NO: 154002 - DNA, 11 bp, Unknown
  misc_feature (1)..( 11): Result.004 file - promoters50/1012403
agttttattat

SEQ ID NO: 154003 - DNA, 11 bp, Unknown
  misc_feature (1)..( 11): Result.004 file - promoters50/1012403
atcattagtat

SEQ ID NO: 154004 - DNA, 9 bp, Unknown
  misc_feature (1)..( 9): Result.004 file - promoters50/1012403
tgtattcta

SEQ ID NO: 154005 - DNA, 11 bp, Unknown
  misc_feature (1)..( 11): Result.004 file - promoters50/1012403
gtttggttcaa

SEQ ID NO: 154006 - DNA, 11 bp, Unknown
  misc_feature (1)..( 11): Result.004 file - promoters50/1012403
tttttgttaga

SEQ ID NO: 154007 - DNA, 11 bp, Unknown
  misc_feature (1)..( 11): Result.004 file - promoters50/1012403
gtattgtttca

SEQ ID NO: 154008 - DNA, 11 bp, Unknown
  misc_feature (1)..( 11): Result.004 file - promoters50/1012403
tttttgttttc

SEQ ID NO: 154009 - DNA, 11 bp, Unknown
  misc_feature (1)..( 11): Result.004 file - promoters50/1012403
cttttattaaa

SEQ ID NO: 154010 - DNA, 11 bp, Unknown
  misc_feature (1)..( 11): Result.004 file - promoters50/1012403
cttttacaaaa

SEQ ID NO: 154011 - DNA, 10 bp, Unknown
  misc_feature (1)..( 10): Result.004 file - promoters50/1012403
agtaagaaaa

SEQ ID NO: 154012 - DNA, 10 bp, Unknown
  misc_feature (1)..( 10): Result.004 file - promoters50/1012403
tgtatgaaaa

SEQ ID NO: 154013 - DNA, 10 bp, Unknown
  misc_feature (1)..( 10): Result.004 file - promoters50/1012403
tttaaaaaaa

SEQ ID NO: 154014 - DNA, 10 bp, Unknown
  misc_feature (1)..( 10): Result.004 file - promoters50/1012403
aaaaagaaaa

SEQ ID NO: 154015 - DNA, 10 bp, Unknown
  misc_feature (1)..( 10): Result.004 file - promoters50/1012403
tgtttgatat

SEQ ID NO: 154016 - DNA, 10 bp, Unknown
  misc_feature (1)..( 10): Result.004 file - promoters50/1012403
tgtgtctttt

SEQ ID NO: 154017 - DNA, 9 bp, Unknown
  misc_feature (1)..( 9): Result.004 file - promoters50/1012403
gttttttaa

SEQ ID NO: 154018 - DNA, 9 bp, Unknown
  misc_feature (1)..( 9): Result.004 file - promoters50/1012403
ttttattat

SEQ ID NO: 154019 - DNA, 9 bp, Unknown
  misc_feature (1)..( 9): Result.004 file - promoters50/1012403
atttattac

SEQ ID NO: 154020 - DNA, 9 bp, Unknown
  misc_feature (1)..( 9): Result.004 file - promoters50/1012403
gtgtatttc

SEQ ID NO: 154021 - DNA, 9 bp, Unknown
  misc_feature (1)..( 9): Result.004 file - promoters50/1012403
tttttttaa

SEQ ID NO: 154022 - DNA, 9 bp, Unknown
  misc_feature (1)..( 9): Result.004 file - promoters50/1012403
cattagtat

SEQ ID NO: 154023 - DNA, 11 bp, Unknown
  misc_feature (1)..( 11): Result.004 file - promoters50/1012403
aatagaaaagt

SEQ ID NO: 154024 - DNA, 11 bp, Unknown
  misc_feature (1)..( 11): Result.004 file - promoters50/1012403
ttcagaaaata

SEQ ID NO: 154025 - DNA, 11 bp, Unknown
  misc_feature (1)..( 11): Result.004 file - promoters50/1012403
tttaggaaact

SEQ ID NO: 154026 - DNA, 11 bp, Unknown
  misc_feature (1)..( 11): Result.004 file - promoters50/1012403
actagaaaact

SEQ ID NO: 154027 - DNA, 11 bp, Unknown
  misc_feature (1)..( 11): Result.004 file - promoters50/1012403
ttttggattta

SEQ ID NO: 154028 - DNA, 11 bp, Unknown
  misc_feature (1)..( 11): Result.004 file - promoters50/1012403
tacagaagata

SEQ ID NO: 154029 - DNA, 12 bp, Unknown
  misc_feature (1)..( 12): Result.004 file - promoters50/1012403
tttggttcaatt

SEQ ID NO: 154030 - DNA, 12 bp, Unknown
  misc_feature (1)..( 12): Result.004 file - promoters50/1012403
acctgttgaatc

SEQ ID NO: 154031 - DNA, 12 bp, Unknown
  misc_feature (1)..( 12): Result.004 file - promoters50/1012403
attgtttcataa

SEQ ID NO: 154032 - DNA, 12 bp, Unknown
  misc_feature (1)..( 12): Result.004 file - promoters50/1012403
ggtttttcgatt

SEQ ID NO: 154033 - DNA, 12 bp, Unknown
  misc_feature (1)..( 12): Result.004 file - promoters50/1012403
tagctttgaatt

SEQ ID NO: 154034 - DNA, 12 bp, Unknown
  misc_feature (1)..( 12): Result.004 file - promoters50/1012403
attttttgttag

SEQ ID NO: 154035 - DNA, 13 bp, Unknown
  misc_feature (1)..( 13): Result.004 file - promoters50/1012403
tttgaaatttctc

SEQ ID NO: 154036 - DNA, 13 bp, Unknown
  misc_feature (1)..( 13): Result.004 file - promoters50/1012403
tttgtaatcaata

SEQ ID NO: 154037 - DNA, 13 bp, Unknown
  misc_feature (1)..( 13): Result.004 file - promoters50/1012403
actgaaattttag

SEQ ID NO: 154038 - DNA, 13 bp, Unknown
  misc_feature (1)..( 13): Result.004 file - promoters50/1012403
tttaaaatcaact

SEQ ID NO: 154039 - DNA, 13 bp, Unknown
  misc_feature (1)..( 13): Result.004 file - promoters50/1012403
gataaaataaaat

SEQ ID NO: 154040 - DNA, 13 bp, Unknown
  misc_feature (1)..( 13): Result.004 file - promoters50/1012407
ctacaaatcttag

SEQ ID NO: 154041 - DNA, 17 bp, Unknown
  misc_feature (1)..( 17): Result.004 file - promoters50/1012407
caattttgatgacaatt

SEQ ID NO: 154042 - DNA, 17 bp, Unknown
  misc_feature (1)..( 17): Result.004 file - promoters50/1012407
taattttaataatttat

SEQ ID NO: 154043 - DNA, 17 bp, Unknown
  misc_feature (1)..( 17): Result.004 file - promoters50/1012407
caattttgctaaaaatc

SEQ ID NO: 154044 - DNA, 17 bp, Unknown
  misc_feature (1)..( 17): Result.004 file - promoters50/1012407
tcattgtaacaaaaagt

SEQ ID NO: 154045 - DNA, 17 bp, Unknown
  misc_feature (1)..( 17): Result.004 file - promoters50/1012407
agattttaatattttat

SEQ ID NO: 154046 - DNA, 17 bp, Unknown
  misc_feature (1)..( 17): Result.004 file - promoters50/1012442
tgattttgattgattga

SEQ ID NO: 154047 - DNA, 14 bp, Unknown
  misc_feature (1)..( 14): Result.004 file - promoters50/1012442
ctaaaatttacata

SEQ ID NO: 154048 - DNA, 14 bp, Unknown
  misc_feature (1)..( 14): Result.004 file - promoters50/1012442
ataagattcacata

SEQ ID NO: 154049 - DNA, 14 bp, Unknown
  misc_feature (1)..( 14): Result.004 file - promoters50/1012442
ttaagattaattaa

SEQ ID NO: 154050 - DNA, 14 bp, Unknown
  misc_feature (1)..( 14): Result.004 file - promoters50/1012442
ataagaagtctgaa

SEQ ID NO: 154051 - DNA, 8 bp, Unknown
  misc_feature (1)..( 8): Result.004 file - promoters50/1012442
aagaaatt

SEQ ID NO: 154052 - DNA, 8 bp, Unknown
  misc_feature (1)..( 8): Result.004 file - promoters50/1012442
aagatatt

SEQ ID NO: 154053 - DNA, 8 bp, Unknown
  misc_feature (1)..( 8): Result.004 file - promoters50/1012442
aagaaaaa

SEQ ID NO: 154054 - DNA, 7 bp, Unknown
  misc_feature (1)..( 7): Result.004 file - promoters50/1012442
agatatt

SEQ ID NO: 154055 - DNA, 7 bp, Unknown
  misc_feature (1)..( 7): Result.004 file - promoters50/1012442
agatatc

SEQ ID NO: 154056 - DNA, 7 bp, Unknown
  misc_feature (1)..( 7): Result.004 file - promoters50/1012442
atatata

SEQ ID NO: 154057 - DNA, 7 bp, Unknown
  misc_feature (1)..( 7): Result.004 file - promoters50/1012442
caataag

SEQ ID NO: 154058 - DNA, 7 bp, Unknown
  misc_feature (1)..( 7): Result.004 file - promoters50/1012442
aaataag

SEQ ID NO: 154059 - DNA, 8 bp, Unknown
  misc_feature (1)..( 8): Result.004 file - promoters50/1012442
aaactaag

SEQ ID NO: 154060 - DNA, 7 bp, Unknown
  misc_feature (1)..( 7): Result.004 file - promoters50/1012442
tttttaa

SEQ ID NO: 154061 - DNA, 7 bp, Unknown
  misc_feature (1)..( 7): Result.004 file - promoters50/1012442
tttttaa

SEQ ID NO: 154062 - DNA, 7 bp, Unknown
  misc_feature (1)..( 7): Result.004 file - promoters50/1012442
tttttag

SEQ ID NO: 154063 - DNA, 12 bp, Unknown
  misc_feature (1)..( 12): Result.004 file - promoters50/1012442
aaacacaataca

SEQ ID NO: 154064 - DNA, 12 bp, Unknown
  misc_feature (1)..( 12): Result.004 file - promoters50/1012442
aaaaacaaaaca

SEQ ID NO: 154065 - DNA, 12 bp, Unknown
  misc_feature (1)..( 12): Result.004 file - promoters50/1012561
caaaacattaag

SEQ ID NO: 154066 - DNA, 8 bp, Unknown
  misc_feature (1)..( 8): Result.004 file - promoters50/1012561
aaaacaaa

SEQ ID NO: 154067 - DNA, 8 bp, Unknown
  misc_feature (1)..( 8): Result.004 file - promoters50/1012561
gaaataaa

SEQ ID NO: 154068 - DNA, 8 bp, Unknown
  misc_feature (1)..( 8): Result.004 file - promoters50/1012561
gaagtaat

SEQ ID NO: 154069 - DNA, 8 bp, Unknown
  misc_feature (1)..( 8): Result.004 file - promoters50/1012561
tgagtaat

SEQ ID NO: 154070 - DNA, 11 bp, Unknown
  misc_feature (1)..( 11): Result.004 file - promoters50/1012561
aatttttgtgt

SEQ ID NO: 154071 - DNA, 11 bp, Unknown
  misc_feature (1)..( 11): Result.004 file - promoters50/1012561
cattattgttt

SEQ ID NO: 154072 - DNA, 11 bp, Unknown
  misc_feature (1)..( 11): Result.004 file - promoters50/1012561
cgtatttgtgc

SEQ ID NO: 154073 - DNA, 11 bp, Unknown
  misc_feature (1)..( 11): Result.004 file - promoters50/1012561
tgttactgttt

SEQ ID NO: 154074 - DNA, 11 bp, Unknown
  misc_feature (1)..( 11): Result.004 file - promoters50/1012561
actttttaaat

SEQ ID NO: 154075 - DNA, 10 bp, Unknown
  misc_feature (1)..( 10): Result.004 file - promoters50/1012561
atcatttctt

SEQ ID NO: 154076 - DNA, 10 bp, Unknown
  misc_feature (1)..( 10): Result.004 file - promoters50/1012561
atcttttttt

SEQ ID NO: 154077 - DNA, 10 bp, Unknown
  misc_feature (1)..( 10): Result.004 file - promoters50/1012561
ttcattttta

SEQ ID NO: 154078 - DNA, 10 bp, Unknown
  misc_feature (1)..( 10): Result.004 file - promoters50/1012561
cacttttttt

SEQ ID NO: 154079 - DNA, 10 bp, Unknown
  misc_feature (1)..( 10): Result.004 file - promoters50/1012561
tttctttttt

SEQ ID NO: 154080 - DNA, 10 bp, Unknown
  misc_feature (1)..( 10): Result.004 file - promoters50/1012561
tttctttttc

SEQ ID NO: 154081 - DNA, 11 bp, Unknown
  misc_feature (1)..( 11): Result.004 file - promoters50/1012561
tttttttattt

SEQ ID NO: 154082 - DNA, 11 bp, Unknown
  misc_feature (1)..( 11): Result.004 file - promoters50/1012561
aatcttttttt

SEQ ID NO: 154083 - DNA, 10 bp, Unknown
  misc_feature (1)..( 10): Result.004 file - promoters50/1012561
caataattga

SEQ ID NO: 154084 - DNA, 10 bp, Unknown
  misc_feature (1)..( 10): Result.004 file - promoters50/1012561
aaataattat

SEQ ID NO: 154085 - DNA, 10 bp, Unknown
  misc_feature (1)..( 10): Result.004 file - promoters50/1012561
caaaaattat

SEQ ID NO: 154086 - DNA, 10 bp, Unknown
  misc_feature (1)..( 10): Result.004 file - promoters50/1012568
aaaaaattat

SEQ ID NO: 154087 - DNA, 9 bp, Unknown
  misc_feature (1)..( 9): Result.004 file - promoters50/1012568
attcttctt

SEQ ID NO: 154088 - DNA, 9 bp, Unknown
  misc_feature (1)..( 9): Result.004 file - promoters50/1012568
atttttctt

SEQ ID NO: 154089 - DNA, 9 bp, Unknown
  misc_feature (1)..( 9): Result.004 file - promoters50/1012568
attcttttt

SEQ ID NO: 154090 - DNA, 9 bp, Unknown
  misc_feature (1)..( 9): Result.004 file - promoters50/1012568
tttaatttt

SEQ ID NO: 154091 - DNA, 9 bp, Unknown
  misc_feature (1)..( 9): Result.004 file - promoters50/1012568
tttgatttc

SEQ ID NO: 154092 - DNA, 9 bp, Unknown
  misc_feature (1)..( 9): Result.004 file - promoters50/1012568
tataatttt

SEQ ID NO: 154093 - DNA, 6 bp, Unknown
  misc_feature (1)..( 6): Result.004 file - promoters50/1012568
ttttta

SEQ ID NO: 154094 - DNA, 6 bp, Unknown
  misc_feature (1)..( 6): Result.004 file - promoters50/1012568
ttttta

SEQ ID NO: 154095 - DNA, 6 bp, Unknown
  misc_feature (1)..( 6): Result.004 file - promoters50/1012568
ttttta

SEQ ID NO: 154096 - DNA, 7 bp, Unknown
  misc_feature (1)..( 7): Result.004 file - promoters50/1012568
tttagta

SEQ ID NO: 154097 - DNA, 7 bp, Unknown
  misc_feature (1)..( 7): Result.004 file - promoters50/1012568
ttttgta

SEQ ID NO: 154098 - DNA, 7 bp, Unknown
  misc_feature (1)..( 7): Result.004 file - promoters50/1012580
tttagta

SEQ ID NO: 154099 - DNA, 6 bp, Unknown
  misc_feature (1)..( 6): Result.004 file - promoters50/1012580
cttata

SEQ ID NO: 154100 - DNA, 6 bp, Unknown
  misc_feature (1)..( 6): Result.004 file - promoters50/1012580
cttata

SEQ ID NO: 154101 - DNA, 6 bp, Unknown
  misc_feature (1)..( 6): Result.004 file - promoters50/1012620
cttata

SEQ ID NO: 154102 - DNA, 11 bp, Unknown
  misc_feature (1)..( 11): Result.004 file - promoters50/1012620
ataatttgagt

SEQ ID NO: 154103 - DNA, 11 bp, Unknown
  misc_feature (1)..( 11): Result.004 file - promoters50/1012620
caaatgtgatt

SEQ ID NO: 154104 - DNA, 11 bp, Unknown
  misc_feature (1)..( 11): Result.004 file - promoters50/1012620
atatttttagt

SEQ ID NO: 154105 - DNA, 10 bp, Unknown
  misc_feature (1)..( 10): Result.004 file - promoters50/1012620
aatatataca

SEQ ID NO: 154106 - DNA, 10 bp, Unknown
  misc_feature (1)..( 10): Result.004 file - promoters50/1012620
aatttatcaa

SEQ ID NO: 154107 - DNA, 10 bp, Unknown
  misc_feature (1)..( 10): Result.004 file - promoters50/1012620
agtttatttt

SEQ ID NO: 154108 - DNA, 11 bp, Unknown
  misc_feature (1)..( 11): Result.004 file - promoters50/1012620
agagaaaggat

SEQ ID NO: 154109 - DNA, 11 bp, Unknown
  misc_feature (1)..( 11): Result.004 file - promoters50/1012620
agaaaaattgt

SEQ ID NO: 154110 - DNA, 11 bp, Unknown
  misc_feature (1)..( 11): Result.004 file - promoters50/1012620
aaacaaagatt

SEQ ID NO: 154111 - DNA, 9 bp, Unknown
  misc_feature (1)..( 9): Result.004 file - promoters50/1012620
atctataaa

SEQ ID NO: 154112 - DNA, 9 bp, Unknown
  misc_feature (1)..( 9): Result.004 file - promoters50/1012620
atatataaa

SEQ ID NO: 154113 - DNA, 9 bp, Unknown
  misc_feature (1)..( 9): Result.004 file - promoters50/1012620
ccttataaa

SEQ ID NO: 154114 - DNA, 9 bp, Unknown
  misc_feature (1)..( 9): Result.004 file - promoters50/1012620
ccttttaaa

SEQ ID NO: 154115 - DNA, 8 bp, Unknown
  misc_feature (1)..( 8): Result.004 file - promoters50/1012620
aggaggaa

SEQ ID NO: 154116 - DNA, 8 bp, Unknown
  misc_feature (1)..( 8): Result.004 file - promoters50/1012620
tggaggat

SEQ ID NO: 154117 - DNA, 8 bp, Unknown
  misc_feature (1)..( 8): Result.004 file - promoters50/1012620
aggaggaa

SEQ ID NO: 154118 - DNA, 9 bp, Unknown
  misc_feature (1)..( 9): Result.004 file - promoters50/1012620
taatgaaat

SEQ ID NO: 154119 - DNA, 9 bp, Unknown
  misc_feature (1)..( 9): Result.004 file - promoters50/1012620
agatgaaat

SEQ ID NO: 154120 - DNA, 9 bp, Unknown
  misc_feature (1)..( 9): Result.004 file - promoters50/1012620
taattaaaa

SEQ ID NO: 154121 - DNA, 8 bp, Unknown
  misc_feature (1)..( 8): Result.004 file - promoters50/1012620
gttacaaa

SEQ ID NO: 154122 - DNA, 8 bp, Unknown
  misc_feature (1)..( 8): Result.004 file - promoters50/1012620
gttacaac

SEQ ID NO: 154123 - DNA, 8 bp, Unknown
  misc_feature (1)..( 8): Result.004 file - promoters50/1012659
gttataac

SEQ ID NO: 154124 - DNA, 10 bp, Unknown
  misc_feature (1)..( 10): Result.004 file - promoters50/1012659
aataaagaat

SEQ ID NO: 154125 - DNA, 10 bp, Unknown
  misc_feature (1)..( 10): Result.004 file - promoters50/1012659
ttgaaaaaat

SEQ ID NO: 154126 - DNA, 10 bp, Unknown
  misc_feature (1)..( 10): Result.004 file - promoters50/1012659
ttgacaaaat

SEQ ID NO: 154127 - DNA, 10 bp, Unknown
  misc_feature (1)..( 10): Result.004 file - promoters50/1012659
atgaataaac

SEQ ID NO: 154128 - DNA, 11 bp, Unknown
  misc_feature (1)..( 11): Result.004 file - promoters50/1012659
tcactttgaag

SEQ ID NO: 154129 - DNA, 11 bp, Unknown
  misc_feature (1)..( 11): Result.004 file - promoters50/1012659
aaactttgttt

SEQ ID NO: 154130 - DNA, 11 bp, Unknown
  misc_feature (1)..( 11): Result.004 file - promoters50/1012659
tcattttcaca

SEQ ID NO: 154131 - DNA, 11 bp, Unknown
  misc_feature (1)..( 11): Result.004 file - promoters50/1012659
attctttaaag

SEQ ID NO: 154132 - DNA, 10 bp, Unknown
  misc_feature (1)..( 10): Result.004 file - promoters50/1012659
tttgtttaac

SEQ ID NO: 154133 - DNA, 10 bp, Unknown
  misc_feature (1)..( 10): Result.004 file - promoters50/1012659
tttgttgcta

SEQ ID NO: 154134 - DNA, 10 bp, Unknown
  misc_feature (1)..( 10): Result.004 file - promoters50/1012659
tttctttatc

SEQ ID NO: 154135 - DNA, 10 bp, Unknown
  misc_feature (1)..( 10): Result.004 file - promoters50/1012720
gtacttcatc

SEQ ID NO: 154136 - DNA, 11 bp, Unknown
  misc_feature (1)..( 11): Result.004 file - promoters50/1012720
aaatgtcgaaa

SEQ ID NO: 154137 - DNA, 11 bp, Unknown
  misc_feature (1)..( 11): Result.004 file - promoters50/1012720
aaatgttttgc

SEQ ID NO: 154138 - DNA, 11 bp, Unknown
  misc_feature (1)..( 11): Result.004 file - promoters50/1012720
aaacgttaaaa

SEQ ID NO: 154139 - DNA, 11 bp, Unknown
  misc_feature (1)..( 11): Result.004 file - promoters50/1012720
caattttttgt

SEQ ID NO: 154140 - DNA, 11 bp, Unknown
  misc_feature (1)..( 11): Result.004 file - promoters50/1012720
agatttgttgg

SEQ ID NO: 154141 - DNA, 11 bp, Unknown
  misc_feature (1)..( 11): Result.004 file - promoters50/1012720
tactttcttgt

SEQ ID NO: 154142 - DNA, 9 bp, Unknown
  misc_feature (1)..( 9): Result.004 file - promoters50/1012720
ttttaaaat

SEQ ID NO: 154143 - DNA, 9 bp, Unknown
  misc_feature (1)..( 9): Result.004 file - promoters50/1012720
tgttaaaag

SEQ ID NO: 154144 - DNA, 9 bp, Unknown
  misc_feature (1)..( 9): Result.004 file - promoters50/1012720
cgttaaaac

SEQ ID NO: 154145 - DNA, 9 bp, Unknown
  misc_feature (1)..( 9): Result.004 file - promoters50/1012720
ggttacaat

SEQ ID NO: 154146 - DNA, 9 bp, Unknown
  misc_feature (1)..( 9): Result.004 file - promoters50/1012720
tgtgaaatg

SEQ ID NO: 154147 - DNA, 9 bp, Unknown
  misc_feature (1)..( 9): Result.004 file - promoters50/1012720
tgtgaatct

SEQ ID NO: 154148 - DNA, 13 bp, Unknown
  misc_feature (1)..( 13): Result.004 file - promoters50/1012720
ttttgttaatatc

SEQ ID NO: 154149 - DNA, 13 bp, Unknown
  misc_feature (1)..( 13): Result.004 file - promoters50/1012720
ggttgctaaataa

SEQ ID NO: 154150 - DNA, 13 bp, Unknown
  misc_feature (1)..( 13): Result.004 file - promoters50/1012720
tcttgttatgttt

SEQ ID NO: 154151 - DNA, 13 bp, Unknown
  misc_feature (1)..( 13): Result.004 file - promoters50/1012720
ggaccatattttt

SEQ ID NO: 154152 - DNA, 13 bp, Unknown
  misc_feature (1)..( 13): Result.004 file - promoters50/1012720
aattattattatc

SEQ ID NO: 154153 - DNA, 13 bp, Unknown
  misc_feature (1)..( 13): Result.004 file - promoters50/1012757
aattattcaatac

SEQ ID NO: 154154 - DNA, 10 bp, Unknown
  misc_feature (1)..( 10): Result.004 file - promoters50/1012757
tataatatgt

SEQ ID NO: 154155 - DNA, 10 bp, Unknown
  misc_feature (1)..( 10): Result.004 file - promoters50/1012757
aataataaaa

SEQ ID NO: 154156 - DNA, 10 bp, Unknown
  misc_feature (1)..( 10): Result.004 file - promoters50/1012757
tttaatattt

SEQ ID NO: 154157 - DNA, 10 bp, Unknown
  misc_feature (1)..( 10): Result.004 file - promoters50/1012757
tttcataatt

SEQ ID NO: 154158 - DNA, 10 bp, Unknown
  misc_feature (1)..( 10): Result.004 file - promoters50/1012757
cataagaaaa

SEQ ID NO: 154159 - DNA, 10 bp, Unknown
  misc_feature (1)..( 10): Result.004 file - promoters50/1012757
aaaaatatta

SEQ ID NO: 154160 - DNA, 12 bp, Unknown
  misc_feature (1)..( 12): Result.004 file - promoters50/1012757
ataaattaatgc

SEQ ID NO: 154161 - DNA, 12 bp, Unknown
  misc_feature (1)..( 12): Result.004 file - promoters50/1012757
atatattaatgt

SEQ ID NO: 154162 - DNA, 12 bp, Unknown
  misc_feature (1)..( 12): Result.004 file - promoters50/1012757
ccatattaataa

SEQ ID NO: 154163 - DNA, 12 bp, Unknown
  misc_feature (1)..( 12): Result.004 file - promoters50/1012757
aagttttaatgt

SEQ ID NO: 154164 - DNA, 12 bp, Unknown
  misc_feature (1)..( 12): Result.004 file - promoters50/1012757
taaaattaatat

SEQ ID NO: 154165 - DNA, 12 bp, Unknown
  misc_feature (1)..( 12): Result.004 file - promoters50/1012761
tttggttattgt

SEQ ID NO: 154166 - DNA, 9 bp, Unknown
  misc_feature (1)..( 9): Result.004 file - promoters50/1012761
taaaaaaaa

SEQ ID NO: 154167 - DNA, 9 bp, Unknown
  misc_feature (1)..( 9): Result.004 file - promoters50/1012761
taaaaaaag

SEQ ID NO: 154168 - DNA, 9 bp, Unknown
  misc_feature (1)..( 9): Result.004 file - promoters50/1012761
caaaagaca

SEQ ID NO: 154169 - DNA, 7 bp, Unknown
  misc_feature (1)..( 7): Result.004 file - promoters50/1012761
aaaaaaa

SEQ ID NO: 154170 - DNA, 7 bp, Unknown
  misc_feature (1)..( 7): Result.004 file - promoters50/1012761
aaataaa

SEQ ID NO: 154171 - DNA, 7 bp, Unknown
  misc_feature (1)..( 7): Result.004 file - promoters50/1012761
aaataag

SEQ ID NO: 154172 - DNA, 7 bp, Unknown
  misc_feature (1)..( 7): Result.004 file - promoters50/1012761
aaagaaa

SEQ ID NO: 154173 - DNA, 7 bp, Unknown
  misc_feature (1)..( 7): Result.004 file - promoters50/1012761
aaagaaa

SEQ ID NO: 154174 - DNA, 7 bp, Unknown
  misc_feature (1)..( 7): Result.004 file - promoters50/1012761
caagaaa

SEQ ID NO: 154175 - DNA, 7 bp, Unknown
  misc_feature (1)..( 7): Result.004 file - promoters50/1012761
gatttga

SEQ ID NO: 154176 - DNA, 7 bp, Unknown
  misc_feature (1)..( 7): Result.004 file - promoters50/1012761
gatttga

SEQ ID NO: 154177 - DNA, 7 bp, Unknown
  misc_feature (1)..( 7): Result.004 file - promoters50/1012761
gatttgg

SEQ ID NO: 154178 - DNA, 9 bp, Unknown
  misc_feature (1)..( 9): Result.004 file - promoters50/1012761
aaacgaaga

SEQ ID NO: 154179 - DNA, 9 bp, Unknown
  misc_feature (1)..( 9): Result.004 file - promoters50/1012761
taaccaaga

SEQ ID NO: 154180 - DNA, 9 bp, Unknown
  misc_feature (1)..( 9): Result.004 file - promoters50/1012791
taaccagaa

SEQ ID NO: 154181 - DNA, 8 bp, Unknown
  misc_feature (1)..( 8): Result.004 file - promoters50/1012791
aaacaaaa

SEQ ID NO: 154182 - DNA, 8 bp, Unknown
  misc_feature (1)..( 8): Result.004 file - promoters50/1012791
aaacaatt

SEQ ID NO: 154183 - DNA, 8 bp, Unknown
  misc_feature (1)..( 8): Result.004 file - promoters50/1012791
aaacaaaa

SEQ ID NO: 154184 - DNA, 8 bp, Unknown
  misc_feature (1)..( 8): Result.004 file - promoters50/1012791
atacacag

SEQ ID NO: 154185 - DNA, 8 bp, Unknown
  misc_feature (1)..( 8): Result.004 file - promoters50/1012791
aataaaca

SEQ ID NO: 154186 - DNA, 8 bp, Unknown
  misc_feature (1)..( 8): Result.004 file - promoters50/1012791
aattaacg

SEQ ID NO: 154187 - DNA, 8 bp, Unknown
  misc_feature (1)..( 8): Result.004 file - promoters50/1012791
catacaca

SEQ ID NO: 154188 - DNA, 10 bp, Unknown
  misc_feature (1)..( 10): Result.004 file - promoters50/1012791
tttctatatt

SEQ ID NO: 154189 - DNA, 10 bp, Unknown
  misc_feature (1)..( 10): Result.004 file - promoters50/1012791
tttttatatt

SEQ ID NO: 154190 - DNA, 10 bp, Unknown
  misc_feature (1)..( 10): Result.004 file - promoters50/1012791
cttttatcat

SEQ ID NO: 154191 - DNA, 10 bp, Unknown
  misc_feature (1)..( 10): Result.004 file - promoters50/1012791
attctttttt

SEQ ID NO: 154192 - DNA, 11 bp, Unknown
  misc_feature (1)..( 11): Result.004 file - promoters50/1012791
acaaaataaat

SEQ ID NO: 154193 - DNA, 11 bp, Unknown
  misc_feature (1)..( 11): Result.004 file - promoters50/1012791
caaaaacaaat

SEQ ID NO: 154194 - DNA, 11 bp, Unknown
  misc_feature (1)..( 11): Result.004 file - promoters50/1012791
acaaaatggat

SEQ ID NO: 154195 - DNA, 11 bp, Unknown
  misc_feature (1)..( 11): Result.004 file - promoters50/1012791
taaaaacaatt

SEQ ID NO: 154196 - DNA, 9 bp, Unknown
  misc_feature (1)..( 9): Result.004 file - promoters50/1012791
ttcttttat

SEQ ID NO: 154197 - DNA, 9 bp, Unknown
  misc_feature (1)..( 9): Result.004 file - promoters50/1012791
ttctttttt

SEQ ID NO: 154198 - DNA, 9 bp, Unknown
  misc_feature (1)..( 9): Result.004 file - promoters50/1012791
ttctttttt

SEQ ID NO: 154199 - DNA, 9 bp, Unknown
  misc_feature (1)..( 9): Result.004 file - promoters50/1012791
ttttaaaaa

SEQ ID NO: 154200 - DNA, 9 bp, Unknown
  misc_feature (1)..( 9): Result.004 file - promoters50/1012791
ctttacaaa

SEQ ID NO: 154201 - DNA, 9 bp, Unknown
  misc_feature (1)..( 9): Result.004 file - promoters50/1012791
ttttaaagc

SEQ ID NO: 154202 - DNA, 9 bp, Unknown
  misc_feature (1)..( 9): Result.004 file - promoters50/1012791
ttttttttc

SEQ ID NO: 154203 - DNA, 9 bp, Unknown
  misc_feature (1)..( 9): Result.004 file - promoters50/1012791
tttgttttc

SEQ ID NO: 154204 - DNA, 9 bp, Unknown
  misc_feature (1)..( 9): Result.004 file - promoters50/1012791
tttattttt

SEQ ID NO: 154205 - DNA, 8 bp, Unknown
  misc_feature (1)..( 8): Result.004 file - promoters50/1012791
aaaaatga

SEQ ID NO: 154206 - DNA, 8 bp, Unknown
  misc_feature (1)..( 8): Result.004 file - promoters50/1012791
gaaaatga

SEQ ID NO: 154207 - DNA, 8 bp, Unknown
  misc_feature (1)..( 8): Result.004 file - promoters50/1012795
gaaaataa

SEQ ID NO: 154208 - DNA, 8 bp, Unknown
  misc_feature (1)..( 8): Result.004 file - promoters50/1012795
acatgaaa

SEQ ID NO: 154209 - DNA, 8 bp, Unknown
  misc_feature (1)..( 8): Result.004 file - promoters50/1012795
ttatgaaa

SEQ ID NO: 154210 - DNA, 8 bp, Unknown
  misc_feature (1)..( 8): Result.004 file - promoters50/1012795
ttaagaat

SEQ ID NO: 154211 - DNA, 8 bp, Unknown
  misc_feature (1)..( 8): Result.004 file - promoters50/1012795
tttggtac

SEQ ID NO: 154212 - DNA, 8 bp, Unknown
  misc_feature (1)..( 8): Result.004 file - promoters50/1012795
tttggtta

SEQ ID NO: 154213 - DNA, 8 bp, Unknown
  misc_feature (1)..( 8): Result.004 file - promoters50/1012803
tttagtta

SEQ ID NO: 154214 - DNA, 8 bp, Unknown
  misc_feature (1)..( 8): Result.004 file - promoters50/1012803
caagaaaa

SEQ ID NO: 154215 - DNA, 8 bp, Unknown
  misc_feature (1)..( 8): Result.004 file - promoters50/1012803
gaagaaaa

SEQ ID NO: 154216 - DNA, 8 bp, Unknown
  misc_feature (1)..( 8): Result.004 file - promoters50/1012803
caagaaag

SEQ ID NO: 154217 - DNA, 8 bp, Unknown
  misc_feature (1)..( 8): Result.004 file - promoters50/1012803
tgagaaaa

SEQ ID NO: 154218 - DNA, 7 bp, Unknown
  misc_feature (1)..( 7): Result.004 file - promoters50/1012803
tataata

SEQ ID NO: 154219 - DNA, 7 bp, Unknown
  misc_feature (1)..( 7): Result.004 file - promoters50/1012803
cataata

SEQ ID NO: 154220 - DNA, 7 bp, Unknown
  misc_feature (1)..( 7): Result.004 file - promoters50/1012803
cataatt

SEQ ID NO: 154221 - DNA, 7 bp, Unknown
  misc_feature (1)..( 7): Result.004 file - promoters50/1012803
aaataaa

SEQ ID NO: 154222 - DNA, 7 bp, Unknown
  misc_feature (1)..( 7): Result.004 file - promoters50/1012803
aaataat

SEQ ID NO: 154223 - DNA, 7 bp, Unknown
  misc_feature (1)..( 7): Result.004 file - promoters50/1012803
aaataaa

SEQ ID NO: 154224 - DNA, 8 bp, Unknown
  misc_feature (1)..( 8): Result.004 file - promoters50/1012803
cacgaagc

SEQ ID NO: 154225 - DNA, 8 bp, Unknown
  misc_feature (1)..( 8): Result.004 file - promoters50/1012803
cacaaagt

SEQ ID NO: 154226 - DNA, 8 bp, Unknown
  misc_feature (1)..( 8): Result.004 file - promoters50/1012803
gacacagt

SEQ ID NO: 154227 - DNA, 10 bp, Unknown
  misc_feature (1)..( 10): Result.004 file - promoters50/1012803
taatagtaaa

SEQ ID NO: 154228 - DNA, 10 bp, Unknown
  misc_feature (1)..( 10): Result.004 file - promoters50/1012803
ggatattaaa

SEQ ID NO: 154229 - DNA, 10 bp, Unknown
  misc_feature (1)..( 10): Result.004 file - promoters50/1012811
ggatattgtt

SEQ ID NO: 154230 - DNA, 8 bp, Unknown
  misc_feature (1)..( 8): Result.004 file - promoters50/1012811
tgttgatt

SEQ ID NO: 154231 - DNA, 8 bp, Unknown
  misc_feature (1)..( 8): Result.004 file - promoters50/1012811
gtttgatt

SEQ ID NO: 154232 - DNA, 8 bp, Unknown
  misc_feature (1)..( 8): Result.004 file - promoters50/1012811
tgtggatt

SEQ ID NO: 154233 - DNA, 7 bp, Unknown
  misc_feature (1)..( 7): Result.004 file - promoters50/1012811
aaattaa

SEQ ID NO: 154234 - DNA, 7 bp, Unknown
  misc_feature (1)..( 7): Result.004 file - promoters50/1012811
aaattag

SEQ ID NO: 154235 - DNA, 7 bp, Unknown
  misc_feature (1)..( 7): Result.004 file - promoters50/1012811
aaactaa

SEQ ID NO: 154236 - DNA, 8 bp, Unknown
  misc_feature (1)..( 8): Result.004 file - promoters50/1012811
aattcaca

SEQ ID NO: 154237 - DNA, 8 bp, Unknown
  misc_feature (1)..( 8): Result.004 file - promoters50/1012811
aattcata

SEQ ID NO: 154238 - DNA, 8 bp, Unknown
  misc_feature (1)..( 8): Result.004 file - promoters50/1012811
aattgaca

SEQ ID NO: 154239 - DNA, 10 bp, Unknown
  misc_feature (1)..( 10): Result.004 file - promoters50/1012811
caaaataaaa

SEQ ID NO: 154240 - DNA, 10 bp, Unknown
  misc_feature (1)..( 10): Result.004 file - promoters50/1012811
aaaaacaaaa

SEQ ID NO: 154241 - DNA, 10 bp, Unknown
  misc_feature (1)..( 10): Result.004 file - promoters50/1012811
taaaaaaaac

SEQ ID NO: 154242 - DNA, 10 bp, Unknown
  misc_feature (1)..( 10): Result.004 file - promoters50/1012811
tttaacaact

SEQ ID NO: 154243 - DNA, 9 bp, Unknown
  misc_feature (1)..( 9): Result.004 file - promoters50/1012811
aaaagaaag

SEQ ID NO: 154244 - DNA, 9 bp, Unknown
  misc_feature (1)..( 9): Result.004 file - promoters50/1012811
aaaataaat

SEQ ID NO: 154245 - DNA, 9 bp, Unknown
  misc_feature (1)..( 9): Result.004 file - promoters50/1012811
atcataaat

SEQ ID NO: 154246 - DNA, 9 bp, Unknown
  misc_feature (1)..( 9): Result.004 file - promoters50/1012811
tttttatta

SEQ ID NO: 154247 - DNA, 9 bp, Unknown
  misc_feature (1)..( 9): Result.004 file - promoters50/1012811
attttattc

SEQ ID NO: 154248 - DNA, 9 bp, Unknown
  misc_feature (1)..( 9): Result.004 file - promoters50/1012811
gttttgtta

SEQ ID NO: 154249 - DNA, 9 bp, Unknown
  misc_feature (1)..( 9): Result.004 file - promoters50/1012811
gttttgggc

SEQ ID NO: 154250 - DNA, 8 bp, Unknown
  misc_feature (1)..( 8): Result.004 file - promoters50/1012811
agttgtaa

SEQ ID NO: 154251 - DNA, 8 bp, Unknown
  misc_feature (1)..( 8): Result.004 file - promoters50/1012811
tgttttaa

SEQ ID NO: 154252 - DNA, 8 bp, Unknown
  misc_feature (1)..( 8): Result.004 file - promoters50/1012811
ttttttaa

SEQ ID NO: 154253 - DNA, 8 bp, Unknown
  misc_feature (1)..( 8): Result.004 file - promoters50/1012811
ttttttaa

SEQ ID NO: 154254 - DNA, 10 bp, Unknown
  misc_feature (1)..( 10): Result.004 file - promoters50/1012811
aatactataa

SEQ ID NO: 154255 - DNA, 10 bp, Unknown
  misc_feature (1)..( 10): Result.004 file - promoters50/1012811
aatagtatat

SEQ ID NO: 154256 - DNA, 10 bp, Unknown
  misc_feature (1)..( 10): Result.004 file - promoters50/1012811
atgagtgtat

SEQ ID NO: 154257 - DNA, 7 bp, Unknown
  misc_feature (1)..( 7): Result.004 file - promoters50/1012811
aaaaaat

SEQ ID NO: 154258 - DNA, 7 bp, Unknown
  misc_feature (1)..( 7): Result.004 file - promoters50/1012811
aaaaaac

SEQ ID NO: 154259 - DNA, 7 bp, Unknown
  misc_feature (1)..( 7): Result.004 file - promoters50/1012811
aaaaaca

SEQ ID NO: 154260 - DNA, 7 bp, Unknown
  misc_feature (1)..( 7): Result.004 file - promoters50/1012811
attcaaa

SEQ ID NO: 154261 - DNA, 7 bp, Unknown
  misc_feature (1)..( 7): Result.004 file - promoters50/1012811
atttaaa

SEQ ID NO: 154262 - DNA, 7 bp, Unknown
  misc_feature (1)..( 7): Result.004 file - promoters50/1012811
atttaac

SEQ ID NO: 154263 - DNA, 9 bp, Unknown
  misc_feature (1)..( 9): Result.004 file - promoters50/1012811
tgattaaat

SEQ ID NO: 154264 - DNA, 9 bp, Unknown
  misc_feature (1)..( 9): Result.004 file - promoters50/1012811
gtatttaat

SEQ ID NO: 154265 - DNA, 9 bp, Unknown
  misc_feature (1)..( 9): Result.004 file - promoters50/1012835
gtatataaa

SEQ ID NO: 154266 - DNA, 8 bp, Unknown
  misc_feature (1)..( 8): Result.004 file - promoters50/1012835
cttacagt

SEQ ID NO: 154267 - DNA, 8 bp, Unknown
  misc_feature (1)..( 8): Result.004 file - promoters50/1012835
cttacaca

SEQ ID NO: 154268 - DNA, 8 bp, Unknown
  misc_feature (1)..( 8): Result.004 file - promoters50/1012883
attaaaca

SEQ ID NO: 154269 - DNA, 10 bp, Unknown
  misc_feature (1)..( 10): Result.004 file - promoters50/1012883
ttacaaaaag

SEQ ID NO: 154270 - DNA, 10 bp, Unknown
  misc_feature (1)..( 10): Result.004 file - promoters50/1012883
ttataaaaca

SEQ ID NO: 154271 - DNA, 10 bp, Unknown
  misc_feature (1)..( 10): Result.004 file - promoters50/1012883
ttagaaaaaa

SEQ ID NO: 154272 - DNA, 10 bp, Unknown
  misc_feature (1)..( 10): Result.004 file - promoters50/1012883
ttacaatgac

SEQ ID NO: 154273 - DNA, 10 bp, Unknown
  misc_feature (1)..( 10): Result.004 file - promoters50/1012883
aaggaaaaaa

SEQ ID NO: 154274 - DNA, 10 bp, Unknown
  misc_feature (1)..( 10): Result.004 file - promoters50/1012883
acccaaaaaa

SEQ ID NO: 154275 - DNA, 10 bp, Unknown
  misc_feature (1)..( 10): Result.004 file - promoters50/1012883
gtagatattt

SEQ ID NO: 154276 - DNA, 10 bp, Unknown
  misc_feature (1)..( 10): Result.004 file - promoters50/1012883
gtatatatta

SEQ ID NO: 154277 - DNA, 11 bp, Unknown
  misc_feature (1)..( 11): Result.004 file - promoters50/1012883
gcagatactta

SEQ ID NO: 154278 - DNA, 12 bp, Unknown
  misc_feature (1)..( 12): Result.004 file - promoters50/1012883
atgaataaattg

SEQ ID NO: 154279 - DNA, 12 bp, Unknown
  misc_feature (1)..( 12): Result.004 file - promoters50/1012883
tacgaaaaaatg

SEQ ID NO: 154280 - DNA, 12 bp, Unknown
  misc_feature (1)..( 12): Result.004 file - promoters50/1012906
ggtcttaaattc

SEQ ID NO: 154281 - DNA, 15 bp, Unknown
  misc_feature (1)..( 15): Result.004 file - promoters50/1012906
aaaaaaatgtttgat

SEQ ID NO: 154282 - DNA, 15 bp, Unknown
  misc_feature (1)..( 15): Result.004 file - promoters50/1012906
acacgaatatttttg

SEQ ID NO: 154283 - DNA, 15 bp, Unknown
  misc_feature (1)..( 15): Result.004 file - promoters50/1012906
aaaaacatgttggta

SEQ ID NO: 154284 - DNA, 15 bp, Unknown
  misc_feature (1)..( 15): Result.004 file - promoters50/1012906
taaaatatatttaat

SEQ ID NO: 154285 - DNA, 15 bp, Unknown
  misc_feature (1)..( 15): Result.004 file - promoters50/1012906
attgacatattttta

SEQ ID NO: 154286 - DNA, 15 bp, Unknown
  misc_feature (1)..( 15): Result.004 file - promoters50/1012906
aggaacatgggacat

SEQ ID NO: 154287 - DNA, 15 bp, Unknown
  misc_feature (1)..( 15): Result.004 file - promoters50/1012906
agttaaaaaatcttg

SEQ ID NO: 154288 - DNA, 15 bp, Unknown
  misc_feature (1)..( 15): Result.004 file - promoters50/1012906
agcatcttaattttg

SEQ ID NO: 154289 - DNA, 15 bp, Unknown
  misc_feature (1)..( 15): Result.004 file - promoters50/1012906
agtaaaaaaatcttg

SEQ ID NO: 154290 - DNA, 15 bp, Unknown
  misc_feature (1)..( 15): Result.004 file - promoters50/1012906
tgctttctaatttat

SEQ ID NO: 154291 - DNA, 15 bp, Unknown
  misc_feature (1)..( 15): Result.004 file - promoters50/1012906
aaccacttaacttta

SEQ ID NO: 154292 - DNA, 15 bp, Unknown
  misc_feature (1)..( 15): Result.004 file - promoters50/1012906
tttaaaaaaaaaaag

SEQ ID NO: 154293 - DNA, 15 bp, Unknown
  misc_feature (1)..( 15): Result.004 file - promoters50/1012906
agcaagtaaattcgg

SEQ ID NO: 154294 - DNA, 12 bp, Unknown
  misc_feature (1)..( 12): Result.004 file - promoters50/1012906
tatctgaaatat

SEQ ID NO: 154295 - DNA, 12 bp, Unknown
  misc_feature (1)..( 12): Result.004 file - promoters50/1012906
gaattgatataa

SEQ ID NO: 154296 - DNA, 12 bp, Unknown
  misc_feature (1)..( 12): Result.004 file - promoters50/1012906
gaatttataaat

SEQ ID NO: 154297 - DNA, 12 bp, Unknown
  misc_feature (1)..( 12): Result.004 file - promoters50/1012906
taatggatttaa

SEQ ID NO: 154298 - DNA, 12 bp, Unknown
  misc_feature (1)..( 12): Result.004 file - promoters50/1012906
ttatttatttct

SEQ ID NO: 154299 - DNA, 12 bp, Unknown
  misc_feature (1)..( 12): Result.004 file - promoters50/1012906
taatgtatcaga

SEQ ID NO: 154300 - DNA, 12 bp, Unknown
  misc_feature (1)..( 12): Result.004 file - promoters50/1012906
taacatatctat

SEQ ID NO: 154301 - DNA, 10 bp, Unknown
  misc_feature (1)..( 10): Result.004 file - promoters50/1012906
aaaaaatgtt

SEQ ID NO: 154302 - DNA, 10 bp, Unknown
  misc_feature (1)..( 10): Result.004 file - promoters50/1012906
ataaaatgca

SEQ ID NO: 154303 - DNA, 11 bp, Unknown
  misc_feature (1)..( 11): Result.004 file - promoters50/1012906
aaaaacatgtt

SEQ ID NO: 154304 - DNA, 11 bp, Unknown
  misc_feature (1)..( 11): Result.004 file - promoters50/1012906
tgaaaaattaa

SEQ ID NO: 154305 - DNA, 11 bp, Unknown
  misc_feature (1)..( 11): Result.004 file - promoters50/1012906
taaatcataca

SEQ ID NO: 154306 - DNA, 11 bp, Unknown
  misc_feature (1)..( 11): Result.004 file - promoters50/1012906
aggaacatggg

SEQ ID NO: 154307 - DNA, 23 bp, Unknown
  misc_feature (1)..( 23): Result.004 file - promoters50/1012906
tctgaaatattataatacattta

SEQ ID NO: 154308 - DNA, 23 bp, Unknown
  misc_feature (1)..( 23): Result.004 file - promoters50/1012906
attgacatatttttataaatagt

SEQ ID NO: 154309 - DNA, 23 bp, Unknown
  misc_feature (1)..( 23): Result.004 file - promoters50/1012906
gatgaaaaattaaaatatattta

SEQ ID NO: 154310 - DNA, 23 bp, Unknown
  misc_feature (1)..( 23): Result.004 file - promoters50/1012906
tttgacttattaacagaaaaaaa

SEQ ID NO: 154311 - DNA, 23 bp, Unknown
  misc_feature (1)..( 23): Result.004 file - promoters50/1012906
tttcacttctccattttctaaag

SEQ ID NO: 154312 - DNA, 23 bp, Unknown
  misc_feature (1)..( 23): Result.004 file - promoters50/1012906
cgctaataaaaacatgttggtat

SEQ ID NO: 154313 - DNA, 23 bp, Unknown
  misc_feature (1)..( 23): Result.004 file - promoters50/1012906
atggaaatggtcctataaggtcc

SEQ ID NO: 154314 - DNA, 21 bp, Unknown
  misc_feature (1)..( 21): Result.004 file - promoters50/1012906
tgaaatattataatacattta

SEQ ID NO: 154315 - DNA, 21 bp, Unknown
  misc_feature (1)..( 21): Result.004 file - promoters50/1012906
catatttttataaatagtaaa

SEQ ID NO: 154316 - DNA, 21 bp, Unknown
  misc_feature (1)..( 21): Result.004 file - promoters50/1012906
tgaaaaattaaaatatattta

SEQ ID NO: 154317 - DNA, 21 bp, Unknown
  misc_feature (1)..( 21): Result.004 file - promoters50/1012906
aatcatacacgaatatttttg

SEQ ID NO: 154318 - DNA, 21 bp, Unknown
  misc_feature (1)..( 21): Result.004 file - promoters50/1012906
ctccattttctaaagaattac

SEQ ID NO: 154319 - DNA, 21 bp, Unknown
  misc_feature (1)..( 21): Result.004 file - promoters50/1012906
gtcgctaataaaaacatgttg

SEQ ID NO: 154320 - DNA, 21 bp, Unknown
  misc_feature (1)..( 21): Result.004 file - promoters50/1012906
gtcgaaatggaaatggtccta

SEQ ID NO: 154321 - DNA, 11 bp, Unknown
  misc_feature (1)..( 11): Result.004 file - promoters50/1012906
atattataata

SEQ ID NO: 154322 - DNA, 11 bp, Unknown
  misc_feature (1)..( 11): Result.004 file - promoters50/1012906
aatttataaat

SEQ ID NO: 154323 - DNA, 11 bp, Unknown
  misc_feature (1)..( 11): Result.004 file - promoters50/1012906
ttcttataaat

SEQ ID NO: 154324 - DNA, 12 bp, Unknown
  misc_feature (1)..( 12): Result.004 file - promoters50/1012906
gaattgatataa

SEQ ID NO: 154325 - DNA, 12 bp, Unknown
  misc_feature (1)..( 12): Result.004 file - promoters50/1012906
gaagtgaagaga

SEQ ID NO: 154326 - DNA, 12 bp, Unknown
  misc_feature (1)..( 12): Result.004 file - promoters50/1012906
taatggatttaa

SEQ ID NO: 154327 - DNA, 15 bp, Unknown
  misc_feature (1)..( 15): Result.004 file - promoters50/1012906
ttagaattagaaaat

SEQ ID NO: 154328 - DNA, 15 bp, Unknown
  misc_feature (1)..( 15): Result.004 file - promoters50/1012906
aaagaatttataaat

SEQ ID NO: 154329 - DNA, 15 bp, Unknown
  misc_feature (1)..( 15): Result.004 file - promoters50/1012906
attgaattgatataa

SEQ ID NO: 154330 - DNA, 15 bp, Unknown
  misc_feature (1)..( 15): Result.004 file - promoters50/1012906
gtggaagtgaagaga

SEQ ID NO: 154331 - DNA, 15 bp, Unknown
  misc_feature (1)..( 15): Result.004 file - promoters50/1012906
taataatggatttaa

SEQ ID NO: 154332 - DNA, 15 bp, Unknown
  misc_feature (1)..( 15): Result.004 file - promoters50/1012906
gaagaatctgatgtt

SEQ ID NO: 154333 - DNA, 15 bp, Unknown
  misc_feature (1)..( 15): Result.004 file - promoters50/1012906
gaacaatctgcaata

SEQ ID NO: 154334 - DNA, 13 bp, Unknown
  misc_feature (1)..( 13): Result.004 file - promoters50/1012906
gtttaaatactag

SEQ ID NO: 154335 - DNA, 13 bp, Unknown
  misc_feature (1)..( 13): Result.004 file - promoters50/1012906
atataaatatttt

SEQ ID NO: 154336 - DNA, 13 bp, Unknown
  misc_feature (1)..( 13): Result.004 file - promoters50/1012906
ttttgaattcatt

SEQ ID NO: 154337 - DNA, 13 bp, Unknown
  misc_feature (1)..( 13): Result.004 file - promoters50/1012906
atataaatggata

SEQ ID NO: 154338 - DNA, 13 bp, Unknown
  misc_feature (1)..( 13): Result.004 file - promoters50/1012906
ttttgtatttatt

SEQ ID NO: 154339 - DNA, 13 bp, Unknown
  misc_feature (1)..( 13): Result.004 file - promoters50/1012943
tattgacttcgag

SEQ ID NO: 154340 - DNA, 17 bp, Unknown
  misc_feature (1)..( 17): Result.004 file - promoters50/1012943
actcatgatcccatttt

SEQ ID NO: 154341 - DNA, 17 bp, Unknown
  misc_feature (1)..( 17): Result.004 file - promoters50/1012943
caaaatgttccaatttt

SEQ ID NO: 154342 - DNA, 17 bp, Unknown
  misc_feature (1)..( 17): Result.004 file - promoters50/1012943
aaaaatgttgttgaaga

SEQ ID NO: 154343 - DNA, 17 bp, Unknown
  misc_feature (1)..( 17): Result.004 file - promoters50/1012943
gaaagtgttcttcacgg

SEQ ID NO: 154344 - DNA, 17 bp, Unknown
  misc_feature (1)..( 17): Result.004 file - promoters50/1012943
acatgggttcaaatcaa

SEQ ID NO: 154345 - DNA, 17 bp, Unknown
  misc_feature (1)..( 17): Result.004 file - promoters50/1012943
aaaaatttatatgattt

SEQ ID NO: 154346 - DNA, 17 bp, Unknown
  misc_feature (1)..( 17): Result.004 file - promoters50/1012943
caaaaagtttcaatggc

SEQ ID NO: 154347 - DNA, 17 bp, Unknown
  misc_feature (1)..( 17): Result.004 file - promoters50/1012947
gtaaataatccaggtca

SEQ ID NO: 154348 - DNA, 7 bp, Unknown
  misc_feature (1)..( 7): Result.004 file - promoters50/1012947
ccaaaag

SEQ ID NO: 154349 - DNA, 7 bp, Unknown
  misc_feature (1)..( 7): Result.004 file - promoters50/1012947
acaaaag

SEQ ID NO: 154350 - DNA, 7 bp, Unknown
  misc_feature (1)..( 7): Result.004 file - promoters50/1012947
acaaaaa

SEQ ID NO: 154351 - DNA, 7 bp, Unknown
  misc_feature (1)..( 7): Result.004 file - promoters50/1012947
aactatt

SEQ ID NO: 154352 - DNA, 7 bp, Unknown
  misc_feature (1)..( 7): Result.004 file - promoters50/1012947
aaccatt

SEQ ID NO: 154353 - DNA, 7 bp, Unknown
  misc_feature (1)..( 7): Result.004 file - promoters50/1012947
cactatt

SEQ ID NO: 154354 - DNA, 11 bp, Unknown
  misc_feature (1)..( 11): Result.004 file - promoters50/1012947
tactattaaag

SEQ ID NO: 154355 - DNA, 11 bp, Unknown
  misc_feature (1)..( 11): Result.004 file - promoters50/1012947
agttattaatc

SEQ ID NO: 154356 - DNA, 11 bp, Unknown
  misc_feature (1)..( 11): Result.004 file - promoters50/1012955
agtgattcatc

SEQ ID NO: 154357 - DNA, 11 bp, Unknown
  misc_feature (1)..( 11): Result.004 file - promoters50/1012955
aaaattaagtt

SEQ ID NO: 154358 - DNA, 11 bp, Unknown
  misc_feature (1)..( 11): Result.004 file - promoters50/1012955
ttaataaagtt

SEQ ID NO: 154359 - DNA, 11 bp, Unknown
  misc_feature (1)..( 11): Result.004 file - promoters50/1012955
tttatttagtt

SEQ ID NO: 154360 - DNA, 11 bp, Unknown
  misc_feature (1)..( 11): Result.004 file - promoters50/1012955
ttaattaattc

SEQ ID NO: 154361 - DNA, 12 bp, Unknown
  misc_feature (1)..( 12): Result.004 file - promoters50/1012955
tatattttaata

SEQ ID NO: 154362 - DNA, 12 bp, Unknown
  misc_feature (1)..( 12): Result.004 file - promoters50/1012955
tatatcttataa

SEQ ID NO: 154363 - DNA, 12 bp, Unknown
  misc_feature (1)..( 12): Result.004 file - promoters50/1012955
gctttcttatac

SEQ ID NO: 154364 - DNA, 12 bp, Unknown
  misc_feature (1)..( 12): Result.004 file - promoters50/1012964
gacttcatatac

SEQ ID NO: 154365 - DNA, 10 bp, Unknown
  misc_feature (1)..( 10): Result.004 file - promoters50/1012964
taacaagaat

SEQ ID NO: 154366 - DNA, 10 bp, Unknown
  misc_feature (1)..( 10): Result.004 file - promoters50/1012964
taacaaatac

SEQ ID NO: 154367 - DNA, 10 bp, Unknown
  misc_feature (1)..( 10): Result.004 file - promoters50/1012964
caacatgaat

SEQ ID NO: 154368 - DNA, 9 bp, Unknown
  misc_feature (1)..( 9): Result.004 file - promoters50/1012964
gttctaaaa

SEQ ID NO: 154369 - DNA, 9 bp, Unknown
  misc_feature (1)..( 9): Result.004 file - promoters50/1012964
tatctcaaa

SEQ ID NO: 154370 - DNA, 9 bp, Unknown
  misc_feature (1)..( 9): Result.004 file - promoters50/1012984
tatctcata

SEQ ID NO: 154371 - DNA, 9 bp, Unknown
  misc_feature (1)..( 9): Result.004 file - promoters50/1012984
atttgtgaa

SEQ ID NO: 154372 - DNA, 9 bp, Unknown
  misc_feature (1)..( 9): Result.004 file - promoters50/1012984
gtttttgaa

SEQ ID NO: 154373 - DNA, 9 bp, Unknown
  misc_feature (1)..( 9): Result.004 file - promoters50/1012984
atttgttaa

SEQ ID NO: 154374 - DNA, 9 bp, Unknown
  misc_feature (1)..( 9): Result.004 file - promoters50/1012984
ttttatgag

SEQ ID NO: 154375 - DNA, 8 bp, Unknown
  misc_feature (1)..( 8): Result.004 file - promoters50/1012984
ttataaat

SEQ ID NO: 154376 - DNA, 8 bp, Unknown
  misc_feature (1)..( 8): Result.004 file - promoters50/1012984
atataaaa

SEQ ID NO: 154377 - DNA, 8 bp, Unknown
  misc_feature (1)..( 8): Result.004 file - promoters50/1012984
cgataaaa

SEQ ID NO: 154378 - DNA, 8 bp, Unknown
  misc_feature (1)..( 8): Result.004 file - promoters50/1012984
atacaaaa

SEQ ID NO: 154379 - DNA, 13 bp, Unknown
  misc_feature (1)..( 13): Result.004 file - promoters50/1012984
tattagtttataa

SEQ ID NO: 154380 - DNA, 13 bp, Unknown
  misc_feature (1)..( 13): Result.004 file - promoters50/1012984
tattattttatga

SEQ ID NO: 154381 - DNA, 13 bp, Unknown
  misc_feature (1)..( 13): Result.004 file - promoters50/1012984
aagcggtttgtga

SEQ ID NO: 154382 - DNA, 13 bp, Unknown
  misc_feature (1)..( 13): Result.004 file - promoters50/1012988
acttaatttgtta

SEQ ID NO: 154383 - DNA, 8 bp, Unknown
  misc_feature (1)..( 8): Result.004 file - promoters50/1012988
taaatcga

SEQ ID NO: 154384 - DNA, 8 bp, Unknown
  misc_feature (1)..( 8): Result.004 file - promoters50/1012988
caaatcga

SEQ ID NO: 154385 - DNA, 8 bp, Unknown
  misc_feature (1)..( 8): Result.004 file - promoters50/1012988
caaatctg

SEQ ID NO: 154386 - DNA, 9 bp, Unknown
  misc_feature (1)..( 9): Result.004 file - promoters50/1012988
tttaaatta

SEQ ID NO: 154387 - DNA, 9 bp, Unknown
  misc_feature (1)..( 9): Result.004 file - promoters50/1012988
tttaaaccg

SEQ ID NO: 154388 - DNA, 9 bp, Unknown
  misc_feature (1)..( 9): Result.004 file - promoters50/1012988
cttaacccg

SEQ ID NO: 154389 - DNA, 9 bp, Unknown
  misc_feature (1)..( 9): Result.004 file - promoters50/1012988
attgatcaa

SEQ ID NO: 154390 - DNA, 9 bp, Unknown
  misc_feature (1)..( 9): Result.004 file - promoters50/1012988
attcatcag

SEQ ID NO: 154391 - DNA, 9 bp, Unknown
  misc_feature (1)..( 9): Result.004 file - promoters50/1012998
gttcctcag

SEQ ID NO: 154392 - DNA, 9 bp, Unknown
  misc_feature (1)..( 9): Result.004 file - promoters50/1012998
gtaaataag

SEQ ID NO: 154393 - DNA, 9 bp, Unknown
  misc_feature (1)..( 9): Result.004 file - promoters50/1012998
taaaagaag

SEQ ID NO: 154394 - DNA, 9 bp, Unknown
  misc_feature (1)..( 9): Result.004 file - promoters50/1012998
taaaagaat

SEQ ID NO: 154395 - DNA, 12 bp, Unknown
  misc_feature (1)..( 12): Result.004 file - promoters50/1012998
cactctctctct

SEQ ID NO: 154396 - DNA, 12 bp, Unknown
  misc_feature (1)..( 12): Result.004 file - promoters50/1012998
cactttctctct

SEQ ID NO: 154397 - DNA, 12 bp, Unknown
  misc_feature (1)..( 12): Result.004 file - promoters50/1012998
aactttctagca

SEQ ID NO: 154398 - DNA, 8 bp, Unknown
  misc_feature (1)..( 8): Result.004 file - promoters50/1012998
ttttaatt

SEQ ID NO: 154399 - DNA, 8 bp, Unknown
  misc_feature (1)..( 8): Result.004 file - promoters50/1012998
ttttaact

SEQ ID NO: 154400 - DNA, 8 bp, Unknown
  misc_feature (1)..( 8): Result.004 file - promoters50/1012998
atttaatt

SEQ ID NO: 154401 - DNA, 8 bp, Unknown
  misc_feature (1)..( 8): Result.004 file - promoters50/1012998
aaaaaaaa

SEQ ID NO: 154402 - DNA, 8 bp, Unknown
  misc_feature (1)..( 8): Result.004 file - promoters50/1012998
aaaagaaa

SEQ ID NO: 154403 - DNA, 8 bp, Unknown
  misc_feature (1)..( 8): Result.004 file - promoters50/1012998
aaaaacat

SEQ ID NO: 154404 - DNA, 11 bp, Unknown
  misc_feature (1)..( 11): Result.004 file - promoters50/1012998
aataagtatct

SEQ ID NO: 154405 - DNA, 11 bp, Unknown
  misc_feature (1)..( 11): Result.004 file - promoters50/1012998
taaaagaatct

SEQ ID NO: 154406 - DNA, 11 bp, Unknown
  misc_feature (1)..( 11): Result.004 file - promoters50/1012998
taaaagaagaa

SEQ ID NO: 154407 - DNA, 8 bp, Unknown
  misc_feature (1)..( 8): Result.004 file - promoters50/1012998
tatatata

SEQ ID NO: 154408 - DNA, 8 bp, Unknown
  misc_feature (1)..( 8): Result.004 file - promoters50/1012998
tataaata

SEQ ID NO: 154409 - DNA, 8 bp, Unknown
  misc_feature (1)..( 8): Result.004 file - promoters50/1013013
tataaatc

SEQ ID NO: 154410 - DNA, 13 bp, Unknown
  misc_feature (1)..( 13): Result.004 file - promoters50/1013013
agttattaatcac

SEQ ID NO: 154411 - DNA, 13 bp, Unknown
  misc_feature (1)..( 13): Result.004 file - promoters50/1013013
ataatttaatcac

SEQ ID NO: 154412 - DNA, 13 bp, Unknown
  misc_feature (1)..( 13): Result.004 file - promoters50/1013013
agtgattcatctt

SEQ ID NO: 154413 - DNA, 9 bp, Unknown
  misc_feature (1)..( 9): Result.004 file - promoters50/1013013
tttattaaa

SEQ ID NO: 154414 - DNA, 9 bp, Unknown
  misc_feature (1)..( 9): Result.004 file - promoters50/1013013
actatgaaa

SEQ ID NO: 154415 - DNA, 9 bp, Unknown
  misc_feature (1)..( 9): Result.004 file - promoters50/1013013
ttttttaaa

SEQ ID NO: 154416 - DNA, 12 bp, Unknown
  misc_feature (1)..( 12): Result.004 file - promoters50/1013013
aaaagttttatt

SEQ ID NO: 154417 - DNA, 12 bp, Unknown
  misc_feature (1)..( 12): Result.004 file - promoters50/1013013
aaaagttcatct

SEQ ID NO: 154418 - DNA, 12 bp, Unknown
  misc_feature (1)..( 12): Result.004 file - promoters50/1013013
caaacttcatct

SEQ ID NO: 154419 - DNA, 8 bp, Unknown
  misc_feature (1)..( 8): Result.004 file - promoters50/1013013
ctttctta

SEQ ID NO: 154420 - DNA, 8 bp, Unknown
  misc_feature (1)..( 8): Result.004 file - promoters50/1013013
ttttttta

SEQ ID NO: 154421 - DNA, 9 bp, Unknown
  misc_feature (1)..( 9): Result.004 file - promoters50/1013016
attgttttt

SEQ ID NO: 154422 - DNA, 8 bp, Unknown
  misc_feature (1)..( 8): Result.004 file - promoters50/1013016
agaaatga

SEQ ID NO: 154423 - DNA, 8 bp, Unknown
  misc_feature (1)..( 8): Result.004 file - promoters50/1013016
tgaattga

SEQ ID NO: 154424 - DNA, 8 bp, Unknown
  misc_feature (1)..( 8): Result.004 file - promoters50/1013016
agacatgg

SEQ ID NO: 154425 - DNA, 10 bp, Unknown
  misc_feature (1)..( 10): Result.004 file - promoters50/1013016
gatgaatccg

SEQ ID NO: 154426 - DNA, 10 bp, Unknown
  misc_feature (1)..( 10): Result.004 file - promoters50/1013016
gatcaattga

SEQ ID NO: 154427 - DNA, 10 bp, Unknown
  misc_feature (1)..( 10): Result.004 file - promoters50/1013016
tttcatttga

SEQ ID NO: 154428 - DNA, 13 bp, Unknown
  misc_feature (1)..( 13): Result.004 file - promoters50/1013016
ttagagattctat

SEQ ID NO: 154429 - DNA, 13 bp, Unknown
  misc_feature (1)..( 13): Result.004 file - promoters50/1013016
aaagacattatat

SEQ ID NO: 154430 - DNA, 13 bp, Unknown
  misc_feature (1)..( 13): Result.004 file - promoters50/1013016
aaaaacaaaacaa

SEQ ID NO: 154431 - DNA, 8 bp, Unknown
  misc_feature (1)..( 8): Result.004 file - promoters50/1013016
gaacagaa

SEQ ID NO: 154432 - DNA, 8 bp, Unknown
  misc_feature (1)..( 8): Result.004 file - promoters50/1013016
acacagaa

SEQ ID NO: 154433 - DNA, 8 bp, Unknown
  misc_feature (1)..( 8): Result.004 file - promoters50/1013016
gaaaagat

SEQ ID NO: 154434 - DNA, 8 bp, Unknown
  misc_feature (1)..( 8): Result.004 file - promoters50/1013016
ttccaata

SEQ ID NO: 154435 - DNA, 8 bp, Unknown
  misc_feature (1)..( 8): Result.004 file - promoters50/1013016
ttctaatc

SEQ ID NO: 154436 - DNA, 8 bp, Unknown
  misc_feature (1)..( 8): Result.004 file - promoters50/1013128
ttcaaata

SEQ ID NO: 154437 - DNA, 26 bp, Unknown
  misc_feature (1)..( 26): Result.004 file - promoters50/1013128
atagtttgataaatatgtaaaaatca

SEQ ID NO: 154438 - DNA, 26 bp, Unknown
  misc_feature (1)..( 26): Result.004 file - promoters50/1013128
aagaattcataaacatggaatttgtg

SEQ ID NO: 154439 - DNA, 26 bp, Unknown
  misc_feature (1)..( 26): Result.004 file - promoters50/1013128
tatctctatttaatatgcaaaaatca

SEQ ID NO: 154440 - DNA, 26 bp, Unknown
  misc_feature (1)..( 26): Result.004 file - promoters50/1013128
gacgtttgataaaagaaaggtcaaga

SEQ ID NO: 154441 - DNA, 26 bp, Unknown
  misc_feature (1)..( 26): Result.004 file - promoters50/1013128
atcttttcaaaaaaaggtcttcacca

SEQ ID NO: 154442 - DNA, 26 bp, Unknown
  misc_feature (1)..( 26): Result.004 file - promoters50/1013128
gacttttgagtctatttcaatttttg

SEQ ID NO: 154443 - DNA, 26 bp, Unknown
  misc_feature (1)..( 26): Result.004 file - promoters50/1013128
aaaaaggataaaattagtgaactttt

SEQ ID NO: 154444 - DNA, 26 bp, Unknown
  misc_feature (1)..( 26): Result.004 file - promoters50/1013128
aatttgaatgaaactagataatcctc

SEQ ID NO: 154445 - DNA, 11 bp, Unknown
  misc_feature (1)..( 11): Result.004 file - promoters50/1013128
ctaaaataaag

SEQ ID NO: 154446 - DNA, 11 bp, Unknown
  misc_feature (1)..( 11): Result.004 file - promoters50/1013128
agaaaaaaaag

SEQ ID NO: 154447 - DNA, 11 bp, Unknown
  misc_feature (1)..( 11): Result.004 file - promoters50/1013128
aaaaaatagtt

SEQ ID NO: 154448 - DNA, 11 bp, Unknown
  misc_feature (1)..( 11): Result.004 file - promoters50/1013128
cgaaaataaac

SEQ ID NO: 154449 - DNA, 11 bp, Unknown
  misc_feature (1)..( 11): Result.004 file - promoters50/1013128
attaaataata

SEQ ID NO: 154450 - DNA, 11 bp, Unknown
  misc_feature (1)..( 11): Result.004 file - promoters50/1013128
ggaagagaaag

SEQ ID NO: 154451 - DNA, 11 bp, Unknown
  misc_feature (1)..( 11): Result.004 file - promoters50/1013131
tgaaaaaatgc

SEQ ID NO: 154452 - DNA, 11 bp, Unknown
  misc_feature (1)..( 11): Result.004 file - promoters50/1013131
attaataatcc

SEQ ID NO: 154453 - DNA, 11 bp, Unknown
  misc_feature (1)..( 11): Result.004 file - promoters50/1013131
ctccatagtcc

SEQ ID NO: 154454 - DNA, 11 bp, Unknown
  misc_feature (1)..( 11): Result.004 file - promoters50/1013131
taaaataatct

SEQ ID NO: 154455 - DNA, 11 bp, Unknown
  misc_feature (1)..( 11): Result.004 file - promoters50/1013131
gaaaatgatcg

SEQ ID NO: 154456 - DNA, 11 bp, Unknown
  misc_feature (1)..( 11): Result.004 file - promoters50/1013131
taaagtaattt

SEQ ID NO: 154457 - DNA, 10 bp, Unknown
  misc_feature (1)..( 10): Result.004 file - promoters50/1013131
tttatattta

SEQ ID NO: 154458 - DNA, 10 bp, Unknown
  misc_feature (1)..( 10): Result.004 file - promoters50/1013131
tttagatttt

SEQ ID NO: 154459 - DNA, 10 bp, Unknown
  misc_feature (1)..( 10): Result.004 file - promoters50/1013131
tttacatttt

SEQ ID NO: 154460 - DNA, 10 bp, Unknown
  misc_feature (1)..( 10): Result.004 file - promoters50/1013131
ggtattttta

SEQ ID NO: 154461 - DNA, 10 bp, Unknown
  misc_feature (1)..( 10): Result.004 file - promoters50/1013131
attaggttta

SEQ ID NO: 154462 - DNA, 9 bp, Unknown
  misc_feature (1)..( 9): Result.004 file - promoters50/1013131
aaattatat

SEQ ID NO: 154463 - DNA, 9 bp, Unknown
  misc_feature (1)..( 9): Result.004 file - promoters50/1013131
aaagtatta

SEQ ID NO: 154464 - DNA, 9 bp, Unknown
  misc_feature (1)..( 9): Result.004 file - promoters50/1013131
aaatcatac

SEQ ID NO: 154465 - DNA, 9 bp, Unknown
  misc_feature (1)..( 9): Result.004 file - promoters50/1013131
attttatta

SEQ ID NO: 154466 - DNA, 9 bp, Unknown
  misc_feature (1)..( 9): Result.004 file - promoters50/1013131
cttttaatt

SEQ ID NO: 154467 - DNA, 13 bp, Unknown
  misc_feature (1)..( 13): Result.004 file - promoters50/1013131
cgaataaattgta

SEQ ID NO: 154468 - DNA, 13 bp, Unknown
  misc_feature (1)..( 13): Result.004 file - promoters50/1013131
acaatgaatacca

SEQ ID NO: 154469 - DNA, 13 bp, Unknown
  misc_feature (1)..( 13): Result.004 file - promoters50/1013131
tgaacaaaagttt

SEQ ID NO: 154470 - DNA, 13 bp, Unknown
  misc_feature (1)..( 13): Result.004 file - promoters50/1013131
taaataaagtgta

SEQ ID NO: 154471 - DNA, 13 bp, Unknown
  misc_feature (1)..( 13): Result.004 file - promoters50/1013208
tgaatacttttaa

SEQ ID NO: 154472 - DNA, 13 bp, Unknown
  misc_feature (1)..( 13): Result.004 file - promoters50/1013208
ctttttttttagt

SEQ ID NO: 154473 - DNA, 13 bp, Unknown
  misc_feature (1)..( 13): Result.004 file - promoters50/1013208
atttttttctata

SEQ ID NO: 154474 - DNA, 13 bp, Unknown
  misc_feature (1)..( 13): Result.004 file - promoters50/1013208
cttcttttgtagt

SEQ ID NO: 154475 - DNA, 13 bp, Unknown
  misc_feature (1)..( 13): Result.004 file - promoters50/1013208
atttttacaagac

SEQ ID NO: 154476 - DNA, 13 bp, Unknown
  misc_feature (1)..( 13): Result.004 file - promoters50/1013208
ccccctatgtagt

SEQ ID NO: 154477 - DNA, 13 bp, Unknown
  misc_feature (1)..( 13): Result.004 file - promoters50/1013208
cttcttattgaat

SEQ ID NO: 154478 - DNA, 13 bp, Unknown
  misc_feature (1)..( 13): Result.004 file - promoters50/1013208
attattaggcctt

SEQ ID NO: 154479 - DNA, 14 bp, Unknown
  misc_feature (1)..( 14): Result.004 file - promoters50/1013208
gtataataaatctt

SEQ ID NO: 154480 - DNA, 14 bp, Unknown
  misc_feature (1)..( 14): Result.004 file - promoters50/1013208
ttttaaaaaacttt

SEQ ID NO: 154481 - DNA, 14 bp, Unknown
  misc_feature (1)..( 14): Result.004 file - promoters50/1013208
gtgacatatatctt

SEQ ID NO: 154482 - DNA, 14 bp, Unknown
  misc_feature (1)..( 14): Result.004 file - promoters50/1013208
aatccataaattaa

SEQ ID NO: 154483 - DNA, 14 bp, Unknown
  misc_feature (1)..( 14): Result.004 file - promoters50/1013208
ttttaaaaacgaac

SEQ ID NO: 154484 - DNA, 14 bp, Unknown
  misc_feature (1)..( 14): Result.004 file - promoters50/1013208
ggagtctctatctt

SEQ ID NO: 154485 - DNA, 12 bp, Unknown
  misc_feature (1)..( 12): Result.004 file - promoters50/1013208
tttttttttagt

SEQ ID NO: 154486 - DNA, 12 bp, Unknown
  misc_feature (1)..( 12): Result.004 file - promoters50/1013208
tatatttttaca

SEQ ID NO: 154487 - DNA, 13 bp, Unknown
  misc_feature (1)..( 13): Result.004 file - promoters50/1013208
cttcttttgtagt

SEQ ID NO: 154488 - DNA, 13 bp, Unknown
  misc_feature (1)..( 13): Result.004 file - promoters50/1013208
atttttttgacat

SEQ ID NO: 154489 - DNA, 13 bp, Unknown
  misc_feature (1)..( 13): Result.004 file - promoters50/1013208
ccccctatgtagt

SEQ ID NO: 154490 - DNA, 13 bp, Unknown
  misc_feature (1)..( 13): Result.004 file - promoters50/1013208
cttcttattgaat

SEQ ID NO: 154491 - DNA, 13 bp, Unknown
  misc_feature (1)..( 13): Result.004 file - promoters50/1013208
gacaattattagg

SEQ ID NO: 154492 - DNA, 11 bp, Unknown
  misc_feature (1)..( 11): Result.004 file - promoters50/1013208
tgttgagtttc

SEQ ID NO: 154493 - DNA, 11 bp, Unknown
  misc_feature (1)..( 11): Result.004 file - promoters50/1013208
acagtagtttc

SEQ ID NO: 154494 - DNA, 11 bp, Unknown
  misc_feature (1)..( 11): Result.004 file - promoters50/1013208
aaagtaattta

SEQ ID NO: 154495 - DNA, 11 bp, Unknown
  misc_feature (1)..( 11): Result.004 file - promoters50/1013208
aaaataaacta

SEQ ID NO: 154496 - DNA, 11 bp, Unknown
  misc_feature (1)..( 11): Result.004 file - promoters50/1013208
aaaatagcctg

SEQ ID NO: 154497 - DNA, 11 bp, Unknown
  misc_feature (1)..( 11): Result.004 file - promoters50/1013242
ataataaataa

SEQ ID NO: 154498 - DNA, 10 bp, Unknown
  misc_feature (1)..( 10): Result.004 file - promoters50/1013242
ttgtaaagat

SEQ ID NO: 154499 - DNA, 10 bp, Unknown
  misc_feature (1)..( 10): Result.004 file - promoters50/1013242
aaataaagag

SEQ ID NO: 154500 - DNA, 10 bp, Unknown
  misc_feature (1)..( 10): Result.004 file - promoters50/1013242
aaaaaaagat

SEQ ID NO: 154501 - DNA, 10 bp, Unknown
  misc_feature (1)..( 10): Result.004 file - promoters50/1013242
cagtagagaa

SEQ ID NO: 154502 - DNA, 10 bp, Unknown
  misc_feature (1)..( 10): Result.004 file - promoters50/1013242
tagtagaaat

SEQ ID NO: 154503 - DNA, 10 bp, Unknown
  misc_feature (1)..( 10): Result.004 file - promoters50/1013242
cagttgagat

SEQ ID NO: 154504 - DNA, 13 bp, Unknown
  misc_feature (1)..( 13): Result.004 file - promoters50/1013242
ggtataaaaagaa

SEQ ID NO: 154505 - DNA, 13 bp, Unknown
  misc_feature (1)..( 13): Result.004 file - promoters50/1013242
tatatcaaaattt

SEQ ID NO: 154506 - DNA, 13 bp, Unknown
  misc_feature (1)..( 13): Result.004 file - promoters50/1013242
ggtgtaatgagta

SEQ ID NO: 154507 - DNA, 13 bp, Unknown
  misc_feature (1)..( 13): Result.004 file - promoters50/1013242
tgtctcaaaatgt

SEQ ID NO: 154508 - DNA, 13 bp, Unknown
  misc_feature (1)..( 13): Result.004 file - promoters50/1013242
ctttccaaaatgt

SEQ ID NO: 154509 - DNA, 13 bp, Unknown
  misc_feature (1)..( 13): Result.004 file - promoters50/1013242
tgaggcaatatga

SEQ ID NO: 154510 - DNA, 11 bp, Unknown
  misc_feature (1)..( 11): Result.004 file - promoters50/1013242
aatccaaagct

SEQ ID NO: 154511 - DNA, 11 bp, Unknown
  misc_feature (1)..( 11): Result.004 file - promoters50/1013242
aatccagaaag

SEQ ID NO: 154512 - DNA, 11 bp, Unknown
  misc_feature (1)..( 11): Result.004 file - promoters50/1013242
tatccaagtta

SEQ ID NO: 154513 - DNA, 11 bp, Unknown
  misc_feature (1)..( 11): Result.004 file - promoters50/1013242
tatccaactta

SEQ ID NO: 154514 - DNA, 11 bp, Unknown
  misc_feature (1)..( 11): Result.004 file - promoters50/1013242
aatctaagatg

SEQ ID NO: 154515 - DNA, 11 bp, Unknown
  misc_feature (1)..( 11): Result.004 file - promoters50/1013274
tatccaacaaa

SEQ ID NO: 154516 - DNA, 9 bp, Unknown
  misc_feature (1)..( 9): Result.004 file - promoters50/1013274
actataaag

SEQ ID NO: 154517 - DNA, 9 bp, Unknown
  misc_feature (1)..( 9): Result.004 file - promoters50/1013274
aatattaag

SEQ ID NO: 154518 - DNA, 9 bp, Unknown
  misc_feature (1)..( 9): Result.004 file - promoters50/1013274
tctagaaaa

SEQ ID NO: 154519 - DNA, 9 bp, Unknown
  misc_feature (1)..( 9): Result.004 file - promoters50/1013274
aataataac

SEQ ID NO: 154520 - DNA, 9 bp, Unknown
  misc_feature (1)..( 9): Result.004 file - promoters50/1013274
ccgagaaaa

SEQ ID NO: 154521 - DNA, 9 bp, Unknown
  misc_feature (1)..( 9): Result.004 file - promoters50/1013274
aaaagaaaa

SEQ ID NO: 154522 - DNA, 18 bp, Unknown
  misc_feature (1)..( 18): Result.004 file - promoters50/1013274
cgctccatttcgtacatt

SEQ ID NO: 154523 - DNA, 18 bp, Unknown
  misc_feature (1)..( 18): Result.004 file - promoters50/1013274
gtgtccttttttgacgca

SEQ ID NO: 154524 - DNA, 18 bp, Unknown
  misc_feature (1)..( 18): Result.004 file - promoters50/1013274
attttctttttgatattt

SEQ ID NO: 154525 - DNA, 18 bp, Unknown
  misc_feature (1)..( 18): Result.004 file - promoters50/1013274
caaacgatttctgacgtt

SEQ ID NO: 154526 - DNA, 18 bp, Unknown
  misc_feature (1)..( 18): Result.004 file - promoters50/1013274
attttcatttgtatacca

SEQ ID NO: 154527 - DNA, 18 bp, Unknown
  misc_feature (1)..( 18): Result.004 file - promoters50/1013274
tatctattttagattttt

SEQ ID NO: 154528 - DNA, 18 bp, Unknown
  misc_feature (1)..( 18): Result.004 file - promoters50/1013274
cataccatttttgttcca

SEQ ID NO: 154529 - DNA, 18 bp, Unknown
  misc_feature (1)..( 18): Result.004 file - promoters50/1013274
taatatattcttgctgtt

SEQ ID NO: 154530 - DNA, 11 bp, Unknown
  misc_feature (1)..( 11): Result.004 file - promoters50/1013274
ctttgatcatt

SEQ ID NO: 154531 - DNA, 11 bp, Unknown
  misc_feature (1)..( 11): Result.004 file - promoters50/1013274
ttttgatattt

SEQ ID NO: 154532 - DNA, 11 bp, Unknown
  misc_feature (1)..( 11): Result.004 file - promoters50/1013274
gtttgattgtg

SEQ ID NO: 154533 - DNA, 11 bp, Unknown
  misc_feature (1)..( 11): Result.004 file - promoters50/1013274
atttgattttc

SEQ ID NO: 154534 - DNA, 12 bp, Unknown
  misc_feature (1)..( 12): Result.004 file - promoters50/1013274
tttctgacgttt

SEQ ID NO: 154535 - DNA, 13 bp, Unknown
  misc_feature (1)..( 13): Result.004 file - promoters50/1013274
attttagattttt

SEQ ID NO: 154536 - DNA, 13 bp, Unknown
  misc_feature (1)..( 13): Result.004 file - promoters50/1013274
atttttgttccat

SEQ ID NO: 154537 - DNA, 13 bp, Unknown
  misc_feature (1)..( 13): Result.004 file - promoters50/1013274
attcttgctgttc

SEQ ID NO: 154538 - DNA, 11 bp, Unknown
  misc_feature (1)..( 11): Result.004 file - promoters50/1013274
catttttcttt

SEQ ID NO: 154539 - DNA, 11 bp, Unknown
  misc_feature (1)..( 11): Result.004 file - promoters50/1013274
actttctctga

SEQ ID NO: 154540 - DNA, 11 bp, Unknown
  misc_feature (1)..( 11): Result.004 file - promoters50/1013274
catttttgttc

SEQ ID NO: 154541 - DNA, 11 bp, Unknown
  misc_feature (1)..( 11): Result.004 file - promoters50/1013274
gattttttttt

SEQ ID NO: 154542 - DNA, 11 bp, Unknown
  misc_feature (1)..( 11): Result.004 file - promoters50/1013274
cttttttgacg

SEQ ID NO: 154543 - DNA, 11 bp, Unknown
  misc_feature (1)..( 11): Result.004 file - promoters50/1013274
gatttctgacg

SEQ ID NO: 154544 - DNA, 11 bp, Unknown
  misc_feature (1)..( 11): Result.004 file - promoters50/1013274
tattcttgctg

SEQ ID NO: 154545 - DNA, 14 bp, Unknown
  misc_feature (1)..( 14): Result.004 file - promoters50/1013274
aactttaaatattg

SEQ ID NO: 154546 - DNA, 14 bp, Unknown
  misc_feature (1)..( 14): Result.004 file - promoters50/1013274
aacttgaaattctg

SEQ ID NO: 154547 - DNA, 14 bp, Unknown
  misc_feature (1)..( 14): Result.004 file - promoters50/1013274
ggctttaaccaacg

SEQ ID NO: 154548 - DNA, 14 bp, Unknown
  misc_feature (1)..( 14): Result.004 file - promoters50/1013274
aaaaagaaattaaa

SEQ ID NO: 154549 - DNA, 14 bp, Unknown
  misc_feature (1)..( 14): Result.004 file - promoters50/1013274
aaacccaagacatt

SEQ ID NO: 154550 - DNA, 14 bp, Unknown
  misc_feature (1)..( 14): Result.004 file - promoters50/1013274
aatataaagccata

SEQ ID NO: 154551 - DNA, 14 bp, Unknown
  misc_feature (1)..( 14): Result.004 file - promoters50/1013274
ttttttaacaattc

SEQ ID NO: 154552 - DNA, 11 bp, Unknown
  misc_feature (1)..( 11): Result.004 file - promoters50/1013274
aattttcactc

SEQ ID NO: 154553 - DNA, 11 bp, Unknown
  misc_feature (1)..( 11): Result.004 file - promoters50/1013274
gattttcattt

SEQ ID NO: 154554 - DNA, 11 bp, Unknown
  misc_feature (1)..( 11): Result.004 file - promoters50/1013274
ttgtttgattg

SEQ ID NO: 154555 - DNA, 11 bp, Unknown
  misc_feature (1)..( 11): Result.004 file - promoters50/1013274
taatatgattg

SEQ ID NO: 154556 - DNA, 11 bp, Unknown
  misc_feature (1)..( 11): Result.004 file - promoters50/1013274
tattttctttt

SEQ ID NO: 154557 - DNA, 11 bp, Unknown
  misc_feature (1)..( 11): Result.004 file - promoters50/1013274
tattttagatt

SEQ ID NO: 154558 - DNA, 13 bp, Unknown
  misc_feature (1)..( 13): Result.004 file - promoters50/1013274
ttatctatttttt

SEQ ID NO: 154559 - DNA, 13 bp, Unknown
  misc_feature (1)..( 13): Result.004 file - promoters50/1013274
ttatatatgtttc

SEQ ID NO: 154560 - DNA, 13 bp, Unknown
  misc_feature (1)..( 13): Result.004 file - promoters50/1013274
tgttctattaagg

SEQ ID NO: 154561 - DNA, 13 bp, Unknown
  misc_feature (1)..( 13): Result.004 file - promoters50/1013274
ttatctatttaac

SEQ ID NO: 154562 - DNA, 13 bp, Unknown
  misc_feature (1)..( 13): Result.004 file - promoters50/1013274
tgttccattttcg

SEQ ID NO: 154563 - DNA, 13 bp, Unknown
  misc_feature (1)..( 13): Result.004 file - promoters50/1013310
ttgtaaatgtttc

SEQ ID NO: 154564 - DNA, 8 bp, Unknown
  misc_feature (1)..( 8): Result.004 file - promoters50/1013310
taaatatt

SEQ ID NO: 154565 - DNA, 8 bp, Unknown
  misc_feature (1)..( 8): Result.004 file - promoters50/1013310
aaaatatc

SEQ ID NO: 154566 - DNA, 8 bp, Unknown
  misc_feature (1)..( 8): Result.004 file - promoters50/1013310
taaatata

SEQ ID NO: 154567 - DNA, 8 bp, Unknown
  misc_feature (1)..( 8): Result.004 file - promoters50/1013310
taaatagc

SEQ ID NO: 154568 - DNA, 8 bp, Unknown
  misc_feature (1)..( 8): Result.004 file - promoters50/1013314
acaatata

SEQ ID NO: 154569 - DNA, 13 bp, Unknown
  misc_feature (1)..( 13): Result.004 file - promoters50/1013314
ttgaaattttatg

SEQ ID NO: 154570 - DNA, 13 bp, Unknown
  misc_feature (1)..( 13): Result.004 file - promoters50/1013314
aaatatttttatg

SEQ ID NO: 154571 - DNA, 13 bp, Unknown
  misc_feature (1)..( 13): Result.004 file - promoters50/1013314
acatatttttata

SEQ ID NO: 154572 - DNA, 13 bp, Unknown
  misc_feature (1)..( 13): Result.004 file - promoters50/1013314
aaatatttttaat

SEQ ID NO: 154573 - DNA, 13 bp, Unknown
  misc_feature (1)..( 13): Result.004 file - promoters50/1013314
ctttttttttaac

SEQ ID NO: 154574 - DNA, 13 bp, Unknown
  misc_feature (1)..( 13): Result.004 file - promoters50/1013314
caacatttttttc

SEQ ID NO: 154575 - DNA, 14 bp, Unknown
  misc_feature (1)..( 14): Result.004 file - promoters50/1013314
aaatatttttattt

SEQ ID NO: 154576 - DNA, 14 bp, Unknown
  misc_feature (1)..( 14): Result.004 file - promoters50/1013314
taagatttatatga

SEQ ID NO: 154577 - DNA, 14 bp, Unknown
  misc_feature (1)..( 14): Result.004 file - promoters50/1013314
caacatttttttca

SEQ ID NO: 154578 - DNA, 14 bp, Unknown
  misc_feature (1)..( 14): Result.004 file - promoters50/1013314
gaaacttttttttt

SEQ ID NO: 154579 - DNA, 14 bp, Unknown
  misc_feature (1)..( 14): Result.004 file - promoters50/1013314
acatatttttataa

SEQ ID NO: 154580 - DNA, 14 bp, Unknown
  misc_feature (1)..( 14): Result.004 file - promoters50/1013314
aaatatttttaata

SEQ ID NO: 154581 - DNA, 14 bp, Unknown
  misc_feature (1)..( 14): Result.004 file - promoters50/1013314
agttaaagacttta

SEQ ID NO: 154582 - DNA, 14 bp, Unknown
  misc_feature (1)..( 14): Result.004 file - promoters50/1013314
aaaaaaagaattta

SEQ ID NO: 154583 - DNA, 14 bp, Unknown
  misc_feature (1)..( 14): Result.004 file - promoters50/1013314
cataagagaatttc

SEQ ID NO: 154584 - DNA, 14 bp, Unknown
  misc_feature (1)..( 14): Result.004 file - promoters50/1013314
ttcaaaagatttat

SEQ ID NO: 154585 - DNA, 14 bp, Unknown
  misc_feature (1)..( 14): Result.004 file - promoters50/1013314
gatttaagaatatt

SEQ ID NO: 154586 - DNA, 14 bp, Unknown
  misc_feature (1)..( 14): Result.004 file - promoters50/1013314
aaaaaaaaaataca

SEQ ID NO: 154587 - DNA, 12 bp, Unknown
  misc_feature (1)..( 12): Result.004 file - promoters50/1013314
ttaaatattttt

SEQ ID NO: 154588 - DNA, 12 bp, Unknown
  misc_feature (1)..( 12): Result.004 file - promoters50/1013314
ataattatccaa

SEQ ID NO: 154589 - DNA, 12 bp, Unknown
  misc_feature (1)..( 12): Result.004 file - promoters50/1013314
atcaatattctt

SEQ ID NO: 154590 - DNA, 12 bp, Unknown
  misc_feature (1)..( 12): Result.004 file - promoters50/1013314
aacattgtccat

SEQ ID NO: 154591 - DNA, 12 bp, Unknown
  misc_feature (1)..( 12): Result.004 file - promoters50/1013314
catattatccat

SEQ ID NO: 154592 - DNA, 12 bp, Unknown
  misc_feature (1)..( 12): Result.004 file - promoters50/1013314
ataattaaagcg

SEQ ID NO: 154593 - DNA, 12 bp, Unknown
  misc_feature (1)..( 12): Result.004 file - promoters50/1013314
ttttgaaatttt

SEQ ID NO: 154594 - DNA, 12 bp, Unknown
  misc_feature (1)..( 12): Result.004 file - promoters50/1013314
gactgacatttt

SEQ ID NO: 154595 - DNA, 12 bp, Unknown
  misc_feature (1)..( 12): Result.004 file - promoters50/1013314
ttttgatattgc

SEQ ID NO: 154596 - DNA, 12 bp, Unknown
  misc_feature (1)..( 12): Result.004 file - promoters50/1013314
attttaaataac

SEQ ID NO: 154597 - DNA, 12 bp, Unknown
  misc_feature (1)..( 12): Result.004 file - promoters50/1013314
tttagaaacttt

SEQ ID NO: 154598 - DNA, 12 bp, Unknown
  misc_feature (1)..( 12): Result.004 file - promoters50/1013341
gattgacatatt

SEQ ID NO: 154599 - DNA, 10 bp, Unknown
  misc_feature (1)..( 10): Result.004 file - promoters50/1013341
tgaattatcc

SEQ ID NO: 154600 - DNA, 10 bp, Unknown
  misc_feature (1)..( 10): Result.004 file - promoters50/1013341
aaaattattt

SEQ ID NO: 154601 - DNA, 10 bp, Unknown
  misc_feature (1)..( 10): Result.004 file - promoters50/1013341
atgattattg

SEQ ID NO: 154602 - DNA, 10 bp, Unknown
  misc_feature (1)..( 10): Result.004 file - promoters50/1013341
atgtttatat

SEQ ID NO: 154603 - DNA, 10 bp, Unknown
  misc_feature (1)..( 10): Result.004 file - promoters50/1013341
gagatcattt

SEQ ID NO: 154604 - DNA, 10 bp, Unknown
  misc_feature (1)..( 10): Result.004 file - promoters50/1013341
tacattgttt

SEQ ID NO: 154605 - DNA, 12 bp, Unknown
  misc_feature (1)..( 12): Result.004 file - promoters50/1013341
ttcttaaacctt

SEQ ID NO: 154606 - DNA, 12 bp, Unknown
  misc_feature (1)..( 12): Result.004 file - promoters50/1013341
catcaaaacctc

SEQ ID NO: 154607 - DNA, 12 bp, Unknown
  misc_feature (1)..( 12): Result.004 file - promoters50/1013341
ttcataaaccct

SEQ ID NO: 154608 - DNA, 12 bp, Unknown
  misc_feature (1)..( 12): Result.004 file - promoters50/1013341
taaatataccgc

SEQ ID NO: 154609 - DNA, 12 bp, Unknown
  misc_feature (1)..( 12): Result.004 file - promoters50/1013341
ggggtaaaactc

SEQ ID NO: 154610 - DNA, 12 bp, Unknown
  misc_feature (1)..( 12): Result.004 file - promoters50/1013427
ataaacaaactc

SEQ ID NO: 154611 - DNA, 16 bp, Unknown
  misc_feature (1)..( 16): Result.004 file - promoters50/1013427
ttctctttatattaag

SEQ ID NO: 154612 - DNA, 16 bp, Unknown
  misc_feature (1)..( 16): Result.004 file - promoters50/1013427
tcctatttaaatttta

SEQ ID NO: 154613 - DNA, 16 bp, Unknown
  misc_feature (1)..( 16): Result.004 file - promoters50/1013427
tttttcttatattaga

SEQ ID NO: 154614 - DNA, 16 bp, Unknown
  misc_feature (1)..( 16): Result.004 file - promoters50/1013427
ttgcgataatataaag

SEQ ID NO: 154615 - DNA, 16 bp, Unknown
  misc_feature (1)..( 16): Result.004 file - promoters50/1013427
cttcccctatataaag

SEQ ID NO: 154616 - DNA, 16 bp, Unknown
  misc_feature (1)..( 16): Result.004 file - promoters50/1013427
tcctatttaaaccaat

SEQ ID NO: 154617 - DNA, 16 bp, Unknown
  misc_feature (1)..( 16): Result.004 file - promoters50/1013427
tttattttaaagcttt

SEQ ID NO: 154618 - DNA, 10 bp, Unknown
  misc_feature (1)..( 10): Result.004 file - promoters50/1013427
ttcaatttca

SEQ ID NO: 154619 - DNA, 10 bp, Unknown
  misc_feature (1)..( 10): Result.004 file - promoters50/1013427
accaatatca

SEQ ID NO: 154620 - DNA, 10 bp, Unknown
  misc_feature (1)..( 10): Result.004 file - promoters50/1013427
ttctatttct

SEQ ID NO: 154621 - DNA, 10 bp, Unknown
  misc_feature (1)..( 10): Result.004 file - promoters50/1013427
ttctatttat

SEQ ID NO: 154622 - DNA, 10 bp, Unknown
  misc_feature (1)..( 10): Result.004 file - promoters50/1013427
aaaaatctca

SEQ ID NO: 154623 - DNA, 10 bp, Unknown
  misc_feature (1)..( 10): Result.004 file - promoters50/1013441
cccaataaag

SEQ ID NO: 154624 - DNA, 10 bp, Unknown
  misc_feature (1)..( 10): Result.004 file - promoters50/1013441
tgtaaatgag

SEQ ID NO: 154625 - DNA, 10 bp, Unknown
  misc_feature (1)..( 10): Result.004 file - promoters50/1013441
gataaaggag

SEQ ID NO: 154626 - DNA, 10 bp, Unknown
  misc_feature (1)..( 10): Result.004 file - promoters50/1013441
tgtcaatacc

SEQ ID NO: 154627 - DNA, 10 bp, Unknown
  misc_feature (1)..( 10): Result.004 file - promoters50/1013441
aaaaaaagag

SEQ ID NO: 154628 - DNA, 13 bp, Unknown
  misc_feature (1)..( 13): Result.004 file - promoters50/1013441
cttgcttttgtta

SEQ ID NO: 154629 - DNA, 13 bp, Unknown
  misc_feature (1)..( 13): Result.004 file - promoters50/1013441
attagatttttta

SEQ ID NO: 154630 - DNA, 13 bp, Unknown
  misc_feature (1)..( 13): Result.004 file - promoters50/1013441
ccagcgttttttt

SEQ ID NO: 154631 - DNA, 13 bp, Unknown
  misc_feature (1)..( 13): Result.004 file - promoters50/1013441
attcgatcttttt

SEQ ID NO: 154632 - DNA, 10 bp, Unknown
  misc_feature (1)..( 10): Result.004 file - promoters50/1013441
tgattttaat

SEQ ID NO: 154633 - DNA, 10 bp, Unknown
  misc_feature (1)..( 10): Result.004 file - promoters50/1013441
agattttgtg

SEQ ID NO: 154634 - DNA, 10 bp, Unknown
  misc_feature (1)..( 10): Result.004 file - promoters50/1013441
taattatgtg

SEQ ID NO: 154635 - DNA, 10 bp, Unknown
  misc_feature (1)..( 10): Result.004 file - promoters50/1013441
agatttctct

SEQ ID NO: 154636 - DNA, 8 bp, Unknown
  misc_feature (1)..( 8): Result.004 file - promoters50/1013441
aattatat

SEQ ID NO: 154637 - DNA, 8 bp, Unknown
  misc_feature (1)..( 8): Result.004 file - promoters50/1013441
cattttat

SEQ ID NO: 154638 - DNA, 8 bp, Unknown
  misc_feature (1)..( 8): Result.004 file - promoters50/1013441
cattttct

SEQ ID NO: 154639 - DNA, 8 bp, Unknown
  misc_feature (1)..( 8): Result.004 file - promoters50/1013529
aattctat

SEQ ID NO: 154640 - DNA, 11 bp, Unknown
  misc_feature (1)..( 11): Result.004 file - promoters50/1013529
gaagaagaaag

SEQ ID NO: 154641 - DNA, 11 bp, Unknown
  misc_feature (1)..( 11): Result.004 file - promoters50/1013529
aaagaataaaa

SEQ ID NO: 154642 - DNA, 11 bp, Unknown
  misc_feature (1)..( 11): Result.004 file - promoters50/1013529
aacatataaaa

SEQ ID NO: 154643 - DNA, 11 bp, Unknown
  misc_feature (1)..( 11): Result.004 file - promoters50/1013529
aaaaaatcaaa

SEQ ID NO: 154644 - DNA, 11 bp, Unknown
  misc_feature (1)..( 11): Result.004 file - promoters50/1013529
cgttaatcaaa

SEQ ID NO: 154645 - DNA, 11 bp, Unknown
  misc_feature (1)..( 11): Result.004 file - promoters50/1013529
tattaataaat

SEQ ID NO: 154646 - DNA, 11 bp, Unknown
  misc_feature (1)..( 11): Result.004 file - promoters50/1013611
ccaaaatctta

SEQ ID NO: 154647 - DNA, 9 bp, Unknown
  misc_feature (1)..( 9): Result.004 file - promoters50/1013611
ttttgttat

SEQ ID NO: 154648 - DNA, 9 bp, Unknown
  misc_feature (1)..( 9): Result.004 file - promoters50/1013611
atttattat

SEQ ID NO: 154649 - DNA, 9 bp, Unknown
  misc_feature (1)..( 9): Result.004 file - promoters50/1013611
gtttttttt

SEQ ID NO: 154650 - DNA, 10 bp, Unknown
  misc_feature (1)..( 10): Result.004 file - promoters50/1013611
ataaaacaaa

SEQ ID NO: 154651 - DNA, 10 bp, Unknown
  misc_feature (1)..( 10): Result.004 file - promoters50/1013611
caaaaacaaa

SEQ ID NO: 154652 - DNA, 10 bp, Unknown
  misc_feature (1)..( 10): Result.004 file - promoters50/1013611
ataatacagg

SEQ ID NO: 154653 - DNA, 6 bp, Unknown
  misc_feature (1)..( 6): Result.004 file - promoters50/1013611
aattag

SEQ ID NO: 154654 - DNA, 6 bp, Unknown
  misc_feature (1)..( 6): Result.004 file - promoters50/1013611
aattag

SEQ ID NO: 154655 - DNA, 6 bp, Unknown
  misc_feature (1)..( 6): Result.004 file - promoters50/1013611
aattag

SEQ ID NO: 154656 - DNA, 10 bp, Unknown
  misc_feature (1)..( 10): Result.004 file - promoters50/1013611
caacaaaacg

SEQ ID NO: 154657 - DNA, 10 bp, Unknown
  misc_feature (1)..( 10): Result.004 file - promoters50/1013611
caacaaaaaa

SEQ ID NO: 154658 - DNA, 11 bp, Unknown
  misc_feature (1)..( 11): Result.004 file - promoters50/1013629
taaccaaaaaa

SEQ ID NO: 154659 - DNA, 12 bp, Unknown
  misc_feature (1)..( 12): Result.004 file - promoters50/1013629
aatctgtttctt

SEQ ID NO: 154660 - DNA, 12 bp, Unknown
  misc_feature (1)..( 12): Result.004 file - promoters50/1013629
gtttggtttcta

SEQ ID NO: 154661 - DNA, 12 bp, Unknown
  misc_feature (1)..( 12): Result.004 file - promoters50/1013629
gacccgtttctt

SEQ ID NO: 154662 - DNA, 12 bp, Unknown
  misc_feature (1)..( 12): Result.004 file - promoters50/1013629
acacggtttctt

SEQ ID NO: 154663 - DNA, 12 bp, Unknown
  misc_feature (1)..( 12): Result.004 file - promoters50/1013629
aaacggttttgt

SEQ ID NO: 154664 - DNA, 12 bp, Unknown
  misc_feature (1)..( 12): Result.004 file - promoters50/1013629
aaatggttaatc

SEQ ID NO: 154665 - DNA, 12 bp, Unknown
  misc_feature (1)..( 12): Result.004 file - promoters50/1013629
acttttgttttt

SEQ ID NO: 154666 - DNA, 12 bp, Unknown
  misc_feature (1)..( 12): Result.004 file - promoters50/1013629
tcttttgtaaaa

SEQ ID NO: 154667 - DNA, 12 bp, Unknown
  misc_feature (1)..( 12): Result.004 file - promoters50/1013629
tattttctttat

SEQ ID NO: 154668 - DNA, 12 bp, Unknown
  misc_feature (1)..( 12): Result.004 file - promoters50/1013629
tctttttttttc

SEQ ID NO: 154669 - DNA, 12 bp, Unknown
  misc_feature (1)..( 12): Result.004 file - promoters50/1013629
ctatttcttttc

SEQ ID NO: 154670 - DNA, 12 bp, Unknown
  misc_feature (1)..( 12): Result.004 file - promoters50/1013641
ctaattctctaa

SEQ ID NO: 154671 - DNA, 16 bp, Unknown
  misc_feature (1)..( 16): Result.004 file - promoters50/1013641
ctattttgatttttgg

SEQ ID NO: 154672 - DNA, 16 bp, Unknown
  misc_feature (1)..( 16): Result.004 file - promoters50/1013641
acaatttgacttttca

SEQ ID NO: 154673 - DNA, 16 bp, Unknown
  misc_feature (1)..( 16): Result.004 file - promoters50/1013641
ctatattgacatgaat

SEQ ID NO: 154674 - DNA, 16 bp, Unknown
  misc_feature (1)..( 16): Result.004 file - promoters50/1013641
caaaaatgatatttag

SEQ ID NO: 154675 - DNA, 16 bp, Unknown
  misc_feature (1)..( 16): Result.004 file - promoters50/1013641
ttcaagtctcttatca

SEQ ID NO: 154676 - DNA, 16 bp, Unknown
  misc_feature (1)..( 16): Result.004 file - promoters50/1013641
attttaatacttttct

SEQ ID NO: 154677 - DNA, 11 bp, Unknown
  misc_feature (1)..( 11): Result.004 file - promoters50/1013641
acaaactaaag

SEQ ID NO: 154678 - DNA, 11 bp, Unknown
  misc_feature (1)..( 11): Result.004 file - promoters50/1013641
gcaaaataaca

SEQ ID NO: 154679 - DNA, 11 bp, Unknown
  misc_feature (1)..( 11): Result.004 file - promoters50/1013641
cgaaacaaaaa

SEQ ID NO: 154680 - DNA, 12 bp, Unknown
  misc_feature (1)..( 12): Result.004 file - promoters50/1013641
tgaataataaat

SEQ ID NO: 154681 - DNA, 12 bp, Unknown
  misc_feature (1)..( 12): Result.004 file - promoters50/1013641
tcaagaaccagc

SEQ ID NO: 154682 - DNA, 12 bp, Unknown
  misc_feature (1)..( 12): Result.004 file - promoters50/1013641
acaagaagagag

SEQ ID NO: 154683 - DNA, 12 bp, Unknown
  misc_feature (1)..( 12): Result.004 file - promoters50/1013641
acacaaagacac

SEQ ID NO: 154684 - DNA, 14 bp, Unknown
  misc_feature (1)..( 14): Result.004 file - promoters50/1013641
tcttttcttcgata

SEQ ID NO: 154685 - DNA, 14 bp, Unknown
  misc_feature (1)..( 14): Result.004 file - promoters50/1013641
cattttcttcttta

SEQ ID NO: 154686 - DNA, 14 bp, Unknown
  misc_feature (1)..( 14): Result.004 file - promoters50/1013641
tcttttcttttgag

SEQ ID NO: 154687 - DNA, 14 bp, Unknown
  misc_feature (1)..( 14): Result.004 file - promoters50/1013641
aagagtcttgtttt

SEQ ID NO: 154688 - DNA, 14 bp, Unknown
  misc_feature (1)..( 14): Result.004 file - promoters50/1013641
tcaccacttggttt

SEQ ID NO: 154689 - DNA, 14 bp, Unknown
  misc_feature (1)..( 14): Result.004 file - promoters50/1013641
gaagatctagttaa

SEQ ID NO: 154690 - DNA, 8 bp, Unknown
  misc_feature (1)..( 8): Result.004 file - promoters50/1013641
ctcttttc

SEQ ID NO: 154691 - DNA, 8 bp, Unknown
  misc_feature (1)..( 8): Result.004 file - promoters50/1013641
ttcttttg

SEQ ID NO: 154692 - DNA, 8 bp, Unknown
  misc_feature (1)..( 8): Result.004 file - promoters50/1013641
ctcatttg

SEQ ID NO: 154693 - DNA, 8 bp, Unknown
  misc_feature (1)..( 8): Result.004 file - promoters50/1013641
ttctttaa

SEQ ID NO: 154694 - DNA, 9 bp, Unknown
  misc_feature (1)..( 9): Result.004 file - promoters50/1013641
gtcttgttt

SEQ ID NO: 154695 - DNA, 9 bp, Unknown
  misc_feature (1)..( 9): Result.004 file - promoters50/1013645
cacttttgt

SEQ ID NO: 154696 - DNA, 9 bp, Unknown
  misc_feature (1)..( 9): Result.004 file - promoters50/1013645
cttgtatat

SEQ ID NO: 154697 - DNA, 9 bp, Unknown
  misc_feature (1)..( 9): Result.004 file - promoters50/1013645
aatgtctat

SEQ ID NO: 154698 - DNA, 9 bp, Unknown
  misc_feature (1)..( 9): Result.004 file - promoters50/1013665
cttttatag

SEQ ID NO: 154699 - DNA, 9 bp, Unknown
  misc_feature (1)..( 9): Result.004 file - promoters50/1013665
atatctttt

SEQ ID NO: 154700 - DNA, 9 bp, Unknown
  misc_feature (1)..( 9): Result.004 file - promoters50/1013665
atatttttt

SEQ ID NO: 154701 - DNA, 9 bp, Unknown
  misc_feature (1)..( 9): Result.004 file - promoters50/1013674
acattttta

SEQ ID NO: 154702 - DNA, 8 bp, Unknown
  misc_feature (1)..( 8): Result.004 file - promoters50/1013674
ttttgttt

SEQ ID NO: 154703 - DNA, 8 bp, Unknown
  misc_feature (1)..( 8): Result.004 file - promoters50/1013674
ttttgtgg

SEQ ID NO: 154704 - DNA, 8 bp, Unknown
  misc_feature (1)..( 8): Result.004 file - promoters50/1013674
atttattt

SEQ ID NO: 154705 - DNA, 12 bp, Unknown
  misc_feature (1)..( 12): Result.004 file - promoters50/1013674
tttttgtgtgta

SEQ ID NO: 154706 - DNA, 12 bp, Unknown
  misc_feature (1)..( 12): Result.004 file - promoters50/1013674
tttctgtttcaa

SEQ ID NO: 154707 - DNA, 12 bp, Unknown
  misc_feature (1)..( 12): Result.004 file - promoters50/1013674
tttttgttttgt

SEQ ID NO: 154708 - DNA, 8 bp, Unknown
  misc_feature (1)..( 8): Result.004 file - promoters50/1013674
ttaaaaat

SEQ ID NO: 154709 - DNA, 8 bp, Unknown
  misc_feature (1)..( 8): Result.004 file - promoters50/1013674
ttataaat

SEQ ID NO: 154710 - DNA, 8 bp, Unknown
  misc_feature (1)..( 8): Result.004 file - promoters50/1013674
acaaaaat

SEQ ID NO: 154711 - DNA, 8 bp, Unknown
  misc_feature (1)..( 8): Result.004 file - promoters50/1013674
attacaat

SEQ ID NO: 154712 - DNA, 8 bp, Unknown
  misc_feature (1)..( 8): Result.004 file - promoters50/1013674
cttataat

SEQ ID NO: 154713 - DNA, 8 bp, Unknown
  misc_feature (1)..( 8): Result.004 file - promoters50/1013674
cttaaaat

SEQ ID NO: 154714 - DNA, 7 bp, Unknown
  misc_feature (1)..( 7): Result.004 file - promoters50/1013674
aacaaaa

SEQ ID NO: 154715 - DNA, 7 bp, Unknown
  misc_feature (1)..( 7): Result.004 file - promoters50/1013674
aacaaaa

SEQ ID NO: 154716 - DNA, 7 bp, Unknown
  misc_feature (1)..( 7): Result.004 file - promoters50/1013678
gacaaaa

SEQ ID NO: 154717 - DNA, 6 bp, Unknown
  misc_feature (1)..( 6): Result.004 file - promoters50/1013678
caaatt

SEQ ID NO: 154718 - DNA, 6 bp, Unknown
  misc_feature (1)..( 6): Result.004 file - promoters50/1013678
caaatt

SEQ ID NO: 154719 - DNA, 6 bp, Unknown
  misc_feature (1)..( 6): Result.004 file - promoters50/1013678
caaatt

SEQ ID NO: 154720 - DNA, 8 bp, Unknown
  misc_feature (1)..( 8): Result.004 file - promoters50/1013678
aaacgatt

SEQ ID NO: 154721 - DNA, 8 bp, Unknown
  misc_feature (1)..( 8): Result.004 file - promoters50/1013678
aaactatt

SEQ ID NO: 154722 - DNA, 8 bp, Unknown
  misc_feature (1)..( 8): Result.004 file - promoters50/1013678
aaacgatt

SEQ ID NO: 154723 - DNA, 6 bp, Unknown
  misc_feature (1)..( 6): Result.004 file - promoters50/1013678
ttaaat

SEQ ID NO: 154724 - DNA, 6 bp, Unknown
  misc_feature (1)..( 6): Result.004 file - promoters50/1013678
ttaaat

SEQ ID NO: 154725 - DNA, 6 bp, Unknown
  misc_feature (1)..( 6): Result.004 file - promoters50/1013678
ttaaat

SEQ ID NO: 154726 - DNA, 11 bp, Unknown
  misc_feature (1)..( 11): Result.004 file - promoters50/1013678
agaatgggatt

SEQ ID NO: 154727 - DNA, 11 bp, Unknown
  misc_feature (1)..( 11): Result.004 file - promoters50/1013678
agaatgagatc

SEQ ID NO: 154728 - DNA, 11 bp, Unknown
  misc_feature (1)..( 11): Result.004 file - promoters50/1013678
tttttgagatc

SEQ ID NO: 154729 - DNA, 6 bp, Unknown
  misc_feature (1)..( 6): Result.004 file - promoters50/1013678
tagctt

SEQ ID NO: 154730 - DNA, 6 bp, Unknown
  misc_feature (1)..( 6): Result.004 file - promoters50/1013678
tagctt

SEQ ID NO: 154731 - DNA, 6 bp, Unknown
  misc_feature (1)..( 6): Result.004 file - promoters50/1013678
tagctt

SEQ ID NO: 154732 - DNA, 9 bp, Unknown
  misc_feature (1)..( 9): Result.004 file - promoters50/1013678
gcagagaag

SEQ ID NO: 154733 - DNA, 9 bp, Unknown
  misc_feature (1)..( 9): Result.004 file - promoters50/1013678
gcatagatt

SEQ ID NO: 154734 - DNA, 9 bp, Unknown
  misc_feature (1)..( 9): Result.004 file - promoters50/1013710
gaagagaag

SEQ ID NO: 154735 - DNA, 9 bp, Unknown
  misc_feature (1)..( 9): Result.004 file - promoters50/1013710
ataatgagt

SEQ ID NO: 154736 - DNA, 9 bp, Unknown
  misc_feature (1)..( 9): Result.004 file - promoters50/1013710
gtaatgata

SEQ ID NO: 154737 - DNA, 9 bp, Unknown
  misc_feature (1)..( 9): Result.004 file - promoters50/1013710
taaatcagt

SEQ ID NO: 154738 - DNA, 9 bp, Unknown
  misc_feature (1)..( 9): Result.004 file - promoters50/1013710
gtaatgtgt

SEQ ID NO: 154739 - DNA, 8 bp, Unknown
  misc_feature (1)..( 8): Result.004 file - promoters50/1013710
ctgatttg

SEQ ID NO: 154740 - DNA, 8 bp, Unknown
  misc_feature (1)..( 8): Result.004 file - promoters50/1013710
gtgatttg

SEQ ID NO: 154741 - DNA, 8 bp, Unknown
  misc_feature (1)..( 8): Result.004 file - promoters50/1013710
gtgtttta

SEQ ID NO: 154742 - DNA, 10 bp, Unknown
  misc_feature (1)..( 10): Result.004 file - promoters50/1013710
cttgattaac

SEQ ID NO: 154743 - DNA, 10 bp, Unknown
  misc_feature (1)..( 10): Result.004 file - promoters50/1013710
cttgaataac

SEQ ID NO: 154744 - DNA, 10 bp, Unknown
  misc_feature (1)..( 10): Result.004 file - promoters50/1013714
ttggataaac

SEQ ID NO: 154745 - DNA, 12 bp, Unknown
  misc_feature (1)..( 12): Result.004 file - promoters50/1013714
atatatatccgc

SEQ ID NO: 154746 - DNA, 12 bp, Unknown
  misc_feature (1)..( 12): Result.004 file - promoters50/1013714
ctatataatagt

SEQ ID NO: 154747 - DNA, 12 bp, Unknown
  misc_feature (1)..( 12): Result.004 file - promoters50/1013714
ctatataaatcc

SEQ ID NO: 154748 - DNA, 12 bp, Unknown
  misc_feature (1)..( 12): Result.004 file - promoters50/1013714
atatataccctt

SEQ ID NO: 154749 - DNA, 12 bp, Unknown
  misc_feature (1)..( 12): Result.004 file - promoters50/1013714
caatataatctc

SEQ ID NO: 154750 - DNA, 13 bp, Unknown
  misc_feature (1)..( 13): Result.004 file - promoters50/1013714
ccaatttataatc

SEQ ID NO: 154751 - DNA, 13 bp, Unknown
  misc_feature (1)..( 13): Result.004 file - promoters50/1013714
aatttttttaatc

SEQ ID NO: 154752 - DNA, 13 bp, Unknown
  misc_feature (1)..( 13): Result.004 file - promoters50/1013714
gtcattttttggt

SEQ ID NO: 154753 - DNA, 13 bp, Unknown
  misc_feature (1)..( 13): Result.004 file - promoters50/1013714
ataatttcttact

SEQ ID NO: 154754 - DNA, 13 bp, Unknown
  misc_feature (1)..( 13): Result.004 file - promoters50/1013714
atagtttcttttt

SEQ ID NO: 154755 - DNA, 11 bp, Unknown
  misc_feature (1)..( 11): Result.004 file - promoters50/1013714
gtcattttttg

SEQ ID NO: 154756 - DNA, 11 bp, Unknown
  misc_feature (1)..( 11): Result.004 file - promoters50/1013714
tgtattttttc

SEQ ID NO: 154757 - DNA, 11 bp, Unknown
  misc_feature (1)..( 11): Result.004 file - promoters50/1013714
tgaattttttt

SEQ ID NO: 154758 - DNA, 11 bp, Unknown
  misc_feature (1)..( 11): Result.004 file - promoters50/1013714
ataatttctta

SEQ ID NO: 154759 - DNA, 11 bp, Unknown
  misc_feature (1)..( 11): Result.004 file - promoters50/1013764
atagtttcttt

SEQ ID NO: 154760 - DNA, 10 bp, Unknown
  misc_feature (1)..( 10): Result.004 file - promoters50/1013764
tattatgtta

SEQ ID NO: 154761 - DNA, 10 bp, Unknown
  misc_feature (1)..( 10): Result.004 file - promoters50/1013764
tattgtgtct

SEQ ID NO: 154762 - DNA, 10 bp, Unknown
  misc_feature (1)..( 10): Result.004 file - promoters50/1013764
atttgtttct

SEQ ID NO: 154763 - DNA, 8 bp, Unknown
  misc_feature (1)..( 8): Result.004 file - promoters50/1013764
gaccgatc

SEQ ID NO: 154764 - DNA, 8 bp, Unknown
  misc_feature (1)..( 8): Result.004 file - promoters50/1013764
taccaatc

SEQ ID NO: 154765 - DNA, 8 bp, Unknown
  misc_feature (1)..( 8): Result.004 file - promoters50/1013764
taccaaat

SEQ ID NO: 154766 - DNA, 7 bp, Unknown
  misc_feature (1)..( 7): Result.004 file - promoters50/1013764
gtttcta

SEQ ID NO: 154767 - DNA, 7 bp, Unknown
  misc_feature (1)..( 7): Result.004 file - promoters50/1013764
gtttctt

SEQ ID NO: 154768 - DNA, 7 bp, Unknown
  misc_feature (1)..( 7): Result.004 file - promoters50/1013764
ctttcta

SEQ ID NO: 154769 - DNA, 8 bp, Unknown
  misc_feature (1)..( 8): Result.004 file - promoters50/1013764
tagtaata

SEQ ID NO: 154770 - DNA, 8 bp, Unknown
  misc_feature (1)..( 8): Result.004 file - promoters50/1013764
tagtaaaa

SEQ ID NO: 154771 - DNA, 8 bp, Unknown
  misc_feature (1)..( 8): Result.004 file - promoters50/1013764
taggaaaa

SEQ ID NO: 154772 - DNA, 7 bp, Unknown
  misc_feature (1)..( 7): Result.004 file - promoters50/1013764
atatctg

SEQ ID NO: 154773 - DNA, 7 bp, Unknown
  misc_feature (1)..( 7): Result.004 file - promoters50/1013764
atatctg

SEQ ID NO: 154774 - DNA, 7 bp, Unknown
  misc_feature (1)..( 7): Result.004 file - promoters50/1013764
gtatctg

SEQ ID NO: 154775 - DNA, 11 bp, Unknown
  misc_feature (1)..( 11): Result.004 file - promoters50/1013764
tgttgtttcct

SEQ ID NO: 154776 - DNA, 11 bp, Unknown
  misc_feature (1)..( 11): Result.004 file - promoters50/1013764
acttgtctcct

SEQ ID NO: 154777 - DNA, 11 bp, Unknown
  misc_feature (1)..( 11): Result.004 file - promoters50/1013764
actcgtcgttt

SEQ ID NO: 154778 - DNA, 9 bp, Unknown
  misc_feature (1)..( 9): Result.004 file - promoters50/1013764
cttattgat

SEQ ID NO: 154779 - DNA, 9 bp, Unknown
  misc_feature (1)..( 9): Result.004 file - promoters50/1013764
tttaatgat

SEQ ID NO: 154780 - DNA, 9 bp, Unknown
  misc_feature (1)..( 9): Result.004 file - promoters50/1013764
tttaatgtc

SEQ ID NO: 154781 - DNA, 7 bp, Unknown
  misc_feature (1)..( 7): Result.004 file - promoters50/1013764
aatggtg

SEQ ID NO: 154782 - DNA, 7 bp, Unknown
  misc_feature (1)..( 7): Result.004 file - promoters50/1013764
aatggtt

SEQ ID NO: 154783 - DNA, 7 bp, Unknown
  misc_feature (1)..( 7): Result.004 file - promoters50/1013772
aattgtt

SEQ ID NO: 154784 - DNA, 6 bp, Unknown
  misc_feature (1)..( 6): Result.004 file - promoters50/1013772
aagatt

SEQ ID NO: 154785 - DNA, 6 bp, Unknown
  misc_feature (1)..( 6): Result.004 file - promoters50/1013772
aagatt

SEQ ID NO: 154786 - DNA, 6 bp, Unknown
  misc_feature (1)..( 6): Result.004 file - promoters50/1013786
aagatt

SEQ ID NO: 154787 - DNA, 14 bp, Unknown
  misc_feature (1)..( 14): Result.004 file - promoters50/1013786
aagtttctaggaac

SEQ ID NO: 154788 - DNA, 14 bp, Unknown
  misc_feature (1)..( 14): Result.004 file - promoters50/1013786
ttaagtctagtaac

SEQ ID NO: 154789 - DNA, 14 bp, Unknown
  misc_feature (1)..( 14): Result.004 file - promoters50/1013786
ttgagtttaggccg

SEQ ID NO: 154790 - DNA, 14 bp, Unknown
  misc_feature (1)..( 14): Result.004 file - promoters50/1013786
ataagtttaacgaa

SEQ ID NO: 154791 - DNA, 14 bp, Unknown
  misc_feature (1)..( 14): Result.004 file - promoters50/1013786
ttgacttttgacga

SEQ ID NO: 154792 - DNA, 14 bp, Unknown
  misc_feature (1)..( 14): Result.004 file - promoters50/1013786
ttaactttgtactt

SEQ ID NO: 154793 - DNA, 14 bp, Unknown
  misc_feature (1)..( 14): Result.004 file - promoters50/1013786
ctaattttctaaat

SEQ ID NO: 154794 - DNA, 9 bp, Unknown
  misc_feature (1)..( 9): Result.004 file - promoters50/1013786
tcaagtttc

SEQ ID NO: 154795 - DNA, 9 bp, Unknown
  misc_feature (1)..( 9): Result.004 file - promoters50/1013786
ataagttta

SEQ ID NO: 154796 - DNA, 9 bp, Unknown
  misc_feature (1)..( 9): Result.004 file - promoters50/1013786
ttgagttta

SEQ ID NO: 154797 - DNA, 9 bp, Unknown
  misc_feature (1)..( 9): Result.004 file - promoters50/1013786
ttgactttt

SEQ ID NO: 154798 - DNA, 9 bp, Unknown
  misc_feature (1)..( 9): Result.004 file - promoters50/1013786
ttaactttg

SEQ ID NO: 154799 - DNA, 9 bp, Unknown
  misc_feature (1)..( 9): Result.004 file - promoters50/1013786
ctaattttc

SEQ ID NO: 154800 - DNA, 15 bp, Unknown
  misc_feature (1)..( 15): Result.004 file - promoters50/1013786
aaaatattaaccttg

SEQ ID NO: 154801 - DNA, 15 bp, Unknown
  misc_feature (1)..( 15): Result.004 file - promoters50/1013786
ataaagttaactttg

SEQ ID NO: 154802 - DNA, 15 bp, Unknown
  misc_feature (1)..( 15): Result.004 file - promoters50/1013786
ataaacttaacgaat

SEQ ID NO: 154803 - DNA, 15 bp, Unknown
  misc_feature (1)..( 15): Result.004 file - promoters50/1013786
tagtagataagttta

SEQ ID NO: 154804 - DNA, 15 bp, Unknown
  misc_feature (1)..( 15): Result.004 file - promoters50/1013786
acaattctaattttc

SEQ ID NO: 154805 - DNA, 15 bp, Unknown
  misc_feature (1)..( 15): Result.004 file - promoters50/1013792
tcatcgttaattttt

SEQ ID NO: 154806 - DNA, 13 bp, Unknown
  misc_feature (1)..( 13): Result.004 file - promoters50/1013792
tttttcatattag

SEQ ID NO: 154807 - DNA, 13 bp, Unknown
  misc_feature (1)..( 13): Result.004 file - promoters50/1013792
ttttgcataatag

SEQ ID NO: 154808 - DNA, 13 bp, Unknown
  misc_feature (1)..( 13): Result.004 file - promoters50/1013792
ttcttcatatcac

SEQ ID NO: 154809 - DNA, 11 bp, Unknown
  misc_feature (1)..( 11): Result.004 file - promoters50/1013792
gaacaaacaaa

SEQ ID NO: 154810 - DNA, 11 bp, Unknown
  misc_feature (1)..( 11): Result.004 file - promoters50/1013792
gaacaattaca

SEQ ID NO: 154811 - DNA, 11 bp, Unknown
  misc_feature (1)..( 11): Result.004 file - promoters50/1013796
aaacgattaca

SEQ ID NO: 154812 - DNA, 9 bp, Unknown
  misc_feature (1)..( 9): Result.004 file - promoters50/1013796
taagttcct

SEQ ID NO: 154813 - DNA, 9 bp, Unknown
  misc_feature (1)..( 9): Result.004 file - promoters50/1013796
taagttgtt

SEQ ID NO: 154814 - DNA, 9 bp, Unknown
  misc_feature (1)..( 9): Result.004 file - promoters50/1013796
aaagttgtt

SEQ ID NO: 154815 - DNA, 8 bp, Unknown
  misc_feature (1)..( 8): Result.004 file - promoters50/1013796
gttttaga

SEQ ID NO: 154816 - DNA, 8 bp, Unknown
  misc_feature (1)..( 8): Result.004 file - promoters50/1013796
gttataga

SEQ ID NO: 154817 - DNA, 8 bp, Unknown
  misc_feature (1)..( 8): Result.004 file - promoters50/1013796
tttttaga

SEQ ID NO: 154818 - DNA, 11 bp, Unknown
  misc_feature (1)..( 11): Result.004 file - promoters50/1013796
tgaataaaaaa

SEQ ID NO: 154819 - DNA, 11 bp, Unknown
  misc_feature (1)..( 11): Result.004 file - promoters50/1013796
aaaatcaaact

SEQ ID NO: 154820 - DNA, 11 bp, Unknown
  misc_feature (1)..( 11): Result.004 file - promoters50/1013796
tgaaaaaaaaa

SEQ ID NO: 154821 - DNA, 6 bp, Unknown
  misc_feature (1)..( 6): Result.004 file - promoters50/1013796
aagata

SEQ ID NO: 154822 - DNA, 6 bp, Unknown
  misc_feature (1)..( 6): Result.004 file - promoters50/1013796
aagata

SEQ ID NO: 154823 - DNA, 6 bp, Unknown
  misc_feature (1)..( 6): Result.004 file - promoters50/1013796
aagata

SEQ ID NO: 154824 - DNA, 10 bp, Unknown
  misc_feature (1)..( 10): Result.004 file - promoters50/1013796
tttataaatt

SEQ ID NO: 154825 - DNA, 10 bp, Unknown
  misc_feature (1)..( 10): Result.004 file - promoters50/1013796
tttttaaatt

SEQ ID NO: 154826 - DNA, 10 bp, Unknown
  misc_feature (1)..( 10): Result.004 file - promoters50/1013796
gttttaaaaa

SEQ ID NO: 154827 - DNA, 8 bp, Unknown
  misc_feature (1)..( 8): Result.004 file - promoters50/1013796
taaaccaa

SEQ ID NO: 154828 - DNA, 8 bp, Unknown
  misc_feature (1)..( 8): Result.004 file - promoters50/1013796
taaaacaa

SEQ ID NO: 154829 - DNA, 8 bp, Unknown
  misc_feature (1)..( 8): Result.004 file - promoters50/1013796
taaaccgg

SEQ ID NO: 154830 - DNA, 10 bp, Unknown
  misc_feature (1)..( 10): Result.004 file - promoters50/1013796
taaggttttt

SEQ ID NO: 154831 - DNA, 10 bp, Unknown
  misc_feature (1)..( 10): Result.004 file - promoters50/1013796
taaagttgtt

SEQ ID NO: 154832 - DNA, 10 bp, Unknown
  misc_feature (1)..( 10): Result.004 file - promoters50/1013796
ataagttgtt

SEQ ID NO: 154833 - DNA, 12 bp, Unknown
  misc_feature (1)..( 12): Result.004 file - promoters50/1013796
gaacataacaat

SEQ ID NO: 154834 - DNA, 12 bp, Unknown
  misc_feature (1)..( 12): Result.004 file - promoters50/1013796
cgttttaaaaat

SEQ ID NO: 154835 - DNA, 12 bp, Unknown
  misc_feature (1)..( 12): Result.004 file - promoters50/1013805
gtttttaaattt

SEQ ID NO: 154836 - DNA, 14 bp, Unknown
  misc_feature (1)..( 14): Result.004 file - promoters50/1013805
tgaacttagtctgt

SEQ ID NO: 154837 - DNA, 14 bp, Unknown
  misc_feature (1)..( 14): Result.004 file - promoters50/1013805
tttccttagtaaca

SEQ ID NO: 154838 - DNA, 14 bp, Unknown
  misc_feature (1)..( 14): Result.004 file - promoters50/1013805
tgagattactaaca

SEQ ID NO: 154839 - DNA, 14 bp, Unknown
  misc_feature (1)..( 14): Result.004 file - promoters50/1013805
aaagattactttgg

SEQ ID NO: 154840 - DNA, 14 bp, Unknown
  misc_feature (1)..( 14): Result.004 file - promoters50/1013805
ataaattattttct

SEQ ID NO: 154841 - DNA, 14 bp, Unknown
  misc_feature (1)..( 14): Result.004 file - promoters50/1013805
cttgcttaacactc

SEQ ID NO: 154842 - DNA, 14 bp, Unknown
  misc_feature (1)..( 14): Result.004 file - promoters50/1013805
ggagataactttat

SEQ ID NO: 154843 - DNA, 14 bp, Unknown
  misc_feature (1)..( 14): Result.004 file - promoters50/1013805
ggagattgagccag

SEQ ID NO: 154844 - DNA, 16 bp, Unknown
  misc_feature (1)..( 16): Result.004 file - promoters50/1013805
cttagtctgtaacatg

SEQ ID NO: 154845 - DNA, 16 bp, Unknown
  misc_feature (1)..( 16): Result.004 file - promoters50/1013805
tttccttagtaacagc

SEQ ID NO: 154846 - DNA, 16 bp, Unknown
  misc_feature (1)..( 16): Result.004 file - promoters50/1013805
tgagattactaacact

SEQ ID NO: 154847 - DNA, 16 bp, Unknown
  misc_feature (1)..( 16): Result.004 file - promoters50/1013805
aaagattactttggat

SEQ ID NO: 154848 - DNA, 16 bp, Unknown
  misc_feature (1)..( 16): Result.004 file - promoters50/1013805
ataaattattttcttt

SEQ ID NO: 154849 - DNA, 16 bp, Unknown
  misc_feature (1)..( 16): Result.004 file - promoters50/1013805
atgcttgcttaacact

SEQ ID NO: 154850 - DNA, 16 bp, Unknown
  misc_feature (1)..( 16): Result.004 file - promoters50/1013805
ggagataactttattt

SEQ ID NO: 154851 - DNA, 16 bp, Unknown
  misc_feature (1)..( 16): Result.004 file - promoters50/1013805
ggagattgagccagat

SEQ ID NO: 154852 - DNA, 12 bp, Unknown
  misc_feature (1)..( 12): Result.004 file - promoters50/1013805
tcgataattgat

SEQ ID NO: 154853 - DNA, 12 bp, Unknown
  misc_feature (1)..( 12): Result.004 file - promoters50/1013805
tgaataatttgc

SEQ ID NO: 154854 - DNA, 13 bp, Unknown
  misc_feature (1)..( 13): Result.004 file - promoters50/1013805
gtactaacttgtg

SEQ ID NO: 154855 - DNA, 13 bp, Unknown
  misc_feature (1)..( 13): Result.004 file - promoters50/1013805
gagataactttat

SEQ ID NO: 154856 - DNA, 13 bp, Unknown
  misc_feature (1)..( 13): Result.004 file - promoters50/1013805
gagattactaaca

SEQ ID NO: 154857 - DNA, 13 bp, Unknown
  misc_feature (1)..( 13): Result.004 file - promoters50/1013805
ctcttaaattatt

SEQ ID NO: 154858 - DNA, 12 bp, Unknown
  misc_feature (1)..( 12): Result.004 file - promoters50/1013805
tgagaaacctgt

SEQ ID NO: 154859 - DNA, 12 bp, Unknown
  misc_feature (1)..( 12): Result.004 file - promoters50/1013805
gtactaacttgt

SEQ ID NO: 154860 - DNA, 12 bp, Unknown
  misc_feature (1)..( 12): Result.004 file - promoters50/1013805
tgaataatttgc

SEQ ID NO: 154861 - DNA, 12 bp, Unknown
  misc_feature (1)..( 12): Result.004 file - promoters50/1013805
gagataacttta

SEQ ID NO: 154862 - DNA, 12 bp, Unknown
  misc_feature (1)..( 12): Result.004 file - promoters50/1013805
gagattactaac

SEQ ID NO: 154863 - DNA, 12 bp, Unknown
  misc_feature (1)..( 12): Result.004 file - promoters50/1013850
tcttaaattatt

SEQ ID NO: 154864 - DNA, 10 bp, Unknown
  misc_feature (1)..( 10): Result.004 file - promoters50/1013850
aaaatctttc

SEQ ID NO: 154865 - DNA, 10 bp, Unknown
  misc_feature (1)..( 10): Result.004 file - promoters50/1013850
taaattttta

SEQ ID NO: 154866 - DNA, 10 bp, Unknown
  misc_feature (1)..( 10): Result.004 file - promoters50/1013850
caaattctaa

SEQ ID NO: 154867 - DNA, 10 bp, Unknown
  misc_feature (1)..( 10): Result.004 file - promoters50/1013850
tgaattcttc

SEQ ID NO: 154868 - DNA, 10 bp, Unknown
  misc_feature (1)..( 10): Result.004 file - promoters50/1013878
attattttta

SEQ ID NO: 154869 - DNA, 11 bp, Unknown
  misc_feature (1)..( 11): Result.004 file - promoters50/1013878
gataatatgca

SEQ ID NO: 154870 - DNA, 11 bp, Unknown
  misc_feature (1)..( 11): Result.004 file - promoters50/1013878
aataatatata

SEQ ID NO: 154871 - DNA, 11 bp, Unknown
  misc_feature (1)..( 11): Result.004 file - promoters50/1013878
gttaagatgtg

SEQ ID NO: 154872 - DNA, 11 bp, Unknown
  misc_feature (1)..( 11): Result.004 file - promoters50/1013878
tgaaatatgtc

SEQ ID NO: 154873 - DNA, 11 bp, Unknown
  misc_feature (1)..( 11): Result.004 file - promoters50/1013878
caaaaaattgg

SEQ ID NO: 154874 - DNA, 11 bp, Unknown
  misc_feature (1)..( 11): Result.004 file - promoters50/1013878
gtttagaattt

SEQ ID NO: 154875 - DNA, 11 bp, Unknown
  misc_feature (1)..( 11): Result.004 file - promoters50/1013878
ttttataggtc

SEQ ID NO: 154876 - DNA, 15 bp, Unknown
  misc_feature (1)..( 15): Result.004 file - promoters50/1013878
tacaagagaaacttg

SEQ ID NO: 154877 - DNA, 15 bp, Unknown
  misc_feature (1)..( 15): Result.004 file - promoters50/1013878
tagaaataaaaattg

SEQ ID NO: 154878 - DNA, 15 bp, Unknown
  misc_feature (1)..( 15): Result.004 file - promoters50/1013878
agttttaaaaacttt

SEQ ID NO: 154879 - DNA, 15 bp, Unknown
  misc_feature (1)..( 15): Result.004 file - promoters50/1013878
agaaaaaaaaaatgg

SEQ ID NO: 154880 - DNA, 15 bp, Unknown
  misc_feature (1)..( 15): Result.004 file - promoters50/1013878
tgaaactcaaaattt

SEQ ID NO: 154881 - DNA, 15 bp, Unknown
  misc_feature (1)..( 15): Result.004 file - promoters50/1013878
aacaaaacaaaacga

SEQ ID NO: 154882 - DNA, 15 bp, Unknown
  misc_feature (1)..( 15): Result.004 file - promoters50/1013878
aagaagaaaaaaaac

SEQ ID NO: 154883 - DNA, 14 bp, Unknown
  misc_feature (1)..( 14): Result.004 file - promoters50/1013878
acaagagaaacttg

SEQ ID NO: 154884 - DNA, 14 bp, Unknown
  misc_feature (1)..( 14): Result.004 file - promoters50/1013878
agaagaaaaaaaac

SEQ ID NO: 154885 - DNA, 14 bp, Unknown
  misc_feature (1)..( 14): Result.004 file - promoters50/1013878
tttagaagaagtta

SEQ ID NO: 154886 - DNA, 14 bp, Unknown
  misc_feature (1)..( 14): Result.004 file - promoters50/1013878
gaaaaaaaaaatgg

SEQ ID NO: 154887 - DNA, 14 bp, Unknown
  misc_feature (1)..( 14): Result.004 file - promoters50/1013878
agtaaaaaaacaat

SEQ ID NO: 154888 - DNA, 14 bp, Unknown
  misc_feature (1)..( 14): Result.004 file - promoters50/1013878
gtaacaaaacaaaa

SEQ ID NO: 154889 - DNA, 12 bp, Unknown
  misc_feature (1)..( 12): Result.004 file - promoters50/1013878
gaatctaataca

SEQ ID NO: 154890 - DNA, 12 bp, Unknown
  misc_feature (1)..( 12): Result.004 file - promoters50/1013878
aaatataattaa

SEQ ID NO: 154891 - DNA, 13 bp, Unknown
  misc_feature (1)..( 13): Result.004 file - promoters50/1013878
aaattattttaat

SEQ ID NO: 154892 - DNA, 13 bp, Unknown
  misc_feature (1)..( 13): Result.004 file - promoters50/1013878
caaatattttatt

SEQ ID NO: 154893 - DNA, 13 bp, Unknown
  misc_feature (1)..( 13): Result.004 file - promoters50/1013878
catagataattaa

SEQ ID NO: 154894 - DNA, 13 bp, Unknown
  misc_feature (1)..( 13): Result.004 file - promoters50/1013878
ttgatttttttcg

SEQ ID NO: 154895 - DNA, 9 bp, Unknown
  misc_feature (1)..( 9): Result.004 file - promoters50/1013878
aaataaaaa

SEQ ID NO: 154896 - DNA, 9 bp, Unknown
  misc_feature (1)..( 9): Result.004 file - promoters50/1013878
aaacaaaac

SEQ ID NO: 154897 - DNA, 9 bp, Unknown
  misc_feature (1)..( 9): Result.004 file - promoters50/1013878
cagtaaaaa

SEQ ID NO: 154898 - DNA, 9 bp, Unknown
  misc_feature (1)..( 9): Result.004 file - promoters50/1013878
aaaaaaaaa

SEQ ID NO: 154899 - DNA, 9 bp, Unknown
  misc_feature (1)..( 9): Result.004 file - promoters50/1013878
agaaaaaaa

SEQ ID NO: 154900 - DNA, 9 bp, Unknown
  misc_feature (1)..( 9): Result.004 file - promoters50/1013893
ccaaaaaat

SEQ ID NO: 154901 - DNA, 12 bp, Unknown
  misc_feature (1)..( 12): Result.004 file - promoters50/1013893
aagaaaattgac

SEQ ID NO: 154902 - DNA, 12 bp, Unknown
  misc_feature (1)..( 12): Result.004 file - promoters50/1013893
aagaaatttgct

SEQ ID NO: 154903 - DNA, 12 bp, Unknown
  misc_feature (1)..( 12): Result.004 file - promoters50/1013893
gtcaaatttgtc

SEQ ID NO: 154904 - DNA, 12 bp, Unknown
  misc_feature (1)..( 12): Result.004 file - promoters50/1013893
aagaaaccaatt

SEQ ID NO: 154905 - DNA, 12 bp, Unknown
  misc_feature (1)..( 12): Result.004 file - promoters50/1013893
tatgaatctgct

SEQ ID NO: 154906 - DNA, 12 bp, Unknown
  misc_feature (1)..( 12): Result.004 file - promoters50/1013893
taacaatttttt

SEQ ID NO: 154907 - DNA, 14 bp, Unknown
  misc_feature (1)..( 14): Result.004 file - promoters50/1013893
taaggacatcgaaa

SEQ ID NO: 154908 - DNA, 14 bp, Unknown
  misc_feature (1)..( 14): Result.004 file - promoters50/1013893
taagaacattggat

SEQ ID NO: 154909 - DNA, 14 bp, Unknown
  misc_feature (1)..( 14): Result.004 file - promoters50/1013893
cacgaacatggatt

SEQ ID NO: 154910 - DNA, 14 bp, Unknown
  misc_feature (1)..( 14): Result.004 file - promoters50/1013893
aaagaagatgaaac

SEQ ID NO: 154911 - DNA, 14 bp, Unknown
  misc_feature (1)..( 14): Result.004 file - promoters50/1013893
gtagagcataagac

SEQ ID NO: 154912 - DNA, 14 bp, Unknown
  misc_feature (1)..( 14): Result.004 file - promoters50/1013904
agagaaaatttgat

SEQ ID NO: 154913 - DNA, 10 bp, Unknown
  misc_feature (1)..( 10): Result.004 file - promoters50/1013904
aatttaataa

SEQ ID NO: 154914 - DNA, 10 bp, Unknown
  misc_feature (1)..( 10): Result.004 file - promoters50/1013904
aatctaacaa

SEQ ID NO: 154915 - DNA, 10 bp, Unknown
  misc_feature (1)..( 10): Result.004 file - promoters50/1013904
gttttaatta

SEQ ID NO: 154916 - DNA, 10 bp, Unknown
  misc_feature (1)..( 10): Result.004 file - promoters50/1013904
attctaacta

SEQ ID NO: 154917 - DNA, 10 bp, Unknown
  misc_feature (1)..( 10): Result.004 file - promoters50/1013904
tttctaaaat

SEQ ID NO: 154918 - DNA, 10 bp, Unknown
  misc_feature (1)..( 10): Result.004 file - promoters50/1013904
tgtttgatta

SEQ ID NO: 154919 - DNA, 9 bp, Unknown
  misc_feature (1)..( 9): Result.004 file - promoters50/1013904
ttatattta

SEQ ID NO: 154920 - DNA, 9 bp, Unknown
  misc_feature (1)..( 9): Result.004 file - promoters50/1013904
caatatttg

SEQ ID NO: 154921 - DNA, 9 bp, Unknown
  misc_feature (1)..( 9): Result.004 file - promoters50/1013904
atatgtttc

SEQ ID NO: 154922 - DNA, 9 bp, Unknown
  misc_feature (1)..( 9): Result.004 file - promoters50/1013904
caatatgtg

SEQ ID NO: 154923 - DNA, 9 bp, Unknown
  misc_feature (1)..( 9): Result.004 file - promoters50/1013904
caaaattat

SEQ ID NO: 154924 - DNA, 9 bp, Unknown
  misc_feature (1)..( 9): Result.004 file - promoters50/1013907
caaacttat

SEQ ID NO: 154925 - DNA, 9 bp, Unknown
  misc_feature (1)..( 9): Result.004 file - promoters50/1013907
gaaagattg

SEQ ID NO: 154926 - DNA, 9 bp, Unknown
  misc_feature (1)..( 9): Result.004 file - promoters50/1013907
taaagcttg

SEQ ID NO: 154927 - DNA, 9 bp, Unknown
  misc_feature (1)..( 9): Result.004 file - promoters50/1013907
taaaaattt

SEQ ID NO: 154928 - DNA, 9 bp, Unknown
  misc_feature (1)..( 9): Result.004 file - promoters50/1013907
taaaaagga

SEQ ID NO: 154929 - DNA, 9 bp, Unknown
  misc_feature (1)..( 9): Result.004 file - promoters50/1013907
tcccactaa

SEQ ID NO: 154930 - DNA, 9 bp, Unknown
  misc_feature (1)..( 9): Result.004 file - promoters50/1013907
aaccattaa

SEQ ID NO: 154931 - DNA, 9 bp, Unknown
  misc_feature (1)..( 9): Result.004 file - promoters50/1013907
gtccattag

SEQ ID NO: 154932 - DNA, 9 bp, Unknown
  misc_feature (1)..( 9): Result.004 file - promoters50/1013907
aactattct

SEQ ID NO: 154933 - DNA, 10 bp, Unknown
  misc_feature (1)..( 10): Result.004 file - promoters50/1013907
attacaaaaa

SEQ ID NO: 154934 - DNA, 10 bp, Unknown
  misc_feature (1)..( 10): Result.004 file - promoters50/1013907
cttataaaac

SEQ ID NO: 154935 - DNA, 10 bp, Unknown
  misc_feature (1)..( 10): Result.004 file - promoters50/1013907
tttagaaaaa

SEQ ID NO: 154936 - DNA, 11 bp, Unknown
  misc_feature (1)..( 11): Result.004 file - promoters50/1013907
tttaagactct

SEQ ID NO: 154937 - DNA, 8 bp, Unknown
  misc_feature (1)..( 8): Result.004 file - promoters50/1013907
tttaaatg

SEQ ID NO: 154938 - DNA, 8 bp, Unknown
  misc_feature (1)..( 8): Result.004 file - promoters50/1013907
tttaaaat

SEQ ID NO: 154939 - DNA, 8 bp, Unknown
  misc_feature (1)..( 8): Result.004 file - promoters50/1013907
tttgaatt

SEQ ID NO: 154940 - DNA, 9 bp, Unknown
  misc_feature (1)..( 9): Result.004 file - promoters50/1013923
tttagaatc

SEQ ID NO: 154941 - DNA, 13 bp, Unknown
  misc_feature (1)..( 13): Result.004 file - promoters50/1013923
taagatttttgtt

SEQ ID NO: 154942 - DNA, 13 bp, Unknown
  misc_feature (1)..( 13): Result.004 file - promoters50/1013923
ggagactttgggt

SEQ ID NO: 154943 - DNA, 13 bp, Unknown
  misc_feature (1)..( 13): Result.004 file - promoters50/1013923
tagaatttttttc

SEQ ID NO: 154944 - DNA, 13 bp, Unknown
  misc_feature (1)..( 13): Result.004 file - promoters50/1013923
taacattttttaa

SEQ ID NO: 154945 - DNA, 13 bp, Unknown
  misc_feature (1)..( 13): Result.004 file - promoters50/1013923
aacaattttagtt

SEQ ID NO: 154946 - DNA, 13 bp, Unknown
  misc_feature (1)..( 13): Result.004 file - promoters50/1013923
tccaattttgggc

SEQ ID NO: 154947 - DNA, 14 bp, Unknown
  misc_feature (1)..( 14): Result.004 file - promoters50/1013923
taaactaatttaaa

SEQ ID NO: 154948 - DNA, 14 bp, Unknown
  misc_feature (1)..( 14): Result.004 file - promoters50/1013923
acatgtaatttttc

SEQ ID NO: 154949 - DNA, 15 bp, Unknown
  misc_feature (1)..( 15): Result.004 file - promoters50/1013923
acatttaactttatt

SEQ ID NO: 154950 - DNA, 16 bp, Unknown
  misc_feature (1)..( 16): Result.004 file - promoters50/1013923
ctttttaatatttcat

SEQ ID NO: 154951 - DNA, 16 bp, Unknown
  misc_feature (1)..( 16): Result.004 file - promoters50/1013923
aatgataatatcttga

SEQ ID NO: 154952 - DNA, 17 bp, Unknown
  misc_feature (1)..( 17): Result.004 file - promoters50/1013923
acacaaaactatataaa

SEQ ID NO: 154953 - DNA, 10 bp, Unknown
  misc_feature (1)..( 10): Result.004 file - promoters50/1013923
acattctcaa

SEQ ID NO: 154954 - DNA, 10 bp, Unknown
  misc_feature (1)..( 10): Result.004 file - promoters50/1013923
taattttcag

SEQ ID NO: 154955 - DNA, 10 bp, Unknown
  misc_feature (1)..( 10): Result.004 file - promoters50/1013923
catttcacaa

SEQ ID NO: 154956 - DNA, 10 bp, Unknown
  misc_feature (1)..( 10): Result.004 file - promoters50/1013923
catttctcat

SEQ ID NO: 154957 - DNA, 10 bp, Unknown
  misc_feature (1)..( 10): Result.004 file - promoters50/1013923
taactttatt

SEQ ID NO: 154958 - DNA, 10 bp, Unknown
  misc_feature (1)..( 10): Result.004 file - promoters50/1013923
aaactatata

SEQ ID NO: 154959 - DNA, 10 bp, Unknown
  misc_feature (1)..( 10): Result.004 file - promoters50/1013923
gataatggct

SEQ ID NO: 154960 - DNA, 10 bp, Unknown
  misc_feature (1)..( 10): Result.004 file - promoters50/1013923
gataattttc

SEQ ID NO: 154961 - DNA, 10 bp, Unknown
  misc_feature (1)..( 10): Result.004 file - promoters50/1013923
gataatatct

SEQ ID NO: 154962 - DNA, 10 bp, Unknown
  misc_feature (1)..( 10): Result.004 file - promoters50/1013923
cataatatta

SEQ ID NO: 154963 - DNA, 10 bp, Unknown
  misc_feature (1)..( 10): Result.004 file - promoters50/1013923
tttaatattt

SEQ ID NO: 154964 - DNA, 10 bp, Unknown
  misc_feature (1)..( 10): Result.004 file - promoters50/1013931
gataagatta

SEQ ID NO: 154965 - DNA, 9 bp, Unknown
  misc_feature (1)..( 9): Result.004 file - promoters50/1013931
gaaaaattg

SEQ ID NO: 154966 - DNA, 9 bp, Unknown
  misc_feature (1)..( 9): Result.004 file - promoters50/1013931
caaaacttg

SEQ ID NO: 154967 - DNA, 9 bp, Unknown
  misc_feature (1)..( 9): Result.004 file - promoters50/1013931
gaaatattt

SEQ ID NO: 154968 - DNA, 10 bp, Unknown
  misc_feature (1)..( 10): Result.004 file - promoters50/1013931
atctctgctt

SEQ ID NO: 154969 - DNA, 10 bp, Unknown
  misc_feature (1)..( 10): Result.004 file - promoters50/1013931
atctctcgtg

SEQ ID NO: 154970 - DNA, 10 bp, Unknown
  misc_feature (1)..( 10): Result.004 file - promoters50/1013931
ttctctggtg

SEQ ID NO: 154971 - DNA, 9 bp, Unknown
  misc_feature (1)..( 9): Result.004 file - promoters50/1013931
agaaacata

SEQ ID NO: 154972 - DNA, 9 bp, Unknown
  misc_feature (1)..( 9): Result.004 file - promoters50/1013931
agaagcata

SEQ ID NO: 154973 - DNA, 9 bp, Unknown
  misc_feature (1)..( 9): Result.004 file - promoters50/1013931
agaagcacc

SEQ ID NO: 154974 - DNA, 8 bp, Unknown
  misc_feature (1)..( 8): Result.004 file - promoters50/1013931
ttaaactt

SEQ ID NO: 154975 - DNA, 8 bp, Unknown
  misc_feature (1)..( 8): Result.004 file - promoters50/1013931
ttagactt

SEQ ID NO: 154976 - DNA, 8 bp, Unknown
  misc_feature (1)..( 8): Result.004 file - promoters50/1013931
atagactc

SEQ ID NO: 154977 - DNA, 8 bp, Unknown
  misc_feature (1)..( 8): Result.004 file - promoters50/1013931
tttgattt

SEQ ID NO: 154978 - DNA, 8 bp, Unknown
  misc_feature (1)..( 8): Result.004 file - promoters50/1013931
ttttattt

SEQ ID NO: 154979 - DNA, 8 bp, Unknown
  misc_feature (1)..( 8): Result.004 file - promoters50/1013931
atttattc

SEQ ID NO: 154980 - DNA, 11 bp, Unknown
  misc_feature (1)..( 11): Result.004 file - promoters50/1013931
aaagtttcata

SEQ ID NO: 154981 - DNA, 11 bp, Unknown
  misc_feature (1)..( 11): Result.004 file - promoters50/1013931
acagttccata

SEQ ID NO: 154982 - DNA, 11 bp, Unknown
  misc_feature (1)..( 11): Result.004 file - promoters50/1013931
aaaatttgcca

SEQ ID NO: 154983 - DNA, 8 bp, Unknown
  misc_feature (1)..( 8): Result.004 file - promoters50/1013931
tttgttca

SEQ ID NO: 154984 - DNA, 8 bp, Unknown
  misc_feature (1)..( 8): Result.004 file - promoters50/1013931
tttattca

SEQ ID NO: 154985 - DNA, 8 bp, Unknown
  misc_feature (1)..( 8): Result.004 file - promoters50/1013957
tttatttg

SEQ ID NO: 154986 - DNA, 10 bp, Unknown
  misc_feature (1)..( 10): Result.004 file - promoters50/1013957
ttattaatct

SEQ ID NO: 154987 - DNA, 10 bp, Unknown
  misc_feature (1)..( 10): Result.004 file - promoters50/1013957
atataaattg

SEQ ID NO: 154988 - DNA, 10 bp, Unknown
  misc_feature (1)..( 10): Result.004 file - promoters50/1013957
ataaaaatct

SEQ ID NO: 154989 - DNA, 10 bp, Unknown
  misc_feature (1)..( 10): Result.004 file - promoters50/1013957
gtaaaaattt

SEQ ID NO: 154990 - DNA, 10 bp, Unknown
  misc_feature (1)..( 10): Result.004 file - promoters50/1013957
ctaaatattt

SEQ ID NO: 154991 - DNA, 15 bp, Unknown
  misc_feature (1)..( 15): Result.004 file - promoters50/1013957
acgtaattatctaaa

SEQ ID NO: 154992 - DNA, 15 bp, Unknown
  misc_feature (1)..( 15): Result.004 file - promoters50/1013957
ggccacttagctaaa

SEQ ID NO: 154993 - DNA, 15 bp, Unknown
  misc_feature (1)..( 15): Result.004 file - promoters50/1013957
ttctggttatgtaat

SEQ ID NO: 154994 - DNA, 15 bp, Unknown
  misc_feature (1)..( 15): Result.004 file - promoters50/1013957
ttctcgttttgtttg

SEQ ID NO: 154995 - DNA, 15 bp, Unknown
  misc_feature (1)..( 15): Result.004 file - promoters50/1013957
gatagaatttgtttg

SEQ ID NO: 154996 - DNA, 12 bp, Unknown
  misc_feature (1)..( 12): Result.004 file - promoters50/1013957
tttctctgggta

SEQ ID NO: 154997 - DNA, 12 bp, Unknown
  misc_feature (1)..( 12): Result.004 file - promoters50/1013957
cttctctatggt

SEQ ID NO: 154998 - DNA, 12 bp, Unknown
  misc_feature (1)..( 12): Result.004 file - promoters50/1013957
cttttctttggt

SEQ ID NO: 154999 - DNA, 12 bp, Unknown
  misc_feature (1)..( 12): Result.004 file - promoters50/1013957
gttttgtttggg

SEQ ID NO: 155000 - DNA, 12 bp, Unknown
  misc_feature (1)..( 12): Result.004 file - promoters50/1014010
aatttgtttgtt

SEQ ID NO: 155001 - DNA, 13 bp, Unknown
  misc_feature (1)..( 13): Result.004 file - promoters50/1014010
ttaactttattgt

SEQ ID NO: 155002 - DNA, 13 bp, Unknown
  misc_feature (1)..( 13): Result.004 file - promoters50/1014010
ccaactttgacca

SEQ ID NO: 155003 - DNA, 13 bp, Unknown
  misc_feature (1)..( 13): Result.004 file - promoters50/1014010
tctactttcttgt

SEQ ID NO: 155004 - DNA, 13 bp, Unknown
  misc_feature (1)..( 13): Result.004 file - promoters50/1014010
aaaacgttaaaac

SEQ ID NO: 155005 - DNA, 13 bp, Unknown
  misc_feature (1)..( 13): Result.004 file - promoters50/1014010
ttaccttaaaaat

SEQ ID NO: 155006 - DNA, 13 bp, Unknown
  misc_feature (1)..( 13): Result.004 file - promoters50/1014010
aaaccttgtggtc

SEQ ID NO: 155007 - DNA, 9 bp, Unknown
  misc_feature (1)..( 9): Result.004 file - promoters50/1014010
gaacaaaaa

SEQ ID NO: 155008 - DNA, 9 bp, Unknown
  misc_feature (1)..( 9): Result.004 file - promoters50/1014010
aaaccaaac

SEQ ID NO: 155009 - DNA, 9 bp, Unknown
  misc_feature (1)..( 9): Result.004 file - promoters50/1014010
aaacgaaaa

SEQ ID NO: 155010 - DNA, 9 bp, Unknown
  misc_feature (1)..( 9): Result.004 file - promoters50/1014010
gaacaatta

SEQ ID NO: 155011 - DNA, 9 bp, Unknown
  misc_feature (1)..( 9): Result.004 file - promoters50/1014010
ctaccaaaa

SEQ ID NO: 155012 - DNA, 9 bp, Unknown
  misc_feature (1)..( 9): Result.004 file - promoters50/1014010
gaataataa

SEQ ID NO: 155013 - DNA, 9 bp, Unknown
  misc_feature (1)..( 9): Result.004 file - promoters50/1014010
aaataatta

SEQ ID NO: 155014 - DNA, 9 bp, Unknown
  misc_feature (1)..( 9): Result.004 file - promoters50/1014010
gaattaaac

SEQ ID NO: 155015 - DNA, 9 bp, Unknown
  misc_feature (1)..( 9): Result.004 file - promoters50/1014010
atattaaat

SEQ ID NO: 155016 - DNA, 9 bp, Unknown
  misc_feature (1)..( 9): Result.004 file - promoters50/1014010
tatttaaac

SEQ ID NO: 155017 - DNA, 9 bp, Unknown
  misc_feature (1)..( 9): Result.004 file - promoters50/1014010
ttataaaaa

SEQ ID NO: 155018 - DNA, 9 bp, Unknown
  misc_feature (1)..( 9): Result.004 file - promoters50/1014010
ctataaaac

SEQ ID NO: 155019 - DNA, 9 bp, Unknown
  misc_feature (1)..( 9): Result.004 file - promoters50/1014010
gtataaaat

SEQ ID NO: 155020 - DNA, 9 bp, Unknown
  misc_feature (1)..( 9): Result.004 file - promoters50/1014010
ctataaata

SEQ ID NO: 155021 - DNA, 12 bp, Unknown
  misc_feature (1)..( 12): Result.004 file - promoters50/1014010
aatttgaaatcc

SEQ ID NO: 155022 - DNA, 12 bp, Unknown
  misc_feature (1)..( 12): Result.004 file - promoters50/1014010
cattagaaaaaa

SEQ ID NO: 155023 - DNA, 12 bp, Unknown
  misc_feature (1)..( 12): Result.004 file - promoters50/1014010
aattagaataat

SEQ ID NO: 155024 - DNA, 12 bp, Unknown
  misc_feature (1)..( 12): Result.004 file - promoters50/1014010
ggttatatttac

SEQ ID NO: 155025 - DNA, 12 bp, Unknown
  misc_feature (1)..( 12): Result.004 file - promoters50/1014010
aataataattag

SEQ ID NO: 155026 - DNA, 12 bp, Unknown
  misc_feature (1)..( 12): Result.004 file - promoters50/1014010
aattattattat

SEQ ID NO: 155027 - DNA, 9 bp, Unknown
  misc_feature (1)..( 9): Result.004 file - promoters50/1014010
aaaaatttg

SEQ ID NO: 155028 - DNA, 9 bp, Unknown
  misc_feature (1)..( 9): Result.004 file - promoters50/1014010
caaaatttc

SEQ ID NO: 155029 - DNA, 10 bp, Unknown
  misc_feature (1)..( 10): Result.004 file - promoters50/1014010
aaataattat

SEQ ID NO: 155030 - DNA, 10 bp, Unknown
  misc_feature (1)..( 10): Result.004 file - promoters50/1014010
gttatattta

SEQ ID NO: 155031 - DNA, 10 bp, Unknown
  misc_feature (1)..( 10): Result.004 file - promoters50/1014010
cgaaaattat

SEQ ID NO: 155032 - DNA, 10 bp, Unknown
  misc_feature (1)..( 10): Result.004 file - promoters50/1014010
gaataataat

SEQ ID NO: 155033 - DNA, 10 bp, Unknown
  misc_feature (1)..( 10): Result.004 file - promoters50/1014010
atattttgtt

SEQ ID NO: 155034 - DNA, 10 bp, Unknown
  misc_feature (1)..( 10): Result.004 file - promoters50/1014010
atatttactg

SEQ ID NO: 155035 - DNA, 10 bp, Unknown
  misc_feature (1)..( 10): Result.004 file - promoters50/1014010
ataattagtt

SEQ ID NO: 155036 - DNA, 10 bp, Unknown
  misc_feature (1)..( 10): Result.004 file - promoters50/1014010
ataattataa

SEQ ID NO: 155037 - DNA, 10 bp, Unknown
  misc_feature (1)..( 10): Result.004 file - promoters50/1014010
aaaattatat

SEQ ID NO: 155038 - DNA, 10 bp, Unknown
  misc_feature (1)..( 10): Result.004 file - promoters50/1014010
tcaattatta

SEQ ID NO: 155039 - DNA, 12 bp, Unknown
  misc_feature (1)..( 12): Result.004 file - promoters50/1014010
tggttatattta

SEQ ID NO: 155040 - DNA, 12 bp, Unknown
  misc_feature (1)..( 12): Result.004 file - promoters50/1014010
aaattatataaa

SEQ ID NO: 155041 - DNA, 12 bp, Unknown
  misc_feature (1)..( 12): Result.004 file - promoters50/1014010
taattataatta

SEQ ID NO: 155042 - DNA, 12 bp, Unknown
  misc_feature (1)..( 12): Result.004 file - promoters50/1014010
gaataataatta

SEQ ID NO: 155043 - DNA, 12 bp, Unknown
  misc_feature (1)..( 12): Result.004 file - promoters50/1014010
gaacaattactg

SEQ ID NO: 155044 - DNA, 12 bp, Unknown
  misc_feature (1)..( 12): Result.004 file - promoters50/1014117
gaaaaataaaat

SEQ ID NO: 155045 - DNA, 7 bp, Unknown
  misc_feature (1)..( 7): Result.004 file - promoters50/1014117
tttgttc

SEQ ID NO: 155046 - DNA, 7 bp, Unknown
  misc_feature (1)..( 7): Result.004 file - promoters50/1014117
attgttc

SEQ ID NO: 155047 - DNA, 8 bp, Unknown
  misc_feature (1)..( 8): Result.004 file - promoters50/1014125
tttggttt

SEQ ID NO: 155048 - DNA, 15 bp, Unknown
  misc_feature (1)..( 15): Result.004 file - promoters50/1014125
aaactgtgaaactgt

SEQ ID NO: 155049 - DNA, 15 bp, Unknown
  misc_feature (1)..( 15): Result.004 file - promoters50/1014125
aaaatgtgaaatgta

SEQ ID NO: 155050 - DNA, 15 bp, Unknown
  misc_feature (1)..( 15): Result.004 file - promoters50/1014125
gctttgtgaaaaatc

SEQ ID NO: 155051 - DNA, 15 bp, Unknown
  misc_feature (1)..( 15): Result.004 file - promoters50/1014125
caatgtaaaaataat

SEQ ID NO: 155052 - DNA, 15 bp, Unknown
  misc_feature (1)..( 15): Result.004 file - promoters50/1014125
gttatgtgacaatag

SEQ ID NO: 155053 - DNA, 15 bp, Unknown
  misc_feature (1)..( 15): Result.004 file - promoters50/1014125
tgatagtttagaaca

SEQ ID NO: 155054 - DNA, 15 bp, Unknown
  misc_feature (1)..( 15): Result.004 file - promoters50/1014176
tacttgttagtgttc

SEQ ID NO: 155055 - DNA, 12 bp, Unknown
  misc_feature (1)..( 12): Result.004 file - promoters50/1014176
tgtaaattaatt

SEQ ID NO: 155056 - DNA, 12 bp, Unknown
  misc_feature (1)..( 12): Result.004 file - promoters50/1014176
attaaaataatc

SEQ ID NO: 155057 - DNA, 12 bp, Unknown
  misc_feature (1)..( 12): Result.004 file - promoters50/1014176
tacaaattcatt

SEQ ID NO: 155058 - DNA, 12 bp, Unknown
  misc_feature (1)..( 12): Result.004 file - promoters50/1014176
tgtaatttaacc

SEQ ID NO: 155059 - DNA, 12 bp, Unknown
  misc_feature (1)..( 12): Result.004 file - promoters50/1014176
ctttctttacta

SEQ ID NO: 155060 - DNA, 12 bp, Unknown
  misc_feature (1)..( 12): Result.004 file - promoters50/1014180
atttttttacaa

SEQ ID NO: 155061 - DNA, 9 bp, Unknown
  misc_feature (1)..( 9): Result.004 file - promoters50/1014180
ttttaacat

SEQ ID NO: 155062 - DNA, 9 bp, Unknown
  misc_feature (1)..( 9): Result.004 file - promoters50/1014180
ttttaatta

SEQ ID NO: 155063 - DNA, 9 bp, Unknown
  misc_feature (1)..( 9): Result.004 file - promoters50/1014180
tttgaacat

SEQ ID NO: 155064 - DNA, 9 bp, Unknown
  misc_feature (1)..( 9): Result.004 file - promoters50/1014180
tttgattag

SEQ ID NO: 155065 - DNA, 9 bp, Unknown
  misc_feature (1)..( 9): Result.004 file - promoters50/1014180
atttaattc

SEQ ID NO: 155066 - DNA, 9 bp, Unknown
  misc_feature (1)..( 9): Result.004 file - promoters50/1014180
aattaattg

SEQ ID NO: 155067 - DNA, 9 bp, Unknown
  misc_feature (1)..( 9): Result.004 file - promoters50/1014180
aattgatgt

SEQ ID NO: 155068 - DNA, 9 bp, Unknown
  misc_feature (1)..( 9): Result.004 file - promoters50/1014180
aattaatgg

SEQ ID NO: 155069 - DNA, 9 bp, Unknown
  misc_feature (1)..( 9): Result.004 file - promoters50/1014180
gtttgatta

SEQ ID NO: 155070 - DNA, 9 bp, Unknown
  misc_feature (1)..( 9): Result.004 file - promoters50/1014180
atttaattc

SEQ ID NO: 155071 - DNA, 9 bp, Unknown
  misc_feature (1)..( 9): Result.004 file - promoters50/1014180
aattaattg

SEQ ID NO: 155072 - DNA, 9 bp, Unknown
  misc_feature (1)..( 9): Result.004 file - promoters50/1014259
aattacttc

SEQ ID NO: 155073 - DNA, 8 bp, Unknown
  misc_feature (1)..( 8): Result.004 file - promoters50/1014259
ttgaaaac

SEQ ID NO: 155074 - DNA, 8 bp, Unknown
  misc_feature (1)..( 8): Result.004 file - promoters50/1014259
atgaaaat

SEQ ID NO: 155075 - DNA, 8 bp, Unknown
  misc_feature (1)..( 8): Result.004 file - promoters50/1014259
attaaaaa

SEQ ID NO: 155076 - DNA, 10 bp, Unknown
  misc_feature (1)..( 10): Result.004 file - promoters50/1014259
gtaatgacac

SEQ ID NO: 155077 - DNA, 10 bp, Unknown
  misc_feature (1)..( 10): Result.004 file - promoters50/1014259
caaataacaa

SEQ ID NO: 155078 - DNA, 10 bp, Unknown
  misc_feature (1)..( 10): Result.004 file - promoters50/1014259
gtaataacac

SEQ ID NO: 155079 - DNA, 10 bp, Unknown
  misc_feature (1)..( 10): Result.004 file - promoters50/1014259
tatataccaa

SEQ ID NO: 155080 - DNA, 8 bp, Unknown
  misc_feature (1)..( 8): Result.004 file - promoters50/1014259
aatttatc

SEQ ID NO: 155081 - DNA, 8 bp, Unknown
  misc_feature (1)..( 8): Result.004 file - promoters50/1014259
aatatata

SEQ ID NO: 155082 - DNA, 8 bp, Unknown
  misc_feature (1)..( 8): Result.004 file - promoters50/1014259
aatatata

SEQ ID NO: 155083 - DNA, 8 bp, Unknown
  misc_feature (1)..( 8): Result.004 file - promoters50/1014259
tatagata

SEQ ID NO: 155084 - DNA, 9 bp, Unknown
  misc_feature (1)..( 9): Result.004 file - promoters50/1014259
ttcgttttc

SEQ ID NO: 155085 - DNA, 9 bp, Unknown
  misc_feature (1)..( 9): Result.004 file - promoters50/1014259
aaagttttc

SEQ ID NO: 155086 - DNA, 9 bp, Unknown
  misc_feature (1)..( 9): Result.004 file - promoters50/1014259
ttcgttttg

SEQ ID NO: 155087 - DNA, 8 bp, Unknown
  misc_feature (1)..( 8): Result.004 file - promoters50/1014259
tctattta

SEQ ID NO: 155088 - DNA, 8 bp, Unknown
  misc_feature (1)..( 8): Result.004 file - promoters50/1014259
catattta

SEQ ID NO: 155089 - DNA, 8 bp, Unknown
  misc_feature (1)..( 8): Result.004 file - promoters50/1014259
tctgtttg

SEQ ID NO: 155090 - DNA, 8 bp, Unknown
  misc_feature (1)..( 8): Result.004 file - promoters50/1014259
attaaaaa

SEQ ID NO: 155091 - DNA, 8 bp, Unknown
  misc_feature (1)..( 8): Result.004 file - promoters50/1014259
tataaaaa

SEQ ID NO: 155092 - DNA, 8 bp, Unknown
  misc_feature (1)..( 8): Result.004 file - promoters50/1014259
tatgaaag

SEQ ID NO: 155093 - DNA, 15 bp, Unknown
  misc_feature (1)..( 15): Result.004 file - promoters50/1014259
taacaactaatgggc

SEQ ID NO: 155094 - DNA, 15 bp, Unknown
  misc_feature (1)..( 15): Result.004 file - promoters50/1014259
taaaaactaagaaac

SEQ ID NO: 155095 - DNA, 15 bp, Unknown
  misc_feature (1)..( 15): Result.004 file - promoters50/1014259
tcataactaatgggc

SEQ ID NO: 155096 - DNA, 10 bp, Unknown
  misc_feature (1)..( 10): Result.004 file - promoters50/1014259
acaataaaag

SEQ ID NO: 155097 - DNA, 10 bp, Unknown
  misc_feature (1)..( 10): Result.004 file - promoters50/1014259
acaaaaaaag

SEQ ID NO: 155098 - DNA, 10 bp, Unknown
  misc_feature (1)..( 10): Result.004 file - promoters50/1014387
aaactaaacc

SEQ ID NO: 155099 - DNA, 9 bp, Unknown
  misc_feature (1)..( 9): Result.004 file - promoters50/1014387
taaaatatc

SEQ ID NO: 155100 - DNA, 9 bp, Unknown
  misc_feature (1)..( 9): Result.004 file - promoters50/1014387
tgaaatatt

SEQ ID NO: 155101 - DNA, 9 bp, Unknown
  misc_feature (1)..( 9): Result.004 file - promoters50/1014387
aaaaatatt

SEQ ID NO: 155102 - DNA, 9 bp, Unknown
  misc_feature (1)..( 9): Result.004 file - promoters50/1014387
tgatatata

SEQ ID NO: 155103 - DNA, 9 bp, Unknown
  misc_feature (1)..( 9): Result.004 file - promoters50/1014387
tgatattcg

SEQ ID NO: 155104 - DNA, 9 bp, Unknown
  misc_feature (1)..( 9): Result.004 file - promoters50/1014406
agttatata

SEQ ID NO: 155105 - DNA, 14 bp, Unknown
  misc_feature (1)..( 14): Result.004 file - promoters50/1014406
aaaaataaataaaa

SEQ ID NO: 155106 - DNA, 14 bp, Unknown
  misc_feature (1)..( 14): Result.004 file - promoters50/1014406
aaaaaaaaaaaaaa

SEQ ID NO: 155107 - DNA, 14 bp, Unknown
  misc_feature (1)..( 14): Result.004 file - promoters50/1014406
gaaaatacataatt

SEQ ID NO: 155108 - DNA, 14 bp, Unknown
  misc_feature (1)..( 14): Result.004 file - promoters50/1014406
tcaattaaacctac

SEQ ID NO: 155109 - DNA, 14 bp, Unknown
  misc_feature (1)..( 14): Result.004 file - promoters50/1014406
caatttaaaaacaa

SEQ ID NO: 155110 - DNA, 14 bp, Unknown
  misc_feature (1)..( 14): Result.004 file - promoters50/1014452
ggttctaaaaaaca

SEQ ID NO: 155111 - DNA, 10 bp, Unknown
  misc_feature (1)..( 10): Result.004 file - promoters50/1014452
tatataaata

SEQ ID NO: 155112 - DNA, 10 bp, Unknown
  misc_feature (1)..( 10): Result.004 file - promoters50/1014452
actataaata

SEQ ID NO: 155113 - DNA, 10 bp, Unknown
  misc_feature (1)..( 10): Result.004 file - promoters50/1014452
actatatata

SEQ ID NO: 155114 - DNA, 10 bp, Unknown
  misc_feature (1)..( 10): Result.004 file - promoters50/1014452
tctataaaaa

SEQ ID NO: 155115 - DNA, 10 bp, Unknown
  misc_feature (1)..( 10): Result.004 file - promoters50/1014452
tatatacata

SEQ ID NO: 155116 - DNA, 10 bp, Unknown
  misc_feature (1)..( 10): Result.004 file - promoters50/1014452
tatataaata

SEQ ID NO: 155117 - DNA, 10 bp, Unknown
  misc_feature (1)..( 10): Result.004 file - promoters50/1014452
taaatatatg

SEQ ID NO: 155118 - DNA, 11 bp, Unknown
  misc_feature (1)..( 11): Result.004 file - promoters50/1014452
tcaatttttta

SEQ ID NO: 155119 - DNA, 11 bp, Unknown
  misc_feature (1)..( 11): Result.004 file - promoters50/1014452
tcaatctttaa

SEQ ID NO: 155120 - DNA, 12 bp, Unknown
  misc_feature (1)..( 12): Result.004 file - promoters50/1014452
gttattatttac

SEQ ID NO: 155121 - DNA, 12 bp, Unknown
  misc_feature (1)..( 12): Result.004 file - promoters50/1014452
aaatatatttat

SEQ ID NO: 155122 - DNA, 12 bp, Unknown
  misc_feature (1)..( 12): Result.004 file - promoters50/1014452
atagaaatttac

SEQ ID NO: 155123 - DNA, 12 bp, Unknown
  misc_feature (1)..( 12): Result.004 file - promoters50/1014452
accaaaattaca

SEQ ID NO: 155124 - DNA, 10 bp, Unknown
  misc_feature (1)..( 10): Result.004 file - promoters50/1014452
aattaaaaac

SEQ ID NO: 155125 - DNA, 10 bp, Unknown
  misc_feature (1)..( 10): Result.004 file - promoters50/1014452
aattgaaaac

SEQ ID NO: 155126 - DNA, 11 bp, Unknown
  misc_feature (1)..( 11): Result.004 file - promoters50/1014452
aactaaataac

SEQ ID NO: 155127 - DNA, 11 bp, Unknown
  misc_feature (1)..( 11): Result.004 file - promoters50/1014452
cattaaaaaaa

SEQ ID NO: 155128 - DNA, 11 bp, Unknown
  misc_feature (1)..( 11): Result.004 file - promoters50/1014452
aatagaagagt

SEQ ID NO: 155129 - DNA, 11 bp, Unknown
  misc_feature (1)..( 11): Result.004 file - promoters50/1014452
aactaaaaata

SEQ ID NO: 155130 - DNA, 26 bp, Unknown
  misc_feature (1)..( 26): Result.004 file - promoters50/1014452
aatactttatcgtccaatcaatcttt

SEQ ID NO: 155131 - DNA, 26 bp, Unknown
  misc_feature (1)..( 26): Result.004 file - promoters50/1014452
tcatcagtatcgtccaaacaatcatt

SEQ ID NO: 155132 - DNA, 26 bp, Unknown
  misc_feature (1)..( 26): Result.004 file - promoters50/1014452
atttctttttcgagaatacaaagaat

SEQ ID NO: 155133 - DNA, 26 bp, Unknown
  misc_feature (1)..( 26): Result.004 file - promoters50/1014452
ttgatcttacattccaatcgttccaa

SEQ ID NO: 155134 - DNA, 26 bp, Unknown
  misc_feature (1)..( 26): Result.004 file - promoters50/1014452
tatttttactcagtaaaaaaataatt

SEQ ID NO: 155135 - DNA, 26 bp, Unknown
  misc_feature (1)..( 26): Result.004 file - promoters50/1014452
atttgtttttctgaacttacaaatat

SEQ ID NO: 155136 - DNA, 26 bp, Unknown
  misc_feature (1)..( 26): Result.004 file - promoters50/1014452
caatgagtccattaattaaaattaag

SEQ ID NO: 155137 - DNA, 13 bp, Unknown
  misc_feature (1)..( 13): Result.004 file - promoters50/1014452
ctaaaaatatatt

SEQ ID NO: 155138 - DNA, 13 bp, Unknown
  misc_feature (1)..( 13): Result.004 file - promoters50/1014452
tataaaatacttt

SEQ ID NO: 155139 - DNA, 14 bp, Unknown
  misc_feature (1)..( 14): Result.004 file - promoters50/1014452
aataacaattgaag

SEQ ID NO: 155140 - DNA, 15 bp, Unknown
  misc_feature (1)..( 15): Result.004 file - promoters50/1014452
agtatataattttag

SEQ ID NO: 155141 - DNA, 15 bp, Unknown
  misc_feature (1)..( 15): Result.004 file - promoters50/1014452
tttatataattacga

SEQ ID NO: 155142 - DNA, 15 bp, Unknown
  misc_feature (1)..( 15): Result.004 file - promoters50/1014452
tcataatacttttcg

SEQ ID NO: 155143 - DNA, 15 bp, Unknown
  misc_feature (1)..( 15): Result.004 file - promoters50/1014452
tgaccaaaattacaa

SEQ ID NO: 155144 - DNA, 12 bp, Unknown
  misc_feature (1)..( 12): Result.004 file - promoters50/1014452
ggattttttctc

SEQ ID NO: 155145 - DNA, 12 bp, Unknown
  misc_feature (1)..( 12): Result.004 file - promoters50/1014452
caatttttactt

SEQ ID NO: 155146 - DNA, 12 bp, Unknown
  misc_feature (1)..( 12): Result.004 file - promoters50/1014452
taatatttactg

SEQ ID NO: 155147 - DNA, 12 bp, Unknown
  misc_feature (1)..( 12): Result.004 file - promoters50/1014452
caatattacaac

SEQ ID NO: 155148 - DNA, 12 bp, Unknown
  misc_feature (1)..( 12): Result.004 file - promoters50/1014452
tgatttgtactt

SEQ ID NO: 155149 - DNA, 12 bp, Unknown
  misc_feature (1)..( 12): Result.004 file - promoters50/1014452
caaaattggttg

SEQ ID NO: 155150 - DNA, 9 bp, Unknown
  misc_feature (1)..( 9): Result.004 file - promoters50/1014452
taactataa

SEQ ID NO: 155151 - DNA, 9 bp, Unknown
  misc_feature (1)..( 9): Result.004 file - promoters50/1014452
taaatatat

SEQ ID NO: 155152 - DNA, 9 bp, Unknown
  misc_feature (1)..( 9): Result.004 file - promoters50/1014452
actatatat

SEQ ID NO: 155153 - DNA, 9 bp, Unknown
  misc_feature (1)..( 9): Result.004 file - promoters50/1014452
gaaatctat

SEQ ID NO: 155154 - DNA, 9 bp, Unknown
  misc_feature (1)..( 9): Result.004 file - promoters50/1014452
tatatatac

SEQ ID NO: 155155 - DNA, 9 bp, Unknown
  misc_feature (1)..( 9): Result.004 file - promoters50/1014509
cgtatatat

SEQ ID NO: 155156 - DNA, 9 bp, Unknown
  misc_feature (1)..( 9): Result.004 file - promoters50/1014509
tttgatcaa

SEQ ID NO: 155157 - DNA, 9 bp, Unknown
  misc_feature (1)..( 9): Result.004 file - promoters50/1014509
ttttatctt

SEQ ID NO: 155158 - DNA, 9 bp, Unknown
  misc_feature (1)..( 9): Result.004 file - promoters50/1014525
atttagctt

SEQ ID NO: 155159 - DNA, 17 bp, Unknown
  misc_feature (1)..( 17): Result.004 file - promoters50/1014525
ttagatatatttaagtc

SEQ ID NO: 155160 - DNA, 17 bp, Unknown
  misc_feature (1)..( 17): Result.004 file - promoters50/1014525
ttatatatgtttatatg

SEQ ID NO: 155161 - DNA, 17 bp, Unknown
  misc_feature (1)..( 17): Result.004 file - promoters50/1014525
gctcagataattatttg

SEQ ID NO: 155162 - DNA, 17 bp, Unknown
  misc_feature (1)..( 17): Result.004 file - promoters50/1014525
tattttatttttaattc

SEQ ID NO: 155163 - DNA, 17 bp, Unknown
  misc_feature (1)..( 17): Result.004 file - promoters50/1014525
aattattcgttgataaa

SEQ ID NO: 155164 - DNA, 17 bp, Unknown
  misc_feature (1)..( 17): Result.004 file - promoters50/1014525
acaagttggttgagaaa

SEQ ID NO: 155165 - DNA, 17 bp, Unknown
  misc_feature (1)..( 17): Result.004 file - promoters50/1014525
ggaattaattttttcaa

SEQ ID NO: 155166 - DNA, 11 bp, Unknown
  misc_feature (1)..( 11): Result.004 file - promoters50/1014525
aaagtcataaa

SEQ ID NO: 155167 - DNA, 11 bp, Unknown
  misc_feature (1)..( 11): Result.004 file - promoters50/1014525
aaagtgataaa

SEQ ID NO: 155168 - DNA, 11 bp, Unknown
  misc_feature (1)..( 11): Result.004 file - promoters50/1014525
gaagtcagatt

SEQ ID NO: 155169 - DNA, 11 bp, Unknown
  misc_feature (1)..( 11): Result.004 file - promoters50/1014525
ctagtcatttc

SEQ ID NO: 155170 - DNA, 11 bp, Unknown
  misc_feature (1)..( 11): Result.004 file - promoters50/1014525
gtcgtcatata

SEQ ID NO: 155171 - DNA, 11 bp, Unknown
  misc_feature (1)..( 11): Result.004 file - promoters50/1014525
catttcatatg

SEQ ID NO: 155172 - DNA, 10 bp, Unknown
  misc_feature (1)..( 10): Result.004 file - promoters50/1014525
atatttatac

SEQ ID NO: 155173 - DNA, 10 bp, Unknown
  misc_feature (1)..( 10): Result.004 file - promoters50/1014525
gtatatatac

SEQ ID NO: 155174 - DNA, 10 bp, Unknown
  misc_feature (1)..( 10): Result.004 file - promoters50/1014525
ttatataaac

SEQ ID NO: 155175 - DNA, 10 bp, Unknown
  misc_feature (1)..( 10): Result.004 file - promoters50/1014525
gtatataaat

SEQ ID NO: 155176 - DNA, 10 bp, Unknown
  misc_feature (1)..( 10): Result.004 file - promoters50/1014525
ttatatatag

SEQ ID NO: 155177 - DNA, 10 bp, Unknown
  misc_feature (1)..( 10): Result.004 file - promoters50/1014525
atataaataa

SEQ ID NO: 155178 - DNA, 10 bp, Unknown
  misc_feature (1)..( 10): Result.004 file - promoters50/1014525
ctatatattt

SEQ ID NO: 155179 - DNA, 10 bp, Unknown
  misc_feature (1)..( 10): Result.004 file - promoters50/1014525
ttatacaaat

SEQ ID NO: 155180 - DNA, 10 bp, Unknown
  misc_feature (1)..( 10): Result.004 file - promoters50/1014525
aaatataaat

SEQ ID NO: 155181 - DNA, 10 bp, Unknown
  misc_feature (1)..( 10): Result.004 file - promoters50/1014525
ttatataaac

SEQ ID NO: 155182 - DNA, 10 bp, Unknown
  misc_feature (1)..( 10): Result.004 file - promoters50/1014525
gtatataaat

SEQ ID NO: 155183 - DNA, 10 bp, Unknown
  misc_feature (1)..( 10): Result.004 file - promoters50/1014525
ttatatatag

SEQ ID NO: 155184 - DNA, 10 bp, Unknown
  misc_feature (1)..( 10): Result.004 file - promoters50/1014525
ctatatattt

SEQ ID NO: 155185 - DNA, 10 bp, Unknown
  misc_feature (1)..( 10): Result.004 file - promoters50/1014525
tatttgaatg

SEQ ID NO: 155186 - DNA, 10 bp, Unknown
  misc_feature (1)..( 10): Result.004 file - promoters50/1014525
tatatgaatt

SEQ ID NO: 155187 - DNA, 10 bp, Unknown
  misc_feature (1)..( 10): Result.004 file - promoters50/1014525
gattttaata

SEQ ID NO: 155188 - DNA, 10 bp, Unknown
  misc_feature (1)..( 10): Result.004 file - promoters50/1014525
aataagaatg

SEQ ID NO: 155189 - DNA, 10 bp, Unknown
  misc_feature (1)..( 10): Result.004 file - promoters50/1014525
gatatgacat

SEQ ID NO: 155190 - DNA, 10 bp, Unknown
  misc_feature (1)..( 10): Result.004 file - promoters50/1014525
tctttttata

SEQ ID NO: 155191 - DNA, 10 bp, Unknown
  misc_feature (1)..( 10): Result.004 file - promoters50/1014525
ctatccaaaa

SEQ ID NO: 155192 - DNA, 10 bp, Unknown
  misc_feature (1)..( 10): Result.004 file - promoters50/1014525
atatacaaac

SEQ ID NO: 155193 - DNA, 10 bp, Unknown
  misc_feature (1)..( 10): Result.004 file - promoters50/1014525
atattcaacg

SEQ ID NO: 155194 - DNA, 10 bp, Unknown
  misc_feature (1)..( 10): Result.004 file - promoters50/1014525
aagaccaaaa

SEQ ID NO: 155195 - DNA, 10 bp, Unknown
  misc_feature (1)..( 10): Result.004 file - promoters50/1014525
ctatccatat

SEQ ID NO: 155196 - DNA, 10 bp, Unknown
  misc_feature (1)..( 10): Result.004 file - promoters50/1014525
acgtacaaac

SEQ ID NO: 155197 - DNA, 10 bp, Unknown
  misc_feature (1)..( 10): Result.004 file - promoters50/1014525
tttatatgac

SEQ ID NO: 155198 - DNA, 10 bp, Unknown
  misc_feature (1)..( 10): Result.004 file - promoters50/1014525
attatttgag

SEQ ID NO: 155199 - DNA, 11 bp, Unknown
  misc_feature (1)..( 11): Result.004 file - promoters50/1014525
gttgataaact

SEQ ID NO: 155200 - DNA, 11 bp, Unknown
  misc_feature (1)..( 11): Result.004 file - promoters50/1014525
gttgagaaatt

SEQ ID NO: 155201 - DNA, 11 bp, Unknown
  misc_feature (1)..( 11): Result.004 file - promoters50/1014525
attaatttttt

SEQ ID NO: 155202 - DNA, 11 bp, Unknown
  misc_feature (1)..( 11): Result.004 file - promoters50/1014573
tttaattcaag

SEQ ID NO: 155203 - DNA, 6 bp, Unknown
  misc_feature (1)..( 6): Result.004 file - promoters50/1014573
tttttt

SEQ ID NO: 155204 - DNA, 6 bp, Unknown
  misc_feature (1)..( 6): Result.004 file - promoters50/1014573
tttttt

SEQ ID NO: 155205 - DNA, 6 bp, Unknown
  misc_feature (1)..( 6): Result.004 file - promoters50/1014573
tttttt

SEQ ID NO: 155206 - DNA, 8 bp, Unknown
  misc_feature (1)..( 8): Result.004 file - promoters50/1014573
tagattta

SEQ ID NO: 155207 - DNA, 8 bp, Unknown
  misc_feature (1)..( 8): Result.004 file - promoters50/1014573
aagattta

SEQ ID NO: 155208 - DNA, 8 bp, Unknown
  misc_feature (1)..( 8): Result.004 file - promoters50/1014611
aagctttt

SEQ ID NO: 155209 - DNA, 7 bp, Unknown
  misc_feature (1)..( 7): Result.004 file - promoters50/1014611
aattgta

SEQ ID NO: 155210 - DNA, 7 bp, Unknown
  misc_feature (1)..( 7): Result.004 file - promoters50/1014611
aattgta

SEQ ID NO: 155211 - DNA, 7 bp, Unknown
  misc_feature (1)..( 7): Result.004 file - promoters50/1014611
aatggta

SEQ ID NO: 155212 - DNA, 8 bp, Unknown
  misc_feature (1)..( 8): Result.004 file - promoters50/1014611
caaaaata

SEQ ID NO: 155213 - DNA, 8 bp, Unknown
  misc_feature (1)..( 8): Result.004 file - promoters50/1014611
caaaaaaa

SEQ ID NO: 155214 - DNA, 8 bp, Unknown
  misc_feature (1)..( 8): Result.004 file - promoters50/1014611
aaaaaata

SEQ ID NO: 155215 - DNA, 9 bp, Unknown
  misc_feature (1)..( 9): Result.004 file - promoters50/1014611
gtaatattt

SEQ ID NO: 155216 - DNA, 9 bp, Unknown
  misc_feature (1)..( 9): Result.004 file - promoters50/1014611
gtaaaattt

SEQ ID NO: 155217 - DNA, 9 bp, Unknown
  misc_feature (1)..( 9): Result.004 file - promoters50/1014611
ataattttt

SEQ ID NO: 155218 - DNA, 7 bp, Unknown
  misc_feature (1)..( 7): Result.004 file - promoters50/1014611
gtatttt

SEQ ID NO: 155219 - DNA, 7 bp, Unknown
  misc_feature (1)..( 7): Result.004 file - promoters50/1014611
ttatttt

SEQ ID NO: 155220 - DNA, 7 bp, Unknown
  misc_feature (1)..( 7): Result.004 file - promoters50/1014611
ttatttc

SEQ ID NO: 155221 - DNA, 8 bp, Unknown
  misc_feature (1)..( 8): Result.004 file - promoters50/1014611
ataagtta

SEQ ID NO: 155222 - DNA, 8 bp, Unknown
  misc_feature (1)..( 8): Result.004 file - promoters50/1014611
ataaatta

SEQ ID NO: 155223 - DNA, 8 bp, Unknown
  misc_feature (1)..( 8): Result.004 file - promoters50/1014611
ttaaattt

SEQ ID NO: 155224 - DNA, 12 bp, Unknown
  misc_feature (1)..( 12): Result.004 file - promoters50/1014611
taatattataaa

SEQ ID NO: 155225 - DNA, 12 bp, Unknown
  misc_feature (1)..( 12): Result.004 file - promoters50/1014611
taattttaggat

SEQ ID NO: 155226 - DNA, 12 bp, Unknown
  misc_feature (1)..( 12): Result.004 file - promoters50/1014611
aaatatgtgata

SEQ ID NO: 155227 - DNA, 12 bp, Unknown
  misc_feature (1)..( 12): Result.004 file - promoters50/1014611
actttaaaccac

SEQ ID NO: 155228 - DNA, 12 bp, Unknown
  misc_feature (1)..( 12): Result.004 file - promoters50/1014611
aaattaaaacac

SEQ ID NO: 155229 - DNA, 12 bp, Unknown
  misc_feature (1)..( 12): Result.004 file - promoters50/1014611
aaatgaaaaaat

SEQ ID NO: 155230 - DNA, 9 bp, Unknown
  misc_feature (1)..( 9): Result.004 file - promoters50/1014611
aaaataaaa

SEQ ID NO: 155231 - DNA, 9 bp, Unknown
  misc_feature (1)..( 9): Result.004 file - promoters50/1014611
caaagaaaa

SEQ ID NO: 155232 - DNA, 9 bp, Unknown
  misc_feature (1)..( 9): Result.004 file - promoters50/1014611
caaaaaaaa

SEQ ID NO: 155233 - DNA, 13 bp, Unknown
  misc_feature (1)..( 13): Result.004 file - promoters50/1014611
ctttgattgtaag

SEQ ID NO: 155234 - DNA, 13 bp, Unknown
  misc_feature (1)..( 13): Result.004 file - promoters50/1014611
ctttgaaaaaaaa

SEQ ID NO: 155235 - DNA, 13 bp, Unknown
  misc_feature (1)..( 13): Result.004 file - promoters50/1014611
attttaaaaaaaa

SEQ ID NO: 155236 - DNA, 9 bp, Unknown
  misc_feature (1)..( 9): Result.004 file - promoters50/1014611
gcctattta

SEQ ID NO: 155237 - DNA, 9 bp, Unknown
  misc_feature (1)..( 9): Result.004 file - promoters50/1014611
gactaatta

SEQ ID NO: 155238 - DNA, 9 bp, Unknown
  misc_feature (1)..( 9): Result.004 file - promoters50/1014611
gcccattga

SEQ ID NO: 155239 - DNA, 9 bp, Unknown
  misc_feature (1)..( 9): Result.004 file - promoters50/1014611
aaaaaattt

SEQ ID NO: 155240 - DNA, 9 bp, Unknown
  misc_feature (1)..( 9): Result.004 file - promoters50/1014611
atcaaattt

SEQ ID NO: 155241 - DNA, 9 bp, Unknown
  misc_feature (1)..( 9): Result.004 file - promoters50/1014611
aaataattt

SEQ ID NO: 155242 - DNA, 7 bp, Unknown
  misc_feature (1)..( 7): Result.004 file - promoters50/1014611
tttgaaa

SEQ ID NO: 155243 - DNA, 7 bp, Unknown
  misc_feature (1)..( 7): Result.004 file - promoters50/1014611
tttgaac

SEQ ID NO: 155244 - DNA, 7 bp, Unknown
  misc_feature (1)..( 7): Result.004 file - promoters50/1014631
tttcaaa

SEQ ID NO: 155245 - DNA, 7 bp, Unknown
  misc_feature (1)..( 7): Result.004 file - promoters50/1014631
aaactct

SEQ ID NO: 155246 - DNA, 7 bp, Unknown
  misc_feature (1)..( 7): Result.004 file - promoters50/1014631
taactct

SEQ ID NO: 155247 - DNA, 8 bp, Unknown
  misc_feature (1)..( 8): Result.004 file - promoters50/1014631
gaatctct

SEQ ID NO: 155248 - DNA, 9 bp, Unknown
  misc_feature (1)..( 9): Result.004 file - promoters50/1014631
ttggtttct

SEQ ID NO: 155249 - DNA, 9 bp, Unknown
  misc_feature (1)..( 9): Result.004 file - promoters50/1014631
ttggtttca

SEQ ID NO: 155250 - DNA, 9 bp, Unknown
  misc_feature (1)..( 9): Result.004 file - promoters50/1014631
atgggttct

SEQ ID NO: 155251 - DNA, 9 bp, Unknown
  misc_feature (1)..( 9): Result.004 file - promoters50/1014631
ttccttaat

SEQ ID NO: 155252 - DNA, 9 bp, Unknown
  misc_feature (1)..( 9): Result.004 file - promoters50/1014631
ttccgtaaa

SEQ ID NO: 155253 - DNA, 9 bp, Unknown
  misc_feature (1)..( 9): Result.004 file - promoters50/1014631
gtcgttaac

SEQ ID NO: 155254 - DNA, 12 bp, Unknown
  misc_feature (1)..( 12): Result.004 file - promoters50/1014631
gattttgtctat

SEQ ID NO: 155255 - DNA, 12 bp, Unknown
  misc_feature (1)..( 12): Result.004 file - promoters50/1014631
gatgttgtttat

SEQ ID NO: 155256 - DNA, 12 bp, Unknown
  misc_feature (1)..( 12): Result.004 file - promoters50/1014649
tgagttattttc

SEQ ID NO: 155257 - DNA, 9 bp, Unknown
  misc_feature (1)..( 9): Result.004 file - promoters50/1014649
attctttac

SEQ ID NO: 155258 - DNA, 9 bp, Unknown
  misc_feature (1)..( 9): Result.004 file - promoters50/1014649
tttctctac

SEQ ID NO: 155259 - DNA, 9 bp, Unknown
  misc_feature (1)..( 9): Result.004 file - promoters50/1014649
attttttgg

SEQ ID NO: 155260 - DNA, 8 bp, Unknown
  misc_feature (1)..( 8): Result.004 file - promoters50/1014649
acatatgt

SEQ ID NO: 155261 - DNA, 8 bp, Unknown
  misc_feature (1)..( 8): Result.004 file - promoters50/1014649
acatctgt

SEQ ID NO: 155262 - DNA, 8 bp, Unknown
  misc_feature (1)..( 8): Result.004 file - promoters50/1014649
atatatat

SEQ ID NO: 155263 - DNA, 9 bp, Unknown
  misc_feature (1)..( 9): Result.004 file - promoters50/1014649
atttattta

SEQ ID NO: 155264 - DNA, 9 bp, Unknown
  misc_feature (1)..( 9): Result.004 file - promoters50/1014649
atttatttt

SEQ ID NO: 155265 - DNA, 9 bp, Unknown
  misc_feature (1)..( 9): Result.004 file - promoters50/1014649
attaaatta

SEQ ID NO: 155266 - DNA, 8 bp, Unknown
  misc_feature (1)..( 8): Result.004 file - promoters50/1014649
tctatttt

SEQ ID NO: 155267 - DNA, 8 bp, Unknown
  misc_feature (1)..( 8): Result.004 file - promoters50/1014649
tctttttt

SEQ ID NO: 155268 - DNA, 8 bp, Unknown
  misc_feature (1)..( 8): Result.004 file - promoters50/1014662
tcttttgt

SEQ ID NO: 155269 - DNA, 12 bp, Unknown
  misc_feature (1)..( 12): Result.004 file - promoters50/1014662
atataataaata

SEQ ID NO: 155270 - DNA, 12 bp, Unknown
  misc_feature (1)..( 12): Result.004 file - promoters50/1014662
ttattatacttc

SEQ ID NO: 155271 - DNA, 12 bp, Unknown
  misc_feature (1)..( 12): Result.004 file - promoters50/1014662
gtttaataacaa

SEQ ID NO: 155272 - DNA, 12 bp, Unknown
  misc_feature (1)..( 12): Result.004 file - promoters50/1014662
gcataaaaaata

SEQ ID NO: 155273 - DNA, 12 bp, Unknown
  misc_feature (1)..( 12): Result.004 file - promoters50/1014662
atataattatct

SEQ ID NO: 155274 - DNA, 12 bp, Unknown
  misc_feature (1)..( 12): Result.004 file - promoters50/1014662
atataacaattt

SEQ ID NO: 155275 - DNA, 12 bp, Unknown
  misc_feature (1)..( 12): Result.004 file - promoters50/1014662
atataataacat

SEQ ID NO: 155276 - DNA, 11 bp, Unknown
  misc_feature (1)..( 11): Result.004 file - promoters50/1014662
tcaatcaaaag

SEQ ID NO: 155277 - DNA, 11 bp, Unknown
  misc_feature (1)..( 11): Result.004 file - promoters50/1014662
ttgatccaaac

SEQ ID NO: 155278 - DNA, 11 bp, Unknown
  misc_feature (1)..( 11): Result.004 file - promoters50/1014662
caaatcaaatt

SEQ ID NO: 155279 - DNA, 11 bp, Unknown
  misc_feature (1)..( 11): Result.004 file - promoters50/1014662
tcaattaaaag

SEQ ID NO: 155280 - DNA, 11 bp, Unknown
  misc_feature (1)..( 11): Result.004 file - promoters50/1014662
attatcctaac

SEQ ID NO: 155281 - DNA, 11 bp, Unknown
  misc_feature (1)..( 11): Result.004 file - promoters50/1014662
cctttcaaata

SEQ ID NO: 155282 - DNA, 10 bp, Unknown
  misc_feature (1)..( 10): Result.004 file - promoters50/1014662
taaaaatgaa

SEQ ID NO: 155283 - DNA, 11 bp, Unknown
  misc_feature (1)..( 11): Result.004 file - promoters50/1014662
caaaaaaagaa

SEQ ID NO: 155284 - DNA, 11 bp, Unknown
  misc_feature (1)..( 11): Result.004 file - promoters50/1014662
ccaaaaatctt

SEQ ID NO: 155285 - DNA, 10 bp, Unknown
  misc_feature (1)..( 10): Result.004 file - promoters50/1014662
taaaaagtct

SEQ ID NO: 155286 - DNA, 11 bp, Unknown
  misc_feature (1)..( 11): Result.004 file - promoters50/1014662
cgaaaaagggt

SEQ ID NO: 155287 - DNA, 11 bp, Unknown
  misc_feature (1)..( 11): Result.004 file - promoters50/1014662
ccaagaatctg

SEQ ID NO: 155288 - DNA, 12 bp, Unknown
  misc_feature (1)..( 12): Result.004 file - promoters50/1014662
ttttatcacaag

SEQ ID NO: 155289 - DNA, 12 bp, Unknown
  misc_feature (1)..( 12): Result.004 file - promoters50/1014662
ttttgtcaacga

SEQ ID NO: 155290 - DNA, 12 bp, Unknown
  misc_feature (1)..( 12): Result.004 file - promoters50/1014662
gtataacaataa

SEQ ID NO: 155291 - DNA, 12 bp, Unknown
  misc_feature (1)..( 12): Result.004 file - promoters50/1014662
ctttatcctaag

SEQ ID NO: 155292 - DNA, 12 bp, Unknown
  misc_feature (1)..( 12): Result.004 file - promoters50/1014662
ttttgtatctaa

SEQ ID NO: 155293 - DNA, 12 bp, Unknown
  misc_feature (1)..( 12): Result.004 file - promoters50/1014662
cggtgtaaacga

SEQ ID NO: 155294 - DNA, 12 bp, Unknown
  misc_feature (1)..( 12): Result.004 file - promoters50/1014662
gggtgtaatgct

SEQ ID NO: 155295 - DNA, 14 bp, Unknown
  misc_feature (1)..( 14): Result.004 file - promoters50/1014662
actcataataaata

SEQ ID NO: 155296 - DNA, 14 bp, Unknown
  misc_feature (1)..( 14): Result.004 file - promoters50/1014662
acttataatgaatt

SEQ ID NO: 155297 - DNA, 14 bp, Unknown
  misc_feature (1)..( 14): Result.004 file - promoters50/1014662
tcatataatagtaa

SEQ ID NO: 155298 - DNA, 14 bp, Unknown
  misc_feature (1)..( 14): Result.004 file - promoters50/1014662
atttataatataat

SEQ ID NO: 155299 - DNA, 14 bp, Unknown
  misc_feature (1)..( 14): Result.004 file - promoters50/1014662
gaagatagtgaacc

SEQ ID NO: 155300 - DNA, 14 bp, Unknown
  misc_feature (1)..( 14): Result.004 file - promoters50/1014662
taaaataaggaatt

SEQ ID NO: 155301 - DNA, 12 bp, Unknown
  misc_feature (1)..( 12): Result.004 file - promoters50/1014662
tagaaattaata

SEQ ID NO: 155302 - DNA, 12 bp, Unknown
  misc_feature (1)..( 12): Result.004 file - promoters50/1014662
agataattaagt

SEQ ID NO: 155303 - DNA, 11 bp, Unknown
  misc_feature (1)..( 11): Result.004 file - promoters50/1014662
taaaatcaata

SEQ ID NO: 155304 - DNA, 11 bp, Unknown
  misc_feature (1)..( 11): Result.004 file - promoters50/1014662
tttaattatta

SEQ ID NO: 155305 - DNA, 12 bp, Unknown
  misc_feature (1)..( 12): Result.004 file - promoters50/1014662
ataacatcactt

SEQ ID NO: 155306 - DNA, 12 bp, Unknown
  misc_feature (1)..( 12): Result.004 file - promoters50/1014662
ggtacatcactg

SEQ ID NO: 155307 - DNA, 11 bp, Unknown
  misc_feature (1)..( 11): Result.004 file - promoters50/1014662
taattttgtat

SEQ ID NO: 155308 - DNA, 11 bp, Unknown
  misc_feature (1)..( 11): Result.004 file - promoters50/1014662
tgtttttgttt

SEQ ID NO: 155309 - DNA, 11 bp, Unknown
  misc_feature (1)..( 11): Result.004 file - promoters50/1014662
taaatttgttt

SEQ ID NO: 155310 - DNA, 11 bp, Unknown
  misc_feature (1)..( 11): Result.004 file - promoters50/1014662
tgactttgttg

SEQ ID NO: 155311 - DNA, 11 bp, Unknown
  misc_feature (1)..( 11): Result.004 file - promoters50/1014662
aaaatttgcta

SEQ ID NO: 155312 - DNA, 11 bp, Unknown
  misc_feature (1)..( 11): Result.004 file - promoters50/1014678
ctgatttattt

SEQ ID NO: 155313 - DNA, 8 bp, Unknown
  misc_feature (1)..( 8): Result.004 file - promoters50/1014678
aaaatcgt

SEQ ID NO: 155314 - DNA, 8 bp, Unknown
  misc_feature (1)..( 8): Result.004 file - promoters50/1014678
aaactcga

SEQ ID NO: 155315 - DNA, 8 bp, Unknown
  misc_feature (1)..( 8): Result.004 file - promoters50/1014678
gaacacga

SEQ ID NO: 155316 - DNA, 10 bp, Unknown
  misc_feature (1)..( 10): Result.004 file - promoters50/1014678
acaacacatc

SEQ ID NO: 155317 - DNA, 10 bp, Unknown
  misc_feature (1)..( 10): Result.004 file - promoters50/1014678
aaaacaaatc

SEQ ID NO: 155318 - DNA, 10 bp, Unknown
  misc_feature (1)..( 10): Result.004 file - promoters50/1014678
aaaacaaaat

SEQ ID NO: 155319 - DNA, 7 bp, Unknown
  misc_feature (1)..( 7): Result.004 file - promoters50/1014678
ttactgc

SEQ ID NO: 155320 - DNA, 7 bp, Unknown
  misc_feature (1)..( 7): Result.004 file - promoters50/1014678
ttaatgc

SEQ ID NO: 155321 - DNA, 7 bp, Unknown
  misc_feature (1)..( 7): Result.004 file - promoters50/1014681
ttaatga

SEQ ID NO: 155322 - DNA, 10 bp, Unknown
  misc_feature (1)..( 10): Result.004 file - promoters50/1014681
aattaaacat

SEQ ID NO: 155323 - DNA, 10 bp, Unknown
  misc_feature (1)..( 10): Result.004 file - promoters50/1014681
aggtaagcat

SEQ ID NO: 155324 - DNA, 10 bp, Unknown
  misc_feature (1)..( 10): Result.004 file - promoters50/1014681
aataaaacaa

SEQ ID NO: 155325 - DNA, 11 bp, Unknown
  misc_feature (1)..( 11): Result.004 file - promoters50/1014681
tagcgttgttg

SEQ ID NO: 155326 - DNA, 11 bp, Unknown
  misc_feature (1)..( 11): Result.004 file - promoters50/1014681
atatgttattg

SEQ ID NO: 155327 - DNA, 11 bp, Unknown
  misc_feature (1)..( 11): Result.004 file - promoters50/1014689
tatagttgaaa

SEQ ID NO: 155328 - DNA, 9 bp, Unknown
  misc_feature (1)..( 9): Result.004 file - promoters50/1014689
tgttcattc

SEQ ID NO: 155329 - DNA, 9 bp, Unknown
  misc_feature (1)..( 9): Result.004 file - promoters50/1014689
tcttcattt

SEQ ID NO: 155330 - DNA, 9 bp, Unknown
  misc_feature (1)..( 9): Result.004 file - promoters50/1014689
tgtacattt

SEQ ID NO: 155331 - DNA, 9 bp, Unknown
  misc_feature (1)..( 9): Result.004 file - promoters50/1014689
aaatcattt

SEQ ID NO: 155332 - DNA, 13 bp, Unknown
  misc_feature (1)..( 13): Result.004 file - promoters50/1014689
ctgagttagaagg

SEQ ID NO: 155333 - DNA, 13 bp, Unknown
  misc_feature (1)..( 13): Result.004 file - promoters50/1014689
ctgagctagtagg

SEQ ID NO: 155334 - DNA, 13 bp, Unknown
  misc_feature (1)..( 13): Result.004 file - promoters50/1014689
ctgatttataaga

SEQ ID NO: 155335 - DNA, 13 bp, Unknown
  misc_feature (1)..( 13): Result.004 file - promoters50/1014689
ctgaactaaatgt

SEQ ID NO: 155336 - DNA, 9 bp, Unknown
  misc_feature (1)..( 9): Result.004 file - promoters50/1014689
aaaaatgtt

SEQ ID NO: 155337 - DNA, 9 bp, Unknown
  misc_feature (1)..( 9): Result.004 file - promoters50/1014689
aaaaatgtt

SEQ ID NO: 155338 - DNA, 9 bp, Unknown
  misc_feature (1)..( 9): Result.004 file - promoters50/1014689
gacaatgtt

SEQ ID NO: 155339 - DNA, 9 bp, Unknown
  misc_feature (1)..( 9): Result.004 file - promoters50/1014693
acaaatgtg

SEQ ID NO: 155340 - DNA, 14 bp, Unknown
  misc_feature (1)..( 14): Result.004 file - promoters50/1014693
tttttgatagagaa

SEQ ID NO: 155341 - DNA, 14 bp, Unknown
  misc_feature (1)..( 14): Result.004 file - promoters50/1014693
ttttttataaagaa

SEQ ID NO: 155342 - DNA, 14 bp, Unknown
  misc_feature (1)..( 14): Result.004 file - promoters50/1014693
catcttaaaaaaaa

SEQ ID NO: 155343 - DNA, 14 bp, Unknown
  misc_feature (1)..( 14): Result.004 file - promoters50/1014693
gatataacaaagta

SEQ ID NO: 155344 - DNA, 14 bp, Unknown
  misc_feature (1)..( 14): Result.004 file - promoters50/1014693
ttttttagttacag

SEQ ID NO: 155345 - DNA, 14 bp, Unknown
  misc_feature (1)..( 14): Result.004 file - promoters50/1014693
tcgccaagaaatga

SEQ ID NO: 155346 - DNA, 11 bp, Unknown
  misc_feature (1)..( 11): Result.004 file - promoters50/1014693
agtgatttgtc

SEQ ID NO: 155347 - DNA, 11 bp, Unknown
  misc_feature (1)..( 11): Result.004 file - promoters50/1014693
cttgatttatc

SEQ ID NO: 155348 - DNA, 11 bp, Unknown
  misc_feature (1)..( 11): Result.004 file - promoters50/1014693
tttgagttgat

SEQ ID NO: 155349 - DNA, 11 bp, Unknown
  misc_feature (1)..( 11): Result.004 file - promoters50/1014693
cttaattatcc

SEQ ID NO: 155350 - DNA, 11 bp, Unknown
  misc_feature (1)..( 11): Result.004 file - promoters50/1014693
acggattaatc

SEQ ID NO: 155351 - DNA, 11 bp, Unknown
  misc_feature (1)..( 11): Result.004 file - promoters50/1014693
gacaagttgag

SEQ ID NO: 155352 - DNA, 17 bp, Unknown
  misc_feature (1)..( 17): Result.004 file - promoters50/1014693
gcagcttctcttggtta

SEQ ID NO: 155353 - DNA, 17 bp, Unknown
  misc_feature (1)..( 17): Result.004 file - promoters50/1014693
attacttttcttgaatc

SEQ ID NO: 155354 - DNA, 17 bp, Unknown
  misc_feature (1)..( 17): Result.004 file - promoters50/1014693
aaagctcctctctgcgc

SEQ ID NO: 155355 - DNA, 17 bp, Unknown
  misc_feature (1)..( 17): Result.004 file - promoters50/1014693
acgcgctttcttcaatc

SEQ ID NO: 155356 - DNA, 17 bp, Unknown
  misc_feature (1)..( 17): Result.004 file - promoters50/1014693
caatctaaaagcctctg

SEQ ID NO: 155357 - DNA, 17 bp, Unknown
  misc_feature (1)..( 17): Result.004 file - promoters50/1014748
tctttttttccaggttc

SEQ ID NO: 155358 - DNA, 11 bp, Unknown
  misc_feature (1)..( 11): Result.004 file - promoters50/1014748
taattaaaaca

SEQ ID NO: 155359 - DNA, 11 bp, Unknown
  misc_feature (1)..( 11): Result.004 file - promoters50/1014748
aaataaaaaca

SEQ ID NO: 155360 - DNA, 11 bp, Unknown
  misc_feature (1)..( 11): Result.004 file - promoters50/1014771
aaataatactt

SEQ ID NO: 155361 - DNA, 15 bp, Unknown
  misc_feature (1)..( 15): Result.004 file - promoters50/1014771
atttctattttgtag

SEQ ID NO: 155362 - DNA, 15 bp, Unknown
  misc_feature (1)..( 15): Result.004 file - promoters50/1014771
ttttctaaaagatta

SEQ ID NO: 155363 - DNA, 15 bp, Unknown
  misc_feature (1)..( 15): Result.004 file - promoters50/1014771
atttcaatttaatca

SEQ ID NO: 155364 - DNA, 15 bp, Unknown
  misc_feature (1)..( 15): Result.004 file - promoters50/1014771
atttttatgttttac

SEQ ID NO: 155365 - DNA, 15 bp, Unknown
  misc_feature (1)..( 15): Result.004 file - promoters50/1014771
atttgtctcaatttc

SEQ ID NO: 155366 - DNA, 15 bp, Unknown
  misc_feature (1)..( 15): Result.004 file - promoters50/1014771
caatcaatgtaatca

SEQ ID NO: 155367 - DNA, 13 bp, Unknown
  misc_feature (1)..( 13): Result.004 file - promoters50/1014771
taacaattaaaaa

SEQ ID NO: 155368 - DNA, 13 bp, Unknown
  misc_feature (1)..( 13): Result.004 file - promoters50/1014771
ctacaatttaaaa

SEQ ID NO: 155369 - DNA, 13 bp, Unknown
  misc_feature (1)..( 13): Result.004 file - promoters50/1014771
taacaacttaatt

SEQ ID NO: 155370 - DNA, 13 bp, Unknown
  misc_feature (1)..( 13): Result.004 file - promoters50/1014771
ttacaagcttctc

SEQ ID NO: 155371 - DNA, 13 bp, Unknown
  misc_feature (1)..( 13): Result.004 file - promoters50/1014771
ctataattgttct

SEQ ID NO: 155372 - DNA, 13 bp, Unknown
  misc_feature (1)..( 13): Result.004 file - promoters50/1014771
ctttaattgaacc

SEQ ID NO: 155373 - DNA, 11 bp, Unknown
  misc_feature (1)..( 11): Result.004 file - promoters50/1014771
acttaaaaatt

SEQ ID NO: 155374 - DNA, 11 bp, Unknown
  misc_feature (1)..( 11): Result.004 file - promoters50/1014771
ggctaaaaaac

SEQ ID NO: 155375 - DNA, 11 bp, Unknown
  misc_feature (1)..( 11): Result.004 file - promoters50/1014771
acttaaaaaca

SEQ ID NO: 155376 - DNA, 11 bp, Unknown
  misc_feature (1)..( 11): Result.004 file - promoters50/1014771
gttcaaaaaaa

SEQ ID NO: 155377 - DNA, 11 bp, Unknown
  misc_feature (1)..( 11): Result.004 file - promoters50/1014771
agaaaaaaaag

SEQ ID NO: 155378 - DNA, 11 bp, Unknown
  misc_feature (1)..( 11): Result.004 file - promoters50/1014771
acttaaaaagt

SEQ ID NO: 155379 - DNA, 9 bp, Unknown
  misc_feature (1)..( 9): Result.004 file - promoters50/1014771
tttttctta

SEQ ID NO: 155380 - DNA, 9 bp, Unknown
  misc_feature (1)..( 9): Result.004 file - promoters50/1014771
gtgttctta

SEQ ID NO: 155381 - DNA, 9 bp, Unknown
  misc_feature (1)..( 9): Result.004 file - promoters50/1014771
tttttcttc

SEQ ID NO: 155382 - DNA, 9 bp, Unknown
  misc_feature (1)..( 9): Result.004 file - promoters50/1014771
gatttattc

SEQ ID NO: 155383 - DNA, 9 bp, Unknown
  misc_feature (1)..( 9): Result.004 file - promoters50/1014771
tatttataa

SEQ ID NO: 155384 - DNA, 9 bp, Unknown
  misc_feature (1)..( 9): Result.004 file - promoters50/1014771
ttttttttt

SEQ ID NO: 155385 - DNA, 13 bp, Unknown
  misc_feature (1)..( 13): Result.004 file - promoters50/1014771
actttatttttgg

SEQ ID NO: 155386 - DNA, 13 bp, Unknown
  misc_feature (1)..( 13): Result.004 file - promoters50/1014771
ggtttgtttactt

SEQ ID NO: 155387 - DNA, 13 bp, Unknown
  misc_feature (1)..( 13): Result.004 file - promoters50/1014771
tctttttttttgg

SEQ ID NO: 155388 - DNA, 13 bp, Unknown
  misc_feature (1)..( 13): Result.004 file - promoters50/1014771
gatttggttttct

SEQ ID NO: 155389 - DNA, 13 bp, Unknown
  misc_feature (1)..( 13): Result.004 file - promoters50/1014771
ggttgattttgaa

SEQ ID NO: 155390 - DNA, 13 bp, Unknown
  misc_feature (1)..( 13): Result.004 file - promoters50/1014771
aattcttttgtaa

SEQ ID NO: 155391 - DNA, 11 bp, Unknown
  misc_feature (1)..( 11): Result.004 file - promoters50/1014771
gtcttgaattt

SEQ ID NO: 155392 - DNA, 11 bp, Unknown
  misc_feature (1)..( 11): Result.004 file - promoters50/1014771
tactttaattg

SEQ ID NO: 155393 - DNA, 11 bp, Unknown
  misc_feature (1)..( 11): Result.004 file - promoters50/1014771
cggttgatttt

SEQ ID NO: 155394 - DNA, 11 bp, Unknown
  misc_feature (1)..( 11): Result.004 file - promoters50/1014771
gatttgatttg

SEQ ID NO: 155395 - DNA, 11 bp, Unknown
  misc_feature (1)..( 11): Result.004 file - promoters50/1014771
tacgttacaag

SEQ ID NO: 155396 - DNA, 11 bp, Unknown
  misc_feature (1)..( 11): Result.004 file - promoters50/1014771
tcctataattg

SEQ ID NO: 155397 - DNA, 8 bp, Unknown
  misc_feature (1)..( 8): Result.004 file - promoters50/1014771
aagaaagg

SEQ ID NO: 155398 - DNA, 8 bp, Unknown
  misc_feature (1)..( 8): Result.004 file - promoters50/1014771
aagaaagc

SEQ ID NO: 155399 - DNA, 8 bp, Unknown
  misc_feature (1)..( 8): Result.004 file - promoters50/1014771
aaaaaaaa

SEQ ID NO: 155400 - DNA, 8 bp, Unknown
  misc_feature (1)..( 8): Result.004 file - promoters50/1014771
aaaaaacc

SEQ ID NO: 155401 - DNA, 8 bp, Unknown
  misc_feature (1)..( 8): Result.004 file - promoters50/1014771
aaaaaagt

SEQ ID NO: 155402 - DNA, 8 bp, Unknown
  misc_feature (1)..( 8): Result.004 file - promoters50/1014778
taaaaagt

SEQ ID NO: 155403 - DNA, 10 bp, Unknown
  misc_feature (1)..( 10): Result.004 file - promoters50/1014778
ggaatcgaag

SEQ ID NO: 155404 - DNA, 10 bp, Unknown
  misc_feature (1)..( 10): Result.004 file - promoters50/1014778
gctttcgaag

SEQ ID NO: 155405 - DNA, 10 bp, Unknown
  misc_feature (1)..( 10): Result.004 file - promoters50/1014778
aaaattgaaa

SEQ ID NO: 155406 - DNA, 10 bp, Unknown
  misc_feature (1)..( 10): Result.004 file - promoters50/1014778
aatttcgaat

SEQ ID NO: 155407 - DNA, 10 bp, Unknown
  misc_feature (1)..( 10): Result.004 file - promoters50/1014778
caaaatgaaa

SEQ ID NO: 155408 - DNA, 10 bp, Unknown
  misc_feature (1)..( 10): Result.004 file - promoters50/1014778
aaatttgatc

SEQ ID NO: 155409 - DNA, 12 bp, Unknown
  misc_feature (1)..( 12): Result.004 file - promoters50/1014778
ggcttatgaatc

SEQ ID NO: 155410 - DNA, 12 bp, Unknown
  misc_feature (1)..( 12): Result.004 file - promoters50/1014778
ggcttttgacct

SEQ ID NO: 155411 - DNA, 12 bp, Unknown
  misc_feature (1)..( 12): Result.004 file - promoters50/1014778
agattttgattc

SEQ ID NO: 155412 - DNA, 12 bp, Unknown
  misc_feature (1)..( 12): Result.004 file - promoters50/1014778
aggttttgaaag

SEQ ID NO: 155413 - DNA, 12 bp, Unknown
  misc_feature (1)..( 12): Result.004 file - promoters50/1014778
tatttttcattc

SEQ ID NO: 155414 - DNA, 12 bp, Unknown
  misc_feature (1)..( 12): Result.004 file - promoters50/1014815
tcattattctgt

SEQ ID NO: 155415 - DNA, 15 bp, Unknown
  misc_feature (1)..( 15): Result.004 file - promoters50/1014815
tagtgaagcatttaa

SEQ ID NO: 155416 - DNA, 15 bp, Unknown
  misc_feature (1)..( 15): Result.004 file - promoters50/1014815
tttgctagcttttaa

SEQ ID NO: 155417 - DNA, 15 bp, Unknown
  misc_feature (1)..( 15): Result.004 file - promoters50/1014815
gctaagcccatttaa

SEQ ID NO: 155418 - DNA, 15 bp, Unknown
  misc_feature (1)..( 15): Result.004 file - promoters50/1014815
tttcctatctttctc

SEQ ID NO: 155419 - DNA, 15 bp, Unknown
  misc_feature (1)..( 15): Result.004 file - promoters50/1014815
tttatgatcttgtaa

SEQ ID NO: 155420 - DNA, 15 bp, Unknown
  misc_feature (1)..( 15): Result.004 file - promoters50/1014815
tataataggttttta

SEQ ID NO: 155421 - DNA, 9 bp, Unknown
  misc_feature (1)..( 9): Result.004 file - promoters50/1014815
tctttaaac

SEQ ID NO: 155422 - DNA, 9 bp, Unknown
  misc_feature (1)..( 9): Result.004 file - promoters50/1014815
aatttaaat

SEQ ID NO: 155423 - DNA, 9 bp, Unknown
  misc_feature (1)..( 9): Result.004 file - promoters50/1014815
agtttaaat

SEQ ID NO: 155424 - DNA, 9 bp, Unknown
  misc_feature (1)..( 9): Result.004 file - promoters50/1014815
aagttaaat

SEQ ID NO: 155425 - DNA, 9 bp, Unknown
  misc_feature (1)..( 9): Result.004 file - promoters50/1014815
cattgaaag

SEQ ID NO: 155426 - DNA, 9 bp, Unknown
  misc_feature (1)..( 9): Result.004 file - promoters50/1014815
aattcaaaa

SEQ ID NO: 155427 - DNA, 9 bp, Unknown
  misc_feature (1)..( 9): Result.004 file - promoters50/1014815
aaaaaaaga

SEQ ID NO: 155428 - DNA, 9 bp, Unknown
  misc_feature (1)..( 9): Result.004 file - promoters50/1014815
taaaagaga

SEQ ID NO: 155429 - DNA, 10 bp, Unknown
  misc_feature (1)..( 10): Result.004 file - promoters50/1014815
aaaaacaagg

SEQ ID NO: 155430 - DNA, 10 bp, Unknown
  misc_feature (1)..( 10): Result.004 file - promoters50/1014815
tcaaacaata

SEQ ID NO: 155431 - DNA, 10 bp, Unknown
  misc_feature (1)..( 10): Result.004 file - promoters50/1014815
taaaagtaaa

SEQ ID NO: 155432 - DNA, 10 bp, Unknown
  misc_feature (1)..( 10): Result.004 file - promoters50/1014823
taaatgagta

SEQ ID NO: 155433 - DNA, 10 bp, Unknown
  misc_feature (1)..( 10): Result.004 file - promoters50/1014823
gacaaaaatt

SEQ ID NO: 155434 - DNA, 10 bp, Unknown
  misc_feature (1)..( 10): Result.004 file - promoters50/1014823
gacacaaatt

SEQ ID NO: 155435 - DNA, 10 bp, Unknown
  misc_feature (1)..( 10): Result.004 file - promoters50/1014823
aacaagaata

SEQ ID NO: 155436 - DNA, 10 bp, Unknown
  misc_feature (1)..( 10): Result.004 file - promoters50/1014823
cacagaaagc

SEQ ID NO: 155437 - DNA, 12 bp, Unknown
  misc_feature (1)..( 12): Result.004 file - promoters50/1014823
gagcaaagaaga

SEQ ID NO: 155438 - DNA, 12 bp, Unknown
  misc_feature (1)..( 12): Result.004 file - promoters50/1014823
gagcaaatccca

SEQ ID NO: 155439 - DNA, 12 bp, Unknown
  misc_feature (1)..( 12): Result.004 file - promoters50/1014823
aagcaaaaccca

SEQ ID NO: 155440 - DNA, 8 bp, Unknown
  misc_feature (1)..( 8): Result.004 file - promoters50/1014823
ttattttt

SEQ ID NO: 155441 - DNA, 8 bp, Unknown
  misc_feature (1)..( 8): Result.004 file - promoters50/1014823
ttattttg

SEQ ID NO: 155442 - DNA, 8 bp, Unknown
  misc_feature (1)..( 8): Result.004 file - promoters50/1014823
tcattttt

SEQ ID NO: 155443 - DNA, 9 bp, Unknown
  misc_feature (1)..( 9): Result.004 file - promoters50/1014823
tttaatttg

SEQ ID NO: 155444 - DNA, 9 bp, Unknown
  misc_feature (1)..( 9): Result.004 file - promoters50/1014823
cttaattat

SEQ ID NO: 155445 - DNA, 10 bp, Unknown
  misc_feature (1)..( 10): Result.004 file - promoters50/1014823
tttaaatttg

SEQ ID NO: 155446 - DNA, 9 bp, Unknown
  misc_feature (1)..( 9): Result.004 file - promoters50/1014823
gtttttgat

SEQ ID NO: 155447 - DNA, 9 bp, Unknown
  misc_feature (1)..( 9): Result.004 file - promoters50/1014823
tatttggat

SEQ ID NO: 155448 - DNA, 9 bp, Unknown
  misc_feature (1)..( 9): Result.004 file - promoters50/1014823
gtttttgac

SEQ ID NO: 155449 - DNA, 9 bp, Unknown
  misc_feature (1)..( 9): Result.004 file - promoters50/1014823
aattttgat

SEQ ID NO: 155450 - DNA, 8 bp, Unknown
  misc_feature (1)..( 8): Result.004 file - promoters50/1014823
ttaaaata

SEQ ID NO: 155451 - DNA, 8 bp, Unknown
  misc_feature (1)..( 8): Result.004 file - promoters50/1014823
ttagaatt

SEQ ID NO: 155452 - DNA, 8 bp, Unknown
  misc_feature (1)..( 8): Result.004 file - promoters50/1014823
ttataata

SEQ ID NO: 155453 - DNA, 10 bp, Unknown
  misc_feature (1)..( 10): Result.004 file - promoters50/1014823
agtttaatta

SEQ ID NO: 155454 - DNA, 10 bp, Unknown
  misc_feature (1)..( 10): Result.004 file - promoters50/1014823
attttcatta

SEQ ID NO: 155455 - DNA, 10 bp, Unknown
  misc_feature (1)..( 10): Result.004 file - promoters50/1014823
agtataatag

SEQ ID NO: 155456 - DNA, 9 bp, Unknown
  misc_feature (1)..( 9): Result.004 file - promoters50/1014823
ttctactaa

SEQ ID NO: 155457 - DNA, 9 bp, Unknown
  misc_feature (1)..( 9): Result.004 file - promoters50/1014823
ttcgacttg

SEQ ID NO: 155458 - DNA, 9 bp, Unknown
  misc_feature (1)..( 9): Result.004 file - promoters50/1014823
accgatttg

SEQ ID NO: 155459 - DNA, 8 bp, Unknown
  misc_feature (1)..( 8): Result.004 file - promoters50/1014823
acattttt

SEQ ID NO: 155460 - DNA, 8 bp, Unknown
  misc_feature (1)..( 8): Result.004 file - promoters50/1014823
acaatttt

SEQ ID NO: 155461 - DNA, 8 bp, Unknown
  misc_feature (1)..( 8): Result.004 file - promoters50/1014895
taaatttt

SEQ ID NO: 155462 - DNA, 12 bp, Unknown
  misc_feature (1)..( 12): Result.004 file - promoters50/1014895
taatagataact

SEQ ID NO: 155463 - DNA, 12 bp, Unknown
  misc_feature (1)..( 12): Result.004 file - promoters50/1014895
caatggatagtg

SEQ ID NO: 155464 - DNA, 12 bp, Unknown
  misc_feature (1)..( 12): Result.004 file - promoters50/1014895
gaatagatctgt

SEQ ID NO: 155465 - DNA, 12 bp, Unknown
  misc_feature (1)..( 12): Result.004 file - promoters50/1014895
accgggaaagtg

SEQ ID NO: 155466 - DNA, 12 bp, Unknown
  misc_feature (1)..( 12): Result.004 file - promoters50/1014907
aaattgtgagtt

SEQ ID NO: 155467 - DNA, 9 bp, Unknown
  misc_feature (1)..( 9): Result.004 file - promoters50/1014907
attttctag

SEQ ID NO: 155468 - DNA, 9 bp, Unknown
  misc_feature (1)..( 9): Result.004 file - promoters50/1014907
tatttttag

SEQ ID NO: 155469 - DNA, 9 bp, Unknown
  misc_feature (1)..( 9): Result.004 file - promoters50/1014907
cttttctaa

SEQ ID NO: 155470 - DNA, 9 bp, Unknown
  misc_feature (1)..( 9): Result.004 file - promoters50/1014907
tatatttac

SEQ ID NO: 155471 - DNA, 7 bp, Unknown
  misc_feature (1)..( 7): Result.004 file - promoters50/1014907
tatttta

SEQ ID NO: 155472 - DNA, 7 bp, Unknown
  misc_feature (1)..( 7): Result.004 file - promoters50/1014907
tatttta

SEQ ID NO: 155473 - DNA, 8 bp, Unknown
  misc_feature (1)..( 8): Result.004 file - promoters50/1014907
cattcttt

SEQ ID NO: 155474 - DNA, 8 bp, Unknown
  misc_feature (1)..( 8): Result.004 file - promoters50/1014907
aattatat

SEQ ID NO: 155475 - DNA, 9 bp, Unknown
  misc_feature (1)..( 9): Result.004 file - promoters50/1014907
catagtcca

SEQ ID NO: 155476 - DNA, 9 bp, Unknown
  misc_feature (1)..( 9): Result.004 file - promoters50/1014907
aataatcct

SEQ ID NO: 155477 - DNA, 9 bp, Unknown
  misc_feature (1)..( 9): Result.004 file - promoters50/1014907
tccaatcct

SEQ ID NO: 155478 - DNA, 9 bp, Unknown
  misc_feature (1)..( 9): Result.004 file - promoters50/1014907
aataatctc

SEQ ID NO: 155479 - DNA, 9 bp, Unknown
  misc_feature (1)..( 9): Result.004 file - promoters50/1014907
aaaatgatc

SEQ ID NO: 155480 - DNA, 9 bp, Unknown
  misc_feature (1)..( 9): Result.004 file - promoters50/1014907
aaaatgcga

SEQ ID NO: 155481 - DNA, 9 bp, Unknown
  misc_feature (1)..( 9): Result.004 file - promoters50/1014907
aaaataatc

SEQ ID NO: 155482 - DNA, 9 bp, Unknown
  misc_feature (1)..( 9): Result.004 file - promoters50/1014926
ttaataatc

SEQ ID NO: 155483 - DNA, 7 bp, Unknown
  misc_feature (1)..( 7): Result.004 file - promoters50/1014926
ccttcct

SEQ ID NO: 155484 - DNA, 7 bp, Unknown
  misc_feature (1)..( 7): Result.004 file - promoters50/1014926
ccttccc

SEQ ID NO: 155485 - DNA, 7 bp, Unknown
  misc_feature (1)..( 7): Result.004 file - promoters50/1014926
ctttctt

SEQ ID NO: 155486 - DNA, 12 bp, Unknown
  misc_feature (1)..( 12): Result.004 file - promoters50/1014926
ggttgttatagg

SEQ ID NO: 155487 - DNA, 12 bp, Unknown
  misc_feature (1)..( 12): Result.004 file - promoters50/1014926
cattgttaaagg

SEQ ID NO: 155488 - DNA, 12 bp, Unknown
  misc_feature (1)..( 12): Result.004 file - promoters50/1014926
ggttgttgttaa

SEQ ID NO: 155489 - DNA, 12 bp, Unknown
  misc_feature (1)..( 12): Result.004 file - promoters50/1014926
tatttttattta

SEQ ID NO: 155490 - DNA, 8 bp, Unknown
  misc_feature (1)..( 8): Result.004 file - promoters50/1014926
taataaat

SEQ ID NO: 155491 - DNA, 8 bp, Unknown
  misc_feature (1)..( 8): Result.004 file - promoters50/1014926
taagaaat

SEQ ID NO: 155492 - DNA, 8 bp, Unknown
  misc_feature (1)..( 8): Result.004 file - promoters50/1014926
aaataaaa

SEQ ID NO: 155493 - DNA, 7 bp, Unknown
  misc_feature (1)..( 7): Result.004 file - promoters50/1014926
aatgggc

SEQ ID NO: 155494 - DNA, 7 bp, Unknown
  misc_feature (1)..( 7): Result.004 file - promoters50/1014926
gatgggc

SEQ ID NO: 155495 - DNA, 7 bp, Unknown
  misc_feature (1)..( 7): Result.004 file - promoters50/1014926
gatgggg

SEQ ID NO: 155496 - DNA, 8 bp, Unknown
  misc_feature (1)..( 8): Result.004 file - promoters50/1014926
aaataaat

SEQ ID NO: 155497 - DNA, 8 bp, Unknown
  misc_feature (1)..( 8): Result.004 file - promoters50/1014926
aaataagg

SEQ ID NO: 155498 - DNA, 8 bp, Unknown
  misc_feature (1)..( 8): Result.004 file - promoters50/1014926
aaatgagg

SEQ ID NO: 155499 - DNA, 6 bp, Unknown
  misc_feature (1)..( 6): Result.004 file - promoters50/1014926
aagttg

SEQ ID NO: 155500 - DNA, 6 bp, Unknown
  misc_feature (1)..( 6): Result.004 file - promoters50/1014926
aagttg

SEQ ID NO: 155501 - DNA, 6 bp, Unknown
  misc_feature (1)..( 6): Result.004 file - promoters50/1014926
aagttg

SEQ ID NO: 155502 - DNA, 11 bp, Unknown
  misc_feature (1)..( 11): Result.004 file - promoters50/1014926
aaacctaaata

SEQ ID NO: 155503 - DNA, 11 bp, Unknown
  misc_feature (1)..( 11): Result.004 file - promoters50/1014926
ccgcctcaatc

SEQ ID NO: 155504 - DNA, 11 bp, Unknown
  misc_feature (1)..( 11): Result.004 file - promoters50/1014981
aaatctaaata

SEQ ID NO: 155505 - DNA, 8 bp, Unknown
  misc_feature (1)..( 8): Result.004 file - promoters50/1014981
ggaataaa

SEQ ID NO: 155506 - DNA, 8 bp, Unknown
  misc_feature (1)..( 8): Result.004 file - promoters50/1014981
ggaacaaa

SEQ ID NO: 155507 - DNA, 8 bp, Unknown
  misc_feature (1)..( 8): Result.004 file - promoters50/1014989
tgaataat

SEQ ID NO: 155508 - DNA, 8 bp, Unknown
  misc_feature (1)..( 8): Result.004 file - promoters50/1014989
ttttcaaa

SEQ ID NO: 155509 - DNA, 8 bp, Unknown
  misc_feature (1)..( 8): Result.004 file - promoters50/1014989
ttttgaaa

SEQ ID NO: 155510 - DNA, 8 bp, Unknown
  misc_feature (1)..( 8): Result.004 file - promoters50/1014989
atttaaaa

SEQ ID NO: 155511 - DNA, 8 bp, Unknown
  misc_feature (1)..( 8): Result.004 file - promoters50/1014989
ttttgatg

SEQ ID NO: 155512 - DNA, 10 bp, Unknown
  misc_feature (1)..( 10): Result.004 file - promoters50/1014989
caacttattt

SEQ ID NO: 155513 - DNA, 10 bp, Unknown
  misc_feature (1)..( 10): Result.004 file - promoters50/1014989
taacttattg

SEQ ID NO: 155514 - DNA, 10 bp, Unknown
  misc_feature (1)..( 10): Result.004 file - promoters50/1014989
caactaattt

SEQ ID NO: 155515 - DNA, 10 bp, Unknown
  misc_feature (1)..( 10): Result.004 file - promoters50/1014989
caacaaatca

SEQ ID NO: 155516 - DNA, 10 bp, Unknown
  misc_feature (1)..( 10): Result.004 file - promoters50/1014989
acattcaatg

SEQ ID NO: 155517 - DNA, 10 bp, Unknown
  misc_feature (1)..( 10): Result.004 file - promoters50/1014989
aaatttaata

SEQ ID NO: 155518 - DNA, 10 bp, Unknown
  misc_feature (1)..( 10): Result.004 file - promoters50/1014989
acatacaata

SEQ ID NO: 155519 - DNA, 10 bp, Unknown
  misc_feature (1)..( 10): Result.004 file - promoters50/1014989
cattttgata

SEQ ID NO: 155520 - DNA, 8 bp, Unknown
  misc_feature (1)..( 8): Result.004 file - promoters50/1014989
aatttttt

SEQ ID NO: 155521 - DNA, 8 bp, Unknown
  misc_feature (1)..( 8): Result.004 file - promoters50/1014989
aatattta

SEQ ID NO: 155522 - DNA, 7 bp, Unknown
  misc_feature (1)..( 7): Result.004 file - promoters50/1014989
atatttc

SEQ ID NO: 155523 - DNA, 8 bp, Unknown
  misc_feature (1)..( 8): Result.004 file - promoters50/1014989
cgtatttc

SEQ ID NO: 155524 - DNA, 7 bp, Unknown
  misc_feature (1)..( 7): Result.004 file - promoters50/1014989
atatttt

SEQ ID NO: 155525 - DNA, 10 bp, Unknown
  misc_feature (1)..( 10): Result.004 file - promoters50/1014989
acatgtatta

SEQ ID NO: 155526 - DNA, 10 bp, Unknown
  misc_feature (1)..( 10): Result.004 file - promoters50/1014989
acatgttagt

SEQ ID NO: 155527 - DNA, 10 bp, Unknown
  misc_feature (1)..( 10): Result.004 file - promoters50/1014989
tcatattaaa

SEQ ID NO: 155528 - DNA, 10 bp, Unknown
  misc_feature (1)..( 10): Result.004 file - promoters50/1014989
aattattaaa

SEQ ID NO: 155529 - DNA, 10 bp, Unknown
  misc_feature (1)..( 10): Result.004 file - promoters50/1014989
tcttattaca

SEQ ID NO: 155530 - DNA, 7 bp, Unknown
  misc_feature (1)..( 7): Result.004 file - promoters50/1014989
atatttc

SEQ ID NO: 155531 - DNA, 7 bp, Unknown
  misc_feature (1)..( 7): Result.004 file - promoters50/1014989
atatttt

SEQ ID NO: 155532 - DNA, 7 bp, Unknown
  misc_feature (1)..( 7): Result.004 file - promoters50/1014989
atattta

SEQ ID NO: 155533 - DNA, 7 bp, Unknown
  misc_feature (1)..( 7): Result.004 file - promoters50/1015014
gtatttc

SEQ ID NO: 155534 - DNA, 14 bp, Unknown
  misc_feature (1)..( 14): Result.004 file - promoters50/1015014
ggataaattgcata

SEQ ID NO: 155535 - DNA, 14 bp, Unknown
  misc_feature (1)..( 14): Result.004 file - promoters50/1015014
atgtaaatttatgg

SEQ ID NO: 155536 - DNA, 15 bp, Unknown
  misc_feature (1)..( 15): Result.004 file - promoters50/1015014
tgttaatatatagaa

SEQ ID NO: 155537 - DNA, 15 bp, Unknown
  misc_feature (1)..( 15): Result.004 file - promoters50/1015033
tatatatatatatat

SEQ ID NO: 155538 - DNA, 13 bp, Unknown
  misc_feature (1)..( 13): Result.004 file - promoters50/1015033
ttattaaaacctt

SEQ ID NO: 155539 - DNA, 13 bp, Unknown
  misc_feature (1)..( 13): Result.004 file - promoters50/1015033
ggggtaaaaccgg

SEQ ID NO: 155540 - DNA, 13 bp, Unknown
  misc_feature (1)..( 13): Result.004 file - promoters50/1015064
ttaataaaaactt

SEQ ID NO: 155541 - DNA, 13 bp, Unknown
  misc_feature (1)..( 13): Result.004 file - promoters50/1015064
tagttgattcgtt

SEQ ID NO: 155542 - DNA, 13 bp, Unknown
  misc_feature (1)..( 13): Result.004 file - promoters50/1015064
atttttatttgtt

SEQ ID NO: 155543 - DNA, 13 bp, Unknown
  misc_feature (1)..( 13): Result.004 file - promoters50/1015064
tagtttattcgag

SEQ ID NO: 155544 - DNA, 14 bp, Unknown
  misc_feature (1)..( 14): Result.004 file - promoters50/1015064
tgaaatgtttagtt

SEQ ID NO: 155545 - DNA, 8 bp, Unknown
  misc_feature (1)..( 8): Result.004 file - promoters50/1015064
tattaatg

SEQ ID NO: 155546 - DNA, 8 bp, Unknown
  misc_feature (1)..( 8): Result.004 file - promoters50/1015064
tattaata

SEQ ID NO: 155547 - DNA, 8 bp, Unknown
  misc_feature (1)..( 8): Result.004 file - promoters50/1015064
agttaatg

SEQ ID NO: 155548 - DNA, 8 bp, Unknown
  misc_feature (1)..( 8): Result.004 file - promoters50/1015064
ggttaatt

SEQ ID NO: 155549 - DNA, 7 bp, Unknown
  misc_feature (1)..( 7): Result.004 file - promoters50/1015064
aatatta

SEQ ID NO: 155550 - DNA, 7 bp, Unknown
  misc_feature (1)..( 7): Result.004 file - promoters50/1015064
aatattt

SEQ ID NO: 155551 - DNA, 7 bp, Unknown
  misc_feature (1)..( 7): Result.004 file - promoters50/1015064
aatgttt

SEQ ID NO: 155552 - DNA, 7 bp, Unknown
  misc_feature (1)..( 7): Result.004 file - promoters50/1015064
aatgttt

SEQ ID NO: 155553 - DNA, 8 bp, Unknown
  misc_feature (1)..( 8): Result.004 file - promoters50/1015064
tttagtgg

SEQ ID NO: 155554 - DNA, 8 bp, Unknown
  misc_feature (1)..( 8): Result.004 file - promoters50/1015064
tttagttt

SEQ ID NO: 155555 - DNA, 8 bp, Unknown
  misc_feature (1)..( 8): Result.004 file - promoters50/1015064
tttagtta

SEQ ID NO: 155556 - DNA, 8 bp, Unknown
  misc_feature (1)..( 8): Result.004 file - promoters50/1015064
cttatttt

SEQ ID NO: 155557 - DNA, 10 bp, Unknown
  misc_feature (1)..( 10): Result.004 file - promoters50/1015064
tgaagccaaa

SEQ ID NO: 155558 - DNA, 10 bp, Unknown
  misc_feature (1)..( 10): Result.004 file - promoters50/1015064
tgaaaccaac

SEQ ID NO: 155559 - DNA, 10 bp, Unknown
  misc_feature (1)..( 10): Result.004 file - promoters50/1015064
aagaacaaac

SEQ ID NO: 155560 - DNA, 7 bp, Unknown
  misc_feature (1)..( 7): Result.004 file - promoters50/1015064
tttcgat

SEQ ID NO: 155561 - DNA, 7 bp, Unknown
  misc_feature (1)..( 7): Result.004 file - promoters50/1015064
ttttgat

SEQ ID NO: 155562 - DNA, 7 bp, Unknown
  misc_feature (1)..( 7): Result.004 file - promoters50/1015064
ttttgat

SEQ ID NO: 155563 - DNA, 9 bp, Unknown
  misc_feature (1)..( 9): Result.004 file - promoters50/1015064
aatttattt

SEQ ID NO: 155564 - DNA, 9 bp, Unknown
  misc_feature (1)..( 9): Result.004 file - promoters50/1015064
aatatattt

SEQ ID NO: 155565 - DNA, 9 bp, Unknown
  misc_feature (1)..( 9): Result.004 file - promoters50/1015064
aatatattt

SEQ ID NO: 155566 - DNA, 11 bp, Unknown
  misc_feature (1)..( 11): Result.004 file - promoters50/1015064
tacgtaacatg

SEQ ID NO: 155567 - DNA, 11 bp, Unknown
  misc_feature (1)..( 11): Result.004 file - promoters50/1015064
tacgttacaat

SEQ ID NO: 155568 - DNA, 11 bp, Unknown
  misc_feature (1)..( 11): Result.004 file - promoters50/1015092
gtattaatatg

SEQ ID NO: 155569 - DNA, 9 bp, Unknown
  misc_feature (1)..( 9): Result.004 file - promoters50/1015092
ggtctaaat

SEQ ID NO: 155570 - DNA, 9 bp, Unknown
  misc_feature (1)..( 9): Result.004 file - promoters50/1015092
tgtcgaaaa

SEQ ID NO: 155571 - DNA, 10 bp, Unknown
  misc_feature (1)..( 10): Result.004 file - promoters50/1015092
tgtcgagaat

SEQ ID NO: 155572 - DNA, 10 bp, Unknown
  misc_feature (1)..( 10): Result.004 file - promoters50/1015116
tgtcaagatg

SEQ ID NO: 155573 - DNA, 8 bp, Unknown
  misc_feature (1)..( 8): Result.004 file - promoters50/1015116
atttatct

SEQ ID NO: 155574 - DNA, 8 bp, Unknown
  misc_feature (1)..( 8): Result.004 file - promoters50/1015116
atttgtct

SEQ ID NO: 155575 - DNA, 8 bp, Unknown
  misc_feature (1)..( 8): Result.004 file - promoters50/1015116
ttttgtca

SEQ ID NO: 155576 - DNA, 8 bp, Unknown
  misc_feature (1)..( 8): Result.004 file - promoters50/1015116
ttttgttg

SEQ ID NO: 155577 - DNA, 7 bp, Unknown
  misc_feature (1)..( 7): Result.004 file - promoters50/1015116
ttctttg

SEQ ID NO: 155578 - DNA, 7 bp, Unknown
  misc_feature (1)..( 7): Result.004 file - promoters50/1015116
ctctttg

SEQ ID NO: 155579 - DNA, 7 bp, Unknown
  misc_feature (1)..( 7): Result.004 file - promoters50/1015116
ttcattg

SEQ ID NO: 155580 - DNA, 9 bp, Unknown
  misc_feature (1)..( 9): Result.004 file - promoters50/1015116
aaatatata

SEQ ID NO: 155581 - DNA, 9 bp, Unknown
  misc_feature (1)..( 9): Result.004 file - promoters50/1015116
aaagatatg

SEQ ID NO: 155582 - DNA, 9 bp, Unknown
  misc_feature (1)..( 9): Result.004 file - promoters50/1015116
gtatttatt

SEQ ID NO: 155583 - DNA, 8 bp, Unknown
  misc_feature (1)..( 8): Result.004 file - promoters50/1015116
gtttgttg

SEQ ID NO: 155584 - DNA, 8 bp, Unknown
  misc_feature (1)..( 8): Result.004 file - promoters50/1015116
ttttgttg

SEQ ID NO: 155585 - DNA, 8 bp, Unknown
  misc_feature (1)..( 8): Result.004 file - promoters50/1015116
ttttgttt

SEQ ID NO: 155586 - DNA, 9 bp, Unknown
  misc_feature (1)..( 9): Result.004 file - promoters50/1015116
tctttgctt

SEQ ID NO: 155587 - DNA, 9 bp, Unknown
  misc_feature (1)..( 9): Result.004 file - promoters50/1015116
aatttactt

SEQ ID NO: 155588 - DNA, 9 bp, Unknown
  misc_feature (1)..( 9): Result.004 file - promoters50/1015116
aatatacta

SEQ ID NO: 155589 - DNA, 9 bp, Unknown
  misc_feature (1)..( 9): Result.004 file - promoters50/1015116
tttttattt

SEQ ID NO: 155590 - DNA, 9 bp, Unknown
  misc_feature (1)..( 9): Result.004 file - promoters50/1015116
tttttgttt

SEQ ID NO: 155591 - DNA, 9 bp, Unknown
  misc_feature (1)..( 9): Result.004 file - promoters50/1015167
attttgttg

SEQ ID NO: 155592 - DNA, 8 bp, Unknown
  misc_feature (1)..( 8): Result.004 file - promoters50/1015167
gaaacaat

SEQ ID NO: 155593 - DNA, 8 bp, Unknown
  misc_feature (1)..( 8): Result.004 file - promoters50/1015167
gaaaaaat

SEQ ID NO: 155594 - DNA, 8 bp, Unknown
  misc_feature (1)..( 8): Result.004 file - promoters50/1015167
gaaagaat

SEQ ID NO: 155595 - DNA, 8 bp, Unknown
  misc_feature (1)..( 8): Result.004 file - promoters50/1015167
tgaaatca

SEQ ID NO: 155596 - DNA, 8 bp, Unknown
  misc_feature (1)..( 8): Result.004 file - promoters50/1015167
tgagatca

SEQ ID NO: 155597 - DNA, 8 bp, Unknown
  misc_feature (1)..( 8): Result.004 file - promoters50/1015179
tgaaatgt

SEQ ID NO: 155598 - DNA, 12 bp, Unknown
  misc_feature (1)..( 12): Result.004 file - promoters50/1015179
aaactcttataa

SEQ ID NO: 155599 - DNA, 12 bp, Unknown
  misc_feature (1)..( 12): Result.004 file - promoters50/1015179
atactctttatc

SEQ ID NO: 155600 - DNA, 12 bp, Unknown
  misc_feature (1)..( 12): Result.004 file - promoters50/1015179
aaattcttataa

SEQ ID NO: 155601 - DNA, 12 bp, Unknown
  misc_feature (1)..( 12): Result.004 file - promoters50/1015179
tcatttttaaat

SEQ ID NO: 155602 - DNA, 12 bp, Unknown
  misc_feature (1)..( 12): Result.004 file - promoters50/1015179
aaaatcatgttt

SEQ ID NO: 155603 - DNA, 13 bp, Unknown
  misc_feature (1)..( 13): Result.004 file - promoters50/1015179
aaacttcaaaaac

SEQ ID NO: 155604 - DNA, 13 bp, Unknown
  misc_feature (1)..( 13): Result.004 file - promoters50/1015179
tatcttcaattta

SEQ ID NO: 155605 - DNA, 13 bp, Unknown
  misc_feature (1)..( 13): Result.004 file - promoters50/1015179
ccatttcattttt

SEQ ID NO: 155606 - DNA, 13 bp, Unknown
  misc_feature (1)..( 13): Result.004 file - promoters50/1015179
attcttataacaa

SEQ ID NO: 155607 - DNA, 13 bp, Unknown
  misc_feature (1)..( 13): Result.004 file - promoters50/1015179
caaaatcatgttt

SEQ ID NO: 155608 - DNA, 12 bp, Unknown
  misc_feature (1)..( 12): Result.004 file - promoters50/1015179
caacagaacaaa

SEQ ID NO: 155609 - DNA, 12 bp, Unknown
  misc_feature (1)..( 12): Result.004 file - promoters50/1015179
aaacagagctaa

SEQ ID NO: 155610 - DNA, 12 bp, Unknown
  misc_feature (1)..( 12): Result.004 file - promoters50/1015179
ttacatagccca

SEQ ID NO: 155611 - DNA, 12 bp, Unknown
  misc_feature (1)..( 12): Result.004 file - promoters50/1015179
gataataggcca

SEQ ID NO: 155612 - DNA, 12 bp, Unknown
  misc_feature (1)..( 12): Result.004 file - promoters50/1015179
aaagagataaaa

SEQ ID NO: 155613 - DNA, 11 bp, Unknown
  misc_feature (1)..( 11): Result.004 file - promoters50/1015179
tttgaatagtc

SEQ ID NO: 155614 - DNA, 11 bp, Unknown
  misc_feature (1)..( 11): Result.004 file - promoters50/1015179
tttgaaaagtc

SEQ ID NO: 155615 - DNA, 11 bp, Unknown
  misc_feature (1)..( 11): Result.004 file - promoters50/1015179
tttgaattcca

SEQ ID NO: 155616 - DNA, 12 bp, Unknown
  misc_feature (1)..( 12): Result.004 file - promoters50/1015179
tagtgaaaataa

SEQ ID NO: 155617 - DNA, 12 bp, Unknown
  misc_feature (1)..( 12): Result.004 file - promoters50/1015210
tttagaacaaga

SEQ ID NO: 155618 - DNA, 8 bp, Unknown
  misc_feature (1)..( 8): Result.004 file - promoters50/1015210
ttatcctt

SEQ ID NO: 155619 - DNA, 8 bp, Unknown
  misc_feature (1)..( 8): Result.004 file - promoters50/1015210
ttaaccta

SEQ ID NO: 155620 - DNA, 8 bp, Unknown
  misc_feature (1)..( 8): Result.004 file - promoters50/1015210
ttatcctt

SEQ ID NO: 155621 - DNA, 12 bp, Unknown
  misc_feature (1)..( 12): Result.004 file - promoters50/1015210
aaatgcttagtc

SEQ ID NO: 155622 - DNA, 12 bp, Unknown
  misc_feature (1)..( 12): Result.004 file - promoters50/1015210
aaattcttggca

SEQ ID NO: 155623 - DNA, 12 bp, Unknown
  misc_feature (1)..( 12): Result.004 file - promoters50/1015214
tgcttctttgca

SEQ ID NO: 155624 - DNA, 14 bp, Unknown
  misc_feature (1)..( 14): Result.004 file - promoters50/1015214
atatatgtaaacgt

SEQ ID NO: 155625 - DNA, 14 bp, Unknown
  misc_feature (1)..( 14): Result.004 file - promoters50/1015214
ctttatttaaaaag

SEQ ID NO: 155626 - DNA, 14 bp, Unknown
  misc_feature (1)..( 14): Result.004 file - promoters50/1015214
atagatgtttcatt

SEQ ID NO: 155627 - DNA, 14 bp, Unknown
  misc_feature (1)..( 14): Result.004 file - promoters50/1015214
tcgtatctaagacc

SEQ ID NO: 155628 - DNA, 14 bp, Unknown
  misc_feature (1)..( 14): Result.004 file - promoters50/1015214
ttagcattaaaata

SEQ ID NO: 155629 - DNA, 15 bp, Unknown
  misc_feature (1)..( 15): Result.004 file - promoters50/1015214
ttaattttagaaaga

SEQ ID NO: 155630 - DNA, 13 bp, Unknown
  misc_feature (1)..( 13): Result.004 file - promoters50/1015214
ttctgtaactaca

SEQ ID NO: 155631 - DNA, 10 bp, Unknown
  misc_feature (1)..( 10): Result.004 file - promoters50/1015214
ttttagggtt

SEQ ID NO: 155632 - DNA, 9 bp, Unknown
  misc_feature (1)..( 9): Result.004 file - promoters50/1015214
gaaaacaaa

SEQ ID NO: 155633 - DNA, 9 bp, Unknown
  misc_feature (1)..( 9): Result.004 file - promoters50/1015214
agaaagaaa

SEQ ID NO: 155634 - DNA, 9 bp, Unknown
  misc_feature (1)..( 9): Result.004 file - promoters50/1015214
taaaacatt

SEQ ID NO: 155635 - DNA, 9 bp, Unknown
  misc_feature (1)..( 9): Result.004 file - promoters50/1015214
gcacacaac

SEQ ID NO: 155636 - DNA, 9 bp, Unknown
  misc_feature (1)..( 9): Result.004 file - promoters50/1015214
tgaatgaaa

SEQ ID NO: 155637 - DNA, 9 bp, Unknown
  misc_feature (1)..( 9): Result.004 file - promoters50/1015247
tgaatgttg

SEQ ID NO: 155638 - DNA, 10 bp, Unknown
  misc_feature (1)..( 10): Result.004 file - promoters50/1015247
ttcttgtttc

SEQ ID NO: 155639 - DNA, 10 bp, Unknown
  misc_feature (1)..( 10): Result.004 file - promoters50/1015247
ttcttcttta

SEQ ID NO: 155640 - DNA, 10 bp, Unknown
  misc_feature (1)..( 10): Result.004 file - promoters50/1015247
aagatcttta

SEQ ID NO: 155641 - DNA, 9 bp, Unknown
  misc_feature (1)..( 9): Result.004 file - promoters50/1015247
aaaacaaaa

SEQ ID NO: 155642 - DNA, 9 bp, Unknown
  misc_feature (1)..( 9): Result.004 file - promoters50/1015247
aaaacaaaa

SEQ ID NO: 155643 - DNA, 9 bp, Unknown
  misc_feature (1)..( 9): Result.004 file - promoters50/1015247
tcaacaaaa

SEQ ID NO: 155644 - DNA, 10 bp, Unknown
  misc_feature (1)..( 10): Result.004 file - promoters50/1015247
attaaagaaa

SEQ ID NO: 155645 - DNA, 10 bp, Unknown
  misc_feature (1)..( 10): Result.004 file - promoters50/1015247
attaaaggaa

SEQ ID NO: 155646 - DNA, 10 bp, Unknown
  misc_feature (1)..( 10): Result.004 file - promoters50/1015264
agtaagggaa

SEQ ID NO: 155647 - DNA, 7 bp, Unknown
  misc_feature (1)..( 7): Result.004 file - promoters50/1015264
tcatttt

SEQ ID NO: 155648 - DNA, 7 bp, Unknown
  misc_feature (1)..( 7): Result.004 file - promoters50/1015264
tcatttg

SEQ ID NO: 155649 - DNA, 7 bp, Unknown
  misc_feature (1)..( 7): Result.004 file - promoters50/1015264
ccatttg

SEQ ID NO: 155650 - DNA, 9 bp, Unknown
  misc_feature (1)..( 9): Result.004 file - promoters50/1015264
taatttaaa

SEQ ID NO: 155651 - DNA, 9 bp, Unknown
  misc_feature (1)..( 9): Result.004 file - promoters50/1015264
caattaaaa

SEQ ID NO: 155652 - DNA, 9 bp, Unknown
  misc_feature (1)..( 9): Result.004 file - promoters50/1015264
taatttttc

SEQ ID NO: 155653 - DNA, 11 bp, Unknown
  misc_feature (1)..( 11): Result.004 file - promoters50/1015264
ctagaaattta

SEQ ID NO: 155654 - DNA, 11 bp, Unknown
  misc_feature (1)..( 11): Result.004 file - promoters50/1015264
taaaaaaatta

SEQ ID NO: 155655 - DNA, 11 bp, Unknown
  misc_feature (1)..( 11): Result.004 file - promoters50/1015264
attgaaaactt

SEQ ID NO: 155656 - DNA, 8 bp, Unknown
  misc_feature (1)..( 8): Result.004 file - promoters50/1015264
gtaattac

SEQ ID NO: 155657 - DNA, 8 bp, Unknown
  misc_feature (1)..( 8): Result.004 file - promoters50/1015264
ctaattaa

SEQ ID NO: 155658 - DNA, 8 bp, Unknown
  misc_feature (1)..( 8): Result.004 file - promoters50/1015264
ctaaataa

SEQ ID NO: 155659 - DNA, 7 bp, Unknown
  misc_feature (1)..( 7): Result.004 file - promoters50/1015264
tttattt

SEQ ID NO: 155660 - DNA, 7 bp, Unknown
  misc_feature (1)..( 7): Result.004 file - promoters50/1015264
tttatta

SEQ ID NO: 155661 - DNA, 7 bp, Unknown
  misc_feature (1)..( 7): Result.004 file - promoters50/1015264
tttatta

SEQ ID NO: 155662 - DNA, 8 bp, Unknown
  misc_feature (1)..( 8): Result.004 file - promoters50/1015264
agtattag

SEQ ID NO: 155663 - DNA, 8 bp, Unknown
  misc_feature (1)..( 8): Result.004 file - promoters50/1015264
tttattag

SEQ ID NO: 155664 - DNA, 8 bp, Unknown
  misc_feature (1)..( 8): Result.004 file - promoters50/1015264
tttattat

SEQ ID NO: 155665 - DNA, 10 bp, Unknown
  misc_feature (1)..( 10): Result.004 file - promoters50/1015264
tacaaaaatg

SEQ ID NO: 155666 - DNA, 10 bp, Unknown
  misc_feature (1)..( 10): Result.004 file - promoters50/1015264
tactaaataa

SEQ ID NO: 155667 - DNA, 10 bp, Unknown
  misc_feature (1)..( 10): Result.004 file - promoters50/1015264
ctctaattaa

SEQ ID NO: 155668 - DNA, 11 bp, Unknown
  misc_feature (1)..( 11): Result.004 file - promoters50/1015264
cgaatttgatt

SEQ ID NO: 155669 - DNA, 11 bp, Unknown
  misc_feature (1)..( 11): Result.004 file - promoters50/1015264
tttgtttgatt

SEQ ID NO: 155670 - DNA, 11 bp, Unknown
  misc_feature (1)..( 11): Result.004 file - promoters50/1015264
tttgtatgatt

SEQ ID NO: 155671 - DNA, 11 bp, Unknown
  misc_feature (1)..( 11): Result.004 file - promoters50/1015264
tttgtatacca

SEQ ID NO: 155672 - DNA, 11 bp, Unknown
  misc_feature (1)..( 11): Result.004 file - promoters50/1015264
tttgtatgatt

SEQ ID NO: 155673 - DNA, 11 bp, Unknown
  misc_feature (1)..( 11): Result.004 file - promoters50/1015375
tttgtttgatt

SEQ ID NO: 155674 - DNA, 8 bp, Unknown
  misc_feature (1)..( 8): Result.004 file - promoters50/1015375
tattctcg

SEQ ID NO: 155675 - DNA, 8 bp, Unknown
  misc_feature (1)..( 8): Result.004 file - promoters50/1015375
tattctag

SEQ ID NO: 155676 - DNA, 8 bp, Unknown
  misc_feature (1)..( 8): Result.004 file - promoters50/1015427
tattgtcg

SEQ ID NO: 155677 - DNA, 7 bp, Unknown
  misc_feature (1)..( 7): Result.004 file - promoters50/1015427
taattta

SEQ ID NO: 155678 - DNA, 7 bp, Unknown
  misc_feature (1)..( 7): Result.004 file - promoters50/1015427
taatttg

SEQ ID NO: 155679 - DNA, 7 bp, Unknown
  misc_feature (1)..( 7): Result.004 file - promoters50/1015427
caatttg

SEQ ID NO: 155680 - DNA, 8 bp, Unknown
  misc_feature (1)..( 8): Result.004 file - promoters50/1015427
agaaaatt

SEQ ID NO: 155681 - DNA, 8 bp, Unknown
  misc_feature (1)..( 8): Result.004 file - promoters50/1015427
agaaaaat

SEQ ID NO: 155682 - DNA, 8 bp, Unknown
  misc_feature (1)..( 8): Result.004 file - promoters50/1015516
agaaaaaa

SEQ ID NO: 155683 - DNA, 8 bp, Unknown
  misc_feature (1)..( 8): Result.004 file - promoters50/1015516
tgattcca

SEQ ID NO: 155684 - DNA, 8 bp, Unknown
  misc_feature (1)..( 8): Result.004 file - promoters50/1015516
tgatgcca

SEQ ID NO: 155685 - DNA, 8 bp, Unknown
  misc_feature (1)..( 8): Result.004 file - promoters50/1015524
tgatgcag

SEQ ID NO: 155686 - DNA, 9 bp, Unknown
  misc_feature (1)..( 9): Result.004 file - promoters50/1015524
cttttcttt

SEQ ID NO: 155687 - DNA, 9 bp, Unknown
  misc_feature (1)..( 9): Result.004 file - promoters50/1015524
tttttctta

SEQ ID NO: 155688 - DNA, 9 bp, Unknown
  misc_feature (1)..( 9): Result.004 file - promoters50/1015524
cttttttta

SEQ ID NO: 155689 - DNA, 9 bp, Unknown
  misc_feature (1)..( 9): Result.004 file - promoters50/1015524
aatttatta

SEQ ID NO: 155690 - DNA, 9 bp, Unknown
  misc_feature (1)..( 9): Result.004 file - promoters50/1015524
caattttta

SEQ ID NO: 155691 - DNA, 9 bp, Unknown
  misc_feature (1)..( 9): Result.004 file - promoters50/1015524
aatatatta

SEQ ID NO: 155692 - DNA, 18 bp, Unknown
  misc_feature (1)..( 18): Result.004 file - promoters50/1015524
cagatatacattgctttg

SEQ ID NO: 155693 - DNA, 18 bp, Unknown
  misc_feature (1)..( 18): Result.004 file - promoters50/1015524
cggatttacttgaatgag

SEQ ID NO: 155694 - DNA, 18 bp, Unknown
  misc_feature (1)..( 18): Result.004 file - promoters50/1015524
aagaaatagaacaaagag

SEQ ID NO: 155695 - DNA, 18 bp, Unknown
  misc_feature (1)..( 18): Result.004 file - promoters50/1015524
tttctataaattattttt

SEQ ID NO: 155696 - DNA, 18 bp, Unknown
  misc_feature (1)..( 18): Result.004 file - promoters50/1015524
ccggttttgataattccc

SEQ ID NO: 155697 - DNA, 18 bp, Unknown
  misc_feature (1)..( 18): Result.004 file - promoters50/1015524
aagagctaaaaacggata

SEQ ID NO: 155698 - DNA, 18 bp, Unknown
  misc_feature (1)..( 18): Result.004 file - promoters50/1015524
aagaaattgcatagttac

SEQ ID NO: 155699 - DNA, 18 bp, Unknown
  misc_feature (1)..( 18): Result.004 file - promoters50/1015524
ccaattttttatagatta

SEQ ID NO: 155700 - DNA, 9 bp, Unknown
  misc_feature (1)..( 9): Result.004 file - promoters50/1015524
atataaaca

SEQ ID NO: 155701 - DNA, 9 bp, Unknown
  misc_feature (1)..( 9): Result.004 file - promoters50/1015524
atataaaga

SEQ ID NO: 155702 - DNA, 9 bp, Unknown
  misc_feature (1)..( 9): Result.004 file - promoters50/1015524
atatataca

SEQ ID NO: 155703 - DNA, 9 bp, Unknown
  misc_feature (1)..( 9): Result.004 file - promoters50/1015524
atattaaca

SEQ ID NO: 155704 - DNA, 9 bp, Unknown
  misc_feature (1)..( 9): Result.004 file - promoters50/1015524
ttatttaac

SEQ ID NO: 155705 - DNA, 9 bp, Unknown
  misc_feature (1)..( 9): Result.004 file - promoters50/1015524
ctatatatt

SEQ ID NO: 155706 - DNA, 11 bp, Unknown
  misc_feature (1)..( 11): Result.004 file - promoters50/1015524
caaaaacaact

SEQ ID NO: 155707 - DNA, 11 bp, Unknown
  misc_feature (1)..( 11): Result.004 file - promoters50/1015524
taaatacattt

SEQ ID NO: 155708 - DNA, 11 bp, Unknown
  misc_feature (1)..( 11): Result.004 file - promoters50/1015524
caaatacattg

SEQ ID NO: 155709 - DNA, 11 bp, Unknown
  misc_feature (1)..( 11): Result.004 file - promoters50/1015524
caaatatttcc

SEQ ID NO: 155710 - DNA, 11 bp, Unknown
  misc_feature (1)..( 11): Result.004 file - promoters50/1015524
aagatacgttg

SEQ ID NO: 155711 - DNA, 11 bp, Unknown
  misc_feature (1)..( 11): Result.004 file - promoters50/1015524
tgaatagatta

SEQ ID NO: 155712 - DNA, 10 bp, Unknown
  misc_feature (1)..( 10): Result.004 file - promoters50/1015524
tttgtttctc

SEQ ID NO: 155713 - DNA, 10 bp, Unknown
  misc_feature (1)..( 10): Result.004 file - promoters50/1015524
attgttttcg

SEQ ID NO: 155714 - DNA, 10 bp, Unknown
  misc_feature (1)..( 10): Result.004 file - promoters50/1015524
aatgtttctc

SEQ ID NO: 155715 - DNA, 10 bp, Unknown
  misc_feature (1)..( 10): Result.004 file - promoters50/1015524
tttttttctg

SEQ ID NO: 155716 - DNA, 10 bp, Unknown
  misc_feature (1)..( 10): Result.004 file - promoters50/1015524
attgtttaag

SEQ ID NO: 155717 - DNA, 10 bp, Unknown
  misc_feature (1)..( 10): Result.004 file - promoters50/1015537
tttttttttt

SEQ ID NO: 155718 - DNA, 10 bp, Unknown
  misc_feature (1)..( 10): Result.004 file - promoters50/1015537
ttaattttgc

SEQ ID NO: 155719 - DNA, 10 bp, Unknown
  misc_feature (1)..( 10): Result.004 file - promoters50/1015537
ttaattgtct

SEQ ID NO: 155720 - DNA, 10 bp, Unknown
  misc_feature (1)..( 10): Result.004 file - promoters50/1015537
ctaatttatt

SEQ ID NO: 155721 - DNA, 10 bp, Unknown
  misc_feature (1)..( 10): Result.004 file - promoters50/1015537
caaatttaag

SEQ ID NO: 155722 - DNA, 10 bp, Unknown
  misc_feature (1)..( 10): Result.004 file - promoters50/1015537
aaaattcaag

SEQ ID NO: 155723 - DNA, 11 bp, Unknown
  misc_feature (1)..( 11): Result.004 file - promoters50/1015537
gaaatattata

SEQ ID NO: 155724 - DNA, 11 bp, Unknown
  misc_feature (1)..( 11): Result.004 file - promoters50/1015537
gtaatttaaaa

SEQ ID NO: 155725 - DNA, 9 bp, Unknown
  misc_feature (1)..( 9): Result.004 file - promoters50/1015537
taattttgc

SEQ ID NO: 155726 - DNA, 9 bp, Unknown
  misc_feature (1)..( 9): Result.004 file - promoters50/1015537
aaatcttga

SEQ ID NO: 155727 - DNA, 9 bp, Unknown
  misc_feature (1)..( 9): Result.004 file - promoters50/1015537
taatttatt

SEQ ID NO: 155728 - DNA, 9 bp, Unknown
  misc_feature (1)..( 9): Result.004 file - promoters50/1015537
aaatttaag

SEQ ID NO: 155729 - DNA, 9 bp, Unknown
  misc_feature (1)..( 9): Result.004 file - promoters50/1015537
aaattcaag

SEQ ID NO: 155730 - DNA, 9 bp, Unknown
  misc_feature (1)..( 9): Result.004 file - promoters50/1015537
taatttaaa

SEQ ID NO: 155731 - DNA, 9 bp, Unknown
  misc_feature (1)..( 9): Result.004 file - promoters50/1015537
aaatattat

SEQ ID NO: 155732 - DNA, 9 bp, Unknown
  misc_feature (1)..( 9): Result.004 file - promoters50/1015537
aaatataaa

SEQ ID NO: 155733 - DNA, 9 bp, Unknown
  misc_feature (1)..( 9): Result.004 file - promoters50/1015537
aaaaattca

SEQ ID NO: 155734 - DNA, 9 bp, Unknown
  misc_feature (1)..( 9): Result.004 file - promoters50/1015537
aaatttaag

SEQ ID NO: 155735 - DNA, 9 bp, Unknown
  misc_feature (1)..( 9): Result.004 file - promoters50/1015537
taatttaaa

SEQ ID NO: 155736 - DNA, 9 bp, Unknown
  misc_feature (1)..( 9): Result.004 file - promoters50/1015537
taatttatt

SEQ ID NO: 155737 - DNA, 10 bp, Unknown
  misc_feature (1)..( 10): Result.004 file - promoters50/1015537
aaagtataaa

SEQ ID NO: 155738 - DNA, 13 bp, Unknown
  misc_feature (1)..( 13): Result.004 file - promoters50/1015537
ccaaatattatcc

SEQ ID NO: 155739 - DNA, 13 bp, Unknown
  misc_feature (1)..( 13): Result.004 file - promoters50/1015537
tttgataatatct

SEQ ID NO: 155740 - DNA, 13 bp, Unknown
  misc_feature (1)..( 13): Result.004 file - promoters50/1015537
gaaattattattt

SEQ ID NO: 155741 - DNA, 13 bp, Unknown
  misc_feature (1)..( 13): Result.004 file - promoters50/1015537
gaaaaaattcaag

SEQ ID NO: 155742 - DNA, 13 bp, Unknown
  misc_feature (1)..( 13): Result.004 file - promoters50/1015537
agaaagaataata

SEQ ID NO: 155743 - DNA, 13 bp, Unknown
  misc_feature (1)..( 13): Result.004 file - promoters50/1015537
aattctaaaatct

SEQ ID NO: 155744 - DNA, 13 bp, Unknown
  misc_feature (1)..( 13): Result.004 file - promoters50/1015537
ccgactaaaaaaa

SEQ ID NO: 155745 - DNA, 10 bp, Unknown
  misc_feature (1)..( 10): Result.004 file - promoters50/1015537
aattgatata

SEQ ID NO: 155746 - DNA, 10 bp, Unknown
  misc_feature (1)..( 10): Result.004 file - promoters50/1015537
atctgaaata

SEQ ID NO: 155747 - DNA, 10 bp, Unknown
  misc_feature (1)..( 10): Result.004 file - promoters50/1015537
aattgatatt

SEQ ID NO: 155748 - DNA, 10 bp, Unknown
  misc_feature (1)..( 10): Result.004 file - promoters50/1015537
ttctaaaatc

SEQ ID NO: 155749 - DNA, 10 bp, Unknown
  misc_feature (1)..( 10): Result.004 file - promoters50/1015537
gactaaaaaa

SEQ ID NO: 155750 - DNA, 10 bp, Unknown
  misc_feature (1)..( 10): Result.004 file - promoters50/1015537
ttctaattta

SEQ ID NO: 155751 - DNA, 10 bp, Unknown
  misc_feature (1)..( 10): Result.004 file - promoters50/1015537
agaaaaaatt

SEQ ID NO: 155752 - DNA, 16 bp, Unknown
  misc_feature (1)..( 16): Result.004 file - promoters50/1015537
cggcaaaagtccaaac

SEQ ID NO: 155753 - DNA, 16 bp, Unknown
  misc_feature (1)..( 16): Result.004 file - promoters50/1015537
cacacaaaatccatat

SEQ ID NO: 155754 - DNA, 16 bp, Unknown
  misc_feature (1)..( 16): Result.004 file - promoters50/1015537
aaacaaaagttcaaac

SEQ ID NO: 155755 - DNA, 16 bp, Unknown
  misc_feature (1)..( 16): Result.004 file - promoters50/1015537
cacataaaatctggta

SEQ ID NO: 155756 - DNA, 16 bp, Unknown
  misc_feature (1)..( 16): Result.004 file - promoters50/1015537
atcataaaataataat

SEQ ID NO: 155757 - DNA, 16 bp, Unknown
  misc_feature (1)..( 16): Result.004 file - promoters50/1015537
aaccaaacaacaagct

SEQ ID NO: 155758 - DNA, 8 bp, Unknown
  misc_feature (1)..( 8): Result.004 file - promoters50/1015537
taagatat

SEQ ID NO: 155759 - DNA, 8 bp, Unknown
  misc_feature (1)..( 8): Result.004 file - promoters50/1015537
taaaatat

SEQ ID NO: 155760 - DNA, 8 bp, Unknown
  misc_feature (1)..( 8): Result.004 file - promoters50/1015537
tgaaatat

SEQ ID NO: 155761 - DNA, 8 bp, Unknown
  misc_feature (1)..( 8): Result.004 file - promoters50/1015537
gaaattat

SEQ ID NO: 155762 - DNA, 8 bp, Unknown
  misc_feature (1)..( 8): Result.004 file - promoters50/1015537
taaaattt

SEQ ID NO: 155763 - DNA, 8 bp, Unknown
  misc_feature (1)..( 8): Result.004 file - promoters50/1015541
aaaaattc

SEQ ID NO: 155764 - DNA, 8 bp, Unknown
  misc_feature (1)..( 8): Result.004 file - promoters50/1015541
aatacatt

SEQ ID NO: 155765 - DNA, 8 bp, Unknown
  misc_feature (1)..( 8): Result.004 file - promoters50/1015541
aatatatt

SEQ ID NO: 155766 - DNA, 8 bp, Unknown
  misc_feature (1)..( 8): Result.004 file - promoters50/1015541
aatgtatg

SEQ ID NO: 155767 - DNA, 12 bp, Unknown
  misc_feature (1)..( 12): Result.004 file - promoters50/1015541
ctatttttttct

SEQ ID NO: 155768 - DNA, 12 bp, Unknown
  misc_feature (1)..( 12): Result.004 file - promoters50/1015541
ctagtttcttct

SEQ ID NO: 155769 - DNA, 12 bp, Unknown
  misc_feature (1)..( 12): Result.004 file - promoters50/1015597
tctgttccttat

SEQ ID NO: 155770 - DNA, 10 bp, Unknown
  misc_feature (1)..( 10): Result.004 file - promoters50/1015597
aatctaattg

SEQ ID NO: 155771 - DNA, 10 bp, Unknown
  misc_feature (1)..( 10): Result.004 file - promoters50/1015597
tatctaatga

SEQ ID NO: 155772 - DNA, 10 bp, Unknown
  misc_feature (1)..( 10): Result.004 file - promoters50/1015597
aatataagaa

SEQ ID NO: 155773 - DNA, 10 bp, Unknown
  misc_feature (1)..( 10): Result.004 file - promoters50/1015597
caactaattt

SEQ ID NO: 155774 - DNA, 10 bp, Unknown
  misc_feature (1)..( 10): Result.004 file - promoters50/1015597
caacaaatgc

SEQ ID NO: 155775 - DNA, 10 bp, Unknown
  misc_feature (1)..( 10): Result.004 file - promoters50/1015597
atattaattt

SEQ ID NO: 155776 - DNA, 8 bp, Unknown
  misc_feature (1)..( 8): Result.004 file - promoters50/1015597
taaaaaaa

SEQ ID NO: 155777 - DNA, 8 bp, Unknown
  misc_feature (1)..( 8): Result.004 file - promoters50/1015597
taataaaa

SEQ ID NO: 155778 - DNA, 8 bp, Unknown
  misc_feature (1)..( 8): Result.004 file - promoters50/1015597
taaaaagt

SEQ ID NO: 155779 - DNA, 8 bp, Unknown
  misc_feature (1)..( 8): Result.004 file - promoters50/1015597
gaaagaag

SEQ ID NO: 155780 - DNA, 8 bp, Unknown
  misc_feature (1)..( 8): Result.004 file - promoters50/1015597
taacaagc

SEQ ID NO: 155781 - DNA, 8 bp, Unknown
  misc_feature (1)..( 8): Result.004 file - promoters50/1015606
taataagt

SEQ ID NO: 155782 - DNA, 8 bp, Unknown
  misc_feature (1)..( 8): Result.004 file - promoters50/1015606
acaagcga

SEQ ID NO: 155783 - DNA, 8 bp, Unknown
  misc_feature (1)..( 8): Result.004 file - promoters50/1015606
acaggcgg

SEQ ID NO: 155784 - DNA, 8 bp, Unknown
  misc_feature (1)..( 8): Result.004 file - promoters50/1015606
acaagcga

SEQ ID NO: 155785 - DNA, 8 bp, Unknown
  misc_feature (1)..( 8): Result.004 file - promoters50/1015606
ccaaacga

SEQ ID NO: 155786 - DNA, 10 bp, Unknown
  misc_feature (1)..( 10): Result.004 file - promoters50/1015606
aatttgtttg

SEQ ID NO: 155787 - DNA, 10 bp, Unknown
  misc_feature (1)..( 10): Result.004 file - promoters50/1015606
aatttgttat

SEQ ID NO: 155788 - DNA, 10 bp, Unknown
  misc_feature (1)..( 10): Result.004 file - promoters50/1015606
attttctttg

SEQ ID NO: 155789 - DNA, 10 bp, Unknown
  misc_feature (1)..( 10): Result.004 file - promoters50/1015637
aatttgtttg

SEQ ID NO: 155790 - DNA, 18 bp, Unknown
  misc_feature (1)..( 18): Result.004 file - promoters50/1015637
cggtactaaatgtatagt

SEQ ID NO: 155791 - DNA, 18 bp, Unknown
  misc_feature (1)..( 18): Result.004 file - promoters50/1015637
acaaagtaattgtttgtt

SEQ ID NO: 155792 - DNA, 18 bp, Unknown
  misc_feature (1)..( 18): Result.004 file - promoters50/1015637
gatatttaaatgggccta

SEQ ID NO: 155793 - DNA, 18 bp, Unknown
  misc_feature (1)..( 18): Result.004 file - promoters50/1015637
aaaaatcaatttttttga

SEQ ID NO: 155794 - DNA, 18 bp, Unknown
  misc_feature (1)..( 18): Result.004 file - promoters50/1015637
tacgaaagattgttagtt

SEQ ID NO: 155795 - DNA, 18 bp, Unknown
  misc_feature (1)..( 18): Result.004 file - promoters50/1015637
taggtataaagaaataaa

SEQ ID NO: 155796 - DNA, 10 bp, Unknown
  misc_feature (1)..( 10): Result.004 file - promoters50/1015637
ggaaagtata

SEQ ID NO: 155797 - DNA, 10 bp, Unknown
  misc_feature (1)..( 10): Result.004 file - promoters50/1015637
ggagagtttc

SEQ ID NO: 155798 - DNA, 10 bp, Unknown
  misc_feature (1)..( 10): Result.004 file - promoters50/1015637
gaaaagtaaa

SEQ ID NO: 155799 - DNA, 10 bp, Unknown
  misc_feature (1)..( 10): Result.004 file - promoters50/1015637
tcaaagtaga

SEQ ID NO: 155800 - DNA, 10 bp, Unknown
  misc_feature (1)..( 10): Result.004 file - promoters50/1015637
acaaaatagc

SEQ ID NO: 155801 - DNA, 10 bp, Unknown
  misc_feature (1)..( 10): Result.004 file - promoters50/1015661
aaaaagaaaa

SEQ ID NO: 155802 - DNA, 11 bp, Unknown
  misc_feature (1)..( 11): Result.004 file - promoters50/1015661
caaaatcaaat

SEQ ID NO: 155803 - DNA, 11 bp, Unknown
  misc_feature (1)..( 11): Result.004 file - promoters50/1015661
ggaaagcaatg

SEQ ID NO: 155804 - DNA, 11 bp, Unknown
  misc_feature (1)..( 11): Result.004 file - promoters50/1015661
cgaaatcataa

SEQ ID NO: 155805 - DNA, 11 bp, Unknown
  misc_feature (1)..( 11): Result.004 file - promoters50/1015661
tgcaattaaaa

SEQ ID NO: 155806 - DNA, 11 bp, Unknown
  misc_feature (1)..( 11): Result.004 file - promoters50/1015661
aaaaagaaatg

SEQ ID NO: 155807 - DNA, 11 bp, Unknown
  misc_feature (1)..( 11): Result.004 file - promoters50/1015661
caaaagagcta

SEQ ID NO: 155808 - DNA, 11 bp, Unknown
  misc_feature (1)..( 11): Result.004 file - promoters50/1015661
aaaaaaaaatg

SEQ ID NO: 155809 - DNA, 11 bp, Unknown
  misc_feature (1)..( 11): Result.004 file - promoters50/1015661
acaaataatat

SEQ ID NO: 155810 - DNA, 12 bp, Unknown
  misc_feature (1)..( 12): Result.004 file - promoters50/1015661
acattatagtat

SEQ ID NO: 155811 - DNA, 12 bp, Unknown
  misc_feature (1)..( 12): Result.004 file - promoters50/1015661
acattataatag

SEQ ID NO: 155812 - DNA, 12 bp, Unknown
  misc_feature (1)..( 12): Result.004 file - promoters50/1015661
ttattaaagtat

SEQ ID NO: 155813 - DNA, 12 bp, Unknown
  misc_feature (1)..( 12): Result.004 file - promoters50/1015661
aaattataacac

SEQ ID NO: 155814 - DNA, 12 bp, Unknown
  misc_feature (1)..( 12): Result.004 file - promoters50/1015661
tgattataattt

SEQ ID NO: 155815 - DNA, 11 bp, Unknown
  misc_feature (1)..( 11): Result.004 file - promoters50/1015661
tactaaagtgt

SEQ ID NO: 155816 - DNA, 16 bp, Unknown
  misc_feature (1)..( 16): Result.004 file - promoters50/1015661
atatttgtgtattctt

SEQ ID NO: 155817 - DNA, 16 bp, Unknown
  misc_feature (1)..( 16): Result.004 file - promoters50/1015661
gtatatgttacaacta

SEQ ID NO: 155818 - DNA, 16 bp, Unknown
  misc_feature (1)..( 16): Result.004 file - promoters50/1015661
gtatttgtttgacggt

SEQ ID NO: 155819 - DNA, 16 bp, Unknown
  misc_feature (1)..( 16): Result.004 file - promoters50/1015661
aattttgttattgctc

SEQ ID NO: 155820 - DNA, 16 bp, Unknown
  misc_feature (1)..( 16): Result.004 file - promoters50/1015661
gtatatcctagcattt

SEQ ID NO: 155821 - DNA, 16 bp, Unknown
  misc_feature (1)..( 16): Result.004 file - promoters50/1015661
ttatcttaaaacaaca

SEQ ID NO: 155822 - DNA, 16 bp, Unknown
  misc_feature (1)..( 16): Result.004 file - promoters50/1015676
ctatatgattgtaatt

SEQ ID NO: 155823 - DNA, 8 bp, Unknown
  misc_feature (1)..( 8): Result.004 file - promoters50/1015676
ttttgaaa

SEQ ID NO: 155824 - DNA, 8 bp, Unknown
  misc_feature (1)..( 8): Result.004 file - promoters50/1015676
ttttcaaa

SEQ ID NO: 155825 - DNA, 8 bp, Unknown
  misc_feature (1)..( 8): Result.004 file - promoters50/1015676
ttttgatg

SEQ ID NO: 155826 - DNA, 7 bp, Unknown
  misc_feature (1)..( 7): Result.004 file - promoters50/1015676
tattttc

SEQ ID NO: 155827 - DNA, 7 bp, Unknown
  misc_feature (1)..( 7): Result.004 file - promoters50/1015676
tatttta

SEQ ID NO: 155828 - DNA, 7 bp, Unknown
  misc_feature (1)..( 7): Result.004 file - promoters50/1015676
tattttc

SEQ ID NO: 155829 - DNA, 13 bp, Unknown
  misc_feature (1)..( 13): Result.004 file - promoters50/1015676
attttatcaatgg

SEQ ID NO: 155830 - DNA, 13 bp, Unknown
  misc_feature (1)..( 13): Result.004 file - promoters50/1015676
attatattaacat

SEQ ID NO: 155831 - DNA, 13 bp, Unknown
  misc_feature (1)..( 13): Result.004 file - promoters50/1015676
tgtatatgaacat

SEQ ID NO: 155832 - DNA, 8 bp, Unknown
  misc_feature (1)..( 8): Result.004 file - promoters50/1015676
ttaaaaca

SEQ ID NO: 155833 - DNA, 8 bp, Unknown
  misc_feature (1)..( 8): Result.004 file - promoters50/1015676
ttacaact

SEQ ID NO: 155834 - DNA, 8 bp, Unknown
  misc_feature (1)..( 8): Result.004 file - promoters50/1015676
ttaaaaca

SEQ ID NO: 155835 - DNA, 8 bp, Unknown
  misc_feature (1)..( 8): Result.004 file - promoters50/1015676
gtttcaaa

SEQ ID NO: 155836 - DNA, 8 bp, Unknown
  misc_feature (1)..( 8): Result.004 file - promoters50/1015676
ttttcaaa

SEQ ID NO: 155837 - DNA, 8 bp, Unknown
  misc_feature (1)..( 8): Result.004 file - promoters50/1015700
gttgcaac

SEQ ID NO: 155838 - DNA, 9 bp, Unknown
  misc_feature (1)..( 9): Result.004 file - promoters50/1015700
atttcgatc

SEQ ID NO: 155839 - DNA, 9 bp, Unknown
  misc_feature (1)..( 9): Result.004 file - promoters50/1015700
atttcgctt

SEQ ID NO: 155840 - DNA, 9 bp, Unknown
  misc_feature (1)..( 9): Result.004 file - promoters50/1015700
attacgatc

SEQ ID NO: 155841 - DNA, 9 bp, Unknown
  misc_feature (1)..( 9): Result.004 file - promoters50/1015726
attttgatg

SEQ ID NO: 155842 - DNA, 8 bp, Unknown
  misc_feature (1)..( 8): Result.004 file - promoters50/1015726
caatttga

SEQ ID NO: 155843 - DNA, 8 bp, Unknown
  misc_feature (1)..( 8): Result.004 file - promoters50/1015726
gaatttga

SEQ ID NO: 155844 - DNA, 8 bp, Unknown
  misc_feature (1)..( 8): Result.004 file - promoters50/1015726
caattttt

SEQ ID NO: 155845 - DNA, 11 bp, Unknown
  misc_feature (1)..( 11): Result.004 file - promoters50/1015726
gataaaacaaa

SEQ ID NO: 155846 - DNA, 11 bp, Unknown
  misc_feature (1)..( 11): Result.004 file - promoters50/1015726
gagtaaaaaaa

SEQ ID NO: 155847 - DNA, 11 bp, Unknown
  misc_feature (1)..( 11): Result.004 file - promoters50/1015748
agtgaaaacga

SEQ ID NO: 155848 - DNA, 14 bp, Unknown
  misc_feature (1)..( 14): Result.004 file - promoters50/1015748
catttaagtgttag

SEQ ID NO: 155849 - DNA, 14 bp, Unknown
  misc_feature (1)..( 14): Result.004 file - promoters50/1015748
attttcagtgtata

SEQ ID NO: 155850 - DNA, 14 bp, Unknown
  misc_feature (1)..( 14): Result.004 file - promoters50/1015748
actttaagttttag

SEQ ID NO: 155851 - DNA, 14 bp, Unknown
  misc_feature (1)..( 14): Result.004 file - promoters50/1015748
attttcaatctata

SEQ ID NO: 155852 - DNA, 14 bp, Unknown
  misc_feature (1)..( 14): Result.004 file - promoters50/1015748
tctttaaattattt

SEQ ID NO: 155853 - DNA, 14 bp, Unknown
  misc_feature (1)..( 14): Result.004 file - promoters50/1015748
tttgtaaattcatt

SEQ ID NO: 155854 - DNA, 13 bp, Unknown
  misc_feature (1)..( 13): Result.004 file - promoters50/1015748
tggacaaaaacct

SEQ ID NO: 155855 - DNA, 13 bp, Unknown
  misc_feature (1)..( 13): Result.004 file - promoters50/1015748
tacttgaaagcct

SEQ ID NO: 155856 - DNA, 14 bp, Unknown
  misc_feature (1)..( 14): Result.004 file - promoters50/1015748
tttaacaaatacca

SEQ ID NO: 155857 - DNA, 14 bp, Unknown
  misc_feature (1)..( 14): Result.004 file - promoters50/1015748
acagaaaaaaactc

SEQ ID NO: 155858 - DNA, 14 bp, Unknown
  misc_feature (1)..( 14): Result.004 file - promoters50/1015748
atttaaaaaaaatg

SEQ ID NO: 155859 - DNA, 14 bp, Unknown
  misc_feature (1)..( 14): Result.004 file - promoters50/1015748
atttaatcgttaat

SEQ ID NO: 155860 - DNA, 14 bp, Unknown
  misc_feature (1)..( 14): Result.004 file - promoters50/1015752
attgaaaatattga

SEQ ID NO: 155861 - DNA, 7 bp, Unknown
  misc_feature (1)..( 7): Result.004 file - promoters50/1015752
gcaaaag

SEQ ID NO: 155862 - DNA, 7 bp, Unknown
  misc_feature (1)..( 7): Result.004 file - promoters50/1015752
acaaaag

SEQ ID NO: 155863 - DNA, 7 bp, Unknown
  misc_feature (1)..( 7): Result.004 file - promoters50/1015752
gcaaaag

SEQ ID NO: 155864 - DNA, 10 bp, Unknown
  misc_feature (1)..( 10): Result.004 file - promoters50/1015752
aataaatgat

SEQ ID NO: 155865 - DNA, 10 bp, Unknown
  misc_feature (1)..( 10): Result.004 file - promoters50/1015752
aataagtgat

SEQ ID NO: 155866 - DNA, 10 bp, Unknown
  misc_feature (1)..( 10): Result.004 file - promoters50/1015763
aataaaggaa

SEQ ID NO: 155867 - DNA, 9 bp, Unknown
  misc_feature (1)..( 9): Result.004 file - promoters50/1015763
ctaatgttt

SEQ ID NO: 155868 - DNA, 9 bp, Unknown
  misc_feature (1)..( 9): Result.004 file - promoters50/1015763
tgaatcttt

SEQ ID NO: 155869 - DNA, 9 bp, Unknown
  misc_feature (1)..( 9): Result.004 file - promoters50/1015844
ctattgtgt

SEQ ID NO: 155870 - DNA, 10 bp, Unknown
  misc_feature (1)..( 10): Result.004 file - promoters50/1015844
ttcgaaatca

SEQ ID NO: 155871 - DNA, 10 bp, Unknown
  misc_feature (1)..( 10): Result.004 file - promoters50/1015844
ttctaaatca

SEQ ID NO: 155872 - DNA, 10 bp, Unknown
  misc_feature (1)..( 10): Result.004 file - promoters50/1015901
cacgaaatcg

SEQ ID NO: 155873 - DNA, 9 bp, Unknown
  misc_feature (1)..( 9): Result.004 file - promoters50/1015901
tatttgtta

SEQ ID NO: 155874 - DNA, 9 bp, Unknown
  misc_feature (1)..( 9): Result.004 file - promoters50/1015901
gctttttta

SEQ ID NO: 155875 - DNA, 9 bp, Unknown
  misc_feature (1)..( 9): Result.004 file - promoters50/1015901
tattggttt

SEQ ID NO: 155876 - DNA, 9 bp, Unknown
  misc_feature (1)..( 9): Result.004 file - promoters50/1015901
actttttgt

SEQ ID NO: 155877 - DNA, 8 bp, Unknown
  misc_feature (1)..( 8): Result.004 file - promoters50/1015901
attagttg

SEQ ID NO: 155878 - DNA, 10 bp, Unknown
  misc_feature (1)..( 10): Result.004 file - promoters50/1015901
taagcataca

SEQ ID NO: 155879 - DNA, 10 bp, Unknown
  misc_feature (1)..( 10): Result.004 file - promoters50/1015901
taaacattta

SEQ ID NO: 155880 - DNA, 10 bp, Unknown
  misc_feature (1)..( 10): Result.004 file - promoters50/1015901
gaagcagaca

SEQ ID NO: 155881 - DNA, 10 bp, Unknown
  misc_feature (1)..( 10): Result.004 file - promoters50/1015901
taaacatttt

SEQ ID NO: 155882 - DNA, 13 bp, Unknown
  misc_feature (1)..( 13): Result.004 file - promoters50/1015901
acaaatttctcat

SEQ ID NO: 155883 - DNA, 13 bp, Unknown
  misc_feature (1)..( 13): Result.004 file - promoters50/1015901
ccaaatttatcat

SEQ ID NO: 155884 - DNA, 13 bp, Unknown
  misc_feature (1)..( 13): Result.004 file - promoters50/1015901
ccaactttcaaga

SEQ ID NO: 155885 - DNA, 13 bp, Unknown
  misc_feature (1)..( 13): Result.004 file - promoters50/1016056
gctaatatatcat

SEQ ID NO: 155886 - DNA, 11 bp, Unknown
  misc_feature (1)..( 11): Result.004 file - promoters50/1016056
aataaaattat

SEQ ID NO: 155887 - DNA, 11 bp, Unknown
  misc_feature (1)..( 11): Result.004 file - promoters50/1016056
aatgaaatatc

SEQ ID NO: 155888 - DNA, 11 bp, Unknown
  misc_feature (1)..( 11): Result.004 file - promoters50/1016056
aataaaataaa

SEQ ID NO: 155889 - DNA, 11 bp, Unknown
  misc_feature (1)..( 11): Result.004 file - promoters50/1016056
aataaaatctt

SEQ ID NO: 155890 - DNA, 11 bp, Unknown
  misc_feature (1)..( 11): Result.004 file - promoters50/1016056
aataaaaactt

SEQ ID NO: 155891 - DNA, 11 bp, Unknown
  misc_feature (1)..( 11): Result.004 file - promoters50/1016063
aataaaggggt

SEQ ID NO: 155892 - DNA, 6 bp, Unknown
  misc_feature (1)..( 6): Result.004 file - promoters50/1016063
aaatca

SEQ ID NO: 155893 - DNA, 6 bp, Unknown
  misc_feature (1)..( 6): Result.004 file - promoters50/1016063
aaatca

SEQ ID NO: 155894 - DNA, 6 bp, Unknown
  misc_feature (1)..( 6): Result.004 file - promoters50/1016066
aaatca

SEQ ID NO: 155895 - DNA, 6 bp, Unknown
  misc_feature (1)..( 6): Result.004 file - promoters50/1016066
acatgt

SEQ ID NO: 155896 - DNA, 6 bp, Unknown
  misc_feature (1)..( 6): Result.004 file - promoters50/1016066
acatgt

SEQ ID NO: 155897 - DNA, 6 bp, Unknown
  misc_feature (1)..( 6): Result.004 file - promoters50/1016066
acatgt

SEQ ID NO: 155898 - DNA, 9 bp, Unknown
  misc_feature (1)..( 9): Result.004 file - promoters50/1016066
aattactaa

SEQ ID NO: 155899 - DNA, 9 bp, Unknown
  misc_feature (1)..( 9): Result.004 file - promoters50/1016066
tattattaa

SEQ ID NO: 155900 - DNA, 9 bp, Unknown
  misc_feature (1)..( 9): Result.004 file - promoters50/1016066
tattattca

SEQ ID NO: 155901 - DNA, 14 bp, Unknown
  misc_feature (1)..( 14): Result.004 file - promoters50/1016066
aattacaaaatgaa

SEQ ID NO: 155902 - DNA, 14 bp, Unknown
  misc_feature (1)..( 14): Result.004 file - promoters50/1016066
aaatacaaaaaaaa

SEQ ID NO: 155903 - DNA, 14 bp, Unknown
  misc_feature (1)..( 14): Result.004 file - promoters50/1016066
caaaacaaaacaaa

SEQ ID NO: 155904 - DNA, 12 bp, Unknown
  misc_feature (1)..( 12): Result.004 file - promoters50/1016066
aaaaaagtgcaa

SEQ ID NO: 155905 - DNA, 12 bp, Unknown
  misc_feature (1)..( 12): Result.004 file - promoters50/1016066
aaaaaaaagaag

SEQ ID NO: 155906 - DNA, 13 bp, Unknown
  misc_feature (1)..( 13): Result.004 file - promoters50/1016094
aaaacaaaacaaa

SEQ ID NO: 155907 - DNA, 15 bp, Unknown
  misc_feature (1)..( 15): Result.004 file - promoters50/1016094
cacatgtgagagtaa

SEQ ID NO: 155908 - DNA, 15 bp, Unknown
  misc_feature (1)..( 15): Result.004 file - promoters50/1016094
cacttgtgtttgatt

SEQ ID NO: 155909 - DNA, 15 bp, Unknown
  misc_feature (1)..( 15): Result.004 file - promoters50/1016094
tgattgagttttatt

SEQ ID NO: 155910 - DNA, 15 bp, Unknown
  misc_feature (1)..( 15): Result.004 file - promoters50/1016094
taattgtatttattt

SEQ ID NO: 155911 - DNA, 9 bp, Unknown
  misc_feature (1)..( 9): Result.004 file - promoters50/1016094
gaaaaaaaa

SEQ ID NO: 155912 - DNA, 9 bp, Unknown
  misc_feature (1)..( 9): Result.004 file - promoters50/1016094
gaataaaaa

SEQ ID NO: 155913 - DNA, 9 bp, Unknown
  misc_feature (1)..( 9): Result.004 file - promoters50/1016094
gaaaaaaat

SEQ ID NO: 155914 - DNA, 9 bp, Unknown
  misc_feature (1)..( 9): Result.004 file - promoters50/1016133
taaaataat

SEQ ID NO: 155915 - DNA, 8 bp, Unknown
  misc_feature (1)..( 8): Result.004 file - promoters50/1016133
ataacatt

SEQ ID NO: 155916 - DNA, 8 bp, Unknown
  misc_feature (1)..( 8): Result.004 file - promoters50/1016133
ataccatt

SEQ ID NO: 155917 - DNA, 8 bp, Unknown
  misc_feature (1)..( 8): Result.004 file - promoters50/1016133
gtaacatt

SEQ ID NO: 155918 - DNA, 10 bp, Unknown
  misc_feature (1)..( 10): Result.004 file - promoters50/1016133
gtatatcaaa

SEQ ID NO: 155919 - DNA, 10 bp, Unknown
  misc_feature (1)..( 10): Result.004 file - promoters50/1016133
aaatattaaa

SEQ ID NO: 155920 - DNA, 10 bp, Unknown
  misc_feature (1)..( 10): Result.004 file - promoters50/1016133
gtatgtcagc

SEQ ID NO: 155921 - DNA, 12 bp, Unknown
  misc_feature (1)..( 12): Result.004 file - promoters50/1016133
catcgtttgtat

SEQ ID NO: 155922 - DNA, 12 bp, Unknown
  misc_feature (1)..( 12): Result.004 file - promoters50/1016133
tatctttttctt

SEQ ID NO: 155923 - DNA, 12 bp, Unknown
  misc_feature (1)..( 12): Result.004 file - promoters50/1016133
tatttttgtctt

SEQ ID NO: 155924 - DNA, 7 bp, Unknown
  misc_feature (1)..( 7): Result.004 file - promoters50/1016133
tatttta

SEQ ID NO: 155925 - DNA, 7 bp, Unknown
  misc_feature (1)..( 7): Result.004 file - promoters50/1016133
catttta

SEQ ID NO: 155926 - DNA, 7 bp, Unknown
  misc_feature (1)..( 7): Result.004 file - promoters50/1016133
tattttt

SEQ ID NO: 155927 - DNA, 10 bp, Unknown
  misc_feature (1)..( 10): Result.004 file - promoters50/1016133
aaaatattac

SEQ ID NO: 155928 - DNA, 10 bp, Unknown
  misc_feature (1)..( 10): Result.004 file - promoters50/1016133
ataattttat

SEQ ID NO: 155929 - DNA, 10 bp, Unknown
  misc_feature (1)..( 10): Result.004 file - promoters50/1016133
aaaatattac

SEQ ID NO: 155930 - DNA, 8 bp, Unknown
  misc_feature (1)..( 8): Result.004 file - promoters50/1016133
aaatatat

SEQ ID NO: 155931 - DNA, 7 bp, Unknown
  misc_feature (1)..( 7): Result.004 file - promoters50/1016133
tatatat

SEQ ID NO: 155932 - DNA, 8 bp, Unknown
  misc_feature (1)..( 8): Result.004 file - promoters50/1016165
aaagataa

SEQ ID NO: 155933 - DNA, 9 bp, Unknown
  misc_feature (1)..( 9): Result.004 file - promoters50/1016165
taatcactg

SEQ ID NO: 155934 - DNA, 9 bp, Unknown
  misc_feature (1)..( 9): Result.004 file - promoters50/1016165
taatcacat

SEQ ID NO: 155935 - DNA, 9 bp, Unknown
  misc_feature (1)..( 9): Result.004 file - promoters50/1016165
taatcaaat

SEQ ID NO: 155936 - DNA, 9 bp, Unknown
  misc_feature (1)..( 9): Result.004 file - promoters50/1016165
aaataaaaa

SEQ ID NO: 155937 - DNA, 9 bp, Unknown
  misc_feature (1)..( 9): Result.004 file - promoters50/1016165
atataaaac

SEQ ID NO: 155938 - DNA, 10 bp, Unknown
  misc_feature (1)..( 10): Result.004 file - promoters50/1016165
atatacaaaa

SEQ ID NO: 155939 - DNA, 13 bp, Unknown
  misc_feature (1)..( 13): Result.004 file - promoters50/1016165
taatcactgatga

SEQ ID NO: 155940 - DNA, 13 bp, Unknown
  misc_feature (1)..( 13): Result.004 file - promoters50/1016165
ggaacactaatgt

SEQ ID NO: 155941 - DNA, 13 bp, Unknown
  misc_feature (1)..( 13): Result.004 file - promoters50/1016165
agtttactaattt

SEQ ID NO: 155942 - DNA, 13 bp, Unknown
  misc_feature (1)..( 13): Result.004 file - promoters50/1016165
cccttaataattt

SEQ ID NO: 155943 - DNA, 13 bp, Unknown
  misc_feature (1)..( 13): Result.004 file - promoters50/1016165
aaaaaactaatca

SEQ ID NO: 155944 - DNA, 13 bp, Unknown
  misc_feature (1)..( 13): Result.004 file - promoters50/1016165
aaaaaacgaatgg

SEQ ID NO: 155945 - DNA, 13 bp, Unknown
  misc_feature (1)..( 13): Result.004 file - promoters50/1016176
cacttgataattg

SEQ ID NO: 155946 - DNA, 16 bp, Unknown
  misc_feature (1)..( 16): Result.004 file - promoters50/1016176
aagcagaaaaactgga

SEQ ID NO: 155947 - DNA, 16 bp, Unknown
  misc_feature (1)..( 16): Result.004 file - promoters50/1016176
caaagtcaaacctgaa

SEQ ID NO: 155948 - DNA, 16 bp, Unknown
  misc_feature (1)..( 16): Result.004 file - promoters50/1016176
caaaataaaaattggt

SEQ ID NO: 155949 - DNA, 16 bp, Unknown
  misc_feature (1)..( 16): Result.004 file - promoters50/1016176
aaaatccaaacccaag

SEQ ID NO: 155950 - DNA, 16 bp, Unknown
  misc_feature (1)..( 16): Result.004 file - promoters50/1016176
agcaggccaaccccaa

SEQ ID NO: 155951 - DNA, 16 bp, Unknown
  misc_feature (1)..( 16): Result.004 file - promoters50/1016176
agaaaaaaaagttgtc

SEQ ID NO: 155952 - DNA, 16 bp, Unknown
  misc_feature (1)..( 16): Result.004 file - promoters50/1016176
tcaaaaaaaaaagttt

SEQ ID NO: 155953 - DNA, 8 bp, Unknown
  misc_feature (1)..( 8): Result.004 file - promoters50/1016176
aagaaacc

SEQ ID NO: 155954 - DNA, 8 bp, Unknown
  misc_feature (1)..( 8): Result.004 file - promoters50/1016176
cagacacc

SEQ ID NO: 155955 - DNA, 8 bp, Unknown
  misc_feature (1)..( 8): Result.004 file - promoters50/1016176
aagaaaaa

SEQ ID NO: 155956 - DNA, 8 bp, Unknown
  misc_feature (1)..( 8): Result.004 file - promoters50/1016176
cagaaaag

SEQ ID NO: 155957 - DNA, 8 bp, Unknown
  misc_feature (1)..( 8): Result.004 file - promoters50/1016176
aacataca

SEQ ID NO: 155958 - DNA, 8 bp, Unknown
  misc_feature (1)..( 8): Result.004 file - promoters50/1016223
aacaaaca

SEQ ID NO: 155959 - DNA, 8 bp, Unknown
  misc_feature (1)..( 8): Result.004 file - promoters50/1016223
aaaacaac

SEQ ID NO: 155960 - DNA, 8 bp, Unknown
  misc_feature (1)..( 8): Result.004 file - promoters50/1016223
aaaaaaac

SEQ ID NO: 155961 - DNA, 8 bp, Unknown
  misc_feature (1)..( 8): Result.004 file - promoters50/1016226
aaaacaat

SEQ ID NO: 155962 - DNA, 13 bp, Unknown
  misc_feature (1)..( 13): Result.004 file - promoters50/1016226
agatccgaaaatt

SEQ ID NO: 155963 - DNA, 13 bp, Unknown
  misc_feature (1)..( 13): Result.004 file - promoters50/1016226
attaccgaaaatt

SEQ ID NO: 155964 - DNA, 13 bp, Unknown
  misc_feature (1)..( 13): Result.004 file - promoters50/1016226
agatcggaaagtc

SEQ ID NO: 155965 - DNA, 9 bp, Unknown
  misc_feature (1)..( 9): Result.004 file - promoters50/1016226
gcaatgtct

SEQ ID NO: 155966 - DNA, 9 bp, Unknown
  misc_feature (1)..( 9): Result.004 file - promoters50/1016226
agaatatct

SEQ ID NO: 155967 - DNA, 9 bp, Unknown
  misc_feature (1)..( 9): Result.004 file - promoters50/1016238
gcaacgtct

SEQ ID NO: 155968 - DNA, 10 bp, Unknown
  misc_feature (1)..( 10): Result.004 file - promoters50/1016238
gattattttt

SEQ ID NO: 155969 - DNA, 10 bp, Unknown
  misc_feature (1)..( 10): Result.004 file - promoters50/1016238
gatgatttga

SEQ ID NO: 155970 - DNA, 10 bp, Unknown
  misc_feature (1)..( 10): Result.004 file - promoters50/1016238
atatattttt

SEQ ID NO: 155971 - DNA, 10 bp, Unknown
  misc_feature (1)..( 10): Result.004 file - promoters50/1016238
agtgattttt

SEQ ID NO: 155972 - DNA, 8 bp, Unknown
  misc_feature (1)..( 8): Result.004 file - promoters50/1016238
ccaacttt

SEQ ID NO: 155973 - DNA, 8 bp, Unknown
  misc_feature (1)..( 8): Result.004 file - promoters50/1016238
tcaatttt

SEQ ID NO: 155974 - DNA, 8 bp, Unknown
  misc_feature (1)..( 8): Result.004 file - promoters50/1016238
tcaatttg

SEQ ID NO: 155975 - DNA, 8 bp, Unknown
  misc_feature (1)..( 8): Result.004 file - promoters50/1016246
ctaatttt

SEQ ID NO: 155976 - DNA, 13 bp, Unknown
  misc_feature (1)..( 13): Result.004 file - promoters50/1016246
gttgtcagagatc

SEQ ID NO: 155977 - DNA, 13 bp, Unknown
  misc_feature (1)..( 13): Result.004 file - promoters50/1016246
atctcaagagatt

SEQ ID NO: 155978 - DNA, 13 bp, Unknown
  misc_feature (1)..( 13): Result.004 file - promoters50/1016246
gttgacagagacg

SEQ ID NO: 155979 - DNA, 13 bp, Unknown
  misc_feature (1)..( 13): Result.004 file - promoters50/1016246
gaaggtggagatt

SEQ ID NO: 155980 - DNA, 10 bp, Unknown
  misc_feature (1)..( 10): Result.004 file - promoters50/1016246
gtgaaaaaag

SEQ ID NO: 155981 - DNA, 10 bp, Unknown
  misc_feature (1)..( 10): Result.004 file - promoters50/1016246
gtgagaaaga

SEQ ID NO: 155982 - DNA, 10 bp, Unknown
  misc_feature (1)..( 10): Result.004 file - promoters50/1016250
gagagcaaga

SEQ ID NO: 155983 - DNA, 12 bp, Unknown
  misc_feature (1)..( 12): Result.004 file - promoters50/1016250
acttttacataa

SEQ ID NO: 155984 - DNA, 12 bp, Unknown
  misc_feature (1)..( 12): Result.004 file - promoters50/1016250
aattttgcatag

SEQ ID NO: 155985 - DNA, 12 bp, Unknown
  misc_feature (1)..( 12): Result.004 file - promoters50/1016250
tgtagtacatat

SEQ ID NO: 155986 - DNA, 12 bp, Unknown
  misc_feature (1)..( 12): Result.004 file - promoters50/1016250
tattttgtgtgt

SEQ ID NO: 155987 - DNA, 12 bp, Unknown
  misc_feature (1)..( 12): Result.004 file - promoters50/1016250
aaagaaacatat

SEQ ID NO: 155988 - DNA, 12 bp, Unknown
  misc_feature (1)..( 12): Result.004 file - promoters50/1016250
tattttacgtac

SEQ ID NO: 155989 - DNA, 15 bp, Unknown
  misc_feature (1)..( 15): Result.004 file - promoters50/1016250
gtaattagaaaattt

SEQ ID NO: 155990 - DNA, 15 bp, Unknown
  misc_feature (1)..( 15): Result.004 file - promoters50/1016250
aacattaaaaaaatg

SEQ ID NO: 155991 - DNA, 15 bp, Unknown
  misc_feature (1)..( 15): Result.004 file - promoters50/1016250
ctttaaagaaaaaga

SEQ ID NO: 155992 - DNA, 15 bp, Unknown
  misc_feature (1)..( 15): Result.004 file - promoters50/1016250
aacagtaaaaccata

SEQ ID NO: 155993 - DNA, 15 bp, Unknown
  misc_feature (1)..( 15): Result.004 file - promoters50/1016250
aacatcaaacaataa

SEQ ID NO: 155994 - DNA, 15 bp, Unknown
  misc_feature (1)..( 15): Result.004 file - promoters50/1016250
atgattaaaacatta

SEQ ID NO: 155995 - DNA, 16 bp, Unknown
  misc_feature (1)..( 16): Result.004 file - promoters50/1016250
aacgaaaaataaataa

SEQ ID NO: 155996 - DNA, 16 bp, Unknown
  misc_feature (1)..( 16): Result.004 file - promoters50/1016250
cttcataaaatctata

SEQ ID NO: 155997 - DNA, 16 bp, Unknown
  misc_feature (1)..( 16): Result.004 file - promoters50/1016250
attcataaactctata

SEQ ID NO: 155998 - DNA, 17 bp, Unknown
  misc_feature (1)..( 17): Result.004 file - promoters50/1016250
tatcactaaactcttag

SEQ ID NO: 155999 - DNA, 16 bp, Unknown
  misc_feature (1)..( 16): Result.004 file - promoters50/1016250
tttcttaatataaacg

SEQ ID NO: 156000 - DNA, 16 bp, Unknown
  misc_feature (1)..( 16): Result.004 file - promoters50/1016250
tttcatatgtttccaa

SEQ ID NO: 156001 - DNA, 17 bp, Unknown
  misc_feature (1)..( 17): Result.004 file - promoters50/1016261
attgcttcgtagattgc

SEQ ID NO: 156002 - DNA, 14 bp, Unknown
  misc_feature (1)..( 14): Result.004 file - promoters50/1016261
atacaattataaat

SEQ ID NO: 156003 - DNA, 14 bp, Unknown
  misc_feature (1)..( 14): Result.004 file - promoters50/1016261
taataataataata

SEQ ID NO: 156004 - DNA, 16 bp, Unknown
  misc_feature (1)..( 16): Result.004 file - promoters50/1016261
tatcaataaatgaaaa

SEQ ID NO: 156005 - DNA, 7 bp, Unknown
  misc_feature (1)..( 7): Result.004 file - promoters50/1016261
aaaaaaa

SEQ ID NO: 156006 - DNA, 7 bp, Unknown
  misc_feature (1)..( 7): Result.004 file - promoters50/1016261
aaaaaaa

SEQ ID NO: 156007 - DNA, 7 bp, Unknown
  misc_feature (1)..( 7): Result.004 file - promoters50/1016261
aaacaaa

SEQ ID NO: 156008 - DNA, 8 bp, Unknown
  misc_feature (1)..( 8): Result.004 file - promoters50/1016261
tatataaa

SEQ ID NO: 156009 - DNA, 8 bp, Unknown
  misc_feature (1)..( 8): Result.004 file - promoters50/1016261
actataaa

SEQ ID NO: 156010 - DNA, 8 bp, Unknown
  misc_feature (1)..( 8): Result.004 file - promoters50/1016268
tatataac

SEQ ID NO: 156011 - DNA, 10 bp, Unknown
  misc_feature (1)..( 10): Result.004 file - promoters50/1016268
ggagtttaaa

SEQ ID NO: 156012 - DNA, 10 bp, Unknown
  misc_feature (1)..( 10): Result.004 file - promoters50/1016268
attgtttaag

SEQ ID NO: 156013 - DNA, 11 bp, Unknown
  misc_feature (1)..( 11): Result.004 file - promoters50/1016268
ggattttcaaa

SEQ ID NO: 156014 - DNA, 9 bp, Unknown
  misc_feature (1)..( 9): Result.004 file - promoters50/1016268
ttatattct

SEQ ID NO: 156015 - DNA, 9 bp, Unknown
  misc_feature (1)..( 9): Result.004 file - promoters50/1016268
ttaaattcg

SEQ ID NO: 156016 - DNA, 9 bp, Unknown
  misc_feature (1)..( 9): Result.004 file - promoters50/1016268
aaatagtct

SEQ ID NO: 156017 - DNA, 8 bp, Unknown
  misc_feature (1)..( 8): Result.004 file - promoters50/1016268
gaataaac

SEQ ID NO: 156018 - DNA, 8 bp, Unknown
  misc_feature (1)..( 8): Result.004 file - promoters50/1016268
aaataaaa

SEQ ID NO: 156019 - DNA, 8 bp, Unknown
  misc_feature (1)..( 8): Result.004 file - promoters50/1016268
gaattaac

SEQ ID NO: 156020 - DNA, 7 bp, Unknown
  misc_feature (1)..( 7): Result.004 file - promoters50/1016268
aatacaa

SEQ ID NO: 156021 - DNA, 7 bp, Unknown
  misc_feature (1)..( 7): Result.004 file - promoters50/1016268
tatacaa

SEQ ID NO: 156022 - DNA, 7 bp, Unknown
  misc_feature (1)..( 7): Result.004 file - promoters50/1016268
aatacag

SEQ ID NO: 156023 - DNA, 9 bp, Unknown
  misc_feature (1)..( 9): Result.004 file - promoters50/1016268
aagacaaaa

SEQ ID NO: 156024 - DNA, 9 bp, Unknown
  misc_feature (1)..( 9): Result.004 file - promoters50/1016268
aagataaac

SEQ ID NO: 156025 - DNA, 9 bp, Unknown
  misc_feature (1)..( 9): Result.004 file - promoters50/1016268
aaaacaaaa

SEQ ID NO: 156026 - DNA, 8 bp, Unknown
  misc_feature (1)..( 8): Result.004 file - promoters50/1016268
ctctcttc

SEQ ID NO: 156027 - DNA, 8 bp, Unknown
  misc_feature (1)..( 8): Result.004 file - promoters50/1016268
ttctcttc

SEQ ID NO: 156028 - DNA, 8 bp, Unknown
  misc_feature (1)..( 8): Result.004 file - promoters50/1016268
ctctctct

SEQ ID NO: 156029 - DNA, 10 bp, Unknown
  misc_feature (1)..( 10): Result.004 file - promoters50/1016268
ggaaatgcaa

SEQ ID NO: 156030 - DNA, 10 bp, Unknown
  misc_feature (1)..( 10): Result.004 file - promoters50/1016268
aaaaattcaa

SEQ ID NO: 156031 - DNA, 10 bp, Unknown
  misc_feature (1)..( 10): Result.004 file - promoters50/1016268
aaaaatttga

SEQ ID NO: 156032 - DNA, 9 bp, Unknown
  misc_feature (1)..( 9): Result.004 file - promoters50/1016268
ttaaaaata

SEQ ID NO: 156033 - DNA, 9 bp, Unknown
  misc_feature (1)..( 9): Result.004 file - promoters50/1016268
ttaataatc

SEQ ID NO: 156034 - DNA, 9 bp, Unknown
  misc_feature (1)..( 9): Result.004 file - promoters50/1016268
ggtataatc

SEQ ID NO: 156035 - DNA, 9 bp, Unknown
  misc_feature (1)..( 9): Result.004 file - promoters50/1016268
ttttaagaa

SEQ ID NO: 156036 - DNA, 9 bp, Unknown
  misc_feature (1)..( 9): Result.004 file - promoters50/1016268
ttttaggaa

SEQ ID NO: 156037 - DNA, 9 bp, Unknown
  misc_feature (1)..( 9): Result.004 file - promoters50/1016268
aattaggaa

SEQ ID NO: 156038 - DNA, 8 bp, Unknown
  misc_feature (1)..( 8): Result.004 file - promoters50/1016268
aaattatt

SEQ ID NO: 156039 - DNA, 8 bp, Unknown
  misc_feature (1)..( 8): Result.004 file - promoters50/1016268
aaaatata

SEQ ID NO: 156040 - DNA, 8 bp, Unknown
  misc_feature (1)..( 8): Result.004 file - promoters50/1016268
aaaatatt

SEQ ID NO: 156041 - DNA, 8 bp, Unknown
  misc_feature (1)..( 8): Result.004 file - promoters50/1016268
cgtttgat

SEQ ID NO: 156042 - DNA, 8 bp, Unknown
  misc_feature (1)..( 8): Result.004 file - promoters50/1016268
tgtttgat

SEQ ID NO: 156043 - DNA, 8 bp, Unknown
  misc_feature (1)..( 8): Result.004 file - promoters50/1016268
cgtatgat

SEQ ID NO: 156044 - DNA, 9 bp, Unknown
  misc_feature (1)..( 9): Result.004 file - promoters50/1016268
aaatatata

SEQ ID NO: 156045 - DNA, 9 bp, Unknown
  misc_feature (1)..( 9): Result.004 file - promoters50/1016268
aaacatata

SEQ ID NO: 156046 - DNA, 9 bp, Unknown
  misc_feature (1)..( 9): Result.004 file - promoters50/1016268
aaatatata

SEQ ID NO: 156047 - DNA, 9 bp, Unknown
  misc_feature (1)..( 9): Result.004 file - promoters50/1016268
aaataataa

SEQ ID NO: 156048 - DNA, 9 bp, Unknown
  misc_feature (1)..( 9): Result.004 file - promoters50/1016268
aaatcataa

SEQ ID NO: 156049 - DNA, 10 bp, Unknown
  misc_feature (1)..( 10): Result.004 file - promoters50/1016268
ccatacatac

SEQ ID NO: 156050 - DNA, 8 bp, Unknown
  misc_feature (1)..( 8): Result.004 file - promoters50/1016268
aatttttg

SEQ ID NO: 156051 - DNA, 8 bp, Unknown
  misc_feature (1)..( 8): Result.004 file - promoters50/1016268
cattattg

SEQ ID NO: 156052 - DNA, 8 bp, Unknown
  misc_feature (1)..( 8): Result.004 file - promoters50/1016268
tattatat

SEQ ID NO: 156053 - DNA, 8 bp, Unknown
  misc_feature (1)..( 8): Result.004 file - promoters50/1016268
ttttcttt

SEQ ID NO: 156054 - DNA, 8 bp, Unknown
  misc_feature (1)..( 8): Result.004 file - promoters50/1016268
tttccttg

SEQ ID NO: 156055 - DNA, 8 bp, Unknown
  misc_feature (1)..( 8): Result.004 file - promoters50/1016268
tctccttg

SEQ ID NO: 156056 - DNA, 8 bp, Unknown
  misc_feature (1)..( 8): Result.004 file - promoters50/1016268
tatcataa

SEQ ID NO: 156057 - DNA, 8 bp, Unknown
  misc_feature (1)..( 8): Result.004 file - promoters50/1016268
tataataa

SEQ ID NO: 156058 - DNA, 8 bp, Unknown
  misc_feature (1)..( 8): Result.004 file - promoters50/1016268
aatagtaa

SEQ ID NO: 156059 - DNA, 8 bp, Unknown
  misc_feature (1)..( 8): Result.004 file - promoters50/1016268
gaaatata

SEQ ID NO: 156060 - DNA, 8 bp, Unknown
  misc_feature (1)..( 8): Result.004 file - promoters50/1016268
taaatata

SEQ ID NO: 156061 - DNA, 9 bp, Unknown
  misc_feature (1)..( 9): Result.004 file - promoters50/1016278
aaacatata

SEQ ID NO: 156062 - DNA, 8 bp, Unknown
  misc_feature (1)..( 8): Result.004 file - promoters50/1016278
taattaag

SEQ ID NO: 156063 - DNA, 8 bp, Unknown
  misc_feature (1)..( 8): Result.004 file - promoters50/1016278
taattatt

SEQ ID NO: 156064 - DNA, 8 bp, Unknown
  misc_feature (1)..( 8): Result.004 file - promoters50/1016278
taattatc

SEQ ID NO: 156065 - DNA, 8 bp, Unknown
  misc_feature (1)..( 8): Result.004 file - promoters50/1016278
aaattatt

SEQ ID NO: 156066 - DNA, 10 bp, Unknown
  misc_feature (1)..( 10): Result.004 file - promoters50/1016278
gttactgatt

SEQ ID NO: 156067 - DNA, 10 bp, Unknown
  misc_feature (1)..( 10): Result.004 file - promoters50/1016278
tttattgatc

SEQ ID NO: 156068 - DNA, 10 bp, Unknown
  misc_feature (1)..( 10): Result.004 file - promoters50/1016278
attacttatt

SEQ ID NO: 156069 - DNA, 11 bp, Unknown
  misc_feature (1)..( 11): Result.004 file - promoters50/1016368
tttgattgaat

SEQ ID NO: 156070 - DNA, 8 bp, Unknown
  misc_feature (1)..( 8): Result.004 file - promoters50/1016368
gagaatgc

SEQ ID NO: 156071 - DNA, 8 bp, Unknown
  misc_feature (1)..( 8): Result.004 file - promoters50/1016368
gagaatcg

SEQ ID NO: 156072 - DNA, 8 bp, Unknown
  misc_feature (1)..( 8): Result.004 file - promoters50/1016368
aagactcg

SEQ ID NO: 156073 - DNA, 11 bp, Unknown
  misc_feature (1)..( 11): Result.004 file - promoters50/1016368
tcacaatttgt

SEQ ID NO: 156074 - DNA, 11 bp, Unknown
  misc_feature (1)..( 11): Result.004 file - promoters50/1016368
atgtaatatgt

SEQ ID NO: 156075 - DNA, 11 bp, Unknown
  misc_feature (1)..( 11): Result.004 file - promoters50/1016368
tcataatttgg

SEQ ID NO: 156076 - DNA, 12 bp, Unknown
  misc_feature (1)..( 12): Result.004 file - promoters50/1016368
aaataaaaaaca

SEQ ID NO: 156077 - DNA, 12 bp, Unknown
  misc_feature (1)..( 12): Result.004 file - promoters50/1016368
aaatagaaaaca

SEQ ID NO: 156078 - DNA, 12 bp, Unknown
  misc_feature (1)..( 12): Result.004 file - promoters50/1016368
caatcaaaatct

SEQ ID NO: 156079 - DNA, 10 bp, Unknown
  misc_feature (1)..( 10): Result.004 file - promoters50/1016368
ccaatataat

SEQ ID NO: 156080 - DNA, 10 bp, Unknown
  misc_feature (1)..( 10): Result.004 file - promoters50/1016368
actatataat

SEQ ID NO: 156081 - DNA, 10 bp, Unknown
  misc_feature (1)..( 10): Result.004 file - promoters50/1016382
actatatata

SEQ ID NO: 156082 - DNA, 11 bp, Unknown
  misc_feature (1)..( 11): Result.004 file - promoters50/1016382
ttttaatatat

SEQ ID NO: 156083 - DNA, 11 bp, Unknown
  misc_feature (1)..( 11): Result.004 file - promoters50/1016382
ttttaatctat

SEQ ID NO: 156084 - DNA, 11 bp, Unknown
  misc_feature (1)..( 11): Result.004 file - promoters50/1016418
atttcatatcc

SEQ ID NO: 156085 - DNA, 12 bp, Unknown
  misc_feature (1)..( 12): Result.004 file - promoters50/1016418
ataatttcaaat

SEQ ID NO: 156086 - DNA, 12 bp, Unknown
  misc_feature (1)..( 12): Result.004 file - promoters50/1016418
ttgtcatcaaat

SEQ ID NO: 156087 - DNA, 12 bp, Unknown
  misc_feature (1)..( 12): Result.004 file - promoters50/1016418
cataatttaaaa

SEQ ID NO: 156088 - DNA, 12 bp, Unknown
  misc_feature (1)..( 12): Result.004 file - promoters50/1016418
tttctttcaaaa

SEQ ID NO: 156089 - DNA, 12 bp, Unknown
  misc_feature (1)..( 12): Result.004 file - promoters50/1016418
catcattactta

SEQ ID NO: 156090 - DNA, 12 bp, Unknown
  misc_feature (1)..( 12): Result.004 file - promoters50/1016418
catctttcagac

SEQ ID NO: 156091 - DNA, 14 bp, Unknown
  misc_feature (1)..( 14): Result.004 file - promoters50/1016418
tcattaatcaattg

SEQ ID NO: 156092 - DNA, 14 bp, Unknown
  misc_feature (1)..( 14): Result.004 file - promoters50/1016418
taaaatatcaatat

SEQ ID NO: 156093 - DNA, 14 bp, Unknown
  misc_feature (1)..( 14): Result.004 file - promoters50/1016418
tcattagtcaaatt

SEQ ID NO: 156094 - DNA, 14 bp, Unknown
  misc_feature (1)..( 14): Result.004 file - promoters50/1016418
cattatataaatgt

SEQ ID NO: 156095 - DNA, 13 bp, Unknown
  misc_feature (1)..( 13): Result.004 file - promoters50/1016418
aaatagtaactgt

SEQ ID NO: 156096 - DNA, 13 bp, Unknown
  misc_feature (1)..( 13): Result.004 file - promoters50/1016418
attatttggattt

SEQ ID NO: 156097 - DNA, 13 bp, Unknown
  misc_feature (1)..( 13): Result.004 file - promoters50/1016418
aatatttgttgat

SEQ ID NO: 156098 - DNA, 13 bp, Unknown
  misc_feature (1)..( 13): Result.004 file - promoters50/1016418
tttatgtggaaaa

SEQ ID NO: 156099 - DNA, 13 bp, Unknown
  misc_feature (1)..( 13): Result.004 file - promoters50/1016418
attaattgttcac

SEQ ID NO: 156100 - DNA, 13 bp, Unknown
  misc_feature (1)..( 13): Result.004 file - promoters50/1016426
tatattttgattt

SEQ ID NO: 156101 - DNA, 9 bp, Unknown
  misc_feature (1)..( 9): Result.004 file - promoters50/1016426
gaaagttaa

SEQ ID NO: 156102 - DNA, 9 bp, Unknown
  misc_feature (1)..( 9): Result.004 file - promoters50/1016426
gaaggtttt

SEQ ID NO: 156103 - DNA, 9 bp, Unknown
  misc_feature (1)..( 9): Result.004 file - promoters50/1016426
caaaattaa

SEQ ID NO: 156104 - DNA, 6 bp, Unknown
  misc_feature (1)..( 6): Result.004 file - promoters50/1016426
aatttt

SEQ ID NO: 156105 - DNA, 6 bp, Unknown
  misc_feature (1)..( 6): Result.004 file - promoters50/1016426
aatttt

SEQ ID NO: 156106 - DNA, 6 bp, Unknown
  misc_feature (1)..( 6): Result.004 file - promoters50/1016426
aatttt

SEQ ID NO: 156107 - DNA, 8 bp, Unknown
  misc_feature (1)..( 8): Result.004 file - promoters50/1016426
tttaaatt

SEQ ID NO: 156108 - DNA, 8 bp, Unknown
  misc_feature (1)..( 8): Result.004 file - promoters50/1016426
tttcaatt

SEQ ID NO: 156109 - DNA, 8 bp, Unknown
  misc_feature (1)..( 8): Result.004 file - promoters50/1016426
tttaaacc

SEQ ID NO: 156110 - DNA, 11 bp, Unknown
  misc_feature (1)..( 11): Result.004 file - promoters50/1016426
ttatacctaaa

SEQ ID NO: 156111 - DNA, 11 bp, Unknown
  misc_feature (1)..( 11): Result.004 file - promoters50/1016426
cattccctaaa

SEQ ID NO: 156112 - DNA, 11 bp, Unknown
  misc_feature (1)..( 11): Result.004 file - promoters50/1016426
ttaaacctaat

SEQ ID NO: 156113 - DNA, 8 bp, Unknown
  misc_feature (1)..( 8): Result.004 file - promoters50/1016426
tatcttcc

SEQ ID NO: 156114 - DNA, 8 bp, Unknown
  misc_feature (1)..( 8): Result.004 file - promoters50/1016426
tttcttcc

SEQ ID NO: 156115 - DNA, 8 bp, Unknown
  misc_feature (1)..( 8): Result.004 file - promoters50/1016468
tttattct

SEQ ID NO: 156116 - DNA, 12 bp, Unknown
  misc_feature (1)..( 12): Result.004 file - promoters50/1016468
gttaatttttga

SEQ ID NO: 156117 - DNA, 12 bp, Unknown
  misc_feature (1)..( 12): Result.004 file - promoters50/1016468
ttgaattttttt

SEQ ID NO: 156118 - DNA, 12 bp, Unknown
  misc_feature (1)..( 12): Result.004 file - promoters50/1016468
tctaattttcta

SEQ ID NO: 156119 - DNA, 12 bp, Unknown
  misc_feature (1)..( 12): Result.004 file - promoters50/1016468
gttaactttgta

SEQ ID NO: 156120 - DNA, 12 bp, Unknown
  misc_feature (1)..( 12): Result.004 file - promoters50/1016468
cttgagtttagg

SEQ ID NO: 156121 - DNA, 12 bp, Unknown
  misc_feature (1)..( 12): Result.004 file - promoters50/1016468
tccaactttctt

SEQ ID NO: 156122 - DNA, 12 bp, Unknown
  misc_feature (1)..( 12): Result.004 file - promoters50/1016468
catcacttggta

SEQ ID NO: 156123 - DNA, 12 bp, Unknown
  misc_feature (1)..( 12): Result.004 file - promoters50/1016468
gaacaaaaccgt

SEQ ID NO: 156124 - DNA, 12 bp, Unknown
  misc_feature (1)..( 12): Result.004 file - promoters50/1016468
gaagaaaaaata

SEQ ID NO: 156125 - DNA, 12 bp, Unknown
  misc_feature (1)..( 12): Result.004 file - promoters50/1016468
aaacaaacgtgg

SEQ ID NO: 156126 - DNA, 12 bp, Unknown
  misc_feature (1)..( 12): Result.004 file - promoters50/1016468
aaacaaatgttt

SEQ ID NO: 156127 - DNA, 12 bp, Unknown
  misc_feature (1)..( 12): Result.004 file - promoters50/1016468
taagaaaatata

SEQ ID NO: 156128 - DNA, 13 bp, Unknown
  misc_feature (1)..( 13): Result.004 file - promoters50/1016468
tatgagaaatcat

SEQ ID NO: 156129 - DNA, 9 bp, Unknown
  misc_feature (1)..( 9): Result.004 file - promoters50/1016468
tggccaact

SEQ ID NO: 156130 - DNA, 9 bp, Unknown
  misc_feature (1)..( 9): Result.004 file - promoters50/1016468
tggtcaaaa

SEQ ID NO: 156131 - DNA, 10 bp, Unknown
  misc_feature (1)..( 10): Result.004 file - promoters50/1016468
gagtctaaag

SEQ ID NO: 156132 - DNA, 10 bp, Unknown
  misc_feature (1)..( 10): Result.004 file - promoters50/1016468
atgtcaaaaa

SEQ ID NO: 156133 - DNA, 10 bp, Unknown
  misc_feature (1)..( 10): Result.004 file - promoters50/1016468
aagtccaaaa

SEQ ID NO: 156134 - DNA, 10 bp, Unknown
  misc_feature (1)..( 10): Result.004 file - promoters50/1016514
tccgcaaaaa

SEQ ID NO: 156135 - DNA, 16 bp, Unknown
  misc_feature (1)..( 16): Result.004 file - promoters50/1016514
ataattcaaataatta

SEQ ID NO: 156136 - DNA, 16 bp, Unknown
  misc_feature (1)..( 16): Result.004 file - promoters50/1016514
ttttccgaaatagtta

SEQ ID NO: 156137 - DNA, 16 bp, Unknown
  misc_feature (1)..( 16): Result.004 file - promoters50/1016514
ttttctgaactagaag

SEQ ID NO: 156138 - DNA, 9 bp, Unknown
  misc_feature (1)..( 9): Result.004 file - promoters50/1016514
aaagaaaaa

SEQ ID NO: 156139 - DNA, 9 bp, Unknown
  misc_feature (1)..( 9): Result.004 file - promoters50/1016514
taagaaaat

SEQ ID NO: 156140 - DNA, 9 bp, Unknown
  misc_feature (1)..( 9): Result.004 file - promoters50/1016525
taacaaaat

SEQ ID NO: 156141 - DNA, 8 bp, Unknown
  misc_feature (1)..( 8): Result.004 file - promoters50/1016525
ctttttaa

SEQ ID NO: 156142 - DNA, 8 bp, Unknown
  misc_feature (1)..( 8): Result.004 file - promoters50/1016525
ttttgtaa

SEQ ID NO: 156143 - DNA, 8 bp, Unknown
  misc_feature (1)..( 8): Result.004 file - promoters50/1016525
cttattat

SEQ ID NO: 156144 - DNA, 7 bp, Unknown
  misc_feature (1)..( 7): Result.004 file - promoters50/1016525
attttaa

SEQ ID NO: 156145 - DNA, 8 bp, Unknown
  misc_feature (1)..( 8): Result.004 file - promoters50/1016525
caataaac

SEQ ID NO: 156146 - DNA, 8 bp, Unknown
  misc_feature (1)..( 8): Result.004 file - promoters50/1016525
taataaat

SEQ ID NO: 156147 - DNA, 8 bp, Unknown
  misc_feature (1)..( 8): Result.004 file - promoters50/1016525
atataaac

SEQ ID NO: 156148 - DNA, 8 bp, Unknown
  misc_feature (1)..( 8): Result.004 file - promoters50/1016525
caataatc

SEQ ID NO: 156149 - DNA, 11 bp, Unknown
  misc_feature (1)..( 11): Result.004 file - promoters50/1016525
agaaaaacagg

SEQ ID NO: 156150 - DNA, 11 bp, Unknown
  misc_feature (1)..( 11): Result.004 file - promoters50/1016525
ataaaaacttt

SEQ ID NO: 156151 - DNA, 11 bp, Unknown
  misc_feature (1)..( 11): Result.004 file - promoters50/1016525
tgaaaaattag

SEQ ID NO: 156152 - DNA, 11 bp, Unknown
  misc_feature (1)..( 11): Result.004 file - promoters50/1016525
atataaacttt

SEQ ID NO: 156153 - DNA, 9 bp, Unknown
  misc_feature (1)..( 9): Result.004 file - promoters50/1016525
caataaacc

SEQ ID NO: 156154 - DNA, 9 bp, Unknown
  misc_feature (1)..( 9): Result.004 file - promoters50/1016525
taataaaga

SEQ ID NO: 156155 - DNA, 9 bp, Unknown
  misc_feature (1)..( 9): Result.004 file - promoters50/1016525
caataatat

SEQ ID NO: 156156 - DNA, 9 bp, Unknown
  misc_feature (1)..( 9): Result.004 file - promoters50/1016525
caaaaaaaa

SEQ ID NO: 156157 - DNA, 9 bp, Unknown
  misc_feature (1)..( 9): Result.004 file - promoters50/1016525
agatattaa

SEQ ID NO: 156158 - DNA, 9 bp, Unknown
  misc_feature (1)..( 9): Result.004 file - promoters50/1016525
aagaaaaat

SEQ ID NO: 156159 - DNA, 9 bp, Unknown
  misc_feature (1)..( 9): Result.004 file - promoters50/1016525
cagaaaaaa

SEQ ID NO: 156160 - DNA, 9 bp, Unknown
  misc_feature (1)..( 9): Result.004 file - promoters50/1016525
caaaaaaaa

SEQ ID NO: 156161 - DNA, 9 bp, Unknown
  misc_feature (1)..( 9): Result.004 file - promoters50/1016525
tagaaaaaa

SEQ ID NO: 156162 - DNA, 8 bp, Unknown
  misc_feature (1)..( 8): Result.004 file - promoters50/1016525
ttttaaaa

SEQ ID NO: 156163 - DNA, 8 bp, Unknown
  misc_feature (1)..( 8): Result.004 file - promoters50/1016525
atttaaaa

SEQ ID NO: 156164 - DNA, 9 bp, Unknown
  misc_feature (1)..( 9): Result.004 file - promoters50/1016525
attctaacg

SEQ ID NO: 156165 - DNA, 9 bp, Unknown
  misc_feature (1)..( 9): Result.004 file - promoters50/1016525
attcaaaat

SEQ ID NO: 156166 - DNA, 14 bp, Unknown
  misc_feature (1)..( 14): Result.004 file - promoters50/1016525
ttttaaaaatatct

SEQ ID NO: 156167 - DNA, 14 bp, Unknown
  misc_feature (1)..( 14): Result.004 file - promoters50/1016525
aaaacaaattattt

SEQ ID NO: 156168 - DNA, 14 bp, Unknown
  misc_feature (1)..( 14): Result.004 file - promoters50/1016525
aatttatatttttt

SEQ ID NO: 156169 - DNA, 14 bp, Unknown
  misc_feature (1)..( 14): Result.004 file - promoters50/1016525
aaaaccaattgata

SEQ ID NO: 156170 - DNA, 9 bp, Unknown
  misc_feature (1)..( 9): Result.004 file - promoters50/1016525
aaataataa

SEQ ID NO: 156171 - DNA, 9 bp, Unknown
  misc_feature (1)..( 9): Result.004 file - promoters50/1016525
aaatgatat

SEQ ID NO: 156172 - DNA, 9 bp, Unknown
  misc_feature (1)..( 9): Result.004 file - promoters50/1016525
agatattaa

SEQ ID NO: 156173 - DNA, 9 bp, Unknown
  misc_feature (1)..( 9): Result.004 file - promoters50/1016624
caataatat

SEQ ID NO: 156174 - DNA, 9 bp, Unknown
  misc_feature (1)..( 9): Result.004 file - promoters50/1016624
attctgaat

SEQ ID NO: 156175 - DNA, 9 bp, Unknown
  misc_feature (1)..( 9): Result.004 file - promoters50/1016624
cttcttaat

SEQ ID NO: 156176 - DNA, 9 bp, Unknown
  misc_feature (1)..( 9): Result.004 file - promoters50/1016624
cttcttcaa

SEQ ID NO: 156177 - DNA, 9 bp, Unknown
  misc_feature (1)..( 9): Result.004 file - promoters50/1016643
gttcttctt

SEQ ID NO: 156178 - DNA, 8 bp, Unknown
  misc_feature (1)..( 8): Result.004 file - promoters50/1016643
atcagcta

SEQ ID NO: 156179 - DNA, 8 bp, Unknown
  misc_feature (1)..( 8): Result.004 file - promoters50/1016643
ttcatcta

SEQ ID NO: 156180 - DNA, 8 bp, Unknown
  misc_feature (1)..( 8): Result.004 file - promoters50/1016665
ttcatctg

SEQ ID NO: 156181 - DNA, 12 bp, Unknown
  misc_feature (1)..( 12): Result.004 file - promoters50/1016665
caaatttatcat

SEQ ID NO: 156182 - DNA, 12 bp, Unknown
  misc_feature (1)..( 12): Result.004 file - promoters50/1016665
ctaatatatcat

SEQ ID NO: 156183 - DNA, 12 bp, Unknown
  misc_feature (1)..( 12): Result.004 file - promoters50/1016665
agaatatatctc

SEQ ID NO: 156184 - DNA, 13 bp, Unknown
  misc_feature (1)..( 13): Result.004 file - promoters50/1016665
ccaactttcaaga

SEQ ID NO: 156185 - DNA, 13 bp, Unknown
  misc_feature (1)..( 13): Result.004 file - promoters50/1016692
cccaataactctt

SEQ ID NO: 156186 - DNA, 10 bp, Unknown
  misc_feature (1)..( 10): Result.004 file - promoters50/1016692
caaacttata

SEQ ID NO: 156187 - DNA, 10 bp, Unknown
  misc_feature (1)..( 10): Result.004 file - promoters50/1016692
gaaagttaga

SEQ ID NO: 156188 - DNA, 10 bp, Unknown
  misc_feature (1)..( 10): Result.004 file - promoters50/1016692
tggactaata

SEQ ID NO: 156189 - DNA, 10 bp, Unknown
  misc_feature (1)..( 10): Result.004 file - promoters50/1016692
gaaagtttcc

SEQ ID NO: 156190 - DNA, 10 bp, Unknown
  misc_feature (1)..( 10): Result.004 file - promoters50/1016692
aaaaattaaa

SEQ ID NO: 156191 - DNA, 10 bp, Unknown
  misc_feature (1)..( 10): Result.004 file - promoters50/1016692
gaaacaagtt

SEQ ID NO: 156192 - DNA, 10 bp, Unknown
  misc_feature (1)..( 10): Result.004 file - promoters50/1016692
aaaataagaa

SEQ ID NO: 156193 - DNA, 10 bp, Unknown
  misc_feature (1)..( 10): Result.004 file - promoters50/1016692
gacacatgtt

SEQ ID NO: 156194 - DNA, 10 bp, Unknown
  misc_feature (1)..( 10): Result.004 file - promoters50/1016692
ataattagat

SEQ ID NO: 156195 - DNA, 10 bp, Unknown
  misc_feature (1)..( 10): Result.004 file - promoters50/1016729
aaaatatcta

SEQ ID NO: 156196 - DNA, 6 bp, Unknown
  misc_feature (1)..( 6): Result.004 file - promoters50/1016729
ttcata

SEQ ID NO: 156197 - DNA, 6 bp, Unknown
  misc_feature (1)..( 6): Result.004 file - promoters50/1016729
ttcata

SEQ ID NO: 156198 - DNA, 6 bp, Unknown
  misc_feature (1)..( 6): Result.004 file - promoters50/1016729
ttcata

SEQ ID NO: 156199 - DNA, 7 bp, Unknown
  misc_feature (1)..( 7): Result.004 file - promoters50/1016729
agcaacg

SEQ ID NO: 156200 - DNA, 7 bp, Unknown
  misc_feature (1)..( 7): Result.004 file - promoters50/1016729
agcaaca

SEQ ID NO: 156201 - DNA, 7 bp, Unknown
  misc_feature (1)..( 7): Result.004 file - promoters50/1016729
agccaca

SEQ ID NO: 156202 - DNA, 9 bp, Unknown
  misc_feature (1)..( 9): Result.004 file - promoters50/1016729
atcaaaaat

SEQ ID NO: 156203 - DNA, 9 bp, Unknown
  misc_feature (1)..( 9): Result.004 file - promoters50/1016729
agcaacaat

SEQ ID NO: 156204 - DNA, 9 bp, Unknown
  misc_feature (1)..( 9): Result.004 file - promoters50/1016767
agccacacc

SEQ ID NO: 156205 - DNA, 12 bp, Unknown
  misc_feature (1)..( 12): Result.004 file - promoters50/1016767
taatacatttat

SEQ ID NO: 156206 - DNA, 12 bp, Unknown
  misc_feature (1)..( 12): Result.004 file - promoters50/1016767
taataaattttg

SEQ ID NO: 156207 - DNA, 12 bp, Unknown
  misc_feature (1)..( 12): Result.004 file - promoters50/1016767
tgatatatttaa

SEQ ID NO: 156208 - DNA, 12 bp, Unknown
  misc_feature (1)..( 12): Result.004 file - promoters50/1016767
aaataaaactcg

SEQ ID NO: 156209 - DNA, 12 bp, Unknown
  misc_feature (1)..( 12): Result.004 file - promoters50/1016767
tgttaagttttg

SEQ ID NO: 156210 - DNA, 10 bp, Unknown
  misc_feature (1)..( 10): Result.004 file - promoters50/1016767
taaaatttaa

SEQ ID NO: 156211 - DNA, 10 bp, Unknown
  misc_feature (1)..( 10): Result.004 file - promoters50/1016767
acaaatttct

SEQ ID NO: 156212 - DNA, 10 bp, Unknown
  misc_feature (1)..( 10): Result.004 file - promoters50/1016767
ccaaatttat

SEQ ID NO: 156213 - DNA, 10 bp, Unknown
  misc_feature (1)..( 10): Result.004 file - promoters50/1016767
tgtaatctct

SEQ ID NO: 156214 - DNA, 10 bp, Unknown
  misc_feature (1)..( 10): Result.004 file - promoters50/1016771
ccaactttca

SEQ ID NO: 156215 - DNA, 9 bp, Unknown
  misc_feature (1)..( 9): Result.004 file - promoters50/1016771
atttttcta

SEQ ID NO: 156216 - DNA, 9 bp, Unknown
  misc_feature (1)..( 9): Result.004 file - promoters50/1016771
attgttccc

SEQ ID NO: 156217 - DNA, 9 bp, Unknown
  misc_feature (1)..( 9): Result.004 file - promoters50/1016771
attttataa

SEQ ID NO: 156218 - DNA, 9 bp, Unknown
  misc_feature (1)..( 9): Result.004 file - promoters50/1016771
tttgttcca

SEQ ID NO: 156219 - DNA, 9 bp, Unknown
  misc_feature (1)..( 9): Result.004 file - promoters50/1016771
attgttagc

SEQ ID NO: 156220 - DNA, 10 bp, Unknown
  misc_feature (1)..( 10): Result.004 file - promoters50/1016771
ctttcttctt

SEQ ID NO: 156221 - DNA, 10 bp, Unknown
  misc_feature (1)..( 10): Result.004 file - promoters50/1016771
aatgttattt

SEQ ID NO: 156222 - DNA, 12 bp, Unknown
  misc_feature (1)..( 12): Result.004 file - promoters50/1016771
atctactttatt

SEQ ID NO: 156223 - DNA, 12 bp, Unknown
  misc_feature (1)..( 12): Result.004 file - promoters50/1016771
cacaaatttatt

SEQ ID NO: 156224 - DNA, 12 bp, Unknown
  misc_feature (1)..( 12): Result.004 file - promoters50/1016771
ctctattttatt

SEQ ID NO: 156225 - DNA, 12 bp, Unknown
  misc_feature (1)..( 12): Result.004 file - promoters50/1016771
ttcttctttatc

SEQ ID NO: 156226 - DNA, 12 bp, Unknown
  misc_feature (1)..( 12): Result.004 file - promoters50/1016771
gtgagttttttt

SEQ ID NO: 156227 - DNA, 12 bp, Unknown
  misc_feature (1)..( 12): Result.004 file - promoters50/1016814
ttctacttcaaa

SEQ ID NO: 156228 - DNA, 11 bp, Unknown
  misc_feature (1)..( 11): Result.004 file - promoters50/1016814
acaacttttac

SEQ ID NO: 156229 - DNA, 11 bp, Unknown
  misc_feature (1)..( 11): Result.004 file - promoters50/1016814
caaacatttga

SEQ ID NO: 156230 - DNA, 11 bp, Unknown
  misc_feature (1)..( 11): Result.004 file - promoters50/1016814
gtgtcttctac

SEQ ID NO: 156231 - DNA, 11 bp, Unknown
  misc_feature (1)..( 11): Result.004 file - promoters50/1016814
caaactttcat

SEQ ID NO: 156232 - DNA, 11 bp, Unknown
  misc_feature (1)..( 11): Result.004 file - promoters50/1016814
taaactttagt

SEQ ID NO: 156233 - DNA, 11 bp, Unknown
  misc_feature (1)..( 11): Result.004 file - promoters50/1016814
taaaaattatt

SEQ ID NO: 156234 - DNA, 11 bp, Unknown
  misc_feature (1)..( 11): Result.004 file - promoters50/1016814
aaaagtattag

SEQ ID NO: 156235 - DNA, 9 bp, Unknown
  misc_feature (1)..( 9): Result.004 file - promoters50/1016814
tattgtatg

SEQ ID NO: 156236 - DNA, 9 bp, Unknown
  misc_feature (1)..( 9): Result.004 file - promoters50/1016814
aattttatc

SEQ ID NO: 156237 - DNA, 9 bp, Unknown
  misc_feature (1)..( 9): Result.004 file - promoters50/1016814
cattttatt

SEQ ID NO: 156238 - DNA, 9 bp, Unknown
  misc_feature (1)..( 9): Result.004 file - promoters50/1016814
cattttggg

SEQ ID NO: 156239 - DNA, 9 bp, Unknown
  misc_feature (1)..( 9): Result.004 file - promoters50/1016814
aattttgtg

SEQ ID NO: 156240 - DNA, 9 bp, Unknown
  misc_feature (1)..( 9): Result.004 file - promoters50/1016854
tgtttcatt

SEQ ID NO: 156241 - DNA, 8 bp, Unknown
  misc_feature (1)..( 8): Result.004 file - promoters50/1016854
aatcttct

SEQ ID NO: 156242 - DNA, 8 bp, Unknown
  misc_feature (1)..( 8): Result.004 file - promoters50/1016854
aatcttat

SEQ ID NO: 156243 - DNA, 8 bp, Unknown
  misc_feature (1)..( 8): Result.004 file - promoters50/1016881
tatcatat

SEQ ID NO: 156244 - DNA, 11 bp, Unknown
  misc_feature (1)..( 11): Result.004 file - promoters50/1016881
ttgtaattaat

SEQ ID NO: 156245 - DNA, 11 bp, Unknown
  misc_feature (1)..( 11): Result.004 file - promoters50/1016881
tattaataaat

SEQ ID NO: 156246 - DNA, 11 bp, Unknown
  misc_feature (1)..( 11): Result.004 file - promoters50/1016881
ttgtaattata

SEQ ID NO: 156247 - DNA, 11 bp, Unknown
  misc_feature (1)..( 11): Result.004 file - promoters50/1016881
atgcaatcaat

SEQ ID NO: 156248 - DNA, 8 bp, Unknown
  misc_feature (1)..( 8): Result.004 file - promoters50/1016881
attcattt

SEQ ID NO: 156249 - DNA, 8 bp, Unknown
  misc_feature (1)..( 8): Result.004 file - promoters50/1016881
attcattt

SEQ ID NO: 156250 - DNA, 8 bp, Unknown
  misc_feature (1)..( 8): Result.004 file - promoters50/1016881
atttatta

SEQ ID NO: 156251 - DNA, 7 bp, Unknown
  misc_feature (1)..( 7): Result.004 file - promoters50/1016881
gtttata

SEQ ID NO: 156252 - DNA, 7 bp, Unknown
  misc_feature (1)..( 7): Result.004 file - promoters50/1016881
gtttatt

SEQ ID NO: 156253 - DNA, 7 bp, Unknown
  misc_feature (1)..( 7): Result.004 file - promoters50/1016881
gttcatt

SEQ ID NO: 156254 - DNA, 9 bp, Unknown
  misc_feature (1)..( 9): Result.004 file - promoters50/1016881
ttaactttt

SEQ ID NO: 156255 - DNA, 9 bp, Unknown
  misc_feature (1)..( 9): Result.004 file - promoters50/1016881
ttaactttt

SEQ ID NO: 156256 - DNA, 9 bp, Unknown
  misc_feature (1)..( 9): Result.004 file - promoters50/1016881
gtaagtttg

SEQ ID NO: 156257 - DNA, 9 bp, Unknown
  misc_feature (1)..( 9): Result.004 file - promoters50/1016881
attattata

SEQ ID NO: 156258 - DNA, 9 bp, Unknown
  misc_feature (1)..( 9): Result.004 file - promoters50/1016881
attaatatc

SEQ ID NO: 156259 - DNA, 9 bp, Unknown
  misc_feature (1)..( 9): Result.004 file - promoters50/1016881
tgtattata

SEQ ID NO: 156260 - DNA, 7 bp, Unknown
  misc_feature (1)..( 7): Result.004 file - promoters50/1016881
aacatcg

SEQ ID NO: 156261 - DNA, 7 bp, Unknown
  misc_feature (1)..( 7): Result.004 file - promoters50/1016881
aacatct

SEQ ID NO: 156262 - DNA, 7 bp, Unknown
  misc_feature (1)..( 7): Result.004 file - promoters50/1016915
cacatct

SEQ ID NO: 156263 - DNA, 11 bp, Unknown
  misc_feature (1)..( 11): Result.004 file - promoters50/1016915
caatcaaataa

SEQ ID NO: 156264 - DNA, 11 bp, Unknown
  misc_feature (1)..( 11): Result.004 file - promoters50/1016915
caattaaaaat

SEQ ID NO: 156265 - DNA, 11 bp, Unknown
  misc_feature (1)..( 11): Result.004 file - promoters50/1016915
aaataaaataa

SEQ ID NO: 156266 - DNA, 8 bp, Unknown
  misc_feature (1)..( 8): Result.004 file - promoters50/1016915
aaaataga

SEQ ID NO: 156267 - DNA, 8 bp, Unknown
  misc_feature (1)..( 8): Result.004 file - promoters50/1016915
aaaataag

SEQ ID NO: 156268 - DNA, 8 bp, Unknown
  misc_feature (1)..( 8): Result.004 file - promoters50/1016915
aaactaag

SEQ ID NO: 156269 - DNA, 8 bp, Unknown
  misc_feature (1)..( 8): Result.004 file - promoters50/1016915
gaatatat

SEQ ID NO: 156270 - DNA, 8 bp, Unknown
  misc_feature (1)..( 8): Result.004 file - promoters50/1016915
agatatat

SEQ ID NO: 156271 - DNA, 8 bp, Unknown
  misc_feature (1)..( 8): Result.004 file - promoters50/1016915
agagataa

SEQ ID NO: 156272 - DNA, 8 bp, Unknown
  misc_feature (1)..( 8): Result.004 file - promoters50/1016915
caaataat

SEQ ID NO: 156273 - DNA, 8 bp, Unknown
  misc_feature (1)..( 8): Result.004 file - promoters50/1016915
caaaaaat

SEQ ID NO: 156274 - DNA, 8 bp, Unknown
  misc_feature (1)..( 8): Result.004 file - promoters50/1016931
ttaaaaat

SEQ ID NO: 156275 - DNA, 7 bp, Unknown
  misc_feature (1)..( 7): Result.004 file - promoters50/1016931
taaacaa

SEQ ID NO: 156276 - DNA, 7 bp, Unknown
  misc_feature (1)..( 7): Result.004 file - promoters50/1016931
taaacac

SEQ ID NO: 156277 - DNA, 7 bp, Unknown
  misc_feature (1)..( 7): Result.004 file - promoters50/1016931
aaaacaa

SEQ ID NO: 156278 - DNA, 10 bp, Unknown
  misc_feature (1)..( 10): Result.004 file - promoters50/1016931
tttttagatc

SEQ ID NO: 156279 - DNA, 10 bp, Unknown
  misc_feature (1)..( 10): Result.004 file - promoters50/1016931
cagttagatc

SEQ ID NO: 156280 - DNA, 10 bp, Unknown
  misc_feature (1)..( 10): Result.004 file - promoters50/1016931
tttatagatt

SEQ ID NO: 156281 - DNA, 10 bp, Unknown
  misc_feature (1)..( 10): Result.004 file - promoters50/1016931
ccaataaatt

SEQ ID NO: 156282 - DNA, 9 bp, Unknown
  misc_feature (1)..( 9): Result.004 file - promoters50/1016931
agatcattt

SEQ ID NO: 156283 - DNA, 9 bp, Unknown
  misc_feature (1)..( 9): Result.004 file - promoters50/1016931
aaatctttt

SEQ ID NO: 156284 - DNA, 9 bp, Unknown
  misc_feature (1)..( 9): Result.004 file - promoters50/1016931
aaatgttta

SEQ ID NO: 156285 - DNA, 7 bp, Unknown
  misc_feature (1)..( 7): Result.004 file - promoters50/1016931
gatttat

SEQ ID NO: 156286 - DNA, 7 bp, Unknown
  misc_feature (1)..( 7): Result.004 file - promoters50/1016931
gatctat

SEQ ID NO: 156287 - DNA, 7 bp, Unknown
  misc_feature (1)..( 7): Result.004 file - promoters50/1016931
gatatat

SEQ ID NO: 156288 - DNA, 7 bp, Unknown
  misc_feature (1)..( 7): Result.004 file - promoters50/1016931
atatcta

SEQ ID NO: 156289 - DNA, 7 bp, Unknown
  misc_feature (1)..( 7): Result.004 file - promoters50/1016931
ttatcta

SEQ ID NO: 156290 - DNA, 7 bp, Unknown
  misc_feature (1)..( 7): Result.004 file - promoters50/1016931
atagcta

SEQ ID NO: 156291 - DNA, 10 bp, Unknown
  misc_feature (1)..( 10): Result.004 file - promoters50/1016931
attattgttt

SEQ ID NO: 156292 - DNA, 10 bp, Unknown
  misc_feature (1)..( 10): Result.004 file - promoters50/1016931
gttactgttt

SEQ ID NO: 156293 - DNA, 10 bp, Unknown
  misc_feature (1)..( 10): Result.004 file - promoters50/1016931
atttttgtgt

SEQ ID NO: 156294 - DNA, 6 bp, Unknown
  misc_feature (1)..( 6): Result.004 file - promoters50/1016931
ttatct

SEQ ID NO: 156295 - DNA, 6 bp, Unknown
  misc_feature (1)..( 6): Result.004 file - promoters50/1016931
ttatct

SEQ ID NO: 156296 - DNA, 6 bp, Unknown
  misc_feature (1)..( 6): Result.004 file - promoters50/1016931
ttatct

SEQ ID NO: 156297 - DNA, 7 bp, Unknown
  misc_feature (1)..( 7): Result.004 file - promoters50/1016931
tcaaaag

SEQ ID NO: 156298 - DNA, 7 bp, Unknown
  misc_feature (1)..( 7): Result.004 file - promoters50/1016931
acaaaag

SEQ ID NO: 156299 - DNA, 7 bp, Unknown
  misc_feature (1)..( 7): Result.004 file - promoters50/1016931
acaaaaa

SEQ ID NO: 156300 - DNA, 12 bp, Unknown
  misc_feature (1)..( 12): Result.004 file - promoters50/1016931
tgataaatcttt

SEQ ID NO: 156301 - DNA, 12 bp, Unknown
  misc_feature (1)..( 12): Result.004 file - promoters50/1016931
caataaattagg

SEQ ID NO: 156302 - DNA, 12 bp, Unknown
  misc_feature (1)..( 12): Result.004 file - promoters50/1016936
tgattaatattt

SEQ ID NO: 156303 - DNA, 8 bp, Unknown
  misc_feature (1)..( 8): Result.004 file - promoters50/1016936
gttttaaa

SEQ ID NO: 156304 - DNA, 8 bp, Unknown
  misc_feature (1)..( 8): Result.004 file - promoters50/1016936
gttttaat

SEQ ID NO: 156305 - DNA, 8 bp, Unknown
  misc_feature (1)..( 8): Result.004 file - promoters50/1016936
atttgaat

SEQ ID NO: 156306 - DNA, 9 bp, Unknown
  misc_feature (1)..( 9): Result.004 file - promoters50/1016936
taatttcta

SEQ ID NO: 156307 - DNA, 9 bp, Unknown
  misc_feature (1)..( 9): Result.004 file - promoters50/1016936
cattttcta

SEQ ID NO: 156308 - DNA, 9 bp, Unknown
  misc_feature (1)..( 9): Result.004 file - promoters50/1016936
catgttctt

SEQ ID NO: 156309 - DNA, 8 bp, Unknown
  misc_feature (1)..( 8): Result.004 file - promoters50/1016936
atatattt

SEQ ID NO: 156310 - DNA, 8 bp, Unknown
  misc_feature (1)..( 8): Result.004 file - promoters50/1016936
atatattt

SEQ ID NO: 156311 - DNA, 8 bp, Unknown
  misc_feature (1)..( 8): Result.004 file - promoters50/1016951
gtattttt

SEQ ID NO: 156312 - DNA, 7 bp, Unknown
  misc_feature (1)..( 7): Result.004 file - promoters50/1016951
tgatttt

SEQ ID NO: 156313 - DNA, 7 bp, Unknown
  misc_feature (1)..( 7): Result.004 file - promoters50/1016951
agatttt

SEQ ID NO: 156314 - DNA, 7 bp, Unknown
  misc_feature (1)..( 7): Result.004 file - promoters50/1016951
agatttc

SEQ ID NO: 156315 - DNA, 7 bp, Unknown
  misc_feature (1)..( 7): Result.004 file - promoters50/1016951
caaacac

SEQ ID NO: 156316 - DNA, 7 bp, Unknown
  misc_feature (1)..( 7): Result.004 file - promoters50/1016951
caaacag

SEQ ID NO: 156317 - DNA, 7 bp, Unknown
  misc_feature (1)..( 7): Result.004 file - promoters50/1016951
aaaacac

SEQ ID NO: 156318 - DNA, 7 bp, Unknown
  misc_feature (1)..( 7): Result.004 file - promoters50/1016951
ttaaata

SEQ ID NO: 156319 - DNA, 7 bp, Unknown
  misc_feature (1)..( 7): Result.004 file - promoters50/1016951
ttatata

SEQ ID NO: 156320 - DNA, 7 bp, Unknown
  misc_feature (1)..( 7): Result.004 file - promoters50/1016951
atacata

SEQ ID NO: 156321 - DNA, 7 bp, Unknown
  misc_feature (1)..( 7): Result.004 file - promoters50/1016951
atatatt

SEQ ID NO: 156322 - DNA, 7 bp, Unknown
  misc_feature (1)..( 7): Result.004 file - promoters50/1016951
atatatc

SEQ ID NO: 156323 - DNA, 7 bp, Unknown
  misc_feature (1)..( 7): Result.004 file - promoters50/1016951
atacata

SEQ ID NO: 156324 - DNA, 6 bp, Unknown
  misc_feature (1)..( 6): Result.004 file - promoters50/1016951
aatttt

SEQ ID NO: 156325 - DNA, 6 bp, Unknown
  misc_feature (1)..( 6): Result.004 file - promoters50/1016951
aatttt

SEQ ID NO: 156326 - DNA, 7 bp, Unknown
  misc_feature (1)..( 7): Result.004 file - promoters50/1016951
aatgttt

SEQ ID NO: 156327 - DNA, 7 bp, Unknown
  misc_feature (1)..( 7): Result.004 file - promoters50/1016951
aacgtaa

SEQ ID NO: 156328 - DNA, 7 bp, Unknown
  misc_feature (1)..( 7): Result.004 file - promoters50/1016951
aacttaa

SEQ ID NO: 156329 - DNA, 7 bp, Unknown
  misc_feature (1)..( 7): Result.004 file - promoters50/1016951
aacataa

SEQ ID NO: 156330 - DNA, 8 bp, Unknown
  misc_feature (1)..( 8): Result.004 file - promoters50/1016951
ttacctaa

SEQ ID NO: 156331 - DNA, 8 bp, Unknown
  misc_feature (1)..( 8): Result.004 file - promoters50/1016951
atacataa

SEQ ID NO: 156332 - DNA, 8 bp, Unknown
  misc_feature (1)..( 8): Result.004 file - promoters50/1017020
atatatat

SEQ ID NO: 156333 - DNA, 14 bp, Unknown
  misc_feature (1)..( 14): Result.004 file - promoters50/1017020
tccagaaaaagttc

SEQ ID NO: 156334 - DNA, 14 bp, Unknown
  misc_feature (1)..( 14): Result.004 file - promoters50/1017020
ttgattcaaaattc

SEQ ID NO: 156335 - DNA, 14 bp, Unknown
  misc_feature (1)..( 14): Result.004 file - promoters50/1017020
ttgaatcaatattt

SEQ ID NO: 156336 - DNA, 15 bp, Unknown
  misc_feature (1)..( 15): Result.004 file - promoters50/1017020
agcagcctatacttt

SEQ ID NO: 156337 - DNA, 8 bp, Unknown
  misc_feature (1)..( 8): Result.004 file - promoters50/1017020
ttaatatg

SEQ ID NO: 156338 - DNA, 8 bp, Unknown
  misc_feature (1)..( 8): Result.004 file - promoters50/1017020
ttaatagc

SEQ ID NO: 156339 - DNA, 8 bp, Unknown
  misc_feature (1)..( 8): Result.004 file - promoters50/1017020
gtaatagc

SEQ ID NO: 156340 - DNA, 9 bp, Unknown
  misc_feature (1)..( 9): Result.004 file - promoters50/1017020
aaaacattt

SEQ ID NO: 156341 - DNA, 9 bp, Unknown
  misc_feature (1)..( 9): Result.004 file - promoters50/1017020
aaaagattt

SEQ ID NO: 156342 - DNA, 9 bp, Unknown
  misc_feature (1)..( 9): Result.004 file - promoters50/1017020
gaaagacaa

SEQ ID NO: 156343 - DNA, 9 bp, Unknown
  misc_feature (1)..( 9): Result.004 file - promoters50/1017020
ataagattg

SEQ ID NO: 156344 - DNA, 10 bp, Unknown
  misc_feature (1)..( 10): Result.004 file - promoters50/1017020
ctatgctttg

SEQ ID NO: 156345 - DNA, 10 bp, Unknown
  misc_feature (1)..( 10): Result.004 file - promoters50/1017020
ctatactttg

SEQ ID NO: 156346 - DNA, 10 bp, Unknown
  misc_feature (1)..( 10): Result.004 file - promoters50/1017041
caatatttta

SEQ ID NO: 156347 - DNA, 7 bp, Unknown
  misc_feature (1)..( 7): Result.004 file - promoters50/1017041
aagtttc

SEQ ID NO: 156348 - DNA, 7 bp, Unknown
  misc_feature (1)..( 7): Result.004 file - promoters50/1017041
gagtttc

SEQ ID NO: 156349 - DNA, 7 bp, Unknown
  misc_feature (1)..( 7): Result.004 file - promoters50/1017046
caatttt

SEQ ID NO: 156350 - DNA, 8 bp, Unknown
  misc_feature (1)..( 8): Result.004 file - promoters50/1017046
taatattt

SEQ ID NO: 156351 - DNA, 8 bp, Unknown
  misc_feature (1)..( 8): Result.004 file - promoters50/1017046
caattttt

SEQ ID NO: 156352 - DNA, 8 bp, Unknown
  misc_feature (1)..( 8): Result.004 file - promoters50/1017046
taatattt

SEQ ID NO: 156353 - DNA, 8 bp, Unknown
  misc_feature (1)..( 8): Result.004 file - promoters50/1017046
aatacttt

SEQ ID NO: 156354 - DNA, 8 bp, Unknown
  misc_feature (1)..( 8): Result.004 file - promoters50/1017046
attacttt

SEQ ID NO: 156355 - DNA, 8 bp, Unknown
  misc_feature (1)..( 8): Result.004 file - promoters50/1017046
aatatttt

SEQ ID NO: 156356 - DNA, 9 bp, Unknown
  misc_feature (1)..( 9): Result.004 file - promoters50/1017046
cctttttac

SEQ ID NO: 156357 - DNA, 9 bp, Unknown
  misc_feature (1)..( 9): Result.004 file - promoters50/1017046
gttttctac

SEQ ID NO: 156358 - DNA, 9 bp, Unknown
  misc_feature (1)..( 9): Result.004 file - promoters50/1017046
cctttttct

SEQ ID NO: 156359 - DNA, 8 bp, Unknown
  misc_feature (1)..( 8): Result.004 file - promoters50/1017046
taaattgg

SEQ ID NO: 156360 - DNA, 8 bp, Unknown
  misc_feature (1)..( 8): Result.004 file - promoters50/1017046
taaatttc

SEQ ID NO: 156361 - DNA, 8 bp, Unknown
  misc_feature (1)..( 8): Result.004 file - promoters50/1017046
taactttc

SEQ ID NO: 156362 - DNA, 14 bp, Unknown
  misc_feature (1)..( 14): Result.004 file - promoters50/1017046
atttccgtttcttt

SEQ ID NO: 156363 - DNA, 14 bp, Unknown
  misc_feature (1)..( 14): Result.004 file - promoters50/1017046
ttaataatttattt

SEQ ID NO: 156364 - DNA, 14 bp, Unknown
  misc_feature (1)..( 14): Result.004 file - promoters50/1017046
ttaacaattttttt

SEQ ID NO: 156365 - DNA, 10 bp, Unknown
  misc_feature (1)..( 10): Result.004 file - promoters50/1017046
tcgggatgga

SEQ ID NO: 156366 - DNA, 10 bp, Unknown
  misc_feature (1)..( 10): Result.004 file - promoters50/1017046
atgggttgga

SEQ ID NO: 156367 - DNA, 10 bp, Unknown
  misc_feature (1)..( 10): Result.004 file - promoters50/1017050
atggcttgca

SEQ ID NO: 156368 - DNA, 12 bp, Unknown
  misc_feature (1)..( 12): Result.004 file - promoters50/1017050
atgattatatga

SEQ ID NO: 156369 - DNA, 12 bp, Unknown
  misc_feature (1)..( 12): Result.004 file - promoters50/1017050
ttgattacatga

SEQ ID NO: 156370 - DNA, 12 bp, Unknown
  misc_feature (1)..( 12): Result.004 file - promoters50/1017050
atgtttacttct

SEQ ID NO: 156371 - DNA, 12 bp, Unknown
  misc_feature (1)..( 12): Result.004 file - promoters50/1017050
acgatgatacag

SEQ ID NO: 156372 - DNA, 12 bp, Unknown
  misc_feature (1)..( 12): Result.004 file - promoters50/1017050
ttgatttagggt

SEQ ID NO: 156373 - DNA, 12 bp, Unknown
  misc_feature (1)..( 12): Result.004 file - promoters50/1017050
ttgagtaccgcg

SEQ ID NO: 156374 - DNA, 12 bp, Unknown
  misc_feature (1)..( 12): Result.004 file - promoters50/1017050
gagattgatata

SEQ ID NO: 156375 - DNA, 12 bp, Unknown
  misc_feature (1)..( 12): Result.004 file - promoters50/1017050
tggcttgatatg

SEQ ID NO: 156376 - DNA, 12 bp, Unknown
  misc_feature (1)..( 12): Result.004 file - promoters50/1017050
aagattgatgaa

SEQ ID NO: 156377 - DNA, 12 bp, Unknown
  misc_feature (1)..( 12): Result.004 file - promoters50/1017050
ttttttgaaatg

SEQ ID NO: 156378 - DNA, 12 bp, Unknown
  misc_feature (1)..( 12): Result.004 file - promoters50/1017050
tagattggatac

SEQ ID NO: 156379 - DNA, 12 bp, Unknown
  misc_feature (1)..( 12): Result.004 file - promoters50/1017050
tagattaaaaaa

SEQ ID NO: 156380 - DNA, 12 bp, Unknown
  misc_feature (1)..( 12): Result.004 file - promoters50/1017109
gagagtgaaaac

SEQ ID NO: 156381 - DNA, 10 bp, Unknown
  misc_feature (1)..( 10): Result.004 file - promoters50/1017109
catttttctt

SEQ ID NO: 156382 - DNA, 10 bp, Unknown
  misc_feature (1)..( 10): Result.004 file - promoters50/1017109
ttatttactt

SEQ ID NO: 156383 - DNA, 10 bp, Unknown
  misc_feature (1)..( 10): Result.004 file - promoters50/1017113
ttaattacta

SEQ ID NO: 156384 - DNA, 11 bp, Unknown
  misc_feature (1)..( 11): Result.004 file - promoters50/1017113
taaaatgaaaa

SEQ ID NO: 156385 - DNA, 11 bp, Unknown
  misc_feature (1)..( 11): Result.004 file - promoters50/1017113
caaaaggaaaa

SEQ ID NO: 156386 - DNA, 11 bp, Unknown
  misc_feature (1)..( 11): Result.004 file - promoters50/1017113
taaaatattat

SEQ ID NO: 156387 - DNA, 9 bp, Unknown
  misc_feature (1)..( 9): Result.004 file - promoters50/1017113
tcaaaatac

SEQ ID NO: 156388 - DNA, 9 bp, Unknown
  misc_feature (1)..( 9): Result.004 file - promoters50/1017113
tcagaataa

SEQ ID NO: 156389 - DNA, 9 bp, Unknown
  misc_feature (1)..( 9): Result.004 file - promoters50/1017113
agaaaatat

SEQ ID NO: 156390 - DNA, 9 bp, Unknown
  misc_feature (1)..( 9): Result.004 file - promoters50/1017113
tataaatac

SEQ ID NO: 156391 - DNA, 9 bp, Unknown
  misc_feature (1)..( 9): Result.004 file - promoters50/1017113
ttttatgtt

SEQ ID NO: 156392 - DNA, 9 bp, Unknown
  misc_feature (1)..( 9): Result.004 file - promoters50/1017113
ttttctgtt

SEQ ID NO: 156393 - DNA, 9 bp, Unknown
  misc_feature (1)..( 9): Result.004 file - promoters50/1017113
gattaagtt

SEQ ID NO: 156394 - DNA, 14 bp, Unknown
  misc_feature (1)..( 14): Result.004 file - promoters50/1017113
ttaaggccgtttgt

SEQ ID NO: 156395 - DNA, 14 bp, Unknown
  misc_feature (1)..( 14): Result.004 file - promoters50/1017113
ttaaggggcaaata

SEQ ID NO: 156396 - DNA, 14 bp, Unknown
  misc_feature (1)..( 14): Result.004 file - promoters50/1017113
ctaagcccgtgtgt

SEQ ID NO: 156397 - DNA, 12 bp, Unknown
  misc_feature (1)..( 12): Result.004 file - promoters50/1017113
gaaaaaaaatat

SEQ ID NO: 156398 - DNA, 12 bp, Unknown
  misc_feature (1)..( 12): Result.004 file - promoters50/1017113
gaaagaaaatat

SEQ ID NO: 156399 - DNA, 12 bp, Unknown
  misc_feature (1)..( 12): Result.004 file - promoters50/1017113
acaagaaacgct

SEQ ID NO: 156400 - DNA, 10 bp, Unknown
  misc_feature (1)..( 10): Result.004 file - promoters50/1017113
atttggtttt

SEQ ID NO: 156401 - DNA, 10 bp, Unknown
  misc_feature (1)..( 10): Result.004 file - promoters50/1017113
attttgtttt

SEQ ID NO: 156402 - DNA, 10 bp, Unknown
  misc_feature (1)..( 10): Result.004 file - promoters50/1017113
cttttattta

SEQ ID NO: 156403 - DNA, 11 bp, Unknown
  misc_feature (1)..( 11): Result.004 file - promoters50/1017113
aatataagata

SEQ ID NO: 156404 - DNA, 11 bp, Unknown
  misc_feature (1)..( 11): Result.004 file - promoters50/1017113
aatatgagata

SEQ ID NO: 156405 - DNA, 11 bp, Unknown
  misc_feature (1)..( 11): Result.004 file - promoters50/1017113
gttacaaaata

SEQ ID NO: 156406 - DNA, 8 bp, Unknown
  misc_feature (1)..( 8): Result.004 file - promoters50/1017113
ttttattt

SEQ ID NO: 156407 - DNA, 8 bp, Unknown
  misc_feature (1)..( 8): Result.004 file - promoters50/1017113
ttttattt

SEQ ID NO: 156408 - DNA, 8 bp, Unknown
  misc_feature (1)..( 8): Result.004 file - promoters50/1017131
ttttgttt

SEQ ID NO: 156409 - DNA, 10 bp, Unknown
  misc_feature (1)..( 10): Result.004 file - promoters50/1017131
attaataaaa

SEQ ID NO: 156410 - DNA, 10 bp, Unknown
  misc_feature (1)..( 10): Result.004 file - promoters50/1017131
attaatattt

SEQ ID NO: 156411 - DNA, 10 bp, Unknown
  misc_feature (1)..( 10): Result.004 file - promoters50/1017131
attaataaag

SEQ ID NO: 156412 - DNA, 10 bp, Unknown
  misc_feature (1)..( 10): Result.004 file - promoters50/1017131
actaaaaaaa

SEQ ID NO: 156413 - DNA, 10 bp, Unknown
  misc_feature (1)..( 10): Result.004 file - promoters50/1017131
tttagtatat

SEQ ID NO: 156414 - DNA, 10 bp, Unknown
  misc_feature (1)..( 10): Result.004 file - promoters50/1017131
ttgagtctat

SEQ ID NO: 156415 - DNA, 13 bp, Unknown
  misc_feature (1)..( 13): Result.004 file - promoters50/1017131
gaaaagtaaaacc

SEQ ID NO: 156416 - DNA, 13 bp, Unknown
  misc_feature (1)..( 13): Result.004 file - promoters50/1017131
tttggataaaacg

SEQ ID NO: 156417 - DNA, 13 bp, Unknown
  misc_feature (1)..( 13): Result.004 file - promoters50/1017131
tttgaataaaagc

SEQ ID NO: 156418 - DNA, 13 bp, Unknown
  misc_feature (1)..( 13): Result.004 file - promoters50/1017131
aagggataaaaga

SEQ ID NO: 156419 - DNA, 13 bp, Unknown
  misc_feature (1)..( 13): Result.004 file - promoters50/1017131
cttggatataatg

SEQ ID NO: 156420 - DNA, 13 bp, Unknown
  misc_feature (1)..( 13): Result.004 file - promoters50/1017131
aatagagaaaacg

SEQ ID NO: 156421 - DNA, 13 bp, Unknown
  misc_feature (1)..( 13): Result.004 file - promoters50/1017131
agtcaagaaaaga

SEQ ID NO: 156422 - DNA, 10 bp, Unknown
  misc_feature (1)..( 10): Result.004 file - promoters50/1017131
gtaaaccaag

SEQ ID NO: 156423 - DNA, 10 bp, Unknown
  misc_feature (1)..( 10): Result.004 file - promoters50/1017131
agaaacaaag

SEQ ID NO: 156424 - DNA, 10 bp, Unknown
  misc_feature (1)..( 10): Result.004 file - promoters50/1017131
gggaaccaaa

SEQ ID NO: 156425 - DNA, 10 bp, Unknown
  misc_feature (1)..( 10): Result.004 file - promoters50/1017131
acaaaaaaag

SEQ ID NO: 156426 - DNA, 10 bp, Unknown
  misc_feature (1)..( 10): Result.004 file - promoters50/1017131
ccaaaaacag

SEQ ID NO: 156427 - DNA, 10 bp, Unknown
  misc_feature (1)..( 10): Result.004 file - promoters50/1017131
taaaataaat

SEQ ID NO: 156428 - DNA, 10 bp, Unknown
  misc_feature (1)..( 10): Result.004 file - promoters50/1017189
ccaaaaataa

SEQ ID NO: 156429 - DNA, 9 bp, Unknown
  misc_feature (1)..( 9): Result.004 file - promoters50/1017189
aagattgat

SEQ ID NO: 156430 - DNA, 9 bp, Unknown
  misc_feature (1)..( 9): Result.004 file - promoters50/1017189
aaggttgga

SEQ ID NO: 156431 - DNA, 9 bp, Unknown
  misc_feature (1)..( 9): Result.004 file - promoters50/1017189
ctgatggat

SEQ ID NO: 156432 - DNA, 6 bp, Unknown
  misc_feature (1)..( 6): Result.004 file - promoters50/1017189
ttttgt

SEQ ID NO: 156433 - DNA, 6 bp, Unknown
  misc_feature (1)..( 6): Result.004 file - promoters50/1017189
ttttgt

SEQ ID NO: 156434 - DNA, 6 bp, Unknown
  misc_feature (1)..( 6): Result.004 file - promoters50/1017189
ttttgt

SEQ ID NO: 156435 - DNA, 9 bp, Unknown
  misc_feature (1)..( 9): Result.004 file - promoters50/1017189
atgttatgt

SEQ ID NO: 156436 - DNA, 9 bp, Unknown
  misc_feature (1)..( 9): Result.004 file - promoters50/1017189
atgatataa

SEQ ID NO: 156437 - DNA, 9 bp, Unknown
  misc_feature (1)..( 9): Result.004 file - promoters50/1017189
ctgttctgt

SEQ ID NO: 156438 - DNA, 9 bp, Unknown
  misc_feature (1)..( 9): Result.004 file - promoters50/1017189
ctttctttt

SEQ ID NO: 156439 - DNA, 9 bp, Unknown
  misc_feature (1)..( 9): Result.004 file - promoters50/1017189
ttttgtttt

SEQ ID NO: 156440 - DNA, 9 bp, Unknown
  misc_feature (1)..( 9): Result.004 file - promoters50/1017282
ttttgtgga

SEQ ID NO: 156441 - DNA, 9 bp, Unknown
  misc_feature (1)..( 9): Result.004 file - promoters50/1017282
tctaacaac

SEQ ID NO: 156442 - DNA, 9 bp, Unknown
  misc_feature (1)..( 9): Result.004 file - promoters50/1017282
tctaactat

SEQ ID NO: 156443 - DNA, 9 bp, Unknown
  misc_feature (1)..( 9): Result.004 file - promoters50/1017282
gctaacaac

SEQ ID NO: 156444 - DNA, 9 bp, Unknown
  misc_feature (1)..( 9): Result.004 file - promoters50/1017282
tctaactcc

SEQ ID NO: 156445 - DNA, 9 bp, Unknown
  misc_feature (1)..( 9): Result.004 file - promoters50/1017282
aataacaaa

SEQ ID NO: 156446 - DNA, 9 bp, Unknown
  misc_feature (1)..( 9): Result.004 file - promoters50/1017286
tcttactac

SEQ ID NO: 156447 - DNA, 10 bp, Unknown
  misc_feature (1)..( 10): Result.004 file - promoters50/1017286
taatatgcaa

SEQ ID NO: 156448 - DNA, 10 bp, Unknown
  misc_feature (1)..( 10): Result.004 file - promoters50/1017286
caatatgtgc

SEQ ID NO: 156449 - DNA, 10 bp, Unknown
  misc_feature (1)..( 10): Result.004 file - promoters50/1017286
atatatgttt

SEQ ID NO: 156450 - DNA, 10 bp, Unknown
  misc_feature (1)..( 10): Result.004 file - promoters50/1017286
caatatttgt

SEQ ID NO: 156451 - DNA, 10 bp, Unknown
  misc_feature (1)..( 10): Result.004 file - promoters50/1017316
caaaattata

SEQ ID NO: 156452 - DNA, 10 bp, Unknown
  misc_feature (1)..( 10): Result.004 file - promoters50/1017316
tcaatttgaa

SEQ ID NO: 156453 - DNA, 10 bp, Unknown
  misc_feature (1)..( 10): Result.004 file - promoters50/1017316
aaaatttgat

SEQ ID NO: 156454 - DNA, 10 bp, Unknown
  misc_feature (1)..( 10): Result.004 file - promoters50/1017316
ttcattttta

SEQ ID NO: 156455 - DNA, 10 bp, Unknown
  misc_feature (1)..( 10): Result.004 file - promoters50/1017316
aaaaattgat

SEQ ID NO: 156456 - DNA, 11 bp, Unknown
  misc_feature (1)..( 11): Result.004 file - promoters50/1017316
tgaaaatcatc

SEQ ID NO: 156457 - DNA, 11 bp, Unknown
  misc_feature (1)..( 11): Result.004 file - promoters50/1017316
agaaaatttga

SEQ ID NO: 156458 - DNA, 11 bp, Unknown
  misc_feature (1)..( 11): Result.004 file - promoters50/1017316
tataaattcat

SEQ ID NO: 156459 - DNA, 11 bp, Unknown
  misc_feature (1)..( 11): Result.004 file - promoters50/1017316
tgataataata

SEQ ID NO: 156460 - DNA, 10 bp, Unknown
  misc_feature (1)..( 10): Result.004 file - promoters50/1017316
tttgtgtgtt

SEQ ID NO: 156461 - DNA, 10 bp, Unknown
  misc_feature (1)..( 10): Result.004 file - promoters50/1017316
tttttgtttg

SEQ ID NO: 156462 - DNA, 10 bp, Unknown
  misc_feature (1)..( 10): Result.004 file - promoters50/1017316
tttgtctgtt

SEQ ID NO: 156463 - DNA, 12 bp, Unknown
  misc_feature (1)..( 12): Result.004 file - promoters50/1017316
aaactcttaatt

SEQ ID NO: 156464 - DNA, 12 bp, Unknown
  misc_feature (1)..( 12): Result.004 file - promoters50/1017316
ggtaaattaatt

SEQ ID NO: 156465 - DNA, 12 bp, Unknown
  misc_feature (1)..( 12): Result.004 file - promoters50/1017316
aaattcttaatg

SEQ ID NO: 156466 - DNA, 11 bp, Unknown
  misc_feature (1)..( 11): Result.004 file - promoters50/1017316
ttgggctatat

SEQ ID NO: 156467 - DNA, 11 bp, Unknown
  misc_feature (1)..( 11): Result.004 file - promoters50/1017316
atgggctttat

SEQ ID NO: 156468 - DNA, 11 bp, Unknown
  misc_feature (1)..( 11): Result.004 file - promoters50/1017316
atgggcttata

SEQ ID NO: 156469 - DNA, 11 bp, Unknown
  misc_feature (1)..( 11): Result.004 file - promoters50/1017316
atgggcaaaat

SEQ ID NO: 156470 - DNA, 9 bp, Unknown
  misc_feature (1)..( 9): Result.004 file - promoters50/1017316
tttttactt

SEQ ID NO: 156471 - DNA, 9 bp, Unknown
  misc_feature (1)..( 9): Result.004 file - promoters50/1017316
ctttgactc

SEQ ID NO: 156472 - DNA, 9 bp, Unknown
  misc_feature (1)..( 9): Result.004 file - promoters50/1017316
tttttactt

SEQ ID NO: 156473 - DNA, 7 bp, Unknown
  misc_feature (1)..( 7): Result.004 file - promoters50/1017316
ttacttt

SEQ ID NO: 156474 - DNA, 7 bp, Unknown
  misc_feature (1)..( 7): Result.004 file - promoters50/1017316
ttactta

SEQ ID NO: 156475 - DNA, 7 bp, Unknown
  misc_feature (1)..( 7): Result.004 file - promoters50/1017316
ttacttt

SEQ ID NO: 156476 - DNA, 9 bp, Unknown
  misc_feature (1)..( 9): Result.004 file - promoters50/1017316
taatttcaa

SEQ ID NO: 156477 - DNA, 9 bp, Unknown
  misc_feature (1)..( 9): Result.004 file - promoters50/1017316
atgtttcaa

SEQ ID NO: 156478 - DNA, 9 bp, Unknown
  misc_feature (1)..( 9): Result.004 file - promoters50/1017354
atgtgtcag

SEQ ID NO: 156479 - DNA, 10 bp, Unknown
  misc_feature (1)..( 10): Result.004 file - promoters50/1017354
aaaatttaaa

SEQ ID NO: 156480 - DNA, 10 bp, Unknown
  misc_feature (1)..( 10): Result.004 file - promoters50/1017354
aaaattcgat

SEQ ID NO: 156481 - DNA, 10 bp, Unknown
  misc_feature (1)..( 10): Result.004 file - promoters50/1017358
caaatacgat

SEQ ID NO: 156482 - DNA, 12 bp, Unknown
  misc_feature (1)..( 12): Result.004 file - promoters50/1017358
accaaaaaagaa

SEQ ID NO: 156483 - DNA, 12 bp, Unknown
  misc_feature (1)..( 12): Result.004 file - promoters50/1017358
tactcaaaagag

SEQ ID NO: 156484 - DNA, 12 bp, Unknown
  misc_feature (1)..( 12): Result.004 file - promoters50/1017358
agttaaaaagtg

SEQ ID NO: 156485 - DNA, 12 bp, Unknown
  misc_feature (1)..( 12): Result.004 file - promoters50/1017358
accagaaatgaa

SEQ ID NO: 156486 - DNA, 12 bp, Unknown
  misc_feature (1)..( 12): Result.004 file - promoters50/1017358
atcgaaatagat

SEQ ID NO: 156487 - DNA, 12 bp, Unknown
  misc_feature (1)..( 12): Result.004 file - promoters50/1017358
attgagaaagaa

SEQ ID NO: 156488 - DNA, 11 bp, Unknown
  misc_feature (1)..( 11): Result.004 file - promoters50/1017358
acatatataaa

SEQ ID NO: 156489 - DNA, 11 bp, Unknown
  misc_feature (1)..( 11): Result.004 file - promoters50/1017358
atctatatata

SEQ ID NO: 156490 - DNA, 11 bp, Unknown
  misc_feature (1)..( 11): Result.004 file - promoters50/1017358
tgagatataat

SEQ ID NO: 156491 - DNA, 11 bp, Unknown
  misc_feature (1)..( 11): Result.004 file - promoters50/1017358
gcctatatata

SEQ ID NO: 156492 - DNA, 11 bp, Unknown
  misc_feature (1)..( 11): Result.004 file - promoters50/1017358
ccttataaata

SEQ ID NO: 156493 - DNA, 11 bp, Unknown
  misc_feature (1)..( 11): Result.004 file - promoters50/1017434
ccttaaaaacc

SEQ ID NO: 156494 - DNA, 11 bp, Unknown
  misc_feature (1)..( 11): Result.004 file - promoters50/1017434
aaggtaaacca

SEQ ID NO: 156495 - DNA, 11 bp, Unknown
  misc_feature (1)..( 11): Result.004 file - promoters50/1017434
aagataaagaa

SEQ ID NO: 156496 - DNA, 11 bp, Unknown
  misc_feature (1)..( 11): Result.004 file - promoters50/1017434
tggataaaatt

SEQ ID NO: 156497 - DNA, 11 bp, Unknown
  misc_feature (1)..( 11): Result.004 file - promoters50/1017434
cagaaaaagag

SEQ ID NO: 156498 - DNA, 11 bp, Unknown
  misc_feature (1)..( 11): Result.004 file - promoters50/1017434
gtaataaagaa

SEQ ID NO: 156499 - DNA, 11 bp, Unknown
  misc_feature (1)..( 11): Result.004 file - promoters50/1017434
tgcataacaaa

SEQ ID NO: 156500 - DNA, 10 bp, Unknown
  misc_feature (1)..( 10): Result.004 file - promoters50/1017434
aatttatatt

SEQ ID NO: 156501 - DNA, 10 bp, Unknown
  misc_feature (1)..( 10): Result.004 file - promoters50/1017434
tctttttatt

SEQ ID NO: 156502 - DNA, 10 bp, Unknown
  misc_feature (1)..( 10): Result.004 file - promoters50/1017434
tctttgtatc

SEQ ID NO: 156503 - DNA, 10 bp, Unknown
  misc_feature (1)..( 10): Result.004 file - promoters50/1017434
cctttttacc

SEQ ID NO: 156504 - DNA, 10 bp, Unknown
  misc_feature (1)..( 10): Result.004 file - promoters50/1017434
ccttattatg

SEQ ID NO: 156505 - DNA, 10 bp, Unknown
  misc_feature (1)..( 10): Result.004 file - promoters50/1017542
tattacttta

SEQ ID NO: 156506 - DNA, 7 bp, Unknown
  misc_feature (1)..( 7): Result.004 file - promoters50/1017542
taattca

SEQ ID NO: 156507 - DNA, 7 bp, Unknown
  misc_feature (1)..( 7): Result.004 file - promoters50/1017542
caattca

SEQ ID NO: 156508 - DNA, 7 bp, Unknown
  misc_feature (1)..( 7): Result.004 file - promoters50/1017552
caattct

SEQ ID NO: 156509 - DNA, 7 bp, Unknown
  misc_feature (1)..( 7): Result.004 file - promoters50/1017552
ttacaac

SEQ ID NO: 156510 - DNA, 7 bp, Unknown
  misc_feature (1)..( 7): Result.004 file - promoters50/1017552
ttagaac

SEQ ID NO: 156511 - DNA, 7 bp, Unknown
  misc_feature (1)..( 7): Result.004 file - promoters50/1017552
ttagaaa

SEQ ID NO: 156512 - DNA, 10 bp, Unknown
  misc_feature (1)..( 10): Result.004 file - promoters50/1017552
aacattgtaa

SEQ ID NO: 156513 - DNA, 10 bp, Unknown
  misc_feature (1)..( 10): Result.004 file - promoters50/1017552
agaattataa

SEQ ID NO: 156514 - DNA, 10 bp, Unknown
  misc_feature (1)..( 10): Result.004 file - promoters50/1017552
agagttatgc

SEQ ID NO: 156515 - DNA, 8 bp, Unknown
  misc_feature (1)..( 8): Result.004 file - promoters50/1017552
aggaaaaa

SEQ ID NO: 156516 - DNA, 8 bp, Unknown
  misc_feature (1)..( 8): Result.004 file - promoters50/1017552
tggaaaac

SEQ ID NO: 156517 - DNA, 8 bp, Unknown
  misc_feature (1)..( 8): Result.004 file - promoters50/1017552
aggaaaaa

SEQ ID NO: 156518 - DNA, 8 bp, Unknown
  misc_feature (1)..( 8): Result.004 file - promoters50/1017552
gaaaaatg

SEQ ID NO: 156519 - DNA, 8 bp, Unknown
  misc_feature (1)..( 8): Result.004 file - promoters50/1017552
aaaaaatg

SEQ ID NO: 156520 - DNA, 9 bp, Unknown
  misc_feature (1)..( 9): Result.004 file - promoters50/1017562
aaagaaatg

SEQ ID NO: 156521 - DNA, 11 bp, Unknown
  misc_feature (1)..( 11): Result.004 file - promoters50/1017562
atatattacta

SEQ ID NO: 156522 - DNA, 11 bp, Unknown
  misc_feature (1)..( 11): Result.004 file - promoters50/1017562
gaatcttacta

SEQ ID NO: 156523 - DNA, 11 bp, Unknown
  misc_feature (1)..( 11): Result.004 file - promoters50/1017562
atataatactt

SEQ ID NO: 156524 - DNA, 11 bp, Unknown
  misc_feature (1)..( 11): Result.004 file - promoters50/1017562
atataatccgg

SEQ ID NO: 156525 - DNA, 12 bp, Unknown
  misc_feature (1)..( 12): Result.004 file - promoters50/1017562
atatatattact

SEQ ID NO: 156526 - DNA, 12 bp, Unknown
  misc_feature (1)..( 12): Result.004 file - promoters50/1017562
ttatgtataata

SEQ ID NO: 156527 - DNA, 12 bp, Unknown
  misc_feature (1)..( 12): Result.004 file - promoters50/1017562
atatatattgac

SEQ ID NO: 156528 - DNA, 12 bp, Unknown
  misc_feature (1)..( 12): Result.004 file - promoters50/1017562
gaatatatgcac

SEQ ID NO: 156529 - DNA, 12 bp, Unknown
  misc_feature (1)..( 12): Result.004 file - promoters50/1017562
tgatataatact

SEQ ID NO: 156530 - DNA, 12 bp, Unknown
  misc_feature (1)..( 12): Result.004 file - promoters50/1017562
atatatattact

SEQ ID NO: 156531 - DNA, 12 bp, Unknown
  misc_feature (1)..( 12): Result.004 file - promoters50/1017562
tataatattaaa

SEQ ID NO: 156532 - DNA, 12 bp, Unknown
  misc_feature (1)..( 12): Result.004 file - promoters50/1017562
atatatattgac

SEQ ID NO: 156533 - DNA, 12 bp, Unknown
  misc_feature (1)..( 12): Result.004 file - promoters50/1017562
tgatataatact

SEQ ID NO: 156534 - DNA, 12 bp, Unknown
  misc_feature (1)..( 12): Result.004 file - promoters50/1017562
gaatataatccg

SEQ ID NO: 156535 - DNA, 12 bp, Unknown
  misc_feature (1)..( 12): Result.004 file - promoters50/1017562
ttcaatcaaaca

SEQ ID NO: 156536 - DNA, 12 bp, Unknown
  misc_feature (1)..( 12): Result.004 file - promoters50/1017562
aataatccaact

SEQ ID NO: 156537 - DNA, 12 bp, Unknown
  misc_feature (1)..( 12): Result.004 file - promoters50/1017562
taaaatcagaca

SEQ ID NO: 156538 - DNA, 12 bp, Unknown
  misc_feature (1)..( 12): Result.004 file - promoters50/1017562
aataattcaatc

SEQ ID NO: 156539 - DNA, 10 bp, Unknown
  misc_feature (1)..( 10): Result.004 file - promoters50/1017562
aaatataaat

SEQ ID NO: 156540 - DNA, 10 bp, Unknown
  misc_feature (1)..( 10): Result.004 file - promoters50/1017562
ctatataacc

SEQ ID NO: 156541 - DNA, 10 bp, Unknown
  misc_feature (1)..( 10): Result.004 file - promoters50/1017562
aaatttaaga

SEQ ID NO: 156542 - DNA, 10 bp, Unknown
  misc_feature (1)..( 10): Result.004 file - promoters50/1017562
ttgtaaaatt

SEQ ID NO: 156543 - DNA, 13 bp, Unknown
  misc_feature (1)..( 13): Result.004 file - promoters50/1017562
tataaatatctac

SEQ ID NO: 156544 - DNA, 13 bp, Unknown
  misc_feature (1)..( 13): Result.004 file - promoters50/1017562
catatatatacac

SEQ ID NO: 156545 - DNA, 13 bp, Unknown
  misc_feature (1)..( 13): Result.004 file - promoters50/1017562
tatatatatggtc

SEQ ID NO: 156546 - DNA, 13 bp, Unknown
  misc_feature (1)..( 13): Result.004 file - promoters50/1017562
tatttaaatctct

SEQ ID NO: 156547 - DNA, 8 bp, Unknown
  misc_feature (1)..( 8): Result.004 file - promoters50/1017562
agaataaa

SEQ ID NO: 156548 - DNA, 8 bp, Unknown
  misc_feature (1)..( 8): Result.004 file - promoters50/1017562
ggaaaaaa

SEQ ID NO: 156549 - DNA, 8 bp, Unknown
  misc_feature (1)..( 8): Result.004 file - promoters50/1017562
agactaac

SEQ ID NO: 156550 - DNA, 8 bp, Unknown
  misc_feature (1)..( 8): Result.004 file - promoters50/1017568
taactaac

SEQ ID NO: 156551 - DNA, 11 bp, Unknown
  misc_feature (1)..( 11): Result.004 file - promoters50/1017568
cataatttagt

SEQ ID NO: 156552 - DNA, 11 bp, Unknown
  misc_feature (1)..( 11): Result.004 file - promoters50/1017568
cataatgtaga

SEQ ID NO: 156553 - DNA, 9 bp, Unknown
  misc_feature (1)..( 9): Result.004 file - promoters50/1017568
taaattata

SEQ ID NO: 156554 - DNA, 10 bp, Unknown
  misc_feature (1)..( 10): Result.004 file - promoters50/1017568
ttaatttcct

SEQ ID NO: 156555 - DNA, 11 bp, Unknown
  misc_feature (1)..( 11): Result.004 file - promoters50/1017568
tcaaatataga

SEQ ID NO: 156556 - DNA, 11 bp, Unknown
  misc_feature (1)..( 11): Result.004 file - promoters50/1017568
tccaatatata

SEQ ID NO: 156557 - DNA, 11 bp, Unknown
  misc_feature (1)..( 11): Result.004 file - promoters50/1017568
cttaatgtttg

SEQ ID NO: 156558 - DNA, 15 bp, Unknown
  misc_feature (1)..( 15): Result.004 file - promoters50/1017568
tttattctgaaaagc

SEQ ID NO: 156559 - DNA, 15 bp, Unknown
  misc_feature (1)..( 15): Result.004 file - promoters50/1017568
ggaaatctcaaaatt

SEQ ID NO: 156560 - DNA, 15 bp, Unknown
  misc_feature (1)..( 15): Result.004 file - promoters50/1017568
tcgaacatgataagc

SEQ ID NO: 156561 - DNA, 15 bp, Unknown
  misc_feature (1)..( 15): Result.004 file - promoters50/1017568
ttttttcggaaaaac

SEQ ID NO: 156562 - DNA, 15 bp, Unknown
  misc_feature (1)..( 15): Result.004 file - promoters50/1017568
tgttagttcaaaaaa

SEQ ID NO: 156563 - DNA, 15 bp, Unknown
  misc_feature (1)..( 15): Result.004 file - promoters50/1017593
atttttctgttcaac

SEQ ID NO: 156564 - DNA, 8 bp, Unknown
  misc_feature (1)..( 8): Result.004 file - promoters50/1017593
ttgtctta

SEQ ID NO: 156565 - DNA, 8 bp, Unknown
  misc_feature (1)..( 8): Result.004 file - promoters50/1017593
ttgtttta

SEQ ID NO: 156566 - DNA, 8 bp, Unknown
  misc_feature (1)..( 8): Result.004 file - promoters50/1017596
tcgtttta

SEQ ID NO: 156567 - DNA, 8 bp, Unknown
  misc_feature (1)..( 8): Result.004 file - promoters50/1017596
tttgtttt

SEQ ID NO: 156568 - DNA, 8 bp, Unknown
  misc_feature (1)..( 8): Result.004 file - promoters50/1017596
tatgtttt

SEQ ID NO: 156569 - DNA, 8 bp, Unknown
  misc_feature (1)..( 8): Result.004 file - promoters50/1017596
tttcttta

SEQ ID NO: 156570 - DNA, 8 bp, Unknown
  misc_feature (1)..( 8): Result.004 file - promoters50/1017596
tatttaac

SEQ ID NO: 156571 - DNA, 8 bp, Unknown
  misc_feature (1)..( 8): Result.004 file - promoters50/1017596
tttttaac

SEQ ID NO: 156572 - DNA, 8 bp, Unknown
  misc_feature (1)..( 8): Result.004 file - promoters50/1017596
tatataag

SEQ ID NO: 156573 - DNA, 8 bp, Unknown
  misc_feature (1)..( 8): Result.004 file - promoters50/1017596
cttttgaa

SEQ ID NO: 156574 - DNA, 8 bp, Unknown
  misc_feature (1)..( 8): Result.004 file - promoters50/1017596
cttatgag

SEQ ID NO: 156575 - DNA, 8 bp, Unknown
  misc_feature (1)..( 8): Result.004 file - promoters50/1017618
attacgag

SEQ ID NO: 156576 - DNA, 15 bp, Unknown
  misc_feature (1)..( 15): Result.004 file - promoters50/1017618
tctcctataataaat

SEQ ID NO: 156577 - DNA, 15 bp, Unknown
  misc_feature (1)..( 15): Result.004 file - promoters50/1017618
tgtcctataaatata

SEQ ID NO: 156578 - DNA, 15 bp, Unknown
  misc_feature (1)..( 15): Result.004 file - promoters50/1017618
tcttctatatatatc

SEQ ID NO: 156579 - DNA, 15 bp, Unknown
  misc_feature (1)..( 15): Result.004 file - promoters50/1017618
tagcctttaaaaaag

SEQ ID NO: 156580 - DNA, 15 bp, Unknown
  misc_feature (1)..( 15): Result.004 file - promoters50/1017618
atcaatataaatacc

SEQ ID NO: 156581 - DNA, 15 bp, Unknown
  misc_feature (1)..( 15): Result.004 file - promoters50/1017618
acaagatcaaaaagc

SEQ ID NO: 156582 - DNA, 12 bp, Unknown
  misc_feature (1)..( 12): Result.004 file - promoters50/1017618
ataataaataca

SEQ ID NO: 156583 - DNA, 12 bp, Unknown
  misc_feature (1)..( 12): Result.004 file - promoters50/1017618
cctataaatata

SEQ ID NO: 156584 - DNA, 12 bp, Unknown
  misc_feature (1)..( 12): Result.004 file - promoters50/1017618
aatataaatacc

SEQ ID NO: 156585 - DNA, 12 bp, Unknown
  misc_feature (1)..( 12): Result.004 file - promoters50/1017618
tctatatatatc

SEQ ID NO: 156586 - DNA, 12 bp, Unknown
  misc_feature (1)..( 12): Result.004 file - promoters50/1017618
cctttaaaaaag

SEQ ID NO: 156587 - DNA, 12 bp, Unknown
  misc_feature (1)..( 12): Result.004 file - promoters50/1017618
agatcaaaaagc

SEQ ID NO: 156588 - DNA, 12 bp, Unknown
  misc_feature (1)..( 12): Result.004 file - promoters50/1017618
aaaataaactaa

SEQ ID NO: 156589 - DNA, 12 bp, Unknown
  misc_feature (1)..( 12): Result.004 file - promoters50/1017618
aaaataaaataa

SEQ ID NO: 156590 - DNA, 12 bp, Unknown
  misc_feature (1)..( 12): Result.004 file - promoters50/1017618
aaaaaaaaaaga

SEQ ID NO: 156591 - DNA, 12 bp, Unknown
  misc_feature (1)..( 12): Result.004 file - promoters50/1017618
caaataaatcgt

SEQ ID NO: 156592 - DNA, 12 bp, Unknown
  misc_feature (1)..( 12): Result.004 file - promoters50/1017618
caaagaaagaca

SEQ ID NO: 156593 - DNA, 12 bp, Unknown
  misc_feature (1)..( 12): Result.004 file - promoters50/1017626
tagataaaacga

SEQ ID NO: 156594 - DNA, 11 bp, Unknown
  misc_feature (1)..( 11): Result.004 file - promoters50/1017626
tcagtaaaaaa

SEQ ID NO: 156595 - DNA, 11 bp, Unknown
  misc_feature (1)..( 11): Result.004 file - promoters50/1017626
tcattaaaaat

SEQ ID NO: 156596 - DNA, 12 bp, Unknown
  misc_feature (1)..( 12): Result.004 file - promoters50/1017626
ttaataacaaat

SEQ ID NO: 156597 - DNA, 12 bp, Unknown
  misc_feature (1)..( 12): Result.004 file - promoters50/1017626
aaccaaaccaat

SEQ ID NO: 156598 - DNA, 9 bp, Unknown
  misc_feature (1)..( 9): Result.004 file - promoters50/1017626
ttttcataa

SEQ ID NO: 156599 - DNA, 9 bp, Unknown
  misc_feature (1)..( 9): Result.004 file - promoters50/1017626
attttataa

SEQ ID NO: 156600 - DNA, 10 bp, Unknown
  misc_feature (1)..( 10): Result.004 file - promoters50/1017626
ttttacatat

SEQ ID NO: 156601 - DNA, 10 bp, Unknown
  misc_feature (1)..( 10): Result.004 file - promoters50/1017626
attaaaatca

SEQ ID NO: 156602 - DNA, 7 bp, Unknown
  misc_feature (1)..( 7): Result.004 file - promoters50/1017626
tctctct

SEQ ID NO: 156603 - DNA, 7 bp, Unknown
  misc_feature (1)..( 7): Result.004 file - promoters50/1017626
tctctcg

SEQ ID NO: 156604 - DNA, 7 bp, Unknown
  misc_feature (1)..( 7): Result.004 file - promoters50/1017626
tctttct

SEQ ID NO: 156605 - DNA, 7 bp, Unknown
  misc_feature (1)..( 7): Result.004 file - promoters50/1017626
actttct

SEQ ID NO: 156606 - DNA, 10 bp, Unknown
  misc_feature (1)..( 10): Result.004 file - promoters50/1017626
aaaattggta

SEQ ID NO: 156607 - DNA, 10 bp, Unknown
  misc_feature (1)..( 10): Result.004 file - promoters50/1017626
caaattggaa

SEQ ID NO: 156608 - DNA, 10 bp, Unknown
  misc_feature (1)..( 10): Result.004 file - promoters50/1017626
cgatttgtag

SEQ ID NO: 156609 - DNA, 10 bp, Unknown
  misc_feature (1)..( 10): Result.004 file - promoters50/1017626
caaattttga

SEQ ID NO: 156610 - DNA, 11 bp, Unknown
  misc_feature (1)..( 11): Result.004 file - promoters50/1017626
atttagaatct

SEQ ID NO: 156611 - DNA, 11 bp, Unknown
  misc_feature (1)..( 11): Result.004 file - promoters50/1017626
aaatagtatcc

SEQ ID NO: 156612 - DNA, 11 bp, Unknown
  misc_feature (1)..( 11): Result.004 file - promoters50/1017626
aaatattattt

SEQ ID NO: 156613 - DNA, 11 bp, Unknown
  misc_feature (1)..( 11): Result.004 file - promoters50/1017626
cttaattattt

SEQ ID NO: 156614 - DNA, 11 bp, Unknown
  misc_feature (1)..( 11): Result.004 file - promoters50/1017626
gcctatataaa

SEQ ID NO: 156615 - DNA, 11 bp, Unknown
  misc_feature (1)..( 11): Result.004 file - promoters50/1017626
gcctataaata

SEQ ID NO: 156616 - DNA, 11 bp, Unknown
  misc_feature (1)..( 11): Result.004 file - promoters50/1017626
gcctatataaa

SEQ ID NO: 156617 - DNA, 11 bp, Unknown
  misc_feature (1)..( 11): Result.004 file - promoters50/1017626
atgtataaata

SEQ ID NO: 156618 - DNA, 12 bp, Unknown
  misc_feature (1)..( 12): Result.004 file - promoters50/1017626
gcctatataaat

SEQ ID NO: 156619 - DNA, 12 bp, Unknown
  misc_feature (1)..( 12): Result.004 file - promoters50/1017626
gtgcctataaat

SEQ ID NO: 156620 - DNA, 12 bp, Unknown
  misc_feature (1)..( 12): Result.004 file - promoters50/1017626
gcctatataaac

SEQ ID NO: 156621 - DNA, 12 bp, Unknown
  misc_feature (1)..( 12): Result.004 file - promoters50/1017626
atatgtataaat

SEQ ID NO: 156622 - DNA, 8 bp, Unknown
  misc_feature (1)..( 8): Result.004 file - promoters50/1017626
aaacgaat

SEQ ID NO: 156623 - DNA, 8 bp, Unknown
  misc_feature (1)..( 8): Result.004 file - promoters50/1017626
aaacgatc

SEQ ID NO: 156624 - DNA, 8 bp, Unknown
  misc_feature (1)..( 8): Result.004 file - promoters50/1017626
taacaaat

SEQ ID NO: 156625 - DNA, 8 bp, Unknown
  misc_feature (1)..( 8): Result.004 file - promoters50/1017626
aaaccaat

SEQ ID NO: 156626 - DNA, 8 bp, Unknown
  misc_feature (1)..( 8): Result.004 file - promoters50/1017626
ataataag

SEQ ID NO: 156627 - DNA, 8 bp, Unknown
  misc_feature (1)..( 8): Result.004 file - promoters50/1017626
ttaataac

SEQ ID NO: 156628 - DNA, 8 bp, Unknown
  misc_feature (1)..( 8): Result.004 file - promoters50/1017626
ccaataac

SEQ ID NO: 156629 - DNA, 8 bp, Unknown
  misc_feature (1)..( 8): Result.004 file - promoters50/1017649
ttaatata

SEQ ID NO: 156630 - DNA, 11 bp, Unknown
  misc_feature (1)..( 11): Result.004 file - promoters50/1017649
gaaataaaaag

SEQ ID NO: 156631 - DNA, 11 bp, Unknown
  misc_feature (1)..( 11): Result.004 file - promoters50/1017649
gtcatacaaat

SEQ ID NO: 156632 - DNA, 11 bp, Unknown
  misc_feature (1)..( 11): Result.004 file - promoters50/1017649
tagataataag

SEQ ID NO: 156633 - DNA, 11 bp, Unknown
  misc_feature (1)..( 11): Result.004 file - promoters50/1017649
gaaataaatca

SEQ ID NO: 156634 - DNA, 11 bp, Unknown
  misc_feature (1)..( 11): Result.004 file - promoters50/1017681
agaatcagtag

SEQ ID NO: 156635 - DNA, 12 bp, Unknown
  misc_feature (1)..( 12): Result.004 file - promoters50/1017681
aaacgagaaagt

SEQ ID NO: 156636 - DNA, 12 bp, Unknown
  misc_feature (1)..( 12): Result.004 file - promoters50/1017681
aaaagagtaaaa

SEQ ID NO: 156637 - DNA, 12 bp, Unknown
  misc_feature (1)..( 12): Result.004 file - promoters50/1017693
aaaagactaaaa

SEQ ID NO: 156638 - DNA, 8 bp, Unknown
  misc_feature (1)..( 8): Result.004 file - promoters50/1017693
aatatagt

SEQ ID NO: 156639 - DNA, 8 bp, Unknown
  misc_feature (1)..( 8): Result.004 file - promoters50/1017693
aataaagt

SEQ ID NO: 156640 - DNA, 8 bp, Unknown
  misc_feature (1)..( 8): Result.004 file - promoters50/1017693
aatattat

SEQ ID NO: 156641 - DNA, 8 bp, Unknown
  misc_feature (1)..( 8): Result.004 file - promoters50/1017693
attggtag

SEQ ID NO: 156642 - DNA, 8 bp, Unknown
  misc_feature (1)..( 8): Result.004 file - promoters50/1017693
atttgtat

SEQ ID NO: 156643 - DNA, 8 bp, Unknown
  misc_feature (1)..( 8): Result.004 file - promoters50/1017693
atttttat

SEQ ID NO: 156644 - DNA, 9 bp, Unknown
  misc_feature (1)..( 9): Result.004 file - promoters50/1017693
atgtttttg

SEQ ID NO: 156645 - DNA, 9 bp, Unknown
  misc_feature (1)..( 9): Result.004 file - promoters50/1017693
atgtctttg

SEQ ID NO: 156646 - DNA, 9 bp, Unknown
  misc_feature (1)..( 9): Result.004 file - promoters50/1017693
tggtttttc

SEQ ID NO: 156647 - DNA, 8 bp, Unknown
  misc_feature (1)..( 8): Result.004 file - promoters50/1017693
aaaaactt

SEQ ID NO: 156648 - DNA, 8 bp, Unknown
  misc_feature (1)..( 8): Result.004 file - promoters50/1017693
aaaaacaa

SEQ ID NO: 156649 - DNA, 8 bp, Unknown
  misc_feature (1)..( 8): Result.004 file - promoters50/1017802
taaatcaa

SEQ ID NO: 156650 - DNA, 25 bp, Unknown
  misc_feature (1)..( 25): Result.004 file - promoters50/1017802
aaagttgcttcaaattatagattct

SEQ ID NO: 156651 - DNA, 25 bp, Unknown
  misc_feature (1)..( 25): Result.004 file - promoters50/1017802
aaagttgctacaaattatagattct

SEQ ID NO: 156652 - DNA, 25 bp, Unknown
  misc_feature (1)..( 25): Result.004 file - promoters50/1017802
gagtttgctagcatcaataatcaca

SEQ ID NO: 156653 - DNA, 22 bp, Unknown
  misc_feature (1)..( 22): Result.004 file - promoters50/1017802
tcttttctgattttgtttctca

SEQ ID NO: 156654 - DNA, 22 bp, Unknown
  misc_feature (1)..( 22): Result.004 file - promoters50/1017802
tcttttctgatattgtttctca

SEQ ID NO: 156655 - DNA, 22 bp, Unknown
  misc_feature (1)..( 22): Result.004 file - promoters50/1017802
atgtatcttattttgagaggtc

SEQ ID NO: 156656 - DNA, 7 bp, Unknown
  misc_feature (1)..( 7): Result.004 file - promoters50/1017802
aaatata

SEQ ID NO: 156657 - DNA, 7 bp, Unknown
  misc_feature (1)..( 7): Result.004 file - promoters50/1017802
aaatata

SEQ ID NO: 156658 - DNA, 7 bp, Unknown
  misc_feature (1)..( 7): Result.004 file - promoters50/1017802
aaatata

SEQ ID NO: 156659 - DNA, 8 bp, Unknown
  misc_feature (1)..( 8): Result.004 file - promoters50/1017802
aataaaat

SEQ ID NO: 156660 - DNA, 8 bp, Unknown
  misc_feature (1)..( 8): Result.004 file - promoters50/1017802
gataaaat

SEQ ID NO: 156661 - DNA, 8 bp, Unknown
  misc_feature (1)..( 8): Result.004 file - promoters50/1017802
gataaatt

SEQ ID NO: 156662 - DNA, 6 bp, Unknown
  misc_feature (1)..( 6): Result.004 file - promoters50/1017802
atagga

SEQ ID NO: 156663 - DNA, 6 bp, Unknown
  misc_feature (1)..( 6): Result.004 file - promoters50/1017802
atagga

SEQ ID NO: 156664 - DNA, 6 bp, Unknown
  misc_feature (1)..( 6): Result.004 file - promoters50/1017802
atagga

SEQ ID NO: 156665 - DNA, 8 bp, Unknown
  misc_feature (1)..( 8): Result.004 file - promoters50/1017802
ataatatt

SEQ ID NO: 156666 - DNA, 8 bp, Unknown
  misc_feature (1)..( 8): Result.004 file - promoters50/1017802
ataaaatt

SEQ ID NO: 156667 - DNA, 8 bp, Unknown
  misc_feature (1)..( 8): Result.004 file - promoters50/1017802
ataaaata

SEQ ID NO: 156668 - DNA, 12 bp, Unknown
  misc_feature (1)..( 12): Result.004 file - promoters50/1017802
aaaaaataaaaa

SEQ ID NO: 156669 - DNA, 12 bp, Unknown
  misc_feature (1)..( 12): Result.004 file - promoters50/1017802
aaaaattaaaaa

SEQ ID NO: 156670 - DNA, 12 bp, Unknown
  misc_feature (1)..( 12): Result.004 file - promoters50/1017883
ctcaaataaaat

SEQ ID NO: 156671 - DNA, 11 bp, Unknown
  misc_feature (1)..( 11): Result.004 file - promoters50/1017883
taagtaacata

SEQ ID NO: 156672 - DNA, 11 bp, Unknown
  misc_feature (1)..( 11): Result.004 file - promoters50/1017883
gaagtatcatc

SEQ ID NO: 156673 - DNA, 11 bp, Unknown
  misc_feature (1)..( 11): Result.004 file - promoters50/1017883
aaataaacata

SEQ ID NO: 156674 - DNA, 11 bp, Unknown
  misc_feature (1)..( 11): Result.004 file - promoters50/1017883
aaagaatcaac

SEQ ID NO: 156675 - DNA, 11 bp, Unknown
  misc_feature (1)..( 11): Result.004 file - promoters50/1017883
aaagaaaaaaa

SEQ ID NO: 156676 - DNA, 11 bp, Unknown
  misc_feature (1)..( 11): Result.004 file - promoters50/1017883
aaataataagc

SEQ ID NO: 156677 - DNA, 14 bp, Unknown
  misc_feature (1)..( 14): Result.004 file - promoters50/1017883
gtccaatataaata

SEQ ID NO: 156678 - DNA, 14 bp, Unknown
  misc_feature (1)..( 14): Result.004 file - promoters50/1017883
cacgcctatatata

SEQ ID NO: 156679 - DNA, 14 bp, Unknown
  misc_feature (1)..( 14): Result.004 file - promoters50/1017883
ttctctaataaata

SEQ ID NO: 156680 - DNA, 14 bp, Unknown
  misc_feature (1)..( 14): Result.004 file - promoters50/1017883
tcgctttataaaca

SEQ ID NO: 156681 - DNA, 14 bp, Unknown
  misc_feature (1)..( 14): Result.004 file - promoters50/1017883
ctcttgtatatata

SEQ ID NO: 156682 - DNA, 14 bp, Unknown
  misc_feature (1)..( 14): Result.004 file - promoters50/1017883
gaattaaataaata

SEQ ID NO: 156683 - DNA, 14 bp, Unknown
  misc_feature (1)..( 14): Result.004 file - promoters50/1017883
tcgccttaaaaacc

SEQ ID NO: 156684 - DNA, 11 bp, Unknown
  misc_feature (1)..( 11): Result.004 file - promoters50/1017883
gctattatgtg

SEQ ID NO: 156685 - DNA, 11 bp, Unknown
  misc_feature (1)..( 11): Result.004 file - promoters50/1017883
tttattatgtg

SEQ ID NO: 156686 - DNA, 11 bp, Unknown
  misc_feature (1)..( 11): Result.004 file - promoters50/1017883
gttattatatt

SEQ ID NO: 156687 - DNA, 11 bp, Unknown
  misc_feature (1)..( 11): Result.004 file - promoters50/1017883
ttttttaatct

SEQ ID NO: 156688 - DNA, 11 bp, Unknown
  misc_feature (1)..( 11): Result.004 file - promoters50/1017883
tttttttcact

SEQ ID NO: 156689 - DNA, 11 bp, Unknown
  misc_feature (1)..( 11): Result.004 file - promoters50/1017883
acttttaaaaa

SEQ ID NO: 156690 - DNA, 11 bp, Unknown
  misc_feature (1)..( 11): Result.004 file - promoters50/1017883
ataattatttt

SEQ ID NO: 156691 - DNA, 14 bp, Unknown
  misc_feature (1)..( 14): Result.004 file - promoters50/1017883
aaacaaatgtttgt

SEQ ID NO: 156692 - DNA, 14 bp, Unknown
  misc_feature (1)..( 14): Result.004 file - promoters50/1017883
aaataaatttttta

SEQ ID NO: 156693 - DNA, 14 bp, Unknown
  misc_feature (1)..( 14): Result.004 file - promoters50/1017883
tctaaactgtgtgt

SEQ ID NO: 156694 - DNA, 14 bp, Unknown
  misc_feature (1)..( 14): Result.004 file - promoters50/1017883
aaacaattctttaa

SEQ ID NO: 156695 - DNA, 14 bp, Unknown
  misc_feature (1)..( 14): Result.004 file - promoters50/1017883
catcgcttgtttgt

SEQ ID NO: 156696 - DNA, 14 bp, Unknown
  misc_feature (1)..( 14): Result.004 file - promoters50/1017887
aaaaaaagaagaaa

SEQ ID NO: 156697 - DNA, 9 bp, Unknown
  misc_feature (1)..( 9): Result.004 file - promoters50/1017887
tttaaattc

SEQ ID NO: 156698 - DNA, 9 bp, Unknown
  misc_feature (1)..( 9): Result.004 file - promoters50/1017887
tttaaataa

SEQ ID NO: 156699 - DNA, 9 bp, Unknown
  misc_feature (1)..( 9): Result.004 file - promoters50/1017887
tttatataa

SEQ ID NO: 156700 - DNA, 10 bp, Unknown
  misc_feature (1)..( 10): Result.004 file - promoters50/1017887
caatattttt

SEQ ID NO: 156701 - DNA, 10 bp, Unknown
  misc_feature (1)..( 10): Result.004 file - promoters50/1017887
ttttattttt

SEQ ID NO: 156702 - DNA, 10 bp, Unknown
  misc_feature (1)..( 10): Result.004 file - promoters50/1017887
tttgatttac

SEQ ID NO: 156703 - DNA, 9 bp, Unknown
  misc_feature (1)..( 9): Result.004 file - promoters50/1017887
cattatatt

SEQ ID NO: 156704 - DNA, 9 bp, Unknown
  misc_feature (1)..( 9): Result.004 file - promoters50/1017887
catcatata

SEQ ID NO: 156705 - DNA, 9 bp, Unknown
  misc_feature (1)..( 9): Result.004 file - promoters50/1017887
ttttatatt

SEQ ID NO: 156706 - DNA, 12 bp, Unknown
  misc_feature (1)..( 12): Result.004 file - promoters50/1017887
acacacatgcat

SEQ ID NO: 156707 - DNA, 12 bp, Unknown
  misc_feature (1)..( 12): Result.004 file - promoters50/1017887
actttcatgcat

SEQ ID NO: 156708 - DNA, 12 bp, Unknown
  misc_feature (1)..( 12): Result.004 file - promoters50/1017887
actctcatgctt

SEQ ID NO: 156709 - DNA, 9 bp, Unknown
  misc_feature (1)..( 9): Result.004 file - promoters50/1017887
tatcattgg

SEQ ID NO: 156710 - DNA, 9 bp, Unknown
  misc_feature (1)..( 9): Result.004 file - promoters50/1017887
gatcaatgg

SEQ ID NO: 156711 - DNA, 9 bp, Unknown
  misc_feature (1)..( 9): Result.004 file - promoters50/1017964
gatgaatgt

SEQ ID NO: 156712 - DNA, 11 bp, Unknown
  misc_feature (1)..( 11): Result.004 file - promoters50/1017964
aaagtataaat

SEQ ID NO: 156713 - DNA, 11 bp, Unknown
  misc_feature (1)..( 11): Result.004 file - promoters50/1017964
ttagtttaaaa

SEQ ID NO: 156714 - DNA, 11 bp, Unknown
  misc_feature (1)..( 11): Result.004 file - promoters50/1017964
aaattataaat

SEQ ID NO: 156715 - DNA, 11 bp, Unknown
  misc_feature (1)..( 11): Result.004 file - promoters50/1017964
aaactattata

SEQ ID NO: 156716 - DNA, 11 bp, Unknown
  misc_feature (1)..( 11): Result.004 file - promoters50/1018052
caattattaac

SEQ ID NO: 156717 - DNA, 10 bp, Unknown
  misc_feature (1)..( 10): Result.004 file - promoters50/1018052
ctcagttgat

SEQ ID NO: 156718 - DNA, 10 bp, Unknown
  misc_feature (1)..( 10): Result.004 file - promoters50/1018052
ttcagtttct

SEQ ID NO: 156719 - DNA, 10 bp, Unknown
  misc_feature (1)..( 10): Result.004 file - promoters50/1018052
atcaattttg

SEQ ID NO: 156720 - DNA, 10 bp, Unknown
  misc_feature (1)..( 10): Result.004 file - promoters50/1018052
actaatttta

SEQ ID NO: 156721 - DNA, 10 bp, Unknown
  misc_feature (1)..( 10): Result.004 file - promoters50/1018052
atcatttttt

SEQ ID NO: 156722 - DNA, 10 bp, Unknown
  misc_feature (1)..( 10): Result.004 file - promoters50/1018052
accaattttg

SEQ ID NO: 156723 - DNA, 16 bp, Unknown
  misc_feature (1)..( 16): Result.004 file - promoters50/1018052
ttgattgattgataca

SEQ ID NO: 156724 - DNA, 16 bp, Unknown
  misc_feature (1)..( 16): Result.004 file - promoters50/1018052
ataatttatttaatat

SEQ ID NO: 156725 - DNA, 15 bp, Unknown
  misc_feature (1)..( 15): Result.004 file - promoters50/1018052
agcttggttgtttga

SEQ ID NO: 156726 - DNA, 16 bp, Unknown
  misc_feature (1)..( 16): Result.004 file - promoters50/1018052
ggaatgtattttcagt

SEQ ID NO: 156727 - DNA, 16 bp, Unknown
  misc_feature (1)..( 16): Result.004 file - promoters50/1018052
taagttagttactaaa

SEQ ID NO: 156728 - DNA, 16 bp, Unknown
  misc_feature (1)..( 16): Result.004 file - promoters50/1018052
atcatttttttctaga

SEQ ID NO: 156729 - DNA, 10 bp, Unknown
  misc_feature (1)..( 10): Result.004 file - promoters50/1018052
tgttttttag

SEQ ID NO: 156730 - DNA, 10 bp, Unknown
  misc_feature (1)..( 10): Result.004 file - promoters50/1018052
atatttttac

SEQ ID NO: 156731 - DNA, 10 bp, Unknown
  misc_feature (1)..( 10): Result.004 file - promoters50/1018052
actgttttag

SEQ ID NO: 156732 - DNA, 11 bp, Unknown
  misc_feature (1)..( 11): Result.004 file - promoters50/1018052
caattttgtag

SEQ ID NO: 156733 - DNA, 11 bp, Unknown
  misc_feature (1)..( 11): Result.004 file - promoters50/1018052
aggacttgtag

SEQ ID NO: 156734 - DNA, 11 bp, Unknown
  misc_feature (1)..( 11): Result.004 file - promoters50/1018077
caattttgcta

SEQ ID NO: 156735 - DNA, 16 bp, Unknown
  misc_feature (1)..( 16): Result.004 file - promoters50/1018077
cataatcattatatat

SEQ ID NO: 156736 - DNA, 16 bp, Unknown
  misc_feature (1)..( 16): Result.004 file - promoters50/1018077
cataattccgggtcta

SEQ ID NO: 156737 - DNA, 16 bp, Unknown
  misc_feature (1)..( 16): Result.004 file - promoters50/1018077
tataatgattctatat

SEQ ID NO: 156738 - DNA, 16 bp, Unknown
  misc_feature (1)..( 16): Result.004 file - promoters50/1018077
aagaatgatcatattt

SEQ ID NO: 156739 - DNA, 9 bp, Unknown
  misc_feature (1)..( 9): Result.004 file - promoters50/1018077
attatctcc

SEQ ID NO: 156740 - DNA, 9 bp, Unknown
  misc_feature (1)..( 9): Result.004 file - promoters50/1018077
attttctcc

SEQ ID NO: 156741 - DNA, 9 bp, Unknown
  misc_feature (1)..( 9): Result.004 file - promoters50/1018077
agtatttcc

SEQ ID NO: 156742 - DNA, 9 bp, Unknown
  misc_feature (1)..( 9): Result.004 file - promoters50/1018077
ggtttctcg

SEQ ID NO: 156743 - DNA, 10 bp, Unknown
  misc_feature (1)..( 10): Result.004 file - promoters50/1018077
tcaaacaaaa

SEQ ID NO: 156744 - DNA, 10 bp, Unknown
  misc_feature (1)..( 10): Result.004 file - promoters50/1018077
tcaaacatct

SEQ ID NO: 156745 - DNA, 10 bp, Unknown
  misc_feature (1)..( 10): Result.004 file - promoters50/1018077
caaaacaaaa

SEQ ID NO: 156746 - DNA, 7 bp, Unknown
  misc_feature (1)..( 7): Result.004 file - promoters50/1018077
actgttt

SEQ ID NO: 156747 - DNA, 7 bp, Unknown
  misc_feature (1)..( 7): Result.004 file - promoters50/1018077
actgttt

SEQ ID NO: 156748 - DNA, 7 bp, Unknown
  misc_feature (1)..( 7): Result.004 file - promoters50/1018085
actgttg

SEQ ID NO: 156749 - DNA, 10 bp, Unknown
  misc_feature (1)..( 10): Result.004 file - promoters50/1018085
aaataatttt

SEQ ID NO: 156750 - DNA, 10 bp, Unknown
  misc_feature (1)..( 10): Result.004 file - promoters50/1018085
gcatattttt

SEQ ID NO: 156751 - DNA, 10 bp, Unknown
  misc_feature (1)..( 10): Result.004 file - promoters50/1018085
aaataattca

SEQ ID NO: 156752 - DNA, 10 bp, Unknown
  misc_feature (1)..( 10): Result.004 file - promoters50/1018085
agattgtttt

SEQ ID NO: 156753 - DNA, 9 bp, Unknown
  misc_feature (1)..( 9): Result.004 file - promoters50/1018085
attttaagt

SEQ ID NO: 156754 - DNA, 9 bp, Unknown
  misc_feature (1)..( 9): Result.004 file - promoters50/1018085
gttttaata

SEQ ID NO: 156755 - DNA, 9 bp, Unknown
  misc_feature (1)..( 9): Result.004 file - promoters50/1018085
tttttagta

SEQ ID NO: 156756 - DNA, 9 bp, Unknown
  misc_feature (1)..( 9): Result.004 file - promoters50/1018085
ggtttggta

SEQ ID NO: 156757 - DNA, 9 bp, Unknown
  misc_feature (1)..( 9): Result.004 file - promoters50/1018085
gagcataag

SEQ ID NO: 156758 - DNA, 9 bp, Unknown
  misc_feature (1)..( 9): Result.004 file - promoters50/1018085
aagcaaaag

SEQ ID NO: 156759 - DNA, 10 bp, Unknown
  misc_feature (1)..( 10): Result.004 file - promoters50/1018085
gagaatcaag

SEQ ID NO: 156760 - DNA, 10 bp, Unknown
  misc_feature (1)..( 10): Result.004 file - promoters50/1018151
gagaataatc

SEQ ID NO: 156761 - DNA, 10 bp, Unknown
  misc_feature (1)..( 10): Result.004 file - promoters50/1018151
ggtttttatt

SEQ ID NO: 156762 - DNA, 10 bp, Unknown
  misc_feature (1)..( 10): Result.004 file - promoters50/1018151
ggttattatc

SEQ ID NO: 156763 - DNA, 10 bp, Unknown
  misc_feature (1)..( 10): Result.004 file - promoters50/1018151
aagttttatt

SEQ ID NO: 156764 - DNA, 10 bp, Unknown
  misc_feature (1)..( 10): Result.004 file - promoters50/1018151
aacaattatc

SEQ ID NO: 156765 - DNA, 10 bp, Unknown
  misc_feature (1)..( 10): Result.004 file - promoters50/1018151
ggttaatatc

SEQ ID NO: 156766 - DNA, 7 bp, Unknown
  misc_feature (1)..( 7): Result.004 file - promoters50/1018151
atttaaa

SEQ ID NO: 156767 - DNA, 7 bp, Unknown
  misc_feature (1)..( 7): Result.004 file - promoters50/1018151
atttaat

SEQ ID NO: 156768 - DNA, 8 bp, Unknown
  misc_feature (1)..( 8): Result.004 file - promoters50/1018151
ctttcaat

SEQ ID NO: 156769 - DNA, 8 bp, Unknown
  misc_feature (1)..( 8): Result.004 file - promoters50/1018151
aatataaa

SEQ ID NO: 156770 - DNA, 12 bp, Unknown
  misc_feature (1)..( 12): Result.004 file - promoters50/1018151
ggtctatataag

SEQ ID NO: 156771 - DNA, 12 bp, Unknown
  misc_feature (1)..( 12): Result.004 file - promoters50/1018151
tctctctataaa

SEQ ID NO: 156772 - DNA, 12 bp, Unknown
  misc_feature (1)..( 12): Result.004 file - promoters50/1018151
aagacttataag

SEQ ID NO: 156773 - DNA, 12 bp, Unknown
  misc_feature (1)..( 12): Result.004 file - promoters50/1018151
ggtgtatataat

SEQ ID NO: 156774 - DNA, 8 bp, Unknown
  misc_feature (1)..( 8): Result.004 file - promoters50/1018151
aaaagtaa

SEQ ID NO: 156775 - DNA, 8 bp, Unknown
  misc_feature (1)..( 8): Result.004 file - promoters50/1018151
taaaataa

SEQ ID NO: 156776 - DNA, 8 bp, Unknown
  misc_feature (1)..( 8): Result.004 file - promoters50/1018151
taatataa

SEQ ID NO: 156777 - DNA, 8 bp, Unknown
  misc_feature (1)..( 8): Result.004 file - promoters50/1018155
gaaaatat

SEQ ID NO: 156778 - DNA, 11 bp, Unknown
  misc_feature (1)..( 11): Result.004 file - promoters50/1018155
ttttgtactta

SEQ ID NO: 156779 - DNA, 11 bp, Unknown
  misc_feature (1)..( 11): Result.004 file - promoters50/1018155
ttttatacgtt

SEQ ID NO: 156780 - DNA, 11 bp, Unknown
  misc_feature (1)..( 11): Result.004 file - promoters50/1018155
atttatacatt

SEQ ID NO: 156781 - DNA, 11 bp, Unknown
  misc_feature (1)..( 11): Result.004 file - promoters50/1018155
ctatgtattta

SEQ ID NO: 156782 - DNA, 11 bp, Unknown
  misc_feature (1)..( 11): Result.004 file - promoters50/1018155
ttttgttttcc

SEQ ID NO: 156783 - DNA, 11 bp, Unknown
  misc_feature (1)..( 11): Result.004 file - promoters50/1018155
gattgttacac

SEQ ID NO: 156784 - DNA, 11 bp, Unknown
  misc_feature (1)..( 11): Result.004 file - promoters50/1018155
aaaataaaaat

SEQ ID NO: 156785 - DNA, 11 bp, Unknown
  misc_feature (1)..( 11): Result.004 file - promoters50/1018155
aagttaaaaac

SEQ ID NO: 156786 - DNA, 11 bp, Unknown
  misc_feature (1)..( 11): Result.004 file - promoters50/1018155
aaattaaaaaa

SEQ ID NO: 156787 - DNA, 11 bp, Unknown
  misc_feature (1)..( 11): Result.004 file - promoters50/1018155
gttttacaaat

SEQ ID NO: 156788 - DNA, 11 bp, Unknown
  misc_feature (1)..( 11): Result.004 file - promoters50/1018155
atcttataaaa

SEQ ID NO: 156789 - DNA, 11 bp, Unknown
  misc_feature (1)..( 11): Result.004 file - promoters50/1018155
tttttgcaatg

SEQ ID NO: 156790 - DNA, 10 bp, Unknown
  misc_feature (1)..( 10): Result.004 file - promoters50/1018155
ccaaaaaaaa

SEQ ID NO: 156791 - DNA, 10 bp, Unknown
  misc_feature (1)..( 10): Result.004 file - promoters50/1018155
tcaagaaacg

SEQ ID NO: 156792 - DNA, 11 bp, Unknown
  misc_feature (1)..( 11): Result.004 file - promoters50/1018155
ctaaaacaaat

SEQ ID NO: 156793 - DNA, 11 bp, Unknown
  misc_feature (1)..( 11): Result.004 file - promoters50/1018155
ccaaaacaaaa

SEQ ID NO: 156794 - DNA, 11 bp, Unknown
  misc_feature (1)..( 11): Result.004 file - promoters50/1018155
gcaagaagaag

SEQ ID NO: 156795 - DNA, 11 bp, Unknown
  misc_feature (1)..( 11): Result.004 file - promoters50/1018155
ccaatctagat

SEQ ID NO: 156796 - DNA, 14 bp, Unknown
  misc_feature (1)..( 14): Result.004 file - promoters50/1018155
gggaatataattaa

SEQ ID NO: 156797 - DNA, 14 bp, Unknown
  misc_feature (1)..( 14): Result.004 file - promoters50/1018155
ttacataaaatctg

SEQ ID NO: 156798 - DNA, 14 bp, Unknown
  misc_feature (1)..( 14): Result.004 file - promoters50/1018155
tttaataaaaatca

SEQ ID NO: 156799 - DNA, 14 bp, Unknown
  misc_feature (1)..( 14): Result.004 file - promoters50/1018155
tttaagaaaaaata

SEQ ID NO: 156800 - DNA, 14 bp, Unknown
  misc_feature (1)..( 14): Result.004 file - promoters50/1018155
gcttacaaaaactg

SEQ ID NO: 156801 - DNA, 15 bp, Unknown
  misc_feature (1)..( 15): Result.004 file - promoters50/1018155
agttggaaacaatag

SEQ ID NO: 156802 - DNA, 15 bp, Unknown
  misc_feature (1)..( 15): Result.004 file - promoters50/1018155
tataacaaaaacaat

SEQ ID NO: 156803 - DNA, 11 bp, Unknown
  misc_feature (1)..( 11): Result.004 file - promoters50/1018155
ataaaaatcat

SEQ ID NO: 156804 - DNA, 11 bp, Unknown
  misc_feature (1)..( 11): Result.004 file - promoters50/1018155
cttgaaaacat

SEQ ID NO: 156805 - DNA, 11 bp, Unknown
  misc_feature (1)..( 11): Result.004 file - promoters50/1018155
cataaaatctg

SEQ ID NO: 156806 - DNA, 11 bp, Unknown
  misc_feature (1)..( 11): Result.004 file - promoters50/1018155
tacaaaaactg

SEQ ID NO: 156807 - DNA, 11 bp, Unknown
  misc_feature (1)..( 11): Result.004 file - promoters50/1018155
aataaaaactc

SEQ ID NO: 156808 - DNA, 11 bp, Unknown
  misc_feature (1)..( 11): Result.004 file - promoters50/1018155
aacaaaatctt

SEQ ID NO: 156809 - DNA, 13 bp, Unknown
  misc_feature (1)..( 13): Result.004 file - promoters50/1018155
ttcattttttgca

SEQ ID NO: 156810 - DNA, 13 bp, Unknown
  misc_feature (1)..( 13): Result.004 file - promoters50/1018155
ttaattttttaat

SEQ ID NO: 156811 - DNA, 13 bp, Unknown
  misc_feature (1)..( 13): Result.004 file - promoters50/1018155
tcaatttactcca

SEQ ID NO: 156812 - DNA, 13 bp, Unknown
  misc_feature (1)..( 13): Result.004 file - promoters50/1018155
tgtgtttttgcaa

SEQ ID NO: 156813 - DNA, 13 bp, Unknown
  misc_feature (1)..( 13): Result.004 file - promoters50/1018155
tctctttttaggt

SEQ ID NO: 156814 - DNA, 13 bp, Unknown
  misc_feature (1)..( 13): Result.004 file - promoters50/1018159
aatcgttttacaa

SEQ ID NO: 156815 - DNA, 9 bp, Unknown
  misc_feature (1)..( 9): Result.004 file - promoters50/1018159
gaaatcgaa

SEQ ID NO: 156816 - DNA, 9 bp, Unknown
  misc_feature (1)..( 9): Result.004 file - promoters50/1018159
gaaatcctc

SEQ ID NO: 156817 - DNA, 9 bp, Unknown
  misc_feature (1)..( 9): Result.004 file - promoters50/1018159
gaaattgaa

SEQ ID NO: 156818 - DNA, 9 bp, Unknown
  misc_feature (1)..( 9): Result.004 file - promoters50/1018159
gaaattagg

SEQ ID NO: 156819 - DNA, 8 bp, Unknown
  misc_feature (1)..( 8): Result.004 file - promoters50/1018159
ataaattc

SEQ ID NO: 156820 - DNA, 8 bp, Unknown
  misc_feature (1)..( 8): Result.004 file - promoters50/1018159
gtaatttc

SEQ ID NO: 156821 - DNA, 8 bp, Unknown
  misc_feature (1)..( 8): Result.004 file - promoters50/1018159
ataaattg

SEQ ID NO: 156822 - DNA, 8 bp, Unknown
  misc_feature (1)..( 8): Result.004 file - promoters50/1018163
ataaatga

SEQ ID NO: 156823 - DNA, 12 bp, Unknown
  misc_feature (1)..( 12): Result.004 file - promoters50/1018163
ctcatgaaaaaa

SEQ ID NO: 156824 - DNA, 12 bp, Unknown
  misc_feature (1)..( 12): Result.004 file - promoters50/1018163
ctcatgacggga

SEQ ID NO: 156825 - DNA, 12 bp, Unknown
  misc_feature (1)..( 12): Result.004 file - promoters50/1018190
cacatgaaaaaa

SEQ ID NO: 156826 - DNA, 13 bp, Unknown
  misc_feature (1)..( 13): Result.004 file - promoters50/1018190
ctgatttttttat

SEQ ID NO: 156827 - DNA, 13 bp, Unknown
  misc_feature (1)..( 13): Result.004 file - promoters50/1018190
atcctttttttaa

SEQ ID NO: 156828 - DNA, 13 bp, Unknown
  misc_feature (1)..( 13): Result.004 file - promoters50/1018190
aacatttttcagt

SEQ ID NO: 156829 - DNA, 13 bp, Unknown
  misc_feature (1)..( 13): Result.004 file - promoters50/1018190
tttaattttgtat

SEQ ID NO: 156830 - DNA, 13 bp, Unknown
  misc_feature (1)..( 13): Result.004 file - promoters50/1018190
cgactttgtttgt

SEQ ID NO: 156831 - DNA, 13 bp, Unknown
  misc_feature (1)..( 13): Result.004 file - promoters50/1018206
acaatttaaaaac

SEQ ID NO: 156832 - DNA, 9 bp, Unknown
  misc_feature (1)..( 9): Result.004 file - promoters50/1018206
caatgatcc

SEQ ID NO: 156833 - DNA, 9 bp, Unknown
  misc_feature (1)..( 9): Result.004 file - promoters50/1018206
cattgatcc

SEQ ID NO: 156834 - DNA, 9 bp, Unknown
  misc_feature (1)..( 9): Result.004 file - promoters50/1018206
aaattatca

SEQ ID NO: 156835 - DNA, 9 bp, Unknown
  misc_feature (1)..( 9): Result.004 file - promoters50/1018206
aaaatatga

SEQ ID NO: 156836 - DNA, 9 bp, Unknown
  misc_feature (1)..( 9): Result.004 file - promoters50/1018206
aaatcatcc

SEQ ID NO: 156837 - DNA, 8 bp, Unknown
  misc_feature (1)..( 8): Result.004 file - promoters50/1018206
caatgatc

SEQ ID NO: 156838 - DNA, 8 bp, Unknown
  misc_feature (1)..( 8): Result.004 file - promoters50/1018206
aaatgata

SEQ ID NO: 156839 - DNA, 8 bp, Unknown
  misc_feature (1)..( 8): Result.004 file - promoters50/1018206
aaattatc

SEQ ID NO: 156840 - DNA, 8 bp, Unknown
  misc_feature (1)..( 8): Result.004 file - promoters50/1018206
aaaatatg

SEQ ID NO: 156841 - DNA, 8 bp, Unknown
  misc_feature (1)..( 8): Result.004 file - promoters50/1018206
aaatcatc

SEQ ID NO: 156842 - DNA, 16 bp, Unknown
  misc_feature (1)..( 16): Result.004 file - promoters50/1018206
gaaaaaaaagaaaaaa

SEQ ID NO: 156843 - DNA, 16 bp, Unknown
  misc_feature (1)..( 16): Result.004 file - promoters50/1018206
gaaaaaaaataaaaaa

SEQ ID NO: 156844 - DNA, 16 bp, Unknown
  misc_feature (1)..( 16): Result.004 file - promoters50/1018206
agaaaacaagagaatg

SEQ ID NO: 156845 - DNA, 16 bp, Unknown
  misc_feature (1)..( 16): Result.004 file - promoters50/1018206
atcaaacaaacagttg

SEQ ID NO: 156846 - DNA, 16 bp, Unknown
  misc_feature (1)..( 16): Result.004 file - promoters50/1018206
tcaaaacattatattt

SEQ ID NO: 156847 - DNA, 15 bp, Unknown
  misc_feature (1)..( 15): Result.004 file - promoters50/1018206
aaaaaaagctatatt

SEQ ID NO: 156848 - DNA, 15 bp, Unknown
  misc_feature (1)..( 15): Result.004 file - promoters50/1018206
gttaaaaactaaaaa

SEQ ID NO: 156849 - DNA, 15 bp, Unknown
  misc_feature (1)..( 15): Result.004 file - promoters50/1018206
gaaaaaaaataaaaa

SEQ ID NO: 156850 - DNA, 15 bp, Unknown
  misc_feature (1)..( 15): Result.004 file - promoters50/1018206
aacaaaaccatacag

SEQ ID NO: 156851 - DNA, 15 bp, Unknown
  misc_feature (1)..( 15): Result.004 file - promoters50/1018213
aacaaacagttgaat

SEQ ID NO: 156852 - DNA, 10 bp, Unknown
  misc_feature (1)..( 10): Result.004 file - promoters50/1018213
tattgtatat

SEQ ID NO: 156853 - DNA, 10 bp, Unknown
  misc_feature (1)..( 10): Result.004 file - promoters50/1018213
tatcgtatat

SEQ ID NO: 156854 - DNA, 10 bp, Unknown
  misc_feature (1)..( 10): Result.004 file - promoters50/1018213
aattatataa

SEQ ID NO: 156855 - DNA, 9 bp, Unknown
  misc_feature (1)..( 9): Result.004 file - promoters50/1018213
ttttataat

SEQ ID NO: 156856 - DNA, 9 bp, Unknown
  misc_feature (1)..( 9): Result.004 file - promoters50/1018213
ttttttaat

SEQ ID NO: 156857 - DNA, 9 bp, Unknown
  misc_feature (1)..( 9): Result.004 file - promoters50/1018213
tttttttca

SEQ ID NO: 156858 - DNA, 9 bp, Unknown
  misc_feature (1)..( 9): Result.004 file - promoters50/1018213
acttttaag

SEQ ID NO: 156859 - DNA, 9 bp, Unknown
  misc_feature (1)..( 9): Result.004 file - promoters50/1018213
taaaaaaag

SEQ ID NO: 156860 - DNA, 9 bp, Unknown
  misc_feature (1)..( 9): Result.004 file - promoters50/1018213
taagaaatt

SEQ ID NO: 156861 - DNA, 9 bp, Unknown
  misc_feature (1)..( 9): Result.004 file - promoters50/1018213
ctagacatt

SEQ ID NO: 156862 - DNA, 8 bp, Unknown
  misc_feature (1)..( 8): Result.004 file - promoters50/1018213
agaaattg

SEQ ID NO: 156863 - DNA, 8 bp, Unknown
  misc_feature (1)..( 8): Result.004 file - promoters50/1018213
agacattg

SEQ ID NO: 156864 - DNA, 8 bp, Unknown
  misc_feature (1)..( 8): Result.004 file - promoters50/1018213
agaaatta

SEQ ID NO: 156865 - DNA, 8 bp, Unknown
  misc_feature (1)..( 8): Result.004 file - promoters50/1018213
aatatttt

SEQ ID NO: 156866 - DNA, 8 bp, Unknown
  misc_feature (1)..( 8): Result.004 file - promoters50/1018213
aatttttt

SEQ ID NO: 156867 - DNA, 8 bp, Unknown
  misc_feature (1)..( 8): Result.004 file - promoters50/1018213
aatttttt

SEQ ID NO: 156868 - DNA, 11 bp, Unknown
  misc_feature (1)..( 11): Result.004 file - promoters50/1018213
ggacaagaatt

SEQ ID NO: 156869 - DNA, 11 bp, Unknown
  misc_feature (1)..( 11): Result.004 file - promoters50/1018213
atccaaaaata

SEQ ID NO: 156870 - DNA, 11 bp, Unknown
  misc_feature (1)..( 11): Result.004 file - promoters50/1018213
tcccaaaacta

SEQ ID NO: 156871 - DNA, 11 bp, Unknown
  misc_feature (1)..( 11): Result.004 file - promoters50/1018217
cgaaaaaaata

SEQ ID NO: 156872 - DNA, 11 bp, Unknown
  misc_feature (1)..( 11): Result.004 file - promoters50/1018217
atagaaaatat

SEQ ID NO: 156873 - DNA, 11 bp, Unknown
  misc_feature (1)..( 11): Result.004 file - promoters50/1018217
tacataaatat

SEQ ID NO: 156874 - DNA, 11 bp, Unknown
  misc_feature (1)..( 11): Result.004 file - promoters50/1018217
ataaaaaataa

SEQ ID NO: 156875 - DNA, 8 bp, Unknown
  misc_feature (1)..( 8): Result.004 file - promoters50/1018217
aaaaaaaa

SEQ ID NO: 156876 - DNA, 8 bp, Unknown
  misc_feature (1)..( 8): Result.004 file - promoters50/1018217
aaaaaaaa

SEQ ID NO: 156877 - DNA, 8 bp, Unknown
  misc_feature (1)..( 8): Result.004 file - promoters50/1018217
acataaat

SEQ ID NO: 156878 - DNA, 8 bp, Unknown
  misc_feature (1)..( 8): Result.004 file - promoters50/1018217
tcaaatgg

SEQ ID NO: 156879 - DNA, 8 bp, Unknown
  misc_feature (1)..( 8): Result.004 file - promoters50/1018217
tcaaatct

SEQ ID NO: 156880 - DNA, 8 bp, Unknown
  misc_feature (1)..( 8): Result.004 file - promoters50/1018220
acaaatct

SEQ ID NO: 156881 - DNA, 12 bp, Unknown
  misc_feature (1)..( 12): Result.004 file - promoters50/1018220
tgttgtaagttt

SEQ ID NO: 156882 - DNA, 12 bp, Unknown
  misc_feature (1)..( 12): Result.004 file - promoters50/1018220
acttgtcagttt

SEQ ID NO: 156883 - DNA, 12 bp, Unknown
  misc_feature (1)..( 12): Result.004 file - promoters50/1018220
tgttttaaaact

SEQ ID NO: 156884 - DNA, 9 bp, Unknown
  misc_feature (1)..( 9): Result.004 file - promoters50/1018220
tcaatttta

SEQ ID NO: 156885 - DNA, 9 bp, Unknown
  misc_feature (1)..( 9): Result.004 file - promoters50/1018220
tcattttta

SEQ ID NO: 156886 - DNA, 9 bp, Unknown
  misc_feature (1)..( 9): Result.004 file - promoters50/1018220
tcattttcg

SEQ ID NO: 156887 - DNA, 11 bp, Unknown
  misc_feature (1)..( 11): Result.004 file - promoters50/1018220
ttaccatgcaa

SEQ ID NO: 156888 - DNA, 11 bp, Unknown
  misc_feature (1)..( 11): Result.004 file - promoters50/1018220
atcaaatgcaa

SEQ ID NO: 156889 - DNA, 11 bp, Unknown
  misc_feature (1)..( 11): Result.004 file - promoters50/1018220
atctaattcaa

SEQ ID NO: 156890 - DNA, 8 bp, Unknown
  misc_feature (1)..( 8): Result.004 file - promoters50/1018220
aagtaaac

SEQ ID NO: 156891 - DNA, 8 bp, Unknown
  misc_feature (1)..( 8): Result.004 file - promoters50/1018220
tagttaac

SEQ ID NO: 156892 - DNA, 8 bp, Unknown
  misc_feature (1)..( 8): Result.004 file - promoters50/1018220
aagaaaac

SEQ ID NO: 156893 - DNA, 7 bp, Unknown
  misc_feature (1)..( 7): Result.004 file - promoters50/1018220
gagatag

SEQ ID NO: 156894 - DNA, 7 bp, Unknown
  misc_feature (1)..( 7): Result.004 file - promoters50/1018220
tagatag

SEQ ID NO: 156895 - DNA, 7 bp, Unknown
  misc_feature (1)..( 7): Result.004 file - promoters50/1018220
tagatat

SEQ ID NO: 156896 - DNA, 11 bp, Unknown
  misc_feature (1)..( 11): Result.004 file - promoters50/1018220
taaaagtaacg

SEQ ID NO: 156897 - DNA, 11 bp, Unknown
  misc_feature (1)..( 11): Result.004 file - promoters50/1018220
tttaagaaacg

SEQ ID NO: 156898 - DNA, 11 bp, Unknown
  misc_feature (1)..( 11): Result.004 file - promoters50/1018220
tttaaaaaaat

SEQ ID NO: 156899 - DNA, 9 bp, Unknown
  misc_feature (1)..( 9): Result.004 file - promoters50/1018220
atagaaaat

SEQ ID NO: 156900 - DNA, 9 bp, Unknown
  misc_feature (1)..( 9): Result.004 file - promoters50/1018220
tcagaaaat

SEQ ID NO: 156901 - DNA, 9 bp, Unknown
  misc_feature (1)..( 9): Result.004 file - promoters50/1018276
tcataaagc

SEQ ID NO: 156902 - DNA, 10 bp, Unknown
  misc_feature (1)..( 10): Result.004 file - promoters50/1018276
tcatttgtat

SEQ ID NO: 156903 - DNA, 10 bp, Unknown
  misc_feature (1)..( 10): Result.004 file - promoters50/1018276
tcatgtgtaa

SEQ ID NO: 156904 - DNA, 10 bp, Unknown
  misc_feature (1)..( 10): Result.004 file - promoters50/1018276
gaatttgttt

SEQ ID NO: 156905 - DNA, 10 bp, Unknown
  misc_feature (1)..( 10): Result.004 file - promoters50/1018276
atatttgttg

SEQ ID NO: 156906 - DNA, 10 bp, Unknown
  misc_feature (1)..( 10): Result.004 file - promoters50/1018276
aaatttatat

SEQ ID NO: 156907 - DNA, 10 bp, Unknown
  misc_feature (1)..( 10): Result.004 file - promoters50/1018276
ttatttattt

SEQ ID NO: 156908 - DNA, 20 bp, Unknown
  misc_feature (1)..( 20): Result.004 file - promoters50/1018276
aaaaacaaaaagtaaaacaa

SEQ ID NO: 156909 - DNA, 20 bp, Unknown
  misc_feature (1)..( 20): Result.004 file - promoters50/1018276
ttttgtgaaatgtattttgt

SEQ ID NO: 156910 - DNA, 20 bp, Unknown
  misc_feature (1)..( 20): Result.004 file - promoters50/1018276
atcaccaaaatctataatct

SEQ ID NO: 156911 - DNA, 20 bp, Unknown
  misc_feature (1)..( 20): Result.004 file - promoters50/1018276
ttttgtcaaatgatgaaata

SEQ ID NO: 156912 - DNA, 20 bp, Unknown
  misc_feature (1)..( 20): Result.004 file - promoters50/1018276
atcgtcttgctctgattttg

SEQ ID NO: 156913 - DNA, 20 bp, Unknown
  misc_feature (1)..( 20): Result.004 file - promoters50/1018382
atgtgttaaaagacttaaag

SEQ ID NO: 156914 - DNA, 9 bp, Unknown
  misc_feature (1)..( 9): Result.004 file - promoters50/1018382
aaaatattg

SEQ ID NO: 156915 - DNA, 9 bp, Unknown
  misc_feature (1)..( 9): Result.004 file - promoters50/1018382
ataatatta

SEQ ID NO: 156916 - DNA, 9 bp, Unknown
  misc_feature (1)..( 9): Result.004 file - promoters50/1018382
aaaaaattg

SEQ ID NO: 156917 - DNA, 9 bp, Unknown
  misc_feature (1)..( 9): Result.004 file - promoters50/1018382
taaataaaa

SEQ ID NO: 156918 - DNA, 12 bp, Unknown
  misc_feature (1)..( 12): Result.004 file - promoters50/1018382
aaaatattgtta

SEQ ID NO: 156919 - DNA, 12 bp, Unknown
  misc_feature (1)..( 12): Result.004 file - promoters50/1018382
agtttattatta

SEQ ID NO: 156920 - DNA, 12 bp, Unknown
  misc_feature (1)..( 12): Result.004 file - promoters50/1018382
aaaaaattggtc

SEQ ID NO: 156921 - DNA, 12 bp, Unknown
  misc_feature (1)..( 12): Result.004 file - promoters50/1018382
ttaatattttct

SEQ ID NO: 156922 - DNA, 13 bp, Unknown
  misc_feature (1)..( 13): Result.004 file - promoters50/1018382
aaatttgtaattt

SEQ ID NO: 156923 - DNA, 13 bp, Unknown
  misc_feature (1)..( 13): Result.004 file - promoters50/1018382
aaatttgttattt

SEQ ID NO: 156924 - DNA, 13 bp, Unknown
  misc_feature (1)..( 13): Result.004 file - promoters50/1018382
aaatctgtatttt

SEQ ID NO: 156925 - DNA, 13 bp, Unknown
  misc_feature (1)..( 13): Result.004 file - promoters50/1018382
ctttttgtttggt

SEQ ID NO: 156926 - DNA, 13 bp, Unknown
  misc_feature (1)..( 13): Result.004 file - promoters50/1018382
ctcgctgtattat

SEQ ID NO: 156927 - DNA, 9 bp, Unknown
  misc_feature (1)..( 9): Result.004 file - promoters50/1018382
atttactat

SEQ ID NO: 156928 - DNA, 9 bp, Unknown
  misc_feature (1)..( 9): Result.004 file - promoters50/1018382
ttttactac

SEQ ID NO: 156929 - DNA, 9 bp, Unknown
  misc_feature (1)..( 9): Result.004 file - promoters50/1018382
ctttattat

SEQ ID NO: 156930 - DNA, 9 bp, Unknown
  misc_feature (1)..( 9): Result.004 file - promoters50/1018382
ttttaccag

SEQ ID NO: 156931 - DNA, 14 bp, Unknown
  misc_feature (1)..( 14): Result.004 file - promoters50/1018382
gattataaaaaaaa

SEQ ID NO: 156932 - DNA, 14 bp, Unknown
  misc_feature (1)..( 14): Result.004 file - promoters50/1018382
gtttacaaaacaaa

SEQ ID NO: 156933 - DNA, 14 bp, Unknown
  misc_feature (1)..( 14): Result.004 file - promoters50/1018382
ggatatcaaaaaat

SEQ ID NO: 156934 - DNA, 14 bp, Unknown
  misc_feature (1)..( 14): Result.004 file - promoters50/1018382
tgttacaaattttc

SEQ ID NO: 156935 - DNA, 14 bp, Unknown
  misc_feature (1)..( 14): Result.004 file - promoters50/1018391
tgttacatccaaat

SEQ ID NO: 156936 - DNA, 12 bp, Unknown
  misc_feature (1)..( 12): Result.004 file - promoters50/1018391
ccctatatatcc

SEQ ID NO: 156937 - DNA, 12 bp, Unknown
  misc_feature (1)..( 12): Result.004 file - promoters50/1018391
cccaataacgaa

SEQ ID NO: 156938 - DNA, 12 bp, Unknown
  misc_feature (1)..( 12): Result.004 file - promoters50/1018391
acctaaataata

SEQ ID NO: 156939 - DNA, 12 bp, Unknown
  misc_feature (1)..( 12): Result.004 file - promoters50/1018391
aactatacataa

SEQ ID NO: 156940 - DNA, 12 bp, Unknown
  misc_feature (1)..( 12): Result.004 file - promoters50/1018391
gcctgaatcata

SEQ ID NO: 156941 - DNA, 12 bp, Unknown
  misc_feature (1)..( 12): Result.004 file - promoters50/1018454
atgtaattaaat

SEQ ID NO: 156942 - DNA, 12 bp, Unknown
  misc_feature (1)..( 12): Result.004 file - promoters50/1018454
agtcttttgtgc

SEQ ID NO: 156943 - DNA, 12 bp, Unknown
  misc_feature (1)..( 12): Result.004 file - promoters50/1018454
cccattttctgc

SEQ ID NO: 156944 - DNA, 12 bp, Unknown
  misc_feature (1)..( 12): Result.004 file - promoters50/1018454
catattatctat

SEQ ID NO: 156945 - DNA, 12 bp, Unknown
  misc_feature (1)..( 12): Result.004 file - promoters50/1018454
ttggttatctat

SEQ ID NO: 156946 - DNA, 12 bp, Unknown
  misc_feature (1)..( 12): Result.004 file - promoters50/1018454
cccagtttcatt

SEQ ID NO: 156947 - DNA, 12 bp, Unknown
  misc_feature (1)..( 12): Result.004 file - promoters50/1018454
taaattttcaat

SEQ ID NO: 156948 - DNA, 11 bp, Unknown
  misc_feature (1)..( 11): Result.004 file - promoters50/1018454
acaaaaatatg

SEQ ID NO: 156949 - DNA, 11 bp, Unknown
  misc_feature (1)..( 11): Result.004 file - promoters50/1018454
tgaaaattatt

SEQ ID NO: 156950 - DNA, 11 bp, Unknown
  misc_feature (1)..( 11): Result.004 file - promoters50/1018454
ttaaaaatatg

SEQ ID NO: 156951 - DNA, 11 bp, Unknown
  misc_feature (1)..( 11): Result.004 file - promoters50/1018454
agaaaatggtt

SEQ ID NO: 156952 - DNA, 11 bp, Unknown
  misc_feature (1)..( 11): Result.004 file - promoters50/1018454
agacaataaga

SEQ ID NO: 156953 - DNA, 11 bp, Unknown
  misc_feature (1)..( 11): Result.004 file - promoters50/1018472
ggaaaatttca

SEQ ID NO: 156954 - DNA, 12 bp, Unknown
  misc_feature (1)..( 12): Result.004 file - promoters50/1018472
aaatcttcaaat

SEQ ID NO: 156955 - DNA, 12 bp, Unknown
  misc_feature (1)..( 12): Result.004 file - promoters50/1018472
gttatttcaaat

SEQ ID NO: 156956 - DNA, 12 bp, Unknown
  misc_feature (1)..( 12): Result.004 file - promoters50/1018472
aaattttcaata

SEQ ID NO: 156957 - DNA, 12 bp, Unknown
  misc_feature (1)..( 12): Result.004 file - promoters50/1018472
tccaattaaatt

SEQ ID NO: 156958 - DNA, 9 bp, Unknown
  misc_feature (1)..( 9): Result.004 file - promoters50/1018472
aaaaaaaat

SEQ ID NO: 156959 - DNA, 9 bp, Unknown
  misc_feature (1)..( 9): Result.004 file - promoters50/1018472
aaaacaaat

SEQ ID NO: 156960 - DNA, 9 bp, Unknown
  misc_feature (1)..( 9): Result.004 file - promoters50/1018472
ttgaaaaat

SEQ ID NO: 156961 - DNA, 6 bp, Unknown
  misc_feature (1)..( 6): Result.004 file - promoters50/1018472
taaatt

SEQ ID NO: 156962 - DNA, 6 bp, Unknown
  misc_feature (1)..( 6): Result.004 file - promoters50/1018472
taaatt

SEQ ID NO: 156963 - DNA, 6 bp, Unknown
  misc_feature (1)..( 6): Result.004 file - promoters50/1018472
taaatt

SEQ ID NO: 156964 - DNA, 8 bp, Unknown
  misc_feature (1)..( 8): Result.004 file - promoters50/1018472
acaaaaaa

SEQ ID NO: 156965 - DNA, 8 bp, Unknown
  misc_feature (1)..( 8): Result.004 file - promoters50/1018472
acaaaatt

SEQ ID NO: 156966 - DNA, 8 bp, Unknown
  misc_feature (1)..( 8): Result.004 file - promoters50/1018472
acaacatt

SEQ ID NO: 156967 - DNA, 7 bp, Unknown
  misc_feature (1)..( 7): Result.004 file - promoters50/1018472
gtcaatt

SEQ ID NO: 156968 - DNA, 7 bp, Unknown
  misc_feature (1)..( 7): Result.004 file - promoters50/1018472
ctcaatt

SEQ ID NO: 156969 - DNA, 7 bp, Unknown
  misc_feature (1)..( 7): Result.004 file - promoters50/1018472
ctcaatg

SEQ ID NO: 156970 - DNA, 9 bp, Unknown
  misc_feature (1)..( 9): Result.004 file - promoters50/1018472
agatatttt

SEQ ID NO: 156971 - DNA, 9 bp, Unknown
  misc_feature (1)..( 9): Result.004 file - promoters50/1018472
agatattct

SEQ ID NO: 156972 - DNA, 9 bp, Unknown
  misc_feature (1)..( 9): Result.004 file - promoters50/1018472
tcatatttt

SEQ ID NO: 156973 - DNA, 7 bp, Unknown
  misc_feature (1)..( 7): Result.004 file - promoters50/1018472
ataaata

SEQ ID NO: 156974 - DNA, 7 bp, Unknown
  misc_feature (1)..( 7): Result.004 file - promoters50/1018472
ataaata

SEQ ID NO: 156975 - DNA, 7 bp, Unknown
  misc_feature (1)..( 7): Result.004 file - promoters50/1018523
ataaatt

SEQ ID NO: 156976 - DNA, 10 bp, Unknown
  misc_feature (1)..( 10): Result.004 file - promoters50/1018523
taaaaattaa

SEQ ID NO: 156977 - DNA, 10 bp, Unknown
  misc_feature (1)..( 10): Result.004 file - promoters50/1018523
taaaaatctc

SEQ ID NO: 156978 - DNA, 10 bp, Unknown
  misc_feature (1)..( 10): Result.004 file - promoters50/1018523
gtaaaatttc

SEQ ID NO: 156979 - DNA, 10 bp, Unknown
  misc_feature (1)..( 10): Result.004 file - promoters50/1018523
taacaattct

SEQ ID NO: 156980 - DNA, 10 bp, Unknown
  misc_feature (1)..( 10): Result.004 file - promoters50/1018523
aaaatattaa

SEQ ID NO: 156981 - DNA, 10 bp, Unknown
  misc_feature (1)..( 10): Result.004 file - promoters50/1018523
ataagattag

SEQ ID NO: 156982 - DNA, 10 bp, Unknown
  misc_feature (1)..( 10): Result.004 file - promoters50/1018523
ttaagatctt

SEQ ID NO: 156983 - DNA, 12 bp, Unknown
  misc_feature (1)..( 12): Result.004 file - promoters50/1018523
agttaaaaaata

SEQ ID NO: 156984 - DNA, 12 bp, Unknown
  misc_feature (1)..( 12): Result.004 file - promoters50/1018523
agttaatatata

SEQ ID NO: 156985 - DNA, 12 bp, Unknown
  misc_feature (1)..( 12): Result.004 file - promoters50/1018523
agttaaaaagtg

SEQ ID NO: 156986 - DNA, 12 bp, Unknown
  misc_feature (1)..( 12): Result.004 file - promoters50/1018523
tgttattatatt

SEQ ID NO: 156987 - DNA, 12 bp, Unknown
  misc_feature (1)..( 12): Result.004 file - promoters50/1018523
gaaaaaaaagac

SEQ ID NO: 156988 - DNA, 12 bp, Unknown
  misc_feature (1)..( 12): Result.004 file - promoters50/1018523
atgaaaaacaaa

SEQ ID NO: 156989 - DNA, 12 bp, Unknown
  misc_feature (1)..( 12): Result.004 file - promoters50/1018523
agttatttaaaa

SEQ ID NO: 156990 - DNA, 9 bp, Unknown
  misc_feature (1)..( 9): Result.004 file - promoters50/1018523
tacaaaaaa

SEQ ID NO: 156991 - DNA, 9 bp, Unknown
  misc_feature (1)..( 9): Result.004 file - promoters50/1018523
cccaaaaat

SEQ ID NO: 156992 - DNA, 9 bp, Unknown
  misc_feature (1)..( 9): Result.004 file - promoters50/1018523
aacaaaaaa

SEQ ID NO: 156993 - DNA, 10 bp, Unknown
  misc_feature (1)..( 10): Result.004 file - promoters50/1018523
gacaaataaa

SEQ ID NO: 156994 - DNA, 10 bp, Unknown
  misc_feature (1)..( 10): Result.004 file - promoters50/1018523
tacaaaacta

SEQ ID NO: 156995 - DNA, 10 bp, Unknown
  misc_feature (1)..( 10): Result.004 file - promoters50/1018523
tcctaaaatc

SEQ ID NO: 156996 - DNA, 12 bp, Unknown
  misc_feature (1)..( 12): Result.004 file - promoters50/1018523
aaacaataaaat

SEQ ID NO: 156997 - DNA, 12 bp, Unknown
  misc_feature (1)..( 12): Result.004 file - promoters50/1018523
aaacagtaaaac

SEQ ID NO: 156998 - DNA, 12 bp, Unknown
  misc_feature (1)..( 12): Result.004 file - promoters50/1018523
agataatatttc

SEQ ID NO: 156999 - DNA, 12 bp, Unknown
  misc_feature (1)..( 12): Result.004 file - promoters50/1018523
cgtcaaaaaact

SEQ ID NO: 157000 - DNA, 12 bp, Unknown
  misc_feature (1)..( 12): Result.004 file - promoters50/1018523
acattataaaat

SEQ ID NO: 157001 - DNA, 12 bp, Unknown
  misc_feature (1)..( 12): Result.004 file - promoters50/1018523
gaaaaataaata

SEQ ID NO: 157002 - DNA, 10 bp, Unknown
  misc_feature (1)..( 10): Result.004 file - promoters50/1018523
attaatattt

SEQ ID NO: 157003 - DNA, 10 bp, Unknown
  misc_feature (1)..( 10): Result.004 file - promoters50/1018523
attaataaag

SEQ ID NO: 157004 - DNA, 10 bp, Unknown
  misc_feature (1)..( 10): Result.004 file - promoters50/1018523
gataatattt

SEQ ID NO: 157005 - DNA, 10 bp, Unknown
  misc_feature (1)..( 10): Result.004 file - promoters50/1018523
tttattatag

SEQ ID NO: 157006 - DNA, 10 bp, Unknown
  misc_feature (1)..( 10): Result.004 file - promoters50/1018523
aaaaataaat

SEQ ID NO: 157007 - DNA, 10 bp, Unknown
  misc_feature (1)..( 10): Result.004 file - promoters50/1018523
tttattttat

SEQ ID NO: 157008 - DNA, 10 bp, Unknown
  misc_feature (1)..( 10): Result.004 file - promoters50/1018523
tatatcacaa

SEQ ID NO: 157009 - DNA, 10 bp, Unknown
  misc_feature (1)..( 10): Result.004 file - promoters50/1018523
tacattgtag

SEQ ID NO: 157010 - DNA, 15 bp, Unknown
  misc_feature (1)..( 15): Result.004 file - promoters50/1018523
ataaataaatttttg

SEQ ID NO: 157011 - DNA, 15 bp, Unknown
  misc_feature (1)..( 15): Result.004 file - promoters50/1018523
tcaaacaaatgtttg

SEQ ID NO: 157012 - DNA, 15 bp, Unknown
  misc_feature (1)..( 15): Result.004 file - promoters50/1018523
ttaactaatttctta

SEQ ID NO: 157013 - DNA, 15 bp, Unknown
  misc_feature (1)..( 15): Result.004 file - promoters50/1018523
ttaaaaaaagaagaa

SEQ ID NO: 157014 - DNA, 15 bp, Unknown
  misc_feature (1)..( 15): Result.004 file - promoters50/1018523
atacatatactgtat

SEQ ID NO: 157015 - DNA, 15 bp, Unknown
  misc_feature (1)..( 15): Result.004 file - promoters50/1018523
aaaaacaaacgtgga

SEQ ID NO: 157016 - DNA, 16 bp, Unknown
  misc_feature (1)..( 16): Result.004 file - promoters50/1018523
ataatataactcttgg

SEQ ID NO: 157017 - DNA, 16 bp, Unknown
  misc_feature (1)..( 16): Result.004 file - promoters50/1018523
ggaaaaaaaagacaaa

SEQ ID NO: 157018 - DNA, 14 bp, Unknown
  misc_feature (1)..( 14): Result.004 file - promoters50/1018523
aaaaatattattag

SEQ ID NO: 157019 - DNA, 14 bp, Unknown
  misc_feature (1)..( 14): Result.004 file - promoters50/1018523
tttgttattatatt

SEQ ID NO: 157020 - DNA, 14 bp, Unknown
  misc_feature (1)..( 14): Result.004 file - promoters50/1018523
agtgatataattat

SEQ ID NO: 157021 - DNA, 14 bp, Unknown
  misc_feature (1)..( 14): Result.004 file - promoters50/1018523
cgtcatattattag

SEQ ID NO: 157022 - DNA, 14 bp, Unknown
  misc_feature (1)..( 14): Result.004 file - promoters50/1018523
gttaatatatattt

SEQ ID NO: 157023 - DNA, 14 bp, Unknown
  misc_feature (1)..( 14): Result.004 file - promoters50/1018523
tggattatcatttt

SEQ ID NO: 157024 - DNA, 14 bp, Unknown
  misc_feature (1)..( 14): Result.004 file - promoters50/1018523
gggctaaaaatgac

SEQ ID NO: 157025 - DNA, 14 bp, Unknown
  misc_feature (1)..( 14): Result.004 file - promoters50/1018523
atagaaaaaaagac

SEQ ID NO: 157026 - DNA, 14 bp, Unknown
  misc_feature (1)..( 14): Result.004 file - promoters50/1018523
gtttcaaatacaag

SEQ ID NO: 157027 - DNA, 14 bp, Unknown
  misc_feature (1)..( 14): Result.004 file - promoters50/1018523
agatcaaataggtc

SEQ ID NO: 157028 - DNA, 14 bp, Unknown
  misc_feature (1)..( 14): Result.004 file - promoters50/1018523
gtttccaatatgtt

SEQ ID NO: 157029 - DNA, 14 bp, Unknown
  misc_feature (1)..( 14): Result.004 file - promoters50/1018523
aattggaagccaaa

SEQ ID NO: 157030 - DNA, 10 bp, Unknown
  misc_feature (1)..( 10): Result.004 file - promoters50/1018523
aataatataa

SEQ ID NO: 157031 - DNA, 10 bp, Unknown
  misc_feature (1)..( 10): Result.004 file - promoters50/1018523
aatgatattc

SEQ ID NO: 157032 - DNA, 10 bp, Unknown
  misc_feature (1)..( 10): Result.004 file - promoters50/1018523
aatttaacta

SEQ ID NO: 157033 - DNA, 10 bp, Unknown
  misc_feature (1)..( 10): Result.004 file - promoters50/1018523
aatgaaattc

SEQ ID NO: 157034 - DNA, 10 bp, Unknown
  misc_feature (1)..( 10): Result.004 file - promoters50/1018523
tttgatatat

SEQ ID NO: 157035 - DNA, 10 bp, Unknown
  misc_feature (1)..( 10): Result.004 file - promoters50/1018523
aatgaaaaac

SEQ ID NO: 157036 - DNA, 9 bp, Unknown
  misc_feature (1)..( 9): Result.004 file - promoters50/1018523
atatatact

SEQ ID NO: 157037 - DNA, 9 bp, Unknown
  misc_feature (1)..( 9): Result.004 file - promoters50/1018523
ctatatata

SEQ ID NO: 157038 - DNA, 9 bp, Unknown
  misc_feature (1)..( 9): Result.004 file - promoters50/1018523
ttataaact

SEQ ID NO: 157039 - DNA, 9 bp, Unknown
  misc_feature (1)..( 9): Result.004 file - promoters50/1018523
ttatatata

SEQ ID NO: 157040 - DNA, 9 bp, Unknown
  misc_feature (1)..( 9): Result.004 file - promoters50/1018523
ctataaatt

SEQ ID NO: 157041 - DNA, 9 bp, Unknown
  misc_feature (1)..( 9): Result.004 file - promoters50/1018529
ttaaaaacc

SEQ ID NO: 157042 - DNA, 15 bp, Unknown
  misc_feature (1)..( 15): Result.004 file - promoters50/1018529
cttatttaattgtta

SEQ ID NO: 157043 - DNA, 15 bp, Unknown
  misc_feature (1)..( 15): Result.004 file - promoters50/1018529
cttttttaaaaaact

SEQ ID NO: 157044 - DNA, 16 bp, Unknown
  misc_feature (1)..( 16): Result.004 file - promoters50/1018529
aagtatataaaatatt

SEQ ID NO: 157045 - DNA, 16 bp, Unknown
  misc_feature (1)..( 16): Result.004 file - promoters50/1018529
atgaatttaaagcttc

SEQ ID NO: 157046 - DNA, 16 bp, Unknown
  misc_feature (1)..( 16): Result.004 file - promoters50/1018529
attcatttgagtaaac

SEQ ID NO: 157047 - DNA, 16 bp, Unknown
  misc_feature (1)..( 16): Result.004 file - promoters50/1018536
attacgttaagaatat

SEQ ID NO: 157048 - DNA, 14 bp, Unknown
  misc_feature (1)..( 14): Result.004 file - promoters50/1018536
tgcattagttcttc

SEQ ID NO: 157049 - DNA, 14 bp, Unknown
  misc_feature (1)..( 14): Result.004 file - promoters50/1018536
taaatttgttatgt

SEQ ID NO: 157050 - DNA, 14 bp, Unknown
  misc_feature (1)..( 14): Result.004 file - promoters50/1018536
gttattagttaacc

SEQ ID NO: 157051 - DNA, 14 bp, Unknown
  misc_feature (1)..( 14): Result.004 file - promoters50/1018536
tataattgttaatc

SEQ ID NO: 157052 - DNA, 14 bp, Unknown
  misc_feature (1)..( 14): Result.004 file - promoters50/1018536
taaattttttaaaa

SEQ ID NO: 157053 - DNA, 14 bp, Unknown
  misc_feature (1)..( 14): Result.004 file - promoters50/1018536
tatacgttttaaaa

SEQ ID NO: 157054 - DNA, 15 bp, Unknown
  misc_feature (1)..( 15): Result.004 file - promoters50/1018536
aaacttataattatg

SEQ ID NO: 157055 - DNA, 15 bp, Unknown
  misc_feature (1)..( 15): Result.004 file - promoters50/1018536
atctttataagtata

SEQ ID NO: 157056 - DNA, 15 bp, Unknown
  misc_feature (1)..( 15): Result.004 file - promoters50/1018536
caaataataataatg

SEQ ID NO: 157057 - DNA, 15 bp, Unknown
  misc_feature (1)..( 15): Result.004 file - promoters50/1018536
aaatttgtaacttca

SEQ ID NO: 157058 - DNA, 15 bp, Unknown
  misc_feature (1)..( 15): Result.004 file - promoters50/1018536
cgttttaaaagtaag

SEQ ID NO: 157059 - DNA, 15 bp, Unknown
  misc_feature (1)..( 15): Result.004 file - promoters50/1018536
gctaatataagtaac

SEQ ID NO: 157060 - DNA, 15 bp, Unknown
  misc_feature (1)..( 15): Result.004 file - promoters50/1018536
atctttatacaaaac

SEQ ID NO: 157061 - DNA, 15 bp, Unknown
  misc_feature (1)..( 15): Result.004 file - promoters50/1018536
tatgttattagttaa

SEQ ID NO: 157062 - DNA, 12 bp, Unknown
  misc_feature (1)..( 12): Result.004 file - promoters50/1018536
tatataaacaaa

SEQ ID NO: 157063 - DNA, 12 bp, Unknown
  misc_feature (1)..( 12): Result.004 file - promoters50/1018536
cctataaatatc

SEQ ID NO: 157064 - DNA, 12 bp, Unknown
  misc_feature (1)..( 12): Result.004 file - promoters50/1018536
tatataataacc

SEQ ID NO: 157065 - DNA, 12 bp, Unknown
  misc_feature (1)..( 12): Result.004 file - promoters50/1018536
tatataaatgac

SEQ ID NO: 157066 - DNA, 12 bp, Unknown
  misc_feature (1)..( 12): Result.004 file - promoters50/1018536
tttataaataaa

SEQ ID NO: 157067 - DNA, 12 bp, Unknown
  misc_feature (1)..( 12): Result.004 file - promoters50/1018536
acgataaatatc

SEQ ID NO: 157068 - DNA, 13 bp, Unknown
  misc_feature (1)..( 13): Result.004 file - promoters50/1018536
ttttgaagaattt

SEQ ID NO: 157069 - DNA, 13 bp, Unknown
  misc_feature (1)..( 13): Result.004 file - promoters50/1018536
ttttgatgaatgt

SEQ ID NO: 157070 - DNA, 13 bp, Unknown
  misc_feature (1)..( 13): Result.004 file - promoters50/1018536
tatttatgacgag

SEQ ID NO: 157071 - DNA, 13 bp, Unknown
  misc_feature (1)..( 13): Result.004 file - promoters50/1018536
atttgctgaataa

SEQ ID NO: 157072 - DNA, 13 bp, Unknown
  misc_feature (1)..( 13): Result.004 file - promoters50/1018536
cccttgtgaatgt

SEQ ID NO: 157073 - DNA, 13 bp, Unknown
  misc_feature (1)..( 13): Result.004 file - promoters50/1018536
aaaagatgaagtc

SEQ ID NO: 157074 - DNA, 18 bp, Unknown
  misc_feature (1)..( 18): Result.004 file - promoters50/1018536
aaaatgttagataggaaa

SEQ ID NO: 157075 - DNA, 18 bp, Unknown
  misc_feature (1)..( 18): Result.004 file - promoters50/1018536
taaattttaaaattattc

SEQ ID NO: 157076 - DNA, 18 bp, Unknown
  misc_feature (1)..( 18): Result.004 file - promoters50/1018536
taaattttgaaataattt

SEQ ID NO: 157077 - DNA, 18 bp, Unknown
  misc_feature (1)..( 18): Result.004 file - promoters50/1018536
accattgtgaaataattt

SEQ ID NO: 157078 - DNA, 18 bp, Unknown
  misc_feature (1)..( 18): Result.004 file - promoters50/1018536
taaattttttaaaatata

SEQ ID NO: 157079 - DNA, 18 bp, Unknown
  misc_feature (1)..( 18): Result.004 file - promoters50/1018536
ttgattctaaaatattgt

SEQ ID NO: 157080 - DNA, 9 bp, Unknown
  misc_feature (1)..( 9): Result.004 file - promoters50/1018536
gtaatgtaa

SEQ ID NO: 157081 - DNA, 9 bp, Unknown
  misc_feature (1)..( 9): Result.004 file - promoters50/1018536
tgaatgtat

SEQ ID NO: 157082 - DNA, 9 bp, Unknown
  misc_feature (1)..( 9): Result.004 file - promoters50/1018536
ctaatataa

SEQ ID NO: 157083 - DNA, 9 bp, Unknown
  misc_feature (1)..( 9): Result.004 file - promoters50/1018536
ctaatgtga

SEQ ID NO: 157084 - DNA, 9 bp, Unknown
  misc_feature (1)..( 9): Result.004 file - promoters50/1018536
tgaatgtca

SEQ ID NO: 157085 - DNA, 9 bp, Unknown
  misc_feature (1)..( 9): Result.004 file - promoters50/1018536
ataatgtaa

SEQ ID NO: 157086 - DNA, 12 bp, Unknown
  misc_feature (1)..( 12): Result.004 file - promoters50/1018536
atttaaatgtca

SEQ ID NO: 157087 - DNA, 12 bp, Unknown
  misc_feature (1)..( 12): Result.004 file - promoters50/1018536
ctaaaaatatca

SEQ ID NO: 157088 - DNA, 12 bp, Unknown
  misc_feature (1)..( 12): Result.004 file - promoters50/1018536
tgtgaaatgtta

SEQ ID NO: 157089 - DNA, 12 bp, Unknown
  misc_feature (1)..( 12): Result.004 file - promoters50/1018536
ctaacaatctca

SEQ ID NO: 157090 - DNA, 12 bp, Unknown
  misc_feature (1)..( 12): Result.004 file - promoters50/1018536
agtaaaatatac

SEQ ID NO: 157091 - DNA, 12 bp, Unknown
  misc_feature (1)..( 12): Result.004 file - promoters50/1018536
aaaacaattacg

SEQ ID NO: 157092 - DNA, 12 bp, Unknown
  misc_feature (1)..( 12): Result.004 file - promoters50/1018536
catataattaat

SEQ ID NO: 157093 - DNA, 12 bp, Unknown
  misc_feature (1)..( 12): Result.004 file - promoters50/1018536
aatatatttaga

SEQ ID NO: 157094 - DNA, 12 bp, Unknown
  misc_feature (1)..( 12): Result.004 file - promoters50/1018536
aatatgtttgag

SEQ ID NO: 157095 - DNA, 12 bp, Unknown
  misc_feature (1)..( 12): Result.004 file - promoters50/1018536
ttaccatttagt

SEQ ID NO: 157096 - DNA, 12 bp, Unknown
  misc_feature (1)..( 12): Result.004 file - promoters50/1018536
gatttaatttcg

SEQ ID NO: 157097 - DNA, 12 bp, Unknown
  misc_feature (1)..( 12): Result.004 file - promoters50/1018691
ttgtaatttagt

SEQ ID NO: 157098 - DNA, 12 bp, Unknown
  misc_feature (1)..( 12): Result.004 file - promoters50/1018691
gttttaggcaac

SEQ ID NO: 157099 - DNA, 12 bp, Unknown
  misc_feature (1)..( 12): Result.004 file - promoters50/1018691
gaaaaaggcaaa

SEQ ID NO: 157100 - DNA, 12 bp, Unknown
  misc_feature (1)..( 12): Result.004 file - promoters50/1018691
gaaacaggtaaa

SEQ ID NO: 157101 - DNA, 7 bp, Unknown
  misc_feature (1)..( 7): Result.004 file - promoters50/1018691
taccttt

SEQ ID NO: 157102 - DNA, 7 bp, Unknown
  misc_feature (1)..( 7): Result.004 file - promoters50/1018691
tacattt

SEQ ID NO: 157103 - DNA, 7 bp, Unknown
  misc_feature (1)..( 7): Result.004 file - promoters50/1018698
aacattt

SEQ ID NO: 157104 - DNA, 10 bp, Unknown
  misc_feature (1)..( 10): Result.004 file - promoters50/1018698
cctcgaaaag

SEQ ID NO: 157105 - DNA, 10 bp, Unknown
  misc_feature (1)..( 10): Result.004 file - promoters50/1018698
aatcgaaaag

SEQ ID NO: 157106 - DNA, 10 bp, Unknown
  misc_feature (1)..( 10): Result.004 file - promoters50/1018743
aatcgaaccc

SEQ ID NO: 157107 - DNA, 10 bp, Unknown
  misc_feature (1)..( 10): Result.004 file - promoters50/1018743
gtccttgtcg

SEQ ID NO: 157108 - DNA, 10 bp, Unknown
  misc_feature (1)..( 10): Result.004 file - promoters50/1018743
agcctcgtcg

SEQ ID NO: 157109 - DNA, 10 bp, Unknown
  misc_feature (1)..( 10): Result.004 file - promoters50/1018755
gtccttgtta

SEQ ID NO: 157110 - DNA, 11 bp, Unknown
  misc_feature (1)..( 11): Result.004 file - promoters50/1018755
cactgcttgta

SEQ ID NO: 157111 - DNA, 11 bp, Unknown
  misc_feature (1)..( 11): Result.004 file - promoters50/1018755
gacttcttagt

SEQ ID NO: 157112 - DNA, 11 bp, Unknown
  misc_feature (1)..( 11): Result.004 file - promoters50/1018755
cacagctctaa

SEQ ID NO: 157113 - DNA, 11 bp, Unknown
  misc_feature (1)..( 11): Result.004 file - promoters50/1018755
atatgcttgct

SEQ ID NO: 157114 - DNA, 11 bp, Unknown
  misc_feature (1)..( 11): Result.004 file - promoters50/1018755
atcgtcttccc

SEQ ID NO: 157115 - DNA, 11 bp, Unknown
  misc_feature (1)..( 11): Result.004 file - promoters50/1018755
tggatcttccc

SEQ ID NO: 157116 - DNA, 11 bp, Unknown
  misc_feature (1)..( 11): Result.004 file - promoters50/1018755
gctttatttat

SEQ ID NO: 157117 - DNA, 11 bp, Unknown
  misc_feature (1)..( 11): Result.004 file - promoters50/1018755
tttttgtttac

SEQ ID NO: 157118 - DNA, 11 bp, Unknown
  misc_feature (1)..( 11): Result.004 file - promoters50/1018755
gaattattttg

SEQ ID NO: 157119 - DNA, 11 bp, Unknown
  misc_feature (1)..( 11): Result.004 file - promoters50/1018755
tttttatttat

SEQ ID NO: 157120 - DNA, 11 bp, Unknown
  misc_feature (1)..( 11): Result.004 file - promoters50/1018755
aaaatattttc

SEQ ID NO: 157121 - DNA, 11 bp, Unknown
  misc_feature (1)..( 11): Result.004 file - promoters50/1018770
tttttgtgctg

SEQ ID NO: 157122 - DNA, 16 bp, Unknown
  misc_feature (1)..( 16): Result.004 file - promoters50/1018770
gacataaattttttat

SEQ ID NO: 157123 - DNA, 16 bp, Unknown
  misc_feature (1)..( 16): Result.004 file - promoters50/1018770
aatatatattctgaat

SEQ ID NO: 157124 - DNA, 16 bp, Unknown
  misc_feature (1)..( 16): Result.004 file - promoters50/1018770
tttataaatgtatttc

SEQ ID NO: 157125 - DNA, 16 bp, Unknown
  misc_feature (1)..( 16): Result.004 file - promoters50/1018770
gacctaagtttaagtt

SEQ ID NO: 157126 - DNA, 16 bp, Unknown
  misc_feature (1)..( 16): Result.004 file - promoters50/1018770
atcatatttttttaaa

SEQ ID NO: 157127 - DNA, 16 bp, Unknown
  misc_feature (1)..( 16): Result.004 file - promoters50/1018770
gaacttaatttttttt

SEQ ID NO: 157128 - DNA, 16 bp, Unknown
  misc_feature (1)..( 16): Result.004 file - promoters50/1018770
acataaattttttata

SEQ ID NO: 157129 - DNA, 16 bp, Unknown
  misc_feature (1)..( 16): Result.004 file - promoters50/1018770
ctcagaatttttgcga

SEQ ID NO: 157130 - DNA, 16 bp, Unknown
  misc_feature (1)..( 16): Result.004 file - promoters50/1018770
ttcactctttttgata

SEQ ID NO: 157131 - DNA, 16 bp, Unknown
  misc_feature (1)..( 16): Result.004 file - promoters50/1018770
gacctaagtttaagtt

SEQ ID NO: 157132 - DNA, 16 bp, Unknown
  misc_feature (1)..( 16): Result.004 file - promoters50/1018770
ccaattctttttgcca

SEQ ID NO: 157133 - DNA, 16 bp, Unknown
  misc_feature (1)..( 16): Result.004 file - promoters50/1018783
ccattcctttttgtat

SEQ ID NO: 157134 - DNA, 11 bp, Unknown
  misc_feature (1)..( 11): Result.004 file - promoters50/1018783
atcatagtatt

SEQ ID NO: 157135 - DNA, 11 bp, Unknown
  misc_feature (1)..( 11): Result.004 file - promoters50/1018783
tttataatata

SEQ ID NO: 157136 - DNA, 11 bp, Unknown
  misc_feature (1)..( 11): Result.004 file - promoters50/1018783
caaatactatt

SEQ ID NO: 157137 - DNA, 11 bp, Unknown
  misc_feature (1)..( 11): Result.004 file - promoters50/1018783
tttgtaattag

SEQ ID NO: 157138 - DNA, 11 bp, Unknown
  misc_feature (1)..( 11): Result.004 file - promoters50/1018783
tttctaataat

SEQ ID NO: 157139 - DNA, 9 bp, Unknown
  misc_feature (1)..( 9): Result.004 file - promoters50/1018783
aaatatata

SEQ ID NO: 157140 - DNA, 9 bp, Unknown
  misc_feature (1)..( 9): Result.004 file - promoters50/1018783
aaaaataat

SEQ ID NO: 157141 - DNA, 9 bp, Unknown
  misc_feature (1)..( 9): Result.004 file - promoters50/1018783
aaaactaaa

SEQ ID NO: 157142 - DNA, 9 bp, Unknown
  misc_feature (1)..( 9): Result.004 file - promoters50/1018783
taaactaat

SEQ ID NO: 157143 - DNA, 10 bp, Unknown
  misc_feature (1)..( 10): Result.004 file - promoters50/1018783
aaatcatatg

SEQ ID NO: 157144 - DNA, 18 bp, Unknown
  misc_feature (1)..( 18): Result.004 file - promoters50/1018783
atgattaaaatctagatg

SEQ ID NO: 157145 - DNA, 18 bp, Unknown
  misc_feature (1)..( 18): Result.004 file - promoters50/1018783
ccaattaaataaatgaaa

SEQ ID NO: 157146 - DNA, 19 bp, Unknown
  misc_feature (1)..( 19): Result.004 file - promoters50/1018783
gattttataatataaataa

SEQ ID NO: 157147 - DNA, 19 bp, Unknown
  misc_feature (1)..( 19): Result.004 file - promoters50/1018783
ccacttaactttaagtttc

SEQ ID NO: 157148 - DNA, 19 bp, Unknown
  misc_feature (1)..( 19): Result.004 file - promoters50/1018786
actcaataaatattgtata

SEQ ID NO: 157149 - DNA, 7 bp, Unknown
  misc_feature (1)..( 7): Result.004 file - promoters50/1018786
tattttt

SEQ ID NO: 157150 - DNA, 7 bp, Unknown
  misc_feature (1)..( 7): Result.004 file - promoters50/1018786
aattttt

SEQ ID NO: 157151 - DNA, 7 bp, Unknown
  misc_feature (1)..( 7): Result.004 file - promoters50/1018786
tatttta

SEQ ID NO: 157152 - DNA, 8 bp, Unknown
  misc_feature (1)..( 8): Result.004 file - promoters50/1018786
tttattat

SEQ ID NO: 157153 - DNA, 8 bp, Unknown
  misc_feature (1)..( 8): Result.004 file - promoters50/1018786
cttattat

SEQ ID NO: 157154 - DNA, 8 bp, Unknown
  misc_feature (1)..( 8): Result.004 file - promoters50/1018786
attatttc

SEQ ID NO: 157155 - DNA, 10 bp, Unknown
  misc_feature (1)..( 10): Result.004 file - promoters50/1018786
ggtggttggc

SEQ ID NO: 157156 - DNA, 10 bp, Unknown
  misc_feature (1)..( 10): Result.004 file - promoters50/1018786
attggttggt

SEQ ID NO: 157157 - DNA, 10 bp, Unknown
  misc_feature (1)..( 10): Result.004 file - promoters50/1018835
attggtaggt

SEQ ID NO: 157158 - DNA, 9 bp, Unknown
  misc_feature (1)..( 9): Result.004 file - promoters50/1018835
atttaaata

SEQ ID NO: 157159 - DNA, 9 bp, Unknown
  misc_feature (1)..( 9): Result.004 file - promoters50/1018835
gtttcaatt

SEQ ID NO: 157160 - DNA, 9 bp, Unknown
  misc_feature (1)..( 9): Result.004 file - promoters50/1018835
gttccaaca

SEQ ID NO: 157161 - DNA, 9 bp, Unknown
  misc_feature (1)..( 9): Result.004 file - promoters50/1018835
caatcaatt

SEQ ID NO: 157162 - DNA, 8 bp, Unknown
  misc_feature (1)..( 8): Result.004 file - promoters50/1018835
gaagtgcg

SEQ ID NO: 157163 - DNA, 8 bp, Unknown
  misc_feature (1)..( 8): Result.004 file - promoters50/1018835
gaaatgct

SEQ ID NO: 157164 - DNA, 8 bp, Unknown
  misc_feature (1)..( 8): Result.004 file - promoters50/1018835
ctaatgct

SEQ ID NO: 157165 - DNA, 8 bp, Unknown
  misc_feature (1)..( 8): Result.004 file - promoters50/1018890
gaaatgtg

SEQ ID NO: 157166 - DNA, 8 bp, Unknown
  misc_feature (1)..( 8): Result.004 file - promoters50/1018890
ttactatt

SEQ ID NO: 157167 - DNA, 8 bp, Unknown
  misc_feature (1)..( 8): Result.004 file - promoters50/1018890
ttaatatt

SEQ ID NO: 157168 - DNA, 8 bp, Unknown
  misc_feature (1)..( 8): Result.004 file - promoters50/1018890
ttaatatt

SEQ ID NO: 157169 - DNA, 8 bp, Unknown
  misc_feature (1)..( 8): Result.004 file - promoters50/1018890
gtactatc

SEQ ID NO: 157170 - DNA, 7 bp, Unknown
  misc_feature (1)..( 7): Result.004 file - promoters50/1018890
taaaatg

SEQ ID NO: 157171 - DNA, 7 bp, Unknown
  misc_feature (1)..( 7): Result.004 file - promoters50/1018890
aaaaatg

SEQ ID NO: 157172 - DNA, 7 bp, Unknown
  misc_feature (1)..( 7): Result.004 file - promoters50/1018890
aaaaata

SEQ ID NO: 157173 - DNA, 8 bp, Unknown
  misc_feature (1)..( 8): Result.004 file - promoters50/1018890
attatttc

SEQ ID NO: 157174 - DNA, 8 bp, Unknown
  misc_feature (1)..( 8): Result.004 file - promoters50/1018890
attattga

SEQ ID NO: 157175 - DNA, 8 bp, Unknown
  misc_feature (1)..( 8): Result.004 file - promoters50/1018890
attactga

SEQ ID NO: 157176 - DNA, 7 bp, Unknown
  misc_feature (1)..( 7): Result.004 file - promoters50/1018890
aaaataa

SEQ ID NO: 157177 - DNA, 7 bp, Unknown
  misc_feature (1)..( 7): Result.004 file - promoters50/1018890
aaaataa

SEQ ID NO: 157178 - DNA, 7 bp, Unknown
  misc_feature (1)..( 7): Result.004 file - promoters50/1018890
taaataa

SEQ ID NO: 157179 - DNA, 7 bp, Unknown
  misc_feature (1)..( 7): Result.004 file - promoters50/1018890
aaaatag

SEQ ID NO: 157180 - DNA, 9 bp, Unknown
  misc_feature (1)..( 9): Result.004 file - promoters50/1018890
aaataaatt

SEQ ID NO: 157181 - DNA, 9 bp, Unknown
  misc_feature (1)..( 9): Result.004 file - promoters50/1018890
taattaatt

SEQ ID NO: 157182 - DNA, 9 bp, Unknown
  misc_feature (1)..( 9): Result.004 file - promoters50/1018890
aaataattg

SEQ ID NO: 157183 - DNA, 9 bp, Unknown
  misc_feature (1)..( 9): Result.004 file - promoters50/1018890
ctatatata

SEQ ID NO: 157184 - DNA, 9 bp, Unknown
  misc_feature (1)..( 9): Result.004 file - promoters50/1018890
ctatatata

SEQ ID NO: 157185 - DNA, 9 bp, Unknown
  misc_feature (1)..( 9): Result.004 file - promoters50/1018890
ctatataac

SEQ ID NO: 157186 - DNA, 8 bp, Unknown
  misc_feature (1)..( 8): Result.004 file - promoters50/1018890
aatttacg

SEQ ID NO: 157187 - DNA, 8 bp, Unknown
  misc_feature (1)..( 8): Result.004 file - promoters50/1018890
aatttatt

SEQ ID NO: 157188 - DNA, 8 bp, Unknown
  misc_feature (1)..( 8): Result.004 file - promoters50/1018890
tatttatt

SEQ ID NO: 157189 - DNA, 8 bp, Unknown
  misc_feature (1)..( 8): Result.004 file - promoters50/1018890
actagtgt

SEQ ID NO: 157190 - DNA, 8 bp, Unknown
  misc_feature (1)..( 8): Result.004 file - promoters50/1018890
actagttc

SEQ ID NO: 157191 - DNA, 8 bp, Unknown
  misc_feature (1)..( 8): Result.004 file - promoters50/1018890
actatttc

SEQ ID NO: 157192 - DNA, 11 bp, Unknown
  misc_feature (1)..( 11): Result.004 file - promoters50/1018890
gcaattttatt

SEQ ID NO: 157193 - DNA, 11 bp, Unknown
  misc_feature (1)..( 11): Result.004 file - promoters50/1018890
gcaattttatt

SEQ ID NO: 157194 - DNA, 11 bp, Unknown
  misc_feature (1)..( 11): Result.004 file - promoters50/1018890
aaaaatttatt

SEQ ID NO: 157195 - DNA, 13 bp, Unknown
  misc_feature (1)..( 13): Result.004 file - promoters50/1018890
ggtggaacatgaa

SEQ ID NO: 157196 - DNA, 13 bp, Unknown
  misc_feature (1)..( 13): Result.004 file - promoters50/1018890
ggtggtacatgaa

SEQ ID NO: 157197 - DNA, 13 bp, Unknown
  misc_feature (1)..( 13): Result.004 file - promoters50/1018890
agacgatcatgaa

SEQ ID NO: 157198 - DNA, 8 bp, Unknown
  misc_feature (1)..( 8): Result.004 file - promoters50/1018890
gcaaccac

SEQ ID NO: 157199 - DNA, 8 bp, Unknown
  misc_feature (1)..( 8): Result.004 file - promoters50/1018890
gcatccaa

SEQ ID NO: 157200 - DNA, 8 bp, Unknown
  misc_feature (1)..( 8): Result.004 file - promoters50/1018890
gcattcaa

SEQ ID NO: 157201 - DNA, 7 bp, Unknown
  misc_feature (1)..( 7): Result.004 file - promoters50/1018890
atacata

SEQ ID NO: 157202 - DNA, 7 bp, Unknown
  misc_feature (1)..( 7): Result.004 file - promoters50/1018890
ataaata

SEQ ID NO: 157203 - DNA, 7 bp, Unknown
  misc_feature (1)..( 7): Result.004 file - promoters50/1018920
aaacaaa

SEQ ID NO: 157204 - DNA, 11 bp, Unknown
  misc_feature (1)..( 11): Result.004 file - promoters50/1018920
ttaatttcaat

SEQ ID NO: 157205 - DNA, 11 bp, Unknown
  misc_feature (1)..( 11): Result.004 file - promoters50/1018920
ctaatttccaa

SEQ ID NO: 157206 - DNA, 11 bp, Unknown
  misc_feature (1)..( 11): Result.004 file - promoters50/1018920
aaaatttcaaa

SEQ ID NO: 157207 - DNA, 11 bp, Unknown
  misc_feature (1)..( 11): Result.004 file - promoters50/1018920
atcatttcaca

SEQ ID NO: 157208 - DNA, 11 bp, Unknown
  misc_feature (1)..( 11): Result.004 file - promoters50/1018920
ctcattccaaa

SEQ ID NO: 157209 - DNA, 11 bp, Unknown
  misc_feature (1)..( 11): Result.004 file - promoters50/1018920
ctaacttcaag

SEQ ID NO: 157210 - DNA, 11 bp, Unknown
  misc_feature (1)..( 11): Result.004 file - promoters50/1018956
ctattttccaa

SEQ ID NO: 157211 - DNA, 7 bp, Unknown
  misc_feature (1)..( 7): Result.004 file - promoters50/1018956
aaaagaa

SEQ ID NO: 157212 - DNA, 7 bp, Unknown
  misc_feature (1)..( 7): Result.004 file - promoters50/1018956
aaatgaa

SEQ ID NO: 157213 - DNA, 7 bp, Unknown
  misc_feature (1)..( 7): Result.004 file - promoters50/1018973
aaaagaa

SEQ ID NO: 157214 - DNA, 12 bp, Unknown
  misc_feature (1)..( 12): Result.004 file - promoters50/1018973
atataagtaaca

SEQ ID NO: 157215 - DNA, 12 bp, Unknown
  misc_feature (1)..( 12): Result.004 file - promoters50/1018973
ttataagtataa

SEQ ID NO: 157216 - DNA, 12 bp, Unknown
  misc_feature (1)..( 12): Result.004 file - promoters50/1018973
gatgaagtcaca

SEQ ID NO: 157217 - DNA, 13 bp, Unknown
  misc_feature (1)..( 13): Result.004 file - promoters50/1018973
gagtaatgtaatt

SEQ ID NO: 157218 - DNA, 13 bp, Unknown
  misc_feature (1)..( 13): Result.004 file - promoters50/1018973
taataatgtaaaa

SEQ ID NO: 157219 - DNA, 13 bp, Unknown
  misc_feature (1)..( 13): Result.004 file - promoters50/1018973
ttataattatgca

SEQ ID NO: 157220 - DNA, 13 bp, Unknown
  misc_feature (1)..( 13): Result.004 file - promoters50/1018973
atattattatttc

SEQ ID NO: 157221 - DNA, 11 bp, Unknown
  misc_feature (1)..( 11): Result.004 file - promoters50/1018973
ctataaatatc

SEQ ID NO: 157222 - DNA, 11 bp, Unknown
  misc_feature (1)..( 11): Result.004 file - promoters50/1018973
ctataaaaacc

SEQ ID NO: 157223 - DNA, 11 bp, Unknown
  misc_feature (1)..( 11): Result.004 file - promoters50/1018973
atataaacaaa

SEQ ID NO: 157224 - DNA, 11 bp, Unknown
  misc_feature (1)..( 11): Result.004 file - promoters50/1018973
cgataaatatc

SEQ ID NO: 157225 - DNA, 11 bp, Unknown
  misc_feature (1)..( 11): Result.004 file - promoters50/1018973
ttataaataaa

SEQ ID NO: 157226 - DNA, 11 bp, Unknown
  misc_feature (1)..( 11): Result.004 file - promoters50/1018973
ccataaaagca

SEQ ID NO: 157227 - DNA, 11 bp, Unknown
  misc_feature (1)..( 11): Result.004 file - promoters50/1018973
atctttataag

SEQ ID NO: 157228 - DNA, 11 bp, Unknown
  misc_feature (1)..( 11): Result.004 file - promoters50/1018973
atctttataca

SEQ ID NO: 157229 - DNA, 11 bp, Unknown
  misc_feature (1)..( 11): Result.004 file - promoters50/1018973
aaatttgtaac

SEQ ID NO: 157230 - DNA, 11 bp, Unknown
  misc_feature (1)..( 11): Result.004 file - promoters50/1018973
caatttttaaa

SEQ ID NO: 157231 - DNA, 11 bp, Unknown
  misc_feature (1)..( 11): Result.004 file - promoters50/1018973
atattattatt

SEQ ID NO: 157232 - DNA, 11 bp, Unknown
  misc_feature (1)..( 11): Result.004 file - promoters50/1018973
gtgttttgaaa

SEQ ID NO: 157233 - DNA, 9 bp, Unknown
  misc_feature (1)..( 9): Result.004 file - promoters50/1018973
aattgttaa

SEQ ID NO: 157234 - DNA, 9 bp, Unknown
  misc_feature (1)..( 9): Result.004 file - promoters50/1018973
atttgttat

SEQ ID NO: 157235 - DNA, 9 bp, Unknown
  misc_feature (1)..( 9): Result.004 file - promoters50/1018973
aatttttaa

SEQ ID NO: 157236 - DNA, 9 bp, Unknown
  misc_feature (1)..( 9): Result.004 file - promoters50/1018973
tattattat

SEQ ID NO: 157237 - DNA, 10 bp, Unknown
  misc_feature (1)..( 10): Result.004 file - promoters50/1018973
cattagttct

SEQ ID NO: 157238 - DNA, 10 bp, Unknown
  misc_feature (1)..( 10): Result.004 file - promoters50/1019024
aatgtgtttt

SEQ ID NO: 157239 - DNA, 11 bp, Unknown
  misc_feature (1)..( 11): Result.004 file - promoters50/1019024
gtttatttaat

SEQ ID NO: 157240 - DNA, 11 bp, Unknown
  misc_feature (1)..( 11): Result.004 file - promoters50/1019024
ttttaattaat

SEQ ID NO: 157241 - DNA, 11 bp, Unknown
  misc_feature (1)..( 11): Result.004 file - promoters50/1019024
atttatttata

SEQ ID NO: 157242 - DNA, 11 bp, Unknown
  misc_feature (1)..( 11): Result.004 file - promoters50/1019024
atttaattctc

SEQ ID NO: 157243 - DNA, 11 bp, Unknown
  misc_feature (1)..( 11): Result.004 file - promoters50/1019030
aattactttct

SEQ ID NO: 157244 - DNA, 12 bp, Unknown
  misc_feature (1)..( 12): Result.004 file - promoters50/1019030
taaattttgaaa

SEQ ID NO: 157245 - DNA, 12 bp, Unknown
  misc_feature (1)..( 12): Result.004 file - promoters50/1019030
tatattttgaat

SEQ ID NO: 157246 - DNA, 12 bp, Unknown
  misc_feature (1)..( 12): Result.004 file - promoters50/1019030
taaattttaaaa

SEQ ID NO: 157247 - DNA, 11 bp, Unknown
  misc_feature (1)..( 11): Result.004 file - promoters50/1019030
ttacaaaatta

SEQ ID NO: 157248 - DNA, 11 bp, Unknown
  misc_feature (1)..( 11): Result.004 file - promoters50/1019030
tttaaaaatta

SEQ ID NO: 157249 - DNA, 11 bp, Unknown
  misc_feature (1)..( 11): Result.004 file - promoters50/1019030
ttaccaaatat

SEQ ID NO: 157250 - DNA, 11 bp, Unknown
  misc_feature (1)..( 11): Result.004 file - promoters50/1019030
ttacaatattt

SEQ ID NO: 157251 - DNA, 11 bp, Unknown
  misc_feature (1)..( 11): Result.004 file - promoters50/1019030
tttttgaaaaa

SEQ ID NO: 157252 - DNA, 11 bp, Unknown
  misc_feature (1)..( 11): Result.004 file - promoters50/1019030
tcaaagaaaaa

SEQ ID NO: 157253 - DNA, 11 bp, Unknown
  misc_feature (1)..( 11): Result.004 file - promoters50/1019030
tcaaataaaat

SEQ ID NO: 157254 - DNA, 11 bp, Unknown
  misc_feature (1)..( 11): Result.004 file - promoters50/1019030
ttaaattaaac

SEQ ID NO: 157255 - DNA, 7 bp, Unknown
  misc_feature (1)..( 7): Result.004 file - promoters50/1019030
attttag

SEQ ID NO: 157256 - DNA, 7 bp, Unknown
  misc_feature (1)..( 7): Result.004 file - promoters50/1019030
tttttag

SEQ ID NO: 157257 - DNA, 7 bp, Unknown
  misc_feature (1)..( 7): Result.004 file - promoters50/1019030
attttaa

SEQ ID NO: 157258 - DNA, 7 bp, Unknown
  misc_feature (1)..( 7): Result.004 file - promoters50/1019030
attatag

SEQ ID NO: 157259 - DNA, 7 bp, Unknown
  misc_feature (1)..( 7): Result.004 file - promoters50/1019030
ataaaaa

SEQ ID NO: 157260 - DNA, 7 bp, Unknown
  misc_feature (1)..( 7): Result.004 file - promoters50/1019030
ataaaaa

SEQ ID NO: 157261 - DNA, 7 bp, Unknown
  misc_feature (1)..( 7): Result.004 file - promoters50/1019030
ctaaaaa

SEQ ID NO: 157262 - DNA, 7 bp, Unknown
  misc_feature (1)..( 7): Result.004 file - promoters50/1019030
ataaaaa

SEQ ID NO: 157263 - DNA, 9 bp, Unknown
  misc_feature (1)..( 9): Result.004 file - promoters50/1019030
caaagaaaa

SEQ ID NO: 157264 - DNA, 9 bp, Unknown
  misc_feature (1)..( 9): Result.004 file - promoters50/1019030
aaaacaaaa

SEQ ID NO: 157265 - DNA, 9 bp, Unknown
  misc_feature (1)..( 9): Result.004 file - promoters50/1019030
aaaagaaat

SEQ ID NO: 157266 - DNA, 9 bp, Unknown
  misc_feature (1)..( 9): Result.004 file - promoters50/1019030
aaaacatgt

SEQ ID NO: 157267 - DNA, 8 bp, Unknown
  misc_feature (1)..( 8): Result.004 file - promoters50/1019030
tattttag

SEQ ID NO: 157268 - DNA, 8 bp, Unknown
  misc_feature (1)..( 8): Result.004 file - promoters50/1019030
tattttgt

SEQ ID NO: 157269 - DNA, 8 bp, Unknown
  misc_feature (1)..( 8): Result.004 file - promoters50/1019030
aattatag

SEQ ID NO: 157270 - DNA, 7 bp, Unknown
  misc_feature (1)..( 7): Result.004 file - promoters50/1019030
ttaaaaa

SEQ ID NO: 157271 - DNA, 7 bp, Unknown
  misc_feature (1)..( 7): Result.004 file - promoters50/1019030
ataaaaa

SEQ ID NO: 157272 - DNA, 7 bp, Unknown
  misc_feature (1)..( 7): Result.004 file - promoters50/1019030
ataaaat

SEQ ID NO: 157273 - DNA, 9 bp, Unknown
  misc_feature (1)..( 9): Result.004 file - promoters50/1019030
gaaaaatgt

SEQ ID NO: 157274 - DNA, 9 bp, Unknown
  misc_feature (1)..( 9): Result.004 file - promoters50/1019030
aaaacatgt

SEQ ID NO: 157275 - DNA, 9 bp, Unknown
  misc_feature (1)..( 9): Result.004 file - promoters50/1019030
aaaacaaaa

SEQ ID NO: 157276 - DNA, 7 bp, Unknown
  misc_feature (1)..( 7): Result.004 file - promoters50/1019030
aaaataa

SEQ ID NO: 157277 - DNA, 13 bp, Unknown
  misc_feature (1)..( 13): Result.004 file - promoters50/1019030
tattataaattaa

SEQ ID NO: 157278 - DNA, 13 bp, Unknown
  misc_feature (1)..( 13): Result.004 file - promoters50/1019030
tattatatatttt

SEQ ID NO: 157279 - DNA, 8 bp, Unknown
  misc_feature (1)..( 8): Result.004 file - promoters50/1019030
aattgtag

SEQ ID NO: 157280 - DNA, 8 bp, Unknown
  misc_feature (1)..( 8): Result.004 file - promoters50/1019030
aattatag

SEQ ID NO: 157281 - DNA, 8 bp, Unknown
  misc_feature (1)..( 8): Result.004 file - promoters50/1019030
aatcatat

SEQ ID NO: 157282 - DNA, 6 bp, Unknown
  misc_feature (1)..( 6): Result.004 file - promoters50/1019030
ataaaa

SEQ ID NO: 157283 - DNA, 6 bp, Unknown
  misc_feature (1)..( 6): Result.004 file - promoters50/1019030
ataaaa

SEQ ID NO: 157284 - DNA, 6 bp, Unknown
  misc_feature (1)..( 6): Result.004 file - promoters50/1019030
ataaaa

SEQ ID NO: 157285 - DNA, 7 bp, Unknown
  misc_feature (1)..( 7): Result.004 file - promoters50/1019030
tgtctaa

SEQ ID NO: 157286 - DNA, 7 bp, Unknown
  misc_feature (1)..( 7): Result.004 file - promoters50/1019030
tgtataa

SEQ ID NO: 157287 - DNA, 7 bp, Unknown
  misc_feature (1)..( 7): Result.004 file - promoters50/1019030
tgtttct

SEQ ID NO: 157288 - DNA, 9 bp, Unknown
  misc_feature (1)..( 9): Result.004 file - promoters50/1019030
aaaataaaa

SEQ ID NO: 157289 - DNA, 9 bp, Unknown
  misc_feature (1)..( 9): Result.004 file - promoters50/1019030
aaaatatct

SEQ ID NO: 157290 - DNA, 9 bp, Unknown
  misc_feature (1)..( 9): Result.004 file - promoters50/1019048
aaaaaaaaa

SEQ ID NO: 157291 - DNA, 11 bp, Unknown
  misc_feature (1)..( 11): Result.004 file - promoters50/1019048
cgataataaat

SEQ ID NO: 157292 - DNA, 11 bp, Unknown
  misc_feature (1)..( 11): Result.004 file - promoters50/1019048
cgatgatactt

SEQ ID NO: 157293 - DNA, 11 bp, Unknown
  misc_feature (1)..( 11): Result.004 file - promoters50/1019048
ggatcatataa

SEQ ID NO: 157294 - DNA, 11 bp, Unknown
  misc_feature (1)..( 11): Result.004 file - promoters50/1019048
acctgaaactc

SEQ ID NO: 157295 - DNA, 11 bp, Unknown
  misc_feature (1)..( 11): Result.004 file - promoters50/1019048
cgatcatgtaa

SEQ ID NO: 157296 - DNA, 11 bp, Unknown
  misc_feature (1)..( 11): Result.004 file - promoters50/1019048
tggtgtaatga

SEQ ID NO: 157297 - DNA, 11 bp, Unknown
  misc_feature (1)..( 11): Result.004 file - promoters50/1019048
atataataaaa

SEQ ID NO: 157298 - DNA, 11 bp, Unknown
  misc_feature (1)..( 11): Result.004 file - promoters50/1019048
gtttaacaaat

SEQ ID NO: 157299 - DNA, 12 bp, Unknown
  misc_feature (1)..( 12): Result.004 file - promoters50/1019048
ttttaatgaaat

SEQ ID NO: 157300 - DNA, 12 bp, Unknown
  misc_feature (1)..( 12): Result.004 file - promoters50/1019048
ttttacaagaca

SEQ ID NO: 157301 - DNA, 12 bp, Unknown
  misc_feature (1)..( 12): Result.004 file - promoters50/1019048
tcttaatggcta

SEQ ID NO: 157302 - DNA, 12 bp, Unknown
  misc_feature (1)..( 12): Result.004 file - promoters50/1019052
ttttacgtctat

SEQ ID NO: 157303 - DNA, 8 bp, Unknown
  misc_feature (1)..( 8): Result.004 file - promoters50/1019052
catatgtt

SEQ ID NO: 157304 - DNA, 8 bp, Unknown
  misc_feature (1)..( 8): Result.004 file - promoters50/1019052
gatatgtt

SEQ ID NO: 157305 - DNA, 8 bp, Unknown
  misc_feature (1)..( 8): Result.004 file - promoters50/1019052
catttgtt

SEQ ID NO: 157306 - DNA, 7 bp, Unknown
  misc_feature (1)..( 7): Result.004 file - promoters50/1019052
ttataag

SEQ ID NO: 157307 - DNA, 7 bp, Unknown
  misc_feature (1)..( 7): Result.004 file - promoters50/1019052
ttataaa

SEQ ID NO: 157308 - DNA, 7 bp, Unknown
  misc_feature (1)..( 7): Result.004 file - promoters50/1019052
atataaa

SEQ ID NO: 157309 - DNA, 10 bp, Unknown
  misc_feature (1)..( 10): Result.004 file - promoters50/1019052
ttaactacaa

SEQ ID NO: 157310 - DNA, 10 bp, Unknown
  misc_feature (1)..( 10): Result.004 file - promoters50/1019052
ttaactgaga

SEQ ID NO: 157311 - DNA, 10 bp, Unknown
  misc_feature (1)..( 10): Result.004 file - promoters50/1019067
ataacagaga

SEQ ID NO: 157312 - DNA, 9 bp, Unknown
  misc_feature (1)..( 9): Result.004 file - promoters50/1019067
aaaataatc

SEQ ID NO: 157313 - DNA, 9 bp, Unknown
  misc_feature (1)..( 9): Result.004 file - promoters50/1019067
aaaaaaatg

SEQ ID NO: 157314 - DNA, 9 bp, Unknown
  misc_feature (1)..( 9): Result.004 file - promoters50/1019067
agaaaaatg

SEQ ID NO: 157315 - DNA, 9 bp, Unknown
  misc_feature (1)..( 9): Result.004 file - promoters50/1019067
agagaaagg

SEQ ID NO: 157316 - DNA, 10 bp, Unknown
  misc_feature (1)..( 10): Result.004 file - promoters50/1019067
tatatatata

SEQ ID NO: 157317 - DNA, 10 bp, Unknown
  misc_feature (1)..( 10): Result.004 file - promoters50/1019067
tatatatata

SEQ ID NO: 157318 - DNA, 10 bp, Unknown
  misc_feature (1)..( 10): Result.004 file - promoters50/1019067
tatacatata

SEQ ID NO: 157319 - DNA, 10 bp, Unknown
  misc_feature (1)..( 10): Result.004 file - promoters50/1019067
tatttatagg

SEQ ID NO: 157320 - DNA, 10 bp, Unknown
  misc_feature (1)..( 10): Result.004 file - promoters50/1019067
tatataacaa

SEQ ID NO: 157321 - DNA, 10 bp, Unknown
  misc_feature (1)..( 10): Result.004 file - promoters50/1019067
aatccaatta

SEQ ID NO: 157322 - DNA, 10 bp, Unknown
  misc_feature (1)..( 10): Result.004 file - promoters50/1019067
aatctaattg

SEQ ID NO: 157323 - DNA, 10 bp, Unknown
  misc_feature (1)..( 10): Result.004 file - promoters50/1019067
taggcaatta

SEQ ID NO: 157324 - DNA, 10 bp, Unknown
  misc_feature (1)..( 10): Result.004 file - promoters50/1019067
cttctaatat

SEQ ID NO: 157325 - DNA, 10 bp, Unknown
  misc_feature (1)..( 10): Result.004 file - promoters50/1019067
taatagaaaa

SEQ ID NO: 157326 - DNA, 10 bp, Unknown
  misc_feature (1)..( 10): Result.004 file - promoters50/1019067
taaaagaaac

SEQ ID NO: 157327 - DNA, 10 bp, Unknown
  misc_feature (1)..( 10): Result.004 file - promoters50/1019067
tctaagaaac

SEQ ID NO: 157328 - DNA, 10 bp, Unknown
  misc_feature (1)..( 10): Result.004 file - promoters50/1019105
aaaaacaaaa

SEQ ID NO: 157329 - DNA, 11 bp, Unknown
  misc_feature (1)..( 11): Result.004 file - promoters50/1019105
gcaacgaaaaa

SEQ ID NO: 157330 - DNA, 11 bp, Unknown
  misc_feature (1)..( 11): Result.004 file - promoters50/1019105
agtgggaaaaa

SEQ ID NO: 157331 - DNA, 11 bp, Unknown
  misc_feature (1)..( 11): Result.004 file - promoters50/1019105
gctacgaaaat

SEQ ID NO: 157332 - DNA, 11 bp, Unknown
  misc_feature (1)..( 11): Result.004 file - promoters50/1019105
gctaccaaact

SEQ ID NO: 157333 - DNA, 11 bp, Unknown
  misc_feature (1)..( 11): Result.004 file - promoters50/1019105
cctactaaatt

SEQ ID NO: 157334 - DNA, 11 bp, Unknown
  misc_feature (1)..( 11): Result.004 file - promoters50/1019105
ataactaaagc

SEQ ID NO: 157335 - DNA, 10 bp, Unknown
  misc_feature (1)..( 10): Result.004 file - promoters50/1019105
gcaacgaaaa

SEQ ID NO: 157336 - DNA, 10 bp, Unknown
  misc_feature (1)..( 10): Result.004 file - promoters50/1019105
aaaacgaaga

SEQ ID NO: 157337 - DNA, 10 bp, Unknown
  misc_feature (1)..( 10): Result.004 file - promoters50/1019105
ataactaaag

SEQ ID NO: 157338 - DNA, 10 bp, Unknown
  misc_feature (1)..( 10): Result.004 file - promoters50/1019105
gctacgaaaa

SEQ ID NO: 157339 - DNA, 10 bp, Unknown
  misc_feature (1)..( 10): Result.004 file - promoters50/1019105
gctaccaaac

SEQ ID NO: 157340 - DNA, 10 bp, Unknown
  misc_feature (1)..( 10): Result.004 file - promoters50/1019111
cctactaaat

SEQ ID NO: 157341 - DNA, 8 bp, Unknown
  misc_feature (1)..( 8): Result.004 file - promoters50/1019111
ataagata

SEQ ID NO: 157342 - DNA, 8 bp, Unknown
  misc_feature (1)..( 8): Result.004 file - promoters50/1019111
atatgatt

SEQ ID NO: 157343 - DNA, 8 bp, Unknown
  misc_feature (1)..( 8): Result.004 file - promoters50/1019111
ataatata

SEQ ID NO: 157344 - DNA, 7 bp, Unknown
  misc_feature (1)..( 7): Result.004 file - promoters50/1019111
gttttag

SEQ ID NO: 157345 - DNA, 7 bp, Unknown
  misc_feature (1)..( 7): Result.004 file - promoters50/1019111
gttctag

SEQ ID NO: 157346 - DNA, 7 bp, Unknown
  misc_feature (1)..( 7): Result.004 file - promoters50/1019111
attttag

SEQ ID NO: 157347 - DNA, 11 bp, Unknown
  misc_feature (1)..( 11): Result.004 file - promoters50/1019111
ttataatttat

SEQ ID NO: 157348 - DNA, 11 bp, Unknown
  misc_feature (1)..( 11): Result.004 file - promoters50/1019111
ttatattttag

SEQ ID NO: 157349 - DNA, 11 bp, Unknown
  misc_feature (1)..( 11): Result.004 file - promoters50/1019111
cacagttttag

SEQ ID NO: 157350 - DNA, 8 bp, Unknown
  misc_feature (1)..( 8): Result.004 file - promoters50/1019111
attttttt

SEQ ID NO: 157351 - DNA, 8 bp, Unknown
  misc_feature (1)..( 8): Result.004 file - promoters50/1019111
attttttt

SEQ ID NO: 157352 - DNA, 8 bp, Unknown
  misc_feature (1)..( 8): Result.004 file - promoters50/1019111
attttttt

SEQ ID NO: 157353 - DNA, 15 bp, Unknown
  misc_feature (1)..( 15): Result.004 file - promoters50/1019111
gttattaagtttcaa

SEQ ID NO: 157354 - DNA, 15 bp, Unknown
  misc_feature (1)..( 15): Result.004 file - promoters50/1019111
ttttatttctttcaa

SEQ ID NO: 157355 - DNA, 15 bp, Unknown
  misc_feature (1)..( 15): Result.004 file - promoters50/1019253
tttaatttatttcat

SEQ ID NO: 157356 - DNA, 7 bp, Unknown
  misc_feature (1)..( 7): Result.004 file - promoters50/1019253
tttcttc

SEQ ID NO: 157357 - DNA, 7 bp, Unknown
  misc_feature (1)..( 7): Result.004 file - promoters50/1019253
tttctta

SEQ ID NO: 157358 - DNA, 7 bp, Unknown
  misc_feature (1)..( 7): Result.004 file - promoters50/1019253
ttttttc

SEQ ID NO: 157359 - DNA, 9 bp, Unknown
  misc_feature (1)..( 9): Result.004 file - promoters50/1019253
tattatttc

SEQ ID NO: 157360 - DNA, 9 bp, Unknown
  misc_feature (1)..( 9): Result.004 file - promoters50/1019253
atttatttt

SEQ ID NO: 157361 - DNA, 9 bp, Unknown
  misc_feature (1)..( 9): Result.004 file - promoters50/1019253
tatgatttc

SEQ ID NO: 157362 - DNA, 11 bp, Unknown
  misc_feature (1)..( 11): Result.004 file - promoters50/1019253
tttatagattt

SEQ ID NO: 157363 - DNA, 11 bp, Unknown
  misc_feature (1)..( 11): Result.004 file - promoters50/1019253
attaaagaaaa

SEQ ID NO: 157364 - DNA, 11 bp, Unknown
  misc_feature (1)..( 11): Result.004 file - promoters50/1019253
attaaagcaaa

SEQ ID NO: 157365 - DNA, 9 bp, Unknown
  misc_feature (1)..( 9): Result.004 file - promoters50/1019253
tttttattt

SEQ ID NO: 157366 - DNA, 9 bp, Unknown
  misc_feature (1)..( 9): Result.004 file - promoters50/1019253
tttttcttt

SEQ ID NO: 157367 - DNA, 9 bp, Unknown
  misc_feature (1)..( 9): Result.004 file - promoters50/1019253
tgtttctta

SEQ ID NO: 157368 - DNA, 11 bp, Unknown
  misc_feature (1)..( 11): Result.004 file - promoters50/1019253
attaaacttta

SEQ ID NO: 157369 - DNA, 11 bp, Unknown
  misc_feature (1)..( 11): Result.004 file - promoters50/1019253
attaaagcaaa

SEQ ID NO: 157370 - DNA, 11 bp, Unknown
  misc_feature (1)..( 11): Result.004 file - promoters50/1019257
attaaagaaaa

SEQ ID NO: 157371 - DNA, 13 bp, Unknown
  misc_feature (1)..( 13): Result.004 file - promoters50/1019257
ggagaattcatta

SEQ ID NO: 157372 - DNA, 13 bp, Unknown
  misc_feature (1)..( 13): Result.004 file - promoters50/1019257
atatttttcattt

SEQ ID NO: 157373 - DNA, 13 bp, Unknown
  misc_feature (1)..( 13): Result.004 file - promoters50/1019257
gagatttttattt

SEQ ID NO: 157374 - DNA, 13 bp, Unknown
  misc_feature (1)..( 13): Result.004 file - promoters50/1019257
agaattttgttat

SEQ ID NO: 157375 - DNA, 13 bp, Unknown
  misc_feature (1)..( 13): Result.004 file - promoters50/1019257
ataattttgttaa

SEQ ID NO: 157376 - DNA, 13 bp, Unknown
  misc_feature (1)..( 13): Result.004 file - promoters50/1019257
tggattttgaatt

SEQ ID NO: 157377 - DNA, 11 bp, Unknown
  misc_feature (1)..( 11): Result.004 file - promoters50/1019257
ttttgaatttt

SEQ ID NO: 157378 - DNA, 11 bp, Unknown
  misc_feature (1)..( 11): Result.004 file - promoters50/1019257
atttgaattaa

SEQ ID NO: 157379 - DNA, 11 bp, Unknown
  misc_feature (1)..( 11): Result.004 file - promoters50/1019257
acttgacttaa

SEQ ID NO: 157380 - DNA, 11 bp, Unknown
  misc_feature (1)..( 11): Result.004 file - promoters50/1019257
atttgagggta

SEQ ID NO: 157381 - DNA, 11 bp, Unknown
  misc_feature (1)..( 11): Result.004 file - promoters50/1019257
cttagacttaa

SEQ ID NO: 157382 - DNA, 11 bp, Unknown
  misc_feature (1)..( 11): Result.004 file - promoters50/1019257
agacgacttaa

SEQ ID NO: 157383 - DNA, 15 bp, Unknown
  misc_feature (1)..( 15): Result.004 file - promoters50/1019257
cggattttgtgatta

SEQ ID NO: 157384 - DNA, 15 bp, Unknown
  misc_feature (1)..( 15): Result.004 file - promoters50/1019257
agaattttgttatta

SEQ ID NO: 157385 - DNA, 15 bp, Unknown
  misc_feature (1)..( 15): Result.004 file - promoters50/1019257
tggattttgaatttt

SEQ ID NO: 157386 - DNA, 15 bp, Unknown
  misc_feature (1)..( 15): Result.004 file - promoters50/1019257
gagatttttatttgc

SEQ ID NO: 157387 - DNA, 15 bp, Unknown
  misc_feature (1)..( 15): Result.004 file - promoters50/1019257
aatatttttcattta

SEQ ID NO: 157388 - DNA, 15 bp, Unknown
  misc_feature (1)..( 15): Result.004 file - promoters50/1019260
ataattttgttaaaa

SEQ ID NO: 157389 - DNA, 8 bp, Unknown
  misc_feature (1)..( 8): Result.004 file - promoters50/1019260
aaaaccta

SEQ ID NO: 157390 - DNA, 8 bp, Unknown
  misc_feature (1)..( 8): Result.004 file - promoters50/1019260
aaaacctg

SEQ ID NO: 157391 - DNA, 8 bp, Unknown
  misc_feature (1)..( 8): Result.004 file - promoters50/1019260
taaatctg

SEQ ID NO: 157392 - DNA, 10 bp, Unknown
  misc_feature (1)..( 10): Result.004 file - promoters50/1019260
tttatgcttt

SEQ ID NO: 157393 - DNA, 10 bp, Unknown
  misc_feature (1)..( 10): Result.004 file - promoters50/1019260
gttatgattt

SEQ ID NO: 157394 - DNA, 10 bp, Unknown
  misc_feature (1)..( 10): Result.004 file - promoters50/1019287
gttatgctgg

SEQ ID NO: 157395 - DNA, 13 bp, Unknown
  misc_feature (1)..( 13): Result.004 file - promoters50/1019287
cataacaaaaatt

SEQ ID NO: 157396 - DNA, 13 bp, Unknown
  misc_feature (1)..( 13): Result.004 file - promoters50/1019287
aaaaacaaaagaa

SEQ ID NO: 157397 - DNA, 13 bp, Unknown
  misc_feature (1)..( 13): Result.004 file - promoters50/1019287
cttctcaaaaact

SEQ ID NO: 157398 - DNA, 13 bp, Unknown
  misc_feature (1)..( 13): Result.004 file - promoters50/1019287
tcattcaaaagat

SEQ ID NO: 157399 - DNA, 13 bp, Unknown
  misc_feature (1)..( 13): Result.004 file - promoters50/1019287
aggaaaaaaaaaa

SEQ ID NO: 157400 - DNA, 13 bp, Unknown
  misc_feature (1)..( 13): Result.004 file - promoters50/1019287
ttctccaaagtta

SEQ ID NO: 157401 - DNA, 15 bp, Unknown
  misc_feature (1)..( 15): Result.004 file - promoters50/1019287
caaatatttttaata

SEQ ID NO: 157402 - DNA, 15 bp, Unknown
  misc_feature (1)..( 15): Result.004 file - promoters50/1019287
gaaatatttttatgt

SEQ ID NO: 157403 - DNA, 15 bp, Unknown
  misc_feature (1)..( 15): Result.004 file - promoters50/1019287
actttttttttaaca

SEQ ID NO: 157404 - DNA, 15 bp, Unknown
  misc_feature (1)..( 15): Result.004 file - promoters50/1019287
gaaatacgttgaaag

SEQ ID NO: 157405 - DNA, 15 bp, Unknown
  misc_feature (1)..( 15): Result.004 file - promoters50/1019287
tttgaaattttatgg

SEQ ID NO: 157406 - DNA, 15 bp, Unknown
  misc_feature (1)..( 15): Result.004 file - promoters50/1019287
tggtatgtttgatgg

SEQ ID NO: 157407 - DNA, 12 bp, Unknown
  misc_feature (1)..( 12): Result.004 file - promoters50/1019287
tcataagagaat

SEQ ID NO: 157408 - DNA, 12 bp, Unknown
  misc_feature (1)..( 12): Result.004 file - promoters50/1019287
tcaaaagattta

SEQ ID NO: 157409 - DNA, 12 bp, Unknown
  misc_feature (1)..( 12): Result.004 file - promoters50/1019287
acattagatgag

SEQ ID NO: 157410 - DNA, 12 bp, Unknown
  misc_feature (1)..( 12): Result.004 file - promoters50/1019287
acaaaagaaaaa

SEQ ID NO: 157411 - DNA, 12 bp, Unknown
  misc_feature (1)..( 12): Result.004 file - promoters50/1019287
cataaacattta

SEQ ID NO: 157412 - DNA, 12 bp, Unknown
  misc_feature (1)..( 12): Result.004 file - promoters50/1019494
ttcttagctgag

SEQ ID NO: 157413 - DNA, 12 bp, Unknown
  misc_feature (1)..( 12): Result.004 file - promoters50/1019494
aattaacttttt

SEQ ID NO: 157414 - DNA, 12 bp, Unknown
  misc_feature (1)..( 12): Result.004 file - promoters50/1019494
aattaacatttg

SEQ ID NO: 157415 - DNA, 12 bp, Unknown
  misc_feature (1)..( 12): Result.004 file - promoters50/1019494
tttggtcttttt

SEQ ID NO: 157416 - DNA, 7 bp, Unknown
  misc_feature (1)..( 7): Result.004 file - promoters50/1019494
ataaata

SEQ ID NO: 157417 - DNA, 7 bp, Unknown
  misc_feature (1)..( 7): Result.004 file - promoters50/1019494
atatata

SEQ ID NO: 157418 - DNA, 7 bp, Unknown
  misc_feature (1)..( 7): Result.004 file - promoters50/1019498
atatatg

SEQ ID NO: 157419 - DNA, 10 bp, Unknown
  misc_feature (1)..( 10): Result.004 file - promoters50/1019498
gcggtaacta

SEQ ID NO: 157420 - DNA, 10 bp, Unknown
  misc_feature (1)..( 10): Result.004 file - promoters50/1019498
gcggcaaccg

SEQ ID NO: 157421 - DNA, 10 bp, Unknown
  misc_feature (1)..( 10): Result.004 file - promoters50/1019498
caagtaccta

SEQ ID NO: 157422 - DNA, 15 bp, Unknown
  misc_feature (1)..( 15): Result.004 file - promoters50/1019498
caaagtatgaaaacg

SEQ ID NO: 157423 - DNA, 15 bp, Unknown
  misc_feature (1)..( 15): Result.004 file - promoters50/1019498
caaagtatattaaac

SEQ ID NO: 157424 - DNA, 15 bp, Unknown
  misc_feature (1)..( 15): Result.004 file - promoters50/1019498
tatagtataataaac

SEQ ID NO: 157425 - DNA, 9 bp, Unknown
  misc_feature (1)..( 9): Result.004 file - promoters50/1019498
tttattttg

SEQ ID NO: 157426 - DNA, 9 bp, Unknown
  misc_feature (1)..( 9): Result.004 file - promoters50/1019498
cttatttaa

SEQ ID NO: 157427 - DNA, 9 bp, Unknown
  misc_feature (1)..( 9): Result.004 file - promoters50/1019498
tttattata

SEQ ID NO: 157428 - DNA, 9 bp, Unknown
  misc_feature (1)..( 9): Result.004 file - promoters50/1019498
catatataa

SEQ ID NO: 157429 - DNA, 8 bp, Unknown
  misc_feature (1)..( 8): Result.004 file - promoters50/1019498
gtatatgt

SEQ ID NO: 157430 - DNA, 8 bp, Unknown
  misc_feature (1)..( 8): Result.004 file - promoters50/1019498
atatatgt

SEQ ID NO: 157431 - DNA, 8 bp, Unknown
  misc_feature (1)..( 8): Result.004 file - promoters50/1019498
atatataa

SEQ ID NO: 157432 - DNA, 10 bp, Unknown
  misc_feature (1)..( 10): Result.004 file - promoters50/1019498
tatcatatat

SEQ ID NO: 157433 - DNA, 10 bp, Unknown
  misc_feature (1)..( 10): Result.004 file - promoters50/1019498
aatcatgtat

SEQ ID NO: 157434 - DNA, 10 bp, Unknown
  misc_feature (1)..( 10): Result.004 file - promoters50/1019498
aataatgggc

SEQ ID NO: 157435 - DNA, 12 bp, Unknown
  misc_feature (1)..( 12): Result.004 file - promoters50/1019498
tttgaaattaac

SEQ ID NO: 157436 - DNA, 12 bp, Unknown
  misc_feature (1)..( 12): Result.004 file - promoters50/1019498
agtataataaac

SEQ ID NO: 157437 - DNA, 12 bp, Unknown
  misc_feature (1)..( 12): Result.004 file - promoters50/1019498
agtatattaaac

SEQ ID NO: 157438 - DNA, 8 bp, Unknown
  misc_feature (1)..( 8): Result.004 file - promoters50/1019498
atttttca

SEQ ID NO: 157439 - DNA, 8 bp, Unknown
  misc_feature (1)..( 8): Result.004 file - promoters50/1019498
ctttttca

SEQ ID NO: 157440 - DNA, 8 bp, Unknown
  misc_feature (1)..( 8): Result.004 file - promoters50/1019524
ctttttta

SEQ ID NO: 157441 - DNA, 13 bp, Unknown
  misc_feature (1)..( 13): Result.004 file - promoters50/1019524
gaatggagaggaa

SEQ ID NO: 157442 - DNA, 13 bp, Unknown
  misc_feature (1)..( 13): Result.004 file - promoters50/1019524
acatgtagagggg

SEQ ID NO: 157443 - DNA, 13 bp, Unknown
  misc_feature (1)..( 13): Result.004 file - promoters50/1019524
agatgaatttaaa

SEQ ID NO: 157444 - DNA, 13 bp, Unknown
  misc_feature (1)..( 13): Result.004 file - promoters50/1019524
tcatgaatacggt

SEQ ID NO: 157445 - DNA, 13 bp, Unknown
  misc_feature (1)..( 13): Result.004 file - promoters50/1019524
aaatgtattttga

SEQ ID NO: 157446 - DNA, 13 bp, Unknown
  misc_feature (1)..( 13): Result.004 file - promoters50/1019537
ggttgtagtttga

SEQ ID NO: 157447 - DNA, 9 bp, Unknown
  misc_feature (1)..( 9): Result.004 file - promoters50/1019537
agcattttt

SEQ ID NO: 157448 - DNA, 9 bp, Unknown
  misc_feature (1)..( 9): Result.004 file - promoters50/1019537
caaattttt

SEQ ID NO: 157449 - DNA, 9 bp, Unknown
  misc_feature (1)..( 9): Result.004 file - promoters50/1019537
tctattttt

SEQ ID NO: 157450 - DNA, 9 bp, Unknown
  misc_feature (1)..( 9): Result.004 file - promoters50/1019537
tttatttaa

SEQ ID NO: 157451 - DNA, 9 bp, Unknown
  misc_feature (1)..( 9): Result.004 file - promoters50/1019537
tttcttttg

SEQ ID NO: 157452 - DNA, 9 bp, Unknown
  misc_feature (1)..( 9): Result.004 file - promoters50/1019537
cgtatctaa

SEQ ID NO: 157453 - DNA, 12 bp, Unknown
  misc_feature (1)..( 12): Result.004 file - promoters50/1019537
aagagagagatg

SEQ ID NO: 157454 - DNA, 12 bp, Unknown
  misc_feature (1)..( 12): Result.004 file - promoters50/1019537
tagatagatgtt

SEQ ID NO: 157455 - DNA, 12 bp, Unknown
  misc_feature (1)..( 12): Result.004 file - promoters50/1019537
aagagaattagg

SEQ ID NO: 157456 - DNA, 12 bp, Unknown
  misc_feature (1)..( 12): Result.004 file - promoters50/1019537
aatatatgtaaa

SEQ ID NO: 157457 - DNA, 12 bp, Unknown
  misc_feature (1)..( 12): Result.004 file - promoters50/1019537
tttatttaaaaa

SEQ ID NO: 157458 - DNA, 12 bp, Unknown
  misc_feature (1)..( 12): Result.004 file - promoters50/1019537
tagcattaaaat

SEQ ID NO: 157459 - DNA, 12 bp, Unknown
  misc_feature (1)..( 12): Result.004 file - promoters50/1019537
attttagaaaga

SEQ ID NO: 157460 - DNA, 12 bp, Unknown
  misc_feature (1)..( 12): Result.004 file - promoters50/1019537
tttatatggttg

SEQ ID NO: 157461 - DNA, 8 bp, Unknown
  misc_feature (1)..( 8): Result.004 file - promoters50/1019537
tatataaa

SEQ ID NO: 157462 - DNA, 8 bp, Unknown
  misc_feature (1)..( 8): Result.004 file - promoters50/1019537
tatttaaa

SEQ ID NO: 157463 - DNA, 8 bp, Unknown
  misc_feature (1)..( 8): Result.004 file - promoters50/1019537
tctataaa

SEQ ID NO: 157464 - DNA, 8 bp, Unknown
  misc_feature (1)..( 8): Result.004 file - promoters50/1019537
tatatact

SEQ ID NO: 157465 - DNA, 8 bp, Unknown
  misc_feature (1)..( 8): Result.004 file - promoters50/1019537
tatataag

SEQ ID NO: 157466 - DNA, 8 bp, Unknown
  misc_feature (1)..( 8): Result.004 file - promoters50/1019537
tatataaa

SEQ ID NO: 157467 - DNA, 11 bp, Unknown
  misc_feature (1)..( 11): Result.004 file - promoters50/1019537
agtgaatgttg

SEQ ID NO: 157468 - DNA, 11 bp, Unknown
  misc_feature (1)..( 11): Result.004 file - promoters50/1019537
tatgaatgaaa

SEQ ID NO: 157469 - DNA, 11 bp, Unknown
  misc_feature (1)..( 11): Result.004 file - promoters50/1019537
ggtgtatggtt

SEQ ID NO: 157470 - DNA, 11 bp, Unknown
  misc_feature (1)..( 11): Result.004 file - promoters50/1019537
tatgaattcta

SEQ ID NO: 157471 - DNA, 11 bp, Unknown
  misc_feature (1)..( 11): Result.004 file - promoters50/1019537
agagaaagaaa

SEQ ID NO: 157472 - DNA, 11 bp, Unknown
  misc_feature (1)..( 11): Result.004 file - promoters50/1019537
tggaaaacaaa

SEQ ID NO: 157473 - DNA, 11 bp, Unknown
  misc_feature (1)..( 11): Result.004 file - promoters50/1019545
gattaaaacat

SEQ ID NO: 157474 - DNA, 8 bp, Unknown
  misc_feature (1)..( 8): Result.004 file - promoters50/1019545
atatactc

SEQ ID NO: 157475 - DNA, 8 bp, Unknown
  misc_feature (1)..( 8): Result.004 file - promoters50/1019545
atattctc

SEQ ID NO: 157476 - DNA, 8 bp, Unknown
  misc_feature (1)..( 8): Result.004 file - promoters50/1019545
atatattc

SEQ ID NO: 157477 - DNA, 8 bp, Unknown
  misc_feature (1)..( 8): Result.004 file - promoters50/1019545
aaagcaga

SEQ ID NO: 157478 - DNA, 8 bp, Unknown
  misc_feature (1)..( 8): Result.004 file - promoters50/1019545
gaagcaga

SEQ ID NO: 157479 - DNA, 8 bp, Unknown
  misc_feature (1)..( 8): Result.004 file - promoters50/1019545
gaaccagt

SEQ ID NO: 157480 - DNA, 8 bp, Unknown
  misc_feature (1)..( 8): Result.004 file - promoters50/1019545
ttttattc

SEQ ID NO: 157481 - DNA, 8 bp, Unknown
  misc_feature (1)..( 8): Result.004 file - promoters50/1019545
attttttc

SEQ ID NO: 157482 - DNA, 8 bp, Unknown
  misc_feature (1)..( 8): Result.004 file - promoters50/1019545
ttttattg

SEQ ID NO: 157483 - DNA, 10 bp, Unknown
  misc_feature (1)..( 10): Result.004 file - promoters50/1019545
tttgtagaga

SEQ ID NO: 157484 - DNA, 10 bp, Unknown
  misc_feature (1)..( 10): Result.004 file - promoters50/1019545
atagtataga

SEQ ID NO: 157485 - DNA, 10 bp, Unknown
  misc_feature (1)..( 10): Result.004 file - promoters50/1019545
ataatataat

SEQ ID NO: 157486 - DNA, 10 bp, Unknown
  misc_feature (1)..( 10): Result.004 file - promoters50/1019545
ataatgtaat

SEQ ID NO: 157487 - DNA, 10 bp, Unknown
  misc_feature (1)..( 10): Result.004 file - promoters50/1019545
ataatataat

SEQ ID NO: 157488 - DNA, 10 bp, Unknown
  misc_feature (1)..( 10): Result.004 file - promoters50/1019559
atagtataga

SEQ ID NO: 157489 - DNA, 10 bp, Unknown
  misc_feature (1)..( 10): Result.004 file - promoters50/1019559
taaagtatga

SEQ ID NO: 157490 - DNA, 10 bp, Unknown
  misc_feature (1)..( 10): Result.004 file - promoters50/1019559
taaagtaaag

SEQ ID NO: 157491 - DNA, 10 bp, Unknown
  misc_feature (1)..( 10): Result.004 file - promoters50/1019559
aaaagaaaag

SEQ ID NO: 157492 - DNA, 11 bp, Unknown
  misc_feature (1)..( 11): Result.004 file - promoters50/1019559
aaaagtcttca

SEQ ID NO: 157493 - DNA, 11 bp, Unknown
  misc_feature (1)..( 11): Result.004 file - promoters50/1019559
aaaagttgcag

SEQ ID NO: 157494 - DNA, 11 bp, Unknown
  misc_feature (1)..( 11): Result.004 file - promoters50/1019559
gaaatttgcag

SEQ ID NO: 157495 - DNA, 10 bp, Unknown
  misc_feature (1)..( 10): Result.004 file - promoters50/1019559
atttttcaaa

SEQ ID NO: 157496 - DNA, 10 bp, Unknown
  misc_feature (1)..( 10): Result.004 file - promoters50/1019559
aattttgaaa

SEQ ID NO: 157497 - DNA, 10 bp, Unknown
  misc_feature (1)..( 10): Result.004 file - promoters50/1019559
aattttgttg

SEQ ID NO: 157498 - DNA, 11 bp, Unknown
  misc_feature (1)..( 11): Result.004 file - promoters50/1019559
cttgaaacaaa

SEQ ID NO: 157499 - DNA, 11 bp, Unknown
  misc_feature (1)..( 11): Result.004 file - promoters50/1019559
ggagaaagaaa

SEQ ID NO: 157500 - DNA, 11 bp, Unknown
  misc_feature (1)..( 11): Result.004 file - promoters50/1019559
ggagaaagcgg

SEQ ID NO: 157501 - DNA, 9 bp, Unknown
  misc_feature (1)..( 9): Result.004 file - promoters50/1019559
atctgagct

SEQ ID NO: 157502 - DNA, 9 bp, Unknown
  misc_feature (1)..( 9): Result.004 file - promoters50/1019559
ttcttagct

SEQ ID NO: 157503 - DNA, 9 bp, Unknown
  misc_feature (1)..( 9): Result.004 file - promoters50/1019559
ttcttatca

SEQ ID NO: 157504 - DNA, 8 bp, Unknown
  misc_feature (1)..( 8): Result.004 file - promoters50/1019559
aaaacatt

SEQ ID NO: 157505 - DNA, 8 bp, Unknown
  misc_feature (1)..( 8): Result.004 file - promoters50/1019559
gaaagatt

SEQ ID NO: 157506 - DNA, 8 bp, Unknown
  misc_feature (1)..( 8): Result.004 file - promoters50/1019604
gaaagaaa

SEQ ID NO: 157507 - DNA, 17 bp, Unknown
  misc_feature (1)..( 17): Result.004 file - promoters50/1019604
tctctactatataaaca

SEQ ID NO: 157508 - DNA, 17 bp, Unknown
  misc_feature (1)..( 17): Result.004 file - promoters50/1019604
tctctactatataaaca

SEQ ID NO: 157509 - DNA, 17 bp, Unknown
  misc_feature (1)..( 17): Result.004 file - promoters50/1019604
cttcaccaatataatct

SEQ ID NO: 157510 - DNA, 17 bp, Unknown
  misc_feature (1)..( 17): Result.004 file - promoters50/1019604
acacaactatatataca

SEQ ID NO: 157511 - DNA, 17 bp, Unknown
  misc_feature (1)..( 17): Result.004 file - promoters50/1019604
ttgctcctctataaaac

SEQ ID NO: 157512 - DNA, 17 bp, Unknown
  misc_feature (1)..( 17): Result.004 file - promoters50/1019604
aactatggatataaatt

SEQ ID NO: 157513 - DNA, 13 bp, Unknown
  misc_feature (1)..( 13): Result.004 file - promoters50/1019604
tttctagaaacct

SEQ ID NO: 157514 - DNA, 13 bp, Unknown
  misc_feature (1)..( 13): Result.004 file - promoters50/1019604
tgtctaaaaataa

SEQ ID NO: 157515 - DNA, 13 bp, Unknown
  misc_feature (1)..( 13): Result.004 file - promoters50/1019604
tttctagaaccaa

SEQ ID NO: 157516 - DNA, 13 bp, Unknown
  misc_feature (1)..( 13): Result.004 file - promoters50/1019604
tgtttaaaagtag

SEQ ID NO: 157517 - DNA, 13 bp, Unknown
  misc_feature (1)..( 13): Result.004 file - promoters50/1019604
tgtttacattatc

SEQ ID NO: 157518 - DNA, 13 bp, Unknown
  misc_feature (1)..( 13): Result.004 file - promoters50/1019604
aatttgaaaatag

SEQ ID NO: 157519 - DNA, 10 bp, Unknown
  misc_feature (1)..( 10): Result.004 file - promoters50/1019604
tcaagacaaa

SEQ ID NO: 157520 - DNA, 10 bp, Unknown
  misc_feature (1)..( 10): Result.004 file - promoters50/1019604
acaaaacatt

SEQ ID NO: 157521 - DNA, 10 bp, Unknown
  misc_feature (1)..( 10): Result.004 file - promoters50/1019604
tcaagacatc

SEQ ID NO: 157522 - DNA, 10 bp, Unknown
  misc_feature (1)..( 10): Result.004 file - promoters50/1019604
ccaagtcaaa

SEQ ID NO: 157523 - DNA, 10 bp, Unknown
  misc_feature (1)..( 10): Result.004 file - promoters50/1019604
aatagataaa

SEQ ID NO: 157524 - DNA, 10 bp, Unknown
  misc_feature (1)..( 10): Result.004 file - promoters50/1019604
aatagacaat

SEQ ID NO: 157525 - DNA, 10 bp, Unknown
  misc_feature (1)..( 10): Result.004 file - promoters50/1019659
acaagtccat

SEQ ID NO: 157526 - DNA, 8 bp, Unknown
  misc_feature (1)..( 8): Result.004 file - promoters50/1019659
gttctatt

SEQ ID NO: 157527 - DNA, 8 bp, Unknown
  misc_feature (1)..( 8): Result.004 file - promoters50/1019659
gttcgatt

SEQ ID NO: 157528 - DNA, 8 bp, Unknown
  misc_feature (1)..( 8): Result.004 file - promoters50/1019659
attctatt

SEQ ID NO: 157529 - DNA, 8 bp, Unknown
  misc_feature (1)..( 8): Result.004 file - promoters50/1019659
attagttt

SEQ ID NO: 157530 - DNA, 8 bp, Unknown
  misc_feature (1)..( 8): Result.004 file - promoters50/1019659
tttatttt

SEQ ID NO: 157531 - DNA, 8 bp, Unknown
  misc_feature (1)..( 8): Result.004 file - promoters50/1019663
tttatttc

SEQ ID NO: 157532 - DNA, 8 bp, Unknown
  misc_feature (1)..( 8): Result.004 file - promoters50/1019663
gttgtgat

SEQ ID NO: 157533 - DNA, 8 bp, Unknown
  misc_feature (1)..( 8): Result.004 file - promoters50/1019663
gttttgaa

SEQ ID NO: 157534 - DNA, 8 bp, Unknown
  misc_feature (1)..( 8): Result.004 file - promoters50/1019663
cttttgaa

SEQ ID NO: 157535 - DNA, 10 bp, Unknown
  misc_feature (1)..( 10): Result.004 file - promoters50/1019663
tacatacaac

SEQ ID NO: 157536 - DNA, 10 bp, Unknown
  misc_feature (1)..( 10): Result.004 file - promoters50/1019663
aacaaacaac

SEQ ID NO: 157537 - DNA, 10 bp, Unknown
  misc_feature (1)..( 10): Result.004 file - promoters50/1019663
aatatatatg

SEQ ID NO: 157538 - DNA, 9 bp, Unknown
  misc_feature (1)..( 9): Result.004 file - promoters50/1019663
tgttggaat

SEQ ID NO: 157539 - DNA, 9 bp, Unknown
  misc_feature (1)..( 9): Result.004 file - promoters50/1019663
ttttgaaat

SEQ ID NO: 157540 - DNA, 9 bp, Unknown
  misc_feature (1)..( 9): Result.004 file - promoters50/1019663
ttttgaatg

SEQ ID NO: 157541 - DNA, 7 bp, Unknown
  misc_feature (1)..( 7): Result.004 file - promoters50/1019663
ttttgat

SEQ ID NO: 157542 - DNA, 7 bp, Unknown
  misc_feature (1)..( 7): Result.004 file - promoters50/1019663
ttttgaa

SEQ ID NO: 157543 - DNA, 7 bp, Unknown
  misc_feature (1)..( 7): Result.004 file - promoters50/1019663
ttttgaa

SEQ ID NO: 157544 - DNA, 7 bp, Unknown
  misc_feature (1)..( 7): Result.004 file - promoters50/1019663
cttgtat

SEQ ID NO: 157545 - DNA, 7 bp, Unknown
  misc_feature (1)..( 7): Result.004 file - promoters50/1019663
cttatat

SEQ ID NO: 157546 - DNA, 7 bp, Unknown
  misc_feature (1)..( 7): Result.004 file - promoters50/1019695
tttatat

SEQ ID NO: 157547 - DNA, 8 bp, Unknown
  misc_feature (1)..( 8): Result.004 file - promoters50/1019695
attagtta

SEQ ID NO: 157548 - DNA, 8 bp, Unknown
  misc_feature (1)..( 8): Result.004 file - promoters50/1019695
atttgtta

SEQ ID NO: 157549 - DNA, 8 bp, Unknown
  misc_feature (1)..( 8): Result.004 file - promoters50/1019695
atttttta

SEQ ID NO: 157550 - DNA, 9 bp, Unknown
  misc_feature (1)..( 9): Result.004 file - promoters50/1019695
gtttatgta

SEQ ID NO: 157551 - DNA, 9 bp, Unknown
  misc_feature (1)..( 9): Result.004 file - promoters50/1019695
gttgatgga

SEQ ID NO: 157552 - DNA, 9 bp, Unknown
  misc_feature (1)..( 9): Result.004 file - promoters50/1019695
tctgatgga

SEQ ID NO: 157553 - DNA, 8 bp, Unknown
  misc_feature (1)..( 8): Result.004 file - promoters50/1019695
ttttcatc

SEQ ID NO: 157554 - DNA, 8 bp, Unknown
  misc_feature (1)..( 8): Result.004 file - promoters50/1019695
ttttcaac

SEQ ID NO: 157555 - DNA, 8 bp, Unknown
  misc_feature (1)..( 8): Result.004 file - promoters50/1019734
gtttaaac

SEQ ID NO: 157556 - DNA, 12 bp, Unknown
  misc_feature (1)..( 12): Result.004 file - promoters50/1019734
taaatcattttt

SEQ ID NO: 157557 - DNA, 12 bp, Unknown
  misc_feature (1)..( 12): Result.004 file - promoters50/1019734
aatttcatttag

SEQ ID NO: 157558 - DNA, 12 bp, Unknown
  misc_feature (1)..( 12): Result.004 file - promoters50/1019734
gaaataattttc

SEQ ID NO: 157559 - DNA, 13 bp, Unknown
  misc_feature (1)..( 13): Result.004 file - promoters50/1019734
aaattcatgtttt

SEQ ID NO: 157560 - DNA, 13 bp, Unknown
  misc_feature (1)..( 13): Result.004 file - promoters50/1019734
caaataaaagaag

SEQ ID NO: 157561 - DNA, 13 bp, Unknown
  misc_feature (1)..( 13): Result.004 file - promoters50/1019746
caaatatcgttgt

SEQ ID NO: 157562 - DNA, 10 bp, Unknown
  misc_feature (1)..( 10): Result.004 file - promoters50/1019746
taattgatga

SEQ ID NO: 157563 - DNA, 10 bp, Unknown
  misc_feature (1)..( 10): Result.004 file - promoters50/1019746
ccattgatac

SEQ ID NO: 157564 - DNA, 10 bp, Unknown
  misc_feature (1)..( 10): Result.004 file - promoters50/1019746
aaattgattt

SEQ ID NO: 157565 - DNA, 10 bp, Unknown
  misc_feature (1)..( 10): Result.004 file - promoters50/1019746
ggattaatac

SEQ ID NO: 157566 - DNA, 10 bp, Unknown
  misc_feature (1)..( 10): Result.004 file - promoters50/1019746
gatttgattg

SEQ ID NO: 157567 - DNA, 10 bp, Unknown
  misc_feature (1)..( 10): Result.004 file - promoters50/1019746
gatttaattc

SEQ ID NO: 157568 - DNA, 11 bp, Unknown
  misc_feature (1)..( 11): Result.004 file - promoters50/1019746
taaagcccaag

SEQ ID NO: 157569 - DNA, 11 bp, Unknown
  misc_feature (1)..( 11): Result.004 file - promoters50/1019746
taaggccaggc

SEQ ID NO: 157570 - DNA, 11 bp, Unknown
  misc_feature (1)..( 11): Result.004 file - promoters50/1019746
taaggcccaaa

SEQ ID NO: 157571 - DNA, 11 bp, Unknown
  misc_feature (1)..( 11): Result.004 file - promoters50/1019746
taagcccatat

SEQ ID NO: 157572 - DNA, 11 bp, Unknown
  misc_feature (1)..( 11): Result.004 file - promoters50/1019746
aaaggcccaat

SEQ ID NO: 157573 - DNA, 11 bp, Unknown
  misc_feature (1)..( 11): Result.004 file - promoters50/1019746
aaggcccatta

SEQ ID NO: 157574 - DNA, 11 bp, Unknown
  misc_feature (1)..( 11): Result.004 file - promoters50/1019746
ctaggcctaat

SEQ ID NO: 157575 - DNA, 12 bp, Unknown
  misc_feature (1)..( 12): Result.004 file - promoters50/1019746
agtattttttct

SEQ ID NO: 157576 - DNA, 12 bp, Unknown
  misc_feature (1)..( 12): Result.004 file - promoters50/1019746
tatatttttaat

SEQ ID NO: 157577 - DNA, 12 bp, Unknown
  misc_feature (1)..( 12): Result.004 file - promoters50/1019746
aatatgtttctt

SEQ ID NO: 157578 - DNA, 12 bp, Unknown
  misc_feature (1)..( 12): Result.004 file - promoters50/1019746
ggtatgtttgat

SEQ ID NO: 157579 - DNA, 12 bp, Unknown
  misc_feature (1)..( 12): Result.004 file - promoters50/1019746
ggtttgtagtat

SEQ ID NO: 157580 - DNA, 12 bp, Unknown
  misc_feature (1)..( 12): Result.004 file - promoters50/1019746
acaattttaaat

SEQ ID NO: 157581 - DNA, 12 bp, Unknown
  misc_feature (1)..( 12): Result.004 file - promoters50/1019764
acactcttaaat

SEQ ID NO: 157582 - DNA, 7 bp, Unknown
  misc_feature (1)..( 7): Result.004 file - promoters50/1019764
tttgttt

SEQ ID NO: 157583 - DNA, 7 bp, Unknown
  misc_feature (1)..( 7): Result.004 file - promoters50/1019764
tttgttt

SEQ ID NO: 157584 - DNA, 7 bp, Unknown
  misc_feature (1)..( 7): Result.004 file - promoters50/1019764
tttctgt

SEQ ID NO: 157585 - DNA, 9 bp, Unknown
  misc_feature (1)..( 9): Result.004 file - promoters50/1019764
agatgtatt

SEQ ID NO: 157586 - DNA, 9 bp, Unknown
  misc_feature (1)..( 9): Result.004 file - promoters50/1019764
agatgtatt

SEQ ID NO: 157587 - DNA, 9 bp, Unknown
  misc_feature (1)..( 9): Result.004 file - promoters50/1019776
agatgttga

SEQ ID NO: 157588 - DNA, 11 bp, Unknown
  misc_feature (1)..( 11): Result.004 file - promoters50/1019776
atactttgttt

SEQ ID NO: 157589 - DNA, 11 bp, Unknown
  misc_feature (1)..( 11): Result.004 file - promoters50/1019776
atattttcttt

SEQ ID NO: 157590 - DNA, 11 bp, Unknown
  misc_feature (1)..( 11): Result.004 file - promoters50/1019776
ccaatttgtta

SEQ ID NO: 157591 - DNA, 9 bp, Unknown
  misc_feature (1)..( 9): Result.004 file - promoters50/1019776
gaataaaaa

SEQ ID NO: 157592 - DNA, 9 bp, Unknown
  misc_feature (1)..( 9): Result.004 file - promoters50/1019776
gtatataaa

SEQ ID NO: 157593 - DNA, 9 bp, Unknown
  misc_feature (1)..( 9): Result.004 file - promoters50/1019776
gtatatatt

SEQ ID NO: 157594 - DNA, 9 bp, Unknown
  misc_feature (1)..( 9): Result.004 file - promoters50/1019776
aaattaact

SEQ ID NO: 157595 - DNA, 9 bp, Unknown
  misc_feature (1)..( 9): Result.004 file - promoters50/1019776
aaagtaaag

SEQ ID NO: 157596 - DNA, 9 bp, Unknown
  misc_feature (1)..( 9): Result.004 file - promoters50/1019776
aaagaaaag

SEQ ID NO: 157597 - DNA, 8 bp, Unknown
  misc_feature (1)..( 8): Result.004 file - promoters50/1019776
ctaattca

SEQ ID NO: 157598 - DNA, 8 bp, Unknown
  misc_feature (1)..( 8): Result.004 file - promoters50/1019776
ttaattca

SEQ ID NO: 157599 - DNA, 8 bp, Unknown
  misc_feature (1)..( 8): Result.004 file - promoters50/1019907
ttaattaa

SEQ ID NO: 157600 - DNA, 10 bp, Unknown
  misc_feature (1)..( 10): Result.004 file - promoters50/1019907
ttttcactaa

SEQ ID NO: 157601 - DNA, 10 bp, Unknown
  misc_feature (1)..( 10): Result.004 file - promoters50/1019907
tttttactat

SEQ ID NO: 157602 - DNA, 10 bp, Unknown
  misc_feature (1)..( 10): Result.004 file - promoters50/1019907
gtttcaataa

SEQ ID NO: 157603 - DNA, 11 bp, Unknown
  misc_feature (1)..( 11): Result.004 file - promoters50/1019907
ggaaaaaatta

SEQ ID NO: 157604 - DNA, 11 bp, Unknown
  misc_feature (1)..( 11): Result.004 file - promoters50/1019907
tcacaaactta

SEQ ID NO: 157605 - DNA, 11 bp, Unknown
  misc_feature (1)..( 11): Result.004 file - promoters50/1019907
tcacacactca

SEQ ID NO: 157606 - DNA, 8 bp, Unknown
  misc_feature (1)..( 8): Result.004 file - promoters50/1019907
ataaaatg

SEQ ID NO: 157607 - DNA, 8 bp, Unknown
  misc_feature (1)..( 8): Result.004 file - promoters50/1019907
atataatt

SEQ ID NO: 157608 - DNA, 8 bp, Unknown
  misc_feature (1)..( 8): Result.004 file - promoters50/1019915
caataatt

SEQ ID NO: 157609 - DNA, 7 bp, Unknown
  misc_feature (1)..( 7): Result.004 file - promoters50/1019915
aacaaga

SEQ ID NO: 157610 - DNA, 7 bp, Unknown
  misc_feature (1)..( 7): Result.004 file - promoters50/1019915
aactaga

SEQ ID NO: 157611 - DNA, 7 bp, Unknown
  misc_feature (1)..( 7): Result.004 file - promoters50/1019915
aactaga

SEQ ID NO: 157612 - DNA, 9 bp, Unknown
  misc_feature (1)..( 9): Result.004 file - promoters50/1019915
ctgcaaatt

SEQ ID NO: 157613 - DNA, 9 bp, Unknown
  misc_feature (1)..( 9): Result.004 file - promoters50/1019915
tgtcaaatt

SEQ ID NO: 157614 - DNA, 9 bp, Unknown
  misc_feature (1)..( 9): Result.004 file - promoters50/1019915
tgtcatatt

SEQ ID NO: 157615 - DNA, 10 bp, Unknown
  misc_feature (1)..( 10): Result.004 file - promoters50/1019915
gaccgaaaaa

SEQ ID NO: 157616 - DNA, 10 bp, Unknown
  misc_feature (1)..( 10): Result.004 file - promoters50/1019915
ttaagaaaaa

SEQ ID NO: 157617 - DNA, 10 bp, Unknown
  misc_feature (1)..( 10): Result.004 file - promoters50/1019915
ttaacaaaac

SEQ ID NO: 157618 - DNA, 8 bp, Unknown
  misc_feature (1)..( 8): Result.004 file - promoters50/1019915
ctaaaaac

SEQ ID NO: 157619 - DNA, 8 bp, Unknown
  misc_feature (1)..( 8): Result.004 file - promoters50/1019915
ttaaaaaa

SEQ ID NO: 157620 - DNA, 8 bp, Unknown
  misc_feature (1)..( 8): Result.004 file - promoters50/1019915
ctagaaac

SEQ ID NO: 157621 - DNA, 8 bp, Unknown
  misc_feature (1)..( 8): Result.004 file - promoters50/1019915
aaaataaa

SEQ ID NO: 157622 - DNA, 8 bp, Unknown
  misc_feature (1)..( 8): Result.004 file - promoters50/1019915
aaaacaaa

SEQ ID NO: 157623 - DNA, 8 bp, Unknown
  misc_feature (1)..( 8): Result.004 file - promoters50/1019915
aaaataaa

SEQ ID NO: 157624 - DNA, 8 bp, Unknown
  misc_feature (1)..( 8): Result.004 file - promoters50/1019915
tttctagt

SEQ ID NO: 157625 - DNA, 8 bp, Unknown
  misc_feature (1)..( 8): Result.004 file - promoters50/1019915
tttttagt

SEQ ID NO: 157626 - DNA, 8 bp, Unknown
  misc_feature (1)..( 8): Result.004 file - promoters50/1019915
attttaga

SEQ ID NO: 157627 - DNA, 12 bp, Unknown
  misc_feature (1)..( 12): Result.004 file - promoters50/1019915
ataacaccgtta

SEQ ID NO: 157628 - DNA, 12 bp, Unknown
  misc_feature (1)..( 12): Result.004 file - promoters50/1019915
ataaaaccatta

SEQ ID NO: 157629 - DNA, 12 bp, Unknown
  misc_feature (1)..( 12): Result.004 file - promoters50/1019915
attaaaccattc

SEQ ID NO: 157630 - DNA, 10 bp, Unknown
  misc_feature (1)..( 10): Result.004 file - promoters50/1019915
aaatagtgat

SEQ ID NO: 157631 - DNA, 10 bp, Unknown
  misc_feature (1)..( 10): Result.004 file - promoters50/1019915
ttatattgat

SEQ ID NO: 157632 - DNA, 10 bp, Unknown
  misc_feature (1)..( 10): Result.004 file - promoters50/1019928
ttatattgtt

SEQ ID NO: 157633 - DNA, 16 bp, Unknown
  misc_feature (1)..( 16): Result.004 file - promoters50/1019928
cgaaatttgtaacttc

SEQ ID NO: 157634 - DNA, 16 bp, Unknown
  misc_feature (1)..( 16): Result.004 file - promoters50/1019928
atatctttataagtat

SEQ ID NO: 157635 - DNA, 16 bp, Unknown
  misc_feature (1)..( 16): Result.004 file - promoters50/1019928
gaaaacttataattat

SEQ ID NO: 157636 - DNA, 16 bp, Unknown
  misc_feature (1)..( 16): Result.004 file - promoters50/1019928
ataactttatgttatt

SEQ ID NO: 157637 - DNA, 16 bp, Unknown
  misc_feature (1)..( 16): Result.004 file - promoters50/1019928
caatctttatacaaaa

SEQ ID NO: 157638 - DNA, 16 bp, Unknown
  misc_feature (1)..( 16): Result.004 file - promoters50/1019928
ataactttatgttatt

SEQ ID NO: 157639 - DNA, 16 bp, Unknown
  misc_feature (1)..( 16): Result.004 file - promoters50/1019928
atattattatttctcg

SEQ ID NO: 157640 - DNA, 13 bp, Unknown
  misc_feature (1)..( 13): Result.004 file - promoters50/1019928
aaatttgttatgt

SEQ ID NO: 157641 - DNA, 13 bp, Unknown
  misc_feature (1)..( 13): Result.004 file - promoters50/1019928
ataattgttaatc

SEQ ID NO: 157642 - DNA, 14 bp, Unknown
  misc_feature (1)..( 14): Result.004 file - promoters50/1019928
tgcattagttcttc

SEQ ID NO: 157643 - DNA, 14 bp, Unknown
  misc_feature (1)..( 14): Result.004 file - promoters50/1019928
actttatgttatta

SEQ ID NO: 157644 - DNA, 14 bp, Unknown
  misc_feature (1)..( 14): Result.004 file - promoters50/1019928
taattttgttttat

SEQ ID NO: 157645 - DNA, 14 bp, Unknown
  misc_feature (1)..( 14): Result.004 file - promoters50/1019928
caatgatattatta

SEQ ID NO: 157646 - DNA, 17 bp, Unknown
  misc_feature (1)..( 17): Result.004 file - promoters50/1019928
tctattttaattcgttg

SEQ ID NO: 157647 - DNA, 17 bp, Unknown
  misc_feature (1)..( 17): Result.004 file - promoters50/1019928
aaacttttaaaatgcta

SEQ ID NO: 157648 - DNA, 17 bp, Unknown
  misc_feature (1)..( 17): Result.004 file - promoters50/1019928
aatttttcaatatttcg

SEQ ID NO: 157649 - DNA, 17 bp, Unknown
  misc_feature (1)..( 17): Result.004 file - promoters50/1019928
cttatttgaaattttca

SEQ ID NO: 157650 - DNA, 17 bp, Unknown
  misc_feature (1)..( 17): Result.004 file - promoters50/1019928
aaaatttcataaacttt

SEQ ID NO: 157651 - DNA, 17 bp, Unknown
  misc_feature (1)..( 17): Result.004 file - promoters50/1019928
aaaattgtgaaggaagc

SEQ ID NO: 157652 - DNA, 17 bp, Unknown
  misc_feature (1)..( 17): Result.004 file - promoters50/1019928
aaagaatgaaatctgtc

SEQ ID NO: 157653 - DNA, 9 bp, Unknown
  misc_feature (1)..( 9): Result.004 file - promoters50/1019928
cccataaaa

SEQ ID NO: 157654 - DNA, 9 bp, Unknown
  misc_feature (1)..( 9): Result.004 file - promoters50/1019928
gctataaaa

SEQ ID NO: 157655 - DNA, 9 bp, Unknown
  misc_feature (1)..( 9): Result.004 file - promoters50/1019928
cctataaat

SEQ ID NO: 157656 - DNA, 9 bp, Unknown
  misc_feature (1)..( 9): Result.004 file - promoters50/1019928
tatataaac

SEQ ID NO: 157657 - DNA, 9 bp, Unknown
  misc_feature (1)..( 9): Result.004 file - promoters50/1019928
tatataaat

SEQ ID NO: 157658 - DNA, 9 bp, Unknown
  misc_feature (1)..( 9): Result.004 file - promoters50/1019928
tatataaat

SEQ ID NO: 157659 - DNA, 11 bp, Unknown
  misc_feature (1)..( 11): Result.004 file - promoters50/1019928
ctataaatatc

SEQ ID NO: 157660 - DNA, 11 bp, Unknown
  misc_feature (1)..( 11): Result.004 file - promoters50/1019928
atataaacaaa

SEQ ID NO: 157661 - DNA, 11 bp, Unknown
  misc_feature (1)..( 11): Result.004 file - promoters50/1019928
atataaatgac

SEQ ID NO: 157662 - DNA, 11 bp, Unknown
  misc_feature (1)..( 11): Result.004 file - promoters50/1019928
cgataaatatc

SEQ ID NO: 157663 - DNA, 11 bp, Unknown
  misc_feature (1)..( 11): Result.004 file - promoters50/1019928
atataaatgac

SEQ ID NO: 157664 - DNA, 11 bp, Unknown
  misc_feature (1)..( 11): Result.004 file - promoters50/1019928
ctataaaaacc

SEQ ID NO: 157665 - DNA, 9 bp, Unknown
  misc_feature (1)..( 9): Result.004 file - promoters50/1019928
ctaaacttt

SEQ ID NO: 157666 - DNA, 9 bp, Unknown
  misc_feature (1)..( 9): Result.004 file - promoters50/1019928
tgaaaattt

SEQ ID NO: 157667 - DNA, 9 bp, Unknown
  misc_feature (1)..( 9): Result.004 file - promoters50/1019928
ataaacttt

SEQ ID NO: 157668 - DNA, 9 bp, Unknown
  misc_feature (1)..( 9): Result.004 file - promoters50/1019928
agaaaattc

SEQ ID NO: 157669 - DNA, 9 bp, Unknown
  misc_feature (1)..( 9): Result.004 file - promoters50/1019928
agaaaagaa

SEQ ID NO: 157670 - DNA, 9 bp, Unknown
  misc_feature (1)..( 9): Result.004 file - promoters50/1019979
aaaaaattg

SEQ ID NO: 157671 - DNA, 10 bp, Unknown
  misc_feature (1)..( 10): Result.004 file - promoters50/1019979
atataataca

SEQ ID NO: 157672 - DNA, 10 bp, Unknown
  misc_feature (1)..( 10): Result.004 file - promoters50/1019979
ataaaatatg

SEQ ID NO: 157673 - DNA, 10 bp, Unknown
  misc_feature (1)..( 10): Result.004 file - promoters50/1020005
gtaaaagatg

SEQ ID NO: 157674 - DNA, 8 bp, Unknown
  misc_feature (1)..( 8): Result.004 file - promoters50/1020005
tcttaaat

SEQ ID NO: 157675 - DNA, 8 bp, Unknown
  misc_feature (1)..( 8): Result.004 file - promoters50/1020005
tctaaaac

SEQ ID NO: 157676 - DNA, 8 bp, Unknown
  misc_feature (1)..( 8): Result.004 file - promoters50/1020005
agtaaaac

SEQ ID NO: 157677 - DNA, 11 bp, Unknown
  misc_feature (1)..( 11): Result.004 file - promoters50/1020005
aagaaaaaatg

SEQ ID NO: 157678 - DNA, 11 bp, Unknown
  misc_feature (1)..( 11): Result.004 file - promoters50/1020005
aagcaaagagg

SEQ ID NO: 157679 - DNA, 11 bp, Unknown
  misc_feature (1)..( 11): Result.004 file - promoters50/1020019
aaggaaacagg

SEQ ID NO: 157680 - DNA, 7 bp, Unknown
  misc_feature (1)..( 7): Result.004 file - promoters50/1020019
agtttta

SEQ ID NO: 157681 - DNA, 7 bp, Unknown
  misc_feature (1)..( 7): Result.004 file - promoters50/1020019
agttttt

SEQ ID NO: 157682 - DNA, 7 bp, Unknown
  misc_feature (1)..( 7): Result.004 file - promoters50/1020019
agttttt

SEQ ID NO: 157683 - DNA, 9 bp, Unknown
  misc_feature (1)..( 9): Result.004 file - promoters50/1020019
tttttaatc

SEQ ID NO: 157684 - DNA, 9 bp, Unknown
  misc_feature (1)..( 9): Result.004 file - promoters50/1020019
attttaatc

SEQ ID NO: 157685 - DNA, 9 bp, Unknown
  misc_feature (1)..( 9): Result.004 file - promoters50/1020019
tttttaatt

SEQ ID NO: 157686 - DNA, 12 bp, Unknown
  misc_feature (1)..( 12): Result.004 file - promoters50/1020019
agatattttata

SEQ ID NO: 157687 - DNA, 12 bp, Unknown
  misc_feature (1)..( 12): Result.004 file - promoters50/1020019
attcattttata

SEQ ID NO: 157688 - DNA, 12 bp, Unknown
  misc_feature (1)..( 12): Result.004 file - promoters50/1020019
ttaaattttaat

SEQ ID NO: 157689 - DNA, 12 bp, Unknown
  misc_feature (1)..( 12): Result.004 file - promoters50/1020019
ccatatattatt

SEQ ID NO: 157690 - DNA, 8 bp, Unknown
  misc_feature (1)..( 8): Result.004 file - promoters50/1020019
agacaaac

SEQ ID NO: 157691 - DNA, 8 bp, Unknown
  misc_feature (1)..( 8): Result.004 file - promoters50/1020019
agaaaaac

SEQ ID NO: 157692 - DNA, 8 bp, Unknown
  misc_feature (1)..( 8): Result.004 file - promoters50/1020019
ccacaaac

SEQ ID NO: 157693 - DNA, 8 bp, Unknown
  misc_feature (1)..( 8): Result.004 file - promoters50/1020019
tacaatta

SEQ ID NO: 157694 - DNA, 8 bp, Unknown
  misc_feature (1)..( 8): Result.004 file - promoters50/1020019
gacattta

SEQ ID NO: 157695 - DNA, 8 bp, Unknown
  misc_feature (1)..( 8): Result.004 file - promoters50/1020019
gactttta

SEQ ID NO: 157696 - DNA, 9 bp, Unknown
  misc_feature (1)..( 9): Result.004 file - promoters50/1020019
ataagatat

SEQ ID NO: 157697 - DNA, 9 bp, Unknown
  misc_feature (1)..( 9): Result.004 file - promoters50/1020019
ataatatat

SEQ ID NO: 157698 - DNA, 9 bp, Unknown
  misc_feature (1)..( 9): Result.004 file - promoters50/1020019
gccatatat

SEQ ID NO: 157699 - DNA, 12 bp, Unknown
  misc_feature (1)..( 12): Result.004 file - promoters50/1020019
tattgccaaaat

SEQ ID NO: 157700 - DNA, 12 bp, Unknown
  misc_feature (1)..( 12): Result.004 file - promoters50/1020019
tattgacaaaat

SEQ ID NO: 157701 - DNA, 12 bp, Unknown
  misc_feature (1)..( 12): Result.004 file - promoters50/1020019
tattgactttta

SEQ ID NO: 157702 - DNA, 12 bp, Unknown
  misc_feature (1)..( 12): Result.004 file - promoters50/1020019
tttagacacaat

SEQ ID NO: 157703 - DNA, 8 bp, Unknown
  misc_feature (1)..( 8): Result.004 file - promoters50/1020019
cattaaaa

SEQ ID NO: 157704 - DNA, 8 bp, Unknown
  misc_feature (1)..( 8): Result.004 file - promoters50/1020019
gtttaaaa

SEQ ID NO: 157705 - DNA, 8 bp, Unknown
  misc_feature (1)..( 8): Result.004 file - promoters50/1020023
cattgaaa

SEQ ID NO: 157706 - DNA, 12 bp, Unknown
  misc_feature (1)..( 12): Result.004 file - promoters50/1020023
atatttatataa

SEQ ID NO: 157707 - DNA, 12 bp, Unknown
  misc_feature (1)..( 12): Result.004 file - promoters50/1020023
caatttagataa

SEQ ID NO: 157708 - DNA, 12 bp, Unknown
  misc_feature (1)..( 12): Result.004 file - promoters50/1020023
aagtttataaaa

SEQ ID NO: 157709 - DNA, 12 bp, Unknown
  misc_feature (1)..( 12): Result.004 file - promoters50/1020023
caatttaatacc

SEQ ID NO: 157710 - DNA, 12 bp, Unknown
  misc_feature (1)..( 12): Result.004 file - promoters50/1020023
tgattaataatt

SEQ ID NO: 157711 - DNA, 12 bp, Unknown
  misc_feature (1)..( 12): Result.004 file - promoters50/1020023
gccttaatatcg

SEQ ID NO: 157712 - DNA, 12 bp, Unknown
  misc_feature (1)..( 12): Result.004 file - promoters50/1020023
tggtttatggca

SEQ ID NO: 157713 - DNA, 12 bp, Unknown
  misc_feature (1)..( 12): Result.004 file - promoters50/1020023
tcctatatatca

SEQ ID NO: 157714 - DNA, 12 bp, Unknown
  misc_feature (1)..( 12): Result.004 file - promoters50/1020023
ttctatatatat

SEQ ID NO: 157715 - DNA, 12 bp, Unknown
  misc_feature (1)..( 12): Result.004 file - promoters50/1020023
tcctataaatat

SEQ ID NO: 157716 - DNA, 12 bp, Unknown
  misc_feature (1)..( 12): Result.004 file - promoters50/1020023
tcctataaattg

SEQ ID NO: 157717 - DNA, 12 bp, Unknown
  misc_feature (1)..( 12): Result.004 file - promoters50/1020023
aaatataaatat

SEQ ID NO: 157718 - DNA, 12 bp, Unknown
  misc_feature (1)..( 12): Result.004 file - promoters50/1020023
gtgtataaatat

SEQ ID NO: 157719 - DNA, 13 bp, Unknown
  misc_feature (1)..( 13): Result.004 file - promoters50/1020023
actatttaaaagt

SEQ ID NO: 157720 - DNA, 13 bp, Unknown
  misc_feature (1)..( 13): Result.004 file - promoters50/1020023
actattcttcgat

SEQ ID NO: 157721 - DNA, 14 bp, Unknown
  misc_feature (1)..( 14): Result.004 file - promoters50/1020023
cctaattaagtctt

SEQ ID NO: 157722 - DNA, 14 bp, Unknown
  misc_feature (1)..( 14): Result.004 file - promoters50/1020023
gataaataaactta

SEQ ID NO: 157723 - DNA, 14 bp, Unknown
  misc_feature (1)..( 14): Result.004 file - promoters50/1020023
ctataataaaatta

SEQ ID NO: 157724 - DNA, 14 bp, Unknown
  misc_feature (1)..( 14): Result.004 file - promoters50/1020023
accaaataaaagaa

SEQ ID NO: 157725 - DNA, 12 bp, Unknown
  misc_feature (1)..( 12): Result.004 file - promoters50/1020023
aattttatgcaa

SEQ ID NO: 157726 - DNA, 12 bp, Unknown
  misc_feature (1)..( 12): Result.004 file - promoters50/1020023
atttttatgtat

SEQ ID NO: 157727 - DNA, 12 bp, Unknown
  misc_feature (1)..( 12): Result.004 file - promoters50/1020023
gattttatcttt

SEQ ID NO: 157728 - DNA, 12 bp, Unknown
  misc_feature (1)..( 12): Result.004 file - promoters50/1020023
ttttttttgtat

SEQ ID NO: 157729 - DNA, 12 bp, Unknown
  misc_feature (1)..( 12): Result.004 file - promoters50/1020023
tctgttatgtct

SEQ ID NO: 157730 - DNA, 12 bp, Unknown
  misc_feature (1)..( 12): Result.004 file - promoters50/1020023
gtttttctgttt

SEQ ID NO: 157731 - DNA, 12 bp, Unknown
  misc_feature (1)..( 12): Result.004 file - promoters50/1020046
gattttcagatt

SEQ ID NO: 157732 - DNA, 11 bp, Unknown
  misc_feature (1)..( 11): Result.004 file - promoters50/1020046
gatcttaattc

SEQ ID NO: 157733 - DNA, 11 bp, Unknown
  misc_feature (1)..( 11): Result.004 file - promoters50/1020046
taatttaatta

SEQ ID NO: 157734 - DNA, 11 bp, Unknown
  misc_feature (1)..( 11): Result.004 file - promoters50/1020046
ctcattatttc

SEQ ID NO: 157735 - DNA, 11 bp, Unknown
  misc_feature (1)..( 11): Result.004 file - promoters50/1020046
gattttaataa

SEQ ID NO: 157736 - DNA, 11 bp, Unknown
  misc_feature (1)..( 11): Result.004 file - promoters50/1020046
ttaataaatcg

SEQ ID NO: 157737 - DNA, 11 bp, Unknown
  misc_feature (1)..( 11): Result.004 file - promoters50/1020046
tattctaaaaa

SEQ ID NO: 157738 - DNA, 8 bp, Unknown
  misc_feature (1)..( 8): Result.004 file - promoters50/1020046
tttataag

SEQ ID NO: 157739 - DNA, 8 bp, Unknown
  misc_feature (1)..( 8): Result.004 file - promoters50/1020046
cttataaa

SEQ ID NO: 157740 - DNA, 8 bp, Unknown
  misc_feature (1)..( 8): Result.004 file - promoters50/1020046
tttatata

SEQ ID NO: 157741 - DNA, 8 bp, Unknown
  misc_feature (1)..( 8): Result.004 file - promoters50/1020046
tttataaa

SEQ ID NO: 157742 - DNA, 9 bp, Unknown
  misc_feature (1)..( 9): Result.004 file - promoters50/1020046
tctattaag

SEQ ID NO: 157743 - DNA, 10 bp, Unknown
  misc_feature (1)..( 10): Result.004 file - promoters50/1020046
tttagatatg

SEQ ID NO: 157744 - DNA, 13 bp, Unknown
  misc_feature (1)..( 13): Result.004 file - promoters50/1020046
tgtatatattttt

SEQ ID NO: 157745 - DNA, 13 bp, Unknown
  misc_feature (1)..( 13): Result.004 file - promoters50/1020046
aaaatatatatat

SEQ ID NO: 157746 - DNA, 13 bp, Unknown
  misc_feature (1)..( 13): Result.004 file - promoters50/1020046
cgtttatgtttgg

SEQ ID NO: 157747 - DNA, 13 bp, Unknown
  misc_feature (1)..( 13): Result.004 file - promoters50/1020046
taaacatattcaa

SEQ ID NO: 157748 - DNA, 13 bp, Unknown
  misc_feature (1)..( 13): Result.004 file - promoters50/1020046
aaaatttatcaat

SEQ ID NO: 157749 - DNA, 13 bp, Unknown
  misc_feature (1)..( 13): Result.004 file - promoters50/1020046
aaattataaaccc

SEQ ID NO: 157750 - DNA, 13 bp, Unknown
  misc_feature (1)..( 13): Result.004 file - promoters50/1020046
ttattttattttt

SEQ ID NO: 157751 - DNA, 19 bp, Unknown
  misc_feature (1)..( 19): Result.004 file - promoters50/1020046
ttagaaaagtcatgtttct

SEQ ID NO: 157752 - DNA, 19 bp, Unknown
  misc_feature (1)..( 19): Result.004 file - promoters50/1020046
taatcaaagacatttttct

SEQ ID NO: 157753 - DNA, 19 bp, Unknown
  misc_feature (1)..( 19): Result.004 file - promoters50/1020046
taattaaaaacaaattacc

SEQ ID NO: 157754 - DNA, 19 bp, Unknown
  misc_feature (1)..( 19): Result.004 file - promoters50/1020046
caccaaaaaaaaaaaaaaa

SEQ ID NO: 157755 - DNA, 19 bp, Unknown
  misc_feature (1)..( 19): Result.004 file - promoters50/1020046
ttgaaaaaaactgcaaaaa

SEQ ID NO: 157756 - DNA, 19 bp, Unknown
  misc_feature (1)..( 19): Result.004 file - promoters50/1020046
cctaataagtaaggtaagc

SEQ ID NO: 157757 - DNA, 19 bp, Unknown
  misc_feature (1)..( 19): Result.004 file - promoters50/1020046
atattcaagtaaaatgcgt

SEQ ID NO: 157758 - DNA, 12 bp, Unknown
  misc_feature (1)..( 12): Result.004 file - promoters50/1020046
ttaaaaattaga

SEQ ID NO: 157759 - DNA, 12 bp, Unknown
  misc_feature (1)..( 12): Result.004 file - promoters50/1020046
aataaatttaga

SEQ ID NO: 157760 - DNA, 11 bp, Unknown
  misc_feature (1)..( 11): Result.004 file - promoters50/1020046
aaaaaatatac

SEQ ID NO: 157761 - DNA, 11 bp, Unknown
  misc_feature (1)..( 11): Result.004 file - promoters50/1020046
gaaaatttaga

SEQ ID NO: 157762 - DNA, 12 bp, Unknown
  misc_feature (1)..( 12): Result.004 file - promoters50/1020046
aacaaaattatt

SEQ ID NO: 157763 - DNA, 12 bp, Unknown
  misc_feature (1)..( 12): Result.004 file - promoters50/1020046
taagaaacggca

SEQ ID NO: 157764 - DNA, 12 bp, Unknown
  misc_feature (1)..( 12): Result.004 file - promoters50/1020046
gaagaaagacga

SEQ ID NO: 157765 - DNA, 12 bp, Unknown
  misc_feature (1)..( 12): Result.004 file - promoters50/1020046
tctataaagaca

SEQ ID NO: 157766 - DNA, 12 bp, Unknown
  misc_feature (1)..( 12): Result.004 file - promoters50/1020046
tatttaaacaca

SEQ ID NO: 157767 - DNA, 12 bp, Unknown
  misc_feature (1)..( 12): Result.004 file - promoters50/1020046
tttataaacaca

SEQ ID NO: 157768 - DNA, 12 bp, Unknown
  misc_feature (1)..( 12): Result.004 file - promoters50/1020046
tttataaccaaa

SEQ ID NO: 157769 - DNA, 12 bp, Unknown
  misc_feature (1)..( 12): Result.004 file - promoters50/1020046
cccttaaaaccg

SEQ ID NO: 157770 - DNA, 12 bp, Unknown
  misc_feature (1)..( 12): Result.004 file - promoters50/1020046
cttttaaaccat

SEQ ID NO: 157771 - DNA, 12 bp, Unknown
  misc_feature (1)..( 12): Result.004 file - promoters50/1020046
tttaaatgtgat

SEQ ID NO: 157772 - DNA, 12 bp, Unknown
  misc_feature (1)..( 12): Result.004 file - promoters50/1020046
attaaattgaga

SEQ ID NO: 157773 - DNA, 13 bp, Unknown
  misc_feature (1)..( 13): Result.004 file - promoters50/1020046
tttcaaattcgag

SEQ ID NO: 157774 - DNA, 13 bp, Unknown
  misc_feature (1)..( 13): Result.004 file - promoters50/1020046
tttgaaaactgga

SEQ ID NO: 157775 - DNA, 13 bp, Unknown
  misc_feature (1)..( 13): Result.004 file - promoters50/1020046
attcaaattcctt

SEQ ID NO: 157776 - DNA, 13 bp, Unknown
  misc_feature (1)..( 13): Result.004 file - promoters50/1020046
tgagaaaaataaa

SEQ ID NO: 157777 - DNA, 14 bp, Unknown
  misc_feature (1)..( 14): Result.004 file - promoters50/1020046
cccaaaaaatatat

SEQ ID NO: 157778 - DNA, 14 bp, Unknown
  misc_feature (1)..( 14): Result.004 file - promoters50/1020046
aagtaaacatattc

SEQ ID NO: 157779 - DNA, 14 bp, Unknown
  misc_feature (1)..( 14): Result.004 file - promoters50/1020046
cattcaaaatttat

SEQ ID NO: 157780 - DNA, 14 bp, Unknown
  misc_feature (1)..( 14): Result.004 file - promoters50/1020046
aaaagaaattataa

SEQ ID NO: 157781 - DNA, 14 bp, Unknown
  misc_feature (1)..( 14): Result.004 file - promoters50/1020046
ttctaaatacttat

SEQ ID NO: 157782 - DNA, 14 bp, Unknown
  misc_feature (1)..( 14): Result.004 file - promoters50/1020046
gccaaaactttgtc

SEQ ID NO: 157783 - DNA, 13 bp, Unknown
  misc_feature (1)..( 13): Result.004 file - promoters50/1020046
cataaaatatgta

SEQ ID NO: 157784 - DNA, 13 bp, Unknown
  misc_feature (1)..( 13): Result.004 file - promoters50/1020046
aataaaaaataaa

SEQ ID NO: 157785 - DNA, 13 bp, Unknown
  misc_feature (1)..( 13): Result.004 file - promoters50/1020046
aataaaaaataaa

SEQ ID NO: 157786 - DNA, 13 bp, Unknown
  misc_feature (1)..( 13): Result.004 file - promoters50/1020046
cctaaaaagtggg

SEQ ID NO: 157787 - DNA, 13 bp, Unknown
  misc_feature (1)..( 13): Result.004 file - promoters50/1020046
aatcaaattatag

SEQ ID NO: 157788 - DNA, 13 bp, Unknown
  misc_feature (1)..( 13): Result.004 file - promoters50/1020145
aattaaaacaaaa

SEQ ID NO: 157789 - DNA, 8 bp, Unknown
  misc_feature (1)..( 8): Result.004 file - promoters50/1020145
atttgaaa

SEQ ID NO: 157790 - DNA, 8 bp, Unknown
  misc_feature (1)..( 8): Result.004 file - promoters50/1020145
atttgaat

SEQ ID NO: 157791 - DNA, 8 bp, Unknown
  misc_feature (1)..( 8): Result.004 file - promoters50/1020208
atttaaat

SEQ ID NO: 157792 - DNA, 12 bp, Unknown
  misc_feature (1)..( 12): Result.004 file - promoters50/1020208
aataaatttatt

SEQ ID NO: 157793 - DNA, 12 bp, Unknown
  misc_feature (1)..( 12): Result.004 file - promoters50/1020208
tataaatcacta

SEQ ID NO: 157794 - DNA, 12 bp, Unknown
  misc_feature (1)..( 12): Result.004 file - promoters50/1020208
actaaaattaga

SEQ ID NO: 157795 - DNA, 12 bp, Unknown
  misc_feature (1)..( 12): Result.004 file - promoters50/1020208
caaaaaaagaaa

SEQ ID NO: 157796 - DNA, 12 bp, Unknown
  misc_feature (1)..( 12): Result.004 file - promoters50/1020208
ttccaattaggg

SEQ ID NO: 157797 - DNA, 12 bp, Unknown
  misc_feature (1)..( 12): Result.004 file - promoters50/1020208
caaaaactgtta

SEQ ID NO: 157798 - DNA, 12 bp, Unknown
  misc_feature (1)..( 12): Result.004 file - promoters50/1020208
acatatgattgt

SEQ ID NO: 157799 - DNA, 12 bp, Unknown
  misc_feature (1)..( 12): Result.004 file - promoters50/1020208
tttgatgaatgt

SEQ ID NO: 157800 - DNA, 12 bp, Unknown
  misc_feature (1)..( 12): Result.004 file - promoters50/1020208
ccttgtgaatgt

SEQ ID NO: 157801 - DNA, 12 bp, Unknown
  misc_feature (1)..( 12): Result.004 file - promoters50/1020208
cgtgatgaagaa

SEQ ID NO: 157802 - DNA, 12 bp, Unknown
  misc_feature (1)..( 12): Result.004 file - promoters50/1020208
aaagatgaagtc

SEQ ID NO: 157803 - DNA, 12 bp, Unknown
  misc_feature (1)..( 12): Result.004 file - promoters50/1020223
tttgctgaataa

SEQ ID NO: 157804 - DNA, 9 bp, Unknown
  misc_feature (1)..( 9): Result.004 file - promoters50/1020223
tttgtagtg

SEQ ID NO: 157805 - DNA, 9 bp, Unknown
  misc_feature (1)..( 9): Result.004 file - promoters50/1020223
tttgttgtg

SEQ ID NO: 157806 - DNA, 9 bp, Unknown
  misc_feature (1)..( 9): Result.004 file - promoters50/1020223
attgtagct

SEQ ID NO: 157807 - DNA, 8 bp, Unknown
  misc_feature (1)..( 8): Result.004 file - promoters50/1020223
tgtttgtt

SEQ ID NO: 157808 - DNA, 8 bp, Unknown
  misc_feature (1)..( 8): Result.004 file - promoters50/1020223
gatttgtt

SEQ ID NO: 157809 - DNA, 8 bp, Unknown
  misc_feature (1)..( 8): Result.004 file - promoters50/1020223
gatatgta

SEQ ID NO: 157810 - DNA, 8 bp, Unknown
  misc_feature (1)..( 8): Result.004 file - promoters50/1020223
tgatttgt

SEQ ID NO: 157811 - DNA, 8 bp, Unknown
  misc_feature (1)..( 8): Result.004 file - promoters50/1020223
tgatttgg

SEQ ID NO: 157812 - DNA, 8 bp, Unknown
  misc_feature (1)..( 8): Result.004 file - promoters50/1020223
agatatgt

SEQ ID NO: 157813 - DNA, 12 bp, Unknown
  misc_feature (1)..( 12): Result.004 file - promoters50/1020223
gatttgttcaat

SEQ ID NO: 157814 - DNA, 12 bp, Unknown
  misc_feature (1)..( 12): Result.004 file - promoters50/1020223
agtttgttcaat

SEQ ID NO: 157815 - DNA, 12 bp, Unknown
  misc_feature (1)..( 12): Result.004 file - promoters50/1020223
gatatgtatgtt

SEQ ID NO: 157816 - DNA, 7 bp, Unknown
  misc_feature (1)..( 7): Result.004 file - promoters50/1020223
gtttgtt

SEQ ID NO: 157817 - DNA, 7 bp, Unknown
  misc_feature (1)..( 7): Result.004 file - promoters50/1020223
ttttgtt

SEQ ID NO: 157818 - DNA, 7 bp, Unknown
  misc_feature (1)..( 7): Result.004 file - promoters50/1020223
gtttgtg

SEQ ID NO: 157819 - DNA, 8 bp, Unknown
  misc_feature (1)..( 8): Result.004 file - promoters50/1020223
atcatatt

SEQ ID NO: 157820 - DNA, 8 bp, Unknown
  misc_feature (1)..( 8): Result.004 file - promoters50/1020223
atcatatt

SEQ ID NO: 157821 - DNA, 8 bp, Unknown
  misc_feature (1)..( 8): Result.004 file - promoters50/1020265
atcatatt

SEQ ID NO: 157822 - DNA, 8 bp, Unknown
  misc_feature (1)..( 8): Result.004 file - promoters50/1020265
atgactac

SEQ ID NO: 157823 - DNA, 8 bp, Unknown
  misc_feature (1)..( 8): Result.004 file - promoters50/1020265
atgactta

SEQ ID NO: 157824 - DNA, 8 bp, Unknown
  misc_feature (1)..( 8): Result.004 file - promoters50/1020265
ttgattta

SEQ ID NO: 157825 - DNA, 7 bp, Unknown
  misc_feature (1)..( 7): Result.004 file - promoters50/1020265
attgtgt

SEQ ID NO: 157826 - DNA, 7 bp, Unknown
  misc_feature (1)..( 7): Result.004 file - promoters50/1020265
attctgt

SEQ ID NO: 157827 - DNA, 7 bp, Unknown
  misc_feature (1)..( 7): Result.004 file - promoters50/1020265
tttgtgt

SEQ ID NO: 157828 - DNA, 8 bp, Unknown
  misc_feature (1)..( 8): Result.004 file - promoters50/1020265
atttttca

SEQ ID NO: 157829 - DNA, 8 bp, Unknown
  misc_feature (1)..( 8): Result.004 file - promoters50/1020265
attattct

SEQ ID NO: 157830 - DNA, 8 bp, Unknown
  misc_feature (1)..( 8): Result.004 file - promoters50/1020265
cttattct

SEQ ID NO: 157831 - DNA, 8 bp, Unknown
  misc_feature (1)..( 8): Result.004 file - promoters50/1020265
ggaataaa

SEQ ID NO: 157832 - DNA, 8 bp, Unknown
  misc_feature (1)..( 8): Result.004 file - promoters50/1020265
tgaagaaa

SEQ ID NO: 157833 - DNA, 8 bp, Unknown
  misc_feature (1)..( 8): Result.004 file - promoters50/1020272
tgaagaat

SEQ ID NO: 157834 - DNA, 8 bp, Unknown
  misc_feature (1)..( 8): Result.004 file - promoters50/1020272
gcgacaaa

SEQ ID NO: 157835 - DNA, 8 bp, Unknown
  misc_feature (1)..( 8): Result.004 file - promoters50/1020272
gcggcaac

SEQ ID NO: 157836 - DNA, 8 bp, Unknown
  misc_feature (1)..( 8): Result.004 file - promoters50/1020272
gcggtaac

SEQ ID NO: 157837 - DNA, 8 bp, Unknown
  misc_feature (1)..( 8): Result.004 file - promoters50/1020272
aaacattt

SEQ ID NO: 157838 - DNA, 8 bp, Unknown
  misc_feature (1)..( 8): Result.004 file - promoters50/1020272
aaacgttt

SEQ ID NO: 157839 - DNA, 8 bp, Unknown
  misc_feature (1)..( 8): Result.004 file - promoters50/1020272
aaaagtta

SEQ ID NO: 157840 - DNA, 6 bp, Unknown
  misc_feature (1)..( 6): Result.004 file - promoters50/1020272
tttatt

SEQ ID NO: 157841 - DNA, 6 bp, Unknown
  misc_feature (1)..( 6): Result.004 file - promoters50/1020272
tttatt

SEQ ID NO: 157842 - DNA, 7 bp, Unknown
  misc_feature (1)..( 7): Result.004 file - promoters50/1020272
tttaatt

SEQ ID NO: 157843 - DNA, 11 bp, Unknown
  misc_feature (1)..( 11): Result.004 file - promoters50/1020272
caagtacctac

SEQ ID NO: 157844 - DNA, 11 bp, Unknown
  misc_feature (1)..( 11): Result.004 file - promoters50/1020272
gcggtaactaa

SEQ ID NO: 157845 - DNA, 11 bp, Unknown
  misc_feature (1)..( 11): Result.004 file - promoters50/1020272
gcggcaaccgc

SEQ ID NO: 157846 - DNA, 11 bp, Unknown
  misc_feature (1)..( 11): Result.004 file - promoters50/1020272
tcgtaaactaa

SEQ ID NO: 157847 - DNA, 9 bp, Unknown
  misc_feature (1)..( 9): Result.004 file - promoters50/1020272
ttgaaatta

SEQ ID NO: 157848 - DNA, 9 bp, Unknown
  misc_feature (1)..( 9): Result.004 file - promoters50/1020272
ttgagattg

SEQ ID NO: 157849 - DNA, 9 bp, Unknown
  misc_feature (1)..( 9): Result.004 file - promoters50/1020274
cgaagattg

SEQ ID NO: 157850 - DNA, 11 bp, Unknown
  misc_feature (1)..( 11): Result.004 file - promoters50/1020274
aaatttaaaaa

SEQ ID NO: 157851 - DNA, 11 bp, Unknown
  misc_feature (1)..( 11): Result.004 file - promoters50/1020274
atatttaaaat

SEQ ID NO: 157852 - DNA, 11 bp, Unknown
  misc_feature (1)..( 11): Result.004 file - promoters50/1020274
aaacttaaatg

SEQ ID NO: 157853 - DNA, 11 bp, Unknown
  misc_feature (1)..( 11): Result.004 file - promoters50/1020274
gcattaaaaaa

SEQ ID NO: 157854 - DNA, 11 bp, Unknown
  misc_feature (1)..( 11): Result.004 file - promoters50/1020274
taagagtaaaa

SEQ ID NO: 157855 - DNA, 11 bp, Unknown
  misc_feature (1)..( 11): Result.004 file - promoters50/1020274
ttagaataatt

SEQ ID NO: 157856 - DNA, 11 bp, Unknown
  misc_feature (1)..( 11): Result.004 file - promoters50/1020274
aaagaatataa

SEQ ID NO: 157857 - DNA, 11 bp, Unknown
  misc_feature (1)..( 11): Result.004 file - promoters50/1020274
aaagaagataa

SEQ ID NO: 157858 - DNA, 16 bp, Unknown
  misc_feature (1)..( 16): Result.004 file - promoters50/1020274
tgaaaataacatcaat

SEQ ID NO: 157859 - DNA, 16 bp, Unknown
  misc_feature (1)..( 16): Result.004 file - promoters50/1020274
tgataattcgaagacg

SEQ ID NO: 157860 - DNA, 16 bp, Unknown
  misc_feature (1)..( 16): Result.004 file - promoters50/1020274
tcaaaattaacaacaa

SEQ ID NO: 157861 - DNA, 16 bp, Unknown
  misc_feature (1)..( 16): Result.004 file - promoters50/1020274
ttccaacagcaagtag

SEQ ID NO: 157862 - DNA, 9 bp, Unknown
  misc_feature (1)..( 9): Result.004 file - promoters50/1020274
tattaatat

SEQ ID NO: 157863 - DNA, 9 bp, Unknown
  misc_feature (1)..( 9): Result.004 file - promoters50/1020274
tataaatca

SEQ ID NO: 157864 - DNA, 9 bp, Unknown
  misc_feature (1)..( 9): Result.004 file - promoters50/1020274
tatttatat

SEQ ID NO: 157865 - DNA, 9 bp, Unknown
  misc_feature (1)..( 9): Result.004 file - promoters50/1020274
cattagtat

SEQ ID NO: 157866 - DNA, 17 bp, Unknown
  misc_feature (1)..( 17): Result.004 file - promoters50/1020274
aaaataacatcaattag

SEQ ID NO: 157867 - DNA, 17 bp, Unknown
  misc_feature (1)..( 17): Result.004 file - promoters50/1020274
tttccaacagcaagtag

SEQ ID NO: 157868 - DNA, 17 bp, Unknown
  misc_feature (1)..( 17): Result.004 file - promoters50/1020274
aaattaacaacaaatcc

SEQ ID NO: 157869 - DNA, 17 bp, Unknown
  misc_feature (1)..( 17): Result.004 file - promoters50/1020274
tatgtaacaaacaaaaa

SEQ ID NO: 157870 - DNA, 17 bp, Unknown
  misc_feature (1)..( 17): Result.004 file - promoters50/1020274
gaagtaaaaaatggtat

SEQ ID NO: 157871 - DNA, 9 bp, Unknown
  misc_feature (1)..( 9): Result.004 file - promoters50/1020274
aatttttat

SEQ ID NO: 157872 - DNA, 9 bp, Unknown
  misc_feature (1)..( 9): Result.004 file - promoters50/1020274
gatttttga

SEQ ID NO: 157873 - DNA, 9 bp, Unknown
  misc_feature (1)..( 9): Result.004 file - promoters50/1020274
aatatttat

SEQ ID NO: 157874 - DNA, 9 bp, Unknown
  misc_feature (1)..( 9): Result.004 file - promoters50/1020274
aatattaca

SEQ ID NO: 157875 - DNA, 9 bp, Unknown
  misc_feature (1)..( 9): Result.004 file - promoters50/1020274
agtatttaa

SEQ ID NO: 157876 - DNA, 9 bp, Unknown
  misc_feature (1)..( 9): Result.004 file - promoters50/1020274
atttttatt

SEQ ID NO: 157877 - DNA, 9 bp, Unknown
  misc_feature (1)..( 9): Result.004 file - promoters50/1020274
tatttaatt

SEQ ID NO: 157878 - DNA, 9 bp, Unknown
  misc_feature (1)..( 9): Result.004 file - promoters50/1020274
catttaaaa

SEQ ID NO: 157879 - DNA, 9 bp, Unknown
  misc_feature (1)..( 9): Result.004 file - promoters50/1020313
tatataact

SEQ ID NO: 157880 - DNA, 13 bp, Unknown
  misc_feature (1)..( 13): Result.004 file - promoters50/1020313
tgtttattttact

SEQ ID NO: 157881 - DNA, 13 bp, Unknown
  misc_feature (1)..( 13): Result.004 file - promoters50/1020313
attttttttttag

SEQ ID NO: 157882 - DNA, 13 bp, Unknown
  misc_feature (1)..( 13): Result.004 file - promoters50/1020313
tgttaattgtctc

SEQ ID NO: 157883 - DNA, 13 bp, Unknown
  misc_feature (1)..( 13): Result.004 file - promoters50/1020313
aaccaattttact

SEQ ID NO: 157884 - DNA, 13 bp, Unknown
  misc_feature (1)..( 13): Result.004 file - promoters50/1020313
tatttatttattt

SEQ ID NO: 157885 - DNA, 13 bp, Unknown
  misc_feature (1)..( 13): Result.004 file - promoters50/1020313
tgtttattggcgt

SEQ ID NO: 157886 - DNA, 14 bp, Unknown
  misc_feature (1)..( 14): Result.004 file - promoters50/1020313
tcagagtcgtcaag

SEQ ID NO: 157887 - DNA, 14 bp, Unknown
  misc_feature (1)..( 14): Result.004 file - promoters50/1020313
aggaagtcatcatt

SEQ ID NO: 157888 - DNA, 14 bp, Unknown
  misc_feature (1)..( 14): Result.004 file - promoters50/1020313
ttaacttcatcaaa

SEQ ID NO: 157889 - DNA, 14 bp, Unknown
  misc_feature (1)..( 14): Result.004 file - promoters50/1020313
atgacgtcataatt

SEQ ID NO: 157890 - DNA, 14 bp, Unknown
  misc_feature (1)..( 14): Result.004 file - promoters50/1020313
ttaactttatcata

SEQ ID NO: 157891 - DNA, 14 bp, Unknown
  misc_feature (1)..( 14): Result.004 file - promoters50/1020362
gaaacgacgccatt

SEQ ID NO: 157892 - DNA, 11 bp, Unknown
  misc_feature (1)..( 11): Result.004 file - promoters50/1020362
ccccaaacaaa

SEQ ID NO: 157893 - DNA, 11 bp, Unknown
  misc_feature (1)..( 11): Result.004 file - promoters50/1020362
ccccaaccaat

SEQ ID NO: 157894 - DNA, 11 bp, Unknown
  misc_feature (1)..( 11): Result.004 file - promoters50/1020362
tgtcaaaaaaa

SEQ ID NO: 157895 - DNA, 7 bp, Unknown
  misc_feature (1)..( 7): Result.004 file - promoters50/1020362
attttgg

SEQ ID NO: 157896 - DNA, 7 bp, Unknown
  misc_feature (1)..( 7): Result.004 file - promoters50/1020362
attgtgg

SEQ ID NO: 157897 - DNA, 7 bp, Unknown
  misc_feature (1)..( 7): Result.004 file - promoters50/1020362
atagttt

SEQ ID NO: 157898 - DNA, 7 bp, Unknown
  misc_feature (1)..( 7): Result.004 file - promoters50/1020362
atgtaag

SEQ ID NO: 157899 - DNA, 7 bp, Unknown
  misc_feature (1)..( 7): Result.004 file - promoters50/1020362
atgtaac

SEQ ID NO: 157900 - DNA, 7 bp, Unknown
  misc_feature (1)..( 7): Result.004 file - promoters50/1020362
atgaaag

SEQ ID NO: 157901 - DNA, 8 bp, Unknown
  misc_feature (1)..( 8): Result.004 file - promoters50/1020362
caaatctc

SEQ ID NO: 157902 - DNA, 8 bp, Unknown
  misc_feature (1)..( 8): Result.004 file - promoters50/1020362
aaaatctc

SEQ ID NO: 157903 - DNA, 8 bp, Unknown
  misc_feature (1)..( 8): Result.004 file - promoters50/1020364
caactctc

SEQ ID NO: 157904 - DNA, 13 bp, Unknown
  misc_feature (1)..( 13): Result.004 file - promoters50/1020364
ctgataaatatat

SEQ ID NO: 157905 - DNA, 13 bp, Unknown
  misc_feature (1)..( 13): Result.004 file - promoters50/1020364
ttgttaactatat

SEQ ID NO: 157906 - DNA, 13 bp, Unknown
  misc_feature (1)..( 13): Result.004 file - promoters50/1020364
tgattaattaatc

SEQ ID NO: 157907 - DNA, 13 bp, Unknown
  misc_feature (1)..( 13): Result.004 file - promoters50/1020364
aaacaaaacatat

SEQ ID NO: 157908 - DNA, 13 bp, Unknown
  misc_feature (1)..( 13): Result.004 file - promoters50/1020364
accctaattatct

SEQ ID NO: 157909 - DNA, 13 bp, Unknown
  misc_feature (1)..( 13): Result.004 file - promoters50/1020364
tgataaattattc

SEQ ID NO: 157910 - DNA, 13 bp, Unknown
  misc_feature (1)..( 13): Result.004 file - promoters50/1020364
aaattaaaatggt

SEQ ID NO: 157911 - DNA, 13 bp, Unknown
  misc_feature (1)..( 13): Result.004 file - promoters50/1020364
taattaatttctt

SEQ ID NO: 157912 - DNA, 13 bp, Unknown
  misc_feature (1)..( 13): Result.004 file - promoters50/1020364
aaactaaaaaggt

SEQ ID NO: 157913 - DNA, 13 bp, Unknown
  misc_feature (1)..( 13): Result.004 file - promoters50/1020364
aaatcaaatcgaa

SEQ ID NO: 157914 - DNA, 13 bp, Unknown
  misc_feature (1)..( 13): Result.004 file - promoters50/1020364
aaagactttgggt

SEQ ID NO: 157915 - DNA, 14 bp, Unknown
  misc_feature (1)..( 14): Result.004 file - promoters50/1020430
aaatctaaccacaa

SEQ ID NO: 157916 - DNA, 12 bp, Unknown
  misc_feature (1)..( 12): Result.004 file - promoters50/1020430
tatataactctg

SEQ ID NO: 157917 - DNA, 12 bp, Unknown
  misc_feature (1)..( 12): Result.004 file - promoters50/1020430
catataaatttg

SEQ ID NO: 157918 - DNA, 12 bp, Unknown
  misc_feature (1)..( 12): Result.004 file - promoters50/1020430
tatatatactct

SEQ ID NO: 157919 - DNA, 12 bp, Unknown
  misc_feature (1)..( 12): Result.004 file - promoters50/1020430
tctataaataca

SEQ ID NO: 157920 - DNA, 12 bp, Unknown
  misc_feature (1)..( 12): Result.004 file - promoters50/1020430
tatatatagaaa

SEQ ID NO: 157921 - DNA, 12 bp, Unknown
  misc_feature (1)..( 12): Result.004 file - promoters50/1020430
tatatataaaac

SEQ ID NO: 157922 - DNA, 12 bp, Unknown
  misc_feature (1)..( 12): Result.004 file - promoters50/1020430
gatataatacag

SEQ ID NO: 157923 - DNA, 11 bp, Unknown
  misc_feature (1)..( 11): Result.004 file - promoters50/1020430
taaagaaatgc

SEQ ID NO: 157924 - DNA, 11 bp, Unknown
  misc_feature (1)..( 11): Result.004 file - promoters50/1020430
taaacaaaatt

SEQ ID NO: 157925 - DNA, 11 bp, Unknown
  misc_feature (1)..( 11): Result.004 file - promoters50/1020430
aaaacaaaggt

SEQ ID NO: 157926 - DNA, 11 bp, Unknown
  misc_feature (1)..( 11): Result.004 file - promoters50/1020430
taaacaaatga

SEQ ID NO: 157927 - DNA, 11 bp, Unknown
  misc_feature (1)..( 11): Result.004 file - promoters50/1020430
gtcccaaatgg

SEQ ID NO: 157928 - DNA, 11 bp, Unknown
  misc_feature (1)..( 11): Result.004 file - promoters50/1020430
aatacaagtgg

SEQ ID NO: 157929 - DNA, 9 bp, Unknown
  misc_feature (1)..( 9): Result.004 file - promoters50/1020430
ggaacaaaa

SEQ ID NO: 157930 - DNA, 9 bp, Unknown
  misc_feature (1)..( 9): Result.004 file - promoters50/1020430
aaaacaaac

SEQ ID NO: 157931 - DNA, 9 bp, Unknown
  misc_feature (1)..( 9): Result.004 file - promoters50/1020430
agaagaaaa

SEQ ID NO: 157932 - DNA, 9 bp, Unknown
  misc_feature (1)..( 9): Result.004 file - promoters50/1020430
cgaataaaa

SEQ ID NO: 157933 - DNA, 9 bp, Unknown
  misc_feature (1)..( 9): Result.004 file - promoters50/1020430
caaacaaat

SEQ ID NO: 157934 - DNA, 9 bp, Unknown
  misc_feature (1)..( 9): Result.004 file - promoters50/1020430
aaaacaatt

SEQ ID NO: 157935 - DNA, 9 bp, Unknown
  misc_feature (1)..( 9): Result.004 file - promoters50/1020430
acaccaatg

SEQ ID NO: 157936 - DNA, 9 bp, Unknown
  misc_feature (1)..( 9): Result.004 file - promoters50/1020430
tcacaaatt

SEQ ID NO: 157937 - DNA, 9 bp, Unknown
  misc_feature (1)..( 9): Result.004 file - promoters50/1020430
caaccaatg

SEQ ID NO: 157938 - DNA, 9 bp, Unknown
  misc_feature (1)..( 9): Result.004 file - promoters50/1020430
caaccaact

SEQ ID NO: 157939 - DNA, 9 bp, Unknown
  misc_feature (1)..( 9): Result.004 file - promoters50/1020430
tcagaaact

SEQ ID NO: 157940 - DNA, 9 bp, Unknown
  misc_feature (1)..( 9): Result.004 file - promoters50/1020508
tcagaacaa

SEQ ID NO: 157941 - DNA, 10 bp, Unknown
  misc_feature (1)..( 10): Result.004 file - promoters50/1020508
acaaaattgt

SEQ ID NO: 157942 - DNA, 10 bp, Unknown
  misc_feature (1)..( 10): Result.004 file - promoters50/1020508
acaacattag

SEQ ID NO: 157943 - DNA, 10 bp, Unknown
  misc_feature (1)..( 10): Result.004 file - promoters50/1020508
gatacattaa

SEQ ID NO: 157944 - DNA, 10 bp, Unknown
  misc_feature (1)..( 10): Result.004 file - promoters50/1020508
tcgacattac

SEQ ID NO: 157945 - DNA, 10 bp, Unknown
  misc_feature (1)..( 10): Result.004 file - promoters50/1020512
cttacattaa

SEQ ID NO: 157946 - DNA, 10 bp, Unknown
  misc_feature (1)..( 10): Result.004 file - promoters50/1020512
aacaaatata

SEQ ID NO: 157947 - DNA, 10 bp, Unknown
  misc_feature (1)..( 10): Result.004 file - promoters50/1020512
aactaatata

SEQ ID NO: 157948 - DNA, 10 bp, Unknown
  misc_feature (1)..( 10): Result.004 file - promoters50/1020512
tgaaaatatt

SEQ ID NO: 157949 - DNA, 10 bp, Unknown
  misc_feature (1)..( 10): Result.004 file - promoters50/1020512
tgcaaagaaa

SEQ ID NO: 157950 - DNA, 10 bp, Unknown
  misc_feature (1)..( 10): Result.004 file - promoters50/1020512
ctctaatatg

SEQ ID NO: 157951 - DNA, 10 bp, Unknown
  misc_feature (1)..( 10): Result.004 file - promoters50/1020512
ttctaatttt

SEQ ID NO: 157952 - DNA, 10 bp, Unknown
  misc_feature (1)..( 10): Result.004 file - promoters50/1020512
atctaataaa

SEQ ID NO: 157953 - DNA, 12 bp, Unknown
  misc_feature (1)..( 12): Result.004 file - promoters50/1020512
aaactgaaccaa

SEQ ID NO: 157954 - DNA, 12 bp, Unknown
  misc_feature (1)..( 12): Result.004 file - promoters50/1020512
aaaatgaaaaac

SEQ ID NO: 157955 - DNA, 12 bp, Unknown
  misc_feature (1)..( 12): Result.004 file - promoters50/1020512
cgaataaaaaaa

SEQ ID NO: 157956 - DNA, 12 bp, Unknown
  misc_feature (1)..( 12): Result.004 file - promoters50/1020512
attttaaaaaaa

SEQ ID NO: 157957 - DNA, 12 bp, Unknown
  misc_feature (1)..( 12): Result.004 file - promoters50/1020512
cgattaacaaac

SEQ ID NO: 157958 - DNA, 12 bp, Unknown
  misc_feature (1)..( 12): Result.004 file - promoters50/1020512
aaaaagacaaac

SEQ ID NO: 157959 - DNA, 12 bp, Unknown
  misc_feature (1)..( 12): Result.004 file - promoters50/1020512
catttaacactt

SEQ ID NO: 157960 - DNA, 11 bp, Unknown
  misc_feature (1)..( 11): Result.004 file - promoters50/1020512
ataaaaaaaaa

SEQ ID NO: 157961 - DNA, 11 bp, Unknown
  misc_feature (1)..( 11): Result.004 file - promoters50/1020512
ggaaaaaaaag

SEQ ID NO: 157962 - DNA, 12 bp, Unknown
  misc_feature (1)..( 12): Result.004 file - promoters50/1020512
aaaatgaaaaac

SEQ ID NO: 157963 - DNA, 12 bp, Unknown
  misc_feature (1)..( 12): Result.004 file - promoters50/1020512
attttaaaaaaa

SEQ ID NO: 157964 - DNA, 12 bp, Unknown
  misc_feature (1)..( 12): Result.004 file - promoters50/1020512
cgattaacaaac

SEQ ID NO: 157965 - DNA, 12 bp, Unknown
  misc_feature (1)..( 12): Result.004 file - promoters50/1020535
catttaacactt

SEQ ID NO: 157966 - DNA, 6 bp, Unknown
  misc_feature (1)..( 6): Result.004 file - promoters50/1020535
gaaaat

SEQ ID NO: 157967 - DNA, 6 bp, Unknown
  misc_feature (1)..( 6): Result.004 file - promoters50/1020535
gaaaat

SEQ ID NO: 157968 - DNA, 6 bp, Unknown
  misc_feature (1)..( 6): Result.004 file - promoters50/1020535
gaaaat

SEQ ID NO: 157969 - DNA, 10 bp, Unknown
  misc_feature (1)..( 10): Result.004 file - promoters50/1020535
cctgaaaatt

SEQ ID NO: 157970 - DNA, 10 bp, Unknown
  misc_feature (1)..( 10): Result.004 file - promoters50/1020535
tgagaaaatt

SEQ ID NO: 157971 - DNA, 10 bp, Unknown
  misc_feature (1)..( 10): Result.004 file - promoters50/1020543
tgagaaaaat

SEQ ID NO: 157972 - DNA, 13 bp, Unknown
  misc_feature (1)..( 13): Result.004 file - promoters50/1020543
caaaaaaaaaaaa

SEQ ID NO: 157973 - DNA, 13 bp, Unknown
  misc_feature (1)..( 13): Result.004 file - promoters50/1020543
caaaaatgttaat

SEQ ID NO: 157974 - DNA, 13 bp, Unknown
  misc_feature (1)..( 13): Result.004 file - promoters50/1020543
gaaagatgtcaat

SEQ ID NO: 157975 - DNA, 10 bp, Unknown
  misc_feature (1)..( 10): Result.004 file - promoters50/1020543
tttgaaaaga

SEQ ID NO: 157976 - DNA, 10 bp, Unknown
  misc_feature (1)..( 10): Result.004 file - promoters50/1020543
aaaaaaaaga

SEQ ID NO: 157977 - DNA, 11 bp, Unknown
  misc_feature (1)..( 11): Result.004 file - promoters50/1020543
gaagaaacaga

SEQ ID NO: 157978 - DNA, 8 bp, Unknown
  misc_feature (1)..( 8): Result.004 file - promoters50/1020543
ttttatga

SEQ ID NO: 157979 - DNA, 8 bp, Unknown
  misc_feature (1)..( 8): Result.004 file - promoters50/1020543
tttcatgt

SEQ ID NO: 157980 - DNA, 8 bp, Unknown
  misc_feature (1)..( 8): Result.004 file - promoters50/1020543
tttcgtgt

SEQ ID NO: 157981 - DNA, 12 bp, Unknown
  misc_feature (1)..( 12): Result.004 file - promoters50/1020543
tgaaaagatgaa

SEQ ID NO: 157982 - DNA, 12 bp, Unknown
  misc_feature (1)..( 12): Result.004 file - promoters50/1020543
acacaagaagaa

SEQ ID NO: 157983 - DNA, 12 bp, Unknown
  misc_feature (1)..( 12): Result.004 file - promoters50/1020557
gaaaaaaaagaa

SEQ ID NO: 157984 - DNA, 17 bp, Unknown
  misc_feature (1)..( 17): Result.004 file - promoters50/1020557
tctctactatataaaca

SEQ ID NO: 157985 - DNA, 17 bp, Unknown
  misc_feature (1)..( 17): Result.004 file - promoters50/1020557
tctctactatataaaca

SEQ ID NO: 157986 - DNA, 17 bp, Unknown
  misc_feature (1)..( 17): Result.004 file - promoters50/1020557
tttctaatataaaacaa

SEQ ID NO: 157987 - DNA, 17 bp, Unknown
  misc_feature (1)..( 17): Result.004 file - promoters50/1020557
ataggcctatatatact

SEQ ID NO: 157988 - DNA, 17 bp, Unknown
  misc_feature (1)..( 17): Result.004 file - promoters50/1020557
ttgctcctctataaaac

SEQ ID NO: 157989 - DNA, 17 bp, Unknown
  misc_feature (1)..( 17): Result.004 file - promoters50/1020557
acacaactatatataca

SEQ ID NO: 157990 - DNA, 17 bp, Unknown
  misc_feature (1)..( 17): Result.004 file - promoters50/1020596
atgtgtttatacaaata

SEQ ID NO: 157991 - DNA, 12 bp, Unknown
  misc_feature (1)..( 12): Result.004 file - promoters50/1020596
tatggaaagagg

SEQ ID NO: 157992 - DNA, 12 bp, Unknown
  misc_feature (1)..( 12): Result.004 file - promoters50/1020596
tattgaaagtag

SEQ ID NO: 157993 - DNA, 12 bp, Unknown
  misc_feature (1)..( 12): Result.004 file - promoters50/1020596
aatggaagtaag

SEQ ID NO: 157994 - DNA, 12 bp, Unknown
  misc_feature (1)..( 12): Result.004 file - promoters50/1020596
ctctgaaagttt

SEQ ID NO: 157995 - DNA, 12 bp, Unknown
  misc_feature (1)..( 12): Result.004 file - promoters50/1020596
gtgataaaattt

SEQ ID NO: 157996 - DNA, 8 bp, Unknown
  misc_feature (1)..( 8): Result.004 file - promoters50/1020596
cattaata

SEQ ID NO: 157997 - DNA, 8 bp, Unknown
  misc_feature (1)..( 8): Result.004 file - promoters50/1020596
cataaatt

SEQ ID NO: 157998 - DNA, 8 bp, Unknown
  misc_feature (1)..( 8): Result.004 file - promoters50/1020596
gataaatc

SEQ ID NO: 157999 - DNA, 8 bp, Unknown
  misc_feature (1)..( 8): Result.004 file - promoters50/1020596
tttaaatt

SEQ ID NO: 158000 - DNA, 8 bp, Unknown
  misc_feature (1)..( 8): Result.004 file - promoters50/1020619
attaaata

SEQ ID NO: 158001 - DNA, 12 bp, Unknown
  misc_feature (1)..( 12): Result.004 file - promoters50/1020619
tttaaattctat

SEQ ID NO: 158002 - DNA, 12 bp, Unknown
  misc_feature (1)..( 12): Result.004 file - promoters50/1020619
cttaaatacttt

SEQ ID NO: 158003 - DNA, 12 bp, Unknown
  misc_feature (1)..( 12): Result.004 file - promoters50/1020619
tttcaatttgga

SEQ ID NO: 158004 - DNA, 12 bp, Unknown
  misc_feature (1)..( 12): Result.004 file - promoters50/1020619
aataaatagatt

SEQ ID NO: 158005 - DNA, 12 bp, Unknown
  misc_feature (1)..( 12): Result.004 file - promoters50/1020619
tttatataacta

SEQ ID NO: 158006 - DNA, 12 bp, Unknown
  misc_feature (1)..( 12): Result.004 file - promoters50/1020619
tactaatagata

SEQ ID NO: 158007 - DNA, 10 bp, Unknown
  misc_feature (1)..( 10): Result.004 file - promoters50/1020619
ttctatttcc

SEQ ID NO: 158008 - DNA, 10 bp, Unknown
  misc_feature (1)..( 10): Result.004 file - promoters50/1020619
aactatttaa

SEQ ID NO: 158009 - DNA, 10 bp, Unknown
  misc_feature (1)..( 10): Result.004 file - promoters50/1020619
ttcaatttgg

SEQ ID NO: 158010 - DNA, 10 bp, Unknown
  misc_feature (1)..( 10): Result.004 file - promoters50/1020619
ttttatttac

SEQ ID NO: 158011 - DNA, 11 bp, Unknown
  misc_feature (1)..( 11): Result.004 file - promoters50/1020619
aaaaacttttt

SEQ ID NO: 158012 - DNA, 11 bp, Unknown
  misc_feature (1)..( 11): Result.004 file - promoters50/1020619
aataaacttaa

SEQ ID NO: 158013 - DNA, 11 bp, Unknown
  misc_feature (1)..( 11): Result.004 file - promoters50/1020634
ccctaattaag

SEQ ID NO: 158014 - DNA, 11 bp, Unknown
  misc_feature (1)..( 11): Result.004 file - promoters50/1020634
atttaaagact

SEQ ID NO: 158015 - DNA, 11 bp, Unknown
  misc_feature (1)..( 11): Result.004 file - promoters50/1020634
ccgaaaatact

SEQ ID NO: 158016 - DNA, 11 bp, Unknown
  misc_feature (1)..( 11): Result.004 file - promoters50/1020634
tccaaaataac

SEQ ID NO: 158017 - DNA, 11 bp, Unknown
  misc_feature (1)..( 11): Result.004 file - promoters50/1020634
taaaaaataga

SEQ ID NO: 158018 - DNA, 11 bp, Unknown
  misc_feature (1)..( 11): Result.004 file - promoters50/1020634
tccaaaatcat

SEQ ID NO: 158019 - DNA, 11 bp, Unknown
  misc_feature (1)..( 11): Result.004 file - promoters50/1020634
attataatcat

SEQ ID NO: 158020 - DNA, 11 bp, Unknown
  misc_feature (1)..( 11): Result.004 file - promoters50/1020634
tcactaatcaa

SEQ ID NO: 158021 - DNA, 14 bp, Unknown
  misc_feature (1)..( 14): Result.004 file - promoters50/1020634
gttttaaaatagta

SEQ ID NO: 158022 - DNA, 14 bp, Unknown
  misc_feature (1)..( 14): Result.004 file - promoters50/1020634
cttttcaaattgtg

SEQ ID NO: 158023 - DNA, 14 bp, Unknown
  misc_feature (1)..( 14): Result.004 file - promoters50/1020634
tgtttgaaactgat

SEQ ID NO: 158024 - DNA, 14 bp, Unknown
  misc_feature (1)..( 14): Result.004 file - promoters50/1020634
aagctcagattagt

SEQ ID NO: 158025 - DNA, 14 bp, Unknown
  misc_feature (1)..( 14): Result.004 file - promoters50/1020634
gatgtcatattcgt

SEQ ID NO: 158026 - DNA, 14 bp, Unknown
  misc_feature (1)..( 14): Result.004 file - promoters50/1020646
ggatagagataagt

SEQ ID NO: 158027 - DNA, 11 bp, Unknown
  misc_feature (1)..( 11): Result.004 file - promoters50/1020646
aataatttgta

SEQ ID NO: 158028 - DNA, 11 bp, Unknown
  misc_feature (1)..( 11): Result.004 file - promoters50/1020646
aattattggta

SEQ ID NO: 158029 - DNA, 11 bp, Unknown
  misc_feature (1)..( 11): Result.004 file - promoters50/1020646
aatattttagg

SEQ ID NO: 158030 - DNA, 11 bp, Unknown
  misc_feature (1)..( 11): Result.004 file - promoters50/1020666
actattttact

SEQ ID NO: 158031 - DNA, 13 bp, Unknown
  misc_feature (1)..( 13): Result.004 file - promoters50/1020666
aaagaaaccaatt

SEQ ID NO: 158032 - DNA, 13 bp, Unknown
  misc_feature (1)..( 13): Result.004 file - promoters50/1020666
aaataaatattgt

SEQ ID NO: 158033 - DNA, 13 bp, Unknown
  misc_feature (1)..( 13): Result.004 file - promoters50/1020666
aaaaaaaatcttc

SEQ ID NO: 158034 - DNA, 13 bp, Unknown
  misc_feature (1)..( 13): Result.004 file - promoters50/1020666
aaaaaaaacgaat

SEQ ID NO: 158035 - DNA, 13 bp, Unknown
  misc_feature (1)..( 13): Result.004 file - promoters50/1020666
atatataagatgt

SEQ ID NO: 158036 - DNA, 13 bp, Unknown
  misc_feature (1)..( 13): Result.004 file - promoters50/1020666
gtatatacggttt

SEQ ID NO: 158037 - DNA, 10 bp, Unknown
  misc_feature (1)..( 10): Result.004 file - promoters50/1020666
taacaaactg

SEQ ID NO: 158038 - DNA, 10 bp, Unknown
  misc_feature (1)..( 10): Result.004 file - promoters50/1020666
ccacaaacaa

SEQ ID NO: 158039 - DNA, 10 bp, Unknown
  misc_feature (1)..( 10): Result.004 file - promoters50/1020666
taagaaatat

SEQ ID NO: 158040 - DNA, 10 bp, Unknown
  misc_feature (1)..( 10): Result.004 file - promoters50/1020666
ccacaaacca

SEQ ID NO: 158041 - DNA, 10 bp, Unknown
  misc_feature (1)..( 10): Result.004 file - promoters50/1020666
ctccaaaaat

SEQ ID NO: 158042 - DNA, 10 bp, Unknown
  misc_feature (1)..( 10): Result.004 file - promoters50/1020666
ctagaaataa

SEQ ID NO: 158043 - DNA, 10 bp, Unknown
  misc_feature (1)..( 10): Result.004 file - promoters50/1020666
tggtaaataa

SEQ ID NO: 158044 - DNA, 14 bp, Unknown
  misc_feature (1)..( 14): Result.004 file - promoters50/1020666
aactaatacattga

SEQ ID NO: 158045 - DNA, 14 bp, Unknown
  misc_feature (1)..( 14): Result.004 file - promoters50/1020666
aacaaatctataaa

SEQ ID NO: 158046 - DNA, 14 bp, Unknown
  misc_feature (1)..( 14): Result.004 file - promoters50/1020666
cactcatactttga

SEQ ID NO: 158047 - DNA, 14 bp, Unknown
  misc_feature (1)..( 14): Result.004 file - promoters50/1020666
aacgaatggcaagt

SEQ ID NO: 158048 - DNA, 14 bp, Unknown
  misc_feature (1)..( 14): Result.004 file - promoters50/1020666
aagttataatttct

SEQ ID NO: 158049 - DNA, 8 bp, Unknown
  misc_feature (1)..( 8): Result.004 file - promoters50/1020666
tactttgt

SEQ ID NO: 158050 - DNA, 7 bp, Unknown
  misc_feature (1)..( 7): Result.004 file - promoters50/1020666
tatcaaa

SEQ ID NO: 158051 - DNA, 7 bp, Unknown
  misc_feature (1)..( 7): Result.004 file - promoters50/1020666
tattaaa

SEQ ID NO: 158052 - DNA, 7 bp, Unknown
  misc_feature (1)..( 7): Result.004 file - promoters50/1020666
tataaaa

SEQ ID NO: 158053 - DNA, 7 bp, Unknown
  misc_feature (1)..( 7): Result.004 file - promoters50/1020666
tattaat

SEQ ID NO: 158054 - DNA, 7 bp, Unknown
  misc_feature (1)..( 7): Result.004 file - promoters50/1020666
tataaat

SEQ ID NO: 158055 - DNA, 7 bp, Unknown
  misc_feature (1)..( 7): Result.004 file - promoters50/1020666
taataac

SEQ ID NO: 158056 - DNA, 11 bp, Unknown
  misc_feature (1)..( 11): Result.004 file - promoters50/1020666
aattacttttt

SEQ ID NO: 158057 - DNA, 11 bp, Unknown
  misc_feature (1)..( 11): Result.004 file - promoters50/1020666
gattagttttc

SEQ ID NO: 158058 - DNA, 11 bp, Unknown
  misc_feature (1)..( 11): Result.004 file - promoters50/1020666
ataaacttttt

SEQ ID NO: 158059 - DNA, 11 bp, Unknown
  misc_feature (1)..( 11): Result.004 file - promoters50/1020666
atttaattttg

SEQ ID NO: 158060 - DNA, 11 bp, Unknown
  misc_feature (1)..( 11): Result.004 file - promoters50/1020666
gaattgttttc

SEQ ID NO: 158061 - DNA, 11 bp, Unknown
  misc_feature (1)..( 11): Result.004 file - promoters50/1020680
gattaggtatc

SEQ ID NO: 158062 - DNA, 8 bp, Unknown
  misc_feature (1)..( 8): Result.004 file - promoters50/1020680
attgggtg

SEQ ID NO: 158063 - DNA, 8 bp, Unknown
  misc_feature (1)..( 8): Result.004 file - promoters50/1020680
tttgagtg

SEQ ID NO: 158064 - DNA, 8 bp, Unknown
  misc_feature (1)..( 8): Result.004 file - promoters50/1020680
tttgagaa

SEQ ID NO: 158065 - DNA, 8 bp, Unknown
  misc_feature (1)..( 8): Result.004 file - promoters50/1020680
gttgagtt

SEQ ID NO: 158066 - DNA, 11 bp, Unknown
  misc_feature (1)..( 11): Result.004 file - promoters50/1020680
ttaaaacaaaa

SEQ ID NO: 158067 - DNA, 11 bp, Unknown
  misc_feature (1)..( 11): Result.004 file - promoters50/1020680
ggtaaagaaag

SEQ ID NO: 158068 - DNA, 12 bp, Unknown
  misc_feature (1)..( 12): Result.004 file - promoters50/1020680
tatttcacaaaa

SEQ ID NO: 158069 - DNA, 12 bp, Unknown
  misc_feature (1)..( 12): Result.004 file - promoters50/1020690
gttaaaccaaaa

SEQ ID NO: 158070 - DNA, 11 bp, Unknown
  misc_feature (1)..( 11): Result.004 file - promoters50/1020690
attttaatgtg

SEQ ID NO: 158071 - DNA, 11 bp, Unknown
  misc_feature (1)..( 11): Result.004 file - promoters50/1020690
gatttattgtt

SEQ ID NO: 158072 - DNA, 11 bp, Unknown
  misc_feature (1)..( 11): Result.004 file - promoters50/1020690
cattgattata

SEQ ID NO: 158073 - DNA, 11 bp, Unknown
  misc_feature (1)..( 11): Result.004 file - promoters50/1020690
catcgattcat

SEQ ID NO: 158074 - DNA, 11 bp, Unknown
  misc_feature (1)..( 11): Result.004 file - promoters50/1020690
aatttattttc

SEQ ID NO: 158075 - DNA, 11 bp, Unknown
  misc_feature (1)..( 11): Result.004 file - promoters50/1020690
atgtgaactta

SEQ ID NO: 158076 - DNA, 15 bp, Unknown
  misc_feature (1)..( 15): Result.004 file - promoters50/1020690
tggagatttaagaac

SEQ ID NO: 158077 - DNA, 15 bp, Unknown
  misc_feature (1)..( 15): Result.004 file - promoters50/1020690
ttaatatttaagatt

SEQ ID NO: 158078 - DNA, 15 bp, Unknown
  misc_feature (1)..( 15): Result.004 file - promoters50/1020690
tttggatttattgtt

SEQ ID NO: 158079 - DNA, 15 bp, Unknown
  misc_feature (1)..( 15): Result.004 file - promoters50/1020690
ctaccattgattata

SEQ ID NO: 158080 - DNA, 15 bp, Unknown
  misc_feature (1)..( 15): Result.004 file - promoters50/1020690
catcgattcatatga

SEQ ID NO: 158081 - DNA, 15 bp, Unknown
  misc_feature (1)..( 15): Result.004 file - promoters50/1020690
gatgaatttattttc

SEQ ID NO: 158082 - DNA, 15 bp, Unknown
  misc_feature (1)..( 15): Result.004 file - promoters50/1020697
gctaatgtgaactta

SEQ ID NO: 158083 - DNA, 8 bp, Unknown
  misc_feature (1)..( 8): Result.004 file - promoters50/1020697
aaattaaa

SEQ ID NO: 158084 - DNA, 8 bp, Unknown
  misc_feature (1)..( 8): Result.004 file - promoters50/1020697
gaatcaaa

SEQ ID NO: 158085 - DNA, 8 bp, Unknown
  misc_feature (1)..( 8): Result.004 file - promoters50/1020697
aaattacc

SEQ ID NO: 158086 - DNA, 17 bp, Unknown
  misc_feature (1)..( 17): Result.004 file - promoters50/1020697
attatttattaattgtt

SEQ ID NO: 158087 - DNA, 17 bp, Unknown
  misc_feature (1)..( 17): Result.004 file - promoters50/1020697
attaattattaattata

SEQ ID NO: 158088 - DNA, 17 bp, Unknown
  misc_feature (1)..( 17): Result.004 file - promoters50/1020697
atttctcattaatggaa

SEQ ID NO: 158089 - DNA, 17 bp, Unknown
  misc_feature (1)..( 17): Result.004 file - promoters50/1020697
atcagctagtaatgata

SEQ ID NO: 158090 - DNA, 7 bp, Unknown
  misc_feature (1)..( 7): Result.004 file - promoters50/1020697
agaacat

SEQ ID NO: 158091 - DNA, 7 bp, Unknown
  misc_feature (1)..( 7): Result.004 file - promoters50/1020697
agagcat

SEQ ID NO: 158092 - DNA, 7 bp, Unknown
  misc_feature (1)..( 7): Result.004 file - promoters50/1020697
agagcag

SEQ ID NO: 158093 - DNA, 8 bp, Unknown
  misc_feature (1)..( 8): Result.004 file - promoters50/1020697
aaaattag

SEQ ID NO: 158094 - DNA, 8 bp, Unknown
  misc_feature (1)..( 8): Result.004 file - promoters50/1020697
ctaattag

SEQ ID NO: 158095 - DNA, 8 bp, Unknown
  misc_feature (1)..( 8): Result.004 file - promoters50/1020697
ctatttat

SEQ ID NO: 158096 - DNA, 11 bp, Unknown
  misc_feature (1)..( 11): Result.004 file - promoters50/1020697
taataaaaaat

SEQ ID NO: 158097 - DNA, 11 bp, Unknown
  misc_feature (1)..( 11): Result.004 file - promoters50/1020697
taattaaattt

SEQ ID NO: 158098 - DNA, 11 bp, Unknown
  misc_feature (1)..( 11): Result.004 file - promoters50/1020697
ccattaacttt

SEQ ID NO: 158099 - DNA, 9 bp, Unknown
  misc_feature (1)..( 9): Result.004 file - promoters50/1020697
caaaacaga

SEQ ID NO: 158100 - DNA, 9 bp, Unknown
  misc_feature (1)..( 9): Result.004 file - promoters50/1020697
taaaaaaga

SEQ ID NO: 158101 - DNA, 9 bp, Unknown
  misc_feature (1)..( 9): Result.004 file - promoters50/1020697
taaaaactt

SEQ ID NO: 158102 - DNA, 7 bp, Unknown
  misc_feature (1)..( 7): Result.004 file - promoters50/1020697
tttaaaa

SEQ ID NO: 158103 - DNA, 7 bp, Unknown
  misc_feature (1)..( 7): Result.004 file - promoters50/1020697
tttaaat

SEQ ID NO: 158104 - DNA, 7 bp, Unknown
  misc_feature (1)..( 7): Result.004 file - promoters50/1020697
attaaat

SEQ ID NO: 158105 - DNA, 9 bp, Unknown
  misc_feature (1)..( 9): Result.004 file - promoters50/1020697
aaagagaag

SEQ ID NO: 158106 - DNA, 9 bp, Unknown
  misc_feature (1)..( 9): Result.004 file - promoters50/1020697
agagagaag

SEQ ID NO: 158107 - DNA, 9 bp, Unknown
  misc_feature (1)..( 9): Result.004 file - promoters50/1020701
agagtgaaa

SEQ ID NO: 158108 - DNA, 13 bp, Unknown
  misc_feature (1)..( 13): Result.004 file - promoters50/1020701
ataaattaatgcc

SEQ ID NO: 158109 - DNA, 13 bp, Unknown
  misc_feature (1)..( 13): Result.004 file - promoters50/1020701
atatattaatgtt

SEQ ID NO: 158110 - DNA, 13 bp, Unknown
  misc_feature (1)..( 13): Result.004 file - promoters50/1020701
gaaaatttatgtc

SEQ ID NO: 158111 - DNA, 13 bp, Unknown
  misc_feature (1)..( 13): Result.004 file - promoters50/1020701
ccatattaataaa

SEQ ID NO: 158112 - DNA, 13 bp, Unknown
  misc_feature (1)..( 13): Result.004 file - promoters50/1020701
ataagttattata

SEQ ID NO: 158113 - DNA, 13 bp, Unknown
  misc_feature (1)..( 13): Result.004 file - promoters50/1020701
tttggttattgta

SEQ ID NO: 158114 - DNA, 13 bp, Unknown
  misc_feature (1)..( 13): Result.004 file - promoters50/1020701
cgagtataaggtt

SEQ ID NO: 158115 - DNA, 8 bp, Unknown
  misc_feature (1)..( 8): Result.004 file - promoters50/1020701
tcataatt

SEQ ID NO: 158116 - DNA, 8 bp, Unknown
  misc_feature (1)..( 8): Result.004 file - promoters50/1020701
tcacaatt

SEQ ID NO: 158117 - DNA, 8 bp, Unknown
  misc_feature (1)..( 8): Result.004 file - promoters50/1020701
taatattt

SEQ ID NO: 158118 - DNA, 8 bp, Unknown
  misc_feature (1)..( 8): Result.004 file - promoters50/1020701
taatatgt

SEQ ID NO: 158119 - DNA, 8 bp, Unknown
  misc_feature (1)..( 8): Result.004 file - promoters50/1020701
taatataa

SEQ ID NO: 158120 - DNA, 8 bp, Unknown
  misc_feature (1)..( 8): Result.004 file - promoters50/1020713
tcacaaca

SEQ ID NO: 158121 - DNA, 7 bp, Unknown
  misc_feature (1)..( 7): Result.004 file - promoters50/1020713
taagtta

SEQ ID NO: 158122 - DNA, 7 bp, Unknown
  misc_feature (1)..( 7): Result.004 file - promoters50/1020713
gaagtta

SEQ ID NO: 158123 - DNA, 7 bp, Unknown
  misc_feature (1)..( 7): Result.004 file - promoters50/1020713
taattta

SEQ ID NO: 158124 - DNA, 8 bp, Unknown
  misc_feature (1)..( 8): Result.004 file - promoters50/1020713
tgaagaaa

SEQ ID NO: 158125 - DNA, 8 bp, Unknown
  misc_feature (1)..( 8): Result.004 file - promoters50/1020713
agaaaaaa

SEQ ID NO: 158126 - DNA, 8 bp, Unknown
  misc_feature (1)..( 8): Result.004 file - promoters50/1020713
agaaaaca

SEQ ID NO: 158127 - DNA, 7 bp, Unknown
  misc_feature (1)..( 7): Result.004 file - promoters50/1020713
gaatttt

SEQ ID NO: 158128 - DNA, 7 bp, Unknown
  misc_feature (1)..( 7): Result.004 file - promoters50/1020713
gaaattt

SEQ ID NO: 158129 - DNA, 7 bp, Unknown
  misc_feature (1)..( 7): Result.004 file - promoters50/1020713
aaaattt

SEQ ID NO: 158130 - DNA, 8 bp, Unknown
  misc_feature (1)..( 8): Result.004 file - promoters50/1020713
gttagtta

SEQ ID NO: 158131 - DNA, 8 bp, Unknown
  misc_feature (1)..( 8): Result.004 file - promoters50/1020713
gttggttg

SEQ ID NO: 158132 - DNA, 8 bp, Unknown
  misc_feature (1)..( 8): Result.004 file - promoters50/1020713
tttattta

SEQ ID NO: 158133 - DNA, 8 bp, Unknown
  misc_feature (1)..( 8): Result.004 file - promoters50/1020713
ataagaga

SEQ ID NO: 158134 - DNA, 8 bp, Unknown
  misc_feature (1)..( 8): Result.004 file - promoters50/1020713
ataagagg

SEQ ID NO: 158135 - DNA, 8 bp, Unknown
  misc_feature (1)..( 8): Result.004 file - promoters50/1020713
ttaatagg

SEQ ID NO: 158136 - DNA, 9 bp, Unknown
  misc_feature (1)..( 9): Result.004 file - promoters50/1020713
aggcccatg

SEQ ID NO: 158137 - DNA, 9 bp, Unknown
  misc_feature (1)..( 9): Result.004 file - promoters50/1020713
aggcccatt

SEQ ID NO: 158138 - DNA, 9 bp, Unknown
  misc_feature (1)..( 9): Result.004 file - promoters50/1020730
aagcccatt

SEQ ID NO: 158139 - DNA, 7 bp, Unknown
  misc_feature (1)..( 7): Result.004 file - promoters50/1020730
taattta

SEQ ID NO: 158140 - DNA, 7 bp, Unknown
  misc_feature (1)..( 7): Result.004 file - promoters50/1020730
taagtta

SEQ ID NO: 158141 - DNA, 7 bp, Unknown
  misc_feature (1)..( 7): Result.004 file - promoters50/1020730
taatttt

SEQ ID NO: 158142 - DNA, 12 bp, Unknown
  misc_feature (1)..( 12): Result.004 file - promoters50/1020730
attaatctccaa

SEQ ID NO: 158143 - DNA, 12 bp, Unknown
  misc_feature (1)..( 12): Result.004 file - promoters50/1020730
attcatcttgtc

SEQ ID NO: 158144 - DNA, 12 bp, Unknown
  misc_feature (1)..( 12): Result.004 file - promoters50/1020730
ttgaatctcttt

SEQ ID NO: 158145 - DNA, 12 bp, Unknown
  misc_feature (1)..( 12): Result.004 file - promoters50/1020730
caagatcacttt

SEQ ID NO: 158146 - DNA, 10 bp, Unknown
  misc_feature (1)..( 10): Result.004 file - promoters50/1020730
aaaataattt

SEQ ID NO: 158147 - DNA, 10 bp, Unknown
  misc_feature (1)..( 10): Result.004 file - promoters50/1020730
tggatatttt

SEQ ID NO: 158148 - DNA, 10 bp, Unknown
  misc_feature (1)..( 10): Result.004 file - promoters50/1020730
aaactaatgt

SEQ ID NO: 158149 - DNA, 11 bp, Unknown
  misc_feature (1)..( 11): Result.004 file - promoters50/1020730
aaatttgaata

SEQ ID NO: 158150 - DNA, 11 bp, Unknown
  misc_feature (1)..( 11): Result.004 file - promoters50/1020730
ttgtctgaata

SEQ ID NO: 158151 - DNA, 11 bp, Unknown
  misc_feature (1)..( 11): Result.004 file - promoters50/1020730
ttgtcggaatc

SEQ ID NO: 158152 - DNA, 9 bp, Unknown
  misc_feature (1)..( 9): Result.004 file - promoters50/1020730
gtacaaatt

SEQ ID NO: 158153 - DNA, 9 bp, Unknown
  misc_feature (1)..( 9): Result.004 file - promoters50/1020730
gtagaaaaa

SEQ ID NO: 158154 - DNA, 9 bp, Unknown
  misc_feature (1)..( 9): Result.004 file - promoters50/1020786
agagaaaaa

SEQ ID NO: 158155 - DNA, 12 bp, Unknown
  misc_feature (1)..( 12): Result.004 file - promoters50/1020786
aaatttatgtcg

SEQ ID NO: 158156 - DNA, 12 bp, Unknown
  misc_feature (1)..( 12): Result.004 file - promoters50/1020786
agatttatttcg

SEQ ID NO: 158157 - DNA, 12 bp, Unknown
  misc_feature (1)..( 12): Result.004 file - promoters50/1020786
aaattaatgcca

SEQ ID NO: 158158 - DNA, 12 bp, Unknown
  misc_feature (1)..( 12): Result.004 file - promoters50/1020786
ccatttatggac

SEQ ID NO: 158159 - DNA, 12 bp, Unknown
  misc_feature (1)..( 12): Result.004 file - promoters50/1020786
agttttatttta

SEQ ID NO: 158160 - DNA, 12 bp, Unknown
  misc_feature (1)..( 12): Result.004 file - promoters50/1020786
ggatttttggtg

SEQ ID NO: 158161 - DNA, 12 bp, Unknown
  misc_feature (1)..( 12): Result.004 file - promoters50/1020786
aaattaatattt

SEQ ID NO: 158162 - DNA, 13 bp, Unknown
  misc_feature (1)..( 13): Result.004 file - promoters50/1020786
ttaacaaactaat

SEQ ID NO: 158163 - DNA, 13 bp, Unknown
  misc_feature (1)..( 13): Result.004 file - promoters50/1020786
aagacaaacggtc

SEQ ID NO: 158164 - DNA, 13 bp, Unknown
  misc_feature (1)..( 13): Result.004 file - promoters50/1020786
caatcaaattaat

SEQ ID NO: 158165 - DNA, 13 bp, Unknown
  misc_feature (1)..( 13): Result.004 file - promoters50/1020786
gttaaaaaatatt

SEQ ID NO: 158166 - DNA, 13 bp, Unknown
  misc_feature (1)..( 13): Result.004 file - promoters50/1020786
tttaaaatcgtca

SEQ ID NO: 158167 - DNA, 13 bp, Unknown
  misc_feature (1)..( 13): Result.004 file - promoters50/1020786
tttaaattaatta

SEQ ID NO: 158168 - DNA, 14 bp, Unknown
  misc_feature (1)..( 14): Result.004 file - promoters50/1020786
cctctatataaacc

SEQ ID NO: 158169 - DNA, 14 bp, Unknown
  misc_feature (1)..( 14): Result.004 file - promoters50/1020786
tctccctataaatt

SEQ ID NO: 158170 - DNA, 14 bp, Unknown
  misc_feature (1)..( 14): Result.004 file - promoters50/1020786
tacctttataaact

SEQ ID NO: 158171 - DNA, 14 bp, Unknown
  misc_feature (1)..( 14): Result.004 file - promoters50/1020786
cctatatataaaca

SEQ ID NO: 158172 - DNA, 14 bp, Unknown
  misc_feature (1)..( 14): Result.004 file - promoters50/1020786
ttctcgtataaata

SEQ ID NO: 158173 - DNA, 14 bp, Unknown
  misc_feature (1)..( 14): Result.004 file - promoters50/1020786
cgatattatatagg

SEQ ID NO: 158174 - DNA, 17 bp, Unknown
  misc_feature (1)..( 17): Result.004 file - promoters50/1020786
tacttaagcaaaaatta

SEQ ID NO: 158175 - DNA, 17 bp, Unknown
  misc_feature (1)..( 17): Result.004 file - promoters50/1020786
ttgttcgtcaaaaaact

SEQ ID NO: 158176 - DNA, 17 bp, Unknown
  misc_feature (1)..( 17): Result.004 file - promoters50/1020786
ctttaatgcaaagatta

SEQ ID NO: 158177 - DNA, 17 bp, Unknown
  misc_feature (1)..( 17): Result.004 file - promoters50/1020786
ggatagtttaaaaatta

SEQ ID NO: 158178 - DNA, 17 bp, Unknown
  misc_feature (1)..( 17): Result.004 file - promoters50/1020786
tatactcccaaaaacag

SEQ ID NO: 158179 - DNA, 17 bp, Unknown
  misc_feature (1)..( 17): Result.004 file - promoters50/1020786
tagtgctaaaaatacat

SEQ ID NO: 158180 - DNA, 17 bp, Unknown
  misc_feature (1)..( 17): Result.004 file - promoters50/1020786
ttagaaatcaaacagat

SEQ ID NO: 158181 - DNA, 14 bp, Unknown
  misc_feature (1)..( 14): Result.004 file - promoters50/1020786
aacgacaaaacaag

SEQ ID NO: 158182 - DNA, 14 bp, Unknown
  misc_feature (1)..( 14): Result.004 file - promoters50/1020786
aacaacaaaaaaag

SEQ ID NO: 158183 - DNA, 14 bp, Unknown
  misc_feature (1)..( 14): Result.004 file - promoters50/1020786
tttaataaaccaat

SEQ ID NO: 158184 - DNA, 14 bp, Unknown
  misc_feature (1)..( 14): Result.004 file - promoters50/1020786
aacgaccataatta

SEQ ID NO: 158185 - DNA, 14 bp, Unknown
  misc_feature (1)..( 14): Result.004 file - promoters50/1020786
cacaacattgcttc

SEQ ID NO: 158186 - DNA, 14 bp, Unknown
  misc_feature (1)..( 14): Result.004 file - promoters50/1020786
atcaacaaaaattg

SEQ ID NO: 158187 - DNA, 14 bp, Unknown
  misc_feature (1)..( 14): Result.004 file - promoters50/1020786
ggcaacaaatcatt

SEQ ID NO: 158188 - DNA, 12 bp, Unknown
  misc_feature (1)..( 12): Result.004 file - promoters50/1020786
gatgaaatataa

SEQ ID NO: 158189 - DNA, 12 bp, Unknown
  misc_feature (1)..( 12): Result.004 file - promoters50/1020786
tgccaaatatta

SEQ ID NO: 158190 - DNA, 11 bp, Unknown
  misc_feature (1)..( 11): Result.004 file - promoters50/1020786
taaaaatacat

SEQ ID NO: 158191 - DNA, 11 bp, Unknown
  misc_feature (1)..( 11): Result.004 file - promoters50/1020786
caaaaacagta

SEQ ID NO: 158192 - DNA, 12 bp, Unknown
  misc_feature (1)..( 12): Result.004 file - promoters50/1020786
caaacaataaaa

SEQ ID NO: 158193 - DNA, 12 bp, Unknown
  misc_feature (1)..( 12): Result.004 file - promoters50/1020786
caaaaaacttta

SEQ ID NO: 158194 - DNA, 10 bp, Unknown
  misc_feature (1)..( 10): Result.004 file - promoters50/1020786
ataaagtata

SEQ ID NO: 158195 - DNA, 10 bp, Unknown
  misc_feature (1)..( 10): Result.004 file - promoters50/1020786
ctaaaatatc

SEQ ID NO: 158196 - DNA, 10 bp, Unknown
  misc_feature (1)..( 10): Result.004 file - promoters50/1020786
caaaaataag

SEQ ID NO: 158197 - DNA, 10 bp, Unknown
  misc_feature (1)..( 10): Result.004 file - promoters50/1020786
acaaaaaaag

SEQ ID NO: 158198 - DNA, 10 bp, Unknown
  misc_feature (1)..( 10): Result.004 file - promoters50/1020786
acaaaaaagg

SEQ ID NO: 158199 - DNA, 10 bp, Unknown
  misc_feature (1)..( 10): Result.004 file - promoters50/1020786
ttaaaataaa

SEQ ID NO: 158200 - DNA, 9 bp, Unknown
  misc_feature (1)..( 9): Result.004 file - promoters50/1020786
cgatataac

SEQ ID NO: 158201 - DNA, 9 bp, Unknown
  misc_feature (1)..( 9): Result.004 file - promoters50/1020786
acatataaa

SEQ ID NO: 158202 - DNA, 9 bp, Unknown
  misc_feature (1)..( 9): Result.004 file - promoters50/1020786
acagatagg

SEQ ID NO: 158203 - DNA, 9 bp, Unknown
  misc_feature (1)..( 9): Result.004 file - promoters50/1020786
tgataaaaa

SEQ ID NO: 158204 - DNA, 10 bp, Unknown
  misc_feature (1)..( 10): Result.004 file - promoters50/1020786
atatatgaac

SEQ ID NO: 158205 - DNA, 10 bp, Unknown
  misc_feature (1)..( 10): Result.004 file - promoters50/1020818
ttctataaat

SEQ ID NO: 158206 - DNA, 13 bp, Unknown
  misc_feature (1)..( 13): Result.004 file - promoters50/1020818
aactttttttctt

SEQ ID NO: 158207 - DNA, 13 bp, Unknown
  misc_feature (1)..( 13): Result.004 file - promoters50/1020818
ataatttttcctt

SEQ ID NO: 158208 - DNA, 13 bp, Unknown
  misc_feature (1)..( 13): Result.004 file - promoters50/1020818
ataatgtttgagt

SEQ ID NO: 158209 - DNA, 11 bp, Unknown
  misc_feature (1)..( 11): Result.004 file - promoters50/1020818
caaaaattaag

SEQ ID NO: 158210 - DNA, 11 bp, Unknown
  misc_feature (1)..( 11): Result.004 file - promoters50/1020818
caataattttt

SEQ ID NO: 158211 - DNA, 11 bp, Unknown
  misc_feature (1)..( 11): Result.004 file - promoters50/1020818
aaaacatttat

SEQ ID NO: 158212 - DNA, 11 bp, Unknown
  misc_feature (1)..( 11): Result.004 file - promoters50/1020818
acataatgttt

SEQ ID NO: 158213 - DNA, 10 bp, Unknown
  misc_feature (1)..( 10): Result.004 file - promoters50/1020818
taaaaaagaa

SEQ ID NO: 158214 - DNA, 10 bp, Unknown
  misc_feature (1)..( 10): Result.004 file - promoters50/1020818
taaaaaaggg

SEQ ID NO: 158215 - DNA, 10 bp, Unknown
  misc_feature (1)..( 10): Result.004 file - promoters50/1020818
tataaaagaa

SEQ ID NO: 158216 - DNA, 9 bp, Unknown
  misc_feature (1)..( 9): Result.004 file - promoters50/1020818
gtcaaatcc

SEQ ID NO: 158217 - DNA, 9 bp, Unknown
  misc_feature (1)..( 9): Result.004 file - promoters50/1020818
gtcaaaaaa

SEQ ID NO: 158218 - DNA, 9 bp, Unknown
  misc_feature (1)..( 9): Result.004 file - promoters50/1020834
ctcaaaaaa

SEQ ID NO: 158219 - DNA, 8 bp, Unknown
  misc_feature (1)..( 8): Result.004 file - promoters50/1020834
agactacc

SEQ ID NO: 158220 - DNA, 8 bp, Unknown
  misc_feature (1)..( 8): Result.004 file - promoters50/1020834
agaatacc

SEQ ID NO: 158221 - DNA, 8 bp, Unknown
  misc_feature (1)..( 8): Result.004 file - promoters50/1020838
agaataga

SEQ ID NO: 158222 - DNA, 8 bp, Unknown
  misc_feature (1)..( 8): Result.004 file - promoters50/1020838
gaaggaat

SEQ ID NO: 158223 - DNA, 8 bp, Unknown
  misc_feature (1)..( 8): Result.004 file - promoters50/1020838
gaaagaaa

SEQ ID NO: 158224 - DNA, 8 bp, Unknown
  misc_feature (1)..( 8): Result.004 file - promoters50/1020838
aaagtaat

SEQ ID NO: 158225 - DNA, 8 bp, Unknown
  misc_feature (1)..( 8): Result.004 file - promoters50/1020838
cttttgaa

SEQ ID NO: 158226 - DNA, 8 bp, Unknown
  misc_feature (1)..( 8): Result.004 file - promoters50/1020838
ctttggaa

SEQ ID NO: 158227 - DNA, 8 bp, Unknown
  misc_feature (1)..( 8): Result.004 file - promoters50/1020838
attttgag

SEQ ID NO: 158228 - DNA, 8 bp, Unknown
  misc_feature (1)..( 8): Result.004 file - promoters50/1020838
atttttaa

SEQ ID NO: 158229 - DNA, 8 bp, Unknown
  misc_feature (1)..( 8): Result.004 file - promoters50/1020838
ctttgtaa

SEQ ID NO: 158230 - DNA, 8 bp, Unknown
  misc_feature (1)..( 8): Result.004 file - promoters50/1020838
attttttg

SEQ ID NO: 158231 - DNA, 7 bp, Unknown
  misc_feature (1)..( 7): Result.004 file - promoters50/1020838
aataaaa

SEQ ID NO: 158232 - DNA, 7 bp, Unknown
  misc_feature (1)..( 7): Result.004 file - promoters50/1020838
aataaat

SEQ ID NO: 158233 - DNA, 7 bp, Unknown
  misc_feature (1)..( 7): Result.004 file - promoters50/1020842
aataaaa

SEQ ID NO: 158234 - DNA, 8 bp, Unknown
  misc_feature (1)..( 8): Result.004 file - promoters50/1020842
taaaagat

SEQ ID NO: 158235 - DNA, 8 bp, Unknown
  misc_feature (1)..( 8): Result.004 file - promoters50/1020842
aaaaggat

SEQ ID NO: 158236 - DNA, 8 bp, Unknown
  misc_feature (1)..( 8): Result.004 file - promoters50/1020842
taaaagat

SEQ ID NO: 158237 - DNA, 10 bp, Unknown
  misc_feature (1)..( 10): Result.004 file - promoters50/1020842
tcatcaattt

SEQ ID NO: 158238 - DNA, 10 bp, Unknown
  misc_feature (1)..( 10): Result.004 file - promoters50/1020842
tcatcaataa

SEQ ID NO: 158239 - DNA, 10 bp, Unknown
  misc_feature (1)..( 10): Result.004 file - promoters50/1020842
ccatcaattt

SEQ ID NO: 158240 - DNA, 8 bp, Unknown
  misc_feature (1)..( 8): Result.004 file - promoters50/1020842
taacaata

SEQ ID NO: 158241 - DNA, 8 bp, Unknown
  misc_feature (1)..( 8): Result.004 file - promoters50/1020842
taaaaatt

SEQ ID NO: 158242 - DNA, 8 bp, Unknown
  misc_feature (1)..( 8): Result.004 file - promoters50/1020842
ttaaaatt

SEQ ID NO: 158243 - DNA, 8 bp, Unknown
  misc_feature (1)..( 8): Result.004 file - promoters50/1020842
gaaactct

SEQ ID NO: 158244 - DNA, 8 bp, Unknown
  misc_feature (1)..( 8): Result.004 file - promoters50/1020842
aaaattct

SEQ ID NO: 158245 - DNA, 8 bp, Unknown
  misc_feature (1)..( 8): Result.004 file - promoters50/1020842
aaaatttt

SEQ ID NO: 158246 - DNA, 8 bp, Unknown
  misc_feature (1)..( 8): Result.004 file - promoters50/1020842
gaaacaga

SEQ ID NO: 158247 - DNA, 8 bp, Unknown
  misc_feature (1)..( 8): Result.004 file - promoters50/1020842
gaaacaaa

SEQ ID NO: 158248 - DNA, 8 bp, Unknown
  misc_feature (1)..( 8): Result.004 file - promoters50/1020848
taaaaaaa

SEQ ID NO: 158249 - DNA, 8 bp, Unknown
  misc_feature (1)..( 8): Result.004 file - promoters50/1020848
taatatgt

SEQ ID NO: 158250 - DNA, 8 bp, Unknown
  misc_feature (1)..( 8): Result.004 file - promoters50/1020848
aaatttgt

SEQ ID NO: 158251 - DNA, 8 bp, Unknown
  misc_feature (1)..( 8): Result.004 file - promoters50/1020848
aaatttac

SEQ ID NO: 158252 - DNA, 8 bp, Unknown
  misc_feature (1)..( 8): Result.004 file - promoters50/1020848
ctacattc

SEQ ID NO: 158253 - DNA, 8 bp, Unknown
  misc_feature (1)..( 8): Result.004 file - promoters50/1020848
ctacattt

SEQ ID NO: 158254 - DNA, 8 bp, Unknown
  misc_feature (1)..( 8): Result.004 file - promoters50/1020863
atactttt

SEQ ID NO: 158255 - DNA, 13 bp, Unknown
  misc_feature (1)..( 13): Result.004 file - promoters50/1020863
aaacaaatgtttg

SEQ ID NO: 158256 - DNA, 13 bp, Unknown
  misc_feature (1)..( 13): Result.004 file - promoters50/1020863
aaacaaacgtgga

SEQ ID NO: 158257 - DNA, 13 bp, Unknown
  misc_feature (1)..( 13): Result.004 file - promoters50/1020863
aaataaatttttg

SEQ ID NO: 158258 - DNA, 13 bp, Unknown
  misc_feature (1)..( 13): Result.004 file - promoters50/1020863
aaaaaaagaagaa

SEQ ID NO: 158259 - DNA, 13 bp, Unknown
  misc_feature (1)..( 13): Result.004 file - promoters50/1020863
taactaatttctt

SEQ ID NO: 158260 - DNA, 13 bp, Unknown
  misc_feature (1)..( 13): Result.004 file - promoters50/1020863
atacatatactgt

SEQ ID NO: 158261 - DNA, 10 bp, Unknown
  misc_feature (1)..( 10): Result.004 file - promoters50/1020863
gttattatat

SEQ ID NO: 158262 - DNA, 10 bp, Unknown
  misc_feature (1)..( 10): Result.004 file - promoters50/1020863
catattatta

SEQ ID NO: 158263 - DNA, 10 bp, Unknown
  misc_feature (1)..( 10): Result.004 file - promoters50/1020863
aatattatta

SEQ ID NO: 158264 - DNA, 10 bp, Unknown
  misc_feature (1)..( 10): Result.004 file - promoters50/1020863
gttaatatat

SEQ ID NO: 158265 - DNA, 10 bp, Unknown
  misc_feature (1)..( 10): Result.004 file - promoters50/1020863
gatataatta

SEQ ID NO: 158266 - DNA, 10 bp, Unknown
  misc_feature (1)..( 10): Result.004 file - promoters50/1020863
attatcattt

SEQ ID NO: 158267 - DNA, 14 bp, Unknown
  misc_feature (1)..( 14): Result.004 file - promoters50/1020863
gtttcaaatacaag

SEQ ID NO: 158268 - DNA, 14 bp, Unknown
  misc_feature (1)..( 14): Result.004 file - promoters50/1020863
gtttccaatatgtt

SEQ ID NO: 158269 - DNA, 14 bp, Unknown
  misc_feature (1)..( 14): Result.004 file - promoters50/1020863
agatcaaataggtc

SEQ ID NO: 158270 - DNA, 14 bp, Unknown
  misc_feature (1)..( 14): Result.004 file - promoters50/1020863
gaaaaaaagacaaa

SEQ ID NO: 158271 - DNA, 14 bp, Unknown
  misc_feature (1)..( 14): Result.004 file - promoters50/1020863
gggctaaaaatgac

SEQ ID NO: 158272 - DNA, 14 bp, Unknown
  misc_feature (1)..( 14): Result.004 file - promoters50/1020863
gattaaattggaag

SEQ ID NO: 158273 - DNA, 10 bp, Unknown
  misc_feature (1)..( 10): Result.004 file - promoters50/1020863
gtaaaatttc

SEQ ID NO: 158274 - DNA, 10 bp, Unknown
  misc_feature (1)..( 10): Result.004 file - promoters50/1020863
taaaaattaa

SEQ ID NO: 158275 - DNA, 11 bp, Unknown
  misc_feature (1)..( 11): Result.004 file - promoters50/1020863
gaaaatattaa

SEQ ID NO: 158276 - DNA, 11 bp, Unknown
  misc_feature (1)..( 11): Result.004 file - promoters50/1020863
tagaatactaa

SEQ ID NO: 158277 - DNA, 11 bp, Unknown
  misc_feature (1)..( 11): Result.004 file - promoters50/1020863
gtaacaattct

SEQ ID NO: 158278 - DNA, 11 bp, Unknown
  misc_feature (1)..( 11): Result.004 file - promoters50/1020863
ttaacaaaaaa

SEQ ID NO: 158279 - DNA, 11 bp, Unknown
  misc_feature (1)..( 11): Result.004 file - promoters50/1020863
ggaacaagtct

SEQ ID NO: 158280 - DNA, 11 bp, Unknown
  misc_feature (1)..( 11): Result.004 file - promoters50/1020863
ggagcaataga

SEQ ID NO: 158281 - DNA, 12 bp, Unknown
  misc_feature (1)..( 12): Result.004 file - promoters50/1020863
aatgatattcgt

SEQ ID NO: 158282 - DNA, 12 bp, Unknown
  misc_feature (1)..( 12): Result.004 file - promoters50/1020863
aatgaaattcat

SEQ ID NO: 158283 - DNA, 12 bp, Unknown
  misc_feature (1)..( 12): Result.004 file - promoters50/1020863
tttgatatatac

SEQ ID NO: 158284 - DNA, 12 bp, Unknown
  misc_feature (1)..( 12): Result.004 file - promoters50/1020863
cgcaatagtcga

SEQ ID NO: 158285 - DNA, 12 bp, Unknown
  misc_feature (1)..( 12): Result.004 file - promoters50/1020863
aatgaaaaacaa

SEQ ID NO: 158286 - DNA, 12 bp, Unknown
  misc_feature (1)..( 12): Result.004 file - promoters50/1020863
acaaaaagtgaa

SEQ ID NO: 158287 - DNA, 12 bp, Unknown
  misc_feature (1)..( 12): Result.004 file - promoters50/1020863
gtttgtttaaca

SEQ ID NO: 158288 - DNA, 12 bp, Unknown
  misc_feature (1)..( 12): Result.004 file - promoters50/1020863
ttttatttcttt

SEQ ID NO: 158289 - DNA, 12 bp, Unknown
  misc_feature (1)..( 12): Result.004 file - promoters50/1020863
ttttgtttctgg

SEQ ID NO: 158290 - DNA, 12 bp, Unknown
  misc_feature (1)..( 12): Result.004 file - promoters50/1020863
ttctgtttcaca

SEQ ID NO: 158291 - DNA, 12 bp, Unknown
  misc_feature (1)..( 12): Result.004 file - promoters50/1020863
ttttataatgat

SEQ ID NO: 158292 - DNA, 12 bp, Unknown
  misc_feature (1)..( 12): Result.004 file - promoters50/1020863
atatgtctgcgc

SEQ ID NO: 158293 - DNA, 12 bp, Unknown
  misc_feature (1)..( 12): Result.004 file - promoters50/1020892
ttatatcttata

SEQ ID NO: 158294 - DNA, 16 bp, Unknown
  misc_feature (1)..( 16): Result.004 file - promoters50/1020892
tgaacatgtagacgac

SEQ ID NO: 158295 - DNA, 16 bp, Unknown
  misc_feature (1)..( 16): Result.004 file - promoters50/1020892
agaacaagtagacgac

SEQ ID NO: 158296 - DNA, 16 bp, Unknown
  misc_feature (1)..( 16): Result.004 file - promoters50/1020892
cgaagaagtataaaaa

SEQ ID NO: 158297 - DNA, 16 bp, Unknown
  misc_feature (1)..( 16): Result.004 file - promoters50/1020892
cgatgaaagcagaagc

SEQ ID NO: 158298 - DNA, 16 bp, Unknown
  misc_feature (1)..( 16): Result.004 file - promoters50/1020892
acaacaagtgagactc

SEQ ID NO: 158299 - DNA, 16 bp, Unknown
  misc_feature (1)..( 16): Result.004 file - promoters50/1020892
catgcaagatgagagt

SEQ ID NO: 158300 - DNA, 14 bp, Unknown
  misc_feature (1)..( 14): Result.004 file - promoters50/1020892
tactacagacagta

SEQ ID NO: 158301 - DNA, 14 bp, Unknown
  misc_feature (1)..( 14): Result.004 file - promoters50/1020892
atttacagaacaat

SEQ ID NO: 158302 - DNA, 14 bp, Unknown
  misc_feature (1)..( 14): Result.004 file - promoters50/1020892
cattactgaagccc

SEQ ID NO: 158303 - DNA, 14 bp, Unknown
  misc_feature (1)..( 14): Result.004 file - promoters50/1020892
gcttactgaaaaat

SEQ ID NO: 158304 - DNA, 14 bp, Unknown
  misc_feature (1)..( 14): Result.004 file - promoters50/1020892
agctgctgcagcac

SEQ ID NO: 158305 - DNA, 14 bp, Unknown
  misc_feature (1)..( 14): Result.004 file - promoters50/1020940
aaatattggggcct

SEQ ID NO: 158306 - DNA, 9 bp, Unknown
  misc_feature (1)..( 9): Result.004 file - promoters50/1020940
aaaaattaa

SEQ ID NO: 158307 - DNA, 9 bp, Unknown
  misc_feature (1)..( 9): Result.004 file - promoters50/1020940
aaatattct

SEQ ID NO: 158308 - DNA, 9 bp, Unknown
  misc_feature (1)..( 9): Result.004 file - promoters50/1020940
gtaaattat

SEQ ID NO: 158309 - DNA, 9 bp, Unknown
  misc_feature (1)..( 9): Result.004 file - promoters50/1020940
acaaagtaa

SEQ ID NO: 158310 - DNA, 9 bp, Unknown
  misc_feature (1)..( 9): Result.004 file - promoters50/1020940
aaaaatgaa

SEQ ID NO: 158311 - DNA, 9 bp, Unknown
  misc_feature (1)..( 9): Result.004 file - promoters50/1020940
caatatttg

SEQ ID NO: 158312 - DNA, 10 bp, Unknown
  misc_feature (1)..( 10): Result.004 file - promoters50/1020940
tatatatacc

SEQ ID NO: 158313 - DNA, 10 bp, Unknown
  misc_feature (1)..( 10): Result.004 file - promoters50/1020940
tatataaacc

SEQ ID NO: 158314 - DNA, 10 bp, Unknown
  misc_feature (1)..( 10): Result.004 file - promoters50/1020940
tatataaagg

SEQ ID NO: 158315 - DNA, 10 bp, Unknown
  misc_feature (1)..( 10): Result.004 file - promoters50/1020940
tatataatag

SEQ ID NO: 158316 - DNA, 10 bp, Unknown
  misc_feature (1)..( 10): Result.004 file - promoters50/1020940
tatataatgg

SEQ ID NO: 158317 - DNA, 10 bp, Unknown
  misc_feature (1)..( 10): Result.004 file - promoters50/1020940
tatttaaaca

SEQ ID NO: 158318 - DNA, 10 bp, Unknown
  misc_feature (1)..( 10): Result.004 file - promoters50/1020940
aatataatct

SEQ ID NO: 158319 - DNA, 11 bp, Unknown
  misc_feature (1)..( 11): Result.004 file - promoters50/1020940
aaataaaatgt

SEQ ID NO: 158320 - DNA, 11 bp, Unknown
  misc_feature (1)..( 11): Result.004 file - promoters50/1020940
tgctaaaattg

SEQ ID NO: 158321 - DNA, 11 bp, Unknown
  misc_feature (1)..( 11): Result.004 file - promoters50/1020940
tattaacatga

SEQ ID NO: 158322 - DNA, 11 bp, Unknown
  misc_feature (1)..( 11): Result.004 file - promoters50/1020940
aaagaaaacat

SEQ ID NO: 158323 - DNA, 11 bp, Unknown
  misc_feature (1)..( 11): Result.004 file - promoters50/1020940
acgtaagattg

SEQ ID NO: 158324 - DNA, 11 bp, Unknown
  misc_feature (1)..( 11): Result.004 file - promoters50/1020940
cattcacaatt

SEQ ID NO: 158325 - DNA, 11 bp, Unknown
  misc_feature (1)..( 11): Result.004 file - promoters50/1020940
aagtaaactag

SEQ ID NO: 158326 - DNA, 12 bp, Unknown
  misc_feature (1)..( 12): Result.004 file - promoters50/1020940
acaaaatagatt

SEQ ID NO: 158327 - DNA, 12 bp, Unknown
  misc_feature (1)..( 12): Result.004 file - promoters50/1020940
gaaaaaaagaaa

SEQ ID NO: 158328 - DNA, 12 bp, Unknown
  misc_feature (1)..( 12): Result.004 file - promoters50/1020940
acaaaattagac

SEQ ID NO: 158329 - DNA, 12 bp, Unknown
  misc_feature (1)..( 12): Result.004 file - promoters50/1020940
acaataaagtag

SEQ ID NO: 158330 - DNA, 13 bp, Unknown
  misc_feature (1)..( 13): Result.004 file - promoters50/1020940
agttaaataaagc

SEQ ID NO: 158331 - DNA, 13 bp, Unknown
  misc_feature (1)..( 13): Result.004 file - promoters50/1020940
ccaagtaaaaacc

SEQ ID NO: 158332 - DNA, 13 bp, Unknown
  misc_feature (1)..( 13): Result.004 file - promoters50/1020940
taatagtttcttt

SEQ ID NO: 158333 - DNA, 13 bp, Unknown
  misc_feature (1)..( 13): Result.004 file - promoters50/1020940
taagagttttacg

SEQ ID NO: 158334 - DNA, 13 bp, Unknown
  misc_feature (1)..( 13): Result.004 file - promoters50/1020940
acataatttctta

SEQ ID NO: 158335 - DNA, 13 bp, Unknown
  misc_feature (1)..( 13): Result.004 file - promoters50/1020940
tgataattaggga

SEQ ID NO: 158336 - DNA, 13 bp, Unknown
  misc_feature (1)..( 13): Result.004 file - promoters50/1020940
ttgaattttttta

SEQ ID NO: 158337 - DNA, 13 bp, Unknown
  misc_feature (1)..( 13): Result.004 file - promoters50/1020940
tagatgttttttt

SEQ ID NO: 158338 - DNA, 13 bp, Unknown
  misc_feature (1)..( 13): Result.004 file - promoters50/1020940
atagtttcttttt

SEQ ID NO: 158339 - DNA, 13 bp, Unknown
  misc_feature (1)..( 13): Result.004 file - promoters50/1020940
ttggtttctcatt

SEQ ID NO: 158340 - DNA, 13 bp, Unknown
  misc_feature (1)..( 13): Result.004 file - promoters50/1020940
ataatttcttact

SEQ ID NO: 158341 - DNA, 13 bp, Unknown
  misc_feature (1)..( 13): Result.004 file - promoters50/1020940
ataattagggatt

SEQ ID NO: 158342 - DNA, 13 bp, Unknown
  misc_feature (1)..( 13): Result.004 file - promoters50/1020940
ataattaacgaac

SEQ ID NO: 158343 - DNA, 13 bp, Unknown
  misc_feature (1)..( 13): Result.004 file - promoters50/1020940
tgtttttttcatt

SEQ ID NO: 158344 - DNA, 13 bp, Unknown
  misc_feature (1)..( 13): Result.004 file - promoters50/1020940
gaatttttttaat

SEQ ID NO: 158345 - DNA, 13 bp, Unknown
  misc_feature (1)..( 13): Result.004 file - promoters50/1020940
atgaatctctctg

SEQ ID NO: 158346 - DNA, 13 bp, Unknown
  misc_feature (1)..( 13): Result.004 file - promoters50/1020940
aacaatcactctc

SEQ ID NO: 158347 - DNA, 13 bp, Unknown
  misc_feature (1)..( 13): Result.004 file - promoters50/1020940
atcaatccctctc

SEQ ID NO: 158348 - DNA, 13 bp, Unknown
  misc_feature (1)..( 13): Result.004 file - promoters50/1020940
ttaaatctctccc

SEQ ID NO: 158349 - DNA, 13 bp, Unknown
  misc_feature (1)..( 13): Result.004 file - promoters50/1020940
aacaaacacaaca

SEQ ID NO: 158350 - DNA, 13 bp, Unknown
  misc_feature (1)..( 13): Result.004 file - promoters50/1020940
tttaaacaagctg

SEQ ID NO: 158351 - DNA, 13 bp, Unknown
  misc_feature (1)..( 13): Result.004 file - promoters50/1020940
tttttgcagtaaa

SEQ ID NO: 158352 - DNA, 13 bp, Unknown
  misc_feature (1)..( 13): Result.004 file - promoters50/1020940
ttattgtagtgta

SEQ ID NO: 158353 - DNA, 13 bp, Unknown
  misc_feature (1)..( 13): Result.004 file - promoters50/1020940
tcattgtagtagt

SEQ ID NO: 158354 - DNA, 13 bp, Unknown
  misc_feature (1)..( 13): Result.004 file - promoters50/1020940
gattttcagtaat

SEQ ID NO: 158355 - DNA, 13 bp, Unknown
  misc_feature (1)..( 13): Result.004 file - promoters50/1020940
gattttcacaaac

SEQ ID NO: 158356 - DNA, 13 bp, Unknown
  misc_feature (1)..( 13): Result.004 file - promoters50/1020940
gtttctcattaat

SEQ ID NO: 158357 - DNA, 11 bp, Unknown
  misc_feature (1)..( 11): Result.004 file - promoters50/1020940
gattttcacaa

SEQ ID NO: 158358 - DNA, 11 bp, Unknown
  misc_feature (1)..( 11): Result.004 file - promoters50/1020940
ttttttcattg

SEQ ID NO: 158359 - DNA, 11 bp, Unknown
  misc_feature (1)..( 11): Result.004 file - promoters50/1020940
gattttcagta

SEQ ID NO: 158360 - DNA, 11 bp, Unknown
  misc_feature (1)..( 11): Result.004 file - promoters50/1020940
gatttttacat

SEQ ID NO: 158361 - DNA, 11 bp, Unknown
  misc_feature (1)..( 11): Result.004 file - promoters50/1020940
cgttttgattt

SEQ ID NO: 158362 - DNA, 12 bp, Unknown
  misc_feature (1)..( 12): Result.004 file - promoters50/1020940
ggtttctcatta

SEQ ID NO: 158363 - DNA, 10 bp, Unknown
  misc_feature (1)..( 10): Result.004 file - promoters50/1020940
atttttacat

SEQ ID NO: 158364 - DNA, 10 bp, Unknown
  misc_feature (1)..( 10): Result.004 file - promoters50/1020940
agttttacgt

SEQ ID NO: 158365 - DNA, 10 bp, Unknown
  misc_feature (1)..( 10): Result.004 file - promoters50/1020940
tttttttcat

SEQ ID NO: 158366 - DNA, 10 bp, Unknown
  misc_feature (1)..( 10): Result.004 file - promoters50/1020940
agttttattg

SEQ ID NO: 158367 - DNA, 10 bp, Unknown
  misc_feature (1)..( 10): Result.004 file - promoters50/1020940
attttttggt

SEQ ID NO: 158368 - DNA, 10 bp, Unknown
  misc_feature (1)..( 10): Result.004 file - promoters50/1020940
atttttttaa

SEQ ID NO: 158369 - DNA, 14 bp, Unknown
  misc_feature (1)..( 14): Result.004 file - promoters50/1020940
tcgtgatttttaca

SEQ ID NO: 158370 - DNA, 14 bp, Unknown
  misc_feature (1)..( 14): Result.004 file - promoters50/1020940
ttttgattttacca

SEQ ID NO: 158371 - DNA, 14 bp, Unknown
  misc_feature (1)..( 14): Result.004 file - promoters50/1020940
tcaagattttgatt

SEQ ID NO: 158372 - DNA, 14 bp, Unknown
  misc_feature (1)..( 14): Result.004 file - promoters50/1020940
ttttggtttctcat

SEQ ID NO: 158373 - DNA, 14 bp, Unknown
  misc_feature (1)..( 14): Result.004 file - promoters50/1020940
accaagttttattg

SEQ ID NO: 158374 - DNA, 14 bp, Unknown
  misc_feature (1)..( 14): Result.004 file - promoters50/1020968
atgtttttttcatt

SEQ ID NO: 158375 - DNA, 12 bp, Unknown
  misc_feature (1)..( 12): Result.004 file - promoters50/1020968
gtaatttaaaat

SEQ ID NO: 158376 - DNA, 12 bp, Unknown
  misc_feature (1)..( 12): Result.004 file - promoters50/1020968
atcatttaagtt

SEQ ID NO: 158377 - DNA, 12 bp, Unknown
  misc_feature (1)..( 12): Result.004 file - promoters50/1020968
gtaatttaatgc

SEQ ID NO: 158378 - DNA, 12 bp, Unknown
  misc_feature (1)..( 12): Result.004 file - promoters50/1020968
cgaattcaaacc

SEQ ID NO: 158379 - DNA, 12 bp, Unknown
  misc_feature (1)..( 12): Result.004 file - promoters50/1020968
tatttttaaaat

SEQ ID NO: 158380 - DNA, 12 bp, Unknown
  misc_feature (1)..( 12): Result.004 file - promoters50/1020968
gaaatgtaactt

SEQ ID NO: 158381 - DNA, 14 bp, Unknown
  misc_feature (1)..( 14): Result.004 file - promoters50/1020968
catttaagttttaa

SEQ ID NO: 158382 - DNA, 14 bp, Unknown
  misc_feature (1)..( 14): Result.004 file - promoters50/1020968
catataaacaacaa

SEQ ID NO: 158383 - DNA, 14 bp, Unknown
  misc_feature (1)..( 14): Result.004 file - promoters50/1020968
catgtaaatctaat

SEQ ID NO: 158384 - DNA, 14 bp, Unknown
  misc_feature (1)..( 14): Result.004 file - promoters50/1020968
tatttgagttatgt

SEQ ID NO: 158385 - DNA, 14 bp, Unknown
  misc_feature (1)..( 14): Result.004 file - promoters50/1020968
ggtttaaattttaa

SEQ ID NO: 158386 - DNA, 15 bp, Unknown
  misc_feature (1)..( 15): Result.004 file - promoters50/1020968
aattctaaaatcttc

SEQ ID NO: 158387 - DNA, 15 bp, Unknown
  misc_feature (1)..( 15): Result.004 file - promoters50/1020968
tattataaacttttt

SEQ ID NO: 158388 - DNA, 11 bp, Unknown
  misc_feature (1)..( 11): Result.004 file - promoters50/1020968
gttatagttaa

SEQ ID NO: 158389 - DNA, 11 bp, Unknown
  misc_feature (1)..( 11): Result.004 file - promoters50/1020968
tttataattac

SEQ ID NO: 158390 - DNA, 11 bp, Unknown
  misc_feature (1)..( 11): Result.004 file - promoters50/1020968
attatagattt

SEQ ID NO: 158391 - DNA, 11 bp, Unknown
  misc_feature (1)..( 11): Result.004 file - promoters50/1020968
tttatatattt

SEQ ID NO: 158392 - DNA, 11 bp, Unknown
  misc_feature (1)..( 11): Result.004 file - promoters50/1020968
tgacaaattac

SEQ ID NO: 158393 - DNA, 11 bp, Unknown
  misc_feature (1)..( 11): Result.004 file - promoters50/1020968
attaaatatgt

SEQ ID NO: 158394 - DNA, 11 bp, Unknown
  misc_feature (1)..( 11): Result.004 file - promoters50/1020968
ctaaaatatca

SEQ ID NO: 158395 - DNA, 9 bp, Unknown
  misc_feature (1)..( 9): Result.004 file - promoters50/1020968
gtcaataaa

SEQ ID NO: 158396 - DNA, 9 bp, Unknown
  misc_feature (1)..( 9): Result.004 file - promoters50/1020968
gaaaataaa

SEQ ID NO: 158397 - DNA, 9 bp, Unknown
  misc_feature (1)..( 9): Result.004 file - promoters50/1020968
cgaaataaa

SEQ ID NO: 158398 - DNA, 10 bp, Unknown
  misc_feature (1)..( 10): Result.004 file - promoters50/1020968
ataaagtaat

SEQ ID NO: 158399 - DNA, 10 bp, Unknown
  misc_feature (1)..( 10): Result.004 file - promoters50/1020968
agaaaaaaaa

SEQ ID NO: 158400 - DNA, 10 bp, Unknown
  misc_feature (1)..( 10): Result.004 file - promoters50/1020968
gaaaaataaa

SEQ ID NO: 158401 - DNA, 10 bp, Unknown
  misc_feature (1)..( 10): Result.004 file - promoters50/1020968
ttaaaatatt

SEQ ID NO: 158402 - DNA, 10 bp, Unknown
  misc_feature (1)..( 10): Result.004 file - promoters50/1020968
tttaaaatcg

SEQ ID NO: 158403 - DNA, 10 bp, Unknown
  misc_feature (1)..( 10): Result.004 file - promoters50/1020968
cgtaaaattt

SEQ ID NO: 158404 - DNA, 10 bp, Unknown
  misc_feature (1)..( 10): Result.004 file - promoters50/1020968
tttaaaattg

SEQ ID NO: 158405 - DNA, 10 bp, Unknown
  misc_feature (1)..( 10): Result.004 file - promoters50/1020968
aataaaatga

SEQ ID NO: 158406 - DNA, 10 bp, Unknown
  misc_feature (1)..( 10): Result.004 file - promoters50/1020968
tttaaaatat

SEQ ID NO: 158407 - DNA, 10 bp, Unknown
  misc_feature (1)..( 10): Result.004 file - promoters50/1020968
attaaaatat

SEQ ID NO: 158408 - DNA, 10 bp, Unknown
  misc_feature (1)..( 10): Result.004 file - promoters50/1020968
cttaatatac

SEQ ID NO: 158409 - DNA, 10 bp, Unknown
  misc_feature (1)..( 10): Result.004 file - promoters50/1021047
tggaaacttt

SEQ ID NO: 158410 - DNA, 11 bp, Unknown
  misc_feature (1)..( 11): Result.004 file - promoters50/1021047
tgttatattaa

SEQ ID NO: 158411 - DNA, 11 bp, Unknown
  misc_feature (1)..( 11): Result.004 file - promoters50/1021047
aattattttaa

SEQ ID NO: 158412 - DNA, 11 bp, Unknown
  misc_feature (1)..( 11): Result.004 file - promoters50/1021047
acttattttat

SEQ ID NO: 158413 - DNA, 12 bp, Unknown
  misc_feature (1)..( 12): Result.004 file - promoters50/1021047
gtttgattttta

SEQ ID NO: 158414 - DNA, 12 bp, Unknown
  misc_feature (1)..( 12): Result.004 file - promoters50/1021047
tttcaatattgg

SEQ ID NO: 158415 - DNA, 12 bp, Unknown
  misc_feature (1)..( 12): Result.004 file - promoters50/1021047
tttgaattcatt

SEQ ID NO: 158416 - DNA, 13 bp, Unknown
  misc_feature (1)..( 13): Result.004 file - promoters50/1021047
gaacaatcattgg

SEQ ID NO: 158417 - DNA, 13 bp, Unknown
  misc_feature (1)..( 13): Result.004 file - promoters50/1021047
gtaggatatttct

SEQ ID NO: 158418 - DNA, 11 bp, Unknown
  misc_feature (1)..( 11): Result.004 file - promoters50/1021047
ttatgtattca

SEQ ID NO: 158419 - DNA, 11 bp, Unknown
  misc_feature (1)..( 11): Result.004 file - promoters50/1021047
ttaagtagatt

SEQ ID NO: 158420 - DNA, 11 bp, Unknown
  misc_feature (1)..( 11): Result.004 file - promoters50/1021047
ataattagttt

SEQ ID NO: 158421 - DNA, 11 bp, Unknown
  misc_feature (1)..( 11): Result.004 file - promoters50/1021047
cgaagaagatt

SEQ ID NO: 158422 - DNA, 11 bp, Unknown
  misc_feature (1)..( 11): Result.004 file - promoters50/1021047
gtaattactgg

SEQ ID NO: 158423 - DNA, 11 bp, Unknown
  misc_feature (1)..( 11): Result.004 file - promoters50/1021047
agaagaagtta

SEQ ID NO: 158424 - DNA, 13 bp, Unknown
  misc_feature (1)..( 13): Result.004 file - promoters50/1021047
caagtatataaac

SEQ ID NO: 158425 - DNA, 13 bp, Unknown
  misc_feature (1)..( 13): Result.004 file - promoters50/1021047
aaattatttaaat

SEQ ID NO: 158426 - DNA, 13 bp, Unknown
  misc_feature (1)..( 13): Result.004 file - promoters50/1021047
caagaatatacat

SEQ ID NO: 158427 - DNA, 13 bp, Unknown
  misc_feature (1)..( 13): Result.004 file - promoters50/1021047
ataaaataaaaac

SEQ ID NO: 158428 - DNA, 13 bp, Unknown
  misc_feature (1)..( 13): Result.004 file - promoters50/1021047
cagtaaaataaag

SEQ ID NO: 158429 - DNA, 13 bp, Unknown
  misc_feature (1)..( 13): Result.004 file - promoters50/1021047
aagaagtaagaac

SEQ ID NO: 158430 - DNA, 13 bp, Unknown
  misc_feature (1)..( 13): Result.004 file - promoters50/1021047
gagtctataaatt

SEQ ID NO: 158431 - DNA, 13 bp, Unknown
  misc_feature (1)..( 13): Result.004 file - promoters50/1021047
tattatataaacg

SEQ ID NO: 158432 - DNA, 13 bp, Unknown
  misc_feature (1)..( 13): Result.004 file - promoters50/1021047
gtgtctataaata

SEQ ID NO: 158433 - DNA, 13 bp, Unknown
  misc_feature (1)..( 13): Result.004 file - promoters50/1021047
tattatataactc

SEQ ID NO: 158434 - DNA, 13 bp, Unknown
  misc_feature (1)..( 13): Result.004 file - promoters50/1021047
aagtatatatact

SEQ ID NO: 158435 - DNA, 13 bp, Unknown
  misc_feature (1)..( 13): Result.004 file - promoters50/1021079
aaatctataaata

SEQ ID NO: 158436 - DNA, 11 bp, Unknown
  misc_feature (1)..( 11): Result.004 file - promoters50/1021079
agtaaaatatt

SEQ ID NO: 158437 - DNA, 11 bp, Unknown
  misc_feature (1)..( 11): Result.004 file - promoters50/1021079
aataaaatctc

SEQ ID NO: 158438 - DNA, 11 bp, Unknown
  misc_feature (1)..( 11): Result.004 file - promoters50/1021079
agtaaaaatac

SEQ ID NO: 158439 - DNA, 11 bp, Unknown
  misc_feature (1)..( 11): Result.004 file - promoters50/1021079
tttaaaatata

SEQ ID NO: 158440 - DNA, 11 bp, Unknown
  misc_feature (1)..( 11): Result.004 file - promoters50/1021079
accaaaaaaaa

SEQ ID NO: 158441 - DNA, 11 bp, Unknown
  misc_feature (1)..( 11): Result.004 file - promoters50/1021079
gatataatctt

SEQ ID NO: 158442 - DNA, 11 bp, Unknown
  misc_feature (1)..( 11): Result.004 file - promoters50/1021079
aggaaaacata

SEQ ID NO: 158443 - DNA, 13 bp, Unknown
  misc_feature (1)..( 13): Result.004 file - promoters50/1021079
aattgaaacacca

SEQ ID NO: 158444 - DNA, 13 bp, Unknown
  misc_feature (1)..( 13): Result.004 file - promoters50/1021079
gtttgatacacat

SEQ ID NO: 158445 - DNA, 14 bp, Unknown
  misc_feature (1)..( 14): Result.004 file - promoters50/1021079
tgtgttttactcat

SEQ ID NO: 158446 - DNA, 13 bp, Unknown
  misc_feature (1)..( 13): Result.004 file - promoters50/1021079
tttttatatcttg

SEQ ID NO: 158447 - DNA, 14 bp, Unknown
  misc_feature (1)..( 14): Result.004 file - promoters50/1021079
atttgtataccaaa

SEQ ID NO: 158448 - DNA, 14 bp, Unknown
  misc_feature (1)..( 14): Result.004 file - promoters50/1021104
gactcttgacacaa

SEQ ID NO: 158449 - DNA, 12 bp, Unknown
  misc_feature (1)..( 12): Result.004 file - promoters50/1021104
aattctaaaatc

SEQ ID NO: 158450 - DNA, 12 bp, Unknown
  misc_feature (1)..( 12): Result.004 file - promoters50/1021104
aattcttaaatt

SEQ ID NO: 158451 - DNA, 12 bp, Unknown
  misc_feature (1)..( 12): Result.004 file - promoters50/1021104
tgttccaaattc

SEQ ID NO: 158452 - DNA, 12 bp, Unknown
  misc_feature (1)..( 12): Result.004 file - promoters50/1021104
ctttattaaatt

SEQ ID NO: 158453 - DNA, 12 bp, Unknown
  misc_feature (1)..( 12): Result.004 file - promoters50/1021104
ttttcttaggtg

SEQ ID NO: 158454 - DNA, 12 bp, Unknown
  misc_feature (1)..( 12): Result.004 file - promoters50/1021136
gtgactttaatc

SEQ ID NO: 158455 - DNA, 9 bp, Unknown
  misc_feature (1)..( 9): Result.004 file - promoters50/1021136
ttaaaaata

SEQ ID NO: 158456 - DNA, 9 bp, Unknown
  misc_feature (1)..( 9): Result.004 file - promoters50/1021136
ttaaaaatc

SEQ ID NO: 158457 - DNA, 9 bp, Unknown
  misc_feature (1)..( 9): Result.004 file - promoters50/1021136
ataataata

SEQ ID NO: 158458 - DNA, 9 bp, Unknown
  misc_feature (1)..( 9): Result.004 file - promoters50/1021136
acaaaaatc

SEQ ID NO: 158459 - DNA, 7 bp, Unknown
  misc_feature (1)..( 7): Result.004 file - promoters50/1021136
atttgtt

SEQ ID NO: 158460 - DNA, 7 bp, Unknown
  misc_feature (1)..( 7): Result.004 file - promoters50/1021136
gtttgtt

SEQ ID NO: 158461 - DNA, 7 bp, Unknown
  misc_feature (1)..( 7): Result.004 file - promoters50/1021136
ttttgtt

SEQ ID NO: 158462 - DNA, 7 bp, Unknown
  misc_feature (1)..( 7): Result.004 file - promoters50/1021136
gtttgtg

SEQ ID NO: 158463 - DNA, 8 bp, Unknown
  misc_feature (1)..( 8): Result.004 file - promoters50/1021136
caagaaaa

SEQ ID NO: 158464 - DNA, 8 bp, Unknown
  misc_feature (1)..( 8): Result.004 file - promoters50/1021136
aaagaaaa

SEQ ID NO: 158465 - DNA, 8 bp, Unknown
  misc_feature (1)..( 8): Result.004 file - promoters50/1021136
aaagaaac

SEQ ID NO: 158466 - DNA, 8 bp, Unknown
  misc_feature (1)..( 8): Result.004 file - promoters50/1021136
aaagtaaa

SEQ ID NO: 158467 - DNA, 11 bp, Unknown
  misc_feature (1)..( 11): Result.004 file - promoters50/1021136
tttttgcattt

SEQ ID NO: 158468 - DNA, 11 bp, Unknown
  misc_feature (1)..( 11): Result.004 file - promoters50/1021136
tctttgaattt

SEQ ID NO: 158469 - DNA, 11 bp, Unknown
  misc_feature (1)..( 11): Result.004 file - promoters50/1021136
tgattgcatag

SEQ ID NO: 158470 - DNA, 11 bp, Unknown
  misc_feature (1)..( 11): Result.004 file - promoters50/1021136
tctctgagttt

SEQ ID NO: 158471 - DNA, 7 bp, Unknown
  misc_feature (1)..( 7): Result.004 file - promoters50/1021136
aaaaatt

SEQ ID NO: 158472 - DNA, 7 bp, Unknown
  misc_feature (1)..( 7): Result.004 file - promoters50/1021136
aaaaata

SEQ ID NO: 158473 - DNA, 8 bp, Unknown
  misc_feature (1)..( 8): Result.004 file - promoters50/1021136
aaacaata

SEQ ID NO: 158474 - DNA, 8 bp, Unknown
  misc_feature (1)..( 8): Result.004 file - promoters50/1021148
aaaaaatc

SEQ ID NO: 158475 - DNA, 14 bp, Unknown
  misc_feature (1)..( 14): Result.004 file - promoters50/1021148
ataataattttttt

SEQ ID NO: 158476 - DNA, 14 bp, Unknown
  misc_feature (1)..( 14): Result.004 file - promoters50/1021148
gtgataatttcacg

SEQ ID NO: 158477 - DNA, 14 bp, Unknown
  misc_feature (1)..( 14): Result.004 file - promoters50/1021148
ataaaaatttgatt

SEQ ID NO: 158478 - DNA, 11 bp, Unknown
  misc_feature (1)..( 11): Result.004 file - promoters50/1021148
aatatttactt

SEQ ID NO: 158479 - DNA, 14 bp, Unknown
  misc_feature (1)..( 14): Result.004 file - promoters50/1021148
ggttgaatttgatt

SEQ ID NO: 158480 - DNA, 14 bp, Unknown
  misc_feature (1)..( 14): Result.004 file - promoters50/1021148
gtagatataaagaa

SEQ ID NO: 158481 - DNA, 11 bp, Unknown
  misc_feature (1)..( 11): Result.004 file - promoters50/1021148
aaatttgtaaa

SEQ ID NO: 158482 - DNA, 11 bp, Unknown
  misc_feature (1)..( 11): Result.004 file - promoters50/1021148
agatttgtgtc

SEQ ID NO: 158483 - DNA, 11 bp, Unknown
  misc_feature (1)..( 11): Result.004 file - promoters50/1021148
gtatttataaa

SEQ ID NO: 158484 - DNA, 11 bp, Unknown
  misc_feature (1)..( 11): Result.004 file - promoters50/1021148
acatttttaag

SEQ ID NO: 158485 - DNA, 11 bp, Unknown
  misc_feature (1)..( 11): Result.004 file - promoters50/1021148
aaatttgaaaa

SEQ ID NO: 158486 - DNA, 11 bp, Unknown
  misc_feature (1)..( 11): Result.004 file - promoters50/1021148
tcatttatcag

SEQ ID NO: 158487 - DNA, 11 bp, Unknown
  misc_feature (1)..( 11): Result.004 file - promoters50/1021148
ctttttttaca

SEQ ID NO: 158488 - DNA, 13 bp, Unknown
  misc_feature (1)..( 13): Result.004 file - promoters50/1021148
caaagaaaatata

SEQ ID NO: 158489 - DNA, 13 bp, Unknown
  misc_feature (1)..( 13): Result.004 file - promoters50/1021148
ttcaaaaattatt

SEQ ID NO: 158490 - DNA, 13 bp, Unknown
  misc_feature (1)..( 13): Result.004 file - promoters50/1021148
caaaaaaattatc

SEQ ID NO: 158491 - DNA, 14 bp, Unknown
  misc_feature (1)..( 14): Result.004 file - promoters50/1021148
gaaacgaatctaat

SEQ ID NO: 158492 - DNA, 14 bp, Unknown
  misc_feature (1)..( 14): Result.004 file - promoters50/1021148
cataaaaattcgac

SEQ ID NO: 158493 - DNA, 14 bp, Unknown
  misc_feature (1)..( 14): Result.004 file - promoters50/1021148
cataataatttgaa

SEQ ID NO: 158494 - DNA, 14 bp, Unknown
  misc_feature (1)..( 14): Result.004 file - promoters50/1021148
cgacaaaacaaact

SEQ ID NO: 158495 - DNA, 14 bp, Unknown
  misc_feature (1)..( 14): Result.004 file - promoters50/1021148
aaaaaaaatggcct

SEQ ID NO: 158496 - DNA, 14 bp, Unknown
  misc_feature (1)..( 14): Result.004 file - promoters50/1021148
agaaaaaaaacatt

SEQ ID NO: 158497 - DNA, 15 bp, Unknown
  misc_feature (1)..( 15): Result.004 file - promoters50/1021148
tgaaataaaagatgt

SEQ ID NO: 158498 - DNA, 15 bp, Unknown
  misc_feature (1)..( 15): Result.004 file - promoters50/1021148
cgaaaaaaaaataaa

SEQ ID NO: 158499 - DNA, 15 bp, Unknown
  misc_feature (1)..( 15): Result.004 file - promoters50/1021148
agaaataaaaattgg

SEQ ID NO: 158500 - DNA, 15 bp, Unknown
  misc_feature (1)..( 15): Result.004 file - promoters50/1021148
tgaaaaatataaaat

SEQ ID NO: 158501 - DNA, 15 bp, Unknown
  misc_feature (1)..( 15): Result.004 file - promoters50/1021148
acaagagaaacttgt

SEQ ID NO: 158502 - DNA, 15 bp, Unknown
  misc_feature (1)..( 15): Result.004 file - promoters50/1021148
ggtagtaaaagttta

SEQ ID NO: 158503 - DNA, 9 bp, Unknown
  misc_feature (1)..( 9): Result.004 file - promoters50/1021148
attttacta

SEQ ID NO: 158504 - DNA, 9 bp, Unknown
  misc_feature (1)..( 9): Result.004 file - promoters50/1021148
cttttacga

SEQ ID NO: 158505 - DNA, 9 bp, Unknown
  misc_feature (1)..( 9): Result.004 file - promoters50/1021148
attttataa

SEQ ID NO: 158506 - DNA, 9 bp, Unknown
  misc_feature (1)..( 9): Result.004 file - promoters50/1021148
attttatag

SEQ ID NO: 158507 - DNA, 9 bp, Unknown
  misc_feature (1)..( 9): Result.004 file - promoters50/1021148
tatttaacg

SEQ ID NO: 158508 - DNA, 9 bp, Unknown
  misc_feature (1)..( 9): Result.004 file - promoters50/1021148
atttgatat

SEQ ID NO: 158509 - DNA, 15 bp, Unknown
  misc_feature (1)..( 15): Result.004 file - promoters50/1021148
tacaagaaaaaaaaa

SEQ ID NO: 158510 - DNA, 15 bp, Unknown
  misc_feature (1)..( 15): Result.004 file - promoters50/1021148
aaaaataaaaaatta

SEQ ID NO: 158511 - DNA, 15 bp, Unknown
  misc_feature (1)..( 15): Result.004 file - promoters50/1021148
agaaataaaaattgg

SEQ ID NO: 158512 - DNA, 15 bp, Unknown
  misc_feature (1)..( 15): Result.004 file - promoters50/1021148
aatttgaaaaatata

SEQ ID NO: 158513 - DNA, 15 bp, Unknown
  misc_feature (1)..( 15): Result.004 file - promoters50/1021148
acaagagaaacttgt

SEQ ID NO: 158514 - DNA, 15 bp, Unknown
  misc_feature (1)..( 15): Result.004 file - promoters50/1021148
ggacataaaaattcg

SEQ ID NO: 158515 - DNA, 9 bp, Unknown
  misc_feature (1)..( 9): Result.004 file - promoters50/1021148
ctttatttt

SEQ ID NO: 158516 - DNA, 9 bp, Unknown
  misc_feature (1)..( 9): Result.004 file - promoters50/1021148
ttttattta

SEQ ID NO: 158517 - DNA, 9 bp, Unknown
  misc_feature (1)..( 9): Result.004 file - promoters50/1021148
ttttctttt

SEQ ID NO: 158518 - DNA, 10 bp, Unknown
  misc_feature (1)..( 10): Result.004 file - promoters50/1021148
gtttgattaa

SEQ ID NO: 158519 - DNA, 10 bp, Unknown
  misc_feature (1)..( 10): Result.004 file - promoters50/1021148
attttataat

SEQ ID NO: 158520 - DNA, 10 bp, Unknown
  misc_feature (1)..( 10): Result.004 file - promoters50/1021148
ttttgcttga

SEQ ID NO: 158521 - DNA, 15 bp, Unknown
  misc_feature (1)..( 15): Result.004 file - promoters50/1021148
cttttttttatttgc

SEQ ID NO: 158522 - DNA, 15 bp, Unknown
  misc_feature (1)..( 15): Result.004 file - promoters50/1021148
ctaatttctatccat

SEQ ID NO: 158523 - DNA, 15 bp, Unknown
  misc_feature (1)..( 15): Result.004 file - promoters50/1021148
ataatttttttgttt

SEQ ID NO: 158524 - DNA, 15 bp, Unknown
  misc_feature (1)..( 15): Result.004 file - promoters50/1021148
acaatttatattata

SEQ ID NO: 158525 - DNA, 15 bp, Unknown
  misc_feature (1)..( 15): Result.004 file - promoters50/1021148
aacatttttaagaag

SEQ ID NO: 158526 - DNA, 15 bp, Unknown
  misc_feature (1)..( 15): Result.004 file - promoters50/1021218
atctttttttacaac

SEQ ID NO: 158527 - DNA, 18 bp, Unknown
  misc_feature (1)..( 18): Result.004 file - promoters50/1021218
ttttatcacatataagct

SEQ ID NO: 158528 - DNA, 18 bp, Unknown
  misc_feature (1)..( 18): Result.004 file - promoters50/1021218
tgattttggatataatat

SEQ ID NO: 158529 - DNA, 18 bp, Unknown
  misc_feature (1)..( 18): Result.004 file - promoters50/1021218
ttcaaattcttatcagct

SEQ ID NO: 158530 - DNA, 18 bp, Unknown
  misc_feature (1)..( 18): Result.004 file - promoters50/1021218
agtcagcacacataaaat

SEQ ID NO: 158531 - DNA, 18 bp, Unknown
  misc_feature (1)..( 18): Result.004 file - promoters50/1021218
agtcggcaaacaacaaga

SEQ ID NO: 158532 - DNA, 18 bp, Unknown
  misc_feature (1)..( 18): Result.004 file - promoters50/1021218
aaccaacggagataagct

SEQ ID NO: 158533 - DNA, 17 bp, Unknown
  misc_feature (1)..( 17): Result.004 file - promoters50/1021218
gaaacgacgccattatc

SEQ ID NO: 158534 - DNA, 17 bp, Unknown
  misc_feature (1)..( 17): Result.004 file - promoters50/1021218
aagatgacgtcataatt

SEQ ID NO: 158535 - DNA, 17 bp, Unknown
  misc_feature (1)..( 17): Result.004 file - promoters50/1021218
taaacaacgcaagactc

SEQ ID NO: 158536 - DNA, 17 bp, Unknown
  misc_feature (1)..( 17): Result.004 file - promoters50/1021218
taatcaaaccaaacatg

SEQ ID NO: 158537 - DNA, 17 bp, Unknown
  misc_feature (1)..( 17): Result.004 file - promoters50/1021218
gtcaggaagtcatcatt

SEQ ID NO: 158538 - DNA, 17 bp, Unknown
  misc_feature (1)..( 17): Result.004 file - promoters50/1021239
caattaacttcatcaaa

SEQ ID NO: 158539 - DNA, 10 bp, Unknown
  misc_feature (1)..( 10): Result.004 file - promoters50/1021239
aaaaaataaa

SEQ ID NO: 158540 - DNA, 10 bp, Unknown
  misc_feature (1)..( 10): Result.004 file - promoters50/1021239
caaaaacaaa

SEQ ID NO: 158541 - DNA, 10 bp, Unknown
  misc_feature (1)..( 10): Result.004 file - promoters50/1021239
caaaaagtcg

SEQ ID NO: 158542 - DNA, 8 bp, Unknown
  misc_feature (1)..( 8): Result.004 file - promoters50/1021239
ttcgatgt

SEQ ID NO: 158543 - DNA, 8 bp, Unknown
  misc_feature (1)..( 8): Result.004 file - promoters50/1021239
ttcaatga

SEQ ID NO: 158544 - DNA, 8 bp, Unknown
  misc_feature (1)..( 8): Result.004 file - promoters50/1021239
ttctgcaa

SEQ ID NO: 158545 - DNA, 7 bp, Unknown
  misc_feature (1)..( 7): Result.004 file - promoters50/1021239
cacttaa

SEQ ID NO: 158546 - DNA, 7 bp, Unknown
  misc_feature (1)..( 7): Result.004 file - promoters50/1021239
cacttaa

SEQ ID NO: 158547 - DNA, 7 bp, Unknown
  misc_feature (1)..( 7): Result.004 file - promoters50/1021242
gacttaa

SEQ ID NO: 158548 - DNA, 11 bp, Unknown
  misc_feature (1)..( 11): Result.004 file - promoters50/1021242
aaaaaatgtga

SEQ ID NO: 158549 - DNA, 11 bp, Unknown
  misc_feature (1)..( 11): Result.004 file - promoters50/1021242
aaataattttt

SEQ ID NO: 158550 - DNA, 11 bp, Unknown
  misc_feature (1)..( 11): Result.004 file - promoters50/1021242
aaactgtgaaa

SEQ ID NO: 158551 - DNA, 11 bp, Unknown
  misc_feature (1)..( 11): Result.004 file - promoters50/1021323
ttactgtggtt

SEQ ID NO: 158552 - DNA, 11 bp, Unknown
  misc_feature (1)..( 11): Result.004 file - promoters50/1021323
cagaaacctaa

SEQ ID NO: 158553 - DNA, 11 bp, Unknown
  misc_feature (1)..( 11): Result.004 file - promoters50/1021323
ttgaaacgtaa

SEQ ID NO: 158554 - DNA, 11 bp, Unknown
  misc_feature (1)..( 11): Result.004 file - promoters50/1021323
acgaaaaaagt

SEQ ID NO: 158555 - DNA, 11 bp, Unknown
  misc_feature (1)..( 11): Result.004 file - promoters50/1021323
ttgaaaaattt

SEQ ID NO: 158556 - DNA, 11 bp, Unknown
  misc_feature (1)..( 11): Result.004 file - promoters50/1021323
aagaaaaagac

SEQ ID NO: 158557 - DNA, 11 bp, Unknown
  misc_feature (1)..( 11): Result.004 file - promoters50/1021323
gagaaaaaaag

SEQ ID NO: 158558 - DNA, 11 bp, Unknown
  misc_feature (1)..( 11): Result.004 file - promoters50/1021323
cttaaacaaga

SEQ ID NO: 158559 - DNA, 11 bp, Unknown
  misc_feature (1)..( 11): Result.004 file - promoters50/1021323
cgtaaacagta

SEQ ID NO: 158560 - DNA, 11 bp, Unknown
  misc_feature (1)..( 11): Result.004 file - promoters50/1021323
acgaaaaaagt

SEQ ID NO: 158561 - DNA, 11 bp, Unknown
  misc_feature (1)..( 11): Result.004 file - promoters50/1021323
gaaaaaaagtt

SEQ ID NO: 158562 - DNA, 11 bp, Unknown
  misc_feature (1)..( 11): Result.004 file - promoters50/1021323
ttgaaaaattt

SEQ ID NO: 158563 - DNA, 11 bp, Unknown
  misc_feature (1)..( 11): Result.004 file - promoters50/1021323
aagaaaaagac

SEQ ID NO: 158564 - DNA, 11 bp, Unknown
  misc_feature (1)..( 11): Result.004 file - promoters50/1021323
atcattttgtt

SEQ ID NO: 158565 - DNA, 11 bp, Unknown
  misc_feature (1)..( 11): Result.004 file - promoters50/1021323
ttgatttggtt

SEQ ID NO: 158566 - DNA, 11 bp, Unknown
  misc_feature (1)..( 11): Result.004 file - promoters50/1021323
aaccttttgtt

SEQ ID NO: 158567 - DNA, 11 bp, Unknown
  misc_feature (1)..( 11): Result.004 file - promoters50/1021323
atcatcttggt

SEQ ID NO: 158568 - DNA, 11 bp, Unknown
  misc_feature (1)..( 11): Result.004 file - promoters50/1021323
tgaattttgac

SEQ ID NO: 158569 - DNA, 11 bp, Unknown
  misc_feature (1)..( 11): Result.004 file - promoters50/1021323
gtgacttggag

SEQ ID NO: 158570 - DNA, 11 bp, Unknown
  misc_feature (1)..( 11): Result.004 file - promoters50/1021334
atgacgtggaa

SEQ ID NO: 158571 - DNA, 9 bp, Unknown
  misc_feature (1)..( 9): Result.004 file - promoters50/1021334
gtagataag

SEQ ID NO: 158572 - DNA, 9 bp, Unknown
  misc_feature (1)..( 9): Result.004 file - promoters50/1021334
atagaaaag

SEQ ID NO: 158573 - DNA, 9 bp, Unknown
  misc_feature (1)..( 9): Result.004 file - promoters50/1021334
atagtaaat

SEQ ID NO: 158574 - DNA, 11 bp, Unknown
  misc_feature (1)..( 11): Result.004 file - promoters50/1021334
tattttcctaa

SEQ ID NO: 158575 - DNA, 11 bp, Unknown
  misc_feature (1)..( 11): Result.004 file - promoters50/1021334
tattttgtgtt

SEQ ID NO: 158576 - DNA, 11 bp, Unknown
  misc_feature (1)..( 11): Result.004 file - promoters50/1021334
tatttttgatc

SEQ ID NO: 158577 - DNA, 11 bp, Unknown
  misc_feature (1)..( 11): Result.004 file - promoters50/1021334
aattttttgtt

SEQ ID NO: 158578 - DNA, 7 bp, Unknown
  misc_feature (1)..( 7): Result.004 file - promoters50/1021334
aaaatga

SEQ ID NO: 158579 - DNA, 7 bp, Unknown
  misc_feature (1)..( 7): Result.004 file - promoters50/1021334
aaaatgg

SEQ ID NO: 158580 - DNA, 7 bp, Unknown
  misc_feature (1)..( 7): Result.004 file - promoters50/1021334
aaagtga

SEQ ID NO: 158581 - DNA, 8 bp, Unknown
  misc_feature (1)..( 8): Result.004 file - promoters50/1021334
cagaaatg

SEQ ID NO: 158582 - DNA, 8 bp, Unknown
  misc_feature (1)..( 8): Result.004 file - promoters50/1021334
aagaaatg

SEQ ID NO: 158583 - DNA, 8 bp, Unknown
  misc_feature (1)..( 8): Result.004 file - promoters50/1021334
aagaaagt

SEQ ID NO: 158584 - DNA, 7 bp, Unknown
  misc_feature (1)..( 7): Result.004 file - promoters50/1021334
tgttgac

SEQ ID NO: 158585 - DNA, 7 bp, Unknown
  misc_feature (1)..( 7): Result.004 file - promoters50/1021334
tgtggac

SEQ ID NO: 158586 - DNA, 7 bp, Unknown
  misc_feature (1)..( 7): Result.004 file - promoters50/1021334
tgtggaa

SEQ ID NO: 158587 - DNA, 11 bp, Unknown
  misc_feature (1)..( 11): Result.004 file - promoters50/1021334
aattttgctaa

SEQ ID NO: 158588 - DNA, 11 bp, Unknown
  misc_feature (1)..( 11): Result.004 file - promoters50/1021334
aattttttgtt

SEQ ID NO: 158589 - DNA, 11 bp, Unknown
  misc_feature (1)..( 11): Result.004 file - promoters50/1021334
tattttgtgtt

SEQ ID NO: 158590 - DNA, 11 bp, Unknown
  misc_feature (1)..( 11): Result.004 file - promoters50/1021419
tcatttgtggc

SEQ ID NO: 158591 - DNA, 9 bp, Unknown
  misc_feature (1)..( 9): Result.004 file - promoters50/1021419
ggtaaatgc

SEQ ID NO: 158592 - DNA, 9 bp, Unknown
  misc_feature (1)..( 9): Result.004 file - promoters50/1021419
attaaatga

SEQ ID NO: 158593 - DNA, 9 bp, Unknown
  misc_feature (1)..( 9): Result.004 file - promoters50/1021419
tgtaaatct

SEQ ID NO: 158594 - DNA, 9 bp, Unknown
  misc_feature (1)..( 9): Result.004 file - promoters50/1021419
tttaaattt

SEQ ID NO: 158595 - DNA, 9 bp, Unknown
  misc_feature (1)..( 9): Result.004 file - promoters50/1021419
atttaatcc

SEQ ID NO: 158596 - DNA, 9 bp, Unknown
  misc_feature (1)..( 9): Result.004 file - promoters50/1021419
gggaaatga

SEQ ID NO: 158597 - DNA, 9 bp, Unknown
  misc_feature (1)..( 9): Result.004 file - promoters50/1021438
attcaattc

SEQ ID NO: 158598 - DNA, 12 bp, Unknown
  misc_feature (1)..( 12): Result.004 file - promoters50/1021438
tggttggttgca

SEQ ID NO: 158599 - DNA, 12 bp, Unknown
  misc_feature (1)..( 12): Result.004 file - promoters50/1021438
gttttgtttgtg

SEQ ID NO: 158600 - DNA, 12 bp, Unknown
  misc_feature (1)..( 12): Result.004 file - promoters50/1021438
ttagtggctgct

SEQ ID NO: 158601 - DNA, 12 bp, Unknown
  misc_feature (1)..( 12): Result.004 file - promoters50/1021438
attttgttttct

SEQ ID NO: 158602 - DNA, 12 bp, Unknown
  misc_feature (1)..( 12): Result.004 file - promoters50/1021438
tttctgtttggt

SEQ ID NO: 158603 - DNA, 12 bp, Unknown
  misc_feature (1)..( 12): Result.004 file - promoters50/1021438
tttatgttcggt

SEQ ID NO: 158604 - DNA, 12 bp, Unknown
  misc_feature (1)..( 12): Result.004 file - promoters50/1021445
ggtatgtttgat

SEQ ID NO: 158605 - DNA, 14 bp, Unknown
  misc_feature (1)..( 14): Result.004 file - promoters50/1021445
agtattaaaaatgc

SEQ ID NO: 158606 - DNA, 14 bp, Unknown
  misc_feature (1)..( 14): Result.004 file - promoters50/1021445
accattaaagctcc

SEQ ID NO: 158607 - DNA, 14 bp, Unknown
  misc_feature (1)..( 14): Result.004 file - promoters50/1021445
agttttaaagtttg

SEQ ID NO: 158608 - DNA, 14 bp, Unknown
  misc_feature (1)..( 14): Result.004 file - promoters50/1021445
tttattgaagacta

SEQ ID NO: 158609 - DNA, 14 bp, Unknown
  misc_feature (1)..( 14): Result.004 file - promoters50/1021445
ctgtttgaaatttt

SEQ ID NO: 158610 - DNA, 14 bp, Unknown
  misc_feature (1)..( 14): Result.004 file - promoters50/1021445
cgttttatatttcg

SEQ ID NO: 158611 - DNA, 11 bp, Unknown
  misc_feature (1)..( 11): Result.004 file - promoters50/1021445
ttttaaaaagg

SEQ ID NO: 158612 - DNA, 11 bp, Unknown
  misc_feature (1)..( 11): Result.004 file - promoters50/1021445
aattaaaaaaa

SEQ ID NO: 158613 - DNA, 11 bp, Unknown
  misc_feature (1)..( 11): Result.004 file - promoters50/1021445
cactaaaaagg

SEQ ID NO: 158614 - DNA, 11 bp, Unknown
  misc_feature (1)..( 11): Result.004 file - promoters50/1021445
ctcaaaaaagc

SEQ ID NO: 158615 - DNA, 11 bp, Unknown
  misc_feature (1)..( 11): Result.004 file - promoters50/1021445
aatcaaacttg

SEQ ID NO: 158616 - DNA, 12 bp, Unknown
  misc_feature (1)..( 12): Result.004 file - promoters50/1021445
ttataataaatt

SEQ ID NO: 158617 - DNA, 12 bp, Unknown
  misc_feature (1)..( 12): Result.004 file - promoters50/1021445
acataatgaatg

SEQ ID NO: 158618 - DNA, 11 bp, Unknown
  misc_feature (1)..( 11): Result.004 file - promoters50/1021445
aaaagaaattg

SEQ ID NO: 158619 - DNA, 11 bp, Unknown
  misc_feature (1)..( 11): Result.004 file - promoters50/1021445
aaaaaaaaatc

SEQ ID NO: 158620 - DNA, 11 bp, Unknown
  misc_feature (1)..( 11): Result.004 file - promoters50/1021445
agcagaaattg

SEQ ID NO: 158621 - DNA, 11 bp, Unknown
  misc_feature (1)..( 11): Result.004 file - promoters50/1021445
ataataaatta

SEQ ID NO: 158622 - DNA, 11 bp, Unknown
  misc_feature (1)..( 11): Result.004 file - promoters50/1021445
ataatgaatgg

SEQ ID NO: 158623 - DNA, 11 bp, Unknown
  misc_feature (1)..( 11): Result.004 file - promoters50/1021445
tgtagaaatga

SEQ ID NO: 158624 - DNA, 9 bp, Unknown
  misc_feature (1)..( 9): Result.004 file - promoters50/1021445
aaaacaaat

SEQ ID NO: 158625 - DNA, 9 bp, Unknown
  misc_feature (1)..( 9): Result.004 file - promoters50/1021445
aaaactaat

SEQ ID NO: 158626 - DNA, 9 bp, Unknown
  misc_feature (1)..( 9): Result.004 file - promoters50/1021445
aaaaaaatt

SEQ ID NO: 158627 - DNA, 9 bp, Unknown
  misc_feature (1)..( 9): Result.004 file - promoters50/1021445
ataacaaac

SEQ ID NO: 158628 - DNA, 9 bp, Unknown
  misc_feature (1)..( 9): Result.004 file - promoters50/1021445
gaaacaaca

SEQ ID NO: 158629 - DNA, 9 bp, Unknown
  misc_feature (1)..( 9): Result.004 file - promoters50/1021445
gtaataaac

SEQ ID NO: 158630 - DNA, 12 bp, Unknown
  misc_feature (1)..( 12): Result.004 file - promoters50/1021445
ttatcaaaacgc

SEQ ID NO: 158631 - DNA, 12 bp, Unknown
  misc_feature (1)..( 12): Result.004 file - promoters50/1021445
atataaaactct

SEQ ID NO: 158632 - DNA, 12 bp, Unknown
  misc_feature (1)..( 12): Result.004 file - promoters50/1021445
gtataaaaagcg

SEQ ID NO: 158633 - DNA, 12 bp, Unknown
  misc_feature (1)..( 12): Result.004 file - promoters50/1021445
ggataaaagctt

SEQ ID NO: 158634 - DNA, 12 bp, Unknown
  misc_feature (1)..( 12): Result.004 file - promoters50/1021445
ctataaaggctt

SEQ ID NO: 158635 - DNA, 12 bp, Unknown
  misc_feature (1)..( 12): Result.004 file - promoters50/1021445
ttataaacgctg

SEQ ID NO: 158636 - DNA, 12 bp, Unknown
  misc_feature (1)..( 12): Result.004 file - promoters50/1021445
atataaattgtt

SEQ ID NO: 158637 - DNA, 13 bp, Unknown
  misc_feature (1)..( 13): Result.004 file - promoters50/1021445
cagagaaatggtt

SEQ ID NO: 158638 - DNA, 13 bp, Unknown
  misc_feature (1)..( 13): Result.004 file - promoters50/1021445
cactaaaaaggtt

SEQ ID NO: 158639 - DNA, 13 bp, Unknown
  misc_feature (1)..( 13): Result.004 file - promoters50/1021445
actacaaaagtta

SEQ ID NO: 158640 - DNA, 13 bp, Unknown
  misc_feature (1)..( 13): Result.004 file - promoters50/1021445
aaaacaaaaagaa

SEQ ID NO: 158641 - DNA, 13 bp, Unknown
  misc_feature (1)..( 13): Result.004 file - promoters50/1021445
tcagtaaaagttt

SEQ ID NO: 158642 - DNA, 13 bp, Unknown
  misc_feature (1)..( 13): Result.004 file - promoters50/1021549
ccctcaaaaaagc

SEQ ID NO: 158643 - DNA, 10 bp, Unknown
  misc_feature (1)..( 10): Result.004 file - promoters50/1021549
atatacaatt

SEQ ID NO: 158644 - DNA, 10 bp, Unknown
  misc_feature (1)..( 10): Result.004 file - promoters50/1021549
ttattcaaac

SEQ ID NO: 158645 - DNA, 10 bp, Unknown
  misc_feature (1)..( 10): Result.004 file - promoters50/1021549
gtataattct

SEQ ID NO: 158646 - DNA, 10 bp, Unknown
  misc_feature (1)..( 10): Result.004 file - promoters50/1021549
gtattcattc

SEQ ID NO: 158647 - DNA, 10 bp, Unknown
  misc_feature (1)..( 10): Result.004 file - promoters50/1021549
gaattgaaac

SEQ ID NO: 158648 - DNA, 10 bp, Unknown
  misc_feature (1)..( 10): Result.004 file - promoters50/1021549
tcattgaaag

SEQ ID NO: 158649 - DNA, 12 bp, Unknown
  misc_feature (1)..( 12): Result.004 file - promoters50/1021549
aaagcccatttt

SEQ ID NO: 158650 - DNA, 12 bp, Unknown
  misc_feature (1)..( 12): Result.004 file - promoters50/1021549
aaagcccataga

SEQ ID NO: 158651 - DNA, 12 bp, Unknown
  misc_feature (1)..( 12): Result.004 file - promoters50/1021549
aaagcccaatag

SEQ ID NO: 158652 - DNA, 12 bp, Unknown
  misc_feature (1)..( 12): Result.004 file - promoters50/1021549
ccagcccattca

SEQ ID NO: 158653 - DNA, 12 bp, Unknown
  misc_feature (1)..( 12): Result.004 file - promoters50/1021549
atggcccaatag

SEQ ID NO: 158654 - DNA, 12 bp, Unknown
  misc_feature (1)..( 12): Result.004 file - promoters50/1021645
agggcccaacat

SEQ ID NO: 158655 - DNA, 8 bp, Unknown
  misc_feature (1)..( 8): Result.004 file - promoters50/1021645
agtccatg

SEQ ID NO: 158656 - DNA, 8 bp, Unknown
  misc_feature (1)..( 8): Result.004 file - promoters50/1021645
cttccatg

SEQ ID NO: 158657 - DNA, 8 bp, Unknown
  misc_feature (1)..( 8): Result.004 file - promoters50/1021645
ctttcatg

SEQ ID NO: 158658 - DNA, 9 bp, Unknown
  misc_feature (1)..( 9): Result.004 file - promoters50/1021645
tttgcaatt

SEQ ID NO: 158659 - DNA, 9 bp, Unknown
  misc_feature (1)..( 9): Result.004 file - promoters50/1021645
tttgaaatt

SEQ ID NO: 158660 - DNA, 9 bp, Unknown
  misc_feature (1)..( 9): Result.004 file - promoters50/1021719
agtgccatt

SEQ ID NO: 158661 - DNA, 7 bp, Unknown
  misc_feature (1)..( 7): Result.004 file - promoters50/1021719
attaatt

SEQ ID NO: 158662 - DNA, 7 bp, Unknown
  misc_feature (1)..( 7): Result.004 file - promoters50/1021719
atttatt

SEQ ID NO: 158663 - DNA, 7 bp, Unknown
  misc_feature (1)..( 7): Result.004 file - promoters50/1021772
atttatc

SEQ ID NO: 158664 - DNA, 9 bp, Unknown
  misc_feature (1)..( 9): Result.004 file - promoters50/1021772
aaatctata

SEQ ID NO: 158665 - DNA, 9 bp, Unknown
  misc_feature (1)..( 9): Result.004 file - promoters50/1021772
aaatctaac

SEQ ID NO: 158666 - DNA, 9 bp, Unknown
  misc_feature (1)..( 9): Result.004 file - promoters50/1021772
taatctata

SEQ ID NO: 158667 - DNA, 10 bp, Unknown
  misc_feature (1)..( 10): Result.004 file - promoters50/1021772
tatacaaaaa

SEQ ID NO: 158668 - DNA, 10 bp, Unknown
  misc_feature (1)..( 10): Result.004 file - promoters50/1021772
tatataaaaa

SEQ ID NO: 158669 - DNA, 10 bp, Unknown
  misc_feature (1)..( 10): Result.004 file - promoters50/1021772
attatgaaaa

SEQ ID NO: 158670 - DNA, 10 bp, Unknown
  misc_feature (1)..( 10): Result.004 file - promoters50/1021772
caataacttg

SEQ ID NO: 158671 - DNA, 10 bp, Unknown
  misc_feature (1)..( 10): Result.004 file - promoters50/1021772
caataaaagt

SEQ ID NO: 158672 - DNA, 10 bp, Unknown
  misc_feature (1)..( 10): Result.004 file - promoters50/1021833
aaataaaagt

SEQ ID NO: 158673 - DNA, 14 bp, Unknown
  misc_feature (1)..( 14): Result.004 file - promoters50/1021833
tgatgtttgattaa

SEQ ID NO: 158674 - DNA, 14 bp, Unknown
  misc_feature (1)..( 14): Result.004 file - promoters50/1021833
atatgcttgcttaa

SEQ ID NO: 158675 - DNA, 14 bp, Unknown
  misc_feature (1)..( 14): Result.004 file - promoters50/1021833
cttctttggattaa

SEQ ID NO: 158676 - DNA, 14 bp, Unknown
  misc_feature (1)..( 14): Result.004 file - promoters50/1021833
actggttttattat

SEQ ID NO: 158677 - DNA, 14 bp, Unknown
  misc_feature (1)..( 14): Result.004 file - promoters50/1021833
ggatctttagatcc

SEQ ID NO: 158678 - DNA, 14 bp, Unknown
  misc_feature (1)..( 14): Result.004 file - promoters50/1021833
agattttttttcgg

SEQ ID NO: 158679 - DNA, 14 bp, Unknown
  misc_feature (1)..( 14): Result.004 file - promoters50/1021833
ggagcttgggcaaa

SEQ ID NO: 158680 - DNA, 10 bp, Unknown
  misc_feature (1)..( 10): Result.004 file - promoters50/1021833
cttttattat

SEQ ID NO: 158681 - DNA, 10 bp, Unknown
  misc_feature (1)..( 10): Result.004 file - promoters50/1021833
gtttgattaa

SEQ ID NO: 158682 - DNA, 10 bp, Unknown
  misc_feature (1)..( 10): Result.004 file - promoters50/1021833
tctttcttat

SEQ ID NO: 158683 - DNA, 10 bp, Unknown
  misc_feature (1)..( 10): Result.004 file - promoters50/1021833
tttacattta

SEQ ID NO: 158684 - DNA, 10 bp, Unknown
  misc_feature (1)..( 10): Result.004 file - promoters50/1021833
gtttgatttg

SEQ ID NO: 158685 - DNA, 10 bp, Unknown
  misc_feature (1)..( 10): Result.004 file - promoters50/1021833
gtttgacata

SEQ ID NO: 158686 - DNA, 10 bp, Unknown
  misc_feature (1)..( 10): Result.004 file - promoters50/1021840
gttttctttg

SEQ ID NO: 158687 - DNA, 10 bp, Unknown
  misc_feature (1)..( 10): Result.004 file - promoters50/1021840
ccatattaac

SEQ ID NO: 158688 - DNA, 10 bp, Unknown
  misc_feature (1)..( 10): Result.004 file - promoters50/1021840
aaataataaa

SEQ ID NO: 158689 - DNA, 10 bp, Unknown
  misc_feature (1)..( 10): Result.004 file - promoters50/1021840
aaatcatatg

SEQ ID NO: 158690 - DNA, 10 bp, Unknown
  misc_feature (1)..( 10): Result.004 file - promoters50/1021840
acttaacaaa

SEQ ID NO: 158691 - DNA, 10 bp, Unknown
  misc_feature (1)..( 10): Result.004 file - promoters50/1021840
gaagaacaaa

SEQ ID NO: 158692 - DNA, 9 bp, Unknown
  misc_feature (1)..( 9): Result.004 file - promoters50/1021840
ctttttttt

SEQ ID NO: 158693 - DNA, 9 bp, Unknown
  misc_feature (1)..( 9): Result.004 file - promoters50/1021840
tatttattt

SEQ ID NO: 158694 - DNA, 9 bp, Unknown
  misc_feature (1)..( 9): Result.004 file - promoters50/1021840
tcttcttta

SEQ ID NO: 158695 - DNA, 9 bp, Unknown
  misc_feature (1)..( 9): Result.004 file - promoters50/1021840
tattgattc

SEQ ID NO: 158696 - DNA, 13 bp, Unknown
  misc_feature (1)..( 13): Result.004 file - promoters50/1021840
tcaaaaattatat

SEQ ID NO: 158697 - DNA, 13 bp, Unknown
  misc_feature (1)..( 13): Result.004 file - promoters50/1021840
tcaaaaatcatat

SEQ ID NO: 158698 - DNA, 13 bp, Unknown
  misc_feature (1)..( 13): Result.004 file - promoters50/1021840
acaaaaaatctaa

SEQ ID NO: 158699 - DNA, 13 bp, Unknown
  misc_feature (1)..( 13): Result.004 file - promoters50/1021862
aatgaaataataa

SEQ ID NO: 158700 - DNA, 12 bp, Unknown
  misc_feature (1)..( 12): Result.004 file - promoters50/1021862
tgatgtaatcgt

SEQ ID NO: 158701 - DNA, 12 bp, Unknown
  misc_feature (1)..( 12): Result.004 file - promoters50/1021862
ttttgtaattta

SEQ ID NO: 158702 - DNA, 12 bp, Unknown
  misc_feature (1)..( 12): Result.004 file - promoters50/1021862
tcttgtaattac

SEQ ID NO: 158703 - DNA, 12 bp, Unknown
  misc_feature (1)..( 12): Result.004 file - promoters50/1021862
aacagtagtttc

SEQ ID NO: 158704 - DNA, 12 bp, Unknown
  misc_feature (1)..( 12): Result.004 file - promoters50/1021862
ttttataaagta

SEQ ID NO: 158705 - DNA, 12 bp, Unknown
  misc_feature (1)..( 12): Result.004 file - promoters50/1021862
ttgttgagtttc

SEQ ID NO: 158706 - DNA, 14 bp, Unknown
  misc_feature (1)..( 14): Result.004 file - promoters50/1021862
catataaacaacaa

SEQ ID NO: 158707 - DNA, 14 bp, Unknown
  misc_feature (1)..( 14): Result.004 file - promoters50/1021862
catttaagttttaa

SEQ ID NO: 158708 - DNA, 14 bp, Unknown
  misc_feature (1)..( 14): Result.004 file - promoters50/1021862
tatttgagttatgt

SEQ ID NO: 158709 - DNA, 14 bp, Unknown
  misc_feature (1)..( 14): Result.004 file - promoters50/1021862
ggtttaaattttaa

SEQ ID NO: 158710 - DNA, 14 bp, Unknown
  misc_feature (1)..( 14): Result.004 file - promoters50/1021862
atggaaagtttgca

SEQ ID NO: 158711 - DNA, 14 bp, Unknown
  misc_feature (1)..( 14): Result.004 file - promoters50/1021862
tacacaaatttgtt

SEQ ID NO: 158712 - DNA, 10 bp, Unknown
  misc_feature (1)..( 10): Result.004 file - promoters50/1021862
ataatattca

SEQ ID NO: 158713 - DNA, 10 bp, Unknown
  misc_feature (1)..( 10): Result.004 file - promoters50/1021862
gaaattttca

SEQ ID NO: 158714 - DNA, 10 bp, Unknown
  misc_feature (1)..( 10): Result.004 file - promoters50/1021862
ataaaattag

SEQ ID NO: 158715 - DNA, 10 bp, Unknown
  misc_feature (1)..( 10): Result.004 file - promoters50/1021862
ttaaatttaa

SEQ ID NO: 158716 - DNA, 10 bp, Unknown
  misc_feature (1)..( 10): Result.004 file - promoters50/1021862
ttaatttttt

SEQ ID NO: 158717 - DNA, 10 bp, Unknown
  misc_feature (1)..( 10): Result.004 file - promoters50/1021862
gcaatttaga

SEQ ID NO: 158718 - DNA, 9 bp, Unknown
  misc_feature (1)..( 9): Result.004 file - promoters50/1021862
caataaaat

SEQ ID NO: 158719 - DNA, 9 bp, Unknown
  misc_feature (1)..( 9): Result.004 file - promoters50/1021862
aaataaatc

SEQ ID NO: 158720 - DNA, 9 bp, Unknown
  misc_feature (1)..( 9): Result.004 file - promoters50/1021862
aaataaact

SEQ ID NO: 158721 - DNA, 9 bp, Unknown
  misc_feature (1)..( 9): Result.004 file - promoters50/1021862
taataaata

SEQ ID NO: 158722 - DNA, 10 bp, Unknown
  misc_feature (1)..( 10): Result.004 file - promoters50/1021862
aaagtaattt

SEQ ID NO: 158723 - DNA, 10 bp, Unknown
  misc_feature (1)..( 10): Result.004 file - promoters50/1021862
acagtagttt

SEQ ID NO: 158724 - DNA, 9 bp, Unknown
  misc_feature (1)..( 9): Result.004 file - promoters50/1021862
ataaaatga

SEQ ID NO: 158725 - DNA, 9 bp, Unknown
  misc_feature (1)..( 9): Result.004 file - promoters50/1021862
gtaaaattt

SEQ ID NO: 158726 - DNA, 9 bp, Unknown
  misc_feature (1)..( 9): Result.004 file - promoters50/1021862
ttaaaatat

SEQ ID NO: 158727 - DNA, 9 bp, Unknown
  misc_feature (1)..( 9): Result.004 file - promoters50/1021862
ttaaaatcg

SEQ ID NO: 158728 - DNA, 9 bp, Unknown
  misc_feature (1)..( 9): Result.004 file - promoters50/1021862
ggaaacttt

SEQ ID NO: 158729 - DNA, 9 bp, Unknown
  misc_feature (1)..( 9): Result.004 file - promoters50/1021862
gtataatgg

SEQ ID NO: 158730 - DNA, 16 bp, Unknown
  misc_feature (1)..( 16): Result.004 file - promoters50/1021862
acaaaataaaaagatt

SEQ ID NO: 158731 - DNA, 16 bp, Unknown
  misc_feature (1)..( 16): Result.004 file - promoters50/1021862
tcaaattaagtacaca

SEQ ID NO: 158732 - DNA, 16 bp, Unknown
  misc_feature (1)..( 16): Result.004 file - promoters50/1021862
ggaaaaaaaaaaaaaa

SEQ ID NO: 158733 - DNA, 16 bp, Unknown
  misc_feature (1)..( 16): Result.004 file - promoters50/1021862
acaaatttgagtgtta

SEQ ID NO: 158734 - DNA, 16 bp, Unknown
  misc_feature (1)..( 16): Result.004 file - promoters50/1021862
tcaaatgaccaaataa

SEQ ID NO: 158735 - DNA, 16 bp, Unknown
  misc_feature (1)..( 16): Result.004 file - promoters50/1021870
gagaagaaagacgaag

SEQ ID NO: 158736 - DNA, 13 bp, Unknown
  misc_feature (1)..( 13): Result.004 file - promoters50/1021870
gatcaaaatctgg

SEQ ID NO: 158737 - DNA, 13 bp, Unknown
  misc_feature (1)..( 13): Result.004 file - promoters50/1021870
ctaaaaaatcgta

SEQ ID NO: 158738 - DNA, 13 bp, Unknown
  misc_feature (1)..( 13): Result.004 file - promoters50/1021870
gatttaaatttgg

SEQ ID NO: 158739 - DNA, 13 bp, Unknown
  misc_feature (1)..( 13): Result.004 file - promoters50/1021870
aaacaaaattgtt

SEQ ID NO: 158740 - DNA, 13 bp, Unknown
  misc_feature (1)..( 13): Result.004 file - promoters50/1021870
taacaaataatta

SEQ ID NO: 158741 - DNA, 13 bp, Unknown
  misc_feature (1)..( 13): Result.004 file - promoters50/1021870
aacctaattttaa

SEQ ID NO: 158742 - DNA, 13 bp, Unknown
  misc_feature (1)..( 13): Result.004 file - promoters50/1021870
aatcaacatatac

SEQ ID NO: 158743 - DNA, 9 bp, Unknown
  misc_feature (1)..( 9): Result.004 file - promoters50/1021870
ccataattt

SEQ ID NO: 158744 - DNA, 9 bp, Unknown
  misc_feature (1)..( 9): Result.004 file - promoters50/1021870
ccaaaatca

SEQ ID NO: 158745 - DNA, 9 bp, Unknown
  misc_feature (1)..( 9): Result.004 file - promoters50/1021870
aaataatta

SEQ ID NO: 158746 - DNA, 9 bp, Unknown
  misc_feature (1)..( 9): Result.004 file - promoters50/1021870
acatcattt

SEQ ID NO: 158747 - DNA, 9 bp, Unknown
  misc_feature (1)..( 9): Result.004 file - promoters50/1021870
aaataatta

SEQ ID NO: 158748 - DNA, 9 bp, Unknown
  misc_feature (1)..( 9): Result.004 file - promoters50/1021870
acttaatta

SEQ ID NO: 158749 - DNA, 9 bp, Unknown
  misc_feature (1)..( 9): Result.004 file - promoters50/1021870
tgatcattt

SEQ ID NO: 158750 - DNA, 13 bp, Unknown
  misc_feature (1)..( 13): Result.004 file - promoters50/1021870
gcaattttttagg

SEQ ID NO: 158751 - DNA, 13 bp, Unknown
  misc_feature (1)..( 13): Result.004 file - promoters50/1021870
tgtttttattatt

SEQ ID NO: 158752 - DNA, 13 bp, Unknown
  misc_feature (1)..( 13): Result.004 file - promoters50/1021870
ctattttattaaa

SEQ ID NO: 158753 - DNA, 13 bp, Unknown
  misc_feature (1)..( 13): Result.004 file - promoters50/1021870
gaaatttaatatt

SEQ ID NO: 158754 - DNA, 13 bp, Unknown
  misc_feature (1)..( 13): Result.004 file - promoters50/1021870
aatcttccacttt

SEQ ID NO: 158755 - DNA, 13 bp, Unknown
  misc_feature (1)..( 13): Result.004 file - promoters50/1021870
cgcatttaatcaa

SEQ ID NO: 158756 - DNA, 10 bp, Unknown
  misc_feature (1)..( 10): Result.004 file - promoters50/1021870
attacatata

SEQ ID NO: 158757 - DNA, 10 bp, Unknown
  misc_feature (1)..( 10): Result.004 file - promoters50/1021870
tcaacatata

SEQ ID NO: 158758 - DNA, 10 bp, Unknown
  misc_feature (1)..( 10): Result.004 file - promoters50/1021870
tttaaataaa

SEQ ID NO: 158759 - DNA, 10 bp, Unknown
  misc_feature (1)..( 10): Result.004 file - promoters50/1021870
gtaacaaata

SEQ ID NO: 158760 - DNA, 10 bp, Unknown
  misc_feature (1)..( 10): Result.004 file - promoters50/1021870
ctaaaaaatc

SEQ ID NO: 158761 - DNA, 10 bp, Unknown
  misc_feature (1)..( 10): Result.004 file - promoters50/1021870
tttaaatttg

SEQ ID NO: 158762 - DNA, 10 bp, Unknown
  misc_feature (1)..( 10): Result.004 file - promoters50/1021870
ttttaatcgg

SEQ ID NO: 158763 - DNA, 12 bp, Unknown
  misc_feature (1)..( 12): Result.004 file - promoters50/1021870
tttaaacaattt

SEQ ID NO: 158764 - DNA, 12 bp, Unknown
  misc_feature (1)..( 12): Result.004 file - promoters50/1021870
aacaaacaaaat

SEQ ID NO: 158765 - DNA, 12 bp, Unknown
  misc_feature (1)..( 12): Result.004 file - promoters50/1021870
tttaatcaaata

SEQ ID NO: 158766 - DNA, 12 bp, Unknown
  misc_feature (1)..( 12): Result.004 file - promoters50/1021870
gacaaacatttt

SEQ ID NO: 158767 - DNA, 12 bp, Unknown
  misc_feature (1)..( 12): Result.004 file - promoters50/1021870
gtcaagcaagcg

SEQ ID NO: 158768 - DNA, 12 bp, Unknown
  misc_feature (1)..( 12): Result.004 file - promoters50/1021870
cttcatcaaacc

SEQ ID NO: 158769 - DNA, 9 bp, Unknown
  misc_feature (1)..( 9): Result.004 file - promoters50/1021870
gatttaaat

SEQ ID NO: 158770 - DNA, 9 bp, Unknown
  misc_feature (1)..( 9): Result.004 file - promoters50/1021870
aattttaat

SEQ ID NO: 158771 - DNA, 9 bp, Unknown
  misc_feature (1)..( 9): Result.004 file - promoters50/1021870
aattcaaac

SEQ ID NO: 158772 - DNA, 9 bp, Unknown
  misc_feature (1)..( 9): Result.004 file - promoters50/1021870
tgtttaaat

SEQ ID NO: 158773 - DNA, 9 bp, Unknown
  misc_feature (1)..( 9): Result.004 file - promoters50/1021870
aattcaaag

SEQ ID NO: 158774 - DNA, 9 bp, Unknown
  misc_feature (1)..( 9): Result.004 file - promoters50/1021935
tacttaatc

SEQ ID NO: 158775 - DNA, 6 bp, Unknown
  misc_feature (1)..( 6): Result.004 file - promoters50/1021935
ttttgt

SEQ ID NO: 158776 - DNA, 6 bp, Unknown
  misc_feature (1)..( 6): Result.004 file - promoters50/1021935
ttttgt

SEQ ID NO: 158777 - DNA, 6 bp, Unknown
  misc_feature (1)..( 6): Result.004 file - promoters50/1021935
ttttgt

SEQ ID NO: 158778 - DNA, 9 bp, Unknown
  misc_feature (1)..( 9): Result.004 file - promoters50/1021935
gtgttcaga

SEQ ID NO: 158779 - DNA, 9 bp, Unknown
  misc_feature (1)..( 9): Result.004 file - promoters50/1021935
gtggtcacc

SEQ ID NO: 158780 - DNA, 9 bp, Unknown
  misc_feature (1)..( 9): Result.004 file - promoters50/1021968
atgtttaga

SEQ ID NO: 158781 - DNA, 13 bp, Unknown
  misc_feature (1)..( 13): Result.004 file - promoters50/1021968
ccaataatttaca

SEQ ID NO: 158782 - DNA, 13 bp, Unknown
  misc_feature (1)..( 13): Result.004 file - promoters50/1021968
tcaacaatgtaca

SEQ ID NO: 158783 - DNA, 13 bp, Unknown
  misc_feature (1)..( 13): Result.004 file - promoters50/1021968
ttgaaaatttata

SEQ ID NO: 158784 - DNA, 13 bp, Unknown
  misc_feature (1)..( 13): Result.004 file - promoters50/1021968
tgtataattttat

SEQ ID NO: 158785 - DNA, 13 bp, Unknown
  misc_feature (1)..( 13): Result.004 file - promoters50/1021968
taaatcatttttt

SEQ ID NO: 158786 - DNA, 13 bp, Unknown
  misc_feature (1)..( 13): Result.004 file - promoters50/1021968
gtaaaaataagaa

SEQ ID NO: 158787 - DNA, 10 bp, Unknown
  misc_feature (1)..( 10): Result.004 file - promoters50/1021968
cctttttacc

SEQ ID NO: 158788 - DNA, 10 bp, Unknown
  misc_feature (1)..( 10): Result.004 file - promoters50/1021968
ccttattatg

SEQ ID NO: 158789 - DNA, 10 bp, Unknown
  misc_feature (1)..( 10): Result.004 file - promoters50/1021968
tatttttaat

SEQ ID NO: 158790 - DNA, 11 bp, Unknown
  misc_feature (1)..( 11): Result.004 file - promoters50/1021968
aaagttttact

SEQ ID NO: 158791 - DNA, 11 bp, Unknown
  misc_feature (1)..( 11): Result.004 file - promoters50/1021968
agtctttgctt

SEQ ID NO: 158792 - DNA, 11 bp, Unknown
  misc_feature (1)..( 11): Result.004 file - promoters50/1021968
agttgtttata

SEQ ID NO: 158793 - DNA, 11 bp, Unknown
  misc_feature (1)..( 11): Result.004 file - promoters50/1021968
gtatgtttgat

SEQ ID NO: 158794 - DNA, 9 bp, Unknown
  misc_feature (1)..( 9): Result.004 file - promoters50/1021968
ggaaaaaaa

SEQ ID NO: 158795 - DNA, 9 bp, Unknown
  misc_feature (1)..( 9): Result.004 file - promoters50/1021968
agaagaaaa

SEQ ID NO: 158796 - DNA, 9 bp, Unknown
  misc_feature (1)..( 9): Result.004 file - promoters50/1021968
ataaaaaat

SEQ ID NO: 158797 - DNA, 9 bp, Unknown
  misc_feature (1)..( 9): Result.004 file - promoters50/1021968
tcaaaaaaa

SEQ ID NO: 158798 - DNA, 9 bp, Unknown
  misc_feature (1)..( 9): Result.004 file - promoters50/1021968
tcaataaac

SEQ ID NO: 158799 - DNA, 10 bp, Unknown
  misc_feature (1)..( 10): Result.004 file - promoters50/1021968
caaatacaaa

SEQ ID NO: 158800 - DNA, 11 bp, Unknown
  misc_feature (1)..( 11): Result.004 file - promoters50/1021968
ctttttaccag

SEQ ID NO: 158801 - DNA, 11 bp, Unknown
  misc_feature (1)..( 11): Result.004 file - promoters50/1021968
aagtttgccag

SEQ ID NO: 158802 - DNA, 11 bp, Unknown
  misc_feature (1)..( 11): Result.004 file - promoters50/1021968
agttttacttt

SEQ ID NO: 158803 - DNA, 11 bp, Unknown
  misc_feature (1)..( 11): Result.004 file - promoters50/1021968
gtctttgctta

SEQ ID NO: 158804 - DNA, 11 bp, Unknown
  misc_feature (1)..( 11): Result.004 file - promoters50/1021968
ttgtttatata

SEQ ID NO: 158805 - DNA, 11 bp, Unknown
  misc_feature (1)..( 11): Result.004 file - promoters50/1021976
gagttcataat

SEQ ID NO: 158806 - DNA, 9 bp, Unknown
  misc_feature (1)..( 9): Result.004 file - promoters50/1021976
ctagcgaag

SEQ ID NO: 158807 - DNA, 9 bp, Unknown
  misc_feature (1)..( 9): Result.004 file - promoters50/1021976
gtagagaag

SEQ ID NO: 158808 - DNA, 9 bp, Unknown
  misc_feature (1)..( 9): Result.004 file - promoters50/1022005
gtagagaaa

SEQ ID NO: 158809 - DNA, 15 bp, Unknown
  misc_feature (1)..( 15): Result.004 file - promoters50/1022005
tctgcaattaaaact

SEQ ID NO: 158810 - DNA, 15 bp, Unknown
  misc_feature (1)..( 15): Result.004 file - promoters50/1022005
gattcaattagtaat

SEQ ID NO: 158811 - DNA, 15 bp, Unknown
  misc_feature (1)..( 15): Result.004 file - promoters50/1022005
aaatcaaatctttct

SEQ ID NO: 158812 - DNA, 15 bp, Unknown
  misc_feature (1)..( 15): Result.004 file - promoters50/1022005
agatcacatctcact

SEQ ID NO: 158813 - DNA, 15 bp, Unknown
  misc_feature (1)..( 15): Result.004 file - promoters50/1022005
gattaaaatcgttct

SEQ ID NO: 158814 - DNA, 15 bp, Unknown
  misc_feature (1)..( 15): Result.004 file - promoters50/1022005
aaaccaatagaaaac

SEQ ID NO: 158815 - DNA, 11 bp, Unknown
  misc_feature (1)..( 11): Result.004 file - promoters50/1022005
aattaaaactt

SEQ ID NO: 158816 - DNA, 11 bp, Unknown
  misc_feature (1)..( 11): Result.004 file - promoters50/1022005
aaaaaaaactc

SEQ ID NO: 158817 - DNA, 11 bp, Unknown
  misc_feature (1)..( 11): Result.004 file - promoters50/1022005
aatcaaatctt

SEQ ID NO: 158818 - DNA, 11 bp, Unknown
  misc_feature (1)..( 11): Result.004 file - promoters50/1022005
gatcacatctc

SEQ ID NO: 158819 - DNA, 11 bp, Unknown
  misc_feature (1)..( 11): Result.004 file - promoters50/1022005
ggagaaatctc

SEQ ID NO: 158820 - DNA, 11 bp, Unknown
  misc_feature (1)..( 11): Result.004 file - promoters50/1022014
atataaaccaa

SEQ ID NO: 158821 - DNA, 10 bp, Unknown
  misc_feature (1)..( 10): Result.004 file - promoters50/1022014
cttctttatt

SEQ ID NO: 158822 - DNA, 10 bp, Unknown
  misc_feature (1)..( 10): Result.004 file - promoters50/1022014
agtctttatt

SEQ ID NO: 158823 - DNA, 10 bp, Unknown
  misc_feature (1)..( 10): Result.004 file - promoters50/1022014
cttttttatt

SEQ ID NO: 158824 - DNA, 7 bp, Unknown
  misc_feature (1)..( 7): Result.004 file - promoters50/1022014
tttgaaa

SEQ ID NO: 158825 - DNA, 7 bp, Unknown
  misc_feature (1)..( 7): Result.004 file - promoters50/1022014
tttaaaa

SEQ ID NO: 158826 - DNA, 7 bp, Unknown
  misc_feature (1)..( 7): Result.004 file - promoters50/1022014
tttgaat

SEQ ID NO: 158827 - DNA, 8 bp, Unknown
  misc_feature (1)..( 8): Result.004 file - promoters50/1022014
gtcaaaat

SEQ ID NO: 158828 - DNA, 8 bp, Unknown
  misc_feature (1)..( 8): Result.004 file - promoters50/1022014
gtcacaat

SEQ ID NO: 158829 - DNA, 8 bp, Unknown
  misc_feature (1)..( 8): Result.004 file - promoters50/1022059
gtccaaag

SEQ ID NO: 158830 - DNA, 11 bp, Unknown
  misc_feature (1)..( 11): Result.004 file - promoters50/1022059
ggttaggtcat

SEQ ID NO: 158831 - DNA, 11 bp, Unknown
  misc_feature (1)..( 11): Result.004 file - promoters50/1022059
gattaggtcat

SEQ ID NO: 158832 - DNA, 11 bp, Unknown
  misc_feature (1)..( 11): Result.004 file - promoters50/1022088
gatcaggaaag

SEQ ID NO: 158833 - DNA, 9 bp, Unknown
  misc_feature (1)..( 9): Result.004 file - promoters50/1022088
aaaatagtt

SEQ ID NO: 158834 - DNA, 9 bp, Unknown
  misc_feature (1)..( 9): Result.004 file - promoters50/1022088
ctaattgtt

SEQ ID NO: 158835 - DNA, 9 bp, Unknown
  misc_feature (1)..( 9): Result.004 file - promoters50/1022088
ctacttgga

SEQ ID NO: 158836 - DNA, 8 bp, Unknown
  misc_feature (1)..( 8): Result.004 file - promoters50/1022088
caataaag

SEQ ID NO: 158837 - DNA, 8 bp, Unknown
  misc_feature (1)..( 8): Result.004 file - promoters50/1022088
caaaaaag

SEQ ID NO: 158838 - DNA, 8 bp, Unknown
  misc_feature (1)..( 8): Result.004 file - promoters50/1022088
gaaaaaaa

SEQ ID NO: 158839 - DNA, 11 bp, Unknown
  misc_feature (1)..( 11): Result.004 file - promoters50/1022088
ttatgtttttt

SEQ ID NO: 158840 - DNA, 11 bp, Unknown
  misc_feature (1)..( 11): Result.004 file - promoters50/1022088
ttatgatttga

SEQ ID NO: 158841 - DNA, 11 bp, Unknown
  misc_feature (1)..( 11): Result.004 file - promoters50/1022088
aaatgaattga

SEQ ID NO: 158842 - DNA, 9 bp, Unknown
  misc_feature (1)..( 9): Result.004 file - promoters50/1022088
aaaagattt

SEQ ID NO: 158843 - DNA, 9 bp, Unknown
  misc_feature (1)..( 9): Result.004 file - promoters50/1022088
aaaaaattg

SEQ ID NO: 158844 - DNA, 9 bp, Unknown
  misc_feature (1)..( 9): Result.004 file - promoters50/1022088
aaaaaagta

SEQ ID NO: 158845 - DNA, 9 bp, Unknown
  misc_feature (1)..( 9): Result.004 file - promoters50/1022088
tccaaattg

SEQ ID NO: 158846 - DNA, 9 bp, Unknown
  misc_feature (1)..( 9): Result.004 file - promoters50/1022088
aaaatgaat

SEQ ID NO: 158847 - DNA, 9 bp, Unknown
  misc_feature (1)..( 9): Result.004 file - promoters50/1022088
aaattgaat

SEQ ID NO: 158848 - DNA, 9 bp, Unknown
  misc_feature (1)..( 9): Result.004 file - promoters50/1022088
aaattgtgg

SEQ ID NO: 158849 - DNA, 12 bp, Unknown
  misc_feature (1)..( 12): Result.004 file - promoters50/1022088
tacaaaaaaaat

SEQ ID NO: 158850 - DNA, 12 bp, Unknown
  misc_feature (1)..( 12): Result.004 file - promoters50/1022088
taccaaataaat

SEQ ID NO: 158851 - DNA, 12 bp, Unknown
  misc_feature (1)..( 12): Result.004 file - promoters50/1022111
tcacaaactcgc

SEQ ID NO: 158852 - DNA, 8 bp, Unknown
  misc_feature (1)..( 8): Result.004 file - promoters50/1022111
ttattttg

SEQ ID NO: 158853 - DNA, 8 bp, Unknown
  misc_feature (1)..( 8): Result.004 file - promoters50/1022111
ttatttaa

SEQ ID NO: 158854 - DNA, 8 bp, Unknown
  misc_feature (1)..( 8): Result.004 file - promoters50/1022127
atatataa

SEQ ID NO: 158855 - DNA, 8 bp, Unknown
  misc_feature (1)..( 8): Result.004 file - promoters50/1022127
caaacgat

SEQ ID NO: 158856 - DNA, 8 bp, Unknown
  misc_feature (1)..( 8): Result.004 file - promoters50/1022127
caaacgaa

SEQ ID NO: 158857 - DNA, 8 bp, Unknown
  misc_feature (1)..( 8): Result.004 file - promoters50/1022127
aaaaagat

SEQ ID NO: 158858 - DNA, 8 bp, Unknown
  misc_feature (1)..( 8): Result.004 file - promoters50/1022127
taaaaaaa

SEQ ID NO: 158859 - DNA, 8 bp, Unknown
  misc_feature (1)..( 8): Result.004 file - promoters50/1022127
caaagaaa

SEQ ID NO: 158860 - DNA, 8 bp, Unknown
  misc_feature (1)..( 8): Result.004 file - promoters50/1022131
caaagacg

SEQ ID NO: 158861 - DNA, 12 bp, Unknown
  misc_feature (1)..( 12): Result.004 file - promoters50/1022131
acttaaaatgga

SEQ ID NO: 158862 - DNA, 12 bp, Unknown
  misc_feature (1)..( 12): Result.004 file - promoters50/1022131
ttttaaaaaaag

SEQ ID NO: 158863 - DNA, 12 bp, Unknown
  misc_feature (1)..( 12): Result.004 file - promoters50/1022131
atttaaaagacc

SEQ ID NO: 158864 - DNA, 13 bp, Unknown
  misc_feature (1)..( 13): Result.004 file - promoters50/1022131
gattagaaacaga

SEQ ID NO: 158865 - DNA, 13 bp, Unknown
  misc_feature (1)..( 13): Result.004 file - promoters50/1022131
tttttaaacgagt

SEQ ID NO: 158866 - DNA, 12 bp, Unknown
  misc_feature (1)..( 12): Result.004 file - promoters50/1022131
ctgtaaaaggaa

SEQ ID NO: 158867 - DNA, 12 bp, Unknown
  misc_feature (1)..( 12): Result.004 file - promoters50/1022131
ttaaaaaaagaa

SEQ ID NO: 158868 - DNA, 12 bp, Unknown
  misc_feature (1)..( 12): Result.004 file - promoters50/1022131
ttagaaacagac

SEQ ID NO: 158869 - DNA, 12 bp, Unknown
  misc_feature (1)..( 12): Result.004 file - promoters50/1022182
aatttaaaagac

SEQ ID NO: 158870 - DNA, 9 bp, Unknown
  misc_feature (1)..( 9): Result.004 file - promoters50/1022182
tgctaaatt

SEQ ID NO: 158871 - DNA, 9 bp, Unknown
  misc_feature (1)..( 9): Result.004 file - promoters50/1022182
tgcttaatt

SEQ ID NO: 158872 - DNA, 9 bp, Unknown
  misc_feature (1)..( 9): Result.004 file - promoters50/1022182
acctatatt

SEQ ID NO: 158873 - DNA, 9 bp, Unknown
  misc_feature (1)..( 9): Result.004 file - promoters50/1022182
tggctgttt

SEQ ID NO: 158874 - DNA, 9 bp, Unknown
  misc_feature (1)..( 9): Result.004 file - promoters50/1022182
tggttgtta

SEQ ID NO: 158875 - DNA, 9 bp, Unknown
  misc_feature (1)..( 9): Result.004 file - promoters50/1022182
cagcttttt

SEQ ID NO: 158876 - DNA, 9 bp, Unknown
  misc_feature (1)..( 9): Result.004 file - promoters50/1022182
aattgattc

SEQ ID NO: 158877 - DNA, 9 bp, Unknown
  misc_feature (1)..( 9): Result.004 file - promoters50/1022182
aatttattt

SEQ ID NO: 158878 - DNA, 9 bp, Unknown
  misc_feature (1)..( 9): Result.004 file - promoters50/1022182
atttggttc

SEQ ID NO: 158879 - DNA, 10 bp, Unknown
  misc_feature (1)..( 10): Result.004 file - promoters50/1022182
agtttacttc

SEQ ID NO: 158880 - DNA, 10 bp, Unknown
  misc_feature (1)..( 10): Result.004 file - promoters50/1022182
ttttttactg

SEQ ID NO: 158881 - DNA, 10 bp, Unknown
  misc_feature (1)..( 10): Result.004 file - promoters50/1022182
tagttttctg

SEQ ID NO: 158882 - DNA, 10 bp, Unknown
  misc_feature (1)..( 10): Result.004 file - promoters50/1022182
tagtcttcaa

SEQ ID NO: 158883 - DNA, 10 bp, Unknown
  misc_feature (1)..( 10): Result.004 file - promoters50/1022182
atcttttctt

SEQ ID NO: 158884 - DNA, 8 bp, Unknown
  misc_feature (1)..( 8): Result.004 file - promoters50/1022182
ggaatctg

SEQ ID NO: 158885 - DNA, 8 bp, Unknown
  misc_feature (1)..( 8): Result.004 file - promoters50/1022182
ggaatctg

SEQ ID NO: 158886 - DNA, 8 bp, Unknown
  misc_feature (1)..( 8): Result.004 file - promoters50/1022192
ctaatctg

SEQ ID NO: 158887 - DNA, 8 bp, Unknown
  misc_feature (1)..( 8): Result.004 file - promoters50/1022192
ttgtttag

SEQ ID NO: 158888 - DNA, 8 bp, Unknown
  misc_feature (1)..( 8): Result.004 file - promoters50/1022192
ttgtttaa

SEQ ID NO: 158889 - DNA, 8 bp, Unknown
  misc_feature (1)..( 8): Result.004 file - promoters50/1022192
ttggttag

SEQ ID NO: 158890 - DNA, 8 bp, Unknown
  misc_feature (1)..( 8): Result.004 file - promoters50/1022192
tcatagtt

SEQ ID NO: 158891 - DNA, 8 bp, Unknown
  misc_feature (1)..( 8): Result.004 file - promoters50/1022192
tcaaagtc

SEQ ID NO: 158892 - DNA, 8 bp, Unknown
  misc_feature (1)..( 8): Result.004 file - promoters50/1022192
acattgtt

SEQ ID NO: 158893 - DNA, 10 bp, Unknown
  misc_feature (1)..( 10): Result.004 file - promoters50/1022192
acaatgaaaa

SEQ ID NO: 158894 - DNA, 10 bp, Unknown
  misc_feature (1)..( 10): Result.004 file - promoters50/1022192
cttatgaaat

SEQ ID NO: 158895 - DNA, 10 bp, Unknown
  misc_feature (1)..( 10): Result.004 file - promoters50/1022192
cttttgaaat

SEQ ID NO: 158896 - DNA, 13 bp, Unknown
  misc_feature (1)..( 13): Result.004 file - promoters50/1022192
ggagttattatat

SEQ ID NO: 158897 - DNA, 13 bp, Unknown
  misc_feature (1)..( 13): Result.004 file - promoters50/1022192
ggacttatgaaat

SEQ ID NO: 158898 - DNA, 13 bp, Unknown
  misc_feature (1)..( 13): Result.004 file - promoters50/1022192
catcttttgaaat

SEQ ID NO: 158899 - DNA, 10 bp, Unknown
  misc_feature (1)..( 10): Result.004 file - promoters50/1022192
gttttttacg

SEQ ID NO: 158900 - DNA, 10 bp, Unknown
  misc_feature (1)..( 10): Result.004 file - promoters50/1022192
actttttaaa

SEQ ID NO: 158901 - DNA, 10 bp, Unknown
  misc_feature (1)..( 10): Result.004 file - promoters50/1022192
acttcttaaa

SEQ ID NO: 158902 - DNA, 12 bp, Unknown
  misc_feature (1)..( 12): Result.004 file - promoters50/1022192
cttcttaccaag

SEQ ID NO: 158903 - DNA, 12 bp, Unknown
  misc_feature (1)..( 12): Result.004 file - promoters50/1022192
tttcttactaag

SEQ ID NO: 158904 - DNA, 13 bp, Unknown
  misc_feature (1)..( 13): Result.004 file - promoters50/1022192
tttacttgttggg

SEQ ID NO: 158905 - DNA, 10 bp, Unknown
  misc_feature (1)..( 10): Result.004 file - promoters50/1022192
ctttttaaaa

SEQ ID NO: 158906 - DNA, 10 bp, Unknown
  misc_feature (1)..( 10): Result.004 file - promoters50/1022192
cttttgaaat

SEQ ID NO: 158907 - DNA, 10 bp, Unknown
  misc_feature (1)..( 10): Result.004 file - promoters50/1022227
cttatgaaat

SEQ ID NO: 158908 - DNA, 11 bp, Unknown
  misc_feature (1)..( 11): Result.004 file - promoters50/1022227
gatgcattttc

SEQ ID NO: 158909 - DNA, 11 bp, Unknown
  misc_feature (1)..( 11): Result.004 file - promoters50/1022227
tttgcagtttc

SEQ ID NO: 158910 - DNA, 11 bp, Unknown
  misc_feature (1)..( 11): Result.004 file - promoters50/1022242
tttgtagtttt

SEQ ID NO: 158911 - DNA, 13 bp, Unknown
  misc_feature (1)..( 13): Result.004 file - promoters50/1022242
aaacaatatgtaa

SEQ ID NO: 158912 - DNA, 13 bp, Unknown
  misc_feature (1)..( 13): Result.004 file - promoters50/1022242
agcatatatgtaa

SEQ ID NO: 158913 - DNA, 13 bp, Unknown
  misc_feature (1)..( 13): Result.004 file - promoters50/1022242
agcatttatgtgt

SEQ ID NO: 158914 - DNA, 6 bp, Unknown
  misc_feature (1)..( 6): Result.004 file - promoters50/1022242
acataa

SEQ ID NO: 158915 - DNA, 6 bp, Unknown
  misc_feature (1)..( 6): Result.004 file - promoters50/1022242
acataa

SEQ ID NO: 158916 - DNA, 6 bp, Unknown
  misc_feature (1)..( 6): Result.004 file - promoters50/1022242
acataa

SEQ ID NO: 158917 - DNA, 11 bp, Unknown
  misc_feature (1)..( 11): Result.004 file - promoters50/1022242
aaaaaagaatt

SEQ ID NO: 158918 - DNA, 11 bp, Unknown
  misc_feature (1)..( 11): Result.004 file - promoters50/1022242
tctaaagcatt

SEQ ID NO: 158919 - DNA, 11 bp, Unknown
  misc_feature (1)..( 11): Result.004 file - promoters50/1022252
tcttaagccac

SEQ ID NO: 158920 - DNA, 8 bp, Unknown
  misc_feature (1)..( 8): Result.004 file - promoters50/1022252
taaaaatt

SEQ ID NO: 158921 - DNA, 8 bp, Unknown
  misc_feature (1)..( 8): Result.004 file - promoters50/1022252
taataatt

SEQ ID NO: 158922 - DNA, 8 bp, Unknown
  misc_feature (1)..( 8): Result.004 file - promoters50/1022252
aaaaaatt

SEQ ID NO: 158923 - DNA, 8 bp, Unknown
  misc_feature (1)..( 8): Result.004 file - promoters50/1022252
aaaaaatt

SEQ ID NO: 158924 - DNA, 8 bp, Unknown
  misc_feature (1)..( 8): Result.004 file - promoters50/1022252
aaaagatt

SEQ ID NO: 158925 - DNA, 8 bp, Unknown
  misc_feature (1)..( 8): Result.004 file - promoters50/1022252
aaaaaaaa

SEQ ID NO: 158926 - DNA, 7 bp, Unknown
  misc_feature (1)..( 7): Result.004 file - promoters50/1022252
aaaatta

SEQ ID NO: 158927 - DNA, 7 bp, Unknown
  misc_feature (1)..( 7): Result.004 file - promoters50/1022252
aaaattt

SEQ ID NO: 158928 - DNA, 7 bp, Unknown
  misc_feature (1)..( 7): Result.004 file - promoters50/1022256
gaaatta

SEQ ID NO: 158929 - DNA, 11 bp, Unknown
  misc_feature (1)..( 11): Result.004 file - promoters50/1022256
aaatattaaat

SEQ ID NO: 158930 - DNA, 11 bp, Unknown
  misc_feature (1)..( 11): Result.004 file - promoters50/1022256
aaacatttaat

SEQ ID NO: 158931 - DNA, 11 bp, Unknown
  misc_feature (1)..( 11): Result.004 file - promoters50/1022256
atttattaatt

SEQ ID NO: 158932 - DNA, 10 bp, Unknown
  misc_feature (1)..( 10): Result.004 file - promoters50/1022256
agataatgag

SEQ ID NO: 158933 - DNA, 10 bp, Unknown
  misc_feature (1)..( 10): Result.004 file - promoters50/1022256
ttataaagag

SEQ ID NO: 158934 - DNA, 10 bp, Unknown
  misc_feature (1)..( 10): Result.004 file - promoters50/1022256
agataatttt

SEQ ID NO: 158935 - DNA, 8 bp, Unknown
  misc_feature (1)..( 8): Result.004 file - promoters50/1022256
ttttttca

SEQ ID NO: 158936 - DNA, 8 bp, Unknown
  misc_feature (1)..( 8): Result.004 file - promoters50/1022256
ttttatca

SEQ ID NO: 158937 - DNA, 8 bp, Unknown
  misc_feature (1)..( 8): Result.004 file - promoters50/1022256
ttttattt

SEQ ID NO: 158938 - DNA, 11 bp, Unknown
  misc_feature (1)..( 11): Result.004 file - promoters50/1022256
tatatatatac

SEQ ID NO: 158939 - DNA, 11 bp, Unknown
  misc_feature (1)..( 11): Result.004 file - promoters50/1022256
tatataaatac

SEQ ID NO: 158940 - DNA, 11 bp, Unknown
  misc_feature (1)..( 11): Result.004 file - promoters50/1022256
gttataaaacc

SEQ ID NO: 158941 - DNA, 7 bp, Unknown
  misc_feature (1)..( 7): Result.004 file - promoters50/1022256
aaaagaa

SEQ ID NO: 158942 - DNA, 7 bp, Unknown
  misc_feature (1)..( 7): Result.004 file - promoters50/1022256
aaaagac

SEQ ID NO: 158943 - DNA, 7 bp, Unknown
  misc_feature (1)..( 7): Result.004 file - promoters50/1022256
aaaaact

SEQ ID NO: 158944 - DNA, 8 bp, Unknown
  misc_feature (1)..( 8): Result.004 file - promoters50/1022256
taaattaa

SEQ ID NO: 158945 - DNA, 8 bp, Unknown
  misc_feature (1)..( 8): Result.004 file - promoters50/1022256
aaaactaa

SEQ ID NO: 158946 - DNA, 9 bp, Unknown
  misc_feature (1)..( 9): Result.004 file - promoters50/1022264
aaagactga

SEQ ID NO: 158947 - DNA, 10 bp, Unknown
  misc_feature (1)..( 10): Result.004 file - promoters50/1022264
aaatattgtt

SEQ ID NO: 158948 - DNA, 10 bp, Unknown
  misc_feature (1)..( 10): Result.004 file - promoters50/1022264
aaagatttat

SEQ ID NO: 158949 - DNA, 10 bp, Unknown
  misc_feature (1)..( 10): Result.004 file - promoters50/1022264
aaagttttat

SEQ ID NO: 158950 - DNA, 9 bp, Unknown
  misc_feature (1)..( 9): Result.004 file - promoters50/1022264
gctcatttt

SEQ ID NO: 158951 - DNA, 9 bp, Unknown
  misc_feature (1)..( 9): Result.004 file - promoters50/1022264
aaacatttt

SEQ ID NO: 158952 - DNA, 9 bp, Unknown
  misc_feature (1)..( 9): Result.004 file - promoters50/1022264
gctcacttt

SEQ ID NO: 158953 - DNA, 17 bp, Unknown
  misc_feature (1)..( 17): Result.004 file - promoters50/1022264
attttttgtttcaaata

SEQ ID NO: 158954 - DNA, 17 bp, Unknown
  misc_feature (1)..( 17): Result.004 file - promoters50/1022264
atttttagtttgttaat

SEQ ID NO: 158955 - DNA, 17 bp, Unknown
  misc_feature (1)..( 17): Result.004 file - promoters50/1022264
ttctgttgtatcagata

SEQ ID NO: 158956 - DNA, 9 bp, Unknown
  misc_feature (1)..( 9): Result.004 file - promoters50/1022264
tttgttaat

SEQ ID NO: 158957 - DNA, 9 bp, Unknown
  misc_feature (1)..( 9): Result.004 file - promoters50/1022264
attgtaaat

SEQ ID NO: 158958 - DNA, 9 bp, Unknown
  misc_feature (1)..( 9): Result.004 file - promoters50/1022264
tttgttagc

SEQ ID NO: 158959 - DNA, 8 bp, Unknown
  misc_feature (1)..( 8): Result.004 file - promoters50/1022264
taaaatct

SEQ ID NO: 158960 - DNA, 8 bp, Unknown
  misc_feature (1)..( 8): Result.004 file - promoters50/1022264
taaaattc

SEQ ID NO: 158961 - DNA, 8 bp, Unknown
  misc_feature (1)..( 8): Result.004 file - promoters50/1022264
aaaacttc

SEQ ID NO: 158962 - DNA, 10 bp, Unknown
  misc_feature (1)..( 10): Result.004 file - promoters50/1022264
attgttttaa

SEQ ID NO: 158963 - DNA, 10 bp, Unknown
  misc_feature (1)..( 10): Result.004 file - promoters50/1022264
aaagttttat

SEQ ID NO: 158964 - DNA, 10 bp, Unknown
  misc_feature (1)..( 10): Result.004 file - promoters50/1022268
aaagatttat

SEQ ID NO: 158965 - DNA, 9 bp, Unknown
  misc_feature (1)..( 9): Result.004 file - promoters50/1022268
atcctccga

SEQ ID NO: 158966 - DNA, 9 bp, Unknown
  misc_feature (1)..( 9): Result.004 file - promoters50/1022268
ctccgccga

SEQ ID NO: 158967 - DNA, 9 bp, Unknown
  misc_feature (1)..( 9): Result.004 file - promoters50/1022292
ctccggcga

SEQ ID NO: 158968 - DNA, 12 bp, Unknown
  misc_feature (1)..( 12): Result.004 file - promoters50/1022292
agaaaataaaaa

SEQ ID NO: 158969 - DNA, 12 bp, Unknown
  misc_feature (1)..( 12): Result.004 file - promoters50/1022292
tttgaattaaat

SEQ ID NO: 158970 - DNA, 12 bp, Unknown
  misc_feature (1)..( 12): Result.004 file - promoters50/1022292
aatctataaaaa

SEQ ID NO: 158971 - DNA, 12 bp, Unknown
  misc_feature (1)..( 12): Result.004 file - promoters50/1022292
agaaaataaaaa

SEQ ID NO: 158972 - DNA, 12 bp, Unknown
  misc_feature (1)..( 12): Result.004 file - promoters50/1022292
acagaataaaaa

SEQ ID NO: 158973 - DNA, 12 bp, Unknown
  misc_feature (1)..( 12): Result.004 file - promoters50/1022292
gttgactaaaaa

SEQ ID NO: 158974 - DNA, 12 bp, Unknown
  misc_feature (1)..( 12): Result.004 file - promoters50/1022292
tatatataaaaa

SEQ ID NO: 158975 - DNA, 12 bp, Unknown
  misc_feature (1)..( 12): Result.004 file - promoters50/1022292
aaaatcaaaaat

SEQ ID NO: 158976 - DNA, 12 bp, Unknown
  misc_feature (1)..( 12): Result.004 file - promoters50/1022292
ttaattaaaaga

SEQ ID NO: 158977 - DNA, 12 bp, Unknown
  misc_feature (1)..( 12): Result.004 file - promoters50/1022292
aaaaacaaggaa

SEQ ID NO: 158978 - DNA, 12 bp, Unknown
  misc_feature (1)..( 12): Result.004 file - promoters50/1022292
gtgatcaaatcc

SEQ ID NO: 158979 - DNA, 12 bp, Unknown
  misc_feature (1)..( 12): Result.004 file - promoters50/1022292
gaaaataaaaaa

SEQ ID NO: 158980 - DNA, 12 bp, Unknown
  misc_feature (1)..( 12): Result.004 file - promoters50/1022292
tgacataaattt

SEQ ID NO: 158981 - DNA, 11 bp, Unknown
  misc_feature (1)..( 11): Result.004 file - promoters50/1022292
aacaaaagatt

SEQ ID NO: 158982 - DNA, 11 bp, Unknown
  misc_feature (1)..( 11): Result.004 file - promoters50/1022292
aaataaagatc

SEQ ID NO: 158983 - DNA, 11 bp, Unknown
  misc_feature (1)..( 11): Result.004 file - promoters50/1022292
atataaaaatt

SEQ ID NO: 158984 - DNA, 11 bp, Unknown
  misc_feature (1)..( 11): Result.004 file - promoters50/1022292
aaataaaaatc

SEQ ID NO: 158985 - DNA, 11 bp, Unknown
  misc_feature (1)..( 11): Result.004 file - promoters50/1022292
ttccaatgaaa

SEQ ID NO: 158986 - DNA, 11 bp, Unknown
  misc_feature (1)..( 11): Result.004 file - promoters50/1022292
gactaaaaaac

SEQ ID NO: 158987 - DNA, 9 bp, Unknown
  misc_feature (1)..( 9): Result.004 file - promoters50/1022292
gaaataatt

SEQ ID NO: 158988 - DNA, 9 bp, Unknown
  misc_feature (1)..( 9): Result.004 file - promoters50/1022292
caaagaata

SEQ ID NO: 158989 - DNA, 9 bp, Unknown
  misc_feature (1)..( 9): Result.004 file - promoters50/1022292
taaaaaata

SEQ ID NO: 158990 - DNA, 9 bp, Unknown
  misc_feature (1)..( 9): Result.004 file - promoters50/1022292
aaaagaatc

SEQ ID NO: 158991 - DNA, 9 bp, Unknown
  misc_feature (1)..( 9): Result.004 file - promoters50/1022292
aaaacaatt

SEQ ID NO: 158992 - DNA, 9 bp, Unknown
  misc_feature (1)..( 9): Result.004 file - promoters50/1022296
caaagaaac

SEQ ID NO: 158993 - DNA, 8 bp, Unknown
  misc_feature (1)..( 8): Result.004 file - promoters50/1022296
tatttagg

SEQ ID NO: 158994 - DNA, 8 bp, Unknown
  misc_feature (1)..( 8): Result.004 file - promoters50/1022296
tatttatg

SEQ ID NO: 158995 - DNA, 8 bp, Unknown
  misc_feature (1)..( 8): Result.004 file - promoters50/1022296
tatatatt

SEQ ID NO: 158996 - DNA, 8 bp, Unknown
  misc_feature (1)..( 8): Result.004 file - promoters50/1022296
aatttatc

SEQ ID NO: 158997 - DNA, 8 bp, Unknown
  misc_feature (1)..( 8): Result.004 file - promoters50/1022296
aatttaat

SEQ ID NO: 158998 - DNA, 8 bp, Unknown
  misc_feature (1)..( 8): Result.004 file - promoters50/1022370
aataaatt

SEQ ID NO: 158999 - DNA, 11 bp, Unknown
  misc_feature (1)..( 11): Result.004 file - promoters50/1022370
caagtatataa

SEQ ID NO: 159000 - DNA, 11 bp, Unknown
  misc_feature (1)..( 11): Result.004 file - promoters50/1022370
caactatatat

SEQ ID NO: 159001 - DNA, 11 bp, Unknown
  misc_feature (1)..( 11): Result.004 file - promoters50/1022370
gagttatatat

SEQ ID NO: 159002 - DNA, 11 bp, Unknown
  misc_feature (1)..( 11): Result.004 file - promoters50/1022370
tctctatataa

SEQ ID NO: 159003 - DNA, 11 bp, Unknown
  misc_feature (1)..( 11): Result.004 file - promoters50/1022383
taagcatacat

SEQ ID NO: 159004 - DNA, 8 bp, Unknown
  misc_feature (1)..( 8): Result.004 file - promoters50/1022383
attgcctc

SEQ ID NO: 159005 - DNA, 8 bp, Unknown
  misc_feature (1)..( 8): Result.004 file - promoters50/1022383
attgccat

SEQ ID NO: 159006 - DNA, 8 bp, Unknown
  misc_feature (1)..( 8): Result.004 file - promoters50/1022383
atttccat

SEQ ID NO: 159007 - DNA, 9 bp, Unknown
  misc_feature (1)..( 9): Result.004 file - promoters50/1022383
tcaaatgaa

SEQ ID NO: 159008 - DNA, 9 bp, Unknown
  misc_feature (1)..( 9): Result.004 file - promoters50/1022383
caaaatgaa

SEQ ID NO: 159009 - DNA, 9 bp, Unknown
  misc_feature (1)..( 9): Result.004 file - promoters50/1022383
caaaatgta

SEQ ID NO: 159010 - DNA, 7 bp, Unknown
  misc_feature (1)..( 7): Result.004 file - promoters50/1022383
agatctc

SEQ ID NO: 159011 - DNA, 7 bp, Unknown
  misc_feature (1)..( 7): Result.004 file - promoters50/1022383
agatctc

SEQ ID NO: 159012 - DNA, 7 bp, Unknown
  misc_feature (1)..( 7): Result.004 file - promoters50/1022383
agatctt

SEQ ID NO: 159013 - DNA, 7 bp, Unknown
  misc_feature (1)..( 7): Result.004 file - promoters50/1022383
cttttgc

SEQ ID NO: 159014 - DNA, 7 bp, Unknown
  misc_feature (1)..( 7): Result.004 file - promoters50/1022383
tttttgc

SEQ ID NO: 159015 - DNA, 8 bp, Unknown
  misc_feature (1)..( 8): Result.004 file - promoters50/1022383
gttattgt

SEQ ID NO: 159016 - DNA, 9 bp, Unknown
  misc_feature (1)..( 9): Result.004 file - promoters50/1022383
tcctccatg

SEQ ID NO: 159017 - DNA, 9 bp, Unknown
  misc_feature (1)..( 9): Result.004 file - promoters50/1022383
atttccatg

SEQ ID NO: 159018 - DNA, 9 bp, Unknown
  misc_feature (1)..( 9): Result.004 file - promoters50/1022389
attgccatc

SEQ ID NO: 159019 - DNA, 11 bp, Unknown
  misc_feature (1)..( 11): Result.004 file - promoters50/1022389
gcttcaatttt

SEQ ID NO: 159020 - DNA, 11 bp, Unknown
  misc_feature (1)..( 11): Result.004 file - promoters50/1022389
gcttcattttt

SEQ ID NO: 159021 - DNA, 11 bp, Unknown
  misc_feature (1)..( 11): Result.004 file - promoters50/1022389
atagcaatttt

SEQ ID NO: 159022 - DNA, 8 bp, Unknown
  misc_feature (1)..( 8): Result.004 file - promoters50/1022389
aaatatta

SEQ ID NO: 159023 - DNA, 8 bp, Unknown
  misc_feature (1)..( 8): Result.004 file - promoters50/1022389
aaatatta

SEQ ID NO: 159024 - DNA, 8 bp, Unknown
  misc_feature (1)..( 8): Result.004 file - promoters50/1022401
aaatatac

SEQ ID NO: 159025 - DNA, 8 bp, Unknown
  misc_feature (1)..( 8): Result.004 file - promoters50/1022401
taaaaata

SEQ ID NO: 159026 - DNA, 8 bp, Unknown
  misc_feature (1)..( 8): Result.004 file - promoters50/1022401
taaagata

SEQ ID NO: 159027 - DNA, 8 bp, Unknown
  misc_feature (1)..( 8): Result.004 file - promoters50/1022401
taagaata

SEQ ID NO: 159028 - DNA, 8 bp, Unknown
  misc_feature (1)..( 8): Result.004 file - promoters50/1022401
gaaaaaca

SEQ ID NO: 159029 - DNA, 8 bp, Unknown
  misc_feature (1)..( 8): Result.004 file - promoters50/1022401
taaagaca

SEQ ID NO: 159030 - DNA, 8 bp, Unknown
  misc_feature (1)..( 8): Result.004 file - promoters50/1022401
taacaatt

SEQ ID NO: 159031 - DNA, 8 bp, Unknown
  misc_feature (1)..( 8): Result.004 file - promoters50/1022401
gaaaaatg

SEQ ID NO: 159032 - DNA, 10 bp, Unknown
  misc_feature (1)..( 10): Result.004 file - promoters50/1022401
gtaaaacaaa

SEQ ID NO: 159033 - DNA, 10 bp, Unknown
  misc_feature (1)..( 10): Result.004 file - promoters50/1022401
attaaacaaa

SEQ ID NO: 159034 - DNA, 10 bp, Unknown
  misc_feature (1)..( 10): Result.004 file - promoters50/1022401
acataacact

SEQ ID NO: 159035 - DNA, 10 bp, Unknown
  misc_feature (1)..( 10): Result.004 file - promoters50/1022401
ttaaaaaaaa

SEQ ID NO: 159036 - DNA, 10 bp, Unknown
  misc_feature (1)..( 10): Result.004 file - promoters50/1022401
gactaaaaaa

SEQ ID NO: 159037 - DNA, 10 bp, Unknown
  misc_feature (1)..( 10): Result.004 file - promoters50/1022401
gtggaaaaaa

SEQ ID NO: 159038 - DNA, 9 bp, Unknown
  misc_feature (1)..( 9): Result.004 file - promoters50/1022401
taatgtaac

SEQ ID NO: 159039 - DNA, 9 bp, Unknown
  misc_feature (1)..( 9): Result.004 file - promoters50/1022401
agttgtaac

SEQ ID NO: 159040 - DNA, 9 bp, Unknown
  misc_feature (1)..( 9): Result.004 file - promoters50/1022401
aaatataaa

SEQ ID NO: 159041 - DNA, 9 bp, Unknown
  misc_feature (1)..( 9): Result.004 file - promoters50/1022401
tgttttaag

SEQ ID NO: 159042 - DNA, 9 bp, Unknown
  misc_feature (1)..( 9): Result.004 file - promoters50/1022401
ggttttatt

SEQ ID NO: 159043 - DNA, 9 bp, Unknown
  misc_feature (1)..( 9): Result.004 file - promoters50/1022401
aaataaaaa

SEQ ID NO: 159044 - DNA, 10 bp, Unknown
  misc_feature (1)..( 10): Result.004 file - promoters50/1022401
ctatttaaga

SEQ ID NO: 159045 - DNA, 10 bp, Unknown
  misc_feature (1)..( 10): Result.004 file - promoters50/1022401
gtatataata

SEQ ID NO: 159046 - DNA, 10 bp, Unknown
  misc_feature (1)..( 10): Result.004 file - promoters50/1022401
tcatttaaaa

SEQ ID NO: 159047 - DNA, 10 bp, Unknown
  misc_feature (1)..( 10): Result.004 file - promoters50/1022401
tcaattaatc

SEQ ID NO: 159048 - DNA, 10 bp, Unknown
  misc_feature (1)..( 10): Result.004 file - promoters50/1022401
ttttttaatt

SEQ ID NO: 159049 - DNA, 10 bp, Unknown
  misc_feature (1)..( 10): Result.004 file - promoters50/1022401
ttattttttg

SEQ ID NO: 159050 - DNA, 11 bp, Unknown
  misc_feature (1)..( 11): Result.004 file - promoters50/1022401
agatttttaat

SEQ ID NO: 159051 - DNA, 11 bp, Unknown
  misc_feature (1)..( 11): Result.004 file - promoters50/1022401
ttattgttagg

SEQ ID NO: 159052 - DNA, 11 bp, Unknown
  misc_feature (1)..( 11): Result.004 file - promoters50/1022401
tccttttcaat

SEQ ID NO: 159053 - DNA, 11 bp, Unknown
  misc_feature (1)..( 11): Result.004 file - promoters50/1022401
tgttttttaat

SEQ ID NO: 159054 - DNA, 11 bp, Unknown
  misc_feature (1)..( 11): Result.004 file - promoters50/1022401
tcatttaaaac

SEQ ID NO: 159055 - DNA, 11 bp, Unknown
  misc_feature (1)..( 11): Result.004 file - promoters50/1022401
ttattttttgt

SEQ ID NO: 159056 - DNA, 11 bp, Unknown
  misc_feature (1)..( 11): Result.004 file - promoters50/1022401
ataaaaagtta

SEQ ID NO: 159057 - DNA, 11 bp, Unknown
  misc_feature (1)..( 11): Result.004 file - promoters50/1022401
atataaaccta

SEQ ID NO: 159058 - DNA, 11 bp, Unknown
  misc_feature (1)..( 11): Result.004 file - promoters50/1022401
aaaaaaagtta

SEQ ID NO: 159059 - DNA, 11 bp, Unknown
  misc_feature (1)..( 11): Result.004 file - promoters50/1022401
ttataaatcgt

SEQ ID NO: 159060 - DNA, 11 bp, Unknown
  misc_feature (1)..( 11): Result.004 file - promoters50/1022401
ttataattttt

SEQ ID NO: 159061 - DNA, 11 bp, Unknown
  misc_feature (1)..( 11): Result.004 file - promoters50/1022401
caataaacgat

SEQ ID NO: 159062 - DNA, 11 bp, Unknown
  misc_feature (1)..( 11): Result.004 file - promoters50/1022401
ttattattccc

SEQ ID NO: 159063 - DNA, 11 bp, Unknown
  misc_feature (1)..( 11): Result.004 file - promoters50/1022401
gtttaaagata

SEQ ID NO: 159064 - DNA, 11 bp, Unknown
  misc_feature (1)..( 11): Result.004 file - promoters50/1022401
tgttacagaga

SEQ ID NO: 159065 - DNA, 11 bp, Unknown
  misc_feature (1)..( 11): Result.004 file - promoters50/1022401
tgtcacatatc

SEQ ID NO: 159066 - DNA, 11 bp, Unknown
  misc_feature (1)..( 11): Result.004 file - promoters50/1022401
aatcaaataat

SEQ ID NO: 159067 - DNA, 11 bp, Unknown
  misc_feature (1)..( 11): Result.004 file - promoters50/1022401
tagcaaagaat

SEQ ID NO: 159068 - DNA, 11 bp, Unknown
  misc_feature (1)..( 11): Result.004 file - promoters50/1022434
aattaaataat

SEQ ID NO: 159069 - DNA, 9 bp, Unknown
  misc_feature (1)..( 9): Result.004 file - promoters50/1022434
ccattttcg

SEQ ID NO: 159070 - DNA, 9 bp, Unknown
  misc_feature (1)..( 9): Result.004 file - promoters50/1022434
agattatcg

SEQ ID NO: 159071 - DNA, 9 bp, Unknown
  misc_feature (1)..( 9): Result.004 file - promoters50/1022441
agattatct

SEQ ID NO: 159072 - DNA, 12 bp, Unknown
  misc_feature (1)..( 12): Result.004 file - promoters50/1022441
aattgattattt

SEQ ID NO: 159073 - DNA, 12 bp, Unknown
  misc_feature (1)..( 12): Result.004 file - promoters50/1022441
aattgatttttt

SEQ ID NO: 159074 - DNA, 12 bp, Unknown
  misc_feature (1)..( 12): Result.004 file - promoters50/1022527
acttgattggta

SEQ ID NO: 159075 - DNA, 7 bp, Unknown
  misc_feature (1)..( 7): Result.004 file - promoters50/1022527
tgttaag

SEQ ID NO: 159076 - DNA, 7 bp, Unknown
  misc_feature (1)..( 7): Result.004 file - promoters50/1022527
tgtgaag

SEQ ID NO: 159077 - DNA, 7 bp, Unknown
  misc_feature (1)..( 7): Result.004 file - promoters50/1022527
tgtgaac

SEQ ID NO: 159078 - DNA, 7 bp, Unknown
  misc_feature (1)..( 7): Result.004 file - promoters50/1022527
tatgaaa

SEQ ID NO: 159079 - DNA, 7 bp, Unknown
  misc_feature (1)..( 7): Result.004 file - promoters50/1022527
tatgaac

SEQ ID NO: 159080 - DNA, 7 bp, Unknown
  misc_feature (1)..( 7): Result.004 file - promoters50/1022527
aatgaaa

SEQ ID NO: 159081 - DNA, 12 bp, Unknown
  misc_feature (1)..( 12): Result.004 file - promoters50/1022527
aataaaataatg

SEQ ID NO: 159082 - DNA, 12 bp, Unknown
  misc_feature (1)..( 12): Result.004 file - promoters50/1022527
aataaaccagat

SEQ ID NO: 159083 - DNA, 12 bp, Unknown
  misc_feature (1)..( 12): Result.004 file - promoters50/1022527
aaaaaaaattaa

SEQ ID NO: 159084 - DNA, 8 bp, Unknown
  misc_feature (1)..( 8): Result.004 file - promoters50/1022527
atagaaca

SEQ ID NO: 159085 - DNA, 8 bp, Unknown
  misc_feature (1)..( 8): Result.004 file - promoters50/1022527
ataaaact

SEQ ID NO: 159086 - DNA, 8 bp, Unknown
  misc_feature (1)..( 8): Result.004 file - promoters50/1022527
taaaaact

SEQ ID NO: 159087 - DNA, 11 bp, Unknown
  misc_feature (1)..( 11): Result.004 file - promoters50/1022527
tatgtcaaatt

SEQ ID NO: 159088 - DNA, 11 bp, Unknown
  misc_feature (1)..( 11): Result.004 file - promoters50/1022527
aatgtctaatt

SEQ ID NO: 159089 - DNA, 11 bp, Unknown
  misc_feature (1)..( 11): Result.004 file - promoters50/1022546
aatgtcttaat

SEQ ID NO: 159090 - DNA, 11 bp, Unknown
  misc_feature (1)..( 11): Result.004 file - promoters50/1022546
tcgattttcaa

SEQ ID NO: 159091 - DNA, 11 bp, Unknown
  misc_feature (1)..( 11): Result.004 file - promoters50/1022546
aagattttatt

SEQ ID NO: 159092 - DNA, 11 bp, Unknown
  misc_feature (1)..( 11): Result.004 file - promoters50/1022546
aagatttacgc

SEQ ID NO: 159093 - DNA, 11 bp, Unknown
  misc_feature (1)..( 11): Result.004 file - promoters50/1022546
aacatttaatt

SEQ ID NO: 159094 - DNA, 8 bp, Unknown
  misc_feature (1)..( 8): Result.004 file - promoters50/1022546
caaccaat

SEQ ID NO: 159095 - DNA, 8 bp, Unknown
  misc_feature (1)..( 8): Result.004 file - promoters50/1022546
caaccaat

SEQ ID NO: 159096 - DNA, 8 bp, Unknown
  misc_feature (1)..( 8): Result.004 file - promoters50/1022546
aaaccaaa

SEQ ID NO: 159097 - DNA, 13 bp, Unknown
  misc_feature (1)..( 13): Result.004 file - promoters50/1022546
gttgatctcaaaa

SEQ ID NO: 159098 - DNA, 13 bp, Unknown
  misc_feature (1)..( 13): Result.004 file - promoters50/1022546
tgcaatctcaata

SEQ ID NO: 159099 - DNA, 13 bp, Unknown
  misc_feature (1)..( 13): Result.004 file - promoters50/1022546
gtttatctgaaaa

SEQ ID NO: 159100 - DNA, 8 bp, Unknown
  misc_feature (1)..( 8): Result.004 file - promoters50/1022546
tttccgtg

SEQ ID NO: 159101 - DNA, 8 bp, Unknown
  misc_feature (1)..( 8): Result.004 file - promoters50/1022546
tttgcgtc

SEQ ID NO: 159102 - DNA, 8 bp, Unknown
  misc_feature (1)..( 8): Result.004 file - promoters50/1022546
cttccgtg

SEQ ID NO: 159103 - DNA, 7 bp, Unknown
  misc_feature (1)..( 7): Result.004 file - promoters50/1022546
taaaaaa

SEQ ID NO: 159104 - DNA, 7 bp, Unknown
  misc_feature (1)..( 7): Result.004 file - promoters50/1022546
caaaaaa

SEQ ID NO: 159105 - DNA, 7 bp, Unknown
  misc_feature (1)..( 7): Result.004 file - promoters50/1022546
taaaaag

SEQ ID NO: 159106 - DNA, 9 bp, Unknown
  misc_feature (1)..( 9): Result.004 file - promoters50/1022546
ttctcttta

SEQ ID NO: 159107 - DNA, 9 bp, Unknown
  misc_feature (1)..( 9): Result.004 file - promoters50/1022546
ctctatttt

SEQ ID NO: 159108 - DNA, 9 bp, Unknown
  misc_feature (1)..( 9): Result.004 file - promoters50/1022561
ttcccttta

SEQ ID NO: 159109 - DNA, 8 bp, Unknown
  misc_feature (1)..( 8): Result.004 file - promoters50/1022561
caaaaagt

SEQ ID NO: 159110 - DNA, 8 bp, Unknown
  misc_feature (1)..( 8): Result.004 file - promoters50/1022561
aaaaaaga

SEQ ID NO: 159111 - DNA, 8 bp, Unknown
  misc_feature (1)..( 8): Result.004 file - promoters50/1022561
aaaaaagg

SEQ ID NO: 159112 - DNA, 8 bp, Unknown
  misc_feature (1)..( 8): Result.004 file - promoters50/1022561
caaaaatt

SEQ ID NO: 159113 - DNA, 9 bp, Unknown
  misc_feature (1)..( 9): Result.004 file - promoters50/1022561
gaaaacaga

SEQ ID NO: 159114 - DNA, 9 bp, Unknown
  misc_feature (1)..( 9): Result.004 file - promoters50/1022561
gaaaaaaaa

SEQ ID NO: 159115 - DNA, 9 bp, Unknown
  misc_feature (1)..( 9): Result.004 file - promoters50/1022561
gaagaaaga

SEQ ID NO: 159116 - DNA, 9 bp, Unknown
  misc_feature (1)..( 9): Result.004 file - promoters50/1022561
caaaaaaag

SEQ ID NO: 159117 - DNA, 9 bp, Unknown
  misc_feature (1)..( 9): Result.004 file - promoters50/1022561
agagaaagg

SEQ ID NO: 159118 - DNA, 9 bp, Unknown
  misc_feature (1)..( 9): Result.004 file - promoters50/1022578
caaaatagt

SEQ ID NO: 159119 - DNA, 7 bp, Unknown
  misc_feature (1)..( 7): Result.004 file - promoters50/1022578
aaggaag

SEQ ID NO: 159120 - DNA, 7 bp, Unknown
  misc_feature (1)..( 7): Result.004 file - promoters50/1022578
aaggaaa

SEQ ID NO: 159121 - DNA, 8 bp, Unknown
  misc_feature (1)..( 8): Result.004 file - promoters50/1022586
caggtaaa

SEQ ID NO: 159122 - DNA, 9 bp, Unknown
  misc_feature (1)..( 9): Result.004 file - promoters50/1022586
aaacatttc

SEQ ID NO: 159123 - DNA, 9 bp, Unknown
  misc_feature (1)..( 9): Result.004 file - promoters50/1022586
gtacaattc

SEQ ID NO: 159124 - DNA, 9 bp, Unknown
  misc_feature (1)..( 9): Result.004 file - promoters50/1022586
aaatattga

SEQ ID NO: 159125 - DNA, 8 bp, Unknown
  misc_feature (1)..( 8): Result.004 file - promoters50/1022586
tataaata

SEQ ID NO: 159126 - DNA, 8 bp, Unknown
  misc_feature (1)..( 8): Result.004 file - promoters50/1022586
tataaaac

SEQ ID NO: 159127 - DNA, 8 bp, Unknown
  misc_feature (1)..( 8): Result.004 file - promoters50/1022586
tataaata

SEQ ID NO: 159128 - DNA, 7 bp, Unknown
  misc_feature (1)..( 7): Result.004 file - promoters50/1022586
tttgata

SEQ ID NO: 159129 - DNA, 7 bp, Unknown
  misc_feature (1)..( 7): Result.004 file - promoters50/1022586
tttaata

SEQ ID NO: 159130 - DNA, 7 bp, Unknown
  misc_feature (1)..( 7): Result.004 file - promoters50/1022586
tttaata

SEQ ID NO: 159131 - DNA, 7 bp, Unknown
  misc_feature (1)..( 7): Result.004 file - promoters50/1022586
aaaatcc

SEQ ID NO: 159132 - DNA, 7 bp, Unknown
  misc_feature (1)..( 7): Result.004 file - promoters50/1022586
aaattcc

SEQ ID NO: 159133 - DNA, 8 bp, Unknown
  misc_feature (1)..( 8): Result.004 file - promoters50/1022586
aaagttct

SEQ ID NO: 159134 - DNA, 7 bp, Unknown
  misc_feature (1)..( 7): Result.004 file - promoters50/1022586
tttgtat

SEQ ID NO: 159135 - DNA, 7 bp, Unknown
  misc_feature (1)..( 7): Result.004 file - promoters50/1022586
tttgtag

SEQ ID NO: 159136 - DNA, 7 bp, Unknown
  misc_feature (1)..( 7): Result.004 file - promoters50/1022586
tttctag

SEQ ID NO: 159137 - DNA, 9 bp, Unknown
  misc_feature (1)..( 9): Result.004 file - promoters50/1022586
cccaataaa

SEQ ID NO: 159138 - DNA, 9 bp, Unknown
  misc_feature (1)..( 9): Result.004 file - promoters50/1022586
accaaaaaa

SEQ ID NO: 159139 - DNA, 9 bp, Unknown
  misc_feature (1)..( 9): Result.004 file - promoters50/1022594
acctaaaca

SEQ ID NO: 159140 - DNA, 7 bp, Unknown
  misc_feature (1)..( 7): Result.004 file - promoters50/1022594
aaaacta

SEQ ID NO: 159141 - DNA, 7 bp, Unknown
  misc_feature (1)..( 7): Result.004 file - promoters50/1022594
gaaacta

SEQ ID NO: 159142 - DNA, 7 bp, Unknown
  misc_feature (1)..( 7): Result.004 file - promoters50/1022594
aaaactt

SEQ ID NO: 159143 - DNA, 10 bp, Unknown
  misc_feature (1)..( 10): Result.004 file - promoters50/1022594
actaaagaaa

SEQ ID NO: 159144 - DNA, 10 bp, Unknown
  misc_feature (1)..( 10): Result.004 file - promoters50/1022594
actaaataaa

SEQ ID NO: 159145 - DNA, 10 bp, Unknown
  misc_feature (1)..( 10): Result.004 file - promoters50/1022594
tagaaaaaaa

SEQ ID NO: 159146 - DNA, 10 bp, Unknown
  misc_feature (1)..( 10): Result.004 file - promoters50/1022594
cttaaataga

SEQ ID NO: 159147 - DNA, 9 bp, Unknown
  misc_feature (1)..( 9): Result.004 file - promoters50/1022594
aattgaaaa

SEQ ID NO: 159148 - DNA, 9 bp, Unknown
  misc_feature (1)..( 9): Result.004 file - promoters50/1022594
aatagaaaa

SEQ ID NO: 159149 - DNA, 9 bp, Unknown
  misc_feature (1)..( 9): Result.004 file - promoters50/1022610
catagaaaa

SEQ ID NO: 159150 - DNA, 15 bp, Unknown
  misc_feature (1)..( 15): Result.004 file - promoters50/1022610
aaaaatgtatatata

SEQ ID NO: 159151 - DNA, 15 bp, Unknown
  misc_feature (1)..( 15): Result.004 file - promoters50/1022610
atgaatttattactg

SEQ ID NO: 159152 - DNA, 15 bp, Unknown
  misc_feature (1)..( 15): Result.004 file - promoters50/1022610
gccactgtaaataaa

SEQ ID NO: 159153 - DNA, 15 bp, Unknown
  misc_feature (1)..( 15): Result.004 file - promoters50/1022610
aaaaatttatatgat

SEQ ID NO: 159154 - DNA, 15 bp, Unknown
  misc_feature (1)..( 15): Result.004 file - promoters50/1022610
gaaagtgtcaaagaa

SEQ ID NO: 159155 - DNA, 15 bp, Unknown
  misc_feature (1)..( 15): Result.004 file - promoters50/1022662
ttttgtgtaaagaaa

SEQ ID NO: 159156 - DNA, 12 bp, Unknown
  misc_feature (1)..( 12): Result.004 file - promoters50/1022662
cccatttgtaaa

SEQ ID NO: 159157 - DNA, 12 bp, Unknown
  misc_feature (1)..( 12): Result.004 file - promoters50/1022662
aatctttataaa

SEQ ID NO: 159158 - DNA, 12 bp, Unknown
  misc_feature (1)..( 12): Result.004 file - promoters50/1022662
gattcttgtaac

SEQ ID NO: 159159 - DNA, 12 bp, Unknown
  misc_feature (1)..( 12): Result.004 file - promoters50/1022662
attttttgtatc

SEQ ID NO: 159160 - DNA, 12 bp, Unknown
  misc_feature (1)..( 12): Result.004 file - promoters50/1022662
tatctttattta

SEQ ID NO: 159161 - DNA, 12 bp, Unknown
  misc_feature (1)..( 12): Result.004 file - promoters50/1022687
attttttgttcg

SEQ ID NO: 159162 - DNA, 12 bp, Unknown
  misc_feature (1)..( 12): Result.004 file - promoters50/1022687
tattattttgaa

SEQ ID NO: 159163 - DNA, 12 bp, Unknown
  misc_feature (1)..( 12): Result.004 file - promoters50/1022687
atgcattgtgag

SEQ ID NO: 159164 - DNA, 12 bp, Unknown
  misc_feature (1)..( 12): Result.004 file - promoters50/1022687
gtttatttttta

SEQ ID NO: 159165 - DNA, 12 bp, Unknown
  misc_feature (1)..( 12): Result.004 file - promoters50/1022687
ccatgtttcgaa

SEQ ID NO: 159166 - DNA, 12 bp, Unknown
  misc_feature (1)..( 12): Result.004 file - promoters50/1022687
ttttattttacc

SEQ ID NO: 159167 - DNA, 12 bp, Unknown
  misc_feature (1)..( 12): Result.004 file - promoters50/1022687
gtttctttgctc

SEQ ID NO: 159168 - DNA, 20 bp, Unknown
  misc_feature (1)..( 20): Result.004 file - promoters50/1022687
agagtttttaagaagattag

SEQ ID NO: 159169 - DNA, 20 bp, Unknown
  misc_feature (1)..( 20): Result.004 file - promoters50/1022687
tcagtgtttgatgcatagtt

SEQ ID NO: 159170 - DNA, 20 bp, Unknown
  misc_feature (1)..( 20): Result.004 file - promoters50/1022687
agagattttgatttcctaat

SEQ ID NO: 159171 - DNA, 20 bp, Unknown
  misc_feature (1)..( 20): Result.004 file - promoters50/1022687
ctcatttttattttaatggt

SEQ ID NO: 159172 - DNA, 20 bp, Unknown
  misc_feature (1)..( 20): Result.004 file - promoters50/1022687
tattattttgaacacgacaa

SEQ ID NO: 159173 - DNA, 20 bp, Unknown
  misc_feature (1)..( 20): Result.004 file - promoters50/1022687
tgatgttttaatttaaatgg

SEQ ID NO: 159174 - DNA, 11 bp, Unknown
  misc_feature (1)..( 11): Result.004 file - promoters50/1022687
agtttttaaga

SEQ ID NO: 159175 - DNA, 11 bp, Unknown
  misc_feature (1)..( 11): Result.004 file - promoters50/1022687
atgttttaatt

SEQ ID NO: 159176 - DNA, 11 bp, Unknown
  misc_feature (1)..( 11): Result.004 file - promoters50/1022687
catttttattt

SEQ ID NO: 159177 - DNA, 11 bp, Unknown
  misc_feature (1)..( 11): Result.004 file - promoters50/1022687
gattattatta

SEQ ID NO: 159178 - DNA, 11 bp, Unknown
  misc_feature (1)..( 11): Result.004 file - promoters50/1022687
caatttgattc

SEQ ID NO: 159179 - DNA, 11 bp, Unknown
  misc_feature (1)..( 11): Result.004 file - promoters50/1022687
gattttgattt

SEQ ID NO: 159180 - DNA, 11 bp, Unknown
  misc_feature (1)..( 11): Result.004 file - promoters50/1022687
atggtttaatt

SEQ ID NO: 159181 - DNA, 11 bp, Unknown
  misc_feature (1)..( 11): Result.004 file - promoters50/1022687
tttgatgcata

SEQ ID NO: 159182 - DNA, 11 bp, Unknown
  misc_feature (1)..( 11): Result.004 file - promoters50/1022687
tttgattcctt

SEQ ID NO: 159183 - DNA, 11 bp, Unknown
  misc_feature (1)..( 11): Result.004 file - promoters50/1022687
tttgatttcct

SEQ ID NO: 159184 - DNA, 11 bp, Unknown
  misc_feature (1)..( 11): Result.004 file - promoters50/1022687
gttgatgtttt

SEQ ID NO: 159185 - DNA, 11 bp, Unknown
  misc_feature (1)..( 11): Result.004 file - promoters50/1022687
tttaatggttt

SEQ ID NO: 159186 - DNA, 11 bp, Unknown
  misc_feature (1)..( 11): Result.004 file - promoters50/1022687
tttaattgctt

SEQ ID NO: 159187 - DNA, 13 bp, Unknown
  misc_feature (1)..( 13): Result.004 file - promoters50/1022687
tttgccttttgac

SEQ ID NO: 159188 - DNA, 13 bp, Unknown
  misc_feature (1)..( 13): Result.004 file - promoters50/1022687
ctgttcttttgtt

SEQ ID NO: 159189 - DNA, 13 bp, Unknown
  misc_feature (1)..( 13): Result.004 file - promoters50/1022687
tttacctttttcc

SEQ ID NO: 159190 - DNA, 13 bp, Unknown
  misc_feature (1)..( 13): Result.004 file - promoters50/1022687
aatccgttttgtt

SEQ ID NO: 159191 - DNA, 13 bp, Unknown
  misc_feature (1)..( 13): Result.004 file - promoters50/1022687
cactccttttcta

SEQ ID NO: 159192 - DNA, 13 bp, Unknown
  misc_feature (1)..( 13): Result.004 file - promoters50/1022687
taattcttttgga

SEQ ID NO: 159193 - DNA, 12 bp, Unknown
  misc_feature (1)..( 12): Result.004 file - promoters50/1022687
agttgcatactg

SEQ ID NO: 159194 - DNA, 12 bp, Unknown
  misc_feature (1)..( 12): Result.004 file - promoters50/1022687
aattgcttactg

SEQ ID NO: 159195 - DNA, 12 bp, Unknown
  misc_feature (1)..( 12): Result.004 file - promoters50/1022687
atttgattcctt

SEQ ID NO: 159196 - DNA, 12 bp, Unknown
  misc_feature (1)..( 12): Result.004 file - promoters50/1022687
ttttaatttaaa

SEQ ID NO: 159197 - DNA, 12 bp, Unknown
  misc_feature (1)..( 12): Result.004 file - promoters50/1022687
ttttgatttcct

SEQ ID NO: 159198 - DNA, 12 bp, Unknown
  misc_feature (1)..( 12): Result.004 file - promoters50/1022728
ttttaatggttt

SEQ ID NO: 159199 - DNA, 8 bp, Unknown
  misc_feature (1)..( 8): Result.004 file - promoters50/1022728
agtacatg

SEQ ID NO: 159200 - DNA, 8 bp, Unknown
  misc_feature (1)..( 8): Result.004 file - promoters50/1022728
agtaaatg

SEQ ID NO: 159201 - DNA, 8 bp, Unknown
  misc_feature (1)..( 8): Result.004 file - promoters50/1022728
agtaaaga

SEQ ID NO: 159202 - DNA, 8 bp, Unknown
  misc_feature (1)..( 8): Result.004 file - promoters50/1022728
agtaaaga

SEQ ID NO: 159203 - DNA, 8 bp, Unknown
  misc_feature (1)..( 8): Result.004 file - promoters50/1022728
gatgtttt

SEQ ID NO: 159204 - DNA, 8 bp, Unknown
  misc_feature (1)..( 8): Result.004 file - promoters50/1022728
gatttttt

SEQ ID NO: 159205 - DNA, 8 bp, Unknown
  misc_feature (1)..( 8): Result.004 file - promoters50/1022728
aatttttg

SEQ ID NO: 159206 - DNA, 7 bp, Unknown
  misc_feature (1)..( 7): Result.004 file - promoters50/1022728
aaaaaca

SEQ ID NO: 159207 - DNA, 7 bp, Unknown
  misc_feature (1)..( 7): Result.004 file - promoters50/1022728
aaaaact

SEQ ID NO: 159208 - DNA, 7 bp, Unknown
  misc_feature (1)..( 7): Result.004 file - promoters50/1022728
aaagact

SEQ ID NO: 159209 - DNA, 7 bp, Unknown
  misc_feature (1)..( 7): Result.004 file - promoters50/1022728
ggaaaga

SEQ ID NO: 159210 - DNA, 7 bp, Unknown
  misc_feature (1)..( 7): Result.004 file - promoters50/1022728
agaaaga

SEQ ID NO: 159211 - DNA, 7 bp, Unknown
  misc_feature (1)..( 7): Result.004 file - promoters50/1022728
aaaaaga

SEQ ID NO: 159212 - DNA, 11 bp, Unknown
  misc_feature (1)..( 11): Result.004 file - promoters50/1022728
caattgtaata

SEQ ID NO: 159213 - DNA, 11 bp, Unknown
  misc_feature (1)..( 11): Result.004 file - promoters50/1022728
caattataata

SEQ ID NO: 159214 - DNA, 11 bp, Unknown
  misc_feature (1)..( 11): Result.004 file - promoters50/1022728
atattataatt

SEQ ID NO: 159215 - DNA, 9 bp, Unknown
  misc_feature (1)..( 9): Result.004 file - promoters50/1022728
gtgaaaata

SEQ ID NO: 159216 - DNA, 9 bp, Unknown
  misc_feature (1)..( 9): Result.004 file - promoters50/1022728
aagaaaata

SEQ ID NO: 159217 - DNA, 9 bp, Unknown
  misc_feature (1)..( 9): Result.004 file - promoters50/1022742
aagtaaaga

SEQ ID NO: 159218 - DNA, 7 bp, Unknown
  misc_feature (1)..( 7): Result.004 file - promoters50/1022742
cgttttt

SEQ ID NO: 159219 - DNA, 7 bp, Unknown
  misc_feature (1)..( 7): Result.004 file - promoters50/1022742
agttttt

SEQ ID NO: 159220 - DNA, 7 bp, Unknown
  misc_feature (1)..( 7): Result.004 file - promoters50/1022742
cgttttt

SEQ ID NO: 159221 - DNA, 8 bp, Unknown
  misc_feature (1)..( 8): Result.004 file - promoters50/1022742
ttttaaat

SEQ ID NO: 159222 - DNA, 8 bp, Unknown
  misc_feature (1)..( 8): Result.004 file - promoters50/1022742
ttttgaat

SEQ ID NO: 159223 - DNA, 8 bp, Unknown
  misc_feature (1)..( 8): Result.004 file - promoters50/1022742
ttttgagt

SEQ ID NO: 159224 - DNA, 9 bp, Unknown
  misc_feature (1)..( 9): Result.004 file - promoters50/1022742
aaataagcg

SEQ ID NO: 159225 - DNA, 9 bp, Unknown
  misc_feature (1)..( 9): Result.004 file - promoters50/1022742
aaaaaagaa

SEQ ID NO: 159226 - DNA, 9 bp, Unknown
  misc_feature (1)..( 9): Result.004 file - promoters50/1022748
caaaacgaa

SEQ ID NO: 159227 - DNA, 8 bp, Unknown
  misc_feature (1)..( 8): Result.004 file - promoters50/1022748
aaagtttt

SEQ ID NO: 159228 - DNA, 8 bp, Unknown
  misc_feature (1)..( 8): Result.004 file - promoters50/1022748
gaagtttg

SEQ ID NO: 159229 - DNA, 9 bp, Unknown
  misc_feature (1)..( 9): Result.004 file - promoters50/1022748
aaatgtttg

SEQ ID NO: 159230 - DNA, 9 bp, Unknown
  misc_feature (1)..( 9): Result.004 file - promoters50/1022748
caaagttgt

SEQ ID NO: 159231 - DNA, 9 bp, Unknown
  misc_feature (1)..( 9): Result.004 file - promoters50/1022748
caaattttt

SEQ ID NO: 159232 - DNA, 9 bp, Unknown
  misc_feature (1)..( 9): Result.004 file - promoters50/1022748
taatgtttc

SEQ ID NO: 159233 - DNA, 13 bp, Unknown
  misc_feature (1)..( 13): Result.004 file - promoters50/1022748
aattaaaaatggg

SEQ ID NO: 159234 - DNA, 13 bp, Unknown
  misc_feature (1)..( 13): Result.004 file - promoters50/1022748
ttttaaaaaaggg

SEQ ID NO: 159235 - DNA, 13 bp, Unknown
  misc_feature (1)..( 13): Result.004 file - promoters50/1022748
tattaaagtttgg

SEQ ID NO: 159236 - DNA, 13 bp, Unknown
  misc_feature (1)..( 13): Result.004 file - promoters50/1022748
aattaaagaccaa

SEQ ID NO: 159237 - DNA, 13 bp, Unknown
  misc_feature (1)..( 13): Result.004 file - promoters50/1022748
tggcccaaaaggg

SEQ ID NO: 159238 - DNA, 13 bp, Unknown
  misc_feature (1)..( 13): Result.004 file - promoters50/1022748
tattaagaaaggc

SEQ ID NO: 159239 - DNA, 13 bp, Unknown
  misc_feature (1)..( 13): Result.004 file - promoters50/1022748
agttcaaaaaaaa

SEQ ID NO: 159240 - DNA, 13 bp, Unknown
  misc_feature (1)..( 13): Result.004 file - promoters50/1022748
ttagttaaaaaag

SEQ ID NO: 159241 - DNA, 13 bp, Unknown
  misc_feature (1)..( 13): Result.004 file - promoters50/1022748
tttcttaaaaaat

SEQ ID NO: 159242 - DNA, 13 bp, Unknown
  misc_feature (1)..( 13): Result.004 file - promoters50/1022748
atatataaaaatt

SEQ ID NO: 159243 - DNA, 13 bp, Unknown
  misc_feature (1)..( 13): Result.004 file - promoters50/1022748
atatgtaaaacga

SEQ ID NO: 159244 - DNA, 13 bp, Unknown
  misc_feature (1)..( 13): Result.004 file - promoters50/1022748
gagaataaaaatt

SEQ ID NO: 159245 - DNA, 11 bp, Unknown
  misc_feature (1)..( 11): Result.004 file - promoters50/1022748
gaaaataaaaa

SEQ ID NO: 159246 - DNA, 11 bp, Unknown
  misc_feature (1)..( 11): Result.004 file - promoters50/1022748
atatataaaaa

SEQ ID NO: 159247 - DNA, 11 bp, Unknown
  misc_feature (1)..( 11): Result.004 file - promoters50/1022748
agtcaaacaaa

SEQ ID NO: 159248 - DNA, 11 bp, Unknown
  misc_feature (1)..( 11): Result.004 file - promoters50/1022748
gagaataaaaa

SEQ ID NO: 159249 - DNA, 11 bp, Unknown
  misc_feature (1)..( 11): Result.004 file - promoters50/1022748
tttcttaaaaa

SEQ ID NO: 159250 - DNA, 11 bp, Unknown
  misc_feature (1)..( 11): Result.004 file - promoters50/1022785
atatgtaaaac

SEQ ID NO: 159251 - DNA, 10 bp, Unknown
  misc_feature (1)..( 10): Result.004 file - promoters50/1022785
gcagaagaag

SEQ ID NO: 159252 - DNA, 10 bp, Unknown
  misc_feature (1)..( 10): Result.004 file - promoters50/1022785
gcagaggaag

SEQ ID NO: 159253 - DNA, 10 bp, Unknown
  misc_feature (1)..( 10): Result.004 file - promoters50/1022785
gcaaaagtct

SEQ ID NO: 159254 - DNA, 10 bp, Unknown
  misc_feature (1)..( 10): Result.004 file - promoters50/1022785
gcaaaaacca

SEQ ID NO: 159255 - DNA, 7 bp, Unknown
  misc_feature (1)..( 7): Result.004 file - promoters50/1022785
gtaagat

SEQ ID NO: 159256 - DNA, 7 bp, Unknown
  misc_feature (1)..( 7): Result.004 file - promoters50/1022785
gtaagag

SEQ ID NO: 159257 - DNA, 7 bp, Unknown
  misc_feature (1)..( 7): Result.004 file - promoters50/1022785
gtacgag

SEQ ID NO: 159258 - DNA, 14 bp, Unknown
  misc_feature (1)..( 14): Result.004 file - promoters50/1022785
ttgctaaaaccctt

SEQ ID NO: 159259 - DNA, 14 bp, Unknown
  misc_feature (1)..( 14): Result.004 file - promoters50/1022785
ttgataaaaccaaa

SEQ ID NO: 159260 - DNA, 14 bp, Unknown
  misc_feature (1)..( 14): Result.004 file - promoters50/1022793
ccaagtaaactaaa

SEQ ID NO: 159261 - DNA, 11 bp, Unknown
  misc_feature (1)..( 11): Result.004 file - promoters50/1022793
caattaggttt

SEQ ID NO: 159262 - DNA, 11 bp, Unknown
  misc_feature (1)..( 11): Result.004 file - promoters50/1022793
aaatgaggttt

SEQ ID NO: 159263 - DNA, 11 bp, Unknown
  misc_feature (1)..( 11): Result.004 file - promoters50/1022814
caactagttga

SEQ ID NO: 159264 - DNA, 11 bp, Unknown
  misc_feature (1)..( 11): Result.004 file - promoters50/1022814
tataaattata

SEQ ID NO: 159265 - DNA, 11 bp, Unknown
  misc_feature (1)..( 11): Result.004 file - promoters50/1022814
tataaaggaaa

SEQ ID NO: 159266 - DNA, 11 bp, Unknown
  misc_feature (1)..( 11): Result.004 file - promoters50/1022814
aataaataata

SEQ ID NO: 159267 - DNA, 11 bp, Unknown
  misc_feature (1)..( 11): Result.004 file - promoters50/1022814
ataaattatat

SEQ ID NO: 159268 - DNA, 11 bp, Unknown
  misc_feature (1)..( 11): Result.004 file - promoters50/1022814
aatacttatat

SEQ ID NO: 159269 - DNA, 11 bp, Unknown
  misc_feature (1)..( 11): Result.004 file - promoters50/1022824
ataaataatac

SEQ ID NO: 159270 - DNA, 10 bp, Unknown
  misc_feature (1)..( 10): Result.004 file - promoters50/1022824
ataaactctc

SEQ ID NO: 159271 - DNA, 10 bp, Unknown
  misc_feature (1)..( 10): Result.004 file - promoters50/1022824
ataaactaat

SEQ ID NO: 159272 - DNA, 10 bp, Unknown
  misc_feature (1)..( 10): Result.004 file - promoters50/1022824
aaaaactaaa

SEQ ID NO: 159273 - DNA, 10 bp, Unknown
  misc_feature (1)..( 10): Result.004 file - promoters50/1022824
aggtactaaa

SEQ ID NO: 159274 - DNA, 12 bp, Unknown
  misc_feature (1)..( 12): Result.004 file - promoters50/1022824
gcgttttcagtt

SEQ ID NO: 159275 - DNA, 12 bp, Unknown
  misc_feature (1)..( 12): Result.004 file - promoters50/1022824
ctcttttaagtt

SEQ ID NO: 159276 - DNA, 12 bp, Unknown
  misc_feature (1)..( 12): Result.004 file - promoters50/1022824
cccttttactta

SEQ ID NO: 159277 - DNA, 12 bp, Unknown
  misc_feature (1)..( 12): Result.004 file - promoters50/1022824
aagttttatgtc

SEQ ID NO: 159278 - DNA, 9 bp, Unknown
  misc_feature (1)..( 9): Result.004 file - promoters50/1022824
ttactcatt

SEQ ID NO: 159279 - DNA, 9 bp, Unknown
  misc_feature (1)..( 9): Result.004 file - promoters50/1022824
aaactaatt

SEQ ID NO: 159280 - DNA, 9 bp, Unknown
  misc_feature (1)..( 9): Result.004 file - promoters50/1022824
aaactaaaa

SEQ ID NO: 159281 - DNA, 9 bp, Unknown
  misc_feature (1)..( 9): Result.004 file - promoters50/1022932
gtactaaac

SEQ ID NO: 159282 - DNA, 9 bp, Unknown
  misc_feature (1)..( 9): Result.004 file - promoters50/1022932
cttaatttc

SEQ ID NO: 159283 - DNA, 9 bp, Unknown
  misc_feature (1)..( 9): Result.004 file - promoters50/1022932
tttacttta

SEQ ID NO: 159284 - DNA, 9 bp, Unknown
  misc_feature (1)..( 9): Result.004 file - promoters50/1022932
gttactttt

SEQ ID NO: 159285 - DNA, 9 bp, Unknown
  misc_feature (1)..( 9): Result.004 file - promoters50/1022932
cttaattat

SEQ ID NO: 159286 - DNA, 9 bp, Unknown
  misc_feature (1)..( 9): Result.004 file - promoters50/1022932
ccaaatttc

SEQ ID NO: 159287 - DNA, 9 bp, Unknown
  misc_feature (1)..( 9): Result.004 file - promoters50/1022979
gcaactttg

SEQ ID NO: 159288 - DNA, 9 bp, Unknown
  misc_feature (1)..( 9): Result.004 file - promoters50/1022979
acccatttt

SEQ ID NO: 159289 - DNA, 9 bp, Unknown
  misc_feature (1)..( 9): Result.004 file - promoters50/1022979
taacatttt

SEQ ID NO: 159290 - DNA, 9 bp, Unknown
  misc_feature (1)..( 9): Result.004 file - promoters50/1022979
taaaatttt

SEQ ID NO: 159291 - DNA, 9 bp, Unknown
  misc_feature (1)..( 9): Result.004 file - promoters50/1022979
tttttctct

SEQ ID NO: 159292 - DNA, 9 bp, Unknown
  misc_feature (1)..( 9): Result.004 file - promoters50/1022979
tttttctct

SEQ ID NO: 159293 - DNA, 9 bp, Unknown
  misc_feature (1)..( 9): Result.004 file - promoters50/1022983
ggtttctcc

SEQ ID NO: 159294 - DNA, 10 bp, Unknown
  misc_feature (1)..( 10): Result.004 file - promoters50/1022983
atttcttatt

SEQ ID NO: 159295 - DNA, 10 bp, Unknown
  misc_feature (1)..( 10): Result.004 file - promoters50/1022983
atttctccta

SEQ ID NO: 159296 - DNA, 10 bp, Unknown
  misc_feature (1)..( 10): Result.004 file - promoters50/1022983
ttttattaca

SEQ ID NO: 159297 - DNA, 10 bp, Unknown
  misc_feature (1)..( 10): Result.004 file - promoters50/1022983
atttcatatg

SEQ ID NO: 159298 - DNA, 10 bp, Unknown
  misc_feature (1)..( 10): Result.004 file - promoters50/1022983
gtttaattct

SEQ ID NO: 159299 - DNA, 10 bp, Unknown
  misc_feature (1)..( 10): Result.004 file - promoters50/1022987
gtttaaataa

SEQ ID NO: 159300 - DNA, 10 bp, Unknown
  misc_feature (1)..( 10): Result.004 file - promoters50/1022987
agtcttgtga

SEQ ID NO: 159301 - DNA, 10 bp, Unknown
  misc_feature (1)..( 10): Result.004 file - promoters50/1022987
tgtcttgttc

SEQ ID NO: 159302 - DNA, 10 bp, Unknown
  misc_feature (1)..( 10): Result.004 file - promoters50/1022987
agtctttcag

SEQ ID NO: 159303 - DNA, 11 bp, Unknown
  misc_feature (1)..( 11): Result.004 file - promoters50/1022987
taaacttgtgt

SEQ ID NO: 159304 - DNA, 11 bp, Unknown
  misc_feature (1)..( 11): Result.004 file - promoters50/1022987
ccaacttcttc

SEQ ID NO: 159305 - DNA, 11 bp, Unknown
  misc_feature (1)..( 11): Result.004 file - promoters50/1023029
tgtcgttccta

SEQ ID NO: 159306 - DNA, 7 bp, Unknown
  misc_feature (1)..( 7): Result.004 file - promoters50/1023029
cgtatac

SEQ ID NO: 159307 - DNA, 7 bp, Unknown
  misc_feature (1)..( 7): Result.004 file - promoters50/1023029
cgtatat

SEQ ID NO: 159308 - DNA, 7 bp, Unknown
  misc_feature (1)..( 7): Result.004 file - promoters50/1023029
agtatat

SEQ ID NO: 159309 - DNA, 9 bp, Unknown
  misc_feature (1)..( 9): Result.004 file - promoters50/1023029
ataggttac

SEQ ID NO: 159310 - DNA, 9 bp, Unknown
  misc_feature (1)..( 9): Result.004 file - promoters50/1023029
atatgttgc

SEQ ID NO: 159311 - DNA, 9 bp, Unknown
  misc_feature (1)..( 9): Result.004 file - promoters50/1023029
atagtttac

SEQ ID NO: 159312 - DNA, 9 bp, Unknown
  misc_feature (1)..( 9): Result.004 file - promoters50/1023029
gatatttta

SEQ ID NO: 159313 - DNA, 9 bp, Unknown
  misc_feature (1)..( 9): Result.004 file - promoters50/1023029
taaatttta

SEQ ID NO: 159314 - DNA, 9 bp, Unknown
  misc_feature (1)..( 9): Result.004 file - promoters50/1023029
ataatttga

SEQ ID NO: 159315 - DNA, 11 bp, Unknown
  misc_feature (1)..( 11): Result.004 file - promoters50/1023029
atatatatgaa

SEQ ID NO: 159316 - DNA, 11 bp, Unknown
  misc_feature (1)..( 11): Result.004 file - promoters50/1023029
aagtatatgaa

SEQ ID NO: 159317 - DNA, 11 bp, Unknown
  misc_feature (1)..( 11): Result.004 file - promoters50/1023029
aagcatattta

SEQ ID NO: 159318 - DNA, 9 bp, Unknown
  misc_feature (1)..( 9): Result.004 file - promoters50/1023029
caatataaa

SEQ ID NO: 159319 - DNA, 9 bp, Unknown
  misc_feature (1)..( 9): Result.004 file - promoters50/1023029
caatataaa

SEQ ID NO: 159320 - DNA, 9 bp, Unknown
  misc_feature (1)..( 9): Result.004 file - promoters50/1023029
ctatataac

SEQ ID NO: 159321 - DNA, 10 bp, Unknown
  misc_feature (1)..( 10): Result.004 file - promoters50/1023029
gatacttaat

SEQ ID NO: 159322 - DNA, 10 bp, Unknown
  misc_feature (1)..( 10): Result.004 file - promoters50/1023029
tttactcaat

SEQ ID NO: 159323 - DNA, 10 bp, Unknown
  misc_feature (1)..( 10): Result.004 file - promoters50/1023029
tttactcacc

SEQ ID NO: 159324 - DNA, 9 bp, Unknown
  misc_feature (1)..( 9): Result.004 file - promoters50/1023029
gaacatatt

SEQ ID NO: 159325 - DNA, 9 bp, Unknown
  misc_feature (1)..( 9): Result.004 file - promoters50/1023029
aagcatatt

SEQ ID NO: 159326 - DNA, 9 bp, Unknown
  misc_feature (1)..( 9): Result.004 file - promoters50/1023029
aagtatatg

SEQ ID NO: 159327 - DNA, 8 bp, Unknown
  misc_feature (1)..( 8): Result.004 file - promoters50/1023029
tttaaatt

SEQ ID NO: 159328 - DNA, 8 bp, Unknown
  misc_feature (1)..( 8): Result.004 file - promoters50/1023029
tttatatt

SEQ ID NO: 159329 - DNA, 8 bp, Unknown
  misc_feature (1)..( 8): Result.004 file - promoters50/1023037
tttgtata

SEQ ID NO: 159330 - DNA, 9 bp, Unknown
  misc_feature (1)..( 9): Result.004 file - promoters50/1023037
gggcatatt

SEQ ID NO: 159331 - DNA, 9 bp, Unknown
  misc_feature (1)..( 9): Result.004 file - promoters50/1023037
gggtatata

SEQ ID NO: 159332 - DNA, 9 bp, Unknown
  misc_feature (1)..( 9): Result.004 file - promoters50/1023037
tggtagata

SEQ ID NO: 159333 - DNA, 11 bp, Unknown
  misc_feature (1)..( 11): Result.004 file - promoters50/1023037
acagtttataa

SEQ ID NO: 159334 - DNA, 11 bp, Unknown
  misc_feature (1)..( 11): Result.004 file - promoters50/1023037
agagtatatta

SEQ ID NO: 159335 - DNA, 11 bp, Unknown
  misc_feature (1)..( 11): Result.004 file - promoters50/1023037
acaatttataa

SEQ ID NO: 159336 - DNA, 9 bp, Unknown
  misc_feature (1)..( 9): Result.004 file - promoters50/1023037
tgattcact

SEQ ID NO: 159337 - DNA, 9 bp, Unknown
  misc_feature (1)..( 9): Result.004 file - promoters50/1023037
aaattcact

SEQ ID NO: 159338 - DNA, 9 bp, Unknown
  misc_feature (1)..( 9): Result.004 file - promoters50/1023062
aaatgcacc

SEQ ID NO: 159339 - DNA, 11 bp, Unknown
  misc_feature (1)..( 11): Result.004 file - promoters50/1023062
taaaaaatgtt

SEQ ID NO: 159340 - DNA, 11 bp, Unknown
  misc_feature (1)..( 11): Result.004 file - promoters50/1023062
tgaaaaattca

SEQ ID NO: 159341 - DNA, 11 bp, Unknown
  misc_feature (1)..( 11): Result.004 file - promoters50/1023062
ataaaaaaatc

SEQ ID NO: 159342 - DNA, 12 bp, Unknown
  misc_feature (1)..( 12): Result.004 file - promoters50/1023062
ctaaagaatttt

SEQ ID NO: 159343 - DNA, 12 bp, Unknown
  misc_feature (1)..( 12): Result.004 file - promoters50/1023062
ccaaaaacgtta

SEQ ID NO: 159344 - DNA, 12 bp, Unknown
  misc_feature (1)..( 12): Result.004 file - promoters50/1023062
gaaaataataat

SEQ ID NO: 159345 - DNA, 12 bp, Unknown
  misc_feature (1)..( 12): Result.004 file - promoters50/1023062
ctacagaatggg

SEQ ID NO: 159346 - DNA, 10 bp, Unknown
  misc_feature (1)..( 10): Result.004 file - promoters50/1023062
gtttcttatc

SEQ ID NO: 159347 - DNA, 10 bp, Unknown
  misc_feature (1)..( 10): Result.004 file - promoters50/1023062
atttattatc

SEQ ID NO: 159348 - DNA, 10 bp, Unknown
  misc_feature (1)..( 10): Result.004 file - promoters50/1023062
atttcttttc

SEQ ID NO: 159349 - DNA, 10 bp, Unknown
  misc_feature (1)..( 10): Result.004 file - promoters50/1023062
tcttcttacg

SEQ ID NO: 159350 - DNA, 10 bp, Unknown
  misc_feature (1)..( 10): Result.004 file - promoters50/1023062
ttttctttgt

SEQ ID NO: 159351 - DNA, 11 bp, Unknown
  misc_feature (1)..( 11): Result.004 file - promoters50/1023079
ctttacttcaa

SEQ ID NO: 159352 - DNA, 8 bp, Unknown
  misc_feature (1)..( 8): Result.004 file - promoters50/1023079
tttgtttg

SEQ ID NO: 159353 - DNA, 8 bp, Unknown
  misc_feature (1)..( 8): Result.004 file - promoters50/1023079
tttcttta

SEQ ID NO: 159354 - DNA, 8 bp, Unknown
  misc_feature (1)..( 8): Result.004 file - promoters50/1023079
tttgattg

SEQ ID NO: 159355 - DNA, 8 bp, Unknown
  misc_feature (1)..( 8): Result.004 file - promoters50/1023079
aatcttta

SEQ ID NO: 159356 - DNA, 8 bp, Unknown
  misc_feature (1)..( 8): Result.004 file - promoters50/1023079
tttgtttg

SEQ ID NO: 159357 - DNA, 14 bp, Unknown
  misc_feature (1)..( 14): Result.004 file - promoters50/1023079
gatctaacggctaa

SEQ ID NO: 159358 - DNA, 14 bp, Unknown
  misc_feature (1)..( 14): Result.004 file - promoters50/1023079
gatttaatttaaaa

SEQ ID NO: 159359 - DNA, 14 bp, Unknown
  misc_feature (1)..( 14): Result.004 file - promoters50/1023079
gttttaattctttg

SEQ ID NO: 159360 - DNA, 14 bp, Unknown
  misc_feature (1)..( 14): Result.004 file - promoters50/1023079
tgttttattccaat

SEQ ID NO: 159361 - DNA, 14 bp, Unknown
  misc_feature (1)..( 14): Result.004 file - promoters50/1023089
aaattaattaaatt

SEQ ID NO: 159362 - DNA, 11 bp, Unknown
  misc_feature (1)..( 11): Result.004 file - promoters50/1023089
ctactaaaatc

SEQ ID NO: 159363 - DNA, 11 bp, Unknown
  misc_feature (1)..( 11): Result.004 file - promoters50/1023089
atacaaaaatt

SEQ ID NO: 159364 - DNA, 11 bp, Unknown
  misc_feature (1)..( 11): Result.004 file - promoters50/1023089
atacaacaatt

SEQ ID NO: 159365 - DNA, 11 bp, Unknown
  misc_feature (1)..( 11): Result.004 file - promoters50/1023089
gattaatacat

SEQ ID NO: 159366 - DNA, 11 bp, Unknown
  misc_feature (1)..( 11): Result.004 file - promoters50/1023089
gattaatactt

SEQ ID NO: 159367 - DNA, 11 bp, Unknown
  misc_feature (1)..( 11): Result.004 file - promoters50/1023089
cacaaattctt

SEQ ID NO: 159368 - DNA, 10 bp, Unknown
  misc_feature (1)..( 10): Result.004 file - promoters50/1023089
atacattcta

SEQ ID NO: 159369 - DNA, 10 bp, Unknown
  misc_feature (1)..( 10): Result.004 file - promoters50/1023089
ataaattctt

SEQ ID NO: 159370 - DNA, 10 bp, Unknown
  misc_feature (1)..( 10): Result.004 file - promoters50/1023089
ataaatactt

SEQ ID NO: 159371 - DNA, 12 bp, Unknown
  misc_feature (1)..( 12): Result.004 file - promoters50/1023089
ataaatttgata

SEQ ID NO: 159372 - DNA, 12 bp, Unknown
  misc_feature (1)..( 12): Result.004 file - promoters50/1023089
tgtattttgatt

SEQ ID NO: 159373 - DNA, 12 bp, Unknown
  misc_feature (1)..( 12): Result.004 file - promoters50/1023089
ataaaattgata

SEQ ID NO: 159374 - DNA, 11 bp, Unknown
  misc_feature (1)..( 11): Result.004 file - promoters50/1023089
ataataaactc

SEQ ID NO: 159375 - DNA, 11 bp, Unknown
  misc_feature (1)..( 11): Result.004 file - promoters50/1023089
ataaaaaatcg

SEQ ID NO: 159376 - DNA, 11 bp, Unknown
  misc_feature (1)..( 11): Result.004 file - promoters50/1023124
aaaaaaaaaat

SEQ ID NO: 159377 - DNA, 16 bp, Unknown
  misc_feature (1)..( 16): Result.004 file - promoters50/1023124
ttgtcaaaaaaaaaaa

SEQ ID NO: 159378 - DNA, 16 bp, Unknown
  misc_feature (1)..( 16): Result.004 file - promoters50/1023124
attttaaaaaaaaaaa

SEQ ID NO: 159379 - DNA, 16 bp, Unknown
  misc_feature (1)..( 16): Result.004 file - promoters50/1023124
attttaaaacaatgaa

SEQ ID NO: 159380 - DNA, 16 bp, Unknown
  misc_feature (1)..( 16): Result.004 file - promoters50/1023124
cttttcaaatctgcag

SEQ ID NO: 159381 - DNA, 16 bp, Unknown
  misc_feature (1)..( 16): Result.004 file - promoters50/1023124
atcatcaaatttgttt

SEQ ID NO: 159382 - DNA, 16 bp, Unknown
  misc_feature (1)..( 16): Result.004 file - promoters50/1023128
cttatcatgaataatg

SEQ ID NO: 159383 - DNA, 9 bp, Unknown
  misc_feature (1)..( 9): Result.004 file - promoters50/1023128
aataaaaaa

SEQ ID NO: 159384 - DNA, 9 bp, Unknown
  misc_feature (1)..( 9): Result.004 file - promoters50/1023128
catataaag

SEQ ID NO: 159385 - DNA, 9 bp, Unknown
  misc_feature (1)..( 9): Result.004 file - promoters50/1023128
gacaaaaaa

SEQ ID NO: 159386 - DNA, 9 bp, Unknown
  misc_feature (1)..( 9): Result.004 file - promoters50/1023128
tatataact

SEQ ID NO: 159387 - DNA, 9 bp, Unknown
  misc_feature (1)..( 9): Result.004 file - promoters50/1023143
tatgtaata

SEQ ID NO: 159388 - DNA, 7 bp, Unknown
  misc_feature (1)..( 7): Result.004 file - promoters50/1023143
aattatg

SEQ ID NO: 159389 - DNA, 7 bp, Unknown
  misc_feature (1)..( 7): Result.004 file - promoters50/1023143
tattatg

SEQ ID NO: 159390 - DNA, 7 bp, Unknown
  misc_feature (1)..( 7): Result.004 file - promoters50/1023155
tattata

SEQ ID NO: 159391 - DNA, 7 bp, Unknown
  misc_feature (1)..( 7): Result.004 file - promoters50/1023155
attcaag

SEQ ID NO: 159392 - DNA, 7 bp, Unknown
  misc_feature (1)..( 7): Result.004 file - promoters50/1023155
attcaaa

SEQ ID NO: 159393 - DNA, 7 bp, Unknown
  misc_feature (1)..( 7): Result.004 file - promoters50/1023155
cttcaaa

SEQ ID NO: 159394 - DNA, 10 bp, Unknown
  misc_feature (1)..( 10): Result.004 file - promoters50/1023155
tttctccata

SEQ ID NO: 159395 - DNA, 10 bp, Unknown
  misc_feature (1)..( 10): Result.004 file - promoters50/1023155
tttttccgcc

SEQ ID NO: 159396 - DNA, 10 bp, Unknown
  misc_feature (1)..( 10): Result.004 file - promoters50/1023185
cttctcaata

SEQ ID NO: 159397 - DNA, 9 bp, Unknown
  misc_feature (1)..( 9): Result.004 file - promoters50/1023185
aatgatctt

SEQ ID NO: 159398 - DNA, 9 bp, Unknown
  misc_feature (1)..( 9): Result.004 file - promoters50/1023185
aatgaactt

SEQ ID NO: 159399 - DNA, 9 bp, Unknown
  misc_feature (1)..( 9): Result.004 file - promoters50/1023185
gatgaaccc

SEQ ID NO: 159400 - DNA, 8 bp, Unknown
  misc_feature (1)..( 8): Result.004 file - promoters50/1023185
acacattg

SEQ ID NO: 159401 - DNA, 8 bp, Unknown
  misc_feature (1)..( 8): Result.004 file - promoters50/1023185
acacattt

SEQ ID NO: 159402 - DNA, 8 bp, Unknown
  misc_feature (1)..( 8): Result.004 file - promoters50/1023210
tcacattt

SEQ ID NO: 159403 - DNA, 8 bp, Unknown
  misc_feature (1)..( 8): Result.004 file - promoters50/1023210
ttctggcc

SEQ ID NO: 159404 - DNA, 8 bp, Unknown
  misc_feature (1)..( 8): Result.004 file - promoters50/1023210
ttcttgcc

SEQ ID NO: 159405 - DNA, 8 bp, Unknown
  misc_feature (1)..( 8): Result.004 file - promoters50/1023210
gtcttgcg

SEQ ID NO: 159406 - DNA, 10 bp, Unknown
  misc_feature (1)..( 10): Result.004 file - promoters50/1023210
tacgtgtcaa

SEQ ID NO: 159407 - DNA, 10 bp, Unknown
  misc_feature (1)..( 10): Result.004 file - promoters50/1023210
tacgtgtcaa

SEQ ID NO: 159408 - DNA, 10 bp, Unknown
  misc_feature (1)..( 10): Result.004 file - promoters50/1023210
cacgtgtcat

SEQ ID NO: 159409 - DNA, 20 bp, Unknown
  misc_feature (1)..( 20): Result.004 file - promoters50/1023210
ttggttattgcttcaccgcc

SEQ ID NO: 159410 - DNA, 20 bp, Unknown
  misc_feature (1)..( 20): Result.004 file - promoters50/1023210
ttggctattgcttccacgcc

SEQ ID NO: 159411 - DNA, 20 bp, Unknown
  misc_feature (1)..( 20): Result.004 file - promoters50/1023210
ttagctattgcttcaccgcc

SEQ ID NO: 159412 - DNA, 15 bp, Unknown
  misc_feature (1)..( 15): Result.004 file - promoters50/1023210
cgccttagctttctc

SEQ ID NO: 159413 - DNA, 15 bp, Unknown
  misc_feature (1)..( 15): Result.004 file - promoters50/1023210
cgccttagctttctc

SEQ ID NO: 159414 - DNA, 15 bp, Unknown
  misc_feature (1)..( 15): Result.004 file - promoters50/1023210
cgccttagctttctc

SEQ ID NO: 159415 - DNA, 22 bp, Unknown
  misc_feature (1)..( 22): Result.004 file - promoters50/1023210
gaccgactcgtcctcgtctttt

SEQ ID NO: 159416 - DNA, 22 bp, Unknown
  misc_feature (1)..( 22): Result.004 file - promoters50/1023210
gaccgagtcgtcctcgtctttt

SEQ ID NO: 159417 - DNA, 22 bp, Unknown
  misc_feature (1)..( 22): Result.004 file - promoters50/1023210
gacctagtcgtcctcgtctttt

SEQ ID NO: 159418 - DNA, 9 bp, Unknown
  misc_feature (1)..( 9): Result.004 file - promoters50/1023210
caataaaac

SEQ ID NO: 159419 - DNA, 9 bp, Unknown
  misc_feature (1)..( 9): Result.004 file - promoters50/1023210
caaaaaaaa

SEQ ID NO: 159420 - DNA, 9 bp, Unknown
  misc_feature (1)..( 9): Result.004 file - promoters50/1023210
gaaaacaac

SEQ ID NO: 159421 - DNA, 6 bp, Unknown
  misc_feature (1)..( 6): Result.004 file - promoters50/1023210
aaaaca

SEQ ID NO: 159422 - DNA, 6 bp, Unknown
  misc_feature (1)..( 6): Result.004 file - promoters50/1023210
aaaaca

SEQ ID NO: 159423 - DNA, 6 bp, Unknown
  misc_feature (1)..( 6): Result.004 file - promoters50/1023210
aaaaca

SEQ ID NO: 159424 - DNA, 19 bp, Unknown
  misc_feature (1)..( 19): Result.004 file - promoters50/1023210
ttcttcttctataaattaa

SEQ ID NO: 159425 - DNA, 19 bp, Unknown
  misc_feature (1)..( 19): Result.004 file - promoters50/1023210
ttcttcttctataaaacaa

SEQ ID NO: 159426 - DNA, 19 bp, Unknown
  misc_feature (1)..( 19): Result.004 file - promoters50/1023210
ttttgcttctataaatcaa

SEQ ID NO: 159427 - DNA, 19 bp, Unknown
  misc_feature (1)..( 19): Result.004 file - promoters50/1023221
gatctttgccggaaaacaa

SEQ ID NO: 159428 - DNA, 10 bp, Unknown
  misc_feature (1)..( 10): Result.004 file - promoters50/1023221
ccaactagaa

SEQ ID NO: 159429 - DNA, 10 bp, Unknown
  misc_feature (1)..( 10): Result.004 file - promoters50/1023221
acaagtagaa

SEQ ID NO: 159430 - DNA, 10 bp, Unknown
  misc_feature (1)..( 10): Result.004 file - promoters50/1023221
accactagac

SEQ ID NO: 159431 - DNA, 10 bp, Unknown
  misc_feature (1)..( 10): Result.004 file - promoters50/1023221
acaagtaatc

SEQ ID NO: 159432 - DNA, 10 bp, Unknown
  misc_feature (1)..( 10): Result.004 file - promoters50/1023221
acaagtcttc

SEQ ID NO: 159433 - DNA, 10 bp, Unknown
  misc_feature (1)..( 10): Result.004 file - promoters50/1023237
tggagtagaa

SEQ ID NO: 159434 - DNA, 15 bp, Unknown
  misc_feature (1)..( 15): Result.004 file - promoters50/1023237
ttttgttgtttcttc

SEQ ID NO: 159435 - DNA, 15 bp, Unknown
  misc_feature (1)..( 15): Result.004 file - promoters50/1023237
tcttgttgtttacgt

SEQ ID NO: 159436 - DNA, 15 bp, Unknown
  misc_feature (1)..( 15): Result.004 file - promoters50/1023237
ttttgtttgtttgtg

SEQ ID NO: 159437 - DNA, 15 bp, Unknown
  misc_feature (1)..( 15): Result.004 file - promoters50/1023237
cttggttccagaagc

SEQ ID NO: 159438 - DNA, 15 bp, Unknown
  misc_feature (1)..( 15): Result.004 file - promoters50/1023237
tgtgtttcttttttc

SEQ ID NO: 159439 - DNA, 15 bp, Unknown
  misc_feature (1)..( 15): Result.004 file - promoters50/1023237
tgtttttctttcttt

SEQ ID NO: 159440 - DNA, 13 bp, Unknown
  misc_feature (1)..( 13): Result.004 file - promoters50/1023237
gagaaacttgtaa

SEQ ID NO: 159441 - DNA, 13 bp, Unknown
  misc_feature (1)..( 13): Result.004 file - promoters50/1023237
gagaaataaatga

SEQ ID NO: 159442 - DNA, 13 bp, Unknown
  misc_feature (1)..( 13): Result.004 file - promoters50/1023237
gagaaaatttgat

SEQ ID NO: 159443 - DNA, 13 bp, Unknown
  misc_feature (1)..( 13): Result.004 file - promoters50/1023237
cagaaaaatggtt

SEQ ID NO: 159444 - DNA, 13 bp, Unknown
  misc_feature (1)..( 13): Result.004 file - promoters50/1023237
aagaacattggat

SEQ ID NO: 159445 - DNA, 13 bp, Unknown
  misc_feature (1)..( 13): Result.004 file - promoters50/1023237
atgaaaaaggttt

SEQ ID NO: 159446 - DNA, 16 bp, Unknown
  misc_feature (1)..( 16): Result.004 file - promoters50/1023237
aaatgttttgttgttt

SEQ ID NO: 159447 - DNA, 16 bp, Unknown
  misc_feature (1)..( 16): Result.004 file - promoters50/1023237
aaaagttttgcaagaa

SEQ ID NO: 159448 - DNA, 16 bp, Unknown
  misc_feature (1)..( 16): Result.004 file - promoters50/1023237
aaggtttttgtttgtt

SEQ ID NO: 159449 - DNA, 16 bp, Unknown
  misc_feature (1)..( 16): Result.004 file - promoters50/1023237
atatgtttttctttct

SEQ ID NO: 159450 - DNA, 16 bp, Unknown
  misc_feature (1)..( 16): Result.004 file - promoters50/1023237
gtatggttttaaatgt

SEQ ID NO: 159451 - DNA, 16 bp, Unknown
  misc_feature (1)..( 16): Result.004 file - promoters50/1023237
ttatggtcgtttaatg

SEQ ID NO: 159452 - DNA, 16 bp, Unknown
  misc_feature (1)..( 16): Result.004 file - promoters50/1023237
gttgattttgaaagaa

SEQ ID NO: 159453 - DNA, 7 bp, Unknown
  misc_feature (1)..( 7): Result.004 file - promoters50/1023237
tttttaa

SEQ ID NO: 159454 - DNA, 7 bp, Unknown
  misc_feature (1)..( 7): Result.004 file - promoters50/1023237
tttttat

SEQ ID NO: 159455 - DNA, 7 bp, Unknown
  misc_feature (1)..( 7): Result.004 file - promoters50/1023237
cttttaa

SEQ ID NO: 159456 - DNA, 8 bp, Unknown
  misc_feature (1)..( 8): Result.004 file - promoters50/1023237
tttcttaa

SEQ ID NO: 159457 - DNA, 8 bp, Unknown
  misc_feature (1)..( 8): Result.004 file - promoters50/1023237
attgttat

SEQ ID NO: 159458 - DNA, 8 bp, Unknown
  misc_feature (1)..( 8): Result.004 file - promoters50/1023270
cttctaag

SEQ ID NO: 159459 - DNA, 13 bp, Unknown
  misc_feature (1)..( 13): Result.004 file - promoters50/1023270
tggatttcttttt

SEQ ID NO: 159460 - DNA, 13 bp, Unknown
  misc_feature (1)..( 13): Result.004 file - promoters50/1023270
gggttttgtttta

SEQ ID NO: 159461 - DNA, 13 bp, Unknown
  misc_feature (1)..( 13): Result.004 file - promoters50/1023270
caactttgtttct

SEQ ID NO: 159462 - DNA, 13 bp, Unknown
  misc_feature (1)..( 13): Result.004 file - promoters50/1023270
tatttttgtggat

SEQ ID NO: 159463 - DNA, 13 bp, Unknown
  misc_feature (1)..( 13): Result.004 file - promoters50/1023270
ttgtgaagtttta

SEQ ID NO: 159464 - DNA, 13 bp, Unknown
  misc_feature (1)..( 13): Result.004 file - promoters50/1023270
caaccttgtaatg

SEQ ID NO: 159465 - DNA, 8 bp, Unknown
  misc_feature (1)..( 8): Result.004 file - promoters50/1023270
ctataatt

SEQ ID NO: 159466 - DNA, 8 bp, Unknown
  misc_feature (1)..( 8): Result.004 file - promoters50/1023270
gtattatt

SEQ ID NO: 159467 - DNA, 8 bp, Unknown
  misc_feature (1)..( 8): Result.004 file - promoters50/1023270
atataatc

SEQ ID NO: 159468 - DNA, 8 bp, Unknown
  misc_feature (1)..( 8): Result.004 file - promoters50/1023270
agattatt

SEQ ID NO: 159469 - DNA, 8 bp, Unknown
  misc_feature (1)..( 8): Result.004 file - promoters50/1023270
ataaaata

SEQ ID NO: 159470 - DNA, 10 bp, Unknown
  misc_feature (1)..( 10): Result.004 file - promoters50/1023270
gttgaactca

SEQ ID NO: 159471 - DNA, 10 bp, Unknown
  misc_feature (1)..( 10): Result.004 file - promoters50/1023270
tttgaacccc

SEQ ID NO: 159472 - DNA, 10 bp, Unknown
  misc_feature (1)..( 10): Result.004 file - promoters50/1023270
gttaaacgtt

SEQ ID NO: 159473 - DNA, 11 bp, Unknown
  misc_feature (1)..( 11): Result.004 file - promoters50/1023270
tttggaataat

SEQ ID NO: 159474 - DNA, 11 bp, Unknown
  misc_feature (1)..( 11): Result.004 file - promoters50/1023297
ttttaaatgtt

SEQ ID NO: 159475 - DNA, 8 bp, Unknown
  misc_feature (1)..( 8): Result.004 file - promoters50/1023297
ttttgtct

SEQ ID NO: 159476 - DNA, 8 bp, Unknown
  misc_feature (1)..( 8): Result.004 file - promoters50/1023297
atttctct

SEQ ID NO: 159477 - DNA, 8 bp, Unknown
  misc_feature (1)..( 8): Result.004 file - promoters50/1023297
ttttgttt

SEQ ID NO: 159478 - DNA, 8 bp, Unknown
  misc_feature (1)..( 8): Result.004 file - promoters50/1023297
ttttttct

SEQ ID NO: 159479 - DNA, 8 bp, Unknown
  misc_feature (1)..( 8): Result.004 file - promoters50/1023297
tcttctct

SEQ ID NO: 159480 - DNA, 8 bp, Unknown
  misc_feature (1)..( 8): Result.004 file - promoters50/1023299
atttatgt

SEQ ID NO: 159481 - DNA, 11 bp, Unknown
  misc_feature (1)..( 11): Result.004 file - promoters50/1023299
atggaaacaca

SEQ ID NO: 159482 - DNA, 11 bp, Unknown
  misc_feature (1)..( 11): Result.004 file - promoters50/1023299
ctataaataca

SEQ ID NO: 159483 - DNA, 11 bp, Unknown
  misc_feature (1)..( 11): Result.004 file - promoters50/1023299
ctataaatatc

SEQ ID NO: 159484 - DNA, 11 bp, Unknown
  misc_feature (1)..( 11): Result.004 file - promoters50/1023299
ctttaaatacc

SEQ ID NO: 159485 - DNA, 11 bp, Unknown
  misc_feature (1)..( 11): Result.004 file - promoters50/1023299
atataaacgct

SEQ ID NO: 159486 - DNA, 11 bp, Unknown
  misc_feature (1)..( 11): Result.004 file - promoters50/1023324
ttataaaacat

SEQ ID NO: 159487 - DNA, 9 bp, Unknown
  misc_feature (1)..( 9): Result.004 file - promoters50/1023324
atttcaaag

SEQ ID NO: 159488 - DNA, 9 bp, Unknown
  misc_feature (1)..( 9): Result.004 file - promoters50/1023324
gattcaaag

SEQ ID NO: 159489 - DNA, 9 bp, Unknown
  misc_feature (1)..( 9): Result.004 file - promoters50/1023324
atttaaaag

SEQ ID NO: 159490 - DNA, 7 bp, Unknown
  misc_feature (1)..( 7): Result.004 file - promoters50/1023324
atacatt

SEQ ID NO: 159491 - DNA, 7 bp, Unknown
  misc_feature (1)..( 7): Result.004 file - promoters50/1023324
ataaatt

SEQ ID NO: 159492 - DNA, 7 bp, Unknown
  misc_feature (1)..( 7): Result.004 file - promoters50/1023339
ataaata

SEQ ID NO: 159493 - DNA, 10 bp, Unknown
  misc_feature (1)..( 10): Result.004 file - promoters50/1023339
gaagatcatc

SEQ ID NO: 159494 - DNA, 10 bp, Unknown
  misc_feature (1)..( 10): Result.004 file - promoters50/1023339
taagaacatt

SEQ ID NO: 159495 - DNA, 10 bp, Unknown
  misc_feature (1)..( 10): Result.004 file - promoters50/1023339
gaagatgatg

SEQ ID NO: 159496 - DNA, 10 bp, Unknown
  misc_feature (1)..( 10): Result.004 file - promoters50/1023339
acagaaaatt

SEQ ID NO: 159497 - DNA, 10 bp, Unknown
  misc_feature (1)..( 10): Result.004 file - promoters50/1023339
atagagaata

SEQ ID NO: 159498 - DNA, 10 bp, Unknown
  misc_feature (1)..( 10): Result.004 file - promoters50/1023397
caagaacgag

SEQ ID NO: 159499 - DNA, 15 bp, Unknown
  misc_feature (1)..( 15): Result.004 file - promoters50/1023397
attctttcttttttt

SEQ ID NO: 159500 - DNA, 15 bp, Unknown
  misc_feature (1)..( 15): Result.004 file - promoters50/1023397
cttctttttggttaa

SEQ ID NO: 159501 - DNA, 15 bp, Unknown
  misc_feature (1)..( 15): Result.004 file - promoters50/1023397
tttctttttttggtt

SEQ ID NO: 159502 - DNA, 15 bp, Unknown
  misc_feature (1)..( 15): Result.004 file - promoters50/1023397
attcttaacaacgtt

SEQ ID NO: 159503 - DNA, 15 bp, Unknown
  misc_feature (1)..( 15): Result.004 file - promoters50/1023397
cttcttcttcgtcaa

SEQ ID NO: 159504 - DNA, 15 bp, Unknown
  misc_feature (1)..( 15): Result.004 file - promoters50/1023397
ctttttttttttggt

SEQ ID NO: 159505 - DNA, 15 bp, Unknown
  misc_feature (1)..( 15): Result.004 file - promoters50/1023397
tttatttgttaaact

SEQ ID NO: 159506 - DNA, 10 bp, Unknown
  misc_feature (1)..( 10): Result.004 file - promoters50/1023397
cggatattcg

SEQ ID NO: 159507 - DNA, 10 bp, Unknown
  misc_feature (1)..( 10): Result.004 file - promoters50/1023397
atgattttcc

SEQ ID NO: 159508 - DNA, 10 bp, Unknown
  misc_feature (1)..( 10): Result.004 file - promoters50/1023397
tgaattatcc

SEQ ID NO: 159509 - DNA, 10 bp, Unknown
  misc_feature (1)..( 10): Result.004 file - promoters50/1023397
aaaattattt

SEQ ID NO: 159510 - DNA, 10 bp, Unknown
  misc_feature (1)..( 10): Result.004 file - promoters50/1023397
tacattgttt

SEQ ID NO: 159511 - DNA, 10 bp, Unknown
  misc_feature (1)..( 10): Result.004 file - promoters50/1023397
tgaatttgta

SEQ ID NO: 159512 - DNA, 10 bp, Unknown
  misc_feature (1)..( 10): Result.004 file - promoters50/1023397
aaacttatct

SEQ ID NO: 159513 - DNA, 14 bp, Unknown
  misc_feature (1)..( 14): Result.004 file - promoters50/1023397
ctttttttggtttt

SEQ ID NO: 159514 - DNA, 14 bp, Unknown
  misc_feature (1)..( 14): Result.004 file - promoters50/1023397
tttttttggttttt

SEQ ID NO: 159515 - DNA, 15 bp, Unknown
  misc_feature (1)..( 15): Result.004 file - promoters50/1023397
cttctttttggttaa

SEQ ID NO: 159516 - DNA, 15 bp, Unknown
  misc_feature (1)..( 15): Result.004 file - promoters50/1023397
cttcttcttcgtcaa

SEQ ID NO: 159517 - DNA, 15 bp, Unknown
  misc_feature (1)..( 15): Result.004 file - promoters50/1023397
ctttttttttttggt

SEQ ID NO: 159518 - DNA, 15 bp, Unknown
  misc_feature (1)..( 15): Result.004 file - promoters50/1023397
atttatttgttaaac

SEQ ID NO: 159519 - DNA, 15 bp, Unknown
  misc_feature (1)..( 15): Result.004 file - promoters50/1023407
gtttttttaatacga

SEQ ID NO: 159520 - DNA, 10 bp, Unknown
  misc_feature (1)..( 10): Result.004 file - promoters50/1023407
ataatacatc

SEQ ID NO: 159521 - DNA, 10 bp, Unknown
  misc_feature (1)..( 10): Result.004 file - promoters50/1023407
gtaatacata

SEQ ID NO: 159522 - DNA, 10 bp, Unknown
  misc_feature (1)..( 10): Result.004 file - promoters50/1023407
ataatataca

SEQ ID NO: 159523 - DNA, 10 bp, Unknown
  misc_feature (1)..( 10): Result.004 file - promoters50/1023407
ttaataccta

SEQ ID NO: 159524 - DNA, 10 bp, Unknown
  misc_feature (1)..( 10): Result.004 file - promoters50/1023407
ctaatttacc

SEQ ID NO: 159525 - DNA, 10 bp, Unknown
  misc_feature (1)..( 10): Result.004 file - promoters50/1023407
ggattttacc

SEQ ID NO: 159526 - DNA, 10 bp, Unknown
  misc_feature (1)..( 10): Result.004 file - promoters50/1023407
gagtttctcc

SEQ ID NO: 159527 - DNA, 10 bp, Unknown
  misc_feature (1)..( 10): Result.004 file - promoters50/1023407
gagattcctc

SEQ ID NO: 159528 - DNA, 10 bp, Unknown
  misc_feature (1)..( 10): Result.004 file - promoters50/1023407
aggtttcttt

SEQ ID NO: 159529 - DNA, 10 bp, Unknown
  misc_feature (1)..( 10): Result.004 file - promoters50/1023407
tcgttgcttc

SEQ ID NO: 159530 - DNA, 10 bp, Unknown
  misc_feature (1)..( 10): Result.004 file - promoters50/1023407
aagtttctga

SEQ ID NO: 159531 - DNA, 10 bp, Unknown
  misc_feature (1)..( 10): Result.004 file - promoters50/1023426
aagactcctc

SEQ ID NO: 159532 - DNA, 8 bp, Unknown
  misc_feature (1)..( 8): Result.004 file - promoters50/1023426
tcagaatt

SEQ ID NO: 159533 - DNA, 8 bp, Unknown
  misc_feature (1)..( 8): Result.004 file - promoters50/1023426
ggagaatt

SEQ ID NO: 159534 - DNA, 8 bp, Unknown
  misc_feature (1)..( 8): Result.004 file - promoters50/1023426
tcacaatg

SEQ ID NO: 159535 - DNA, 8 bp, Unknown
  misc_feature (1)..( 8): Result.004 file - promoters50/1023426
atttaatt

SEQ ID NO: 159536 - DNA, 8 bp, Unknown
  misc_feature (1)..( 8): Result.004 file - promoters50/1023426
attgaatt

SEQ ID NO: 159537 - DNA, 8 bp, Unknown
  misc_feature (1)..( 8): Result.004 file - promoters50/1023432
atttaaca

SEQ ID NO: 159538 - DNA, 12 bp, Unknown
  misc_feature (1)..( 12): Result.004 file - promoters50/1023432
atagcatttttg

SEQ ID NO: 159539 - DNA, 12 bp, Unknown
  misc_feature (1)..( 12): Result.004 file - promoters50/1023432
taaccatatttg

SEQ ID NO: 159540 - DNA, 12 bp, Unknown
  misc_feature (1)..( 12): Result.004 file - promoters50/1023432
acttcattttac

SEQ ID NO: 159541 - DNA, 12 bp, Unknown
  misc_feature (1)..( 12): Result.004 file - promoters50/1023432
tggccattgttg

SEQ ID NO: 159542 - DNA, 12 bp, Unknown
  misc_feature (1)..( 12): Result.004 file - promoters50/1023432
atagcttttttt

SEQ ID NO: 159543 - DNA, 12 bp, Unknown
  misc_feature (1)..( 12): Result.004 file - promoters50/1023432
tcaggattgtta

SEQ ID NO: 159544 - DNA, 10 bp, Unknown
  misc_feature (1)..( 10): Result.004 file - promoters50/1023432
aaatttaatc

SEQ ID NO: 159545 - DNA, 10 bp, Unknown
  misc_feature (1)..( 10): Result.004 file - promoters50/1023432
gtattgaatc

SEQ ID NO: 159546 - DNA, 10 bp, Unknown
  misc_feature (1)..( 10): Result.004 file - promoters50/1023432
aaatgtaact

SEQ ID NO: 159547 - DNA, 10 bp, Unknown
  misc_feature (1)..( 10): Result.004 file - promoters50/1023432
taatttaatg

SEQ ID NO: 159548 - DNA, 10 bp, Unknown
  misc_feature (1)..( 10): Result.004 file - promoters50/1023432
ttgttgaatt

SEQ ID NO: 159549 - DNA, 10 bp, Unknown
  misc_feature (1)..( 10): Result.004 file - promoters50/1023432
agatttaaat

SEQ ID NO: 159550 - DNA, 13 bp, Unknown
  misc_feature (1)..( 13): Result.004 file - promoters50/1023432
taattaaaataca

SEQ ID NO: 159551 - DNA, 13 bp, Unknown
  misc_feature (1)..( 13): Result.004 file - promoters50/1023432
agccgaaaaaaca

SEQ ID NO: 159552 - DNA, 13 bp, Unknown
  misc_feature (1)..( 13): Result.004 file - promoters50/1023432
gatgtaagatatt

SEQ ID NO: 159553 - DNA, 13 bp, Unknown
  misc_feature (1)..( 13): Result.004 file - promoters50/1023432
ccgataaatttgc

SEQ ID NO: 159554 - DNA, 13 bp, Unknown
  misc_feature (1)..( 13): Result.004 file - promoters50/1023432
gtagcaaaagaaa

SEQ ID NO: 159555 - DNA, 13 bp, Unknown
  misc_feature (1)..( 13): Result.004 file - promoters50/1023453
aaagaaagatatc

SEQ ID NO: 159556 - DNA, 12 bp, Unknown
  misc_feature (1)..( 12): Result.004 file - promoters50/1023453
agaaaagaaaga

SEQ ID NO: 159557 - DNA, 12 bp, Unknown
  misc_feature (1)..( 12): Result.004 file - promoters50/1023453
gaaaaagaaaaa

SEQ ID NO: 159558 - DNA, 12 bp, Unknown
  misc_feature (1)..( 12): Result.004 file - promoters50/1023453
agaaaagaaata

SEQ ID NO: 159559 - DNA, 12 bp, Unknown
  misc_feature (1)..( 12): Result.004 file - promoters50/1023453
ttgaaagaaaat

SEQ ID NO: 159560 - DNA, 12 bp, Unknown
  misc_feature (1)..( 12): Result.004 file - promoters50/1023453
agataagtaaag

SEQ ID NO: 159561 - DNA, 13 bp, Unknown
  misc_feature (1)..( 13): Result.004 file - promoters50/1023453
ggataagcaaaaa

SEQ ID NO: 159562 - DNA, 12 bp, Unknown
  misc_feature (1)..( 12): Result.004 file - promoters50/1023453
gtttcaatcttc

SEQ ID NO: 159563 - DNA, 12 bp, Unknown
  misc_feature (1)..( 12): Result.004 file - promoters50/1023453
gggacaatctaa

SEQ ID NO: 159564 - DNA, 12 bp, Unknown
  misc_feature (1)..( 12): Result.004 file - promoters50/1023453
gtttcaatcttc

SEQ ID NO: 159565 - DNA, 12 bp, Unknown
  misc_feature (1)..( 12): Result.004 file - promoters50/1023453
gtttaaatcaga

SEQ ID NO: 159566 - DNA, 12 bp, Unknown
  misc_feature (1)..( 12): Result.004 file - promoters50/1023453
agttcaaaattt

SEQ ID NO: 159567 - DNA, 12 bp, Unknown
  misc_feature (1)..( 12): Result.004 file - promoters50/1023453
tgtgtaatctaa

SEQ ID NO: 159568 - DNA, 9 bp, Unknown
  misc_feature (1)..( 9): Result.004 file - promoters50/1023453
ctaattttg

SEQ ID NO: 159569 - DNA, 9 bp, Unknown
  misc_feature (1)..( 9): Result.004 file - promoters50/1023453
ctaatttta

SEQ ID NO: 159570 - DNA, 9 bp, Unknown
  misc_feature (1)..( 9): Result.004 file - promoters50/1023453
caaatgttg

SEQ ID NO: 159571 - DNA, 9 bp, Unknown
  misc_feature (1)..( 9): Result.004 file - promoters50/1023453
ccaatgttt

SEQ ID NO: 159572 - DNA, 9 bp, Unknown
  misc_feature (1)..( 9): Result.004 file - promoters50/1023453
taaattttc

SEQ ID NO: 159573 - DNA, 9 bp, Unknown
  misc_feature (1)..( 9): Result.004 file - promoters50/1023579
caaatgtaa

SEQ ID NO: 159574 - DNA, 9 bp, Unknown
  misc_feature (1)..( 9): Result.004 file - promoters50/1023579
aactatcat

SEQ ID NO: 159575 - DNA, 9 bp, Unknown
  misc_feature (1)..( 9): Result.004 file - promoters50/1023579
taatatcat

SEQ ID NO: 159576 - DNA, 9 bp, Unknown
  misc_feature (1)..( 9): Result.004 file - promoters50/1023579
taaaatcaa

SEQ ID NO: 159577 - DNA, 10 bp, Unknown
  misc_feature (1)..( 10): Result.004 file - promoters50/1023579
aaataatcat

SEQ ID NO: 159578 - DNA, 10 bp, Unknown
  misc_feature (1)..( 10): Result.004 file - promoters50/1023579
atataaacat

SEQ ID NO: 159579 - DNA, 10 bp, Unknown
  misc_feature (1)..( 10): Result.004 file - promoters50/1023583
aaagaatcca

SEQ ID NO: 159580 - DNA, 9 bp, Unknown
  misc_feature (1)..( 9): Result.004 file - promoters50/1023583
gtttttatg

SEQ ID NO: 159581 - DNA, 9 bp, Unknown
  misc_feature (1)..( 9): Result.004 file - promoters50/1023583
gttattata

SEQ ID NO: 159582 - DNA, 9 bp, Unknown
  misc_feature (1)..( 9): Result.004 file - promoters50/1023583
gtttgtgta

SEQ ID NO: 159583 - DNA, 9 bp, Unknown
  misc_feature (1)..( 9): Result.004 file - promoters50/1023583
atcgtcttc

SEQ ID NO: 159584 - DNA, 9 bp, Unknown
  misc_feature (1)..( 9): Result.004 file - promoters50/1023583
accgtcttg

SEQ ID NO: 159585 - DNA, 9 bp, Unknown
  misc_feature (1)..( 9): Result.004 file - promoters50/1023583
atcatcttc

SEQ ID NO: 159586 - DNA, 10 bp, Unknown
  misc_feature (1)..( 10): Result.004 file - promoters50/1023583
tgaaaagaaa

SEQ ID NO: 159587 - DNA, 10 bp, Unknown
  misc_feature (1)..( 10): Result.004 file - promoters50/1023583
tgagaagagc

SEQ ID NO: 159588 - DNA, 10 bp, Unknown
  misc_feature (1)..( 10): Result.004 file - promoters50/1023583
acaaacgaag

SEQ ID NO: 159589 - DNA, 10 bp, Unknown
  misc_feature (1)..( 10): Result.004 file - promoters50/1023583
acaaaacaaa

SEQ ID NO: 159590 - DNA, 12 bp, Unknown
  misc_feature (1)..( 12): Result.004 file - promoters50/1023583
tgggtttataag

SEQ ID NO: 159591 - DNA, 12 bp, Unknown
  misc_feature (1)..( 12): Result.004 file - promoters50/1023583
agagtttttaag

SEQ ID NO: 159592 - DNA, 12 bp, Unknown
  misc_feature (1)..( 12): Result.004 file - promoters50/1023594
agtgtttgatgc

SEQ ID NO: 159593 - DNA, 9 bp, Unknown
  misc_feature (1)..( 9): Result.004 file - promoters50/1023594
tgaaaaatt

SEQ ID NO: 159594 - DNA, 9 bp, Unknown
  misc_feature (1)..( 9): Result.004 file - promoters50/1023594
acaaagatt

SEQ ID NO: 159595 - DNA, 9 bp, Unknown
  misc_feature (1)..( 9): Result.004 file - promoters50/1023594
tgagaaatt

SEQ ID NO: 159596 - DNA, 9 bp, Unknown
  misc_feature (1)..( 9): Result.004 file - promoters50/1023594
taaaaaatg

SEQ ID NO: 159597 - DNA, 9 bp, Unknown
  misc_feature (1)..( 9): Result.004 file - promoters50/1023594
ataaaaatt

SEQ ID NO: 159598 - DNA, 9 bp, Unknown
  misc_feature (1)..( 9): Result.004 file - promoters50/1023594
agaaaaaga

SEQ ID NO: 159599 - DNA, 9 bp, Unknown
  misc_feature (1)..( 9): Result.004 file - promoters50/1023594
ccaaagagg

SEQ ID NO: 159600 - DNA, 9 bp, Unknown
  misc_feature (1)..( 9): Result.004 file - promoters50/1023594
atataaagg

SEQ ID NO: 159601 - DNA, 12 bp, Unknown
  misc_feature (1)..( 12): Result.004 file - promoters50/1023594
attaaatcaaat

SEQ ID NO: 159602 - DNA, 12 bp, Unknown
  misc_feature (1)..( 12): Result.004 file - promoters50/1023594
aggaaagcaatg

SEQ ID NO: 159603 - DNA, 13 bp, Unknown
  misc_feature (1)..( 13): Result.004 file - promoters50/1023594
acaaaattgaatc

SEQ ID NO: 159604 - DNA, 13 bp, Unknown
  misc_feature (1)..( 13): Result.004 file - promoters50/1023594
accaaaacaacac

SEQ ID NO: 159605 - DNA, 13 bp, Unknown
  misc_feature (1)..( 13): Result.004 file - promoters50/1023594
ttaaaaagaaatg

SEQ ID NO: 159606 - DNA, 13 bp, Unknown
  misc_feature (1)..( 13): Result.004 file - promoters50/1023594
ttagaaagatact

SEQ ID NO: 159607 - DNA, 10 bp, Unknown
  misc_feature (1)..( 10): Result.004 file - promoters50/1023594
ttcaaacaga

SEQ ID NO: 159608 - DNA, 10 bp, Unknown
  misc_feature (1)..( 10): Result.004 file - promoters50/1023594
caaaaacagt

SEQ ID NO: 159609 - DNA, 10 bp, Unknown
  misc_feature (1)..( 10): Result.004 file - promoters50/1023594
aaaaaacatt

SEQ ID NO: 159610 - DNA, 10 bp, Unknown
  misc_feature (1)..( 10): Result.004 file - promoters50/1023594
ataaaataaa

SEQ ID NO: 159611 - DNA, 10 bp, Unknown
  misc_feature (1)..( 10): Result.004 file - promoters50/1023594
tcaaaataaa

SEQ ID NO: 159612 - DNA, 10 bp, Unknown
  misc_feature (1)..( 10): Result.004 file - promoters50/1023594
ccaaaatgtc

SEQ ID NO: 159613 - DNA, 10 bp, Unknown
  misc_feature (1)..( 10): Result.004 file - promoters50/1023594
ccaaaatcaa

SEQ ID NO: 159614 - DNA, 10 bp, Unknown
  misc_feature (1)..( 10): Result.004 file - promoters50/1023594
tcactattag

SEQ ID NO: 159615 - DNA, 10 bp, Unknown
  misc_feature (1)..( 10): Result.004 file - promoters50/1023594
caactattcg

SEQ ID NO: 159616 - DNA, 10 bp, Unknown
  misc_feature (1)..( 10): Result.004 file - promoters50/1023594
tcattattat

SEQ ID NO: 159617 - DNA, 10 bp, Unknown
  misc_feature (1)..( 10): Result.004 file - promoters50/1023594
gtattattga

SEQ ID NO: 159618 - DNA, 10 bp, Unknown
  misc_feature (1)..( 10): Result.004 file - promoters50/1023594
taattattca

SEQ ID NO: 159619 - DNA, 10 bp, Unknown
  misc_feature (1)..( 10): Result.004 file - promoters50/1023594
ttaatattat

SEQ ID NO: 159620 - DNA, 10 bp, Unknown
  misc_feature (1)..( 10): Result.004 file - promoters50/1023594
atattatgaa

SEQ ID NO: 159621 - DNA, 10 bp, Unknown
  misc_feature (1)..( 10): Result.004 file - promoters50/1023594
caattaagaa

SEQ ID NO: 159622 - DNA, 11 bp, Unknown
  misc_feature (1)..( 11): Result.004 file - promoters50/1023594
tgaacttatga

SEQ ID NO: 159623 - DNA, 11 bp, Unknown
  misc_feature (1)..( 11): Result.004 file - promoters50/1023594
tgaatttataa

SEQ ID NO: 159624 - DNA, 11 bp, Unknown
  misc_feature (1)..( 11): Result.004 file - promoters50/1023594
acaactaatgg

SEQ ID NO: 159625 - DNA, 11 bp, Unknown
  misc_feature (1)..( 11): Result.004 file - promoters50/1023594
acaattaaacc

SEQ ID NO: 159626 - DNA, 11 bp, Unknown
  misc_feature (1)..( 11): Result.004 file - promoters50/1023594
tcaaataatcg

SEQ ID NO: 159627 - DNA, 11 bp, Unknown
  misc_feature (1)..( 11): Result.004 file - promoters50/1023594
tacttttttaa

SEQ ID NO: 159628 - DNA, 12 bp, Unknown
  misc_feature (1)..( 12): Result.004 file - promoters50/1023594
tttgaattttga

SEQ ID NO: 159629 - DNA, 12 bp, Unknown
  misc_feature (1)..( 12): Result.004 file - promoters50/1023594
tttgcattttaa

SEQ ID NO: 159630 - DNA, 12 bp, Unknown
  misc_feature (1)..( 12): Result.004 file - promoters50/1023594
ttttaatcaaca

SEQ ID NO: 159631 - DNA, 12 bp, Unknown
  misc_feature (1)..( 12): Result.004 file - promoters50/1023594
gatgacttttgt

SEQ ID NO: 159632 - DNA, 12 bp, Unknown
  misc_feature (1)..( 12): Result.004 file - promoters50/1023594
atttttttttgt

SEQ ID NO: 159633 - DNA, 12 bp, Unknown
  misc_feature (1)..( 12): Result.004 file - promoters50/1023594
cttgaatttttt

SEQ ID NO: 159634 - DNA, 12 bp, Unknown
  misc_feature (1)..( 12): Result.004 file - promoters50/1023594
attgaatctaaa

SEQ ID NO: 159635 - DNA, 9 bp, Unknown
  misc_feature (1)..( 9): Result.004 file - promoters50/1023594
ttcaacaat

SEQ ID NO: 159636 - DNA, 9 bp, Unknown
  misc_feature (1)..( 9): Result.004 file - promoters50/1023594
gaaaacaat

SEQ ID NO: 159637 - DNA, 9 bp, Unknown
  misc_feature (1)..( 9): Result.004 file - promoters50/1023594
ttcgacaaa

SEQ ID NO: 159638 - DNA, 9 bp, Unknown
  misc_feature (1)..( 9): Result.004 file - promoters50/1023594
ctaaacaaa

SEQ ID NO: 159639 - DNA, 9 bp, Unknown
  misc_feature (1)..( 9): Result.004 file - promoters50/1023594
ttaaaaaat

SEQ ID NO: 159640 - DNA, 9 bp, Unknown
  misc_feature (1)..( 9): Result.004 file - promoters50/1023594
gcaaataat

SEQ ID NO: 159641 - DNA, 12 bp, Unknown
  misc_feature (1)..( 12): Result.004 file - promoters50/1023594
caacaatagagg

SEQ ID NO: 159642 - DNA, 12 bp, Unknown
  misc_feature (1)..( 12): Result.004 file - promoters50/1023594
aaaggatagaga

SEQ ID NO: 159643 - DNA, 12 bp, Unknown
  misc_feature (1)..( 12): Result.004 file - promoters50/1023594
aaagaatagaaa

SEQ ID NO: 159644 - DNA, 12 bp, Unknown
  misc_feature (1)..( 12): Result.004 file - promoters50/1023594
aaataattcgtt

SEQ ID NO: 159645 - DNA, 12 bp, Unknown
  misc_feature (1)..( 12): Result.004 file - promoters50/1023594
tatctatagaaa

SEQ ID NO: 159646 - DNA, 12 bp, Unknown
  misc_feature (1)..( 12): Result.004 file - promoters50/1023594
aaaaaatgttat

SEQ ID NO: 159647 - DNA, 12 bp, Unknown
  misc_feature (1)..( 12): Result.004 file - promoters50/1023594
caaaacaattaa

SEQ ID NO: 159648 - DNA, 12 bp, Unknown
  misc_feature (1)..( 12): Result.004 file - promoters50/1023594
tcaaataatcga

SEQ ID NO: 159649 - DNA, 12 bp, Unknown
  misc_feature (1)..( 12): Result.004 file - promoters50/1023594
caaaataatgaa

SEQ ID NO: 159650 - DNA, 12 bp, Unknown
  misc_feature (1)..( 12): Result.004 file - promoters50/1023594
ccaaacaaagag

SEQ ID NO: 159651 - DNA, 12 bp, Unknown
  misc_feature (1)..( 12): Result.004 file - promoters50/1023594
attcacaactaa

SEQ ID NO: 159652 - DNA, 12 bp, Unknown
  misc_feature (1)..( 12): Result.004 file - promoters50/1023594
ccaaccaatcat

SEQ ID NO: 159653 - DNA, 11 bp, Unknown
  misc_feature (1)..( 11): Result.004 file - promoters50/1023594
ttgataatata

SEQ ID NO: 159654 - DNA, 11 bp, Unknown
  misc_feature (1)..( 11): Result.004 file - promoters50/1023594
atgataaaata

SEQ ID NO: 159655 - DNA, 11 bp, Unknown
  misc_feature (1)..( 11): Result.004 file - promoters50/1023594
tctaaaaaaac

SEQ ID NO: 159656 - DNA, 11 bp, Unknown
  misc_feature (1)..( 11): Result.004 file - promoters50/1023594
ttcaaaataaa

SEQ ID NO: 159657 - DNA, 11 bp, Unknown
  misc_feature (1)..( 11): Result.004 file - promoters50/1023594
atgctaataac

SEQ ID NO: 159658 - DNA, 11 bp, Unknown
  misc_feature (1)..( 11): Result.004 file - promoters50/1023594
gccaaaatgtc

SEQ ID NO: 159659 - DNA, 9 bp, Unknown
  misc_feature (1)..( 9): Result.004 file - promoters50/1023594
tattattga

SEQ ID NO: 159660 - DNA, 9 bp, Unknown
  misc_feature (1)..( 9): Result.004 file - promoters50/1023594
tattatatc

SEQ ID NO: 159661 - DNA, 9 bp, Unknown
  misc_feature (1)..( 9): Result.004 file - promoters50/1023594
tattatgaa

SEQ ID NO: 159662 - DNA, 9 bp, Unknown
  misc_feature (1)..( 9): Result.004 file - promoters50/1023594
tattattat

SEQ ID NO: 159663 - DNA, 9 bp, Unknown
  misc_feature (1)..( 9): Result.004 file - promoters50/1023594
aattattca

SEQ ID NO: 159664 - DNA, 9 bp, Unknown
  misc_feature (1)..( 9): Result.004 file - promoters50/1023619
aattaagaa

SEQ ID NO: 159665 - DNA, 15 bp, Unknown
  misc_feature (1)..( 15): Result.004 file - promoters50/1023619
tttaataaagtttga

SEQ ID NO: 159666 - DNA, 15 bp, Unknown
  misc_feature (1)..( 15): Result.004 file - promoters50/1023619
catcgaaaagttaaa

SEQ ID NO: 159667 - DNA, 15 bp, Unknown
  misc_feature (1)..( 15): Result.004 file - promoters50/1023619
accccacaagttaaa

SEQ ID NO: 159668 - DNA, 15 bp, Unknown
  misc_feature (1)..( 15): Result.004 file - promoters50/1023619
gaacgaaaagtcact

SEQ ID NO: 159669 - DNA, 15 bp, Unknown
  misc_feature (1)..( 15): Result.004 file - promoters50/1023619
gaatgaaaaagtcac

SEQ ID NO: 159670 - DNA, 15 bp, Unknown
  misc_feature (1)..( 15): Result.004 file - promoters50/1023619
ttcagaaaaagcgaa

SEQ ID NO: 159671 - DNA, 13 bp, Unknown
  misc_feature (1)..( 13): Result.004 file - promoters50/1023619
aattgattctaat

SEQ ID NO: 159672 - DNA, 13 bp, Unknown
  misc_feature (1)..( 13): Result.004 file - promoters50/1023619
aatttatttcgta

SEQ ID NO: 159673 - DNA, 13 bp, Unknown
  misc_feature (1)..( 13): Result.004 file - promoters50/1023619
ctttgatttgaat

SEQ ID NO: 159674 - DNA, 13 bp, Unknown
  misc_feature (1)..( 13): Result.004 file - promoters50/1023619
aattgatgaaaga

SEQ ID NO: 159675 - DNA, 13 bp, Unknown
  misc_feature (1)..( 13): Result.004 file - promoters50/1023619
aattgagcaatgt

SEQ ID NO: 159676 - DNA, 13 bp, Unknown
  misc_feature (1)..( 13): Result.004 file - promoters50/1023619
cattgttgagaga

SEQ ID NO: 159677 - DNA, 13 bp, Unknown
  misc_feature (1)..( 13): Result.004 file - promoters50/1023619
cattggtttagtt

SEQ ID NO: 159678 - DNA, 13 bp, Unknown
  misc_feature (1)..( 13): Result.004 file - promoters50/1023619
ttttaatctctcg

SEQ ID NO: 159679 - DNA, 13 bp, Unknown
  misc_feature (1)..( 13): Result.004 file - promoters50/1023619
atagaatctttcg

SEQ ID NO: 159680 - DNA, 13 bp, Unknown
  misc_feature (1)..( 13): Result.004 file - promoters50/1023619
gtttaatctgagt

SEQ ID NO: 159681 - DNA, 13 bp, Unknown
  misc_feature (1)..( 13): Result.004 file - promoters50/1023619
gtttaagagtata

SEQ ID NO: 159682 - DNA, 13 bp, Unknown
  misc_feature (1)..( 13): Result.004 file - promoters50/1023619
gttgaagtctaat

SEQ ID NO: 159683 - DNA, 13 bp, Unknown
  misc_feature (1)..( 13): Result.004 file - promoters50/1023634
ttggaatctgaca

SEQ ID NO: 159684 - DNA, 12 bp, Unknown
  misc_feature (1)..( 12): Result.004 file - promoters50/1023634
aaaaatgtgaaa

SEQ ID NO: 159685 - DNA, 12 bp, Unknown
  misc_feature (1)..( 12): Result.004 file - promoters50/1023634
caaactgtgaaa

SEQ ID NO: 159686 - DNA, 12 bp, Unknown
  misc_feature (1)..( 12): Result.004 file - promoters50/1023634
aaaaatcgtcat

SEQ ID NO: 159687 - DNA, 13 bp, Unknown
  misc_feature (1)..( 13): Result.004 file - promoters50/1023634
aaataatttttag

SEQ ID NO: 159688 - DNA, 13 bp, Unknown
  misc_feature (1)..( 13): Result.004 file - promoters50/1023634
atgttatgtgaca

SEQ ID NO: 159689 - DNA, 13 bp, Unknown
  misc_feature (1)..( 13): Result.004 file - promoters50/1023634
tcttgatagttta

SEQ ID NO: 159690 - DNA, 13 bp, Unknown
  misc_feature (1)..( 13): Result.004 file - promoters50/1023634
gttacttgttagt

SEQ ID NO: 159691 - DNA, 13 bp, Unknown
  misc_feature (1)..( 13): Result.004 file - promoters50/1023634
taaacatatttga

SEQ ID NO: 159692 - DNA, 18 bp, Unknown
  misc_feature (1)..( 18): Result.004 file - promoters50/1023634
attttaagaaagtatata

SEQ ID NO: 159693 - DNA, 18 bp, Unknown
  misc_feature (1)..( 18): Result.004 file - promoters50/1023634
tttttaaaaaactatata

SEQ ID NO: 159694 - DNA, 18 bp, Unknown
  misc_feature (1)..( 18): Result.004 file - promoters50/1023634
agatttagaaagagatgt

SEQ ID NO: 159695 - DNA, 18 bp, Unknown
  misc_feature (1)..( 18): Result.004 file - promoters50/1023634
tagctaacaaataatttt

SEQ ID NO: 159696 - DNA, 18 bp, Unknown
  misc_feature (1)..( 18): Result.004 file - promoters50/1023634
aatttaaagcttcacatt

SEQ ID NO: 159697 - DNA, 18 bp, Unknown
  misc_feature (1)..( 18): Result.004 file - promoters50/1023681
tttttatctgagaaattt

SEQ ID NO: 159698 - DNA, 8 bp, Unknown
  misc_feature (1)..( 8): Result.004 file - promoters50/1023681
aaatgaaa

SEQ ID NO: 159699 - DNA, 8 bp, Unknown
  misc_feature (1)..( 8): Result.004 file - promoters50/1023681
caatcaaa

SEQ ID NO: 159700 - DNA, 8 bp, Unknown
  misc_feature (1)..( 8): Result.004 file - promoters50/1023698
aaatgagg

SEQ ID NO: 159701 - DNA, 9 bp, Unknown
  misc_feature (1)..( 9): Result.004 file - promoters50/1023698
aagtaaaaa

SEQ ID NO: 159702 - DNA, 9 bp, Unknown
  misc_feature (1)..( 9): Result.004 file - promoters50/1023698
aagcaaaaa

SEQ ID NO: 159703 - DNA, 9 bp, Unknown
  misc_feature (1)..( 9): Result.004 file - promoters50/1023698
aagcaaaaa

SEQ ID NO: 159704 - DNA, 8 bp, Unknown
  misc_feature (1)..( 8): Result.004 file - promoters50/1023698
ctttattt

SEQ ID NO: 159705 - DNA, 8 bp, Unknown
  misc_feature (1)..( 8): Result.004 file - promoters50/1023698
ttttattt

SEQ ID NO: 159706 - DNA, 8 bp, Unknown
  misc_feature (1)..( 8): Result.004 file - promoters50/1023698
ctttatag

SEQ ID NO: 159707 - DNA, 10 bp, Unknown
  misc_feature (1)..( 10): Result.004 file - promoters50/1023698
taaaaaataa

SEQ ID NO: 159708 - DNA, 10 bp, Unknown
  misc_feature (1)..( 10): Result.004 file - promoters50/1023698
taaaatataa

SEQ ID NO: 159709 - DNA, 11 bp, Unknown
  misc_feature (1)..( 11): Result.004 file - promoters50/1023698
atagaaattaa

SEQ ID NO: 159710 - DNA, 10 bp, Unknown
  misc_feature (1)..( 10): Result.004 file - promoters50/1023698
acattattgt

SEQ ID NO: 159711 - DNA, 10 bp, Unknown
  misc_feature (1)..( 10): Result.004 file - promoters50/1023698
acattataaa

SEQ ID NO: 159712 - DNA, 10 bp, Unknown
  misc_feature (1)..( 10): Result.004 file - promoters50/1023747
ttattgtaaa

SEQ ID NO: 159713 - DNA, 7 bp, Unknown
  misc_feature (1)..( 7): Result.004 file - promoters50/1023747
ataaatc

SEQ ID NO: 159714 - DNA, 7 bp, Unknown
  misc_feature (1)..( 7): Result.004 file - promoters50/1023747
atacatc

SEQ ID NO: 159715 - DNA, 7 bp, Unknown
  misc_feature (1)..( 7): Result.004 file - promoters50/1023747
aaaaaaa

SEQ ID NO: 159716 - DNA, 7 bp, Unknown
  misc_feature (1)..( 7): Result.004 file - promoters50/1023747
aataata

SEQ ID NO: 159717 - DNA, 7 bp, Unknown
  misc_feature (1)..( 7): Result.004 file - promoters50/1023747
aattata

SEQ ID NO: 159718 - DNA, 7 bp, Unknown
  misc_feature (1)..( 7): Result.004 file - promoters50/1023747
aattatg

SEQ ID NO: 159719 - DNA, 8 bp, Unknown
  misc_feature (1)..( 8): Result.004 file - promoters50/1023747
aaatcaca

SEQ ID NO: 159720 - DNA, 8 bp, Unknown
  misc_feature (1)..( 8): Result.004 file - promoters50/1023747
aaatcatt

SEQ ID NO: 159721 - DNA, 8 bp, Unknown
  misc_feature (1)..( 8): Result.004 file - promoters50/1023782
caatcatt

SEQ ID NO: 159722 - DNA, 10 bp, Unknown
  misc_feature (1)..( 10): Result.004 file - promoters50/1023782
ataaatcaaa

SEQ ID NO: 159723 - DNA, 10 bp, Unknown
  misc_feature (1)..( 10): Result.004 file - promoters50/1023782
ggaaatgaaa

SEQ ID NO: 159724 - DNA, 10 bp, Unknown
  misc_feature (1)..( 10): Result.004 file - promoters50/1023782
ggaaaagaaa

SEQ ID NO: 159725 - DNA, 10 bp, Unknown
  misc_feature (1)..( 10): Result.004 file - promoters50/1023782
atgcaagaaa

SEQ ID NO: 159726 - DNA, 12 bp, Unknown
  misc_feature (1)..( 12): Result.004 file - promoters50/1023782
agtttggatatc

SEQ ID NO: 159727 - DNA, 12 bp, Unknown
  misc_feature (1)..( 12): Result.004 file - promoters50/1023782
agtttggatttt

SEQ ID NO: 159728 - DNA, 12 bp, Unknown
  misc_feature (1)..( 12): Result.004 file - promoters50/1023782
aaattgggtttt

SEQ ID NO: 159729 - DNA, 12 bp, Unknown
  misc_feature (1)..( 12): Result.004 file - promoters50/1023786
tcaatggtttac

SEQ ID NO: 159730 - DNA, 7 bp, Unknown
  misc_feature (1)..( 7): Result.004 file - promoters50/1023786
ctaattc

SEQ ID NO: 159731 - DNA, 7 bp, Unknown
  misc_feature (1)..( 7): Result.004 file - promoters50/1023786
ctaattt

SEQ ID NO: 159732 - DNA, 7 bp, Unknown
  misc_feature (1)..( 7): Result.004 file - promoters50/1023786
ctatttt

SEQ ID NO: 159733 - DNA, 7 bp, Unknown
  misc_feature (1)..( 7): Result.004 file - promoters50/1023786
gtatttt

SEQ ID NO: 159734 - DNA, 7 bp, Unknown
  misc_feature (1)..( 7): Result.004 file - promoters50/1023786
gtaattt

SEQ ID NO: 159735 - DNA, 7 bp, Unknown
  misc_feature (1)..( 7): Result.004 file - promoters50/1023851
ataattt

SEQ ID NO: 159736 - DNA, 20 bp, Unknown
  misc_feature (1)..( 20): Result.004 file - promoters50/1023851
aaacaatagttttgacatat

SEQ ID NO: 159737 - DNA, 20 bp, Unknown
  misc_feature (1)..( 20): Result.004 file - promoters50/1023851
gaaaacctaagttgatatat

SEQ ID NO: 159738 - DNA, 20 bp, Unknown
  misc_feature (1)..( 20): Result.004 file - promoters50/1023851
aaaccatagttttgaccaac

SEQ ID NO: 159739 - DNA, 29 bp, Unknown
  misc_feature (1)..( 29): Result.004 file - promoters50/1023851
aaaaaccaaatatactgtaatactagcaa

SEQ ID NO: 159740 - DNA, 29 bp, Unknown
  misc_feature (1)..( 29): Result.004 file - promoters50/1023851
aaaaaccaaaaataccgtaatactatcaa

SEQ ID NO: 159741 - DNA, 29 bp, Unknown
  misc_feature (1)..( 29): Result.004 file - promoters50/1023851
ataggccaaaactgaaaacctaagttgat

SEQ ID NO: 159742 - DNA, 8 bp, Unknown
  misc_feature (1)..( 8): Result.004 file - promoters50/1023851
aaaaacaa

SEQ ID NO: 159743 - DNA, 8 bp, Unknown
  misc_feature (1)..( 8): Result.004 file - promoters50/1023851
caaaacaa

SEQ ID NO: 159744 - DNA, 8 bp, Unknown
  misc_feature (1)..( 8): Result.004 file - promoters50/1023891
caaaactg

SEQ ID NO: 159745 - DNA, 11 bp, Unknown
  misc_feature (1)..( 11): Result.004 file - promoters50/1023891
cattcaaaacg

SEQ ID NO: 159746 - DNA, 11 bp, Unknown
  misc_feature (1)..( 11): Result.004 file - promoters50/1023891
catttaaattt

SEQ ID NO: 159747 - DNA, 11 bp, Unknown
  misc_feature (1)..( 11): Result.004 file - promoters50/1023891
gctttgaatca

SEQ ID NO: 159748 - DNA, 11 bp, Unknown
  misc_feature (1)..( 11): Result.004 file - promoters50/1023891
aattttaattt

SEQ ID NO: 159749 - DNA, 11 bp, Unknown
  misc_feature (1)..( 11): Result.004 file - promoters50/1023891
tggattagttt

SEQ ID NO: 159750 - DNA, 13 bp, Unknown
  misc_feature (1)..( 13): Result.004 file - promoters50/1023891
aaagttttaatgt

SEQ ID NO: 159751 - DNA, 13 bp, Unknown
  misc_feature (1)..( 13): Result.004 file - promoters50/1023891
aaaattttaaaat

SEQ ID NO: 159752 - DNA, 13 bp, Unknown
  misc_feature (1)..( 13): Result.004 file - promoters50/1023891
gatattttataga

SEQ ID NO: 159753 - DNA, 13 bp, Unknown
  misc_feature (1)..( 13): Result.004 file - promoters50/1023891
tttcttttacaga

SEQ ID NO: 159754 - DNA, 13 bp, Unknown
  misc_feature (1)..( 13): Result.004 file - promoters50/1023963
ataattttagaga

SEQ ID NO: 159755 - DNA, 14 bp, Unknown
  misc_feature (1)..( 14): Result.004 file - promoters50/1023963
aagaacacataatg

SEQ ID NO: 159756 - DNA, 14 bp, Unknown
  misc_feature (1)..( 14): Result.004 file - promoters50/1023963
cgctacaaataaac

SEQ ID NO: 159757 - DNA, 14 bp, Unknown
  misc_feature (1)..( 14): Result.004 file - promoters50/1023963
gaagacaactatga

SEQ ID NO: 159758 - DNA, 14 bp, Unknown
  misc_feature (1)..( 14): Result.004 file - promoters50/1023963
gaaaacacataatg

SEQ ID NO: 159759 - DNA, 14 bp, Unknown
  misc_feature (1)..( 14): Result.004 file - promoters50/1023963
ttttacaaatgtaa

SEQ ID NO: 159760 - DNA, 14 bp, Unknown
  misc_feature (1)..( 14): Result.004 file - promoters50/1023963
gaagactgacgacg

SEQ ID NO: 159761 - DNA, 12 bp, Unknown
  misc_feature (1)..( 12): Result.004 file - promoters50/1023963
attttagaaaag

SEQ ID NO: 159762 - DNA, 12 bp, Unknown
  misc_feature (1)..( 12): Result.004 file - promoters50/1023963
acattaaaaaaa

SEQ ID NO: 159763 - DNA, 12 bp, Unknown
  misc_feature (1)..( 12): Result.004 file - promoters50/1023963
acattgaaatgt

SEQ ID NO: 159764 - DNA, 12 bp, Unknown
  misc_feature (1)..( 12): Result.004 file - promoters50/1023963
agagtaaataat

SEQ ID NO: 159765 - DNA, 12 bp, Unknown
  misc_feature (1)..( 12): Result.004 file - promoters50/1023963
acagtgatcatc

SEQ ID NO: 159766 - DNA, 12 bp, Unknown
  misc_feature (1)..( 12): Result.004 file - promoters50/1024003
aacgtatatatg

SEQ ID NO: 159767 - DNA, 8 bp, Unknown
  misc_feature (1)..( 8): Result.004 file - promoters50/1024003
ttttatct

SEQ ID NO: 159768 - DNA, 8 bp, Unknown
  misc_feature (1)..( 8): Result.004 file - promoters50/1024003
ttttttct

SEQ ID NO: 159769 - DNA, 8 bp, Unknown
  misc_feature (1)..( 8): Result.004 file - promoters50/1024015
gtttctcc

SEQ ID NO: 159770 - DNA, 11 bp, Unknown
  misc_feature (1)..( 11): Result.004 file - promoters50/1024015
aagatagagat

SEQ ID NO: 159771 - DNA, 11 bp, Unknown
  misc_feature (1)..( 11): Result.004 file - promoters50/1024015
tacatacagat

SEQ ID NO: 159772 - DNA, 11 bp, Unknown
  misc_feature (1)..( 11): Result.004 file - promoters50/1024015
aggatagatag

SEQ ID NO: 159773 - DNA, 11 bp, Unknown
  misc_feature (1)..( 11): Result.004 file - promoters50/1024015
tagatacagac

SEQ ID NO: 159774 - DNA, 11 bp, Unknown
  misc_feature (1)..( 11): Result.004 file - promoters50/1024015
cacaaacaaga

SEQ ID NO: 159775 - DNA, 11 bp, Unknown
  misc_feature (1)..( 11): Result.004 file - promoters50/1024045
cacaaaacatc

SEQ ID NO: 159776 - DNA, 10 bp, Unknown
  misc_feature (1)..( 10): Result.004 file - promoters50/1024045
aatttgagac

SEQ ID NO: 159777 - DNA, 10 bp, Unknown
  misc_feature (1)..( 10): Result.004 file - promoters50/1024045
agtttgagac

SEQ ID NO: 159778 - DNA, 10 bp, Unknown
  misc_feature (1)..( 10): Result.004 file - promoters50/1024045
aatatgatgg

SEQ ID NO: 159779 - DNA, 9 bp, Unknown
  misc_feature (1)..( 9): Result.004 file - promoters50/1024045
gaatttggg

SEQ ID NO: 159780 - DNA, 9 bp, Unknown
  misc_feature (1)..( 9): Result.004 file - promoters50/1024045
aaatttggt

SEQ ID NO: 159781 - DNA, 9 bp, Unknown
  misc_feature (1)..( 9): Result.004 file - promoters50/1024045
aaatttggg

SEQ ID NO: 159782 - DNA, 9 bp, Unknown
  misc_feature (1)..( 9): Result.004 file - promoters50/1024045
aaatttcaa

SEQ ID NO: 159783 - DNA, 8 bp, Unknown
  misc_feature (1)..( 8): Result.004 file - promoters50/1024045
gagagata

SEQ ID NO: 159784 - DNA, 8 bp, Unknown
  misc_feature (1)..( 8): Result.004 file - promoters50/1024045
aagatata

SEQ ID NO: 159785 - DNA, 8 bp, Unknown
  misc_feature (1)..( 8): Result.004 file - promoters50/1024045
aaaaaata

SEQ ID NO: 159786 - DNA, 7 bp, Unknown
  misc_feature (1)..( 7): Result.004 file - promoters50/1024045
aatcaat

SEQ ID NO: 159787 - DNA, 7 bp, Unknown
  misc_feature (1)..( 7): Result.004 file - promoters50/1024045
aattaat

SEQ ID NO: 159788 - DNA, 7 bp, Unknown
  misc_feature (1)..( 7): Result.004 file - promoters50/1024045
gattaat

SEQ ID NO: 159789 - DNA, 6 bp, Unknown
  misc_feature (1)..( 6): Result.004 file - promoters50/1024045
taatta

SEQ ID NO: 159790 - DNA, 6 bp, Unknown
  misc_feature (1)..( 6): Result.004 file - promoters50/1024045
taatta

SEQ ID NO: 159791 - DNA, 6 bp, Unknown
  misc_feature (1)..( 6): Result.004 file - promoters50/1024126
taatta

SEQ ID NO: 159792 - DNA, 15 bp, Unknown
  misc_feature (1)..( 15): Result.004 file - promoters50/1024126
tttattgaaaaatca

SEQ ID NO: 159793 - DNA, 15 bp, Unknown
  misc_feature (1)..( 15): Result.004 file - promoters50/1024126
ttgattcaaaattct

SEQ ID NO: 159794 - DNA, 15 bp, Unknown
  misc_feature (1)..( 15): Result.004 file - promoters50/1024126
tcagttgaaaccgaa

SEQ ID NO: 159795 - DNA, 15 bp, Unknown
  misc_feature (1)..( 15): Result.004 file - promoters50/1024126
agtattgacgatact

SEQ ID NO: 159796 - DNA, 15 bp, Unknown
  misc_feature (1)..( 15): Result.004 file - promoters50/1024126
atgatttaaattatt

SEQ ID NO: 159797 - DNA, 15 bp, Unknown
  misc_feature (1)..( 15): Result.004 file - promoters50/1024126
ggtgaagaagaattg

SEQ ID NO: 159798 - DNA, 15 bp, Unknown
  misc_feature (1)..( 15): Result.004 file - promoters50/1024126
agtcttgaattgttc

SEQ ID NO: 159799 - DNA, 15 bp, Unknown
  misc_feature (1)..( 15): Result.004 file - promoters50/1024126
gaaaacgaagaggaa

SEQ ID NO: 159800 - DNA, 13 bp, Unknown
  misc_feature (1)..( 13): Result.004 file - promoters50/1024126
ataaaataatatg

SEQ ID NO: 159801 - DNA, 13 bp, Unknown
  misc_feature (1)..( 13): Result.004 file - promoters50/1024126
ttctgatattata

SEQ ID NO: 159802 - DNA, 13 bp, Unknown
  misc_feature (1)..( 13): Result.004 file - promoters50/1024126
aaaaaaaattata

SEQ ID NO: 159803 - DNA, 13 bp, Unknown
  misc_feature (1)..( 13): Result.004 file - promoters50/1024126
catataaagtaat

SEQ ID NO: 159804 - DNA, 13 bp, Unknown
  misc_feature (1)..( 13): Result.004 file - promoters50/1024126
ttttcttattatc

SEQ ID NO: 159805 - DNA, 13 bp, Unknown
  misc_feature (1)..( 13): Result.004 file - promoters50/1024126
atgagaaaataac

SEQ ID NO: 159806 - DNA, 11 bp, Unknown
  misc_feature (1)..( 11): Result.004 file - promoters50/1024126
tattaaaatag

SEQ ID NO: 159807 - DNA, 11 bp, Unknown
  misc_feature (1)..( 11): Result.004 file - promoters50/1024126
tatcaaagaat

SEQ ID NO: 159808 - DNA, 11 bp, Unknown
  misc_feature (1)..( 11): Result.004 file - promoters50/1024126
aattaaaaaaa

SEQ ID NO: 159809 - DNA, 11 bp, Unknown
  misc_feature (1)..( 11): Result.004 file - promoters50/1024126
taagaaaagga

SEQ ID NO: 159810 - DNA, 11 bp, Unknown
  misc_feature (1)..( 11): Result.004 file - promoters50/1024126
aacgaagagga

SEQ ID NO: 159811 - DNA, 11 bp, Unknown
  misc_feature (1)..( 11): Result.004 file - promoters50/1024126
gaagaagaatt

SEQ ID NO: 159812 - DNA, 10 bp, Unknown
  misc_feature (1)..( 10): Result.004 file - promoters50/1024126
gaaaaatcat

SEQ ID NO: 159813 - DNA, 10 bp, Unknown
  misc_feature (1)..( 10): Result.004 file - promoters50/1024126
aaaaaattct

SEQ ID NO: 159814 - DNA, 10 bp, Unknown
  misc_feature (1)..( 10): Result.004 file - promoters50/1024126
gaagaattgt

SEQ ID NO: 159815 - DNA, 10 bp, Unknown
  misc_feature (1)..( 10): Result.004 file - promoters50/1024126
tcaaaattct

SEQ ID NO: 159816 - DNA, 10 bp, Unknown
  misc_feature (1)..( 10): Result.004 file - promoters50/1024126
taaacatttg

SEQ ID NO: 159817 - DNA, 10 bp, Unknown
  misc_feature (1)..( 10): Result.004 file - promoters50/1024126
aaagaataca

SEQ ID NO: 159818 - DNA, 10 bp, Unknown
  misc_feature (1)..( 10): Result.004 file - promoters50/1024126
gaagaggaag

SEQ ID NO: 159819 - DNA, 8 bp, Unknown
  misc_feature (1)..( 8): Result.004 file - promoters50/1024126
aaacaaca

SEQ ID NO: 159820 - DNA, 8 bp, Unknown
  misc_feature (1)..( 8): Result.004 file - promoters50/1024126
caactaca

SEQ ID NO: 159821 - DNA, 8 bp, Unknown
  misc_feature (1)..( 8): Result.004 file - promoters50/1024126
aaaaaact

SEQ ID NO: 159822 - DNA, 8 bp, Unknown
  misc_feature (1)..( 8): Result.004 file - promoters50/1024126
aaacaaat

SEQ ID NO: 159823 - DNA, 8 bp, Unknown
  misc_feature (1)..( 8): Result.004 file - promoters50/1024126
aaagaaag

SEQ ID NO: 159824 - DNA, 8 bp, Unknown
  misc_feature (1)..( 8): Result.004 file - promoters50/1024130
gaactaat

SEQ ID NO: 159825 - DNA, 8 bp, Unknown
  misc_feature (1)..( 8): Result.004 file - promoters50/1024130
ttggcaac

SEQ ID NO: 159826 - DNA, 8 bp, Unknown
  misc_feature (1)..( 8): Result.004 file - promoters50/1024130
ttgtcaac

SEQ ID NO: 159827 - DNA, 8 bp, Unknown
  misc_feature (1)..( 8): Result.004 file - promoters50/1024166
ttgtcagg

SEQ ID NO: 159828 - DNA, 12 bp, Unknown
  misc_feature (1)..( 12): Result.004 file - promoters50/1024166
attaaaaaaaaa

SEQ ID NO: 159829 - DNA, 12 bp, Unknown
  misc_feature (1)..( 12): Result.004 file - promoters50/1024166
aataacaaaaaa

SEQ ID NO: 159830 - DNA, 12 bp, Unknown
  misc_feature (1)..( 12): Result.004 file - promoters50/1024166
attataaacaaa

SEQ ID NO: 159831 - DNA, 12 bp, Unknown
  misc_feature (1)..( 12): Result.004 file - promoters50/1024166
cccaaaaagttt

SEQ ID NO: 159832 - DNA, 12 bp, Unknown
  misc_feature (1)..( 12): Result.004 file - promoters50/1024166
aagaaaaaaaaa

SEQ ID NO: 159833 - DNA, 12 bp, Unknown
  misc_feature (1)..( 12): Result.004 file - promoters50/1024166
accaaaaaaaat

SEQ ID NO: 159834 - DNA, 12 bp, Unknown
  misc_feature (1)..( 12): Result.004 file - promoters50/1024166
tttataagcatt

SEQ ID NO: 159835 - DNA, 13 bp, Unknown
  misc_feature (1)..( 13): Result.004 file - promoters50/1024166
agttatgttttgt

SEQ ID NO: 159836 - DNA, 13 bp, Unknown
  misc_feature (1)..( 13): Result.004 file - promoters50/1024166
tattattttttaa

SEQ ID NO: 159837 - DNA, 13 bp, Unknown
  misc_feature (1)..( 13): Result.004 file - promoters50/1024166
atttatgtatagt

SEQ ID NO: 159838 - DNA, 13 bp, Unknown
  misc_feature (1)..( 13): Result.004 file - promoters50/1024166
agtcatgcaacaa

SEQ ID NO: 159839 - DNA, 13 bp, Unknown
  misc_feature (1)..( 13): Result.004 file - promoters50/1024166
ttttgtgttttgt

SEQ ID NO: 159840 - DNA, 13 bp, Unknown
  misc_feature (1)..( 13): Result.004 file - promoters50/1024189
taatatatattct

SEQ ID NO: 159841 - DNA, 10 bp, Unknown
  misc_feature (1)..( 10): Result.004 file - promoters50/1024189
tctttacagt

SEQ ID NO: 159842 - DNA, 10 bp, Unknown
  misc_feature (1)..( 10): Result.004 file - promoters50/1024189
actttacgtt

SEQ ID NO: 159843 - DNA, 10 bp, Unknown
  misc_feature (1)..( 10): Result.004 file - promoters50/1024189
tctttatcta

SEQ ID NO: 159844 - DNA, 10 bp, Unknown
  misc_feature (1)..( 10): Result.004 file - promoters50/1024189
actatacaac

SEQ ID NO: 159845 - DNA, 10 bp, Unknown
  misc_feature (1)..( 10): Result.004 file - promoters50/1024189
attttttttt

SEQ ID NO: 159846 - DNA, 10 bp, Unknown
  misc_feature (1)..( 10): Result.004 file - promoters50/1024189
gttttttgta

SEQ ID NO: 159847 - DNA, 10 bp, Unknown
  misc_feature (1)..( 10): Result.004 file - promoters50/1024189
ttttttcttt

SEQ ID NO: 159848 - DNA, 8 bp, Unknown
  misc_feature (1)..( 8): Result.004 file - promoters50/1024189
atataata

SEQ ID NO: 159849 - DNA, 8 bp, Unknown
  misc_feature (1)..( 8): Result.004 file - promoters50/1024189
ttattata

SEQ ID NO: 159850 - DNA, 8 bp, Unknown
  misc_feature (1)..( 8): Result.004 file - promoters50/1024189
atataaaa

SEQ ID NO: 159851 - DNA, 8 bp, Unknown
  misc_feature (1)..( 8): Result.004 file - promoters50/1024189
ttataatg

SEQ ID NO: 159852 - DNA, 8 bp, Unknown
  misc_feature (1)..( 8): Result.004 file - promoters50/1024189
atataata

SEQ ID NO: 159853 - DNA, 8 bp, Unknown
  misc_feature (1)..( 8): Result.004 file - promoters50/1024189
gtataaat

SEQ ID NO: 159854 - DNA, 8 bp, Unknown
  misc_feature (1)..( 8): Result.004 file - promoters50/1024189
atatatta

SEQ ID NO: 159855 - DNA, 12 bp, Unknown
  misc_feature (1)..( 12): Result.004 file - promoters50/1024189
gcctaaaatata

SEQ ID NO: 159856 - DNA, 12 bp, Unknown
  misc_feature (1)..( 12): Result.004 file - promoters50/1024189
aaccaaaatata

SEQ ID NO: 159857 - DNA, 12 bp, Unknown
  misc_feature (1)..( 12): Result.004 file - promoters50/1024189
ataaaaaataaa

SEQ ID NO: 159858 - DNA, 12 bp, Unknown
  misc_feature (1)..( 12): Result.004 file - promoters50/1024189
cttgtaaacata

SEQ ID NO: 159859 - DNA, 12 bp, Unknown
  misc_feature (1)..( 12): Result.004 file - promoters50/1024189
ataataaatagg

SEQ ID NO: 159860 - DNA, 12 bp, Unknown
  misc_feature (1)..( 12): Result.004 file - promoters50/1024189
tgtataaattta

SEQ ID NO: 159861 - DNA, 15 bp, Unknown
  misc_feature (1)..( 15): Result.004 file - promoters50/1024189
taataacatcacttt

SEQ ID NO: 159862 - DNA, 15 bp, Unknown
  misc_feature (1)..( 15): Result.004 file - promoters50/1024189
atataaaatcaataa

SEQ ID NO: 159863 - DNA, 15 bp, Unknown
  misc_feature (1)..( 15): Result.004 file - promoters50/1024189
agtagaaattaatat

SEQ ID NO: 159864 - DNA, 15 bp, Unknown
  misc_feature (1)..( 15): Result.004 file - promoters50/1024189
atagataattaagtt

SEQ ID NO: 159865 - DNA, 15 bp, Unknown
  misc_feature (1)..( 15): Result.004 file - promoters50/1024189
accatatattattat

SEQ ID NO: 159866 - DNA, 15 bp, Unknown
  misc_feature (1)..( 15): Result.004 file - promoters50/1024189
gtataaatttactca

SEQ ID NO: 159867 - DNA, 11 bp, Unknown
  misc_feature (1)..( 11): Result.004 file - promoters50/1024189
gttactgattt

SEQ ID NO: 159868 - DNA, 11 bp, Unknown
  misc_feature (1)..( 11): Result.004 file - promoters50/1024189
tttattgatca

SEQ ID NO: 159869 - DNA, 11 bp, Unknown
  misc_feature (1)..( 11): Result.004 file - promoters50/1024189
ttgtctgtttt

SEQ ID NO: 159870 - DNA, 11 bp, Unknown
  misc_feature (1)..( 11): Result.004 file - promoters50/1024189
tttgttggtgt

SEQ ID NO: 159871 - DNA, 11 bp, Unknown
  misc_feature (1)..( 11): Result.004 file - promoters50/1024189
gggattgattc

SEQ ID NO: 159872 - DNA, 11 bp, Unknown
  misc_feature (1)..( 11): Result.004 file - promoters50/1024189
tctatttataa

SEQ ID NO: 159873 - DNA, 13 bp, Unknown
  misc_feature (1)..( 13): Result.004 file - promoters50/1024189
tctaattttgtat

SEQ ID NO: 159874 - DNA, 13 bp, Unknown
  misc_feature (1)..( 13): Result.004 file - promoters50/1024189
tttaattttaatt

SEQ ID NO: 159875 - DNA, 13 bp, Unknown
  misc_feature (1)..( 13): Result.004 file - promoters50/1024189
attaatttttatt

SEQ ID NO: 159876 - DNA, 13 bp, Unknown
  misc_feature (1)..( 13): Result.004 file - promoters50/1024189
attgattctctca

SEQ ID NO: 159877 - DNA, 13 bp, Unknown
  misc_feature (1)..( 13): Result.004 file - promoters50/1024189
attgatcaatcaa

SEQ ID NO: 159878 - DNA, 13 bp, Unknown
  misc_feature (1)..( 13): Result.004 file - promoters50/1024199
ttcaatcttattg

SEQ ID NO: 159879 - DNA, 16 bp, Unknown
  misc_feature (1)..( 16): Result.004 file - promoters50/1024199
atttatgtctttgtat

SEQ ID NO: 159880 - DNA, 16 bp, Unknown
  misc_feature (1)..( 16): Result.004 file - promoters50/1024199
agactcatctctgtgg

SEQ ID NO: 159881 - DNA, 16 bp, Unknown
  misc_feature (1)..( 16): Result.004 file - promoters50/1024199
attaatgtattttatg

SEQ ID NO: 159882 - DNA, 16 bp, Unknown
  misc_feature (1)..( 16): Result.004 file - promoters50/1024199
tataataaattttttc

SEQ ID NO: 159883 - DNA, 16 bp, Unknown
  misc_feature (1)..( 16): Result.004 file - promoters50/1024199
gtgattaaattttata

SEQ ID NO: 159884 - DNA, 16 bp, Unknown
  misc_feature (1)..( 16): Result.004 file - promoters50/1024199
gaattttaattaaaac

SEQ ID NO: 159885 - DNA, 16 bp, Unknown
  misc_feature (1)..( 16): Result.004 file - promoters50/1024199
gctgagccatttatgt

SEQ ID NO: 159886 - DNA, 17 bp, Unknown
  misc_feature (1)..( 17): Result.004 file - promoters50/1024199
tatataaatcccttaaa

SEQ ID NO: 159887 - DNA, 17 bp, Unknown
  misc_feature (1)..( 17): Result.004 file - promoters50/1024199
tttatgaatccatataa

SEQ ID NO: 159888 - DNA, 17 bp, Unknown
  misc_feature (1)..( 17): Result.004 file - promoters50/1024199
ataaataatctcttaaa

SEQ ID NO: 159889 - DNA, 17 bp, Unknown
  misc_feature (1)..( 17): Result.004 file - promoters50/1024199
tttataaactcagtgat

SEQ ID NO: 159890 - DNA, 17 bp, Unknown
  misc_feature (1)..( 17): Result.004 file - promoters50/1024199
agtcttaagcacagaac

SEQ ID NO: 159891 - DNA, 17 bp, Unknown
  misc_feature (1)..( 17): Result.004 file - promoters50/1024199
tttataagtaggtcatt

SEQ ID NO: 159892 - DNA, 10 bp, Unknown
  misc_feature (1)..( 10): Result.004 file - promoters50/1024199
agccatattg

SEQ ID NO: 159893 - DNA, 10 bp, Unknown
  misc_feature (1)..( 10): Result.004 file - promoters50/1024199
aaccatatgt

SEQ ID NO: 159894 - DNA, 10 bp, Unknown
  misc_feature (1)..( 10): Result.004 file - promoters50/1024199
gagcattttg

SEQ ID NO: 159895 - DNA, 10 bp, Unknown
  misc_feature (1)..( 10): Result.004 file - promoters50/1024199
aacaataatg

SEQ ID NO: 159896 - DNA, 11 bp, Unknown
  misc_feature (1)..( 11): Result.004 file - promoters50/1024199
ttcaatcatgt

SEQ ID NO: 159897 - DNA, 11 bp, Unknown
  misc_feature (1)..( 11): Result.004 file - promoters50/1024203
tatcatttttt

SEQ ID NO: 159898 - DNA, 7 bp, Unknown
  misc_feature (1)..( 7): Result.004 file - promoters50/1024203
aaatgtc

SEQ ID NO: 159899 - DNA, 7 bp, Unknown
  misc_feature (1)..( 7): Result.004 file - promoters50/1024203
aaatgta

SEQ ID NO: 159900 - DNA, 7 bp, Unknown
  misc_feature (1)..( 7): Result.004 file - promoters50/1024203
aaaagtc

SEQ ID NO: 159901 - DNA, 7 bp, Unknown
  misc_feature (1)..( 7): Result.004 file - promoters50/1024206
aaatgtc

SEQ ID NO: 159902 - DNA, 13 bp, Unknown
  misc_feature (1)..( 13): Result.004 file - promoters50/1024206
atgttattgatat

SEQ ID NO: 159903 - DNA, 13 bp, Unknown
  misc_feature (1)..( 13): Result.004 file - promoters50/1024206
aaattagtgattc

SEQ ID NO: 159904 - DNA, 13 bp, Unknown
  misc_feature (1)..( 13): Result.004 file - promoters50/1024206
atgttattgttat

SEQ ID NO: 159905 - DNA, 9 bp, Unknown
  misc_feature (1)..( 9): Result.004 file - promoters50/1024206
gggtgatgt

SEQ ID NO: 159906 - DNA, 9 bp, Unknown
  misc_feature (1)..( 9): Result.004 file - promoters50/1024206
tggttatgt

SEQ ID NO: 159907 - DNA, 9 bp, Unknown
  misc_feature (1)..( 9): Result.004 file - promoters50/1024214
tggatattt

SEQ ID NO: 159908 - DNA, 11 bp, Unknown
  misc_feature (1)..( 11): Result.004 file - promoters50/1024214
gcttatattaa

SEQ ID NO: 159909 - DNA, 11 bp, Unknown
  misc_feature (1)..( 11): Result.004 file - promoters50/1024214
gctgatatttg

SEQ ID NO: 159910 - DNA, 11 bp, Unknown
  misc_feature (1)..( 11): Result.004 file - promoters50/1024214
atttatattga

SEQ ID NO: 159911 - DNA, 11 bp, Unknown
  misc_feature (1)..( 11): Result.004 file - promoters50/1024214
atagatttttg

SEQ ID NO: 159912 - DNA, 11 bp, Unknown
  misc_feature (1)..( 11): Result.004 file - promoters50/1024214
ggtgaaattaa

SEQ ID NO: 159913 - DNA, 11 bp, Unknown
  misc_feature (1)..( 11): Result.004 file - promoters50/1024214
gaagactttag

SEQ ID NO: 159914 - DNA, 11 bp, Unknown
  misc_feature (1)..( 11): Result.004 file - promoters50/1024214
tacactataga

SEQ ID NO: 159915 - DNA, 16 bp, Unknown
  misc_feature (1)..( 16): Result.004 file - promoters50/1024214
gtttagtttagaagtc

SEQ ID NO: 159916 - DNA, 16 bp, Unknown
  misc_feature (1)..( 16): Result.004 file - promoters50/1024214
ccattgttgagagatt

SEQ ID NO: 159917 - DNA, 17 bp, Unknown
  misc_feature (1)..( 17): Result.004 file - promoters50/1024214
ttttaattgatgaaaga

SEQ ID NO: 159918 - DNA, 17 bp, Unknown
  misc_feature (1)..( 17): Result.004 file - promoters50/1024214
gtcaaattgatttagct

SEQ ID NO: 159919 - DNA, 17 bp, Unknown
  misc_feature (1)..( 17): Result.004 file - promoters50/1024214
agggatttgattggttg

SEQ ID NO: 159920 - DNA, 17 bp, Unknown
  misc_feature (1)..( 17): Result.004 file - promoters50/1024214
gtcaaatttatttcgta

SEQ ID NO: 159921 - DNA, 13 bp, Unknown
  misc_feature (1)..( 13): Result.004 file - promoters50/1024214
acattggtttagt

SEQ ID NO: 159922 - DNA, 13 bp, Unknown
  misc_feature (1)..( 13): Result.004 file - promoters50/1024214
cattcattttagt

SEQ ID NO: 159923 - DNA, 13 bp, Unknown
  misc_feature (1)..( 13): Result.004 file - promoters50/1024214
aaattgatttagc

SEQ ID NO: 159924 - DNA, 13 bp, Unknown
  misc_feature (1)..( 13): Result.004 file - promoters50/1024214
caattgattctaa

SEQ ID NO: 159925 - DNA, 13 bp, Unknown
  misc_feature (1)..( 13): Result.004 file - promoters50/1024214
gatttgattggtt

SEQ ID NO: 159926 - DNA, 13 bp, Unknown
  misc_feature (1)..( 13): Result.004 file - promoters50/1024214
aaatttatttcgt

SEQ ID NO: 159927 - DNA, 13 bp, Unknown
  misc_feature (1)..( 13): Result.004 file - promoters50/1024214
aaatcgattccgc

SEQ ID NO: 159928 - DNA, 13 bp, Unknown
  misc_feature (1)..( 13): Result.004 file - promoters50/1024214
taattgatgaaag

SEQ ID NO: 159929 - DNA, 13 bp, Unknown
  misc_feature (1)..( 13): Result.004 file - promoters50/1024214
aattgattctaat

SEQ ID NO: 159930 - DNA, 13 bp, Unknown
  misc_feature (1)..( 13): Result.004 file - promoters50/1024214
aattgagcaatgt

SEQ ID NO: 159931 - DNA, 13 bp, Unknown
  misc_feature (1)..( 13): Result.004 file - promoters50/1024214
aattgatgaaaga

SEQ ID NO: 159932 - DNA, 13 bp, Unknown
  misc_feature (1)..( 13): Result.004 file - promoters50/1024214
aattgatttagct

SEQ ID NO: 159933 - DNA, 13 bp, Unknown
  misc_feature (1)..( 13): Result.004 file - promoters50/1024214
aatttatttcgta

SEQ ID NO: 159934 - DNA, 13 bp, Unknown
  misc_feature (1)..( 13): Result.004 file - promoters50/1024236
cattgttgagaga

SEQ ID NO: 159935 - DNA, 9 bp, Unknown
  misc_feature (1)..( 9): Result.004 file - promoters50/1024236
cataataat

SEQ ID NO: 159936 - DNA, 9 bp, Unknown
  misc_feature (1)..( 9): Result.004 file - promoters50/1024236
aataaaaat

SEQ ID NO: 159937 - DNA, 9 bp, Unknown
  misc_feature (1)..( 9): Result.004 file - promoters50/1024236
ttaaataat

SEQ ID NO: 159938 - DNA, 9 bp, Unknown
  misc_feature (1)..( 9): Result.004 file - promoters50/1024236
attaataaa

SEQ ID NO: 159939 - DNA, 9 bp, Unknown
  misc_feature (1)..( 9): Result.004 file - promoters50/1024236
attagtaaa

SEQ ID NO: 159940 - DNA, 9 bp, Unknown
  misc_feature (1)..( 9): Result.004 file - promoters50/1024236
tatagtatg

SEQ ID NO: 159941 - DNA, 15 bp, Unknown
  misc_feature (1)..( 15): Result.004 file - promoters50/1024236
ctgaaaaagaaatta

SEQ ID NO: 159942 - DNA, 15 bp, Unknown
  misc_feature (1)..( 15): Result.004 file - promoters50/1024236
aaacccaagacattt

SEQ ID NO: 159943 - DNA, 15 bp, Unknown
  misc_feature (1)..( 15): Result.004 file - promoters50/1024236
aaaccctagacttgg

SEQ ID NO: 159944 - DNA, 15 bp, Unknown
  misc_feature (1)..( 15): Result.004 file - promoters50/1024236
attttctatacttgg

SEQ ID NO: 159945 - DNA, 15 bp, Unknown
  misc_feature (1)..( 15): Result.004 file - promoters50/1024236
caactttaggcttag

SEQ ID NO: 159946 - DNA, 15 bp, Unknown
  misc_feature (1)..( 15): Result.004 file - promoters50/1024236
taagggtatatttgt

SEQ ID NO: 159947 - DNA, 8 bp, Unknown
  misc_feature (1)..( 8): Result.004 file - promoters50/1024236
taaaaaaa

SEQ ID NO: 159948 - DNA, 8 bp, Unknown
  misc_feature (1)..( 8): Result.004 file - promoters50/1024236
gaaaaaaa

SEQ ID NO: 159949 - DNA, 8 bp, Unknown
  misc_feature (1)..( 8): Result.004 file - promoters50/1024236
taaaaata

SEQ ID NO: 159950 - DNA, 8 bp, Unknown
  misc_feature (1)..( 8): Result.004 file - promoters50/1024236
taaataaa

SEQ ID NO: 159951 - DNA, 8 bp, Unknown
  misc_feature (1)..( 8): Result.004 file - promoters50/1024236
caaaaaac

SEQ ID NO: 159952 - DNA, 8 bp, Unknown
  misc_feature (1)..( 8): Result.004 file - promoters50/1024236
agaataaa

SEQ ID NO: 159953 - DNA, 13 bp, Unknown
  misc_feature (1)..( 13): Result.004 file - promoters50/1024236
tttactatttata

SEQ ID NO: 159954 - DNA, 13 bp, Unknown
  misc_feature (1)..( 13): Result.004 file - promoters50/1024236
taaactcttttga

SEQ ID NO: 159955 - DNA, 13 bp, Unknown
  misc_feature (1)..( 13): Result.004 file - promoters50/1024236
tttaatatatatt

SEQ ID NO: 159956 - DNA, 13 bp, Unknown
  misc_feature (1)..( 13): Result.004 file - promoters50/1024236
atcgttattaata

SEQ ID NO: 159957 - DNA, 13 bp, Unknown
  misc_feature (1)..( 13): Result.004 file - promoters50/1024236
attagtaaaagaa

SEQ ID NO: 159958 - DNA, 13 bp, Unknown
  misc_feature (1)..( 13): Result.004 file - promoters50/1024247
taatttcttttca

SEQ ID NO: 159959 - DNA, 8 bp, Unknown
  misc_feature (1)..( 8): Result.004 file - promoters50/1024247
cactatgc

SEQ ID NO: 159960 - DNA, 8 bp, Unknown
  misc_feature (1)..( 8): Result.004 file - promoters50/1024247
aactttgc

SEQ ID NO: 159961 - DNA, 8 bp, Unknown
  misc_feature (1)..( 8): Result.004 file - promoters50/1024247
aacttttt

SEQ ID NO: 159962 - DNA, 8 bp, Unknown
  misc_feature (1)..( 8): Result.004 file - promoters50/1024247
tacttttg

SEQ ID NO: 159963 - DNA, 11 bp, Unknown
  misc_feature (1)..( 11): Result.004 file - promoters50/1024247
acatctctctt

SEQ ID NO: 159964 - DNA, 11 bp, Unknown
  misc_feature (1)..( 11): Result.004 file - promoters50/1024247
tgtactccctt

SEQ ID NO: 159965 - DNA, 11 bp, Unknown
  misc_feature (1)..( 11): Result.004 file - promoters50/1024247
atcactcactc

SEQ ID NO: 159966 - DNA, 9 bp, Unknown
  misc_feature (1)..( 9): Result.004 file - promoters50/1024247
gcagagaag

SEQ ID NO: 159967 - DNA, 9 bp, Unknown
  misc_feature (1)..( 9): Result.004 file - promoters50/1024247
gcaaagaaa

SEQ ID NO: 159968 - DNA, 9 bp, Unknown
  misc_feature (1)..( 9): Result.004 file - promoters50/1024247
tgaaagaaa

SEQ ID NO: 159969 - DNA, 8 bp, Unknown
  misc_feature (1)..( 8): Result.004 file - promoters50/1024247
tctttttc

SEQ ID NO: 159970 - DNA, 8 bp, Unknown
  misc_feature (1)..( 8): Result.004 file - promoters50/1024247
gatttttc

SEQ ID NO: 159971 - DNA, 8 bp, Unknown
  misc_feature (1)..( 8): Result.004 file - promoters50/1024247
tcttttta

SEQ ID NO: 159972 - DNA, 11 bp, Unknown
  misc_feature (1)..( 11): Result.004 file - promoters50/1024247
ctacagaaaga

SEQ ID NO: 159973 - DNA, 11 bp, Unknown
  misc_feature (1)..( 11): Result.004 file - promoters50/1024247
taacataaaga

SEQ ID NO: 159974 - DNA, 11 bp, Unknown
  misc_feature (1)..( 11): Result.004 file - promoters50/1024251
taacatgaaga

SEQ ID NO: 159975 - DNA, 8 bp, Unknown
  misc_feature (1)..( 8): Result.004 file - promoters50/1024251
aaaacaaa

SEQ ID NO: 159976 - DNA, 8 bp, Unknown
  misc_feature (1)..( 8): Result.004 file - promoters50/1024251
caaataaa

SEQ ID NO: 159977 - DNA, 8 bp, Unknown
  misc_feature (1)..( 8): Result.004 file - promoters50/1024251
caattaag

SEQ ID NO: 159978 - DNA, 7 bp, Unknown
  misc_feature (1)..( 7): Result.004 file - promoters50/1024251
attttaa

SEQ ID NO: 159979 - DNA, 7 bp, Unknown
  misc_feature (1)..( 7): Result.004 file - promoters50/1024251
attttat

SEQ ID NO: 159980 - DNA, 7 bp, Unknown
  misc_feature (1)..( 7): Result.004 file - promoters50/1024251
tttttat

SEQ ID NO: 159981 - DNA, 9 bp, Unknown
  misc_feature (1)..( 9): Result.004 file - promoters50/1024251
acaacaagt

SEQ ID NO: 159982 - DNA, 9 bp, Unknown
  misc_feature (1)..( 9): Result.004 file - promoters50/1024251
acaacaata

SEQ ID NO: 159983 - DNA, 9 bp, Unknown
  misc_feature (1)..( 9): Result.004 file - promoters50/1024251
ataacaata

SEQ ID NO: 159984 - DNA, 8 bp, Unknown
  misc_feature (1)..( 8): Result.004 file - promoters50/1024251
caaaataa

SEQ ID NO: 159985 - DNA, 8 bp, Unknown
  misc_feature (1)..( 8): Result.004 file - promoters50/1024251
taaattaa

SEQ ID NO: 159986 - DNA, 8 bp, Unknown
  misc_feature (1)..( 8): Result.004 file - promoters50/1024257
taaattgt

SEQ ID NO: 159987 - DNA, 9 bp, Unknown
  misc_feature (1)..( 9): Result.004 file - promoters50/1024257
tttctaaat

SEQ ID NO: 159988 - DNA, 9 bp, Unknown
  misc_feature (1)..( 9): Result.004 file - promoters50/1024257
tttctaaaa

SEQ ID NO: 159989 - DNA, 9 bp, Unknown
  misc_feature (1)..( 9): Result.004 file - promoters50/1024257
attctaact

SEQ ID NO: 159990 - DNA, 9 bp, Unknown
  misc_feature (1)..( 9): Result.004 file - promoters50/1024257
aatctaaca

SEQ ID NO: 159991 - DNA, 10 bp, Unknown
  misc_feature (1)..( 10): Result.004 file - promoters50/1024277
ggcctacaat

SEQ ID NO: 159992 - DNA, 9 bp, Unknown
  misc_feature (1)..( 9): Result.004 file - promoters50/1024277
taaaaaaaa

SEQ ID NO: 159993 - DNA, 9 bp, Unknown
  misc_feature (1)..( 9): Result.004 file - promoters50/1024277
taaacaaaa

SEQ ID NO: 159994 - DNA, 9 bp, Unknown
  misc_feature (1)..( 9): Result.004 file - promoters50/1024277
taaacaaaa

SEQ ID NO: 159995 - DNA, 7 bp, Unknown
  misc_feature (1)..( 7): Result.004 file - promoters50/1024277
ttctaat

SEQ ID NO: 159996 - DNA, 7 bp, Unknown
  misc_feature (1)..( 7): Result.004 file - promoters50/1024277
ttctaat

SEQ ID NO: 159997 - DNA, 7 bp, Unknown
  misc_feature (1)..( 7): Result.004 file - promoters50/1024288
ttctaat

SEQ ID NO: 159998 - DNA, 7 bp, Unknown
  misc_feature (1)..( 7): Result.004 file - promoters50/1024288
gattttt

SEQ ID NO: 159999 - DNA, 7 bp, Unknown
  misc_feature (1)..( 7): Result.004 file - promoters50/1024288
gattttt

SEQ ID NO: 160000 - DNA, 7 bp, Unknown
  misc_feature (1)..( 7): Result.004 file - promoters50/1024288
gattttt

SEQ ID NO: 160001 - DNA, 11 bp, Unknown
  misc_feature (1)..( 11): Result.004 file - promoters50/1024288
aacaaaaagtc

SEQ ID NO: 160002 - DNA, 11 bp, Unknown
  misc_feature (1)..( 11): Result.004 file - promoters50/1024288
aaccaaaactt

SEQ ID NO: 160003 - DNA, 11 bp, Unknown
  misc_feature (1)..( 11): Result.004 file - promoters50/1024288
aaaaaaataaa

SEQ ID NO: 160004 - DNA, 9 bp, Unknown
  misc_feature (1)..( 9): Result.004 file - promoters50/1024288
aagatatgg

SEQ ID NO: 160005 - DNA, 9 bp, Unknown
  misc_feature (1)..( 9): Result.004 file - promoters50/1024288
tggatatgt

SEQ ID NO: 160006 - DNA, 9 bp, Unknown
  misc_feature (1)..( 9): Result.004 file - promoters50/1024288
tcaatatat

SEQ ID NO: 160007 - DNA, 9 bp, Unknown
  misc_feature (1)..( 9): Result.004 file - promoters50/1024288
tcaaagagt

SEQ ID NO: 160008 - DNA, 9 bp, Unknown
  misc_feature (1)..( 9): Result.004 file - promoters50/1024288
tcaaagaat

SEQ ID NO: 160009 - DNA, 9 bp, Unknown
  misc_feature (1)..( 9): Result.004 file - promoters50/1024355
tgaaaaaat

SEQ ID NO: 160010 - DNA, 9 bp, Unknown
  misc_feature (1)..( 9): Result.004 file - promoters50/1024355
tttgatttt

SEQ ID NO: 160011 - DNA, 9 bp, Unknown
  misc_feature (1)..( 9): Result.004 file - promoters50/1024355
tttgataca

SEQ ID NO: 160012 - DNA, 9 bp, Unknown
  misc_feature (1)..( 9): Result.004 file - promoters50/1024355
tttgattgt

SEQ ID NO: 160013 - DNA, 9 bp, Unknown
  misc_feature (1)..( 9): Result.004 file - promoters50/1024355
cttgacaca

SEQ ID NO: 160014 - DNA, 9 bp, Unknown
  misc_feature (1)..( 9): Result.004 file - promoters50/1024355
gttgattta

SEQ ID NO: 160015 - DNA, 9 bp, Unknown
  misc_feature (1)..( 9): Result.004 file - promoters50/1024355
attgttttg

SEQ ID NO: 160016 - DNA, 11 bp, Unknown
  misc_feature (1)..( 11): Result.004 file - promoters50/1024355
ctatgctctgt

SEQ ID NO: 160017 - DNA, 11 bp, Unknown
  misc_feature (1)..( 11): Result.004 file - promoters50/1024355
ctatactctct

SEQ ID NO: 160018 - DNA, 11 bp, Unknown
  misc_feature (1)..( 11): Result.004 file - promoters50/1024355
atatacttttt

SEQ ID NO: 160019 - DNA, 11 bp, Unknown
  misc_feature (1)..( 11): Result.004 file - promoters50/1024355
gtattcttatg

SEQ ID NO: 160020 - DNA, 11 bp, Unknown
  misc_feature (1)..( 11): Result.004 file - promoters50/1024355
ttgaactttct

SEQ ID NO: 160021 - DNA, 11 bp, Unknown
  misc_feature (1)..( 11): Result.004 file - promoters50/1024367
gtattcaaata

SEQ ID NO: 160022 - DNA, 10 bp, Unknown
  misc_feature (1)..( 10): Result.004 file - promoters50/1024367
ataagtttca

SEQ ID NO: 160023 - DNA, 10 bp, Unknown
  misc_feature (1)..( 10): Result.004 file - promoters50/1024367
ttaactttga

SEQ ID NO: 160024 - DNA, 10 bp, Unknown
  misc_feature (1)..( 10): Result.004 file - promoters50/1024367
aaaagtttat

SEQ ID NO: 160025 - DNA, 10 bp, Unknown
  misc_feature (1)..( 10): Result.004 file - promoters50/1024367
tgaagtatca

SEQ ID NO: 160026 - DNA, 10 bp, Unknown
  misc_feature (1)..( 10): Result.004 file - promoters50/1024367
ataaattttg

SEQ ID NO: 160027 - DNA, 10 bp, Unknown
  misc_feature (1)..( 10): Result.004 file - promoters50/1024367
tgaactttag

SEQ ID NO: 160028 - DNA, 9 bp, Unknown
  misc_feature (1)..( 9): Result.004 file - promoters50/1024367
aaaataata

SEQ ID NO: 160029 - DNA, 9 bp, Unknown
  misc_feature (1)..( 9): Result.004 file - promoters50/1024367
aaaataaag

SEQ ID NO: 160030 - DNA, 9 bp, Unknown
  misc_feature (1)..( 9): Result.004 file - promoters50/1024367
caaatcata

SEQ ID NO: 160031 - DNA, 9 bp, Unknown
  misc_feature (1)..( 9): Result.004 file - promoters50/1024367
gaaataaat

SEQ ID NO: 160032 - DNA, 9 bp, Unknown
  misc_feature (1)..( 9): Result.004 file - promoters50/1024367
caaacaatg

SEQ ID NO: 160033 - DNA, 9 bp, Unknown
  misc_feature (1)..( 9): Result.004 file - promoters50/1024367
aaaataaaa

SEQ ID NO: 160034 - DNA, 12 bp, Unknown
  misc_feature (1)..( 12): Result.004 file - promoters50/1024367
tttatatataac

SEQ ID NO: 160035 - DNA, 12 bp, Unknown
  misc_feature (1)..( 12): Result.004 file - promoters50/1024367
actatataagaa

SEQ ID NO: 160036 - DNA, 12 bp, Unknown
  misc_feature (1)..( 12): Result.004 file - promoters50/1024367
catatatataac

SEQ ID NO: 160037 - DNA, 12 bp, Unknown
  misc_feature (1)..( 12): Result.004 file - promoters50/1024367
tttatattctca

SEQ ID NO: 160038 - DNA, 12 bp, Unknown
  misc_feature (1)..( 12): Result.004 file - promoters50/1024367
tgtatatatact

SEQ ID NO: 160039 - DNA, 12 bp, Unknown
  misc_feature (1)..( 12): Result.004 file - promoters50/1024367
gagatataatac

SEQ ID NO: 160040 - DNA, 12 bp, Unknown
  misc_feature (1)..( 12): Result.004 file - promoters50/1024367
cctatatataaa

SEQ ID NO: 160041 - DNA, 9 bp, Unknown
  misc_feature (1)..( 9): Result.004 file - promoters50/1024367
ataataaat

SEQ ID NO: 160042 - DNA, 9 bp, Unknown
  misc_feature (1)..( 9): Result.004 file - promoters50/1024367
ataaaaaac

SEQ ID NO: 160043 - DNA, 9 bp, Unknown
  misc_feature (1)..( 9): Result.004 file - promoters50/1024367
ttaaaaaag

SEQ ID NO: 160044 - DNA, 9 bp, Unknown
  misc_feature (1)..( 9): Result.004 file - promoters50/1024367
aaaataaaa

SEQ ID NO: 160045 - DNA, 9 bp, Unknown
  misc_feature (1)..( 9): Result.004 file - promoters50/1024367
gcaaacaat

SEQ ID NO: 160046 - DNA, 9 bp, Unknown
  misc_feature (1)..( 9): Result.004 file - promoters50/1024367
acaaaaaga

SEQ ID NO: 160047 - DNA, 8 bp, Unknown
  misc_feature (1)..( 8): Result.004 file - promoters50/1024367
aattttgg

SEQ ID NO: 160048 - DNA, 8 bp, Unknown
  misc_feature (1)..( 8): Result.004 file - promoters50/1024367
aattttaa

SEQ ID NO: 160049 - DNA, 8 bp, Unknown
  misc_feature (1)..( 8): Result.004 file - promoters50/1024367
aatttttt

SEQ ID NO: 160050 - DNA, 8 bp, Unknown
  misc_feature (1)..( 8): Result.004 file - promoters50/1024367
tattttat

SEQ ID NO: 160051 - DNA, 8 bp, Unknown
  misc_feature (1)..( 8): Result.004 file - promoters50/1024367
ctttttat

SEQ ID NO: 160052 - DNA, 9 bp, Unknown
  misc_feature (1)..( 9): Result.004 file - promoters50/1024367
tatttctat

SEQ ID NO: 160053 - DNA, 15 bp, Unknown
  misc_feature (1)..( 15): Result.004 file - promoters50/1024367
gataggttttccgaa

SEQ ID NO: 160054 - DNA, 15 bp, Unknown
  misc_feature (1)..( 15): Result.004 file - promoters50/1024367
gatagattttcgatc

SEQ ID NO: 160055 - DNA, 15 bp, Unknown
  misc_feature (1)..( 15): Result.004 file - promoters50/1024367
taattcttttccatc

SEQ ID NO: 160056 - DNA, 15 bp, Unknown
  misc_feature (1)..( 15): Result.004 file - promoters50/1024367
tatacattcgtttta

SEQ ID NO: 160057 - DNA, 15 bp, Unknown
  misc_feature (1)..( 15): Result.004 file - promoters50/1024367
gtggaaatttcccat

SEQ ID NO: 160058 - DNA, 15 bp, Unknown
  misc_feature (1)..( 15): Result.004 file - promoters50/1024367
taatgattttgtcta

SEQ ID NO: 160059 - DNA, 10 bp, Unknown
  misc_feature (1)..( 10): Result.004 file - promoters50/1024367
gtgtttgatt

SEQ ID NO: 160060 - DNA, 10 bp, Unknown
  misc_feature (1)..( 10): Result.004 file - promoters50/1024367
catttttatt

SEQ ID NO: 160061 - DNA, 10 bp, Unknown
  misc_feature (1)..( 10): Result.004 file - promoters50/1024367
atatttcatt

SEQ ID NO: 160062 - DNA, 10 bp, Unknown
  misc_feature (1)..( 10): Result.004 file - promoters50/1024367
tttttttaca

SEQ ID NO: 160063 - DNA, 10 bp, Unknown
  misc_feature (1)..( 10): Result.004 file - promoters50/1024367
aatttttagt

SEQ ID NO: 160064 - DNA, 10 bp, Unknown
  misc_feature (1)..( 10): Result.004 file - promoters50/1024375
aatctttaaa

SEQ ID NO: 160065 - DNA, 9 bp, Unknown
  misc_feature (1)..( 9): Result.004 file - promoters50/1024375
aatatgtat

SEQ ID NO: 160066 - DNA, 9 bp, Unknown
  misc_feature (1)..( 9): Result.004 file - promoters50/1024375
aatttgtta

SEQ ID NO: 160067 - DNA, 9 bp, Unknown
  misc_feature (1)..( 9): Result.004 file - promoters50/1024375
gttatgtac

SEQ ID NO: 160068 - DNA, 9 bp, Unknown
  misc_feature (1)..( 9): Result.004 file - promoters50/1024375
ggtttgttg

SEQ ID NO: 160069 - DNA, 9 bp, Unknown
  misc_feature (1)..( 9): Result.004 file - promoters50/1024375
tctttgtta

SEQ ID NO: 160070 - DNA, 9 bp, Unknown
  misc_feature (1)..( 9): Result.004 file - promoters50/1024375
cgtttttta

SEQ ID NO: 160071 - DNA, 9 bp, Unknown
  misc_feature (1)..( 9): Result.004 file - promoters50/1024375
aatttggat

SEQ ID NO: 160072 - DNA, 12 bp, Unknown
  misc_feature (1)..( 12): Result.004 file - promoters50/1024375
aataaaaatatt

SEQ ID NO: 160073 - DNA, 12 bp, Unknown
  misc_feature (1)..( 12): Result.004 file - promoters50/1024375
tttaataatggg

SEQ ID NO: 160074 - DNA, 12 bp, Unknown
  misc_feature (1)..( 12): Result.004 file - promoters50/1024375
aagaaaaaaaaa

SEQ ID NO: 160075 - DNA, 12 bp, Unknown
  misc_feature (1)..( 12): Result.004 file - promoters50/1024375
cagaataaaaac

SEQ ID NO: 160076 - DNA, 12 bp, Unknown
  misc_feature (1)..( 12): Result.004 file - promoters50/1024375
aatcaaaaaatt

SEQ ID NO: 160077 - DNA, 12 bp, Unknown
  misc_feature (1)..( 12): Result.004 file - promoters50/1024408
actaaaccaaga

SEQ ID NO: 160078 - DNA, 8 bp, Unknown
  misc_feature (1)..( 8): Result.004 file - promoters50/1024408
tttgttaa

SEQ ID NO: 160079 - DNA, 8 bp, Unknown
  misc_feature (1)..( 8): Result.004 file - promoters50/1024408
tttgataa

SEQ ID NO: 160080 - DNA, 8 bp, Unknown
  misc_feature (1)..( 8): Result.004 file - promoters50/1024408
tttatgac

SEQ ID NO: 160081 - DNA, 8 bp, Unknown
  misc_feature (1)..( 8): Result.004 file - promoters50/1024408
actataat

SEQ ID NO: 160082 - DNA, 8 bp, Unknown
  misc_feature (1)..( 8): Result.004 file - promoters50/1024408
actaaaat

SEQ ID NO: 160083 - DNA, 8 bp, Unknown
  misc_feature (1)..( 8): Result.004 file - promoters50/1024420
catataat

SEQ ID NO: 160084 - DNA, 12 bp, Unknown
  misc_feature (1)..( 12): Result.004 file - promoters50/1024420
ataaaaataaaa

SEQ ID NO: 160085 - DNA, 12 bp, Unknown
  misc_feature (1)..( 12): Result.004 file - promoters50/1024420
ataaaaaaaaaa

SEQ ID NO: 160086 - DNA, 12 bp, Unknown
  misc_feature (1)..( 12): Result.004 file - promoters50/1024431
atacaaacgttg

SEQ ID NO: 160087 - DNA, 15 bp, Unknown
  misc_feature (1)..( 15): Result.004 file - promoters50/1024431
cggtatataattcaa

SEQ ID NO: 160088 - DNA, 15 bp, Unknown
  misc_feature (1)..( 15): Result.004 file - promoters50/1024431
caaaaaataattttc

SEQ ID NO: 160089 - DNA, 15 bp, Unknown
  misc_feature (1)..( 15): Result.004 file - promoters50/1024431
tgcattattattcaa

SEQ ID NO: 160090 - DNA, 15 bp, Unknown
  misc_feature (1)..( 15): Result.004 file - promoters50/1024431
atataaataaatcaa

SEQ ID NO: 160091 - DNA, 15 bp, Unknown
  misc_feature (1)..( 15): Result.004 file - promoters50/1024431
ttaaatacaatttca

SEQ ID NO: 160092 - DNA, 15 bp, Unknown
  misc_feature (1)..( 15): Result.004 file - promoters50/1024431
caaaaaataatctag

SEQ ID NO: 160093 - DNA, 16 bp, Unknown
  misc_feature (1)..( 16): Result.004 file - promoters50/1024431
caacttttcttagttt

SEQ ID NO: 160094 - DNA, 16 bp, Unknown
  misc_feature (1)..( 16): Result.004 file - promoters50/1024431
taattttcctttgtaa

SEQ ID NO: 160095 - DNA, 16 bp, Unknown
  misc_feature (1)..( 16): Result.004 file - promoters50/1024431
taggttttgttatgga

SEQ ID NO: 160096 - DNA, 16 bp, Unknown
  misc_feature (1)..( 16): Result.004 file - promoters50/1024431
tatatcttcttatttt

SEQ ID NO: 160097 - DNA, 16 bp, Unknown
  misc_feature (1)..( 16): Result.004 file - promoters50/1024431
tatattttaggtgtac

SEQ ID NO: 160098 - DNA, 16 bp, Unknown
  misc_feature (1)..( 16): Result.004 file - promoters50/1024431
aatatttttcttattg

SEQ ID NO: 160099 - DNA, 12 bp, Unknown
  misc_feature (1)..( 12): Result.004 file - promoters50/1024431
aaaataactcac

SEQ ID NO: 160100 - DNA, 12 bp, Unknown
  misc_feature (1)..( 12): Result.004 file - promoters50/1024431
gaaataaatcac

SEQ ID NO: 160101 - DNA, 12 bp, Unknown
  misc_feature (1)..( 12): Result.004 file - promoters50/1024431
gaaataaaaaga

SEQ ID NO: 160102 - DNA, 12 bp, Unknown
  misc_feature (1)..( 12): Result.004 file - promoters50/1024431
aaaatatatcag

SEQ ID NO: 160103 - DNA, 12 bp, Unknown
  misc_feature (1)..( 12): Result.004 file - promoters50/1024431
gagataaatagt

SEQ ID NO: 160104 - DNA, 12 bp, Unknown
  misc_feature (1)..( 12): Result.004 file - promoters50/1024454
tagataaagttt

SEQ ID NO: 160105 - DNA, 9 bp, Unknown
  misc_feature (1)..( 9): Result.004 file - promoters50/1024454
aaacagaaa

SEQ ID NO: 160106 - DNA, 9 bp, Unknown
  misc_feature (1)..( 9): Result.004 file - promoters50/1024454
atacataaa

SEQ ID NO: 160107 - DNA, 9 bp, Unknown
  misc_feature (1)..( 9): Result.004 file - promoters50/1024470
aaagagaat

SEQ ID NO: 160108 - DNA, 10 bp, Unknown
  misc_feature (1)..( 10): Result.004 file - promoters50/1024470
taatggagaa

SEQ ID NO: 160109 - DNA, 10 bp, Unknown
  misc_feature (1)..( 10): Result.004 file - promoters50/1024470
ggaaggagaa

SEQ ID NO: 160110 - DNA, 10 bp, Unknown
  misc_feature (1)..( 10): Result.004 file - promoters50/1024470
ggagggagat

SEQ ID NO: 160111 - DNA, 7 bp, Unknown
  misc_feature (1)..( 7): Result.004 file - promoters50/1024470
tttttaa

SEQ ID NO: 160112 - DNA, 7 bp, Unknown
  misc_feature (1)..( 7): Result.004 file - promoters50/1024470
tttttac

SEQ ID NO: 160113 - DNA, 7 bp, Unknown
  misc_feature (1)..( 7): Result.004 file - promoters50/1024470
ttttttt

SEQ ID NO: 160114 - DNA, 7 bp, Unknown
  misc_feature (1)..( 7): Result.004 file - promoters50/1024470
ttttaac

SEQ ID NO: 160115 - DNA, 7 bp, Unknown
  misc_feature (1)..( 7): Result.004 file - promoters50/1024470
tttaaac

SEQ ID NO: 160116 - DNA, 7 bp, Unknown
  misc_feature (1)..( 7): Result.004 file - promoters50/1024470
tttaaaa

SEQ ID NO: 160117 - DNA, 11 bp, Unknown
  misc_feature (1)..( 11): Result.004 file - promoters50/1024470
taaatttatac

SEQ ID NO: 160118 - DNA, 11 bp, Unknown
  misc_feature (1)..( 11): Result.004 file - promoters50/1024470
taaacttaact

SEQ ID NO: 160119 - DNA, 11 bp, Unknown
  misc_feature (1)..( 11): Result.004 file - promoters50/1024470
attatttttac

SEQ ID NO: 160120 - DNA, 9 bp, Unknown
  misc_feature (1)..( 9): Result.004 file - promoters50/1024470
attttctta

SEQ ID NO: 160121 - DNA, 9 bp, Unknown
  misc_feature (1)..( 9): Result.004 file - promoters50/1024470
gttttcttg

SEQ ID NO: 160122 - DNA, 9 bp, Unknown
  misc_feature (1)..( 9): Result.004 file - promoters50/1024470
attttttta

SEQ ID NO: 160123 - DNA, 11 bp, Unknown
  misc_feature (1)..( 11): Result.004 file - promoters50/1024470
ttttaaaggga

SEQ ID NO: 160124 - DNA, 11 bp, Unknown
  misc_feature (1)..( 11): Result.004 file - promoters50/1024470
tttaaaaagga

SEQ ID NO: 160125 - DNA, 11 bp, Unknown
  misc_feature (1)..( 11): Result.004 file - promoters50/1024470
tttaaacagaa

SEQ ID NO: 160126 - DNA, 7 bp, Unknown
  misc_feature (1)..( 7): Result.004 file - promoters50/1024470
aaattgt

SEQ ID NO: 160127 - DNA, 7 bp, Unknown
  misc_feature (1)..( 7): Result.004 file - promoters50/1024470
taattgt

SEQ ID NO: 160128 - DNA, 7 bp, Unknown
  misc_feature (1)..( 7): Result.004 file - promoters50/1024499
gaatttg

SEQ ID NO: 160129 - DNA, 12 bp, Unknown
  misc_feature (1)..( 12): Result.004 file - promoters50/1024499
tcgaaccaaaat

SEQ ID NO: 160130 - DNA, 12 bp, Unknown
  misc_feature (1)..( 12): Result.004 file - promoters50/1024499
agaaactaaaaa

SEQ ID NO: 160131 - DNA, 12 bp, Unknown
  misc_feature (1)..( 12): Result.004 file - promoters50/1024499
aaaaaataaaaa

SEQ ID NO: 160132 - DNA, 12 bp, Unknown
  misc_feature (1)..( 12): Result.004 file - promoters50/1024499
tttaattaaaaa

SEQ ID NO: 160133 - DNA, 12 bp, Unknown
  misc_feature (1)..( 12): Result.004 file - promoters50/1024499
ttttattaattt

SEQ ID NO: 160134 - DNA, 12 bp, Unknown
  misc_feature (1)..( 12): Result.004 file - promoters50/1024499
atttactaatag

SEQ ID NO: 160135 - DNA, 11 bp, Unknown
  misc_feature (1)..( 11): Result.004 file - promoters50/1024499
aacattaatat

SEQ ID NO: 160136 - DNA, 11 bp, Unknown
  misc_feature (1)..( 11): Result.004 file - promoters50/1024499
gacaataatag

SEQ ID NO: 160137 - DNA, 11 bp, Unknown
  misc_feature (1)..( 11): Result.004 file - promoters50/1024499
aacatttcata

SEQ ID NO: 160138 - DNA, 11 bp, Unknown
  misc_feature (1)..( 11): Result.004 file - promoters50/1024499
ctttttaatat

SEQ ID NO: 160139 - DNA, 11 bp, Unknown
  misc_feature (1)..( 11): Result.004 file - promoters50/1024499
aacatttaatt

SEQ ID NO: 160140 - DNA, 11 bp, Unknown
  misc_feature (1)..( 11): Result.004 file - promoters50/1024499
tacattttgta

SEQ ID NO: 160141 - DNA, 18 bp, Unknown
  misc_feature (1)..( 18): Result.004 file - promoters50/1024499
aactaaaaatatatttat

SEQ ID NO: 160142 - DNA, 18 bp, Unknown
  misc_feature (1)..( 18): Result.004 file - promoters50/1024499
agtataaaatactttatc

SEQ ID NO: 160143 - DNA, 18 bp, Unknown
  misc_feature (1)..( 18): Result.004 file - promoters50/1024499
caagtaagatattttttt

SEQ ID NO: 160144 - DNA, 18 bp, Unknown
  misc_feature (1)..( 18): Result.004 file - promoters50/1024499
acttttaaatacttttta

SEQ ID NO: 160145 - DNA, 18 bp, Unknown
  misc_feature (1)..( 18): Result.004 file - promoters50/1024499
agtatataattttagaga

SEQ ID NO: 160146 - DNA, 18 bp, Unknown
  misc_feature (1)..( 18): Result.004 file - promoters50/1024499
atagccacattgttttta

SEQ ID NO: 160147 - DNA, 11 bp, Unknown
  misc_feature (1)..( 11): Result.004 file - promoters50/1024499
actataaatag

SEQ ID NO: 160148 - DNA, 11 bp, Unknown
  misc_feature (1)..( 11): Result.004 file - promoters50/1024499
tctataaaaaa

SEQ ID NO: 160149 - DNA, 11 bp, Unknown
  misc_feature (1)..( 11): Result.004 file - promoters50/1024499
tatataaatag

SEQ ID NO: 160150 - DNA, 11 bp, Unknown
  misc_feature (1)..( 11): Result.004 file - promoters50/1024499
catataaataa

SEQ ID NO: 160151 - DNA, 11 bp, Unknown
  misc_feature (1)..( 11): Result.004 file - promoters50/1024499
tatataaataa

SEQ ID NO: 160152 - DNA, 11 bp, Unknown
  misc_feature (1)..( 11): Result.004 file - promoters50/1024499
actatatatat

SEQ ID NO: 160153 - DNA, 11 bp, Unknown
  misc_feature (1)..( 11): Result.004 file - promoters50/1024499
tatataaatac

SEQ ID NO: 160154 - DNA, 16 bp, Unknown
  misc_feature (1)..( 16): Result.004 file - promoters50/1024499
gaaaatatttgtaatc

SEQ ID NO: 160155 - DNA, 16 bp, Unknown
  misc_feature (1)..( 16): Result.004 file - promoters50/1024499
tagtagatttgttaca

SEQ ID NO: 160156 - DNA, 16 bp, Unknown
  misc_feature (1)..( 16): Result.004 file - promoters50/1024499
aactttctttttaatg

SEQ ID NO: 160157 - DNA, 16 bp, Unknown
  misc_feature (1)..( 16): Result.004 file - promoters50/1024499
ttttaattttgttatt

SEQ ID NO: 160158 - DNA, 16 bp, Unknown
  misc_feature (1)..( 16): Result.004 file - promoters50/1024499
aattaaacttttaaat

SEQ ID NO: 160159 - DNA, 16 bp, Unknown
  misc_feature (1)..( 16): Result.004 file - promoters50/1024499
atcgaaacatttaatt

SEQ ID NO: 160160 - DNA, 16 bp, Unknown
  misc_feature (1)..( 16): Result.004 file - promoters50/1024499
ttaaacatttcatagc

SEQ ID NO: 160161 - DNA, 17 bp, Unknown
  misc_feature (1)..( 17): Result.004 file - promoters50/1024499
ggacaataatagtataa

SEQ ID NO: 160162 - DNA, 17 bp, Unknown
  misc_feature (1)..( 17): Result.004 file - promoters50/1024499
tgatcttaccagtatac

SEQ ID NO: 160163 - DNA, 17 bp, Unknown
  misc_feature (1)..( 17): Result.004 file - promoters50/1024499
ccaaaaaaagagtttaa

SEQ ID NO: 160164 - DNA, 17 bp, Unknown
  misc_feature (1)..( 17): Result.004 file - promoters50/1024499
tttatttagcaggataa

SEQ ID NO: 160165 - DNA, 17 bp, Unknown
  misc_feature (1)..( 17): Result.004 file - promoters50/1024499
gtcggtcatcagtatcg

SEQ ID NO: 160166 - DNA, 17 bp, Unknown
  misc_feature (1)..( 17): Result.004 file - promoters50/1024499
tttcattttcaattttt

SEQ ID NO: 160167 - DNA, 13 bp, Unknown
  misc_feature (1)..( 13): Result.004 file - promoters50/1024499
aaaaatatattta

SEQ ID NO: 160168 - DNA, 13 bp, Unknown
  misc_feature (1)..( 13): Result.004 file - promoters50/1024499
taagatatttttt

SEQ ID NO: 160169 - DNA, 13 bp, Unknown
  misc_feature (1)..( 13): Result.004 file - promoters50/1024499
tttaatatttcat

SEQ ID NO: 160170 - DNA, 13 bp, Unknown
  misc_feature (1)..( 13): Result.004 file - promoters50/1024499
taaaatactttat

SEQ ID NO: 160171 - DNA, 13 bp, Unknown
  misc_feature (1)..( 13): Result.004 file - promoters50/1024499
cacagtatataat

SEQ ID NO: 160172 - DNA, 13 bp, Unknown
  misc_feature (1)..( 13): Result.004 file - promoters50/1024499
cacattgttttta

SEQ ID NO: 160173 - DNA, 13 bp, Unknown
  misc_feature (1)..( 13): Result.004 file - promoters50/1024499
attaatgtttgta

SEQ ID NO: 160174 - DNA, 13 bp, Unknown
  misc_feature (1)..( 13): Result.004 file - promoters50/1024499
atatatttatttg

SEQ ID NO: 160175 - DNA, 13 bp, Unknown
  misc_feature (1)..( 13): Result.004 file - promoters50/1024499
gatatttttttta

SEQ ID NO: 160176 - DNA, 13 bp, Unknown
  misc_feature (1)..( 13): Result.004 file - promoters50/1024499
ttgtttttattca

SEQ ID NO: 160177 - DNA, 13 bp, Unknown
  misc_feature (1)..( 13): Result.004 file - promoters50/1024499
agagatttctttg

SEQ ID NO: 160178 - DNA, 13 bp, Unknown
  misc_feature (1)..( 13): Result.004 file - promoters50/1024499
taatgtttgtaat

SEQ ID NO: 160179 - DNA, 13 bp, Unknown
  misc_feature (1)..( 13): Result.004 file - promoters50/1024499
aatactttttaat

SEQ ID NO: 160180 - DNA, 11 bp, Unknown
  misc_feature (1)..( 11): Result.004 file - promoters50/1024499
aatcaatcttt

SEQ ID NO: 160181 - DNA, 11 bp, Unknown
  misc_feature (1)..( 11): Result.004 file - promoters50/1024499
aatcaaatgac

SEQ ID NO: 160182 - DNA, 11 bp, Unknown
  misc_feature (1)..( 11): Result.004 file - promoters50/1024499
aattaatttta

SEQ ID NO: 160183 - DNA, 11 bp, Unknown
  misc_feature (1)..( 11): Result.004 file - promoters50/1024499
aattaatgttt

SEQ ID NO: 160184 - DNA, 11 bp, Unknown
  misc_feature (1)..( 11): Result.004 file - promoters50/1024499
ttttaatgcat

SEQ ID NO: 160185 - DNA, 11 bp, Unknown
  misc_feature (1)..( 11): Result.004 file - promoters50/1024499
ttttaatattt

SEQ ID NO: 160186 - DNA, 15 bp, Unknown
  misc_feature (1)..( 15): Result.004 file - promoters50/1024499
aatcaatctttaagc

SEQ ID NO: 160187 - DNA, 15 bp, Unknown
  misc_feature (1)..( 15): Result.004 file - promoters50/1024499
attcaattttttaaa

SEQ ID NO: 160188 - DNA, 15 bp, Unknown
  misc_feature (1)..( 15): Result.004 file - promoters50/1024499
ttttaatatttcata

SEQ ID NO: 160189 - DNA, 15 bp, Unknown
  misc_feature (1)..( 15): Result.004 file - promoters50/1024499
aattaatgtttgtaa

SEQ ID NO: 160190 - DNA, 15 bp, Unknown
  misc_feature (1)..( 15): Result.004 file - promoters50/1024499
aagatatttttttta

SEQ ID NO: 160191 - DNA, 15 bp, Unknown
  misc_feature (1)..( 15): Result.004 file - promoters50/1024499
tttagagatttcttt

SEQ ID NO: 160192 - DNA, 13 bp, Unknown
  misc_feature (1)..( 13): Result.004 file - promoters50/1024499
tatatttatttga

SEQ ID NO: 160193 - DNA, 13 bp, Unknown
  misc_feature (1)..( 13): Result.004 file - promoters50/1024499
tttattaatttga

SEQ ID NO: 160194 - DNA, 13 bp, Unknown
  misc_feature (1)..( 13): Result.004 file - promoters50/1024499
tcgactaatttta

SEQ ID NO: 160195 - DNA, 13 bp, Unknown
  misc_feature (1)..( 13): Result.004 file - promoters50/1024499
gttattaactttc

SEQ ID NO: 160196 - DNA, 13 bp, Unknown
  misc_feature (1)..( 13): Result.004 file - promoters50/1024499
aaccgtaacttgg

SEQ ID NO: 160197 - DNA, 13 bp, Unknown
  misc_feature (1)..( 13): Result.004 file - promoters50/1024499
tttactaatagaa

SEQ ID NO: 160198 - DNA, 11 bp, Unknown
  misc_feature (1)..( 11): Result.004 file - promoters50/1024499
ctcgactaatt

SEQ ID NO: 160199 - DNA, 11 bp, Unknown
  misc_feature (1)..( 11): Result.004 file - promoters50/1024499
atttactaata

SEQ ID NO: 160200 - DNA, 11 bp, Unknown
  misc_feature (1)..( 11): Result.004 file - promoters50/1024499
tgttattaact

SEQ ID NO: 160201 - DNA, 11 bp, Unknown
  misc_feature (1)..( 11): Result.004 file - promoters50/1024499
ttttattaatt

SEQ ID NO: 160202 - DNA, 11 bp, Unknown
  misc_feature (1)..( 11): Result.004 file - promoters50/1024499
tttaattaaaa

SEQ ID NO: 160203 - DNA, 11 bp, Unknown
  misc_feature (1)..( 11): Result.004 file - promoters50/1024550
cttgtctaata

SEQ ID NO: 160204 - DNA, 9 bp, Unknown
  misc_feature (1)..( 9): Result.004 file - promoters50/1024550
caaatctgt

SEQ ID NO: 160205 - DNA, 9 bp, Unknown
  misc_feature (1)..( 9): Result.004 file - promoters50/1024550
aaaatctgg

SEQ ID NO: 160206 - DNA, 9 bp, Unknown
  misc_feature (1)..( 9): Result.004 file - promoters50/1024550
ccaatttgg

SEQ ID NO: 160207 - DNA, 9 bp, Unknown
  misc_feature (1)..( 9): Result.004 file - promoters50/1024570
aaaatcatt

SEQ ID NO: 160208 - DNA, 10 bp, Unknown
  misc_feature (1)..( 10): Result.004 file - promoters50/1024570
atgtaaaacc

SEQ ID NO: 160209 - DNA, 10 bp, Unknown
  misc_feature (1)..( 10): Result.004 file - promoters50/1024570
atgaaaaacc

SEQ ID NO: 160210 - DNA, 10 bp, Unknown
  misc_feature (1)..( 10): Result.004 file - promoters50/1024603
tggaaaaagg

SEQ ID NO: 160211 - DNA, 7 bp, Unknown
  misc_feature (1)..( 7): Result.004 file - promoters50/1024603
ctatata

SEQ ID NO: 160212 - DNA, 7 bp, Unknown
  misc_feature (1)..( 7): Result.004 file - promoters50/1024603
atatata

SEQ ID NO: 160213 - DNA, 7 bp, Unknown
  misc_feature (1)..( 7): Result.004 file - promoters50/1024603
atacatt

SEQ ID NO: 160214 - DNA, 7 bp, Unknown
  misc_feature (1)..( 7): Result.004 file - promoters50/1024603
taacatg

SEQ ID NO: 160215 - DNA, 7 bp, Unknown
  misc_feature (1)..( 7): Result.004 file - promoters50/1024603
taaaatg

SEQ ID NO: 160216 - DNA, 7 bp, Unknown
  misc_feature (1)..( 7): Result.004 file - promoters50/1024603
taacatg

SEQ ID NO: 160217 - DNA, 13 bp, Unknown
  misc_feature (1)..( 13): Result.004 file - promoters50/1024603
aattttcccacat

SEQ ID NO: 160218 - DNA, 13 bp, Unknown
  misc_feature (1)..( 13): Result.004 file - promoters50/1024603
aattgtccatcat

SEQ ID NO: 160219 - DNA, 13 bp, Unknown
  misc_feature (1)..( 13): Result.004 file - promoters50/1024603
agttttccccaaa

SEQ ID NO: 160220 - DNA, 13 bp, Unknown
  misc_feature (1)..( 13): Result.004 file - promoters50/1024603
tttattccacaaa

SEQ ID NO: 160221 - DNA, 12 bp, Unknown
  misc_feature (1)..( 12): Result.004 file - promoters50/1024603
tttaagatctca

SEQ ID NO: 160222 - DNA, 12 bp, Unknown
  misc_feature (1)..( 12): Result.004 file - promoters50/1024603
gagtagatatca

SEQ ID NO: 160223 - DNA, 12 bp, Unknown
  misc_feature (1)..( 12): Result.004 file - promoters50/1024603
tattagaaattt

SEQ ID NO: 160224 - DNA, 8 bp, Unknown
  misc_feature (1)..( 8): Result.004 file - promoters50/1024603
agattagt

SEQ ID NO: 160225 - DNA, 8 bp, Unknown
  misc_feature (1)..( 8): Result.004 file - promoters50/1024603
agattaga

SEQ ID NO: 160226 - DNA, 8 bp, Unknown
  misc_feature (1)..( 8): Result.004 file - promoters50/1024603
ctattaga

SEQ ID NO: 160227 - DNA, 9 bp, Unknown
  misc_feature (1)..( 9): Result.004 file - promoters50/1024603
acattatgt

SEQ ID NO: 160228 - DNA, 9 bp, Unknown
  misc_feature (1)..( 9): Result.004 file - promoters50/1024603
aaattgtgt

SEQ ID NO: 160229 - DNA, 9 bp, Unknown
  misc_feature (1)..( 9): Result.004 file - promoters50/1024611
aaatcgtgt

SEQ ID NO: 160230 - DNA, 10 bp, Unknown
  misc_feature (1)..( 10): Result.004 file - promoters50/1024611
tcaaaatagc

SEQ ID NO: 160231 - DNA, 10 bp, Unknown
  misc_feature (1)..( 10): Result.004 file - promoters50/1024611
ccaaaagagc

SEQ ID NO: 160232 - DNA, 10 bp, Unknown
  misc_feature (1)..( 10): Result.004 file - promoters50/1024639
tcaaaagctt

SEQ ID NO: 160233 - DNA, 9 bp, Unknown
  misc_feature (1)..( 9): Result.004 file - promoters50/1024639
gtaaaatta

SEQ ID NO: 160234 - DNA, 9 bp, Unknown
  misc_feature (1)..( 9): Result.004 file - promoters50/1024639
tacaaatta

SEQ ID NO: 160235 - DNA, 9 bp, Unknown
  misc_feature (1)..( 9): Result.004 file - promoters50/1024639
gtataattt

SEQ ID NO: 160236 - DNA, 9 bp, Unknown
  misc_feature (1)..( 9): Result.004 file - promoters50/1024639
taagaaata

SEQ ID NO: 160237 - DNA, 9 bp, Unknown
  misc_feature (1)..( 9): Result.004 file - promoters50/1024639
taataaata

SEQ ID NO: 160238 - DNA, 9 bp, Unknown
  misc_feature (1)..( 9): Result.004 file - promoters50/1024639
gtatatata

SEQ ID NO: 160239 - DNA, 6 bp, Unknown
  misc_feature (1)..( 6): Result.004 file - promoters50/1024639
tttaaa

SEQ ID NO: 160240 - DNA, 6 bp, Unknown
  misc_feature (1)..( 6): Result.004 file - promoters50/1024639
tttaaa

SEQ ID NO: 160241 - DNA, 6 bp, Unknown
  misc_feature (1)..( 6): Result.004 file - promoters50/1024639
tttaaa

SEQ ID NO: 160242 - DNA, 10 bp, Unknown
  misc_feature (1)..( 10): Result.004 file - promoters50/1024639
ttatcttaaa

SEQ ID NO: 160243 - DNA, 10 bp, Unknown
  misc_feature (1)..( 10): Result.004 file - promoters50/1024639
ttttctaaaa

SEQ ID NO: 160244 - DNA, 10 bp, Unknown
  misc_feature (1)..( 10): Result.004 file - promoters50/1024639
ttatattaga

SEQ ID NO: 160245 - DNA, 9 bp, Unknown
  misc_feature (1)..( 9): Result.004 file - promoters50/1024639
agatctttt

SEQ ID NO: 160246 - DNA, 9 bp, Unknown
  misc_feature (1)..( 9): Result.004 file - promoters50/1024639
tgatttttt

SEQ ID NO: 160247 - DNA, 9 bp, Unknown
  misc_feature (1)..( 9): Result.004 file - promoters50/1024639
tgatttcct

SEQ ID NO: 160248 - DNA, 7 bp, Unknown
  misc_feature (1)..( 7): Result.004 file - promoters50/1024639
taattac

SEQ ID NO: 160249 - DNA, 7 bp, Unknown
  misc_feature (1)..( 7): Result.004 file - promoters50/1024639
taattat

SEQ ID NO: 160250 - DNA, 7 bp, Unknown
  misc_feature (1)..( 7): Result.004 file - promoters50/1024639
gaattat

SEQ ID NO: 160251 - DNA, 8 bp, Unknown
  misc_feature (1)..( 8): Result.004 file - promoters50/1024639
actaattg

SEQ ID NO: 160252 - DNA, 8 bp, Unknown
  misc_feature (1)..( 8): Result.004 file - promoters50/1024639
actaattt

SEQ ID NO: 160253 - DNA, 8 bp, Unknown
  misc_feature (1)..( 8): Result.004 file - promoters50/1024662
tgtaattt

SEQ ID NO: 160254 - DNA, 17 bp, Unknown
  misc_feature (1)..( 17): Result.004 file - promoters50/1024662
aaataataaaacattgg

SEQ ID NO: 160255 - DNA, 17 bp, Unknown
  misc_feature (1)..( 17): Result.004 file - promoters50/1024662
acataagaaaattgaca

SEQ ID NO: 160256 - DNA, 17 bp, Unknown
  misc_feature (1)..( 17): Result.004 file - promoters50/1024662
ccaccggaaaatttatc

SEQ ID NO: 160257 - DNA, 17 bp, Unknown
  misc_feature (1)..( 17): Result.004 file - promoters50/1024662
tgggaagagaattgaca

SEQ ID NO: 160258 - DNA, 17 bp, Unknown
  misc_feature (1)..( 17): Result.004 file - promoters50/1024662
gatatcgaaaatgttgg

SEQ ID NO: 160259 - DNA, 17 bp, Unknown
  misc_feature (1)..( 17): Result.004 file - promoters50/1024713
tgggaagtgaagaccac

SEQ ID NO: 160260 - DNA, 9 bp, Unknown
  misc_feature (1)..( 9): Result.004 file - promoters50/1024713
caaattttc

SEQ ID NO: 160261 - DNA, 9 bp, Unknown
  misc_feature (1)..( 9): Result.004 file - promoters50/1024713
gaaatttgc

SEQ ID NO: 160262 - DNA, 9 bp, Unknown
  misc_feature (1)..( 9): Result.004 file - promoters50/1024713
gaactttgc

SEQ ID NO: 160263 - DNA, 11 bp, Unknown
  misc_feature (1)..( 11): Result.004 file - promoters50/1024713
aaattttcctt

SEQ ID NO: 160264 - DNA, 11 bp, Unknown
  misc_feature (1)..( 11): Result.004 file - promoters50/1024713
gaactttgctt

SEQ ID NO: 160265 - DNA, 11 bp, Unknown
  misc_feature (1)..( 11): Result.004 file - promoters50/1024713
gaaatttgcag

SEQ ID NO: 160266 - DNA, 10 bp, Unknown
  misc_feature (1)..( 10): Result.004 file - promoters50/1024713
taatttgttt

SEQ ID NO: 160267 - DNA, 10 bp, Unknown
  misc_feature (1)..( 10): Result.004 file - promoters50/1024713
aaatttattt

SEQ ID NO: 160268 - DNA, 10 bp, Unknown
  misc_feature (1)..( 10): Result.004 file - promoters50/1024713
aaatttgcag

SEQ ID NO: 160269 - DNA, 8 bp, Unknown
  misc_feature (1)..( 8): Result.004 file - promoters50/1024713
attatttt

SEQ ID NO: 160270 - DNA, 8 bp, Unknown
  misc_feature (1)..( 8): Result.004 file - promoters50/1024713
catatttt

SEQ ID NO: 160271 - DNA, 8 bp, Unknown
  misc_feature (1)..( 8): Result.004 file - promoters50/1024713
catctttt

SEQ ID NO: 160272 - DNA, 13 bp, Unknown
  misc_feature (1)..( 13): Result.004 file - promoters50/1024713
tttgaaacatttt

SEQ ID NO: 160273 - DNA, 13 bp, Unknown
  misc_feature (1)..( 13): Result.004 file - promoters50/1024713
tttaaaactaaaa

SEQ ID NO: 160274 - DNA, 13 bp, Unknown
  misc_feature (1)..( 13): Result.004 file - promoters50/1024756
taaaaaactaaaa

SEQ ID NO: 160275 - DNA, 14 bp, Unknown
  misc_feature (1)..( 14): Result.004 file - promoters50/1024756
taacagtcaaaccg

SEQ ID NO: 160276 - DNA, 14 bp, Unknown
  misc_feature (1)..( 14): Result.004 file - promoters50/1024756
gtcaggtcaaatcc

SEQ ID NO: 160277 - DNA, 14 bp, Unknown
  misc_feature (1)..( 14): Result.004 file - promoters50/1024756
taacagtcaaaaaa

SEQ ID NO: 160278 - DNA, 14 bp, Unknown
  misc_feature (1)..( 14): Result.004 file - promoters50/1024783
aaaatctcaaaaaa

SEQ ID NO: 160279 - DNA, 6 bp, Unknown
  misc_feature (1)..( 6): Result.004 file - promoters50/1024783
attttt

SEQ ID NO: 160280 - DNA, 6 bp, Unknown
  misc_feature (1)..( 6): Result.004 file - promoters50/1024783
attttt

SEQ ID NO: 160281 - DNA, 7 bp, Unknown
  misc_feature (1)..( 7): Result.004 file - promoters50/1024783
attcttt

SEQ ID NO: 160282 - DNA, 8 bp, Unknown
  misc_feature (1)..( 8): Result.004 file - promoters50/1024783
tttttttt

SEQ ID NO: 160283 - DNA, 8 bp, Unknown
  misc_feature (1)..( 8): Result.004 file - promoters50/1024783
cttttttt

SEQ ID NO: 160284 - DNA, 8 bp, Unknown
  misc_feature (1)..( 8): Result.004 file - promoters50/1024787
ctttttcc

SEQ ID NO: 160285 - DNA, 7 bp, Unknown
  misc_feature (1)..( 7): Result.004 file - promoters50/1024787
aaaattc

SEQ ID NO: 160286 - DNA, 7 bp, Unknown
  misc_feature (1)..( 7): Result.004 file - promoters50/1024787
aaagttc

SEQ ID NO: 160287 - DNA, 7 bp, Unknown
  misc_feature (1)..( 7): Result.004 file - promoters50/1024787
aaaattc

SEQ ID NO: 160288 - DNA, 8 bp, Unknown
  misc_feature (1)..( 8): Result.004 file - promoters50/1024787
acactttt

SEQ ID NO: 160289 - DNA, 8 bp, Unknown
  misc_feature (1)..( 8): Result.004 file - promoters50/1024787
acagtttc

SEQ ID NO: 160290 - DNA, 8 bp, Unknown
  misc_feature (1)..( 8): Result.004 file - promoters50/1024787
ccaggttc

SEQ ID NO: 160291 - DNA, 7 bp, Unknown
  misc_feature (1)..( 7): Result.004 file - promoters50/1024787
agttttt

SEQ ID NO: 160292 - DNA, 7 bp, Unknown
  misc_feature (1)..( 7): Result.004 file - promoters50/1024787
tgttttt

SEQ ID NO: 160293 - DNA, 7 bp, Unknown
  misc_feature (1)..( 7): Result.004 file - promoters50/1024787
tgttttc

SEQ ID NO: 160294 - DNA, 8 bp, Unknown
  misc_feature (1)..( 8): Result.004 file - promoters50/1024787
gggcttta

SEQ ID NO: 160295 - DNA, 8 bp, Unknown
  misc_feature (1)..( 8): Result.004 file - promoters50/1024787
gggcttta

SEQ ID NO: 160296 - DNA, 8 bp, Unknown
  misc_feature (1)..( 8): Result.004 file - promoters50/1024787
aggctttt

SEQ ID NO: 160297 - DNA, 9 bp, Unknown
  misc_feature (1)..( 9): Result.004 file - promoters50/1024787
acatctctt

SEQ ID NO: 160298 - DNA, 9 bp, Unknown
  misc_feature (1)..( 9): Result.004 file - promoters50/1024787
aattctctt

SEQ ID NO: 160299 - DNA, 9 bp, Unknown
  misc_feature (1)..( 9): Result.004 file - promoters50/1024787
aattatctg

SEQ ID NO: 160300 - DNA, 8 bp, Unknown
  misc_feature (1)..( 8): Result.004 file - promoters50/1024787
ttttttta

SEQ ID NO: 160301 - DNA, 8 bp, Unknown
  misc_feature (1)..( 8): Result.004 file - promoters50/1024787
ttttctta

SEQ ID NO: 160302 - DNA, 8 bp, Unknown
  misc_feature (1)..( 8): Result.004 file - promoters50/1024821
cgttctta

SEQ ID NO: 160303 - DNA, 7 bp, Unknown
  misc_feature (1)..( 7): Result.004 file - promoters50/1024821
ttctttg

SEQ ID NO: 160304 - DNA, 7 bp, Unknown
  misc_feature (1)..( 7): Result.004 file - promoters50/1024821
ttctttt

SEQ ID NO: 160305 - DNA, 8 bp, Unknown
  misc_feature (1)..( 8): Result.004 file - promoters50/1024821
ttcgtttt

SEQ ID NO: 160306 - DNA, 10 bp, Unknown
  misc_feature (1)..( 10): Result.004 file - promoters50/1024821
aagaggaagc

SEQ ID NO: 160307 - DNA, 10 bp, Unknown
  misc_feature (1)..( 10): Result.004 file - promoters50/1024821
aagaagaagc

SEQ ID NO: 160308 - DNA, 10 bp, Unknown
  misc_feature (1)..( 10): Result.004 file - promoters50/1024837
aagaagttga

SEQ ID NO: 160309 - DNA, 9 bp, Unknown
  misc_feature (1)..( 9): Result.004 file - promoters50/1024837
actttggaa

SEQ ID NO: 160310 - DNA, 9 bp, Unknown
  misc_feature (1)..( 9): Result.004 file - promoters50/1024837
tctttggat

SEQ ID NO: 160311 - DNA, 9 bp, Unknown
  misc_feature (1)..( 9): Result.004 file - promoters50/1024837
actttgtct

SEQ ID NO: 160312 - DNA, 9 bp, Unknown
  misc_feature (1)..( 9): Result.004 file - promoters50/1024837
tctttgaat

SEQ ID NO: 160313 - DNA, 9 bp, Unknown
  misc_feature (1)..( 9): Result.004 file - promoters50/1024837
gagttggat

SEQ ID NO: 160314 - DNA, 9 bp, Unknown
  misc_feature (1)..( 9): Result.004 file - promoters50/1024837
tgtttgatt

SEQ ID NO: 160315 - DNA, 14 bp, Unknown
  misc_feature (1)..( 14): Result.004 file - promoters50/1024837
acgttaaaaataaa

SEQ ID NO: 160316 - DNA, 14 bp, Unknown
  misc_feature (1)..( 14): Result.004 file - promoters50/1024837
caagaagaaaaaaa

SEQ ID NO: 160317 - DNA, 14 bp, Unknown
  misc_feature (1)..( 14): Result.004 file - promoters50/1024837
catccacaaacaaa

SEQ ID NO: 160318 - DNA, 14 bp, Unknown
  misc_feature (1)..( 14): Result.004 file - promoters50/1024837
ctatttcaaaaata

SEQ ID NO: 160319 - DNA, 14 bp, Unknown
  misc_feature (1)..( 14): Result.004 file - promoters50/1024837
tatatataaaaatt

SEQ ID NO: 160320 - DNA, 14 bp, Unknown
  misc_feature (1)..( 14): Result.004 file - promoters50/1024837
caagtagaagaaag

SEQ ID NO: 160321 - DNA, 13 bp, Unknown
  misc_feature (1)..( 13): Result.004 file - promoters50/1024837
ccaaaagaatcag

SEQ ID NO: 160322 - DNA, 13 bp, Unknown
  misc_feature (1)..( 13): Result.004 file - promoters50/1024837
acaaaacaattca

SEQ ID NO: 160323 - DNA, 13 bp, Unknown
  misc_feature (1)..( 13): Result.004 file - promoters50/1024837
aataaataatcat

SEQ ID NO: 160324 - DNA, 13 bp, Unknown
  misc_feature (1)..( 13): Result.004 file - promoters50/1024837
tcttcagattcag

SEQ ID NO: 160325 - DNA, 13 bp, Unknown
  misc_feature (1)..( 13): Result.004 file - promoters50/1024837
atcaaataattct

SEQ ID NO: 160326 - DNA, 13 bp, Unknown
  misc_feature (1)..( 13): Result.004 file - promoters50/1024837
tcaaatacgtttc

SEQ ID NO: 160327 - DNA, 13 bp, Unknown
  misc_feature (1)..( 13): Result.004 file - promoters50/1024837
tcaattaatcttt

SEQ ID NO: 160328 - DNA, 13 bp, Unknown
  misc_feature (1)..( 13): Result.004 file - promoters50/1024837
ttgtaataataac

SEQ ID NO: 160329 - DNA, 8 bp, Unknown
  misc_feature (1)..( 8): Result.004 file - promoters50/1024837
taatgttt

SEQ ID NO: 160330 - DNA, 8 bp, Unknown
  misc_feature (1)..( 8): Result.004 file - promoters50/1024837
ccatgttt

SEQ ID NO: 160331 - DNA, 8 bp, Unknown
  misc_feature (1)..( 8): Result.004 file - promoters50/1024837
taatattt

SEQ ID NO: 160332 - DNA, 8 bp, Unknown
  misc_feature (1)..( 8): Result.004 file - promoters50/1024837
aaatattg

SEQ ID NO: 160333 - DNA, 8 bp, Unknown
  misc_feature (1)..( 8): Result.004 file - promoters50/1024837
gaatattg

SEQ ID NO: 160334 - DNA, 8 bp, Unknown
  misc_feature (1)..( 8): Result.004 file - promoters50/1024840
aaatatag

SEQ ID NO: 160335 - DNA, 7 bp, Unknown
  misc_feature (1)..( 7): Result.004 file - promoters50/1024840
cataaga

SEQ ID NO: 160336 - DNA, 7 bp, Unknown
  misc_feature (1)..( 7): Result.004 file - promoters50/1024840
tataaga

SEQ ID NO: 160337 - DNA, 7 bp, Unknown
  misc_feature (1)..( 7): Result.004 file - promoters50/1024840
cataagt

SEQ ID NO: 160338 - DNA, 8 bp, Unknown
  misc_feature (1)..( 8): Result.004 file - promoters50/1024840
aaaatgaa

SEQ ID NO: 160339 - DNA, 8 bp, Unknown
  misc_feature (1)..( 8): Result.004 file - promoters50/1024840
aaaaagaa

SEQ ID NO: 160340 - DNA, 9 bp, Unknown
  misc_feature (1)..( 9): Result.004 file - promoters50/1024840
aagaaagat

SEQ ID NO: 160341 - DNA, 11 bp, Unknown
  misc_feature (1)..( 11): Result.004 file - promoters50/1024840
gaataaagtat

SEQ ID NO: 160342 - DNA, 11 bp, Unknown
  misc_feature (1)..( 11): Result.004 file - promoters50/1024840
gaagaaaaaag

SEQ ID NO: 160343 - DNA, 11 bp, Unknown
  misc_feature (1)..( 11): Result.004 file - promoters50/1024840
agatacagtat

SEQ ID NO: 160344 - DNA, 7 bp, Unknown
  misc_feature (1)..( 7): Result.004 file - promoters50/1024840
gaataat

SEQ ID NO: 160345 - DNA, 7 bp, Unknown
  misc_feature (1)..( 7): Result.004 file - promoters50/1024840
taataat

SEQ ID NO: 160346 - DNA, 7 bp, Unknown
  misc_feature (1)..( 7): Result.004 file - promoters50/1024853
taaaaat

SEQ ID NO: 160347 - DNA, 12 bp, Unknown
  misc_feature (1)..( 12): Result.004 file - promoters50/1024853
tcttatatataa

SEQ ID NO: 160348 - DNA, 12 bp, Unknown
  misc_feature (1)..( 12): Result.004 file - promoters50/1024853
tcttataaataa

SEQ ID NO: 160349 - DNA, 13 bp, Unknown
  misc_feature (1)..( 13): Result.004 file - promoters50/1024853
agccgttatataa

SEQ ID NO: 160350 - DNA, 12 bp, Unknown
  misc_feature (1)..( 12): Result.004 file - promoters50/1024853
ctttataaaacc

SEQ ID NO: 160351 - DNA, 12 bp, Unknown
  misc_feature (1)..( 12): Result.004 file - promoters50/1024853
cactataaaact

SEQ ID NO: 160352 - DNA, 13 bp, Unknown
  misc_feature (1)..( 13): Result.004 file - promoters50/1024853
tactattaaagcc

SEQ ID NO: 160353 - DNA, 13 bp, Unknown
  misc_feature (1)..( 13): Result.004 file - promoters50/1024872
cgctactataaat

SEQ ID NO: 160354 - DNA, 11 bp, Unknown
  misc_feature (1)..( 11): Result.004 file - promoters50/1024872
acatcctaaat

SEQ ID NO: 160355 - DNA, 11 bp, Unknown
  misc_feature (1)..( 11): Result.004 file - promoters50/1024872
aataactaaat

SEQ ID NO: 160356 - DNA, 11 bp, Unknown
  misc_feature (1)..( 11): Result.004 file - promoters50/1024872
aattactaaaa

SEQ ID NO: 160357 - DNA, 7 bp, Unknown
  misc_feature (1)..( 7): Result.004 file - promoters50/1024872
aatattt

SEQ ID NO: 160358 - DNA, 7 bp, Unknown
  misc_feature (1)..( 7): Result.004 file - promoters50/1024872
aatcttt

SEQ ID NO: 160359 - DNA, 7 bp, Unknown
  misc_feature (1)..( 7): Result.004 file - promoters50/1024872
gatcttt

SEQ ID NO: 160360 - DNA, 9 bp, Unknown
  misc_feature (1)..( 9): Result.004 file - promoters50/1024872
tatttatta

SEQ ID NO: 160361 - DNA, 9 bp, Unknown
  misc_feature (1)..( 9): Result.004 file - promoters50/1024872
tctttatta

SEQ ID NO: 160362 - DNA, 9 bp, Unknown
  misc_feature (1)..( 9): Result.004 file - promoters50/1024872
tatgtatta

SEQ ID NO: 160363 - DNA, 11 bp, Unknown
  misc_feature (1)..( 11): Result.004 file - promoters50/1024872
aaggaaaaaaa

SEQ ID NO: 160364 - DNA, 11 bp, Unknown
  misc_feature (1)..( 11): Result.004 file - promoters50/1024872
tgagaaaaaaa

SEQ ID NO: 160365 - DNA, 11 bp, Unknown
  misc_feature (1)..( 11): Result.004 file - promoters50/1024872
aaagaaaaaca

SEQ ID NO: 160366 - DNA, 11 bp, Unknown
  misc_feature (1)..( 11): Result.004 file - promoters50/1024872
gaaaacaagtt

SEQ ID NO: 160367 - DNA, 11 bp, Unknown
  misc_feature (1)..( 11): Result.004 file - promoters50/1024872
taaaataagtt

SEQ ID NO: 160368 - DNA, 11 bp, Unknown
  misc_feature (1)..( 11): Result.004 file - promoters50/1024872
taaaataacta

SEQ ID NO: 160369 - DNA, 11 bp, Unknown
  misc_feature (1)..( 11): Result.004 file - promoters50/1024872
taagaaaggaa

SEQ ID NO: 160370 - DNA, 11 bp, Unknown
  misc_feature (1)..( 11): Result.004 file - promoters50/1024872
aaagaaaaaca

SEQ ID NO: 160371 - DNA, 11 bp, Unknown
  misc_feature (1)..( 11): Result.004 file - promoters50/1024889
aaataaaaaca

SEQ ID NO: 160372 - DNA, 11 bp, Unknown
  misc_feature (1)..( 11): Result.004 file - promoters50/1024889
gaaggttttaa

SEQ ID NO: 160373 - DNA, 11 bp, Unknown
  misc_feature (1)..( 11): Result.004 file - promoters50/1024889
aaagtttttgt

SEQ ID NO: 160374 - DNA, 11 bp, Unknown
  misc_feature (1)..( 11): Result.004 file - promoters50/1024889
gccggttataa

SEQ ID NO: 160375 - DNA, 11 bp, Unknown
  misc_feature (1)..( 11): Result.004 file - promoters50/1024889
aaactttagaa

SEQ ID NO: 160376 - DNA, 11 bp, Unknown
  misc_feature (1)..( 11): Result.004 file - promoters50/1024889
aaaatttagca

SEQ ID NO: 160377 - DNA, 11 bp, Unknown
  misc_feature (1)..( 11): Result.004 file - promoters50/1024889
aaaattggtaa

SEQ ID NO: 160378 - DNA, 11 bp, Unknown
  misc_feature (1)..( 11): Result.004 file - promoters50/1024889
ataatttacga

SEQ ID NO: 160379 - DNA, 11 bp, Unknown
  misc_feature (1)..( 11): Result.004 file - promoters50/1024889
tttgaatttag

SEQ ID NO: 160380 - DNA, 11 bp, Unknown
  misc_feature (1)..( 11): Result.004 file - promoters50/1024889
tttggattaat

SEQ ID NO: 160381 - DNA, 11 bp, Unknown
  misc_feature (1)..( 11): Result.004 file - promoters50/1024889
ttttaattgat

SEQ ID NO: 160382 - DNA, 11 bp, Unknown
  misc_feature (1)..( 11): Result.004 file - promoters50/1024889
ttctaattgca

SEQ ID NO: 160383 - DNA, 11 bp, Unknown
  misc_feature (1)..( 11): Result.004 file - promoters50/1024889
cattatttgtg

SEQ ID NO: 160384 - DNA, 11 bp, Unknown
  misc_feature (1)..( 11): Result.004 file - promoters50/1024889
aaaaatttttt

SEQ ID NO: 160385 - DNA, 11 bp, Unknown
  misc_feature (1)..( 11): Result.004 file - promoters50/1024889
acggataattc

SEQ ID NO: 160386 - DNA, 11 bp, Unknown
  misc_feature (1)..( 11): Result.004 file - promoters50/1024889
ttggaaaattt

SEQ ID NO: 160387 - DNA, 11 bp, Unknown
  misc_feature (1)..( 11): Result.004 file - promoters50/1024889
aacaataattt

SEQ ID NO: 160388 - DNA, 11 bp, Unknown
  misc_feature (1)..( 11): Result.004 file - promoters50/1024889
aaaaaaagttt

SEQ ID NO: 160389 - DNA, 11 bp, Unknown
  misc_feature (1)..( 11): Result.004 file - promoters50/1024889
aataaaaattg

SEQ ID NO: 160390 - DNA, 11 bp, Unknown
  misc_feature (1)..( 11): Result.004 file - promoters50/1024889
ttggaaaaaaa

SEQ ID NO: 160391 - DNA, 14 bp, Unknown
  misc_feature (1)..( 14): Result.004 file - promoters50/1024889
ttgtaataataact

SEQ ID NO: 160392 - DNA, 14 bp, Unknown
  misc_feature (1)..( 14): Result.004 file - promoters50/1024889
tggtaataatgttt

SEQ ID NO: 160393 - DNA, 14 bp, Unknown
  misc_feature (1)..( 14): Result.004 file - promoters50/1024889
cggttataaaaaca

SEQ ID NO: 160394 - DNA, 14 bp, Unknown
  misc_feature (1)..( 14): Result.004 file - promoters50/1024889
ttgtgatattattt

SEQ ID NO: 160395 - DNA, 14 bp, Unknown
  misc_feature (1)..( 14): Result.004 file - promoters50/1024889
aacaaatacaaact

SEQ ID NO: 160396 - DNA, 14 bp, Unknown
  misc_feature (1)..( 14): Result.004 file - promoters50/1024889
ggtgaagaaaaaca

SEQ ID NO: 160397 - DNA, 14 bp, Unknown
  misc_feature (1)..( 14): Result.004 file - promoters50/1024905
ctgtgatttacata

SEQ ID NO: 160398 - DNA, 11 bp, Unknown
  misc_feature (1)..( 11): Result.004 file - promoters50/1024905
gaaaaaggaaa

SEQ ID NO: 160399 - DNA, 11 bp, Unknown
  misc_feature (1)..( 11): Result.004 file - promoters50/1024905
caaaaagactg

SEQ ID NO: 160400 - DNA, 11 bp, Unknown
  misc_feature (1)..( 11): Result.004 file - promoters50/1024905
tcaaaaggaaa

SEQ ID NO: 160401 - DNA, 11 bp, Unknown
  misc_feature (1)..( 11): Result.004 file - promoters50/1024924
caaaaacccaa

SEQ ID NO: 160402 - DNA, 7 bp, Unknown
  misc_feature (1)..( 7): Result.004 file - promoters50/1024924
ttatttt

SEQ ID NO: 160403 - DNA, 7 bp, Unknown
  misc_feature (1)..( 7): Result.004 file - promoters50/1024924
ttaattt

SEQ ID NO: 160404 - DNA, 7 bp, Unknown
  misc_feature (1)..( 7): Result.004 file - promoters50/1024924
ctaattt

SEQ ID NO: 160405 - DNA, 10 bp, Unknown
  misc_feature (1)..( 10): Result.004 file - promoters50/1024924
tttggcatct

SEQ ID NO: 160406 - DNA, 10 bp, Unknown
  misc_feature (1)..( 10): Result.004 file - promoters50/1024924
ttttgcatgc

SEQ ID NO: 160407 - DNA, 10 bp, Unknown
  misc_feature (1)..( 10): Result.004 file - promoters50/1024924
aatggaatct

SEQ ID NO: 160408 - DNA, 7 bp, Unknown
  misc_feature (1)..( 7): Result.004 file - promoters50/1024924
tttattt

SEQ ID NO: 160409 - DNA, 7 bp, Unknown
  misc_feature (1)..( 7): Result.004 file - promoters50/1024924
tttatta

SEQ ID NO: 160410 - DNA, 7 bp, Unknown
  misc_feature (1)..( 7): Result.004 file - promoters50/1024924
attatta

SEQ ID NO: 160411 - DNA, 8 bp, Unknown
  misc_feature (1)..( 8): Result.004 file - promoters50/1024924
atatatat

SEQ ID NO: 160412 - DNA, 8 bp, Unknown
  misc_feature (1)..( 8): Result.004 file - promoters50/1024924
atagatat

SEQ ID NO: 160413 - DNA, 8 bp, Unknown
  misc_feature (1)..( 8): Result.004 file - promoters50/1024924
atatatct

SEQ ID NO: 160414 - DNA, 7 bp, Unknown
  misc_feature (1)..( 7): Result.004 file - promoters50/1024924
tcttatt

SEQ ID NO: 160415 - DNA, 7 bp, Unknown
  misc_feature (1)..( 7): Result.004 file - promoters50/1024924
tctaatt

SEQ ID NO: 160416 - DNA, 7 bp, Unknown
  misc_feature (1)..( 7): Result.004 file - promoters50/1024924
tctaatg

SEQ ID NO: 160417 - DNA, 9 bp, Unknown
  misc_feature (1)..( 9): Result.004 file - promoters50/1024924
catgaaact

SEQ ID NO: 160418 - DNA, 9 bp, Unknown
  misc_feature (1)..( 9): Result.004 file - promoters50/1024924
cattaaatt

SEQ ID NO: 160419 - DNA, 9 bp, Unknown
  misc_feature (1)..( 9): Result.004 file - promoters50/1024924
aattaaatt

SEQ ID NO: 160420 - DNA, 8 bp, Unknown
  misc_feature (1)..( 8): Result.004 file - promoters50/1024924
aattcatg

SEQ ID NO: 160421 - DNA, 8 bp, Unknown
  misc_feature (1)..( 8): Result.004 file - promoters50/1024924
aattcaaa

SEQ ID NO: 160422 - DNA, 8 bp, Unknown
  misc_feature (1)..( 8): Result.004 file - promoters50/1024924
gattaaaa

SEQ ID NO: 160423 - DNA, 7 bp, Unknown
  misc_feature (1)..( 7): Result.004 file - promoters50/1024924
aatttga

SEQ ID NO: 160424 - DNA, 7 bp, Unknown
  misc_feature (1)..( 7): Result.004 file - promoters50/1024924
aatttgt

SEQ ID NO: 160425 - DNA, 7 bp, Unknown
  misc_feature (1)..( 7): Result.004 file - promoters50/1024924
tatttga

SEQ ID NO: 160426 - DNA, 7 bp, Unknown
  misc_feature (1)..( 7): Result.004 file - promoters50/1024924
aaaatat

SEQ ID NO: 160427 - DNA, 7 bp, Unknown
  misc_feature (1)..( 7): Result.004 file - promoters50/1024924
aaactat

SEQ ID NO: 160428 - DNA, 7 bp, Unknown
  misc_feature (1)..( 7): Result.004 file - promoters50/1024958
aaactaa

SEQ ID NO: 160429 - DNA, 8 bp, Unknown
  misc_feature (1)..( 8): Result.004 file - promoters50/1024958
caattatt

SEQ ID NO: 160430 - DNA, 8 bp, Unknown
  misc_feature (1)..( 8): Result.004 file - promoters50/1024958
caattaca

SEQ ID NO: 160431 - DNA, 8 bp, Unknown
  misc_feature (1)..( 8): Result.004 file - promoters50/1024958
aaattatt

SEQ ID NO: 160432 - DNA, 8 bp, Unknown
  misc_feature (1)..( 8): Result.004 file - promoters50/1024958
agatgaaa

SEQ ID NO: 160433 - DNA, 8 bp, Unknown
  misc_feature (1)..( 8): Result.004 file - promoters50/1024958
tgattaaa

SEQ ID NO: 160434 - DNA, 8 bp, Unknown
  misc_feature (1)..( 8): Result.004 file - promoters50/1024958
tgaataat

SEQ ID NO: 160435 - DNA, 8 bp, Unknown
  misc_feature (1)..( 8): Result.004 file - promoters50/1024958
gaaaaagc

SEQ ID NO: 160436 - DNA, 8 bp, Unknown
  misc_feature (1)..( 8): Result.004 file - promoters50/1024958
caaaaagc

SEQ ID NO: 160437 - DNA, 8 bp, Unknown
  misc_feature (1)..( 8): Result.004 file - promoters50/1024958
gaaaaaaa

SEQ ID NO: 160438 - DNA, 8 bp, Unknown
  misc_feature (1)..( 8): Result.004 file - promoters50/1024958
gaataaaa

SEQ ID NO: 160439 - DNA, 8 bp, Unknown
  misc_feature (1)..( 8): Result.004 file - promoters50/1024958
caataaaa

SEQ ID NO: 160440 - DNA, 8 bp, Unknown
  misc_feature (1)..( 8): Result.004 file - promoters50/1024958
gaaaaaaa

SEQ ID NO: 160441 - DNA, 7 bp, Unknown
  misc_feature (1)..( 7): Result.004 file - promoters50/1024958
aaaattg

SEQ ID NO: 160442 - DNA, 7 bp, Unknown
  misc_feature (1)..( 7): Result.004 file - promoters50/1024958
aaagttg

SEQ ID NO: 160443 - DNA, 7 bp, Unknown
  misc_feature (1)..( 7): Result.004 file - promoters50/1024958
aaagtta

SEQ ID NO: 160444 - DNA, 8 bp, Unknown
  misc_feature (1)..( 8): Result.004 file - promoters50/1024958
gatgtttg

SEQ ID NO: 160445 - DNA, 8 bp, Unknown
  misc_feature (1)..( 8): Result.004 file - promoters50/1024958
gatatttg

SEQ ID NO: 160446 - DNA, 8 bp, Unknown
  misc_feature (1)..( 8): Result.004 file - promoters50/1024961
tatatttt

SEQ ID NO: 160447 - DNA, 7 bp, Unknown
  misc_feature (1)..( 7): Result.004 file - promoters50/1024961
aaacaat

SEQ ID NO: 160448 - DNA, 7 bp, Unknown
  misc_feature (1)..( 7): Result.004 file - promoters50/1024961
aaaaaat

SEQ ID NO: 160449 - DNA, 7 bp, Unknown
  misc_feature (1)..( 7): Result.004 file - promoters50/1024961
gaacaat

SEQ ID NO: 160450 - DNA, 14 bp, Unknown
  misc_feature (1)..( 14): Result.004 file - promoters50/1024961
cttggttttgcttg

SEQ ID NO: 160451 - DNA, 14 bp, Unknown
  misc_feature (1)..( 14): Result.004 file - promoters50/1024961
cttgattttacttg

SEQ ID NO: 160452 - DNA, 14 bp, Unknown
  misc_feature (1)..( 14): Result.004 file - promoters50/1024961
cttggtcttgccgt

SEQ ID NO: 160453 - DNA, 7 bp, Unknown
  misc_feature (1)..( 7): Result.004 file - promoters50/1024961
aaaaaag

SEQ ID NO: 160454 - DNA, 7 bp, Unknown
  misc_feature (1)..( 7): Result.004 file - promoters50/1024961
aaaaaat

SEQ ID NO: 160455 - DNA, 7 bp, Unknown
  misc_feature (1)..( 7): Result.004 file - promoters50/1024961
aaataag

SEQ ID NO: 160456 - DNA, 8 bp, Unknown
  misc_feature (1)..( 8): Result.004 file - promoters50/1024961
aaagaaat

SEQ ID NO: 160457 - DNA, 8 bp, Unknown
  misc_feature (1)..( 8): Result.004 file - promoters50/1024961
aaataaat

SEQ ID NO: 160458 - DNA, 8 bp, Unknown
  misc_feature (1)..( 8): Result.004 file - promoters50/1025028
aaataact

SEQ ID NO: 160459 - DNA, 12 bp, Unknown
  misc_feature (1)..( 12): Result.004 file - promoters50/1025028
aattaaccaacc

SEQ ID NO: 160460 - DNA, 12 bp, Unknown
  misc_feature (1)..( 12): Result.004 file - promoters50/1025028
aattaattgtat

SEQ ID NO: 160461 - DNA, 12 bp, Unknown
  misc_feature (1)..( 12): Result.004 file - promoters50/1025028
cattaaccaagc

SEQ ID NO: 160462 - DNA, 12 bp, Unknown
  misc_feature (1)..( 12): Result.004 file - promoters50/1025028
tattaattttat

SEQ ID NO: 160463 - DNA, 12 bp, Unknown
  misc_feature (1)..( 12): Result.004 file - promoters50/1025028
aattatatccac

SEQ ID NO: 160464 - DNA, 8 bp, Unknown
  misc_feature (1)..( 8): Result.004 file - promoters50/1025028
agatatta

SEQ ID NO: 160465 - DNA, 8 bp, Unknown
  misc_feature (1)..( 8): Result.004 file - promoters50/1025028
ctatatta

SEQ ID NO: 160466 - DNA, 8 bp, Unknown
  misc_feature (1)..( 8): Result.004 file - promoters50/1025028
atatattt

SEQ ID NO: 160467 - DNA, 8 bp, Unknown
  misc_feature (1)..( 8): Result.004 file - promoters50/1025028
atatatct

SEQ ID NO: 160468 - DNA, 7 bp, Unknown
  misc_feature (1)..( 7): Result.004 file - promoters50/1025028
aatttta

SEQ ID NO: 160469 - DNA, 7 bp, Unknown
  misc_feature (1)..( 7): Result.004 file - promoters50/1025028
aattttg

SEQ ID NO: 160470 - DNA, 7 bp, Unknown
  misc_feature (1)..( 7): Result.004 file - promoters50/1025028
aatttta

SEQ ID NO: 160471 - DNA, 7 bp, Unknown
  misc_feature (1)..( 7): Result.004 file - promoters50/1025028
aattttg

SEQ ID NO: 160472 - DNA, 9 bp, Unknown
  misc_feature (1)..( 9): Result.004 file - promoters50/1025028
attcaaagt

SEQ ID NO: 160473 - DNA, 9 bp, Unknown
  misc_feature (1)..( 9): Result.004 file - promoters50/1025028
aatcaaagc

SEQ ID NO: 160474 - DNA, 9 bp, Unknown
  misc_feature (1)..( 9): Result.004 file - promoters50/1025028
agtcaaagt

SEQ ID NO: 160475 - DNA, 9 bp, Unknown
  misc_feature (1)..( 9): Result.004 file - promoters50/1025053
agttaaact

SEQ ID NO: 160476 - DNA, 9 bp, Unknown
  misc_feature (1)..( 9): Result.004 file - promoters50/1025053
cgagtctat

SEQ ID NO: 160477 - DNA, 9 bp, Unknown
  misc_feature (1)..( 9): Result.004 file - promoters50/1025053
ctagtctat

SEQ ID NO: 160478 - DNA, 9 bp, Unknown
  misc_feature (1)..( 9): Result.004 file - promoters50/1025087
ctaatcttt

SEQ ID NO: 160479 - DNA, 16 bp, Unknown
  misc_feature (1)..( 16): Result.004 file - promoters50/1025087
cttgtaatacccagta

SEQ ID NO: 160480 - DNA, 16 bp, Unknown
  misc_feature (1)..( 16): Result.004 file - promoters50/1025087
tttgaaattggtagag

SEQ ID NO: 160481 - DNA, 16 bp, Unknown
  misc_feature (1)..( 16): Result.004 file - promoters50/1025087
tttcaaaagagtagaa

SEQ ID NO: 160482 - DNA, 16 bp, Unknown
  misc_feature (1)..( 16): Result.004 file - promoters50/1025087
ttagaaaatgggattt

SEQ ID NO: 160483 - DNA, 16 bp, Unknown
  misc_feature (1)..( 16): Result.004 file - promoters50/1025087
aaccaaaatcggattt

SEQ ID NO: 160484 - DNA, 16 bp, Unknown
  misc_feature (1)..( 16): Result.004 file - promoters50/1025100
aggaatcatcggagcg

SEQ ID NO: 160485 - DNA, 13 bp, Unknown
  misc_feature (1)..( 13): Result.004 file - promoters50/1025100
gataaaaaaaata

SEQ ID NO: 160486 - DNA, 13 bp, Unknown
  misc_feature (1)..( 13): Result.004 file - promoters50/1025100
gataaaaaatata

SEQ ID NO: 160487 - DNA, 13 bp, Unknown
  misc_feature (1)..( 13): Result.004 file - promoters50/1025100
aatagaaatacaa

SEQ ID NO: 160488 - DNA, 8 bp, Unknown
  misc_feature (1)..( 8): Result.004 file - promoters50/1025100
tcaatttt

SEQ ID NO: 160489 - DNA, 8 bp, Unknown
  misc_feature (1)..( 8): Result.004 file - promoters50/1025100
acaatttt

SEQ ID NO: 160490 - DNA, 8 bp, Unknown
  misc_feature (1)..( 8): Result.004 file - promoters50/1025113
acacttta

SEQ ID NO: 160491 - DNA, 11 bp, Unknown
  misc_feature (1)..( 11): Result.004 file - promoters50/1025113
tttaacaaaac

SEQ ID NO: 160492 - DNA, 11 bp, Unknown
  misc_feature (1)..( 11): Result.004 file - promoters50/1025113
tttaagaaaat

SEQ ID NO: 160493 - DNA, 11 bp, Unknown
  misc_feature (1)..( 11): Result.004 file - promoters50/1025113
cttttcaaaac

SEQ ID NO: 160494 - DNA, 12 bp, Unknown
  misc_feature (1)..( 12): Result.004 file - promoters50/1025113
ttaagtatatat

SEQ ID NO: 160495 - DNA, 12 bp, Unknown
  misc_feature (1)..( 12): Result.004 file - promoters50/1025113
gaaaatatatat

SEQ ID NO: 160496 - DNA, 12 bp, Unknown
  misc_feature (1)..( 12): Result.004 file - promoters50/1025113
aaagataaatac

SEQ ID NO: 160497 - DNA, 9 bp, Unknown
  misc_feature (1)..( 9): Result.004 file - promoters50/1025113
atatagctt

SEQ ID NO: 160498 - DNA, 9 bp, Unknown
  misc_feature (1)..( 9): Result.004 file - promoters50/1025113
atacagcta

SEQ ID NO: 160499 - DNA, 9 bp, Unknown
  misc_feature (1)..( 9): Result.004 file - promoters50/1025117
ctttagctt

SEQ ID NO: 160500 - DNA, 10 bp, Unknown
  misc_feature (1)..( 10): Result.004 file - promoters50/1025117
ttttattatg

SEQ ID NO: 160501 - DNA, 10 bp, Unknown
  misc_feature (1)..( 10): Result.004 file - promoters50/1025117
gttttttaat

SEQ ID NO: 160502 - DNA, 10 bp, Unknown
  misc_feature (1)..( 10): Result.004 file - promoters50/1025117
ttttattcta

SEQ ID NO: 160503 - DNA, 10 bp, Unknown
  misc_feature (1)..( 10): Result.004 file - promoters50/1025117
cattagtatt

SEQ ID NO: 160504 - DNA, 10 bp, Unknown
  misc_feature (1)..( 10): Result.004 file - promoters50/1025117
ttttaagcct

SEQ ID NO: 160505 - DNA, 10 bp, Unknown
  misc_feature (1)..( 10): Result.004 file - promoters50/1025117
atttaatcct

SEQ ID NO: 160506 - DNA, 14 bp, Unknown
  misc_feature (1)..( 14): Result.004 file - promoters50/1025117
ttatttcatggcgt

SEQ ID NO: 160507 - DNA, 14 bp, Unknown
  misc_feature (1)..( 14): Result.004 file - promoters50/1025117
ttgtttaatgtttt

SEQ ID NO: 160508 - DNA, 14 bp, Unknown
  misc_feature (1)..( 14): Result.004 file - promoters50/1025117
ttgttcaatatttt

SEQ ID NO: 160509 - DNA, 14 bp, Unknown
  misc_feature (1)..( 14): Result.004 file - promoters50/1025117
gcatttaatcctat

SEQ ID NO: 160510 - DNA, 15 bp, Unknown
  misc_feature (1)..( 15): Result.004 file - promoters50/1025117
ttattctaataattt

SEQ ID NO: 160511 - DNA, 15 bp, Unknown
  misc_feature (1)..( 15): Result.004 file - promoters50/1025117
gtattgtaagatttt

SEQ ID NO: 160512 - DNA, 11 bp, Unknown
  misc_feature (1)..( 11): Result.004 file - promoters50/1025117
atagagtttgg

SEQ ID NO: 160513 - DNA, 11 bp, Unknown
  misc_feature (1)..( 11): Result.004 file - promoters50/1025117
atatagtttta

SEQ ID NO: 160514 - DNA, 11 bp, Unknown
  misc_feature (1)..( 11): Result.004 file - promoters50/1025117
taagattttgt

SEQ ID NO: 160515 - DNA, 11 bp, Unknown
  misc_feature (1)..( 11): Result.004 file - promoters50/1025117
atttagtttgc

SEQ ID NO: 160516 - DNA, 11 bp, Unknown
  misc_feature (1)..( 11): Result.004 file - promoters50/1025117
atttcttttgt

SEQ ID NO: 160517 - DNA, 11 bp, Unknown
  misc_feature (1)..( 11): Result.004 file - promoters50/1025117
tgagatttcat

SEQ ID NO: 160518 - DNA, 12 bp, Unknown
  misc_feature (1)..( 12): Result.004 file - promoters50/1025117
atattaaaatac

SEQ ID NO: 160519 - DNA, 12 bp, Unknown
  misc_feature (1)..( 12): Result.004 file - promoters50/1025117
ttattgaaattt

SEQ ID NO: 160520 - DNA, 12 bp, Unknown
  misc_feature (1)..( 12): Result.004 file - promoters50/1025117
ttgttaatatat

SEQ ID NO: 160521 - DNA, 12 bp, Unknown
  misc_feature (1)..( 12): Result.004 file - promoters50/1025117
atattattaata

SEQ ID NO: 160522 - DNA, 12 bp, Unknown
  misc_feature (1)..( 12): Result.004 file - promoters50/1025178
tttaaaatatat

SEQ ID NO: 160523 - DNA, 7 bp, Unknown
  misc_feature (1)..( 7): Result.004 file - promoters50/1025178
ccaaata

SEQ ID NO: 160524 - DNA, 7 bp, Unknown
  misc_feature (1)..( 7): Result.004 file - promoters50/1025178
ccaaatg

SEQ ID NO: 160525 - DNA, 7 bp, Unknown
  misc_feature (1)..( 7): Result.004 file - promoters50/1025178
acaaatg

SEQ ID NO: 160526 - DNA, 15 bp, Unknown
  misc_feature (1)..( 15): Result.004 file - promoters50/1025178
aaggtatccgaaccg

SEQ ID NO: 160527 - DNA, 15 bp, Unknown
  misc_feature (1)..( 15): Result.004 file - promoters50/1025178
tttgtaaccgagccg

SEQ ID NO: 160528 - DNA, 15 bp, Unknown
  misc_feature (1)..( 15): Result.004 file - promoters50/1025185
aaggaatcacgcagg

SEQ ID NO: 160529 - DNA, 9 bp, Unknown
  misc_feature (1)..( 9): Result.004 file - promoters50/1025185
aagaagaaa

SEQ ID NO: 160530 - DNA, 9 bp, Unknown
  misc_feature (1)..( 9): Result.004 file - promoters50/1025185
ttgaataaa

SEQ ID NO: 160531 - DNA, 9 bp, Unknown
  misc_feature (1)..( 9): Result.004 file - promoters50/1025185
aagcagaca

SEQ ID NO: 160532 - DNA, 11 bp, Unknown
  misc_feature (1)..( 11): Result.004 file - promoters50/1025185
aatgtttgata

SEQ ID NO: 160533 - DNA, 11 bp, Unknown
  misc_feature (1)..( 11): Result.004 file - promoters50/1025185
aatttttgatt

SEQ ID NO: 160534 - DNA, 11 bp, Unknown
  misc_feature (1)..( 11): Result.004 file - promoters50/1025185
gtttttttata

SEQ ID NO: 160535 - DNA, 9 bp, Unknown
  misc_feature (1)..( 9): Result.004 file - promoters50/1025185
ttttatcat

SEQ ID NO: 160536 - DNA, 9 bp, Unknown
  misc_feature (1)..( 9): Result.004 file - promoters50/1025185
taatatcat

SEQ ID NO: 160537 - DNA, 9 bp, Unknown
  misc_feature (1)..( 9): Result.004 file - promoters50/1025194
ttttctcaa

SEQ ID NO: 160538 - DNA, 10 bp, Unknown
  misc_feature (1)..( 10): Result.004 file - promoters50/1025194
cgaatttttc

SEQ ID NO: 160539 - DNA, 10 bp, Unknown
  misc_feature (1)..( 10): Result.004 file - promoters50/1025194
acaatatttc

SEQ ID NO: 160540 - DNA, 10 bp, Unknown
  misc_feature (1)..( 10): Result.004 file - promoters50/1025194
acactatatc

SEQ ID NO: 160541 - DNA, 10 bp, Unknown
  misc_feature (1)..( 10): Result.004 file - promoters50/1025194
taaatttttg

SEQ ID NO: 160542 - DNA, 10 bp, Unknown
  misc_feature (1)..( 10): Result.004 file - promoters50/1025194
aactaacatg

SEQ ID NO: 160543 - DNA, 10 bp, Unknown
  misc_feature (1)..( 10): Result.004 file - promoters50/1025194
cactatcatt

SEQ ID NO: 160544 - DNA, 10 bp, Unknown
  misc_feature (1)..( 10): Result.004 file - promoters50/1025194
tacaaataat

SEQ ID NO: 160545 - DNA, 10 bp, Unknown
  misc_feature (1)..( 10): Result.004 file - promoters50/1025202
acataataat

SEQ ID NO: 160546 - DNA, 8 bp, Unknown
  misc_feature (1)..( 8): Result.004 file - promoters50/1025202
atttctgt

SEQ ID NO: 160547 - DNA, 8 bp, Unknown
  misc_feature (1)..( 8): Result.004 file - promoters50/1025202
atttatgt

SEQ ID NO: 160548 - DNA, 8 bp, Unknown
  misc_feature (1)..( 8): Result.004 file - promoters50/1025202
tgttctgt

SEQ ID NO: 160549 - DNA, 7 bp, Unknown
  misc_feature (1)..( 7): Result.004 file - promoters50/1025202
cttaatt

SEQ ID NO: 160550 - DNA, 7 bp, Unknown
  misc_feature (1)..( 7): Result.004 file - promoters50/1025202
cttaatt

SEQ ID NO: 160551 - DNA, 7 bp, Unknown
  misc_feature (1)..( 7): Result.004 file - promoters50/1025211
tttaatt

SEQ ID NO: 160552 - DNA, 14 bp, Unknown
  misc_feature (1)..( 14): Result.004 file - promoters50/1025211
tataaaatacagta

SEQ ID NO: 160553 - DNA, 14 bp, Unknown
  misc_feature (1)..( 14): Result.004 file - promoters50/1025211
cgaaaaataaataa

SEQ ID NO: 160554 - DNA, 14 bp, Unknown
  misc_feature (1)..( 14): Result.004 file - promoters50/1025211
aataaaattaatat

SEQ ID NO: 160555 - DNA, 14 bp, Unknown
  misc_feature (1)..( 14): Result.004 file - promoters50/1025211
tatataatattttt

SEQ ID NO: 160556 - DNA, 14 bp, Unknown
  misc_feature (1)..( 14): Result.004 file - promoters50/1025211
gagataatatttca

SEQ ID NO: 160557 - DNA, 14 bp, Unknown
  misc_feature (1)..( 14): Result.004 file - promoters50/1025211
atcatgctatttat

SEQ ID NO: 160558 - DNA, 13 bp, Unknown
  misc_feature (1)..( 13): Result.004 file - promoters50/1025211
atataattatttt

SEQ ID NO: 160559 - DNA, 13 bp, Unknown
  misc_feature (1)..( 13): Result.004 file - promoters50/1025211
atattattagtag

SEQ ID NO: 160560 - DNA, 13 bp, Unknown
  misc_feature (1)..( 13): Result.004 file - promoters50/1025211
atattattagcct

SEQ ID NO: 160561 - DNA, 13 bp, Unknown
  misc_feature (1)..( 13): Result.004 file - promoters50/1025211
ccttaattaccga

SEQ ID NO: 160562 - DNA, 13 bp, Unknown
  misc_feature (1)..( 13): Result.004 file - promoters50/1025211
gattaattctttt

SEQ ID NO: 160563 - DNA, 13 bp, Unknown
  misc_feature (1)..( 13): Result.004 file - promoters50/1025211
ttattatattgag

SEQ ID NO: 160564 - DNA, 12 bp, Unknown
  misc_feature (1)..( 12): Result.004 file - promoters50/1025211
ttttgtttctgg

SEQ ID NO: 160565 - DNA, 12 bp, Unknown
  misc_feature (1)..( 12): Result.004 file - promoters50/1025211
gtttgtttaaca

SEQ ID NO: 160566 - DNA, 12 bp, Unknown
  misc_feature (1)..( 12): Result.004 file - promoters50/1025211
ttttatttcttt

SEQ ID NO: 160567 - DNA, 12 bp, Unknown
  misc_feature (1)..( 12): Result.004 file - promoters50/1025211
atatgtctgcgc

SEQ ID NO: 160568 - DNA, 12 bp, Unknown
  misc_feature (1)..( 12): Result.004 file - promoters50/1025211
gattaattcttt

SEQ ID NO: 160569 - DNA, 12 bp, Unknown
  misc_feature (1)..( 12): Result.004 file - promoters50/1025211
caaaaatcctta

SEQ ID NO: 160570 - DNA, 16 bp, Unknown
  misc_feature (1)..( 16): Result.004 file - promoters50/1025211
taacaattctaatttt

SEQ ID NO: 160571 - DNA, 16 bp, Unknown
  misc_feature (1)..( 16): Result.004 file - promoters50/1025211
gaacaagtctctatga

SEQ ID NO: 160572 - DNA, 16 bp, Unknown
  misc_feature (1)..( 16): Result.004 file - promoters50/1025211
taaaaattaaatgcta

SEQ ID NO: 160573 - DNA, 16 bp, Unknown
  misc_feature (1)..( 16): Result.004 file - promoters50/1025211
aaaatattaaccttga

SEQ ID NO: 160574 - DNA, 16 bp, Unknown
  misc_feature (1)..( 16): Result.004 file - promoters50/1025211
agtatattagttaata

SEQ ID NO: 160575 - DNA, 16 bp, Unknown
  misc_feature (1)..( 16): Result.004 file - promoters50/1025211
ccaaaattgaccctga

SEQ ID NO: 160576 - DNA, 16 bp, Unknown
  misc_feature (1)..( 16): Result.004 file - promoters50/1025233
gtaaaatttcataacc

SEQ ID NO: 160577 - DNA, 9 bp, Unknown
  misc_feature (1)..( 9): Result.004 file - promoters50/1025233
acagaatct

SEQ ID NO: 160578 - DNA, 9 bp, Unknown
  misc_feature (1)..( 9): Result.004 file - promoters50/1025233
ttagaatct

SEQ ID NO: 160579 - DNA, 9 bp, Unknown
  misc_feature (1)..( 9): Result.004 file - promoters50/1025233
acaaaatga

SEQ ID NO: 160580 - DNA, 8 bp, Unknown
  misc_feature (1)..( 8): Result.004 file - promoters50/1025233
atttcttt

SEQ ID NO: 160581 - DNA, 8 bp, Unknown
  misc_feature (1)..( 8): Result.004 file - promoters50/1025233
attttttt

SEQ ID NO: 160582 - DNA, 8 bp, Unknown
  misc_feature (1)..( 8): Result.004 file - promoters50/1025262
attgtttt

SEQ ID NO: 160583 - DNA, 7 bp, Unknown
  misc_feature (1)..( 7): Result.004 file - promoters50/1025262
tcagatt

SEQ ID NO: 160584 - DNA, 7 bp, Unknown
  misc_feature (1)..( 7): Result.004 file - promoters50/1025262
tcacatt

SEQ ID NO: 160585 - DNA, 7 bp, Unknown
  misc_feature (1)..( 7): Result.004 file - promoters50/1025262
tcagata

SEQ ID NO: 160586 - DNA, 8 bp, Unknown
  misc_feature (1)..( 8): Result.004 file - promoters50/1025262
aaatgtaa

SEQ ID NO: 160587 - DNA, 8 bp, Unknown
  misc_feature (1)..( 8): Result.004 file - promoters50/1025262
atatgtaa

SEQ ID NO: 160588 - DNA, 8 bp, Unknown
  misc_feature (1)..( 8): Result.004 file - promoters50/1025262
atatataa

SEQ ID NO: 160589 - DNA, 8 bp, Unknown
  misc_feature (1)..( 8): Result.004 file - promoters50/1025262
agaaaaat

SEQ ID NO: 160590 - DNA, 8 bp, Unknown
  misc_feature (1)..( 8): Result.004 file - promoters50/1025262
agaaaaaa

SEQ ID NO: 160591 - DNA, 8 bp, Unknown
  misc_feature (1)..( 8): Result.004 file - promoters50/1025288
ttaaaaaa

SEQ ID NO: 160592 - DNA, 10 bp, Unknown
  misc_feature (1)..( 10): Result.004 file - promoters50/1025288
acatatataa

SEQ ID NO: 160593 - DNA, 10 bp, Unknown
  misc_feature (1)..( 10): Result.004 file - promoters50/1025288
tgataaataa

SEQ ID NO: 160594 - DNA, 10 bp, Unknown
  misc_feature (1)..( 10): Result.004 file - promoters50/1025288
tgagaaagtc

SEQ ID NO: 160595 - DNA, 8 bp, Unknown
  misc_feature (1)..( 8): Result.004 file - promoters50/1025288
tttgatta

SEQ ID NO: 160596 - DNA, 8 bp, Unknown
  misc_feature (1)..( 8): Result.004 file - promoters50/1025288
tttgatca

SEQ ID NO: 160597 - DNA, 8 bp, Unknown
  misc_feature (1)..( 8): Result.004 file - promoters50/1025288
gttggtca

SEQ ID NO: 160598 - DNA, 12 bp, Unknown
  misc_feature (1)..( 12): Result.004 file - promoters50/1025288
tttgatcaaatc

SEQ ID NO: 160599 - DNA, 12 bp, Unknown
  misc_feature (1)..( 12): Result.004 file - promoters50/1025288
ggctgtcaaatg

SEQ ID NO: 160600 - DNA, 12 bp, Unknown
  misc_feature (1)..( 12): Result.004 file - promoters50/1025288
tttggtcatatc

SEQ ID NO: 160601 - DNA, 12 bp, Unknown
  misc_feature (1)..( 12): Result.004 file - promoters50/1025288
gttgttcatagg

SEQ ID NO: 160602 - DNA, 9 bp, Unknown
  misc_feature (1)..( 9): Result.004 file - promoters50/1025288
caaagatga

SEQ ID NO: 160603 - DNA, 9 bp, Unknown
  misc_feature (1)..( 9): Result.004 file - promoters50/1025288
taaatatga

SEQ ID NO: 160604 - DNA, 9 bp, Unknown
  misc_feature (1)..( 9): Result.004 file - promoters50/1025288
taaataagt

SEQ ID NO: 160605 - DNA, 10 bp, Unknown
  misc_feature (1)..( 10): Result.004 file - promoters50/1025288
ttatatgttg

SEQ ID NO: 160606 - DNA, 10 bp, Unknown
  misc_feature (1)..( 10): Result.004 file - promoters50/1025288
ttatttgttc

SEQ ID NO: 160607 - DNA, 10 bp, Unknown
  misc_feature (1)..( 10): Result.004 file - promoters50/1025288
aaatttcttt

SEQ ID NO: 160608 - DNA, 8 bp, Unknown
  misc_feature (1)..( 8): Result.004 file - promoters50/1025288
tttaaaag

SEQ ID NO: 160609 - DNA, 8 bp, Unknown
  misc_feature (1)..( 8): Result.004 file - promoters50/1025288
attaaaat

SEQ ID NO: 160610 - DNA, 8 bp, Unknown
  misc_feature (1)..( 8): Result.004 file - promoters50/1025288
tttaaaag

SEQ ID NO: 160611 - DNA, 8 bp, Unknown
  misc_feature (1)..( 8): Result.004 file - promoters50/1025288
ttatttca

SEQ ID NO: 160612 - DNA, 8 bp, Unknown
  misc_feature (1)..( 8): Result.004 file - promoters50/1025288
ctatttct

SEQ ID NO: 160613 - DNA, 8 bp, Unknown
  misc_feature (1)..( 8): Result.004 file - promoters50/1025288
ctacttct

SEQ ID NO: 160614 - DNA, 8 bp, Unknown
  misc_feature (1)..( 8): Result.004 file - promoters50/1025288
aaattgag

SEQ ID NO: 160615 - DNA, 8 bp, Unknown
  misc_feature (1)..( 8): Result.004 file - promoters50/1025288
aaatggag

SEQ ID NO: 160616 - DNA, 8 bp, Unknown
  misc_feature (1)..( 8): Result.004 file - promoters50/1025288
acatggag

SEQ ID NO: 160617 - DNA, 12 bp, Unknown
  misc_feature (1)..( 12): Result.004 file - promoters50/1025288
ctgtatttttaa

SEQ ID NO: 160618 - DNA, 12 bp, Unknown
  misc_feature (1)..( 12): Result.004 file - promoters50/1025288
ctgaatttattt

SEQ ID NO: 160619 - DNA, 12 bp, Unknown
  misc_feature (1)..( 12): Result.004 file - promoters50/1025322
tcaaatttcttt

SEQ ID NO: 160620 - DNA, 7 bp, Unknown
  misc_feature (1)..( 7): Result.004 file - promoters50/1025322
aaattag

SEQ ID NO: 160621 - DNA, 7 bp, Unknown
  misc_feature (1)..( 7): Result.004 file - promoters50/1025322
aaattag

SEQ ID NO: 160622 - DNA, 7 bp, Unknown
  misc_feature (1)..( 7): Result.004 file - promoters50/1025322
caattag

SEQ ID NO: 160623 - DNA, 8 bp, Unknown
  misc_feature (1)..( 8): Result.004 file - promoters50/1025322
attctttc

SEQ ID NO: 160624 - DNA, 8 bp, Unknown
  misc_feature (1)..( 8): Result.004 file - promoters50/1025322
tttctttc

SEQ ID NO: 160625 - DNA, 8 bp, Unknown
  misc_feature (1)..( 8): Result.004 file - promoters50/1025340
tttgtttg

SEQ ID NO: 160626 - DNA, 9 bp, Unknown
  misc_feature (1)..( 9): Result.004 file - promoters50/1025340
gttagatca

SEQ ID NO: 160627 - DNA, 9 bp, Unknown
  misc_feature (1)..( 9): Result.004 file - promoters50/1025340
gttagatcg

SEQ ID NO: 160628 - DNA, 9 bp, Unknown
  misc_feature (1)..( 9): Result.004 file - promoters50/1025340
agtagttca

SEQ ID NO: 160629 - DNA, 9 bp, Unknown
  misc_feature (1)..( 9): Result.004 file - promoters50/1025340
aaaagttca

SEQ ID NO: 160630 - DNA, 8 bp, Unknown
  misc_feature (1)..( 8): Result.004 file - promoters50/1025340
tatattta

SEQ ID NO: 160631 - DNA, 8 bp, Unknown
  misc_feature (1)..( 8): Result.004 file - promoters50/1025340
catattta

SEQ ID NO: 160632 - DNA, 8 bp, Unknown
  misc_feature (1)..( 8): Result.004 file - promoters50/1025340
tatatatg

SEQ ID NO: 160633 - DNA, 8 bp, Unknown
  misc_feature (1)..( 8): Result.004 file - promoters50/1025348
agtatata

SEQ ID NO: 160634 - DNA, 11 bp, Unknown
  misc_feature (1)..( 11): Result.004 file - promoters50/1025348
ctactttcttt

SEQ ID NO: 160635 - DNA, 11 bp, Unknown
  misc_feature (1)..( 11): Result.004 file - promoters50/1025348
ctagtttgttt

SEQ ID NO: 160636 - DNA, 11 bp, Unknown
  misc_feature (1)..( 11): Result.004 file - promoters50/1025348
atagttttgga

SEQ ID NO: 160637 - DNA, 9 bp, Unknown
  misc_feature (1)..( 9): Result.004 file - promoters50/1025348
gaaaatgtt

SEQ ID NO: 160638 - DNA, 9 bp, Unknown
  misc_feature (1)..( 9): Result.004 file - promoters50/1025348
aaaaacgtt

SEQ ID NO: 160639 - DNA, 10 bp, Unknown
  misc_feature (1)..( 10): Result.004 file - promoters50/1025348
taacaacacc

SEQ ID NO: 160640 - DNA, 12 bp, Unknown
  misc_feature (1)..( 12): Result.004 file - promoters50/1025348
ataattttttat

SEQ ID NO: 160641 - DNA, 12 bp, Unknown
  misc_feature (1)..( 12): Result.004 file - promoters50/1025348
ctaatttaacat

SEQ ID NO: 160642 - DNA, 12 bp, Unknown
  misc_feature (1)..( 12): Result.004 file - promoters50/1025348
atagttttttat

SEQ ID NO: 160643 - DNA, 12 bp, Unknown
  misc_feature (1)..( 12): Result.004 file - promoters50/1025348
gggcttttaata

SEQ ID NO: 160644 - DNA, 10 bp, Unknown
  misc_feature (1)..( 10): Result.004 file - promoters50/1025348
cttccctcag

SEQ ID NO: 160645 - DNA, 10 bp, Unknown
  misc_feature (1)..( 10): Result.004 file - promoters50/1025348
cttcccttta

SEQ ID NO: 160646 - DNA, 10 bp, Unknown
  misc_feature (1)..( 10): Result.004 file - promoters50/1025348
tttcctttta

SEQ ID NO: 160647 - DNA, 8 bp, Unknown
  misc_feature (1)..( 8): Result.004 file - promoters50/1025348
tttatttc

SEQ ID NO: 160648 - DNA, 8 bp, Unknown
  misc_feature (1)..( 8): Result.004 file - promoters50/1025348
attatttt

SEQ ID NO: 160649 - DNA, 8 bp, Unknown
  misc_feature (1)..( 8): Result.004 file - promoters50/1025348
tttgtttc

SEQ ID NO: 160650 - DNA, 7 bp, Unknown
  misc_feature (1)..( 7): Result.004 file - promoters50/1025348
cttttaa

SEQ ID NO: 160651 - DNA, 7 bp, Unknown
  misc_feature (1)..( 7): Result.004 file - promoters50/1025348
cttttaa

SEQ ID NO: 160652 - DNA, 7 bp, Unknown
  misc_feature (1)..( 7): Result.004 file - promoters50/1025348
attttaa

SEQ ID NO: 160653 - DNA, 7 bp, Unknown
  misc_feature (1)..( 7): Result.004 file - promoters50/1025348
taaaaac

SEQ ID NO: 160654 - DNA, 7 bp, Unknown
  misc_feature (1)..( 7): Result.004 file - promoters50/1025348
taaaaaa

SEQ ID NO: 160655 - DNA, 7 bp, Unknown
  misc_feature (1)..( 7): Result.004 file - promoters50/1025372
taacaac

SEQ ID NO: 160656 - DNA, 7 bp, Unknown
  misc_feature (1)..( 7): Result.004 file - promoters50/1025372
gttgaat

SEQ ID NO: 160657 - DNA, 7 bp, Unknown
  misc_feature (1)..( 7): Result.004 file - promoters50/1025372
gttgaaa

SEQ ID NO: 160658 - DNA, 7 bp, Unknown
  misc_feature (1)..( 7): Result.004 file - promoters50/1025372
cttgaaa

SEQ ID NO: 160659 - DNA, 8 bp, Unknown
  misc_feature (1)..( 8): Result.004 file - promoters50/1025372
tatatttt

SEQ ID NO: 160660 - DNA, 8 bp, Unknown
  misc_feature (1)..( 8): Result.004 file - promoters50/1025372
tatttttt

SEQ ID NO: 160661 - DNA, 8 bp, Unknown
  misc_feature (1)..( 8): Result.004 file - promoters50/1025372
tatatttt

SEQ ID NO: 160662 - DNA, 9 bp, Unknown
  misc_feature (1)..( 9): Result.004 file - promoters50/1025372
tcatctgat

SEQ ID NO: 160663 - DNA, 9 bp, Unknown
  misc_feature (1)..( 9): Result.004 file - promoters50/1025372
ccatttgat

SEQ ID NO: 160664 - DNA, 9 bp, Unknown
  misc_feature (1)..( 9): Result.004 file - promoters50/1025372
tcatctttt

SEQ ID NO: 160665 - DNA, 9 bp, Unknown
  misc_feature (1)..( 9): Result.004 file - promoters50/1025372
tttcaatat

SEQ ID NO: 160666 - DNA, 9 bp, Unknown
  misc_feature (1)..( 9): Result.004 file - promoters50/1025372
catcattat

SEQ ID NO: 160667 - DNA, 9 bp, Unknown
  misc_feature (1)..( 9): Result.004 file - promoters50/1025372
catccttat

SEQ ID NO: 160668 - DNA, 7 bp, Unknown
  misc_feature (1)..( 7): Result.004 file - promoters50/1025372
tttttgt

SEQ ID NO: 160669 - DNA, 7 bp, Unknown
  misc_feature (1)..( 7): Result.004 file - promoters50/1025372
tttttgc

SEQ ID NO: 160670 - DNA, 7 bp, Unknown
  misc_feature (1)..( 7): Result.004 file - promoters50/1025372
ttttttt

SEQ ID NO: 160671 - DNA, 7 bp, Unknown
  misc_feature (1)..( 7): Result.004 file - promoters50/1025372
ttttatt

SEQ ID NO: 160672 - DNA, 7 bp, Unknown
  misc_feature (1)..( 7): Result.004 file - promoters50/1025372
ttttata

SEQ ID NO: 160673 - DNA, 7 bp, Unknown
  misc_feature (1)..( 7): Result.004 file - promoters50/1025443
tttgata

SEQ ID NO: 160674 - DNA, 10 bp, Unknown
  misc_feature (1)..( 10): Result.004 file - promoters50/1025443
aaaaaataca

SEQ ID NO: 160675 - DNA, 10 bp, Unknown
  misc_feature (1)..( 10): Result.004 file - promoters50/1025443
acaaaatatg

SEQ ID NO: 160676 - DNA, 10 bp, Unknown
  misc_feature (1)..( 10): Result.004 file - promoters50/1025443
tgaaaataca

SEQ ID NO: 160677 - DNA, 10 bp, Unknown
  misc_feature (1)..( 10): Result.004 file - promoters50/1025443
tgaaaattta

SEQ ID NO: 160678 - DNA, 12 bp, Unknown
  misc_feature (1)..( 12): Result.004 file - promoters50/1025443
aaaaaatacaaa

SEQ ID NO: 160679 - DNA, 12 bp, Unknown
  misc_feature (1)..( 12): Result.004 file - promoters50/1025443
taaccatacaaa

SEQ ID NO: 160680 - DNA, 12 bp, Unknown
  misc_feature (1)..( 12): Result.004 file - promoters50/1025443
tgaaaatacagg

SEQ ID NO: 160681 - DNA, 12 bp, Unknown
  misc_feature (1)..( 12): Result.004 file - promoters50/1025443
tgaaaatttagt

SEQ ID NO: 160682 - DNA, 10 bp, Unknown
  misc_feature (1)..( 10): Result.004 file - promoters50/1025443
tttaggaaat

SEQ ID NO: 160683 - DNA, 10 bp, Unknown
  misc_feature (1)..( 10): Result.004 file - promoters50/1025443
gttgggaaat

SEQ ID NO: 160684 - DNA, 10 bp, Unknown
  misc_feature (1)..( 10): Result.004 file - promoters50/1025443
gttgtgaaat

SEQ ID NO: 160685 - DNA, 12 bp, Unknown
  misc_feature (1)..( 12): Result.004 file - promoters50/1025443
ttttatttctta

SEQ ID NO: 160686 - DNA, 12 bp, Unknown
  misc_feature (1)..( 12): Result.004 file - promoters50/1025443
tttaattattgt

SEQ ID NO: 160687 - DNA, 12 bp, Unknown
  misc_feature (1)..( 12): Result.004 file - promoters50/1025468
cattatctctta

SEQ ID NO: 160688 - DNA, 10 bp, Unknown
  misc_feature (1)..( 10): Result.004 file - promoters50/1025468
gataatgtat

SEQ ID NO: 160689 - DNA, 10 bp, Unknown
  misc_feature (1)..( 10): Result.004 file - promoters50/1025468
gatgatgtac

SEQ ID NO: 160690 - DNA, 10 bp, Unknown
  misc_feature (1)..( 10): Result.004 file - promoters50/1025468
ctaaatatat

SEQ ID NO: 160691 - DNA, 10 bp, Unknown
  misc_feature (1)..( 10): Result.004 file - promoters50/1025468
ttaaaaatag

SEQ ID NO: 160692 - DNA, 10 bp, Unknown
  misc_feature (1)..( 10): Result.004 file - promoters50/1025468
agaaacatga

SEQ ID NO: 160693 - DNA, 10 bp, Unknown
  misc_feature (1)..( 10): Result.004 file - promoters50/1025468
ttgaatatac

SEQ ID NO: 160694 - DNA, 11 bp, Unknown
  misc_feature (1)..( 11): Result.004 file - promoters50/1025468
aaaaaaaacac

SEQ ID NO: 160695 - DNA, 11 bp, Unknown
  misc_feature (1)..( 11): Result.004 file - promoters50/1025468
cttagaaacac

SEQ ID NO: 160696 - DNA, 11 bp, Unknown
  misc_feature (1)..( 11): Result.004 file - promoters50/1025468
aaagaaaacaa

SEQ ID NO: 160697 - DNA, 11 bp, Unknown
  misc_feature (1)..( 11): Result.004 file - promoters50/1025468
gaaaaatacat

SEQ ID NO: 160698 - DNA, 11 bp, Unknown
  misc_feature (1)..( 11): Result.004 file - promoters50/1025468
gtgaaaaacgt

SEQ ID NO: 160699 - DNA, 11 bp, Unknown
  misc_feature (1)..( 11): Result.004 file - promoters50/1025471
aatgaaaatat

SEQ ID NO: 160700 - DNA, 10 bp, Unknown
  misc_feature (1)..( 10): Result.004 file - promoters50/1025471
tataaaaaaa

SEQ ID NO: 160701 - DNA, 10 bp, Unknown
  misc_feature (1)..( 10): Result.004 file - promoters50/1025471
gttaaaaaag

SEQ ID NO: 160702 - DNA, 10 bp, Unknown
  misc_feature (1)..( 10): Result.004 file - promoters50/1025471
attaataaat

SEQ ID NO: 160703 - DNA, 10 bp, Unknown
  misc_feature (1)..( 10): Result.004 file - promoters50/1025471
ttcaaaaaag

SEQ ID NO: 160704 - DNA, 10 bp, Unknown
  misc_feature (1)..( 10): Result.004 file - promoters50/1025471
aagaataaaa

SEQ ID NO: 160705 - DNA, 10 bp, Unknown
  misc_feature (1)..( 10): Result.004 file - promoters50/1025471
tttaacaaac

SEQ ID NO: 160706 - DNA, 10 bp, Unknown
  misc_feature (1)..( 10): Result.004 file - promoters50/1025491
attaatgaat

SEQ ID NO: 160707 - DNA, 11 bp, Unknown
  misc_feature (1)..( 11): Result.004 file - promoters50/1025491
catatctaaat

SEQ ID NO: 160708 - DNA, 11 bp, Unknown
  misc_feature (1)..( 11): Result.004 file - promoters50/1025491
tttttctaaaa

SEQ ID NO: 160709 - DNA, 11 bp, Unknown
  misc_feature (1)..( 11): Result.004 file - promoters50/1025491
ttttgctaaaa

SEQ ID NO: 160710 - DNA, 11 bp, Unknown
  misc_feature (1)..( 11): Result.004 file - promoters50/1025491
atctgctaatg

SEQ ID NO: 160711 - DNA, 10 bp, Unknown
  misc_feature (1)..( 10): Result.004 file - promoters50/1025491
tcgattcttt

SEQ ID NO: 160712 - DNA, 10 bp, Unknown
  misc_feature (1)..( 10): Result.004 file - promoters50/1025491
acaatttttt

SEQ ID NO: 160713 - DNA, 10 bp, Unknown
  misc_feature (1)..( 10): Result.004 file - promoters50/1025491
tcaattttgc

SEQ ID NO: 160714 - DNA, 10 bp, Unknown
  misc_feature (1)..( 10): Result.004 file - promoters50/1025491
acaattttat

SEQ ID NO: 160715 - DNA, 7 bp, Unknown
  misc_feature (1)..( 7): Result.004 file - promoters50/1025491
attctat

SEQ ID NO: 160716 - DNA, 7 bp, Unknown
  misc_feature (1)..( 7): Result.004 file - promoters50/1025491
attctat

SEQ ID NO: 160717 - DNA, 7 bp, Unknown
  misc_feature (1)..( 7): Result.004 file - promoters50/1025491
attatat

SEQ ID NO: 160718 - DNA, 7 bp, Unknown
  misc_feature (1)..( 7): Result.004 file - promoters50/1025491
attatag

SEQ ID NO: 160719 - DNA, 14 bp, Unknown
  misc_feature (1)..( 14): Result.004 file - promoters50/1025491
tatttggaaaattt

SEQ ID NO: 160720 - DNA, 14 bp, Unknown
  misc_feature (1)..( 14): Result.004 file - promoters50/1025491
ttgattcaaaattc

SEQ ID NO: 160721 - DNA, 14 bp, Unknown
  misc_feature (1)..( 14): Result.004 file - promoters50/1025491
ttgaatcaatattt

SEQ ID NO: 160722 - DNA, 14 bp, Unknown
  misc_feature (1)..( 14): Result.004 file - promoters50/1025511
gcataataataaat

SEQ ID NO: 160723 - DNA, 9 bp, Unknown
  misc_feature (1)..( 9): Result.004 file - promoters50/1025511
aaataataa

SEQ ID NO: 160724 - DNA, 9 bp, Unknown
  misc_feature (1)..( 9): Result.004 file - promoters50/1025511
taataataa

SEQ ID NO: 160725 - DNA, 10 bp, Unknown
  misc_feature (1)..( 10): Result.004 file - promoters50/1025511
gaagtaaaga

SEQ ID NO: 160726 - DNA, 10 bp, Unknown
  misc_feature (1)..( 10): Result.004 file - promoters50/1025511
aaaataatca

SEQ ID NO: 160727 - DNA, 10 bp, Unknown
  misc_feature (1)..( 10): Result.004 file - promoters50/1025511
agaatcatgc

SEQ ID NO: 160728 - DNA, 10 bp, Unknown
  misc_feature (1)..( 10): Result.004 file - promoters50/1025515
ttagtaatag

SEQ ID NO: 160729 - DNA, 12 bp, Unknown
  misc_feature (1)..( 12): Result.004 file - promoters50/1025515
cgtttactatat

SEQ ID NO: 160730 - DNA, 12 bp, Unknown
  misc_feature (1)..( 12): Result.004 file - promoters50/1025515
acttggctatat

SEQ ID NO: 160731 - DNA, 12 bp, Unknown
  misc_feature (1)..( 12): Result.004 file - promoters50/1025515
gttttagtatat

SEQ ID NO: 160732 - DNA, 12 bp, Unknown
  misc_feature (1)..( 12): Result.004 file - promoters50/1025515
gttttggtaata

SEQ ID NO: 160733 - DNA, 12 bp, Unknown
  misc_feature (1)..( 12): Result.004 file - promoters50/1025515
gacgagctataa

SEQ ID NO: 160734 - DNA, 12 bp, Unknown
  misc_feature (1)..( 12): Result.004 file - promoters50/1025515
taagaagtgtat

SEQ ID NO: 160735 - DNA, 10 bp, Unknown
  misc_feature (1)..( 10): Result.004 file - promoters50/1025515
ctttttgtta

SEQ ID NO: 160736 - DNA, 10 bp, Unknown
  misc_feature (1)..( 10): Result.004 file - promoters50/1025515
acttttgttc

SEQ ID NO: 160737 - DNA, 10 bp, Unknown
  misc_feature (1)..( 10): Result.004 file - promoters50/1025515
tcttttttag

SEQ ID NO: 160738 - DNA, 10 bp, Unknown
  misc_feature (1)..( 10): Result.004 file - promoters50/1025515
tgttttaggt

SEQ ID NO: 160739 - DNA, 10 bp, Unknown
  misc_feature (1)..( 10): Result.004 file - promoters50/1025515
agttttaaac

SEQ ID NO: 160740 - DNA, 10 bp, Unknown
  misc_feature (1)..( 10): Result.004 file - promoters50/1025540
agtttttccg

SEQ ID NO: 160741 - DNA, 8 bp, Unknown
  misc_feature (1)..( 8): Result.004 file - promoters50/1025540
ttgtttta

SEQ ID NO: 160742 - DNA, 8 bp, Unknown
  misc_feature (1)..( 8): Result.004 file - promoters50/1025540
tcgtttta

SEQ ID NO: 160743 - DNA, 8 bp, Unknown
  misc_feature (1)..( 8): Result.004 file - promoters50/1025642
ttgtctta

SEQ ID NO: 160744 - DNA, 12 bp, Unknown
  misc_feature (1)..( 12): Result.004 file - promoters50/1025642
accattatcgct

SEQ ID NO: 160745 - DNA, 12 bp, Unknown
  misc_feature (1)..( 12): Result.004 file - promoters50/1025642
accaatattcag

SEQ ID NO: 160746 - DNA, 12 bp, Unknown
  misc_feature (1)..( 12): Result.004 file - promoters50/1025642
taaaatatttta

SEQ ID NO: 160747 - DNA, 12 bp, Unknown
  misc_feature (1)..( 12): Result.004 file - promoters50/1025642
taaaagattcga

SEQ ID NO: 160748 - DNA, 12 bp, Unknown
  misc_feature (1)..( 12): Result.004 file - promoters50/1025642
aaaactatatat

SEQ ID NO: 160749 - DNA, 12 bp, Unknown
  misc_feature (1)..( 12): Result.004 file - promoters50/1025642
gggtagattcga

SEQ ID NO: 160750 - DNA, 18 bp, Unknown
  misc_feature (1)..( 18): Result.004 file - promoters50/1025642
taatgatttagtatagag

SEQ ID NO: 160751 - DNA, 18 bp, Unknown
  misc_feature (1)..( 18): Result.004 file - promoters50/1025642
ttttaagaaagtatataa

SEQ ID NO: 160752 - DNA, 18 bp, Unknown
  misc_feature (1)..( 18): Result.004 file - promoters50/1025642
ttgcatattattattcta

SEQ ID NO: 160753 - DNA, 18 bp, Unknown
  misc_feature (1)..( 18): Result.004 file - promoters50/1025642
ttttaaaaaactatatat

SEQ ID NO: 160754 - DNA, 19 bp, Unknown
  misc_feature (1)..( 19): Result.004 file - promoters50/1025642
ttcgataaaagctaatgtt

SEQ ID NO: 160755 - DNA, 19 bp, Unknown
  misc_feature (1)..( 19): Result.004 file - promoters50/1025642
aaaatccatgcctttaaaa

SEQ ID NO: 160756 - DNA, 18 bp, Unknown
  misc_feature (1)..( 18): Result.004 file - promoters50/1025642
taggaaatattttattca

SEQ ID NO: 160757 - DNA, 18 bp, Unknown
  misc_feature (1)..( 18): Result.004 file - promoters50/1025642
tagaacaccatttattaa

SEQ ID NO: 160758 - DNA, 18 bp, Unknown
  misc_feature (1)..( 18): Result.004 file - promoters50/1025642
gaaatcataattaataaa

SEQ ID NO: 160759 - DNA, 18 bp, Unknown
  misc_feature (1)..( 18): Result.004 file - promoters50/1025642
tactatataatgaatatt

SEQ ID NO: 160760 - DNA, 18 bp, Unknown
  misc_feature (1)..( 18): Result.004 file - promoters50/1025642
gaaaacatacttaatcgg

SEQ ID NO: 160761 - DNA, 18 bp, Unknown
  misc_feature (1)..( 18): Result.004 file - promoters50/1025642
atacatgatttgaataaa

SEQ ID NO: 160762 - DNA, 18 bp, Unknown
  misc_feature (1)..( 18): Result.004 file - promoters50/1025642
atgatgatgatgaatgtg

SEQ ID NO: 160763 - DNA, 11 bp, Unknown
  misc_feature (1)..( 11): Result.004 file - promoters50/1025642
attttgaaaaa

SEQ ID NO: 160764 - DNA, 11 bp, Unknown
  misc_feature (1)..( 11): Result.004 file - promoters50/1025642
tcattgaaatg

SEQ ID NO: 160765 - DNA, 11 bp, Unknown
  misc_feature (1)..( 11): Result.004 file - promoters50/1025642
atttttaaatt

SEQ ID NO: 160766 - DNA, 11 bp, Unknown
  misc_feature (1)..( 11): Result.004 file - promoters50/1025642
attcttataac

SEQ ID NO: 160767 - DNA, 11 bp, Unknown
  misc_feature (1)..( 11): Result.004 file - promoters50/1025642
atcttcaattt

SEQ ID NO: 160768 - DNA, 11 bp, Unknown
  misc_feature (1)..( 11): Result.004 file - promoters50/1025642
atttttggctg

SEQ ID NO: 160769 - DNA, 17 bp, Unknown
  misc_feature (1)..( 17): Result.004 file - promoters50/1025642
atattcagaattaatat

SEQ ID NO: 160770 - DNA, 17 bp, Unknown
  misc_feature (1)..( 17): Result.004 file - promoters50/1025642
gaaatcataattaataa

SEQ ID NO: 160771 - DNA, 17 bp, Unknown
  misc_feature (1)..( 17): Result.004 file - promoters50/1025642
tactatataatgaatat

SEQ ID NO: 160772 - DNA, 17 bp, Unknown
  misc_feature (1)..( 17): Result.004 file - promoters50/1025642
acaccatttattaacat

SEQ ID NO: 160773 - DNA, 17 bp, Unknown
  misc_feature (1)..( 17): Result.004 file - promoters50/1025642
gaaaacatacttaatcg

SEQ ID NO: 160774 - DNA, 17 bp, Unknown
  misc_feature (1)..( 17): Result.004 file - promoters50/1025642
gtatacatgatttgaat

SEQ ID NO: 160775 - DNA, 17 bp, Unknown
  misc_feature (1)..( 17): Result.004 file - promoters50/1025642
atgatgatgatgaatgt

SEQ ID NO: 160776 - DNA, 18 bp, Unknown
  misc_feature (1)..( 18): Result.004 file - promoters50/1025642
tagctaacaaataatttt

SEQ ID NO: 160777 - DNA, 18 bp, Unknown
  misc_feature (1)..( 18): Result.004 file - promoters50/1025642
attttaagaaagtatata

SEQ ID NO: 160778 - DNA, 18 bp, Unknown
  misc_feature (1)..( 18): Result.004 file - promoters50/1025642
tttttaaaaaactatata

SEQ ID NO: 160779 - DNA, 18 bp, Unknown
  misc_feature (1)..( 18): Result.004 file - promoters50/1025642
ttcgataaaagctaatgt

SEQ ID NO: 160780 - DNA, 18 bp, Unknown
  misc_feature (1)..( 18): Result.004 file - promoters50/1025642
tttttatctgagaaattt

SEQ ID NO: 160781 - DNA, 18 bp, Unknown
  misc_feature (1)..( 18): Result.004 file - promoters50/1025683
cctttaaaagattcgact

SEQ ID NO: 160782 - DNA, 9 bp, Unknown
  misc_feature (1)..( 9): Result.004 file - promoters50/1025683
agaaaatta

SEQ ID NO: 160783 - DNA, 9 bp, Unknown
  misc_feature (1)..( 9): Result.004 file - promoters50/1025683
agagaatac

SEQ ID NO: 160784 - DNA, 9 bp, Unknown
  misc_feature (1)..( 9): Result.004 file - promoters50/1025683
agaacattg

SEQ ID NO: 160785 - DNA, 9 bp, Unknown
  misc_feature (1)..( 9): Result.004 file - promoters50/1025683
acaaaaaaa

SEQ ID NO: 160786 - DNA, 9 bp, Unknown
  misc_feature (1)..( 9): Result.004 file - promoters50/1025683
tctacattg

SEQ ID NO: 160787 - DNA, 9 bp, Unknown
  misc_feature (1)..( 9): Result.004 file - promoters50/1025683
tgaacatca

SEQ ID NO: 160788 - DNA, 9 bp, Unknown
  misc_feature (1)..( 9): Result.004 file - promoters50/1025683
cgaacatgg

SEQ ID NO: 160789 - DNA, 11 bp, Unknown
  misc_feature (1)..( 11): Result.004 file - promoters50/1025683
cctatatataa

SEQ ID NO: 160790 - DNA, 11 bp, Unknown
  misc_feature (1)..( 11): Result.004 file - promoters50/1025683
cctttataaaa

SEQ ID NO: 160791 - DNA, 11 bp, Unknown
  misc_feature (1)..( 11): Result.004 file - promoters50/1025683
gttatataaat

SEQ ID NO: 160792 - DNA, 11 bp, Unknown
  misc_feature (1)..( 11): Result.004 file - promoters50/1025683
cttataaataa

SEQ ID NO: 160793 - DNA, 11 bp, Unknown
  misc_feature (1)..( 11): Result.004 file - promoters50/1025683
agtatataaat

SEQ ID NO: 160794 - DNA, 11 bp, Unknown
  misc_feature (1)..( 11): Result.004 file - promoters50/1025683
actataaaact

SEQ ID NO: 160795 - DNA, 12 bp, Unknown
  misc_feature (1)..( 12): Result.004 file - promoters50/1025683
aattttaatatt

SEQ ID NO: 160796 - DNA, 12 bp, Unknown
  misc_feature (1)..( 12): Result.004 file - promoters50/1025683
gattataaatca

SEQ ID NO: 160797 - DNA, 13 bp, Unknown
  misc_feature (1)..( 13): Result.004 file - promoters50/1025683
ctctatgaatcat

SEQ ID NO: 160798 - DNA, 13 bp, Unknown
  misc_feature (1)..( 13): Result.004 file - promoters50/1025683
gattatccctaac

SEQ ID NO: 160799 - DNA, 13 bp, Unknown
  misc_feature (1)..( 13): Result.004 file - promoters50/1025683
tggtaataatgta

SEQ ID NO: 160800 - DNA, 9 bp, Unknown
  misc_feature (1)..( 9): Result.004 file - promoters50/1025729
aataattta

SEQ ID NO: 160801 - DNA, 6 bp, Unknown
  misc_feature (1)..( 6): Result.004 file - promoters50/1025729
tatata

SEQ ID NO: 160802 - DNA, 6 bp, Unknown
  misc_feature (1)..( 6): Result.004 file - promoters50/1025729
tatata

SEQ ID NO: 160803 - DNA, 6 bp, Unknown
  misc_feature (1)..( 6): Result.004 file - promoters50/1025744
tatata

SEQ ID NO: 160804 - DNA, 13 bp, Unknown
  misc_feature (1)..( 13): Result.004 file - promoters50/1025744
acagagaatattc

SEQ ID NO: 160805 - DNA, 13 bp, Unknown
  misc_feature (1)..( 13): Result.004 file - promoters50/1025744
tctttgaatcttc

SEQ ID NO: 160806 - DNA, 13 bp, Unknown
  misc_feature (1)..( 13): Result.004 file - promoters50/1025744
ataagtaattttc

SEQ ID NO: 160807 - DNA, 13 bp, Unknown
  misc_feature (1)..( 13): Result.004 file - promoters50/1025744
ttctccaatcttc

SEQ ID NO: 160808 - DNA, 13 bp, Unknown
  misc_feature (1)..( 13): Result.004 file - promoters50/1025744
cttttgagtataa

SEQ ID NO: 160809 - DNA, 13 bp, Unknown
  misc_feature (1)..( 13): Result.004 file - promoters50/1025744
gttttgaagctta

SEQ ID NO: 160810 - DNA, 13 bp, Unknown
  misc_feature (1)..( 13): Result.004 file - promoters50/1025744
gtttagaacatct

SEQ ID NO: 160811 - DNA, 13 bp, Unknown
  misc_feature (1)..( 13): Result.004 file - promoters50/1025744
aattaaaacataa

SEQ ID NO: 160812 - DNA, 13 bp, Unknown
  misc_feature (1)..( 13): Result.004 file - promoters50/1025744
ttataatacaaac

SEQ ID NO: 160813 - DNA, 13 bp, Unknown
  misc_feature (1)..( 13): Result.004 file - promoters50/1025744
gtttagaacatct

SEQ ID NO: 160814 - DNA, 13 bp, Unknown
  misc_feature (1)..( 13): Result.004 file - promoters50/1025744
aaaaaaaaaataa

SEQ ID NO: 160815 - DNA, 13 bp, Unknown
  misc_feature (1)..( 13): Result.004 file - promoters50/1025744
ttgtgaaaaatcg

SEQ ID NO: 160816 - DNA, 13 bp, Unknown
  misc_feature (1)..( 13): Result.004 file - promoters50/1025791
gttttgaagctta

SEQ ID NO: 160817 - DNA, 13 bp, Unknown
  misc_feature (1)..( 13): Result.004 file - promoters50/1025791
cattagtttcctg

SEQ ID NO: 160818 - DNA, 13 bp, Unknown
  misc_feature (1)..( 13): Result.004 file - promoters50/1025791
cccaagtgtccta

SEQ ID NO: 160819 - DNA, 13 bp, Unknown
  misc_feature (1)..( 13): Result.004 file - promoters50/1025791
cattcgtttagtc

SEQ ID NO: 160820 - DNA, 13 bp, Unknown
  misc_feature (1)..( 13): Result.004 file - promoters50/1025791
aattaatttcttc

SEQ ID NO: 160821 - DNA, 13 bp, Unknown
  misc_feature (1)..( 13): Result.004 file - promoters50/1025791
atttactttggaa

SEQ ID NO: 160822 - DNA, 13 bp, Unknown
  misc_feature (1)..( 13): Result.004 file - promoters50/1025791
ttaatgtttgctt

SEQ ID NO: 160823 - DNA, 19 bp, Unknown
  misc_feature (1)..( 19): Result.004 file - promoters50/1025791
ataattgaagctctccctt

SEQ ID NO: 160824 - DNA, 19 bp, Unknown
  misc_feature (1)..( 19): Result.004 file - promoters50/1025791
gtgctaagagctttccatt

SEQ ID NO: 160825 - DNA, 19 bp, Unknown
  misc_feature (1)..( 19): Result.004 file - promoters50/1025791
tgttaaagagcttattaag

SEQ ID NO: 160826 - DNA, 19 bp, Unknown
  misc_feature (1)..( 19): Result.004 file - promoters50/1025791
agaagaagagcgtttaacc

SEQ ID NO: 160827 - DNA, 19 bp, Unknown
  misc_feature (1)..( 19): Result.004 file - promoters50/1025791
agacgaagagaacctgaga

SEQ ID NO: 160828 - DNA, 19 bp, Unknown
  misc_feature (1)..( 19): Result.004 file - promoters50/1025791
ccaagaagaaaaaaattgt

SEQ ID NO: 160829 - DNA, 19 bp, Unknown
  misc_feature (1)..( 19): Result.004 file - promoters50/1025883
tttacgctcactttctatt

SEQ ID NO: 160830 - DNA, 9 bp, Unknown
  misc_feature (1)..( 9): Result.004 file - promoters50/1025883
ctctctata

SEQ ID NO: 160831 - DNA, 9 bp, Unknown
  misc_feature (1)..( 9): Result.004 file - promoters50/1025883
ctcactaag

SEQ ID NO: 160832 - DNA, 9 bp, Unknown
  misc_feature (1)..( 9): Result.004 file - promoters50/1025883
aacacaaag

SEQ ID NO: 160833 - DNA, 8 bp, Unknown
  misc_feature (1)..( 8): Result.004 file - promoters50/1025883
ccacaagg

SEQ ID NO: 160834 - DNA, 8 bp, Unknown
  misc_feature (1)..( 8): Result.004 file - promoters50/1025883
ccagaagg

SEQ ID NO: 160835 - DNA, 8 bp, Unknown
  misc_feature (1)..( 8): Result.004 file - promoters50/1026000
ccagcagg

SEQ ID NO: 160836 - DNA, 7 bp, Unknown
  misc_feature (1)..( 7): Result.004 file - promoters50/1026000
ttgaaaa

SEQ ID NO: 160837 - DNA, 7 bp, Unknown
  misc_feature (1)..( 7): Result.004 file - promoters50/1026000
ttgaaat

SEQ ID NO: 160838 - DNA, 7 bp, Unknown
  misc_feature (1)..( 7): Result.004 file - promoters50/1026000
tttaaaa

SEQ ID NO: 160839 - DNA, 8 bp, Unknown
  misc_feature (1)..( 8): Result.004 file - promoters50/1026000
tttgaaat

SEQ ID NO: 160840 - DNA, 8 bp, Unknown
  misc_feature (1)..( 8): Result.004 file - promoters50/1026000
tttcaaat

SEQ ID NO: 160841 - DNA, 8 bp, Unknown
  misc_feature (1)..( 8): Result.004 file - promoters50/1026000
actcaaat

SEQ ID NO: 160842 - DNA, 9 bp, Unknown
  misc_feature (1)..( 9): Result.004 file - promoters50/1026000
atggatact

SEQ ID NO: 160843 - DNA, 9 bp, Unknown
  misc_feature (1)..( 9): Result.004 file - promoters50/1026000
atggattag

SEQ ID NO: 160844 - DNA, 9 bp, Unknown
  misc_feature (1)..( 9): Result.004 file - promoters50/1026000
atggttact

SEQ ID NO: 160845 - DNA, 8 bp, Unknown
  misc_feature (1)..( 8): Result.004 file - promoters50/1026000
aaagtagc

SEQ ID NO: 160846 - DNA, 8 bp, Unknown
  misc_feature (1)..( 8): Result.004 file - promoters50/1026000
gaaggagc

SEQ ID NO: 160847 - DNA, 8 bp, Unknown
  misc_feature (1)..( 8): Result.004 file - promoters50/1026000
gaaggaaa

SEQ ID NO: 160848 - DNA, 7 bp, Unknown
  misc_feature (1)..( 7): Result.004 file - promoters50/1026000
caaagag

SEQ ID NO: 160849 - DNA, 7 bp, Unknown
  misc_feature (1)..( 7): Result.004 file - promoters50/1026000
taaagag

SEQ ID NO: 160850 - DNA, 7 bp, Unknown
  misc_feature (1)..( 7): Result.004 file - promoters50/1026014
taaagac

SEQ ID NO: 160851 - DNA, 13 bp, Unknown
  misc_feature (1)..( 13): Result.004 file - promoters50/1026014
cactgattttgga

SEQ ID NO: 160852 - DNA, 13 bp, Unknown
  misc_feature (1)..( 13): Result.004 file - promoters50/1026014
aaaagattttata

SEQ ID NO: 160853 - DNA, 13 bp, Unknown
  misc_feature (1)..( 13): Result.004 file - promoters50/1026014
tactgattttaga

SEQ ID NO: 160854 - DNA, 13 bp, Unknown
  misc_feature (1)..( 13): Result.004 file - promoters50/1026014
taataattatata

SEQ ID NO: 160855 - DNA, 13 bp, Unknown
  misc_feature (1)..( 13): Result.004 file - promoters50/1026014
actttattttata

SEQ ID NO: 160856 - DNA, 13 bp, Unknown
  misc_feature (1)..( 13): Result.004 file - promoters50/1026014
taaaaatttacac

SEQ ID NO: 160857 - DNA, 13 bp, Unknown
  misc_feature (1)..( 13): Result.004 file - promoters50/1026014
taaacattaaatt

SEQ ID NO: 160858 - DNA, 15 bp, Unknown
  misc_feature (1)..( 15): Result.004 file - promoters50/1026014
tagatgtcatattcg

SEQ ID NO: 160859 - DNA, 15 bp, Unknown
  misc_feature (1)..( 15): Result.004 file - promoters50/1026014
tttgtgtcacattcc

SEQ ID NO: 160860 - DNA, 15 bp, Unknown
  misc_feature (1)..( 15): Result.004 file - promoters50/1026014
atcttttcaaattgt

SEQ ID NO: 160861 - DNA, 15 bp, Unknown
  misc_feature (1)..( 15): Result.004 file - promoters50/1026014
ttttgctcagatttc

SEQ ID NO: 160862 - DNA, 15 bp, Unknown
  misc_feature (1)..( 15): Result.004 file - promoters50/1026014
tttatgttacattta

SEQ ID NO: 160863 - DNA, 15 bp, Unknown
  misc_feature (1)..( 15): Result.004 file - promoters50/1026014
gatgaattaaatttg

SEQ ID NO: 160864 - DNA, 15 bp, Unknown
  misc_feature (1)..( 15): Result.004 file - promoters50/1026014
ttacataaaaatttg

SEQ ID NO: 160865 - DNA, 15 bp, Unknown
  misc_feature (1)..( 15): Result.004 file - promoters50/1026014
gtaaaaaaaattcac

SEQ ID NO: 160866 - DNA, 15 bp, Unknown
  misc_feature (1)..( 15): Result.004 file - promoters50/1026014
tcaaaataaacccgt

SEQ ID NO: 160867 - DNA, 15 bp, Unknown
  misc_feature (1)..( 15): Result.004 file - promoters50/1026014
ctaaaaaaacatttt

SEQ ID NO: 160868 - DNA, 15 bp, Unknown
  misc_feature (1)..( 15): Result.004 file - promoters50/1026014
gtaaaataaagtcac

SEQ ID NO: 160869 - DNA, 15 bp, Unknown
  misc_feature (1)..( 15): Result.004 file - promoters50/1026014
ccaaaaaagtaaaaa

SEQ ID NO: 160870 - DNA, 15 bp, Unknown
  misc_feature (1)..( 15): Result.004 file - promoters50/1026014
caaaaagaactaact

SEQ ID NO: 160871 - DNA, 13 bp, Unknown
  misc_feature (1)..( 13): Result.004 file - promoters50/1026014
tttcataaatcca

SEQ ID NO: 160872 - DNA, 13 bp, Unknown
  misc_feature (1)..( 13): Result.004 file - promoters50/1026014
ttttataatataa

SEQ ID NO: 160873 - DNA, 13 bp, Unknown
  misc_feature (1)..( 13): Result.004 file - promoters50/1026014
ttttataggtccc

SEQ ID NO: 160874 - DNA, 13 bp, Unknown
  misc_feature (1)..( 13): Result.004 file - promoters50/1026014
atttctaataatt

SEQ ID NO: 160875 - DNA, 13 bp, Unknown
  misc_feature (1)..( 13): Result.004 file - promoters50/1026014
attcgtaaaaatt

SEQ ID NO: 160876 - DNA, 13 bp, Unknown
  misc_feature (1)..( 13): Result.004 file - promoters50/1026014
tcctttaaacatt

SEQ ID NO: 160877 - DNA, 14 bp, Unknown
  misc_feature (1)..( 14): Result.004 file - promoters50/1026014
acttaaaacttggt

SEQ ID NO: 160878 - DNA, 14 bp, Unknown
  misc_feature (1)..( 14): Result.004 file - promoters50/1026014
tattaaaatatttt

SEQ ID NO: 160879 - DNA, 14 bp, Unknown
  misc_feature (1)..( 14): Result.004 file - promoters50/1026014
ctttataatgaaac

SEQ ID NO: 160880 - DNA, 14 bp, Unknown
  misc_feature (1)..( 14): Result.004 file - promoters50/1026014
ctttttaaatggcg

SEQ ID NO: 160881 - DNA, 15 bp, Unknown
  misc_feature (1)..( 15): Result.004 file - promoters50/1026014
tgactaaaattctct

SEQ ID NO: 160882 - DNA, 15 bp, Unknown
  misc_feature (1)..( 15): Result.004 file - promoters50/1026039
ttttgacaaaatttc

SEQ ID NO: 160883 - DNA, 11 bp, Unknown
  misc_feature (1)..( 11): Result.004 file - promoters50/1026039
actagtataca

SEQ ID NO: 160884 - DNA, 11 bp, Unknown
  misc_feature (1)..( 11): Result.004 file - promoters50/1026039
actagttatga

SEQ ID NO: 160885 - DNA, 11 bp, Unknown
  misc_feature (1)..( 11): Result.004 file - promoters50/1026039
tctattatttt

SEQ ID NO: 160886 - DNA, 11 bp, Unknown
  misc_feature (1)..( 11): Result.004 file - promoters50/1026039
tctattatagt

SEQ ID NO: 160887 - DNA, 11 bp, Unknown
  misc_feature (1)..( 11): Result.004 file - promoters50/1026039
atcattttttt

SEQ ID NO: 160888 - DNA, 9 bp, Unknown
  misc_feature (1)..( 9): Result.004 file - promoters50/1026039
gattatatt

SEQ ID NO: 160889 - DNA, 9 bp, Unknown
  misc_feature (1)..( 9): Result.004 file - promoters50/1026039
cattgtatt

SEQ ID NO: 160890 - DNA, 9 bp, Unknown
  misc_feature (1)..( 9): Result.004 file - promoters50/1026039
tattttgtc

SEQ ID NO: 160891 - DNA, 9 bp, Unknown
  misc_feature (1)..( 9): Result.004 file - promoters50/1026039
atttatata

SEQ ID NO: 160892 - DNA, 9 bp, Unknown
  misc_feature (1)..( 9): Result.004 file - promoters50/1026160
cattacata

SEQ ID NO: 160893 - DNA, 11 bp, Unknown
  misc_feature (1)..( 11): Result.004 file - promoters50/1026160
aagaaacaaag

SEQ ID NO: 160894 - DNA, 11 bp, Unknown
  misc_feature (1)..( 11): Result.004 file - promoters50/1026160
gccaaacaaca

SEQ ID NO: 160895 - DNA, 11 bp, Unknown
  misc_feature (1)..( 11): Result.004 file - promoters50/1026160
aagaaaaaaaa

SEQ ID NO: 160896 - DNA, 11 bp, Unknown
  misc_feature (1)..( 11): Result.004 file - promoters50/1026160
tggtaacaaca

SEQ ID NO: 160897 - DNA, 11 bp, Unknown
  misc_feature (1)..( 11): Result.004 file - promoters50/1026160
tgccaaaaacc

SEQ ID NO: 160898 - DNA, 11 bp, Unknown
  misc_feature (1)..( 11): Result.004 file - promoters50/1026160
atcaaaaaatt

SEQ ID NO: 160899 - DNA, 11 bp, Unknown
  misc_feature (1)..( 11): Result.004 file - promoters50/1026160
tataaaaaatt

SEQ ID NO: 160900 - DNA, 13 bp, Unknown
  misc_feature (1)..( 13): Result.004 file - promoters50/1026160
tataaaaattttt

SEQ ID NO: 160901 - DNA, 13 bp, Unknown
  misc_feature (1)..( 13): Result.004 file - promoters50/1026160
aataaaagtttgt

SEQ ID NO: 160902 - DNA, 13 bp, Unknown
  misc_feature (1)..( 13): Result.004 file - promoters50/1026160
acaaagaattttt

SEQ ID NO: 160903 - DNA, 13 bp, Unknown
  misc_feature (1)..( 13): Result.004 file - promoters50/1026160
aataaaccgaggt

SEQ ID NO: 160904 - DNA, 13 bp, Unknown
  misc_feature (1)..( 13): Result.004 file - promoters50/1026160
cataacagttgta

SEQ ID NO: 160905 - DNA, 13 bp, Unknown
  misc_feature (1)..( 13): Result.004 file - promoters50/1026160
gttcaaactttca

SEQ ID NO: 160906 - DNA, 13 bp, Unknown
  misc_feature (1)..( 13): Result.004 file - promoters50/1026235
ttctgaagtttct

SEQ ID NO: 160907 - DNA, 7 bp, Unknown
  misc_feature (1)..( 7): Result.004 file - promoters50/1026235
ttttaaa

SEQ ID NO: 160908 - DNA, 7 bp, Unknown
  misc_feature (1)..( 7): Result.004 file - promoters50/1026235
tttgaaa

SEQ ID NO: 160909 - DNA, 7 bp, Unknown
  misc_feature (1)..( 7): Result.004 file - promoters50/1026235
ttgtaag

SEQ ID NO: 160910 - DNA, 10 bp, Unknown
  misc_feature (1)..( 10): Result.004 file - promoters50/1026235
tctttcttca

SEQ ID NO: 160911 - DNA, 10 bp, Unknown
  misc_feature (1)..( 10): Result.004 file - promoters50/1026235
aaattcttca

SEQ ID NO: 160912 - DNA, 10 bp, Unknown
  misc_feature (1)..( 10): Result.004 file - promoters50/1026412
aaagtcttgg

SEQ ID NO: 160913 - DNA, 13 bp, Unknown
  misc_feature (1)..( 13): Result.004 file - promoters50/1026412
aaaagaactccta

SEQ ID NO: 160914 - DNA, 13 bp, Unknown
  misc_feature (1)..( 13): Result.004 file - promoters50/1026412
taaataacttcta

SEQ ID NO: 160915 - DNA, 14 bp, Unknown
  misc_feature (1)..( 14): Result.004 file - promoters50/1026412
caaacgaaagacac

SEQ ID NO: 160916 - DNA, 14 bp, Unknown
  misc_feature (1)..( 14): Result.004 file - promoters50/1026412
ccacgaaactacta

SEQ ID NO: 160917 - DNA, 14 bp, Unknown
  misc_feature (1)..( 14): Result.004 file - promoters50/1026412
ataacaaactacag

SEQ ID NO: 160918 - DNA, 14 bp, Unknown
  misc_feature (1)..( 14): Result.004 file - promoters50/1026416
accggtcactacac

SEQ ID NO: 160919 - DNA, 9 bp, Unknown
  misc_feature (1)..( 9): Result.004 file - promoters50/1026416
ttttggttt

SEQ ID NO: 160920 - DNA, 9 bp, Unknown
  misc_feature (1)..( 9): Result.004 file - promoters50/1026416
ttttggaga

SEQ ID NO: 160921 - DNA, 9 bp, Unknown
  misc_feature (1)..( 9): Result.004 file - promoters50/1026416
ttttggtga

SEQ ID NO: 160922 - DNA, 9 bp, Unknown
  misc_feature (1)..( 9): Result.004 file - promoters50/1026416
gtttggttt

SEQ ID NO: 160923 - DNA, 6 bp, Unknown
  misc_feature (1)..( 6): Result.004 file - promoters50/1026416
aaagaa

SEQ ID NO: 160924 - DNA, 6 bp, Unknown
  misc_feature (1)..( 6): Result.004 file - promoters50/1026416
aaagaa

SEQ ID NO: 160925 - DNA, 6 bp, Unknown
  misc_feature (1)..( 6): Result.004 file - promoters50/1026416
aaagaa

SEQ ID NO: 160926 - DNA, 7 bp, Unknown
  misc_feature (1)..( 7): Result.004 file - promoters50/1026416
atttaat

SEQ ID NO: 160927 - DNA, 7 bp, Unknown
  misc_feature (1)..( 7): Result.004 file - promoters50/1026416
atttaaa

SEQ ID NO: 160928 - DNA, 7 bp, Unknown
  misc_feature (1)..( 7): Result.004 file - promoters50/1026416
ttttaaa

SEQ ID NO: 160929 - DNA, 11 bp, Unknown
  misc_feature (1)..( 11): Result.004 file - promoters50/1026416
aaaaagaaaga

SEQ ID NO: 160930 - DNA, 11 bp, Unknown
  misc_feature (1)..( 11): Result.004 file - promoters50/1026416
ggaaataaaga

SEQ ID NO: 160931 - DNA, 11 bp, Unknown
  misc_feature (1)..( 11): Result.004 file - promoters50/1026419
aaaaacaaacg

SEQ ID NO: 160932 - DNA, 10 bp, Unknown
  misc_feature (1)..( 10): Result.004 file - promoters50/1026419
gaaacaagta

SEQ ID NO: 160933 - DNA, 10 bp, Unknown
  misc_feature (1)..( 10): Result.004 file - promoters50/1026419
aaaataagta

SEQ ID NO: 160934 - DNA, 10 bp, Unknown
  misc_feature (1)..( 10): Result.004 file - promoters50/1026419
gaaagaagta

SEQ ID NO: 160935 - DNA, 10 bp, Unknown
  misc_feature (1)..( 10): Result.004 file - promoters50/1026419
gaatcaaagt

SEQ ID NO: 160936 - DNA, 9 bp, Unknown
  misc_feature (1)..( 9): Result.004 file - promoters50/1026419
ttgggtcat

SEQ ID NO: 160937 - DNA, 9 bp, Unknown
  misc_feature (1)..( 9): Result.004 file - promoters50/1026419
ctggttcat

SEQ ID NO: 160938 - DNA, 9 bp, Unknown
  misc_feature (1)..( 9): Result.004 file - promoters50/1026419
ttgggtttc

SEQ ID NO: 160939 - DNA, 9 bp, Unknown
  misc_feature (1)..( 9): Result.004 file - promoters50/1026439
gtgggttcg

SEQ ID NO: 160940 - DNA, 9 bp, Unknown
  misc_feature (1)..( 9): Result.004 file - promoters50/1026439
atatttcag

SEQ ID NO: 160941 - DNA, 9 bp, Unknown
  misc_feature (1)..( 9): Result.004 file - promoters50/1026439
aaattacag

SEQ ID NO: 160942 - DNA, 9 bp, Unknown
  misc_feature (1)..( 9): Result.004 file - promoters50/1026514
aaaatacaa

SEQ ID NO: 160943 - DNA, 8 bp, Unknown
  misc_feature (1)..( 8): Result.004 file - promoters50/1026514
cataaaag

SEQ ID NO: 160944 - DNA, 8 bp, Unknown
  misc_feature (1)..( 8): Result.004 file - promoters50/1026514
catcaaat

SEQ ID NO: 160945 - DNA, 8 bp, Unknown
  misc_feature (1)..( 8): Result.004 file - promoters50/1026514
tttcaaat

SEQ ID NO: 160946 - DNA, 14 bp, Unknown
  misc_feature (1)..( 14): Result.004 file - promoters50/1026514
taagttgaataatt

SEQ ID NO: 160947 - DNA, 14 bp, Unknown
  misc_feature (1)..( 14): Result.004 file - promoters50/1026514
taaattgactgatc

SEQ ID NO: 160948 - DNA, 14 bp, Unknown
  misc_feature (1)..( 14): Result.004 file - promoters50/1026514
aaagttgaagaatt

SEQ ID NO: 160949 - DNA, 14 bp, Unknown
  misc_feature (1)..( 14): Result.004 file - promoters50/1026514
atagttgactttga

SEQ ID NO: 160950 - DNA, 8 bp, Unknown
  misc_feature (1)..( 8): Result.004 file - promoters50/1026514
gattgatg

SEQ ID NO: 160951 - DNA, 8 bp, Unknown
  misc_feature (1)..( 8): Result.004 file - promoters50/1026514
cattcatg

SEQ ID NO: 160952 - DNA, 8 bp, Unknown
  misc_feature (1)..( 8): Result.004 file - promoters50/1026514
cattcatc

SEQ ID NO: 160953 - DNA, 11 bp, Unknown
  misc_feature (1)..( 11): Result.004 file - promoters50/1026514
gtcaaaaataa

SEQ ID NO: 160954 - DNA, 11 bp, Unknown
  misc_feature (1)..( 11): Result.004 file - promoters50/1026514
tacaaaattaa

SEQ ID NO: 160955 - DNA, 11 bp, Unknown
  misc_feature (1)..( 11): Result.004 file - promoters50/1026514
tactaaattga

SEQ ID NO: 160956 - DNA, 10 bp, Unknown
  misc_feature (1)..( 10): Result.004 file - promoters50/1026514
ttttataaaa

SEQ ID NO: 160957 - DNA, 10 bp, Unknown
  misc_feature (1)..( 10): Result.004 file - promoters50/1026514
ttttataaat

SEQ ID NO: 160958 - DNA, 10 bp, Unknown
  misc_feature (1)..( 10): Result.004 file - promoters50/1026514
aattaaaaat

SEQ ID NO: 160959 - DNA, 8 bp, Unknown
  misc_feature (1)..( 8): Result.004 file - promoters50/1026514
attgataa

SEQ ID NO: 160960 - DNA, 8 bp, Unknown
  misc_feature (1)..( 8): Result.004 file - promoters50/1026514
attgctaa

SEQ ID NO: 160961 - DNA, 8 bp, Unknown
  misc_feature (1)..( 8): Result.004 file - promoters50/1026514
catgataa

SEQ ID NO: 160962 - DNA, 9 bp, Unknown
  misc_feature (1)..( 9): Result.004 file - promoters50/1026514
aaaaaccca

SEQ ID NO: 160963 - DNA, 9 bp, Unknown
  misc_feature (1)..( 9): Result.004 file - promoters50/1026514
taaaaccca

SEQ ID NO: 160964 - DNA, 9 bp, Unknown
  misc_feature (1)..( 9): Result.004 file - promoters50/1026514
acaaagcca

SEQ ID NO: 160965 - DNA, 9 bp, Unknown
  misc_feature (1)..( 9): Result.004 file - promoters50/1026514
taacaccaa

SEQ ID NO: 160966 - DNA, 7 bp, Unknown
  misc_feature (1)..( 7): Result.004 file - promoters50/1026514
aaccaaa

SEQ ID NO: 160967 - DNA, 7 bp, Unknown
  misc_feature (1)..( 7): Result.004 file - promoters50/1026514
caccaaa

SEQ ID NO: 160968 - DNA, 7 bp, Unknown
  misc_feature (1)..( 7): Result.004 file - promoters50/1026540
caccaac

SEQ ID NO: 160969 - DNA, 9 bp, Unknown
  misc_feature (1)..( 9): Result.004 file - promoters50/1026540
cctctgtaa

SEQ ID NO: 160970 - DNA, 9 bp, Unknown
  misc_feature (1)..( 9): Result.004 file - promoters50/1026540
aatctttaa

SEQ ID NO: 160971 - DNA, 9 bp, Unknown
  misc_feature (1)..( 9): Result.004 file - promoters50/1026540
aatattttt

SEQ ID NO: 160972 - DNA, 10 bp, Unknown
  misc_feature (1)..( 10): Result.004 file - promoters50/1026540
aggaaacaga

SEQ ID NO: 160973 - DNA, 10 bp, Unknown
  misc_feature (1)..( 10): Result.004 file - promoters50/1026540
ttaaaataga

SEQ ID NO: 160974 - DNA, 10 bp, Unknown
  misc_feature (1)..( 10): Result.004 file - promoters50/1026544
ttataatatt

SEQ ID NO: 160975 - DNA, 10 bp, Unknown
  misc_feature (1)..( 10): Result.004 file - promoters50/1026544
gagatttttt

SEQ ID NO: 160976 - DNA, 10 bp, Unknown
  misc_feature (1)..( 10): Result.004 file - promoters50/1026544
tttttttttt

SEQ ID NO: 160977 - DNA, 10 bp, Unknown
  misc_feature (1)..( 10): Result.004 file - promoters50/1026544
gatatttttc

SEQ ID NO: 160978 - DNA, 11 bp, Unknown
  misc_feature (1)..( 11): Result.004 file - promoters50/1026544
aaaaattagta

SEQ ID NO: 160979 - DNA, 11 bp, Unknown
  misc_feature (1)..( 11): Result.004 file - promoters50/1026544
aaaaataagag

SEQ ID NO: 160980 - DNA, 11 bp, Unknown
  misc_feature (1)..( 11): Result.004 file - promoters50/1026544
caaaataataa

SEQ ID NO: 160981 - DNA, 9 bp, Unknown
  misc_feature (1)..( 9): Result.004 file - promoters50/1026544
aaagagaat

SEQ ID NO: 160982 - DNA, 9 bp, Unknown
  misc_feature (1)..( 9): Result.004 file - promoters50/1026544
atagaaaat

SEQ ID NO: 160983 - DNA, 9 bp, Unknown
  misc_feature (1)..( 9): Result.004 file - promoters50/1026544
atacaaagg

SEQ ID NO: 160984 - DNA, 8 bp, Unknown
  misc_feature (1)..( 8): Result.004 file - promoters50/1026544
ggcccatt

SEQ ID NO: 160985 - DNA, 8 bp, Unknown
  misc_feature (1)..( 8): Result.004 file - promoters50/1026544
ggcccaat

SEQ ID NO: 160986 - DNA, 8 bp, Unknown
  misc_feature (1)..( 8): Result.004 file - promoters50/1026544
agcccaat

SEQ ID NO: 160987 - DNA, 10 bp, Unknown
  misc_feature (1)..( 10): Result.004 file - promoters50/1026544
aacataatcc

SEQ ID NO: 160988 - DNA, 10 bp, Unknown
  misc_feature (1)..( 10): Result.004 file - promoters50/1026544
tacaaaataa

SEQ ID NO: 160989 - DNA, 10 bp, Unknown
  misc_feature (1)..( 10): Result.004 file - promoters50/1026551
aaaaaaataa

SEQ ID NO: 160990 - DNA, 10 bp, Unknown
  misc_feature (1)..( 10): Result.004 file - promoters50/1026551
ttaatttata

SEQ ID NO: 160991 - DNA, 10 bp, Unknown
  misc_feature (1)..( 10): Result.004 file - promoters50/1026551
tcaatatata

SEQ ID NO: 160992 - DNA, 10 bp, Unknown
  misc_feature (1)..( 10): Result.004 file - promoters50/1026551
ttagtttgaa

SEQ ID NO: 160993 - DNA, 10 bp, Unknown
  misc_feature (1)..( 10): Result.004 file - promoters50/1026551
ttaagttaag

SEQ ID NO: 160994 - DNA, 10 bp, Unknown
  misc_feature (1)..( 10): Result.004 file - promoters50/1026551
aagatatatc

SEQ ID NO: 160995 - DNA, 11 bp, Unknown
  misc_feature (1)..( 11): Result.004 file - promoters50/1026551
aagtataactt

SEQ ID NO: 160996 - DNA, 11 bp, Unknown
  misc_feature (1)..( 11): Result.004 file - promoters50/1026551
gcatatacctt

SEQ ID NO: 160997 - DNA, 11 bp, Unknown
  misc_feature (1)..( 11): Result.004 file - promoters50/1026551
aagtttaaaat

SEQ ID NO: 160998 - DNA, 11 bp, Unknown
  misc_feature (1)..( 11): Result.004 file - promoters50/1026551
tggtttaaaaa

SEQ ID NO: 160999 - DNA, 17 bp, Unknown
  misc_feature (1)..( 17): Result.004 file - promoters50/1026551
taaaggatgatggacca

SEQ ID NO: 161000 - DNA, 17 bp, Unknown
  misc_feature (1)..( 17): Result.004 file - promoters50/1026551
agaaggatgatggacca

SEQ ID NO: 161001 - DNA, 17 bp, Unknown
  misc_feature (1)..( 17): Result.004 file - promoters50/1026551
taaaggatgctgtgcca

SEQ ID NO: 161002 - DNA, 17 bp, Unknown
  misc_feature (1)..( 17): Result.004 file - promoters50/1026551
taaaagattagataatt

SEQ ID NO: 161003 - DNA, 21 bp, Unknown
  misc_feature (1)..( 21): Result.004 file - promoters50/1026551
tacacattaataacgtggtcg

SEQ ID NO: 161004 - DNA, 21 bp, Unknown
  misc_feature (1)..( 21): Result.004 file - promoters50/1026551
tacacattaataacgtggtcc

SEQ ID NO: 161005 - DNA, 21 bp, Unknown
  misc_feature (1)..( 21): Result.004 file - promoters50/1026551
cccacgtaaataacgtggtcc

SEQ ID NO: 161006 - DNA, 21 bp, Unknown
  misc_feature (1)..( 21): Result.004 file - promoters50/1026551
acaattcaaataattctacgg

SEQ ID NO: 161007 - DNA, 41 bp, Unknown; identical to SEQ ID NO: 100566
  misc_feature (1)..( 41): Result.004 file - promoters50/1026551

SEQ ID NO: 161008 - DNA, 41 bp, Unknown; identical to SEQ ID NO: 100565
  misc_feature (1)..( 41): Result.004 file - promoters50/1026551

SEQ ID NO: 161009 - DNA, 41 bp, Unknown; identical to SEQ ID NO: 100567
  misc_feature (1)..( 41): Result.004 file - promoters50/1026551

SEQ ID NO: 161010 - DNA, 41 bp, Unknown; identical to SEQ ID NO: 100568
  misc_feature (1)..( 41): Result.004 file - promoters50/1026551

SEQ ID NO: 161011 - DNA, 8 bp, Unknown
  misc_feature (1)..( 8): Result.004 file - promoters50/1026551
attatata

SEQ ID NO: 161012 - DNA, 8 bp, Unknown
  misc_feature (1)..( 8): Result.004 file - promoters50/1026551
attttata

SEQ ID NO: 161013 - DNA, 8 bp, Unknown
  misc_feature (1)..( 8): Result.004 file - promoters50/1026551
attttacg

SEQ ID NO: 161014 - DNA, 9 bp, Unknown
  misc_feature (1)..( 9): Result.004 file - promoters50/1026562
attgtttta

SEQ ID NO: 161015 - DNA, 8 bp, Unknown
  misc_feature (1)..( 8): Result.004 file - promoters50/1026562
aaaatcta

SEQ ID NO: 161016 - DNA, 8 bp, Unknown
  misc_feature (1)..( 8): Result.004 file - promoters50/1026562
aaagtctt

SEQ ID NO: 161017 - DNA, 8 bp, Unknown
  misc_feature (1)..( 8): Result.004 file - promoters50/1026562
gaagcctt

SEQ ID NO: 161018 - DNA, 10 bp, Unknown
  misc_feature (1)..( 10): Result.004 file - promoters50/1026562
aattaatatt

SEQ ID NO: 161019 - DNA, 10 bp, Unknown
  misc_feature (1)..( 10): Result.004 file - promoters50/1026562
aatcaattgc

SEQ ID NO: 161020 - DNA, 10 bp, Unknown
  misc_feature (1)..( 10): Result.004 file - promoters50/1026562
gatcaagtgc

SEQ ID NO: 161021 - DNA, 8 bp, Unknown
  misc_feature (1)..( 8): Result.004 file - promoters50/1026562
ttttgtat

SEQ ID NO: 161022 - DNA, 8 bp, Unknown
  misc_feature (1)..( 8): Result.004 file - promoters50/1026562
tttcgtat

SEQ ID NO: 161023 - DNA, 8 bp, Unknown
  misc_feature (1)..( 8): Result.004 file - promoters50/1026562
tttggtag

SEQ ID NO: 161024 - DNA, 8 bp, Unknown
  misc_feature (1)..( 8): Result.004 file - promoters50/1026562
tcaaatgg

SEQ ID NO: 161025 - DNA, 8 bp, Unknown
  misc_feature (1)..( 8): Result.004 file - promoters50/1026562
acaaatgg

SEQ ID NO: 161026 - DNA, 8 bp, Unknown
  misc_feature (1)..( 8): Result.004 file - promoters50/1026562
acaaatct

SEQ ID NO: 161027 - DNA, 8 bp, Unknown
  misc_feature (1)..( 8): Result.004 file - promoters50/1026562
aatattca

SEQ ID NO: 161028 - DNA, 8 bp, Unknown
  misc_feature (1)..( 8): Result.004 file - promoters50/1026562
aatattag

SEQ ID NO: 161029 - DNA, 8 bp, Unknown
  misc_feature (1)..( 8): Result.004 file - promoters50/1026562
tatactag

SEQ ID NO: 161030 - DNA, 7 bp, Unknown
  misc_feature (1)..( 7): Result.004 file - promoters50/1026562
aatttaa

SEQ ID NO: 161031 - DNA, 7 bp, Unknown
  misc_feature (1)..( 7): Result.004 file - promoters50/1026562
aatataa

SEQ ID NO: 161032 - DNA, 7 bp, Unknown
  misc_feature (1)..( 7): Result.004 file - promoters50/1026562
catataa

SEQ ID NO: 161033 - DNA, 8 bp, Unknown
  misc_feature (1)..( 8): Result.004 file - promoters50/1026562
ttcgattc

SEQ ID NO: 161034 - DNA, 8 bp, Unknown
  misc_feature (1)..( 8): Result.004 file - promoters50/1026562
ttccattc

SEQ ID NO: 161035 - DNA, 8 bp, Unknown
  misc_feature (1)..( 8): Result.004 file - promoters50/1026565
ttccatgt

SEQ ID NO: 161036 - DNA, 8 bp, Unknown
  misc_feature (1)..( 8): Result.004 file - promoters50/1026565
tgatgaag

SEQ ID NO: 161037 - DNA, 8 bp, Unknown
  misc_feature (1)..( 8): Result.004 file - promoters50/1026565
tgaagaaa

SEQ ID NO: 161038 - DNA, 8 bp, Unknown
  misc_feature (1)..( 8): Result.004 file - promoters50/1026565
aaaagaaa

SEQ ID NO: 161039 - DNA, 8 bp, Unknown
  misc_feature (1)..( 8): Result.004 file - promoters50/1026565
agagatga

SEQ ID NO: 161040 - DNA, 8 bp, Unknown
  misc_feature (1)..( 8): Result.004 file - promoters50/1026565
agacatga

SEQ ID NO: 161041 - DNA, 8 bp, Unknown
  misc_feature (1)..( 8): Result.004 file - promoters50/1026565
gcacatga

SEQ ID NO: 161042 - DNA, 9 bp, Unknown
  misc_feature (1)..( 9): Result.004 file - promoters50/1026565
caaacaaaa

SEQ ID NO: 161043 - DNA, 9 bp, Unknown
  misc_feature (1)..( 9): Result.004 file - promoters50/1026565
cttacaaaa

SEQ ID NO: 161044 - DNA, 9 bp, Unknown
  misc_feature (1)..( 9): Result.004 file - promoters50/1026574
caaacaaac

SEQ ID NO: 161045 - DNA, 8 bp, Unknown
  misc_feature (1)..( 8): Result.004 file - promoters50/1026574
attttttt

SEQ ID NO: 161046 - DNA, 8 bp, Unknown
  misc_feature (1)..( 8): Result.004 file - promoters50/1026574
gttttttg

SEQ ID NO: 161047 - DNA, 8 bp, Unknown
  misc_feature (1)..( 8): Result.004 file - promoters50/1026574
attttttt

SEQ ID NO: 161048 - DNA, 7 bp, Unknown
  misc_feature (1)..( 7): Result.004 file - promoters50/1026574
gaataaa

SEQ ID NO: 161049 - DNA, 7 bp, Unknown
  misc_feature (1)..( 7): Result.004 file - promoters50/1026574
gaaaaaa

SEQ ID NO: 161050 - DNA, 7 bp, Unknown
  misc_feature (1)..( 7): Result.004 file - promoters50/1026574
gaaaaaa

SEQ ID NO: 161051 - DNA, 10 bp, Unknown
  misc_feature (1)..( 10): Result.004 file - promoters50/1026574
acatttatag

SEQ ID NO: 161052 - DNA, 10 bp, Unknown
  misc_feature (1)..( 10): Result.004 file - promoters50/1026574
tactttgtag

SEQ ID NO: 161053 - DNA, 10 bp, Unknown
  misc_feature (1)..( 10): Result.004 file - promoters50/1026574
acatttataa

SEQ ID NO: 161054 - DNA, 9 bp, Unknown
  misc_feature (1)..( 9): Result.004 file - promoters50/1026574
tatacgttt

SEQ ID NO: 161055 - DNA, 9 bp, Unknown
  misc_feature (1)..( 9): Result.004 file - promoters50/1026574
tattcgtcg

SEQ ID NO: 161056 - DNA, 9 bp, Unknown
  misc_feature (1)..( 9): Result.004 file - promoters50/1026574
gttacattt

SEQ ID NO: 161057 - DNA, 8 bp, Unknown
  misc_feature (1)..( 8): Result.004 file - promoters50/1026574
tggatttt

SEQ ID NO: 161058 - DNA, 8 bp, Unknown
  misc_feature (1)..( 8): Result.004 file - promoters50/1026574
gggacttt

SEQ ID NO: 161059 - DNA, 8 bp, Unknown
  misc_feature (1)..( 8): Result.004 file - promoters50/1026574
tggatttc

SEQ ID NO: 161060 - DNA, 8 bp, Unknown
  misc_feature (1)..( 8): Result.004 file - promoters50/1026578
tggttttt

SEQ ID NO: 161061 - DNA, 8 bp, Unknown
  misc_feature (1)..( 8): Result.004 file - promoters50/1026578
taaaagta

SEQ ID NO: 161062 - DNA, 8 bp, Unknown
  misc_feature (1)..( 8): Result.004 file - promoters50/1026578
taaaagat

SEQ ID NO: 161063 - DNA, 8 bp, Unknown
  misc_feature (1)..( 8): Result.004 file - promoters50/1026578
aaaaagat

SEQ ID NO: 161064 - DNA, 8 bp, Unknown
  misc_feature (1)..( 8): Result.004 file - promoters50/1026618
taagagag

SEQ ID NO: 161065 - DNA, 10 bp, Unknown
  misc_feature (1)..( 10): Result.004 file - promoters50/1026618
taataagtat

SEQ ID NO: 161066 - DNA, 10 bp, Unknown
  misc_feature (1)..( 10): Result.004 file - promoters50/1026618
gaattagtat

SEQ ID NO: 161067 - DNA, 10 bp, Unknown
  misc_feature (1)..( 10): Result.004 file - promoters50/1026618
aaataattat

SEQ ID NO: 161068 - DNA, 10 bp, Unknown
  misc_feature (1)..( 10): Result.004 file - promoters50/1026618
aaaaaaatgg

SEQ ID NO: 161069 - DNA, 10 bp, Unknown
  misc_feature (1)..( 10): Result.004 file - promoters50/1026618
aaaaaaatca

SEQ ID NO: 161070 - DNA, 10 bp, Unknown
  misc_feature (1)..( 10): Result.004 file - promoters50/1026618
tcattatttg

SEQ ID NO: 161071 - DNA, 15 bp, Unknown
  misc_feature (1)..( 15): Result.004 file - promoters50/1026618
acgattataaacaca

SEQ ID NO: 161072 - DNA, 15 bp, Unknown
  misc_feature (1)..( 15): Result.004 file - promoters50/1026618
aaatttaaaaagcac

SEQ ID NO: 161073 - DNA, 15 bp, Unknown
  misc_feature (1)..( 15): Result.004 file - promoters50/1026618
ctacatataaatgaa

SEQ ID NO: 161074 - DNA, 15 bp, Unknown
  misc_feature (1)..( 15): Result.004 file - promoters50/1026618
aattttatatatgtc

SEQ ID NO: 161075 - DNA, 15 bp, Unknown
  misc_feature (1)..( 15): Result.004 file - promoters50/1026618
atttagataaatttg

SEQ ID NO: 161076 - DNA, 15 bp, Unknown
  misc_feature (1)..( 15): Result.004 file - promoters50/1026618
gagatcctaaacagc

SEQ ID NO: 161077 - DNA, 15 bp, Unknown
  misc_feature (1)..( 15): Result.004 file - promoters50/1026667
aaacttaaaagtaaa

SEQ ID NO: 161078 - DNA, 8 bp, Unknown
  misc_feature (1)..( 8): Result.004 file - promoters50/1026667
atatttta

SEQ ID NO: 161079 - DNA, 8 bp, Unknown
  misc_feature (1)..( 8): Result.004 file - promoters50/1026667
atagttta

SEQ ID NO: 161080 - DNA, 8 bp, Unknown
  misc_feature (1)..( 8): Result.004 file - promoters50/1026667
ttattttg

SEQ ID NO: 161081 - DNA, 9 bp, Unknown
  misc_feature (1)..( 9): Result.004 file - promoters50/1026667
ctttatgga

SEQ ID NO: 161082 - DNA, 9 bp, Unknown
  misc_feature (1)..( 9): Result.004 file - promoters50/1026667
gcttatgga

SEQ ID NO: 161083 - DNA, 9 bp, Unknown
  misc_feature (1)..( 9): Result.004 file - promoters50/1026705
gctgatgat

SEQ ID NO: 161084 - DNA, 12 bp, Unknown
  misc_feature (1)..( 12): Result.004 file - promoters50/1026705
aatttcatttga

SEQ ID NO: 161085 - DNA, 12 bp, Unknown
  misc_feature (1)..( 12): Result.004 file - promoters50/1026705
aatttcaataac

SEQ ID NO: 161086 - DNA, 12 bp, Unknown
  misc_feature (1)..( 12): Result.004 file - promoters50/1026705
tattttattgtt

SEQ ID NO: 161087 - DNA, 12 bp, Unknown
  misc_feature (1)..( 12): Result.004 file - promoters50/1026705
cattttagatga

SEQ ID NO: 161088 - DNA, 12 bp, Unknown
  misc_feature (1)..( 12): Result.004 file - promoters50/1026705
tttttctttttt

SEQ ID NO: 161089 - DNA, 12 bp, Unknown
  misc_feature (1)..( 12): Result.004 file - promoters50/1026705
tatttttgatca

SEQ ID NO: 161090 - DNA, 13 bp, Unknown
  misc_feature (1)..( 13): Result.004 file - promoters50/1026705
atttcatttgaac

SEQ ID NO: 161091 - DNA, 13 bp, Unknown
  misc_feature (1)..( 13): Result.004 file - promoters50/1026705
tgatcatttgtgg

SEQ ID NO: 161092 - DNA, 13 bp, Unknown
  misc_feature (1)..( 13): Result.004 file - promoters50/1026705
attctattttatt

SEQ ID NO: 161093 - DNA, 13 bp, Unknown
  misc_feature (1)..( 13): Result.004 file - promoters50/1026705
tgaccattttaga

SEQ ID NO: 161094 - DNA, 13 bp, Unknown
  misc_feature (1)..( 13): Result.004 file - promoters50/1026705
ccgctatttgtaa

SEQ ID NO: 161095 - DNA, 13 bp, Unknown
  misc_feature (1)..( 13): Result.004 file - promoters50/1026742
ttttcttttttga

SEQ ID NO: 161096 - DNA, 10 bp, Unknown
  misc_feature (1)..( 10): Result.004 file - promoters50/1026742
cccttactgt

SEQ ID NO: 161097 - DNA, 10 bp, Unknown
  misc_feature (1)..( 10): Result.004 file - promoters50/1026742
ctcttgctga

SEQ ID NO: 161098 - DNA, 10 bp, Unknown
  misc_feature (1)..( 10): Result.004 file - promoters50/1026742
agtttattgt

SEQ ID NO: 161099 - DNA, 10 bp, Unknown
  misc_feature (1)..( 10): Result.004 file - promoters50/1026742
ctctttctgg

SEQ ID NO: 161100 - DNA, 10 bp, Unknown
  misc_feature (1)..( 10): Result.004 file - promoters50/1026822
tctttatttc

SEQ ID NO: 161101 - DNA, 10 bp, Unknown
  misc_feature (1)..( 10): Result.004 file - promoters50/1026822
acaaaatagg

SEQ ID NO: 161102 - DNA, 10 bp, Unknown
  misc_feature (1)..( 10): Result.004 file - promoters50/1026822
acacaatctt

SEQ ID NO: 161103 - DNA, 10 bp, Unknown
  misc_feature (1)..( 10): Result.004 file - promoters50/1026822
tataaattag

SEQ ID NO: 161104 - DNA, 8 bp, Unknown
  misc_feature (1)..( 8): Result.004 file - promoters50/1026822
aaattcat

SEQ ID NO: 161105 - DNA, 8 bp, Unknown
  misc_feature (1)..( 8): Result.004 file - promoters50/1026822
taatacat

SEQ ID NO: 161106 - DNA, 8 bp, Unknown
  misc_feature (1)..( 8): Result.004 file - promoters50/1026861
taaaacag

SEQ ID NO: 161107 - DNA, 10 bp, Unknown
  misc_feature (1)..( 10): Result.004 file - promoters50/1026861
catcataaaa

SEQ ID NO: 161108 - DNA, 10 bp, Unknown
  misc_feature (1)..( 10): Result.004 file - promoters50/1026861
agttataaaa

SEQ ID NO: 161109 - DNA, 10 bp, Unknown
  misc_feature (1)..( 10): Result.004 file - promoters50/1026861
ccatataaaa

SEQ ID NO: 161110 - DNA, 10 bp, Unknown
  misc_feature (1)..( 10): Result.004 file - promoters50/1026861
atatataaag

SEQ ID NO: 161111 - DNA, 10 bp, Unknown
  misc_feature (1)..( 10): Result.004 file - promoters50/1026861
ctatataagc

SEQ ID NO: 161112 - DNA, 10 bp, Unknown
  misc_feature (1)..( 10): Result.004 file - promoters50/1026861
ttatatagat

SEQ ID NO: 161113 - DNA, 10 bp, Unknown
  misc_feature (1)..( 10): Result.004 file - promoters50/1026880
ttaaatagat

SEQ ID NO: 161114 - DNA, 9 bp, Unknown
  misc_feature (1)..( 9): Result.004 file - promoters50/1026880
ttttgatta

SEQ ID NO: 161115 - DNA, 9 bp, Unknown
  misc_feature (1)..( 9): Result.004 file - promoters50/1026880
cgttgattg

SEQ ID NO: 161116 - DNA, 9 bp, Unknown
  misc_feature (1)..( 9): Result.004 file - promoters50/1026931
ttttgttta

SEQ ID NO: 161117 - DNA, 11 bp, Unknown
  misc_feature (1)..( 11): Result.004 file - promoters50/1026931
ttacaaaaaaa

SEQ ID NO: 161118 - DNA, 11 bp, Unknown
  misc_feature (1)..( 11): Result.004 file - promoters50/1026931
ttataaagaaa

SEQ ID NO: 161119 - DNA, 11 bp, Unknown
  misc_feature (1)..( 11): Result.004 file - promoters50/1026931
gcttcaagaaa

SEQ ID NO: 161120 - DNA, 7 bp, Unknown
  misc_feature (1)..( 7): Result.004 file - promoters50/1026931
tatattt

SEQ ID NO: 161121 - DNA, 7 bp, Unknown
  misc_feature (1)..( 7): Result.004 file - promoters50/1026931
tatattt

SEQ ID NO: 161122 - DNA, 7 bp, Unknown
  misc_feature (1)..( 7): Result.004 file - promoters50/1026976
tatattt

SEQ ID NO: 161123 - DNA, 14 bp, Unknown
  misc_feature (1)..( 14): Result.004 file - promoters50/1026976
gttgaatgtaatct

SEQ ID NO: 161124 - DNA, 14 bp, Unknown
  misc_feature (1)..( 14): Result.004 file - promoters50/1026976
cttgaatcaatatt

SEQ ID NO: 161125 - DNA, 14 bp, Unknown
  misc_feature (1)..( 14): Result.004 file - promoters50/1026976
attgattcaaaatt

SEQ ID NO: 161126 - DNA, 14 bp, Unknown
  misc_feature (1)..( 14): Result.004 file - promoters50/1026976
cttaaatgcttttc

SEQ ID NO: 161127 - DNA, 14 bp, Unknown
  misc_feature (1)..( 14): Result.004 file - promoters50/1026976
taaaaattgtggag

SEQ ID NO: 161128 - DNA, 14 bp, Unknown
  misc_feature (1)..( 14): Result.004 file - promoters50/1026976
ttaaaatctacgca

SEQ ID NO: 161129 - DNA, 14 bp, Unknown
  misc_feature (1)..( 14): Result.004 file - promoters50/1026976
gtataatttactta

SEQ ID NO: 161130 - DNA, 13 bp, Unknown
  misc_feature (1)..( 13): Result.004 file - promoters50/1026976
ttctcttctctct

SEQ ID NO: 161131 - DNA, 13 bp, Unknown
  misc_feature (1)..( 13): Result.004 file - promoters50/1026976
ttcttttctattg

SEQ ID NO: 161132 - DNA, 13 bp, Unknown
  misc_feature (1)..( 13): Result.004 file - promoters50/1026976
tttttttctaaaa

SEQ ID NO: 161133 - DNA, 14 bp, Unknown
  misc_feature (1)..( 14): Result.004 file - promoters50/1026976
caattttgctaaaa

SEQ ID NO: 161134 - DNA, 14 bp, Unknown
  misc_feature (1)..( 14): Result.004 file - promoters50/1026976
tgaatctgctaatg

SEQ ID NO: 161135 - DNA, 14 bp, Unknown
  misc_feature (1)..( 14): Result.004 file - promoters50/1026976
cgaatcagctaaac

SEQ ID NO: 161136 - DNA, 14 bp, Unknown
  misc_feature (1)..( 14): Result.004 file - promoters50/1026976
agaaccagattaaa

SEQ ID NO: 161137 - DNA, 14 bp, Unknown
  misc_feature (1)..( 14): Result.004 file - promoters50/1026987
taatttatttaata

SEQ ID NO: 161138 - DNA, 11 bp, Unknown
  misc_feature (1)..( 11): Result.004 file - promoters50/1026987
tatttaaaaag

SEQ ID NO: 161139 - DNA, 11 bp, Unknown
  misc_feature (1)..( 11): Result.004 file - promoters50/1026987
tatgtaaacgt

SEQ ID NO: 161140 - DNA, 12 bp, Unknown
  misc_feature (1)..( 12): Result.004 file - promoters50/1026987
attttagaaaga

SEQ ID NO: 161141 - DNA, 12 bp, Unknown
  misc_feature (1)..( 12): Result.004 file - promoters50/1026987
tatctaagacct

SEQ ID NO: 161142 - DNA, 12 bp, Unknown
  misc_feature (1)..( 12): Result.004 file - promoters50/1026987
gcattaaaatat

SEQ ID NO: 161143 - DNA, 12 bp, Unknown
  misc_feature (1)..( 12): Result.004 file - promoters50/1026987
ttttttttttag

SEQ ID NO: 161144 - DNA, 12 bp, Unknown
  misc_feature (1)..( 12): Result.004 file - promoters50/1026987
ctagtaaacata

SEQ ID NO: 161145 - DNA, 10 bp, Unknown
  misc_feature (1)..( 10): Result.004 file - promoters50/1026987
ttttagggtt

SEQ ID NO: 161146 - DNA, 9 bp, Unknown
  misc_feature (1)..( 9): Result.004 file - promoters50/1026987
tatttaaac

SEQ ID NO: 161147 - DNA, 9 bp, Unknown
  misc_feature (1)..( 9): Result.004 file - promoters50/1026987
tatataaac

SEQ ID NO: 161148 - DNA, 9 bp, Unknown
  misc_feature (1)..( 9): Result.004 file - promoters50/1026987
tatataaat

SEQ ID NO: 161149 - DNA, 9 bp, Unknown
  misc_feature (1)..( 9): Result.004 file - promoters50/1026987
tatataagc

SEQ ID NO: 161150 - DNA, 9 bp, Unknown
  misc_feature (1)..( 9): Result.004 file - promoters50/1026987
tctataaaa

SEQ ID NO: 161151 - DNA, 9 bp, Unknown
  misc_feature (1)..( 9): Result.004 file - promoters50/1026987
cctataaac

SEQ ID NO: 161152 - DNA, 10 bp, Unknown
  misc_feature (1)..( 10): Result.004 file - promoters50/1026987
cgattttctt

SEQ ID NO: 161153 - DNA, 10 bp, Unknown
  misc_feature (1)..( 10): Result.004 file - promoters50/1026987
attttttctt

SEQ ID NO: 161154 - DNA, 10 bp, Unknown
  misc_feature (1)..( 10): Result.004 file - promoters50/1026987
taattgtctc

SEQ ID NO: 161155 - DNA, 10 bp, Unknown
  misc_feature (1)..( 10): Result.004 file - promoters50/1026987
acggtttctt

SEQ ID NO: 161156 - DNA, 10 bp, Unknown
  misc_feature (1)..( 10): Result.004 file - promoters50/1026987
taattttttc

SEQ ID NO: 161157 - DNA, 10 bp, Unknown
  misc_feature (1)..( 10): Result.004 file - promoters50/1026991
ttggtttcta

SEQ ID NO: 161158 - DNA, 8 bp, Unknown
  misc_feature (1)..( 8): Result.004 file - promoters50/1026991
cataaaaa

SEQ ID NO: 161159 - DNA, 8 bp, Unknown
  misc_feature (1)..( 8): Result.004 file - promoters50/1026991
tataaaaa

SEQ ID NO: 161160 - DNA, 8 bp, Unknown
  misc_feature (1)..( 8): Result.004 file - promoters50/1026991
cattaaat

SEQ ID NO: 161161 - DNA, 9 bp, Unknown
  misc_feature (1)..( 9): Result.004 file - promoters50/1026991
aaaactggt

SEQ ID NO: 161162 - DNA, 9 bp, Unknown
  misc_feature (1)..( 9): Result.004 file - promoters50/1026991
aaaattggt

SEQ ID NO: 161163 - DNA, 10 bp, Unknown
  misc_feature (1)..( 10): Result.004 file - promoters50/1026991
aaacattaaa

SEQ ID NO: 161164 - DNA, 7 bp, Unknown
  misc_feature (1)..( 7): Result.004 file - promoters50/1026991
taaattt

SEQ ID NO: 161165 - DNA, 7 bp, Unknown
  misc_feature (1)..( 7): Result.004 file - promoters50/1026991
taaattg

SEQ ID NO: 161166 - DNA, 7 bp, Unknown
  misc_feature (1)..( 7): Result.004 file - promoters50/1027032
aaaattg

SEQ ID NO: 161167 - DNA, 12 bp, Unknown
  misc_feature (1)..( 12): Result.004 file - promoters50/1027032
ttttaattatat

SEQ ID NO: 161168 - DNA, 12 bp, Unknown
  misc_feature (1)..( 12): Result.004 file - promoters50/1027032
atttaattagat

SEQ ID NO: 161169 - DNA, 12 bp, Unknown
  misc_feature (1)..( 12): Result.004 file - promoters50/1027032
tgtgaatgataa

SEQ ID NO: 161170 - DNA, 12 bp, Unknown
  misc_feature (1)..( 12): Result.004 file - promoters50/1027032
gtaaaattatat

SEQ ID NO: 161171 - DNA, 12 bp, Unknown
  misc_feature (1)..( 12): Result.004 file - promoters50/1027032
cgtgaaggatct

SEQ ID NO: 161172 - DNA, 12 bp, Unknown
  misc_feature (1)..( 12): Result.004 file - promoters50/1027032
atttaagaactc

SEQ ID NO: 161173 - DNA, 12 bp, Unknown
  misc_feature (1)..( 12): Result.004 file - promoters50/1027032
ccgtaattagta

SEQ ID NO: 161174 - DNA, 14 bp, Unknown
  misc_feature (1)..( 14): Result.004 file - promoters50/1027032
agaacgaaatatct

SEQ ID NO: 161175 - DNA, 14 bp, Unknown
  misc_feature (1)..( 14): Result.004 file - promoters50/1027032
ttaacaaaacaatt

SEQ ID NO: 161176 - DNA, 14 bp, Unknown
  misc_feature (1)..( 14): Result.004 file - promoters50/1027032
ccaacgaaacgatt

SEQ ID NO: 161177 - DNA, 14 bp, Unknown
  misc_feature (1)..( 14): Result.004 file - promoters50/1027032
ttatcaaattgact

SEQ ID NO: 161178 - DNA, 14 bp, Unknown
  misc_feature (1)..( 14): Result.004 file - promoters50/1027032
ctttcaatttgagc

SEQ ID NO: 161179 - DNA, 14 bp, Unknown
  misc_feature (1)..( 14): Result.004 file - promoters50/1027032
tcttcaatcgttac

SEQ ID NO: 161180 - DNA, 14 bp, Unknown
  misc_feature (1)..( 14): Result.004 file - promoters50/1027032
ccttcaattggttg

SEQ ID NO: 161181 - DNA, 10 bp, Unknown
  misc_feature (1)..( 10): Result.004 file - promoters50/1027032
tatgtaattt

SEQ ID NO: 161182 - DNA, 10 bp, Unknown
  misc_feature (1)..( 10): Result.004 file - promoters50/1027032
aatggaataa

SEQ ID NO: 161183 - DNA, 10 bp, Unknown
  misc_feature (1)..( 10): Result.004 file - promoters50/1027032
accgtaatta

SEQ ID NO: 161184 - DNA, 10 bp, Unknown
  misc_feature (1)..( 10): Result.004 file - promoters50/1027032
tttggattaa

SEQ ID NO: 161185 - DNA, 10 bp, Unknown
  misc_feature (1)..( 10): Result.004 file - promoters50/1027032
ttttgattgt

SEQ ID NO: 161186 - DNA, 10 bp, Unknown
  misc_feature (1)..( 10): Result.004 file - promoters50/1027040
tccggaattc

SEQ ID NO: 161187 - DNA, 8 bp, Unknown
  misc_feature (1)..( 8): Result.004 file - promoters50/1027040
gattttta

SEQ ID NO: 161188 - DNA, 8 bp, Unknown
  misc_feature (1)..( 8): Result.004 file - promoters50/1027040
gatttttt

SEQ ID NO: 161189 - DNA, 8 bp, Unknown
  misc_feature (1)..( 8): Result.004 file - promoters50/1027040
tattttta

SEQ ID NO: 161190 - DNA, 9 bp, Unknown
  misc_feature (1)..( 9): Result.004 file - promoters50/1027040
tcaaagaat

SEQ ID NO: 161191 - DNA, 9 bp, Unknown
  misc_feature (1)..( 9): Result.004 file - promoters50/1027040
tcaaagagt

SEQ ID NO: 161192 - DNA, 9 bp, Unknown
  misc_feature (1)..( 9): Result.004 file - promoters50/1027040
tgaaaaaat

SEQ ID NO: 161193 - DNA, 12 bp, Unknown
  misc_feature (1)..( 12): Result.004 file - promoters50/1027040
aaaaaaataaat

SEQ ID NO: 161194 - DNA, 12 bp, Unknown
  misc_feature (1)..( 12): Result.004 file - promoters50/1027040
aaaaaaacaaaa

SEQ ID NO: 161195 - DNA, 12 bp, Unknown
  misc_feature (1)..( 12): Result.004 file - promoters50/1027040
catgaaccaaaa

SEQ ID NO: 161196 - DNA, 10 bp, Unknown
  misc_feature (1)..( 10): Result.004 file - promoters50/1027040
tcaatatatt

SEQ ID NO: 161197 - DNA, 10 bp, Unknown
  misc_feature (1)..( 10): Result.004 file - promoters50/1027040
tcaagatatg

SEQ ID NO: 161198 - DNA, 10 bp, Unknown
  misc_feature (1)..( 10): Result.004 file - promoters50/1027040
tttggatatg

SEQ ID NO: 161199 - DNA, 10 bp, Unknown
  misc_feature (1)..( 10): Result.004 file - promoters50/1027040
tttgattttg

SEQ ID NO: 161200 - DNA, 10 bp, Unknown
  misc_feature (1)..( 10): Result.004 file - promoters50/1027040
tttgattttt

SEQ ID NO: 161201 - DNA, 10 bp, Unknown
  misc_feature (1)..( 10): Result.004 file - promoters50/1027064
ttagattttt

SEQ ID NO: 161202 - DNA, 11 bp, Unknown
  misc_feature (1)..( 11): Result.004 file - promoters50/1027064
attagttaaaa

SEQ ID NO: 161203 - DNA, 11 bp, Unknown
  misc_feature (1)..( 11): Result.004 file - promoters50/1027064
tatagttgaaa

SEQ ID NO: 161204 - DNA, 11 bp, Unknown
  misc_feature (1)..( 11): Result.004 file - promoters50/1027064
tattgttatag

SEQ ID NO: 161205 - DNA, 9 bp, Unknown
  misc_feature (1)..( 9): Result.004 file - promoters50/1027064
aagttatgt

SEQ ID NO: 161206 - DNA, 9 bp, Unknown
  misc_feature (1)..( 9): Result.004 file - promoters50/1027064
tggttatgt

SEQ ID NO: 161207 - DNA, 9 bp, Unknown
  misc_feature (1)..( 9): Result.004 file - promoters50/1027108
tggatattt

SEQ ID NO: 161208 - DNA, 10 bp, Unknown
  misc_feature (1)..( 10): Result.004 file - promoters50/1027108
gttaaaacaa

SEQ ID NO: 161209 - DNA, 10 bp, Unknown
  misc_feature (1)..( 10): Result.004 file - promoters50/1027108
gttaagacaa

SEQ ID NO: 161210 - DNA, 10 bp, Unknown
  misc_feature (1)..( 10): Result.004 file - promoters50/1027121
attagaacgg

SEQ ID NO: 161211 - DNA, 10 bp, Unknown
  misc_feature (1)..( 10): Result.004 file - promoters50/1027121
attataataa

SEQ ID NO: 161212 - DNA, 10 bp, Unknown
  misc_feature (1)..( 10): Result.004 file - promoters50/1027121
gttagaataa

SEQ ID NO: 161213 - DNA, 10 bp, Unknown
  misc_feature (1)..( 10): Result.004 file - promoters50/1027125
attatacaag

SEQ ID NO: 161214 - DNA, 9 bp, Unknown
  misc_feature (1)..( 9): Result.004 file - promoters50/1027125
aattgtaaa

SEQ ID NO: 161215 - DNA, 9 bp, Unknown
  misc_feature (1)..( 9): Result.004 file - promoters50/1027125
agctgtaaa

SEQ ID NO: 161216 - DNA, 9 bp, Unknown
  misc_feature (1)..( 9): Result.004 file - promoters50/1027125
ctttgtaaa

SEQ ID NO: 161217 - DNA, 9 bp, Unknown
  misc_feature (1)..( 9): Result.004 file - promoters50/1027125
aatggtaag

SEQ ID NO: 161218 - DNA, 9 bp, Unknown
  misc_feature (1)..( 9): Result.004 file - promoters50/1027125
ttttgtaga

SEQ ID NO: 161219 - DNA, 9 bp, Unknown
  misc_feature (1)..( 9): Result.004 file - promoters50/1027156
ttttttaat

SEQ ID NO: 161220 - DNA, 8 bp, Unknown
  misc_feature (1)..( 8): Result.004 file - promoters50/1027156
atacaaaa

SEQ ID NO: 161221 - DNA, 8 bp, Unknown
  misc_feature (1)..( 8): Result.004 file - promoters50/1027156
atacaata

SEQ ID NO: 161222 - DNA, 8 bp, Unknown
  misc_feature (1)..( 8): Result.004 file - promoters50/1027156
ctacaata

SEQ ID NO: 161223 - DNA, 9 bp, Unknown
  misc_feature (1)..( 9): Result.004 file - promoters50/1027156
ttagtcaac

SEQ ID NO: 161224 - DNA, 9 bp, Unknown
  misc_feature (1)..( 9): Result.004 file - promoters50/1027156
aaagtaaac

SEQ ID NO: 161225 - DNA, 9 bp, Unknown
  misc_feature (1)..( 9): Result.004 file - promoters50/1027156
aaagaaaaa

SEQ ID NO: 161226 - DNA, 10 bp, Unknown
  misc_feature (1)..( 10): Result.004 file - promoters50/1027156
catataggtt

SEQ ID NO: 161227 - DNA, 10 bp, Unknown
  misc_feature (1)..( 10): Result.004 file - promoters50/1027156
aaaataagtt

SEQ ID NO: 161228 - DNA, 10 bp, Unknown
  misc_feature (1)..( 10): Result.004 file - promoters50/1027156
aaactaagaa

SEQ ID NO: 161229 - DNA, 9 bp, Unknown
  misc_feature (1)..( 9): Result.004 file - promoters50/1027156
caacaactt

SEQ ID NO: 161230 - DNA, 9 bp, Unknown
  misc_feature (1)..( 9): Result.004 file - promoters50/1027156
caaaaacta

SEQ ID NO: 161231 - DNA, 9 bp, Unknown
  misc_feature (1)..( 9): Result.004 file - promoters50/1027171
taaaataag

SEQ ID NO: 161232 - DNA, 16 bp, Unknown
  misc_feature (1)..( 16): Result.004 file - promoters50/1027171
caacttttcttagttt

SEQ ID NO: 161233 - DNA, 16 bp, Unknown
  misc_feature (1)..( 16): Result.004 file - promoters50/1027171
taggttttgttatgga

SEQ ID NO: 161234 - DNA, 16 bp, Unknown
  misc_feature (1)..( 16): Result.004 file - promoters50/1027171
tatatcttcttatttt

SEQ ID NO: 161235 - DNA, 16 bp, Unknown
  misc_feature (1)..( 16): Result.004 file - promoters50/1027171
tatattttaggtgtac

SEQ ID NO: 161236 - DNA, 16 bp, Unknown
  misc_feature (1)..( 16): Result.004 file - promoters50/1027171
aatatttttcttattg

SEQ ID NO: 161237 - DNA, 12 bp, Unknown
  misc_feature (1)..( 12): Result.004 file - promoters50/1027171
ttcaaaaatcaa

SEQ ID NO: 161238 - DNA, 12 bp, Unknown
  misc_feature (1)..( 12): Result.004 file - promoters50/1027171
atataaaaacaa

SEQ ID NO: 161239 - DNA, 12 bp, Unknown
  misc_feature (1)..( 12): Result.004 file - promoters50/1027171
gaaataaatcac

SEQ ID NO: 161240 - DNA, 12 bp, Unknown
  misc_feature (1)..( 12): Result.004 file - promoters50/1027171
aaagaaaaacct

SEQ ID NO: 161241 - DNA, 12 bp, Unknown
  misc_feature (1)..( 12): Result.004 file - promoters50/1027171
agataaagtttc

SEQ ID NO: 161242 - DNA, 12 bp, Unknown
  misc_feature (1)..( 12): Result.004 file - promoters50/1027171
aaaataactcac

SEQ ID NO: 161243 - DNA, 12 bp, Unknown
  misc_feature (1)..( 12): Result.004 file - promoters50/1027171
gaaataaatcac

SEQ ID NO: 161244 - DNA, 12 bp, Unknown
  misc_feature (1)..( 12): Result.004 file - promoters50/1027171
aaaatatatcag

SEQ ID NO: 161245 - DNA, 12 bp, Unknown
  misc_feature (1)..( 12): Result.004 file - promoters50/1027171
gagataaatagt

SEQ ID NO: 161246 - DNA, 12 bp, Unknown
  misc_feature (1)..( 12): Result.004 file - promoters50/1027171
tagataaagttt

SEQ ID NO: 161247 - DNA, 13 bp, Unknown
  misc_feature (1)..( 13): Result.004 file - promoters50/1027171
caaaaaataatct

SEQ ID NO: 161248 - DNA, 13 bp, Unknown
  misc_feature (1)..( 13): Result.004 file - promoters50/1027171
caaaacataaatc

SEQ ID NO: 161249 - DNA, 14 bp, Unknown
  misc_feature (1)..( 14): Result.004 file - promoters50/1027171
tatctcatcaatta

SEQ ID NO: 161250 - DNA, 14 bp, Unknown
  misc_feature (1)..( 14): Result.004 file - promoters50/1027171
aatttcatttatat

SEQ ID NO: 161251 - DNA, 12 bp, Unknown
  misc_feature (1)..( 12): Result.004 file - promoters50/1027171
gaaacttaaaaa

SEQ ID NO: 161252 - DNA, 12 bp, Unknown
  misc_feature (1)..( 12): Result.004 file - promoters50/1027171
aaaacttatatt

SEQ ID NO: 161253 - DNA, 12 bp, Unknown
  misc_feature (1)..( 12): Result.004 file - promoters50/1027171
cttactaatatt

SEQ ID NO: 161254 - DNA, 12 bp, Unknown
  misc_feature (1)..( 12): Result.004 file - promoters50/1027175
aaaactccaaaa

SEQ ID NO: 161255 - DNA, 10 bp, Unknown
  misc_feature (1)..( 10): Result.004 file - promoters50/1027175
gttttgacca

SEQ ID NO: 161256 - DNA, 10 bp, Unknown
  misc_feature (1)..( 10): Result.004 file - promoters50/1027175
cttttcacca

SEQ ID NO: 161257 - DNA, 10 bp, Unknown
  misc_feature (1)..( 10): Result.004 file - promoters50/1027175
gttttgtaat

SEQ ID NO: 161258 - DNA, 11 bp, Unknown
  misc_feature (1)..( 11): Result.004 file - promoters50/1027175
tattatgtggc

SEQ ID NO: 161259 - DNA, 11 bp, Unknown
  misc_feature (1)..( 11): Result.004 file - promoters50/1027175
tattttgtggc

SEQ ID NO: 161260 - DNA, 11 bp, Unknown
  misc_feature (1)..( 11): Result.004 file - promoters50/1027175
ttttatgtgag

SEQ ID NO: 161261 - DNA, 11 bp, Unknown
  misc_feature (1)..( 11): Result.004 file - promoters50/1027175
tcttttttttt

SEQ ID NO: 161262 - DNA, 11 bp, Unknown
  misc_feature (1)..( 11): Result.004 file - promoters50/1027175
tctttttcctt

SEQ ID NO: 161263 - DNA, 11 bp, Unknown
  misc_feature (1)..( 11): Result.004 file - promoters50/1027189
gcttttttttt

SEQ ID NO: 161264 - DNA, 9 bp, Unknown
  misc_feature (1)..( 9): Result.004 file - promoters50/1027189
caaaataat

SEQ ID NO: 161265 - DNA, 9 bp, Unknown
  misc_feature (1)..( 9): Result.004 file - promoters50/1027189
ctaaaaaat

SEQ ID NO: 161266 - DNA, 9 bp, Unknown
  misc_feature (1)..( 9): Result.004 file - promoters50/1027189
aaaaacaat

SEQ ID NO: 161267 - DNA, 9 bp, Unknown
  misc_feature (1)..( 9): Result.004 file - promoters50/1027189
tagaaaaat

SEQ ID NO: 161268 - DNA, 9 bp, Unknown
  misc_feature (1)..( 9): Result.004 file - promoters50/1027189
tagagaaac

SEQ ID NO: 161269 - DNA, 6 bp, Unknown
  misc_feature (1)..( 6): Result.004 file - promoters50/1027189
aacaat

SEQ ID NO: 161270 - DNA, 7 bp, Unknown
  misc_feature (1)..( 7): Result.004 file - promoters50/1027189
aaacaaa

SEQ ID NO: 161271 - DNA, 7 bp, Unknown
  misc_feature (1)..( 7): Result.004 file - promoters50/1027189
caacaaa

SEQ ID NO: 161272 - DNA, 7 bp, Unknown
  misc_feature (1)..( 7): Result.004 file - promoters50/1027189
aaacaat

SEQ ID NO: 161273 - DNA, 7 bp, Unknown
  misc_feature (1)..( 7): Result.004 file - promoters50/1027189
aaacaaa

SEQ ID NO: 161274 - DNA, 7 bp, Unknown
  misc_feature (1)..( 7): Result.004 file - promoters50/1027189
caagaaa

SEQ ID NO: 161275 - DNA, 6 bp, Unknown
  misc_feature (1)..( 6): Result.004 file - promoters50/1027189
aacaat

SEQ ID NO: 161276 - DNA, 9 bp, Unknown
  misc_feature (1)..( 9): Result.004 file - promoters50/1027189
tatacatat

SEQ ID NO: 161277 - DNA, 9 bp, Unknown
  misc_feature (1)..( 9): Result.004 file - promoters50/1027189
tatatataa

SEQ ID NO: 161278 - DNA, 9 bp, Unknown
  misc_feature (1)..( 9): Result.004 file - promoters50/1027189
gttacatag

SEQ ID NO: 161279 - DNA, 9 bp, Unknown
  misc_feature (1)..( 9): Result.004 file - promoters50/1027189
tatgcattt

SEQ ID NO: 161280 - DNA, 9 bp, Unknown
  misc_feature (1)..( 9): Result.004 file - promoters50/1027189
tatctaaga

SEQ ID NO: 161281 - DNA, 9 bp, Unknown
  misc_feature (1)..( 9): Result.004 file - promoters50/1027189
aatggattt

SEQ ID NO: 161282 - DNA, 10 bp, Unknown
  misc_feature (1)..( 10): Result.004 file - promoters50/1027189
tggtatcatg

SEQ ID NO: 161283 - DNA, 10 bp, Unknown
  misc_feature (1)..( 10): Result.004 file - promoters50/1027189
ttatatgatg

SEQ ID NO: 161284 - DNA, 10 bp, Unknown
  misc_feature (1)..( 10): Result.004 file - promoters50/1027189
aaatattatg

SEQ ID NO: 161285 - DNA, 10 bp, Unknown
  misc_feature (1)..( 10): Result.004 file - promoters50/1027189
aaatatgaga

SEQ ID NO: 161286 - DNA, 10 bp, Unknown
  misc_feature (1)..( 10): Result.004 file - promoters50/1027189
atatatgaca

SEQ ID NO: 161287 - DNA, 10 bp, Unknown
  misc_feature (1)..( 10): Result.004 file - promoters50/1027189
aaattttata

SEQ ID NO: 161288 - DNA, 16 bp, Unknown
  misc_feature (1)..( 16): Result.004 file - promoters50/1027189
gattagaaacagactt

SEQ ID NO: 161289 - DNA, 16 bp, Unknown
  misc_feature (1)..( 16): Result.004 file - promoters50/1027189
gatgagaaccttattt

SEQ ID NO: 161290 - DNA, 16 bp, Unknown
  misc_feature (1)..( 16): Result.004 file - promoters50/1027189
ttttataaatttggag

SEQ ID NO: 161291 - DNA, 16 bp, Unknown
  misc_feature (1)..( 16): Result.004 file - promoters50/1027189
tatgagataaaaatag

SEQ ID NO: 161292 - DNA, 16 bp, Unknown
  misc_feature (1)..( 16): Result.004 file - promoters50/1027189
aatgggaagcggcgga

SEQ ID NO: 161293 - DNA, 16 bp, Unknown
  misc_feature (1)..( 16): Result.004 file - promoters50/1027201
acacataacttttgag

SEQ ID NO: 161294 - DNA, 9 bp, Unknown
  misc_feature (1)..( 9): Result.004 file - promoters50/1027201
gatgaagaa

SEQ ID NO: 161295 - DNA, 9 bp, Unknown
  misc_feature (1)..( 9): Result.004 file - promoters50/1027201
attgatgaa

SEQ ID NO: 161296 - DNA, 9 bp, Unknown
  misc_feature (1)..( 9): Result.004 file - promoters50/1027201
gatgcagat

SEQ ID NO: 161297 - DNA, 9 bp, Unknown
  misc_feature (1)..( 9): Result.004 file - promoters50/1027201
aagctcgat

SEQ ID NO: 161298 - DNA, 9 bp, Unknown
  misc_feature (1)..( 9): Result.004 file - promoters50/1027201
aaggtcgat

SEQ ID NO: 161299 - DNA, 9 bp, Unknown
  misc_feature (1)..( 9): Result.004 file - promoters50/1027201
aagctcgat

SEQ ID NO: 161300 - DNA, 7 bp, Unknown
  misc_feature (1)..( 7): Result.004 file - promoters50/1027201
aaaaaat

SEQ ID NO: 161301 - DNA, 7 bp, Unknown
  misc_feature (1)..( 7): Result.004 file - promoters50/1027201
aaaaaat

SEQ ID NO: 161302 - DNA, 7 bp, Unknown
  misc_feature (1)..( 7): Result.004 file - promoters50/1027204
aaaaaaa

SEQ ID NO: 161303 - DNA, 8 bp, Unknown
  misc_feature (1)..( 8): Result.004 file - promoters50/1027204
aaataatg

SEQ ID NO: 161304 - DNA, 8 bp, Unknown
  misc_feature (1)..( 8): Result.004 file - promoters50/1027204
aaataaaa

SEQ ID NO: 161305 - DNA, 8 bp, Unknown
  misc_feature (1)..( 8): Result.004 file - promoters50/1027204
aaataatg

SEQ ID NO: 161306 - DNA, 8 bp, Unknown
  misc_feature (1)..( 8): Result.004 file - promoters50/1027204
aaaatttc

SEQ ID NO: 161307 - DNA, 8 bp, Unknown
  misc_feature (1)..( 8): Result.004 file - promoters50/1027204
gaaatttt

SEQ ID NO: 161308 - DNA, 8 bp, Unknown
  misc_feature (1)..( 8): Result.004 file - promoters50/1027204
aaagttta

SEQ ID NO: 161309 - DNA, 7 bp, Unknown
  misc_feature (1)..( 7): Result.004 file - promoters50/1027204
aaaaaat

SEQ ID NO: 161310 - DNA, 7 bp, Unknown
  misc_feature (1)..( 7): Result.004 file - promoters50/1027204
aaaaaaa

SEQ ID NO: 161311 - DNA, 7 bp, Unknown
  misc_feature (1)..( 7): Result.004 file - promoters50/1027204
aaaaatc

SEQ ID NO: 161312 - DNA, 8 bp, Unknown
  misc_feature (1)..( 8): Result.004 file - promoters50/1027204
aaaataat

SEQ ID NO: 161313 - DNA, 13 bp, Unknown
  misc_feature (1)..( 13): Result.004 file - promoters50/1027204
aaataaaaagatt

SEQ ID NO: 161314 - DNA, 13 bp, Unknown
  misc_feature (1)..( 13): Result.004 file - promoters50/1027204
atatacaaatatt

SEQ ID NO: 161315 - DNA, 13 bp, Unknown
  misc_feature (1)..( 13): Result.004 file - promoters50/1027204
aaataaaaagata

SEQ ID NO: 161316 - DNA, 8 bp, Unknown
  misc_feature (1)..( 8): Result.004 file - promoters50/1027204
atatatat

SEQ ID NO: 161317 - DNA, 8 bp, Unknown
  misc_feature (1)..( 8): Result.004 file - promoters50/1027204
atatatat

SEQ ID NO: 161318 - DNA, 8 bp, Unknown
  misc_feature (1)..( 8): Result.004 file - promoters50/1027204
ttatatag

SEQ ID NO: 161319 - DNA, 12 bp, Unknown
  misc_feature (1)..( 12): Result.004 file - promoters50/1027204
tttaaaaatatt

SEQ ID NO: 161320 - DNA, 12 bp, Unknown
  misc_feature (1)..( 12): Result.004 file - promoters50/1027204
gaaaaaaatcca

SEQ ID NO: 161321 - DNA, 12 bp, Unknown
  misc_feature (1)..( 12): Result.004 file - promoters50/1027204
aataaaaagatt

SEQ ID NO: 161322 - DNA, 12 bp, Unknown
  misc_feature (1)..( 12): Result.004 file - promoters50/1027204
aataaaattaat

SEQ ID NO: 161323 - DNA, 8 bp, Unknown
  misc_feature (1)..( 8): Result.004 file - promoters50/1027204
gagagagg

SEQ ID NO: 161324 - DNA, 8 bp, Unknown
  misc_feature (1)..( 8): Result.004 file - promoters50/1027204
gagagatc

SEQ ID NO: 161325 - DNA, 8 bp, Unknown
  misc_feature (1)..( 8): Result.004 file - promoters50/1027204
cagatatc

SEQ ID NO: 161326 - DNA, 7 bp, Unknown
  misc_feature (1)..( 7): Result.004 file - promoters50/1027204
taaggaa

SEQ ID NO: 161327 - DNA, 7 bp, Unknown
  misc_feature (1)..( 7): Result.004 file - promoters50/1027204
taatgaa

SEQ ID NO: 161328 - DNA, 7 bp, Unknown
  misc_feature (1)..( 7): Result.004 file - promoters50/1027204
taacgaa

SEQ ID NO: 161329 - DNA, 7 bp, Unknown
  misc_feature (1)..( 7): Result.004 file - promoters50/1027204
caaatta

SEQ ID NO: 161330 - DNA, 7 bp, Unknown
  misc_feature (1)..( 7): Result.004 file - promoters50/1027204
aaaatta

SEQ ID NO: 161331 - DNA, 7 bp, Unknown
  misc_feature (1)..( 7): Result.004 file - promoters50/1027212
aaaattt

SEQ ID NO: 161332 - DNA, 10 bp, Unknown
  misc_feature (1)..( 10): Result.004 file - promoters50/1027212
atattatgga

SEQ ID NO: 161333 - DNA, 10 bp, Unknown
  misc_feature (1)..( 10): Result.004 file - promoters50/1027212
atattaaaaa

SEQ ID NO: 161334 - DNA, 10 bp, Unknown
  misc_feature (1)..( 10): Result.004 file - promoters50/1027212
atatcaaaaa

SEQ ID NO: 161335 - DNA, 8 bp, Unknown
  misc_feature (1)..( 8): Result.004 file - promoters50/1027212
gaatgcat

SEQ ID NO: 161336 - DNA, 8 bp, Unknown
  misc_feature (1)..( 8): Result.004 file - promoters50/1027212
aaatacat

SEQ ID NO: 161337 - DNA, 8 bp, Unknown
  misc_feature (1)..( 8): Result.004 file - promoters50/1027212
gaaggcag

SEQ ID NO: 161338 - DNA, 9 bp, Unknown
  misc_feature (1)..( 9): Result.004 file - promoters50/1027212
tgtctaaaa

SEQ ID NO: 161339 - DNA, 9 bp, Unknown
  misc_feature (1)..( 9): Result.004 file - promoters50/1027212
tgtttaaaa

SEQ ID NO: 161340 - DNA, 10 bp, Unknown
  misc_feature (1)..( 10): Result.004 file - promoters50/1027212
tttctagaaa

SEQ ID NO: 161341 - DNA, 10 bp, Unknown
  misc_feature (1)..( 10): Result.004 file - promoters50/1027212
accaatataa

SEQ ID NO: 161342 - DNA, 10 bp, Unknown
  misc_feature (1)..( 10): Result.004 file - promoters50/1027212
tactatataa

SEQ ID NO: 161343 - DNA, 10 bp, Unknown
  misc_feature (1)..( 10): Result.004 file - promoters50/1027212
accaatataa

SEQ ID NO: 161344 - DNA, 10 bp, Unknown
  misc_feature (1)..( 10): Result.004 file - promoters50/1027212
atatatataa

SEQ ID NO: 161345 - DNA, 8 bp, Unknown
  misc_feature (1)..( 8): Result.004 file - promoters50/1027212
tttttaat

SEQ ID NO: 161346 - DNA, 8 bp, Unknown
  misc_feature (1)..( 8): Result.004 file - promoters50/1027212
ttttaaat

SEQ ID NO: 161347 - DNA, 8 bp, Unknown
  misc_feature (1)..( 8): Result.004 file - promoters50/1027212
gtttaaaa

SEQ ID NO: 161348 - DNA, 9 bp, Unknown
  misc_feature (1)..( 9): Result.004 file - promoters50/1027212
aagtaaaaa

SEQ ID NO: 161349 - DNA, 9 bp, Unknown
  misc_feature (1)..( 9): Result.004 file - promoters50/1027212
gtttaaaaa

SEQ ID NO: 161350 - DNA, 9 bp, Unknown
  misc_feature (1)..( 9): Result.004 file - promoters50/1027212
ttttaaaca

SEQ ID NO: 161351 - DNA, 9 bp, Unknown
  misc_feature (1)..( 9): Result.004 file - promoters50/1027212
aaaaaaaag

SEQ ID NO: 161352 - DNA, 9 bp, Unknown
  misc_feature (1)..( 9): Result.004 file - promoters50/1027212
aaataaaat

SEQ ID NO: 161353 - DNA, 9 bp, Unknown
  misc_feature (1)..( 9): Result.004 file - promoters50/1027212
gcctaaaat

SEQ ID NO: 161354 - DNA, 7 bp, Unknown
  misc_feature (1)..( 7): Result.004 file - promoters50/1027212
taacatt

SEQ ID NO: 161355 - DNA, 7 bp, Unknown
  misc_feature (1)..( 7): Result.004 file - promoters50/1027212
taaaatt

SEQ ID NO: 161356 - DNA, 7 bp, Unknown
  misc_feature (1)..( 7): Result.004 file - promoters50/1027212
taaaata

SEQ ID NO: 161357 - DNA, 8 bp, Unknown
  misc_feature (1)..( 8): Result.004 file - promoters50/1027212
taaataaa

SEQ ID NO: 161358 - DNA, 8 bp, Unknown
  misc_feature (1)..( 8): Result.004 file - promoters50/1027212
caaaaaaa

SEQ ID NO: 161359 - DNA, 8 bp, Unknown
  misc_feature (1)..( 8): Result.004 file - promoters50/1027212
caaaaaag

SEQ ID NO: 161360 - DNA, 7 bp, Unknown
  misc_feature (1)..( 7): Result.004 file - promoters50/1027212
aaaagag

SEQ ID NO: 161361 - DNA, 7 bp, Unknown
  misc_feature (1)..( 7): Result.004 file - promoters50/1027212
aaaagag

SEQ ID NO: 161362 - DNA, 8 bp, Unknown
  misc_feature (1)..( 8): Result.004 file - promoters50/1027237
aaacagac

SEQ ID NO: 161363 - DNA, 7 bp, Unknown
  misc_feature (1)..( 7): Result.004 file - promoters50/1027237
gaacaag

SEQ ID NO: 161364 - DNA, 7 bp, Unknown
  misc_feature (1)..( 7): Result.004 file - promoters50/1027237
gaataag

SEQ ID NO: 161365 - DNA, 7 bp, Unknown
  misc_feature (1)..( 7): Result.004 file - promoters50/1027237
gaagaag

SEQ ID NO: 161366 - DNA, 12 bp, Unknown
  misc_feature (1)..( 12): Result.004 file - promoters50/1027237
tctaatatttaa

SEQ ID NO: 161367 - DNA, 12 bp, Unknown
  misc_feature (1)..( 12): Result.004 file - promoters50/1027237
tctaatatatag

SEQ ID NO: 161368 - DNA, 12 bp, Unknown
  misc_feature (1)..( 12): Result.004 file - promoters50/1027237
caaaatatataa

SEQ ID NO: 161369 - DNA, 11 bp, Unknown
  misc_feature (1)..( 11): Result.004 file - promoters50/1027237
tttatctctta

SEQ ID NO: 161370 - DNA, 11 bp, Unknown
  misc_feature (1)..( 11): Result.004 file - promoters50/1027237
tttatctttta

SEQ ID NO: 161371 - DNA, 11 bp, Unknown
  misc_feature (1)..( 11): Result.004 file - promoters50/1027237
ttattctgtta

SEQ ID NO: 161372 - DNA, 11 bp, Unknown
  misc_feature (1)..( 11): Result.004 file - promoters50/1027237
tatattttagt

SEQ ID NO: 161373 - DNA, 11 bp, Unknown
  misc_feature (1)..( 11): Result.004 file - promoters50/1027237
tatttttgagt

SEQ ID NO: 161374 - DNA, 11 bp, Unknown
  misc_feature (1)..( 11): Result.004 file - promoters50/1027237
aatatttgggc

SEQ ID NO: 161375 - DNA, 9 bp, Unknown
  misc_feature (1)..( 9): Result.004 file - promoters50/1027237
gaagcagaa

SEQ ID NO: 161376 - DNA, 9 bp, Unknown
  misc_feature (1)..( 9): Result.004 file - promoters50/1027237
gaagaagaa

SEQ ID NO: 161377 - DNA, 9 bp, Unknown
  misc_feature (1)..( 9): Result.004 file - promoters50/1027237
gaataagct

SEQ ID NO: 161378 - DNA, 9 bp, Unknown
  misc_feature (1)..( 9): Result.004 file - promoters50/1027237
tataatttt

SEQ ID NO: 161379 - DNA, 9 bp, Unknown
  misc_feature (1)..( 9): Result.004 file - promoters50/1027237
tattatttt

SEQ ID NO: 161380 - DNA, 9 bp, Unknown
  misc_feature (1)..( 9): Result.004 file - promoters50/1027240
ggttacttt

SEQ ID NO: 161381 - DNA, 9 bp, Unknown
  misc_feature (1)..( 9): Result.004 file - promoters50/1027240
aatcaaaac

SEQ ID NO: 161382 - DNA, 9 bp, Unknown
  misc_feature (1)..( 9): Result.004 file - promoters50/1027240
aatgaaaag

SEQ ID NO: 161383 - DNA, 9 bp, Unknown
  misc_feature (1)..( 9): Result.004 file - promoters50/1027240
tatcaaaag

SEQ ID NO: 161384 - DNA, 9 bp, Unknown
  misc_feature (1)..( 9): Result.004 file - promoters50/1027240
cggcaaaag

SEQ ID NO: 161385 - DNA, 11 bp, Unknown
  misc_feature (1)..( 11): Result.004 file - promoters50/1027240
tcaaaatattt

SEQ ID NO: 161386 - DNA, 11 bp, Unknown
  misc_feature (1)..( 11): Result.004 file - promoters50/1027240
gcaaaatcttt

SEQ ID NO: 161387 - DNA, 11 bp, Unknown
  misc_feature (1)..( 11): Result.004 file - promoters50/1027240
ataaattatat

SEQ ID NO: 161388 - DNA, 11 bp, Unknown
  misc_feature (1)..( 11): Result.004 file - promoters50/1027240
tcaaaaaaaaa

SEQ ID NO: 161389 - DNA, 13 bp, Unknown
  misc_feature (1)..( 13): Result.004 file - promoters50/1027240
taaccctagaagt

SEQ ID NO: 161390 - DNA, 13 bp, Unknown
  misc_feature (1)..( 13): Result.004 file - promoters50/1027240
taaacctaaattt

SEQ ID NO: 161391 - DNA, 13 bp, Unknown
  misc_feature (1)..( 13): Result.004 file - promoters50/1027240
ctacccaaaaaac

SEQ ID NO: 161392 - DNA, 13 bp, Unknown
  misc_feature (1)..( 13): Result.004 file - promoters50/1027240
cttacctacattt

SEQ ID NO: 161393 - DNA, 6 bp, Unknown
  misc_feature (1)..( 6): Result.004 file - promoters50/1027240
aaaaaa

SEQ ID NO: 161394 - DNA, 6 bp, Unknown
  misc_feature (1)..( 6): Result.004 file - promoters50/1027240
aaaaaa

SEQ ID NO: 161395 - DNA, 6 bp, Unknown
  misc_feature (1)..( 6): Result.004 file - promoters50/1027240
aaaaac

SEQ ID NO: 161396 - DNA, 6 bp, Unknown
  misc_feature (1)..( 6): Result.004 file - promoters50/1027240
aaaaaa

SEQ ID NO: 161397 - DNA, 9 bp, Unknown
  misc_feature (1)..( 9): Result.004 file - promoters50/1027240
attaaaata

SEQ ID NO: 161398 - DNA, 9 bp, Unknown
  misc_feature (1)..( 9): Result.004 file - promoters50/1027240
cttaaaaat

SEQ ID NO: 161399 - DNA, 9 bp, Unknown
  misc_feature (1)..( 9): Result.004 file - promoters50/1027240
tttataata

SEQ ID NO: 161400 - DNA, 9 bp, Unknown
  misc_feature (1)..( 9): Result.004 file - promoters50/1027240
tttttaata

SEQ ID NO: 161401 - DNA, 9 bp, Unknown
  misc_feature (1)..( 9): Result.004 file - promoters50/1027240
attaaaata

SEQ ID NO: 161402 - DNA, 9 bp, Unknown
  misc_feature (1)..( 9): Result.004 file - promoters50/1027240
ttaaaaata

SEQ ID NO: 161403 - DNA, 9 bp, Unknown
  misc_feature (1)..( 9): Result.004 file - promoters50/1027240
tttataata

SEQ ID NO: 161404 - DNA, 9 bp, Unknown
  misc_feature (1)..( 9): Result.004 file - promoters50/1027240
tttttaata

SEQ ID NO: 161405 - DNA, 9 bp, Unknown
  misc_feature (1)..( 9): Result.004 file - promoters50/1027240
cgaaaaaat

SEQ ID NO: 161406 - DNA, 9 bp, Unknown
  misc_feature (1)..( 9): Result.004 file - promoters50/1027240
ccaaaaaat

SEQ ID NO: 161407 - DNA, 9 bp, Unknown
  misc_feature (1)..( 9): Result.004 file - promoters50/1027240
tgaaaaaag

SEQ ID NO: 161408 - DNA, 9 bp, Unknown
  misc_feature (1)..( 9): Result.004 file - promoters50/1027243
ccaaaaaac

SEQ ID NO: 161409 - DNA, 11 bp, Unknown
  misc_feature (1)..( 11): Result.004 file - promoters50/1027243
tgatactattt

SEQ ID NO: 161410 - DNA, 11 bp, Unknown
  misc_feature (1)..( 11): Result.004 file - promoters50/1027243
ttatattatta

SEQ ID NO: 161411 - DNA, 11 bp, Unknown
  misc_feature (1)..( 11): Result.004 file - promoters50/1027243
tagtacaattt

SEQ ID NO: 161412 - DNA, 11 bp, Unknown
  misc_feature (1)..( 11): Result.004 file - promoters50/1027243
ttttactaact

SEQ ID NO: 161413 - DNA, 11 bp, Unknown
  misc_feature (1)..( 11): Result.004 file - promoters50/1027243
cttttctattc

SEQ ID NO: 161414 - DNA, 11 bp, Unknown
  misc_feature (1)..( 11): Result.004 file - promoters50/1027276
ttagattagcc

SEQ ID NO: 161415 - DNA, 11 bp, Unknown
  misc_feature (1)..( 11): Result.004 file - promoters50/1027276
acaaatttgtt

SEQ ID NO: 161416 - DNA, 11 bp, Unknown
  misc_feature (1)..( 11): Result.004 file - promoters50/1027276
ttaaattttaa

SEQ ID NO: 161417 - DNA, 11 bp, Unknown
  misc_feature (1)..( 11): Result.004 file - promoters50/1027276
tcaagtttttt

SEQ ID NO: 161418 - DNA, 11 bp, Unknown
  misc_feature (1)..( 11): Result.004 file - promoters50/1027276
ttaaatatgtt

SEQ ID NO: 161419 - DNA, 11 bp, Unknown
  misc_feature (1)..( 11): Result.004 file - promoters50/1027276
atgaattctaa

SEQ ID NO: 161420 - DNA, 11 bp, Unknown
  misc_feature (1)..( 11): Result.004 file - promoters50/1027346
ttaaattattc

SEQ ID NO: 161421 - DNA, 9 bp, Unknown
  misc_feature (1)..( 9): Result.004 file - promoters50/1027346
ttacatgtt

SEQ ID NO: 161422 - DNA, 9 bp, Unknown
  misc_feature (1)..( 9): Result.004 file - promoters50/1027346
ttaaatgtt

SEQ ID NO: 161423 - DNA, 9 bp, Unknown
  misc_feature (1)..( 9): Result.004 file - promoters50/1027346
atgcatgtt

SEQ ID NO: 161424 - DNA, 13 bp, Unknown
  misc_feature (1)..( 13): Result.004 file - promoters50/1027346
aataaaatagtaa

SEQ ID NO: 161425 - DNA, 13 bp, Unknown
  misc_feature (1)..( 13): Result.004 file - promoters50/1027346
aatgaaataataa

SEQ ID NO: 161426 - DNA, 13 bp, Unknown
  misc_feature (1)..( 13): Result.004 file - promoters50/1027346
actaaaataaaac

SEQ ID NO: 161427 - DNA, 9 bp, Unknown
  misc_feature (1)..( 9): Result.004 file - promoters50/1027346
aatcaaaat

SEQ ID NO: 161428 - DNA, 9 bp, Unknown
  misc_feature (1)..( 9): Result.004 file - promoters50/1027346
tttcataat

SEQ ID NO: 161429 - DNA, 9 bp, Unknown
  misc_feature (1)..( 9): Result.004 file - promoters50/1027346
tttcctaag

SEQ ID NO: 161430 - DNA, 8 bp, Unknown
  misc_feature (1)..( 8): Result.004 file - promoters50/1027346
cataaaat

SEQ ID NO: 161431 - DNA, 8 bp, Unknown
  misc_feature (1)..( 8): Result.004 file - promoters50/1027346
gataaaat

SEQ ID NO: 161432 - DNA, 8 bp, Unknown
  misc_feature (1)..( 8): Result.004 file - promoters50/1027346
cataaaat

SEQ ID NO: 161433 - DNA, 8 bp, Unknown
  misc_feature (1)..( 8): Result.004 file - promoters50/1027346
tgttattc

SEQ ID NO: 161434 - DNA, 8 bp, Unknown
  misc_feature (1)..( 8): Result.004 file - promoters50/1027346
tgttattt

SEQ ID NO: 161435 - DNA, 8 bp, Unknown
  misc_feature (1)..( 8): Result.004 file - promoters50/1027346
ggttgttt

SEQ ID NO: 161436 - DNA, 8 bp, Unknown
  misc_feature (1)..( 8): Result.004 file - promoters50/1027346
ctttataa

SEQ ID NO: 161437 - DNA, 8 bp, Unknown
  misc_feature (1)..( 8): Result.004 file - promoters50/1027346
atttataa

SEQ ID NO: 161438 - DNA, 8 bp, Unknown
  misc_feature (1)..( 8): Result.004 file - promoters50/1027346
atttatct

SEQ ID NO: 161439 - DNA, 8 bp, Unknown
  misc_feature (1)..( 8): Result.004 file - promoters50/1027346
aattaaat

SEQ ID NO: 161440 - DNA, 8 bp, Unknown
  misc_feature (1)..( 8): Result.004 file - promoters50/1027346
aatgaaat

SEQ ID NO: 161441 - DNA, 8 bp, Unknown
  misc_feature (1)..( 8): Result.004 file - promoters50/1027346
tgtgaaat

SEQ ID NO: 161442 - DNA, 8 bp, Unknown
  misc_feature (1)..( 8): Result.004 file - promoters50/1027346
attcaaca

SEQ ID NO: 161443 - DNA, 8 bp, Unknown
  misc_feature (1)..( 8): Result.004 file - promoters50/1027346
attaaact

SEQ ID NO: 161444 - DNA, 8 bp, Unknown
  misc_feature (1)..( 8): Result.004 file - promoters50/1027346
attcaact

SEQ ID NO: 161445 - DNA, 9 bp, Unknown
  misc_feature (1)..( 9): Result.004 file - promoters50/1027346
atgtaaaaa

SEQ ID NO: 161446 - DNA, 9 bp, Unknown
  misc_feature (1)..( 9): Result.004 file - promoters50/1027346
atgtgaaat

SEQ ID NO: 161447 - DNA, 9 bp, Unknown
  misc_feature (1)..( 9): Result.004 file - promoters50/1027346
gaatgaaat

SEQ ID NO: 161448 - DNA, 7 bp, Unknown
  misc_feature (1)..( 7): Result.004 file - promoters50/1027346
aatattt

SEQ ID NO: 161449 - DNA, 7 bp, Unknown
  misc_feature (1)..( 7): Result.004 file - promoters50/1027346
aatattt

SEQ ID NO: 161450 - DNA, 7 bp, Unknown
  misc_feature (1)..( 7): Result.004 file - promoters50/1027350
tatcttt

SEQ ID NO: 161451 - DNA, 11 bp, Unknown
  misc_feature (1)..( 11): Result.004 file - promoters50/1027350
aaacaaaatta

SEQ ID NO: 161452 - DNA, 11 bp, Unknown
  misc_feature (1)..( 11): Result.004 file - promoters50/1027350
aaacgaaatta

SEQ ID NO: 161453 - DNA, 11 bp, Unknown
  misc_feature (1)..( 11): Result.004 file - promoters50/1027350
atccaagattc

SEQ ID NO: 161454 - DNA, 11 bp, Unknown
  misc_feature (1)..( 11): Result.004 file - promoters50/1027350
aaacaatgtcc

SEQ ID NO: 161455 - DNA, 15 bp, Unknown
  misc_feature (1)..( 15): Result.004 file - promoters50/1027350
aaaattatacctttt

SEQ ID NO: 161456 - DNA, 15 bp, Unknown
  misc_feature (1)..( 15): Result.004 file - promoters50/1027350
aaaagtatctacact

SEQ ID NO: 161457 - DNA, 15 bp, Unknown
  misc_feature (1)..( 15): Result.004 file - promoters50/1027350
ttcattttacttttt

SEQ ID NO: 161458 - DNA, 15 bp, Unknown
  misc_feature (1)..( 15): Result.004 file - promoters50/1027350
tgtatttttgagtga

SEQ ID NO: 161459 - DNA, 8 bp, Unknown
  misc_feature (1)..( 8): Result.004 file - promoters50/1027350
gttccaat

SEQ ID NO: 161460 - DNA, 8 bp, Unknown
  misc_feature (1)..( 8): Result.004 file - promoters50/1027350
attccaaa

SEQ ID NO: 161461 - DNA, 8 bp, Unknown
  misc_feature (1)..( 8): Result.004 file - promoters50/1027350
tttcgaaa

SEQ ID NO: 161462 - DNA, 8 bp, Unknown
  misc_feature (1)..( 8): Result.004 file - promoters50/1027378
attccacg

SEQ ID NO: 161463 - DNA, 14 bp, Unknown
  misc_feature (1)..( 14): Result.004 file - promoters50/1027378
cttgaatcaatatt

SEQ ID NO: 161464 - DNA, 14 bp, Unknown
  misc_feature (1)..( 14): Result.004 file - promoters50/1027378
gttgaattcatctc

SEQ ID NO: 161465 - DNA, 14 bp, Unknown
  misc_feature (1)..( 14): Result.004 file - promoters50/1027378
attgattcaaaatt

SEQ ID NO: 161466 - DNA, 14 bp, Unknown
  misc_feature (1)..( 14): Result.004 file - promoters50/1027378
gttggattgttgtc

SEQ ID NO: 161467 - DNA, 14 bp, Unknown
  misc_feature (1)..( 14): Result.004 file - promoters50/1027378
gatgattcaataag

SEQ ID NO: 161468 - DNA, 14 bp, Unknown
  misc_feature (1)..( 14): Result.004 file - promoters50/1027378
aatgcttcatgaag

SEQ ID NO: 161469 - DNA, 18 bp, Unknown
  misc_feature (1)..( 18): Result.004 file - promoters50/1027378
ttgaatcaatattttatc

SEQ ID NO: 161470 - DNA, 18 bp, Unknown
  misc_feature (1)..( 18): Result.004 file - promoters50/1027378
acatatgaatatgttaaa

SEQ ID NO: 161471 - DNA, 18 bp, Unknown
  misc_feature (1)..( 18): Result.004 file - promoters50/1027378
atatatatatatttaaaa

SEQ ID NO: 161472 - DNA, 18 bp, Unknown
  misc_feature (1)..( 18): Result.004 file - promoters50/1027378
ttgattcaaaattctcta

SEQ ID NO: 161473 - DNA, 18 bp, Unknown
  misc_feature (1)..( 18): Result.004 file - promoters50/1027378
aagagtttgtattcaaat

SEQ ID NO: 161474 - DNA, 18 bp, Unknown
  misc_feature (1)..( 18): Result.004 file - promoters50/1027378
ttaacggatgattcaata

SEQ ID NO: 161475 - DNA, 18 bp, Unknown
  misc_feature (1)..( 18): Result.004 file - promoters50/1027399
tcatctgaaaaatcaaat

SEQ ID NO: 161476 - DNA, 14 bp, Unknown
  misc_feature (1)..( 14): Result.004 file - promoters50/1027399
ggtgatttttctat

SEQ ID NO: 161477 - DNA, 14 bp, Unknown
  misc_feature (1)..( 14): Result.004 file - promoters50/1027399
caattattttctta

SEQ ID NO: 161478 - DNA, 14 bp, Unknown
  misc_feature (1)..( 14): Result.004 file - promoters50/1027399
attttgttttctaa

SEQ ID NO: 161479 - DNA, 14 bp, Unknown
  misc_feature (1)..( 14): Result.004 file - promoters50/1027399
ataatatattcttg

SEQ ID NO: 161480 - DNA, 14 bp, Unknown
  misc_feature (1)..( 14): Result.004 file - promoters50/1027399
ataatatatgtaat

SEQ ID NO: 161481 - DNA, 14 bp, Unknown
  misc_feature (1)..( 14): Result.004 file - promoters50/1027399
atcttctatgcttg

SEQ ID NO: 161482 - DNA, 13 bp, Unknown
  misc_feature (1)..( 13): Result.004 file - promoters50/1027399
ttatatagaattg

SEQ ID NO: 161483 - DNA, 13 bp, Unknown
  misc_feature (1)..( 13): Result.004 file - promoters50/1027399
atttatagaatta

SEQ ID NO: 161484 - DNA, 13 bp, Unknown
  misc_feature (1)..( 13): Result.004 file - promoters50/1027399
aaagatagtattg

SEQ ID NO: 161485 - DNA, 13 bp, Unknown
  misc_feature (1)..( 13): Result.004 file - promoters50/1027399
ttacatagtaaca

SEQ ID NO: 161486 - DNA, 13 bp, Unknown
  misc_feature (1)..( 13): Result.004 file - promoters50/1027399
cgttatacaatat

SEQ ID NO: 161487 - DNA, 13 bp, Unknown
  misc_feature (1)..( 13): Result.004 file - promoters50/1027399
atttgtagtgaat

SEQ ID NO: 161488 - DNA, 13 bp, Unknown
  misc_feature (1)..( 13): Result.004 file - promoters50/1027399
tcatctatgtaaa

SEQ ID NO: 161489 - DNA, 13 bp, Unknown
  misc_feature (1)..( 13): Result.004 file - promoters50/1027399
aaaaatatataaa

SEQ ID NO: 161490 - DNA, 13 bp, Unknown
  misc_feature (1)..( 13): Result.004 file - promoters50/1027399
agtttaatacaaa

SEQ ID NO: 161491 - DNA, 13 bp, Unknown
  misc_feature (1)..( 13): Result.004 file - promoters50/1027399
agaaatatatata

SEQ ID NO: 161492 - DNA, 13 bp, Unknown
  misc_feature (1)..( 13): Result.004 file - promoters50/1027399
agaaagatagtat

SEQ ID NO: 161493 - DNA, 13 bp, Unknown
  misc_feature (1)..( 13): Result.004 file - promoters50/1027406
tttacgatataat

SEQ ID NO: 161494 - DNA, 16 bp, Unknown
  misc_feature (1)..( 16): Result.004 file - promoters50/1027406
cgataaaagctaatgt

SEQ ID NO: 161495 - DNA, 16 bp, Unknown
  misc_feature (1)..( 16): Result.004 file - promoters50/1027406
tttaaaaaactatata

SEQ ID NO: 161496 - DNA, 17 bp, Unknown
  misc_feature (1)..( 17): Result.004 file - promoters50/1027406
ttttaagaaagtatata

SEQ ID NO: 161497 - DNA, 17 bp, Unknown
  misc_feature (1)..( 17): Result.004 file - promoters50/1027406
tattattattctaagtt

SEQ ID NO: 161498 - DNA, 17 bp, Unknown
  misc_feature (1)..( 17): Result.004 file - promoters50/1027406
acatgaggttttaagga

SEQ ID NO: 161499 - DNA, 17 bp, Unknown
  misc_feature (1)..( 17): Result.004 file - promoters50/1027406
tagaaagaaatcataaa

SEQ ID NO: 161500 - DNA, 9 bp, Unknown
  misc_feature (1)..( 9): Result.004 file - promoters50/1027406
gtttttgaa

SEQ ID NO: 161501 - DNA, 9 bp, Unknown
  misc_feature (1)..( 9): Result.004 file - promoters50/1027406
ttttttgcc

SEQ ID NO: 161502 - DNA, 9 bp, Unknown
  misc_feature (1)..( 9): Result.004 file - promoters50/1027406
aattttgaa

SEQ ID NO: 161503 - DNA, 10 bp, Unknown
  misc_feature (1)..( 10): Result.004 file - promoters50/1027406
cttttctgcc

SEQ ID NO: 161504 - DNA, 10 bp, Unknown
  misc_feature (1)..( 10): Result.004 file - promoters50/1027406
agtttttgaa

SEQ ID NO: 161505 - DNA, 10 bp, Unknown
  misc_feature (1)..( 10): Result.004 file - promoters50/1027406
taatattggt

SEQ ID NO: 161506 - DNA, 10 bp, Unknown
  misc_feature (1)..( 10): Result.004 file - promoters50/1027406
ggattttaag

SEQ ID NO: 161507 - DNA, 10 bp, Unknown
  misc_feature (1)..( 10): Result.004 file - promoters50/1027406
atgttttaat

SEQ ID NO: 161508 - DNA, 10 bp, Unknown
  misc_feature (1)..( 10): Result.004 file - promoters50/1027406
gtattttact

SEQ ID NO: 161509 - DNA, 11 bp, Unknown
  misc_feature (1)..( 11): Result.004 file - promoters50/1027406
ttgtctttaag

SEQ ID NO: 161510 - DNA, 10 bp, Unknown
  misc_feature (1)..( 10): Result.004 file - promoters50/1027406
atgttgtaag

SEQ ID NO: 161511 - DNA, 10 bp, Unknown
  misc_feature (1)..( 10): Result.004 file - promoters50/1027406
aatttttacc

SEQ ID NO: 161512 - DNA, 11 bp, Unknown
  misc_feature (1)..( 11): Result.004 file - promoters50/1027406
aaattcttata

SEQ ID NO: 161513 - DNA, 16 bp, Unknown
  misc_feature (1)..( 16): Result.004 file - promoters50/1027406
tttgaaattggtagag

SEQ ID NO: 161514 - DNA, 16 bp, Unknown
  misc_feature (1)..( 16): Result.004 file - promoters50/1027406
cttgtaatacccagta

SEQ ID NO: 161515 - DNA, 17 bp, Unknown
  misc_feature (1)..( 17): Result.004 file - promoters50/1027406
attagaacttgggagaa

SEQ ID NO: 161516 - DNA, 17 bp, Unknown
  misc_feature (1)..( 17): Result.004 file - promoters50/1027406
tttagaaaatgggattt

SEQ ID NO: 161517 - DNA, 17 bp, Unknown
  misc_feature (1)..( 17): Result.004 file - promoters50/1027406
atcagaaaattacattt

SEQ ID NO: 161518 - DNA, 17 bp, Unknown
  misc_feature (1)..( 17): Result.004 file - promoters50/1027406
gaaccaaaatcggattt

SEQ ID NO: 161519 - DNA, 12 bp, Unknown
  misc_feature (1)..( 12): Result.004 file - promoters50/1027406
ttcgataaaagc

SEQ ID NO: 161520 - DNA, 12 bp, Unknown
  misc_feature (1)..( 12): Result.004 file - promoters50/1027406
aaggataaatta

SEQ ID NO: 161521 - DNA, 12 bp, Unknown
  misc_feature (1)..( 12): Result.004 file - promoters50/1027406
gtatataaaata

SEQ ID NO: 161522 - DNA, 12 bp, Unknown
  misc_feature (1)..( 12): Result.004 file - promoters50/1027406
aactatatatta

SEQ ID NO: 161523 - DNA, 12 bp, Unknown
  misc_feature (1)..( 12): Result.004 file - promoters50/1027406
ctagatagtcac

SEQ ID NO: 161524 - DNA, 12 bp, Unknown
  misc_feature (1)..( 12): Result.004 file - promoters50/1027406
ctatataatgaa

SEQ ID NO: 161525 - DNA, 12 bp, Unknown
  misc_feature (1)..( 12): Result.004 file - promoters50/1027406
attacaacaaaa

SEQ ID NO: 161526 - DNA, 12 bp, Unknown
  misc_feature (1)..( 12): Result.004 file - promoters50/1027406
tattcaaaaaaa

SEQ ID NO: 161527 - DNA, 12 bp, Unknown
  misc_feature (1)..( 12): Result.004 file - promoters50/1027406
tttagaacatct

SEQ ID NO: 161528 - DNA, 12 bp, Unknown
  misc_feature (1)..( 12): Result.004 file - promoters50/1027406
ttatacacaaaa

SEQ ID NO: 161529 - DNA, 12 bp, Unknown
  misc_feature (1)..( 12): Result.004 file - promoters50/1027406
tatacaacaatt

SEQ ID NO: 161530 - DNA, 12 bp, Unknown
  misc_feature (1)..( 12): Result.004 file - promoters50/1027406
tttagagtgaca

SEQ ID NO: 161531 - DNA, 12 bp, Unknown
  misc_feature (1)..( 12): Result.004 file - promoters50/1027406
aatacaaactgt

SEQ ID NO: 161532 - DNA, 14 bp, Unknown
  misc_feature (1)..( 14): Result.004 file - promoters50/1027406
cgacatttttttct

SEQ ID NO: 161533 - DNA, 14 bp, Unknown
  misc_feature (1)..( 14): Result.004 file - promoters50/1027406
aaagatttttctga

SEQ ID NO: 161534 - DNA, 15 bp, Unknown
  misc_feature (1)..( 15): Result.004 file - promoters50/1027406
ataaattcttttctt

SEQ ID NO: 161535 - DNA, 15 bp, Unknown
  misc_feature (1)..( 15): Result.004 file - promoters50/1027406
tattattattctaag

SEQ ID NO: 161536 - DNA, 15 bp, Unknown
  misc_feature (1)..( 15): Result.004 file - promoters50/1027406
tccaattttaagaaa

SEQ ID NO: 161537 - DNA, 15 bp, Unknown
  misc_feature (1)..( 15): Result.004 file - promoters50/1027452
ccaaatttggtgaat

SEQ ID NO: 161538 - DNA, 11 bp, Unknown
  misc_feature (1)..( 11): Result.004 file - promoters50/1027452
taatttcttaa

SEQ ID NO: 161539 - DNA, 11 bp, Unknown
  misc_feature (1)..( 11): Result.004 file - promoters50/1027452
taatttaaccc

SEQ ID NO: 161540 - DNA, 11 bp, Unknown
  misc_feature (1)..( 11): Result.004 file - promoters50/1027452
aaatttcgtaa

SEQ ID NO: 161541 - DNA, 11 bp, Unknown
  misc_feature (1)..( 11): Result.004 file - promoters50/1027456
tgattgcgtct

SEQ ID NO: 161542 - DNA, 10 bp, Unknown
  misc_feature (1)..( 10): Result.004 file - promoters50/1027456
ttaatttctg

SEQ ID NO: 161543 - DNA, 10 bp, Unknown
  misc_feature (1)..( 10): Result.004 file - promoters50/1027456
ttattttctt

SEQ ID NO: 161544 - DNA, 10 bp, Unknown
  misc_feature (1)..( 10): Result.004 file - promoters50/1027456
ataaattcat

SEQ ID NO: 161545 - DNA, 10 bp, Unknown
  misc_feature (1)..( 10): Result.004 file - promoters50/1027456
taaatttcga

SEQ ID NO: 161546 - DNA, 10 bp, Unknown
  misc_feature (1)..( 10): Result.004 file - promoters50/1027456
aatctttctt

SEQ ID NO: 161547 - DNA, 10 bp, Unknown
  misc_feature (1)..( 10): Result.004 file - promoters50/1027456
aaaaattcaa

SEQ ID NO: 161548 - DNA, 9 bp, Unknown
  misc_feature (1)..( 9): Result.004 file - promoters50/1027456
aaaatcaaa

SEQ ID NO: 161549 - DNA, 9 bp, Unknown
  misc_feature (1)..( 9): Result.004 file - promoters50/1027456
taaaacaat

SEQ ID NO: 161550 - DNA, 10 bp, Unknown
  misc_feature (1)..( 10): Result.004 file - promoters50/1027456
taaattcatt

SEQ ID NO: 161551 - DNA, 10 bp, Unknown
  misc_feature (1)..( 10): Result.004 file - promoters50/1027456
aaaattcaaa

SEQ ID NO: 161552 - DNA, 10 bp, Unknown
  misc_feature (1)..( 10): Result.004 file - promoters50/1027456
aaaaaacaat

SEQ ID NO: 161553 - DNA, 10 bp, Unknown
  misc_feature (1)..( 10): Result.004 file - promoters50/1027460
taaatttcga

SEQ ID NO: 161554 - DNA, 13 bp, Unknown
  misc_feature (1)..( 13): Result.004 file - promoters50/1027460
tgaagaatatatc

SEQ ID NO: 161555 - DNA, 13 bp, Unknown
  misc_feature (1)..( 13): Result.004 file - promoters50/1027460
ttttgaatctata

SEQ ID NO: 161556 - DNA, 13 bp, Unknown
  misc_feature (1)..( 13): Result.004 file - promoters50/1027460
agaaaaatatatc

SEQ ID NO: 161557 - DNA, 13 bp, Unknown
  misc_feature (1)..( 13): Result.004 file - promoters50/1027460
acattaatataaa

SEQ ID NO: 161558 - DNA, 13 bp, Unknown
  misc_feature (1)..( 13): Result.004 file - promoters50/1027460
actaaaataactc

SEQ ID NO: 161559 - DNA, 13 bp, Unknown
  misc_feature (1)..( 13): Result.004 file - promoters50/1027460
ggaaaaaaaaatt

SEQ ID NO: 161560 - DNA, 13 bp, Unknown
  misc_feature (1)..( 13): Result.004 file - promoters50/1027460
actgaaattttag

SEQ ID NO: 161561 - DNA, 11 bp, Unknown
  misc_feature (1)..( 11): Result.004 file - promoters50/1027460
taaaatatgat

SEQ ID NO: 161562 - DNA, 11 bp, Unknown
  misc_feature (1)..( 11): Result.004 file - promoters50/1027460
aaaaataaagt

SEQ ID NO: 161563 - DNA, 11 bp, Unknown
  misc_feature (1)..( 11): Result.004 file - promoters50/1027460
taaaagatgat

SEQ ID NO: 161564 - DNA, 11 bp, Unknown
  misc_feature (1)..( 11): Result.004 file - promoters50/1027460
aaaaatagttg

SEQ ID NO: 161565 - DNA, 11 bp, Unknown
  misc_feature (1)..( 11): Result.004 file - promoters50/1027460
taaaataaaaa

SEQ ID NO: 161566 - DNA, 11 bp, Unknown
  misc_feature (1)..( 11): Result.004 file - promoters50/1027460
acaaatagtct

SEQ ID NO: 161567 - DNA, 13 bp, Unknown
  misc_feature (1)..( 13): Result.004 file - promoters50/1027460
cccaaaaacataa

SEQ ID NO: 161568 - DNA, 13 bp, Unknown
  misc_feature (1)..( 13): Result.004 file - promoters50/1027460
tttaaatacaatt

SEQ ID NO: 161569 - DNA, 13 bp, Unknown
  misc_feature (1)..( 13): Result.004 file - promoters50/1027460
gacaaaaatattt

SEQ ID NO: 161570 - DNA, 13 bp, Unknown
  misc_feature (1)..( 13): Result.004 file - promoters50/1027460
cccaaaaaataat

SEQ ID NO: 161571 - DNA, 13 bp, Unknown
  misc_feature (1)..( 13): Result.004 file - promoters50/1027460
aggaaaaatagta

SEQ ID NO: 161572 - DNA, 13 bp, Unknown
  misc_feature (1)..( 13): Result.004 file - promoters50/1027467
acggtatataatt

SEQ ID NO: 161573 - DNA, 6 bp, Unknown
  misc_feature (1)..( 6): Result.004 file - promoters50/1027467
tgtaaa

SEQ ID NO: 161574 - DNA, 6 bp, Unknown
  misc_feature (1)..( 6): Result.004 file - promoters50/1027467
tgtaaa

SEQ ID NO: 161575 - DNA, 7 bp, Unknown
  misc_feature (1)..( 7): Result.004 file - promoters50/1027467
tgtcaaa

SEQ ID NO: 161576 - DNA, 8 bp, Unknown
  misc_feature (1)..( 8): Result.004 file - promoters50/1027467
tgtaaaaa

SEQ ID NO: 161577 - DNA, 8 bp, Unknown
  misc_feature (1)..( 8): Result.004 file - promoters50/1027467
attaaaaa

SEQ ID NO: 161578 - DNA, 8 bp, Unknown
  misc_feature (1)..( 8): Result.004 file - promoters50/1027492
tgtcaaac

SEQ ID NO: 161579 - DNA, 21 bp, Unknown
  misc_feature (1)..( 21): Result.004 file - promoters50/1027492
tcagtatataaatcccttaaa

SEQ ID NO: 161580 - DNA, 21 bp, Unknown
  misc_feature (1)..( 21): Result.004 file - promoters50/1027492
tcttataaataatctcttaaa

SEQ ID NO: 161581 - DNA, 21 bp, Unknown
  misc_feature (1)..( 21): Result.004 file - promoters50/1027492
cttatttatgaatccatataa

SEQ ID NO: 161582 - DNA, 21 bp, Unknown
  misc_feature (1)..( 21): Result.004 file - promoters50/1027492
ccgttatataaatccttcact

SEQ ID NO: 161583 - DNA, 21 bp, Unknown
  misc_feature (1)..( 21): Result.004 file - promoters50/1027492
gttttatactcacagtcaaag

SEQ ID NO: 161584 - DNA, 21 bp, Unknown
  misc_feature (1)..( 21): Result.004 file - promoters50/1027523
tatttatatagataagcaatt

SEQ ID NO: 161585 - DNA, 10 bp, Unknown
  misc_feature (1)..( 10): Result.004 file - promoters50/1027523
ttttcatata

SEQ ID NO: 161586 - DNA, 10 bp, Unknown
  misc_feature (1)..( 10): Result.004 file - promoters50/1027523
ctttcttata

SEQ ID NO: 161587 - DNA, 10 bp, Unknown
  misc_feature (1)..( 10): Result.004 file - promoters50/1027590
ttttaataag

SEQ ID NO: 161588 - DNA, 11 bp, Unknown
  misc_feature (1)..( 11): Result.004 file - promoters50/1027590
tatatttttaa

SEQ ID NO: 161589 - DNA, 11 bp, Unknown
  misc_feature (1)..( 11): Result.004 file - promoters50/1027590
gtgattttttt

SEQ ID NO: 161590 - DNA, 11 bp, Unknown
  misc_feature (1)..( 11): Result.004 file - promoters50/1027590
ataatttaatc

SEQ ID NO: 161591 - DNA, 11 bp, Unknown
  misc_feature (1)..( 11): Result.004 file - promoters50/1027590
atgctttttaa

SEQ ID NO: 161592 - DNA, 12 bp, Unknown
  misc_feature (1)..( 12): Result.004 file - promoters50/1027590
gagattctttgg

SEQ ID NO: 161593 - DNA, 12 bp, Unknown
  misc_feature (1)..( 12): Result.004 file - promoters50/1027590
taaatctttgtt

SEQ ID NO: 161594 - DNA, 14 bp, Unknown
  misc_feature (1)..( 14): Result.004 file - promoters50/1027590
aacattagtagaaa

SEQ ID NO: 161595 - DNA, 14 bp, Unknown
  misc_feature (1)..( 14): Result.004 file - promoters50/1027590
gtttttagtaaacc

SEQ ID NO: 161596 - DNA, 14 bp, Unknown
  misc_feature (1)..( 14): Result.004 file - promoters50/1027590
tatttttgtatcaa

SEQ ID NO: 161597 - DNA, 14 bp, Unknown
  misc_feature (1)..( 14): Result.004 file - promoters50/1027590
tattttttgtatcc

SEQ ID NO: 161598 - DNA, 14 bp, Unknown
  misc_feature (1)..( 14): Result.004 file - promoters50/1027590
tagtttataggaaa

SEQ ID NO: 161599 - DNA, 14 bp, Unknown
  misc_feature (1)..( 14): Result.004 file - promoters50/1027596
cagtttattatgat

SEQ ID NO: 161600 - DNA, 13 bp, Unknown
  misc_feature (1)..( 13): Result.004 file - promoters50/1027596
ttactttctttga

SEQ ID NO: 161601 - DNA, 13 bp, Unknown
  misc_feature (1)..( 13): Result.004 file - promoters50/1027596
tatttttgttttc

SEQ ID NO: 161602 - DNA, 13 bp, Unknown
  misc_feature (1)..( 13): Result.004 file - promoters50/1027596
aaactttctggga

SEQ ID NO: 161603 - DNA, 13 bp, Unknown
  misc_feature (1)..( 13): Result.004 file - promoters50/1027596
ttattttctttat

SEQ ID NO: 161604 - DNA, 13 bp, Unknown
  misc_feature (1)..( 13): Result.004 file - promoters50/1027596
cgattctcttact

SEQ ID NO: 161605 - DNA, 13 bp, Unknown
  misc_feature (1)..( 13): Result.004 file - promoters50/1027596
attcttcctggga

SEQ ID NO: 161606 - DNA, 13 bp, Unknown
  misc_feature (1)..( 13): Result.004 file - promoters50/1027596
ttactttctggca

SEQ ID NO: 161607 - DNA, 11 bp, Unknown
  misc_feature (1)..( 11): Result.004 file - promoters50/1027596
gattagaaaca

SEQ ID NO: 161608 - DNA, 11 bp, Unknown
  misc_feature (1)..( 11): Result.004 file - promoters50/1027596
aatttgaaaca

SEQ ID NO: 161609 - DNA, 11 bp, Unknown
  misc_feature (1)..( 11): Result.004 file - promoters50/1027596
cattcgaaaac

SEQ ID NO: 161610 - DNA, 11 bp, Unknown
  misc_feature (1)..( 11): Result.004 file - promoters50/1027596
aatttgggcct

SEQ ID NO: 161611 - DNA, 11 bp, Unknown
  misc_feature (1)..( 11): Result.004 file - promoters50/1027596
cgattgaaata

SEQ ID NO: 161612 - DNA, 11 bp, Unknown
  misc_feature (1)..( 11): Result.004 file - promoters50/1027652
catttgatgaa

SEQ ID NO: 161613 - DNA, 10 bp, Unknown
  misc_feature (1)..( 10): Result.004 file - promoters50/1027652
atcaattaat

SEQ ID NO: 161614 - DNA, 10 bp, Unknown
  misc_feature (1)..( 10): Result.004 file - promoters50/1027652
cacaactaat

SEQ ID NO: 161615 - DNA, 10 bp, Unknown
  misc_feature (1)..( 10): Result.004 file - promoters50/1027652
atcaattgta

SEQ ID NO: 161616 - DNA, 10 bp, Unknown
  misc_feature (1)..( 10): Result.004 file - promoters50/1027652
atttactaat

SEQ ID NO: 161617 - DNA, 10 bp, Unknown
  misc_feature (1)..( 10): Result.004 file - promoters50/1027652
aattattaaa

SEQ ID NO: 161618 - DNA, 9 bp, Unknown
  misc_feature (1)..( 9): Result.004 file - promoters50/1027652
ttaagaaaa

SEQ ID NO: 161619 - DNA, 9 bp, Unknown
  misc_feature (1)..( 9): Result.004 file - promoters50/1027652
ttaagaagc

SEQ ID NO: 161620 - DNA, 9 bp, Unknown
  misc_feature (1)..( 9): Result.004 file - promoters50/1027652
ataaaaaaa

SEQ ID NO: 161621 - DNA, 9 bp, Unknown
  misc_feature (1)..( 9): Result.004 file - promoters50/1027652
caaaggaaa

SEQ ID NO: 161622 - DNA, 9 bp, Unknown
  misc_feature (1)..( 9): Result.004 file - promoters50/1027652
tcaaaaaag

SEQ ID NO: 161623 - DNA, 12 bp, Unknown
  misc_feature (1)..( 12): Result.004 file - promoters50/1027652
acaaattcaaat

SEQ ID NO: 161624 - DNA, 12 bp, Unknown
  misc_feature (1)..( 12): Result.004 file - promoters50/1027652
acatatttctaa

SEQ ID NO: 161625 - DNA, 12 bp, Unknown
  misc_feature (1)..( 12): Result.004 file - promoters50/1027652
ctaaattcctat

SEQ ID NO: 161626 - DNA, 12 bp, Unknown
  misc_feature (1)..( 12): Result.004 file - promoters50/1027652
tcaaattcgaat

SEQ ID NO: 161627 - DNA, 12 bp, Unknown
  misc_feature (1)..( 12): Result.004 file - promoters50/1027652
ccaaaatatctc

SEQ ID NO: 161628 - DNA, 12 bp, Unknown
  misc_feature (1)..( 12): Result.004 file - promoters50/1027652
tcaaagtccaca

SEQ ID NO: 161629 - DNA, 11 bp, Unknown
  misc_feature (1)..( 11): Result.004 file - promoters50/1027652
aaaaattattt

SEQ ID NO: 161630 - DNA, 11 bp, Unknown
  misc_feature (1)..( 11): Result.004 file - promoters50/1027652
aaaaattaagg

SEQ ID NO: 161631 - DNA, 11 bp, Unknown
  misc_feature (1)..( 11): Result.004 file - promoters50/1027652
caaaatcaaga

SEQ ID NO: 161632 - DNA, 11 bp, Unknown
  misc_feature (1)..( 11): Result.004 file - promoters50/1027652
ttagatctaga

SEQ ID NO: 161633 - DNA, 11 bp, Unknown
  misc_feature (1)..( 11): Result.004 file - promoters50/1027725
gtaaattattg

SEQ ID NO: 161634 - DNA, 10 bp, Unknown
  misc_feature (1)..( 10): Result.004 file - promoters50/1027725
ttgttttatt

SEQ ID NO: 161635 - DNA, 10 bp, Unknown
  misc_feature (1)..( 10): Result.004 file - promoters50/1027725
atgtttttgc

SEQ ID NO: 161636 - DNA, 10 bp, Unknown
  misc_feature (1)..( 10): Result.004 file - promoters50/1027725
gcgtttgatt

SEQ ID NO: 161637 - DNA, 11 bp, Unknown
  misc_feature (1)..( 11): Result.004 file - promoters50/1027725
ttgtatttgga

SEQ ID NO: 161638 - DNA, 11 bp, Unknown
  misc_feature (1)..( 11): Result.004 file - promoters50/1027725
ttggattaatg

SEQ ID NO: 161639 - DNA, 11 bp, Unknown
  misc_feature (1)..( 11): Result.004 file - promoters50/1027725
ttggatagctt

SEQ ID NO: 161640 - DNA, 14 bp, Unknown
  misc_feature (1)..( 14): Result.004 file - promoters50/1027725
atagtagaatagct

SEQ ID NO: 161641 - DNA, 14 bp, Unknown
  misc_feature (1)..( 14): Result.004 file - promoters50/1027725
atagaagaaacaaa

SEQ ID NO: 161642 - DNA, 14 bp, Unknown
  misc_feature (1)..( 14): Result.004 file - promoters50/1027725
gttgtataatttta

SEQ ID NO: 161643 - DNA, 14 bp, Unknown
  misc_feature (1)..( 14): Result.004 file - promoters50/1027725
agttaataaaagtt

SEQ ID NO: 161644 - DNA, 14 bp, Unknown
  misc_feature (1)..( 14): Result.004 file - promoters50/1027725
gagttttaacagtt

SEQ ID NO: 161645 - DNA, 14 bp, Unknown
  misc_feature (1)..( 14): Result.004 file - promoters50/1027725
tttagataaatttg

SEQ ID NO: 161646 - DNA, 14 bp, Unknown
  misc_feature (1)..( 14): Result.004 file - promoters50/1027725
gagacctaagttta

SEQ ID NO: 161647 - DNA, 14 bp, Unknown
  misc_feature (1)..( 14): Result.004 file - promoters50/1027760
atgacataaatttt

SEQ ID NO: 161648 - DNA, 14 bp, Unknown
  misc_feature (1)..( 14): Result.004 file - promoters50/1027760
ataaatgaaatttc

SEQ ID NO: 161649 - DNA, 14 bp, Unknown
  misc_feature (1)..( 14): Result.004 file - promoters50/1027760
ataactgagattga

SEQ ID NO: 161650 - DNA, 14 bp, Unknown
  misc_feature (1)..( 14): Result.004 file - promoters50/1027760
atacatgaatttag

SEQ ID NO: 161651 - DNA, 14 bp, Unknown
  misc_feature (1)..( 14): Result.004 file - promoters50/1027760
agagtcaaaatttc

SEQ ID NO: 161652 - DNA, 14 bp, Unknown
  misc_feature (1)..( 14): Result.004 file - promoters50/1027760
atacttcagaacac

SEQ ID NO: 161653 - DNA, 14 bp, Unknown
  misc_feature (1)..( 14): Result.004 file - promoters50/1027760
atagctgaaaacga

SEQ ID NO: 161654 - DNA, 12 bp, Unknown
  misc_feature (1)..( 12): Result.004 file - promoters50/1027760
atctcactttta

SEQ ID NO: 161655 - DNA, 12 bp, Unknown
  misc_feature (1)..( 12): Result.004 file - promoters50/1027760
atatcatttttc

SEQ ID NO: 161656 - DNA, 12 bp, Unknown
  misc_feature (1)..( 12): Result.004 file - promoters50/1027760
ctttcattcctt

SEQ ID NO: 161657 - DNA, 12 bp, Unknown
  misc_feature (1)..( 12): Result.004 file - promoters50/1027760
ttttcatccaca

SEQ ID NO: 161658 - DNA, 12 bp, Unknown
  misc_feature (1)..( 12): Result.004 file - promoters50/1027760
aaaccattttgg

SEQ ID NO: 161659 - DNA, 12 bp, Unknown
  misc_feature (1)..( 12): Result.004 file - promoters50/1027760
ttagcgtttttc

SEQ ID NO: 161660 - DNA, 14 bp, Unknown
  misc_feature (1)..( 14): Result.004 file - promoters50/1027760
catattttgtaaat

SEQ ID NO: 161661 - DNA, 14 bp, Unknown
  misc_feature (1)..( 14): Result.004 file - promoters50/1027760
aataatttacgaaa

SEQ ID NO: 161662 - DNA, 14 bp, Unknown
  misc_feature (1)..( 14): Result.004 file - promoters50/1027760
cttaagttactacc

SEQ ID NO: 161663 - DNA, 14 bp, Unknown
  misc_feature (1)..( 14): Result.004 file - promoters50/1027760
aatagtttactatt

SEQ ID NO: 161664 - DNA, 15 bp, Unknown
  misc_feature (1)..( 15): Result.004 file - promoters50/1027760
tttaatgttactaat

SEQ ID NO: 161665 - DNA, 15 bp, Unknown
  misc_feature (1)..( 15): Result.004 file - promoters50/1027762
tttattgttacaaat

SEQ ID NO: 161666 - DNA, 8 bp, Unknown
  misc_feature (1)..( 8): Result.004 file - promoters50/1027762
ttgttttg

SEQ ID NO: 161667 - DNA, 8 bp, Unknown
  misc_feature (1)..( 8): Result.004 file - promoters50/1027762
aagttttg

SEQ ID NO: 161668 - DNA, 8 bp, Unknown
  misc_feature (1)..( 8): Result.004 file - promoters50/1027762
ttgattta

SEQ ID NO: 161669 - DNA, 8 bp, Unknown
  misc_feature (1)..( 8): Result.004 file - promoters50/1027762
aattaaaa

SEQ ID NO: 161670 - DNA, 8 bp, Unknown
  misc_feature (1)..( 8): Result.004 file - promoters50/1027762
aataaaaa

SEQ ID NO: 161671 - DNA, 8 bp, Unknown
  misc_feature (1)..( 8): Result.004 file - promoters50/1027762
tataaaat

SEQ ID NO: 161672 - DNA, 7 bp, Unknown
  misc_feature (1)..( 7): Result.004 file - promoters50/1027762
agtaaaa

SEQ ID NO: 161673 - DNA, 7 bp, Unknown
  misc_feature (1)..( 7): Result.004 file - promoters50/1027762
agtaaaa

SEQ ID NO: 161674 - DNA, 7 bp, Unknown
  misc_feature (1)..( 7): Result.004 file - promoters50/1027765
agtaaaa

SEQ ID NO: 161675 - DNA, 9 bp, Unknown
  misc_feature (1)..( 9): Result.004 file - promoters50/1027765
aattacaaa

SEQ ID NO: 161676 - DNA, 9 bp, Unknown
  misc_feature (1)..( 9): Result.004 file - promoters50/1027765
cgttagaaa

SEQ ID NO: 161677 - DNA, 9 bp, Unknown
  misc_feature (1)..( 9): Result.004 file - promoters50/1027765
ccttataaa

SEQ ID NO: 161678 - DNA, 9 bp, Unknown
  misc_feature (1)..( 9): Result.004 file - promoters50/1027765
aaatacaac

SEQ ID NO: 161679 - DNA, 9 bp, Unknown
  misc_feature (1)..( 9): Result.004 file - promoters50/1027765
aaaaacaat

SEQ ID NO: 161680 - DNA, 9 bp, Unknown
  misc_feature (1)..( 9): Result.004 file - promoters50/1027765
tcaaaaaaa

SEQ ID NO: 161681 - DNA, 12 bp, Unknown
  misc_feature (1)..( 12): Result.004 file - promoters50/1027765
ctctaaaaattg

SEQ ID NO: 161682 - DNA, 12 bp, Unknown
  misc_feature (1)..( 12): Result.004 file - promoters50/1027765
aaataaaaattg

SEQ ID NO: 161683 - DNA, 12 bp, Unknown
  misc_feature (1)..( 12): Result.004 file - promoters50/1027765
cattaataatcc

SEQ ID NO: 161684 - DNA, 12 bp, Unknown
  misc_feature (1)..( 12): Result.004 file - promoters50/1027765
ttttaaaaactt

SEQ ID NO: 161685 - DNA, 12 bp, Unknown
  misc_feature (1)..( 12): Result.004 file - promoters50/1027765
gaataaaaaaat

SEQ ID NO: 161686 - DNA, 12 bp, Unknown
  misc_feature (1)..( 12): Result.004 file - promoters50/1027850
aaaaaaaaatat

SEQ ID NO: 161687 - DNA, 16 bp, Unknown
  misc_feature (1)..( 16): Result.004 file - promoters50/1027850
tcgcttctgaacacgg

SEQ ID NO: 161688 - DNA, 16 bp, Unknown
  misc_feature (1)..( 16): Result.004 file - promoters50/1027850
tcgattctgattggag

SEQ ID NO: 161689 - DNA, 16 bp, Unknown
  misc_feature (1)..( 16): Result.004 file - promoters50/1027850
cggcttctgatgagaa

SEQ ID NO: 161690 - DNA, 16 bp, Unknown
  misc_feature (1)..( 16): Result.004 file - promoters50/1027850
cttgctctaattgctt

SEQ ID NO: 161691 - DNA, 16 bp, Unknown
  misc_feature (1)..( 16): Result.004 file - promoters50/1027850
aggatcttaaatgctt

SEQ ID NO: 161692 - DNA, 16 bp, Unknown
  misc_feature (1)..( 16): Result.004 file - promoters50/1027869
tatgatctgattttaa

SEQ ID NO: 161693 - DNA, 16 bp, Unknown
  misc_feature (1)..( 16): Result.004 file - promoters50/1027869
atcgtttacatcaaat

SEQ ID NO: 161694 - DNA, 16 bp, Unknown
  misc_feature (1)..( 16): Result.004 file - promoters50/1027869
atctttttataattta

SEQ ID NO: 161695 - DNA, 16 bp, Unknown
  misc_feature (1)..( 16): Result.004 file - promoters50/1027869
ctcgtctactccttgt

SEQ ID NO: 161696 - DNA, 16 bp, Unknown
  misc_feature (1)..( 16): Result.004 file - promoters50/1027869
ttcttttatttttctt

SEQ ID NO: 161697 - DNA, 16 bp, Unknown
  misc_feature (1)..( 16): Result.004 file - promoters50/1027869
gcattttcttatttta

SEQ ID NO: 161698 - DNA, 9 bp, Unknown
  misc_feature (1)..( 9): Result.004 file - promoters50/1027869
aatttatta

SEQ ID NO: 161699 - DNA, 9 bp, Unknown
  misc_feature (1)..( 9): Result.004 file - promoters50/1027869
atattatta

SEQ ID NO: 161700 - DNA, 9 bp, Unknown
  misc_feature (1)..( 9): Result.004 file - promoters50/1027869
attttctta

SEQ ID NO: 161701 - DNA, 9 bp, Unknown
  misc_feature (1)..( 9): Result.004 file - promoters50/1027873
attttctat

SEQ ID NO: 161702 - DNA, 7 bp, Unknown
  misc_feature (1)..( 7): Result.004 file - promoters50/1027873
ttttggt

SEQ ID NO: 161703 - DNA, 7 bp, Unknown
  misc_feature (1)..( 7): Result.004 file - promoters50/1027873
ttttgga

SEQ ID NO: 161704 - DNA, 7 bp, Unknown
  misc_feature (1)..( 7): Result.004 file - promoters50/1027873
ttttggt

SEQ ID NO: 161705 - DNA, 7 bp, Unknown
  misc_feature (1)..( 7): Result.004 file - promoters50/1027873
ttttggg

SEQ ID NO: 161706 - DNA, 13 bp, Unknown
  misc_feature (1)..( 13): Result.004 file - promoters50/1027873
cgcaaaaacatat

SEQ ID NO: 161707 - DNA, 13 bp, Unknown
  misc_feature (1)..( 13): Result.004 file - promoters50/1027873
accaaaatcatat

SEQ ID NO: 161708 - DNA, 13 bp, Unknown
  misc_feature (1)..( 13): Result.004 file - promoters50/1027873
tcacctaacttat

SEQ ID NO: 161709 - DNA, 13 bp, Unknown
  misc_feature (1)..( 13): Result.004 file - promoters50/1027873
accagaatcgctt

SEQ ID NO: 161710 - DNA, 8 bp, Unknown
  misc_feature (1)..( 8): Result.004 file - promoters50/1027873
gttaacaa

SEQ ID NO: 161711 - DNA, 8 bp, Unknown
  misc_feature (1)..( 8): Result.004 file - promoters50/1027873
tttagcaa

SEQ ID NO: 161712 - DNA, 8 bp, Unknown
  misc_feature (1)..( 8): Result.004 file - promoters50/1027873
attaacaa

SEQ ID NO: 161713 - DNA, 9 bp, Unknown
  misc_feature (1)..( 9): Result.004 file - promoters50/1027873
attcagctg

SEQ ID NO: 161714 - DNA, 15 bp, Unknown
  misc_feature (1)..( 15): Result.004 file - promoters50/1027873
attgtatctttttaa

SEQ ID NO: 161715 - DNA, 15 bp, Unknown
  misc_feature (1)..( 15): Result.004 file - promoters50/1027873
attgtatttttgtaa

SEQ ID NO: 161716 - DNA, 15 bp, Unknown
  misc_feature (1)..( 15): Result.004 file - promoters50/1027873
tatgtataatattaa

SEQ ID NO: 161717 - DNA, 15 bp, Unknown
  misc_feature (1)..( 15): Result.004 file - promoters50/1027877
acaaggtttttggga

SEQ ID NO: 161718 - DNA, 9 bp, Unknown
  misc_feature (1)..( 9): Result.004 file - promoters50/1027877
atcaggaaa

SEQ ID NO: 161719 - DNA, 9 bp, Unknown
  misc_feature (1)..( 9): Result.004 file - promoters50/1027877
atcaagaat

SEQ ID NO: 161720 - DNA, 9 bp, Unknown
  misc_feature (1)..( 9): Result.004 file - promoters50/1027877
ttaaggaaa

SEQ ID NO: 161721 - DNA, 9 bp, Unknown
  misc_feature (1)..( 9): Result.004 file - promoters50/1027877
atcaagagg

SEQ ID NO: 161722 - DNA, 8 bp, Unknown
  misc_feature (1)..( 8): Result.004 file - promoters50/1027877
caagaact

SEQ ID NO: 161723 - DNA, 8 bp, Unknown
  misc_feature (1)..( 8): Result.004 file - promoters50/1027877
caagaatt

SEQ ID NO: 161724 - DNA, 8 bp, Unknown
  misc_feature (1)..( 8): Result.004 file - promoters50/1027877
gaagaatg

SEQ ID NO: 161725 - DNA, 8 bp, Unknown
  misc_feature (1)..( 8): Result.004 file - promoters50/1027885
gaagaatt

SEQ ID NO: 161726 - DNA, 8 bp, Unknown
  misc_feature (1)..( 8): Result.004 file - promoters50/1027885
aaattcaa

SEQ ID NO: 161727 - DNA, 8 bp, Unknown
  misc_feature (1)..( 8): Result.004 file - promoters50/1027885
aaattctt

SEQ ID NO: 161728 - DNA, 8 bp, Unknown
  misc_feature (1)..( 8): Result.004 file - promoters50/1027885
taatactt

SEQ ID NO: 161729 - DNA, 7 bp, Unknown
  misc_feature (1)..( 7): Result.004 file - promoters50/1027885
tttgaaa

SEQ ID NO: 161730 - DNA, 7 bp, Unknown
  misc_feature (1)..( 7): Result.004 file - promoters50/1027885
tttcaaa

SEQ ID NO: 161731 - DNA, 7 bp, Unknown
  misc_feature (1)..( 7): Result.004 file - promoters50/1027914
tttgaat

SEQ ID NO: 161732 - DNA, 7 bp, Unknown
  misc_feature (1)..( 7): Result.004 file - promoters50/1027914
ttgttta

SEQ ID NO: 161733 - DNA, 7 bp, Unknown
  misc_feature (1)..( 7): Result.004 file - promoters50/1027914
ttgatta

SEQ ID NO: 161734 - DNA, 7 bp, Unknown
  misc_feature (1)..( 7): Result.004 file - promoters50/1027914
gtgatta

SEQ ID NO: 161735 - DNA, 8 bp, Unknown
  misc_feature (1)..( 8): Result.004 file - promoters50/1027914
tctcttct

SEQ ID NO: 161736 - DNA, 8 bp, Unknown
  misc_feature (1)..( 8): Result.004 file - promoters50/1027914
tctattct

SEQ ID NO: 161737 - DNA, 8 bp, Unknown
  misc_feature (1)..( 8): Result.004 file - promoters50/1027914
tcttttct

SEQ ID NO: 161738 - DNA, 11 bp, Unknown
  misc_feature (1)..( 11): Result.004 file - promoters50/1027914
attataaaaac

SEQ ID NO: 161739 - DNA, 11 bp, Unknown
  misc_feature (1)..( 11): Result.004 file - promoters50/1027914
tatataataac

SEQ ID NO: 161740 - DNA, 11 bp, Unknown
  misc_feature (1)..( 11): Result.004 file - promoters50/1027928
tatataatcca

SEQ ID NO: 161741 - DNA, 14 bp, Unknown
  misc_feature (1)..( 14): Result.004 file - promoters50/1027928
ataaatatctatat

SEQ ID NO: 161742 - DNA, 14 bp, Unknown
  misc_feature (1)..( 14): Result.004 file - promoters50/1027928
ttccatagctagag

SEQ ID NO: 161743 - DNA, 14 bp, Unknown
  misc_feature (1)..( 14): Result.004 file - promoters50/1027928
caaaatttctcatt

SEQ ID NO: 161744 - DNA, 14 bp, Unknown
  misc_feature (1)..( 14): Result.004 file - promoters50/1027928
gaatccagctagag

SEQ ID NO: 161745 - DNA, 14 bp, Unknown
  misc_feature (1)..( 14): Result.004 file - promoters50/1027928
taaaattagtgaac

SEQ ID NO: 161746 - DNA, 14 bp, Unknown
  misc_feature (1)..( 14): Result.004 file - promoters50/1027928
caaaatttataaat

SEQ ID NO: 161747 - DNA, 16 bp, Unknown
  misc_feature (1)..( 16): Result.004 file - promoters50/1027928
ttttaatttcttttca

SEQ ID NO: 161748 - DNA, 16 bp, Unknown
  misc_feature (1)..( 16): Result.004 file - promoters50/1027928
gtttgattagtaaaag

SEQ ID NO: 161749 - DNA, 16 bp, Unknown
  misc_feature (1)..( 16): Result.004 file - promoters50/1027928
ttttaaatattttata

SEQ ID NO: 161750 - DNA, 16 bp, Unknown
  misc_feature (1)..( 16): Result.004 file - promoters50/1027928
gtgtaatttttttcta

SEQ ID NO: 161751 - DNA, 16 bp, Unknown
  misc_feature (1)..( 16): Result.004 file - promoters50/1027928
taataatgtttttcta

SEQ ID NO: 161752 - DNA, 16 bp, Unknown
  misc_feature (1)..( 16): Result.004 file - promoters50/1027928
taataaattttgatta

SEQ ID NO: 161753 - DNA, 10 bp, Unknown
  misc_feature (1)..( 10): Result.004 file - promoters50/1027928
catatatata

SEQ ID NO: 161754 - DNA, 10 bp, Unknown
  misc_feature (1)..( 10): Result.004 file - promoters50/1027928
tataaatatt

SEQ ID NO: 161755 - DNA, 10 bp, Unknown
  misc_feature (1)..( 10): Result.004 file - promoters50/1027928
aataaaaatt

SEQ ID NO: 161756 - DNA, 10 bp, Unknown
  misc_feature (1)..( 10): Result.004 file - promoters50/1027928
tataaaaaat

SEQ ID NO: 161757 - DNA, 10 bp, Unknown
  misc_feature (1)..( 10): Result.004 file - promoters50/1027928
aataaatttt

SEQ ID NO: 161758 - DNA, 11 bp, Unknown
  misc_feature (1)..( 11): Result.004 file - promoters50/1027928
gatacaaaacc

SEQ ID NO: 161759 - DNA, 11 bp, Unknown
  misc_feature (1)..( 11): Result.004 file - promoters50/1027928
atttatacata

SEQ ID NO: 161760 - DNA, 13 bp, Unknown
  misc_feature (1)..( 13): Result.004 file - promoters50/1027928
ggttttataatcg

SEQ ID NO: 161761 - DNA, 13 bp, Unknown
  misc_feature (1)..( 13): Result.004 file - promoters50/1027928
ctatttttaatta

SEQ ID NO: 161762 - DNA, 13 bp, Unknown
  misc_feature (1)..( 13): Result.004 file - promoters50/1027928
tgatttttttttt

SEQ ID NO: 161763 - DNA, 13 bp, Unknown
  misc_feature (1)..( 13): Result.004 file - promoters50/1027928
gtttttctaattt

SEQ ID NO: 161764 - DNA, 13 bp, Unknown
  misc_feature (1)..( 13): Result.004 file - promoters50/1027928
taatttttttcta

SEQ ID NO: 161765 - DNA, 13 bp, Unknown
  misc_feature (1)..( 13): Result.004 file - promoters50/1027928
taaattttgatta

SEQ ID NO: 161766 - DNA, 10 bp, Unknown
  misc_feature (1)..( 10): Result.004 file - promoters50/1027928
aataaaaatt

SEQ ID NO: 161767 - DNA, 10 bp, Unknown
  misc_feature (1)..( 10): Result.004 file - promoters50/1027928
cataataatg

SEQ ID NO: 161768 - DNA, 10 bp, Unknown
  misc_feature (1)..( 10): Result.004 file - promoters50/1027928
tataaatatt

SEQ ID NO: 161769 - DNA, 10 bp, Unknown
  misc_feature (1)..( 10): Result.004 file - promoters50/1027928
tataaaaaat

SEQ ID NO: 161770 - DNA, 10 bp, Unknown
  misc_feature (1)..( 10): Result.004 file - promoters50/1027928
aataaatttt

SEQ ID NO: 161771 - DNA, 11 bp, Unknown
  misc_feature (1)..( 11): Result.004 file - promoters50/1027943
gatacaaaacc

SEQ ID NO: 161772 - DNA, 10 bp, Unknown
  misc_feature (1)..( 10): Result.004 file - promoters50/1027943
agagcaagac

SEQ ID NO: 161773 - DNA, 10 bp, Unknown
  misc_feature (1)..( 10): Result.004 file - promoters50/1027943
agagaaagag

SEQ ID NO: 161774 - DNA, 10 bp, Unknown
  misc_feature (1)..( 10): Result.004 file - promoters50/1027970
caggaacgag

SEQ ID NO: 161775 - DNA, 8 bp, Unknown
  misc_feature (1)..( 8): Result.004 file - promoters50/1027970
taagattc

SEQ ID NO: 161776 - DNA, 8 bp, Unknown
  misc_feature (1)..( 8): Result.004 file - promoters50/1027970
taaaattg

SEQ ID NO: 161777 - DNA, 8 bp, Unknown
  misc_feature (1)..( 8): Result.004 file - promoters50/1027982
taagcttc

SEQ ID NO: 161778 - DNA, 10 bp, Unknown
  misc_feature (1)..( 10): Result.004 file - promoters50/1027982
aaattttttt

SEQ ID NO: 161779 - DNA, 10 bp, Unknown
  misc_feature (1)..( 10): Result.004 file - promoters50/1027982
tgattgtttt

SEQ ID NO: 161780 - DNA, 10 bp, Unknown
  misc_feature (1)..( 10): Result.004 file - promoters50/1027982
aaactttttg

SEQ ID NO: 161781 - DNA, 8 bp, Unknown
  misc_feature (1)..( 8): Result.004 file - promoters50/1027982
ataaataa

SEQ ID NO: 161782 - DNA, 8 bp, Unknown
  misc_feature (1)..( 8): Result.004 file - promoters50/1027982
atatatat

SEQ ID NO: 161783 - DNA, 9 bp, Unknown
  misc_feature (1)..( 9): Result.004 file - promoters50/1027982
atattatat

SEQ ID NO: 161784 - DNA, 14 bp, Unknown
  misc_feature (1)..( 14): Result.004 file - promoters50/1027982
ttaaaataaataaa

SEQ ID NO: 161785 - DNA, 14 bp, Unknown
  misc_feature (1)..( 14): Result.004 file - promoters50/1027982
ttaaattaattaaa

SEQ ID NO: 161786 - DNA, 14 bp, Unknown
  misc_feature (1)..( 14): Result.004 file - promoters50/1027982
atatcatatataac

SEQ ID NO: 161787 - DNA, 7 bp, Unknown
  misc_feature (1)..( 7): Result.004 file - promoters50/1027982
aaatatt

SEQ ID NO: 161788 - DNA, 7 bp, Unknown
  misc_feature (1)..( 7): Result.004 file - promoters50/1027982
aaagatt

SEQ ID NO: 161789 - DNA, 7 bp, Unknown
  misc_feature (1)..( 7): Result.004 file - promoters50/1027990
aaatata

SEQ ID NO: 161790 - DNA, 16 bp, Unknown
  misc_feature (1)..( 16): Result.004 file - promoters50/1027990
ttctcgattaggcttc

SEQ ID NO: 161791 - DNA, 16 bp, Unknown
  misc_feature (1)..( 16): Result.004 file - promoters50/1027990
actataattaggttat

SEQ ID NO: 161792 - DNA, 16 bp, Unknown
  misc_feature (1)..( 16): Result.004 file - promoters50/1027990
tgtgttcttaggattc

SEQ ID NO: 161793 - DNA, 16 bp, Unknown
  misc_feature (1)..( 16): Result.004 file - promoters50/1027990
tggtgaatttggttaa

SEQ ID NO: 161794 - DNA, 16 bp, Unknown
  misc_feature (1)..( 16): Result.004 file - promoters50/1027990
gtgatgattttccatt

SEQ ID NO: 161795 - DNA, 16 bp, Unknown
  misc_feature (1)..( 16): Result.004 file - promoters50/1027990
acgcatattttgttga

SEQ ID NO: 161796 - DNA, 16 bp, Unknown
  misc_feature (1)..( 16): Result.004 file - promoters50/1027990
tgttgcatttggagta

SEQ ID NO: 161797 - DNA, 10 bp, Unknown
  misc_feature (1)..( 10): Result.004 file - promoters50/1027990
aagagtttga

SEQ ID NO: 161798 - DNA, 10 bp, Unknown
  misc_feature (1)..( 10): Result.004 file - promoters50/1027990
aagattttga

SEQ ID NO: 161799 - DNA, 10 bp, Unknown
  misc_feature (1)..( 10): Result.004 file - promoters50/1027990
gtgtgtttga

SEQ ID NO: 161800 - DNA, 10 bp, Unknown
  misc_feature (1)..( 10): Result.004 file - promoters50/1027990
cagatttaac

SEQ ID NO: 161801 - DNA, 10 bp, Unknown
  misc_feature (1)..( 10): Result.004 file - promoters50/1027990
catattttgt

SEQ ID NO: 161802 - DNA, 10 bp, Unknown
  misc_feature (1)..( 10): Result.004 file - promoters50/1028042
agtattttgt

SEQ ID NO: 161803 - DNA, 7 bp, Unknown
  misc_feature (1)..( 7): Result.004 file - promoters50/1028042
ccatgtt

SEQ ID NO: 161804 - DNA, 7 bp, Unknown
  misc_feature (1)..( 7): Result.004 file - promoters50/1028042
acatgtt

SEQ ID NO: 161805 - DNA, 7 bp, Unknown
  misc_feature (1)..( 7): Result.004 file - promoters50/1028042
acatgta

SEQ ID NO: 161806 - DNA, 7 bp, Unknown
  misc_feature (1)..( 7): Result.004 file - promoters50/1028042
gatgtaa

SEQ ID NO: 161807 - DNA, 7 bp, Unknown
  misc_feature (1)..( 7): Result.004 file - promoters50/1028042
aatgtaa

SEQ ID NO: 161808 - DNA, 7 bp, Unknown
  misc_feature (1)..( 7): Result.004 file - promoters50/1028042
aatctaa

SEQ ID NO: 161809 - DNA, 13 bp, Unknown
  misc_feature (1)..( 13): Result.004 file - promoters50/1028042
accaaaagacaaa

SEQ ID NO: 161810 - DNA, 13 bp, Unknown
  misc_feature (1)..( 13): Result.004 file - promoters50/1028042
cagaaaagaaaaa

SEQ ID NO: 161811 - DNA, 13 bp, Unknown
  misc_feature (1)..( 13): Result.004 file - promoters50/1028042
cagaaaagaagac

SEQ ID NO: 161812 - DNA, 8 bp, Unknown
  misc_feature (1)..( 8): Result.004 file - promoters50/1028042
aaacgaaa

SEQ ID NO: 161813 - DNA, 8 bp, Unknown
  misc_feature (1)..( 8): Result.004 file - promoters50/1028042
agacgaaa

SEQ ID NO: 161814 - DNA, 8 bp, Unknown
  misc_feature (1)..( 8): Result.004 file - promoters50/1028042
agaggaag

SEQ ID NO: 161815 - DNA, 13 bp, Unknown
  misc_feature (1)..( 13): Result.004 file - promoters50/1028042
agatcaattagtg

SEQ ID NO: 161816 - DNA, 13 bp, Unknown
  misc_feature (1)..( 13): Result.004 file - promoters50/1028042
agaacaattaacc

SEQ ID NO: 161817 - DNA, 13 bp, Unknown
  misc_feature (1)..( 13): Result.004 file - promoters50/1028049
actctaatcaacc

SEQ ID NO: 161818 - DNA, 9 bp, Unknown
  misc_feature (1)..( 9): Result.004 file - promoters50/1028049
gagtgttga

SEQ ID NO: 161819 - DNA, 9 bp, Unknown
  misc_feature (1)..( 9): Result.004 file - promoters50/1028049
ttttgttga

SEQ ID NO: 161820 - DNA, 9 bp, Unknown
  misc_feature (1)..( 9): Result.004 file - promoters50/1028049
ttttattgt

SEQ ID NO: 161821 - DNA, 10 bp, Unknown
  misc_feature (1)..( 10): Result.004 file - promoters50/1028049
atttgatttg

SEQ ID NO: 161822 - DNA, 9 bp, Unknown
  misc_feature (1)..( 9): Result.004 file - promoters50/1028049
aatggtgac

SEQ ID NO: 161823 - DNA, 9 bp, Unknown
  misc_feature (1)..( 9): Result.004 file - promoters50/1028049
aatgttgaa

SEQ ID NO: 161824 - DNA, 9 bp, Unknown
  misc_feature (1)..( 9): Result.004 file - promoters50/1028049
tatgtagaa

SEQ ID NO: 161825 - DNA, 10 bp, Unknown
  misc_feature (1)..( 10): Result.004 file - promoters50/1028049
atgaatcctc

SEQ ID NO: 161826 - DNA, 10 bp, Unknown
  misc_feature (1)..( 10): Result.004 file - promoters50/1028049
atgaatatgt

SEQ ID NO: 161827 - DNA, 10 bp, Unknown
  misc_feature (1)..( 10): Result.004 file - promoters50/1028049
ttgaatcaat

SEQ ID NO: 161828 - DNA, 10 bp, Unknown
  misc_feature (1)..( 10): Result.004 file - promoters50/1028049
ttgagtcaat

SEQ ID NO: 161829 - DNA, 9 bp, Unknown
  misc_feature (1)..( 9): Result.004 file - promoters50/1028049
ggttttaac

SEQ ID NO: 161830 - DNA, 9 bp, Unknown
  misc_feature (1)..( 9): Result.004 file - promoters50/1028049
ggttataat

SEQ ID NO: 161831 - DNA, 9 bp, Unknown
  misc_feature (1)..( 9): Result.004 file - promoters50/1028049
acttaaaat

SEQ ID NO: 161832 - DNA, 10 bp, Unknown
  misc_feature (1)..( 10): Result.004 file - promoters50/1028049
cgattttgtt

SEQ ID NO: 161833 - DNA, 10 bp, Unknown
  misc_feature (1)..( 10): Result.004 file - promoters50/1028049
cgatattgta

SEQ ID NO: 161834 - DNA, 10 bp, Unknown
  misc_feature (1)..( 10): Result.004 file - promoters50/1028084
tgatttggtt

SEQ ID NO: 161835 - DNA, 12 bp, Unknown
  misc_feature (1)..( 12): Result.004 file - promoters50/1028084
gaaattttattt

SEQ ID NO: 161836 - DNA, 12 bp, Unknown
  misc_feature (1)..( 12): Result.004 file - promoters50/1028084
tatcttttattt

SEQ ID NO: 161837 - DNA, 12 bp, Unknown
  misc_feature (1)..( 12): Result.004 file - promoters50/1028084
gaaattttagga

SEQ ID NO: 161838 - DNA, 11 bp, Unknown
  misc_feature (1)..( 11): Result.004 file - promoters50/1028084
ataccaatttt

SEQ ID NO: 161839 - DNA, 11 bp, Unknown
  misc_feature (1)..( 11): Result.004 file - promoters50/1028084
gtaacaatttt

SEQ ID NO: 161840 - DNA, 11 bp, Unknown
  misc_feature (1)..( 11): Result.004 file - promoters50/1028095
atatcaattta

SEQ ID NO: 161841 - DNA, 17 bp, Unknown
  misc_feature (1)..( 17): Result.004 file - promoters50/1028095
tattattataaaatatt

SEQ ID NO: 161842 - DNA, 17 bp, Unknown
  misc_feature (1)..( 17): Result.004 file - promoters50/1028095
gaatatgatagattagc

SEQ ID NO: 161843 - DNA, 17 bp, Unknown
  misc_feature (1)..( 17): Result.004 file - promoters50/1028095
ttttagtatacaattat

SEQ ID NO: 161844 - DNA, 17 bp, Unknown
  misc_feature (1)..( 17): Result.004 file - promoters50/1028095
aaaagacctacaaatat

SEQ ID NO: 161845 - DNA, 17 bp, Unknown
  misc_feature (1)..( 17): Result.004 file - promoters50/1028095
aatttgtttgaataatt

SEQ ID NO: 161846 - DNA, 17 bp, Unknown
  misc_feature (1)..( 17): Result.004 file - promoters50/1028095
ggctagaatactttatt

SEQ ID NO: 161847 - DNA, 13 bp, Unknown
  misc_feature (1)..( 13): Result.004 file - promoters50/1028095
taattttcatcaa

SEQ ID NO: 161848 - DNA, 13 bp, Unknown
  misc_feature (1)..( 13): Result.004 file - promoters50/1028095
ttattttcttttt

SEQ ID NO: 161849 - DNA, 13 bp, Unknown
  misc_feature (1)..( 13): Result.004 file - promoters50/1028095
caattttagttat

SEQ ID NO: 161850 - DNA, 13 bp, Unknown
  misc_feature (1)..( 13): Result.004 file - promoters50/1028095
aaatattatatat

SEQ ID NO: 161851 - DNA, 13 bp, Unknown
  misc_feature (1)..( 13): Result.004 file - promoters50/1028095
tcgtttttttttt

SEQ ID NO: 161852 - DNA, 13 bp, Unknown
  misc_feature (1)..( 13): Result.004 file - promoters50/1028095
caatttgttacct

SEQ ID NO: 161853 - DNA, 18 bp, Unknown
  misc_feature (1)..( 18): Result.004 file - promoters50/1028095
ttattataaaatattata

SEQ ID NO: 161854 - DNA, 18 bp, Unknown
  misc_feature (1)..( 18): Result.004 file - promoters50/1028095
ttgctataaaaaaacaaa

SEQ ID NO: 161855 - DNA, 18 bp, Unknown
  misc_feature (1)..( 18): Result.004 file - promoters50/1028095
ttagtatacaattatata

SEQ ID NO: 161856 - DNA, 18 bp, Unknown
  misc_feature (1)..( 18): Result.004 file - promoters50/1028095
aagacctacaaatatgtt

SEQ ID NO: 161857 - DNA, 18 bp, Unknown
  misc_feature (1)..( 18): Result.004 file - promoters50/1028095
acttcatctaatttgttt

SEQ ID NO: 161858 - DNA, 18 bp, Unknown
  misc_feature (1)..( 18): Result.004 file - promoters50/1028095
cgaggctagaatacttta

SEQ ID NO: 161859 - DNA, 12 bp, Unknown
  misc_feature (1)..( 12): Result.004 file - promoters50/1028095
tctttatttgcg

SEQ ID NO: 161860 - DNA, 12 bp, Unknown
  misc_feature (1)..( 12): Result.004 file - promoters50/1028095
aatttgtttgaa

SEQ ID NO: 161861 - DNA, 12 bp, Unknown
  misc_feature (1)..( 12): Result.004 file - promoters50/1028095
actttattttat

SEQ ID NO: 161862 - DNA, 12 bp, Unknown
  misc_feature (1)..( 12): Result.004 file - promoters50/1028095
gatttgttagag

SEQ ID NO: 161863 - DNA, 12 bp, Unknown
  misc_feature (1)..( 12): Result.004 file - promoters50/1028095
aatatgttttgg

SEQ ID NO: 161864 - DNA, 12 bp, Unknown
  misc_feature (1)..( 12): Result.004 file - promoters50/1028151
tgtattttttag

SEQ ID NO: 161865 - DNA, 9 bp, Unknown
  misc_feature (1)..( 9): Result.004 file - promoters50/1028151
gttttattt

SEQ ID NO: 161866 - DNA, 9 bp, Unknown
  misc_feature (1)..( 9): Result.004 file - promoters50/1028151
tgattattt

SEQ ID NO: 161867 - DNA, 9 bp, Unknown
  misc_feature (1)..( 9): Result.004 file - promoters50/1028177
tgagtattc

SEQ ID NO: 161868 - DNA, 12 bp, Unknown
  misc_feature (1)..( 12): Result.004 file - promoters50/1028177
tcttcttacttc

SEQ ID NO: 161869 - DNA, 12 bp, Unknown
  misc_feature (1)..( 12): Result.004 file - promoters50/1028177
tgttctaactga

SEQ ID NO: 161870 - DNA, 12 bp, Unknown
  misc_feature (1)..( 12): Result.004 file - promoters50/1028177
tcttctttaaga

SEQ ID NO: 161871 - DNA, 12 bp, Unknown
  misc_feature (1)..( 12): Result.004 file - promoters50/1028177
ggttctatggtt

SEQ ID NO: 161872 - DNA, 12 bp, Unknown
  misc_feature (1)..( 12): Result.004 file - promoters50/1028177
gctgctaacttc

SEQ ID NO: 161873 - DNA, 12 bp, Unknown
  misc_feature (1)..( 12): Result.004 file - promoters50/1028177
ttcgataattga

SEQ ID NO: 161874 - DNA, 12 bp, Unknown
  misc_feature (1)..( 12): Result.004 file - promoters50/1028216
tctgcttttgat

SEQ ID NO: 161875 - DNA, 8 bp, Unknown
  misc_feature (1)..( 8): Result.004 file - promoters50/1028216
ttcttttt

SEQ ID NO: 161876 - DNA, 8 bp, Unknown
  misc_feature (1)..( 8): Result.004 file - promoters50/1028216
aacttttt

SEQ ID NO: 161877 - DNA, 8 bp, Unknown
  misc_feature (1)..( 8): Result.004 file - promoters50/1028224
ttcttttg

SEQ ID NO: 161878 - DNA, 8 bp, Unknown
  misc_feature (1)..( 8): Result.004 file - promoters50/1028224
taatcagt

SEQ ID NO: 161879 - DNA, 8 bp, Unknown
  misc_feature (1)..( 8): Result.004 file - promoters50/1028224
taatcacg

SEQ ID NO: 161880 - DNA, 8 bp, Unknown
  misc_feature (1)..( 8): Result.004 file - promoters50/1028224
aaattagt

SEQ ID NO: 161881 - DNA, 8 bp, Unknown
  misc_feature (1)..( 8): Result.004 file - promoters50/1028224
atgtttat

SEQ ID NO: 161882 - DNA, 8 bp, Unknown
  misc_feature (1)..( 8): Result.004 file - promoters50/1028224
atgttttg

SEQ ID NO: 161883 - DNA, 8 bp, Unknown
  misc_feature (1)..( 8): Result.004 file - promoters50/1028224
ctgtttat

SEQ ID NO: 161884 - DNA, 8 bp, Unknown
  misc_feature (1)..( 8): Result.004 file - promoters50/1028224
ttatgttt

SEQ ID NO: 161885 - DNA, 8 bp, Unknown
  misc_feature (1)..( 8): Result.004 file - promoters50/1028224
ttatgtat

SEQ ID NO: 161886 - DNA, 8 bp, Unknown
  misc_feature (1)..( 8): Result.004 file - promoters50/1028238
atattttt

SEQ ID NO: 161887 - DNA, 7 bp, Unknown
  misc_feature (1)..( 7): Result.004 file - promoters50/1028238
ctatata

SEQ ID NO: 161888 - DNA, 7 bp, Unknown
  misc_feature (1)..( 7): Result.004 file - promoters50/1028238
ctatatt

SEQ ID NO: 161889 - DNA, 7 bp, Unknown
  misc_feature (1)..( 7): Result.004 file - promoters50/1028238
ttatata

SEQ ID NO: 161890 - DNA, 9 bp, Unknown
  misc_feature (1)..( 9): Result.004 file - promoters50/1028238
ttatatatg

SEQ ID NO: 161891 - DNA, 9 bp, Unknown
  misc_feature (1)..( 9): Result.004 file - promoters50/1028238
atatacatg

SEQ ID NO: 161892 - DNA, 9 bp, Unknown
  misc_feature (1)..( 9): Result.004 file - promoters50/1028238
ttatttatt

SEQ ID NO: 161893 - DNA, 9 bp, Unknown
  misc_feature (1)..( 9): Result.004 file - promoters50/1028238
atatataac

SEQ ID NO: 161894 - DNA, 9 bp, Unknown
  misc_feature (1)..( 9): Result.004 file - promoters50/1028238
gtatttaaa

SEQ ID NO: 161895 - DNA, 9 bp, Unknown
  misc_feature (1)..( 9): Result.004 file - promoters50/1028241
ctatatata

SEQ ID NO: 161896 - DNA, 8 bp, Unknown
  misc_feature (1)..( 8): Result.004 file - promoters50/1028241
aataaatt

SEQ ID NO: 161897 - DNA, 8 bp, Unknown
  misc_feature (1)..( 8): Result.004 file - promoters50/1028241
attaaatt

SEQ ID NO: 161898 - DNA, 8 bp, Unknown
  misc_feature (1)..( 8): Result.004 file - promoters50/1028241
attcaatg

SEQ ID NO: 161899 - DNA, 8 bp, Unknown
  misc_feature (1)..( 8): Result.004 file - promoters50/1028241
cataaaaa

SEQ ID NO: 161900 - DNA, 8 bp, Unknown
  misc_feature (1)..( 8): Result.004 file - promoters50/1028241
cattaaat

SEQ ID NO: 161901 - DNA, 8 bp, Unknown
  misc_feature (1)..( 8): Result.004 file - promoters50/1028241
gattaaaa

SEQ ID NO: 161902 - DNA, 8 bp, Unknown
  misc_feature (1)..( 8): Result.004 file - promoters50/1028241
tattcaat

SEQ ID NO: 161903 - DNA, 9 bp, Unknown
  misc_feature (1)..( 9): Result.004 file - promoters50/1028241
atgtttata

SEQ ID NO: 161904 - DNA, 9 bp, Unknown
  misc_feature (1)..( 9): Result.004 file - promoters50/1028241
ttgttaata

SEQ ID NO: 161905 - DNA, 9 bp, Unknown
  misc_feature (1)..( 9): Result.004 file - promoters50/1028243
gttttttta

SEQ ID NO: 161906 - DNA, 10 bp, Unknown
  misc_feature (1)..( 10): Result.004 file - promoters50/1028243
tgaagaatta

SEQ ID NO: 161907 - DNA, 10 bp, Unknown
  misc_feature (1)..( 10): Result.004 file - promoters50/1028243
ggaataattt

SEQ ID NO: 161908 - DNA, 11 bp, Unknown
  misc_feature (1)..( 11): Result.004 file - promoters50/1028243
aaaataaattg

SEQ ID NO: 161909 - DNA, 11 bp, Unknown
  misc_feature (1)..( 11): Result.004 file - promoters50/1028243
aatttaaattt

SEQ ID NO: 161910 - DNA, 11 bp, Unknown
  misc_feature (1)..( 11): Result.004 file - promoters50/1028243
aaaataaacta

SEQ ID NO: 161911 - DNA, 11 bp, Unknown
  misc_feature (1)..( 11): Result.004 file - promoters50/1028243
gtcataatttt

SEQ ID NO: 161912 - DNA, 12 bp, Unknown
  misc_feature (1)..( 12): Result.004 file - promoters50/1028243
cttttatttcct

SEQ ID NO: 161913 - DNA, 12 bp, Unknown
  misc_feature (1)..( 12): Result.004 file - promoters50/1028243
gtattatttcac

SEQ ID NO: 161914 - DNA, 12 bp, Unknown
  misc_feature (1)..( 12): Result.004 file - promoters50/1028243
tttttgtttcct

SEQ ID NO: 161915 - DNA, 12 bp, Unknown
  misc_feature (1)..( 12): Result.004 file - promoters50/1028243
gtataatttaat

SEQ ID NO: 161916 - DNA, 12 bp, Unknown
  misc_feature (1)..( 12): Result.004 file - promoters50/1028243
ttataatactaa

SEQ ID NO: 161917 - DNA, 12 bp, Unknown
  misc_feature (1)..( 12): Result.004 file - promoters50/1028243
gtataagaattg

SEQ ID NO: 161918 - DNA, 12 bp, Unknown
  misc_feature (1)..( 12): Result.004 file - promoters50/1028243
gttttgttacct

SEQ ID NO: 161919 - DNA, 12 bp, Unknown
  misc_feature (1)..( 12): Result.004 file - promoters50/1028304
tatttacaatgt

SEQ ID NO: 161920 - DNA, 11 bp, Unknown
  misc_feature (1)..( 11): Result.004 file - promoters50/1028304
aaacatttttt

SEQ ID NO: 161921 - DNA, 11 bp, Unknown
  misc_feature (1)..( 11): Result.004 file - promoters50/1028304
agtgatttttt

SEQ ID NO: 161922 - DNA, 11 bp, Unknown
  misc_feature (1)..( 11): Result.004 file - promoters50/1028304
aacaatttcta

SEQ ID NO: 161923 - DNA, 11 bp, Unknown
  misc_feature (1)..( 11): Result.004 file - promoters50/1028304
aaatattttga

SEQ ID NO: 161924 - DNA, 11 bp, Unknown
  misc_feature (1)..( 11): Result.004 file - promoters50/1028304
tttcatttttt

SEQ ID NO: 161925 - DNA, 11 bp, Unknown
  misc_feature (1)..( 11): Result.004 file - promoters50/1028304
cctaatttttc

SEQ ID NO: 161926 - DNA, 12 bp, Unknown
  misc_feature (1)..( 12): Result.004 file - promoters50/1028304
aaacattttttt

SEQ ID NO: 161927 - DNA, 12 bp, Unknown
  misc_feature (1)..( 12): Result.004 file - promoters50/1028304
aaaaattgtgca

SEQ ID NO: 161928 - DNA, 12 bp, Unknown
  misc_feature (1)..( 12): Result.004 file - promoters50/1028304
aacaatttctac

SEQ ID NO: 161929 - DNA, 12 bp, Unknown
  misc_feature (1)..( 12): Result.004 file - promoters50/1028304
aaagatttaaga

SEQ ID NO: 161930 - DNA, 12 bp, Unknown
  misc_feature (1)..( 12): Result.004 file - promoters50/1028304
aaatattttgaa

SEQ ID NO: 161931 - DNA, 12 bp, Unknown
  misc_feature (1)..( 12): Result.004 file - promoters50/1028304
caaaattgagca

SEQ ID NO: 161932 - DNA, 12 bp, Unknown
  misc_feature (1)..( 12): Result.004 file - promoters50/1028304
cgaaaacagatg

SEQ ID NO: 161933 - DNA, 12 bp, Unknown
  misc_feature (1)..( 12): Result.004 file - promoters50/1028304
cgaaaaccatgg

SEQ ID NO: 161934 - DNA, 12 bp, Unknown
  misc_feature (1)..( 12): Result.004 file - promoters50/1028304
agaaaaaagaaa

SEQ ID NO: 161935 - DNA, 13 bp, Unknown
  misc_feature (1)..( 13): Result.004 file - promoters50/1028304
tgaacaaaaccca

SEQ ID NO: 161936 - DNA, 13 bp, Unknown
  misc_feature (1)..( 13): Result.004 file - promoters50/1028304
ttaaaaaagtgac

SEQ ID NO: 161937 - DNA, 13 bp, Unknown
  misc_feature (1)..( 13): Result.004 file - promoters50/1028318
tgatcaataagtt

SEQ ID NO: 161938 - DNA, 11 bp, Unknown
  misc_feature (1)..( 11): Result.004 file - promoters50/1028318
tcttcaagaaa

SEQ ID NO: 161939 - DNA, 11 bp, Unknown
  misc_feature (1)..( 11): Result.004 file - promoters50/1028318
tgtctaagaaa

SEQ ID NO: 161940 - DNA, 11 bp, Unknown
  misc_feature (1)..( 11): Result.004 file - promoters50/1028318
ttttcgagaat

SEQ ID NO: 161941 - DNA, 11 bp, Unknown
  misc_feature (1)..( 11): Result.004 file - promoters50/1028318
ttatggagaat

SEQ ID NO: 161942 - DNA, 11 bp, Unknown
  misc_feature (1)..( 11): Result.004 file - promoters50/1028318
gtttcaagatg

SEQ ID NO: 161943 - DNA, 11 bp, Unknown
  misc_feature (1)..( 11): Result.004 file - promoters50/1028318
ttttcaaaatg

SEQ ID NO: 161944 - DNA, 11 bp, Unknown
  misc_feature (1)..( 11): Result.004 file - promoters50/1028318
gttgcaacttg

SEQ ID NO: 161945 - DNA, 10 bp, Unknown
  misc_feature (1)..( 10): Result.004 file - promoters50/1028318
ttcttcaaga

SEQ ID NO: 161946 - DNA, 10 bp, Unknown
  misc_feature (1)..( 10): Result.004 file - promoters50/1028318
ttcttaaaga

SEQ ID NO: 161947 - DNA, 10 bp, Unknown
  misc_feature (1)..( 10): Result.004 file - promoters50/1028318
ggtttcaaga

SEQ ID NO: 161948 - DNA, 10 bp, Unknown
  misc_feature (1)..( 10): Result.004 file - promoters50/1028318
ctcttaataa

SEQ ID NO: 161949 - DNA, 10 bp, Unknown
  misc_feature (1)..( 10): Result.004 file - promoters50/1028318
ctcttaattt

SEQ ID NO: 161950 - DNA, 10 bp, Unknown
  misc_feature (1)..( 10): Result.004 file - promoters50/1028318
ttctaaatct

SEQ ID NO: 161951 - DNA, 13 bp, Unknown
  misc_feature (1)..( 13): Result.004 file - promoters50/1028318
tattatttcaggt

SEQ ID NO: 161952 - DNA, 13 bp, Unknown
  misc_feature (1)..( 13): Result.004 file - promoters50/1028318
gattattaaaaac

SEQ ID NO: 161953 - DNA, 13 bp, Unknown
  misc_feature (1)..( 13): Result.004 file - promoters50/1028318
tattattatatat

SEQ ID NO: 161954 - DNA, 13 bp, Unknown
  misc_feature (1)..( 13): Result.004 file - promoters50/1028318
aattaataaaaaa

SEQ ID NO: 161955 - DNA, 13 bp, Unknown
  misc_feature (1)..( 13): Result.004 file - promoters50/1028318
acataatgaatgt

SEQ ID NO: 161956 - DNA, 13 bp, Unknown
  misc_feature (1)..( 13): Result.004 file - promoters50/1028318
atctaaaaaaaaa

SEQ ID NO: 161957 - DNA, 11 bp, Unknown
  misc_feature (1)..( 11): Result.004 file - promoters50/1028318
gaaagtttaaa

SEQ ID NO: 161958 - DNA, 11 bp, Unknown
  misc_feature (1)..( 11): Result.004 file - promoters50/1028318
aaaagttagtt

SEQ ID NO: 161959 - DNA, 11 bp, Unknown
  misc_feature (1)..( 11): Result.004 file - promoters50/1028318
gaaactttaat

SEQ ID NO: 161960 - DNA, 11 bp, Unknown
  misc_feature (1)..( 11): Result.004 file - promoters50/1028318
ctccatttaat

SEQ ID NO: 161961 - DNA, 11 bp, Unknown
  misc_feature (1)..( 11): Result.004 file - promoters50/1028318
gttactttctg

SEQ ID NO: 161962 - DNA, 11 bp, Unknown
  misc_feature (1)..( 11): Result.004 file - promoters50/1028331
taaacgttact

SEQ ID NO: 161963 - DNA, 10 bp, Unknown
  misc_feature (1)..( 10): Result.004 file - promoters50/1028331
caaaagagaa

SEQ ID NO: 161964 - DNA, 10 bp, Unknown
  misc_feature (1)..( 10): Result.004 file - promoters50/1028331
caaaagaata

SEQ ID NO: 161965 - DNA, 10 bp, Unknown
  misc_feature (1)..( 10): Result.004 file - promoters50/1028331
caaaaaagaa

SEQ ID NO: 161966 - DNA, 10 bp, Unknown
  misc_feature (1)..( 10): Result.004 file - promoters50/1028331
tgaagaagga

SEQ ID NO: 161967 - DNA, 10 bp, Unknown
  misc_feature (1)..( 10): Result.004 file - promoters50/1028331
tgaagacgga

SEQ ID NO: 161968 - DNA, 10 bp, Unknown
  misc_feature (1)..( 10): Result.004 file - promoters50/1028352
tgatgacgga

SEQ ID NO: 161969 - DNA, 8 bp, Unknown
  misc_feature (1)..( 8): Result.004 file - promoters50/1028352
aaaaaatt

SEQ ID NO: 161970 - DNA, 8 bp, Unknown
  misc_feature (1)..( 8): Result.004 file - promoters50/1028352
aaaacatt

SEQ ID NO: 161971 - DNA, 8 bp, Unknown
  misc_feature (1)..( 8): Result.004 file - promoters50/1028352
gaaaaatg

SEQ ID NO: 161972 - DNA, 12 bp, Unknown
  misc_feature (1)..( 12): Result.004 file - promoters50/1028352
aaataaaaacgg

SEQ ID NO: 161973 - DNA, 12 bp, Unknown
  misc_feature (1)..( 12): Result.004 file - promoters50/1028352
aaagaaagaaaa

SEQ ID NO: 161974 - DNA, 12 bp, Unknown
  misc_feature (1)..( 12): Result.004 file - promoters50/1028352
tgataacaacgg

SEQ ID NO: 161975 - DNA, 7 bp, Unknown
  misc_feature (1)..( 7): Result.004 file - promoters50/1028352
aaaaacc

SEQ ID NO: 161976 - DNA, 7 bp, Unknown
  misc_feature (1)..( 7): Result.004 file - promoters50/1028352
aaacacc

SEQ ID NO: 161977 - DNA, 7 bp, Unknown
  misc_feature (1)..( 7): Result.004 file - promoters50/1028352
aaacact

SEQ ID NO: 161978 - DNA, 8 bp, Unknown
  misc_feature (1)..( 8): Result.004 file - promoters50/1028352
aaaaacct

SEQ ID NO: 161979 - DNA, 8 bp, Unknown
  misc_feature (1)..( 8): Result.004 file - promoters50/1028352
aaaaaccg

SEQ ID NO: 161980 - DNA, 8 bp, Unknown
  misc_feature (1)..( 8): Result.004 file - promoters50/1028352
ctaaaccg

SEQ ID NO: 161981 - DNA, 7 bp, Unknown
  misc_feature (1)..( 7): Result.004 file - promoters50/1028352
caaacaa

SEQ ID NO: 161982 - DNA, 7 bp, Unknown
  misc_feature (1)..( 7): Result.004 file - promoters50/1028352
caaacac

SEQ ID NO: 161983 - DNA, 7 bp, Unknown
  misc_feature (1)..( 7): Result.004 file - promoters50/1028352
taaacac

SEQ ID NO: 161984 - DNA, 9 bp, Unknown
  misc_feature (1)..( 9): Result.004 file - promoters50/1028352
caaacaaaa

SEQ ID NO: 161985 - DNA, 9 bp, Unknown
  misc_feature (1)..( 9): Result.004 file - promoters50/1028352
gaaactaaa

SEQ ID NO: 161986 - DNA, 9 bp, Unknown
  misc_feature (1)..( 9): Result.004 file - promoters50/1028355
gaaactatg

SEQ ID NO: 161987 - DNA, 18 bp, Unknown
  misc_feature (1)..( 18): Result.004 file - promoters50/1028355
tttttattttttatttta

SEQ ID NO: 161988 - DNA, 18 bp, Unknown
  misc_feature (1)..( 18): Result.004 file - promoters50/1028355
atttcattaattatgatt

SEQ ID NO: 161989 - DNA, 19 bp, Unknown
  misc_feature (1)..( 19): Result.004 file - promoters50/1028355
ttttgtattatttatttta

SEQ ID NO: 161990 - DNA, 10 bp, Unknown
  misc_feature (1)..( 10): Result.004 file - promoters50/1028355
cttcaaatat

SEQ ID NO: 161991 - DNA, 10 bp, Unknown
  misc_feature (1)..( 10): Result.004 file - promoters50/1028355
tatcaaatat

SEQ ID NO: 161992 - DNA, 10 bp, Unknown
  misc_feature (1)..( 10): Result.004 file - promoters50/1028368
tatctaatat

SEQ ID NO: 161993 - DNA, 12 bp, Unknown
  misc_feature (1)..( 12): Result.004 file - promoters50/1028368
ttttgttttcta

SEQ ID NO: 161994 - DNA, 12 bp, Unknown
  misc_feature (1)..( 12): Result.004 file - promoters50/1028368
cagcgttttctg

SEQ ID NO: 161995 - DNA, 12 bp, Unknown
  misc_feature (1)..( 12): Result.004 file - promoters50/1028368
tattgttttgaa

SEQ ID NO: 161996 - DNA, 12 bp, Unknown
  misc_feature (1)..( 12): Result.004 file - promoters50/1028368
atctgttttttg

SEQ ID NO: 161997 - DNA, 12 bp, Unknown
  misc_feature (1)..( 12): Result.004 file - promoters50/1028368
actgatttttaa

SEQ ID NO: 161998 - DNA, 12 bp, Unknown
  misc_feature (1)..( 12): Result.004 file - promoters50/1028368
tttagttttctt

SEQ ID NO: 161999 - DNA, 12 bp, Unknown
  misc_feature (1)..( 12): Result.004 file - promoters50/1028368
gagaatttttgt

SEQ ID NO: 162000 - DNA, 10 bp, Unknown
  misc_feature (1)..( 10): Result.004 file - promoters50/1028368
aaaatatata

SEQ ID NO: 162001 - DNA, 10 bp, Unknown
  misc_feature (1)..( 10): Result.004 file - promoters50/1028368
aaagtattca

SEQ ID NO: 162002 - DNA, 10 bp, Unknown
  misc_feature (1)..( 10): Result.004 file - promoters50/1028368
aaaatttata

SEQ ID NO: 162003 - DNA, 10 bp, Unknown
  misc_feature (1)..( 10): Result.004 file - promoters50/1028368
caaatatatc

SEQ ID NO: 162004 - DNA, 10 bp, Unknown
  misc_feature (1)..( 10): Result.004 file - promoters50/1028368
caaatttttg

SEQ ID NO: 162005 - DNA, 10 bp, Unknown
  misc_feature (1)..( 10): Result.004 file - promoters50/1028368
caaatagttc

SEQ ID NO: 162006 - DNA, 18 bp, Unknown
  misc_feature (1)..( 18): Result.004 file - promoters50/1028368
tcattcttttgatacatt

SEQ ID NO: 162007 - DNA, 18 bp, Unknown
  misc_feature (1)..( 18): Result.004 file - promoters50/1028368
cactctttttgatatgat

SEQ ID NO: 162008 - DNA, 18 bp, Unknown
  misc_feature (1)..( 18): Result.004 file - promoters50/1028368
gtaaaagtttgatatatt

SEQ ID NO: 162009 - DNA, 18 bp, Unknown
  misc_feature (1)..( 18): Result.004 file - promoters50/1028368
tcactcttttgttttgtt

SEQ ID NO: 162010 - DNA, 18 bp, Unknown
  misc_feature (1)..( 18): Result.004 file - promoters50/1028368
caaaatcgatgacatgta

SEQ ID NO: 162011 - DNA, 18 bp, Unknown
  misc_feature (1)..( 18): Result.004 file - promoters50/1028368
gaaacgatttgttatagc

SEQ ID NO: 162012 - DNA, 18 bp, Unknown
  misc_feature (1)..( 18): Result.004 file - promoters50/1028382
gtcatgtgttgtagattg

SEQ ID NO: 162013 - DNA, 8 bp, Unknown
  misc_feature (1)..( 8): Result.004 file - promoters50/1028382
tgaagaaa

SEQ ID NO: 162014 - DNA, 8 bp, Unknown
  misc_feature (1)..( 8): Result.004 file - promoters50/1028382
tgaggaaa

SEQ ID NO: 162015 - DNA, 8 bp, Unknown
  misc_feature (1)..( 8): Result.004 file - promoters50/1028382
agaataaa

SEQ ID NO: 162016 - DNA, 8 bp, Unknown
  misc_feature (1)..( 8): Result.004 file - promoters50/1028382
ttggtgac

SEQ ID NO: 162017 - DNA, 8 bp, Unknown
  misc_feature (1)..( 8): Result.004 file - promoters50/1028382
ttggtgtt

SEQ ID NO: 162018 - DNA, 8 bp, Unknown
  misc_feature (1)..( 8): Result.004 file - promoters50/1028402
ttgttgtt

SEQ ID NO: 162019 - DNA, 8 bp, Unknown
  misc_feature (1)..( 8): Result.004 file - promoters50/1028402
aaaaatgg

SEQ ID NO: 162020 - DNA, 8 bp, Unknown
  misc_feature (1)..( 8): Result.004 file - promoters50/1028402
gaaaatgc

SEQ ID NO: 162021 - DNA, 8 bp, Unknown
  misc_feature (1)..( 8): Result.004 file - promoters50/1028402
aaaaatgt

SEQ ID NO: 162022 - DNA, 8 bp, Unknown
  misc_feature (1)..( 8): Result.004 file - promoters50/1028402
acaaatgc

SEQ ID NO: 162023 - DNA, 11 bp, Unknown
  misc_feature (1)..( 11): Result.004 file - promoters50/1028402
taaaagacaac

SEQ ID NO: 162024 - DNA, 11 bp, Unknown
  misc_feature (1)..( 11): Result.004 file - promoters50/1028402
tcaaaggcaaa

SEQ ID NO: 162025 - DNA, 11 bp, Unknown
  misc_feature (1)..( 11): Result.004 file - promoters50/1028402
ccaaagtcaac

SEQ ID NO: 162026 - DNA, 11 bp, Unknown
  misc_feature (1)..( 11): Result.004 file - promoters50/1028413
ccaatgtctcc

SEQ ID NO: 162027 - DNA, 13 bp, Unknown
  misc_feature (1)..( 13): Result.004 file - promoters50/1028413
tttcatttttaaa

SEQ ID NO: 162028 - DNA, 13 bp, Unknown
  misc_feature (1)..( 13): Result.004 file - promoters50/1028413
ctaaattcttata

SEQ ID NO: 162029 - DNA, 13 bp, Unknown
  misc_feature (1)..( 13): Result.004 file - promoters50/1028413
aattatttttggc

SEQ ID NO: 162030 - DNA, 13 bp, Unknown
  misc_feature (1)..( 13): Result.004 file - promoters50/1028413
ttcaatttaactg

SEQ ID NO: 162031 - DNA, 13 bp, Unknown
  misc_feature (1)..( 13): Result.004 file - promoters50/1028413
atatattttgaaa

SEQ ID NO: 162032 - DNA, 13 bp, Unknown
  misc_feature (1)..( 13): Result.004 file - promoters50/1028459
tgacattcttcag

SEQ ID NO: 162033 - DNA, 8 bp, Unknown
  misc_feature (1)..( 8): Result.004 file - promoters50/1028459
atttattc

SEQ ID NO: 162034 - DNA, 8 bp, Unknown
  misc_feature (1)..( 8): Result.004 file - promoters50/1028459
atttatcc

SEQ ID NO: 162035 - DNA, 8 bp, Unknown
  misc_feature (1)..( 8): Result.004 file - promoters50/1028459
gtttcttc

SEQ ID NO: 162036 - DNA, 8 bp, Unknown
  misc_feature (1)..( 8): Result.004 file - promoters50/1028459
gtttatta

SEQ ID NO: 162037 - DNA, 8 bp, Unknown
  misc_feature (1)..( 8): Result.004 file - promoters50/1028459
gcttcttc

SEQ ID NO: 162038 - DNA, 10 bp, Unknown
  misc_feature (1)..( 10): Result.004 file - promoters50/1028459
gttttggcat

SEQ ID NO: 162039 - DNA, 10 bp, Unknown
  misc_feature (1)..( 10): Result.004 file - promoters50/1028459
ttcttggcat

SEQ ID NO: 162040 - DNA, 10 bp, Unknown
  misc_feature (1)..( 10): Result.004 file - promoters50/1028459
attttggcga

SEQ ID NO: 162041 - DNA, 10 bp, Unknown
  misc_feature (1)..( 10): Result.004 file - promoters50/1028459
attttgtttt

SEQ ID NO: 162042 - DNA, 9 bp, Unknown
  misc_feature (1)..( 9): Result.004 file - promoters50/1028459
tatcaaatc

SEQ ID NO: 162043 - DNA, 9 bp, Unknown
  misc_feature (1)..( 9): Result.004 file - promoters50/1028459
caacaaatc

SEQ ID NO: 162044 - DNA, 9 bp, Unknown
  misc_feature (1)..( 9): Result.004 file - promoters50/1028459
tataaaata

SEQ ID NO: 162045 - DNA, 9 bp, Unknown
  misc_feature (1)..( 9): Result.004 file - promoters50/1028459
acacaaatc

SEQ ID NO: 162046 - DNA, 10 bp, Unknown
  misc_feature (1)..( 10): Result.004 file - promoters50/1028459
cgttttggca

SEQ ID NO: 162047 - DNA, 10 bp, Unknown
  misc_feature (1)..( 10): Result.004 file - promoters50/1028459
tgttttgaca

SEQ ID NO: 162048 - DNA, 10 bp, Unknown
  misc_feature (1)..( 10): Result.004 file - promoters50/1028459
gcatttggac

SEQ ID NO: 162049 - DNA, 10 bp, Unknown
  misc_feature (1)..( 10): Result.004 file - promoters50/1028470
tgttttaata

SEQ ID NO: 162050 - DNA, 13 bp, Unknown
  misc_feature (1)..( 13): Result.004 file - promoters50/1028470
tgaatagatatgc

SEQ ID NO: 162051 - DNA, 13 bp, Unknown
  misc_feature (1)..( 13): Result.004 file - promoters50/1028470
gtcctagatatat

SEQ ID NO: 162052 - DNA, 13 bp, Unknown
  misc_feature (1)..( 13): Result.004 file - promoters50/1028470
ttagtagataagt

SEQ ID NO: 162053 - DNA, 13 bp, Unknown
  misc_feature (1)..( 13): Result.004 file - promoters50/1028470
tttctaaatactc

SEQ ID NO: 162054 - DNA, 13 bp, Unknown
  misc_feature (1)..( 13): Result.004 file - promoters50/1028470
aaactacatattc

SEQ ID NO: 162055 - DNA, 13 bp, Unknown
  misc_feature (1)..( 13): Result.004 file - promoters50/1028470
gcaatagagaagc

SEQ ID NO: 162056 - DNA, 13 bp, Unknown
  misc_feature (1)..( 13): Result.004 file - promoters50/1028470
tccgcaaatcctc

SEQ ID NO: 162057 - DNA, 13 bp, Unknown
  misc_feature (1)..( 13): Result.004 file - promoters50/1028470
tttccaaaattca

SEQ ID NO: 162058 - DNA, 9 bp, Unknown
  misc_feature (1)..( 9): Result.004 file - promoters50/1028470
gaatagata

SEQ ID NO: 162059 - DNA, 9 bp, Unknown
  misc_feature (1)..( 9): Result.004 file - promoters50/1028470
tgatatata

SEQ ID NO: 162060 - DNA, 9 bp, Unknown
  misc_feature (1)..( 9): Result.004 file - promoters50/1028470
ctatagatg

SEQ ID NO: 162061 - DNA, 9 bp, Unknown
  misc_feature (1)..( 9): Result.004 file - promoters50/1028470
aaataaata

SEQ ID NO: 162062 - DNA, 9 bp, Unknown
  misc_feature (1)..( 9): Result.004 file - promoters50/1028470
aaatagatc

SEQ ID NO: 162063 - DNA, 9 bp, Unknown
  misc_feature (1)..( 9): Result.004 file - promoters50/1028545
tgatatact

SEQ ID NO: 162064 - DNA, 15 bp, Unknown
  misc_feature (1)..( 15): Result.004 file - promoters50/1028545
ttatattaaaatgtt

SEQ ID NO: 162065 - DNA, 15 bp, Unknown
  misc_feature (1)..( 15): Result.004 file - promoters50/1028545
ttattttaattttgg

SEQ ID NO: 162066 - DNA, 15 bp, Unknown
  misc_feature (1)..( 15): Result.004 file - promoters50/1028545
agttttgaattcatt

SEQ ID NO: 162067 - DNA, 15 bp, Unknown
  misc_feature (1)..( 15): Result.004 file - promoters50/1028545
ttgtttcaatattgg

SEQ ID NO: 162068 - DNA, 15 bp, Unknown
  misc_feature (1)..( 15): Result.004 file - promoters50/1028545
cactttcaaaagaga

SEQ ID NO: 162069 - DNA, 9 bp, Unknown
  misc_feature (1)..( 9): Result.004 file - promoters50/1028545
ctaatttcc

SEQ ID NO: 162070 - DNA, 9 bp, Unknown
  misc_feature (1)..( 9): Result.004 file - promoters50/1028545
ttaatttca

SEQ ID NO: 162071 - DNA, 9 bp, Unknown
  misc_feature (1)..( 9): Result.004 file - promoters50/1028545
aaaatttca

SEQ ID NO: 162072 - DNA, 9 bp, Unknown
  misc_feature (1)..( 9): Result.004 file - promoters50/1028545
ctaatttgt

SEQ ID NO: 162073 - DNA, 9 bp, Unknown
  misc_feature (1)..( 9): Result.004 file - promoters50/1028590
ttaacttca

SEQ ID NO: 162074 - DNA, 8 bp, Unknown
  misc_feature (1)..( 8): Result.004 file - promoters50/1028590
tatgatta

SEQ ID NO: 162075 - DNA, 8 bp, Unknown
  misc_feature (1)..( 8): Result.004 file - promoters50/1028590
tatcattg

SEQ ID NO: 162076 - DNA, 8 bp, Unknown
  misc_feature (1)..( 8): Result.004 file - promoters50/1028590
gatgattg

SEQ ID NO: 162077 - DNA, 8 bp, Unknown
  misc_feature (1)..( 8): Result.004 file - promoters50/1028590
aatgtttg

SEQ ID NO: 162078 - DNA, 8 bp, Unknown
  misc_feature (1)..( 8): Result.004 file - promoters50/1028590
gatggttg

SEQ ID NO: 162079 - DNA, 8 bp, Unknown
  misc_feature (1)..( 8): Result.004 file - promoters50/1028623
actgtttg

SEQ ID NO: 162080 - DNA, 8 bp, Unknown
  misc_feature (1)..( 8): Result.004 file - promoters50/1028623
aaagctca

SEQ ID NO: 162081 - DNA, 8 bp, Unknown
  misc_feature (1)..( 8): Result.004 file - promoters50/1028623
taagatca

SEQ ID NO: 162082 - DNA, 9 bp, Unknown
  misc_feature (1)..( 9): Result.004 file - promoters50/1028623
taatgctta

SEQ ID NO: 162083 - DNA, 8 bp, Unknown
  misc_feature (1)..( 8): Result.004 file - promoters50/1028623
aaaacagc

SEQ ID NO: 162084 - DNA, 8 bp, Unknown
  misc_feature (1)..( 8): Result.004 file - promoters50/1028623
aaatcagc

SEQ ID NO: 162085 - DNA, 8 bp, Unknown
  misc_feature (1)..( 8): Result.004 file - promoters50/1028629
aaaacatt

SEQ ID NO: 162086 - DNA, 8 bp, Unknown
  misc_feature (1)..( 8): Result.004 file - promoters50/1028629
tttgttga

SEQ ID NO: 162087 - DNA, 8 bp, Unknown
  misc_feature (1)..( 8): Result.004 file - promoters50/1028629
attgttga

SEQ ID NO: 162088 - DNA, 8 bp, Unknown
  misc_feature (1)..( 8): Result.004 file - promoters50/1028629
attgttag

SEQ ID NO: 162089 - DNA, 7 bp, Unknown
  misc_feature (1)..( 7): Result.004 file - promoters50/1028629
caaatat

SEQ ID NO: 162090 - DNA, 7 bp, Unknown
  misc_feature (1)..( 7): Result.004 file - promoters50/1028629
caattat

SEQ ID NO: 162091 - DNA, 7 bp, Unknown
  misc_feature (1)..( 7): Result.004 file - promoters50/1028674
caattat

SEQ ID NO: 162092 - DNA, 9 bp, Unknown
  misc_feature (1)..( 9): Result.004 file - promoters50/1028674
ttaaaataa

SEQ ID NO: 162093 - DNA, 9 bp, Unknown
  misc_feature (1)..( 9): Result.004 file - promoters50/1028674
ttataatca

SEQ ID NO: 162094 - DNA, 9 bp, Unknown
  misc_feature (1)..( 9): Result.004 file - promoters50/1028674
tgaaactaa

SEQ ID NO: 162095 - DNA, 9 bp, Unknown
  misc_feature (1)..( 9): Result.004 file - promoters50/1028674
ttataagtt

SEQ ID NO: 162096 - DNA, 12 bp, Unknown
  misc_feature (1)..( 12): Result.004 file - promoters50/1028674
acaaaatttaaa

SEQ ID NO: 162097 - DNA, 12 bp, Unknown
  misc_feature (1)..( 12): Result.004 file - promoters50/1028674
taaaaatttaca

SEQ ID NO: 162098 - DNA, 12 bp, Unknown
  misc_feature (1)..( 12): Result.004 file - promoters50/1028674
aatatatttaat

SEQ ID NO: 162099 - DNA, 12 bp, Unknown
  misc_feature (1)..( 12): Result.004 file - promoters50/1028674
ataatattcaaa

SEQ ID NO: 162100 - DNA, 12 bp, Unknown
  misc_feature (1)..( 12): Result.004 file - promoters50/1028674
taataattatat

SEQ ID NO: 162101 - DNA, 7 bp, Unknown
  misc_feature (1)..( 7): Result.004 file - promoters50/1028674
atttaaa

SEQ ID NO: 162102 - DNA, 7 bp, Unknown
  misc_feature (1)..( 7): Result.004 file - promoters50/1028674
ctttaaa

SEQ ID NO: 162103 - DNA, 7 bp, Unknown
  misc_feature (1)..( 7): Result.004 file - promoters50/1028674
atttaat

SEQ ID NO: 162104 - DNA, 7 bp, Unknown
  misc_feature (1)..( 7): Result.004 file - promoters50/1028674
attcaaa

SEQ ID NO: 162105 - DNA, 8 bp, Unknown
  misc_feature (1)..( 8): Result.004 file - promoters50/1028674
tttctaat

SEQ ID NO: 162106 - DNA, 11 bp, Unknown
  misc_feature (1)..( 11): Result.004 file - promoters50/1028674
ttcattaatta

SEQ ID NO: 162107 - DNA, 11 bp, Unknown
  misc_feature (1)..( 11): Result.004 file - promoters50/1028674
accattaataa

SEQ ID NO: 162108 - DNA, 11 bp, Unknown
  misc_feature (1)..( 11): Result.004 file - promoters50/1028674
aaatttaatta

SEQ ID NO: 162109 - DNA, 12 bp, Unknown
  misc_feature (1)..( 12): Result.004 file - promoters50/1028674
agaatctaaact

SEQ ID NO: 162110 - DNA, 12 bp, Unknown
  misc_feature (1)..( 12): Result.004 file - promoters50/1028674
gcataatatgac

SEQ ID NO: 162111 - DNA, 12 bp, Unknown
  misc_feature (1)..( 12): Result.004 file - promoters50/1028674
atataataatat

SEQ ID NO: 162112 - DNA, 12 bp, Unknown
  misc_feature (1)..( 12): Result.004 file - promoters50/1028674
taataattatat

SEQ ID NO: 162113 - DNA, 12 bp, Unknown
  misc_feature (1)..( 12): Result.004 file - promoters50/1028674
taaaaatttaca

SEQ ID NO: 162114 - DNA, 13 bp, Unknown
  misc_feature (1)..( 13): Result.004 file - promoters50/1028674
aaatatatttaat

SEQ ID NO: 162115 - DNA, 7 bp, Unknown
  misc_feature (1)..( 7): Result.004 file - promoters50/1028674
attcaac

SEQ ID NO: 162116 - DNA, 7 bp, Unknown
  misc_feature (1)..( 7): Result.004 file - promoters50/1028674
attcaaa

SEQ ID NO: 162117 - DNA, 8 bp, Unknown
  misc_feature (1)..( 8): Result.004 file - promoters50/1028674
tttctaat

SEQ ID NO: 162118 - DNA, 8 bp, Unknown
  misc_feature (1)..( 8): Result.004 file - promoters50/1028682
attaaaat

SEQ ID NO: 162119 - DNA, 11 bp, Unknown
  misc_feature (1)..( 11): Result.004 file - promoters50/1028682
aacaaattgag

SEQ ID NO: 162120 - DNA, 11 bp, Unknown
  misc_feature (1)..( 11): Result.004 file - promoters50/1028682
tacatattgag

SEQ ID NO: 162121 - DNA, 11 bp, Unknown
  misc_feature (1)..( 11): Result.004 file - promoters50/1028682
aacaaaattaa

SEQ ID NO: 162122 - DNA, 11 bp, Unknown
  misc_feature (1)..( 11): Result.004 file - promoters50/1028682
cccatattatc

SEQ ID NO: 162123 - DNA, 11 bp, Unknown
  misc_feature (1)..( 11): Result.004 file - promoters50/1028682
ctgatataatc

SEQ ID NO: 162124 - DNA, 11 bp, Unknown
  misc_feature (1)..( 11): Result.004 file - promoters50/1028763
ggcctatatac

SEQ ID NO: 162125 - DNA, 14 bp, Unknown
  misc_feature (1)..( 14): Result.004 file - promoters50/1028763
aaaacccaaacaaa

SEQ ID NO: 162126 - DNA, 14 bp, Unknown
  misc_feature (1)..( 14): Result.004 file - promoters50/1028763
gaattccaaagaaa

SEQ ID NO: 162127 - DNA, 14 bp, Unknown
  misc_feature (1)..( 14): Result.004 file - promoters50/1028763
ctcttctaaaagat

SEQ ID NO: 162128 - DNA, 14 bp, Unknown
  misc_feature (1)..( 14): Result.004 file - promoters50/1028763
agcttttaattaaa

SEQ ID NO: 162129 - DNA, 14 bp, Unknown
  misc_feature (1)..( 14): Result.004 file - promoters50/1028763
ctctactaaagcaa

SEQ ID NO: 162130 - DNA, 14 bp, Unknown
  misc_feature (1)..( 14): Result.004 file - promoters50/1028785
tggaactcaagtgg

SEQ ID NO: 162131 - DNA, 7 bp, Unknown
  misc_feature (1)..( 7): Result.004 file - promoters50/1028785
acatttg

SEQ ID NO: 162132 - DNA, 7 bp, Unknown
  misc_feature (1)..( 7): Result.004 file - promoters50/1028785
acatttt

SEQ ID NO: 162133 - DNA, 7 bp, Unknown
  misc_feature (1)..( 7): Result.004 file - promoters50/1028785
gcatttt

SEQ ID NO: 162134 - DNA, 9 bp, Unknown
  misc_feature (1)..( 9): Result.004 file - promoters50/1028785
atttccaag

SEQ ID NO: 162135 - DNA, 9 bp, Unknown
  misc_feature (1)..( 9): Result.004 file - promoters50/1028785
attaccaca

SEQ ID NO: 162136 - DNA, 9 bp, Unknown
  misc_feature (1)..( 9): Result.004 file - promoters50/1028793
gatacaaca

SEQ ID NO: 162137 - DNA, 7 bp, Unknown
  misc_feature (1)..( 7): Result.004 file - promoters50/1028793
ttttaaa

SEQ ID NO: 162138 - DNA, 7 bp, Unknown
  misc_feature (1)..( 7): Result.004 file - promoters50/1028793
gtttaaa

SEQ ID NO: 162139 - DNA, 7 bp, Unknown
  misc_feature (1)..( 7): Result.004 file - promoters50/1028826
ttttaac

SEQ ID NO: 162140 - DNA, 10 bp, Unknown
  misc_feature (1)..( 10): Result.004 file - promoters50/1028826
atacgttttt

SEQ ID NO: 162141 - DNA, 10 bp, Unknown
  misc_feature (1)..( 10): Result.004 file - promoters50/1028826
aaacgtttag

SEQ ID NO: 162142 - DNA, 10 bp, Unknown
  misc_feature (1)..( 10): Result.004 file - promoters50/1028826
ttacatttgt

SEQ ID NO: 162143 - DNA, 10 bp, Unknown
  misc_feature (1)..( 10): Result.004 file - promoters50/1028826
aaaagtttgt

SEQ ID NO: 162144 - DNA, 10 bp, Unknown
  misc_feature (1)..( 10): Result.004 file - promoters50/1028826
acacgcttac

SEQ ID NO: 162145 - DNA, 10 bp, Unknown
  misc_feature (1)..( 10): Result.004 file - promoters50/1028826
tgtcatgtgt

SEQ ID NO: 162146 - DNA, 12 bp, Unknown
  misc_feature (1)..( 12): Result.004 file - promoters50/1028826
tccttaatctta

SEQ ID NO: 162147 - DNA, 12 bp, Unknown
  misc_feature (1)..( 12): Result.004 file - promoters50/1028826
tgattaatttta

SEQ ID NO: 162148 - DNA, 12 bp, Unknown
  misc_feature (1)..( 12): Result.004 file - promoters50/1028826
ggtttactctat

SEQ ID NO: 162149 - DNA, 12 bp, Unknown
  misc_feature (1)..( 12): Result.004 file - promoters50/1028826
ttcctaattttg

SEQ ID NO: 162150 - DNA, 12 bp, Unknown
  misc_feature (1)..( 12): Result.004 file - promoters50/1028826
aaacaaattttt

SEQ ID NO: 162151 - DNA, 12 bp, Unknown
  misc_feature (1)..( 12): Result.004 file - promoters50/1028826
tgagtaatattc

SEQ ID NO: 162152 - DNA, 11 bp, Unknown
  misc_feature (1)..( 11): Result.004 file - promoters50/1028826
ttattaaaatg

SEQ ID NO: 162153 - DNA, 11 bp, Unknown
  misc_feature (1)..( 11): Result.004 file - promoters50/1028826
taattgaaacc

SEQ ID NO: 162154 - DNA, 11 bp, Unknown
  misc_feature (1)..( 11): Result.004 file - promoters50/1028826
ttatcaaattg

SEQ ID NO: 162155 - DNA, 11 bp, Unknown
  misc_feature (1)..( 11): Result.004 file - promoters50/1028826
tacctgaaaca

SEQ ID NO: 162156 - DNA, 11 bp, Unknown
  misc_feature (1)..( 11): Result.004 file - promoters50/1028826
cttttgataca

SEQ ID NO: 162157 - DNA, 11 bp, Unknown
  misc_feature (1)..( 11): Result.004 file - promoters50/1028826
ctatccaataa

SEQ ID NO: 162158 - DNA, 14 bp, Unknown
  misc_feature (1)..( 14): Result.004 file - promoters50/1028826
caaatttcttaaaa

SEQ ID NO: 162159 - DNA, 14 bp, Unknown
  misc_feature (1)..( 14): Result.004 file - promoters50/1028826
attacaatttaaaa

SEQ ID NO: 162160 - DNA, 14 bp, Unknown
  misc_feature (1)..( 14): Result.004 file - promoters50/1028826
aatgtttattaaaa

SEQ ID NO: 162161 - DNA, 14 bp, Unknown
  misc_feature (1)..( 14): Result.004 file - promoters50/1028826
gaatgggcttaaac

SEQ ID NO: 162162 - DNA, 14 bp, Unknown
  misc_feature (1)..( 14): Result.004 file - promoters50/1028826
aatctttattacgt

SEQ ID NO: 162163 - DNA, 14 bp, Unknown
  misc_feature (1)..( 14): Result.004 file - promoters50/1028835
ggtttttattgctc

SEQ ID NO: 162164 - DNA, 10 bp, Unknown
  misc_feature (1)..( 10): Result.004 file - promoters50/1028835
attaatttgt

SEQ ID NO: 162165 - DNA, 10 bp, Unknown
  misc_feature (1)..( 10): Result.004 file - promoters50/1028835
atttattaat

SEQ ID NO: 162166 - DNA, 10 bp, Unknown
  misc_feature (1)..( 10): Result.004 file - promoters50/1028835
agtaattttt

SEQ ID NO: 162167 - DNA, 10 bp, Unknown
  misc_feature (1)..( 10): Result.004 file - promoters50/1028835
ctttgttaca

SEQ ID NO: 162168 - DNA, 10 bp, Unknown
  misc_feature (1)..( 10): Result.004 file - promoters50/1028835
ttttatgaat

SEQ ID NO: 162169 - DNA, 10 bp, Unknown
  misc_feature (1)..( 10): Result.004 file - promoters50/1028835
ttttcttaaa

SEQ ID NO: 162170 - DNA, 13 bp, Unknown
  misc_feature (1)..( 13): Result.004 file - promoters50/1028835
ctaatgaatctaa

SEQ ID NO: 162171 - DNA, 13 bp, Unknown
  misc_feature (1)..( 13): Result.004 file - promoters50/1028835
tttatgaatgcta

SEQ ID NO: 162172 - DNA, 13 bp, Unknown
  misc_feature (1)..( 13): Result.004 file - promoters50/1028835
aaactgaatctaa

SEQ ID NO: 162173 - DNA, 13 bp, Unknown
  misc_feature (1)..( 13): Result.004 file - promoters50/1028835
tttattaataggt

SEQ ID NO: 162174 - DNA, 13 bp, Unknown
  misc_feature (1)..( 13): Result.004 file - promoters50/1028835
tacattaatgtta

SEQ ID NO: 162175 - DNA, 13 bp, Unknown
  misc_feature (1)..( 13): Result.004 file - promoters50/1028851
tttcttaaaaaaa

SEQ ID NO: 162176 - DNA, 11 bp, Unknown
  misc_feature (1)..( 11): Result.004 file - promoters50/1028851
tatatcaacca

SEQ ID NO: 162177 - DNA, 11 bp, Unknown
  misc_feature (1)..( 11): Result.004 file - promoters50/1028851
agtatctacca

SEQ ID NO: 162178 - DNA, 11 bp, Unknown
  misc_feature (1)..( 11): Result.004 file - promoters50/1028851
cgaatccacca

SEQ ID NO: 162179 - DNA, 11 bp, Unknown
  misc_feature (1)..( 11): Result.004 file - promoters50/1028851
tatttcaattt

SEQ ID NO: 162180 - DNA, 11 bp, Unknown
  misc_feature (1)..( 11): Result.004 file - promoters50/1028851
tatctcaaaat

SEQ ID NO: 162181 - DNA, 11 bp, Unknown
  misc_feature (1)..( 11): Result.004 file - promoters50/1028851
actttctattt

SEQ ID NO: 162182 - DNA, 9 bp, Unknown
  misc_feature (1)..( 9): Result.004 file - promoters50/1028851
ccaaattgt

SEQ ID NO: 162183 - DNA, 9 bp, Unknown
  misc_feature (1)..( 9): Result.004 file - promoters50/1028851
acaaattta

SEQ ID NO: 162184 - DNA, 9 bp, Unknown
  misc_feature (1)..( 9): Result.004 file - promoters50/1028851
caaaattta

SEQ ID NO: 162185 - DNA, 9 bp, Unknown
  misc_feature (1)..( 9): Result.004 file - promoters50/1028851
acaaattat

SEQ ID NO: 162186 - DNA, 9 bp, Unknown
  misc_feature (1)..( 9): Result.004 file - promoters50/1028851
tcaattttt

SEQ ID NO: 162187 - DNA, 9 bp, Unknown
  misc_feature (1)..( 9): Result.004 file - promoters50/1028851
tcactttct

SEQ ID NO: 162188 - DNA, 9 bp, Unknown
  misc_feature (1)..( 9): Result.004 file - promoters50/1028851
tcaaatttc

SEQ ID NO: 162189 - DNA, 9 bp, Unknown
  misc_feature (1)..( 9): Result.004 file - promoters50/1028851
caaaattta

SEQ ID NO: 162190 - DNA, 9 bp, Unknown
  misc_feature (1)..( 9): Result.004 file - promoters50/1028851
acaaattat

SEQ ID NO: 162191 - DNA, 9 bp, Unknown
  misc_feature (1)..( 9): Result.004 file - promoters50/1028851
tcaattttt

SEQ ID NO: 162192 - DNA, 9 bp, Unknown
  misc_feature (1)..( 9): Result.004 file - promoters50/1028851
acaaattta

SEQ ID NO: 162193 - DNA, 9 bp, Unknown
  misc_feature (1)..( 9): Result.004 file - promoters50/1028851
tcactttct

SEQ ID NO: 162194 - DNA, 11 bp, Unknown
  misc_feature (1)..( 11): Result.004 file - promoters50/1028851
acattaaaaat

SEQ ID NO: 162195 - DNA, 11 bp, Unknown
  misc_feature (1)..( 11): Result.004 file - promoters50/1028851
acaataaaagt

SEQ ID NO: 162196 - DNA, 11 bp, Unknown
  misc_feature (1)..( 11): Result.004 file - promoters50/1028851
acgttaaaaat

SEQ ID NO: 162197 - DNA, 11 bp, Unknown
  misc_feature (1)..( 11): Result.004 file - promoters50/1028851
ttaataaagtg

SEQ ID NO: 162198 - DNA, 11 bp, Unknown
  misc_feature (1)..( 11): Result.004 file - promoters50/1028851
gcaacaaattt

SEQ ID NO: 162199 - DNA, 11 bp, Unknown
  misc_feature (1)..( 11): Result.004 file - promoters50/1028859
ttaatcaaata

SEQ ID NO: 162200 - DNA, 11 bp, Unknown
  misc_feature (1)..( 11): Result.004 file - promoters50/1028859
aaagatatatt

SEQ ID NO: 162201 - DNA, 11 bp, Unknown
  misc_feature (1)..( 11): Result.004 file - promoters50/1028859
aaatatatata

SEQ ID NO: 162202 - DNA, 11 bp, Unknown
  misc_feature (1)..( 11): Result.004 file - promoters50/1028859
acggataaatt

SEQ ID NO: 162203 - DNA, 15 bp, Unknown
  misc_feature (1)..( 15): Result.004 file - promoters50/1028859
attatagtttaattc

SEQ ID NO: 162204 - DNA, 15 bp, Unknown
  misc_feature (1)..( 15): Result.004 file - promoters50/1028859
attaaagttcaattt

SEQ ID NO: 162205 - DNA, 15 bp, Unknown
  misc_feature (1)..( 15): Result.004 file - promoters50/1028859
gttaaccattaataa

SEQ ID NO: 162206 - DNA, 9 bp, Unknown
  misc_feature (1)..( 9): Result.004 file - promoters50/1028859
tctcttttt

SEQ ID NO: 162207 - DNA, 9 bp, Unknown
  misc_feature (1)..( 9): Result.004 file - promoters50/1028859
tctcttttt

SEQ ID NO: 162208 - DNA, 9 bp, Unknown
  misc_feature (1)..( 9): Result.004 file - promoters50/1028863
tttcttttc

SEQ ID NO: 162209 - DNA, 13 bp, Unknown
  misc_feature (1)..( 13): Result.004 file - promoters50/1028863
tcaatatgttata

SEQ ID NO: 162210 - DNA, 13 bp, Unknown
  misc_feature (1)..( 13): Result.004 file - promoters50/1028863
tcaatatgtgcaa

SEQ ID NO: 162211 - DNA, 13 bp, Unknown
  misc_feature (1)..( 13): Result.004 file - promoters50/1028863
aatatatgttaat

SEQ ID NO: 162212 - DNA, 13 bp, Unknown
  misc_feature (1)..( 13): Result.004 file - promoters50/1028863
agtgtatgttaat

SEQ ID NO: 162213 - DNA, 13 bp, Unknown
  misc_feature (1)..( 13): Result.004 file - promoters50/1028863
ccaatatgtaaat

SEQ ID NO: 162214 - DNA, 13 bp, Unknown
  misc_feature (1)..( 13): Result.004 file - promoters50/1028863
atcacttgtaaat

SEQ ID NO: 162215 - DNA, 13 bp, Unknown
  misc_feature (1)..( 13): Result.004 file - promoters50/1028863
gattcaaaattct

SEQ ID NO: 162216 - DNA, 13 bp, Unknown
  misc_feature (1)..( 13): Result.004 file - promoters50/1028863
aaaaaaaaattct

SEQ ID NO: 162217 - DNA, 13 bp, Unknown
  misc_feature (1)..( 13): Result.004 file - promoters50/1028863
atagaaaaattaa

SEQ ID NO: 162218 - DNA, 13 bp, Unknown
  misc_feature (1)..( 13): Result.004 file - promoters50/1028863
gcaaataaattaa

SEQ ID NO: 162219 - DNA, 13 bp, Unknown
  misc_feature (1)..( 13): Result.004 file - promoters50/1028863
aaaaaaaaatgga

SEQ ID NO: 162220 - DNA, 13 bp, Unknown
  misc_feature (1)..( 13): Result.004 file - promoters50/1028866
aataaataataac

SEQ ID NO: 162221 - DNA, 11 bp, Unknown
  misc_feature (1)..( 11): Result.004 file - promoters50/1028866
caatcaaattt

SEQ ID NO: 162222 - DNA, 11 bp, Unknown
  misc_feature (1)..( 11): Result.004 file - promoters50/1028866
gatgcaaatta

SEQ ID NO: 162223 - DNA, 11 bp, Unknown
  misc_feature (1)..( 11): Result.004 file - promoters50/1028866
gatgcaaatgt

SEQ ID NO: 162224 - DNA, 11 bp, Unknown
  misc_feature (1)..( 11): Result.004 file - promoters50/1028866
ggggcatattg

SEQ ID NO: 162225 - DNA, 11 bp, Unknown
  misc_feature (1)..( 11): Result.004 file - promoters50/1028866
gatccaaacac

SEQ ID NO: 162226 - DNA, 10 bp, Unknown
  misc_feature (1)..( 10): Result.004 file - promoters50/1028908
tgtgatattg

SEQ ID NO: 162227 - DNA, 11 bp, Unknown
  misc_feature (1)..( 11): Result.004 file - promoters50/1028908
acaaataaagt

SEQ ID NO: 162228 - DNA, 11 bp, Unknown
  misc_feature (1)..( 11): Result.004 file - promoters50/1028908
acaaatacgaa

SEQ ID NO: 162229 - DNA, 11 bp, Unknown
  misc_feature (1)..( 11): Result.004 file - promoters50/1028908
tcaagtacgaa

SEQ ID NO: 162230 - DNA, 13 bp, Unknown
  misc_feature (1)..( 13): Result.004 file - promoters50/1028908
gttggtttatcat

SEQ ID NO: 162231 - DNA, 13 bp, Unknown
  misc_feature (1)..( 13): Result.004 file - promoters50/1028908
aatggttaatcat

SEQ ID NO: 162232 - DNA, 13 bp, Unknown
  misc_feature (1)..( 13): Result.004 file - promoters50/1028937
aatgcttacattg

SEQ ID NO: 162233 - DNA, 14 bp, Unknown
  misc_feature (1)..( 14): Result.004 file - promoters50/1028937
acaataataaacaa

SEQ ID NO: 162234 - DNA, 14 bp, Unknown
  misc_feature (1)..( 14): Result.004 file - promoters50/1028937
tttataatataaat

SEQ ID NO: 162235 - DNA, 14 bp, Unknown
  misc_feature (1)..( 14): Result.004 file - promoters50/1028937
taaatagtaaaaaa

SEQ ID NO: 162236 - DNA, 14 bp, Unknown
  misc_feature (1)..( 14): Result.004 file - promoters50/1028937
acaattatataggt

SEQ ID NO: 162237 - DNA, 14 bp, Unknown
  misc_feature (1)..( 14): Result.004 file - promoters50/1028937
tttttaacaaattt

SEQ ID NO: 162238 - DNA, 14 bp, Unknown
  misc_feature (1)..( 14): Result.004 file - promoters50/1028937
tttattttataggt

SEQ ID NO: 162239 - DNA, 14 bp, Unknown
  misc_feature (1)..( 14): Result.004 file - promoters50/1028937
gagatagtactatc

SEQ ID NO: 162240 - DNA, 13 bp, Unknown
  misc_feature (1)..( 13): Result.004 file - promoters50/1028937
aaattattatatt

SEQ ID NO: 162241 - DNA, 13 bp, Unknown
  misc_feature (1)..( 13): Result.004 file - promoters50/1028937
taattataaagta

SEQ ID NO: 162242 - DNA, 13 bp, Unknown
  misc_feature (1)..( 13): Result.004 file - promoters50/1028937
caattatataggt

SEQ ID NO: 162243 - DNA, 13 bp, Unknown
  misc_feature (1)..( 13): Result.004 file - promoters50/1028937
aaaatatacagtg

SEQ ID NO: 162244 - DNA, 13 bp, Unknown
  misc_feature (1)..( 13): Result.004 file - promoters50/1028937
ttattttataggt

SEQ ID NO: 162245 - DNA, 13 bp, Unknown
  misc_feature (1)..( 13): Result.004 file - promoters50/1028937
aacttttttttta

SEQ ID NO: 162246 - DNA, 13 bp, Unknown
  misc_feature (1)..( 13): Result.004 file - promoters50/1028937
atatttttataaa

SEQ ID NO: 162247 - DNA, 13 bp, Unknown
  misc_feature (1)..( 13): Result.004 file - promoters50/1028937
atataaaaaataa

SEQ ID NO: 162248 - DNA, 13 bp, Unknown
  misc_feature (1)..( 13): Result.004 file - promoters50/1028937
acataaaaatttg

SEQ ID NO: 162249 - DNA, 13 bp, Unknown
  misc_feature (1)..( 13): Result.004 file - promoters50/1028937
tatcaaaaaaaga

SEQ ID NO: 162250 - DNA, 13 bp, Unknown
  misc_feature (1)..( 13): Result.004 file - promoters50/1028937
acaaaaacaataa

SEQ ID NO: 162251 - DNA, 13 bp, Unknown
  misc_feature (1)..( 13): Result.004 file - promoters50/1028937
ctcgaaaatatac

SEQ ID NO: 162252 - DNA, 13 bp, Unknown
  misc_feature (1)..( 13): Result.004 file - promoters50/1028937
aaaaaaaaaatac

SEQ ID NO: 162253 - DNA, 13 bp, Unknown
  misc_feature (1)..( 13): Result.004 file - promoters50/1028937
taaacaaacaaat

SEQ ID NO: 162254 - DNA, 13 bp, Unknown
  misc_feature (1)..( 13): Result.004 file - promoters50/1028937
aaaacaatttata

SEQ ID NO: 162255 - DNA, 13 bp, Unknown
  misc_feature (1)..( 13): Result.004 file - promoters50/1028937
gaaaaaaaaaata

SEQ ID NO: 162256 - DNA, 13 bp, Unknown
  misc_feature (1)..( 13): Result.004 file - promoters50/1028937
aaaagaatttata

SEQ ID NO: 162257 - DNA, 13 bp, Unknown
  misc_feature (1)..( 13): Result.004 file - promoters50/1028937
caaacaaaaacaa

SEQ ID NO: 162258 - DNA, 13 bp, Unknown
  misc_feature (1)..( 13): Result.004 file - promoters50/1028937
tgaagaatctgat

SEQ ID NO: 162259 - DNA, 11 bp, Unknown
  misc_feature (1)..( 11): Result.004 file - promoters50/1028937
tatctattttg

SEQ ID NO: 162260 - DNA, 11 bp, Unknown
  misc_feature (1)..( 11): Result.004 file - promoters50/1028937
aacttatttta

SEQ ID NO: 162261 - DNA, 11 bp, Unknown
  misc_feature (1)..( 11): Result.004 file - promoters50/1028937
aaattatttta

SEQ ID NO: 162262 - DNA, 11 bp, Unknown
  misc_feature (1)..( 11): Result.004 file - promoters50/1028937
aacctaatttc

SEQ ID NO: 162263 - DNA, 11 bp, Unknown
  misc_feature (1)..( 11): Result.004 file - promoters50/1028937
ttcctaatttg

SEQ ID NO: 162264 - DNA, 11 bp, Unknown
  misc_feature (1)..( 11): Result.004 file - promoters50/1028937
tatctgttttt

SEQ ID NO: 162265 - DNA, 11 bp, Unknown
  misc_feature (1)..( 11): Result.004 file - promoters50/1028937
ttattatattg

SEQ ID NO: 162266 - DNA, 11 bp, Unknown
  misc_feature (1)..( 11): Result.004 file - promoters50/1028937
ttattttatag

SEQ ID NO: 162267 - DNA, 11 bp, Unknown
  misc_feature (1)..( 11): Result.004 file - promoters50/1028937
caattatatag

SEQ ID NO: 162268 - DNA, 11 bp, Unknown
  misc_feature (1)..( 11): Result.004 file - promoters50/1028937
agattttataa

SEQ ID NO: 162269 - DNA, 12 bp, Unknown
  misc_feature (1)..( 12): Result.004 file - promoters50/1028937
atatttttataa

SEQ ID NO: 162270 - DNA, 12 bp, Unknown
  misc_feature (1)..( 12): Result.004 file - promoters50/1028937
ctttttttttaa

SEQ ID NO: 162271 - DNA, 12 bp, Unknown
  misc_feature (1)..( 12): Result.004 file - promoters50/1028937
aaatatatttaa

SEQ ID NO: 162272 - DNA, 11 bp, Unknown
  misc_feature (1)..( 11): Result.004 file - promoters50/1028937
atatatataat

SEQ ID NO: 162273 - DNA, 11 bp, Unknown
  misc_feature (1)..( 11): Result.004 file - promoters50/1028937
atatatttaat

SEQ ID NO: 162274 - DNA, 11 bp, Unknown
  misc_feature (1)..( 11): Result.004 file - promoters50/1028937
gtatgtattta

SEQ ID NO: 162275 - DNA, 11 bp, Unknown
  misc_feature (1)..( 11): Result.004 file - promoters50/1028937
atatttttata

SEQ ID NO: 162276 - DNA, 11 bp, Unknown
  misc_feature (1)..( 11): Result.004 file - promoters50/1028937
ttctttttaat

SEQ ID NO: 162277 - DNA, 11 bp, Unknown
  misc_feature (1)..( 11): Result.004 file - promoters50/1028937
caaattttatt

SEQ ID NO: 162278 - DNA, 12 bp, Unknown
  misc_feature (1)..( 12): Result.004 file - promoters50/1028937
agaatactttat

SEQ ID NO: 162279 - DNA, 12 bp, Unknown
  misc_feature (1)..( 12): Result.004 file - promoters50/1028937
gacatattttta

SEQ ID NO: 162280 - DNA, 12 bp, Unknown
  misc_feature (1)..( 12): Result.004 file - promoters50/1028937
tatgtatttttt

SEQ ID NO: 162281 - DNA, 12 bp, Unknown
  misc_feature (1)..( 12): Result.004 file - promoters50/1028937
aatatatttaat

SEQ ID NO: 162282 - DNA, 12 bp, Unknown
  misc_feature (1)..( 12): Result.004 file - promoters50/1028937
tatgtatttaga

SEQ ID NO: 162283 - DNA, 12 bp, Unknown
  misc_feature (1)..( 12): Result.004 file - promoters50/1028955
ttattattgaga

SEQ ID NO: 162284 - DNA, 12 bp, Unknown
  misc_feature (1)..( 12): Result.004 file - promoters50/1028955
atagatgtttca

SEQ ID NO: 162285 - DNA, 12 bp, Unknown
  misc_feature (1)..( 12): Result.004 file - promoters50/1028955
gttgatgtctca

SEQ ID NO: 162286 - DNA, 12 bp, Unknown
  misc_feature (1)..( 12): Result.004 file - promoters50/1028955
atatatgtaaac

SEQ ID NO: 162287 - DNA, 12 bp, Unknown
  misc_feature (1)..( 12): Result.004 file - promoters50/1028955
ttaattgtctcc

SEQ ID NO: 162288 - DNA, 12 bp, Unknown
  misc_feature (1)..( 12): Result.004 file - promoters50/1028955
aaaaataccact

SEQ ID NO: 162289 - DNA, 12 bp, Unknown
  misc_feature (1)..( 12): Result.004 file - promoters50/1028955
aaacataaattt

SEQ ID NO: 162290 - DNA, 8 bp, Unknown
  misc_feature (1)..( 8): Result.004 file - promoters50/1028955
attttcaa

SEQ ID NO: 162291 - DNA, 8 bp, Unknown
  misc_feature (1)..( 8): Result.004 file - promoters50/1028955
atttacaa

SEQ ID NO: 162292 - DNA, 8 bp, Unknown
  misc_feature (1)..( 8): Result.004 file - promoters50/1028955
attttctt

SEQ ID NO: 162293 - DNA, 8 bp, Unknown
  misc_feature (1)..( 8): Result.004 file - promoters50/1028955
attaacaa

SEQ ID NO: 162294 - DNA, 8 bp, Unknown
  misc_feature (1)..( 8): Result.004 file - promoters50/1028955
attaacat

SEQ ID NO: 162295 - DNA, 8 bp, Unknown
  misc_feature (1)..( 8): Result.004 file - promoters50/1028955
attgtctc

SEQ ID NO: 162296 - DNA, 10 bp, Unknown
  misc_feature (1)..( 10): Result.004 file - promoters50/1028955
ttagatagat

SEQ ID NO: 162297 - DNA, 10 bp, Unknown
  misc_feature (1)..( 10): Result.004 file - promoters50/1028955
aaagagagag

SEQ ID NO: 162298 - DNA, 10 bp, Unknown
  misc_feature (1)..( 10): Result.004 file - promoters50/1028955
aaatatatgt

SEQ ID NO: 162299 - DNA, 10 bp, Unknown
  misc_feature (1)..( 10): Result.004 file - promoters50/1028955
gaagagaatt

SEQ ID NO: 162300 - DNA, 10 bp, Unknown
  misc_feature (1)..( 10): Result.004 file - promoters50/1028955
aaaaatacca

SEQ ID NO: 162301 - DNA, 10 bp, Unknown
  misc_feature (1)..( 10): Result.004 file - promoters50/1028963
aaacataaat

SEQ ID NO: 162302 - DNA, 10 bp, Unknown
  misc_feature (1)..( 10): Result.004 file - promoters50/1028963
taatacaatt

SEQ ID NO: 162303 - DNA, 10 bp, Unknown
  misc_feature (1)..( 10): Result.004 file - promoters50/1028963
aaataaaata

SEQ ID NO: 162304 - DNA, 10 bp, Unknown
  misc_feature (1)..( 10): Result.004 file - promoters50/1028963
aaatgaaata

SEQ ID NO: 162305 - DNA, 8 bp, Unknown
  misc_feature (1)..( 8): Result.004 file - promoters50/1028963
tatcttct

SEQ ID NO: 162306 - DNA, 8 bp, Unknown
  misc_feature (1)..( 8): Result.004 file - promoters50/1028963
tattttct

SEQ ID NO: 162307 - DNA, 8 bp, Unknown
  misc_feature (1)..( 8): Result.004 file - promoters50/1028984
tatcttaa

SEQ ID NO: 162308 - DNA, 7 bp, Unknown
  misc_feature (1)..( 7): Result.004 file - promoters50/1028984
taaaatg

SEQ ID NO: 162309 - DNA, 7 bp, Unknown
  misc_feature (1)..( 7): Result.004 file - promoters50/1028984
gaaaatg

SEQ ID NO: 162310 - DNA, 7 bp, Unknown
  misc_feature (1)..( 7): Result.004 file - promoters50/1029005
taaaata

SEQ ID NO: 162311 - DNA, 10 bp, Unknown
  misc_feature (1)..( 10): Result.004 file - promoters50/1029005
aaatttattt

SEQ ID NO: 162312 - DNA, 10 bp, Unknown
  misc_feature (1)..( 10): Result.004 file - promoters50/1029005
tcgttttttt

SEQ ID NO: 162313 - DNA, 10 bp, Unknown
  misc_feature (1)..( 10): Result.004 file - promoters50/1029005
ttttttcttt

SEQ ID NO: 162314 - DNA, 10 bp, Unknown
  misc_feature (1)..( 10): Result.004 file - promoters50/1029005
ctttttgttt

SEQ ID NO: 162315 - DNA, 10 bp, Unknown
  misc_feature (1)..( 10): Result.004 file - promoters50/1029005
aaatttgttt

SEQ ID NO: 162316 - DNA, 10 bp, Unknown
  misc_feature (1)..( 10): Result.004 file - promoters50/1029085
caatttgagt

SEQ ID NO: 162317 - DNA, 13 bp, Unknown
  misc_feature (1)..( 13): Result.004 file - promoters50/1029085
ttttaaagaaccg

SEQ ID NO: 162318 - DNA, 13 bp, Unknown
  misc_feature (1)..( 13): Result.004 file - promoters50/1029085
gtttagagaagaa

SEQ ID NO: 162319 - DNA, 13 bp, Unknown
  misc_feature (1)..( 13): Result.004 file - promoters50/1029085
ttttaaaaattgg

SEQ ID NO: 162320 - DNA, 13 bp, Unknown
  misc_feature (1)..( 13): Result.004 file - promoters50/1029085
tatgacagtatag

SEQ ID NO: 162321 - DNA, 13 bp, Unknown
  misc_feature (1)..( 13): Result.004 file - promoters50/1029085
aattaaaatgaag

SEQ ID NO: 162322 - DNA, 13 bp, Unknown
  misc_feature (1)..( 13): Result.004 file - promoters50/1029085
cattaaattaatt

SEQ ID NO: 162323 - DNA, 13 bp, Unknown
  misc_feature (1)..( 13): Result.004 file - promoters50/1029085
gacaaaattttaa

SEQ ID NO: 162324 - DNA, 13 bp, Unknown
  misc_feature (1)..( 13): Result.004 file - promoters50/1029085
gactaaatcttac

SEQ ID NO: 162325 - DNA, 13 bp, Unknown
  misc_feature (1)..( 13): Result.004 file - promoters50/1029085
tgattaatttttg

SEQ ID NO: 162326 - DNA, 13 bp, Unknown
  misc_feature (1)..( 13): Result.004 file - promoters50/1029085
tgttaaatttacg

SEQ ID NO: 162327 - DNA, 13 bp, Unknown
  misc_feature (1)..( 13): Result.004 file - promoters50/1029085
tccgtaatattag

SEQ ID NO: 162328 - DNA, 13 bp, Unknown
  misc_feature (1)..( 13): Result.004 file - promoters50/1029089
ggagttgtattat

SEQ ID NO: 162329 - DNA, 9 bp, Unknown
  misc_feature (1)..( 9): Result.004 file - promoters50/1029089
ttaatgtat

SEQ ID NO: 162330 - DNA, 9 bp, Unknown
  misc_feature (1)..( 9): Result.004 file - promoters50/1029089
tcaatatat

SEQ ID NO: 162331 - DNA, 9 bp, Unknown
  misc_feature (1)..( 9): Result.004 file - promoters50/1029089
tcaatattt

SEQ ID NO: 162332 - DNA, 7 bp, Unknown
  misc_feature (1)..( 7): Result.004 file - promoters50/1029089
gttaaaa

SEQ ID NO: 162333 - DNA, 7 bp, Unknown
  misc_feature (1)..( 7): Result.004 file - promoters50/1029089
gttaaaa

SEQ ID NO: 162334 - DNA, 7 bp, Unknown
  misc_feature (1)..( 7): Result.004 file - promoters50/1029089
cttaaaa

SEQ ID NO: 162335 - DNA, 9 bp, Unknown
  misc_feature (1)..( 9): Result.004 file - promoters50/1029089
aaataataa

SEQ ID NO: 162336 - DNA, 9 bp, Unknown
  misc_feature (1)..( 9): Result.004 file - promoters50/1029089
aaaaaataa

SEQ ID NO: 162337 - DNA, 9 bp, Unknown
  misc_feature (1)..( 9): Result.004 file - promoters50/1029089
taaaaatag

SEQ ID NO: 162338 - DNA, 9 bp, Unknown
  misc_feature (1)..( 9): Result.004 file - promoters50/1029089
aaaataaaa

SEQ ID NO: 162339 - DNA, 9 bp, Unknown
  misc_feature (1)..( 9): Result.004 file - promoters50/1029089
aaaataaaa

SEQ ID NO: 162340 - DNA, 9 bp, Unknown
  misc_feature (1)..( 9): Result.004 file - promoters50/1029089
aaaaaaaat

SEQ ID NO: 162341 - DNA, 9 bp, Unknown
  misc_feature (1)..( 9): Result.004 file - promoters50/1029089
ttttaatgt

SEQ ID NO: 162342 - DNA, 9 bp, Unknown
  misc_feature (1)..( 9): Result.004 file - promoters50/1029089
tttcaatat

SEQ ID NO: 162343 - DNA, 9 bp, Unknown
  misc_feature (1)..( 9): Result.004 file - promoters50/1029309
agtcaatat

SEQ ID NO: 162344 - DNA, 9 bp, Unknown
  misc_feature (1)..( 9): Result.004 file - promoters50/1029309
tgtgactca

SEQ ID NO: 162345 - DNA, 9 bp, Unknown
  misc_feature (1)..( 9): Result.004 file - promoters50/1029309
cttgaatca

SEQ ID NO: 162346 - DNA, 9 bp, Unknown
  misc_feature (1)..( 9): Result.004 file - promoters50/1029309
tgtgtctcg

SEQ ID NO: 162347 - DNA, 8 bp, Unknown
  misc_feature (1)..( 8): Result.004 file - promoters50/1029309
ttgatgaa

SEQ ID NO: 162348 - DNA, 8 bp, Unknown
  misc_feature (1)..( 8): Result.004 file - promoters50/1029309
ttgttgat

SEQ ID NO: 162349 - DNA, 8 bp, Unknown
  misc_feature (1)..( 8): Result.004 file - promoters50/1029315
cggatgaa

SEQ ID NO: 162350 - DNA, 13 bp, Unknown
  misc_feature (1)..( 13): Result.004 file - promoters50/1029315
tttggtttctcat

SEQ ID NO: 162351 - DNA, 13 bp, Unknown
  misc_feature (1)..( 13): Result.004 file - promoters50/1029315
ggtggattcggtg

SEQ ID NO: 162352 - DNA, 13 bp, Unknown
  misc_feature (1)..( 13): Result.004 file - promoters50/1029315
ttttgattttcag

SEQ ID NO: 162353 - DNA, 13 bp, Unknown
  misc_feature (1)..( 13): Result.004 file - promoters50/1029315
tagggattttcac

SEQ ID NO: 162354 - DNA, 13 bp, Unknown
  misc_feature (1)..( 13): Result.004 file - promoters50/1029315
acactttttaaca

SEQ ID NO: 162355 - DNA, 13 bp, Unknown
  misc_feature (1)..( 13): Result.004 file - promoters50/1029315
aacaatcactctc

SEQ ID NO: 162356 - DNA, 13 bp, Unknown
  misc_feature (1)..( 13): Result.004 file - promoters50/1029315
aacaaacacaaca

SEQ ID NO: 162357 - DNA, 13 bp, Unknown
  misc_feature (1)..( 13): Result.004 file - promoters50/1029315
aacaatcaacgat

SEQ ID NO: 162358 - DNA, 13 bp, Unknown
  misc_feature (1)..( 13): Result.004 file - promoters50/1029315
aacaataatagca

SEQ ID NO: 162359 - DNA, 13 bp, Unknown
  misc_feature (1)..( 13): Result.004 file - promoters50/1029315
atcaatccctctc

SEQ ID NO: 162360 - DNA, 10 bp, Unknown
  misc_feature (1)..( 10): Result.004 file - promoters50/1029315
tctatataat

SEQ ID NO: 162361 - DNA, 10 bp, Unknown
  misc_feature (1)..( 10): Result.004 file - promoters50/1029315
ccaatataat

SEQ ID NO: 162362 - DNA, 10 bp, Unknown
  misc_feature (1)..( 10): Result.004 file - promoters50/1029315
ctaatataaa

SEQ ID NO: 162363 - DNA, 10 bp, Unknown
  misc_feature (1)..( 10): Result.004 file - promoters50/1029315
aatatatata

SEQ ID NO: 162364 - DNA, 10 bp, Unknown
  misc_feature (1)..( 10): Result.004 file - promoters50/1029315
tctatataaa

SEQ ID NO: 162365 - DNA, 12 bp, Unknown
  misc_feature (1)..( 12): Result.004 file - promoters50/1029315
caataaagtagt

SEQ ID NO: 162366 - DNA, 12 bp, Unknown
  misc_feature (1)..( 12): Result.004 file - promoters50/1029315
tgaaaaagtaat

SEQ ID NO: 162367 - DNA, 12 bp, Unknown
  misc_feature (1)..( 12): Result.004 file - promoters50/1029315
attccaagtaaa

SEQ ID NO: 162368 - DNA, 13 bp, Unknown
  misc_feature (1)..( 13): Result.004 file - promoters50/1029315
agcgaaagttaaa

SEQ ID NO: 162369 - DNA, 13 bp, Unknown
  misc_feature (1)..( 13): Result.004 file - promoters50/1029349
tgataaactaatc

SEQ ID NO: 162370 - DNA, 7 bp, Unknown
  misc_feature (1)..( 7): Result.004 file - promoters50/1029349
tatgaat

SEQ ID NO: 162371 - DNA, 7 bp, Unknown
  misc_feature (1)..( 7): Result.004 file - promoters50/1029349
tatgaaa

SEQ ID NO: 162372 - DNA, 7 bp, Unknown
  misc_feature (1)..( 7): Result.004 file - promoters50/1029349
tattaat

SEQ ID NO: 162373 - DNA, 8 bp, Unknown
  misc_feature (1)..( 8): Result.004 file - promoters50/1029349
ttaataac

SEQ ID NO: 162374 - DNA, 8 bp, Unknown
  misc_feature (1)..( 8): Result.004 file - promoters50/1029349
ctaaaaac

SEQ ID NO: 162375 - DNA, 8 bp, Unknown
  misc_feature (1)..( 8): Result.004 file - promoters50/1029395
ctaaaatt

SEQ ID NO: 162376 - DNA, 9 bp, Unknown
  misc_feature (1)..( 9): Result.004 file - promoters50/1029395
aattgatga

SEQ ID NO: 162377 - DNA, 9 bp, Unknown
  misc_feature (1)..( 9): Result.004 file - promoters50/1029395
aatcgatct

SEQ ID NO: 162378 - DNA, 9 bp, Unknown
  misc_feature (1)..( 9): Result.004 file - promoters50/1029395
atttggtga

SEQ ID NO: 162379 - DNA, 9 bp, Unknown
  misc_feature (1)..( 9): Result.004 file - promoters50/1029395
tttatttga

SEQ ID NO: 162380 - DNA, 9 bp, Unknown
  misc_feature (1)..( 9): Result.004 file - promoters50/1029395
tttgtttca

SEQ ID NO: 162381 - DNA, 9 bp, Unknown
  misc_feature (1)..( 9): Result.004 file - promoters50/1029395
tctatttgt

SEQ ID NO: 162382 - DNA, 10 bp, Unknown
  misc_feature (1)..( 10): Result.004 file - promoters50/1029395
attaaggttt

SEQ ID NO: 162383 - DNA, 10 bp, Unknown
  misc_feature (1)..( 10): Result.004 file - promoters50/1029395
tttaaagttt

SEQ ID NO: 162384 - DNA, 10 bp, Unknown
  misc_feature (1)..( 10): Result.004 file - promoters50/1029395
tttcaagctt

SEQ ID NO: 162385 - DNA, 9 bp, Unknown
  misc_feature (1)..( 9): Result.004 file - promoters50/1029395
aaaagacaa

SEQ ID NO: 162386 - DNA, 9 bp, Unknown
  misc_feature (1)..( 9): Result.004 file - promoters50/1029395
aaaagatta

SEQ ID NO: 162387 - DNA, 9 bp, Unknown
  misc_feature (1)..( 9): Result.004 file - promoters50/1029395
aaacgatta

SEQ ID NO: 162388 - DNA, 15 bp, Unknown
  misc_feature (1)..( 15): Result.004 file - promoters50/1029395
tttgtgtctttttac

SEQ ID NO: 162389 - DNA, 15 bp, Unknown
  misc_feature (1)..( 15): Result.004 file - promoters50/1029395
attgtatcttcttac

SEQ ID NO: 162390 - DNA, 15 bp, Unknown
  misc_feature (1)..( 15): Result.004 file - promoters50/1029433
attttataaaaatta

SEQ ID NO: 162391 - DNA, 9 bp, Unknown
  misc_feature (1)..( 9): Result.004 file - promoters50/1029433
tattataaa

SEQ ID NO: 162392 - DNA, 9 bp, Unknown
  misc_feature (1)..( 9): Result.004 file - promoters50/1029433
acttataaa

SEQ ID NO: 162393 - DNA, 9 bp, Unknown
  misc_feature (1)..( 9): Result.004 file - promoters50/1029444
tatgatacg

SEQ ID NO: 162394 - DNA, 11 bp, Unknown
  misc_feature (1)..( 11): Result.004 file - promoters50/1029444
tatattttgca

SEQ ID NO: 162395 - DNA, 11 bp, Unknown
  misc_feature (1)..( 11): Result.004 file - promoters50/1029444
aaaattttgtt

SEQ ID NO: 162396 - DNA, 11 bp, Unknown
  misc_feature (1)..( 11): Result.004 file - promoters50/1029444
ataattttcat

SEQ ID NO: 162397 - DNA, 8 bp, Unknown
  misc_feature (1)..( 8): Result.004 file - promoters50/1029444
tatcattt

SEQ ID NO: 162398 - DNA, 8 bp, Unknown
  misc_feature (1)..( 8): Result.004 file - promoters50/1029444
tataattt

SEQ ID NO: 162399 - DNA, 8 bp, Unknown
  misc_feature (1)..( 8): Result.004 file - promoters50/1029444
actaattt

SEQ ID NO: 162400 - DNA, 10 bp, Unknown
  misc_feature (1)..( 10): Result.004 file - promoters50/1029444
gttaaataaa

SEQ ID NO: 162401 - DNA, 10 bp, Unknown
  misc_feature (1)..( 10): Result.004 file - promoters50/1029444
actaaaaaaa

SEQ ID NO: 162402 - DNA, 10 bp, Unknown
  misc_feature (1)..( 10): Result.004 file - promoters50/1029543
actgaaagat

SEQ ID NO: 162403 - DNA, 8 bp, Unknown
  misc_feature (1)..( 8): Result.004 file - promoters50/1029543
tttattat

SEQ ID NO: 162404 - DNA, 8 bp, Unknown
  misc_feature (1)..( 8): Result.004 file - promoters50/1029543
attactat

SEQ ID NO: 162405 - DNA, 8 bp, Unknown
  misc_feature (1)..( 8): Result.004 file - promoters50/1029543
tttcttat

SEQ ID NO: 162406 - DNA, 8 bp, Unknown
  misc_feature (1)..( 8): Result.004 file - promoters50/1029543
attacttc

SEQ ID NO: 162407 - DNA, 8 bp, Unknown
  misc_feature (1)..( 8): Result.004 file - promoters50/1029543
attaattc

SEQ ID NO: 162408 - DNA, 8 bp, Unknown
  misc_feature (1)..( 8): Result.004 file - promoters50/1029576
attacttt

SEQ ID NO: 162409 - DNA, 9 bp, Unknown
  misc_feature (1)..( 9): Result.004 file - promoters50/1029576
cttaacaca

SEQ ID NO: 162410 - DNA, 9 bp, Unknown
  misc_feature (1)..( 9): Result.004 file - promoters50/1029576
tttaacatt

SEQ ID NO: 162411 - DNA, 9 bp, Unknown
  misc_feature (1)..( 9): Result.004 file - promoters50/1029576
ttttacatt

SEQ ID NO: 162412 - DNA, 11 bp, Unknown
  misc_feature (1)..( 11): Result.004 file - promoters50/1029576
taacacactta

SEQ ID NO: 162413 - DNA, 11 bp, Unknown
  misc_feature (1)..( 11): Result.004 file - promoters50/1029576
tttaacattta

SEQ ID NO: 162414 - DNA, 11 bp, Unknown
  misc_feature (1)..( 11): Result.004 file - promoters50/1029576
ttttacattct

SEQ ID NO: 162415 - DNA, 7 bp, Unknown
  misc_feature (1)..( 7): Result.004 file - promoters50/1029576
aaaaatt

SEQ ID NO: 162416 - DNA, 7 bp, Unknown
  misc_feature (1)..( 7): Result.004 file - promoters50/1029576
taaaatt

SEQ ID NO: 162417 - DNA, 7 bp, Unknown
  misc_feature (1)..( 7): Result.004 file - promoters50/1029576
aaaaatt

SEQ ID NO: 162418 - DNA, 13 bp, Unknown
  misc_feature (1)..( 13): Result.004 file - promoters50/1029576
gagagatgtagac

SEQ ID NO: 162419 - DNA, 13 bp, Unknown
  misc_feature (1)..( 13): Result.004 file - promoters50/1029576
gagaaatgtattt

SEQ ID NO: 162420 - DNA, 13 bp, Unknown
  misc_feature (1)..( 13): Result.004 file - promoters50/1029576
cacagatgaattt

SEQ ID NO: 162421 - DNA, 7 bp, Unknown
  misc_feature (1)..( 7): Result.004 file - promoters50/1029576
ctaaaaa

SEQ ID NO: 162422 - DNA, 7 bp, Unknown
  misc_feature (1)..( 7): Result.004 file - promoters50/1029576
ataaaaa

SEQ ID NO: 162423 - DNA, 7 bp, Unknown
  misc_feature (1)..( 7): Result.004 file - promoters50/1029576
atataaa

SEQ ID NO: 162424 - DNA, 8 bp, Unknown
  misc_feature (1)..( 8): Result.004 file - promoters50/1029576
tatttgag

SEQ ID NO: 162425 - DNA, 8 bp, Unknown
  misc_feature (1)..( 8): Result.004 file - promoters50/1029576
catttgag

SEQ ID NO: 162426 - DNA, 8 bp, Unknown
  misc_feature (1)..( 8): Result.004 file - promoters50/1029590
tatatgat

SEQ ID NO: 162427 - DNA, 7 bp, Unknown
  misc_feature (1)..( 7): Result.004 file - promoters50/1029590
atctgat

SEQ ID NO: 162428 - DNA, 7 bp, Unknown
  misc_feature (1)..( 7): Result.004 file - promoters50/1029590
atctgat

SEQ ID NO: 162429 - DNA, 7 bp, Unknown
  misc_feature (1)..( 7): Result.004 file - promoters50/1029590
atccgat

SEQ ID NO: 162430 - DNA, 9 bp, Unknown
  misc_feature (1)..( 9): Result.004 file - promoters50/1029590
tttacctcc

SEQ ID NO: 162431 - DNA, 9 bp, Unknown
  misc_feature (1)..( 9): Result.004 file - promoters50/1029590
ttttcctaa

SEQ ID NO: 162432 - DNA, 9 bp, Unknown
  misc_feature (1)..( 9): Result.004 file - promoters50/1029636
gtttcttaa

SEQ ID NO: 162433 - DNA, 15 bp, Unknown
  misc_feature (1)..( 15): Result.004 file - promoters50/1029636
attattaaaaataaa

SEQ ID NO: 162434 - DNA, 15 bp, Unknown
  misc_feature (1)..( 15): Result.004 file - promoters50/1029636
attgttataaaaaaa

SEQ ID NO: 162435 - DNA, 15 bp, Unknown
  misc_feature (1)..( 15): Result.004 file - promoters50/1029636
cggtctaaaaacatg

SEQ ID NO: 162436 - DNA, 12 bp, Unknown
  misc_feature (1)..( 12): Result.004 file - promoters50/1029636
gttaggttggat

SEQ ID NO: 162437 - DNA, 12 bp, Unknown
  misc_feature (1)..( 12): Result.004 file - promoters50/1029636
gttcggttcgat

SEQ ID NO: 162438 - DNA, 12 bp, Unknown
  misc_feature (1)..( 12): Result.004 file - promoters50/1029636
atccgggtcggg

SEQ ID NO: 162439 - DNA, 11 bp, Unknown
  misc_feature (1)..( 11): Result.004 file - promoters50/1029636
tataactttat

SEQ ID NO: 162440 - DNA, 11 bp, Unknown
  misc_feature (1)..( 11): Result.004 file - promoters50/1029636
aataaatttat

SEQ ID NO: 162441 - DNA, 11 bp, Unknown
  misc_feature (1)..( 11): Result.004 file - promoters50/1029791
aatcaattgcg

SEQ ID NO: 162442 - DNA, 7 bp, Unknown
  misc_feature (1)..( 7): Result.004 file - promoters50/1029791
gaagaat

SEQ ID NO: 162443 - DNA, 7 bp, Unknown
  misc_feature (1)..( 7): Result.004 file - promoters50/1029791
gaataat

SEQ ID NO: 162444 - DNA, 7 bp, Unknown
  misc_feature (1)..( 7): Result.004 file - promoters50/1029794
gaacaat

SEQ ID NO: 162445 - DNA, 8 bp, Unknown
  misc_feature (1)..( 8): Result.004 file - promoters50/1029794
ttagtaat

SEQ ID NO: 162446 - DNA, 8 bp, Unknown
  misc_feature (1)..( 8): Result.004 file - promoters50/1029794
ttaataaa

SEQ ID NO: 162447 - DNA, 8 bp, Unknown
  misc_feature (1)..( 8): Result.004 file - promoters50/1029837
taaataaa

SEQ ID NO: 162448 - DNA, 11 bp, Unknown
  misc_feature (1)..( 11): Result.004 file - promoters50/1029837
aataatataat

SEQ ID NO: 162449 - DNA, 11 bp, Unknown
  misc_feature (1)..( 11): Result.004 file - promoters50/1029837
cataatagaga

SEQ ID NO: 162450 - DNA, 11 bp, Unknown
  misc_feature (1)..( 11): Result.004 file - promoters50/1029837
aattatatata

SEQ ID NO: 162451 - DNA, 11 bp, Unknown
  misc_feature (1)..( 11): Result.004 file - promoters50/1029837
aagtatatact

SEQ ID NO: 162452 - DNA, 11 bp, Unknown
  misc_feature (1)..( 11): Result.004 file - promoters50/1029837
atacatatact

SEQ ID NO: 162453 - DNA, 10 bp, Unknown
  misc_feature (1)..( 10): Result.004 file - promoters50/1029837
aagatttgta

SEQ ID NO: 162454 - DNA, 10 bp, Unknown
  misc_feature (1)..( 10): Result.004 file - promoters50/1029837
atgattggta

SEQ ID NO: 162455 - DNA, 10 bp, Unknown
  misc_feature (1)..( 10): Result.004 file - promoters50/1029837
aagttttgag

SEQ ID NO: 162456 - DNA, 10 bp, Unknown
  misc_feature (1)..( 10): Result.004 file - promoters50/1029837
aaattttgag

SEQ ID NO: 162457 - DNA, 10 bp, Unknown
  misc_feature (1)..( 10): Result.004 file - promoters50/1029841
aagtttattg

SEQ ID NO: 162458 - DNA, 12 bp, Unknown
  misc_feature (1)..( 12): Result.004 file - promoters50/1029841
acataataatta

SEQ ID NO: 162459 - DNA, 12 bp, Unknown
  misc_feature (1)..( 12): Result.004 file - promoters50/1029841
cttaaatattta

SEQ ID NO: 162460 - DNA, 11 bp, Unknown
  misc_feature (1)..( 11): Result.004 file - promoters50/1029841
attaaaaatca

SEQ ID NO: 162461 - DNA, 12 bp, Unknown
  misc_feature (1)..( 12): Result.004 file - promoters50/1029841
atggaataatcc

SEQ ID NO: 162462 - DNA, 12 bp, Unknown
  misc_feature (1)..( 12): Result.004 file - promoters50/1029892
cttagatattat

SEQ ID NO: 162463 - DNA, 9 bp, Unknown
  misc_feature (1)..( 9): Result.004 file - promoters50/1029892
gaataagaa

SEQ ID NO: 162464 - DNA, 9 bp, Unknown
  misc_feature (1)..( 9): Result.004 file - promoters50/1029892
gaagaagaa

SEQ ID NO: 162465 - DNA, 9 bp, Unknown
  misc_feature (1)..( 9): Result.004 file - promoters50/1029908
gaggtagat

SEQ ID NO: 162466 - DNA, 12 bp, Unknown
  misc_feature (1)..( 12): Result.004 file - promoters50/1029908
tgagaagattta

SEQ ID NO: 162467 - DNA, 12 bp, Unknown
  misc_feature (1)..( 12): Result.004 file - promoters50/1029908
aagaaagattct

SEQ ID NO: 162468 - DNA, 12 bp, Unknown
  misc_feature (1)..( 12): Result.004 file - promoters50/1029908
tcttaagatttc

SEQ ID NO: 162469 - DNA, 12 bp, Unknown
  misc_feature (1)..( 12): Result.004 file - promoters50/1029908
tttcaaggtttg

SEQ ID NO: 162470 - DNA, 12 bp, Unknown
  misc_feature (1)..( 12): Result.004 file - promoters50/1029908
aaaaaagataat

SEQ ID NO: 162471 - DNA, 12 bp, Unknown
  misc_feature (1)..( 12): Result.004 file - promoters50/1029908
aagaaaaattac

SEQ ID NO: 162472 - DNA, 12 bp, Unknown
  misc_feature (1)..( 12): Result.004 file - promoters50/1029908
aaaagaggtttg

SEQ ID NO: 162473 - DNA, 12 bp, Unknown
  misc_feature (1)..( 12): Result.004 file - promoters50/1029908
ccaggaggtttt

SEQ ID NO: 162474 - DNA, 14 bp, Unknown
  misc_feature (1)..( 14): Result.004 file - promoters50/1029908
aatgtattttatgt

SEQ ID NO: 162475 - DNA, 14 bp, Unknown
  misc_feature (1)..( 14): Result.004 file - promoters50/1029908
tttgtgtttgttgt

SEQ ID NO: 162476 - DNA, 14 bp, Unknown
  misc_feature (1)..( 14): Result.004 file - promoters50/1029908
tgattattatatgt

SEQ ID NO: 162477 - DNA, 14 bp, Unknown
  misc_feature (1)..( 14): Result.004 file - promoters50/1029908
aatatatctcaagg

SEQ ID NO: 162478 - DNA, 14 bp, Unknown
  misc_feature (1)..( 14): Result.004 file - promoters50/1029908
catgcattccaaag

SEQ ID NO: 162479 - DNA, 14 bp, Unknown
  misc_feature (1)..( 14): Result.004 file - promoters50/1029952
catatattctatta

SEQ ID NO: 162480 - DNA, 11 bp, Unknown
  misc_feature (1)..( 11): Result.004 file - promoters50/1029952
cttttatatca

SEQ ID NO: 162481 - DNA, 11 bp, Unknown
  misc_feature (1)..( 11): Result.004 file - promoters50/1029952
cttatattctt

SEQ ID NO: 162482 - DNA, 11 bp, Unknown
  misc_feature (1)..( 11): Result.004 file - promoters50/1029952
gttttatactc

SEQ ID NO: 162483 - DNA, 11 bp, Unknown
  misc_feature (1)..( 11): Result.004 file - promoters50/1029952
tatttatatag

SEQ ID NO: 162484 - DNA, 11 bp, Unknown
  misc_feature (1)..( 11): Result.004 file - promoters50/1029952
catatatactt

SEQ ID NO: 162485 - DNA, 11 bp, Unknown
  misc_feature (1)..( 11): Result.004 file - promoters50/1029952
cttaaatagat

SEQ ID NO: 162486 - DNA, 11 bp, Unknown
  misc_feature (1)..( 11): Result.004 file - promoters50/1029952
tggagaaaaaa

SEQ ID NO: 162487 - DNA, 11 bp, Unknown
  misc_feature (1)..( 11): Result.004 file - promoters50/1029952
tggagaaaaaa

SEQ ID NO: 162488 - DNA, 10 bp, Unknown
  misc_feature (1)..( 10): Result.004 file - promoters50/1029952
cgagaaaaga

SEQ ID NO: 162489 - DNA, 11 bp, Unknown
  misc_feature (1)..( 11): Result.004 file - promoters50/1029952
taaagaaaaag

SEQ ID NO: 162490 - DNA, 11 bp, Unknown
  misc_feature (1)..( 11): Result.004 file - promoters50/1029952
acaaggaaaga

SEQ ID NO: 162491 - DNA, 11 bp, Unknown
  misc_feature (1)..( 11): Result.004 file - promoters50/1029952
acaagaagaag

SEQ ID NO: 162492 - DNA, 10 bp, Unknown
  misc_feature (1)..( 10): Result.004 file - promoters50/1029952
aatgggcctt

SEQ ID NO: 162493 - DNA, 10 bp, Unknown
  misc_feature (1)..( 10): Result.004 file - promoters50/1029952
aatgggctgg

SEQ ID NO: 162494 - DNA, 10 bp, Unknown
  misc_feature (1)..( 10): Result.004 file - promoters50/1029952
aataggccca

SEQ ID NO: 162495 - DNA, 10 bp, Unknown
  misc_feature (1)..( 10): Result.004 file - promoters50/1029952
aaaaggccca

SEQ ID NO: 162496 - DNA, 10 bp, Unknown
  misc_feature (1)..( 10): Result.004 file - promoters50/1029952
tatgggcctt

SEQ ID NO: 162497 - DNA, 10 bp, Unknown
  misc_feature (1)..( 10): Result.004 file - promoters50/1030069
aaaaggccca

SEQ ID NO: 162498 - DNA, 8 bp, Unknown
  misc_feature (1)..( 8): Result.004 file - promoters50/1030069
actaataa

SEQ ID NO: 162499 - DNA, 7 bp, Unknown
  misc_feature (1)..( 7): Result.004 file - promoters50/1030069
ataataa

SEQ ID NO: 162500 - DNA, 8 bp, Unknown
  misc_feature (1)..( 8): Result.004 file - promoters50/1030069
aattatac

SEQ ID NO: 162501 - DNA, 7 bp, Unknown
  misc_feature (1)..( 7): Result.004 file - promoters50/1030069
aatgata

SEQ ID NO: 162502 - DNA, 7 bp, Unknown
  misc_feature (1)..( 7): Result.004 file - promoters50/1030069
aataata

SEQ ID NO: 162503 - DNA, 7 bp, Unknown
  misc_feature (1)..( 7): Result.004 file - promoters50/1030069
aattata

SEQ ID NO: 162504 - DNA, 8 bp, Unknown
  misc_feature (1)..( 8): Result.004 file - promoters50/1030069
tatagtgg

SEQ ID NO: 162505 - DNA, 8 bp, Unknown
  misc_feature (1)..( 8): Result.004 file - promoters50/1030069
gataatgg

SEQ ID NO: 162506 - DNA, 8 bp, Unknown
  misc_feature (1)..( 8): Result.004 file - promoters50/1030126
aatagtaa

SEQ ID NO: 162507 - DNA, 10 bp, Unknown
  misc_feature (1)..( 10): Result.004 file - promoters50/1030126
taatcaaaaa

SEQ ID NO: 162508 - DNA, 10 bp, Unknown
  misc_feature (1)..( 10): Result.004 file - promoters50/1030126
taagcaaaaa

SEQ ID NO: 162509 - DNA, 10 bp, Unknown
  misc_feature (1)..( 10): Result.004 file - promoters50/1030126
taaccaaaac

SEQ ID NO: 162510 - DNA, 10 bp, Unknown
  misc_feature (1)..( 10): Result.004 file - promoters50/1030126
aaattaaatg

SEQ ID NO: 162511 - DNA, 10 bp, Unknown
  misc_feature (1)..( 10): Result.004 file - promoters50/1030126
gaagcaagct

SEQ ID NO: 162512 - DNA, 10 bp, Unknown
  misc_feature (1)..( 10): Result.004 file - promoters50/1030126
agattaaaat

SEQ ID NO: 162513 - DNA, 22 bp, Unknown
  misc_feature (1)..( 22): Result.004 file - promoters50/1030126
tttttttgttttgattataata

SEQ ID NO: 162514 - DNA, 22 bp, Unknown
  misc_feature (1)..( 22): Result.004 file - promoters50/1030126
accttggttttcgattaacaaa

SEQ ID NO: 162515 - DNA, 22 bp, Unknown
  misc_feature (1)..( 22): Result.004 file - promoters50/1030126
aaataaatttttgagttaaaaa

SEQ ID NO: 162516 - DNA, 22 bp, Unknown
  misc_feature (1)..( 22): Result.004 file - promoters50/1030126
aacaaaatgtttgaatgttaca

SEQ ID NO: 162517 - DNA, 22 bp, Unknown
  misc_feature (1)..( 22): Result.004 file - promoters50/1030126
gtatgtttaatggattaagaaa

SEQ ID NO: 162518 - DNA, 22 bp, Unknown
  misc_feature (1)..( 22): Result.004 file - promoters50/1030126
aaacaaatgtttgtctttgtta

SEQ ID NO: 162519 - DNA, 13 bp, Unknown
  misc_feature (1)..( 13): Result.004 file - promoters50/1030126
aacctatgattag

SEQ ID NO: 162520 - DNA, 13 bp, Unknown
  misc_feature (1)..( 13): Result.004 file - promoters50/1030126
actgtatgtttaa

SEQ ID NO: 162521 - DNA, 13 bp, Unknown
  misc_feature (1)..( 13): Result.004 file - promoters50/1030126
aaccaatgatatt

SEQ ID NO: 162522 - DNA, 13 bp, Unknown
  misc_feature (1)..( 13): Result.004 file - promoters50/1030126
acaaaatgtttga

SEQ ID NO: 162523 - DNA, 13 bp, Unknown
  misc_feature (1)..( 13): Result.004 file - promoters50/1030126
aataaatttttga

SEQ ID NO: 162524 - DNA, 14 bp, Unknown
  misc_feature (1)..( 14): Result.004 file - promoters50/1030126
gtataatgaattaa

SEQ ID NO: 162525 - DNA, 12 bp, Unknown
  misc_feature (1)..( 12): Result.004 file - promoters50/1030126
aaatgaaaaaaa

SEQ ID NO: 162526 - DNA, 12 bp, Unknown
  misc_feature (1)..( 12): Result.004 file - promoters50/1030126
taatcaaatata

SEQ ID NO: 162527 - DNA, 12 bp, Unknown
  misc_feature (1)..( 12): Result.004 file - promoters50/1030126
taatcaaatttc

SEQ ID NO: 162528 - DNA, 12 bp, Unknown
  misc_feature (1)..( 12): Result.004 file - promoters50/1030126
ctatcatattat

SEQ ID NO: 162529 - DNA, 12 bp, Unknown
  misc_feature (1)..( 12): Result.004 file - promoters50/1030126
ttattatattga

SEQ ID NO: 162530 - DNA, 12 bp, Unknown
  misc_feature (1)..( 12): Result.004 file - promoters50/1030126
taataaaaccgg

SEQ ID NO: 162531 - DNA, 12 bp, Unknown
  misc_feature (1)..( 12): Result.004 file - promoters50/1030126
gtttcacatata

SEQ ID NO: 162532 - DNA, 12 bp, Unknown
  misc_feature (1)..( 12): Result.004 file - promoters50/1030126
atattattagcc

SEQ ID NO: 162533 - DNA, 9 bp, Unknown
  misc_feature (1)..( 9): Result.004 file - promoters50/1030126
attataata

SEQ ID NO: 162534 - DNA, 9 bp, Unknown
  misc_feature (1)..( 9): Result.004 file - promoters50/1030126
actatcata

SEQ ID NO: 162535 - DNA, 9 bp, Unknown
  misc_feature (1)..( 9): Result.004 file - promoters50/1030126
gttattata

SEQ ID NO: 162536 - DNA, 9 bp, Unknown
  misc_feature (1)..( 9): Result.004 file - promoters50/1030126
actatcata

SEQ ID NO: 162537 - DNA, 9 bp, Unknown
  misc_feature (1)..( 9): Result.004 file - promoters50/1030126
cttattaca

SEQ ID NO: 162538 - DNA, 9 bp, Unknown
  misc_feature (1)..( 9): Result.004 file - promoters50/1030126
aatattatt

SEQ ID NO: 162539 - DNA, 9 bp, Unknown
  misc_feature (1)..( 9): Result.004 file - promoters50/1030126
caacaaaat

SEQ ID NO: 162540 - DNA, 9 bp, Unknown
  misc_feature (1)..( 9): Result.004 file - promoters50/1030126
taacaaagt

SEQ ID NO: 162541 - DNA, 9 bp, Unknown
  misc_feature (1)..( 9): Result.004 file - promoters50/1030126
taaaaaaaa

SEQ ID NO: 162542 - DNA, 9 bp, Unknown
  misc_feature (1)..( 9): Result.004 file - promoters50/1030126
acacatagt

SEQ ID NO: 162543 - DNA, 9 bp, Unknown
  misc_feature (1)..( 9): Result.004 file - promoters50/1030126
atacatata

SEQ ID NO: 162544 - DNA, 9 bp, Unknown
  misc_feature (1)..( 9): Result.004 file - promoters50/1030126
ttaaaatgt

SEQ ID NO: 162545 - DNA, 9 bp, Unknown
  misc_feature (1)..( 9): Result.004 file - promoters50/1030139
ataaataaa

SEQ ID NO: 162546 - DNA, 9 bp, Unknown
  misc_feature (1)..( 9): Result.004 file - promoters50/1030139
aaaagaaac

SEQ ID NO: 162547 - DNA, 9 bp, Unknown
  misc_feature (1)..( 9): Result.004 file - promoters50/1030139
ctaagaaac

SEQ ID NO: 162548 - DNA, 9 bp, Unknown
  misc_feature (1)..( 9): Result.004 file - promoters50/1030139
ataagaatt

SEQ ID NO: 162549 - DNA, 9 bp, Unknown
  misc_feature (1)..( 9): Result.004 file - promoters50/1030139
ataagtatt

SEQ ID NO: 162550 - DNA, 10 bp, Unknown
  misc_feature (1)..( 10): Result.004 file - promoters50/1030139
tgattagcaa

SEQ ID NO: 162551 - DNA, 10 bp, Unknown
  misc_feature (1)..( 10): Result.004 file - promoters50/1030139
tgattagtta

SEQ ID NO: 162552 - DNA, 10 bp, Unknown
  misc_feature (1)..( 10): Result.004 file - promoters50/1030139
cgatgagtac

SEQ ID NO: 162553 - DNA, 10 bp, Unknown
  misc_feature (1)..( 10): Result.004 file - promoters50/1030157
tcattagtta

SEQ ID NO: 162554 - DNA, 10 bp, Unknown
  misc_feature (1)..( 10): Result.004 file - promoters50/1030157
taaaaaaata

SEQ ID NO: 162555 - DNA, 10 bp, Unknown
  misc_feature (1)..( 10): Result.004 file - promoters50/1030157
tgaaataata

SEQ ID NO: 162556 - DNA, 10 bp, Unknown
  misc_feature (1)..( 10): Result.004 file - promoters50/1030157
tgaaatatcg

SEQ ID NO: 162557 - DNA, 10 bp, Unknown
  misc_feature (1)..( 10): Result.004 file - promoters50/1030157
tgaaatgtca

SEQ ID NO: 162558 - DNA, 10 bp, Unknown
  misc_feature (1)..( 10): Result.004 file - promoters50/1030192
tgagatatat

SEQ ID NO: 162559 - DNA, 8 bp, Unknown
  misc_feature (1)..( 8): Result.004 file - promoters50/1030192
tcgtttta

SEQ ID NO: 162560 - DNA, 8 bp, Unknown
  misc_feature (1)..( 8): Result.004 file - promoters50/1030192
ttgtttta

SEQ ID NO: 162561 - DNA, 8 bp, Unknown
  misc_feature (1)..( 8): Result.004 file - promoters50/1030223
ttgtctta

SEQ ID NO: 162562 - DNA, 16 bp, Unknown
  misc_feature (1)..( 16): Result.004 file - promoters50/1030223
tataatactctgatac

SEQ ID NO: 162563 - DNA, 16 bp, Unknown
  misc_feature (1)..( 16): Result.004 file - promoters50/1030223
aataatactctgatac

SEQ ID NO: 162564 - DNA, 16 bp, Unknown
  misc_feature (1)..( 16): Result.004 file - promoters50/1030223
tattataaaccctaaa

SEQ ID NO: 162565 - DNA, 27 bp, Unknown
  misc_feature (1)..( 27): Result.004 file - promoters50/1030223
tgtgataaatttcctttaactttactt

SEQ ID NO: 162566 - DNA, 27 bp, Unknown
  misc_feature (1)..( 27): Result.004 file - promoters50/1030223
tgtgataaatttcatttaactttgctt

SEQ ID NO: 162567 - DNA, 27 bp, Unknown
  misc_feature (1)..( 27): Result.004 file - promoters50/1030223
aatataaaatttctttagacatacaat

SEQ ID NO: 162568 - DNA, 15 bp, Unknown
  misc_feature (1)..( 15): Result.004 file - promoters50/1030223
ttttgataaaatatt

SEQ ID NO: 162569 - DNA, 15 bp, Unknown
  misc_feature (1)..( 15): Result.004 file - promoters50/1030223
ttttgataaattatt

SEQ ID NO: 162570 - DNA, 15 bp, Unknown
  misc_feature (1)..( 15): Result.004 file - promoters50/1030223
tagacatacaatata

SEQ ID NO: 162571 - DNA, 9 bp, Unknown
  misc_feature (1)..( 9): Result.004 file - promoters50/1030223
ttcgtttct

SEQ ID NO: 162572 - DNA, 9 bp, Unknown
  misc_feature (1)..( 9): Result.004 file - promoters50/1030223
ttcgttttc

SEQ ID NO: 162573 - DNA, 9 bp, Unknown
  misc_feature (1)..( 9): Result.004 file - promoters50/1030223
cccgtctct

SEQ ID NO: 162574 - DNA, 16 bp, Unknown
  misc_feature (1)..( 16): Result.004 file - promoters50/1030223
cgtttctataaataga

SEQ ID NO: 162575 - DNA, 16 bp, Unknown
  misc_feature (1)..( 16): Result.004 file - promoters50/1030223
gttttctataaataga

SEQ ID NO: 162576 - DNA, 16 bp, Unknown
  misc_feature (1)..( 16): Result.004 file - promoters50/1030223
cgtctctctcttgcta

SEQ ID NO: 162577 - DNA, 11 bp, Unknown
  misc_feature (1)..( 11): Result.004 file - promoters50/1030223
aaatttgatac

SEQ ID NO: 162578 - DNA, 11 bp, Unknown
  misc_feature (1)..( 11): Result.004 file - promoters50/1030223
aaatttgatca

SEQ ID NO: 162579 - DNA, 11 bp, Unknown
  misc_feature (1)..( 11): Result.004 file - promoters50/1030231
actcttgttca

SEQ ID NO: 162580 - DNA, 9 bp, Unknown
  misc_feature (1)..( 9): Result.004 file - promoters50/1030231
caaaaattg

SEQ ID NO: 162581 - DNA, 9 bp, Unknown
  misc_feature (1)..( 9): Result.004 file - promoters50/1030231
caaaaatgg

SEQ ID NO: 162582 - DNA, 9 bp, Unknown
  misc_feature (1)..( 9): Result.004 file - promoters50/1030231
cgaaaatgg

SEQ ID NO: 162583 - DNA, 9 bp, Unknown
  misc_feature (1)..( 9): Result.004 file - promoters50/1030231
cgagaatcc

SEQ ID NO: 162584 - DNA, 9 bp, Unknown
  misc_feature (1)..( 9): Result.004 file - promoters50/1030231
agagaatta

SEQ ID NO: 162585 - DNA, 9 bp, Unknown
  misc_feature (1)..( 9): Result.004 file - promoters50/1030242
atagaattc

SEQ ID NO: 162586 - DNA, 8 bp, Unknown
  misc_feature (1)..( 8): Result.004 file - promoters50/1030242
caattatt

SEQ ID NO: 162587 - DNA, 8 bp, Unknown
  misc_feature (1)..( 8): Result.004 file - promoters50/1030242
caattaca

SEQ ID NO: 162588 - DNA, 8 bp, Unknown
  misc_feature (1)..( 8): Result.004 file - promoters50/1030242
aaattatt

SEQ ID NO: 162589 - DNA, 8 bp, Unknown
  misc_feature (1)..( 8): Result.004 file - promoters50/1030242
taacaaag

SEQ ID NO: 162590 - DNA, 8 bp, Unknown
  misc_feature (1)..( 8): Result.004 file - promoters50/1030242
taaaaaac

SEQ ID NO: 162591 - DNA, 8 bp, Unknown
  misc_feature (1)..( 8): Result.004 file - promoters50/1030283
aaacactt

SEQ ID NO: 162592 - DNA, 15 bp, Unknown
  misc_feature (1)..( 15): Result.004 file - promoters50/1030283
caaatttttactttt

SEQ ID NO: 162593 - DNA, 15 bp, Unknown
  misc_feature (1)..( 15): Result.004 file - promoters50/1030283
caaacttttattttt

SEQ ID NO: 162594 - DNA, 15 bp, Unknown
  misc_feature (1)..( 15): Result.004 file - promoters50/1030283
aacattttttccaga

SEQ ID NO: 162595 - DNA, 15 bp, Unknown
  misc_feature (1)..( 15): Result.004 file - promoters50/1030283
ccgttttttaggtcc

SEQ ID NO: 162596 - DNA, 15 bp, Unknown
  misc_feature (1)..( 15): Result.004 file - promoters50/1030283
ttgttttttaatttc

SEQ ID NO: 162597 - DNA, 15 bp, Unknown
  misc_feature (1)..( 15): Result.004 file - promoters50/1030312
aatatctttcacctt

SEQ ID NO: 162598 - DNA, 12 bp, Unknown
  misc_feature (1)..( 12): Result.004 file - promoters50/1030312
cagcttctgtaa

SEQ ID NO: 162599 - DNA, 12 bp, Unknown
  misc_feature (1)..( 12): Result.004 file - promoters50/1030312
caggttctcaga

SEQ ID NO: 162600 - DNA, 12 bp, Unknown
  misc_feature (1)..( 12): Result.004 file - promoters50/1030312
aagggtctgaga

SEQ ID NO: 162601 - DNA, 11 bp, Unknown
  misc_feature (1)..( 11): Result.004 file - promoters50/1030312
aatgtcagatt

SEQ ID NO: 162602 - DNA, 11 bp, Unknown
  misc_feature (1)..( 11): Result.004 file - promoters50/1030312
gttctcagatt

SEQ ID NO: 162603 - DNA, 11 bp, Unknown
  misc_feature (1)..( 11): Result.004 file - promoters50/1030321
agggtctgaga

SEQ ID NO: 162604 - DNA, 11 bp, Unknown
  misc_feature (1)..( 11): Result.004 file - promoters50/1030321
gccgttgttgt

SEQ ID NO: 162605 - DNA, 11 bp, Unknown
  misc_feature (1)..( 11): Result.004 file - promoters50/1030321
gattttgttgg

SEQ ID NO: 162606 - DNA, 11 bp, Unknown
  misc_feature (1)..( 11): Result.004 file - promoters50/1030321
aaagtttttgt

SEQ ID NO: 162607 - DNA, 11 bp, Unknown
  misc_feature (1)..( 11): Result.004 file - promoters50/1030321
catgtttataa

SEQ ID NO: 162608 - DNA, 11 bp, Unknown
  misc_feature (1)..( 11): Result.004 file - promoters50/1030321
ttgtttgtttc

SEQ ID NO: 162609 - DNA, 11 bp, Unknown
  misc_feature (1)..( 11): Result.004 file - promoters50/1030324
aaggttttaac

SEQ ID NO: 162610 - DNA, 21 bp, Unknown
  misc_feature (1)..( 21): Result.004 file - promoters50/1030324
ttataaataatctcttaaaac

SEQ ID NO: 162611 - DNA, 21 bp, Unknown
  misc_feature (1)..( 21): Result.004 file - promoters50/1030324
agtatataaatcccttaaacc

SEQ ID NO: 162612 - DNA, 21 bp, Unknown
  misc_feature (1)..( 21): Result.004 file - promoters50/1030324
tatttatgaatccatataaag

SEQ ID NO: 162613 - DNA, 21 bp, Unknown
  misc_feature (1)..( 21): Result.004 file - promoters50/1030324
cctttataaaaccctaattcg

SEQ ID NO: 162614 - DNA, 21 bp, Unknown
  misc_feature (1)..( 21): Result.004 file - promoters50/1030324
actataaacaaaccttaaacc

SEQ ID NO: 162615 - DNA, 21 bp, Unknown
  misc_feature (1)..( 21): Result.004 file - promoters50/1030324
gttatataaatccttcactcg

SEQ ID NO: 162616 - DNA, 21 bp, Unknown
  misc_feature (1)..( 21): Result.004 file - promoters50/1030324
gttttatactcacagtcaaag

SEQ ID NO: 162617 - DNA, 15 bp, Unknown
  misc_feature (1)..( 15): Result.004 file - promoters50/1030324
tctatgaatcatgtc

SEQ ID NO: 162618 - DNA, 15 bp, Unknown
  misc_feature (1)..( 15): Result.004 file - promoters50/1030324
tctttgaatattgaa

SEQ ID NO: 162619 - DNA, 15 bp, Unknown
  misc_feature (1)..( 15): Result.004 file - promoters50/1030324
attataaatcatccg

SEQ ID NO: 162620 - DNA, 15 bp, Unknown
  misc_feature (1)..( 15): Result.004 file - promoters50/1030324
ctcttgcatagaaat

SEQ ID NO: 162621 - DNA, 15 bp, Unknown
  misc_feature (1)..( 15): Result.004 file - promoters50/1030324
tctttggattaatgt

SEQ ID NO: 162622 - DNA, 15 bp, Unknown
  misc_feature (1)..( 15): Result.004 file - promoters50/1030324
caaacaaatcaaatc

SEQ ID NO: 162623 - DNA, 15 bp, Unknown
  misc_feature (1)..( 15): Result.004 file - promoters50/1030324
gaaattgatcataaa

SEQ ID NO: 162624 - DNA, 13 bp, Unknown
  misc_feature (1)..( 13): Result.004 file - promoters50/1030324
cttataaataatc

SEQ ID NO: 162625 - DNA, 13 bp, Unknown
  misc_feature (1)..( 13): Result.004 file - promoters50/1030324
tttataaaaccct

SEQ ID NO: 162626 - DNA, 13 bp, Unknown
  misc_feature (1)..( 13): Result.004 file - promoters50/1030324
tatataaatccct

SEQ ID NO: 162627 - DNA, 13 bp, Unknown
  misc_feature (1)..( 13): Result.004 file - promoters50/1030324
actataaacaaac

SEQ ID NO: 162628 - DNA, 13 bp, Unknown
  misc_feature (1)..( 13): Result.004 file - promoters50/1030324
tatataaatcctt

SEQ ID NO: 162629 - DNA, 13 bp, Unknown
  misc_feature (1)..( 13): Result.004 file - promoters50/1030324
tttatactcacag

SEQ ID NO: 162630 - DNA, 14 bp, Unknown
  misc_feature (1)..( 14): Result.004 file - promoters50/1030324
acacataatgtaga

SEQ ID NO: 162631 - DNA, 14 bp, Unknown
  misc_feature (1)..( 14): Result.004 file - promoters50/1030324
tggcttaatgtttg

SEQ ID NO: 162632 - DNA, 14 bp, Unknown
  misc_feature (1)..( 14): Result.004 file - promoters50/1030324
gctcataatttagt

SEQ ID NO: 162633 - DNA, 14 bp, Unknown
  misc_feature (1)..( 14): Result.004 file - promoters50/1030324
gaacttaagttagt

SEQ ID NO: 162634 - DNA, 14 bp, Unknown
  misc_feature (1)..( 14): Result.004 file - promoters50/1030324
gatcataaaaaccc

SEQ ID NO: 162635 - DNA, 14 bp, Unknown
  misc_feature (1)..( 14): Result.004 file - promoters50/1030329
gattataaatcatc

SEQ ID NO: 162636 - DNA, 9 bp, Unknown
  misc_feature (1)..( 9): Result.004 file - promoters50/1030329
tttagaaaa

SEQ ID NO: 162637 - DNA, 9 bp, Unknown
  misc_feature (1)..( 9): Result.004 file - promoters50/1030329
ggtagcaaa

SEQ ID NO: 162638 - DNA, 9 bp, Unknown
  misc_feature (1)..( 9): Result.004 file - promoters50/1030329
tttagaagc

SEQ ID NO: 162639 - DNA, 7 bp, Unknown
  misc_feature (1)..( 7): Result.004 file - promoters50/1030329
tttgaac

SEQ ID NO: 162640 - DNA, 7 bp, Unknown
  misc_feature (1)..( 7): Result.004 file - promoters50/1030329
tttgaaa

SEQ ID NO: 162641 - DNA, 8 bp, Unknown
  misc_feature (1)..( 8): Result.004 file - promoters50/1030336
gttgcaag

SEQ ID NO: 162642 - DNA, 12 bp, Unknown
  misc_feature (1)..( 12): Result.004 file - promoters50/1030336
aggtaaaccaga

SEQ ID NO: 162643 - DNA, 12 bp, Unknown
  misc_feature (1)..( 12): Result.004 file - promoters50/1030336
aggtaaaacaga

SEQ ID NO: 162644 - DNA, 12 bp, Unknown
  misc_feature (1)..( 12): Result.004 file - promoters50/1030336
aggaaaatctag

SEQ ID NO: 162645 - DNA, 12 bp, Unknown
  misc_feature (1)..( 12): Result.004 file - promoters50/1030336
gtcaaaaagaaa

SEQ ID NO: 162646 - DNA, 9 bp, Unknown
  misc_feature (1)..( 9): Result.004 file - promoters50/1030336
ccagaagaa

SEQ ID NO: 162647 - DNA, 9 bp, Unknown
  misc_feature (1)..( 9): Result.004 file - promoters50/1030336
ccaaaagag

SEQ ID NO: 162648 - DNA, 9 bp, Unknown
  misc_feature (1)..( 9): Result.004 file - promoters50/1030336
cttgaagaa

SEQ ID NO: 162649 - DNA, 8 bp, Unknown
  misc_feature (1)..( 8): Result.004 file - promoters50/1030336
aagagaaa

SEQ ID NO: 162650 - DNA, 8 bp, Unknown
  misc_feature (1)..( 8): Result.004 file - promoters50/1030336
aagagatt

SEQ ID NO: 162651 - DNA, 8 bp, Unknown
  misc_feature (1)..( 8): Result.004 file - promoters50/1030336
aagaaatt

SEQ ID NO: 162652 - DNA, 10 bp, Unknown
  misc_feature (1)..( 10): Result.004 file - promoters50/1030336
aatccttcaa

SEQ ID NO: 162653 - DNA, 10 bp, Unknown
  misc_feature (1)..( 10): Result.004 file - promoters50/1030336
aatcattcaa

SEQ ID NO: 162654 - DNA, 10 bp, Unknown
  misc_feature (1)..( 10): Result.004 file - promoters50/1030336
aatacttaaa

SEQ ID NO: 162655 - DNA, 9 bp, Unknown
  misc_feature (1)..( 9): Result.004 file - promoters50/1030336
ttgagataa

SEQ ID NO: 162656 - DNA, 9 bp, Unknown
  misc_feature (1)..( 9): Result.004 file - promoters50/1030336
ttgagaatg

SEQ ID NO: 162657 - DNA, 9 bp, Unknown
  misc_feature (1)..( 9): Result.004 file - promoters50/1030410
atgataatg

SEQ ID NO: 162658 - DNA, 8 bp, Unknown
  misc_feature (1)..( 8): Result.004 file - promoters50/1030410
cttttttc

SEQ ID NO: 162659 - DNA, 8 bp, Unknown
  misc_feature (1)..( 8): Result.004 file - promoters50/1030410
cttttttt

SEQ ID NO: 162660 - DNA, 8 bp, Unknown
  misc_feature (1)..( 8): Result.004 file - promoters50/1030428
gtttcttc

SEQ ID NO: 162661 - DNA, 7 bp, Unknown
  misc_feature (1)..( 7): Result.004 file - promoters50/1030428
tataaag

SEQ ID NO: 162662 - DNA, 7 bp, Unknown
  misc_feature (1)..( 7): Result.004 file - promoters50/1030428
aataaag

SEQ ID NO: 162663 - DNA, 7 bp, Unknown
  misc_feature (1)..( 7): Result.004 file - promoters50/1030428
tataaac

SEQ ID NO: 162664 - DNA, 7 bp, Unknown
  misc_feature (1)..( 7): Result.004 file - promoters50/1030428
tataaat

SEQ ID NO: 162665 - DNA, 7 bp, Unknown
  misc_feature (1)..( 7): Result.004 file - promoters50/1030481
tataaat

SEQ ID NO: 162666 - DNA, 8 bp, Unknown
  misc_feature (1)..( 8): Result.004 file - promoters50/1030481
aaataaaa

SEQ ID NO: 162667 - DNA, 8 bp, Unknown
  misc_feature (1)..( 8): Result.004 file - promoters50/1030481
caataaaa

SEQ ID NO: 162668 - DNA, 8 bp, Unknown
  misc_feature (1)..( 8): Result.004 file - promoters50/1030481
caagaaat

SEQ ID NO: 162669 - DNA, 7 bp, Unknown
  misc_feature (1)..( 7): Result.004 file - promoters50/1030481
taagaaa

SEQ ID NO: 162670 - DNA, 7 bp, Unknown
  misc_feature (1)..( 7): Result.004 file - promoters50/1030481
caagaaa

SEQ ID NO: 162671 - DNA, 7 bp, Unknown
  misc_feature (1)..( 7): Result.004 file - promoters50/1030481
caataaa

SEQ ID NO: 162672 - DNA, 11 bp, Unknown
  misc_feature (1)..( 11): Result.004 file - promoters50/1030481
aattaagagaa

SEQ ID NO: 162673 - DNA, 11 bp, Unknown
  misc_feature (1)..( 11): Result.004 file - promoters50/1030481
cattaacagaa

SEQ ID NO: 162674 - DNA, 11 bp, Unknown
  misc_feature (1)..( 11): Result.004 file - promoters50/1030481
aatcaataaaa

SEQ ID NO: 162675 - DNA, 8 bp, Unknown
  misc_feature (1)..( 8): Result.004 file - promoters50/1030481
tctcatgt

SEQ ID NO: 162676 - DNA, 8 bp, Unknown
  misc_feature (1)..( 8): Result.004 file - promoters50/1030481
tctcatga

SEQ ID NO: 162677 - DNA, 8 bp, Unknown
  misc_feature (1)..( 8): Result.004 file - promoters50/1030481
ggtcatga

SEQ ID NO: 162678 - DNA, 10 bp, Unknown
  misc_feature (1)..( 10): Result.004 file - promoters50/1030481
gacggtattt

SEQ ID NO: 162679 - DNA, 10 bp, Unknown
  misc_feature (1)..( 10): Result.004 file - promoters50/1030481
gacgttatat

SEQ ID NO: 162680 - DNA, 10 bp, Unknown
  misc_feature (1)..( 10): Result.004 file - promoters50/1030481
tgagttatat

SEQ ID NO: 162681 - DNA, 9 bp, Unknown
  misc_feature (1)..( 9): Result.004 file - promoters50/1030481
actaatcgg

SEQ ID NO: 162682 - DNA, 9 bp, Unknown
  misc_feature (1)..( 9): Result.004 file - promoters50/1030481
actcatctt

SEQ ID NO: 162683 - DNA, 9 bp, Unknown
  misc_feature (1)..( 9): Result.004 file - promoters50/1030481
cctcacctt

SEQ ID NO: 162684 - DNA, 9 bp, Unknown
  misc_feature (1)..( 9): Result.004 file - promoters50/1030481
ctcaaccat

SEQ ID NO: 162685 - DNA, 9 bp, Unknown
  misc_feature (1)..( 9): Result.004 file - promoters50/1030481
ctcacccat

SEQ ID NO: 162686 - DNA, 9 bp, Unknown
  misc_feature (1)..( 9): Result.004 file - promoters50/1030519
aaaacccat

SEQ ID NO: 162687 - DNA, 10 bp, Unknown
  misc_feature (1)..( 10): Result.004 file - promoters50/1030519
aagaacaaaa

SEQ ID NO: 162688 - DNA, 10 bp, Unknown
  misc_feature (1)..( 10): Result.004 file - promoters50/1030519
aagaagaaac

SEQ ID NO: 162689 - DNA, 10 bp, Unknown
  misc_feature (1)..( 10): Result.004 file - promoters50/1030519
aaacacaaaa

SEQ ID NO: 162690 - DNA, 8 bp, Unknown
  misc_feature (1)..( 8): Result.004 file - promoters50/1030519
aaaacaat

SEQ ID NO: 162691 - DNA, 8 bp, Unknown
  misc_feature (1)..( 8): Result.004 file - promoters50/1030519
aaaagaat

SEQ ID NO: 162692 - DNA, 9 bp, Unknown
  misc_feature (1)..( 9): Result.004 file - promoters50/1030519
aaacacaaa

SEQ ID NO: 162693 - DNA, 9 bp, Unknown
  misc_feature (1)..( 9): Result.004 file - promoters50/1030519
attcttatc

SEQ ID NO: 162694 - DNA, 9 bp, Unknown
  misc_feature (1)..( 9): Result.004 file - promoters50/1030519
atttttaat

SEQ ID NO: 162695 - DNA, 9 bp, Unknown
  misc_feature (1)..( 9): Result.004 file - promoters50/1030519
tttcatatc

SEQ ID NO: 162696 - DNA, 8 bp, Unknown
  misc_feature (1)..( 8): Result.004 file - promoters50/1030519
aaagcttg

SEQ ID NO: 162697 - DNA, 8 bp, Unknown
  misc_feature (1)..( 8): Result.004 file - promoters50/1030519
aaaccttg

SEQ ID NO: 162698 - DNA, 8 bp, Unknown
  misc_feature (1)..( 8): Result.004 file - promoters50/1030528
tgagcttg

SEQ ID NO: 162699 - DNA, 10 bp, Unknown
  misc_feature (1)..( 10): Result.004 file - promoters50/1030528
tttttaaaaa

SEQ ID NO: 162700 - DNA, 10 bp, Unknown
  misc_feature (1)..( 10): Result.004 file - promoters50/1030528
ttattaaaat

SEQ ID NO: 162701 - DNA, 10 bp, Unknown
  misc_feature (1)..( 10): Result.004 file - promoters50/1030528
gaactaaaaa

SEQ ID NO: 162702 - DNA, 10 bp, Unknown
  misc_feature (1)..( 10): Result.004 file - promoters50/1030528
atcttaaaac

SEQ ID NO: 162703 - DNA, 10 bp, Unknown
  misc_feature (1)..( 10): Result.004 file - promoters50/1030528
ttattaaagt

SEQ ID NO: 162704 - DNA, 10 bp, Unknown
  misc_feature (1)..( 10): Result.004 file - promoters50/1030528
ttactaatag

SEQ ID NO: 162705 - DNA, 10 bp, Unknown
  misc_feature (1)..( 10): Result.004 file - promoters50/1030528
aatactaatt

SEQ ID NO: 162706 - DNA, 10 bp, Unknown
  misc_feature (1)..( 10): Result.004 file - promoters50/1030528
tataataatt

SEQ ID NO: 162707 - DNA, 10 bp, Unknown
  misc_feature (1)..( 10): Result.004 file - promoters50/1030528
tttactaata

SEQ ID NO: 162708 - DNA, 11 bp, Unknown
  misc_feature (1)..( 11): Result.004 file - promoters50/1030528
taagaataatg

SEQ ID NO: 162709 - DNA, 11 bp, Unknown
  misc_feature (1)..( 11): Result.004 file - promoters50/1030528
gagtaatgatg

SEQ ID NO: 162710 - DNA, 10 bp, Unknown
  misc_feature (1)..( 10): Result.004 file - promoters50/1030528
aagaaaaatt

SEQ ID NO: 162711 - DNA, 11 bp, Unknown
  misc_feature (1)..( 11): Result.004 file - promoters50/1030528
actaaatgata

SEQ ID NO: 162712 - DNA, 13 bp, Unknown
  misc_feature (1)..( 13): Result.004 file - promoters50/1030528
attatttttttaa

SEQ ID NO: 162713 - DNA, 13 bp, Unknown
  misc_feature (1)..( 13): Result.004 file - promoters50/1030528
gttatatttttaa

SEQ ID NO: 162714 - DNA, 13 bp, Unknown
  misc_feature (1)..( 13): Result.004 file - promoters50/1030528
tttaattttgtta

SEQ ID NO: 162715 - DNA, 13 bp, Unknown
  misc_feature (1)..( 13): Result.004 file - promoters50/1030528
attattaaagtat

SEQ ID NO: 162716 - DNA, 13 bp, Unknown
  misc_feature (1)..( 13): Result.004 file - promoters50/1030528
tttaaatttatta

SEQ ID NO: 162717 - DNA, 13 bp, Unknown
  misc_feature (1)..( 13): Result.004 file - promoters50/1030528
ctaattcttatct

SEQ ID NO: 162718 - DNA, 13 bp, Unknown
  misc_feature (1)..( 13): Result.004 file - promoters50/1030528
gcaaatcttgttt

SEQ ID NO: 162719 - DNA, 11 bp, Unknown
  misc_feature (1)..( 11): Result.004 file - promoters50/1030528
taatgattatt

SEQ ID NO: 162720 - DNA, 11 bp, Unknown
  misc_feature (1)..( 11): Result.004 file - promoters50/1030528
aaatgatatga

SEQ ID NO: 162721 - DNA, 11 bp, Unknown
  misc_feature (1)..( 11): Result.004 file - promoters50/1030528
aaattattaaa

SEQ ID NO: 162722 - DNA, 12 bp, Unknown
  misc_feature (1)..( 12): Result.004 file - promoters50/1030528
tgtcttattaaa

SEQ ID NO: 162723 - DNA, 11 bp, Unknown
  misc_feature (1)..( 11): Result.004 file - promoters50/1030528
taattgaacta

SEQ ID NO: 162724 - DNA, 12 bp, Unknown
  misc_feature (1)..( 12): Result.004 file - promoters50/1030528
taatagaagagt

SEQ ID NO: 162725 - DNA, 13 bp, Unknown
  misc_feature (1)..( 13): Result.004 file - promoters50/1030528
taatgattatttt

SEQ ID NO: 162726 - DNA, 13 bp, Unknown
  misc_feature (1)..( 13): Result.004 file - promoters50/1030528
ttgggattatctt

SEQ ID NO: 162727 - DNA, 13 bp, Unknown
  misc_feature (1)..( 13): Result.004 file - promoters50/1030528
gaaaaattattaa

SEQ ID NO: 162728 - DNA, 13 bp, Unknown
  misc_feature (1)..( 13): Result.004 file - promoters50/1030528
tgtaaattgtctt

SEQ ID NO: 162729 - DNA, 13 bp, Unknown
  misc_feature (1)..( 13): Result.004 file - promoters50/1030528
gtctaattttaat

SEQ ID NO: 162730 - DNA, 13 bp, Unknown
  misc_feature (1)..( 13): Result.004 file - promoters50/1030528
ctctaattcttat

SEQ ID NO: 162731 - DNA, 11 bp, Unknown
  misc_feature (1)..( 11): Result.004 file - promoters50/1030528
taaattgtctt

SEQ ID NO: 162732 - DNA, 11 bp, Unknown
  misc_feature (1)..( 11): Result.004 file - promoters50/1030528
aaaaatgttat

SEQ ID NO: 162733 - DNA, 11 bp, Unknown
  misc_feature (1)..( 11): Result.004 file - promoters50/1030528
gggattatctt

SEQ ID NO: 162734 - DNA, 11 bp, Unknown
  misc_feature (1)..( 11): Result.004 file - promoters50/1030528
taaatgatatg

SEQ ID NO: 162735 - DNA, 11 bp, Unknown
  misc_feature (1)..( 11): Result.004 file - promoters50/1030528
ctaattttaat

SEQ ID NO: 162736 - DNA, 11 bp, Unknown
  misc_feature (1)..( 11): Result.004 file - promoters50/1030528
aaaaattatta

SEQ ID NO: 162737 - DNA, 11 bp, Unknown
  misc_feature (1)..( 11): Result.004 file - promoters50/1030528
attcttatctt

SEQ ID NO: 162738 - DNA, 13 bp, Unknown
  misc_feature (1)..( 13): Result.004 file - promoters50/1030528
ttatcagagataa

SEQ ID NO: 162739 - DNA, 13 bp, Unknown
  misc_feature (1)..( 13): Result.004 file - promoters50/1030528
ctattagacggac

SEQ ID NO: 162740 - DNA, 13 bp, Unknown
  misc_feature (1)..( 13): Result.004 file - promoters50/1030528
ttatcaacaacgt

SEQ ID NO: 162741 - DNA, 13 bp, Unknown
  misc_feature (1)..( 13): Result.004 file - promoters50/1030528
ttaacaaaagaaa

SEQ ID NO: 162742 - DNA, 13 bp, Unknown
  misc_feature (1)..( 13): Result.004 file - promoters50/1030528
acattaaacgaat

SEQ ID NO: 162743 - DNA, 13 bp, Unknown
  misc_feature (1)..( 13): Result.004 file - promoters50/1030528
attttagtcggtc

SEQ ID NO: 162744 - DNA, 13 bp, Unknown
  misc_feature (1)..( 13): Result.004 file - promoters50/1030530
aaaaaagtctgtc

SEQ ID NO: 162745 - DNA, 9 bp, Unknown
  misc_feature (1)..( 9): Result.004 file - promoters50/1030530
tgaacaaaa

SEQ ID NO: 162746 - DNA, 9 bp, Unknown
  misc_feature (1)..( 9): Result.004 file - promoters50/1030530
ggaaaaaaa

SEQ ID NO: 162747 - DNA, 9 bp, Unknown
  misc_feature (1)..( 9): Result.004 file - promoters50/1030530
tcaacgaaa

SEQ ID NO: 162748 - DNA, 9 bp, Unknown
  misc_feature (1)..( 9): Result.004 file - promoters50/1030530
ttaaaaaat

SEQ ID NO: 162749 - DNA, 9 bp, Unknown
  misc_feature (1)..( 9): Result.004 file - promoters50/1030530
ggagaaacg

SEQ ID NO: 162750 - DNA, 9 bp, Unknown
  misc_feature (1)..( 9): Result.004 file - promoters50/1030530
tcaaacaat

SEQ ID NO: 162751 - DNA, 11 bp, Unknown
  misc_feature (1)..( 11): Result.004 file - promoters50/1030530
gaacaaaatat

SEQ ID NO: 162752 - DNA, 11 bp, Unknown
  misc_feature (1)..( 11): Result.004 file - promoters50/1030530
gagacaaatat

SEQ ID NO: 162753 - DNA, 11 bp, Unknown
  misc_feature (1)..( 11): Result.004 file - promoters50/1030530
ttaaaaaataa

SEQ ID NO: 162754 - DNA, 11 bp, Unknown
  misc_feature (1)..( 11): Result.004 file - promoters50/1030530
ggaaaaaaacg

SEQ ID NO: 162755 - DNA, 11 bp, Unknown
  misc_feature (1)..( 11): Result.004 file - promoters50/1030530
ggagaaacgac

SEQ ID NO: 162756 - DNA, 11 bp, Unknown
  misc_feature (1)..( 11): Result.004 file - promoters50/1030581
tcaaacaatca

SEQ ID NO: 162757 - DNA, 14 bp, Unknown
  misc_feature (1)..( 14): Result.004 file - promoters50/1030581
gaatttgaaagaga

SEQ ID NO: 162758 - DNA, 14 bp, Unknown
  misc_feature (1)..( 14): Result.004 file - promoters50/1030581
ggttttgaagctta

SEQ ID NO: 162759 - DNA, 14 bp, Unknown
  misc_feature (1)..( 14): Result.004 file - promoters50/1030581
aaatgtgaaatgta

SEQ ID NO: 162760 - DNA, 14 bp, Unknown
  misc_feature (1)..( 14): Result.004 file - promoters50/1030581
ttgttggaagggaa

SEQ ID NO: 162761 - DNA, 15 bp, Unknown
  misc_feature (1)..( 15): Result.004 file - promoters50/1030581
tagtttagaacatct

SEQ ID NO: 162762 - DNA, 15 bp, Unknown
  misc_feature (1)..( 15): Result.004 file - promoters50/1030581
aaactgtgaaactgt

SEQ ID NO: 162763 - DNA, 15 bp, Unknown
  misc_feature (1)..( 15): Result.004 file - promoters50/1030581
ggacgtggaatcgac

SEQ ID NO: 162764 - DNA, 12 bp, Unknown
  misc_feature (1)..( 12): Result.004 file - promoters50/1030581
tctaaaatctct

SEQ ID NO: 162765 - DNA, 12 bp, Unknown
  misc_feature (1)..( 12): Result.004 file - promoters50/1030581
atgcaaatatct

SEQ ID NO: 162766 - DNA, 12 bp, Unknown
  misc_feature (1)..( 12): Result.004 file - promoters50/1030581
cccaaaatctga

SEQ ID NO: 162767 - DNA, 12 bp, Unknown
  misc_feature (1)..( 12): Result.004 file - promoters50/1030581
aataaaatcaga

SEQ ID NO: 162768 - DNA, 12 bp, Unknown
  misc_feature (1)..( 12): Result.004 file - promoters50/1030581
cgacaaatatgg

SEQ ID NO: 162769 - DNA, 12 bp, Unknown
  misc_feature (1)..( 12): Result.004 file - promoters50/1030581
atgtaaatagca

SEQ ID NO: 162770 - DNA, 12 bp, Unknown
  misc_feature (1)..( 12): Result.004 file - promoters50/1030591
gttgaaattcac

SEQ ID NO: 162771 - DNA, 8 bp, Unknown
  misc_feature (1)..( 8): Result.004 file - promoters50/1030591
tttattgg

SEQ ID NO: 162772 - DNA, 8 bp, Unknown
  misc_feature (1)..( 8): Result.004 file - promoters50/1030591
gttattgg

SEQ ID NO: 162773 - DNA, 8 bp, Unknown
  misc_feature (1)..( 8): Result.004 file - promoters50/1030591
gttatttg

SEQ ID NO: 162774 - DNA, 8 bp, Unknown
  misc_feature (1)..( 8): Result.004 file - promoters50/1030591
gaatagat

SEQ ID NO: 162775 - DNA, 8 bp, Unknown
  misc_feature (1)..( 8): Result.004 file - promoters50/1030591
aaatagat

SEQ ID NO: 162776 - DNA, 8 bp, Unknown
  misc_feature (1)..( 8): Result.004 file - promoters50/1030605
aaatagct

SEQ ID NO: 162777 - DNA, 14 bp, Unknown
  misc_feature (1)..( 14): Result.004 file - promoters50/1030605
gttttgatcgcttt

SEQ ID NO: 162778 - DNA, 14 bp, Unknown
  misc_feature (1)..( 14): Result.004 file - promoters50/1030605
tatttaatcagaaa

SEQ ID NO: 162779 - DNA, 14 bp, Unknown
  misc_feature (1)..( 14): Result.004 file - promoters50/1030605
attttgacatcata

SEQ ID NO: 162780 - DNA, 14 bp, Unknown
  misc_feature (1)..( 14): Result.004 file - promoters50/1030605
attttgaaatcatg

SEQ ID NO: 162781 - DNA, 14 bp, Unknown
  misc_feature (1)..( 14): Result.004 file - promoters50/1030605
tttttgaacttatg

SEQ ID NO: 162782 - DNA, 14 bp, Unknown
  misc_feature (1)..( 14): Result.004 file - promoters50/1030605
ctatcaaaataatg

SEQ ID NO: 162783 - DNA, 11 bp, Unknown
  misc_feature (1)..( 11): Result.004 file - promoters50/1030605
aaaataataat

SEQ ID NO: 162784 - DNA, 11 bp, Unknown
  misc_feature (1)..( 11): Result.004 file - promoters50/1030605
aaaaaaataca

SEQ ID NO: 162785 - DNA, 11 bp, Unknown
  misc_feature (1)..( 11): Result.004 file - promoters50/1030605
caaataaaaca

SEQ ID NO: 162786 - DNA, 11 bp, Unknown
  misc_feature (1)..( 11): Result.004 file - promoters50/1030605
taaaaaatgtt

SEQ ID NO: 162787 - DNA, 11 bp, Unknown
  misc_feature (1)..( 11): Result.004 file - promoters50/1030605
aaaaaaagaat

SEQ ID NO: 162788 - DNA, 11 bp, Unknown
  misc_feature (1)..( 11): Result.004 file - promoters50/1030605
cgaaaaaggtg

SEQ ID NO: 162789 - DNA, 11 bp, Unknown
  misc_feature (1)..( 11): Result.004 file - promoters50/1030605
caactaatttg

SEQ ID NO: 162790 - DNA, 13 bp, Unknown
  misc_feature (1)..( 13): Result.004 file - promoters50/1030605
gacatatttttat

SEQ ID NO: 162791 - DNA, 13 bp, Unknown
  misc_feature (1)..( 13): Result.004 file - promoters50/1030605
aaaatatatttaa

SEQ ID NO: 162792 - DNA, 13 bp, Unknown
  misc_feature (1)..( 13): Result.004 file - promoters50/1030605
actttttttttaa

SEQ ID NO: 162793 - DNA, 13 bp, Unknown
  misc_feature (1)..( 13): Result.004 file - promoters50/1030605
tgattattttttg

SEQ ID NO: 162794 - DNA, 13 bp, Unknown
  misc_feature (1)..( 13): Result.004 file - promoters50/1030605
tgaatttataagc

SEQ ID NO: 162795 - DNA, 13 bp, Unknown
  misc_feature (1)..( 13): Result.004 file - promoters50/1030605
aaattttattgct

SEQ ID NO: 162796 - DNA, 13 bp, Unknown
  misc_feature (1)..( 13): Result.004 file - promoters50/1030605
ataataaattttg

SEQ ID NO: 162797 - DNA, 11 bp, Unknown
  misc_feature (1)..( 11): Result.004 file - promoters50/1030605
aaaaaaagaat

SEQ ID NO: 162798 - DNA, 11 bp, Unknown
  misc_feature (1)..( 11): Result.004 file - promoters50/1030605
gaatgaagaat

SEQ ID NO: 162799 - DNA, 11 bp, Unknown
  misc_feature (1)..( 11): Result.004 file - promoters50/1030605
aaaaaaaaaat

SEQ ID NO: 162800 - DNA, 11 bp, Unknown
  misc_feature (1)..( 11): Result.004 file - promoters50/1030605
ttacgaaaaag

SEQ ID NO: 162801 - DNA, 11 bp, Unknown
  misc_feature (1)..( 11): Result.004 file - promoters50/1030605
ttttaaaaaat

SEQ ID NO: 162802 - DNA, 11 bp, Unknown
  misc_feature (1)..( 11): Result.004 file - promoters50/1030605
cattaacaaat

SEQ ID NO: 162803 - DNA, 14 bp, Unknown
  misc_feature (1)..( 14): Result.004 file - promoters50/1030605
cgattgacatattt

SEQ ID NO: 162804 - DNA, 14 bp, Unknown
  misc_feature (1)..( 14): Result.004 file - promoters50/1030605
ttattgagatagta

SEQ ID NO: 162805 - DNA, 14 bp, Unknown
  misc_feature (1)..( 14): Result.004 file - promoters50/1030605
attttgacatcata

SEQ ID NO: 162806 - DNA, 14 bp, Unknown
  misc_feature (1)..( 14): Result.004 file - promoters50/1030605
attttgaaatcatg

SEQ ID NO: 162807 - DNA, 14 bp, Unknown
  misc_feature (1)..( 14): Result.004 file - promoters50/1030605
tttttgaacttatg

SEQ ID NO: 162808 - DNA, 14 bp, Unknown
  misc_feature (1)..( 14): Result.004 file - promoters50/1030605
ctatcaaaataatg

SEQ ID NO: 162809 - DNA, 16 bp, Unknown
  misc_feature (1)..( 16): Result.004 file - promoters50/1030605
tttataaattagacga

SEQ ID NO: 162810 - DNA, 16 bp, Unknown
  misc_feature (1)..( 16): Result.004 file - promoters50/1030605
aaaatacattaggaca

SEQ ID NO: 162811 - DNA, 16 bp, Unknown
  misc_feature (1)..( 16): Result.004 file - promoters50/1030605
ataagtaatttttaaa

SEQ ID NO: 162812 - DNA, 16 bp, Unknown
  misc_feature (1)..( 16): Result.004 file - promoters50/1030605
caactaatttgtcaga

SEQ ID NO: 162813 - DNA, 16 bp, Unknown
  misc_feature (1)..( 16): Result.004 file - promoters50/1030605
attcaacaatagaggt

SEQ ID NO: 162814 - DNA, 16 bp, Unknown
  misc_feature (1)..( 16): Result.004 file - promoters50/1030616
ttaacaaataaaacag

SEQ ID NO: 162815 - DNA, 8 bp, Unknown
  misc_feature (1)..( 8): Result.004 file - promoters50/1030616
gaaattat

SEQ ID NO: 162816 - DNA, 8 bp, Unknown
  misc_feature (1)..( 8): Result.004 file - promoters50/1030616
caaaatat

SEQ ID NO: 162817 - DNA, 8 bp, Unknown
  misc_feature (1)..( 8): Result.004 file - promoters50/1030616
gaaatttg

SEQ ID NO: 162818 - DNA, 8 bp, Unknown
  misc_feature (1)..( 8): Result.004 file - promoters50/1030616
gaaaatat

SEQ ID NO: 162819 - DNA, 8 bp, Unknown
  misc_feature (1)..( 8): Result.004 file - promoters50/1030616
caaaatga

SEQ ID NO: 162820 - DNA, 13 bp, Unknown
  misc_feature (1)..( 13): Result.004 file - promoters50/1030616
ttgtaaaacatta

SEQ ID NO: 162821 - DNA, 13 bp, Unknown
  misc_feature (1)..( 13): Result.004 file - promoters50/1030616
ttctaaaatattg

SEQ ID NO: 162822 - DNA, 13 bp, Unknown
  misc_feature (1)..( 13): Result.004 file - promoters50/1030616
acataacagaaat

SEQ ID NO: 162823 - DNA, 13 bp, Unknown
  misc_feature (1)..( 13): Result.004 file - promoters50/1030616
tatgtaaattttg

SEQ ID NO: 162824 - DNA, 13 bp, Unknown
  misc_feature (1)..( 13): Result.004 file - promoters50/1030616
catataaatatac

SEQ ID NO: 162825 - DNA, 14 bp, Unknown
  misc_feature (1)..( 14): Result.004 file - promoters50/1030616
aaactcttaccgaa

SEQ ID NO: 162826 - DNA, 14 bp, Unknown
  misc_feature (1)..( 14): Result.004 file - promoters50/1030616
aaacttttaaaatg

SEQ ID NO: 162827 - DNA, 14 bp, Unknown
  misc_feature (1)..( 14): Result.004 file - promoters50/1030616
tctattttaattcg

SEQ ID NO: 162828 - DNA, 14 bp, Unknown
  misc_feature (1)..( 14): Result.004 file - promoters50/1030616
attaatttaatttt

SEQ ID NO: 162829 - DNA, 14 bp, Unknown
  misc_feature (1)..( 14): Result.004 file - promoters50/1030616
aagaatttaaatgt

SEQ ID NO: 162830 - DNA, 14 bp, Unknown
  misc_feature (1)..( 14): Result.004 file - promoters50/1030616
tacaaattaaattt

SEQ ID NO: 162831 - DNA, 10 bp, Unknown
  misc_feature (1)..( 10): Result.004 file - promoters50/1030616
aaatgaaatg

SEQ ID NO: 162832 - DNA, 10 bp, Unknown
  misc_feature (1)..( 10): Result.004 file - promoters50/1030616
aaatgacacg

SEQ ID NO: 162833 - DNA, 10 bp, Unknown
  misc_feature (1)..( 10): Result.004 file - promoters50/1030616
gaatcaaaaa

SEQ ID NO: 162834 - DNA, 11 bp, Unknown
  misc_feature (1)..( 11): Result.004 file - promoters50/1030616
ttatccaaaaa

SEQ ID NO: 162835 - DNA, 11 bp, Unknown
  misc_feature (1)..( 11): Result.004 file - promoters50/1030616
aaaagacgtag

SEQ ID NO: 162836 - DNA, 13 bp, Unknown
  misc_feature (1)..( 13): Result.004 file - promoters50/1030616
atataattaagag

SEQ ID NO: 162837 - DNA, 13 bp, Unknown
  misc_feature (1)..( 13): Result.004 file - promoters50/1030616
atacaattgcacg

SEQ ID NO: 162838 - DNA, 13 bp, Unknown
  misc_feature (1)..( 13): Result.004 file - promoters50/1030616
acataattatctt

SEQ ID NO: 162839 - DNA, 13 bp, Unknown
  misc_feature (1)..( 13): Result.004 file - promoters50/1030616
gcatcattaaaca

SEQ ID NO: 162840 - DNA, 13 bp, Unknown
  misc_feature (1)..( 13): Result.004 file - promoters50/1030715
atttaaatatgct

SEQ ID NO: 162841 - DNA, 11 bp, Unknown
  misc_feature (1)..( 11): Result.004 file - promoters50/1030715
tattatttcca

SEQ ID NO: 162842 - DNA, 11 bp, Unknown
  misc_feature (1)..( 11): Result.004 file - promoters50/1030715
aaatatttcat

SEQ ID NO: 162843 - DNA, 11 bp, Unknown
  misc_feature (1)..( 11): Result.004 file - promoters50/1030715
ttatattttaa

SEQ ID NO: 162844 - DNA, 11 bp, Unknown
  misc_feature (1)..( 11): Result.004 file - promoters50/1030715
atatattgcta

SEQ ID NO: 162845 - DNA, 12 bp, Unknown
  misc_feature (1)..( 12): Result.004 file - promoters50/1030715
ttatatgttaaa

SEQ ID NO: 162846 - DNA, 10 bp, Unknown
  misc_feature (1)..( 10): Result.004 file - promoters50/1030715
ttctttaaga

SEQ ID NO: 162847 - DNA, 10 bp, Unknown
  misc_feature (1)..( 10): Result.004 file - promoters50/1030715
ttgtttcaga

SEQ ID NO: 162848 - DNA, 10 bp, Unknown
  misc_feature (1)..( 10): Result.004 file - promoters50/1030715
ttcttaaagc

SEQ ID NO: 162849 - DNA, 10 bp, Unknown
  misc_feature (1)..( 10): Result.004 file - promoters50/1030757
ttcttagcgg

SEQ ID NO: 162850 - DNA, 11 bp, Unknown
  misc_feature (1)..( 11): Result.004 file - promoters50/1030757
taaatacattt

SEQ ID NO: 162851 - DNA, 11 bp, Unknown
  misc_feature (1)..( 11): Result.004 file - promoters50/1030757
caaaaacaact

SEQ ID NO: 162852 - DNA, 11 bp, Unknown
  misc_feature (1)..( 11): Result.004 file - promoters50/1030757
caaatacattg

SEQ ID NO: 162853 - DNA, 11 bp, Unknown
  misc_feature (1)..( 11): Result.004 file - promoters50/1030757
ctgataaattt

SEQ ID NO: 162854 - DNA, 11 bp, Unknown
  misc_feature (1)..( 11): Result.004 file - promoters50/1030757
aagatacgttg

SEQ ID NO: 162855 - DNA, 11 bp, Unknown
  misc_feature (1)..( 11): Result.004 file - promoters50/1030757
caaatatttcc

SEQ ID NO: 162856 - DNA, 12 bp, Unknown
  misc_feature (1)..( 12): Result.004 file - promoters50/1030757
caatttattagg

SEQ ID NO: 162857 - DNA, 12 bp, Unknown
  misc_feature (1)..( 12): Result.004 file - promoters50/1030757
gaatatattact

SEQ ID NO: 162858 - DNA, 12 bp, Unknown
  misc_feature (1)..( 12): Result.004 file - promoters50/1030757
tcattttcaaag

SEQ ID NO: 162859 - DNA, 12 bp, Unknown
  misc_feature (1)..( 12): Result.004 file - promoters50/1030757
gtttttcttatc

SEQ ID NO: 162860 - DNA, 12 bp, Unknown
  misc_feature (1)..( 12): Result.004 file - promoters50/1030757
caatttttagtc

SEQ ID NO: 162861 - DNA, 12 bp, Unknown
  misc_feature (1)..( 12): Result.004 file - promoters50/1030757
ttctttcttttt

SEQ ID NO: 162862 - DNA, 15 bp, Unknown
  misc_feature (1)..( 15): Result.004 file - promoters50/1030757
ttacacttttatgtt

SEQ ID NO: 162863 - DNA, 15 bp, Unknown
  misc_feature (1)..( 15): Result.004 file - promoters50/1030757
gaaaacttttatata

SEQ ID NO: 162864 - DNA, 15 bp, Unknown
  misc_feature (1)..( 15): Result.004 file - promoters50/1030757
aatcactttactagg

SEQ ID NO: 162865 - DNA, 15 bp, Unknown
  misc_feature (1)..( 15): Result.004 file - promoters50/1030757
ttttgatttcataca

SEQ ID NO: 162866 - DNA, 15 bp, Unknown
  misc_feature (1)..( 15): Result.004 file - promoters50/1030757
tttcgaatttaaata

SEQ ID NO: 162867 - DNA, 15 bp, Unknown
  misc_feature (1)..( 15): Result.004 file - promoters50/1030757
aatcattttcttttt

SEQ ID NO: 162868 - DNA, 10 bp, Unknown
  misc_feature (1)..( 10): Result.004 file - promoters50/1030757
ccggttttga

SEQ ID NO: 162869 - DNA, 10 bp, Unknown
  misc_feature (1)..( 10): Result.004 file - promoters50/1030757
acggatttac

SEQ ID NO: 162870 - DNA, 10 bp, Unknown
  misc_feature (1)..( 10): Result.004 file - promoters50/1030757
tcagatatac

SEQ ID NO: 162871 - DNA, 10 bp, Unknown
  misc_feature (1)..( 10): Result.004 file - promoters50/1030757
taagaaatag

SEQ ID NO: 162872 - DNA, 10 bp, Unknown
  misc_feature (1)..( 10): Result.004 file - promoters50/1030757
aaagaaattg

SEQ ID NO: 162873 - DNA, 10 bp, Unknown
  misc_feature (1)..( 10): Result.004 file - promoters50/1030757
atggatttga

SEQ ID NO: 162874 - DNA, 10 bp, Unknown
  misc_feature (1)..( 10): Result.004 file - promoters50/1030771
acggatatcg

SEQ ID NO: 162875 - DNA, 9 bp, Unknown
  misc_feature (1)..( 9): Result.004 file - promoters50/1030771
tgaaaaaaa

SEQ ID NO: 162876 - DNA, 9 bp, Unknown
  misc_feature (1)..( 9): Result.004 file - promoters50/1030771
tgaaaaagt

SEQ ID NO: 162877 - DNA, 9 bp, Unknown
  misc_feature (1)..( 9): Result.004 file - promoters50/1030771
ttaaaaaaa

SEQ ID NO: 162878 - DNA, 9 bp, Unknown
  misc_feature (1)..( 9): Result.004 file - promoters50/1030771
taaaagagt

SEQ ID NO: 162879 - DNA, 10 bp, Unknown
  misc_feature (1)..( 10): Result.004 file - promoters50/1030771
tgaaaataaa

SEQ ID NO: 162880 - DNA, 8 bp, Unknown
  misc_feature (1)..( 8): Result.004 file - promoters50/1030771
aaaaaaac

SEQ ID NO: 162881 - DNA, 8 bp, Unknown
  misc_feature (1)..( 8): Result.004 file - promoters50/1030771
tcaaaaac

SEQ ID NO: 162882 - DNA, 9 bp, Unknown
  misc_feature (1)..( 9): Result.004 file - promoters50/1030771
aaaataaac

SEQ ID NO: 162883 - DNA, 9 bp, Unknown
  misc_feature (1)..( 9): Result.004 file - promoters50/1030771
taaaaaaaa

SEQ ID NO: 162884 - DNA, 9 bp, Unknown
  misc_feature (1)..( 9): Result.004 file - promoters50/1030803
aaagtaatt

SEQ ID NO: 162885 - DNA, 9 bp, Unknown
  misc_feature (1)..( 9): Result.004 file - promoters50/1030803
tcggtgaag

SEQ ID NO: 162886 - DNA, 9 bp, Unknown
  misc_feature (1)..( 9): Result.004 file - promoters50/1030803
tcggagaat

SEQ ID NO: 162887 - DNA, 9 bp, Unknown
  misc_feature (1)..( 9): Result.004 file - promoters50/1030821
aatgtgaag

SEQ ID NO: 162888 - DNA, 14 bp, Unknown
  misc_feature (1)..( 14): Result.004 file - promoters50/1030821
aaacaatgtactta

SEQ ID NO: 162889 - DNA, 14 bp, Unknown
  misc_feature (1)..( 14): Result.004 file - promoters50/1030821
aaaaaataatcaga

SEQ ID NO: 162890 - DNA, 14 bp, Unknown
  misc_feature (1)..( 14): Result.004 file - promoters50/1030821
gtacaatctactta

SEQ ID NO: 162891 - DNA, 14 bp, Unknown
  misc_feature (1)..( 14): Result.004 file - promoters50/1030821
catcaataaactta

SEQ ID NO: 162892 - DNA, 14 bp, Unknown
  misc_feature (1)..( 14): Result.004 file - promoters50/1030821
agataatgtactga

SEQ ID NO: 162893 - DNA, 14 bp, Unknown
  misc_feature (1)..( 14): Result.004 file - promoters50/1030821
gtgaaatgtatagg

SEQ ID NO: 162894 - DNA, 9 bp, Unknown
  misc_feature (1)..( 9): Result.004 file - promoters50/1030821
caaaccaat

SEQ ID NO: 162895 - DNA, 9 bp, Unknown
  misc_feature (1)..( 9): Result.004 file - promoters50/1030821
gaaaacaaa

SEQ ID NO: 162896 - DNA, 9 bp, Unknown
  misc_feature (1)..( 9): Result.004 file - promoters50/1030821
caatccaaa

SEQ ID NO: 162897 - DNA, 9 bp, Unknown
  misc_feature (1)..( 9): Result.004 file - promoters50/1030821
taaactaat

SEQ ID NO: 162898 - DNA, 10 bp, Unknown
  misc_feature (1)..( 10): Result.004 file - promoters50/1030821
ctatccgaag

SEQ ID NO: 162899 - DNA, 10 bp, Unknown
  misc_feature (1)..( 10): Result.004 file - promoters50/1030821
atatcgaaaa

SEQ ID NO: 162900 - DNA, 10 bp, Unknown
  misc_feature (1)..( 10): Result.004 file - promoters50/1030821
atattttttt

SEQ ID NO: 162901 - DNA, 10 bp, Unknown
  misc_feature (1)..( 10): Result.004 file - promoters50/1030821
gtattgtttc

SEQ ID NO: 162902 - DNA, 10 bp, Unknown
  misc_feature (1)..( 10): Result.004 file - promoters50/1030821
aaatttttgc

SEQ ID NO: 162903 - DNA, 11 bp, Unknown
  misc_feature (1)..( 11): Result.004 file - promoters50/1030821
ttgttttctta

SEQ ID NO: 162904 - DNA, 11 bp, Unknown
  misc_feature (1)..( 11): Result.004 file - promoters50/1030821
gtattgcagag

SEQ ID NO: 162905 - DNA, 11 bp, Unknown
  misc_feature (1)..( 11): Result.004 file - promoters50/1030916
taattttgcat

SEQ ID NO: 162906 - DNA, 13 bp, Unknown
  misc_feature (1)..( 13): Result.004 file - promoters50/1030916
atttcaaaaacgt

SEQ ID NO: 162907 - DNA, 13 bp, Unknown
  misc_feature (1)..( 13): Result.004 file - promoters50/1030916
gggtcaaaatctg

SEQ ID NO: 162908 - DNA, 13 bp, Unknown
  misc_feature (1)..( 13): Result.004 file - promoters50/1030916
atttccaaagcaa

SEQ ID NO: 162909 - DNA, 13 bp, Unknown
  misc_feature (1)..( 13): Result.004 file - promoters50/1030916
ggagcaaaaacgt

SEQ ID NO: 162910 - DNA, 13 bp, Unknown
  misc_feature (1)..( 13): Result.004 file - promoters50/1030916
aatacaaaataat

SEQ ID NO: 162911 - DNA, 13 bp, Unknown
  misc_feature (1)..( 13): Result.004 file - promoters50/1030916
aaatcataattaa

SEQ ID NO: 162912 - DNA, 16 bp, Unknown
  misc_feature (1)..( 16): Result.004 file - promoters50/1030916
acaagaaagtactaaa

SEQ ID NO: 162913 - DNA, 16 bp, Unknown
  misc_feature (1)..( 16): Result.004 file - promoters50/1030916
gttgttttttactaac

SEQ ID NO: 162914 - DNA, 16 bp, Unknown
  misc_feature (1)..( 16): Result.004 file - promoters50/1030916
aatcaattttaataac

SEQ ID NO: 162915 - DNA, 16 bp, Unknown
  misc_feature (1)..( 16): Result.004 file - promoters50/1030916
ttttccttttaaaaag

SEQ ID NO: 162916 - DNA, 16 bp, Unknown
  misc_feature (1)..( 16): Result.004 file - promoters50/1030916
ttttgcttttaagata

SEQ ID NO: 162917 - DNA, 16 bp, Unknown
  misc_feature (1)..( 16): Result.004 file - promoters50/1030916
taaaccgattgcttca

SEQ ID NO: 162918 - DNA, 12 bp, Unknown
  misc_feature (1)..( 12): Result.004 file - promoters50/1030916
gataactgtcat

SEQ ID NO: 162919 - DNA, 12 bp, Unknown
  misc_feature (1)..( 12): Result.004 file - promoters50/1030916
ggtaattgtagt

SEQ ID NO: 162920 - DNA, 12 bp, Unknown
  misc_feature (1)..( 12): Result.004 file - promoters50/1030916
tttaattgttat

SEQ ID NO: 162921 - DNA, 12 bp, Unknown
  misc_feature (1)..( 12): Result.004 file - promoters50/1030916
gttaattgcagt

SEQ ID NO: 162922 - DNA, 12 bp, Unknown
  misc_feature (1)..( 12): Result.004 file - promoters50/1030916
attacttgattc

SEQ ID NO: 162923 - DNA, 12 bp, Unknown
  misc_feature (1)..( 12): Result.004 file - promoters50/1030916
atttcttcagct

SEQ ID NO: 162924 - DNA, 12 bp, Unknown
  misc_feature (1)..( 12): Result.004 file - promoters50/1030916
aaatattgtaag

SEQ ID NO: 162925 - DNA, 8 bp, Unknown
  misc_feature (1)..( 8): Result.004 file - promoters50/1030916
tcaaaatc

SEQ ID NO: 162926 - DNA, 8 bp, Unknown
  misc_feature (1)..( 8): Result.004 file - promoters50/1030916
ttaaaatc

SEQ ID NO: 162927 - DNA, 8 bp, Unknown
  misc_feature (1)..( 8): Result.004 file - promoters50/1030916
acaaaata

SEQ ID NO: 162928 - DNA, 8 bp, Unknown
  misc_feature (1)..( 8): Result.004 file - promoters50/1030916
tcataatt

SEQ ID NO: 162929 - DNA, 8 bp, Unknown
  misc_feature (1)..( 8): Result.004 file - promoters50/1030916
ttataatg

SEQ ID NO: 162930 - DNA, 8 bp, Unknown
  misc_feature (1)..( 8): Result.004 file - promoters50/1030916
ttacaata

SEQ ID NO: 162931 - DNA, 12 bp, Unknown
  misc_feature (1)..( 12): Result.004 file - promoters50/1030916
gttaattgcagt

SEQ ID NO: 162932 - DNA, 12 bp, Unknown
  misc_feature (1)..( 12): Result.004 file - promoters50/1030916
attacttgattc

SEQ ID NO: 162933 - DNA, 12 bp, Unknown
  misc_feature (1)..( 12): Result.004 file - promoters50/1030916
ggtaattgtagt

SEQ ID NO: 162934 - DNA, 12 bp, Unknown
  misc_feature (1)..( 12): Result.004 file - promoters50/1030916
tttaattgttat

SEQ ID NO: 162935 - DNA, 12 bp, Unknown
  misc_feature (1)..( 12): Result.004 file - promoters50/1030916
atttcttcagct

SEQ ID NO: 162936 - DNA, 12 bp, Unknown
  misc_feature (1)..( 12): Result.004 file - promoters50/1030918
aaatattgtaag

SEQ ID NO: 162937 - DNA, 8 bp, Unknown
  misc_feature (1)..( 8): Result.004 file - promoters50/1030918
cttaatga

SEQ ID NO: 162938 - DNA, 8 bp, Unknown
  misc_feature (1)..( 8): Result.004 file - promoters50/1030918
tttattga

SEQ ID NO: 162939 - DNA, 8 bp, Unknown
  misc_feature (1)..( 8): Result.004 file - promoters50/1030918
tttatttg

SEQ ID NO: 162940 - DNA, 8 bp, Unknown
  misc_feature (1)..( 8): Result.004 file - promoters50/1030933
tttattcg

SEQ ID NO: 162941 - DNA, 14 bp, Unknown
  misc_feature (1)..( 14): Result.004 file - promoters50/1030933
ataagataaggcgg

SEQ ID NO: 162942 - DNA, 14 bp, Unknown
  misc_feature (1)..( 14): Result.004 file - promoters50/1030933
agaagatactaata

SEQ ID NO: 162943 - DNA, 14 bp, Unknown
  misc_feature (1)..( 14): Result.004 file - promoters50/1030933
aaaagatcctattt

SEQ ID NO: 162944 - DNA, 14 bp, Unknown
  misc_feature (1)..( 14): Result.004 file - promoters50/1030933
agaagatgctaaac

SEQ ID NO: 162945 - DNA, 14 bp, Unknown
  misc_feature (1)..( 14): Result.004 file - promoters50/1030933
tttgaatcctataa

SEQ ID NO: 162946 - DNA, 14 bp, Unknown
  misc_feature (1)..( 14): Result.004 file - promoters50/1030940
tgtcaatgctgaac

SEQ ID NO: 162947 - DNA, 10 bp, Unknown
  misc_feature (1)..( 10): Result.004 file - promoters50/1030940
taaaaagtaa

SEQ ID NO: 162948 - DNA, 10 bp, Unknown
  misc_feature (1)..( 10): Result.004 file - promoters50/1030940
acaaatgtat

SEQ ID NO: 162949 - DNA, 10 bp, Unknown
  misc_feature (1)..( 10): Result.004 file - promoters50/1030940
ttcaatttat

SEQ ID NO: 162950 - DNA, 10 bp, Unknown
  misc_feature (1)..( 10): Result.004 file - promoters50/1030940
ccaaatgcga

SEQ ID NO: 162951 - DNA, 10 bp, Unknown
  misc_feature (1)..( 10): Result.004 file - promoters50/1030940
tttaatttat

SEQ ID NO: 162952 - DNA, 10 bp, Unknown
  misc_feature (1)..( 10): Result.004 file - promoters50/1030940
ttaaattatt

SEQ ID NO: 162953 - DNA, 11 bp, Unknown
  misc_feature (1)..( 11): Result.004 file - promoters50/1030940
caagatatttt

SEQ ID NO: 162954 - DNA, 11 bp, Unknown
  misc_feature (1)..( 11): Result.004 file - promoters50/1030940
caaaatatctt

SEQ ID NO: 162955 - DNA, 11 bp, Unknown
  misc_feature (1)..( 11): Result.004 file - promoters50/1030940
taaattatgtt

SEQ ID NO: 162956 - DNA, 11 bp, Unknown
  misc_feature (1)..( 11): Result.004 file - promoters50/1030940
tgaattttgtt

SEQ ID NO: 162957 - DNA, 11 bp, Unknown
  misc_feature (1)..( 11): Result.004 file - promoters50/1030940
ataaagatcct

SEQ ID NO: 162958 - DNA, 11 bp, Unknown
  misc_feature (1)..( 11): Result.004 file - promoters50/1030940
aaaatttttct

SEQ ID NO: 162959 - DNA, 11 bp, Unknown
  misc_feature (1)..( 11): Result.004 file - promoters50/1030940
aaaaataagaa

SEQ ID NO: 162960 - DNA, 10 bp, Unknown
  misc_feature (1)..( 10): Result.004 file - promoters50/1030940
gaaaagagaa

SEQ ID NO: 162961 - DNA, 10 bp, Unknown
  misc_feature (1)..( 10): Result.004 file - promoters50/1030940
aaaaagaaat

SEQ ID NO: 162962 - DNA, 11 bp, Unknown
  misc_feature (1)..( 11): Result.004 file - promoters50/1030940
aaaatagaaat

SEQ ID NO: 162963 - DNA, 11 bp, Unknown
  misc_feature (1)..( 11): Result.004 file - promoters50/1030940
tatatataaaa

SEQ ID NO: 162964 - DNA, 11 bp, Unknown
  misc_feature (1)..( 11): Result.004 file - promoters50/1030940
gaagtatgtgt

SEQ ID NO: 162965 - DNA, 11 bp, Unknown
  misc_feature (1)..( 11): Result.004 file - promoters50/1030940
aaaaaatacag

SEQ ID NO: 162966 - DNA, 12 bp, Unknown
  misc_feature (1)..( 12): Result.004 file - promoters50/1030940
gaagaaatttat

SEQ ID NO: 162967 - DNA, 12 bp, Unknown
  misc_feature (1)..( 12): Result.004 file - promoters50/1030940
aaagaaatgtag

SEQ ID NO: 162968 - DNA, 12 bp, Unknown
  misc_feature (1)..( 12): Result.004 file - promoters50/1030940
atagaaatatgt

SEQ ID NO: 162969 - DNA, 12 bp, Unknown
  misc_feature (1)..( 12): Result.004 file - promoters50/1030940
gaaaaaatacag

SEQ ID NO: 162970 - DNA, 12 bp, Unknown
  misc_feature (1)..( 12): Result.004 file - promoters50/1030940
actgaattttgt

SEQ ID NO: 162971 - DNA, 12 bp, Unknown
  misc_feature (1)..( 12): Result.004 file - promoters50/1030940
atataaaaattt

SEQ ID NO: 162972 - DNA, 12 bp, Unknown
  misc_feature (1)..( 12): Result.004 file - promoters50/1030940
ctggaagtatgt

SEQ ID NO: 162973 - DNA, 20 bp, Unknown
  misc_feature (1)..( 20): Result.004 file - promoters50/1030940
gttattattatatttgaaat

SEQ ID NO: 162974 - DNA, 20 bp, Unknown
  misc_feature (1)..( 20): Result.004 file - promoters50/1030940
caaacttttatttttgttgg

SEQ ID NO: 162975 - DNA, 20 bp, Unknown
  misc_feature (1)..( 20): Result.004 file - promoters50/1030940
ttgggttttagattatgcaa

SEQ ID NO: 162976 - DNA, 20 bp, Unknown
  misc_feature (1)..( 20): Result.004 file - promoters50/1030940
cttttgatttcatttgatca

SEQ ID NO: 162977 - DNA, 20 bp, Unknown
  misc_feature (1)..( 20): Result.004 file - promoters50/1030940
caaatttttacttttaacaa

SEQ ID NO: 162978 - DNA, 20 bp, Unknown
  misc_feature (1)..( 20): Result.004 file - promoters50/1030940
aagaaaaaaccgtttgatca

SEQ ID NO: 162979 - DNA, 17 bp, Unknown
  misc_feature (1)..( 17): Result.004 file - promoters50/1030940
aaattatgttattatta

SEQ ID NO: 162980 - DNA, 17 bp, Unknown
  misc_feature (1)..( 17): Result.004 file - promoters50/1030940
ttcaacacaaattttta

SEQ ID NO: 162981 - DNA, 16 bp, Unknown
  misc_feature (1)..( 16): Result.004 file - promoters50/1030940
caaacttttatttttg

SEQ ID NO: 162982 - DNA, 16 bp, Unknown
  misc_feature (1)..( 16): Result.004 file - promoters50/1030940
atgcttttgatttcat

SEQ ID NO: 162983 - DNA, 17 bp, Unknown
  misc_feature (1)..( 17): Result.004 file - promoters50/1030940
tgggttttagattatgc

SEQ ID NO: 162984 - DNA, 17 bp, Unknown
  misc_feature (1)..( 17): Result.004 file - promoters50/1030956
aaaccgtttgatcatgt

SEQ ID NO: 162985 - DNA, 8 bp, Unknown
  misc_feature (1)..( 8): Result.004 file - promoters50/1030956
tttttaat

SEQ ID NO: 162986 - DNA, 8 bp, Unknown
  misc_feature (1)..( 8): Result.004 file - promoters50/1030956
tttttaac

SEQ ID NO: 162987 - DNA, 8 bp, Unknown
  misc_feature (1)..( 8): Result.004 file - promoters50/1030956
ttttgatc

SEQ ID NO: 162988 - DNA, 9 bp, Unknown
  misc_feature (1)..( 9): Result.004 file - promoters50/1030956
tttcttact

SEQ ID NO: 162989 - DNA, 9 bp, Unknown
  misc_feature (1)..( 9): Result.004 file - promoters50/1030956
aaaacaaaa

SEQ ID NO: 162990 - DNA, 9 bp, Unknown
  misc_feature (1)..( 9): Result.004 file - promoters50/1030956
aaatcaatg

SEQ ID NO: 162991 - DNA, 9 bp, Unknown
  misc_feature (1)..( 9): Result.004 file - promoters50/1030956
taatcaaat

SEQ ID NO: 162992 - DNA, 9 bp, Unknown
  misc_feature (1)..( 9): Result.004 file - promoters50/1030956
caataaaat

SEQ ID NO: 162993 - DNA, 12 bp, Unknown
  misc_feature (1)..( 12): Result.004 file - promoters50/1030956
aattatgacaat

SEQ ID NO: 162994 - DNA, 12 bp, Unknown
  misc_feature (1)..( 12): Result.004 file - promoters50/1030956
aattttgaaaag

SEQ ID NO: 162995 - DNA, 12 bp, Unknown
  misc_feature (1)..( 12): Result.004 file - promoters50/1030956
agatatgacaat

SEQ ID NO: 162996 - DNA, 12 bp, Unknown
  misc_feature (1)..( 12): Result.004 file - promoters50/1030956
ttgtataacaac

SEQ ID NO: 162997 - DNA, 12 bp, Unknown
  misc_feature (1)..( 12): Result.004 file - promoters50/1030956
ccgactaaggta

SEQ ID NO: 162998 - DNA, 12 bp, Unknown
  misc_feature (1)..( 12): Result.004 file - promoters50/1030956
acgaataatgta

SEQ ID NO: 162999 - DNA, 12 bp, Unknown
  misc_feature (1)..( 12): Result.004 file - promoters50/1030956
taaacttaggaa

SEQ ID NO: 163000 - DNA, 12 bp, Unknown
  misc_feature (1)..( 12): Result.004 file - promoters50/1030956
ctaactaattca

SEQ ID NO: 163001 - DNA, 12 bp, Unknown
  misc_feature (1)..( 12): Result.004 file - promoters50/1030956
ctaaataaagca

SEQ ID NO: 163002 - DNA, 7 bp, Unknown
  misc_feature (1)..( 7): Result.004 file - promoters50/1030956
aataaaa

SEQ ID NO: 163003 - DNA, 7 bp, Unknown
  misc_feature (1)..( 7): Result.004 file - promoters50/1030956
aataaaa

SEQ ID NO: 163004 - DNA, 7 bp, Unknown
  misc_feature (1)..( 7): Result.004 file - promoters50/1030956
aatcaaa

SEQ ID NO: 163005 - DNA, 7 bp, Unknown
  misc_feature (1)..( 7): Result.004 file - promoters50/1030956
aatcaat

SEQ ID NO: 163006 - DNA, 7 bp, Unknown
  misc_feature (1)..( 7): Result.004 file - promoters50/1030956
aatataa

SEQ ID NO: 163007 - DNA, 7 bp, Unknown
  misc_feature (1)..( 7): Result.004 file - promoters50/1030956
tatataa

SEQ ID NO: 163008 - DNA, 7 bp, Unknown
  misc_feature (1)..( 7): Result.004 file - promoters50/1030956
aatataa

SEQ ID NO: 163009 - DNA, 7 bp, Unknown
  misc_feature (1)..( 7): Result.004 file - promoters50/1030956
tatatat

SEQ ID NO: 163010 - DNA, 12 bp, Unknown
  misc_feature (1)..( 12): Result.004 file - promoters50/1030956
taatcaactatt

SEQ ID NO: 163011 - DNA, 12 bp, Unknown
  misc_feature (1)..( 12): Result.004 file - promoters50/1030956
aaaacaaatatc

SEQ ID NO: 163012 - DNA, 12 bp, Unknown
  misc_feature (1)..( 12): Result.004 file - promoters50/1030956
aaaacgaataat

SEQ ID NO: 163013 - DNA, 12 bp, Unknown
  misc_feature (1)..( 12): Result.004 file - promoters50/1031035
cggataaataac

SEQ ID NO: 163014 - DNA, 10 bp, Unknown
  misc_feature (1)..( 10): Result.004 file - promoters50/1031035
acaaacaaaa

SEQ ID NO: 163015 - DNA, 10 bp, Unknown
  misc_feature (1)..( 10): Result.004 file - promoters50/1031035
acagacaaaa

SEQ ID NO: 163016 - DNA, 10 bp, Unknown
  misc_feature (1)..( 10): Result.004 file - promoters50/1031035
acttacaaaa

SEQ ID NO: 163017 - DNA, 7 bp, Unknown
  misc_feature (1)..( 7): Result.004 file - promoters50/1031035
tttgatt

SEQ ID NO: 163018 - DNA, 7 bp, Unknown
  misc_feature (1)..( 7): Result.004 file - promoters50/1031035
attgatt

SEQ ID NO: 163019 - DNA, 8 bp, Unknown
  misc_feature (1)..( 8): Result.004 file - promoters50/1031035
tttggatc

SEQ ID NO: 163020 - DNA, 7 bp, Unknown
  misc_feature (1)..( 7): Result.004 file - promoters50/1031035
tcaaaaa

SEQ ID NO: 163021 - DNA, 7 bp, Unknown
  misc_feature (1)..( 7): Result.004 file - promoters50/1031035
acaaaaa

SEQ ID NO: 163022 - DNA, 7 bp, Unknown
  misc_feature (1)..( 7): Result.004 file - promoters50/1031045
acaaaag

SEQ ID NO: 163023 - DNA, 9 bp, Unknown
  misc_feature (1)..( 9): Result.004 file - promoters50/1031045
acatttaaa

SEQ ID NO: 163024 - DNA, 9 bp, Unknown
  misc_feature (1)..( 9): Result.004 file - promoters50/1031045
acattaaaa

SEQ ID NO: 163025 - DNA, 9 bp, Unknown
  misc_feature (1)..( 9): Result.004 file - promoters50/1031045
tcatttatt

SEQ ID NO: 163026 - DNA, 8 bp, Unknown
  misc_feature (1)..( 8): Result.004 file - promoters50/1031045
ttcaaaaa

SEQ ID NO: 163027 - DNA, 8 bp, Unknown
  misc_feature (1)..( 8): Result.004 file - promoters50/1031045
ttccaaaa

SEQ ID NO: 163028 - DNA, 8 bp, Unknown
  misc_feature (1)..( 8): Result.004 file - promoters50/1031048
tcccaaaa

SEQ ID NO: 163029 - DNA, 9 bp, Unknown
  misc_feature (1)..( 9): Result.004 file - promoters50/1031048
aaagttatg

SEQ ID NO: 163030 - DNA, 9 bp, Unknown
  misc_feature (1)..( 9): Result.004 file - promoters50/1031048
aaaattagc

SEQ ID NO: 163031 - DNA, 9 bp, Unknown
  misc_feature (1)..( 9): Result.004 file - promoters50/1031048
aaaatgttg

SEQ ID NO: 163032 - DNA, 9 bp, Unknown
  misc_feature (1)..( 9): Result.004 file - promoters50/1031048
gaaattaaa

SEQ ID NO: 163033 - DNA, 9 bp, Unknown
  misc_feature (1)..( 9): Result.004 file - promoters50/1031052
caaatcaaa

SEQ ID NO: 163034 - DNA, 10 bp, Unknown
  misc_feature (1)..( 10): Result.004 file - promoters50/1031052
ttgataaaag

SEQ ID NO: 163035 - DNA, 10 bp, Unknown
  misc_feature (1)..( 10): Result.004 file - promoters50/1031052
ttgctaaaaa

SEQ ID NO: 163036 - DNA, 10 bp, Unknown
  misc_feature (1)..( 10): Result.004 file - promoters50/1031052
gtgaaaaaaa

SEQ ID NO: 163037 - DNA, 10 bp, Unknown
  misc_feature (1)..( 10): Result.004 file - promoters50/1031052
atcataaaag

SEQ ID NO: 163038 - DNA, 10 bp, Unknown
  misc_feature (1)..( 10): Result.004 file - promoters50/1031052
ctgctaatgt

SEQ ID NO: 163039 - DNA, 11 bp, Unknown
  misc_feature (1)..( 11): Result.004 file - promoters50/1031052
gagaaaacaaa

SEQ ID NO: 163040 - DNA, 17 bp, Unknown
  misc_feature (1)..( 17): Result.004 file - promoters50/1031052
catcttctaaaatctta

SEQ ID NO: 163041 - DNA, 17 bp, Unknown
  misc_feature (1)..( 17): Result.004 file - promoters50/1031052
tgccttctaggctgagt

SEQ ID NO: 163042 - DNA, 17 bp, Unknown
  misc_feature (1)..( 17): Result.004 file - promoters50/1031052
ctatttcaaaaatactt

SEQ ID NO: 163043 - DNA, 17 bp, Unknown
  misc_feature (1)..( 17): Result.004 file - promoters50/1031052
catcttcaaaattatat

SEQ ID NO: 163044 - DNA, 17 bp, Unknown
  misc_feature (1)..( 17): Result.004 file - promoters50/1031052
tgccgtcttggttggaa

SEQ ID NO: 163045 - DNA, 17 bp, Unknown
  misc_feature (1)..( 17): Result.004 file - promoters50/1031070
ttttgctaaaaatcctt

SEQ ID NO: 163046 - DNA, 9 bp, Unknown
  misc_feature (1)..( 9): Result.004 file - promoters50/1031070
tcgatttgg

SEQ ID NO: 163047 - DNA, 9 bp, Unknown
  misc_feature (1)..( 9): Result.004 file - promoters50/1031070
ttgatttgt

SEQ ID NO: 163048 - DNA, 9 bp, Unknown
  misc_feature (1)..( 9): Result.004 file - promoters50/1031070
ttgatctgt

SEQ ID NO: 163049 - DNA, 12 bp, Unknown
  misc_feature (1)..( 12): Result.004 file - promoters50/1031070
tttaaagattaa

SEQ ID NO: 163050 - DNA, 12 bp, Unknown
  misc_feature (1)..( 12): Result.004 file - promoters50/1031070
tttagagatgtt

SEQ ID NO: 163051 - DNA, 12 bp, Unknown
  misc_feature (1)..( 12): Result.004 file - promoters50/1031070
taagcagatatg

SEQ ID NO: 163052 - DNA, 8 bp, Unknown
  misc_feature (1)..( 8): Result.004 file - promoters50/1031070
gtttttct

SEQ ID NO: 163053 - DNA, 8 bp, Unknown
  misc_feature (1)..( 8): Result.004 file - promoters50/1031070
atttctct

SEQ ID NO: 163054 - DNA, 8 bp, Unknown
  misc_feature (1)..( 8): Result.004 file - promoters50/1031074
gttattcg

SEQ ID NO: 163055 - DNA, 8 bp, Unknown
  misc_feature (1)..( 8): Result.004 file - promoters50/1031074
taataaaa

SEQ ID NO: 163056 - DNA, 8 bp, Unknown
  misc_feature (1)..( 8): Result.004 file - promoters50/1031074
taatgaaa

SEQ ID NO: 163057 - DNA, 8 bp, Unknown
  misc_feature (1)..( 8): Result.004 file - promoters50/1031084
gtatgaaa

SEQ ID NO: 163058 - DNA, 9 bp, Unknown
  misc_feature (1)..( 9): Result.004 file - promoters50/1031084
tagagaatg

SEQ ID NO: 163059 - DNA, 9 bp, Unknown
  misc_feature (1)..( 9): Result.004 file - promoters50/1031084
tagacaatg

SEQ ID NO: 163060 - DNA, 9 bp, Unknown
  misc_feature (1)..( 9): Result.004 file - promoters50/1031084
tagagaata

SEQ ID NO: 163061 - DNA, 8 bp, Unknown
  misc_feature (1)..( 8): Result.004 file - promoters50/1031084
taataagt

SEQ ID NO: 163062 - DNA, 8 bp, Unknown
  misc_feature (1)..( 8): Result.004 file - promoters50/1031084
caatgagt

SEQ ID NO: 163063 - DNA, 8 bp, Unknown
  misc_feature (1)..( 8): Result.004 file - promoters50/1031084
taataaaa

SEQ ID NO: 163064 - DNA, 12 bp, Unknown
  misc_feature (1)..( 12): Result.004 file - promoters50/1031084
aaaatagaaaaa

SEQ ID NO: 163065 - DNA, 12 bp, Unknown
  misc_feature (1)..( 12): Result.004 file - promoters50/1031084
gaaacagagaaa

SEQ ID NO: 163066 - DNA, 12 bp, Unknown
  misc_feature (1)..( 12): Result.004 file - promoters50/1031084
aaaatactttaa

SEQ ID NO: 163067 - DNA, 7 bp, Unknown
  misc_feature (1)..( 7): Result.004 file - promoters50/1031084
atcaaaa

SEQ ID NO: 163068 - DNA, 7 bp, Unknown
  misc_feature (1)..( 7): Result.004 file - promoters50/1031084
atcaaag

SEQ ID NO: 163069 - DNA, 7 bp, Unknown
  misc_feature (1)..( 7): Result.004 file - promoters50/1031084
ttcaaaa

SEQ ID NO: 163070 - DNA, 7 bp, Unknown
  misc_feature (1)..( 7): Result.004 file - promoters50/1031084
tcaaaag

SEQ ID NO: 163071 - DNA, 7 bp, Unknown
  misc_feature (1)..( 7): Result.004 file - promoters50/1031084
acaaaag

SEQ ID NO: 163072 - DNA, 7 bp, Unknown
  misc_feature (1)..( 7): Result.004 file - promoters50/1031084
tcaaaaa

SEQ ID NO: 163073 - DNA, 6 bp, Unknown
  misc_feature (1)..( 6): Result.004 file - promoters50/1031084
attaaa

SEQ ID NO: 163074 - DNA, 6 bp, Unknown
  misc_feature (1)..( 6): Result.004 file - promoters50/1031084
attaaa

SEQ ID NO: 163075 - DNA, 7 bp, Unknown
  misc_feature (1)..( 7): Result.004 file - promoters50/1031084
attgaaa

SEQ ID NO: 163076 - DNA, 7 bp, Unknown
  misc_feature (1)..( 7): Result.004 file - promoters50/1031084
aaaacca

SEQ ID NO: 163077 - DNA, 7 bp, Unknown
  misc_feature (1)..( 7): Result.004 file - promoters50/1031084
taaacca

SEQ ID NO: 163078 - DNA, 7 bp, Unknown
  misc_feature (1)..( 7): Result.004 file - promoters50/1031084
taatcca

SEQ ID NO: 163079 - DNA, 9 bp, Unknown
  misc_feature (1)..( 9): Result.004 file - promoters50/1031084
acaagcagt

SEQ ID NO: 163080 - DNA, 9 bp, Unknown
  misc_feature (1)..( 9): Result.004 file - promoters50/1031084
gaaagaagt

SEQ ID NO: 163081 - DNA, 9 bp, Unknown
  misc_feature (1)..( 9): Result.004 file - promoters50/1031103
acatgcatg

SEQ ID NO: 163082 - DNA, 12 bp, Unknown
  misc_feature (1)..( 12): Result.004 file - promoters50/1031103
gtagttatttca

SEQ ID NO: 163083 - DNA, 12 bp, Unknown
  misc_feature (1)..( 12): Result.004 file - promoters50/1031103
tgtgttatttca

SEQ ID NO: 163084 - DNA, 12 bp, Unknown
  misc_feature (1)..( 12): Result.004 file - promoters50/1031198
tgtgatattgat

SEQ ID NO: 163085 - DNA, 8 bp, Unknown
  misc_feature (1)..( 8): Result.004 file - promoters50/1031198
ttactaaa

SEQ ID NO: 163086 - DNA, 8 bp, Unknown
  misc_feature (1)..( 8): Result.004 file - promoters50/1031198
ttactaaa

SEQ ID NO: 163087 - DNA, 8 bp, Unknown
  misc_feature (1)..( 8): Result.004 file - promoters50/1031198
ttactata

SEQ ID NO: 163088 - DNA, 11 bp, Unknown
  misc_feature (1)..( 11): Result.004 file - promoters50/1031198
tcaaatgaaat

SEQ ID NO: 163089 - DNA, 11 bp, Unknown
  misc_feature (1)..( 11): Result.004 file - promoters50/1031198
caaaatgaaca

SEQ ID NO: 163090 - DNA, 11 bp, Unknown
  misc_feature (1)..( 11): Result.004 file - promoters50/1031198
tcatatgaaat

SEQ ID NO: 163091 - DNA, 7 bp, Unknown
  misc_feature (1)..( 7): Result.004 file - promoters50/1031198
aatttgt

SEQ ID NO: 163092 - DNA, 7 bp, Unknown
  misc_feature (1)..( 7): Result.004 file - promoters50/1031198
aatatgt

SEQ ID NO: 163093 - DNA, 7 bp, Unknown
  misc_feature (1)..( 7): Result.004 file - promoters50/1031198
aatttgg

SEQ ID NO: 163094 - DNA, 9 bp, Unknown
  misc_feature (1)..( 9): Result.004 file - promoters50/1031198
tttgaatat

SEQ ID NO: 163095 - DNA, 9 bp, Unknown
  misc_feature (1)..( 9): Result.004 file - promoters50/1031198
aacgaatat

SEQ ID NO: 163096 - DNA, 9 bp, Unknown
  misc_feature (1)..( 9): Result.004 file - promoters50/1031198
tttgtataa

SEQ ID NO: 163097 - DNA, 14 bp, Unknown
  misc_feature (1)..( 14): Result.004 file - promoters50/1031198
ataagttattaaat

SEQ ID NO: 163098 - DNA, 14 bp, Unknown
  misc_feature (1)..( 14): Result.004 file - promoters50/1031198
ataatttaatcacg

SEQ ID NO: 163099 - DNA, 14 bp, Unknown
  misc_feature (1)..( 14): Result.004 file - promoters50/1031198
gacagttattaatc

SEQ ID NO: 163100 - DNA, 14 bp, Unknown
  misc_feature (1)..( 14): Result.004 file - promoters50/1031198
attagtgattcatc

SEQ ID NO: 163101 - DNA, 11 bp, Unknown
  misc_feature (1)..( 11): Result.004 file - promoters50/1031198
agttattaaat

SEQ ID NO: 163102 - DNA, 11 bp, Unknown
  misc_feature (1)..( 11): Result.004 file - promoters50/1031198
gactatgaaaa

SEQ ID NO: 163103 - DNA, 11 bp, Unknown
  misc_feature (1)..( 11): Result.004 file - promoters50/1031198
agttattaatc

SEQ ID NO: 163104 - DNA, 11 bp, Unknown
  misc_feature (1)..( 11): Result.004 file - promoters50/1031198
agtgattcatc

SEQ ID NO: 163105 - DNA, 8 bp, Unknown
  misc_feature (1)..( 8): Result.004 file - promoters50/1031198
taatatta

SEQ ID NO: 163106 - DNA, 8 bp, Unknown
  misc_feature (1)..( 8): Result.004 file - promoters50/1031198
taagatta

SEQ ID NO: 163107 - DNA, 8 bp, Unknown
  misc_feature (1)..( 8): Result.004 file - promoters50/1031198
taagattt

SEQ ID NO: 163108 - DNA, 9 bp, Unknown
  misc_feature (1)..( 9): Result.004 file - promoters50/1031198
ctaacaaga

SEQ ID NO: 163109 - DNA, 9 bp, Unknown
  misc_feature (1)..( 9): Result.004 file - promoters50/1031198
aaaacgaga

SEQ ID NO: 163110 - DNA, 9 bp, Unknown
  misc_feature (1)..( 9): Result.004 file - promoters50/1031198
ctaacaact

SEQ ID NO: 163111 - DNA, 8 bp, Unknown
  misc_feature (1)..( 8): Result.004 file - promoters50/1031198
acaagttt

SEQ ID NO: 163112 - DNA, 8 bp, Unknown
  misc_feature (1)..( 8): Result.004 file - promoters50/1031198
aaaagttt

SEQ ID NO: 163113 - DNA, 8 bp, Unknown
  misc_feature (1)..( 8): Result.004 file - promoters50/1031198
aaaagttc

SEQ ID NO: 163114 - DNA, 13 bp, Unknown
  misc_feature (1)..( 13): Result.004 file - promoters50/1031198
ataatttaatcac

SEQ ID NO: 163115 - DNA, 13 bp, Unknown
  misc_feature (1)..( 13): Result.004 file - promoters50/1031198
agttattaatcac

SEQ ID NO: 163116 - DNA, 13 bp, Unknown
  misc_feature (1)..( 13): Result.004 file - promoters50/1031198
agtgattcatctt

SEQ ID NO: 163117 - DNA, 12 bp, Unknown
  misc_feature (1)..( 12): Result.004 file - promoters50/1031198
caaacttcatct

SEQ ID NO: 163118 - DNA, 12 bp, Unknown
  misc_feature (1)..( 12): Result.004 file - promoters50/1031198
aaaagttcatct

SEQ ID NO: 163119 - DNA, 12 bp, Unknown
  misc_feature (1)..( 12): Result.004 file - promoters50/1031198
aaaagttttatt

SEQ ID NO: 163120 - DNA, 8 bp, Unknown
  misc_feature (1)..( 8): Result.004 file - promoters50/1031198
attgtttt

SEQ ID NO: 163121 - DNA, 8 bp, Unknown
  misc_feature (1)..( 8): Result.004 file - promoters50/1031198
attttttt

SEQ ID NO: 163122 - DNA, 8 bp, Unknown
  misc_feature (1)..( 8): Result.004 file - promoters50/1031208
ctttctta

SEQ ID NO: 163123 - DNA, 7 bp, Unknown
  misc_feature (1)..( 7): Result.004 file - promoters50/1031208
atttgtt

SEQ ID NO: 163124 - DNA, 7 bp, Unknown
  misc_feature (1)..( 7): Result.004 file - promoters50/1031208
ttttgtt

SEQ ID NO: 163125 - DNA, 7 bp, Unknown
  misc_feature (1)..( 7): Result.004 file - promoters50/1031208
ttttgta

SEQ ID NO: 163126 - DNA, 7 bp, Unknown
  misc_feature (1)..( 7): Result.004 file - promoters50/1031208
atatttg

SEQ ID NO: 163127 - DNA, 7 bp, Unknown
  misc_feature (1)..( 7): Result.004 file - promoters50/1031208
ttatttg

SEQ ID NO: 163128 - DNA, 7 bp, Unknown
  misc_feature (1)..( 7): Result.004 file - promoters50/1031208
ttatttc

SEQ ID NO: 163129 - DNA, 10 bp, Unknown
  misc_feature (1)..( 10): Result.004 file - promoters50/1031208
ttattcttaa

SEQ ID NO: 163130 - DNA, 10 bp, Unknown
  misc_feature (1)..( 10): Result.004 file - promoters50/1031208
ttattctcta

SEQ ID NO: 163131 - DNA, 10 bp, Unknown
  misc_feature (1)..( 10): Result.004 file - promoters50/1031208
tcattctcta

SEQ ID NO: 163132 - DNA, 11 bp, Unknown
  misc_feature (1)..( 11): Result.004 file - promoters50/1031208
aaaagaaaaaa

SEQ ID NO: 163133 - DNA, 11 bp, Unknown
  misc_feature (1)..( 11): Result.004 file - promoters50/1031208
tcaagtaaaga

SEQ ID NO: 163134 - DNA, 11 bp, Unknown
  misc_feature (1)..( 11): Result.004 file - promoters50/1031208
aaaaataaaaa

SEQ ID NO: 163135 - DNA, 8 bp, Unknown
  misc_feature (1)..( 8): Result.004 file - promoters50/1031208
aatttttg

SEQ ID NO: 163136 - DNA, 8 bp, Unknown
  misc_feature (1)..( 8): Result.004 file - promoters50/1031208
aatttttt

SEQ ID NO: 163137 - DNA, 8 bp, Unknown
  misc_feature (1)..( 8): Result.004 file - promoters50/1031208
cgtttttt

SEQ ID NO: 163138 - DNA, 10 bp, Unknown
  misc_feature (1)..( 10): Result.004 file - promoters50/1031208
tcaattacac

SEQ ID NO: 163139 - DNA, 10 bp, Unknown
  misc_feature (1)..( 10): Result.004 file - promoters50/1031208
tcaattaaaa

SEQ ID NO: 163140 - DNA, 10 bp, Unknown
  misc_feature (1)..( 10): Result.004 file - promoters50/1031225
ccaattcaaa

SEQ ID NO: 163141 - DNA, 7 bp, Unknown
  misc_feature (1)..( 7): Result.004 file - promoters50/1031225
ttttgaa

SEQ ID NO: 163142 - DNA, 7 bp, Unknown
  misc_feature (1)..( 7): Result.004 file - promoters50/1031225
ttttgat

SEQ ID NO: 163143 - DNA, 7 bp, Unknown
  misc_feature (1)..( 7): Result.004 file - promoters50/1031225
gtttgat

SEQ ID NO: 163144 - DNA, 10 bp, Unknown
  misc_feature (1)..( 10): Result.004 file - promoters50/1031225
aaaaatctac

SEQ ID NO: 163145 - DNA, 10 bp, Unknown
  misc_feature (1)..( 10): Result.004 file - promoters50/1031225
gattatctac

SEQ ID NO: 163146 - DNA, 10 bp, Unknown
  misc_feature (1)..( 10): Result.004 file - promoters50/1031267
gattagctaa

SEQ ID NO: 163147 - DNA, 9 bp, Unknown
  misc_feature (1)..( 9): Result.004 file - promoters50/1031267
tttgcttct

SEQ ID NO: 163148 - DNA, 9 bp, Unknown
  misc_feature (1)..( 9): Result.004 file - promoters50/1031267
tttgctgat

SEQ ID NO: 163149 - DNA, 9 bp, Unknown
  misc_feature (1)..( 9): Result.004 file - promoters50/1031267
tttactttg

SEQ ID NO: 163150 - DNA, 9 bp, Unknown
  misc_feature (1)..( 9): Result.004 file - promoters50/1031267
tttgatgat

SEQ ID NO: 163151 - DNA, 9 bp, Unknown
  misc_feature (1)..( 9): Result.004 file - promoters50/1031267
attaatttc

SEQ ID NO: 163152 - DNA, 9 bp, Unknown
  misc_feature (1)..( 9): Result.004 file - promoters50/1031267
attacttca

SEQ ID NO: 163153 - DNA, 8 bp, Unknown
  misc_feature (1)..( 8): Result.004 file - promoters50/1031267
ttaatttc

SEQ ID NO: 163154 - DNA, 10 bp, Unknown
  misc_feature (1)..( 10): Result.004 file - promoters50/1031267
gtttgattaa

SEQ ID NO: 163155 - DNA, 10 bp, Unknown
  misc_feature (1)..( 10): Result.004 file - promoters50/1031267
cttttattat

SEQ ID NO: 163156 - DNA, 10 bp, Unknown
  misc_feature (1)..( 10): Result.004 file - promoters50/1031267
gtttgatttg

SEQ ID NO: 163157 - DNA, 10 bp, Unknown
  misc_feature (1)..( 10): Result.004 file - promoters50/1031267
tgtttcttac

SEQ ID NO: 163158 - DNA, 10 bp, Unknown
  misc_feature (1)..( 10): Result.004 file - promoters50/1031267
tttacattta

SEQ ID NO: 163159 - DNA, 10 bp, Unknown
  misc_feature (1)..( 10): Result.004 file - promoters50/1031267
gtttgacata

SEQ ID NO: 163160 - DNA, 12 bp, Unknown
  misc_feature (1)..( 12): Result.004 file - promoters50/1031267
aaaaattgtaat

SEQ ID NO: 163161 - DNA, 12 bp, Unknown
  misc_feature (1)..( 12): Result.004 file - promoters50/1031267
aaaaatttttct

SEQ ID NO: 163162 - DNA, 12 bp, Unknown
  misc_feature (1)..( 12): Result.004 file - promoters50/1031267
tgaaattgaaat

SEQ ID NO: 163163 - DNA, 12 bp, Unknown
  misc_feature (1)..( 12): Result.004 file - promoters50/1031267
ttaaatttacgc

SEQ ID NO: 163164 - DNA, 12 bp, Unknown
  misc_feature (1)..( 12): Result.004 file - promoters50/1031267
taaacttttaaa

SEQ ID NO: 163165 - DNA, 12 bp, Unknown
  misc_feature (1)..( 12): Result.004 file - promoters50/1031267
aaaacttcgtct

SEQ ID NO: 163166 - DNA, 13 bp, Unknown
  misc_feature (1)..( 13): Result.004 file - promoters50/1031267
ttaacaaaacaat

SEQ ID NO: 163167 - DNA, 13 bp, Unknown
  misc_feature (1)..( 13): Result.004 file - promoters50/1031267
ttaagaaaataaa

SEQ ID NO: 163168 - DNA, 13 bp, Unknown
  misc_feature (1)..( 13): Result.004 file - promoters50/1031267
caaccaaaagaat

SEQ ID NO: 163169 - DNA, 13 bp, Unknown
  misc_feature (1)..( 13): Result.004 file - promoters50/1031267
ttaacatgggtga

SEQ ID NO: 163170 - DNA, 13 bp, Unknown
  misc_feature (1)..( 13): Result.004 file - promoters50/1031267
gaaacaaagaaac

SEQ ID NO: 163171 - DNA, 13 bp, Unknown
  misc_feature (1)..( 13): Result.004 file - promoters50/1031267
ttacgaaattgtg

SEQ ID NO: 163172 - DNA, 14 bp, Unknown
  misc_feature (1)..( 14): Result.004 file - promoters50/1031267
aatgacataaattt

SEQ ID NO: 163173 - DNA, 14 bp, Unknown
  misc_feature (1)..( 14): Result.004 file - promoters50/1031267
tgagacctaagttt

SEQ ID NO: 163174 - DNA, 14 bp, Unknown
  misc_feature (1)..( 14): Result.004 file - promoters50/1031267
tgcaacaaaaacaa

SEQ ID NO: 163175 - DNA, 14 bp, Unknown
  misc_feature (1)..( 14): Result.004 file - promoters50/1031267
aataacatatgact

SEQ ID NO: 163176 - DNA, 14 bp, Unknown
  misc_feature (1)..( 14): Result.004 file - promoters50/1031267
tttaacaaaacaat

SEQ ID NO: 163177 - DNA, 14 bp, Unknown
  misc_feature (1)..( 14): Result.004 file - promoters50/1031267
tcaaacgaaaccaa

SEQ ID NO: 163178 - DNA, 19 bp, Unknown
  misc_feature (1)..( 19): Result.004 file - promoters50/1031267
tcaacacaaatttttactt

SEQ ID NO: 163179 - DNA, 19 bp, Unknown
  misc_feature (1)..( 19): Result.004 file - promoters50/1031267
atctagtttattgttacaa

SEQ ID NO: 163180 - DNA, 19 bp, Unknown
  misc_feature (1)..( 19): Result.004 file - promoters50/1031267
caaacttttatttttgttg

SEQ ID NO: 163181 - DNA, 19 bp, Unknown
  misc_feature (1)..( 19): Result.004 file - promoters50/1031267
tgaagtcatattcttaagc

SEQ ID NO: 163182 - DNA, 19 bp, Unknown
  misc_feature (1)..( 19): Result.004 file - promoters50/1031267
cccatattatcttttaagt

SEQ ID NO: 163183 - DNA, 19 bp, Unknown
  misc_feature (1)..( 19): Result.004 file - promoters50/1031267
gattcacgaggtttgaagt

SEQ ID NO: 163184 - DNA, 19 bp, Unknown
  misc_feature (1)..( 19): Result.004 file - promoters50/1031267
tttttgatgcttttgattt

SEQ ID NO: 163185 - DNA, 16 bp, Unknown
  misc_feature (1)..( 16): Result.004 file - promoters50/1031267
acaaatttttactttt

SEQ ID NO: 163186 - DNA, 16 bp, Unknown
  misc_feature (1)..( 16): Result.004 file - promoters50/1031267
acaaatctatcctttt

SEQ ID NO: 163187 - DNA, 16 bp, Unknown
  misc_feature (1)..( 16): Result.004 file - promoters50/1031267
tcaaacttttattttt

SEQ ID NO: 163188 - DNA, 16 bp, Unknown
  misc_feature (1)..( 16): Result.004 file - promoters50/1031267
attatcttttaagtat

SEQ ID NO: 163189 - DNA, 16 bp, Unknown
  misc_feature (1)..( 16): Result.004 file - promoters50/1031267
cgaggtttgaagtttg

SEQ ID NO: 163190 - DNA, 16 bp, Unknown
  misc_feature (1)..( 16): Result.004 file - promoters50/1031267
gatgcttttgatttca

SEQ ID NO: 163191 - DNA, 12 bp, Unknown
  misc_feature (1)..( 12): Result.004 file - promoters50/1031267
ttgttgttactt

SEQ ID NO: 163192 - DNA, 12 bp, Unknown
  misc_feature (1)..( 12): Result.004 file - promoters50/1031267
aggtttttattt

SEQ ID NO: 163193 - DNA, 12 bp, Unknown
  misc_feature (1)..( 12): Result.004 file - promoters50/1031267
aaatttttactt

SEQ ID NO: 163194 - DNA, 12 bp, Unknown
  misc_feature (1)..( 12): Result.004 file - promoters50/1031267
aaacttttaaat

SEQ ID NO: 163195 - DNA, 12 bp, Unknown
  misc_feature (1)..( 12): Result.004 file - promoters50/1031267
cactttctattt

SEQ ID NO: 163196 - DNA, 12 bp, Unknown
  misc_feature (1)..( 12): Result.004 file - promoters50/1031299
aaacttcgtctt

SEQ ID NO: 163197 - DNA, 7 bp, Unknown
  misc_feature (1)..( 7): Result.004 file - promoters50/1031299
taaacat

SEQ ID NO: 163198 - DNA, 7 bp, Unknown
  misc_feature (1)..( 7): Result.004 file - promoters50/1031299
taaacat

SEQ ID NO: 163199 - DNA, 7 bp, Unknown
  misc_feature (1)..( 7): Result.004 file - promoters50/1031299
aaaacat

SEQ ID NO: 163200 - DNA, 16 bp, Unknown
  misc_feature (1)..( 16): Result.004 file - promoters50/1031299
ttaactttacgttctt

SEQ ID NO: 163201 - DNA, 16 bp, Unknown
  misc_feature (1)..( 16): Result.004 file - promoters50/1031299
ttaactgataaaatat

SEQ ID NO: 163202 - DNA, 17 bp, Unknown
  misc_feature (1)..( 17): Result.004 file - promoters50/1031299
ataatctaattgataaa

SEQ ID NO: 163203 - DNA, 17 bp, Unknown
  misc_feature (1)..( 17): Result.004 file - promoters50/1031299
ttaatataagactaatc

SEQ ID NO: 163204 - DNA, 8 bp, Unknown
  misc_feature (1)..( 8): Result.004 file - promoters50/1031299
agatttta

SEQ ID NO: 163205 - DNA, 8 bp, Unknown
  misc_feature (1)..( 8): Result.004 file - promoters50/1031299
agatttta

SEQ ID NO: 163206 - DNA, 8 bp, Unknown
  misc_feature (1)..( 8): Result.004 file - promoters50/1031299
aaatttta

SEQ ID NO: 163207 - DNA, 8 bp, Unknown
  misc_feature (1)..( 8): Result.004 file - promoters50/1031299
aaatatat

SEQ ID NO: 163208 - DNA, 8 bp, Unknown
  misc_feature (1)..( 8): Result.004 file - promoters50/1031299
taatatat

SEQ ID NO: 163209 - DNA, 8 bp, Unknown
  misc_feature (1)..( 8): Result.004 file - promoters50/1031299
aaatatgc

SEQ ID NO: 163210 - DNA, 10 bp, Unknown
  misc_feature (1)..( 10): Result.004 file - promoters50/1031299
acactttttc

SEQ ID NO: 163211 - DNA, 10 bp, Unknown
  misc_feature (1)..( 10): Result.004 file - promoters50/1031299
acaattttta

SEQ ID NO: 163212 - DNA, 10 bp, Unknown
  misc_feature (1)..( 10): Result.004 file - promoters50/1031299
ttggttttta

SEQ ID NO: 163213 - DNA, 8 bp, Unknown
  misc_feature (1)..( 8): Result.004 file - promoters50/1031299
tttaaaat

SEQ ID NO: 163214 - DNA, 8 bp, Unknown
  misc_feature (1)..( 8): Result.004 file - promoters50/1031299
tgtaaaat

SEQ ID NO: 163215 - DNA, 8 bp, Unknown
  misc_feature (1)..( 8): Result.004 file - promoters50/1031299
tttaaaac

SEQ ID NO: 163216 - DNA, 7 bp, Unknown
  misc_feature (1)..( 7): Result.004 file - promoters50/1031299
aatgtta

SEQ ID NO: 163217 - DNA, 7 bp, Unknown
  misc_feature (1)..( 7): Result.004 file - promoters50/1031299
aatgttt

SEQ ID NO: 163218 - DNA, 7 bp, Unknown
  misc_feature (1)..( 7): Result.004 file - promoters50/1031299
aatctta

SEQ ID NO: 163219 - DNA, 16 bp, Unknown
  misc_feature (1)..( 16): Result.004 file - promoters50/1031299
taatttaactgataaa

SEQ ID NO: 163220 - DNA, 16 bp, Unknown
  misc_feature (1)..( 16): Result.004 file - promoters50/1031299
aaatttaatataagac

SEQ ID NO: 163221 - DNA, 16 bp, Unknown
  misc_feature (1)..( 16): Result.004 file - promoters50/1031299
taatctaattgataaa

SEQ ID NO: 163222 - DNA, 8 bp, Unknown
  misc_feature (1)..( 8): Result.004 file - promoters50/1031299
tataaata

SEQ ID NO: 163223 - DNA, 8 bp, Unknown
  misc_feature (1)..( 8): Result.004 file - promoters50/1031299
gatatata

SEQ ID NO: 163224 - DNA, 8 bp, Unknown
  misc_feature (1)..( 8): Result.004 file - promoters50/1031332
tataaata

SEQ ID NO: 163225 - DNA, 8 bp, Unknown
  misc_feature (1)..( 8): Result.004 file - promoters50/1031332
acatatgt

SEQ ID NO: 163226 - DNA, 8 bp, Unknown
  misc_feature (1)..( 8): Result.004 file - promoters50/1031332
acatttgt

SEQ ID NO: 163227 - DNA, 8 bp, Unknown
  misc_feature (1)..( 8): Result.004 file - promoters50/1031332
acatataa

SEQ ID NO: 163228 - DNA, 7 bp, Unknown
  misc_feature (1)..( 7): Result.004 file - promoters50/1031332
cattttc

SEQ ID NO: 163229 - DNA, 7 bp, Unknown
  misc_feature (1)..( 7): Result.004 file - promoters50/1031332
gattttc

SEQ ID NO: 163230 - DNA, 7 bp, Unknown
  misc_feature (1)..( 7): Result.004 file - promoters50/1031332
cattttg

SEQ ID NO: 163231 - DNA, 8 bp, Unknown
  misc_feature (1)..( 8): Result.004 file - promoters50/1031332
cggtataa

SEQ ID NO: 163232 - DNA, 8 bp, Unknown
  misc_feature (1)..( 8): Result.004 file - promoters50/1031332
aagtataa

SEQ ID NO: 163233 - DNA, 8 bp, Unknown
  misc_feature (1)..( 8): Result.004 file - promoters50/1031336
tattatat

SEQ ID NO: 163234 - DNA, 10 bp, Unknown
  misc_feature (1)..( 10): Result.004 file - promoters50/1031336
ttcttcttta

SEQ ID NO: 163235 - DNA, 10 bp, Unknown
  misc_feature (1)..( 10): Result.004 file - promoters50/1031336
ttcttgtttc

SEQ ID NO: 163236 - DNA, 10 bp, Unknown
  misc_feature (1)..( 10): Result.004 file - promoters50/1031336
aagatcttta

SEQ ID NO: 163237 - DNA, 10 bp, Unknown
  misc_feature (1)..( 10): Result.004 file - promoters50/1031336
aaaacaaaaa

SEQ ID NO: 163238 - DNA, 10 bp, Unknown
  misc_feature (1)..( 10): Result.004 file - promoters50/1031336
aaaacaaaat

SEQ ID NO: 163239 - DNA, 10 bp, Unknown
  misc_feature (1)..( 10): Result.004 file - promoters50/1031336
tcaacaaaaa

SEQ ID NO: 163240 - DNA, 10 bp, Unknown
  misc_feature (1)..( 10): Result.004 file - promoters50/1031336
agtaagggaa

SEQ ID NO: 163241 - DNA, 10 bp, Unknown
  misc_feature (1)..( 10): Result.004 file - promoters50/1031336
attaaaggaa

SEQ ID NO: 163242 - DNA, 10 bp, Unknown
  misc_feature (1)..( 10): Result.004 file - promoters50/1031344
attaaagaaa

SEQ ID NO: 163243 - DNA, 9 bp, Unknown
  misc_feature (1)..( 9): Result.004 file - promoters50/1031344
taattatta

SEQ ID NO: 163244 - DNA, 9 bp, Unknown
  misc_feature (1)..( 9): Result.004 file - promoters50/1031344
tgattttta

SEQ ID NO: 163245 - DNA, 9 bp, Unknown
  misc_feature (1)..( 9): Result.004 file - promoters50/1031344
taagtatta

SEQ ID NO: 163246 - DNA, 7 bp, Unknown
  misc_feature (1)..( 7): Result.004 file - promoters50/1031344
aaaattg

SEQ ID NO: 163247 - DNA, 7 bp, Unknown
  misc_feature (1)..( 7): Result.004 file - promoters50/1031344
aaatttg

SEQ ID NO: 163248 - DNA, 7 bp, Unknown
  misc_feature (1)..( 7): Result.004 file - promoters50/1031344
aaaatta

SEQ ID NO: 163249 - DNA, 9 bp, Unknown
  misc_feature (1)..( 9): Result.004 file - promoters50/1031344
ttaataaat

SEQ ID NO: 163250 - DNA, 9 bp, Unknown
  misc_feature (1)..( 9): Result.004 file - promoters50/1031344
ctaaaaaaa

SEQ ID NO: 163251 - DNA, 9 bp, Unknown
  misc_feature (1)..( 9): Result.004 file - promoters50/1031344
gtaattaat

SEQ ID NO: 163252 - DNA, 9 bp, Unknown
  misc_feature (1)..( 9): Result.004 file - promoters50/1031344
ctacgaaaa

SEQ ID NO: 163253 - DNA, 14 bp, Unknown
  misc_feature (1)..( 14): Result.004 file - promoters50/1031344
aaaaaattcatttc

SEQ ID NO: 163254 - DNA, 14 bp, Unknown
  misc_feature (1)..( 14): Result.004 file - promoters50/1031344
gtgatattcatttg

SEQ ID NO: 163255 - DNA, 14 bp, Unknown
  misc_feature (1)..( 14): Result.004 file - promoters50/1031344
gtgacattcagttg

SEQ ID NO: 163256 - DNA, 11 bp, Unknown
  misc_feature (1)..( 11): Result.004 file - promoters50/1031344
aaaactattta

SEQ ID NO: 163257 - DNA, 11 bp, Unknown
  misc_feature (1)..( 11): Result.004 file - promoters50/1031344
aaaactattta

SEQ ID NO: 163258 - DNA, 11 bp, Unknown
  misc_feature (1)..( 11): Result.004 file - promoters50/1031344
gaaactatctg

SEQ ID NO: 163259 - DNA, 8 bp, Unknown
  misc_feature (1)..( 8): Result.004 file - promoters50/1031344
ataagaag

SEQ ID NO: 163260 - DNA, 8 bp, Unknown
  misc_feature (1)..( 8): Result.004 file - promoters50/1031344
ataaaaag

SEQ ID NO: 163261 - DNA, 8 bp, Unknown
  misc_feature (1)..( 8): Result.004 file - promoters50/1031368
acaaaaag

SEQ ID NO: 163262 - DNA, 12 bp, Unknown
  misc_feature (1)..( 12): Result.004 file - promoters50/1031368
ttcgtggacaca

SEQ ID NO: 163263 - DNA, 12 bp, Unknown
  misc_feature (1)..( 12): Result.004 file - promoters50/1031368
gatttggagaca

SEQ ID NO: 163264 - DNA, 12 bp, Unknown
  misc_feature (1)..( 12): Result.004 file - promoters50/1031368
ttcgttgactaa

SEQ ID NO: 163265 - DNA, 7 bp, Unknown
  misc_feature (1)..( 7): Result.004 file - promoters50/1031368
ggactat

SEQ ID NO: 163266 - DNA, 7 bp, Unknown
  misc_feature (1)..( 7): Result.004 file - promoters50/1031368
tgactat

SEQ ID NO: 163267 - DNA, 7 bp, Unknown
  misc_feature (1)..( 7): Result.004 file - promoters50/1031368
tgattat

SEQ ID NO: 163268 - DNA, 9 bp, Unknown
  misc_feature (1)..( 9): Result.004 file - promoters50/1031368
cataaattc

SEQ ID NO: 163269 - DNA, 9 bp, Unknown
  misc_feature (1)..( 9): Result.004 file - promoters50/1031368
cataaattt

SEQ ID NO: 163270 - DNA, 9 bp, Unknown
  misc_feature (1)..( 9): Result.004 file - promoters50/1031386
tatatattt

SEQ ID NO: 163271 - DNA, 8 bp, Unknown
  misc_feature (1)..( 8): Result.004 file - promoters50/1031386
tatatatt

SEQ ID NO: 163272 - DNA, 8 bp, Unknown
  misc_feature (1)..( 8): Result.004 file - promoters50/1031386
tatatatc

SEQ ID NO: 163273 - DNA, 8 bp, Unknown
  misc_feature (1)..( 8): Result.004 file - promoters50/1031386
tatataaa

SEQ ID NO: 163274 - DNA, 8 bp, Unknown
  misc_feature (1)..( 8): Result.004 file - promoters50/1031386
tatttaaa

SEQ ID NO: 163275 - DNA, 8 bp, Unknown
  misc_feature (1)..( 8): Result.004 file - promoters50/1031390
tatataaa

SEQ ID NO: 163276 - DNA, 15 bp, Unknown
  misc_feature (1)..( 15): Result.004 file - promoters50/1031390
ggcggaaaatttttt

SEQ ID NO: 163277 - DNA, 15 bp, Unknown
  misc_feature (1)..( 15): Result.004 file - promoters50/1031390
atttgaaactttaat

SEQ ID NO: 163278 - DNA, 15 bp, Unknown
  misc_feature (1)..( 15): Result.004 file - promoters50/1031390
ataagaaaatgggtc

SEQ ID NO: 163279 - DNA, 15 bp, Unknown
  misc_feature (1)..( 15): Result.004 file - promoters50/1031390
tcaagaaagtttaaa

SEQ ID NO: 163280 - DNA, 15 bp, Unknown
  misc_feature (1)..( 15): Result.004 file - promoters50/1031390
tccatttaatttttt

SEQ ID NO: 163281 - DNA, 15 bp, Unknown
  misc_feature (1)..( 15): Result.004 file - promoters50/1031390
tcatgaaagacattg

SEQ ID NO: 163282 - DNA, 15 bp, Unknown
  misc_feature (1)..( 15): Result.004 file - promoters50/1031390
agtatttttaaaaat

SEQ ID NO: 163283 - DNA, 15 bp, Unknown
  misc_feature (1)..( 15): Result.004 file - promoters50/1031390
tctgttttcaaaatg

SEQ ID NO: 163284 - DNA, 15 bp, Unknown
  misc_feature (1)..( 15): Result.004 file - promoters50/1031390
actaattgtaaaaac

SEQ ID NO: 163285 - DNA, 15 bp, Unknown
  misc_feature (1)..( 15): Result.004 file - promoters50/1031390
agtgttttcaaacca

SEQ ID NO: 163286 - DNA, 15 bp, Unknown
  misc_feature (1)..( 15): Result.004 file - promoters50/1031390
aaaatcttcaaaaat

SEQ ID NO: 163287 - DNA, 15 bp, Unknown
  misc_feature (1)..( 15): Result.004 file - promoters50/1031390
tacggtttcaagatg

SEQ ID NO: 163288 - DNA, 15 bp, Unknown
  misc_feature (1)..( 15): Result.004 file - promoters50/1031390
tctaagaaaaaaaac

SEQ ID NO: 163289 - DNA, 15 bp, Unknown
  misc_feature (1)..( 15): Result.004 file - promoters50/1031390
ttcattttcgagaat

SEQ ID NO: 163290 - DNA, 15 bp, Unknown
  misc_feature (1)..( 15): Result.004 file - promoters50/1031390
taaaaacattggtaa

SEQ ID NO: 163291 - DNA, 15 bp, Unknown
  misc_feature (1)..( 15): Result.004 file - promoters50/1031390
tcaaaccatttggag

SEQ ID NO: 163292 - DNA, 15 bp, Unknown
  misc_feature (1)..( 15): Result.004 file - promoters50/1031390
ctgaaatatttgtaa

SEQ ID NO: 163293 - DNA, 15 bp, Unknown
  misc_feature (1)..( 15): Result.004 file - promoters50/1031390
aaaaaacttttgagc

SEQ ID NO: 163294 - DNA, 15 bp, Unknown
  misc_feature (1)..( 15): Result.004 file - promoters50/1031390
cactaccattaggcc

SEQ ID NO: 163295 - DNA, 15 bp, Unknown
  misc_feature (1)..( 15): Result.004 file - promoters50/1031429
cactaacatatgtgg

SEQ ID NO: 163296 - DNA, 17 bp, Unknown
  misc_feature (1)..( 17): Result.004 file - promoters50/1031429
ctttcgaccaataacta

SEQ ID NO: 163297 - DNA, 17 bp, Unknown
  misc_feature (1)..( 17): Result.004 file - promoters50/1031429
ctttcgaccaataacta

SEQ ID NO: 163298 - DNA, 17 bp, Unknown
  misc_feature (1)..( 17): Result.004 file - promoters50/1031429
agctaccggaattactt

SEQ ID NO: 163299 - DNA, 9 bp, Unknown
  misc_feature (1)..( 9): Result.004 file - promoters50/1031429
actttactt

SEQ ID NO: 163300 - DNA, 8 bp, Unknown
  misc_feature (1)..( 8): Result.004 file - promoters50/1031429
aaaaaaaa

SEQ ID NO: 163301 - DNA, 8 bp, Unknown
  misc_feature (1)..( 8): Result.004 file - promoters50/1031429
aaaaaaaa

SEQ ID NO: 163302 - DNA, 8 bp, Unknown
  misc_feature (1)..( 8): Result.004 file - promoters50/1031429
aaacaaaa

SEQ ID NO: 163303 - DNA, 8 bp, Unknown
  misc_feature (1)..( 8): Result.004 file - promoters50/1031429
ggacaaaa

SEQ ID NO: 163304 - DNA, 10 bp, Unknown
  misc_feature (1)..( 10): Result.004 file - promoters50/1031429
aatacaaatc

SEQ ID NO: 163305 - DNA, 10 bp, Unknown
  misc_feature (1)..( 10): Result.004 file - promoters50/1031429
aataccaatc

SEQ ID NO: 163306 - DNA, 10 bp, Unknown
  misc_feature (1)..( 10): Result.004 file - promoters50/1031429
tatacaatcc

SEQ ID NO: 163307 - DNA, 10 bp, Unknown
  misc_feature (1)..( 10): Result.004 file - promoters50/1031429
ctaaccaata

SEQ ID NO: 163308 - DNA, 12 bp, Unknown
  misc_feature (1)..( 12): Result.004 file - promoters50/1031429
tgatgattcttt

SEQ ID NO: 163309 - DNA, 12 bp, Unknown
  misc_feature (1)..( 12): Result.004 file - promoters50/1031429
tcaacatttttt

SEQ ID NO: 163310 - DNA, 12 bp, Unknown
  misc_feature (1)..( 12): Result.004 file - promoters50/1031429
aaatgattctac

SEQ ID NO: 163311 - DNA, 12 bp, Unknown
  misc_feature (1)..( 12): Result.004 file - promoters50/1031429
aaatgatgattc

SEQ ID NO: 163312 - DNA, 12 bp, Unknown
  misc_feature (1)..( 12): Result.004 file - promoters50/1031429
aatcaatttttc

SEQ ID NO: 163313 - DNA, 11 bp, Unknown
  misc_feature (1)..( 11): Result.004 file - promoters50/1031429
tctattctaac

SEQ ID NO: 163314 - DNA, 11 bp, Unknown
  misc_feature (1)..( 11): Result.004 file - promoters50/1031429
ctcattttaac

SEQ ID NO: 163315 - DNA, 11 bp, Unknown
  misc_feature (1)..( 11): Result.004 file - promoters50/1031429
atgattctaca

SEQ ID NO: 163316 - DNA, 11 bp, Unknown
  misc_feature (1)..( 11): Result.004 file - promoters50/1031429
atgattctttg

SEQ ID NO: 163317 - DNA, 11 bp, Unknown
  misc_feature (1)..( 11): Result.004 file - promoters50/1031429
atcattttcat

SEQ ID NO: 163318 - DNA, 10 bp, Unknown
  misc_feature (1)..( 10): Result.004 file - promoters50/1031429
caacttttta

SEQ ID NO: 163319 - DNA, 10 bp, Unknown
  misc_feature (1)..( 10): Result.004 file - promoters50/1031429
aatcttttta

SEQ ID NO: 163320 - DNA, 10 bp, Unknown
  misc_feature (1)..( 10): Result.004 file - promoters50/1031429
caacttttta

SEQ ID NO: 163321 - DNA, 10 bp, Unknown
  misc_feature (1)..( 10): Result.004 file - promoters50/1031484
aatcttttaa

SEQ ID NO: 163322 - DNA, 8 bp, Unknown
  misc_feature (1)..( 8): Result.004 file - promoters50/1031484
aaaataaa

SEQ ID NO: 163323 - DNA, 8 bp, Unknown
  misc_feature (1)..( 8): Result.004 file - promoters50/1031484
aaaaaaaa

SEQ ID NO: 163324 - DNA, 8 bp, Unknown
  misc_feature (1)..( 8): Result.004 file - promoters50/1031484
tgaataaa

SEQ ID NO: 163325 - DNA, 6 bp, Unknown
  misc_feature (1)..( 6): Result.004 file - promoters50/1031484
aataaa

SEQ ID NO: 163326 - DNA, 6 bp, Unknown
  misc_feature (1)..( 6): Result.004 file - promoters50/1031484
aataaa

SEQ ID NO: 163327 - DNA, 6 bp, Unknown
  misc_feature (1)..( 6): Result.004 file - promoters50/1031484
aataaa

SEQ ID NO: 163328 - DNA, 7 bp, Unknown
  misc_feature (1)..( 7): Result.004 file - promoters50/1031484
tataaaa

SEQ ID NO: 163329 - DNA, 7 bp, Unknown
  misc_feature (1)..( 7): Result.004 file - promoters50/1031484
aataaaa

SEQ ID NO: 163330 - DNA, 7 bp, Unknown
  misc_feature (1)..( 7): Result.004 file - promoters50/1031484
aataaat

SEQ ID NO: 163331 - DNA, 7 bp, Unknown
  misc_feature (1)..( 7): Result.004 file - promoters50/1031484
aaagaaa

SEQ ID NO: 163332 - DNA, 7 bp, Unknown
  misc_feature (1)..( 7): Result.004 file - promoters50/1031484
aaagaaa

SEQ ID NO: 163333 - DNA, 7 bp, Unknown
  misc_feature (1)..( 7): Result.004 file - promoters50/1031488
aaataaa

SEQ ID NO: 163334 - DNA, 13 bp, Unknown
  misc_feature (1)..( 13): Result.004 file - promoters50/1031488
gatataaacacaa

SEQ ID NO: 163335 - DNA, 13 bp, Unknown
  misc_feature (1)..( 13): Result.004 file - promoters50/1031488
aatagaaatacaa

SEQ ID NO: 163336 - DNA, 13 bp, Unknown
  misc_feature (1)..( 13): Result.004 file - promoters50/1031488
gataaaaaatata

SEQ ID NO: 163337 - DNA, 9 bp, Unknown
  misc_feature (1)..( 9): Result.004 file - promoters50/1031488
caacaaaca

SEQ ID NO: 163338 - DNA, 9 bp, Unknown
  misc_feature (1)..( 9): Result.004 file - promoters50/1031488
taacataca

SEQ ID NO: 163339 - DNA, 9 bp, Unknown
  misc_feature (1)..( 9): Result.004 file - promoters50/1031563
caaccaaaa

SEQ ID NO: 163340 - DNA, 7 bp, Unknown
  misc_feature (1)..( 7): Result.004 file - promoters50/1031563
caatagt

SEQ ID NO: 163341 - DNA, 7 bp, Unknown
  misc_feature (1)..( 7): Result.004 file - promoters50/1031563
caaaagt

SEQ ID NO: 163342 - DNA, 7 bp, Unknown
  misc_feature (1)..( 7): Result.004 file - promoters50/1031563
caaaagc

SEQ ID NO: 163343 - DNA, 8 bp, Unknown
  misc_feature (1)..( 8): Result.004 file - promoters50/1031563
tcttaaac

SEQ ID NO: 163344 - DNA, 8 bp, Unknown
  misc_feature (1)..( 8): Result.004 file - promoters50/1031563
acttaaac

SEQ ID NO: 163345 - DNA, 8 bp, Unknown
  misc_feature (1)..( 8): Result.004 file - promoters50/1031563
actgaaat

SEQ ID NO: 163346 - DNA, 8 bp, Unknown
  misc_feature (1)..( 8): Result.004 file - promoters50/1031563
ctatagat

SEQ ID NO: 163347 - DNA, 8 bp, Unknown
  misc_feature (1)..( 8): Result.004 file - promoters50/1031563
ctaaagag

SEQ ID NO: 163348 - DNA, 8 bp, Unknown
  misc_feature (1)..( 8): Result.004 file - promoters50/1031576
aaaaagag

SEQ ID NO: 163349 - DNA, 7 bp, Unknown
  misc_feature (1)..( 7): Result.004 file - promoters50/1031576
aaaaatt

SEQ ID NO: 163350 - DNA, 7 bp, Unknown
  misc_feature (1)..( 7): Result.004 file - promoters50/1031576
aaaaatc

SEQ ID NO: 163351 - DNA, 7 bp, Unknown
  misc_feature (1)..( 7): Result.004 file - promoters50/1031576
aaaaaaa

SEQ ID NO: 163352 - DNA, 9 bp, Unknown
  misc_feature (1)..( 9): Result.004 file - promoters50/1031576
caaaaatca

SEQ ID NO: 163353 - DNA, 9 bp, Unknown
  misc_feature (1)..( 9): Result.004 file - promoters50/1031576
ataaactca

SEQ ID NO: 163354 - DNA, 9 bp, Unknown
  misc_feature (1)..( 9): Result.004 file - promoters50/1031576
ataaactgg

SEQ ID NO: 163355 - DNA, 9 bp, Unknown
  misc_feature (1)..( 9): Result.004 file - promoters50/1031576
tctataaac

SEQ ID NO: 163356 - DNA, 9 bp, Unknown
  misc_feature (1)..( 9): Result.004 file - promoters50/1031576
acaataaac

SEQ ID NO: 163357 - DNA, 9 bp, Unknown
  misc_feature (1)..( 9): Result.004 file - promoters50/1031576
acaacaaaa

SEQ ID NO: 163358 - DNA, 8 bp, Unknown
  misc_feature (1)..( 8): Result.004 file - promoters50/1031576
acaataaa

SEQ ID NO: 163359 - DNA, 8 bp, Unknown
  misc_feature (1)..( 8): Result.004 file - promoters50/1031576
ggaataaa

SEQ ID NO: 163360 - DNA, 8 bp, Unknown
  misc_feature (1)..( 8): Result.004 file - promoters50/1031576
acaataag

SEQ ID NO: 163361 - DNA, 10 bp, Unknown
  misc_feature (1)..( 10): Result.004 file - promoters50/1031576
catctctaag

SEQ ID NO: 163362 - DNA, 10 bp, Unknown
  misc_feature (1)..( 10): Result.004 file - promoters50/1031576
attctcaaag

SEQ ID NO: 163363 - DNA, 10 bp, Unknown
  misc_feature (1)..( 10): Result.004 file - promoters50/1031576
catcactata

SEQ ID NO: 163364 - DNA, 8 bp, Unknown
  misc_feature (1)..( 8): Result.004 file - promoters50/1031576
acaccaat

SEQ ID NO: 163365 - DNA, 8 bp, Unknown
  misc_feature (1)..( 8): Result.004 file - promoters50/1031576
acaacaaa

SEQ ID NO: 163366 - DNA, 8 bp, Unknown
  misc_feature (1)..( 8): Result.004 file - promoters50/1031638
acaataaa

SEQ ID NO: 163367 - DNA, 9 bp, Unknown
  misc_feature (1)..( 9): Result.004 file - promoters50/1031638
aataaaaaa

SEQ ID NO: 163368 - DNA, 9 bp, Unknown
  misc_feature (1)..( 9): Result.004 file - promoters50/1031638
aatcaaaac

SEQ ID NO: 163369 - DNA, 9 bp, Unknown
  misc_feature (1)..( 9): Result.004 file - promoters50/1031638
aagcaaaac

SEQ ID NO: 163370 - DNA, 7 bp, Unknown
  misc_feature (1)..( 7): Result.004 file - promoters50/1031638
aaaacaa

SEQ ID NO: 163371 - DNA, 7 bp, Unknown
  misc_feature (1)..( 7): Result.004 file - promoters50/1031638
aaaacaa

SEQ ID NO: 163372 - DNA, 7 bp, Unknown
  misc_feature (1)..( 7): Result.004 file - promoters50/1031638
aaaacac

SEQ ID NO: 163373 - DNA, 8 bp, Unknown
  misc_feature (1)..( 8): Result.004 file - promoters50/1031638
aaaagcaa

SEQ ID NO: 163374 - DNA, 9 bp, Unknown
  misc_feature (1)..( 9): Result.004 file - promoters50/1031638
aaaacaaat

SEQ ID NO: 163375 - DNA, 9 bp, Unknown
  misc_feature (1)..( 9): Result.004 file - promoters50/1031638
taaaaaaat

SEQ ID NO: 163376 - DNA, 9 bp, Unknown
  misc_feature (1)..( 9): Result.004 file - promoters50/1031638
aaaataaaa

SEQ ID NO: 163377 - DNA, 9 bp, Unknown
  misc_feature (1)..( 9): Result.004 file - promoters50/1031638
caaacttac

SEQ ID NO: 163378 - DNA, 9 bp, Unknown
  misc_feature (1)..( 9): Result.004 file - promoters50/1031638
ttttttaaa

SEQ ID NO: 163379 - DNA, 9 bp, Unknown
  misc_feature (1)..( 9): Result.004 file - promoters50/1031638
tttcttaaa

SEQ ID NO: 163380 - DNA, 9 bp, Unknown
  misc_feature (1)..( 9): Result.004 file - promoters50/1031638
ttttttttc

SEQ ID NO: 163381 - DNA, 7 bp, Unknown
  misc_feature (1)..( 7): Result.004 file - promoters50/1031638
gtaaaaa

SEQ ID NO: 163382 - DNA, 7 bp, Unknown
  misc_feature (1)..( 7): Result.004 file - promoters50/1031638
gtaaaat

SEQ ID NO: 163383 - DNA, 7 bp, Unknown
  misc_feature (1)..( 7): Result.004 file - promoters50/1031638
ataaaat

SEQ ID NO: 163384 - DNA, 11 bp, Unknown
  misc_feature (1)..( 11): Result.004 file - promoters50/1031638
aatttataata

SEQ ID NO: 163385 - DNA, 11 bp, Unknown
  misc_feature (1)..( 11): Result.004 file - promoters50/1031638
aatatataata

SEQ ID NO: 163386 - DNA, 11 bp, Unknown
  misc_feature (1)..( 11): Result.004 file - promoters50/1031638
cgaataaaata

SEQ ID NO: 163387 - DNA, 9 bp, Unknown
  misc_feature (1)..( 9): Result.004 file - promoters50/1031638
ttaaaatag

SEQ ID NO: 163388 - DNA, 9 bp, Unknown
  misc_feature (1)..( 9): Result.004 file - promoters50/1031638
ttaaaaata

SEQ ID NO: 163389 - DNA, 9 bp, Unknown
  misc_feature (1)..( 9): Result.004 file - promoters50/1031638
ttaaacata

SEQ ID NO: 163390 - DNA, 9 bp, Unknown
  misc_feature (1)..( 9): Result.004 file - promoters50/1031638
ctaaacact

SEQ ID NO: 163391 - DNA, 8 bp, Unknown
  misc_feature (1)..( 8): Result.004 file - promoters50/1031638
ttaaaata

SEQ ID NO: 163392 - DNA, 8 bp, Unknown
  misc_feature (1)..( 8): Result.004 file - promoters50/1031638
taaaaata

SEQ ID NO: 163393 - DNA, 9 bp, Unknown
  misc_feature (1)..( 9): Result.004 file - promoters50/1031638
ttaaacata

SEQ ID NO: 163394 - DNA, 9 bp, Unknown
  misc_feature (1)..( 9): Result.004 file - promoters50/1031638
ctaaacact

SEQ ID NO: 163395 - DNA, 8 bp, Unknown
  misc_feature (1)..( 8): Result.004 file - promoters50/1031638
agtatttt

SEQ ID NO: 163396 - DNA, 8 bp, Unknown
  misc_feature (1)..( 8): Result.004 file - promoters50/1031638
aatatttt

SEQ ID NO: 163397 - DNA, 8 bp, Unknown
  misc_feature (1)..( 8): Result.004 file - promoters50/1031638
aatatttc

SEQ ID NO: 163398 - DNA, 6 bp, Unknown
  misc_feature (1)..( 6): Result.004 file - promoters50/1031638
ttcaaa

SEQ ID NO: 163399 - DNA, 6 bp, Unknown
  misc_feature (1)..( 6): Result.004 file - promoters50/1031638
ttcaaa

SEQ ID NO: 163400 - DNA, 6 bp, Unknown
  misc_feature (1)..( 6): Result.004 file - promoters50/1031638
ttcaaa

SEQ ID NO: 163401 - DNA, 7 bp, Unknown
  misc_feature (1)..( 7): Result.004 file - promoters50/1031638
tccaaaa

SEQ ID NO: 163402 - DNA, 7 bp, Unknown
  misc_feature (1)..( 7): Result.004 file - promoters50/1031638
tccaaac

SEQ ID NO: 163403 - DNA, 7 bp, Unknown
  misc_feature (1)..( 7): Result.004 file - promoters50/1031638
tccaaaa

SEQ ID NO: 163404 - DNA, 10 bp, Unknown
  misc_feature (1)..( 10): Result.004 file - promoters50/1031638
attgatgttc

SEQ ID NO: 163405 - DNA, 10 bp, Unknown
  misc_feature (1)..( 10): Result.004 file - promoters50/1031638
attaatgttc

SEQ ID NO: 163406 - DNA, 10 bp, Unknown
  misc_feature (1)..( 10): Result.004 file - promoters50/1031638
attaattcca

SEQ ID NO: 163407 - DNA, 7 bp, Unknown
  misc_feature (1)..( 7): Result.004 file - promoters50/1031638
tccacga

SEQ ID NO: 163408 - DNA, 7 bp, Unknown
  misc_feature (1)..( 7): Result.004 file - promoters50/1031638
cccacga

SEQ ID NO: 163409 - DNA, 7 bp, Unknown
  misc_feature (1)..( 7): Result.004 file - promoters50/1031638
cccacgt

SEQ ID NO: 163410 - DNA, 8 bp, Unknown
  misc_feature (1)..( 8): Result.004 file - promoters50/1031638
aaaatatc

SEQ ID NO: 163411 - DNA, 8 bp, Unknown
  misc_feature (1)..( 8): Result.004 file - promoters50/1031638
aaattata

SEQ ID NO: 163412 - DNA, 8 bp, Unknown
  misc_feature (1)..( 8): Result.004 file - promoters50/1031638
taatcata

SEQ ID NO: 163413 - DNA, 10 bp, Unknown
  misc_feature (1)..( 10): Result.004 file - promoters50/1031638
aaaaatttat

SEQ ID NO: 163414 - DNA, 10 bp, Unknown
  misc_feature (1)..( 10): Result.004 file - promoters50/1031638
aaatattgaa

SEQ ID NO: 163415 - DNA, 10 bp, Unknown
  misc_feature (1)..( 10): Result.004 file - promoters50/1031638
atatataata

SEQ ID NO: 163416 - DNA, 9 bp, Unknown
  misc_feature (1)..( 9): Result.004 file - promoters50/1031638
attttgtaa

SEQ ID NO: 163417 - DNA, 9 bp, Unknown
  misc_feature (1)..( 9): Result.004 file - promoters50/1031638
cgtttataa

SEQ ID NO: 163418 - DNA, 9 bp, Unknown
  misc_feature (1)..( 9): Result.004 file - promoters50/1031642
attttgtag

SEQ ID NO: 163419 - DNA, 9 bp, Unknown
  misc_feature (1)..( 9): Result.004 file - promoters50/1031642
gtccaaaga

SEQ ID NO: 163420 - DNA, 9 bp, Unknown
  misc_feature (1)..( 9): Result.004 file - promoters50/1031642
gtcaaaaaa

SEQ ID NO: 163421 - DNA, 9 bp, Unknown
  misc_feature (1)..( 9): Result.004 file - promoters50/1031642
ctcaaaaaa

SEQ ID NO: 163422 - DNA, 13 bp, Unknown
  misc_feature (1)..( 13): Result.004 file - promoters50/1031642
gtttggctaaaaa

SEQ ID NO: 163423 - DNA, 13 bp, Unknown
  misc_feature (1)..( 13): Result.004 file - promoters50/1031642
gttcggcttaaac

SEQ ID NO: 163424 - DNA, 13 bp, Unknown
  misc_feature (1)..( 13): Result.004 file - promoters50/1031646
tgcggtataaaaa

SEQ ID NO: 163425 - DNA, 9 bp, Unknown
  misc_feature (1)..( 9): Result.004 file - promoters50/1031646
acaaaatta

SEQ ID NO: 163426 - DNA, 9 bp, Unknown
  misc_feature (1)..( 9): Result.004 file - promoters50/1031646
ttaaaattg

SEQ ID NO: 163427 - DNA, 9 bp, Unknown
  misc_feature (1)..( 9): Result.004 file - promoters50/1031646
caaaaataa

SEQ ID NO: 163428 - DNA, 8 bp, Unknown
  misc_feature (1)..( 8): Result.004 file - promoters50/1031646
aaaaccca

SEQ ID NO: 163429 - DNA, 8 bp, Unknown
  misc_feature (1)..( 8): Result.004 file - promoters50/1031646
taaacccg

SEQ ID NO: 163430 - DNA, 8 bp, Unknown
  misc_feature (1)..( 8): Result.004 file - promoters50/1031646
aaaaccca

SEQ ID NO: 163431 - DNA, 9 bp, Unknown
  misc_feature (1)..( 9): Result.004 file - promoters50/1031646
cattgctaa

SEQ ID NO: 163432 - DNA, 9 bp, Unknown
  misc_feature (1)..( 9): Result.004 file - promoters50/1031646
aattgataa

SEQ ID NO: 163433 - DNA, 9 bp, Unknown
  misc_feature (1)..( 9): Result.004 file - promoters50/1031706
aattgagaa

SEQ ID NO: 163434 - DNA, 15 bp, Unknown
  misc_feature (1)..( 15): Result.004 file - promoters50/1031706
atttgaataatcttt

SEQ ID NO: 163435 - DNA, 15 bp, Unknown
  misc_feature (1)..( 15): Result.004 file - promoters50/1031706
aactacatattctga

SEQ ID NO: 163436 - DNA, 15 bp, Unknown
  misc_feature (1)..( 15): Result.004 file - promoters50/1031706
tcatcgttaattttt

SEQ ID NO: 163437 - DNA, 15 bp, Unknown
  misc_feature (1)..( 15): Result.004 file - promoters50/1031706
atttgaataattcca

SEQ ID NO: 163438 - DNA, 15 bp, Unknown
  misc_feature (1)..( 15): Result.004 file - promoters50/1031706
ataaacatattgagc

SEQ ID NO: 163439 - DNA, 15 bp, Unknown
  misc_feature (1)..( 15): Result.004 file - promoters50/1031706
atgtttatatgacca

SEQ ID NO: 163440 - DNA, 15 bp, Unknown
  misc_feature (1)..( 15): Result.004 file - promoters50/1031706
attattatatctaga

SEQ ID NO: 163441 - DNA, 15 bp, Unknown
  misc_feature (1)..( 15): Result.004 file - promoters50/1031706
ttatttttaattcaa

SEQ ID NO: 163442 - DNA, 14 bp, Unknown
  misc_feature (1)..( 14): Result.004 file - promoters50/1031706
tggtctatataaac

SEQ ID NO: 163443 - DNA, 14 bp, Unknown
  misc_feature (1)..( 14): Result.004 file - promoters50/1031706
tcttgtatatatac

SEQ ID NO: 163444 - DNA, 14 bp, Unknown
  misc_feature (1)..( 14): Result.004 file - promoters50/1031706
ccaaccatataaat

SEQ ID NO: 163445 - DNA, 14 bp, Unknown
  misc_feature (1)..( 14): Result.004 file - promoters50/1031706
tccattatatatag

SEQ ID NO: 163446 - DNA, 14 bp, Unknown
  misc_feature (1)..( 14): Result.004 file - promoters50/1031706
tcctttatattctc

SEQ ID NO: 163447 - DNA, 14 bp, Unknown
  misc_feature (1)..( 14): Result.004 file - promoters50/1031706
gtatctatatatag

SEQ ID NO: 163448 - DNA, 13 bp, Unknown
  misc_feature (1)..( 13): Result.004 file - promoters50/1031706
ttcgatttatgtc

SEQ ID NO: 163449 - DNA, 13 bp, Unknown
  misc_feature (1)..( 13): Result.004 file - promoters50/1031706
gtaattttaagtc

SEQ ID NO: 163450 - DNA, 14 bp, Unknown
  misc_feature (1)..( 14): Result.004 file - promoters50/1031706
attcattataaaaa

SEQ ID NO: 163451 - DNA, 14 bp, Unknown
  misc_feature (1)..( 14): Result.004 file - promoters50/1031706
gttgattttaaact

SEQ ID NO: 163452 - DNA, 14 bp, Unknown
  misc_feature (1)..( 14): Result.004 file - promoters50/1031706
gttaatttttgact

SEQ ID NO: 163453 - DNA, 14 bp, Unknown
  misc_feature (1)..( 14): Result.004 file - promoters50/1031706
aacaattctaattt

SEQ ID NO: 163454 - DNA, 10 bp, Unknown
  misc_feature (1)..( 10): Result.004 file - promoters50/1031706
taagaaaaag

SEQ ID NO: 163455 - DNA, 10 bp, Unknown
  misc_feature (1)..( 10): Result.004 file - promoters50/1031706
aaagaaacat

SEQ ID NO: 163456 - DNA, 10 bp, Unknown
  misc_feature (1)..( 10): Result.004 file - promoters50/1031706
aaagcaacta

SEQ ID NO: 163457 - DNA, 10 bp, Unknown
  misc_feature (1)..( 10): Result.004 file - promoters50/1031706
tcagaaactt

SEQ ID NO: 163458 - DNA, 10 bp, Unknown
  misc_feature (1)..( 10): Result.004 file - promoters50/1031706
tcacaaattg

SEQ ID NO: 163459 - DNA, 10 bp, Unknown
  misc_feature (1)..( 10): Result.004 file - promoters50/1031706
tatgaaactt

SEQ ID NO: 163460 - DNA, 10 bp, Unknown
  misc_feature (1)..( 10): Result.004 file - promoters50/1031706
acaccaatgt

SEQ ID NO: 163461 - DNA, 12 bp, Unknown
  misc_feature (1)..( 12): Result.004 file - promoters50/1031706
ccatttgaataa

SEQ ID NO: 163462 - DNA, 12 bp, Unknown
  misc_feature (1)..( 12): Result.004 file - promoters50/1031706
tatttttaattc

SEQ ID NO: 163463 - DNA, 12 bp, Unknown
  misc_feature (1)..( 12): Result.004 file - promoters50/1031706
tatgtttatatg

SEQ ID NO: 163464 - DNA, 12 bp, Unknown
  misc_feature (1)..( 12): Result.004 file - promoters50/1031706
aaccgttaattc

SEQ ID NO: 163465 - DNA, 12 bp, Unknown
  misc_feature (1)..( 12): Result.004 file - promoters50/1031706
gtatttgaataa

SEQ ID NO: 163466 - DNA, 12 bp, Unknown
  misc_feature (1)..( 12): Result.004 file - promoters50/1031706
tattattattat

SEQ ID NO: 163467 - DNA, 13 bp, Unknown
  misc_feature (1)..( 13): Result.004 file - promoters50/1031706
aactatccaaaat

SEQ ID NO: 163468 - DNA, 13 bp, Unknown
  misc_feature (1)..( 13): Result.004 file - promoters50/1031706
aaatatacaaact

SEQ ID NO: 163469 - DNA, 13 bp, Unknown
  misc_feature (1)..( 13): Result.004 file - promoters50/1031706
aaaagaccaaaac

SEQ ID NO: 163470 - DNA, 13 bp, Unknown
  misc_feature (1)..( 13): Result.004 file - promoters50/1031706
aaataaacaaact

SEQ ID NO: 163471 - DNA, 13 bp, Unknown
  misc_feature (1)..( 13): Result.004 file - promoters50/1031706
gacggaacaaaac

SEQ ID NO: 163472 - DNA, 13 bp, Unknown
  misc_feature (1)..( 13): Result.004 file - promoters50/1031706
aaaagaagaaaaa

SEQ ID NO: 163473 - DNA, 10 bp, Unknown
  misc_feature (1)..( 10): Result.004 file - promoters50/1031706
aaaaacaaac

SEQ ID NO: 163474 - DNA, 10 bp, Unknown
  misc_feature (1)..( 10): Result.004 file - promoters50/1031706
caaaacaatt

SEQ ID NO: 163475 - DNA, 10 bp, Unknown
  misc_feature (1)..( 10): Result.004 file - promoters50/1031706
cggaacaaaa

SEQ ID NO: 163476 - DNA, 10 bp, Unknown
  misc_feature (1)..( 10): Result.004 file - promoters50/1031706
ataaacaaac

SEQ ID NO: 163477 - DNA, 10 bp, Unknown
  misc_feature (1)..( 10): Result.004 file - promoters50/1031706
taaaaaaaga

SEQ ID NO: 163478 - DNA, 10 bp, Unknown
  misc_feature (1)..( 10): Result.004 file - promoters50/1031752
caaaaccacg

SEQ ID NO: 163479 - DNA, 12 bp, Unknown
  misc_feature (1)..( 12): Result.004 file - promoters50/1031752
ttttctttgtca

SEQ ID NO: 163480 - DNA, 12 bp, Unknown
  misc_feature (1)..( 12): Result.004 file - promoters50/1031752
tttacttaataa

SEQ ID NO: 163481 - DNA, 12 bp, Unknown
  misc_feature (1)..( 12): Result.004 file - promoters50/1031752
tttaattaatta

SEQ ID NO: 163482 - DNA, 8 bp, Unknown
  misc_feature (1)..( 8): Result.004 file - promoters50/1031752
ttcaagag

SEQ ID NO: 163483 - DNA, 8 bp, Unknown
  misc_feature (1)..( 8): Result.004 file - promoters50/1031752
ttcaagac

SEQ ID NO: 163484 - DNA, 8 bp, Unknown
  misc_feature (1)..( 8): Result.004 file - promoters50/1031752
atcacgag

SEQ ID NO: 163485 - DNA, 9 bp, Unknown
  misc_feature (1)..( 9): Result.004 file - promoters50/1031752
atttaactt

SEQ ID NO: 163486 - DNA, 9 bp, Unknown
  misc_feature (1)..( 9): Result.004 file - promoters50/1031752
ttttatctt

SEQ ID NO: 163487 - DNA, 9 bp, Unknown
  misc_feature (1)..( 9): Result.004 file - promoters50/1031777
ttttatgca

SEQ ID NO: 163488 - DNA, 9 bp, Unknown
  misc_feature (1)..( 9): Result.004 file - promoters50/1031777
aagaaaata

SEQ ID NO: 163489 - DNA, 9 bp, Unknown
  misc_feature (1)..( 9): Result.004 file - promoters50/1031777
tgtaaaata

SEQ ID NO: 163490 - DNA, 9 bp, Unknown
  misc_feature (1)..( 9): Result.004 file - promoters50/1031781
aagagaatc

SEQ ID NO: 163491 - DNA, 8 bp, Unknown
  misc_feature (1)..( 8): Result.004 file - promoters50/1031781
ataattac

SEQ ID NO: 163492 - DNA, 8 bp, Unknown
  misc_feature (1)..( 8): Result.004 file - promoters50/1031781
atatttat

SEQ ID NO: 163493 - DNA, 8 bp, Unknown
  misc_feature (1)..( 8): Result.004 file - promoters50/1031781
aaatttat

SEQ ID NO: 163494 - DNA, 7 bp, Unknown
  misc_feature (1)..( 7): Result.004 file - promoters50/1031781
ttttatt

SEQ ID NO: 163495 - DNA, 7 bp, Unknown
  misc_feature (1)..( 7): Result.004 file - promoters50/1031781
atttatt

SEQ ID NO: 163496 - DNA, 7 bp, Unknown
  misc_feature (1)..( 7): Result.004 file - promoters50/1031781
atttatc

SEQ ID NO: 163497 - DNA, 9 bp, Unknown
  misc_feature (1)..( 9): Result.004 file - promoters50/1031781
caaataata

SEQ ID NO: 163498 - DNA, 9 bp, Unknown
  misc_feature (1)..( 9): Result.004 file - promoters50/1031781
gaaagaata

SEQ ID NO: 163499 - DNA, 10 bp, Unknown
  misc_feature (1)..( 10): Result.004 file - promoters50/1031781
gaagagagat

SEQ ID NO: 163500 - DNA, 8 bp, Unknown
  misc_feature (1)..( 8): Result.004 file - promoters50/1031781
tagaatta

SEQ ID NO: 163501 - DNA, 8 bp, Unknown
  misc_feature (1)..( 8): Result.004 file - promoters50/1031781
tagaatgc

SEQ ID NO: 163502 - DNA, 8 bp, Unknown
  misc_feature (1)..( 8): Result.004 file - promoters50/1031781
taggatgc

SEQ ID NO: 163503 - DNA, 8 bp, Unknown
  misc_feature (1)..( 8): Result.004 file - promoters50/1031781
attaaaag

SEQ ID NO: 163504 - DNA, 8 bp, Unknown
  misc_feature (1)..( 8): Result.004 file - promoters50/1031781
tttaaaac

SEQ ID NO: 163505 - DNA, 8 bp, Unknown
  misc_feature (1)..( 8): Result.004 file - promoters50/1031799
attaaaaa

SEQ ID NO: 163506 - DNA, 12 bp, Unknown
  misc_feature (1)..( 12): Result.004 file - promoters50/1031799
tttgtgagtgat

SEQ ID NO: 163507 - DNA, 12 bp, Unknown
  misc_feature (1)..( 12): Result.004 file - promoters50/1031799
tttgttagttca

SEQ ID NO: 163508 - DNA, 12 bp, Unknown
  misc_feature (1)..( 12): Result.004 file - promoters50/1031799
tggttgattgat

SEQ ID NO: 163509 - DNA, 12 bp, Unknown
  misc_feature (1)..( 12): Result.004 file - promoters50/1031799
ttttttaggtcc

SEQ ID NO: 163510 - DNA, 12 bp, Unknown
  misc_feature (1)..( 12): Result.004 file - promoters50/1031799
atttttactttt

SEQ ID NO: 163511 - DNA, 12 bp, Unknown
  misc_feature (1)..( 12): Result.004 file - promoters50/1031799
atttttggttaa

SEQ ID NO: 163512 - DNA, 11 bp, Unknown
  misc_feature (1)..( 11): Result.004 file - promoters50/1031799
gatctttagat

SEQ ID NO: 163513 - DNA, 11 bp, Unknown
  misc_feature (1)..( 11): Result.004 file - promoters50/1031799
cttctttggat

SEQ ID NO: 163514 - DNA, 11 bp, Unknown
  misc_feature (1)..( 11): Result.004 file - promoters50/1031799
tagagttggat

SEQ ID NO: 163515 - DNA, 11 bp, Unknown
  misc_feature (1)..( 11): Result.004 file - promoters50/1031799
ttactttggaa

SEQ ID NO: 163516 - DNA, 11 bp, Unknown
  misc_feature (1)..( 11): Result.004 file - promoters50/1031799
attctttcaaa

SEQ ID NO: 163517 - DNA, 11 bp, Unknown
  misc_feature (1)..( 11): Result.004 file - promoters50/1031799
attcttacaac

SEQ ID NO: 163518 - DNA, 11 bp, Unknown
  misc_feature (1)..( 11): Result.004 file - promoters50/1031806
ggtattactct

SEQ ID NO: 163519 - DNA, 13 bp, Unknown
  misc_feature (1)..( 13): Result.004 file - promoters50/1031806
actcttgtttcat

SEQ ID NO: 163520 - DNA, 13 bp, Unknown
  misc_feature (1)..( 13): Result.004 file - promoters50/1031806
cttcttgttttgt

SEQ ID NO: 163521 - DNA, 13 bp, Unknown
  misc_feature (1)..( 13): Result.004 file - promoters50/1031806
cctcttgttctga

SEQ ID NO: 163522 - DNA, 13 bp, Unknown
  misc_feature (1)..( 13): Result.004 file - promoters50/1031806
aaacttttttttt

SEQ ID NO: 163523 - DNA, 13 bp, Unknown
  misc_feature (1)..( 13): Result.004 file - promoters50/1031806
ctttttgattcgt

SEQ ID NO: 163524 - DNA, 13 bp, Unknown
  misc_feature (1)..( 13): Result.004 file - promoters50/1031806
gagtttgatttga

SEQ ID NO: 163525 - DNA, 13 bp, Unknown
  misc_feature (1)..( 13): Result.004 file - promoters50/1031806
aatatttttcatt

SEQ ID NO: 163526 - DNA, 8 bp, Unknown
  misc_feature (1)..( 8): Result.004 file - promoters50/1031806
acttaaaa

SEQ ID NO: 163527 - DNA, 8 bp, Unknown
  misc_feature (1)..( 8): Result.004 file - promoters50/1031806
acttaaaa

SEQ ID NO: 163528 - DNA, 9 bp, Unknown
  misc_feature (1)..( 9): Result.004 file - promoters50/1031806
gattagaaa

SEQ ID NO: 163529 - DNA, 9 bp, Unknown
  misc_feature (1)..( 9): Result.004 file - promoters50/1031806
atttagaaa

SEQ ID NO: 163530 - DNA, 9 bp, Unknown
  misc_feature (1)..( 9): Result.004 file - promoters50/1031806
tattaaaat

SEQ ID NO: 163531 - DNA, 9 bp, Unknown
  misc_feature (1)..( 9): Result.004 file - promoters50/1031806
attgagaaa

SEQ ID NO: 163532 - DNA, 14 bp, Unknown
  misc_feature (1)..( 14): Result.004 file - promoters50/1031806
ttaaagtttctgac

SEQ ID NO: 163533 - DNA, 14 bp, Unknown
  misc_feature (1)..( 14): Result.004 file - promoters50/1031806
cctcttgttctgat

SEQ ID NO: 163534 - DNA, 14 bp, Unknown
  misc_feature (1)..( 14): Result.004 file - promoters50/1031806
ggaatctttttgat

SEQ ID NO: 163535 - DNA, 14 bp, Unknown
  misc_feature (1)..( 14): Result.004 file - promoters50/1031806
tttcttcttcttgt

SEQ ID NO: 163536 - DNA, 14 bp, Unknown
  misc_feature (1)..( 14): Result.004 file - promoters50/1031806
aatatttttcattt

SEQ ID NO: 163537 - DNA, 14 bp, Unknown
  misc_feature (1)..( 14): Result.004 file - promoters50/1031806
gagtttgatttgat

SEQ ID NO: 163538 - DNA, 16 bp, Unknown
  misc_feature (1)..( 16): Result.004 file - promoters50/1031806
agagaaatctccgacc

SEQ ID NO: 163539 - DNA, 16 bp, Unknown
  misc_feature (1)..( 16): Result.004 file - promoters50/1031806
gaagaaattaaaggaa

SEQ ID NO: 163540 - DNA, 16 bp, Unknown
  misc_feature (1)..( 16): Result.004 file - promoters50/1031806
gttgaaatgaaaagaa

SEQ ID NO: 163541 - DNA, 16 bp, Unknown
  misc_feature (1)..( 16): Result.004 file - promoters50/1031806
taagaataaccgttgg

SEQ ID NO: 163542 - DNA, 16 bp, Unknown
  misc_feature (1)..( 16): Result.004 file - promoters50/1031806
tgtgaacttagtctgt

SEQ ID NO: 163543 - DNA, 16 bp, Unknown
  misc_feature (1)..( 16): Result.004 file - promoters50/1032149
taacaatcagtatcca

SEQ ID NO: 163544 - DNA, 7 bp, Unknown
  misc_feature (1)..( 7): Result.004 file - promoters50/1032149
gatagtt

SEQ ID NO: 163545 - DNA, 7 bp, Unknown
  misc_feature (1)..( 7): Result.004 file - promoters50/1032149
tatagtt

SEQ ID NO: 163546 - DNA, 7 bp, Unknown
  misc_feature (1)..( 7): Result.004 file - promoters50/1032149
tattgtt

SEQ ID NO: 163547 - DNA, 12 bp, Unknown
  misc_feature (1)..( 12): Result.004 file - promoters50/1032149
tttgcataatca

SEQ ID NO: 163548 - DNA, 12 bp, Unknown
  misc_feature (1)..( 12): Result.004 file - promoters50/1032149
agttattaatca

SEQ ID NO: 163549 - DNA, 12 bp, Unknown
  misc_feature (1)..( 12): Result.004 file - promoters50/1032149
ataatttaatca

SEQ ID NO: 163550 - DNA, 12 bp, Unknown
  misc_feature (1)..( 12): Result.004 file - promoters50/1032149
agtgattcatct

SEQ ID NO: 163551 - DNA, 11 bp, Unknown
  misc_feature (1)..( 11): Result.004 file - promoters50/1032149
tcatattaagc

SEQ ID NO: 163552 - DNA, 11 bp, Unknown
  misc_feature (1)..( 11): Result.004 file - promoters50/1032149
agttattaatc

SEQ ID NO: 163553 - DNA, 11 bp, Unknown
  misc_feature (1)..( 11): Result.004 file - promoters50/1032149
agtgattcatc

SEQ ID NO: 163554 - DNA, 7 bp, Unknown
  misc_feature (1)..( 7): Result.004 file - promoters50/1032149
attttac

SEQ ID NO: 163555 - DNA, 7 bp, Unknown
  misc_feature (1)..( 7): Result.004 file - promoters50/1032149
tttttac

SEQ ID NO: 163556 - DNA, 7 bp, Unknown
  misc_feature (1)..( 7): Result.004 file - promoters50/1032149
attttaa

SEQ ID NO: 163557 - DNA, 10 bp, Unknown
  misc_feature (1)..( 10): Result.004 file - promoters50/1032149
aacaattaaa

SEQ ID NO: 163558 - DNA, 10 bp, Unknown
  misc_feature (1)..( 10): Result.004 file - promoters50/1032149
tccaactaac

SEQ ID NO: 163559 - DNA, 10 bp, Unknown
  misc_feature (1)..( 10): Result.004 file - promoters50/1032149
aacacttaaa

SEQ ID NO: 163560 - DNA, 9 bp, Unknown
  misc_feature (1)..( 9): Result.004 file - promoters50/1032149
catgaaaaa

SEQ ID NO: 163561 - DNA, 9 bp, Unknown
  misc_feature (1)..( 9): Result.004 file - promoters50/1032149
tatgaaaaa

SEQ ID NO: 163562 - DNA, 9 bp, Unknown
  misc_feature (1)..( 9): Result.004 file - promoters50/1032149
tattaaagt

SEQ ID NO: 163563 - DNA, 8 bp, Unknown
  misc_feature (1)..( 8): Result.004 file - promoters50/1032149
atatatga

SEQ ID NO: 163564 - DNA, 8 bp, Unknown
  misc_feature (1)..( 8): Result.004 file - promoters50/1032149
atatatgt

SEQ ID NO: 163565 - DNA, 8 bp, Unknown
  misc_feature (1)..( 8): Result.004 file - promoters50/1032149
ttatgtgt

SEQ ID NO: 163566 - DNA, 13 bp, Unknown
  misc_feature (1)..( 13): Result.004 file - promoters50/1032149
aaattatttttaa

SEQ ID NO: 163567 - DNA, 13 bp, Unknown
  misc_feature (1)..( 13): Result.004 file - promoters50/1032149
aaattgtttttaa

SEQ ID NO: 163568 - DNA, 13 bp, Unknown
  misc_feature (1)..( 13): Result.004 file - promoters50/1032149
atatttttttaat

SEQ ID NO: 163569 - DNA, 8 bp, Unknown
  misc_feature (1)..( 8): Result.004 file - promoters50/1032149
aaaaatta

SEQ ID NO: 163570 - DNA, 8 bp, Unknown
  misc_feature (1)..( 8): Result.004 file - promoters50/1032149
aaatattt

SEQ ID NO: 163571 - DNA, 8 bp, Unknown
  misc_feature (1)..( 8): Result.004 file - promoters50/1032149
caattttt

SEQ ID NO: 163572 - DNA, 9 bp, Unknown
  misc_feature (1)..( 9): Result.004 file - promoters50/1032149
ttttttaaa

SEQ ID NO: 163573 - DNA, 9 bp, Unknown
  misc_feature (1)..( 9): Result.004 file - promoters50/1032149
tttattaaa

SEQ ID NO: 163574 - DNA, 9 bp, Unknown
  misc_feature (1)..( 9): Result.004 file - promoters50/1032149
actatgaaa

SEQ ID NO: 163575 - DNA, 12 bp, Unknown
  misc_feature (1)..( 12): Result.004 file - promoters50/1032149
aaaagttcatct

SEQ ID NO: 163576 - DNA, 12 bp, Unknown
  misc_feature (1)..( 12): Result.004 file - promoters50/1032149
aaaagttttatt

SEQ ID NO: 163577 - DNA, 12 bp, Unknown
  misc_feature (1)..( 12): Result.004 file - promoters50/1032149
caaacttcatct

SEQ ID NO: 163578 - DNA, 8 bp, Unknown
  misc_feature (1)..( 8): Result.004 file - promoters50/1032149
ttttttta

SEQ ID NO: 163579 - DNA, 8 bp, Unknown
  misc_feature (1)..( 8): Result.004 file - promoters50/1032149
ctttctta

SEQ ID NO: 163580 - DNA, 9 bp, Unknown
  misc_feature (1)..( 9): Result.004 file - promoters50/1032160
attgttttt

SEQ ID NO: 163581 - DNA, 12 bp, Unknown
  misc_feature (1)..( 12): Result.004 file - promoters50/1032160
aattttaagata

SEQ ID NO: 163582 - DNA, 12 bp, Unknown
  misc_feature (1)..( 12): Result.004 file - promoters50/1032160
aattttgctaaa

SEQ ID NO: 163583 - DNA, 12 bp, Unknown
  misc_feature (1)..( 12): Result.004 file - promoters50/1032160
aatattacgttt

SEQ ID NO: 163584 - DNA, 12 bp, Unknown
  misc_feature (1)..( 12): Result.004 file - promoters50/1032160
aatttatttaat

SEQ ID NO: 163585 - DNA, 12 bp, Unknown
  misc_feature (1)..( 12): Result.004 file - promoters50/1032160
gattttgctgtg

SEQ ID NO: 163586 - DNA, 12 bp, Unknown
  misc_feature (1)..( 12): Result.004 file - promoters50/1032160
cttattatgttt

SEQ ID NO: 163587 - DNA, 16 bp, Unknown
  misc_feature (1)..( 16): Result.004 file - promoters50/1032160
cacagagacttttttt

SEQ ID NO: 163588 - DNA, 16 bp, Unknown
  misc_feature (1)..( 16): Result.004 file - promoters50/1032160
cacacagaatccagct

SEQ ID NO: 163589 - DNA, 16 bp, Unknown
  misc_feature (1)..( 16): Result.004 file - promoters50/1032160
ttgagagacttctttt

SEQ ID NO: 163590 - DNA, 16 bp, Unknown
  misc_feature (1)..( 16): Result.004 file - promoters50/1032160
gcaagagacagtggag

SEQ ID NO: 163591 - DNA, 16 bp, Unknown
  misc_feature (1)..( 16): Result.004 file - promoters50/1032160
aacaaagaaacatacc

SEQ ID NO: 163592 - DNA, 16 bp, Unknown
  misc_feature (1)..( 16): Result.004 file - promoters50/1032160
cagacagaaagaacgt

SEQ ID NO: 163593 - DNA, 13 bp, Unknown
  misc_feature (1)..( 13): Result.004 file - promoters50/1032160
tatttataaaatt

SEQ ID NO: 163594 - DNA, 13 bp, Unknown
  misc_feature (1)..( 13): Result.004 file - promoters50/1032160
caattaaaaaaat

SEQ ID NO: 163595 - DNA, 13 bp, Unknown
  misc_feature (1)..( 13): Result.004 file - promoters50/1032160
tatttatattaga

SEQ ID NO: 163596 - DNA, 13 bp, Unknown
  misc_feature (1)..( 13): Result.004 file - promoters50/1032160
ttagtaaaagaat

SEQ ID NO: 163597 - DNA, 13 bp, Unknown
  misc_feature (1)..( 13): Result.004 file - promoters50/1032160
catcaccaagaat

SEQ ID NO: 163598 - DNA, 13 bp, Unknown
  misc_feature (1)..( 13): Result.004 file - promoters50/1032266
caattatttcgtt

SEQ ID NO: 163599 - DNA, 12 bp, Unknown
  misc_feature (1)..( 12): Result.004 file - promoters50/1032266
agtgtttggtgt

SEQ ID NO: 163600 - DNA, 12 bp, Unknown
  misc_feature (1)..( 12): Result.004 file - promoters50/1032266
agtctttttacg

SEQ ID NO: 163601 - DNA, 12 bp, Unknown
  misc_feature (1)..( 12): Result.004 file - promoters50/1032266
tatgttaggtgt

SEQ ID NO: 163602 - DNA, 10 bp, Unknown
  misc_feature (1)..( 10): Result.004 file - promoters50/1032266
atatcttcta

SEQ ID NO: 163603 - DNA, 10 bp, Unknown
  misc_feature (1)..( 10): Result.004 file - promoters50/1032266
atattttcaa

SEQ ID NO: 163604 - DNA, 10 bp, Unknown
  misc_feature (1)..( 10): Result.004 file - promoters50/1032274
ttctttacaa

SEQ ID NO: 163605 - DNA, 13 bp, Unknown
  misc_feature (1)..( 13): Result.004 file - promoters50/1032274
ttatatttaaaat

SEQ ID NO: 163606 - DNA, 13 bp, Unknown
  misc_feature (1)..( 13): Result.004 file - promoters50/1032274
ttacatttagtag

SEQ ID NO: 163607 - DNA, 13 bp, Unknown
  misc_feature (1)..( 13): Result.004 file - promoters50/1032274
ctatatctaattt

SEQ ID NO: 163608 - DNA, 13 bp, Unknown
  misc_feature (1)..( 13): Result.004 file - promoters50/1032274
ttatatgacttgt

SEQ ID NO: 163609 - DNA, 13 bp, Unknown
  misc_feature (1)..( 13): Result.004 file - promoters50/1032274
aactatttgactt

SEQ ID NO: 163610 - DNA, 10 bp, Unknown
  misc_feature (1)..( 10): Result.004 file - promoters50/1032274
tgttttgata

SEQ ID NO: 163611 - DNA, 10 bp, Unknown
  misc_feature (1)..( 10): Result.004 file - promoters50/1032274
gaattttata

SEQ ID NO: 163612 - DNA, 10 bp, Unknown
  misc_feature (1)..( 10): Result.004 file - promoters50/1032274
ttatttgatt

SEQ ID NO: 163613 - DNA, 10 bp, Unknown
  misc_feature (1)..( 10): Result.004 file - promoters50/1032274
gaggttgatt

SEQ ID NO: 163614 - DNA, 10 bp, Unknown
  misc_feature (1)..( 10): Result.004 file - promoters50/1032291
ttaattgatg

SEQ ID NO: 163615 - DNA, 7 bp, Unknown
  misc_feature (1)..( 7): Result.004 file - promoters50/1032291
attcgtt

SEQ ID NO: 163616 - DNA, 7 bp, Unknown
  misc_feature (1)..( 7): Result.004 file - promoters50/1032291
attagtt

SEQ ID NO: 163617 - DNA, 7 bp, Unknown
  misc_feature (1)..( 7): Result.004 file - promoters50/1032291
atttgtt

SEQ ID NO: 163618 - DNA, 7 bp, Unknown
  misc_feature (1)..( 7): Result.004 file - promoters50/1032313
atttgta

SEQ ID NO: 163619 - DNA, 13 bp, Unknown
  misc_feature (1)..( 13): Result.004 file - promoters50/1032313
taaaaaagtgttg

SEQ ID NO: 163620 - DNA, 13 bp, Unknown
  misc_feature (1)..( 13): Result.004 file - promoters50/1032313
cgctaaagtgatc

SEQ ID NO: 163621 - DNA, 13 bp, Unknown
  misc_feature (1)..( 13): Result.004 file - promoters50/1032313
aaaaaaagttttt

SEQ ID NO: 163622 - DNA, 13 bp, Unknown
  misc_feature (1)..( 13): Result.004 file - promoters50/1032313
tcataaaatgtta

SEQ ID NO: 163623 - DNA, 13 bp, Unknown
  misc_feature (1)..( 13): Result.004 file - promoters50/1032313
ctaaaaaatatta

SEQ ID NO: 163624 - DNA, 13 bp, Unknown
  misc_feature (1)..( 13): Result.004 file - promoters50/1032313
taataaattttga

SEQ ID NO: 163625 - DNA, 15 bp, Unknown
  misc_feature (1)..( 15): Result.004 file - promoters50/1032313
agggttctcgaaaga

SEQ ID NO: 163626 - DNA, 15 bp, Unknown
  misc_feature (1)..( 15): Result.004 file - promoters50/1032313
cattttctagaaata

SEQ ID NO: 163627 - DNA, 15 bp, Unknown
  misc_feature (1)..( 15): Result.004 file - promoters50/1032313
catcttctaaaatct

SEQ ID NO: 163628 - DNA, 15 bp, Unknown
  misc_feature (1)..( 15): Result.004 file - promoters50/1032313
ctatttcaaaaatac

SEQ ID NO: 163629 - DNA, 15 bp, Unknown
  misc_feature (1)..( 15): Result.004 file - promoters50/1032313
taagtacaataatac

SEQ ID NO: 163630 - DNA, 15 bp, Unknown
  misc_feature (1)..( 15): Result.004 file - promoters50/1032313
gtgcttcaaacaaaa

SEQ ID NO: 163631 - DNA, 14 bp, Unknown
  misc_feature (1)..( 14): Result.004 file - promoters50/1032313
catcttcaaaatta

SEQ ID NO: 163632 - DNA, 14 bp, Unknown
  misc_feature (1)..( 14): Result.004 file - promoters50/1032313
ctatttcaaaaata

SEQ ID NO: 163633 - DNA, 14 bp, Unknown
  misc_feature (1)..( 14): Result.004 file - promoters50/1032313
gtgcttcaaacaaa

SEQ ID NO: 163634 - DNA, 15 bp, Unknown
  misc_feature (1)..( 15): Result.004 file - promoters50/1032313
catcttctaaaatct

SEQ ID NO: 163635 - DNA, 16 bp, Unknown
  misc_feature (1)..( 16): Result.004 file - promoters50/1032313
gtgcttccaacaaatg

SEQ ID NO: 163636 - DNA, 16 bp, Unknown
  misc_feature (1)..( 16): Result.004 file - promoters50/1032316
gtaagtacaataatac

SEQ ID NO: 163637 - DNA, 15 bp, Unknown
  misc_feature (1)..( 15): Result.004 file - promoters50/1032316
tttcttaaattaaaa

SEQ ID NO: 163638 - DNA, 15 bp, Unknown
  misc_feature (1)..( 15): Result.004 file - promoters50/1032316
gttcttcaattgaaa

SEQ ID NO: 163639 - DNA, 16 bp, Unknown
  misc_feature (1)..( 16): Result.004 file - promoters50/1032316
aaatctgaaaaattca

SEQ ID NO: 163640 - DNA, 16 bp, Unknown
  misc_feature (1)..( 16): Result.004 file - promoters50/1032316
tttactttttttttcc

SEQ ID NO: 163641 - DNA, 16 bp, Unknown
  misc_feature (1)..( 16): Result.004 file - promoters50/1032316
cgttcttgtactgagc

SEQ ID NO: 163642 - DNA, 16 bp, Unknown
  misc_feature (1)..( 16): Result.004 file - promoters50/1032381
tttgcttattacagta

SEQ ID NO: 163643 - DNA, 9 bp, Unknown
  misc_feature (1)..( 9): Result.004 file - promoters50/1032381
tttactttg

SEQ ID NO: 163644 - DNA, 9 bp, Unknown
  misc_feature (1)..( 9): Result.004 file - promoters50/1032381
attaatttt

SEQ ID NO: 163645 - DNA, 9 bp, Unknown
  misc_feature (1)..( 9): Result.004 file - promoters50/1032381
taaactttg

SEQ ID NO: 163646 - DNA, 9 bp, Unknown
  misc_feature (1)..( 9): Result.004 file - promoters50/1032381
gttaccttg

SEQ ID NO: 163647 - DNA, 9 bp, Unknown
  misc_feature (1)..( 9): Result.004 file - promoters50/1032381
tttgcttct

SEQ ID NO: 163648 - DNA, 9 bp, Unknown
  misc_feature (1)..( 9): Result.004 file - promoters50/1032381
tataaatat

SEQ ID NO: 163649 - DNA, 11 bp, Unknown
  misc_feature (1)..( 11): Result.004 file - promoters50/1032381
tcaatccaaag

SEQ ID NO: 163650 - DNA, 11 bp, Unknown
  misc_feature (1)..( 11): Result.004 file - promoters50/1032381
aaaatcaaaat

SEQ ID NO: 163651 - DNA, 11 bp, Unknown
  misc_feature (1)..( 11): Result.004 file - promoters50/1032381
ttaataaaaag

SEQ ID NO: 163652 - DNA, 11 bp, Unknown
  misc_feature (1)..( 11): Result.004 file - promoters50/1032381
caaattaaaaa

SEQ ID NO: 163653 - DNA, 11 bp, Unknown
  misc_feature (1)..( 11): Result.004 file - promoters50/1032381
tttttaaaaag

SEQ ID NO: 163654 - DNA, 11 bp, Unknown
  misc_feature (1)..( 11): Result.004 file - promoters50/1032381
caaattacaaa

SEQ ID NO: 163655 - DNA, 11 bp, Unknown
  misc_feature (1)..( 11): Result.004 file - promoters50/1032381
cgtattaaagt

SEQ ID NO: 163656 - DNA, 16 bp, Unknown
  misc_feature (1)..( 16): Result.004 file - promoters50/1032381
ttccactataaaactt

SEQ ID NO: 163657 - DNA, 16 bp, Unknown
  misc_feature (1)..( 16): Result.004 file - promoters50/1032381
cctaactatataacct

SEQ ID NO: 163658 - DNA, 16 bp, Unknown
  misc_feature (1)..( 16): Result.004 file - promoters50/1032381
acggactataaaaagg

SEQ ID NO: 163659 - DNA, 16 bp, Unknown
  misc_feature (1)..( 16): Result.004 file - promoters50/1032381
accctatataaagata

SEQ ID NO: 163660 - DNA, 16 bp, Unknown
  misc_feature (1)..( 16): Result.004 file - promoters50/1032381
attcctaataaaacct

SEQ ID NO: 163661 - DNA, 16 bp, Unknown
  misc_feature (1)..( 16): Result.004 file - promoters50/1032381
cattactattaaagcc

SEQ ID NO: 163662 - DNA, 12 bp, Unknown
  misc_feature (1)..( 12): Result.004 file - promoters50/1032381
tttcttacgcca

SEQ ID NO: 163663 - DNA, 12 bp, Unknown
  misc_feature (1)..( 12): Result.004 file - promoters50/1032381
ttttttagtttt

SEQ ID NO: 163664 - DNA, 12 bp, Unknown
  misc_feature (1)..( 12): Result.004 file - promoters50/1032381
agttttactttt

SEQ ID NO: 163665 - DNA, 12 bp, Unknown
  misc_feature (1)..( 12): Result.004 file - promoters50/1032381
ctttttgttgtt

SEQ ID NO: 163666 - DNA, 12 bp, Unknown
  misc_feature (1)..( 12): Result.004 file - promoters50/1032381
atttttggacca

SEQ ID NO: 163667 - DNA, 12 bp, Unknown
  misc_feature (1)..( 12): Result.004 file - promoters50/1032381
gtttttgctgat

SEQ ID NO: 163668 - DNA, 10 bp, Unknown
  misc_feature (1)..( 10): Result.004 file - promoters50/1032381
caaaagaatc

SEQ ID NO: 163669 - DNA, 10 bp, Unknown
  misc_feature (1)..( 10): Result.004 file - promoters50/1032381
acaaaaaata

SEQ ID NO: 163670 - DNA, 10 bp, Unknown
  misc_feature (1)..( 10): Result.004 file - promoters50/1032381
caaaacaatt

SEQ ID NO: 163671 - DNA, 11 bp, Unknown
  misc_feature (1)..( 11): Result.004 file - promoters50/1032381
aaaaagtaatt

SEQ ID NO: 163672 - DNA, 11 bp, Unknown
  misc_feature (1)..( 11): Result.004 file - promoters50/1032381
aaaaagttttt

SEQ ID NO: 163673 - DNA, 11 bp, Unknown
  misc_feature (1)..( 11): Result.004 file - promoters50/1032381
aactagtgatt

SEQ ID NO: 163674 - DNA, 8 bp, Unknown
  misc_feature (1)..( 8): Result.004 file - promoters50/1032381
tgtttttg

SEQ ID NO: 163675 - DNA, 8 bp, Unknown
  misc_feature (1)..( 8): Result.004 file - promoters50/1032381
agtttttt

SEQ ID NO: 163676 - DNA, 8 bp, Unknown
  misc_feature (1)..( 8): Result.004 file - promoters50/1032381
gatttttg

SEQ ID NO: 163677 - DNA, 8 bp, Unknown
  misc_feature (1)..( 8): Result.004 file - promoters50/1032381
tctttttg

SEQ ID NO: 163678 - DNA, 8 bp, Unknown
  misc_feature (1)..( 8): Result.004 file - promoters50/1032381
agttttac

SEQ ID NO: 163679 - DNA, 8 bp, Unknown
  misc_feature (1)..( 8): Result.004 file - promoters50/1032381
tgtttttg

SEQ ID NO: 163680 - DNA, 11 bp, Unknown
  misc_feature (1)..( 11): Result.004 file - promoters50/1032381
tatttaaatta

SEQ ID NO: 163681 - DNA, 11 bp, Unknown
  misc_feature (1)..( 11): Result.004 file - promoters50/1032381
aatttgaattt

SEQ ID NO: 163682 - DNA, 11 bp, Unknown
  misc_feature (1)..( 11): Result.004 file - promoters50/1032381
tttgtaaattt

SEQ ID NO: 163683 - DNA, 11 bp, Unknown
  misc_feature (1)..( 11): Result.004 file - promoters50/1032381
tatctaatgaa

SEQ ID NO: 163684 - DNA, 11 bp, Unknown
  misc_feature (1)..( 11): Result.004 file - promoters50/1032381
tgtaaaaatta

SEQ ID NO: 163685 - DNA, 11 bp, Unknown
  misc_feature (1)..( 11): Result.004 file - promoters50/1032389
tgagtagatta

SEQ ID NO: 163686 - DNA, 12 bp, Unknown
  misc_feature (1)..( 12): Result.004 file - promoters50/1032389
gtttggttcatt

SEQ ID NO: 163687 - DNA, 12 bp, Unknown
  misc_feature (1)..( 12): Result.004 file - promoters50/1032389
aaaaggttaatt

SEQ ID NO: 163688 - DNA, 12 bp, Unknown
  misc_feature (1)..( 12): Result.004 file - promoters50/1032389
ttttgtttcaga

SEQ ID NO: 163689 - DNA, 12 bp, Unknown
  misc_feature (1)..( 12): Result.004 file - promoters50/1032389
tgttgtttcgtg

SEQ ID NO: 163690 - DNA, 12 bp, Unknown
  misc_feature (1)..( 12): Result.004 file - promoters50/1032389
atttttttattt

SEQ ID NO: 163691 - DNA, 12 bp, Unknown
  misc_feature (1)..( 12): Result.004 file - promoters50/1032389
attttgtgtttt

SEQ ID NO: 163692 - DNA, 9 bp, Unknown
  misc_feature (1)..( 9): Result.004 file - promoters50/1032389
tattttttt

SEQ ID NO: 163693 - DNA, 9 bp, Unknown
  misc_feature (1)..( 9): Result.004 file - promoters50/1032389
aatttttat

SEQ ID NO: 163694 - DNA, 9 bp, Unknown
  misc_feature (1)..( 9): Result.004 file - promoters50/1032389
cattttttt

SEQ ID NO: 163695 - DNA, 9 bp, Unknown
  misc_feature (1)..( 9): Result.004 file - promoters50/1032389
tattttgtt

SEQ ID NO: 163696 - DNA, 10 bp, Unknown
  misc_feature (1)..( 10): Result.004 file - promoters50/1032389
gttttgtttg

SEQ ID NO: 163697 - DNA, 10 bp, Unknown
  misc_feature (1)..( 10): Result.004 file - promoters50/1032400
aattttgtgt

SEQ ID NO: 163698 - DNA, 8 bp, Unknown
  misc_feature (1)..( 8): Result.004 file - promoters50/1032400
aatttatt

SEQ ID NO: 163699 - DNA, 8 bp, Unknown
  misc_feature (1)..( 8): Result.004 file - promoters50/1032400
aattgatt

SEQ ID NO: 163700 - DNA, 8 bp, Unknown
  misc_feature (1)..( 8): Result.004 file - promoters50/1032436
ctttgatt

SEQ ID NO: 163701 - DNA, 10 bp, Unknown
  misc_feature (1)..( 10): Result.004 file - promoters50/1032436
tgtactgaaa

SEQ ID NO: 163702 - DNA, 10 bp, Unknown
  misc_feature (1)..( 10): Result.004 file - promoters50/1032436
aatactcaaa

SEQ ID NO: 163703 - DNA, 10 bp, Unknown
  misc_feature (1)..( 10): Result.004 file - promoters50/1032436
acaactcaat

SEQ ID NO: 163704 - DNA, 10 bp, Unknown
  misc_feature (1)..( 10): Result.004 file - promoters50/1032436
aattctctct

SEQ ID NO: 163705 - DNA, 7 bp, Unknown
  misc_feature (1)..( 7): Result.004 file - promoters50/1032436
attattc

SEQ ID NO: 163706 - DNA, 7 bp, Unknown
  misc_feature (1)..( 7): Result.004 file - promoters50/1032436
attattt

SEQ ID NO: 163707 - DNA, 7 bp, Unknown
  misc_feature (1)..( 7): Result.004 file - promoters50/1032436
atttttt

SEQ ID NO: 163708 - DNA, 14 bp, Unknown
  misc_feature (1)..( 14): Result.004 file - promoters50/1032436
ctccgtgaagactt

SEQ ID NO: 163709 - DNA, 14 bp, Unknown
  misc_feature (1)..( 14): Result.004 file - promoters50/1032436
tcaaatgaagaaaa

SEQ ID NO: 163710 - DNA, 14 bp, Unknown
  misc_feature (1)..( 14): Result.004 file - promoters50/1032436
tcaaaagaagtaaa

SEQ ID NO: 163711 - DNA, 9 bp, Unknown
  misc_feature (1)..( 9): Result.004 file - promoters50/1032436
aataatgtt

SEQ ID NO: 163712 - DNA, 9 bp, Unknown
  misc_feature (1)..( 9): Result.004 file - promoters50/1032436
aataattcc

SEQ ID NO: 163713 - DNA, 9 bp, Unknown
  misc_feature (1)..( 9): Result.004 file - promoters50/1032436
aataaagtt

SEQ ID NO: 163714 - DNA, 8 bp, Unknown
  misc_feature (1)..( 8): Result.004 file - promoters50/1032436
acttttca

SEQ ID NO: 163715 - DNA, 8 bp, Unknown
  misc_feature (1)..( 8): Result.004 file - promoters50/1032436
actgttcc

SEQ ID NO: 163716 - DNA, 8 bp, Unknown
  misc_feature (1)..( 8): Result.004 file - promoters50/1032498
agttttca

SEQ ID NO: 163717 - DNA, 15 bp, Unknown
  misc_feature (1)..( 15): Result.004 file - promoters50/1032498
aatataaagcccaaa

SEQ ID NO: 163718 - DNA, 15 bp, Unknown
  misc_feature (1)..( 15): Result.004 file - promoters50/1032498
atttacaagcccaaa

SEQ ID NO: 163719 - DNA, 15 bp, Unknown
  misc_feature (1)..( 15): Result.004 file - promoters50/1032498
aataaaaagcccatg

SEQ ID NO: 163720 - DNA, 15 bp, Unknown
  misc_feature (1)..( 15): Result.004 file - promoters50/1032498
tgggccaagccgtat

SEQ ID NO: 163721 - DNA, 15 bp, Unknown
  misc_feature (1)..( 15): Result.004 file - promoters50/1032498
tttaaaaaagggaag

SEQ ID NO: 163722 - DNA, 15 bp, Unknown
  misc_feature (1)..( 15): Result.004 file - promoters50/1032498
aatcaaaatctaaaa

SEQ ID NO: 163723 - DNA, 10 bp, Unknown
  misc_feature (1)..( 10): Result.004 file - promoters50/1032498
gagttggata

SEQ ID NO: 163724 - DNA, 10 bp, Unknown
  misc_feature (1)..( 10): Result.004 file - promoters50/1032498
gagatggatc

SEQ ID NO: 163725 - DNA, 10 bp, Unknown
  misc_feature (1)..( 10): Result.004 file - promoters50/1032498
tctttggatt

SEQ ID NO: 163726 - DNA, 10 bp, Unknown
  misc_feature (1)..( 10): Result.004 file - promoters50/1032498
tttttgaata

SEQ ID NO: 163727 - DNA, 10 bp, Unknown
  misc_feature (1)..( 10): Result.004 file - promoters50/1032498
gagattgatt

SEQ ID NO: 163728 - DNA, 10 bp, Unknown
  misc_feature (1)..( 10): Result.004 file - promoters50/1032614
ggtttcgata

SEQ ID NO: 163729 - DNA, 11 bp, Unknown
  misc_feature (1)..( 11): Result.004 file - promoters50/1032614
ctctgaagctt

SEQ ID NO: 163730 - DNA, 11 bp, Unknown
  misc_feature (1)..( 11): Result.004 file - promoters50/1032614
tcttgaagctt

SEQ ID NO: 163731 - DNA, 11 bp, Unknown
  misc_feature (1)..( 11): Result.004 file - promoters50/1032614
atttgaagcga

SEQ ID NO: 163732 - DNA, 11 bp, Unknown
  misc_feature (1)..( 11): Result.004 file - promoters50/1032668
tctcgaagttc

SEQ ID NO: 163733 - DNA, 11 bp, Unknown
  misc_feature (1)..( 11): Result.004 file - promoters50/1032668
tttttaaaaga

SEQ ID NO: 163734 - DNA, 11 bp, Unknown
  misc_feature (1)..( 11): Result.004 file - promoters50/1032668
attttaataaa

SEQ ID NO: 163735 - DNA, 11 bp, Unknown
  misc_feature (1)..( 11): Result.004 file - promoters50/1032668
tttttaaaaca

SEQ ID NO: 163736 - DNA, 12 bp, Unknown
  misc_feature (1)..( 12): Result.004 file - promoters50/1032668
tttattaacaaa

SEQ ID NO: 163737 - DNA, 12 bp, Unknown
  misc_feature (1)..( 12): Result.004 file - promoters50/1032668
tcgtttgatata

SEQ ID NO: 163738 - DNA, 12 bp, Unknown
  misc_feature (1)..( 12): Result.004 file - promoters50/1032668
ggttgtgatata

SEQ ID NO: 163739 - DNA, 12 bp, Unknown
  misc_feature (1)..( 12): Result.004 file - promoters50/1032668
tcttttaatatg

SEQ ID NO: 163740 - DNA, 15 bp, Unknown
  misc_feature (1)..( 15): Result.004 file - promoters50/1032668
cgaatattaagaaag

SEQ ID NO: 163741 - DNA, 15 bp, Unknown
  misc_feature (1)..( 15): Result.004 file - promoters50/1032668
cgaaaatttagactt

SEQ ID NO: 163742 - DNA, 15 bp, Unknown
  misc_feature (1)..( 15): Result.004 file - promoters50/1032668
ggataattgagagca

SEQ ID NO: 163743 - DNA, 15 bp, Unknown
  misc_feature (1)..( 15): Result.004 file - promoters50/1032668
aaaaaaatgatagca

SEQ ID NO: 163744 - DNA, 15 bp, Unknown
  misc_feature (1)..( 15): Result.004 file - promoters50/1032668
taaaactttagtcca

SEQ ID NO: 163745 - DNA, 15 bp, Unknown
  misc_feature (1)..( 15): Result.004 file - promoters50/1032676
attcgatttagtcat

SEQ ID NO: 163746 - DNA, 10 bp, Unknown
  misc_feature (1)..( 10): Result.004 file - promoters50/1032676
agatattact

SEQ ID NO: 163747 - DNA, 10 bp, Unknown
  misc_feature (1)..( 10): Result.004 file - promoters50/1032676
cgatattaat

SEQ ID NO: 163748 - DNA, 10 bp, Unknown
  misc_feature (1)..( 10): Result.004 file - promoters50/1032676
agacattttt

SEQ ID NO: 163749 - DNA, 10 bp, Unknown
  misc_feature (1)..( 10): Result.004 file - promoters50/1032676
tgatattatt

SEQ ID NO: 163750 - DNA, 10 bp, Unknown
  misc_feature (1)..( 10): Result.004 file - promoters50/1032676
taataataac

SEQ ID NO: 163751 - DNA, 10 bp, Unknown
  misc_feature (1)..( 10): Result.004 file - promoters50/1032676
cgttattaat

SEQ ID NO: 163752 - DNA, 10 bp, Unknown
  misc_feature (1)..( 10): Result.004 file - promoters50/1032676
tgatatggcc

SEQ ID NO: 163753 - DNA, 12 bp, Unknown
  misc_feature (1)..( 12): Result.004 file - promoters50/1032676
gtctgaacgaag

SEQ ID NO: 163754 - DNA, 12 bp, Unknown
  misc_feature (1)..( 12): Result.004 file - promoters50/1032676
aaaagaaagaaa

SEQ ID NO: 163755 - DNA, 12 bp, Unknown
  misc_feature (1)..( 12): Result.004 file - promoters50/1032676
aaaaaaaagacc

SEQ ID NO: 163756 - DNA, 12 bp, Unknown
  misc_feature (1)..( 12): Result.004 file - promoters50/1032676
gtaacaaaaaag

SEQ ID NO: 163757 - DNA, 12 bp, Unknown
  misc_feature (1)..( 12): Result.004 file - promoters50/1032676
cttcaaacaaaa

SEQ ID NO: 163758 - DNA, 12 bp, Unknown
  misc_feature (1)..( 12): Result.004 file - promoters50/1032676
acccgagaaatc

SEQ ID NO: 163759 - DNA, 12 bp, Unknown
  misc_feature (1)..( 12): Result.004 file - promoters50/1032676
tttcaaaaatac

SEQ ID NO: 163760 - DNA, 12 bp, Unknown
  misc_feature (1)..( 12): Result.004 file - promoters50/1032676
agtcaaaagtga

SEQ ID NO: 163761 - DNA, 13 bp, Unknown
  misc_feature (1)..( 13): Result.004 file - promoters50/1032676
ttactaatagatt

SEQ ID NO: 163762 - DNA, 13 bp, Unknown
  misc_feature (1)..( 13): Result.004 file - promoters50/1032676
ttattaataaatt

SEQ ID NO: 163763 - DNA, 13 bp, Unknown
  misc_feature (1)..( 13): Result.004 file - promoters50/1032676
atattaatcattg

SEQ ID NO: 163764 - DNA, 13 bp, Unknown
  misc_feature (1)..( 13): Result.004 file - promoters50/1032676
tttttaacaaaag

SEQ ID NO: 163765 - DNA, 13 bp, Unknown
  misc_feature (1)..( 13): Result.004 file - promoters50/1032676
agagcaacaaaag

SEQ ID NO: 163766 - DNA, 13 bp, Unknown
  misc_feature (1)..( 13): Result.004 file - promoters50/1032678
gtaataataactc

SEQ ID NO: 163767 - DNA, 9 bp, Unknown
  misc_feature (1)..( 9): Result.004 file - promoters50/1032678
gaaaaagag

SEQ ID NO: 163768 - DNA, 9 bp, Unknown
  misc_feature (1)..( 9): Result.004 file - promoters50/1032678
gaaaaacct

SEQ ID NO: 163769 - DNA, 9 bp, Unknown
  misc_feature (1)..( 9): Result.004 file - promoters50/1032698
taaaatcct

SEQ ID NO: 163770 - DNA, 10 bp, Unknown
  misc_feature (1)..( 10): Result.004 file - promoters50/1032698
tattttttgg

SEQ ID NO: 163771 - DNA, 10 bp, Unknown
  misc_feature (1)..( 10): Result.004 file - promoters50/1032698
acttttttaa

SEQ ID NO: 163772 - DNA, 10 bp, Unknown
  misc_feature (1)..( 10): Result.004 file - promoters50/1032698
tatatttaat

SEQ ID NO: 163773 - DNA, 10 bp, Unknown
  misc_feature (1)..( 10): Result.004 file - promoters50/1032698
tatttttcta

SEQ ID NO: 163774 - DNA, 10 bp, Unknown
  misc_feature (1)..( 10): Result.004 file - promoters50/1032698
aattttacta

SEQ ID NO: 163775 - DNA, 10 bp, Unknown
  misc_feature (1)..( 10): Result.004 file - promoters50/1032698
gaatttataa

SEQ ID NO: 163776 - DNA, 10 bp, Unknown
  misc_feature (1)..( 10): Result.004 file - promoters50/1032698
tcttttttcg

SEQ ID NO: 163777 - DNA, 10 bp, Unknown
  misc_feature (1)..( 10): Result.004 file - promoters50/1032698
ctaaatgata

SEQ ID NO: 163778 - DNA, 10 bp, Unknown
  misc_feature (1)..( 10): Result.004 file - promoters50/1032698
aaaaaagatt

SEQ ID NO: 163779 - DNA, 10 bp, Unknown
  misc_feature (1)..( 10): Result.004 file - promoters50/1032698
aaaaataata

SEQ ID NO: 163780 - DNA, 11 bp, Unknown
  misc_feature (1)..( 11): Result.004 file - promoters50/1032698
aaaaatagata

SEQ ID NO: 163781 - DNA, 11 bp, Unknown
  misc_feature (1)..( 11): Result.004 file - promoters50/1032698
taaaatattcg

SEQ ID NO: 163782 - DNA, 11 bp, Unknown
  misc_feature (1)..( 11): Result.004 file - promoters50/1032698
aaaaattaaaa

SEQ ID NO: 163783 - DNA, 14 bp, Unknown
  misc_feature (1)..( 14): Result.004 file - promoters50/1032698
ttttgaacttatga

SEQ ID NO: 163784 - DNA, 14 bp, Unknown
  misc_feature (1)..( 14): Result.004 file - promoters50/1032698
taatgaatttataa

SEQ ID NO: 163785 - DNA, 9 bp, Unknown
  misc_feature (1)..( 9): Result.004 file - promoters50/1032698
aacttagca

SEQ ID NO: 163786 - DNA, 14 bp, Unknown
  misc_feature (1)..( 14): Result.004 file - promoters50/1032698
tcttgaattgccct

SEQ ID NO: 163787 - DNA, 14 bp, Unknown
  misc_feature (1)..( 14): Result.004 file - promoters50/1032698
tttttaaagttcca

SEQ ID NO: 163788 - DNA, 8 bp, Unknown
  misc_feature (1)..( 8): Result.004 file - promoters50/1032698
tctttttt

SEQ ID NO: 163789 - DNA, 16 bp, Unknown
  misc_feature (1)..( 16): Result.004 file - promoters50/1032698
aatttaatttcttcac

SEQ ID NO: 163790 - DNA, 16 bp, Unknown
  misc_feature (1)..( 16): Result.004 file - promoters50/1032698
accttattttatgaaa

SEQ ID NO: 163791 - DNA, 16 bp, Unknown
  misc_feature (1)..( 16): Result.004 file - promoters50/1032698
aacctaattctctaac

SEQ ID NO: 163792 - DNA, 16 bp, Unknown
  misc_feature (1)..( 16): Result.004 file - promoters50/1032698
aatttatattataaaa

SEQ ID NO: 163793 - DNA, 16 bp, Unknown
  misc_feature (1)..( 16): Result.004 file - promoters50/1032698
tatatatactatgtat

SEQ ID NO: 163794 - DNA, 16 bp, Unknown
  misc_feature (1)..( 16): Result.004 file - promoters50/1032698
tctctatttttagtta

SEQ ID NO: 163795 - DNA, 16 bp, Unknown
  misc_feature (1)..( 16): Result.004 file - promoters50/1032698
caactaatttgtcaga

SEQ ID NO: 163796 - DNA, 11 bp, Unknown
  misc_feature (1)..( 11): Result.004 file - promoters50/1032698
tatctgaaaaa

SEQ ID NO: 163797 - DNA, 11 bp, Unknown
  misc_feature (1)..( 11): Result.004 file - promoters50/1032698
aatcagaaatt

SEQ ID NO: 163798 - DNA, 11 bp, Unknown
  misc_feature (1)..( 11): Result.004 file - promoters50/1032698
aatcataaaaa

SEQ ID NO: 163799 - DNA, 11 bp, Unknown
  misc_feature (1)..( 11): Result.004 file - promoters50/1032698
tataaaaaaaa

SEQ ID NO: 163800 - DNA, 11 bp, Unknown
  misc_feature (1)..( 11): Result.004 file - promoters50/1032698
aatacaaatat

SEQ ID NO: 163801 - DNA, 11 bp, Unknown
  misc_feature (1)..( 11): Result.004 file - promoters50/1032698
accaagaaatt

SEQ ID NO: 163802 - DNA, 8 bp, Unknown
  misc_feature (1)..( 8): Result.004 file - promoters50/1032698
ctttcaaa

SEQ ID NO: 163803 - DNA, 8 bp, Unknown
  misc_feature (1)..( 8): Result.004 file - promoters50/1032698
aattcaaa

SEQ ID NO: 163804 - DNA, 8 bp, Unknown
  misc_feature (1)..( 8): Result.004 file - promoters50/1032698
aatacaaa

SEQ ID NO: 163805 - DNA, 8 bp, Unknown
  misc_feature (1)..( 8): Result.004 file - promoters50/1032698
tatataaa

SEQ ID NO: 163806 - DNA, 8 bp, Unknown
  misc_feature (1)..( 8): Result.004 file - promoters50/1032698
aattaaaa

SEQ ID NO: 163807 - DNA, 8 bp, Unknown
  misc_feature (1)..( 8): Result.004 file - promoters50/1032698
aataaaaa

SEQ ID NO: 163808 - DNA, 13 bp, Unknown
  misc_feature (1)..( 13): Result.004 file - promoters50/1032698
cataaaaaaagat

SEQ ID NO: 163809 - DNA, 13 bp, Unknown
  misc_feature (1)..( 13): Result.004 file - promoters50/1032698
aatacaaatatag

SEQ ID NO: 163810 - DNA, 13 bp, Unknown
  misc_feature (1)..( 13): Result.004 file - promoters50/1032698
tataaaaccaaga

SEQ ID NO: 163811 - DNA, 14 bp, Unknown
  misc_feature (1)..( 14): Result.004 file - promoters50/1032698
aatcagaaattaga

SEQ ID NO: 163812 - DNA, 14 bp, Unknown
  misc_feature (1)..( 14): Result.004 file - promoters50/1032698
tgacaaaaatagat

SEQ ID NO: 163813 - DNA, 14 bp, Unknown
  misc_feature (1)..( 14): Result.004 file - promoters50/1032698
aattcaaaccttcg

SEQ ID NO: 163814 - DNA, 17 bp, Unknown
  misc_feature (1)..( 17): Result.004 file - promoters50/1032698
tttataatataaataat

SEQ ID NO: 163815 - DNA, 17 bp, Unknown
  misc_feature (1)..( 17): Result.004 file - promoters50/1032698
atacaaatataggcgcc

SEQ ID NO: 163816 - DNA, 17 bp, Unknown
  misc_feature (1)..( 17): Result.004 file - promoters50/1032698
tatccaataaaaataat

SEQ ID NO: 163817 - DNA, 17 bp, Unknown
  misc_feature (1)..( 17): Result.004 file - promoters50/1032698
ttttctatataaaaaaa

SEQ ID NO: 163818 - DNA, 17 bp, Unknown
  misc_feature (1)..( 17): Result.004 file - promoters50/1032698
attaaaatatatttaat

SEQ ID NO: 163819 - DNA, 17 bp, Unknown
  misc_feature (1)..( 17): Result.004 file - promoters50/1032713
attaaaatattcgaaat

SEQ ID NO: 163820 - DNA, 9 bp, Unknown
  misc_feature (1)..( 9): Result.004 file - promoters50/1032713
aaacgccaa

SEQ ID NO: 163821 - DNA, 9 bp, Unknown
  misc_feature (1)..( 9): Result.004 file - promoters50/1032713
aaaagccat

SEQ ID NO: 163822 - DNA, 9 bp, Unknown
  misc_feature (1)..( 9): Result.004 file - promoters50/1032713
acacggcaa

SEQ ID NO: 163823 - DNA, 9 bp, Unknown
  misc_feature (1)..( 9): Result.004 file - promoters50/1032713
taaatccat

SEQ ID NO: 163824 - DNA, 7 bp, Unknown
  misc_feature (1)..( 7): Result.004 file - promoters50/1032713
caaaata

SEQ ID NO: 163825 - DNA, 7 bp, Unknown
  misc_feature (1)..( 7): Result.004 file - promoters50/1032713
caaaata

SEQ ID NO: 163826 - DNA, 7 bp, Unknown
  misc_feature (1)..( 7): Result.004 file - promoters50/1032713
caacata

SEQ ID NO: 163827 - DNA, 10 bp, Unknown
  misc_feature (1)..( 10): Result.004 file - promoters50/1032713
attacttact

SEQ ID NO: 163828 - DNA, 10 bp, Unknown
  misc_feature (1)..( 10): Result.004 file - promoters50/1032713
attgcttata

SEQ ID NO: 163829 - DNA, 10 bp, Unknown
  misc_feature (1)..( 10): Result.004 file - promoters50/1032713
tgtactaact

SEQ ID NO: 163830 - DNA, 9 bp, Unknown
  misc_feature (1)..( 9): Result.004 file - promoters50/1032713
attgaaaca

SEQ ID NO: 163831 - DNA, 9 bp, Unknown
  misc_feature (1)..( 9): Result.004 file - promoters50/1032713
tttgaaaca

SEQ ID NO: 163832 - DNA, 9 bp, Unknown
  misc_feature (1)..( 9): Result.004 file - promoters50/1032730
tttcaaaac

SEQ ID NO: 163833 - DNA, 10 bp, Unknown
  misc_feature (1)..( 10): Result.004 file - promoters50/1032730
tataatttga

SEQ ID NO: 163834 - DNA, 10 bp, Unknown
  misc_feature (1)..( 10): Result.004 file - promoters50/1032730
gttaatttca

SEQ ID NO: 163835 - DNA, 10 bp, Unknown
  misc_feature (1)..( 10): Result.004 file - promoters50/1032730
aattatttta

SEQ ID NO: 163836 - DNA, 10 bp, Unknown
  misc_feature (1)..( 10): Result.004 file - promoters50/1032730
gattatactg

SEQ ID NO: 163837 - DNA, 10 bp, Unknown
  misc_feature (1)..( 10): Result.004 file - promoters50/1032730
gttaattact

SEQ ID NO: 163838 - DNA, 10 bp, Unknown
  misc_feature (1)..( 10): Result.004 file - promoters50/1032730
ccaaatttca

SEQ ID NO: 163839 - DNA, 11 bp, Unknown
  misc_feature (1)..( 11): Result.004 file - promoters50/1032730
aattattttgc

SEQ ID NO: 163840 - DNA, 11 bp, Unknown
  misc_feature (1)..( 11): Result.004 file - promoters50/1032730
aatgatttaat

SEQ ID NO: 163841 - DNA, 11 bp, Unknown
  misc_feature (1)..( 11): Result.004 file - promoters50/1032730
aattatataaa

SEQ ID NO: 163842 - DNA, 12 bp, Unknown
  misc_feature (1)..( 12): Result.004 file - promoters50/1032730
atttagtttcta

SEQ ID NO: 163843 - DNA, 12 bp, Unknown
  misc_feature (1)..( 12): Result.004 file - promoters50/1032730
tgtggatttata

SEQ ID NO: 163844 - DNA, 12 bp, Unknown
  misc_feature (1)..( 12): Result.004 file - promoters50/1032752
caatcctttagt

SEQ ID NO: 163845 - DNA, 9 bp, Unknown
  misc_feature (1)..( 9): Result.004 file - promoters50/1032752
gatttatac

SEQ ID NO: 163846 - DNA, 9 bp, Unknown
  misc_feature (1)..( 9): Result.004 file - promoters50/1032752
aatttattc

SEQ ID NO: 163847 - DNA, 9 bp, Unknown
  misc_feature (1)..( 9): Result.004 file - promoters50/1032752
catttatca

SEQ ID NO: 163848 - DNA, 9 bp, Unknown
  misc_feature (1)..( 9): Result.004 file - promoters50/1032752
aatatatta

SEQ ID NO: 163849 - DNA, 9 bp, Unknown
  misc_feature (1)..( 9): Result.004 file - promoters50/1032752
tatgtatat

SEQ ID NO: 163850 - DNA, 11 bp, Unknown
  misc_feature (1)..( 11): Result.004 file - promoters50/1032752
acagtatgaga

SEQ ID NO: 163851 - DNA, 11 bp, Unknown
  misc_feature (1)..( 11): Result.004 file - promoters50/1032752
catttatcaga

SEQ ID NO: 163852 - DNA, 11 bp, Unknown
  misc_feature (1)..( 11): Result.004 file - promoters50/1032752
cattaatcatt

SEQ ID NO: 163853 - DNA, 11 bp, Unknown
  misc_feature (1)..( 11): Result.004 file - promoters50/1032752
catgaatatat

SEQ ID NO: 163854 - DNA, 11 bp, Unknown
  misc_feature (1)..( 11): Result.004 file - promoters50/1032752
tatgtatatct

SEQ ID NO: 163855 - DNA, 12 bp, Unknown
  misc_feature (1)..( 12): Result.004 file - promoters50/1032752
aaaaatttattc

SEQ ID NO: 163856 - DNA, 12 bp, Unknown
  misc_feature (1)..( 12): Result.004 file - promoters50/1032752
aaaaatggctat

SEQ ID NO: 163857 - DNA, 13 bp, Unknown
  misc_feature (1)..( 13): Result.004 file - promoters50/1032752
aaacaatacctta

SEQ ID NO: 163858 - DNA, 13 bp, Unknown
  misc_feature (1)..( 13): Result.004 file - promoters50/1032752
gaacaatatagca

SEQ ID NO: 163859 - DNA, 13 bp, Unknown
  misc_feature (1)..( 13): Result.004 file - promoters50/1032756
aaaaactaagaat

SEQ ID NO: 163860 - DNA, 9 bp, Unknown
  misc_feature (1)..( 9): Result.004 file - promoters50/1032756
tttattttt

SEQ ID NO: 163861 - DNA, 9 bp, Unknown
  misc_feature (1)..( 9): Result.004 file - promoters50/1032756
cttactttt

SEQ ID NO: 163862 - DNA, 9 bp, Unknown
  misc_feature (1)..( 9): Result.004 file - promoters50/1032756
tttattttc

SEQ ID NO: 163863 - DNA, 9 bp, Unknown
  misc_feature (1)..( 9): Result.004 file - promoters50/1032756
ttaactttt

SEQ ID NO: 163864 - DNA, 11 bp, Unknown
  misc_feature (1)..( 11): Result.004 file - promoters50/1032756
caacatttcga

SEQ ID NO: 163865 - DNA, 11 bp, Unknown
  misc_feature (1)..( 11): Result.004 file - promoters50/1032756
caatatttaat

SEQ ID NO: 163866 - DNA, 11 bp, Unknown
  misc_feature (1)..( 11): Result.004 file - promoters50/1032756
tcatatttgta

SEQ ID NO: 163867 - DNA, 11 bp, Unknown
  misc_feature (1)..( 11): Result.004 file - promoters50/1032756
cagtatctaat

SEQ ID NO: 163868 - DNA, 14 bp, Unknown
  misc_feature (1)..( 14): Result.004 file - promoters50/1032756
tcgataattcatta

SEQ ID NO: 163869 - DNA, 14 bp, Unknown
  misc_feature (1)..( 14): Result.004 file - promoters50/1032756
tcgaaaattaattc

SEQ ID NO: 163870 - DNA, 14 bp, Unknown
  misc_feature (1)..( 14): Result.004 file - promoters50/1032756
tttgtaattaatta

SEQ ID NO: 163871 - DNA, 11 bp, Unknown
  misc_feature (1)..( 11): Result.004 file - promoters50/1032756
ttttcttatta

SEQ ID NO: 163872 - DNA, 11 bp, Unknown
  misc_feature (1)..( 11): Result.004 file - promoters50/1032756
ttttcatattt

SEQ ID NO: 163873 - DNA, 11 bp, Unknown
  misc_feature (1)..( 11): Result.004 file - promoters50/1032756
atccaatattt

SEQ ID NO: 163874 - DNA, 11 bp, Unknown
  misc_feature (1)..( 11): Result.004 file - promoters50/1032756
gtatctaatgg

SEQ ID NO: 163875 - DNA, 10 bp, Unknown
  misc_feature (1)..( 10): Result.004 file - promoters50/1032756
tttggaactt

SEQ ID NO: 163876 - DNA, 10 bp, Unknown
  misc_feature (1)..( 10): Result.004 file - promoters50/1032756
tttgaaactt

SEQ ID NO: 163877 - DNA, 10 bp, Unknown
  misc_feature (1)..( 10): Result.004 file - promoters50/1032756
tttcaaatgg

SEQ ID NO: 163878 - DNA, 8 bp, Unknown
  misc_feature (1)..( 8): Result.004 file - promoters50/1032756
tttcattc

SEQ ID NO: 163879 - DNA, 8 bp, Unknown
  misc_feature (1)..( 8): Result.004 file - promoters50/1032756
ttttattt

SEQ ID NO: 163880 - DNA, 8 bp, Unknown
  misc_feature (1)..( 8): Result.004 file - promoters50/1032788
atttatat

SEQ ID NO: 163881 - DNA, 8 bp, Unknown
  misc_feature (1)..( 8): Result.004 file - promoters50/1032788
ttacaaac

SEQ ID NO: 163882 - DNA, 8 bp, Unknown
  misc_feature (1)..( 8): Result.004 file - promoters50/1032788
ctacaaat

SEQ ID NO: 163883 - DNA, 8 bp, Unknown
  misc_feature (1)..( 8): Result.004 file - promoters50/1032788
ttataaaa

SEQ ID NO: 163884 - DNA, 8 bp, Unknown
  misc_feature (1)..( 8): Result.004 file - promoters50/1032788
ttagaaaa

SEQ ID NO: 163885 - DNA, 8 bp, Unknown
  misc_feature (1)..( 8): Result.004 file - promoters50/1032788
aaataaaa

SEQ ID NO: 163886 - DNA, 8 bp, Unknown
  misc_feature (1)..( 8): Result.004 file - promoters50/1032788
atatcaaa

SEQ ID NO: 163887 - DNA, 8 bp, Unknown
  misc_feature (1)..( 8): Result.004 file - promoters50/1032788
caagaaaa

SEQ ID NO: 163888 - DNA, 10 bp, Unknown
  misc_feature (1)..( 10): Result.004 file - promoters50/1032788
ttcaaataat

SEQ ID NO: 163889 - DNA, 10 bp, Unknown
  misc_feature (1)..( 10): Result.004 file - promoters50/1032788
gacaaataaa

SEQ ID NO: 163890 - DNA, 10 bp, Unknown
  misc_feature (1)..( 10): Result.004 file - promoters50/1032788
tttaaaaaaa

SEQ ID NO: 163891 - DNA, 10 bp, Unknown
  misc_feature (1)..( 10): Result.004 file - promoters50/1032788
tacaaaaaaa

SEQ ID NO: 163892 - DNA, 10 bp, Unknown
  misc_feature (1)..( 10): Result.004 file - promoters50/1032788
tgcaaaaaac

SEQ ID NO: 163893 - DNA, 10 bp, Unknown
  misc_feature (1)..( 10): Result.004 file - promoters50/1032788
tacaaaacta

SEQ ID NO: 163894 - DNA, 11 bp, Unknown
  misc_feature (1)..( 11): Result.004 file - promoters50/1032788
aaaacaattct

SEQ ID NO: 163895 - DNA, 11 bp, Unknown
  misc_feature (1)..( 11): Result.004 file - promoters50/1032788
gaaaaaatagt

SEQ ID NO: 163896 - DNA, 11 bp, Unknown
  misc_feature (1)..( 11): Result.004 file - promoters50/1032788
aaaacaaacgt

SEQ ID NO: 163897 - DNA, 11 bp, Unknown
  misc_feature (1)..( 11): Result.004 file - promoters50/1032788
aagaaaatata

SEQ ID NO: 163898 - DNA, 11 bp, Unknown
  misc_feature (1)..( 11): Result.004 file - promoters50/1032788
taaaaaatatt

SEQ ID NO: 163899 - DNA, 11 bp, Unknown
  misc_feature (1)..( 11): Result.004 file - promoters50/1032788
taatatatatt

SEQ ID NO: 163900 - DNA, 13 bp, Unknown
  misc_feature (1)..( 13): Result.004 file - promoters50/1032788
tacatttttttca

SEQ ID NO: 163901 - DNA, 13 bp, Unknown
  misc_feature (1)..( 13): Result.004 file - promoters50/1032788
ataattattttgc

SEQ ID NO: 163902 - DNA, 13 bp, Unknown
  misc_feature (1)..( 13): Result.004 file - promoters50/1032788
ctttttatttctt

SEQ ID NO: 163903 - DNA, 13 bp, Unknown
  misc_feature (1)..( 13): Result.004 file - promoters50/1032788
ttatttatttact

SEQ ID NO: 163904 - DNA, 13 bp, Unknown
  misc_feature (1)..( 13): Result.004 file - promoters50/1032788
catattattagta

SEQ ID NO: 163905 - DNA, 13 bp, Unknown
  misc_feature (1)..( 13): Result.004 file - promoters50/1032788
ccatatatgtctg

SEQ ID NO: 163906 - DNA, 13 bp, Unknown
  misc_feature (1)..( 13): Result.004 file - promoters50/1032788
tcacttatatctt

SEQ ID NO: 163907 - DNA, 11 bp, Unknown
  misc_feature (1)..( 11): Result.004 file - promoters50/1032788
tttgaaaaaac

SEQ ID NO: 163908 - DNA, 11 bp, Unknown
  misc_feature (1)..( 11): Result.004 file - promoters50/1032788
ttagaaaaatg

SEQ ID NO: 163909 - DNA, 11 bp, Unknown
  misc_feature (1)..( 11): Result.004 file - promoters50/1032788
aacgaaaaata

SEQ ID NO: 163910 - DNA, 11 bp, Unknown
  misc_feature (1)..( 11): Result.004 file - promoters50/1032788
aattaaacata

SEQ ID NO: 163911 - DNA, 11 bp, Unknown
  misc_feature (1)..( 11): Result.004 file - promoters50/1032788
ttataaaatac

SEQ ID NO: 163912 - DNA, 11 bp, Unknown
  misc_feature (1)..( 11): Result.004 file - promoters50/1032788
atatcaaacaa

SEQ ID NO: 163913 - DNA, 11 bp, Unknown
  misc_feature (1)..( 11): Result.004 file - promoters50/1032788
caagaaaacga

SEQ ID NO: 163914 - DNA, 11 bp, Unknown
  misc_feature (1)..( 11): Result.004 file - promoters50/1032788
ttatttattta

SEQ ID NO: 163915 - DNA, 11 bp, Unknown
  misc_feature (1)..( 11): Result.004 file - promoters50/1032788
acttttgtttc

SEQ ID NO: 163916 - DNA, 11 bp, Unknown
  misc_feature (1)..( 11): Result.004 file - promoters50/1032788
atgtttgttta

SEQ ID NO: 163917 - DNA, 11 bp, Unknown
  misc_feature (1)..( 11): Result.004 file - promoters50/1032788
ttatttcttta

SEQ ID NO: 163918 - DNA, 11 bp, Unknown
  misc_feature (1)..( 11): Result.004 file - promoters50/1032788
atatatgtctg

SEQ ID NO: 163919 - DNA, 11 bp, Unknown
  misc_feature (1)..( 11): Result.004 file - promoters50/1032788
ttatatcttat

SEQ ID NO: 163920 - DNA, 12 bp, Unknown
  misc_feature (1)..( 12): Result.004 file - promoters50/1032788
atttaagtctag

SEQ ID NO: 163921 - DNA, 12 bp, Unknown
  misc_feature (1)..( 12): Result.004 file - promoters50/1032788
gaacaagtctct

SEQ ID NO: 163922 - DNA, 12 bp, Unknown
  misc_feature (1)..( 12): Result.004 file - promoters50/1032788
ccttgagtttag

SEQ ID NO: 163923 - DNA, 12 bp, Unknown
  misc_feature (1)..( 12): Result.004 file - promoters50/1032788
taacaattctaa

SEQ ID NO: 163924 - DNA, 12 bp, Unknown
  misc_feature (1)..( 12): Result.004 file - promoters50/1032788
acacaattaact

SEQ ID NO: 163925 - DNA, 12 bp, Unknown
  misc_feature (1)..( 12): Result.004 file - promoters50/1032788
ttagaatactaa

SEQ ID NO: 163926 - DNA, 12 bp, Unknown
  misc_feature (1)..( 12): Result.004 file - promoters50/1032788
taaaaattaaat

SEQ ID NO: 163927 - DNA, 16 bp, Unknown
  misc_feature (1)..( 16): Result.004 file - promoters50/1032788
aaaaaatttaattaac

SEQ ID NO: 163928 - DNA, 16 bp, Unknown
  misc_feature (1)..( 16): Result.004 file - promoters50/1032788
ttcctattttatttta

SEQ ID NO: 163929 - DNA, 16 bp, Unknown
  misc_feature (1)..( 16): Result.004 file - promoters50/1032788
tccaaaattaaaatca

SEQ ID NO: 163930 - DNA, 16 bp, Unknown
  misc_feature (1)..( 16): Result.004 file - promoters50/1032788
accaatgtttatttaa

SEQ ID NO: 163931 - DNA, 16 bp, Unknown
  misc_feature (1)..( 16): Result.004 file - promoters50/1032788
aacaacatttatgaaa

SEQ ID NO: 163932 - DNA, 16 bp, Unknown
  misc_feature (1)..( 16): Result.004 file - promoters50/1032788
aacaatattgcagtca

SEQ ID NO: 163933 - DNA, 10 bp, Unknown
  misc_feature (1)..( 10): Result.004 file - promoters50/1032788
tatgtatata

SEQ ID NO: 163934 - DNA, 10 bp, Unknown
  misc_feature (1)..( 10): Result.004 file - promoters50/1032788
tatatatata

SEQ ID NO: 163935 - DNA, 10 bp, Unknown
  misc_feature (1)..( 10): Result.004 file - promoters50/1032788
tatatatttg

SEQ ID NO: 163936 - DNA, 10 bp, Unknown
  misc_feature (1)..( 10): Result.004 file - promoters50/1032788
aataaatttt

SEQ ID NO: 163937 - DNA, 10 bp, Unknown
  misc_feature (1)..( 10): Result.004 file - promoters50/1032788
taaaaaaaga

SEQ ID NO: 163938 - DNA, 10 bp, Unknown
  misc_feature (1)..( 10): Result.004 file - promoters50/1032788
aaaacaaacg

SEQ ID NO: 163939 - DNA, 13 bp, Unknown
  misc_feature (1)..( 13): Result.004 file - promoters50/1032788
ttaataatatata

SEQ ID NO: 163940 - DNA, 13 bp, Unknown
  misc_feature (1)..( 13): Result.004 file - promoters50/1032788
aagaaaatataca

SEQ ID NO: 163941 - DNA, 13 bp, Unknown
  misc_feature (1)..( 13): Result.004 file - promoters50/1032788
agcgtcatattat

SEQ ID NO: 163942 - DNA, 13 bp, Unknown
  misc_feature (1)..( 13): Result.004 file - promoters50/1032788
tagttaatatata

SEQ ID NO: 163943 - DNA, 13 bp, Unknown
  misc_feature (1)..( 13): Result.004 file - promoters50/1032788
taaaaaatattat

SEQ ID NO: 163944 - DNA, 13 bp, Unknown
  misc_feature (1)..( 13): Result.004 file - promoters50/1032788
aagaaaaaatagt

SEQ ID NO: 163945 - DNA, 9 bp, Unknown
  misc_feature (1)..( 9): Result.004 file - promoters50/1032788
tatatatta

SEQ ID NO: 163946 - DNA, 9 bp, Unknown
  misc_feature (1)..( 9): Result.004 file - promoters50/1032788
gtcatatta

SEQ ID NO: 163947 - DNA, 9 bp, Unknown
  misc_feature (1)..( 9): Result.004 file - promoters50/1032788
tatatattt

SEQ ID NO: 163948 - DNA, 9 bp, Unknown
  misc_feature (1)..( 9): Result.004 file - promoters50/1032788
aataaattt

SEQ ID NO: 163949 - DNA, 10 bp, Unknown
  misc_feature (1)..( 10): Result.004 file - promoters50/1032788
gatataatta

SEQ ID NO: 163950 - DNA, 10 bp, Unknown
  misc_feature (1)..( 10): Result.004 file - promoters50/1032815
aaaataaact

SEQ ID NO: 163951 - DNA, 10 bp, Unknown
  misc_feature (1)..( 10): Result.004 file - promoters50/1032815
gaagattcta

SEQ ID NO: 163952 - DNA, 10 bp, Unknown
  misc_feature (1)..( 10): Result.004 file - promoters50/1032815
gaagtttcta

SEQ ID NO: 163953 - DNA, 10 bp, Unknown
  misc_feature (1)..( 10): Result.004 file - promoters50/1032844
tcagtttcat

SEQ ID NO: 163954 - DNA, 13 bp, Unknown
  misc_feature (1)..( 13): Result.004 file - promoters50/1032844
gctataatttcat

SEQ ID NO: 163955 - DNA, 13 bp, Unknown
  misc_feature (1)..( 13): Result.004 file - promoters50/1032844
atgtgaatatcat

SEQ ID NO: 163956 - DNA, 13 bp, Unknown
  misc_feature (1)..( 13): Result.004 file - promoters50/1032844
attctaattttct

SEQ ID NO: 163957 - DNA, 13 bp, Unknown
  misc_feature (1)..( 13): Result.004 file - promoters50/1032844
gctataatttcat

SEQ ID NO: 163958 - DNA, 13 bp, Unknown
  misc_feature (1)..( 13): Result.004 file - promoters50/1032884
atcctaatcgggt

SEQ ID NO: 163959 - DNA, 9 bp, Unknown
  misc_feature (1)..( 9): Result.004 file - promoters50/1032884
acatgcgaa

SEQ ID NO: 163960 - DNA, 9 bp, Unknown
  misc_feature (1)..( 9): Result.004 file - promoters50/1032884
agatgagaa

SEQ ID NO: 163961 - DNA, 9 bp, Unknown
  misc_feature (1)..( 9): Result.004 file - promoters50/1032884
agacgagaa

SEQ ID NO: 163962 - DNA, 9 bp, Unknown
  misc_feature (1)..( 9): Result.004 file - promoters50/1032884
ataattatc

SEQ ID NO: 163963 - DNA, 9 bp, Unknown
  misc_feature (1)..( 9): Result.004 file - promoters50/1032884
ataataatc

SEQ ID NO: 163964 - DNA, 9 bp, Unknown
  misc_feature (1)..( 9): Result.004 file - promoters50/1032884
gcaataatt

SEQ ID NO: 163965 - DNA, 8 bp, Unknown
  misc_feature (1)..( 8): Result.004 file - promoters50/1032884
agattatg

SEQ ID NO: 163966 - DNA, 8 bp, Unknown
  misc_feature (1)..( 8): Result.004 file - promoters50/1032884
gtattatg

SEQ ID NO: 163967 - DNA, 8 bp, Unknown
  misc_feature (1)..( 8): Result.004 file - promoters50/1032884
gtagtata

SEQ ID NO: 163968 - DNA, 11 bp, Unknown
  misc_feature (1)..( 11): Result.004 file - promoters50/1032884
aacagaagatg

SEQ ID NO: 163969 - DNA, 11 bp, Unknown
  misc_feature (1)..( 11): Result.004 file - promoters50/1032884
tgaagaagatg

SEQ ID NO: 163970 - DNA, 11 bp, Unknown
  misc_feature (1)..( 11): Result.004 file - promoters50/1032884
tgatgaagaag

SEQ ID NO: 163971 - DNA, 9 bp, Unknown
  misc_feature (1)..( 9): Result.004 file - promoters50/1032884
gatctctct

SEQ ID NO: 163972 - DNA, 9 bp, Unknown
  misc_feature (1)..( 9): Result.004 file - promoters50/1032884
gatctcttc

SEQ ID NO: 163973 - DNA, 9 bp, Unknown
  misc_feature (1)..( 9): Result.004 file - promoters50/1032884
actctttct

SEQ ID NO: 163974 - DNA, 11 bp, Unknown
  misc_feature (1)..( 11): Result.004 file - promoters50/1032884
taggcttttta

SEQ ID NO: 163975 - DNA, 11 bp, Unknown
  misc_feature (1)..( 11): Result.004 file - promoters50/1032884
tacacttttta

SEQ ID NO: 163976 - DNA, 11 bp, Unknown
  misc_feature (1)..( 11): Result.004 file - promoters50/1032884
tacactctttc

SEQ ID NO: 163977 - DNA, 8 bp, Unknown
  misc_feature (1)..( 8): Result.004 file - promoters50/1032884
aagtaatt

SEQ ID NO: 163978 - DNA, 8 bp, Unknown
  misc_feature (1)..( 8): Result.004 file - promoters50/1032884
atgtaatt

SEQ ID NO: 163979 - DNA, 8 bp, Unknown
  misc_feature (1)..( 8): Result.004 file - promoters50/1032897
atgtgatt

SEQ ID NO: 163980 - DNA, 9 bp, Unknown
  misc_feature (1)..( 9): Result.004 file - promoters50/1032897
agaaaaagg

SEQ ID NO: 163981 - DNA, 9 bp, Unknown
  misc_feature (1)..( 9): Result.004 file - promoters50/1032897
gaaaatagg

SEQ ID NO: 163982 - DNA, 9 bp, Unknown
  misc_feature (1)..( 9): Result.004 file - promoters50/1032897
ggaagaaga

SEQ ID NO: 163983 - DNA, 9 bp, Unknown
  misc_feature (1)..( 9): Result.004 file - promoters50/1032897
gaaaataga

SEQ ID NO: 163984 - DNA, 9 bp, Unknown
  misc_feature (1)..( 9): Result.004 file - promoters50/1032897
agtaataga

SEQ ID NO: 163985 - DNA, 9 bp, Unknown
  misc_feature (1)..( 9): Result.004 file - promoters50/1032897
gataagaga

SEQ ID NO: 163986 - DNA, 11 bp, Unknown
  misc_feature (1)..( 11): Result.004 file - promoters50/1032897
gtatctcttta

SEQ ID NO: 163987 - DNA, 11 bp, Unknown
  misc_feature (1)..( 11): Result.004 file - promoters50/1032897
gtatctcaaaa

SEQ ID NO: 163988 - DNA, 11 bp, Unknown
  misc_feature (1)..( 11): Result.004 file - promoters50/1032897
ttatttcttgg

SEQ ID NO: 163989 - DNA, 11 bp, Unknown
  misc_feature (1)..( 11): Result.004 file - promoters50/1032897
ttattttttaa

SEQ ID NO: 163990 - DNA, 12 bp, Unknown
  misc_feature (1)..( 12): Result.004 file - promoters50/1032897
ttacttttatta

SEQ ID NO: 163991 - DNA, 12 bp, Unknown
  misc_feature (1)..( 12): Result.004 file - promoters50/1032929
tttttttcttgg

SEQ ID NO: 163992 - DNA, 8 bp, Unknown
  misc_feature (1)..( 8): Result.004 file - promoters50/1032929
ataattat

SEQ ID NO: 163993 - DNA, 8 bp, Unknown
  misc_feature (1)..( 8): Result.004 file - promoters50/1032929
ataattga

SEQ ID NO: 163994 - DNA, 8 bp, Unknown
  misc_feature (1)..( 8): Result.004 file - promoters50/1032940
atatttat

SEQ ID NO: 163995 - DNA, 12 bp, Unknown
  misc_feature (1)..( 12): Result.004 file - promoters50/1032940
tagaatctttga

SEQ ID NO: 163996 - DNA, 12 bp, Unknown
  misc_feature (1)..( 12): Result.004 file - promoters50/1032940
attaatgtttga

SEQ ID NO: 163997 - DNA, 12 bp, Unknown
  misc_feature (1)..( 12): Result.004 file - promoters50/1032940
gtaaatgtttct

SEQ ID NO: 163998 - DNA, 12 bp, Unknown
  misc_feature (1)..( 12): Result.004 file - promoters50/1032940
ttttctgtttgg

SEQ ID NO: 163999 - DNA, 12 bp, Unknown
  misc_feature (1)..( 12): Result.004 file - promoters50/1032940
catgctgtttct

SEQ ID NO: 164000 - DNA, 12 bp, Unknown
  misc_feature (1)..( 12): Result.004 file - promoters50/1032940
ttttctcttttc

SEQ ID NO: 164001 - DNA, 8 bp, Unknown
  misc_feature (1)..( 8): Result.004 file - promoters50/1032940
gaaacttt

SEQ ID NO: 164002 - DNA, 8 bp, Unknown
  misc_feature (1)..( 8): Result.004 file - promoters50/1032940
taaagttt

SEQ ID NO: 164003 - DNA, 8 bp, Unknown
  misc_feature (1)..( 8): Result.004 file - promoters50/1032940
caaaattt

SEQ ID NO: 164004 - DNA, 8 bp, Unknown
  misc_feature (1)..( 8): Result.004 file - promoters50/1032940
taacgttt

SEQ ID NO: 164005 - DNA, 8 bp, Unknown
  misc_feature (1)..( 8): Result.004 file - promoters50/1032940
caaaattt

SEQ ID NO: 164006 - DNA, 8 bp, Unknown
  misc_feature (1)..( 8): Result.004 file - promoters50/1032940
caaatttt

SEQ ID NO: 164007 - DNA, 8 bp, Unknown
  misc_feature (1)..( 8): Result.004 file - promoters50/1032940
gaaaattc

SEQ ID NO: 164008 - DNA, 10 bp, Unknown
  misc_feature (1)..( 10): Result.004 file - promoters50/1032940
ttataaattt

SEQ ID NO: 164009 - DNA, 10 bp, Unknown
  misc_feature (1)..( 10): Result.004 file - promoters50/1032940
ttcaaaattt

SEQ ID NO: 164010 - DNA, 10 bp, Unknown
  misc_feature (1)..( 10): Result.004 file - promoters50/1032940
tccaaaattt

SEQ ID NO: 164011 - DNA, 10 bp, Unknown
  misc_feature (1)..( 10): Result.004 file - promoters50/1032940
aaacaaattt

SEQ ID NO: 164012 - DNA, 10 bp, Unknown
  misc_feature (1)..( 10): Result.004 file - promoters50/1032940
ttcgaaattg

SEQ ID NO: 164013 - DNA, 10 bp, Unknown
  misc_feature (1)..( 10): Result.004 file - promoters50/1032940
gagaaaattc

SEQ ID NO: 164014 - DNA, 10 bp, Unknown
  misc_feature (1)..( 10): Result.004 file - promoters50/1032940
atataataaa

SEQ ID NO: 164015 - DNA, 10 bp, Unknown
  misc_feature (1)..( 10): Result.004 file - promoters50/1032940
atataatata

SEQ ID NO: 164016 - DNA, 11 bp, Unknown
  misc_feature (1)..( 11): Result.004 file - promoters50/1032940
atactaaaagc

SEQ ID NO: 164017 - DNA, 11 bp, Unknown
  misc_feature (1)..( 11): Result.004 file - promoters50/1032940
cacacaatata

SEQ ID NO: 164018 - DNA, 11 bp, Unknown
  misc_feature (1)..( 11): Result.004 file - promoters50/1032940
cttccaatatc

SEQ ID NO: 164019 - DNA, 11 bp, Unknown
  misc_feature (1)..( 11): Result.004 file - promoters50/1032996
aacccaataaa

SEQ ID NO: 164020 - DNA, 7 bp, Unknown
  misc_feature (1)..( 7): Result.004 file - promoters50/1032996
attttaa

SEQ ID NO: 164021 - DNA, 7 bp, Unknown
  misc_feature (1)..( 7): Result.004 file - promoters50/1032996
attataa

SEQ ID NO: 164022 - DNA, 7 bp, Unknown
  misc_feature (1)..( 7): Result.004 file - promoters50/1032996
attttat

SEQ ID NO: 164023 - DNA, 12 bp, Unknown
  misc_feature (1)..( 12): Result.004 file - promoters50/1032996
tatataataatg

SEQ ID NO: 164024 - DNA, 12 bp, Unknown
  misc_feature (1)..( 12): Result.004 file - promoters50/1032996
tatatcatattt

SEQ ID NO: 164025 - DNA, 12 bp, Unknown
  misc_feature (1)..( 12): Result.004 file - promoters50/1032996
tagttcatgttt

SEQ ID NO: 164026 - DNA, 9 bp, Unknown
  misc_feature (1)..( 9): Result.004 file - promoters50/1032996
ctctattta

SEQ ID NO: 164027 - DNA, 9 bp, Unknown
  misc_feature (1)..( 9): Result.004 file - promoters50/1032996
tcatattta

SEQ ID NO: 164028 - DNA, 9 bp, Unknown
  misc_feature (1)..( 9): Result.004 file - promoters50/1033013
tcatgtttt

SEQ ID NO: 164029 - DNA, 10 bp, Unknown
  misc_feature (1)..( 10): Result.004 file - promoters50/1033013
agaaaattga

SEQ ID NO: 164030 - DNA, 10 bp, Unknown
  misc_feature (1)..( 10): Result.004 file - promoters50/1033013
agagaatctt

SEQ ID NO: 164031 - DNA, 10 bp, Unknown
  misc_feature (1)..( 10): Result.004 file - promoters50/1033013
agaaatttga

SEQ ID NO: 164032 - DNA, 10 bp, Unknown
  misc_feature (1)..( 10): Result.004 file - promoters50/1033013
agagtctagt

SEQ ID NO: 164033 - DNA, 11 bp, Unknown
  misc_feature (1)..( 11): Result.004 file - promoters50/1033013
ttttagaacat

SEQ ID NO: 164034 - DNA, 11 bp, Unknown
  misc_feature (1)..( 11): Result.004 file - promoters50/1033013
tttgagaaaag

SEQ ID NO: 164035 - DNA, 11 bp, Unknown
  misc_feature (1)..( 11): Result.004 file - promoters50/1033013
ttttagggggg

SEQ ID NO: 164036 - DNA, 11 bp, Unknown
  misc_feature (1)..( 11): Result.004 file - promoters50/1033176
gtagagataag

SEQ ID NO: 164037 - DNA, 6 bp, Unknown
  misc_feature (1)..( 6): Result.004 file - promoters50/1033176
aacaag

SEQ ID NO: 164038 - DNA, 6 bp, Unknown
  misc_feature (1)..( 6): Result.004 file - promoters50/1033176
aacaag

SEQ ID NO: 164039 - DNA, 6 bp, Unknown
  misc_feature (1)..( 6): Result.004 file - promoters50/1033176
aacaag

SEQ ID NO: 164040 - DNA, 6 bp, Unknown
  misc_feature (1)..( 6): Result.004 file - promoters50/1033176
ttaaaa

SEQ ID NO: 164041 - DNA, 6 bp, Unknown
  misc_feature (1)..( 6): Result.004 file - promoters50/1033176
ttaaaa

SEQ ID NO: 164042 - DNA, 6 bp, Unknown
  misc_feature (1)..( 6): Result.004 file - promoters50/1033176
ttaaaa

SEQ ID NO: 164043 - DNA, 9 bp, Unknown
  misc_feature (1)..( 9): Result.004 file - promoters50/1033176
ctaatttat

SEQ ID NO: 164044 - DNA, 9 bp, Unknown
  misc_feature (1)..( 9): Result.004 file - promoters50/1033176
ataatttaa

SEQ ID NO: 164045 - DNA, 9 bp, Unknown
  misc_feature (1)..( 9): Result.004 file - promoters50/1033176
tagatttat

SEQ ID NO: 164046 - DNA, 9 bp, Unknown
  misc_feature (1)..( 9): Result.004 file - promoters50/1033176
ataattaaa

SEQ ID NO: 164047 - DNA, 17 bp, Unknown
  misc_feature (1)..( 17): Result.004 file - promoters50/1033176
gaatgtaatcagtgcca

SEQ ID NO: 164048 - DNA, 17 bp, Unknown
  misc_feature (1)..( 17): Result.004 file - promoters50/1033176
aaatcatctcaatgcca

SEQ ID NO: 164049 - DNA, 17 bp, Unknown
  misc_feature (1)..( 17): Result.004 file - promoters50/1033176
aaatcatctcaatgcca

SEQ ID NO: 164050 - DNA, 7 bp, Unknown
  misc_feature (1)..( 7): Result.004 file - promoters50/1033176
tttctca

SEQ ID NO: 164051 - DNA, 7 bp, Unknown
  misc_feature (1)..( 7): Result.004 file - promoters50/1033176
tttctca

SEQ ID NO: 164052 - DNA, 7 bp, Unknown
  misc_feature (1)..( 7): Result.004 file - promoters50/1033176
tttctca

SEQ ID NO: 164053 - DNA, 7 bp, Unknown
  misc_feature (1)..( 7): Result.004 file - promoters50/1033176
cgtttga

SEQ ID NO: 164054 - DNA, 7 bp, Unknown
  misc_feature (1)..( 7): Result.004 file - promoters50/1033176
cgtctga

SEQ ID NO: 164055 - DNA, 7 bp, Unknown
  misc_feature (1)..( 7): Result.004 file - promoters50/1033176
cgtttga

SEQ ID NO: 164056 - DNA, 8 bp, Unknown
  misc_feature (1)..( 8): Result.004 file - promoters50/1033176
aattaagc

SEQ ID NO: 164057 - DNA, 8 bp, Unknown
  misc_feature (1)..( 8): Result.004 file - promoters50/1033176
cattaagc

SEQ ID NO: 164058 - DNA, 8 bp, Unknown
  misc_feature (1)..( 8): Result.004 file - promoters50/1033176
aattaaaa

SEQ ID NO: 164059 - DNA, 10 bp, Unknown
  misc_feature (1)..( 10): Result.004 file - promoters50/1033176
tgatgaagaa

SEQ ID NO: 164060 - DNA, 10 bp, Unknown
  misc_feature (1)..( 10): Result.004 file - promoters50/1033176
gattgatgaa

SEQ ID NO: 164061 - DNA, 10 bp, Unknown
  misc_feature (1)..( 10): Result.004 file - promoters50/1033184
gatcgatgaa

SEQ ID NO: 164062 - DNA, 14 bp, Unknown
  misc_feature (1)..( 14): Result.004 file - promoters50/1033184
aaatatatgcttgc

SEQ ID NO: 164063 - DNA, 14 bp, Unknown
  misc_feature (1)..( 14): Result.004 file - promoters50/1033184
ctatatataaacat

SEQ ID NO: 164064 - DNA, 14 bp, Unknown
  misc_feature (1)..( 14): Result.004 file - promoters50/1033184
taatttattttcca

SEQ ID NO: 164065 - DNA, 14 bp, Unknown
  misc_feature (1)..( 14): Result.004 file - promoters50/1033184
aaagataataaagc

SEQ ID NO: 164066 - DNA, 14 bp, Unknown
  misc_feature (1)..( 14): Result.004 file - promoters50/1033184
tgattaatttctct

SEQ ID NO: 164067 - DNA, 14 bp, Unknown
  misc_feature (1)..( 14): Result.004 file - promoters50/1033184
agatttatttgatt

SEQ ID NO: 164068 - DNA, 14 bp, Unknown
  misc_feature (1)..( 14): Result.004 file - promoters50/1033184
ggattaatgtctct

SEQ ID NO: 164069 - DNA, 12 bp, Unknown
  misc_feature (1)..( 12): Result.004 file - promoters50/1033184
caaaaaaaatta

SEQ ID NO: 164070 - DNA, 12 bp, Unknown
  misc_feature (1)..( 12): Result.004 file - promoters50/1033184
taaaataaattg

SEQ ID NO: 164071 - DNA, 12 bp, Unknown
  misc_feature (1)..( 12): Result.004 file - promoters50/1033184
ctcaaaacattg

SEQ ID NO: 164072 - DNA, 12 bp, Unknown
  misc_feature (1)..( 12): Result.004 file - promoters50/1033184
caaaaatactta

SEQ ID NO: 164073 - DNA, 12 bp, Unknown
  misc_feature (1)..( 12): Result.004 file - promoters50/1033184
atgtaaaaatta

SEQ ID NO: 164074 - DNA, 12 bp, Unknown
  misc_feature (1)..( 12): Result.004 file - promoters50/1033184
gtgaattaatta

SEQ ID NO: 164075 - DNA, 11 bp, Unknown
  misc_feature (1)..( 11): Result.004 file - promoters50/1033184
tttgttaaaag

SEQ ID NO: 164076 - DNA, 11 bp, Unknown
  misc_feature (1)..( 11): Result.004 file - promoters50/1033184
tttcttaaaaa

SEQ ID NO: 164077 - DNA, 11 bp, Unknown
  misc_feature (1)..( 11): Result.004 file - promoters50/1033184
aatgtgaaatg

SEQ ID NO: 164078 - DNA, 11 bp, Unknown
  misc_feature (1)..( 11): Result.004 file - promoters50/1033184
tttgttagttc

SEQ ID NO: 164079 - DNA, 11 bp, Unknown
  misc_feature (1)..( 11): Result.004 file - promoters50/1033184
atatataaaaa

SEQ ID NO: 164080 - DNA, 11 bp, Unknown
  misc_feature (1)..( 11): Result.004 file - promoters50/1033184
ttagataaaat

SEQ ID NO: 164081 - DNA, 11 bp, Unknown
  misc_feature (1)..( 11): Result.004 file - promoters50/1033184
atctataaaaa

SEQ ID NO: 164082 - DNA, 10 bp, Unknown
  misc_feature (1)..( 10): Result.004 file - promoters50/1033184
tttaacttac

SEQ ID NO: 164083 - DNA, 10 bp, Unknown
  misc_feature (1)..( 10): Result.004 file - promoters50/1033184
gttaactttg

SEQ ID NO: 164084 - DNA, 10 bp, Unknown
  misc_feature (1)..( 10): Result.004 file - promoters50/1033184
tttaaatttt

SEQ ID NO: 164085 - DNA, 10 bp, Unknown
  misc_feature (1)..( 10): Result.004 file - promoters50/1033184
tgtaaatttt

SEQ ID NO: 164086 - DNA, 10 bp, Unknown
  misc_feature (1)..( 10): Result.004 file - promoters50/1033184
attaaaatgt

SEQ ID NO: 164087 - DNA, 10 bp, Unknown
  misc_feature (1)..( 10): Result.004 file - promoters50/1033194
attaaagttt

SEQ ID NO: 164088 - DNA, 7 bp, Unknown
  misc_feature (1)..( 7): Result.004 file - promoters50/1033194
aaaatgt

SEQ ID NO: 164089 - DNA, 7 bp, Unknown
  misc_feature (1)..( 7): Result.004 file - promoters50/1033194
aaactgt

SEQ ID NO: 164090 - DNA, 7 bp, Unknown
  misc_feature (1)..( 7): Result.004 file - promoters50/1033217
caaatgt

SEQ ID NO: 164091 - DNA, 9 bp, Unknown
  misc_feature (1)..( 9): Result.004 file - promoters50/1033217
tgagtattc

SEQ ID NO: 164092 - DNA, 9 bp, Unknown
  misc_feature (1)..( 9): Result.004 file - promoters50/1033217
tgattattt

SEQ ID NO: 164093 - DNA, 9 bp, Unknown
  misc_feature (1)..( 9): Result.004 file - promoters50/1033262
tatttattt

SEQ ID NO: 164094 - DNA, 10 bp, Unknown
  misc_feature (1)..( 10): Result.004 file - promoters50/1033262
tgatctgcgg

SEQ ID NO: 164095 - DNA, 10 bp, Unknown
  misc_feature (1)..( 10): Result.004 file - promoters50/1033262
tgatttgcaa

SEQ ID NO: 164096 - DNA, 10 bp, Unknown
  misc_feature (1)..( 10): Result.004 file - promoters50/1033262
tgacttgtct

SEQ ID NO: 164097 - DNA, 10 bp, Unknown
  misc_feature (1)..( 10): Result.004 file - promoters50/1033262
ttttttccaa

SEQ ID NO: 164098 - DNA, 10 bp, Unknown
  misc_feature (1)..( 10): Result.004 file - promoters50/1033262
ggagttcact

SEQ ID NO: 164099 - DNA, 10 bp, Unknown
  misc_feature (1)..( 10): Result.004 file - promoters50/1033340
caacttgttt

SEQ ID NO: 164100 - DNA, 9 bp, Unknown
  misc_feature (1)..( 9): Result.004 file - promoters50/1033340
tgataaaca

SEQ ID NO: 164101 - DNA, 9 bp, Unknown
  misc_feature (1)..( 9): Result.004 file - promoters50/1033340
tgatcaaca

SEQ ID NO: 164102 - DNA, 9 bp, Unknown
  misc_feature (1)..( 9): Result.004 file - promoters50/1033340
tgatcattt

SEQ ID NO: 164103 - DNA, 7 bp, Unknown
  misc_feature (1)..( 7): Result.004 file - promoters50/1033340
atctttt

SEQ ID NO: 164104 - DNA, 7 bp, Unknown
  misc_feature (1)..( 7): Result.004 file - promoters50/1033340
ttctttt

SEQ ID NO: 164105 - DNA, 7 bp, Unknown
  misc_feature (1)..( 7): Result.004 file - promoters50/1033360
atcattt

SEQ ID NO: 164106 - DNA, 8 bp, Unknown
  misc_feature (1)..( 8): Result.004 file - promoters50/1033360
gttgattt

SEQ ID NO: 164107 - DNA, 8 bp, Unknown
  misc_feature (1)..( 8): Result.004 file - promoters50/1033360
agtgattt

SEQ ID NO: 164108 - DNA, 8 bp, Unknown
  misc_feature (1)..( 8): Result.004 file - promoters50/1033360
gtttattc

SEQ ID NO: 164109 - DNA, 8 bp, Unknown
  misc_feature (1)..( 8): Result.004 file - promoters50/1033360
attggttt

SEQ ID NO: 164110 - DNA, 8 bp, Unknown
  misc_feature (1)..( 8): Result.004 file - promoters50/1033360
gaggatta

SEQ ID NO: 164111 - DNA, 8 bp, Unknown
  misc_feature (1)..( 8): Result.004 file - promoters50/1033408
atttgttt

SEQ ID NO: 164112 - DNA, 10 bp, Unknown
  misc_feature (1)..( 10): Result.004 file - promoters50/1033408
aatagaaaca

SEQ ID NO: 164113 - DNA, 10 bp, Unknown
  misc_feature (1)..( 10): Result.004 file - promoters50/1033408
aattgaactt

SEQ ID NO: 164114 - DNA, 10 bp, Unknown
  misc_feature (1)..( 10): Result.004 file - promoters50/1033408
ctttgaactt

SEQ ID NO: 164115 - DNA, 8 bp, Unknown
  misc_feature (1)..( 8): Result.004 file - promoters50/1033408
aatagaaa

SEQ ID NO: 164116 - DNA, 8 bp, Unknown
  misc_feature (1)..( 8): Result.004 file - promoters50/1033408
tatataaa

SEQ ID NO: 164117 - DNA, 8 bp, Unknown
  misc_feature (1)..( 8): Result.004 file - promoters50/1033430
tatttaac

SEQ ID NO: 164118 - DNA, 14 bp, Unknown
  misc_feature (1)..( 14): Result.004 file - promoters50/1033430
attggatcaacaat

SEQ ID NO: 164119 - DNA, 14 bp, Unknown
  misc_feature (1)..( 14): Result.004 file - promoters50/1033430
cttgaatcaatatt

SEQ ID NO: 164120 - DNA, 14 bp, Unknown
  misc_feature (1)..( 14): Result.004 file - promoters50/1033430
attcgatagaaaca

SEQ ID NO: 164121 - DNA, 14 bp, Unknown
  misc_feature (1)..( 14): Result.004 file - promoters50/1033430
gtgagatcaagttt

SEQ ID NO: 164122 - DNA, 14 bp, Unknown
  misc_feature (1)..( 14): Result.004 file - promoters50/1033430
attgattcaaaatt

SEQ ID NO: 164123 - DNA, 14 bp, Unknown
  misc_feature (1)..( 14): Result.004 file - promoters50/1033430
tccgattcaattcc

SEQ ID NO: 164124 - DNA, 14 bp, Unknown
  misc_feature (1)..( 14): Result.004 file - promoters50/1033540
atgcattccaaagt

SEQ ID NO: 164125 - DNA, 7 bp, Unknown
  misc_feature (1)..( 7): Result.004 file - promoters50/1033540
ttatttt

SEQ ID NO: 164126 - DNA, 7 bp, Unknown
  misc_feature (1)..( 7): Result.004 file - promoters50/1033540
ttatttg

SEQ ID NO: 164127 - DNA, 7 bp, Unknown
  misc_feature (1)..( 7): Result.004 file - promoters50/1033540
atatttt

SEQ ID NO: 164128 - DNA, 10 bp, Unknown
  misc_feature (1)..( 10): Result.004 file - promoters50/1033540
acaaaattat

SEQ ID NO: 164129 - DNA, 10 bp, Unknown
  misc_feature (1)..( 10): Result.004 file - promoters50/1033540
acataattat

SEQ ID NO: 164130 - DNA, 10 bp, Unknown
  misc_feature (1)..( 10): Result.004 file - promoters50/1033540
atgaaattag

SEQ ID NO: 164131 - DNA, 7 bp, Unknown
  misc_feature (1)..( 7): Result.004 file - promoters50/1033540
cttttcc

SEQ ID NO: 164132 - DNA, 7 bp, Unknown
  misc_feature (1)..( 7): Result.004 file - promoters50/1033540
tttttcc

SEQ ID NO: 164133 - DNA, 7 bp, Unknown
  misc_feature (1)..( 7): Result.004 file - promoters50/1033540
cttttca

SEQ ID NO: 164134 - DNA, 12 bp, Unknown
  misc_feature (1)..( 12): Result.004 file - promoters50/1033540
tccaacacctga

SEQ ID NO: 164135 - DNA, 12 bp, Unknown
  misc_feature (1)..( 12): Result.004 file - promoters50/1033540
cacaacacgtga

SEQ ID NO: 164136 - DNA, 12 bp, Unknown
  misc_feature (1)..( 12): Result.004 file - promoters50/1033596
cacgacagtcaa

SEQ ID NO: 164137 - DNA, 9 bp, Unknown
  misc_feature (1)..( 9): Result.004 file - promoters50/1033596
tgaatctgc

SEQ ID NO: 164138 - DNA, 9 bp, Unknown
  misc_feature (1)..( 9): Result.004 file - promoters50/1033596
aatatctgc

SEQ ID NO: 164139 - DNA, 9 bp, Unknown
  misc_feature (1)..( 9): Result.004 file - promoters50/1033679
tgaatctga

SEQ ID NO: 164140 - DNA, 12 bp, Unknown
  misc_feature (1)..( 12): Result.004 file - promoters50/1033679
gagagttgtatg

SEQ ID NO: 164141 - DNA, 12 bp, Unknown
  misc_feature (1)..( 12): Result.004 file - promoters50/1033679
tcttgttgtaat

SEQ ID NO: 164142 - DNA, 12 bp, Unknown
  misc_feature (1)..( 12): Result.004 file - promoters50/1033679
tcttcttgtctt

SEQ ID NO: 164143 - DNA, 12 bp, Unknown
  misc_feature (1)..( 12): Result.004 file - promoters50/1033679
ttcatttggaat

SEQ ID NO: 164144 - DNA, 12 bp, Unknown
  misc_feature (1)..( 12): Result.004 file - promoters50/1033679
ctttcttcacta

SEQ ID NO: 164145 - DNA, 12 bp, Unknown
  misc_feature (1)..( 12): Result.004 file - promoters50/1033679
ctttcttgtttc

SEQ ID NO: 164146 - DNA, 16 bp, Unknown
  misc_feature (1)..( 16): Result.004 file - promoters50/1033679
gcatatagtaaaaata

SEQ ID NO: 164147 - DNA, 16 bp, Unknown
  misc_feature (1)..( 16): Result.004 file - promoters50/1033679
ttcttacgtaaaaatt

SEQ ID NO: 164148 - DNA, 16 bp, Unknown
  misc_feature (1)..( 16): Result.004 file - promoters50/1033679
aactgggaccaaaata

SEQ ID NO: 164149 - DNA, 16 bp, Unknown
  misc_feature (1)..( 16): Result.004 file - promoters50/1033679
gcatttagtaaaccgt

SEQ ID NO: 164150 - DNA, 16 bp, Unknown
  misc_feature (1)..( 16): Result.004 file - promoters50/1033679
acataccgtagaccag

SEQ ID NO: 164151 - DNA, 16 bp, Unknown
  misc_feature (1)..( 16): Result.004 file - promoters50/1033716
ttccaagtgaaatatt

SEQ ID NO: 164152 - DNA, 10 bp, Unknown
  misc_feature (1)..( 10): Result.004 file - promoters50/1033716
gagattcttt

SEQ ID NO: 164153 - DNA, 10 bp, Unknown
  misc_feature (1)..( 10): Result.004 file - promoters50/1033716
aagattctag

SEQ ID NO: 164154 - DNA, 10 bp, Unknown
  misc_feature (1)..( 10): Result.004 file - promoters50/1033716
aggattctta

SEQ ID NO: 164155 - DNA, 10 bp, Unknown
  misc_feature (1)..( 10): Result.004 file - promoters50/1033716
aagattttag

SEQ ID NO: 164156 - DNA, 10 bp, Unknown
  misc_feature (1)..( 10): Result.004 file - promoters50/1033716
aaaattatag

SEQ ID NO: 164157 - DNA, 10 bp, Unknown
  misc_feature (1)..( 10): Result.004 file - promoters50/1033723
tatattataa

SEQ ID NO: 164158 - DNA, 8 bp, Unknown
  misc_feature (1)..( 8): Result.004 file - promoters50/1033723
atgatgaa

SEQ ID NO: 164159 - DNA, 8 bp, Unknown
  misc_feature (1)..( 8): Result.004 file - promoters50/1033723
ctgaagaa

SEQ ID NO: 164160 - DNA, 8 bp, Unknown
  misc_feature (1)..( 8): Result.004 file - promoters50/1033781
atgaagag

SEQ ID NO: 164161 - DNA, 11 bp, Unknown
  misc_feature (1)..( 11): Result.004 file - promoters50/1033781
tcttattatcg

SEQ ID NO: 164162 - DNA, 11 bp, Unknown
  misc_feature (1)..( 11): Result.004 file - promoters50/1033781
tcttattaggt

SEQ ID NO: 164163 - DNA, 11 bp, Unknown
  misc_feature (1)..( 11): Result.004 file - promoters50/1033781
agttattaatg

SEQ ID NO: 164164 - DNA, 12 bp, Unknown
  misc_feature (1)..( 12): Result.004 file - promoters50/1033781
atttacttaatc

SEQ ID NO: 164165 - DNA, 12 bp, Unknown
  misc_feature (1)..( 12): Result.004 file - promoters50/1033781
ctatcatccatg

SEQ ID NO: 164166 - DNA, 12 bp, Unknown
  misc_feature (1)..( 12): Result.004 file - promoters50/1033781
gattactaacac

SEQ ID NO: 164167 - DNA, 9 bp, Unknown
  misc_feature (1)..( 9): Result.004 file - promoters50/1033781
gtggaattg

SEQ ID NO: 164168 - DNA, 9 bp, Unknown
  misc_feature (1)..( 9): Result.004 file - promoters50/1033781
catgaattg

SEQ ID NO: 164169 - DNA, 9 bp, Unknown
  misc_feature (1)..( 9): Result.004 file - promoters50/1033781
gaagaattg

SEQ ID NO: 164170 - DNA, 9 bp, Unknown
  misc_feature (1)..( 9): Result.004 file - promoters50/1033781
catgtattt

SEQ ID NO: 164171 - DNA, 9 bp, Unknown
  misc_feature (1)..( 9): Result.004 file - promoters50/1033781
tatgatttg

SEQ ID NO: 164172 - DNA, 9 bp, Unknown
  misc_feature (1)..( 9): Result.004 file - promoters50/1033781
cctgaattt

SEQ ID NO: 164173 - DNA, 9 bp, Unknown
  misc_feature (1)..( 9): Result.004 file - promoters50/1033781
tataattta

SEQ ID NO: 164174 - DNA, 11 bp, Unknown
  misc_feature (1)..( 11): Result.004 file - promoters50/1033781
aacaaacaaat

SEQ ID NO: 164175 - DNA, 11 bp, Unknown
  misc_feature (1)..( 11): Result.004 file - promoters50/1033781
aagaaacgaat

SEQ ID NO: 164176 - DNA, 11 bp, Unknown
  misc_feature (1)..( 11): Result.004 file - promoters50/1033781
ttccaacaaat

SEQ ID NO: 164177 - DNA, 11 bp, Unknown
  misc_feature (1)..( 11): Result.004 file - promoters50/1033781
tagaaatgaaa

SEQ ID NO: 164178 - DNA, 11 bp, Unknown
  misc_feature (1)..( 11): Result.004 file - promoters50/1033781
tcgaaacgaca

SEQ ID NO: 164179 - DNA, 11 bp, Unknown
  misc_feature (1)..( 11): Result.004 file - promoters50/1033781
tagatatgata

SEQ ID NO: 164180 - DNA, 10 bp, Unknown
  misc_feature (1)..( 10): Result.004 file - promoters50/1033781
aataacaaac

SEQ ID NO: 164181 - DNA, 10 bp, Unknown
  misc_feature (1)..( 10): Result.004 file - promoters50/1033781
tttaaaaaat

SEQ ID NO: 164182 - DNA, 10 bp, Unknown
  misc_feature (1)..( 10): Result.004 file - promoters50/1033781
aatatcaaag

SEQ ID NO: 164183 - DNA, 10 bp, Unknown
  misc_feature (1)..( 10): Result.004 file - promoters50/1033781
aagaaaaaaa

SEQ ID NO: 164184 - DNA, 11 bp, Unknown
  misc_feature (1)..( 11): Result.004 file - promoters50/1033781
tctaaaataat

SEQ ID NO: 164185 - DNA, 11 bp, Unknown
  misc_feature (1)..( 11): Result.004 file - promoters50/1033837
aataaaaacag

SEQ ID NO: 164186 - DNA, 13 bp, Unknown
  misc_feature (1)..( 13): Result.004 file - promoters50/1033837
ttttattggtttt

SEQ ID NO: 164187 - DNA, 13 bp, Unknown
  misc_feature (1)..( 13): Result.004 file - promoters50/1033837
cattattgttttt

SEQ ID NO: 164188 - DNA, 13 bp, Unknown
  misc_feature (1)..( 13): Result.004 file - promoters50/1033837
gtttatgttggtc

SEQ ID NO: 164189 - DNA, 9 bp, Unknown
  misc_feature (1)..( 9): Result.004 file - promoters50/1033837
aaaaaaaaa

SEQ ID NO: 164190 - DNA, 9 bp, Unknown
  misc_feature (1)..( 9): Result.004 file - promoters50/1033837
aaataaaaa

SEQ ID NO: 164191 - DNA, 9 bp, Unknown
  misc_feature (1)..( 9): Result.004 file - promoters50/1033837
aaagatggg

SEQ ID NO: 164192 - DNA, 13 bp, Unknown
  misc_feature (1)..( 13): Result.004 file - promoters50/1033837
cattatgggacca

SEQ ID NO: 164193 - DNA, 13 bp, Unknown
  misc_feature (1)..( 13): Result.004 file - promoters50/1033837
cataatgggacca

SEQ ID NO: 164194 - DNA, 13 bp, Unknown
  misc_feature (1)..( 13): Result.004 file - promoters50/1033849
ttccatgggaaag

SEQ ID NO: 164195 - DNA, 7 bp, Unknown
  misc_feature (1)..( 7): Result.004 file - promoters50/1033849
gaaaaag

SEQ ID NO: 164196 - DNA, 7 bp, Unknown
  misc_feature (1)..( 7): Result.004 file - promoters50/1033849
caaaaag

SEQ ID NO: 164197 - DNA, 7 bp, Unknown
  misc_feature (1)..( 7): Result.004 file - promoters50/1033865
caaaaat

SEQ ID NO: 164198 - DNA, 11 bp, Unknown
  misc_feature (1)..( 11): Result.004 file - promoters50/1033865
tttttaaattt

SEQ ID NO: 164199 - DNA, 11 bp, Unknown
  misc_feature (1)..( 11): Result.004 file - promoters50/1033865
attttacattt

SEQ ID NO: 164200 - DNA, 11 bp, Unknown
  misc_feature (1)..( 11): Result.004 file - promoters50/1033865
tttttatatat

SEQ ID NO: 164201 - DNA, 11 bp, Unknown
  misc_feature (1)..( 11): Result.004 file - promoters50/1033865
tttttaaccgt

SEQ ID NO: 164202 - DNA, 11 bp, Unknown
  misc_feature (1)..( 11): Result.004 file - promoters50/1033865
ttttgacacaa

SEQ ID NO: 164203 - DNA, 11 bp, Unknown
  misc_feature (1)..( 11): Result.004 file - promoters50/1033865
cgtctacatta

SEQ ID NO: 164204 - DNA, 17 bp, Unknown
  misc_feature (1)..( 17): Result.004 file - promoters50/1033865
gatagaagcatatccaa

SEQ ID NO: 164205 - DNA, 17 bp, Unknown
  misc_feature (1)..( 17): Result.004 file - promoters50/1033865
taaaataaattatccaa

SEQ ID NO: 164206 - DNA, 17 bp, Unknown
  misc_feature (1)..( 17): Result.004 file - promoters50/1033865
agatacttcaaatccaa

SEQ ID NO: 164207 - DNA, 17 bp, Unknown
  misc_feature (1)..( 17): Result.004 file - promoters50/1033865
gagataaccttatccta

SEQ ID NO: 164208 - DNA, 17 bp, Unknown
  misc_feature (1)..( 17): Result.004 file - promoters50/1033865
gagatagccttatcttt

SEQ ID NO: 164209 - DNA, 17 bp, Unknown
  misc_feature (1)..( 17): Result.004 file - promoters50/1033869
cgtggacagatatagtt

SEQ ID NO: 164210 - DNA, 8 bp, Unknown
  misc_feature (1)..( 8): Result.004 file - promoters50/1033869
atctattt

SEQ ID NO: 164211 - DNA, 8 bp, Unknown
  misc_feature (1)..( 8): Result.004 file - promoters50/1033869
ttcttttt

SEQ ID NO: 164212 - DNA, 8 bp, Unknown
  misc_feature (1)..( 8): Result.004 file - promoters50/1034030
ttcttttg

SEQ ID NO: 164213 - DNA, 12 bp, Unknown
  misc_feature (1)..( 12): Result.004 file - promoters50/1034030
ttaaaaatcaaa

SEQ ID NO: 164214 - DNA, 12 bp, Unknown
  misc_feature (1)..( 12): Result.004 file - promoters50/1034030
gagaaagtcacg

SEQ ID NO: 164215 - DNA, 12 bp, Unknown
  misc_feature (1)..( 12): Result.004 file - promoters50/1034030
aaagaaaccaaa

SEQ ID NO: 164216 - DNA, 12 bp, Unknown
  misc_feature (1)..( 12): Result.004 file - promoters50/1034030
gaaaaaatggaa

SEQ ID NO: 164217 - DNA, 12 bp, Unknown
  misc_feature (1)..( 12): Result.004 file - promoters50/1034030
ccacaagcgtaa

SEQ ID NO: 164218 - DNA, 12 bp, Unknown
  misc_feature (1)..( 12): Result.004 file - promoters50/1034030
ccaaaataacgc

SEQ ID NO: 164219 - DNA, 10 bp, Unknown
  misc_feature (1)..( 10): Result.004 file - promoters50/1034030
tatagagttt

SEQ ID NO: 164220 - DNA, 10 bp, Unknown
  misc_feature (1)..( 10): Result.004 file - promoters50/1034030
ataagacttt

SEQ ID NO: 164221 - DNA, 10 bp, Unknown
  misc_feature (1)..( 10): Result.004 file - promoters50/1034030
tataaagtta

SEQ ID NO: 164222 - DNA, 10 bp, Unknown
  misc_feature (1)..( 10): Result.004 file - promoters50/1034030
aatagaaact

SEQ ID NO: 164223 - DNA, 10 bp, Unknown
  misc_feature (1)..( 10): Result.004 file - promoters50/1034030
tatagaatat

SEQ ID NO: 164224 - DNA, 10 bp, Unknown
  misc_feature (1)..( 10): Result.004 file - promoters50/1034066
cataaggttt

SEQ ID NO: 164225 - DNA, 8 bp, Unknown
  misc_feature (1)..( 8): Result.004 file - promoters50/1034066
ttacagag

SEQ ID NO: 164226 - DNA, 8 bp, Unknown
  misc_feature (1)..( 8): Result.004 file - promoters50/1034066
gaacagag

SEQ ID NO: 164227 - DNA, 8 bp, Unknown
  misc_feature (1)..( 8): Result.004 file - promoters50/1034066
gaagagag

SEQ ID NO: 164228 - DNA, 11 bp, Unknown
  misc_feature (1)..( 11): Result.004 file - promoters50/1034066
aatgtttgaat

SEQ ID NO: 164229 - DNA, 11 bp, Unknown
  misc_feature (1)..( 11): Result.004 file - promoters50/1034066
aatatttcctt

SEQ ID NO: 164230 - DNA, 11 bp, Unknown
  misc_feature (1)..( 11): Result.004 file - promoters50/1034066
tttgtttgaat

SEQ ID NO: 164231 - DNA, 7 bp, Unknown
  misc_feature (1)..( 7): Result.004 file - promoters50/1034066
taaaaaa

SEQ ID NO: 164232 - DNA, 7 bp, Unknown
  misc_feature (1)..( 7): Result.004 file - promoters50/1034066
taacaaa

SEQ ID NO: 164233 - DNA, 7 bp, Unknown
  misc_feature (1)..( 7): Result.004 file - promoters50/1034066
taaaaaa

SEQ ID NO: 164234 - DNA, 10 bp, Unknown
  misc_feature (1)..( 10): Result.004 file - promoters50/1034066
gcgagatgcg

SEQ ID NO: 164235 - DNA, 10 bp, Unknown
  misc_feature (1)..( 10): Result.004 file - promoters50/1034066
aagagttgcg

SEQ ID NO: 164236 - DNA, 10 bp, Unknown
  misc_feature (1)..( 10): Result.004 file - promoters50/1034066
aagagttctc

SEQ ID NO: 164237 - DNA, 15 bp, Unknown
  misc_feature (1)..( 15): Result.004 file - promoters50/1034066
aaaaaaaatccaaaa

SEQ ID NO: 164238 - DNA, 15 bp, Unknown
  misc_feature (1)..( 15): Result.004 file - promoters50/1034066
aaccaaactcccaaa

SEQ ID NO: 164239 - DNA, 15 bp, Unknown
  misc_feature (1)..( 15): Result.004 file - promoters50/1034066
aaccaaactcggtat

SEQ ID NO: 164240 - DNA, 8 bp, Unknown
  misc_feature (1)..( 8): Result.004 file - promoters50/1034066
tttataaa

SEQ ID NO: 164241 - DNA, 8 bp, Unknown
  misc_feature (1)..( 8): Result.004 file - promoters50/1034066
tttaaaaa

SEQ ID NO: 164242 - DNA, 8 bp, Unknown
  misc_feature (1)..( 8): Result.004 file - promoters50/1034137
tgtataaa

SEQ ID NO: 164243 - DNA, 29 bp, Unknown
  misc_feature (1)..( 29): Result.004 file - promoters50/1034137
aagctttaagtctatcgctagactgtcca

SEQ ID NO: 164244 - DNA, 29 bp, Unknown
  misc_feature (1)..( 29): Result.004 file - promoters50/1034137
agcttttaagtctctcgctagactgtcca

SEQ ID NO: 164245 - DNA, 29 bp, Unknown
  misc_feature (1)..( 29): Result.004 file - promoters50/1034137
atcatccaccgagatatcaagactgctaa

SEQ ID NO: 164246 - DNA, 29 bp, Unknown
  misc_feature (1)..( 29): Result.004 file - promoters50/1034137
agactaaaagtctaccacatttgtctgtt

SEQ ID NO: 164247 - DNA, 29 bp, Unknown
  misc_feature (1)..( 29): Result.004 file - promoters50/1034137
atggtttaagcacgttacctgtaacgtat

SEQ ID NO: 164248 - DNA, 29 bp, Unknown
  misc_feature (1)..( 29): Result.004 file - promoters50/1034145
agcatttaatgatgataacgatttggaag

SEQ ID NO: 164249 - DNA, 12 bp, Unknown
  misc_feature (1)..( 12): Result.004 file - promoters50/1034145
gataataagttc

SEQ ID NO: 164250 - DNA, 12 bp, Unknown
  misc_feature (1)..( 12): Result.004 file - promoters50/1034145
agtaaaaagtca

SEQ ID NO: 164251 - DNA, 12 bp, Unknown
  misc_feature (1)..( 12): Result.004 file - promoters50/1034145
cttaataagtgg

SEQ ID NO: 164252 - DNA, 12 bp, Unknown
  misc_feature (1)..( 12): Result.004 file - promoters50/1034145
ttcaataacttc

SEQ ID NO: 164253 - DNA, 12 bp, Unknown
  misc_feature (1)..( 12): Result.004 file - promoters50/1034188
gatgatatgatt

SEQ ID NO: 164254 - DNA, 9 bp, Unknown
  misc_feature (1)..( 9): Result.004 file - promoters50/1034188
gcccatttg

SEQ ID NO: 164255 - DNA, 9 bp, Unknown
  misc_feature (1)..( 9): Result.004 file - promoters50/1034188
gcccattta

SEQ ID NO: 164256 - DNA, 9 bp, Unknown
  misc_feature (1)..( 9): Result.004 file - promoters50/1034188
gttcattta

SEQ ID NO: 164257 - DNA, 7 bp, Unknown
  misc_feature (1)..( 7): Result.004 file - promoters50/1034188
atttttt

SEQ ID NO: 164258 - DNA, 7 bp, Unknown
  misc_feature (1)..( 7): Result.004 file - promoters50/1034188
atttttt

SEQ ID NO: 164259 - DNA, 7 bp, Unknown
  misc_feature (1)..( 7): Result.004 file - promoters50/1034212
atttttg

SEQ ID NO: 164260 - DNA, 7 bp, Unknown
  misc_feature (1)..( 7): Result.004 file - promoters50/1034212
aatataa

SEQ ID NO: 164261 - DNA, 7 bp, Unknown
  misc_feature (1)..( 7): Result.004 file - promoters50/1034212
aatatag

SEQ ID NO: 164262 - DNA, 7 bp, Unknown
  misc_feature (1)..( 7): Result.004 file - promoters50/1034306
aatttag

SEQ ID NO: 164263 - DNA, 11 bp, Unknown
  misc_feature (1)..( 11): Result.004 file - promoters50/1034306
gaaataaatta

SEQ ID NO: 164264 - DNA, 11 bp, Unknown
  misc_feature (1)..( 11): Result.004 file - promoters50/1034306
tgaataaattg

SEQ ID NO: 164265 - DNA, 12 bp, Unknown
  misc_feature (1)..( 12): Result.004 file - promoters50/1034306
tgaagtaaccgt

SEQ ID NO: 164266 - DNA, 12 bp, Unknown
  misc_feature (1)..( 12): Result.004 file - promoters50/1034306
tcaaataaacaa

SEQ ID NO: 164267 - DNA, 12 bp, Unknown
  misc_feature (1)..( 12): Result.004 file - promoters50/1034306
ataaataaattt

SEQ ID NO: 164268 - DNA, 12 bp, Unknown
  misc_feature (1)..( 12): Result.004 file - promoters50/1034306
atacatacatat

SEQ ID NO: 164269 - DNA, 12 bp, Unknown
  misc_feature (1)..( 12): Result.004 file - promoters50/1034306
aaaaatatataa

SEQ ID NO: 164270 - DNA, 10 bp, Unknown
  misc_feature (1)..( 10): Result.004 file - promoters50/1034306
gaagaaatta

SEQ ID NO: 164271 - DNA, 10 bp, Unknown
  misc_feature (1)..( 10): Result.004 file - promoters50/1034306
taagatattt

SEQ ID NO: 164272 - DNA, 10 bp, Unknown
  misc_feature (1)..( 10): Result.004 file - promoters50/1034306
gaagaaacca

SEQ ID NO: 164273 - DNA, 10 bp, Unknown
  misc_feature (1)..( 10): Result.004 file - promoters50/1034306
cgttaaatta

SEQ ID NO: 164274 - DNA, 10 bp, Unknown
  misc_feature (1)..( 10): Result.004 file - promoters50/1034306
aaagaaaaat

SEQ ID NO: 164275 - DNA, 10 bp, Unknown
  misc_feature (1)..( 10): Result.004 file - promoters50/1034306
aaaaataaaa

SEQ ID NO: 164276 - DNA, 11 bp, Unknown
  misc_feature (1)..( 11): Result.004 file - promoters50/1034306
cagaattaaaa

SEQ ID NO: 164277 - DNA, 11 bp, Unknown
  misc_feature (1)..( 11): Result.004 file - promoters50/1034306
gtgaattagtt

SEQ ID NO: 164278 - DNA, 11 bp, Unknown
  misc_feature (1)..( 11): Result.004 file - promoters50/1034306
cagtatttgaa

SEQ ID NO: 164279 - DNA, 11 bp, Unknown
  misc_feature (1)..( 11): Result.004 file - promoters50/1034306
tagatttaaat

SEQ ID NO: 164280 - DNA, 11 bp, Unknown
  misc_feature (1)..( 11): Result.004 file - promoters50/1034306
ataaattaaaa

SEQ ID NO: 164281 - DNA, 11 bp, Unknown
  misc_feature (1)..( 11): Result.004 file - promoters50/1034306
atagtttaaaa

SEQ ID NO: 164282 - DNA, 11 bp, Unknown
  misc_feature (1)..( 11): Result.004 file - promoters50/1034306
attttaatata

SEQ ID NO: 164283 - DNA, 11 bp, Unknown
  misc_feature (1)..( 11): Result.004 file - promoters50/1034306
gttttaaatca

SEQ ID NO: 164284 - DNA, 11 bp, Unknown
  misc_feature (1)..( 11): Result.004 file - promoters50/1034306
attttaccctc

SEQ ID NO: 164285 - DNA, 11 bp, Unknown
  misc_feature (1)..( 11): Result.004 file - promoters50/1034306
catttaatcaa

SEQ ID NO: 164286 - DNA, 11 bp, Unknown
  misc_feature (1)..( 11): Result.004 file - promoters50/1034306
attttaacgga

SEQ ID NO: 164287 - DNA, 11 bp, Unknown
  misc_feature (1)..( 11): Result.004 file - promoters50/1034306
gcattaaacaa

SEQ ID NO: 164288 - DNA, 11 bp, Unknown
  misc_feature (1)..( 11): Result.004 file - promoters50/1034306
tgattaaattg

SEQ ID NO: 164289 - DNA, 11 bp, Unknown
  misc_feature (1)..( 11): Result.004 file - promoters50/1034306
tgttagataat

SEQ ID NO: 164290 - DNA, 11 bp, Unknown
  misc_feature (1)..( 11): Result.004 file - promoters50/1034306
cgtttgatata

SEQ ID NO: 164291 - DNA, 11 bp, Unknown
  misc_feature (1)..( 11): Result.004 file - promoters50/1034306
agagagaaaat

SEQ ID NO: 164292 - DNA, 11 bp, Unknown
  misc_feature (1)..( 11): Result.004 file - promoters50/1034306
tgtaagaaaag

SEQ ID NO: 164293 - DNA, 11 bp, Unknown
  misc_feature (1)..( 11): Result.004 file - promoters50/1034306
cttttaatatg

SEQ ID NO: 164294 - DNA, 11 bp, Unknown
  misc_feature (1)..( 11): Result.004 file - promoters50/1034322
ttaaagaaaaa

SEQ ID NO: 164295 - DNA, 35 bp, Unknown; identical to SEQ ID NO: 133958
  misc_feature (1)..( 35): Result.004 file - promoters50/1034322

SEQ ID NO: 164296 - DNA, 35 bp, Unknown; identical to SEQ ID NO: 133959
  misc_feature (1)..( 35): Result.004 file - promoters50/1034322

SEQ ID NO: 164297 - DNA, 35 bp, Unknown; identical to SEQ ID NO: 133957
  misc_feature (1)..( 35): Result.004 file - promoters50/1034322

SEQ ID NO: 164298 - DNA, 35 bp, Unknown
  misc_feature (1)..( 35): Result.004 file - promoters50/1034322
tcaatgacgctcttcactccaaagagaccaccgtt

SEQ ID NO: 164299 - DNA, 35 bp, Unknown
  misc_feature (1)..( 35): Result.004 file - promoters50/1034322
taatatttttgtcgctgttctattttaagaacgag

SEQ ID NO: 164300 - DNA, 35 bp, Unknown
  misc_feature (1)..( 35): Result.004 file - promoters50/1034322
ttggatttcgagcgaatgaaatagtttggttatgc

SEQ ID NO: 164301 - DNA, 10 bp, Unknown
  misc_feature (1)..( 10): Result.004 file - promoters50/1034322
tatataaata

SEQ ID NO: 164302 - DNA, 10 bp, Unknown
  misc_feature (1)..( 10): Result.004 file - promoters50/1034322
tatacaaatc

SEQ ID NO: 164303 - DNA, 10 bp, Unknown
  misc_feature (1)..( 10): Result.004 file - promoters50/1034322
tatatataga

SEQ ID NO: 164304 - DNA, 10 bp, Unknown
  misc_feature (1)..( 10): Result.004 file - promoters50/1034322
tttataaact

SEQ ID NO: 164305 - DNA, 10 bp, Unknown
  misc_feature (1)..( 10): Result.004 file - promoters50/1034322
agtataaata

SEQ ID NO: 164306 - DNA, 10 bp, Unknown
  misc_feature (1)..( 10): Result.004 file - promoters50/1034322
tatataaaca

SEQ ID NO: 164307 - DNA, 10 bp, Unknown
  misc_feature (1)..( 10): Result.004 file - promoters50/1034322
cttaaaaacc

SEQ ID NO: 164308 - DNA, 10 bp, Unknown
  misc_feature (1)..( 10): Result.004 file - promoters50/1034322
aagtttaacg

SEQ ID NO: 164309 - DNA, 10 bp, Unknown
  misc_feature (1)..( 10): Result.004 file - promoters50/1034322
gagtttaggc

SEQ ID NO: 164310 - DNA, 10 bp, Unknown
  misc_feature (1)..( 10): Result.004 file - promoters50/1034322
aggtttaaga

SEQ ID NO: 164311 - DNA, 10 bp, Unknown
  misc_feature (1)..( 10): Result.004 file - promoters50/1034322
taattttcta

SEQ ID NO: 164312 - DNA, 10 bp, Unknown
  misc_feature (1)..( 10): Result.004 file - promoters50/1034322
aagtctagta

SEQ ID NO: 164313 - DNA, 10 bp, Unknown
  misc_feature (1)..( 10): Result.004 file - promoters50/1034322
tgttttcaga

SEQ ID NO: 164314 - DNA, 8 bp, Unknown
  misc_feature (1)..( 8): Result.004 file - promoters50/1034322
aaacatat

SEQ ID NO: 164315 - DNA, 8 bp, Unknown
  misc_feature (1)..( 8): Result.004 file - promoters50/1034322
aaaaataa

SEQ ID NO: 164316 - DNA, 8 bp, Unknown
  misc_feature (1)..( 8): Result.004 file - promoters50/1034322
acaaatag

SEQ ID NO: 164317 - DNA, 8 bp, Unknown
  misc_feature (1)..( 8): Result.004 file - promoters50/1034322
acagatag

SEQ ID NO: 164318 - DNA, 8 bp, Unknown
  misc_feature (1)..( 8): Result.004 file - promoters50/1034322
aaacatat

SEQ ID NO: 164319 - DNA, 8 bp, Unknown
  misc_feature (1)..( 8): Result.004 file - promoters50/1034349
taaaatac

SEQ ID NO: 164320 - DNA, 14 bp, Unknown
  misc_feature (1)..( 14): Result.004 file - promoters50/1034349
gaggctataaatac

SEQ ID NO: 164321 - DNA, 14 bp, Unknown
  misc_feature (1)..( 14): Result.004 file - promoters50/1034349
acctttataaactc

SEQ ID NO: 164322 - DNA, 14 bp, Unknown
  misc_feature (1)..( 14): Result.004 file - promoters50/1034349
acatgtatatatac

SEQ ID NO: 164323 - DNA, 14 bp, Unknown
  misc_feature (1)..( 14): Result.004 file - promoters50/1034349
caaaatataaataa

SEQ ID NO: 164324 - DNA, 14 bp, Unknown
  misc_feature (1)..( 14): Result.004 file - promoters50/1034349
ctctatataaacct

SEQ ID NO: 164325 - DNA, 14 bp, Unknown
  misc_feature (1)..( 14): Result.004 file - promoters50/1034349
acatatatttatac

SEQ ID NO: 164326 - DNA, 9 bp, Unknown
  misc_feature (1)..( 9): Result.004 file - promoters50/1034349
tatagaact

SEQ ID NO: 164327 - DNA, 9 bp, Unknown
  misc_feature (1)..( 9): Result.004 file - promoters50/1034349
aatataact

SEQ ID NO: 164328 - DNA, 9 bp, Unknown
  misc_feature (1)..( 9): Result.004 file - promoters50/1034349
gatataaca

SEQ ID NO: 164329 - DNA, 9 bp, Unknown
  misc_feature (1)..( 9): Result.004 file - promoters50/1034349
aatttaact

SEQ ID NO: 164330 - DNA, 9 bp, Unknown
  misc_feature (1)..( 9): Result.004 file - promoters50/1034349
taaataaat

SEQ ID NO: 164331 - DNA, 9 bp, Unknown
  misc_feature (1)..( 9): Result.004 file - promoters50/1034349
aatatatgt

SEQ ID NO: 164332 - DNA, 12 bp, Unknown
  misc_feature (1)..( 12): Result.004 file - promoters50/1034349
tattactatata

SEQ ID NO: 164333 - DNA, 12 bp, Unknown
  misc_feature (1)..( 12): Result.004 file - promoters50/1034349
gtcgactataga

SEQ ID NO: 164334 - DNA, 12 bp, Unknown
  misc_feature (1)..( 12): Result.004 file - promoters50/1034349
atttaatatttt

SEQ ID NO: 164335 - DNA, 12 bp, Unknown
  misc_feature (1)..( 12): Result.004 file - promoters50/1034349
atcatctataga

SEQ ID NO: 164336 - DNA, 12 bp, Unknown
  misc_feature (1)..( 12): Result.004 file - promoters50/1034349
atttaattaacc

SEQ ID NO: 164337 - DNA, 12 bp, Unknown
  misc_feature (1)..( 12): Result.004 file - promoters50/1034349
tcctattttatt

SEQ ID NO: 164338 - DNA, 9 bp, Unknown
  misc_feature (1)..( 9): Result.004 file - promoters50/1034349
gtcaaaaaa

SEQ ID NO: 164339 - DNA, 9 bp, Unknown
  misc_feature (1)..( 9): Result.004 file - promoters50/1034349
gtcacaaaa

SEQ ID NO: 164340 - DNA, 9 bp, Unknown
  misc_feature (1)..( 9): Result.004 file - promoters50/1034349
aacaataaa

SEQ ID NO: 164341 - DNA, 9 bp, Unknown
  misc_feature (1)..( 9): Result.004 file - promoters50/1034349
agcaaaaat

SEQ ID NO: 164342 - DNA, 9 bp, Unknown
  misc_feature (1)..( 9): Result.004 file - promoters50/1034349
actaaaaat

SEQ ID NO: 164343 - DNA, 10 bp, Unknown
  misc_feature (1)..( 10): Result.004 file - promoters50/1034353
tttaattaaa

SEQ ID NO: 164344 - DNA, 13 bp, Unknown
  misc_feature (1)..( 13): Result.004 file - promoters50/1034353
taaatatttgtgt

SEQ ID NO: 164345 - DNA, 13 bp, Unknown
  misc_feature (1)..( 13): Result.004 file - promoters50/1034353
caaatttttggtt

SEQ ID NO: 164346 - DNA, 13 bp, Unknown
  misc_feature (1)..( 13): Result.004 file - promoters50/1034353
taaaaattgtgtg

SEQ ID NO: 164347 - DNA, 13 bp, Unknown
  misc_feature (1)..( 13): Result.004 file - promoters50/1034353
acaattttgatcc

SEQ ID NO: 164348 - DNA, 13 bp, Unknown
  misc_feature (1)..( 13): Result.004 file - promoters50/1034353
gaggtttttcgtt

SEQ ID NO: 164349 - DNA, 13 bp, Unknown
  misc_feature (1)..( 13): Result.004 file - promoters50/1034463
gagattgtgacgg

SEQ ID NO: 164350 - DNA, 9 bp, Unknown
  misc_feature (1)..( 9): Result.004 file - promoters50/1034463
taatatttt

SEQ ID NO: 164351 - DNA, 9 bp, Unknown
  misc_feature (1)..( 9): Result.004 file - promoters50/1034463
taatatctc

SEQ ID NO: 164352 - DNA, 9 bp, Unknown
  misc_feature (1)..( 9): Result.004 file - promoters50/1034497
aaatttttt

SEQ ID NO: 164353 - DNA, 8 bp, Unknown
  misc_feature (1)..( 8): Result.004 file - promoters50/1034497
ctttattc

SEQ ID NO: 164354 - DNA, 8 bp, Unknown
  misc_feature (1)..( 8): Result.004 file - promoters50/1034497
ctttattt

SEQ ID NO: 164355 - DNA, 8 bp, Unknown
  misc_feature (1)..( 8): Result.004 file - promoters50/1034497
atttatta

SEQ ID NO: 164356 - DNA, 8 bp, Unknown
  misc_feature (1)..( 8): Result.004 file - promoters50/1034497
tcttattt

SEQ ID NO: 164357 - DNA, 14 bp, Unknown
  misc_feature (1)..( 14): Result.004 file - promoters50/1034497
attgattcaattct

SEQ ID NO: 164358 - DNA, 14 bp, Unknown
  misc_feature (1)..( 14): Result.004 file - promoters50/1034497
catatttcatttct

SEQ ID NO: 164359 - DNA, 14 bp, Unknown
  misc_feature (1)..( 14): Result.004 file - promoters50/1034497
acaaattaaatatt

SEQ ID NO: 164360 - DNA, 14 bp, Unknown
  misc_feature (1)..( 14): Result.004 file - promoters50/1034497
atttattctattaa

SEQ ID NO: 164361 - DNA, 8 bp, Unknown
  misc_feature (1)..( 8): Result.004 file - promoters50/1034497
tttaaata

SEQ ID NO: 164362 - DNA, 8 bp, Unknown
  misc_feature (1)..( 8): Result.004 file - promoters50/1034497
attaaata

SEQ ID NO: 164363 - DNA, 8 bp, Unknown
  misc_feature (1)..( 8): Result.004 file - promoters50/1034497
ttttaatc

SEQ ID NO: 164364 - DNA, 8 bp, Unknown
  misc_feature (1)..( 8): Result.004 file - promoters50/1034497
attaaata

SEQ ID NO: 164365 - DNA, 8 bp, Unknown
  misc_feature (1)..( 8): Result.004 file - promoters50/1034497
cttactcg

SEQ ID NO: 164366 - DNA, 12 bp, Unknown
  misc_feature (1)..( 12): Result.004 file - promoters50/1034497
aaataattgatt

SEQ ID NO: 164367 - DNA, 12 bp, Unknown
  misc_feature (1)..( 12): Result.004 file - promoters50/1034497
ttttaatcgatc

SEQ ID NO: 164368 - DNA, 12 bp, Unknown
  misc_feature (1)..( 12): Result.004 file - promoters50/1034497
atttattctatt

SEQ ID NO: 164369 - DNA, 12 bp, Unknown
  misc_feature (1)..( 12): Result.004 file - promoters50/1034497
tcttactcggta

SEQ ID NO: 164370 - DNA, 9 bp, Unknown
  misc_feature (1)..( 9): Result.004 file - promoters50/1034497
agattttaa

SEQ ID NO: 164371 - DNA, 9 bp, Unknown
  misc_feature (1)..( 9): Result.004 file - promoters50/1034497
aaattgtaa

SEQ ID NO: 164372 - DNA, 9 bp, Unknown
  misc_feature (1)..( 9): Result.004 file - promoters50/1034497
agattttct

SEQ ID NO: 164373 - DNA, 9 bp, Unknown
  misc_feature (1)..( 9): Result.004 file - promoters50/1034652
tcattatct

SEQ ID NO: 164374 - DNA, 10 bp, Unknown
  misc_feature (1)..( 10): Result.004 file - promoters50/1034652
tcttcttctt

SEQ ID NO: 164375 - DNA, 10 bp, Unknown
  misc_feature (1)..( 10): Result.004 file - promoters50/1034652
tcttgttctg

SEQ ID NO: 164376 - DNA, 10 bp, Unknown
  misc_feature (1)..( 10): Result.004 file - promoters50/1034652
tttgcttctc

SEQ ID NO: 164377 - DNA, 10 bp, Unknown
  misc_feature (1)..( 10): Result.004 file - promoters50/1034652
ccttctttaa

SEQ ID NO: 164378 - DNA, 10 bp, Unknown
  misc_feature (1)..( 10): Result.004 file - promoters50/1034652
agttggtctg

SEQ ID NO: 164379 - DNA, 10 bp, Unknown
  misc_feature (1)..( 10): Result.004 file - promoters50/1034692
aattcttttg

SEQ ID NO: 164380 - DNA, 9 bp, Unknown
  misc_feature (1)..( 9): Result.004 file - promoters50/1034692
aaaatcaac

SEQ ID NO: 164381 - DNA, 9 bp, Unknown
  misc_feature (1)..( 9): Result.004 file - promoters50/1034692
caaatcaac

SEQ ID NO: 164382 - DNA, 9 bp, Unknown
  misc_feature (1)..( 9): Result.004 file - promoters50/1034692
aaaaacaat

SEQ ID NO: 164383 - DNA, 8 bp, Unknown
  misc_feature (1)..( 8): Result.004 file - promoters50/1034692
aaatggaa

SEQ ID NO: 164384 - DNA, 8 bp, Unknown
  misc_feature (1)..( 8): Result.004 file - promoters50/1034692
aaaaggaa

SEQ ID NO: 164385 - DNA, 8 bp, Unknown
  misc_feature (1)..( 8): Result.004 file - promoters50/1034692
aaaacgaa

SEQ ID NO: 164386 - DNA, 10 bp, Unknown
  misc_feature (1)..( 10): Result.004 file - promoters50/1034692
tcacttgcac

SEQ ID NO: 164387 - DNA, 10 bp, Unknown
  misc_feature (1)..( 10): Result.004 file - promoters50/1034692
attcttacac

SEQ ID NO: 164388 - DNA, 10 bp, Unknown
  misc_feature (1)..( 10): Result.004 file - promoters50/1034834
atttttactt

SEQ ID NO: 164389 - DNA, 10 bp, Unknown
  misc_feature (1)..( 10): Result.004 file - promoters50/1034834
ttttattata

SEQ ID NO: 164390 - DNA, 10 bp, Unknown
  misc_feature (1)..( 10): Result.004 file - promoters50/1034834
tttaattata

SEQ ID NO: 164391 - DNA, 10 bp, Unknown
  misc_feature (1)..( 10): Result.004 file - promoters50/1034834
ttgtatttta

SEQ ID NO: 164392 - DNA, 11 bp, Unknown
  misc_feature (1)..( 11): Result.004 file - promoters50/1034834
atatatataaa

SEQ ID NO: 164393 - DNA, 11 bp, Unknown
  misc_feature (1)..( 11): Result.004 file - promoters50/1034834
atatctataaa

SEQ ID NO: 164394 - DNA, 11 bp, Unknown
  misc_feature (1)..( 11): Result.004 file - promoters50/1034837
ttatataccca

SEQ ID NO: 164395 - DNA, 12 bp, Unknown
  misc_feature (1)..( 12): Result.004 file - promoters50/1034837
agatattttaaa

SEQ ID NO: 164396 - DNA, 12 bp, Unknown
  misc_feature (1)..( 12): Result.004 file - promoters50/1034837
caataatttaca

SEQ ID NO: 164397 - DNA, 12 bp, Unknown
  misc_feature (1)..( 12): Result.004 file - promoters50/1034837
acacaatataca

SEQ ID NO: 164398 - DNA, 12 bp, Unknown
  misc_feature (1)..( 12): Result.004 file - promoters50/1034837
tgaaaatttata

SEQ ID NO: 164399 - DNA, 12 bp, Unknown
  misc_feature (1)..( 12): Result.004 file - promoters50/1034837
caacaatgtaca

SEQ ID NO: 164400 - DNA, 12 bp, Unknown
  misc_feature (1)..( 12): Result.004 file - promoters50/1034837
ttaaaatttaat

SEQ ID NO: 164401 - DNA, 12 bp, Unknown
  misc_feature (1)..( 12): Result.004 file - promoters50/1034837
aaaaaatataca

SEQ ID NO: 164402 - DNA, 12 bp, Unknown
  misc_feature (1)..( 12): Result.004 file - promoters50/1034837
acacaatataca

SEQ ID NO: 164403 - DNA, 12 bp, Unknown
  misc_feature (1)..( 12): Result.004 file - promoters50/1034837
caataatttaca

SEQ ID NO: 164404 - DNA, 12 bp, Unknown
  misc_feature (1)..( 12): Result.004 file - promoters50/1034837
tgaaaatttata

SEQ ID NO: 164405 - DNA, 12 bp, Unknown
  misc_feature (1)..( 12): Result.004 file - promoters50/1034837
caacaatgtaca

SEQ ID NO: 164406 - DNA, 12 bp, Unknown
  misc_feature (1)..( 12): Result.004 file - promoters50/1034837
ttaaaatttaat

SEQ ID NO: 164407 - DNA, 10 bp, Unknown
  misc_feature (1)..( 10): Result.004 file - promoters50/1034837
tcaacaaaat

SEQ ID NO: 164408 - DNA, 10 bp, Unknown
  misc_feature (1)..( 10): Result.004 file - promoters50/1034837
aaaacaaatc

SEQ ID NO: 164409 - DNA, 10 bp, Unknown
  misc_feature (1)..( 10): Result.004 file - promoters50/1034837
tcaataaact

SEQ ID NO: 164410 - DNA, 10 bp, Unknown
  misc_feature (1)..( 10): Result.004 file - promoters50/1034837
ggaaaaaaat

SEQ ID NO: 164411 - DNA, 10 bp, Unknown
  misc_feature (1)..( 10): Result.004 file - promoters50/1034837
ataacaaata

SEQ ID NO: 164412 - DNA, 10 bp, Unknown
  misc_feature (1)..( 10): Result.004 file - promoters50/1034841
agaacaaatg

SEQ ID NO: 164413 - DNA, 8 bp, Unknown
  misc_feature (1)..( 8): Result.004 file - promoters50/1034841
ttgaaaat

SEQ ID NO: 164414 - DNA, 8 bp, Unknown
  misc_feature (1)..( 8): Result.004 file - promoters50/1034841
ttgaaatg

SEQ ID NO: 164415 - DNA, 8 bp, Unknown
  misc_feature (1)..( 8): Result.004 file - promoters50/1034841
ttgcaatg

SEQ ID NO: 164416 - DNA, 9 bp, Unknown
  misc_feature (1)..( 9): Result.004 file - promoters50/1034841
ttgattatt

SEQ ID NO: 164417 - DNA, 9 bp, Unknown
  misc_feature (1)..( 9): Result.004 file - promoters50/1034841
ttgattatt

SEQ ID NO: 164418 - DNA, 9 bp, Unknown
  misc_feature (1)..( 9): Result.004 file - promoters50/1034841
atgattatt

SEQ ID NO: 164419 - DNA, 7 bp, Unknown
  misc_feature (1)..( 7): Result.004 file - promoters50/1034841
aatgaaa

SEQ ID NO: 164420 - DNA, 7 bp, Unknown
  misc_feature (1)..( 7): Result.004 file - promoters50/1034841
aattaaa

SEQ ID NO: 164421 - DNA, 7 bp, Unknown
  misc_feature (1)..( 7): Result.004 file - promoters50/1034841
gatgaaa

SEQ ID NO: 164422 - DNA, 8 bp, Unknown
  misc_feature (1)..( 8): Result.004 file - promoters50/1034841
taaattac

SEQ ID NO: 164423 - DNA, 8 bp, Unknown
  misc_feature (1)..( 8): Result.004 file - promoters50/1034841
taatttat

SEQ ID NO: 164424 - DNA, 8 bp, Unknown
  misc_feature (1)..( 8): Result.004 file - promoters50/1034841
taagttat

SEQ ID NO: 164425 - DNA, 11 bp, Unknown
  misc_feature (1)..( 11): Result.004 file - promoters50/1034841
aaacttaaaag

SEQ ID NO: 164426 - DNA, 11 bp, Unknown
  misc_feature (1)..( 11): Result.004 file - promoters50/1034841
caacttcaaag

SEQ ID NO: 164427 - DNA, 11 bp, Unknown
  misc_feature (1)..( 11): Result.004 file - promoters50/1034870
caacttttttt

SEQ ID NO: 164428 - DNA, 16 bp, Unknown
  misc_feature (1)..( 16): Result.004 file - promoters50/1034870
tttagtgtaatgaaat

SEQ ID NO: 164429 - DNA, 16 bp, Unknown
  misc_feature (1)..( 16): Result.004 file - promoters50/1034870
cctaacagaataaaaa

SEQ ID NO: 164430 - DNA, 16 bp, Unknown
  misc_feature (1)..( 16): Result.004 file - promoters50/1034870
attaaattaattaaaa

SEQ ID NO: 164431 - DNA, 16 bp, Unknown
  misc_feature (1)..( 16): Result.004 file - promoters50/1034870
aatagtacaatgcaat

SEQ ID NO: 164432 - DNA, 16 bp, Unknown
  misc_feature (1)..( 16): Result.004 file - promoters50/1034870
attccagccatgaaag

SEQ ID NO: 164433 - DNA, 16 bp, Unknown
  misc_feature (1)..( 16): Result.004 file - promoters50/1034870
aacagagtaattgatg

SEQ ID NO: 164434 - DNA, 16 bp, Unknown
  misc_feature (1)..( 16): Result.004 file - promoters50/1034870
aaattgccaaagagag

SEQ ID NO: 164435 - DNA, 13 bp, Unknown
  misc_feature (1)..( 13): Result.004 file - promoters50/1034870
ttaacaatttttt

SEQ ID NO: 164436 - DNA, 13 bp, Unknown
  misc_feature (1)..( 13): Result.004 file - promoters50/1034870
acatcaattttgc

SEQ ID NO: 164437 - DNA, 14 bp, Unknown
  misc_feature (1)..( 14): Result.004 file - promoters50/1034870
catatgattgtttt

SEQ ID NO: 164438 - DNA, 14 bp, Unknown
  misc_feature (1)..( 14): Result.004 file - promoters50/1034870
ttaataatttattt

SEQ ID NO: 164439 - DNA, 14 bp, Unknown
  misc_feature (1)..( 14): Result.004 file - promoters50/1034870
gattagattttggt

SEQ ID NO: 164440 - DNA, 14 bp, Unknown
  misc_feature (1)..( 14): Result.004 file - promoters50/1034870
gtaataagttaaca

SEQ ID NO: 164441 - DNA, 26 bp, Unknown
  misc_feature (1)..( 26): Result.004 file - promoters50/1034870
attaacaatttttttctaaaagatta

SEQ ID NO: 164442 - DNA, 26 bp, Unknown
  misc_feature (1)..( 26): Result.004 file - promoters50/1034870
gagacatcaattttgctaaaaatcct

SEQ ID NO: 164443 - DNA, 26 bp, Unknown
  misc_feature (1)..( 26): Result.004 file - promoters50/1034870
catatgattgttttggttgaaatgaa

SEQ ID NO: 164444 - DNA, 26 bp, Unknown
  misc_feature (1)..( 26): Result.004 file - promoters50/1034870
ttaataatttatttaatatttttact

SEQ ID NO: 164445 - DNA, 26 bp, Unknown
  misc_feature (1)..( 26): Result.004 file - promoters50/1034870
tagtgattagattttggtgagaagat

SEQ ID NO: 164446 - DNA, 26 bp, Unknown
  misc_feature (1)..( 26): Result.004 file - promoters50/1034870
cagtttatgaatctgctaatgtgaac

SEQ ID NO: 164447 - DNA, 26 bp, Unknown
  misc_feature (1)..( 26): Result.004 file - promoters50/1034870
gattttacatacacggtaataagtta

SEQ ID NO: 164448 - DNA, 14 bp, Unknown
  misc_feature (1)..( 14): Result.004 file - promoters50/1034870
cttgaatcaatatt

SEQ ID NO: 164449 - DNA, 14 bp, Unknown
  misc_feature (1)..( 14): Result.004 file - promoters50/1034870
cttaaatatttttc

SEQ ID NO: 164450 - DNA, 14 bp, Unknown
  misc_feature (1)..( 14): Result.004 file - promoters50/1034870
attgattcaaaatt

SEQ ID NO: 164451 - DNA, 14 bp, Unknown
  misc_feature (1)..( 14): Result.004 file - promoters50/1034870
cttagatatgataa

SEQ ID NO: 164452 - DNA, 14 bp, Unknown
  misc_feature (1)..( 14): Result.004 file - promoters50/1034870
tttcaaacaaagtt

SEQ ID NO: 164453 - DNA, 14 bp, Unknown
  misc_feature (1)..( 14): Result.004 file - promoters50/1034870
tttaaaacaattat

SEQ ID NO: 164454 - DNA, 15 bp, Unknown
  misc_feature (1)..( 15): Result.004 file - promoters50/1034870
ttgaatcaatatttt

SEQ ID NO: 164455 - DNA, 15 bp, Unknown
  misc_feature (1)..( 15): Result.004 file - promoters50/1034870
cctcttaaatatttt

SEQ ID NO: 164456 - DNA, 15 bp, Unknown
  misc_feature (1)..( 15): Result.004 file - promoters50/1034870
ttgattcaaaattct

SEQ ID NO: 164457 - DNA, 15 bp, Unknown
  misc_feature (1)..( 15): Result.004 file - promoters50/1034870
atatatatatattta

SEQ ID NO: 164458 - DNA, 15 bp, Unknown
  misc_feature (1)..( 15): Result.004 file - promoters50/1034870
gagcttagatatgat

SEQ ID NO: 164459 - DNA, 16 bp, Unknown
  misc_feature (1)..( 16): Result.004 file - promoters50/1034870
cgtggggtatagtttt

SEQ ID NO: 164460 - DNA, 16 bp, Unknown
  misc_feature (1)..( 16): Result.004 file - promoters50/1034962
ggctttcaaacaaagt

SEQ ID NO: 164461 - DNA, 8 bp, Unknown
  misc_feature (1)..( 8): Result.004 file - promoters50/1034962
atttttaa

SEQ ID NO: 164462 - DNA, 8 bp, Unknown
  misc_feature (1)..( 8): Result.004 file - promoters50/1034962
attttttt

SEQ ID NO: 164463 - DNA, 9 bp, Unknown
  misc_feature (1)..( 9): Result.004 file - promoters50/1034962
ttttgtttc

SEQ ID NO: 164464 - DNA, 9 bp, Unknown
  misc_feature (1)..( 9): Result.004 file - promoters50/1034962
aaatcattt

SEQ ID NO: 164465 - DNA, 9 bp, Unknown
  misc_feature (1)..( 9): Result.004 file - promoters50/1034962
caatgattt

SEQ ID NO: 164466 - DNA, 9 bp, Unknown
  misc_feature (1)..( 9): Result.004 file - promoters50/1034970
caattattc

SEQ ID NO: 164467 - DNA, 11 bp, Unknown
  misc_feature (1)..( 11): Result.004 file - promoters50/1034970
gaagacatggt

SEQ ID NO: 164468 - DNA, 11 bp, Unknown
  misc_feature (1)..( 11): Result.004 file - promoters50/1034970
agagaaatggt

SEQ ID NO: 164469 - DNA, 11 bp, Unknown
  misc_feature (1)..( 11): Result.004 file - promoters50/1034970
agagaaagatg

SEQ ID NO: 164470 - DNA, 7 bp, Unknown
  misc_feature (1)..( 7): Result.004 file - promoters50/1034970
tttcttt

SEQ ID NO: 164471 - DNA, 7 bp, Unknown
  misc_feature (1)..( 7): Result.004 file - promoters50/1034970
tttgttt

SEQ ID NO: 164472 - DNA, 7 bp, Unknown
  misc_feature (1)..( 7): Result.004 file - promoters50/1034970
ttttttt

SEQ ID NO: 164473 - DNA, 7 bp, Unknown
  misc_feature (1)..( 7): Result.004 file - promoters50/1034970
attgaca

SEQ ID NO: 164474 - DNA, 7 bp, Unknown
  misc_feature (1)..( 7): Result.004 file - promoters50/1034970
attgact

SEQ ID NO: 164475 - DNA, 7 bp, Unknown
  misc_feature (1)..( 7): Result.004 file - promoters50/1034982
atttact

SEQ ID NO: 164476 - DNA, 8 bp, Unknown
  misc_feature (1)..( 8): Result.004 file - promoters50/1034982
ttcttagt

SEQ ID NO: 164477 - DNA, 8 bp, Unknown
  misc_feature (1)..( 8): Result.004 file - promoters50/1034982
ttcttaaa

SEQ ID NO: 164478 - DNA, 8 bp, Unknown
  misc_feature (1)..( 8): Result.004 file - promoters50/1034982
ttcatagt

SEQ ID NO: 164479 - DNA, 7 bp, Unknown
  misc_feature (1)..( 7): Result.004 file - promoters50/1034982
atagatt

SEQ ID NO: 164480 - DNA, 7 bp, Unknown
  misc_feature (1)..( 7): Result.004 file - promoters50/1034982
gtagatt

SEQ ID NO: 164481 - DNA, 7 bp, Unknown
  misc_feature (1)..( 7): Result.004 file - promoters50/1034982
gtagatg

SEQ ID NO: 164482 - DNA, 9 bp, Unknown
  misc_feature (1)..( 9): Result.004 file - promoters50/1034982
ttttatctc

SEQ ID NO: 164483 - DNA, 9 bp, Unknown
  misc_feature (1)..( 9): Result.004 file - promoters50/1034982
tttaatcag

SEQ ID NO: 164484 - DNA, 9 bp, Unknown
  misc_feature (1)..( 9): Result.004 file - promoters50/1034982
cctaagcag

SEQ ID NO: 164485 - DNA, 9 bp, Unknown
  misc_feature (1)..( 9): Result.004 file - promoters50/1034982
aaaattaat

SEQ ID NO: 164486 - DNA, 9 bp, Unknown
  misc_feature (1)..( 9): Result.004 file - promoters50/1034982
aaaatgaat

SEQ ID NO: 164487 - DNA, 10 bp, Unknown
  misc_feature (1)..( 10): Result.004 file - promoters50/1035027
aaagatgtgg

SEQ ID NO: 164488 - DNA, 8 bp, Unknown
  misc_feature (1)..( 8): Result.004 file - promoters50/1035027
atatatat

SEQ ID NO: 164489 - DNA, 8 bp, Unknown
  misc_feature (1)..( 8): Result.004 file - promoters50/1035027
gtatatac

SEQ ID NO: 164490 - DNA, 8 bp, Unknown
  misc_feature (1)..( 8): Result.004 file - promoters50/1035027
gtatataa

SEQ ID NO: 164491 - DNA, 8 bp, Unknown
  misc_feature (1)..( 8): Result.004 file - promoters50/1035027
tgatataa

SEQ ID NO: 164492 - DNA, 8 bp, Unknown
  misc_feature (1)..( 8): Result.004 file - promoters50/1035027
gtatattc

SEQ ID NO: 164493 - DNA, 13 bp, Unknown
  misc_feature (1)..( 13): Result.004 file - promoters50/1035027
tatttatcaaaaa

SEQ ID NO: 164494 - DNA, 13 bp, Unknown
  misc_feature (1)..( 13): Result.004 file - promoters50/1035027
tatttaatttcat

SEQ ID NO: 164495 - DNA, 13 bp, Unknown
  misc_feature (1)..( 13): Result.004 file - promoters50/1035027
aatttaataccct

SEQ ID NO: 164496 - DNA, 13 bp, Unknown
  misc_feature (1)..( 13): Result.004 file - promoters50/1035027
attttcataacaa

SEQ ID NO: 164497 - DNA, 13 bp, Unknown
  misc_feature (1)..( 13): Result.004 file - promoters50/1035083
gagttaatagcct

SEQ ID NO: 164498 - DNA, 14 bp, Unknown
  misc_feature (1)..( 14): Result.004 file - promoters50/1035083
atctttatacaaaa

SEQ ID NO: 164499 - DNA, 14 bp, Unknown
  misc_feature (1)..( 14): Result.004 file - promoters50/1035083
catattatacgttt

SEQ ID NO: 164500 - DNA, 14 bp, Unknown
  misc_feature (1)..( 14): Result.004 file - promoters50/1035083
atctttataagtat

SEQ ID NO: 164501 - DNA, 14 bp, Unknown
  misc_feature (1)..( 14): Result.004 file - promoters50/1035083
aaacttataattat

SEQ ID NO: 164502 - DNA, 14 bp, Unknown
  misc_feature (1)..( 14): Result.004 file - promoters50/1035083
aaatttgtaacttc

SEQ ID NO: 164503 - DNA, 14 bp, Unknown
  misc_feature (1)..( 14): Result.004 file - promoters50/1035083
aatgatattattat

SEQ ID NO: 164504 - DNA, 11 bp, Unknown
  misc_feature (1)..( 11): Result.004 file - promoters50/1035083
cgataaatatc

SEQ ID NO: 164505 - DNA, 11 bp, Unknown
  misc_feature (1)..( 11): Result.004 file - promoters50/1035083
gtatatataat

SEQ ID NO: 164506 - DNA, 11 bp, Unknown
  misc_feature (1)..( 11): Result.004 file - promoters50/1035083
ctataaatatc

SEQ ID NO: 164507 - DNA, 11 bp, Unknown
  misc_feature (1)..( 11): Result.004 file - promoters50/1035083
tcttatataaa

SEQ ID NO: 164508 - DNA, 11 bp, Unknown
  misc_feature (1)..( 11): Result.004 file - promoters50/1035083
ctataaaaacc

SEQ ID NO: 164509 - DNA, 11 bp, Unknown
  misc_feature (1)..( 11): Result.004 file - promoters50/1035083
ccataaaagca

SEQ ID NO: 164510 - DNA, 13 bp, Unknown
  misc_feature (1)..( 13): Result.004 file - promoters50/1035083
tattttaattcat

SEQ ID NO: 164511 - DNA, 13 bp, Unknown
  misc_feature (1)..( 13): Result.004 file - promoters50/1035083
acttttgattagg

SEQ ID NO: 164512 - DNA, 13 bp, Unknown
  misc_feature (1)..( 13): Result.004 file - promoters50/1035083
gattttacaccac

SEQ ID NO: 164513 - DNA, 13 bp, Unknown
  misc_feature (1)..( 13): Result.004 file - promoters50/1035083
tattttacttaat

SEQ ID NO: 164514 - DNA, 13 bp, Unknown
  misc_feature (1)..( 13): Result.004 file - promoters50/1035083
aaatataaatcat

SEQ ID NO: 164515 - DNA, 13 bp, Unknown
  misc_feature (1)..( 13): Result.004 file - promoters50/1035083
aaagttggttatt

SEQ ID NO: 164516 - DNA, 13 bp, Unknown
  misc_feature (1)..( 13): Result.004 file - promoters50/1035083
gttttaaaagtaa

SEQ ID NO: 164517 - DNA, 13 bp, Unknown
  misc_feature (1)..( 13): Result.004 file - promoters50/1035083
ttttgaaaagagt

SEQ ID NO: 164518 - DNA, 13 bp, Unknown
  misc_feature (1)..( 13): Result.004 file - promoters50/1035083
tctttataagtat

SEQ ID NO: 164519 - DNA, 13 bp, Unknown
  misc_feature (1)..( 13): Result.004 file - promoters50/1035083
ttttgaaataatt

SEQ ID NO: 164520 - DNA, 13 bp, Unknown
  misc_feature (1)..( 13): Result.004 file - promoters50/1035083
aacttataattat

SEQ ID NO: 164521 - DNA, 13 bp, Unknown
  misc_feature (1)..( 13): Result.004 file - promoters50/1035083
ctaatataagtaa

SEQ ID NO: 164522 - DNA, 13 bp, Unknown
  misc_feature (1)..( 13): Result.004 file - promoters50/1035083
atgatattattat

SEQ ID NO: 164523 - DNA, 17 bp, Unknown
  misc_feature (1)..( 17): Result.004 file - promoters50/1035083
taaattttaaaattatt

SEQ ID NO: 164524 - DNA, 17 bp, Unknown
  misc_feature (1)..( 17): Result.004 file - promoters50/1035083
ttgattctaaaatattg

SEQ ID NO: 164525 - DNA, 17 bp, Unknown
  misc_feature (1)..( 17): Result.004 file - promoters50/1035083
aaaatgttagataggaa

SEQ ID NO: 164526 - DNA, 17 bp, Unknown
  misc_feature (1)..( 17): Result.004 file - promoters50/1035083
cagaaactaagattata

SEQ ID NO: 164527 - DNA, 17 bp, Unknown
  misc_feature (1)..( 17): Result.004 file - promoters50/1035083
taaattttgaaataatt

SEQ ID NO: 164528 - DNA, 17 bp, Unknown
  misc_feature (1)..( 17): Result.004 file - promoters50/1035083
tgtgttttgaaaagagt

SEQ ID NO: 164529 - DNA, 20 bp, Unknown
  misc_feature (1)..( 20): Result.004 file - promoters50/1035083
taaattttaaaattattcat

SEQ ID NO: 164530 - DNA, 20 bp, Unknown
  misc_feature (1)..( 20): Result.004 file - promoters50/1035083
gattctaaaatattgttcat

SEQ ID NO: 164531 - DNA, 20 bp, Unknown
  misc_feature (1)..( 20): Result.004 file - promoters50/1035083
cagaaactaagattataatt

SEQ ID NO: 164532 - DNA, 20 bp, Unknown
  misc_feature (1)..( 20): Result.004 file - promoters50/1035083
taaattttgaaataatttca

SEQ ID NO: 164533 - DNA, 20 bp, Unknown
  misc_feature (1)..( 20): Result.004 file - promoters50/1035083
actcgaagaaattgattcat

SEQ ID NO: 164534 - DNA, 20 bp, Unknown
  misc_feature (1)..( 20): Result.004 file - promoters50/1035097
tgtgttttgaaaagagtttt

SEQ ID NO: 164535 - DNA, 9 bp, Unknown
  misc_feature (1)..( 9): Result.004 file - promoters50/1035097
gaaaaaatg

SEQ ID NO: 164536 - DNA, 9 bp, Unknown
  misc_feature (1)..( 9): Result.004 file - promoters50/1035097
gaagaaaga

SEQ ID NO: 164537 - DNA, 9 bp, Unknown
  misc_feature (1)..( 9): Result.004 file - promoters50/1035097
caaaaaatc

SEQ ID NO: 164538 - DNA, 9 bp, Unknown
  misc_feature (1)..( 9): Result.004 file - promoters50/1035097
caaaaaaat

SEQ ID NO: 164539 - DNA, 9 bp, Unknown
  misc_feature (1)..( 9): Result.004 file - promoters50/1035097
gaaaaaaat

SEQ ID NO: 164540 - DNA, 9 bp, Unknown
  misc_feature (1)..( 9): Result.004 file - promoters50/1035117
taaaaaatt

SEQ ID NO: 164541 - DNA, 10 bp, Unknown
  misc_feature (1)..( 10): Result.004 file - promoters50/1035117
tattttttgg

SEQ ID NO: 164542 - DNA, 10 bp, Unknown
  misc_feature (1)..( 10): Result.004 file - promoters50/1035117
tgttttttct

SEQ ID NO: 164543 - DNA, 10 bp, Unknown
  misc_feature (1)..( 10): Result.004 file - promoters50/1035117
tattctttga

SEQ ID NO: 164544 - DNA, 10 bp, Unknown
  misc_feature (1)..( 10): Result.004 file - promoters50/1035117
tcttttttag

SEQ ID NO: 164545 - DNA, 10 bp, Unknown
  misc_feature (1)..( 10): Result.004 file - promoters50/1035117
actttctctc

SEQ ID NO: 164546 - DNA, 10 bp, Unknown
  misc_feature (1)..( 10): Result.004 file - promoters50/1035117
ggttctttgc

SEQ ID NO: 164547 - DNA, 10 bp, Unknown
  misc_feature (1)..( 10): Result.004 file - promoters50/1035117
cctttttata

SEQ ID NO: 164548 - DNA, 10 bp, Unknown
  misc_feature (1)..( 10): Result.004 file - promoters50/1035117
gtctctatga

SEQ ID NO: 164549 - DNA, 9 bp, Unknown
  misc_feature (1)..( 9): Result.004 file - promoters50/1035117
acttttata

SEQ ID NO: 164550 - DNA, 9 bp, Unknown
  misc_feature (1)..( 9): Result.004 file - promoters50/1035117
tcttttaaa

SEQ ID NO: 164551 - DNA, 9 bp, Unknown
  misc_feature (1)..( 9): Result.004 file - promoters50/1035117
tgttttatt

SEQ ID NO: 164552 - DNA, 9 bp, Unknown
  misc_feature (1)..( 9): Result.004 file - promoters50/1035117
tcttttgtc

SEQ ID NO: 164553 - DNA, 9 bp, Unknown
  misc_feature (1)..( 9): Result.004 file - promoters50/1035117
acttttact

SEQ ID NO: 164554 - DNA, 9 bp, Unknown
  misc_feature (1)..( 9): Result.004 file - promoters50/1035117
tttttcatt

SEQ ID NO: 164555 - DNA, 9 bp, Unknown
  misc_feature (1)..( 9): Result.004 file - promoters50/1035117
tgtattaca

SEQ ID NO: 164556 - DNA, 11 bp, Unknown
  misc_feature (1)..( 11): Result.004 file - promoters50/1035117
ctttgttatat

SEQ ID NO: 164557 - DNA, 11 bp, Unknown
  misc_feature (1)..( 11): Result.004 file - promoters50/1035117
atttgatattt

SEQ ID NO: 164558 - DNA, 11 bp, Unknown
  misc_feature (1)..( 11): Result.004 file - promoters50/1035117
tttttttagtt

SEQ ID NO: 164559 - DNA, 11 bp, Unknown
  misc_feature (1)..( 11): Result.004 file - promoters50/1035117
ctttgtaagta

SEQ ID NO: 164560 - DNA, 11 bp, Unknown
  misc_feature (1)..( 11): Result.004 file - promoters50/1035117
ttttaataaat

SEQ ID NO: 164561 - DNA, 11 bp, Unknown
  misc_feature (1)..( 11): Result.004 file - promoters50/1035117
attttatttta

SEQ ID NO: 164562 - DNA, 13 bp, Unknown
  misc_feature (1)..( 13): Result.004 file - promoters50/1035117
aaaaacaacaaat

SEQ ID NO: 164563 - DNA, 13 bp, Unknown
  misc_feature (1)..( 13): Result.004 file - promoters50/1035117
ccaaataacaaat

SEQ ID NO: 164564 - DNA, 13 bp, Unknown
  misc_feature (1)..( 13): Result.004 file - promoters50/1035117
agtaacaacgcat

SEQ ID NO: 164565 - DNA, 13 bp, Unknown
  misc_feature (1)..( 13): Result.004 file - promoters50/1035117
aaaaacaacagaa

SEQ ID NO: 164566 - DNA, 13 bp, Unknown
  misc_feature (1)..( 13): Result.004 file - promoters50/1035117
gcaaagaaaatag

SEQ ID NO: 164567 - DNA, 13 bp, Unknown
  misc_feature (1)..( 13): Result.004 file - promoters50/1035117
gcaaagagagttg

SEQ ID NO: 164568 - DNA, 17 bp, Unknown
  misc_feature (1)..( 17): Result.004 file - promoters50/1035117
acttatttccaataaaa

SEQ ID NO: 164569 - DNA, 17 bp, Unknown
  misc_feature (1)..( 17): Result.004 file - promoters50/1035117
ttttatttctcctactt

SEQ ID NO: 164570 - DNA, 17 bp, Unknown
  misc_feature (1)..( 17): Result.004 file - promoters50/1035117
ttttctttagatttttc

SEQ ID NO: 164571 - DNA, 17 bp, Unknown
  misc_feature (1)..( 17): Result.004 file - promoters50/1035117
aactctatagaaagtct

SEQ ID NO: 164572 - DNA, 17 bp, Unknown
  misc_feature (1)..( 17): Result.004 file - promoters50/1035117
ctttcttttaataaatg

SEQ ID NO: 164573 - DNA, 17 bp, Unknown
  misc_feature (1)..( 17): Result.004 file - promoters50/1035117
ccttcataaaatctata

SEQ ID NO: 164574 - DNA, 17 bp, Unknown
  misc_feature (1)..( 17): Result.004 file - promoters50/1035155
atcactagatttcatac

SEQ ID NO: 164575 - DNA, 11 bp, Unknown
  misc_feature (1)..( 11): Result.004 file - promoters50/1035155
aaaattgttgg

SEQ ID NO: 164576 - DNA, 11 bp, Unknown
  misc_feature (1)..( 11): Result.004 file - promoters50/1035155
caaattgctag

SEQ ID NO: 164577 - DNA, 12 bp, Unknown
  misc_feature (1)..( 12): Result.004 file - promoters50/1035155
aaacatttttta

SEQ ID NO: 164578 - DNA, 12 bp, Unknown
  misc_feature (1)..( 12): Result.004 file - promoters50/1035155
aaatattatata

SEQ ID NO: 164579 - DNA, 12 bp, Unknown
  misc_feature (1)..( 12): Result.004 file - promoters50/1035155
aaacacaataca

SEQ ID NO: 164580 - DNA, 9 bp, Unknown
  misc_feature (1)..( 9): Result.004 file - promoters50/1035155
ttttcatag

SEQ ID NO: 164581 - DNA, 9 bp, Unknown
  misc_feature (1)..( 9): Result.004 file - promoters50/1035155
ttttcattt

SEQ ID NO: 164582 - DNA, 9 bp, Unknown
  misc_feature (1)..( 9): Result.004 file - promoters50/1035155
atttaattt

SEQ ID NO: 164583 - DNA, 9 bp, Unknown
  misc_feature (1)..( 9): Result.004 file - promoters50/1035155
ccttacttt

SEQ ID NO: 164584 - DNA, 7 bp, Unknown
  misc_feature (1)..( 7): Result.004 file - promoters50/1035155
tatgtag

SEQ ID NO: 164585 - DNA, 7 bp, Unknown
  misc_feature (1)..( 7): Result.004 file - promoters50/1035155
tatgtat

SEQ ID NO: 164586 - DNA, 7 bp, Unknown
  misc_feature (1)..( 7): Result.004 file - promoters50/1035155
tatttag

SEQ ID NO: 164587 - DNA, 7 bp, Unknown
  misc_feature (1)..( 7): Result.004 file - promoters50/1035155
cattttt

SEQ ID NO: 164588 - DNA, 11 bp, Unknown
  misc_feature (1)..( 11): Result.004 file - promoters50/1035155
aaatcaaattg

SEQ ID NO: 164589 - DNA, 11 bp, Unknown
  misc_feature (1)..( 11): Result.004 file - promoters50/1035155
aaaacaaaaca

SEQ ID NO: 164590 - DNA, 12 bp, Unknown
  misc_feature (1)..( 12): Result.004 file - promoters50/1035155
aaacacaataca

SEQ ID NO: 164591 - DNA, 12 bp, Unknown
  misc_feature (1)..( 12): Result.004 file - promoters50/1035160
cgacacaaatat

SEQ ID NO: 164592 - DNA, 10 bp, Unknown
  misc_feature (1)..( 10): Result.004 file - promoters50/1035160
ataatttatt

SEQ ID NO: 164593 - DNA, 10 bp, Unknown
  misc_feature (1)..( 10): Result.004 file - promoters50/1035160
ttaatttcat

SEQ ID NO: 164594 - DNA, 10 bp, Unknown
  misc_feature (1)..( 10): Result.004 file - promoters50/1035160
gcaatttaga

SEQ ID NO: 164595 - DNA, 10 bp, Unknown
  misc_feature (1)..( 10): Result.004 file - promoters50/1035160
ttaagttata

SEQ ID NO: 164596 - DNA, 10 bp, Unknown
  misc_feature (1)..( 10): Result.004 file - promoters50/1035160
ttaagtcaat

SEQ ID NO: 164597 - DNA, 10 bp, Unknown
  misc_feature (1)..( 10): Result.004 file - promoters50/1035172
caaatttcat

SEQ ID NO: 164598 - DNA, 8 bp, Unknown
  misc_feature (1)..( 8): Result.004 file - promoters50/1035172
aaaaatta

SEQ ID NO: 164599 - DNA, 8 bp, Unknown
  misc_feature (1)..( 8): Result.004 file - promoters50/1035172
gaaaatta

SEQ ID NO: 164600 - DNA, 8 bp, Unknown
  misc_feature (1)..( 8): Result.004 file - promoters50/1035172
aaaaatag

SEQ ID NO: 164601 - DNA, 8 bp, Unknown
  misc_feature (1)..( 8): Result.004 file - promoters50/1035172
aataataa

SEQ ID NO: 164602 - DNA, 8 bp, Unknown
  misc_feature (1)..( 8): Result.004 file - promoters50/1035172
aataatta

SEQ ID NO: 164603 - DNA, 8 bp, Unknown
  misc_feature (1)..( 8): Result.004 file - promoters50/1035172
aaacatag

SEQ ID NO: 164604 - DNA, 17 bp, Unknown
  misc_feature (1)..( 17): Result.004 file - promoters50/1035172
tcttttctctctataaa

SEQ ID NO: 164605 - DNA, 17 bp, Unknown
  misc_feature (1)..( 17): Result.004 file - promoters50/1035172
acttttgtctatataac

SEQ ID NO: 164606 - DNA, 17 bp, Unknown
  misc_feature (1)..( 17): Result.004 file - promoters50/1035172
tctcttcttcattgaac

SEQ ID NO: 164607 - DNA, 17 bp, Unknown
  misc_feature (1)..( 17): Result.004 file - promoters50/1035172
cactagtgtcctataaa

SEQ ID NO: 164608 - DNA, 17 bp, Unknown
  misc_feature (1)..( 17): Result.004 file - promoters50/1035172
gcttatcttttataatt

SEQ ID NO: 164609 - DNA, 17 bp, Unknown
  misc_feature (1)..( 17): Result.004 file - promoters50/1035172
tattttgtatatttata

SEQ ID NO: 164610 - DNA, 17 bp, Unknown
  misc_feature (1)..( 17): Result.004 file - promoters50/1035194
cccttcctatatttaaa

SEQ ID NO: 164611 - DNA, 10 bp, Unknown
  misc_feature (1)..( 10): Result.004 file - promoters50/1035194
aaaataaaat

SEQ ID NO: 164612 - DNA, 10 bp, Unknown
  misc_feature (1)..( 10): Result.004 file - promoters50/1035194
tgtatataat

SEQ ID NO: 164613 - DNA, 10 bp, Unknown
  misc_feature (1)..( 10): Result.004 file - promoters50/1035194
tgaatacaat

SEQ ID NO: 164614 - DNA, 10 bp, Unknown
  misc_feature (1)..( 10): Result.004 file - promoters50/1035194
aaaataaaat

SEQ ID NO: 164615 - DNA, 10 bp, Unknown
  misc_feature (1)..( 10): Result.004 file - promoters50/1035267
aaaaaaaaaa

SEQ ID NO: 164616 - DNA, 8 bp, Unknown
  misc_feature (1)..( 8): Result.004 file - promoters50/1035267
tcaaataa

SEQ ID NO: 164617 - DNA, 8 bp, Unknown
  misc_feature (1)..( 8): Result.004 file - promoters50/1035267
aaaaataa

SEQ ID NO: 164618 - DNA, 8 bp, Unknown
  misc_feature (1)..( 8): Result.004 file - promoters50/1035267
tcacatag

SEQ ID NO: 164619 - DNA, 10 bp, Unknown
  misc_feature (1)..( 10): Result.004 file - promoters50/1035267
ccacagaaac

SEQ ID NO: 164620 - DNA, 10 bp, Unknown
  misc_feature (1)..( 10): Result.004 file - promoters50/1035267
ccacagcgtt

SEQ ID NO: 164621 - DNA, 10 bp, Unknown
  misc_feature (1)..( 10): Result.004 file - promoters50/1035267
tcacagatgt

SEQ ID NO: 164622 - DNA, 10 bp, Unknown
  misc_feature (1)..( 10): Result.004 file - promoters50/1035306
acacatcaca

SEQ ID NO: 164623 - DNA, 13 bp, Unknown
  misc_feature (1)..( 13): Result.004 file - promoters50/1035306
ttcatattaaaaa

SEQ ID NO: 164624 - DNA, 13 bp, Unknown
  misc_feature (1)..( 13): Result.004 file - promoters50/1035306
cggataataagag

SEQ ID NO: 164625 - DNA, 13 bp, Unknown
  misc_feature (1)..( 13): Result.004 file - promoters50/1035306
cgtatattatgga

SEQ ID NO: 164626 - DNA, 13 bp, Unknown
  misc_feature (1)..( 13): Result.004 file - promoters50/1035306
ttcatactaaaaa

SEQ ID NO: 164627 - DNA, 13 bp, Unknown
  misc_feature (1)..( 13): Result.004 file - promoters50/1035306
gatctttaaaaaa

SEQ ID NO: 164628 - DNA, 13 bp, Unknown
  misc_feature (1)..( 13): Result.004 file - promoters50/1035306
ttactttaaaaaa

SEQ ID NO: 164629 - DNA, 13 bp, Unknown
  misc_feature (1)..( 13): Result.004 file - promoters50/1035306
aatcattagtcga

SEQ ID NO: 164630 - DNA, 13 bp, Unknown
  misc_feature (1)..( 13): Result.004 file - promoters50/1035306
aataattgacgtt

SEQ ID NO: 164631 - DNA, 13 bp, Unknown
  misc_feature (1)..( 13): Result.004 file - promoters50/1035306
aaatttataaaat

SEQ ID NO: 164632 - DNA, 13 bp, Unknown
  misc_feature (1)..( 13): Result.004 file - promoters50/1035306
ttatttataaaat

SEQ ID NO: 164633 - DNA, 13 bp, Unknown
  misc_feature (1)..( 13): Result.004 file - promoters50/1035306
ctaaaaataaaaa

SEQ ID NO: 164634 - DNA, 13 bp, Unknown
  misc_feature (1)..( 13): Result.004 file - promoters50/1035312
ttacttattttcg

SEQ ID NO: 164635 - DNA, 11 bp, Unknown
  misc_feature (1)..( 11): Result.004 file - promoters50/1035312
tatatcaaaaa

SEQ ID NO: 164636 - DNA, 11 bp, Unknown
  misc_feature (1)..( 11): Result.004 file - promoters50/1035312
tgaatcaaaac

SEQ ID NO: 164637 - DNA, 11 bp, Unknown
  misc_feature (1)..( 11): Result.004 file - promoters50/1035312
gaaaccaaaac

SEQ ID NO: 164638 - DNA, 11 bp, Unknown
  misc_feature (1)..( 11): Result.004 file - promoters50/1035312
ctaatgaaaat

SEQ ID NO: 164639 - DNA, 11 bp, Unknown
  misc_feature (1)..( 11): Result.004 file - promoters50/1035312
catgtcaaaaa

SEQ ID NO: 164640 - DNA, 11 bp, Unknown
  misc_feature (1)..( 11): Result.004 file - promoters50/1035312
ctagtgataca

SEQ ID NO: 164641 - DNA, 12 bp, Unknown
  misc_feature (1)..( 12): Result.004 file - promoters50/1035312
attcggcccata

SEQ ID NO: 164642 - DNA, 12 bp, Unknown
  misc_feature (1)..( 12): Result.004 file - promoters50/1035312
attgggcccaat

SEQ ID NO: 164643 - DNA, 12 bp, Unknown
  misc_feature (1)..( 12): Result.004 file - promoters50/1035312
ccctggcccata

SEQ ID NO: 164644 - DNA, 12 bp, Unknown
  misc_feature (1)..( 12): Result.004 file - promoters50/1035312
attaggctttaa

SEQ ID NO: 164645 - DNA, 12 bp, Unknown
  misc_feature (1)..( 12): Result.004 file - promoters50/1035312
tatgggccttat

SEQ ID NO: 164646 - DNA, 12 bp, Unknown
  misc_feature (1)..( 12): Result.004 file - promoters50/1035312
actaggcctaat

SEQ ID NO: 164647 - DNA, 8 bp, Unknown
  misc_feature (1)..( 8): Result.004 file - promoters50/1035312
atttgagc

SEQ ID NO: 164648 - DNA, 8 bp, Unknown
  misc_feature (1)..( 8): Result.004 file - promoters50/1035312
atttgatt

SEQ ID NO: 164649 - DNA, 8 bp, Unknown
  misc_feature (1)..( 8): Result.004 file - promoters50/1035312
atttgatc

SEQ ID NO: 164650 - DNA, 8 bp, Unknown
  misc_feature (1)..( 8): Result.004 file - promoters50/1035312
atttgaaa

SEQ ID NO: 164651 - DNA, 8 bp, Unknown
  misc_feature (1)..( 8): Result.004 file - promoters50/1035312
ttttgaaa

SEQ ID NO: 164652 - DNA, 8 bp, Unknown
  misc_feature (1)..( 8): Result.004 file - promoters50/1035315
gtttgata

SEQ ID NO: 164653 - DNA, 8 bp, Unknown
  misc_feature (1)..( 8): Result.004 file - promoters50/1035315
tattgatt

SEQ ID NO: 164654 - DNA, 8 bp, Unknown
  misc_feature (1)..( 8): Result.004 file - promoters50/1035315
aattgatt

SEQ ID NO: 164655 - DNA, 8 bp, Unknown
  misc_feature (1)..( 8): Result.004 file - promoters50/1035507
aattgaga

SEQ ID NO: 164656 - DNA, 11 bp, Unknown
  misc_feature (1)..( 11): Result.004 file - promoters50/1035507
tttcagtttcc

SEQ ID NO: 164657 - DNA, 11 bp, Unknown
  misc_feature (1)..( 11): Result.004 file - promoters50/1035507
tttcatttttt

SEQ ID NO: 164658 - DNA, 12 bp, Unknown
  misc_feature (1)..( 12): Result.004 file - promoters50/1035507
gctaattatttt

SEQ ID NO: 164659 - DNA, 12 bp, Unknown
  misc_feature (1)..( 12): Result.004 file - promoters50/1035507
caagatttttca

SEQ ID NO: 164660 - DNA, 11 bp, Unknown
  misc_feature (1)..( 11): Result.004 file - promoters50/1035507
ttgaagaatgt

SEQ ID NO: 164661 - DNA, 11 bp, Unknown
  misc_feature (1)..( 11): Result.004 file - promoters50/1035507
gtgatgaatca

SEQ ID NO: 164662 - DNA, 11 bp, Unknown
  misc_feature (1)..( 11): Result.004 file - promoters50/1035507
gtgttgagcta

SEQ ID NO: 164663 - DNA, 11 bp, Unknown
  misc_feature (1)..( 11): Result.004 file - promoters50/1035507
ccattgagtca

SEQ ID NO: 164664 - DNA, 8 bp, Unknown
  misc_feature (1)..( 8): Result.004 file - promoters50/1035507
cataaaac

SEQ ID NO: 164665 - DNA, 8 bp, Unknown
  misc_feature (1)..( 8): Result.004 file - promoters50/1035507
cattaaag

SEQ ID NO: 164666 - DNA, 8 bp, Unknown
  misc_feature (1)..( 8): Result.004 file - promoters50/1035507
tataaaaa

SEQ ID NO: 164667 - DNA, 8 bp, Unknown
  misc_feature (1)..( 8): Result.004 file - promoters50/1035507
tctaaaaa

SEQ ID NO: 164668 - DNA, 8 bp, Unknown
  misc_feature (1)..( 8): Result.004 file - promoters50/1035507
ttcaattg

SEQ ID NO: 164669 - DNA, 8 bp, Unknown
  misc_feature (1)..( 8): Result.004 file - promoters50/1035507
ttcaattt

SEQ ID NO: 164670 - DNA, 8 bp, Unknown
  misc_feature (1)..( 8): Result.004 file - promoters50/1035507
acaaattg

SEQ ID NO: 164671 - DNA, 8 bp, Unknown
  misc_feature (1)..( 8): Result.004 file - promoters50/1035632
acaaatgg

SEQ ID NO: 164672 - DNA, 11 bp, Unknown
  misc_feature (1)..( 11): Result.004 file - promoters50/1035632
ctagagagaat

SEQ ID NO: 164673 - DNA, 11 bp, Unknown
  misc_feature (1)..( 11): Result.004 file - promoters50/1035632
ctacagatgtc

SEQ ID NO: 164674 - DNA, 11 bp, Unknown
  misc_feature (1)..( 11): Result.004 file - promoters50/1035632
atagaaagaaa

SEQ ID NO: 164675 - DNA, 11 bp, Unknown
  misc_feature (1)..( 11): Result.004 file - promoters50/1035632
atataaattag

SEQ ID NO: 164676 - DNA, 11 bp, Unknown
  misc_feature (1)..( 11): Result.004 file - promoters50/1035632
atataaagaaa

SEQ ID NO: 164677 - DNA, 11 bp, Unknown
  misc_feature (1)..( 11): Result.004 file - promoters50/1035636
taataaagtgt

SEQ ID NO: 164678 - DNA, 12 bp, Unknown
  misc_feature (1)..( 12): Result.004 file - promoters50/1035636
atgataacagtc

SEQ ID NO: 164679 - DNA, 12 bp, Unknown
  misc_feature (1)..( 12): Result.004 file - promoters50/1035636
atggtaaccact

SEQ ID NO: 164680 - DNA, 12 bp, Unknown
  misc_feature (1)..( 12): Result.004 file - promoters50/1035636
aatataacggtc

SEQ ID NO: 164681 - DNA, 12 bp, Unknown
  misc_feature (1)..( 12): Result.004 file - promoters50/1035636
atgatatataga

SEQ ID NO: 164682 - DNA, 10 bp, Unknown
  misc_feature (1)..( 10): Result.004 file - promoters50/1035636
cagtctgatg

SEQ ID NO: 164683 - DNA, 10 bp, Unknown
  misc_feature (1)..( 10): Result.004 file - promoters50/1035636
gagtttgaat

SEQ ID NO: 164684 - DNA, 10 bp, Unknown
  misc_feature (1)..( 10): Result.004 file - promoters50/1035636
gagttttaat

SEQ ID NO: 164685 - DNA, 9 bp, Unknown
  misc_feature (1)..( 9): Result.004 file - promoters50/1035636
aaaataaaa

SEQ ID NO: 164686 - DNA, 9 bp, Unknown
  misc_feature (1)..( 9): Result.004 file - promoters50/1035636
aaaattaaa

SEQ ID NO: 164687 - DNA, 9 bp, Unknown
  misc_feature (1)..( 9): Result.004 file - promoters50/1035636
aaaagaaaa

SEQ ID NO: 164688 - DNA, 8 bp, Unknown
  misc_feature (1)..( 8): Result.004 file - promoters50/1035636
ttttgttt

SEQ ID NO: 164689 - DNA, 8 bp, Unknown
  misc_feature (1)..( 8): Result.004 file - promoters50/1035636
cttttttt

SEQ ID NO: 164690 - DNA, 8 bp, Unknown
  misc_feature (1)..( 8): Result.004 file - promoters50/1035636
cttttttt

SEQ ID NO: 164691 - DNA, 9 bp, Unknown
  misc_feature (1)..( 9): Result.004 file - promoters50/1035636
aatatattg

SEQ ID NO: 164692 - DNA, 9 bp, Unknown
  misc_feature (1)..( 9): Result.004 file - promoters50/1035636
aatttattt

SEQ ID NO: 164693 - DNA, 9 bp, Unknown
  misc_feature (1)..( 9): Result.004 file - promoters50/1035636
agttttttt

SEQ ID NO: 164694 - DNA, 9 bp, Unknown
  misc_feature (1)..( 9): Result.004 file - promoters50/1035636
aaaagatgt

SEQ ID NO: 164695 - DNA, 9 bp, Unknown
  misc_feature (1)..( 9): Result.004 file - promoters50/1035636
aaaaaatgt

SEQ ID NO: 164696 - DNA, 9 bp, Unknown
  misc_feature (1)..( 9): Result.004 file - promoters50/1035636
aaaaaaaaa

SEQ ID NO: 164697 - DNA, 8 bp, Unknown
  misc_feature (1)..( 8): Result.004 file - promoters50/1035636
gatcaaaa

SEQ ID NO: 164698 - DNA, 8 bp, Unknown
  misc_feature (1)..( 8): Result.004 file - promoters50/1035636
gattaaat

SEQ ID NO: 164699 - DNA, 8 bp, Unknown
  misc_feature (1)..( 8): Result.004 file - promoters50/1035636
attcaaaa

SEQ ID NO: 164700 - DNA, 7 bp, Unknown
  misc_feature (1)..( 7): Result.004 file - promoters50/1035636
ttacaaa

SEQ ID NO: 164701 - DNA, 7 bp, Unknown
  misc_feature (1)..( 7): Result.004 file - promoters50/1035636
ttacaac

SEQ ID NO: 164702 - DNA, 7 bp, Unknown
  misc_feature (1)..( 7): Result.004 file - promoters50/1035636
ttaaaac

SEQ ID NO: 164703 - DNA, 9 bp, Unknown
  misc_feature (1)..( 9): Result.004 file - promoters50/1035636
ataaaaact

SEQ ID NO: 164704 - DNA, 9 bp, Unknown
  misc_feature (1)..( 9): Result.004 file - promoters50/1035636
ataaaagaa

SEQ ID NO: 164705 - DNA, 9 bp, Unknown
  misc_feature (1)..( 9): Result.004 file - promoters50/1035636
ttaaatgaa

SEQ ID NO: 164706 - DNA, 11 bp, Unknown
  misc_feature (1)..( 11): Result.004 file - promoters50/1035636
cgaataaatta

SEQ ID NO: 164707 - DNA, 11 bp, Unknown
  misc_feature (1)..( 11): Result.004 file - promoters50/1035636
tccataaattc

SEQ ID NO: 164708 - DNA, 11 bp, Unknown
  misc_feature (1)..( 11): Result.004 file - promoters50/1035651
aaaagaaaaaa

SEQ ID NO: 164709 - DNA, 9 bp, Unknown
  misc_feature (1)..( 9): Result.004 file - promoters50/1035651
tttcttctc

SEQ ID NO: 164710 - DNA, 9 bp, Unknown
  misc_feature (1)..( 9): Result.004 file - promoters50/1035651
tttcttcca

SEQ ID NO: 164711 - DNA, 9 bp, Unknown
  misc_feature (1)..( 9): Result.004 file - promoters50/1035651
catcttctc

SEQ ID NO: 164712 - DNA, 11 bp, Unknown
  misc_feature (1)..( 11): Result.004 file - promoters50/1035651
gatggttcaca

SEQ ID NO: 164713 - DNA, 11 bp, Unknown
  misc_feature (1)..( 11): Result.004 file - promoters50/1035651
gatggttcaca

SEQ ID NO: 164714 - DNA, 11 bp, Unknown
  misc_feature (1)..( 11): Result.004 file - promoters50/1035665
tttggttctac

SEQ ID NO: 164715 - DNA, 8 bp, Unknown
  misc_feature (1)..( 8): Result.004 file - promoters50/1035665
taagttaa

SEQ ID NO: 164716 - DNA, 8 bp, Unknown
  misc_feature (1)..( 8): Result.004 file - promoters50/1035665
taaattat

SEQ ID NO: 164717 - DNA, 8 bp, Unknown
  misc_feature (1)..( 8): Result.004 file - promoters50/1035665
taatttat

SEQ ID NO: 164718 - DNA, 8 bp, Unknown
  misc_feature (1)..( 8): Result.004 file - promoters50/1035665
gaagttac

SEQ ID NO: 164719 - DNA, 8 bp, Unknown
  misc_feature (1)..( 8): Result.004 file - promoters50/1035665
taatttat

SEQ ID NO: 164720 - DNA, 8 bp, Unknown
  misc_feature (1)..( 8): Result.004 file - promoters50/1035665
taatatat

SEQ ID NO: 164721 - DNA, 8 bp, Unknown
  misc_feature (1)..( 8): Result.004 file - promoters50/1035665
tatatgag

SEQ ID NO: 164722 - DNA, 9 bp, Unknown
  misc_feature (1)..( 9): Result.004 file - promoters50/1035665
ccatcttaa

SEQ ID NO: 164723 - DNA, 9 bp, Unknown
  misc_feature (1)..( 9): Result.004 file - promoters50/1035665
acatgttat

SEQ ID NO: 164724 - DNA, 9 bp, Unknown
  misc_feature (1)..( 9): Result.004 file - promoters50/1035665
tcatcttct

SEQ ID NO: 164725 - DNA, 9 bp, Unknown
  misc_feature (1)..( 9): Result.004 file - promoters50/1035665
ccatattaa

SEQ ID NO: 164726 - DNA, 9 bp, Unknown
  misc_feature (1)..( 9): Result.004 file - promoters50/1035665
atatcttct

SEQ ID NO: 164727 - DNA, 9 bp, Unknown
  misc_feature (1)..( 9): Result.004 file - promoters50/1035665
aaataataa

SEQ ID NO: 164728 - DNA, 12 bp, Unknown
  misc_feature (1)..( 12): Result.004 file - promoters50/1035665
atgcattttaat

SEQ ID NO: 164729 - DNA, 12 bp, Unknown
  misc_feature (1)..( 12): Result.004 file - promoters50/1035665
ttgcgtttacat

SEQ ID NO: 164730 - DNA, 13 bp, Unknown
  misc_feature (1)..( 13): Result.004 file - promoters50/1035665
atccatattaacc

SEQ ID NO: 164731 - DNA, 13 bp, Unknown
  misc_feature (1)..( 13): Result.004 file - promoters50/1035665
ttgtgtttactag

SEQ ID NO: 164732 - DNA, 13 bp, Unknown
  misc_feature (1)..( 13): Result.004 file - promoters50/1035665
tcgtgtttaatat

SEQ ID NO: 164733 - DNA, 13 bp, Unknown
  misc_feature (1)..( 13): Result.004 file - promoters50/1375217
aatgaaataataa

SEQ ID NO: 164734 - DNA, 11 bp, Unknown
  misc_feature (1)..( 11): Result.004 file - promoters50/1375217
gtgtttttttc

SEQ ID NO: 164735 - DNA, 11 bp, Unknown
  misc_feature (1)..( 11): Result.004 file - promoters50/1375217
atgtttgttta

SEQ ID NO: 164736 - DNA, 11 bp, Unknown
  misc_feature (1)..( 11): Result.004 file - promoters50/1375217
gtttctgtttc

SEQ ID NO: 164737 - DNA, 11 bp, Unknown
  misc_feature (1)..( 11): Result.004 file - promoters50/1375217
acttttgtttc

SEQ ID NO: 164738 - DNA, 11 bp, Unknown
  misc_feature (1)..( 11): Result.004 file - promoters50/1375217
cactttttttg

SEQ ID NO: 164739 - DNA, 11 bp, Unknown
  misc_feature (1)..( 11): Result.004 file - promoters50/1375217
ttatttcttta

SEQ ID NO: 164740 - DNA, 11 bp, Unknown
  misc_feature (1)..( 11): Result.004 file - promoters50/1375217
acatttttttc

SEQ ID NO: 164741 - DNA, 11 bp, Unknown
  misc_feature (1)..( 11): Result.004 file - promoters50/1375217
ttatatcttat

SEQ ID NO: 164742 - DNA, 10 bp, Unknown
  misc_feature (1)..( 10): Result.004 file - promoters50/1375217
ttaatcaatg

SEQ ID NO: 164743 - DNA, 10 bp, Unknown
  misc_feature (1)..( 10): Result.004 file - promoters50/1375217
aaaatcaaga

SEQ ID NO: 164744 - DNA, 10 bp, Unknown
  misc_feature (1)..( 10): Result.004 file - promoters50/1375217
aaaatcaaat

SEQ ID NO: 164745 - DNA, 10 bp, Unknown
  misc_feature (1)..( 10): Result.004 file - promoters50/1375217
ataataaaga

SEQ ID NO: 164746 - DNA, 10 bp, Unknown
  misc_feature (1)..( 10): Result.004 file - promoters50/1375217
gaaaacaatc

SEQ ID NO: 164747 - DNA, 10 bp, Unknown
  misc_feature (1)..( 10): Result.004 file - promoters50/1375217
ataataaaaa

SEQ ID NO: 164748 - DNA, 10 bp, Unknown
  misc_feature (1)..( 10): Result.004 file - promoters50/1375217
taaaccaatg

SEQ ID NO: 164749 - DNA, 9 bp, Unknown
  misc_feature (1)..( 9): Result.004 file - promoters50/1375217
aaatttaca

SEQ ID NO: 164750 - DNA, 9 bp, Unknown
  misc_feature (1)..( 9): Result.004 file - promoters50/1375217
aaagttaaa

SEQ ID NO: 164751 - DNA, 9 bp, Unknown
  misc_feature (1)..( 9): Result.004 file - promoters50/1375217
aaatttttg

SEQ ID NO: 164752 - DNA, 9 bp, Unknown
  misc_feature (1)..( 9): Result.004 file - promoters50/1375217
atagttaaa

SEQ ID NO: 164753 - DNA, 9 bp, Unknown
  misc_feature (1)..( 9): Result.004 file - promoters50/1375217
ctagttaat

SEQ ID NO: 164754 - DNA, 10 bp, Unknown
  misc_feature (1)..( 10): Result.004 file - promoters50/1375217
taatctttac

SEQ ID NO: 164755 - DNA, 11 bp, Unknown
  misc_feature (1)..( 11): Result.004 file - promoters50/1375217
gaaaaacaaac

SEQ ID NO: 164756 - DNA, 11 bp, Unknown
  misc_feature (1)..( 11): Result.004 file - promoters50/1375217
tttaaaaaaag

SEQ ID NO: 164757 - DNA, 11 bp, Unknown
  misc_feature (1)..( 11): Result.004 file - promoters50/1375217
tcaaaacaatt

SEQ ID NO: 164758 - DNA, 11 bp, Unknown
  misc_feature (1)..( 11): Result.004 file - promoters50/1375217
tataaataaat

SEQ ID NO: 164759 - DNA, 11 bp, Unknown
  misc_feature (1)..( 11): Result.004 file - promoters50/1375217
ttaagaaaagc

SEQ ID NO: 164760 - DNA, 11 bp, Unknown
  misc_feature (1)..( 11): Result.004 file - promoters50/1375252
tggtcataaat

SEQ ID NO: 164761 - DNA, 19 bp, Unknown
  misc_feature (1)..( 19): Result.004 file - promoters50/1375252
ttcttgatgtaaatgcaga

SEQ ID NO: 164762 - DNA, 19 bp, Unknown
  misc_feature (1)..( 19): Result.004 file - promoters50/1375252
cctcaaatgcaaacgcagc

SEQ ID NO: 164763 - DNA, 19 bp, Unknown
  misc_feature (1)..( 19): Result.004 file - promoters50/1375252
ttcatgatttaaattatta

SEQ ID NO: 164764 - DNA, 19 bp, Unknown
  misc_feature (1)..( 19): Result.004 file - promoters50/1375252
ctattgatttgttcctcca

SEQ ID NO: 164765 - DNA, 19 bp, Unknown
  misc_feature (1)..( 19): Result.004 file - promoters50/1375252
tctagtcttgaattgttcc

SEQ ID NO: 164766 - DNA, 19 bp, Unknown
  misc_feature (1)..( 19): Result.004 file - promoters50/1375255
tttgtgatttggtgacata

SEQ ID NO: 164767 - DNA, 10 bp, Unknown
  misc_feature (1)..( 10): Result.004 file - promoters50/1375255
gtttaaaaag

SEQ ID NO: 164768 - DNA, 10 bp, Unknown
  misc_feature (1)..( 10): Result.004 file - promoters50/1375255
tattaacaag

SEQ ID NO: 164769 - DNA, 10 bp, Unknown
  misc_feature (1)..( 10): Result.004 file - promoters50/1375255
ttttaaagta

SEQ ID NO: 164770 - DNA, 10 bp, Unknown
  misc_feature (1)..( 10): Result.004 file - promoters50/1375305
gtttgaagat

SEQ ID NO: 164771 - DNA, 10 bp, Unknown
  misc_feature (1)..( 10): Result.004 file - promoters50/1375305
attggttaat

SEQ ID NO: 164772 - DNA, 10 bp, Unknown
  misc_feature (1)..( 10): Result.004 file - promoters50/1375305
attggataat

SEQ ID NO: 164773 - DNA, 10 bp, Unknown
  misc_feature (1)..( 10): Result.004 file - promoters50/1375305
attggagaga

SEQ ID NO: 164774 - DNA, 8 bp, Unknown
  misc_feature (1)..( 8): Result.004 file - promoters50/1375305
caaagaaa

SEQ ID NO: 164775 - DNA, 8 bp, Unknown
  misc_feature (1)..( 8): Result.004 file - promoters50/1375305
caaataaa

SEQ ID NO: 164776 - DNA, 8 bp, Unknown
  misc_feature (1)..( 8): Result.004 file - promoters50/1375347
gagagaga

SEQ ID NO: 164777 - DNA, 7 bp, Unknown
  misc_feature (1)..( 7): Result.004 file - promoters50/1375347
tcatatg

SEQ ID NO: 164778 - DNA, 7 bp, Unknown
  misc_feature (1)..( 7): Result.004 file - promoters50/1375347
tcatata

SEQ ID NO: 164779 - DNA, 7 bp, Unknown
  misc_feature (1)..( 7): Result.004 file - promoters50/1375456
acatata

SEQ ID NO: 164780 - DNA, 9 bp, Unknown
  misc_feature (1)..( 9): Result.004 file - promoters50/1375456
ttggaacaa

SEQ ID NO: 164781 - DNA, 9 bp, Unknown
  misc_feature (1)..( 9): Result.004 file - promoters50/1375456
ttggaaaag

SEQ ID NO: 164782 - DNA, 9 bp, Unknown
  misc_feature (1)..( 9): Result.004 file - promoters50/1375456
ttgaaacaa

SEQ ID NO: 164783 - DNA, 9 bp, Unknown
  misc_feature (1)..( 9): Result.004 file - promoters50/1375456
agaaagaag

SEQ ID NO: 164784 - DNA, 9 bp, Unknown
  misc_feature (1)..( 9): Result.004 file - promoters50/1375456
agaaagctt

SEQ ID NO: 164785 - DNA, 9 bp, Unknown
  misc_feature (1)..( 9): Result.004 file - promoters50/1375456
tgaaacaaa

SEQ ID NO: 164786 - DNA, 9 bp, Unknown
  misc_feature (1)..( 9): Result.004 file - promoters50/1375456
agaaagaag

SEQ ID NO: 164787 - DNA, 9 bp, Unknown
  misc_feature (1)..( 9): Result.004 file - promoters50/1375456
gaaaagaaa

SEQ ID NO: 164788 - DNA, 10 bp, Unknown
  misc_feature (1)..( 10): Result.004 file - promoters50/1375456
ggaaatgaaa

SEQ ID NO: 164789 - DNA, 11 bp, Unknown
  misc_feature (1)..( 11): Result.004 file - promoters50/1375456
gaagtatagaa

SEQ ID NO: 164790 - DNA, 11 bp, Unknown
  misc_feature (1)..( 11): Result.004 file - promoters50/1375456
gaaatatctta

SEQ ID NO: 164791 - DNA, 11 bp, Unknown
  misc_feature (1)..( 11): Result.004 file - promoters50/1375471
aaaataaaata

SEQ ID NO: 164792 - DNA, 12 bp, Unknown
  misc_feature (1)..( 12): Result.004 file - promoters50/1375471
tacaaaataaaa

SEQ ID NO: 164793 - DNA, 12 bp, Unknown
  misc_feature (1)..( 12): Result.004 file - promoters50/1375471
tctaaaataata

SEQ ID NO: 164794 - DNA, 12 bp, Unknown
  misc_feature (1)..( 12): Result.004 file - promoters50/1375471
tacaaaatctcc

SEQ ID NO: 164795 - DNA, 12 bp, Unknown
  misc_feature (1)..( 12): Result.004 file - promoters50/1375471
aacagaataaaa

SEQ ID NO: 164796 - DNA, 12 bp, Unknown
  misc_feature (1)..( 12): Result.004 file - promoters50/1375471
taagaaataaat

SEQ ID NO: 164797 - DNA, 12 bp, Unknown
  misc_feature (1)..( 12): Result.004 file - promoters50/1375474
aagaaaaaaatt

SEQ ID NO: 164798 - DNA, 10 bp, Unknown
  misc_feature (1)..( 10): Result.004 file - promoters50/1375474
ttatttgttc

SEQ ID NO: 164799 - DNA, 10 bp, Unknown
  misc_feature (1)..( 10): Result.004 file - promoters50/1375474
cactttcttc

SEQ ID NO: 164800 - DNA, 10 bp, Unknown
  misc_feature (1)..( 10): Result.004 file - promoters50/1375474
cactctctta

SEQ ID NO: 164801 - DNA, 10 bp, Unknown
  misc_feature (1)..( 10): Result.004 file - promoters50/1375474
aaacataaaa

SEQ ID NO: 164802 - DNA, 10 bp, Unknown
  misc_feature (1)..( 10): Result.004 file - promoters50/1375474
aaacctaaat

SEQ ID NO: 164803 - DNA, 10 bp, Unknown
  misc_feature (1)..( 10): Result.004 file - promoters50/1375547
ccgcctcaat

SEQ ID NO: 164804 - DNA, 7 bp, Unknown
  misc_feature (1)..( 7): Result.004 file - promoters50/1375547
gtttatt

SEQ ID NO: 164805 - DNA, 7 bp, Unknown
  misc_feature (1)..( 7): Result.004 file - promoters50/1375547
ctttatt

SEQ ID NO: 164806 - DNA, 7 bp, Unknown
  misc_feature (1)..( 7): Result.004 file - promoters50/1375547
ctttatt

SEQ ID NO: 164807 - DNA, 7 bp, Unknown
  misc_feature (1)..( 7): Result.004 file - promoters50/1375615
gttgatt

SEQ ID NO: 164808 - DNA, 8 bp, Unknown
  misc_feature (1)..( 8): Result.004 file - promoters50/1375615
atcatatt

SEQ ID NO: 164809 - DNA, 8 bp, Unknown
  misc_feature (1)..( 8): Result.004 file - promoters50/1375615
atcatatt

SEQ ID NO: 164810 - DNA, 8 bp, Unknown
  misc_feature (1)..( 8): Result.004 file - promoters50/1375615
atcatatt

SEQ ID NO: 164811 - DNA, 7 bp, Unknown
  misc_feature (1)..( 7): Result.004 file - promoters50/1375615
gatatgt

SEQ ID NO: 164812 - DNA, 7 bp, Unknown
  misc_feature (1)..( 7): Result.004 file - promoters50/1375615
gatttgt

SEQ ID NO: 164813 - DNA, 7 bp, Unknown
  misc_feature (1)..( 7): Result.004 file - promoters50/1375615
gatttgt

SEQ ID NO: 164814 - DNA, 12 bp, Unknown
  misc_feature (1)..( 12): Result.004 file - promoters50/1375615
agtatgttgttg

SEQ ID NO: 164815 - DNA, 12 bp, Unknown
  misc_feature (1)..( 12): Result.004 file - promoters50/1375615
agtttgttcaat

SEQ ID NO: 164816 - DNA, 12 bp, Unknown
  misc_feature (1)..( 12): Result.004 file - promoters50/1375615
gatttgttcaat

SEQ ID NO: 164817 - DNA, 7 bp, Unknown
  misc_feature (1)..( 7): Result.004 file - promoters50/1375615
tgtttgt

SEQ ID NO: 164818 - DNA, 7 bp, Unknown
  misc_feature (1)..( 7): Result.004 file - promoters50/1375615
tgtttgg

SEQ ID NO: 164819 - DNA, 7 bp, Unknown
  misc_feature (1)..( 7): Result.004 file - promoters50/1375615
agtttgt

SEQ ID NO: 164820 - DNA, 7 bp, Unknown
  misc_feature (1)..( 7): Result.004 file - promoters50/1375615
gtttgtt

SEQ ID NO: 164821 - DNA, 7 bp, Unknown
  misc_feature (1)..( 7): Result.004 file - promoters50/1375615
ttttgtt

SEQ ID NO: 164822 - DNA, 7 bp, Unknown
  misc_feature (1)..( 7): Result.004 file - promoters50/1375615
gtttgtt

SEQ ID NO: 164823 - DNA, 9 bp, Unknown
  misc_feature (1)..( 9): Result.004 file - promoters50/1375615
attgtagct

SEQ ID NO: 164824 - DNA, 9 bp, Unknown
  misc_feature (1)..( 9): Result.004 file - promoters50/1375615
tttgtagtg

SEQ ID NO: 164825 - DNA, 9 bp, Unknown
  misc_feature (1)..( 9): Result.004 file - promoters50/1375634
tttgttgtg

SEQ ID NO: 164826 - DNA, 14 bp, Unknown
  misc_feature (1)..( 14): Result.004 file - promoters50/1375634
gaagtaagcatttt

SEQ ID NO: 164827 - DNA, 14 bp, Unknown
  misc_feature (1)..( 14): Result.004 file - promoters50/1375634
tttgtatgcatggt

SEQ ID NO: 164828 - DNA, 14 bp, Unknown
  misc_feature (1)..( 14): Result.004 file - promoters50/1375634
aaaggaagaagcta

SEQ ID NO: 164829 - DNA, 14 bp, Unknown
  misc_feature (1)..( 14): Result.004 file - promoters50/1375634
accacaagcatttt

SEQ ID NO: 164830 - DNA, 14 bp, Unknown
  misc_feature (1)..( 14): Result.004 file - promoters50/1375634
cctgtatggtgaag

SEQ ID NO: 164831 - DNA, 14 bp, Unknown
  misc_feature (1)..( 14): Result.004 file - promoters50/1375642
aaaggacaaaaatg

SEQ ID NO: 164832 - DNA, 8 bp, Unknown
  misc_feature (1)..( 8): Result.004 file - promoters50/1375642
ttaaaaat

SEQ ID NO: 164833 - DNA, 8 bp, Unknown
  misc_feature (1)..( 8): Result.004 file - promoters50/1375642
ttataaat

SEQ ID NO: 164834 - DNA, 8 bp, Unknown
  misc_feature (1)..( 8): Result.004 file - promoters50/1375642
agataaat

SEQ ID NO: 164835 - DNA, 11 bp, Unknown
  misc_feature (1)..( 11): Result.004 file - promoters50/1375642
ttctatttaag

SEQ ID NO: 164836 - DNA, 11 bp, Unknown
  misc_feature (1)..( 11): Result.004 file - promoters50/1375642
ctctatataat

SEQ ID NO: 164837 - DNA, 11 bp, Unknown
  misc_feature (1)..( 11): Result.004 file - promoters50/1375642
ctctataaaac

SEQ ID NO: 164838 - DNA, 11 bp, Unknown
  misc_feature (1)..( 11): Result.004 file - promoters50/1375642
caatataaaat

SEQ ID NO: 164839 - DNA, 8 bp, Unknown
  misc_feature (1)..( 8): Result.004 file - promoters50/1375642
atttaaag

SEQ ID NO: 164840 - DNA, 8 bp, Unknown
  misc_feature (1)..( 8): Result.004 file - promoters50/1375642
attaaaat

SEQ ID NO: 164841 - DNA, 8 bp, Unknown
  misc_feature (1)..( 8): Result.004 file - promoters50/1375642
aataaaat

SEQ ID NO: 164842 - DNA, 8 bp, Unknown
  misc_feature (1)..( 8): Result.004 file - promoters50/1375642
agagaatt

SEQ ID NO: 164843 - DNA, 8 bp, Unknown
  misc_feature (1)..( 8): Result.004 file - promoters50/1375642
aaagaatt

SEQ ID NO: 164844 - DNA, 8 bp, Unknown
  misc_feature (1)..( 8): Result.004 file - promoters50/1375642
aaaaaata

SEQ ID NO: 164845 - DNA, 6 bp, Unknown
  misc_feature (1)..( 6): Result.004 file - promoters50/1375642
aggaaa

SEQ ID NO: 164846 - DNA, 6 bp, Unknown
  misc_feature (1)..( 6): Result.004 file - promoters50/1375642
aggaaa

SEQ ID NO: 164847 - DNA, 7 bp, Unknown
  misc_feature (1)..( 7): Result.004 file - promoters50/1375675
aggtaaa

SEQ ID NO: 164848 - DNA, 8 bp, Unknown
  misc_feature (1)..( 8): Result.004 file - promoters50/1375675
aatcctaa

SEQ ID NO: 164849 - DNA, 8 bp, Unknown
  misc_feature (1)..( 8): Result.004 file - promoters50/1375675
aattctaa

SEQ ID NO: 164850 - DNA, 8 bp, Unknown
  misc_feature (1)..( 8): Result.004 file - promoters50/1375793
aatcttaa

SEQ ID NO: 164851 - DNA, 9 bp, Unknown
  misc_feature (1)..( 9): Result.004 file - promoters50/1375793
tgtttgttt

SEQ ID NO: 164852 - DNA, 9 bp, Unknown
  misc_feature (1)..( 9): Result.004 file - promoters50/1375793
ggtttgtaa

SEQ ID NO: 164853 - DNA, 9 bp, Unknown
  misc_feature (1)..( 9): Result.004 file - promoters50/1375801
tgttagttt

SEQ ID NO: 164854 - DNA, 9 bp, Unknown
  misc_feature (1)..( 9): Result.004 file - promoters50/1375801
gctgtgatc

SEQ ID NO: 164855 - DNA, 9 bp, Unknown
  misc_feature (1)..( 9): Result.004 file - promoters50/1375801
tttgtgatt

SEQ ID NO: 164856 - DNA, 9 bp, Unknown
  misc_feature (1)..( 9): Result.004 file - promoters50/1375801
tttgttatt

SEQ ID NO: 164857 - DNA, 9 bp, Unknown
  misc_feature (1)..( 9): Result.004 file - promoters50/1375801
aaagcaaat

SEQ ID NO: 164858 - DNA, 9 bp, Unknown
  misc_feature (1)..( 9): Result.004 file - promoters50/1375801
aaatcaaat

SEQ ID NO: 164859 - DNA, 9 bp, Unknown
  misc_feature (1)..( 9): Result.004 file - promoters50/1375801
aaaccaaac

SEQ ID NO: 164860 - DNA, 9 bp, Unknown
  misc_feature (1)..( 9): Result.004 file - promoters50/1375801
ttttatgtc

SEQ ID NO: 164861 - DNA, 9 bp, Unknown
  misc_feature (1)..( 9): Result.004 file - promoters50/1375801
ttttatgca

SEQ ID NO: 164862 - DNA, 9 bp, Unknown
  misc_feature (1)..( 9): Result.004 file - promoters50/1375832
agttaggtc

SEQ ID NO: 164863 - DNA, 9 bp, Unknown
  misc_feature (1)..( 9): Result.004 file - promoters50/1375832
ccaagaaaa

SEQ ID NO: 164864 - DNA, 9 bp, Unknown
  misc_feature (1)..( 9): Result.004 file - promoters50/1375832
ccaacaaaa

SEQ ID NO: 164865 - DNA, 9 bp, Unknown
  misc_feature (1)..( 9): Result.004 file - promoters50/1375832
agaagaaaa

SEQ ID NO: 164866 - DNA, 8 bp, Unknown
  misc_feature (1)..( 8): Result.004 file - promoters50/1375832
tgaatttt

SEQ ID NO: 164867 - DNA, 8 bp, Unknown
  misc_feature (1)..( 8): Result.004 file - promoters50/1375832
agaaattt

SEQ ID NO: 164868 - DNA, 8 bp, Unknown
  misc_feature (1)..( 8): Result.004 file - promoters50/1375832
agatattt

SEQ ID NO: 164869 - DNA, 7 bp, Unknown
  misc_feature (1)..( 7): Result.004 file - promoters50/1375832
aaataaa

SEQ ID NO: 164870 - DNA, 7 bp, Unknown
  misc_feature (1)..( 7): Result.004 file - promoters50/1375832
aaataaa

SEQ ID NO: 164871 - DNA, 7 bp, Unknown
  misc_feature (1)..( 7): Result.004 file - promoters50/1375832
aaataat

SEQ ID NO: 164872 - DNA, 8 bp, Unknown
  misc_feature (1)..( 8): Result.004 file - promoters50/1375832
caaataaa

SEQ ID NO: 164873 - DNA, 8 bp, Unknown
  misc_feature (1)..( 8): Result.004 file - promoters50/1375832
aaaataaa

SEQ ID NO: 164874 - DNA, 8 bp, Unknown
  misc_feature (1)..( 8): Result.004 file - promoters50/1375832
caagtaaa

SEQ ID NO: 164875 - DNA, 8 bp, Unknown
  misc_feature (1)..( 8): Result.004 file - promoters50/1375832
ataatagc

SEQ ID NO: 164876 - DNA, 8 bp, Unknown
  misc_feature (1)..( 8): Result.004 file - promoters50/1375832
ataataat

SEQ ID NO: 164877 - DNA, 8 bp, Unknown
  misc_feature (1)..( 8): Result.004 file - promoters50/1375832
ataacaat

SEQ ID NO: 164878 - DNA, 8 bp, Unknown
  misc_feature (1)..( 8): Result.004 file - promoters50/1375832
gaatgaac

SEQ ID NO: 164879 - DNA, 8 bp, Unknown
  misc_feature (1)..( 8): Result.004 file - promoters50/1375832
gaaagaat

SEQ ID NO: 164880 - DNA, 8 bp, Unknown
  misc_feature (1)..( 8): Result.004 file - promoters50/1375838
caaacaat

SEQ ID NO: 164881 - DNA, 9 bp, Unknown
  misc_feature (1)..( 9): Result.004 file - promoters50/1375838
taaaaataa

SEQ ID NO: 164882 - DNA, 9 bp, Unknown
  misc_feature (1)..( 9): Result.004 file - promoters50/1375838
taaacataa

SEQ ID NO: 164883 - DNA, 9 bp, Unknown
  misc_feature (1)..( 9): Result.004 file - promoters50/1375957
taaacagac

SEQ ID NO: 164884 - DNA, 16 bp, Unknown
  misc_feature (1)..( 16): Result.004 file - promoters50/1375957
taattatgatatttaa

SEQ ID NO: 164885 - DNA, 16 bp, Unknown
  misc_feature (1)..( 16): Result.004 file - promoters50/1375957
atacagtgaaattgaa

SEQ ID NO: 164886 - DNA, 16 bp, Unknown
  misc_feature (1)..( 16): Result.004 file - promoters50/1375957
aaattttgatttttaa

SEQ ID NO: 164887 - DNA, 16 bp, Unknown
  misc_feature (1)..( 16): Result.004 file - promoters50/1375957
aaattatgattaaggc

SEQ ID NO: 164888 - DNA, 16 bp, Unknown
  misc_feature (1)..( 16): Result.004 file - promoters50/1375957
tccatttaattttttg

SEQ ID NO: 164889 - DNA, 16 bp, Unknown
  misc_feature (1)..( 16): Result.004 file - promoters50/1375957
aaaggcttcttttttg

SEQ ID NO: 164890 - DNA, 16 bp, Unknown
  misc_feature (1)..( 16): Result.004 file - promoters50/1375957
ctctgtgcctttttca

SEQ ID NO: 164891 - DNA, 12 bp, Unknown
  misc_feature (1)..( 12): Result.004 file - promoters50/1375957
aataaacatagt

SEQ ID NO: 164892 - DNA, 12 bp, Unknown
  misc_feature (1)..( 12): Result.004 file - promoters50/1375957
gctaaacattag

SEQ ID NO: 164893 - DNA, 12 bp, Unknown
  misc_feature (1)..( 12): Result.004 file - promoters50/1375957
ttaaaacatgtt

SEQ ID NO: 164894 - DNA, 12 bp, Unknown
  misc_feature (1)..( 12): Result.004 file - promoters50/1375957
agataacataga

SEQ ID NO: 164895 - DNA, 12 bp, Unknown
  misc_feature (1)..( 12): Result.004 file - promoters50/1375957
aattaactctaa

SEQ ID NO: 164896 - DNA, 12 bp, Unknown
  misc_feature (1)..( 12): Result.004 file - promoters50/1375957
gttggacataga

SEQ ID NO: 164897 - DNA, 12 bp, Unknown
  misc_feature (1)..( 12): Result.004 file - promoters50/1375957
acttaactgtaa

SEQ ID NO: 164898 - DNA, 8 bp, Unknown
  misc_feature (1)..( 8): Result.004 file - promoters50/1375957
ataaaata

SEQ ID NO: 164899 - DNA, 8 bp, Unknown
  misc_feature (1)..( 8): Result.004 file - promoters50/1375957
ttaaaatg

SEQ ID NO: 164900 - DNA, 8 bp, Unknown
  misc_feature (1)..( 8): Result.004 file - promoters50/1375957
ataaaaaa

SEQ ID NO: 164901 - DNA, 8 bp, Unknown
  misc_feature (1)..( 8): Result.004 file - promoters50/1375957
ccaaaatg

SEQ ID NO: 164902 - DNA, 8 bp, Unknown
  misc_feature (1)..( 8): Result.004 file - promoters50/1375957
tcaaaatt

SEQ ID NO: 164903 - DNA, 8 bp, Unknown
  misc_feature (1)..( 8): Result.004 file - promoters50/1375957
ccaaaatt

SEQ ID NO: 164904 - DNA, 13 bp, Unknown
  misc_feature (1)..( 13): Result.004 file - promoters50/1375957
taatatattttcg

SEQ ID NO: 164905 - DNA, 13 bp, Unknown
  misc_feature (1)..( 13): Result.004 file - promoters50/1375957
aaatatatggata

SEQ ID NO: 164906 - DNA, 13 bp, Unknown
  misc_feature (1)..( 13): Result.004 file - promoters50/1375957
gtataaatttaat

SEQ ID NO: 164907 - DNA, 14 bp, Unknown
  misc_feature (1)..( 14): Result.004 file - promoters50/1375957
taatattataacct

SEQ ID NO: 164908 - DNA, 14 bp, Unknown
  misc_feature (1)..( 14): Result.004 file - promoters50/1375957
tatataaatatgcc

SEQ ID NO: 164909 - DNA, 14 bp, Unknown
  misc_feature (1)..( 14): Result.004 file - promoters50/1375957
taggcatattttaa

SEQ ID NO: 164910 - DNA, 21 bp, Unknown
  misc_feature (1)..( 21): Result.004 file - promoters50/1375957
aattatgatatttaaaataaa

SEQ ID NO: 164911 - DNA, 21 bp, Unknown
  misc_feature (1)..( 21): Result.004 file - promoters50/1375957
tgattaaggctttaaaacatg

SEQ ID NO: 164912 - DNA, 21 bp, Unknown
  misc_feature (1)..( 21): Result.004 file - promoters50/1375957
ttggtccatagataacataga

SEQ ID NO: 164913 - DNA, 21 bp, Unknown
  misc_feature (1)..( 21): Result.004 file - promoters50/1375957
aattttgatttttaatgaatt

SEQ ID NO: 164914 - DNA, 21 bp, Unknown
  misc_feature (1)..( 21): Result.004 file - promoters50/1375957
ctgtaacaattgtaaaatgtt

SEQ ID NO: 164915 - DNA, 21 bp, Unknown
  misc_feature (1)..( 21): Result.004 file - promoters50/1375957
aaagacattgttggacataga

SEQ ID NO: 164916 - DNA, 21 bp, Unknown
  misc_feature (1)..( 21): Result.004 file - promoters50/1375957
gtccttcttcaagaaagttta

SEQ ID NO: 164917 - DNA, 12 bp, Unknown
  misc_feature (1)..( 12): Result.004 file - promoters50/1375957
gtttaatgttat

SEQ ID NO: 164918 - DNA, 12 bp, Unknown
  misc_feature (1)..( 12): Result.004 file - promoters50/1375957
accaaatcttaa

SEQ ID NO: 164919 - DNA, 12 bp, Unknown
  misc_feature (1)..( 12): Result.004 file - promoters50/1375957
gttaaatgtata

SEQ ID NO: 164920 - DNA, 12 bp, Unknown
  misc_feature (1)..( 12): Result.004 file - promoters50/1375957
atttattgtttg

SEQ ID NO: 164921 - DNA, 12 bp, Unknown
  misc_feature (1)..( 12): Result.004 file - promoters50/1375957
gtaaaatgtttt

SEQ ID NO: 164922 - DNA, 12 bp, Unknown
  misc_feature (1)..( 12): Result.004 file - promoters50/1375957
agacattgttgg

SEQ ID NO: 164923 - DNA, 12 bp, Unknown
  misc_feature (1)..( 12): Result.004 file - promoters50/1375988
ttatattttaaa

SEQ ID NO: 164924 - DNA, 14 bp, Unknown
  misc_feature (1)..( 14): Result.004 file - promoters50/1375988
taattattttaaat

SEQ ID NO: 164925 - DNA, 14 bp, Unknown
  misc_feature (1)..( 14): Result.004 file - promoters50/1375988
tcaagattttaaca

SEQ ID NO: 164926 - DNA, 14 bp, Unknown
  misc_feature (1)..( 14): Result.004 file - promoters50/1375988
tcaaagttttaatt

SEQ ID NO: 164927 - DNA, 14 bp, Unknown
  misc_feature (1)..( 14): Result.004 file - promoters50/1375988
tatgaatttaaaaa

SEQ ID NO: 164928 - DNA, 14 bp, Unknown
  misc_feature (1)..( 14): Result.004 file - promoters50/1375988
tcaagattttttcc

SEQ ID NO: 164929 - DNA, 14 bp, Unknown
  misc_feature (1)..( 14): Result.004 file - promoters50/1375988
attgtatttttatt

SEQ ID NO: 164930 - DNA, 14 bp, Unknown
  misc_feature (1)..( 14): Result.004 file - promoters50/1375995
aagagcgtttaacc

SEQ ID NO: 164931 - DNA, 8 bp, Unknown
  misc_feature (1)..( 8): Result.004 file - promoters50/1375995
agtaatta

SEQ ID NO: 164932 - DNA, 8 bp, Unknown
  misc_feature (1)..( 8): Result.004 file - promoters50/1375995
agtaatta

SEQ ID NO: 164933 - DNA, 8 bp, Unknown
  misc_feature (1)..( 8): Result.004 file - promoters50/1375995
ggtattta

SEQ ID NO: 164934 - DNA, 9 bp, Unknown
  misc_feature (1)..( 9): Result.004 file - promoters50/1375995
ttaaaaaaa

SEQ ID NO: 164935 - DNA, 9 bp, Unknown
  misc_feature (1)..( 9): Result.004 file - promoters50/1375995
gaaaataaa

SEQ ID NO: 164936 - DNA, 9 bp, Unknown
  misc_feature (1)..( 9): Result.004 file - promoters50/1375995
tttaataaa

SEQ ID NO: 164937 - DNA, 6 bp, Unknown
  misc_feature (1)..( 6): Result.004 file - promoters50/1375995
taataa

SEQ ID NO: 164938 - DNA, 6 bp, Unknown
  misc_feature (1)..( 6): Result.004 file - promoters50/1375995
taataa

SEQ ID NO: 164939 - DNA, 6 bp, Unknown
  misc_feature (1)..( 6): Result.004 file - promoters50/1375995
taataa

SEQ ID NO: 164940 - DNA, 10 bp, Unknown
  misc_feature (1)..( 10): Result.004 file - promoters50/1375995
aatattaata

SEQ ID NO: 164941 - DNA, 10 bp, Unknown
  misc_feature (1)..( 10): Result.004 file - promoters50/1375995
aataataata

SEQ ID NO: 164942 - DNA, 10 bp, Unknown
  misc_feature (1)..( 10): Result.004 file - promoters50/1376069
agtaataact

SEQ ID NO: 164943 - DNA, 10 bp, Unknown
  misc_feature (1)..( 10): Result.004 file - promoters50/1376069
taatataaga

SEQ ID NO: 164944 - DNA, 10 bp, Unknown
  misc_feature (1)..( 10): Result.004 file - promoters50/1376069
taatctaatt

SEQ ID NO: 164945 - DNA, 10 bp, Unknown
  misc_feature (1)..( 10): Result.004 file - promoters50/1376069
gtttcttatt

SEQ ID NO: 164946 - DNA, 8 bp, Unknown
  misc_feature (1)..( 8): Result.004 file - promoters50/1376069
ggaataaa

SEQ ID NO: 164947 - DNA, 8 bp, Unknown
  misc_feature (1)..( 8): Result.004 file - promoters50/1376069
agaataaa

SEQ ID NO: 164948 - DNA, 8 bp, Unknown
  misc_feature (1)..( 8): Result.004 file - promoters50/1376069
agagtaat

SEQ ID NO: 164949 - DNA, 9 bp, Unknown
  misc_feature (1)..( 9): Result.004 file - promoters50/1376069
aaataatta

SEQ ID NO: 164950 - DNA, 9 bp, Unknown
  misc_feature (1)..( 9): Result.004 file - promoters50/1376069
aaagaataa

SEQ ID NO: 164951 - DNA, 9 bp, Unknown
  misc_feature (1)..( 9): Result.004 file - promoters50/1376069
ggagagtaa

SEQ ID NO: 164952 - DNA, 7 bp, Unknown
  misc_feature (1)..( 7): Result.004 file - promoters50/1376069
aaaattt

SEQ ID NO: 164953 - DNA, 7 bp, Unknown
  misc_feature (1)..( 7): Result.004 file - promoters50/1376069
aaacttt

SEQ ID NO: 164954 - DNA, 7 bp, Unknown
  misc_feature (1)..( 7): Result.004 file - promoters50/1376069
caacttt

SEQ ID NO: 164955 - DNA, 7 bp, Unknown
  misc_feature (1)..( 7): Result.004 file - promoters50/1376069
taatcta

SEQ ID NO: 164956 - DNA, 7 bp, Unknown
  misc_feature (1)..( 7): Result.004 file - promoters50/1376069
taaacta

SEQ ID NO: 164957 - DNA, 7 bp, Unknown
  misc_feature (1)..( 7): Result.004 file - promoters50/1376069
taatcta

SEQ ID NO: 164958 - DNA, 7 bp, Unknown
  misc_feature (1)..( 7): Result.004 file - promoters50/1376069
gttcttt

SEQ ID NO: 164959 - DNA, 7 bp, Unknown
  misc_feature (1)..( 7): Result.004 file - promoters50/1376069
attcttt

SEQ ID NO: 164960 - DNA, 7 bp, Unknown
  misc_feature (1)..( 7): Result.004 file - promoters50/1376069
attattt

SEQ ID NO: 164961 - DNA, 8 bp, Unknown
  misc_feature (1)..( 8): Result.004 file - promoters50/1376069
attgtgaa

SEQ ID NO: 164962 - DNA, 8 bp, Unknown
  misc_feature (1)..( 8): Result.004 file - promoters50/1376069
gttgagaa

SEQ ID NO: 164963 - DNA, 8 bp, Unknown
  misc_feature (1)..( 8): Result.004 file - promoters50/1376069
attctgaa

SEQ ID NO: 164964 - DNA, 11 bp, Unknown
  misc_feature (1)..( 11): Result.004 file - promoters50/1376069
taataaaaaat

SEQ ID NO: 164965 - DNA, 11 bp, Unknown
  misc_feature (1)..( 11): Result.004 file - promoters50/1376069
atctaaaaaaa

SEQ ID NO: 164966 - DNA, 11 bp, Unknown
  misc_feature (1)..( 11): Result.004 file - promoters50/1376340
taataaaaaat

SEQ ID NO: 164967 - DNA, 6 bp, Unknown
  misc_feature (1)..( 6): Result.004 file - promoters50/1376340
aaaaat

SEQ ID NO: 164968 - DNA, 6 bp, Unknown
  misc_feature (1)..( 6): Result.004 file - promoters50/1376340
aaaaat

SEQ ID NO: 164969 - DNA, 6 bp, Unknown
  misc_feature (1)..( 6): Result.004 file - promoters50/1376361
aaaaat

SEQ ID NO: 164970 - DNA, 11 bp, Unknown
  misc_feature (1)..( 11): Result.004 file - promoters50/1376361
tgatactattt

SEQ ID NO: 164971 - DNA, 11 bp, Unknown
  misc_feature (1)..( 11): Result.004 file - promoters50/1376361
ttatattatta

SEQ ID NO: 164972 - DNA, 11 bp, Unknown
  misc_feature (1)..( 11): Result.004 file - promoters50/1376361
tagtacaattt

SEQ ID NO: 164973 - DNA, 11 bp, Unknown
  misc_feature (1)..( 11): Result.004 file - promoters50/1376361
ttttactaact

SEQ ID NO: 164974 - DNA, 11 bp, Unknown
  misc_feature (1)..( 11): Result.004 file - promoters50/1376361
ttagattagcc

SEQ ID NO: 164975 - DNA, 11 bp, Unknown
  misc_feature (1)..( 11): Result.004 file - promoters50/1376455
tagcacaacag

SEQ ID NO: 164976 - DNA, 12 bp, Unknown
  misc_feature (1)..( 12): Result.004 file - promoters50/1376455
ctaaataaattt

SEQ ID NO: 164977 - DNA, 12 bp, Unknown
  misc_feature (1)..( 12): Result.004 file - promoters50/1376455
ttaaaaaaagaa

SEQ ID NO: 164978 - DNA, 12 bp, Unknown
  misc_feature (1)..( 12): Result.004 file - promoters50/1376455
agaaatgaattt

SEQ ID NO: 164979 - DNA, 12 bp, Unknown
  misc_feature (1)..( 12): Result.004 file - promoters50/1376455
aaaaacaaacgt

SEQ ID NO: 164980 - DNA, 12 bp, Unknown
  misc_feature (1)..( 12): Result.004 file - promoters50/1376455
ttaaaatcatcc

SEQ ID NO: 164981 - DNA, 12 bp, Unknown
  misc_feature (1)..( 12): Result.004 file - promoters50/1376455
agaaaaaggatg

SEQ ID NO: 164982 - DNA, 10 bp, Unknown
  misc_feature (1)..( 10): Result.004 file - promoters50/1376455
ttgaacaaac

SEQ ID NO: 164983 - DNA, 10 bp, Unknown
  misc_feature (1)..( 10): Result.004 file - promoters50/1376455
gtgaccaatg

SEQ ID NO: 164984 - DNA, 10 bp, Unknown
  misc_feature (1)..( 10): Result.004 file - promoters50/1376455
tcaaccaact

SEQ ID NO: 164985 - DNA, 10 bp, Unknown
  misc_feature (1)..( 10): Result.004 file - promoters50/1376455
ccgaccaagt

SEQ ID NO: 164986 - DNA, 10 bp, Unknown
  misc_feature (1)..( 10): Result.004 file - promoters50/1376455
tcaaccaatt

SEQ ID NO: 164987 - DNA, 10 bp, Unknown
  misc_feature (1)..( 10): Result.004 file - promoters50/1376455
tcaaacaatc

SEQ ID NO: 164988 - DNA, 12 bp, Unknown
  misc_feature (1)..( 12): Result.004 file - promoters50/1376455
acattgatttat

SEQ ID NO: 164989 - DNA, 12 bp, Unknown
  misc_feature (1)..( 12): Result.004 file - promoters50/1376455
caattgacttag

SEQ ID NO: 164990 - DNA, 12 bp, Unknown
  misc_feature (1)..( 12): Result.004 file - promoters50/1376455
ggattaattctt

SEQ ID NO: 164991 - DNA, 12 bp, Unknown
  misc_feature (1)..( 12): Result.004 file - promoters50/1376455
taattattttgc

SEQ ID NO: 164992 - DNA, 13 bp, Unknown
  misc_feature (1)..( 13): Result.004 file - promoters50/1376455
tcatattattagt

SEQ ID NO: 164993 - DNA, 13 bp, Unknown
  misc_feature (1)..( 13): Result.004 file - promoters50/1376455
ggcacccattaat

SEQ ID NO: 164994 - DNA, 13 bp, Unknown
  misc_feature (1)..( 13): Result.004 file - promoters50/1376455
tagtgctattatg

SEQ ID NO: 164995 - DNA, 10 bp, Unknown
  misc_feature (1)..( 10): Result.004 file - promoters50/1376455
gagaaaatta

SEQ ID NO: 164996 - DNA, 10 bp, Unknown
  misc_feature (1)..( 10): Result.004 file - promoters50/1376455
tagaaaatgc

SEQ ID NO: 164997 - DNA, 10 bp, Unknown
  misc_feature (1)..( 10): Result.004 file - promoters50/1376455
tcgaaactgc

SEQ ID NO: 164998 - DNA, 10 bp, Unknown
  misc_feature (1)..( 10): Result.004 file - promoters50/1376455
tagacaattc

SEQ ID NO: 164999 - DNA, 10 bp, Unknown
  misc_feature (1)..( 10): Result.004 file - promoters50/1376455
atgaaaatga

SEQ ID NO: 165000 - DNA, 10 bp, Unknown
  misc_feature (1)..( 10): Result.004 file - promoters50/1376490
aacaaacgaa

SEQ ID NO: 165001 - DNA, 11 bp, Unknown
  misc_feature (1)..( 11): Result.004 file - promoters50/1376490
agataaattaa

SEQ ID NO: 165002 - DNA, 11 bp, Unknown
  misc_feature (1)..( 11): Result.004 file - promoters50/1376490
taatagattat

SEQ ID NO: 165003 - DNA, 11 bp, Unknown
  misc_feature (1)..( 11): Result.004 file - promoters50/1376490
atataaattaa

SEQ ID NO: 165004 - DNA, 11 bp, Unknown
  misc_feature (1)..( 11): Result.004 file - promoters50/1376490
taatagagtcg

SEQ ID NO: 165005 - DNA, 11 bp, Unknown
  misc_feature (1)..( 11): Result.004 file - promoters50/1376490
cgatacattct

SEQ ID NO: 165006 - DNA, 10 bp, Unknown
  misc_feature (1)..( 10): Result.004 file - promoters50/1376490
catagagtac

SEQ ID NO: 165007 - DNA, 10 bp, Unknown
  misc_feature (1)..( 10): Result.004 file - promoters50/1376490
aatagattac

SEQ ID NO: 165008 - DNA, 10 bp, Unknown
  misc_feature (1)..( 10): Result.004 file - promoters50/1376490
aatagattta

SEQ ID NO: 165009 - DNA, 10 bp, Unknown
  misc_feature (1)..( 10): Result.004 file - promoters50/1376559
cataaattta

SEQ ID NO: 165010 - DNA, 10 bp, Unknown
  misc_feature (1)..( 10): Result.004 file - promoters50/1376559
gcagaggaag

SEQ ID NO: 165011 - DNA, 10 bp, Unknown
  misc_feature (1)..( 10): Result.004 file - promoters50/1376559
gcagaagaag

SEQ ID NO: 165012 - DNA, 10 bp, Unknown
  misc_feature (1)..( 10): Result.004 file - promoters50/1376650
taagaggaag

SEQ ID NO: 165013 - DNA, 12 bp, Unknown
  misc_feature (1)..( 12): Result.004 file - promoters50/1376650
aaatgaaatatc

SEQ ID NO: 165014 - DNA, 12 bp, Unknown
  misc_feature (1)..( 12): Result.004 file - promoters50/1376650
aaataaaataaa

SEQ ID NO: 165015 - DNA, 12 bp, Unknown
  misc_feature (1)..( 12): Result.004 file - promoters50/1376650
aaatggaataaa

SEQ ID NO: 165016 - DNA, 12 bp, Unknown
  misc_feature (1)..( 12): Result.004 file - promoters50/1376650
taacaaaatatt

SEQ ID NO: 165017 - DNA, 12 bp, Unknown
  misc_feature (1)..( 12): Result.004 file - promoters50/1376650
aatttaaatatt

SEQ ID NO: 165018 - DNA, 12 bp, Unknown
  misc_feature (1)..( 12): Result.004 file - promoters50/1376726
ttgaagaagatg

SEQ ID NO: 165019 - DNA, 8 bp, Unknown
  misc_feature (1)..( 8): Result.004 file - promoters50/1376726
tattttct

SEQ ID NO: 165020 - DNA, 8 bp, Unknown
  misc_feature (1)..( 8): Result.004 file - promoters50/1376726
tattctct

SEQ ID NO: 165021 - DNA, 8 bp, Unknown
  misc_feature (1)..( 8): Result.004 file - promoters50/1376726
tattttgt

SEQ ID NO: 165022 - DNA, 8 bp, Unknown
  misc_feature (1)..( 8): Result.004 file - promoters50/1376726
cattttga

SEQ ID NO: 165023 - DNA, 8 bp, Unknown
  misc_feature (1)..( 8): Result.004 file - promoters50/1376726
taataatc

SEQ ID NO: 165024 - DNA, 8 bp, Unknown
  misc_feature (1)..( 8): Result.004 file - promoters50/1376726
aaattatc

SEQ ID NO: 165025 - DNA, 8 bp, Unknown
  misc_feature (1)..( 8): Result.004 file - promoters50/1376726
taaaaata

SEQ ID NO: 165026 - DNA, 8 bp, Unknown
  misc_feature (1)..( 8): Result.004 file - promoters50/1376726
caaaaatt

SEQ ID NO: 165027 - DNA, 9 bp, Unknown
  misc_feature (1)..( 9): Result.004 file - promoters50/1376726
attagaaaa

SEQ ID NO: 165028 - DNA, 9 bp, Unknown
  misc_feature (1)..( 9): Result.004 file - promoters50/1376726
attagaact

SEQ ID NO: 165029 - DNA, 9 bp, Unknown
  misc_feature (1)..( 9): Result.004 file - promoters50/1376726
cttataaaa

SEQ ID NO: 165030 - DNA, 9 bp, Unknown
  misc_feature (1)..( 9): Result.004 file - promoters50/1376733
attataagg

SEQ ID NO: 165031 - DNA, 10 bp, Unknown
  misc_feature (1)..( 10): Result.004 file - promoters50/1376733
actttttgta

SEQ ID NO: 165032 - DNA, 10 bp, Unknown
  misc_feature (1)..( 10): Result.004 file - promoters50/1376733
actatttcta

SEQ ID NO: 165033 - DNA, 10 bp, Unknown
  misc_feature (1)..( 10): Result.004 file - promoters50/1376733
tctttttctt

SEQ ID NO: 165034 - DNA, 10 bp, Unknown
  misc_feature (1)..( 10): Result.004 file - promoters50/1376733
tttttttgta

SEQ ID NO: 165035 - DNA, 8 bp, Unknown
  misc_feature (1)..( 8): Result.004 file - promoters50/1376733
aaactgtc

SEQ ID NO: 165036 - DNA, 8 bp, Unknown
  misc_feature (1)..( 8): Result.004 file - promoters50/1376733
aaattgtc

SEQ ID NO: 165037 - DNA, 8 bp, Unknown
  misc_feature (1)..( 8): Result.004 file - promoters50/1376733
caatagtc

SEQ ID NO: 165038 - DNA, 9 bp, Unknown
  misc_feature (1)..( 9): Result.004 file - promoters50/1376733
aaagttgtc

SEQ ID NO: 165039 - DNA, 7 bp, Unknown
  misc_feature (1)..( 7): Result.004 file - promoters50/1376733
tattttc

SEQ ID NO: 165040 - DNA, 7 bp, Unknown
  misc_feature (1)..( 7): Result.004 file - promoters50/1376733
tattttt

SEQ ID NO: 165041 - DNA, 7 bp, Unknown
  misc_feature (1)..( 7): Result.004 file - promoters50/1376733
tatcttc

SEQ ID NO: 165042 - DNA, 7 bp, Unknown
  misc_feature (1)..( 7): Result.004 file - promoters50/1376737
aattttt

SEQ ID NO: 165043 - DNA, 8 bp, Unknown
  misc_feature (1)..( 8): Result.004 file - promoters50/1376737
ggtctatc

SEQ ID NO: 165044 - DNA, 8 bp, Unknown
  misc_feature (1)..( 8): Result.004 file - promoters50/1376737
ggtttatt

SEQ ID NO: 165045 - DNA, 8 bp, Unknown
  misc_feature (1)..( 8): Result.004 file - promoters50/1376737
tctttatt

SEQ ID NO: 165046 - DNA, 8 bp, Unknown
  misc_feature (1)..( 8): Result.004 file - promoters50/1376737
gtacaaag

SEQ ID NO: 165047 - DNA, 8 bp, Unknown
  misc_feature (1)..( 8): Result.004 file - promoters50/1376737
ctacaaaa

SEQ ID NO: 165048 - DNA, 8 bp, Unknown
  misc_feature (1)..( 8): Result.004 file - promoters50/1376737
ctaaaaaa

SEQ ID NO: 165049 - DNA, 10 bp, Unknown
  misc_feature (1)..( 10): Result.004 file - promoters50/1376737
taacgcatag

SEQ ID NO: 165050 - DNA, 10 bp, Unknown
  misc_feature (1)..( 10): Result.004 file - promoters50/1376737
taaagcaaaa

SEQ ID NO: 165051 - DNA, 10 bp, Unknown
  misc_feature (1)..( 10): Result.004 file - promoters50/1376859
gaaaccaaaa

SEQ ID NO: 165052 - DNA, 8 bp, Unknown
  misc_feature (1)..( 8): Result.004 file - promoters50/1376859
atcttttt

SEQ ID NO: 165053 - DNA, 8 bp, Unknown
  misc_feature (1)..( 8): Result.004 file - promoters50/1376859
atcattta

SEQ ID NO: 165054 - DNA, 8 bp, Unknown
  misc_feature (1)..( 8): Result.004 file - promoters50/1376881
atcagtta

SEQ ID NO: 165055 - DNA, 10 bp, Unknown
  misc_feature (1)..( 10): Result.004 file - promoters50/1376881
tcaacaaaaa

SEQ ID NO: 165056 - DNA, 10 bp, Unknown
  misc_feature (1)..( 10): Result.004 file - promoters50/1376881
gaaacaaaaa

SEQ ID NO: 165057 - DNA, 10 bp, Unknown
  misc_feature (1)..( 10): Result.004 file - promoters50/1376881
gaaagaaagc

SEQ ID NO: 165058 - DNA, 6 bp, Unknown
  misc_feature (1)..( 6): Result.004 file - promoters50/1376881
agtaaa

SEQ ID NO: 165059 - DNA, 6 bp, Unknown
  misc_feature (1)..( 6): Result.004 file - promoters50/1376881
agtaaa

SEQ ID NO: 165060 - DNA, 6 bp, Unknown
  misc_feature (1)..( 6): Result.004 file - promoters50/1376958
agtaaa

SEQ ID NO: 165061 - DNA, 11 bp, Unknown
  misc_feature (1)..( 11): Result.004 file - promoters50/1376958
atacatagaaa

SEQ ID NO: 165062 - DNA, 11 bp, Unknown
  misc_feature (1)..( 11): Result.004 file - promoters50/1376958
aatgatacaaa

SEQ ID NO: 165063 - DNA, 11 bp, Unknown
  misc_feature (1)..( 11): Result.004 file - promoters50/1376958
aatcatacaac

SEQ ID NO: 165064 - DNA, 11 bp, Unknown
  misc_feature (1)..( 11): Result.004 file - promoters50/1376958
gataattaaga

SEQ ID NO: 165065 - DNA, 11 bp, Unknown
  misc_feature (1)..( 11): Result.004 file - promoters50/1376958
acacattaagt

SEQ ID NO: 165066 - DNA, 11 bp, Unknown
  misc_feature (1)..( 11): Result.004 file - promoters50/1376980
acacgttaagt

SEQ ID NO: 165067 - DNA, 7 bp, Unknown
  misc_feature (1)..( 7): Result.004 file - promoters50/1376980
aaaattt

SEQ ID NO: 165068 - DNA, 7 bp, Unknown
  misc_feature (1)..( 7): Result.004 file - promoters50/1376980
aaaattt

SEQ ID NO: 165069 - DNA, 7 bp, Unknown
  misc_feature (1)..( 7): Result.004 file - promoters50/1376980
taaattt

SEQ ID NO: 165070 - DNA, 8 bp, Unknown
  misc_feature (1)..( 8): Result.004 file - promoters50/1376980
tatctaaa

SEQ ID NO: 165071 - DNA, 8 bp, Unknown
  misc_feature (1)..( 8): Result.004 file - promoters50/1376980
tatataaa

SEQ ID NO: 165072 - DNA, 8 bp, Unknown
  misc_feature (1)..( 8): Result.004 file - promoters50/1376980
tttataaa

SEQ ID NO: 165073 - DNA, 7 bp, Unknown
  misc_feature (1)..( 7): Result.004 file - promoters50/1376980
atttaat

SEQ ID NO: 165074 - DNA, 7 bp, Unknown
  misc_feature (1)..( 7): Result.004 file - promoters50/1376980
attaaat

SEQ ID NO: 165075 - DNA, 7 bp, Unknown
  misc_feature (1)..( 7): Result.004 file - promoters50/1376992
attaaac

SEQ ID NO: 165076 - DNA, 13 bp, Unknown
  misc_feature (1)..( 13): Result.004 file - promoters50/1376992
atattaatcatta

SEQ ID NO: 165077 - DNA, 13 bp, Unknown
  misc_feature (1)..( 13): Result.004 file - promoters50/1376992
ttataaatcatta

SEQ ID NO: 165078 - DNA, 13 bp, Unknown
  misc_feature (1)..( 13): Result.004 file - promoters50/1376992
atattatcacctt

SEQ ID NO: 165079 - DNA, 7 bp, Unknown
  misc_feature (1)..( 7): Result.004 file - promoters50/1376992
attaaac

SEQ ID NO: 165080 - DNA, 7 bp, Unknown
  misc_feature (1)..( 7): Result.004 file - promoters50/1376992
attaaat

SEQ ID NO: 165081 - DNA, 7 bp, Unknown
  misc_feature (1)..( 7): Result.004 file - promoters50/1376992
cttaaat

SEQ ID NO: 165082 - DNA, 7 bp, Unknown
  misc_feature (1)..( 7): Result.004 file - promoters50/1376992
gttaaat

SEQ ID NO: 165083 - DNA, 7 bp, Unknown
  misc_feature (1)..( 7): Result.004 file - promoters50/1376992
cttaaat

SEQ ID NO: 165084 - DNA, 7 bp, Unknown
  misc_feature (1)..( 7): Result.004 file - promoters50/1376992
gttaaat

SEQ ID NO: 165085 - DNA, 6 bp, Unknown
  misc_feature (1)..( 6): Result.004 file - promoters50/1376992
aataaa

SEQ ID NO: 165086 - DNA, 6 bp, Unknown
  misc_feature (1)..( 6): Result.004 file - promoters50/1376992
aataaa

SEQ ID NO: 165087 - DNA, 7 bp, Unknown
  misc_feature (1)..( 7): Result.004 file - promoters50/1376992
aattaaa

SEQ ID NO: 165088 - DNA, 10 bp, Unknown
  misc_feature (1)..( 10): Result.004 file - promoters50/1376992
aaacataact

SEQ ID NO: 165089 - DNA, 10 bp, Unknown
  misc_feature (1)..( 10): Result.004 file - promoters50/1376992
aaaaatagaa

SEQ ID NO: 165090 - DNA, 10 bp, Unknown
  misc_feature (1)..( 10): Result.004 file - promoters50/1377007
gaacacaact

SEQ ID NO: 165091 - DNA, 8 bp, Unknown
  misc_feature (1)..( 8): Result.004 file - promoters50/1377007
ctaaatga

SEQ ID NO: 165092 - DNA, 8 bp, Unknown
  misc_feature (1)..( 8): Result.004 file - promoters50/1377007
ctaaatgg

SEQ ID NO: 165093 - DNA, 8 bp, Unknown
  misc_feature (1)..( 8): Result.004 file - promoters50/1377007
ttaactga

SEQ ID NO: 165094 - DNA, 8 bp, Unknown
  misc_feature (1)..( 8): Result.004 file - promoters50/1377007
acaactga

SEQ ID NO: 165095 - DNA, 12 bp, Unknown
  misc_feature (1)..( 12): Result.004 file - promoters50/1377007
ctcaatgtctaa

SEQ ID NO: 165096 - DNA, 12 bp, Unknown
  misc_feature (1)..( 12): Result.004 file - promoters50/1377007
ctcactgtcttt

SEQ ID NO: 165097 - DNA, 12 bp, Unknown
  misc_feature (1)..( 12): Result.004 file - promoters50/1377007
gtatgtgtgttt

SEQ ID NO: 165098 - DNA, 7 bp, Unknown
  misc_feature (1)..( 7): Result.004 file - promoters50/1377007
gtttgaa

SEQ ID NO: 165099 - DNA, 7 bp, Unknown
  misc_feature (1)..( 7): Result.004 file - promoters50/1377007
gtttgat

SEQ ID NO: 165100 - DNA, 7 bp, Unknown
  misc_feature (1)..( 7): Result.004 file - promoters50/1377007
ctttgaa

SEQ ID NO: 165101 - DNA, 8 bp, Unknown
  misc_feature (1)..( 8): Result.004 file - promoters50/1377007
tcaaaatt

SEQ ID NO: 165102 - DNA, 8 bp, Unknown
  misc_feature (1)..( 8): Result.004 file - promoters50/1377007
gtaaaatt

SEQ ID NO: 165103 - DNA, 8 bp, Unknown
  misc_feature (1)..( 8): Result.004 file - promoters50/1377007
tcagaatt

SEQ ID NO: 165104 - DNA, 10 bp, Unknown
  misc_feature (1)..( 10): Result.004 file - promoters50/1377007
tttgaatcaa

SEQ ID NO: 165105 - DNA, 10 bp, Unknown
  misc_feature (1)..( 10): Result.004 file - promoters50/1377007
attgattcaa

SEQ ID NO: 165106 - DNA, 10 bp, Unknown
  misc_feature (1)..( 10): Result.004 file - promoters50/1377007
tttgaaacat

SEQ ID NO: 165107 - DNA, 10 bp, Unknown
  misc_feature (1)..( 10): Result.004 file - promoters50/1377007
tttgattcca

SEQ ID NO: 165108 - DNA, 9 bp, Unknown
  misc_feature (1)..( 9): Result.004 file - promoters50/1377007
tttcttatt

SEQ ID NO: 165109 - DNA, 9 bp, Unknown
  misc_feature (1)..( 9): Result.004 file - promoters50/1377007
tttattact

SEQ ID NO: 165110 - DNA, 9 bp, Unknown
  misc_feature (1)..( 9): Result.004 file - promoters50/1377045
tctattact

SEQ ID NO: 165111 - DNA, 11 bp, Unknown
  misc_feature (1)..( 11): Result.004 file - promoters50/1377045
attcaaccaaa

SEQ ID NO: 165112 - DNA, 11 bp, Unknown
  misc_feature (1)..( 11): Result.004 file - promoters50/1377045
caagcaccaaa

SEQ ID NO: 165113 - DNA, 11 bp, Unknown
  misc_feature (1)..( 11): Result.004 file - promoters50/1377045
attctaccaag

SEQ ID NO: 165114 - DNA, 10 bp, Unknown
  misc_feature (1)..( 10): Result.004 file - promoters50/1377045
aaaagaaaga

SEQ ID NO: 165115 - DNA, 10 bp, Unknown
  misc_feature (1)..( 10): Result.004 file - promoters50/1377045
aaaaaaaaga

SEQ ID NO: 165116 - DNA, 10 bp, Unknown
  misc_feature (1)..( 10): Result.004 file - promoters50/1377045
gtcaaaaagc

SEQ ID NO: 165117 - DNA, 6 bp, Unknown
  misc_feature (1)..( 6): Result.004 file - promoters50/1377045
aaaaac

SEQ ID NO: 165118 - DNA, 6 bp, Unknown
  misc_feature (1)..( 6): Result.004 file - promoters50/1377045
aaaaac

SEQ ID NO: 165119 - DNA, 7 bp, Unknown
  misc_feature (1)..( 7): Result.004 file - promoters50/1377139
aaagaaa

SEQ ID NO: 165120 - DNA, 10 bp, Unknown
  misc_feature (1)..( 10): Result.004 file - promoters50/1377139
tcaatttaaa

SEQ ID NO: 165121 - DNA, 10 bp, Unknown
  misc_feature (1)..( 10): Result.004 file - promoters50/1377139
tcatttttca

SEQ ID NO: 165122 - DNA, 10 bp, Unknown
  misc_feature (1)..( 10): Result.004 file - promoters50/1377139
tcaagttaaa

SEQ ID NO: 165123 - DNA, 10 bp, Unknown
  misc_feature (1)..( 10): Result.004 file - promoters50/1377139
gaatttttcg

SEQ ID NO: 165124 - DNA, 10 bp, Unknown
  misc_feature (1)..( 10): Result.004 file - promoters50/1377139
aaaagttacg

SEQ ID NO: 165125 - DNA, 10 bp, Unknown
  misc_feature (1)..( 10): Result.004 file - promoters50/1377192
acaagttggg

SEQ ID NO: 165126 - DNA, 16 bp, Unknown
  misc_feature (1)..( 16): Result.004 file - promoters50/1377192
tttactaaaccaaaaa

SEQ ID NO: 165127 - DNA, 16 bp, Unknown
  misc_feature (1)..( 16): Result.004 file - promoters50/1377192
tttactcaacagcttg

SEQ ID NO: 165128 - DNA, 16 bp, Unknown
  misc_feature (1)..( 16): Result.004 file - promoters50/1377192
ataacccaaaattgac

SEQ ID NO: 165129 - DNA, 16 bp, Unknown
  misc_feature (1)..( 16): Result.004 file - promoters50/1377192
ttttttcaaaagcttg

SEQ ID NO: 165130 - DNA, 16 bp, Unknown
  misc_feature (1)..( 16): Result.004 file - promoters50/1377192
tggaagcaatagctgg

SEQ ID NO: 165131 - DNA, 16 bp, Unknown
  misc_feature (1)..( 16): Result.004 file - promoters50/1377192
gattttaaactattcc

SEQ ID NO: 165132 - DNA, 16 bp, Unknown
  misc_feature (1)..( 16): Result.004 file - promoters50/1377192
taattttaagtcgagc

SEQ ID NO: 165133 - DNA, 18 bp, Unknown
  misc_feature (1)..( 18): Result.004 file - promoters50/1377192
tcgtcttcactaatttag

SEQ ID NO: 165134 - DNA, 18 bp, Unknown
  misc_feature (1)..( 18): Result.004 file - promoters50/1377192
tgacattccctatgagcc

SEQ ID NO: 165135 - DNA, 18 bp, Unknown
  misc_feature (1)..( 18): Result.004 file - promoters50/1377192
caaaggtcaataaatata

SEQ ID NO: 165136 - DNA, 18 bp, Unknown
  misc_feature (1)..( 18): Result.004 file - promoters50/1377192
ccgttttcacactatgag

SEQ ID NO: 165137 - DNA, 18 bp, Unknown
  misc_feature (1)..( 18): Result.004 file - promoters50/1377192
ccgtttgagtttcacgat

SEQ ID NO: 165138 - DNA, 18 bp, Unknown
  misc_feature (1)..( 18): Result.004 file - promoters50/1377192
tcgtttttagtagtctct

SEQ ID NO: 165139 - DNA, 18 bp, Unknown
  misc_feature (1)..( 18): Result.004 file - promoters50/1377192
aaacattcaacggtcaat

SEQ ID NO: 165140 - DNA, 14 bp, Unknown
  misc_feature (1)..( 14): Result.004 file - promoters50/1377192
tactcaacagcttg

SEQ ID NO: 165141 - DNA, 14 bp, Unknown
  misc_feature (1)..( 14): Result.004 file - promoters50/1377192
gaagcaatagctgg

SEQ ID NO: 165142 - DNA, 14 bp, Unknown
  misc_feature (1)..( 14): Result.004 file - promoters50/1377192
ttttcaaaagcttg

SEQ ID NO: 165143 - DNA, 14 bp, Unknown
  misc_feature (1)..( 14): Result.004 file - promoters50/1377192
attttaaactattc

SEQ ID NO: 165144 - DNA, 14 bp, Unknown
  misc_feature (1)..( 14): Result.004 file - promoters50/1377192
attttaagtcgagc

SEQ ID NO: 165145 - DNA, 14 bp, Unknown
  misc_feature (1)..( 14): Result.004 file - promoters50/1377197
gcggccaaaccttt

SEQ ID NO: 165146 - DNA, 9 bp, Unknown
  misc_feature (1)..( 9): Result.004 file - promoters50/1377197
tgaaagaag

SEQ ID NO: 165147 - DNA, 9 bp, Unknown
  misc_feature (1)..( 9): Result.004 file - promoters50/1377197
aaaaataag

SEQ ID NO: 165148 - DNA, 9 bp, Unknown
  misc_feature (1)..( 9): Result.004 file - promoters50/1377197
aaaaagaaa

SEQ ID NO: 165149 - DNA, 9 bp, Unknown
  misc_feature (1)..( 9): Result.004 file - promoters50/1377197
aaaaaaaag

SEQ ID NO: 165150 - DNA, 9 bp, Unknown
  misc_feature (1)..( 9): Result.004 file - promoters50/1377197
cgaaggaac

SEQ ID NO: 165151 - DNA, 9 bp, Unknown
  misc_feature (1)..( 9): Result.004 file - promoters50/1377249
atatgtaaa

SEQ ID NO: 165152 - DNA, 8 bp, Unknown
  misc_feature (1)..( 8): Result.004 file - promoters50/1377249
taaataac

SEQ ID NO: 165153 - DNA, 8 bp, Unknown
  misc_feature (1)..( 8): Result.004 file - promoters50/1377249
taaataac

SEQ ID NO: 165154 - DNA, 8 bp, Unknown
  misc_feature (1)..( 8): Result.004 file - promoters50/1377268
taaataaa

SEQ ID NO: 165155 - DNA, 10 bp, Unknown
  misc_feature (1)..( 10): Result.004 file - promoters50/1377268
aaactactta

SEQ ID NO: 165156 - DNA, 10 bp, Unknown
  misc_feature (1)..( 10): Result.004 file - promoters50/1377268
aaactaaaac

SEQ ID NO: 165157 - DNA, 10 bp, Unknown
  misc_feature (1)..( 10): Result.004 file - promoters50/1377268
aaactacaac

SEQ ID NO: 165158 - DNA, 10 bp, Unknown
  misc_feature (1)..( 10): Result.004 file - promoters50/1377268
taacgtggca

SEQ ID NO: 165159 - DNA, 10 bp, Unknown
  misc_feature (1)..( 10): Result.004 file - promoters50/1377268
aaacgtgaaa

SEQ ID NO: 165160 - DNA, 10 bp, Unknown
  misc_feature (1)..( 10): Result.004 file - promoters50/1377268
aaacgtaaaa

SEQ ID NO: 165161 - DNA, 9 bp, Unknown
  misc_feature (1)..( 9): Result.004 file - promoters50/1377268
ctatattta

SEQ ID NO: 165162 - DNA, 9 bp, Unknown
  misc_feature (1)..( 9): Result.004 file - promoters50/1377268
aactattta

SEQ ID NO: 165163 - DNA, 9 bp, Unknown
  misc_feature (1)..( 9): Result.004 file - promoters50/1377268
aaccattta

SEQ ID NO: 165164 - DNA, 8 bp, Unknown
  misc_feature (1)..( 8): Result.004 file - promoters50/1377268
ctacttat

SEQ ID NO: 165165 - DNA, 8 bp, Unknown
  misc_feature (1)..( 8): Result.004 file - promoters50/1377268
caacttat

SEQ ID NO: 165166 - DNA, 8 bp, Unknown
  misc_feature (1)..( 8): Result.004 file - promoters50/1377268
caatttat

SEQ ID NO: 165167 - DNA, 11 bp, Unknown
  misc_feature (1)..( 11): Result.004 file - promoters50/1377268
tatatataaag

SEQ ID NO: 165168 - DNA, 11 bp, Unknown
  misc_feature (1)..( 11): Result.004 file - promoters50/1377268
tatatataaag

SEQ ID NO: 165169 - DNA, 11 bp, Unknown
  misc_feature (1)..( 11): Result.004 file - promoters50/1377268
tttatttaacg

SEQ ID NO: 165170 - DNA, 11 bp, Unknown
  misc_feature (1)..( 11): Result.004 file - promoters50/1377268
acaatataaac

SEQ ID NO: 165171 - DNA, 9 bp, Unknown
  misc_feature (1)..( 9): Result.004 file - promoters50/1377268
acttgtttt

SEQ ID NO: 165172 - DNA, 9 bp, Unknown
  misc_feature (1)..( 9): Result.004 file - promoters50/1377268
acttgtata

SEQ ID NO: 165173 - DNA, 9 bp, Unknown
  misc_feature (1)..( 9): Result.004 file - promoters50/1377417
acttgaata

SEQ ID NO: 165174 - DNA, 8 bp, Unknown
  misc_feature (1)..( 8): Result.004 file - promoters50/1377417
caataacc

SEQ ID NO: 165175 - DNA, 8 bp, Unknown
  misc_feature (1)..( 8): Result.004 file - promoters50/1377417
tcataacc

SEQ ID NO: 165176 - DNA, 8 bp, Unknown
  misc_feature (1)..( 8): Result.004 file - promoters50/1377417
caaaaaca

SEQ ID NO: 165177 - DNA, 8 bp, Unknown
  misc_feature (1)..( 8): Result.004 file - promoters50/1377472
taaaaaca

SEQ ID NO: 165178 - DNA, 14 bp, Unknown
  misc_feature (1)..( 14): Result.004 file - promoters50/1377472
tcattttcgagaat

SEQ ID NO: 165179 - DNA, 14 bp, Unknown
  misc_feature (1)..( 14): Result.004 file - promoters50/1377472
acggtttcaagatg

SEQ ID NO: 165180 - DNA, 14 bp, Unknown
  misc_feature (1)..( 14): Result.004 file - promoters50/1377472
ccttcttcaagaaa

SEQ ID NO: 165181 - DNA, 14 bp, Unknown
  misc_feature (1)..( 14): Result.004 file - promoters50/1377472
tatgttgcaacttg

SEQ ID NO: 165182 - DNA, 14 bp, Unknown
  misc_feature (1)..( 14): Result.004 file - promoters50/1377472
ttgtgtctaagaaa

SEQ ID NO: 165183 - DNA, 14 bp, Unknown
  misc_feature (1)..( 14): Result.004 file - promoters50/1377472
ctgctttcacgatt

SEQ ID NO: 165184 - DNA, 14 bp, Unknown
  misc_feature (1)..( 14): Result.004 file - promoters50/1377472
ctgttttcaaaatg

SEQ ID NO: 165185 - DNA, 13 bp, Unknown
  misc_feature (1)..( 13): Result.004 file - promoters50/1377472
agattctcttatt

SEQ ID NO: 165186 - DNA, 13 bp, Unknown
  misc_feature (1)..( 13): Result.004 file - promoters50/1377472
cgattctttaaat

SEQ ID NO: 165187 - DNA, 13 bp, Unknown
  misc_feature (1)..( 13): Result.004 file - promoters50/1377472
agattcaatttta

SEQ ID NO: 165188 - DNA, 13 bp, Unknown
  misc_feature (1)..( 13): Result.004 file - promoters50/1377472
aaattcttttatt

SEQ ID NO: 165189 - DNA, 13 bp, Unknown
  misc_feature (1)..( 13): Result.004 file - promoters50/1377472
gtattatttcagg

SEQ ID NO: 165190 - DNA, 13 bp, Unknown
  misc_feature (1)..( 13): Result.004 file - promoters50/1377472
atattataggaaa

SEQ ID NO: 165191 - DNA, 13 bp, Unknown
  misc_feature (1)..( 13): Result.004 file - promoters50/1377506
aatttgttttagt

SEQ ID NO: 165192 - DNA, 10 bp, Unknown
  misc_feature (1)..( 10): Result.004 file - promoters50/1377506
gaatatgtaa

SEQ ID NO: 165193 - DNA, 10 bp, Unknown
  misc_feature (1)..( 10): Result.004 file - promoters50/1377506
ttctatataa

SEQ ID NO: 165194 - DNA, 10 bp, Unknown
  misc_feature (1)..( 10): Result.004 file - promoters50/1377506
gaatttgttt

SEQ ID NO: 165195 - DNA, 10 bp, Unknown
  misc_feature (1)..( 10): Result.004 file - promoters50/1377506
gaatttgatt

SEQ ID NO: 165196 - DNA, 9 bp, Unknown
  misc_feature (1)..( 9): Result.004 file - promoters50/1377506
tcttcctcc

SEQ ID NO: 165197 - DNA, 9 bp, Unknown
  misc_feature (1)..( 9): Result.004 file - promoters50/1377506
agctcctcc

SEQ ID NO: 165198 - DNA, 9 bp, Unknown
  misc_feature (1)..( 9): Result.004 file - promoters50/1377506
tcttcctcc

SEQ ID NO: 165199 - DNA, 8 bp, Unknown
  misc_feature (1)..( 8): Result.004 file - promoters50/1377506
tcttctcc

SEQ ID NO: 165200 - DNA, 8 bp, Unknown
  misc_feature (1)..( 8): Result.004 file - promoters50/1377506
acttatcc

SEQ ID NO: 165201 - DNA, 8 bp, Unknown
  misc_feature (1)..( 8): Result.004 file - promoters50/1377506
tcttctta

SEQ ID NO: 165202 - DNA, 8 bp, Unknown
  misc_feature (1)..( 8): Result.004 file - promoters50/1377506
tctggttt

SEQ ID NO: 165203 - DNA, 8 bp, Unknown
  misc_feature (1)..( 8): Result.004 file - promoters50/1377506
tctggttt

SEQ ID NO: 165204 - DNA, 8 bp, Unknown
  misc_feature (1)..( 8): Result.004 file - promoters50/1377522
tctggttt

SEQ ID NO: 165205 - DNA, 9 bp, Unknown
  misc_feature (1)..( 9): Result.004 file - promoters50/1377522
tgatatctc

SEQ ID NO: 165206 - DNA, 9 bp, Unknown
  misc_feature (1)..( 9): Result.004 file - promoters50/1377522
ccatacctc

SEQ ID NO: 165207 - DNA, 9 bp, Unknown
  misc_feature (1)..( 9): Result.004 file - promoters50/1377522
tgatgtctt

SEQ ID NO: 165208 - DNA, 9 bp, Unknown
  misc_feature (1)..( 9): Result.004 file - promoters50/1377522
atatgtctc

SEQ ID NO: 165209 - DNA, 8 bp, Unknown
  misc_feature (1)..( 8): Result.004 file - promoters50/1377522
cgacatgt

SEQ ID NO: 165210 - DNA, 8 bp, Unknown
  misc_feature (1)..( 8): Result.004 file - promoters50/1377522
cgacatgt

SEQ ID NO: 165211 - DNA, 8 bp, Unknown
  misc_feature (1)..( 8): Result.004 file - promoters50/1377522
cgacatta

SEQ ID NO: 165212 - DNA, 8 bp, Unknown
  misc_feature (1)..( 8): Result.004 file - promoters50/1377540
acacatgt

SEQ ID NO: 165213 - DNA, 10 bp, Unknown
  misc_feature (1)..( 10): Result.004 file - promoters50/1377540
caaaattcta

SEQ ID NO: 165214 - DNA, 10 bp, Unknown
  misc_feature (1)..( 10): Result.004 file - promoters50/1377540
caaaataaat

SEQ ID NO: 165215 - DNA, 10 bp, Unknown
  misc_feature (1)..( 10): Result.004 file - promoters50/1377540
aaaaatctct

SEQ ID NO: 165216 - DNA, 10 bp, Unknown
  misc_feature (1)..( 10): Result.004 file - promoters50/1377540
gataatgtct

SEQ ID NO: 165217 - DNA, 10 bp, Unknown
  misc_feature (1)..( 10): Result.004 file - promoters50/1377540
ataatttaaa

SEQ ID NO: 165218 - DNA, 10 bp, Unknown
  misc_feature (1)..( 10): Result.004 file - promoters50/1377540
atatttttgt

SEQ ID NO: 165219 - DNA, 10 bp, Unknown
  misc_feature (1)..( 10): Result.004 file - promoters50/1377540
tgatttttgc

SEQ ID NO: 165220 - DNA, 10 bp, Unknown
  misc_feature (1)..( 10): Result.004 file - promoters50/1377540
ttattttttt

SEQ ID NO: 165221 - DNA, 10 bp, Unknown
  misc_feature (1)..( 10): Result.004 file - promoters50/1377540
aattacatga

SEQ ID NO: 165222 - DNA, 10 bp, Unknown
  misc_feature (1)..( 10): Result.004 file - promoters50/1377540
gattaaatgt

SEQ ID NO: 165223 - DNA, 10 bp, Unknown
  misc_feature (1)..( 10): Result.004 file - promoters50/1377540
ttacaaatgt

SEQ ID NO: 165224 - DNA, 10 bp, Unknown
  misc_feature (1)..( 10): Result.004 file - promoters50/1377564
gattaaacaa

SEQ ID NO: 165225 - DNA, 7 bp, Unknown
  misc_feature (1)..( 7): Result.004 file - promoters50/1377564
attttac

SEQ ID NO: 165226 - DNA, 7 bp, Unknown
  misc_feature (1)..( 7): Result.004 file - promoters50/1377564
tttttac

SEQ ID NO: 165227 - DNA, 7 bp, Unknown
  misc_feature (1)..( 7): Result.004 file - promoters50/1377564
attttaa

SEQ ID NO: 165228 - DNA, 9 bp, Unknown
  misc_feature (1)..( 9): Result.004 file - promoters50/1377564
ttgtattaa

SEQ ID NO: 165229 - DNA, 9 bp, Unknown
  misc_feature (1)..( 9): Result.004 file - promoters50/1377564
aagtaataa

SEQ ID NO: 165230 - DNA, 9 bp, Unknown
  misc_feature (1)..( 9): Result.004 file - promoters50/1377564
aagaaatga

SEQ ID NO: 165231 - DNA, 7 bp, Unknown
  misc_feature (1)..( 7): Result.004 file - promoters50/1377564
caaaatt

SEQ ID NO: 165232 - DNA, 7 bp, Unknown
  misc_feature (1)..( 7): Result.004 file - promoters50/1377564
caaaatc

SEQ ID NO: 165233 - DNA, 7 bp, Unknown
  misc_feature (1)..( 7): Result.004 file - promoters50/1377564
taaaatc

SEQ ID NO: 165234 - DNA, 8 bp, Unknown
  misc_feature (1)..( 8): Result.004 file - promoters50/1377564
ttatgtca

SEQ ID NO: 165235 - DNA, 8 bp, Unknown
  misc_feature (1)..( 8): Result.004 file - promoters50/1377564
ttatgtct

SEQ ID NO: 165236 - DNA, 8 bp, Unknown
  misc_feature (1)..( 8): Result.004 file - promoters50/1377564
acatgtct

SEQ ID NO: 165237 - DNA, 7 bp, Unknown
  misc_feature (1)..( 7): Result.004 file - promoters50/1377564
gatggat

SEQ ID NO: 165238 - DNA, 7 bp, Unknown
  misc_feature (1)..( 7): Result.004 file - promoters50/1377564
gatcgat

SEQ ID NO: 165239 - DNA, 7 bp, Unknown
  misc_feature (1)..( 7): Result.004 file - promoters50/1377613
gatcgaa

SEQ ID NO: 165240 - DNA, 10 bp, Unknown
  misc_feature (1)..( 10): Result.004 file - promoters50/1377613
caaattatcc

SEQ ID NO: 165241 - DNA, 10 bp, Unknown
  misc_feature (1)..( 10): Result.004 file - promoters50/1377613
gcaattataa

SEQ ID NO: 165242 - DNA, 10 bp, Unknown
  misc_feature (1)..( 10): Result.004 file - promoters50/1377613
caaatcatcc

SEQ ID NO: 165243 - DNA, 9 bp, Unknown
  misc_feature (1)..( 9): Result.004 file - promoters50/1377613
tacaaaaaa

SEQ ID NO: 165244 - DNA, 9 bp, Unknown
  misc_feature (1)..( 9): Result.004 file - promoters50/1377613
tacaaaata

SEQ ID NO: 165245 - DNA, 9 bp, Unknown
  misc_feature (1)..( 9): Result.004 file - promoters50/1377613
accaaaaaa

SEQ ID NO: 165246 - DNA, 9 bp, Unknown
  misc_feature (1)..( 9): Result.004 file - promoters50/1377613
aaaaataaa

SEQ ID NO: 165247 - DNA, 9 bp, Unknown
  misc_feature (1)..( 9): Result.004 file - promoters50/1377613
aaatataaa

SEQ ID NO: 165248 - DNA, 9 bp, Unknown
  misc_feature (1)..( 9): Result.004 file - promoters50/1377613
aaaaatcat

SEQ ID NO: 165249 - DNA, 9 bp, Unknown
  misc_feature (1)..( 9): Result.004 file - promoters50/1377613
gataaaact

SEQ ID NO: 165250 - DNA, 9 bp, Unknown
  misc_feature (1)..( 9): Result.004 file - promoters50/1377613
tataaaacc

SEQ ID NO: 165251 - DNA, 9 bp, Unknown
  misc_feature (1)..( 9): Result.004 file - promoters50/1377613
tataaaacc

SEQ ID NO: 165252 - DNA, 9 bp, Unknown
  misc_feature (1)..( 9): Result.004 file - promoters50/1377613
atcaaaacc

SEQ ID NO: 165253 - DNA, 9 bp, Unknown
  misc_feature (1)..( 9): Result.004 file - promoters50/1377613
tataaaacc

SEQ ID NO: 165254 - DNA, 9 bp, Unknown
  misc_feature (1)..( 9): Result.004 file - promoters50/1377642
tataaaacc

SEQ ID NO: 165255 - DNA, 8 bp, Unknown
  misc_feature (1)..( 8): Result.004 file - promoters50/1377642
atttatgt

SEQ ID NO: 165256 - DNA, 8 bp, Unknown
  misc_feature (1)..( 8): Result.004 file - promoters50/1377642
atttattt

SEQ ID NO: 165257 - DNA, 8 bp, Unknown
  misc_feature (1)..( 8): Result.004 file - promoters50/1377642
atttattt

SEQ ID NO: 165258 - DNA, 8 bp, Unknown
  misc_feature (1)..( 8): Result.004 file - promoters50/1377642
gtttgttt

SEQ ID NO: 165259 - DNA, 8 bp, Unknown
  misc_feature (1)..( 8): Result.004 file - promoters50/1377642
atttgttt

SEQ ID NO: 165260 - DNA, 8 bp, Unknown
  misc_feature (1)..( 8): Result.004 file - promoters50/1377642
atatatat

SEQ ID NO: 165261 - DNA, 12 bp, Unknown
  misc_feature (1)..( 12): Result.004 file - promoters50/1377642
gatccaaacacg

SEQ ID NO: 165262 - DNA, 12 bp, Unknown
  misc_feature (1)..( 12): Result.004 file - promoters50/1377642
tatcctaactat

SEQ ID NO: 165263 - DNA, 12 bp, Unknown
  misc_feature (1)..( 12): Result.004 file - promoters50/1377642
aatcaaaagatt

SEQ ID NO: 165264 - DNA, 12 bp, Unknown
  misc_feature (1)..( 12): Result.004 file - promoters50/1377642
tacactaactat

SEQ ID NO: 165265 - DNA, 12 bp, Unknown
  misc_feature (1)..( 12): Result.004 file - promoters50/1377642
aatcaaattaat

SEQ ID NO: 165266 - DNA, 12 bp, Unknown
  misc_feature (1)..( 12): Result.004 file - promoters50/1377642
tttcaaatacta

SEQ ID NO: 165267 - DNA, 9 bp, Unknown
  misc_feature (1)..( 9): Result.004 file - promoters50/1377642
ttactttac

SEQ ID NO: 165268 - DNA, 9 bp, Unknown
  misc_feature (1)..( 9): Result.004 file - promoters50/1377642
aaactatac

SEQ ID NO: 165269 - DNA, 9 bp, Unknown
  misc_feature (1)..( 9): Result.004 file - promoters50/1377642
aatctttac

SEQ ID NO: 165270 - DNA, 9 bp, Unknown
  misc_feature (1)..( 9): Result.004 file - promoters50/1377642
ttaattttt

SEQ ID NO: 165271 - DNA, 9 bp, Unknown
  misc_feature (1)..( 9): Result.004 file - promoters50/1377642
atacttttt

SEQ ID NO: 165272 - DNA, 9 bp, Unknown
  misc_feature (1)..( 9): Result.004 file - promoters50/1377642
atacttttt

SEQ ID NO: 165273 - DNA, 14 bp, Unknown
  misc_feature (1)..( 14): Result.004 file - promoters50/1377642
aattattatacttc

SEQ ID NO: 165274 - DNA, 14 bp, Unknown
  misc_feature (1)..( 14): Result.004 file - promoters50/1377642
atatataataaata

SEQ ID NO: 165275 - DNA, 14 bp, Unknown
  misc_feature (1)..( 14): Result.004 file - promoters50/1377642
aaatataataacat

SEQ ID NO: 165276 - DNA, 14 bp, Unknown
  misc_feature (1)..( 14): Result.004 file - promoters50/1377642
tcatataattatct

SEQ ID NO: 165277 - DNA, 14 bp, Unknown
  misc_feature (1)..( 14): Result.004 file - promoters50/1377642
tcatataacaattt

SEQ ID NO: 165278 - DNA, 14 bp, Unknown
  misc_feature (1)..( 14): Result.004 file - promoters50/1377642
aagcataaaaaata

SEQ ID NO: 165279 - DNA, 14 bp, Unknown
  misc_feature (1)..( 14): Result.004 file - promoters50/1377642
cagtttaataacaa

SEQ ID NO: 165280 - DNA, 11 bp, Unknown
  misc_feature (1)..( 11): Result.004 file - promoters50/1377642
taattttgtat

SEQ ID NO: 165281 - DNA, 11 bp, Unknown
  misc_feature (1)..( 11): Result.004 file - promoters50/1377642
tgtttttgttt

SEQ ID NO: 165282 - DNA, 11 bp, Unknown
  misc_feature (1)..( 11): Result.004 file - promoters50/1377642
taaatttgttt

SEQ ID NO: 165283 - DNA, 11 bp, Unknown
  misc_feature (1)..( 11): Result.004 file - promoters50/1377642
ctgatttattt

SEQ ID NO: 165284 - DNA, 11 bp, Unknown
  misc_feature (1)..( 11): Result.004 file - promoters50/1377642
tgactttgttg

SEQ ID NO: 165285 - DNA, 11 bp, Unknown
  misc_feature (1)..( 11): Result.004 file - promoters50/1377642
tttgtttgttg

SEQ ID NO: 165286 - DNA, 11 bp, Unknown
  misc_feature (1)..( 11): Result.004 file - promoters50/1377642
gtaagaattag

SEQ ID NO: 165287 - DNA, 11 bp, Unknown
  misc_feature (1)..( 11): Result.004 file - promoters50/1377642
gtaagaactgg

SEQ ID NO: 165288 - DNA, 11 bp, Unknown
  misc_feature (1)..( 11): Result.004 file - promoters50/1377642
ataagaatatg

SEQ ID NO: 165289 - DNA, 11 bp, Unknown
  misc_feature (1)..( 11): Result.004 file - promoters50/1377642
accagaacatg

SEQ ID NO: 165290 - DNA, 11 bp, Unknown
  misc_feature (1)..( 11): Result.004 file - promoters50/1377642
cgaagaatagt

SEQ ID NO: 165291 - DNA, 11 bp, Unknown
  misc_feature (1)..( 11): Result.004 file - promoters50/1377642
cacagaataat

SEQ ID NO: 165292 - DNA, 12 bp, Unknown
  misc_feature (1)..( 12): Result.004 file - promoters50/1377642
atctcaaataac

SEQ ID NO: 165293 - DNA, 12 bp, Unknown
  misc_feature (1)..( 12): Result.004 file - promoters50/1377642
ataaaaaataaa

SEQ ID NO: 165294 - DNA, 12 bp, Unknown
  misc_feature (1)..( 12): Result.004 file - promoters50/1377642
ataataaatagg

SEQ ID NO: 165295 - DNA, 12 bp, Unknown
  misc_feature (1)..( 12): Result.004 file - promoters50/1377642
cagtttaataac

SEQ ID NO: 165296 - DNA, 13 bp, Unknown
  misc_feature (1)..( 13): Result.004 file - promoters50/1377642
catcacaatgaat

SEQ ID NO: 165297 - DNA, 13 bp, Unknown
  misc_feature (1)..( 13): Result.004 file - promoters50/1377642
ggcctaaaatata

SEQ ID NO: 165298 - DNA, 10 bp, Unknown
  misc_feature (1)..( 10): Result.004 file - promoters50/1377642
ttttatcaca

SEQ ID NO: 165299 - DNA, 10 bp, Unknown
  misc_feature (1)..( 10): Result.004 file - promoters50/1377642
ttttgtcaac

SEQ ID NO: 165300 - DNA, 10 bp, Unknown
  misc_feature (1)..( 10): Result.004 file - promoters50/1377642
gtataacaat

SEQ ID NO: 165301 - DNA, 10 bp, Unknown
  misc_feature (1)..( 10): Result.004 file - promoters50/1377642
ctttatccta

SEQ ID NO: 165302 - DNA, 10 bp, Unknown
  misc_feature (1)..( 10): Result.004 file - promoters50/1377642
gtgtaaacga

SEQ ID NO: 165303 - DNA, 10 bp, Unknown
  misc_feature (1)..( 10): Result.004 file - promoters50/1377664
ttttgtcctc

SEQ ID NO: 165304 - DNA, 9 bp, Unknown
  misc_feature (1)..( 9): Result.004 file - promoters50/1377664
gttcatagc

SEQ ID NO: 165305 - DNA, 9 bp, Unknown
  misc_feature (1)..( 9): Result.004 file - promoters50/1377664
tgtcaaagc

SEQ ID NO: 165306 - DNA, 9 bp, Unknown
  misc_feature (1)..( 9): Result.004 file - promoters50/1377664
gttcgtaga

SEQ ID NO: 165307 - DNA, 9 bp, Unknown
  misc_feature (1)..( 9): Result.004 file - promoters50/1377664
acaaaaggg

SEQ ID NO: 165308 - DNA, 9 bp, Unknown
  misc_feature (1)..( 9): Result.004 file - promoters50/1377664
aaaaaagga

SEQ ID NO: 165309 - DNA, 10 bp, Unknown
  misc_feature (1)..( 10): Result.004 file - promoters50/1377664
aaaataagga

SEQ ID NO: 165310 - DNA, 10 bp, Unknown
  misc_feature (1)..( 10): Result.004 file - promoters50/1377664
aaaataaaac

SEQ ID NO: 165311 - DNA, 11 bp, Unknown
  misc_feature (1)..( 11): Result.004 file - promoters50/1377664
ctaaaaaaatg

SEQ ID NO: 165312 - DNA, 11 bp, Unknown
  misc_feature (1)..( 11): Result.004 file - promoters50/1377664
ctataaatcat

SEQ ID NO: 165313 - DNA, 11 bp, Unknown
  misc_feature (1)..( 11): Result.004 file - promoters50/1377664
ggaaaataatg

SEQ ID NO: 165314 - DNA, 8 bp, Unknown
  misc_feature (1)..( 8): Result.004 file - promoters50/1377664
aaaaaatg

SEQ ID NO: 165315 - DNA, 8 bp, Unknown
  misc_feature (1)..( 8): Result.004 file - promoters50/1377664
aaaaaagt

SEQ ID NO: 165316 - DNA, 9 bp, Unknown
  misc_feature (1)..( 9): Result.004 file - promoters50/1377680
aaaataatg

SEQ ID NO: 165317 - DNA, 10 bp, Unknown
  misc_feature (1)..( 10): Result.004 file - promoters50/1377680
aaatcatttt

SEQ ID NO: 165318 - DNA, 10 bp, Unknown
  misc_feature (1)..( 10): Result.004 file - promoters50/1377680
aaataatttt

SEQ ID NO: 165319 - DNA, 10 bp, Unknown
  misc_feature (1)..( 10): Result.004 file - promoters50/1377680
caatcatatt

SEQ ID NO: 165320 - DNA, 10 bp, Unknown
  misc_feature (1)..( 10): Result.004 file - promoters50/1377680
aaataaagtg

SEQ ID NO: 165321 - DNA, 10 bp, Unknown
  misc_feature (1)..( 10): Result.004 file - promoters50/1377680
ctatcataat

SEQ ID NO: 165322 - DNA, 10 bp, Unknown
  misc_feature (1)..( 10): Result.004 file - promoters50/1377680
atatgatata

SEQ ID NO: 165323 - DNA, 11 bp, Unknown
  misc_feature (1)..( 11): Result.004 file - promoters50/1377680
gtgacaaaaca

SEQ ID NO: 165324 - DNA, 11 bp, Unknown
  misc_feature (1)..( 11): Result.004 file - promoters50/1377680
gtgataaatac

SEQ ID NO: 165325 - DNA, 11 bp, Unknown
  misc_feature (1)..( 11): Result.004 file - promoters50/1377680
ttaataaattt

SEQ ID NO: 165326 - DNA, 11 bp, Unknown
  misc_feature (1)..( 11): Result.004 file - promoters50/1377680
ctaattaattt

SEQ ID NO: 165327 - DNA, 11 bp, Unknown
  misc_feature (1)..( 11): Result.004 file - promoters50/1377680
gagatttattc

SEQ ID NO: 165328 - DNA, 11 bp, Unknown
  misc_feature (1)..( 11): Result.004 file - promoters50/1377687
ctaagaaacat

SEQ ID NO: 165329 - DNA, 15 bp, Unknown
  misc_feature (1)..( 15): Result.004 file - promoters50/1377687
actaaaataactcac

SEQ ID NO: 165330 - DNA, 15 bp, Unknown
  misc_feature (1)..( 15): Result.004 file - promoters50/1377687
acagaaataaatcac

SEQ ID NO: 165331 - DNA, 15 bp, Unknown
  misc_feature (1)..( 15): Result.004 file - promoters50/1377687
acacaaatatgccaa

SEQ ID NO: 165332 - DNA, 8 bp, Unknown
  misc_feature (1)..( 8): Result.004 file - promoters50/1377687
aaaacaat

SEQ ID NO: 165333 - DNA, 8 bp, Unknown
  misc_feature (1)..( 8): Result.004 file - promoters50/1377687
aaaccaag

SEQ ID NO: 165334 - DNA, 8 bp, Unknown
  misc_feature (1)..( 8): Result.004 file - promoters50/1377687
aaaaaaat

SEQ ID NO: 165335 - DNA, 7 bp, Unknown
  misc_feature (1)..( 7): Result.004 file - promoters50/1377687
cttttct

SEQ ID NO: 165336 - DNA, 7 bp, Unknown
  misc_feature (1)..( 7): Result.004 file - promoters50/1377687
cttatct

SEQ ID NO: 165337 - DNA, 7 bp, Unknown
  misc_feature (1)..( 7): Result.004 file - promoters50/1377714
gttatct

SEQ ID NO: 165338 - DNA, 15 bp, Unknown
  misc_feature (1)..( 15): Result.004 file - promoters50/1377714
gttacaattttttgt

SEQ ID NO: 165339 - DNA, 15 bp, Unknown
  misc_feature (1)..( 15): Result.004 file - promoters50/1377714
gttataatttttttg

SEQ ID NO: 165340 - DNA, 15 bp, Unknown
  misc_feature (1)..( 15): Result.004 file - promoters50/1377714
ctcaagatttgttgg

SEQ ID NO: 165341 - DNA, 15 bp, Unknown
  misc_feature (1)..( 15): Result.004 file - promoters50/1377714
ttattaattttaatt

SEQ ID NO: 165342 - DNA, 15 bp, Unknown
  misc_feature (1)..( 15): Result.004 file - promoters50/1377714
gaggtactttcttgt

SEQ ID NO: 165343 - DNA, 15 bp, Unknown
  misc_feature (1)..( 15): Result.004 file - promoters50/1377714
gttatgatttcttca

SEQ ID NO: 165344 - DNA, 15 bp, Unknown
  misc_feature (1)..( 15): Result.004 file - promoters50/1377714
tttatgcttttaaaa

SEQ ID NO: 165345 - DNA, 13 bp, Unknown
  misc_feature (1)..( 13): Result.004 file - promoters50/1377714
atcttgttatgtt

SEQ ID NO: 165346 - DNA, 13 bp, Unknown
  misc_feature (1)..( 13): Result.004 file - promoters50/1377714
atattgatataat

SEQ ID NO: 165347 - DNA, 13 bp, Unknown
  misc_feature (1)..( 13): Result.004 file - promoters50/1377714
gttttgttaatat

SEQ ID NO: 165348 - DNA, 13 bp, Unknown
  misc_feature (1)..( 13): Result.004 file - promoters50/1377714
tatatgagatagt

SEQ ID NO: 165349 - DNA, 13 bp, Unknown
  misc_feature (1)..( 13): Result.004 file - promoters50/1377714
gatgtgatattaa

SEQ ID NO: 165350 - DNA, 13 bp, Unknown
  misc_feature (1)..( 13): Result.004 file - promoters50/1377714
gaatcgagataca

SEQ ID NO: 165351 - DNA, 13 bp, Unknown
  misc_feature (1)..( 13): Result.004 file - promoters50/1377718
cggttgctaaata

SEQ ID NO: 165352 - DNA, 10 bp, Unknown
  misc_feature (1)..( 10): Result.004 file - promoters50/1377718
taaatttgct

SEQ ID NO: 165353 - DNA, 10 bp, Unknown
  misc_feature (1)..( 10): Result.004 file - promoters50/1377718
tgaatctgct

SEQ ID NO: 165354 - DNA, 10 bp, Unknown
  misc_feature (1)..( 10): Result.004 file - promoters50/1377734
taaatttaaa

SEQ ID NO: 165355 - DNA, 7 bp, Unknown
  misc_feature (1)..( 7): Result.004 file - promoters50/1377734
gtgactc

SEQ ID NO: 165356 - DNA, 7 bp, Unknown
  misc_feature (1)..( 7): Result.004 file - promoters50/1377734
ttgactc

SEQ ID NO: 165357 - DNA, 7 bp, Unknown
  misc_feature (1)..( 7): Result.004 file - promoters50/1377740
ttgacta

SEQ ID NO: 165358 - DNA, 7 bp, Unknown
  misc_feature (1)..( 7): Result.004 file - promoters50/1377740
gaaaatg

SEQ ID NO: 165359 - DNA, 7 bp, Unknown
  misc_feature (1)..( 7): Result.004 file - promoters50/1377740
taaaatg

SEQ ID NO: 165360 - DNA, 7 bp, Unknown
  misc_feature (1)..( 7): Result.004 file - promoters50/1377740
taatatg

SEQ ID NO: 165361 - DNA, 10 bp, Unknown
  misc_feature (1)..( 10): Result.004 file - promoters50/1377740
cacatattca

SEQ ID NO: 165362 - DNA, 10 bp, Unknown
  misc_feature (1)..( 10): Result.004 file - promoters50/1377740
cacatattta

SEQ ID NO: 165363 - DNA, 11 bp, Unknown
  misc_feature (1)..( 11): Result.004 file - promoters50/1377740
tgaatagttag

SEQ ID NO: 165364 - DNA, 11 bp, Unknown
  misc_feature (1)..( 11): Result.004 file - promoters50/1377740
ctgtcataatc

SEQ ID NO: 165365 - DNA, 11 bp, Unknown
  misc_feature (1)..( 11): Result.004 file - promoters50/1377740
atatcatcatc

SEQ ID NO: 165366 - DNA, 11 bp, Unknown
  misc_feature (1)..( 11): Result.004 file - promoters50/1377740
ctgtaatatgg

SEQ ID NO: 165367 - DNA, 9 bp, Unknown
  misc_feature (1)..( 9): Result.004 file - promoters50/1377740
ttaaaaaat

SEQ ID NO: 165368 - DNA, 9 bp, Unknown
  misc_feature (1)..( 9): Result.004 file - promoters50/1377740
acaaagaat

SEQ ID NO: 165369 - DNA, 9 bp, Unknown
  misc_feature (1)..( 9): Result.004 file - promoters50/1377835
ttaataaat

SEQ ID NO: 165370 - DNA, 7 bp, Unknown
  misc_feature (1)..( 7): Result.004 file - promoters50/1377835
aaaagaa

SEQ ID NO: 165371 - DNA, 7 bp, Unknown
  misc_feature (1)..( 7): Result.004 file - promoters50/1377835
aaaagat

SEQ ID NO: 165372 - DNA, 7 bp, Unknown
  misc_feature (1)..( 7): Result.004 file - promoters50/1377835
aaaaatt

SEQ ID NO: 165373 - DNA, 10 bp, Unknown
  misc_feature (1)..( 10): Result.004 file - promoters50/1377835
tgcttcctcc

SEQ ID NO: 165374 - DNA, 10 bp, Unknown
  misc_feature (1)..( 10): Result.004 file - promoters50/1377835
tttttcttcc

SEQ ID NO: 165375 - DNA, 10 bp, Unknown
  misc_feature (1)..( 10): Result.004 file - promoters50/1377835
tttttgttcg

SEQ ID NO: 165376 - DNA, 10 bp, Unknown
  misc_feature (1)..( 10): Result.004 file - promoters50/1377835
ctaaatattt

SEQ ID NO: 165377 - DNA, 10 bp, Unknown
  misc_feature (1)..( 10): Result.004 file - promoters50/1377835
gtaaaaattt

SEQ ID NO: 165378 - DNA, 10 bp, Unknown
  misc_feature (1)..( 10): Result.004 file - promoters50/1377835
gtacaaagta

SEQ ID NO: 165379 - DNA, 11 bp, Unknown
  misc_feature (1)..( 11): Result.004 file - promoters50/1377835
caaagtaattg

SEQ ID NO: 165380 - DNA, 11 bp, Unknown
  misc_feature (1)..( 11): Result.004 file - promoters50/1377835
caaactaattt

SEQ ID NO: 165381 - DNA, 11 bp, Unknown
  misc_feature (1)..( 11): Result.004 file - promoters50/1377835
atcactaattt

SEQ ID NO: 165382 - DNA, 12 bp, Unknown
  misc_feature (1)..( 12): Result.004 file - promoters50/1377835
agaaaacaaaat

SEQ ID NO: 165383 - DNA, 12 bp, Unknown
  misc_feature (1)..( 12): Result.004 file - promoters50/1377835
ttagaactaaat

SEQ ID NO: 165384 - DNA, 12 bp, Unknown
  misc_feature (1)..( 12): Result.004 file - promoters50/1377835
agaaaacaatca

SEQ ID NO: 165385 - DNA, 8 bp, Unknown
  misc_feature (1)..( 8): Result.004 file - promoters50/1377835
acaaaaac

SEQ ID NO: 165386 - DNA, 8 bp, Unknown
  misc_feature (1)..( 8): Result.004 file - promoters50/1377835
acaaaaca

SEQ ID NO: 165387 - DNA, 8 bp, Unknown
  misc_feature (1)..( 8): Result.004 file - promoters50/1377835
acacaaca

SEQ ID NO: 165388 - DNA, 19 bp, Unknown
  misc_feature (1)..( 19): Result.004 file - promoters50/1377835
tttaattggtcaaaagaaa

SEQ ID NO: 165389 - DNA, 19 bp, Unknown
  misc_feature (1)..( 19): Result.004 file - promoters50/1377835
tctttttgctcagatttct

SEQ ID NO: 165390 - DNA, 19 bp, Unknown
  misc_feature (1)..( 19): Result.004 file - promoters50/1377835
tttaattggtcaacagaaa

SEQ ID NO: 165391 - DNA, 7 bp, Unknown
  misc_feature (1)..( 7): Result.004 file - promoters50/1377835
ccactaa

SEQ ID NO: 165392 - DNA, 7 bp, Unknown
  misc_feature (1)..( 7): Result.004 file - promoters50/1377835
ccattaa

SEQ ID NO: 165393 - DNA, 7 bp, Unknown
  misc_feature (1)..( 7): Result.004 file - promoters50/1377835
tcactaa

SEQ ID NO: 165394 - DNA, 9 bp, Unknown
  misc_feature (1)..( 9): Result.004 file - promoters50/1377835
agataaaaa

SEQ ID NO: 165395 - DNA, 9 bp, Unknown
  misc_feature (1)..( 9): Result.004 file - promoters50/1377835
ttataaaac

SEQ ID NO: 165396 - DNA, 9 bp, Unknown
  misc_feature (1)..( 9): Result.004 file - promoters50/1377835
agagaaaaa

SEQ ID NO: 165397 - DNA, 9 bp, Unknown
  misc_feature (1)..( 9): Result.004 file - promoters50/1377835
cttattttt

SEQ ID NO: 165398 - DNA, 9 bp, Unknown
  misc_feature (1)..( 9): Result.004 file - promoters50/1377835
cttagtttt

SEQ ID NO: 165399 - DNA, 9 bp, Unknown
  misc_feature (1)..( 9): Result.004 file - promoters50/1377847
atcattttt

SEQ ID NO: 165400 - DNA, 11 bp, Unknown
  misc_feature (1)..( 11): Result.004 file - promoters50/1377847
aaaaccaaacc

SEQ ID NO: 165401 - DNA, 11 bp, Unknown
  misc_feature (1)..( 11): Result.004 file - promoters50/1377847
ttgaccaaacg

SEQ ID NO: 165402 - DNA, 11 bp, Unknown
  misc_feature (1)..( 11): Result.004 file - promoters50/1377847
aaaatcaaacc

SEQ ID NO: 165403 - DNA, 11 bp, Unknown
  misc_feature (1)..( 11): Result.004 file - promoters50/1377847
cacaccaaatg

SEQ ID NO: 165404 - DNA, 11 bp, Unknown
  misc_feature (1)..( 11): Result.004 file - promoters50/1377847
gtgatataatt

SEQ ID NO: 165405 - DNA, 11 bp, Unknown
  misc_feature (1)..( 11): Result.004 file - promoters50/1377847
tatttaaaatc

SEQ ID NO: 165406 - DNA, 14 bp, Unknown
  misc_feature (1)..( 14): Result.004 file - promoters50/1377847
aattctcttccttt

SEQ ID NO: 165407 - DNA, 14 bp, Unknown
  misc_feature (1)..( 14): Result.004 file - promoters50/1377847
ttttctctttcatc

SEQ ID NO: 165408 - DNA, 14 bp, Unknown
  misc_feature (1)..( 14): Result.004 file - promoters50/1377847
tggtctctttttct

SEQ ID NO: 165409 - DNA, 14 bp, Unknown
  misc_feature (1)..( 14): Result.004 file - promoters50/1377847
atgcttcttttaca

SEQ ID NO: 165410 - DNA, 14 bp, Unknown
  misc_feature (1)..( 14): Result.004 file - promoters50/1377847
tttcctcttaaaac

SEQ ID NO: 165411 - DNA, 14 bp, Unknown
  misc_feature (1)..( 14): Result.004 file - promoters50/1377847
ctttctctcattcc

SEQ ID NO: 165412 - DNA, 14 bp, Unknown
  misc_feature (1)..( 14): Result.004 file - promoters50/1377847
aattctctgatcaa

SEQ ID NO: 165413 - DNA, 14 bp, Unknown
  misc_feature (1)..( 14): Result.004 file - promoters50/1377847
tccgctcctaagaa

SEQ ID NO: 165414 - DNA, 10 bp, Unknown
  misc_feature (1)..( 10): Result.004 file - promoters50/1377847
ttaatcaatg

SEQ ID NO: 165415 - DNA, 10 bp, Unknown
  misc_feature (1)..( 10): Result.004 file - promoters50/1377847
ccaatgaatc

SEQ ID NO: 165416 - DNA, 10 bp, Unknown
  misc_feature (1)..( 10): Result.004 file - promoters50/1377847
aaaatcaaga

SEQ ID NO: 165417 - DNA, 10 bp, Unknown
  misc_feature (1)..( 10): Result.004 file - promoters50/1377847
ataataaaga

SEQ ID NO: 165418 - DNA, 10 bp, Unknown
  misc_feature (1)..( 10): Result.004 file - promoters50/1377847
aaaaagaaat

SEQ ID NO: 165419 - DNA, 10 bp, Unknown
  misc_feature (1)..( 10): Result.004 file - promoters50/1377847
taaataagaa

SEQ ID NO: 165420 - DNA, 10 bp, Unknown
  misc_feature (1)..( 10): Result.004 file - promoters50/1377847
gaaaacaatc

SEQ ID NO: 165421 - DNA, 13 bp, Unknown
  misc_feature (1)..( 13): Result.004 file - promoters50/1377847
ctaaaaaagtcac

SEQ ID NO: 165422 - DNA, 13 bp, Unknown
  misc_feature (1)..( 13): Result.004 file - promoters50/1377847
atcacaaagtcga

SEQ ID NO: 165423 - DNA, 13 bp, Unknown
  misc_feature (1)..( 13): Result.004 file - promoters50/1377847
aaattaaaatcaa

SEQ ID NO: 165424 - DNA, 12 bp, Unknown
  misc_feature (1)..( 12): Result.004 file - promoters50/1377847
taataaagagaa

SEQ ID NO: 165425 - DNA, 12 bp, Unknown
  misc_feature (1)..( 12): Result.004 file - promoters50/1377847
aaaaaaagaaat

SEQ ID NO: 165426 - DNA, 13 bp, Unknown
  misc_feature (1)..( 13): Result.004 file - promoters50/1377847
ttaaataagaata

SEQ ID NO: 165427 - DNA, 14 bp, Unknown
  misc_feature (1)..( 14): Result.004 file - promoters50/1377847
aatcacaatgtcga

SEQ ID NO: 165428 - DNA, 13 bp, Unknown
  misc_feature (1)..( 13): Result.004 file - promoters50/1377847
tcctttatatata

SEQ ID NO: 165429 - DNA, 13 bp, Unknown
  misc_feature (1)..( 13): Result.004 file - promoters50/1377847
atgtgtataaata

SEQ ID NO: 165430 - DNA, 13 bp, Unknown
  misc_feature (1)..( 13): Result.004 file - promoters50/1377847
tccattatatata

SEQ ID NO: 165431 - DNA, 13 bp, Unknown
  misc_feature (1)..( 13): Result.004 file - promoters50/1377847
acatgtatatata

SEQ ID NO: 165432 - DNA, 13 bp, Unknown
  misc_feature (1)..( 13): Result.004 file - promoters50/1377847
acctttataaact

SEQ ID NO: 165433 - DNA, 13 bp, Unknown
  misc_feature (1)..( 13): Result.004 file - promoters50/1377893
cgccttaaaaacc

SEQ ID NO: 165434 - DNA, 7 bp, Unknown
  misc_feature (1)..( 7): Result.004 file - promoters50/1377893
gttaaag

SEQ ID NO: 165435 - DNA, 7 bp, Unknown
  misc_feature (1)..( 7): Result.004 file - promoters50/1377893
attaaag

SEQ ID NO: 165436 - DNA, 7 bp, Unknown
  misc_feature (1)..( 7): Result.004 file - promoters50/1377929
tataaaa

SEQ ID NO: 165437 - DNA, 11 bp, Unknown
  misc_feature (1)..( 11): Result.004 file - promoters50/1377929
atacttatgtg

SEQ ID NO: 165438 - DNA, 11 bp, Unknown
  misc_feature (1)..( 11): Result.004 file - promoters50/1377929
ttacttaataa

SEQ ID NO: 165439 - DNA, 11 bp, Unknown
  misc_feature (1)..( 11): Result.004 file - promoters50/1378049
ttaattactaa

SEQ ID NO: 165440 - DNA, 13 bp, Unknown
  misc_feature (1)..( 13): Result.004 file - promoters50/1378049
aaacaaatgtttg

SEQ ID NO: 165441 - DNA, 13 bp, Unknown
  misc_feature (1)..( 13): Result.004 file - promoters50/1378049
aaacaaacgtgga

SEQ ID NO: 165442 - DNA, 13 bp, Unknown
  misc_feature (1)..( 13): Result.004 file - promoters50/1378049
aaataaatttttg

SEQ ID NO: 165443 - DNA, 13 bp, Unknown
  misc_feature (1)..( 13): Result.004 file - promoters50/1378049
taactgatttttc

SEQ ID NO: 165444 - DNA, 13 bp, Unknown
  misc_feature (1)..( 13): Result.004 file - promoters50/1378049
atacatatactgt

SEQ ID NO: 165445 - DNA, 13 bp, Unknown
  misc_feature (1)..( 13): Result.004 file - promoters50/1378049
aaataaactcatt

SEQ ID NO: 165446 - DNA, 8 bp, Unknown
  misc_feature (1)..( 8): Result.004 file - promoters50/1378049
aaaatttc

SEQ ID NO: 165447 - DNA, 8 bp, Unknown
  misc_feature (1)..( 8): Result.004 file - promoters50/1378049
aaaattga

SEQ ID NO: 165448 - DNA, 8 bp, Unknown
  misc_feature (1)..( 8): Result.004 file - promoters50/1378049
aaaattaa

SEQ ID NO: 165449 - DNA, 8 bp, Unknown
  misc_feature (1)..( 8): Result.004 file - promoters50/1378049
aaacttta

SEQ ID NO: 165450 - DNA, 9 bp, Unknown
  misc_feature (1)..( 9): Result.004 file - promoters50/1378049
aaatattaa

SEQ ID NO: 165451 - DNA, 9 bp, Unknown
  misc_feature (1)..( 9): Result.004 file - promoters50/1378049
taaagttaa

SEQ ID NO: 165452 - DNA, 11 bp, Unknown
  misc_feature (1)..( 11): Result.004 file - promoters50/1378049
taatatttcat

SEQ ID NO: 165453 - DNA, 11 bp, Unknown
  misc_feature (1)..( 11): Result.004 file - promoters50/1378049
atttatttcct

SEQ ID NO: 165454 - DNA, 11 bp, Unknown
  misc_feature (1)..( 11): Result.004 file - promoters50/1378049
aagaattttta

SEQ ID NO: 165455 - DNA, 11 bp, Unknown
  misc_feature (1)..( 11): Result.004 file - promoters50/1378049
taatatttaga

SEQ ID NO: 165456 - DNA, 11 bp, Unknown
  misc_feature (1)..( 11): Result.004 file - promoters50/1378049
aaaaataaata

SEQ ID NO: 165457 - DNA, 11 bp, Unknown
  misc_feature (1)..( 11): Result.004 file - promoters50/1378049
tgttatttttt

SEQ ID NO: 165458 - DNA, 11 bp, Unknown
  misc_feature (1)..( 11): Result.004 file - promoters50/1378049
tgtgattcgtt

SEQ ID NO: 165459 - DNA, 13 bp, Unknown
  misc_feature (1)..( 13): Result.004 file - promoters50/1378049
atcacttggtaaa

SEQ ID NO: 165460 - DNA, 13 bp, Unknown
  misc_feature (1)..( 13): Result.004 file - promoters50/1378049
cagcggtgggaaa

SEQ ID NO: 165461 - DNA, 13 bp, Unknown
  misc_feature (1)..( 13): Result.004 file - promoters50/1378049
ttaactttgtact

SEQ ID NO: 165462 - DNA, 13 bp, Unknown
  misc_feature (1)..( 13): Result.004 file - promoters50/1378049
ttaaccttgagtt

SEQ ID NO: 165463 - DNA, 13 bp, Unknown
  misc_feature (1)..( 13): Result.004 file - promoters50/1378049
gtcaacttgtaca

SEQ ID NO: 165464 - DNA, 13 bp, Unknown
  misc_feature (1)..( 13): Result.004 file - promoters50/1378049
gaaactttatgaa

SEQ ID NO: 165465 - DNA, 10 bp, Unknown
  misc_feature (1)..( 10): Result.004 file - promoters50/1378049
caatgatatt

SEQ ID NO: 165466 - DNA, 10 bp, Unknown
  misc_feature (1)..( 10): Result.004 file - promoters50/1378049
gtttgatata

SEQ ID NO: 165467 - DNA, 10 bp, Unknown
  misc_feature (1)..( 10): Result.004 file - promoters50/1378049
aaatgttatt

SEQ ID NO: 165468 - DNA, 10 bp, Unknown
  misc_feature (1)..( 10): Result.004 file - promoters50/1378049
aaatgtcaac

SEQ ID NO: 165469 - DNA, 10 bp, Unknown
  misc_feature (1)..( 10): Result.004 file - promoters50/1378049
atttgctatc

SEQ ID NO: 165470 - DNA, 10 bp, Unknown
  misc_feature (1)..( 10): Result.004 file - promoters50/1378049
tttttctata

SEQ ID NO: 165471 - DNA, 9 bp, Unknown
  misc_feature (1)..( 9): Result.004 file - promoters50/1378049
gataatatt

SEQ ID NO: 165472 - DNA, 9 bp, Unknown
  misc_feature (1)..( 9): Result.004 file - promoters50/1378049
aataataac

SEQ ID NO: 165473 - DNA, 9 bp, Unknown
  misc_feature (1)..( 9): Result.004 file - promoters50/1378049
aataaaatt

SEQ ID NO: 165474 - DNA, 9 bp, Unknown
  misc_feature (1)..( 9): Result.004 file - promoters50/1378049
aaaaataaa

SEQ ID NO: 165475 - DNA, 9 bp, Unknown
  misc_feature (1)..( 9): Result.004 file - promoters50/1378049
taaattaga

SEQ ID NO: 165476 - DNA, 9 bp, Unknown
  misc_feature (1)..( 9): Result.004 file - promoters50/1378061
agtactaat

SEQ ID NO: 165477 - DNA, 9 bp, Unknown
  misc_feature (1)..( 9): Result.004 file - promoters50/1378061
tttgttttc

SEQ ID NO: 165478 - DNA, 9 bp, Unknown
  misc_feature (1)..( 9): Result.004 file - promoters50/1378061
tttattttt

SEQ ID NO: 165479 - DNA, 9 bp, Unknown
  misc_feature (1)..( 9): Result.004 file - promoters50/1378061
ttttttttc

SEQ ID NO: 165480 - DNA, 9 bp, Unknown
  misc_feature (1)..( 9): Result.004 file - promoters50/1378061
aagtaaatt

SEQ ID NO: 165481 - DNA, 9 bp, Unknown
  misc_feature (1)..( 9): Result.004 file - promoters50/1378061
atgtatatt

SEQ ID NO: 165482 - DNA, 9 bp, Unknown
  misc_feature (1)..( 9): Result.004 file - promoters50/1378061
atgtatata

SEQ ID NO: 165483 - DNA, 10 bp, Unknown
  misc_feature (1)..( 10): Result.004 file - promoters50/1378061
tattagattt

SEQ ID NO: 165484 - DNA, 10 bp, Unknown
  misc_feature (1)..( 10): Result.004 file - promoters50/1378061
tattaaattt

SEQ ID NO: 165485 - DNA, 10 bp, Unknown
  misc_feature (1)..( 10): Result.004 file - promoters50/1378061
gagaaaattg

SEQ ID NO: 165486 - DNA, 9 bp, Unknown
  misc_feature (1)..( 9): Result.004 file - promoters50/1378061
aaccatata

SEQ ID NO: 165487 - DNA, 9 bp, Unknown
  misc_feature (1)..( 9): Result.004 file - promoters50/1378061
aacaataaa

SEQ ID NO: 165488 - DNA, 9 bp, Unknown
  misc_feature (1)..( 9): Result.004 file - promoters50/1378061
ctccaaata

SEQ ID NO: 165489 - DNA, 9 bp, Unknown
  misc_feature (1)..( 9): Result.004 file - promoters50/1378061
aacatttat

SEQ ID NO: 165490 - DNA, 9 bp, Unknown
  misc_feature (1)..( 9): Result.004 file - promoters50/1378061
gttatttat

SEQ ID NO: 165491 - DNA, 9 bp, Unknown
  misc_feature (1)..( 9): Result.004 file - promoters50/1378061
aacttttaa

SEQ ID NO: 165492 - DNA, 14 bp, Unknown
  misc_feature (1)..( 14): Result.004 file - promoters50/1378061
gtgacattcagttg

SEQ ID NO: 165493 - DNA, 14 bp, Unknown
  misc_feature (1)..( 14): Result.004 file - promoters50/1378061
gtgatattcatttg

SEQ ID NO: 165494 - DNA, 14 bp, Unknown
  misc_feature (1)..( 14): Result.004 file - promoters50/1378078
aaaaaattcatttc

SEQ ID NO: 165495 - DNA, 9 bp, Unknown
  misc_feature (1)..( 9): Result.004 file - promoters50/1378078
taatttttg

SEQ ID NO: 165496 - DNA, 9 bp, Unknown
  misc_feature (1)..( 9): Result.004 file - promoters50/1378078
taatttttg

SEQ ID NO: 165497 - DNA, 9 bp, Unknown
  misc_feature (1)..( 9): Result.004 file - promoters50/1378088
taaatttta

SEQ ID NO: 165498 - DNA, 10 bp, Unknown
  misc_feature (1)..( 10): Result.004 file - promoters50/1378088
caaaatttta

SEQ ID NO: 165499 - DNA, 10 bp, Unknown
  misc_feature (1)..( 10): Result.004 file - promoters50/1378088
aaaaattggg

SEQ ID NO: 165500 - DNA, 10 bp, Unknown
  misc_feature (1)..( 10): Result.004 file - promoters50/1378088
taaagtttta

SEQ ID NO: 165501 - DNA, 11 bp, Unknown
  misc_feature (1)..( 11): Result.004 file - promoters50/1378088
taataatcctt

SEQ ID NO: 165502 - DNA, 11 bp, Unknown
  misc_feature (1)..( 11): Result.004 file - promoters50/1378088
caaacattaca

SEQ ID NO: 165503 - DNA, 11 bp, Unknown
  misc_feature (1)..( 11): Result.004 file - promoters50/1378088
actacagtact

SEQ ID NO: 165504 - DNA, 12 bp, Unknown
  misc_feature (1)..( 12): Result.004 file - promoters50/1378088
aaaaattcggat

SEQ ID NO: 165505 - DNA, 12 bp, Unknown
  misc_feature (1)..( 12): Result.004 file - promoters50/1378088
caaaattgaatc

SEQ ID NO: 165506 - DNA, 12 bp, Unknown
  misc_feature (1)..( 12): Result.004 file - promoters50/1378088
aaaaatccttta

SEQ ID NO: 165507 - DNA, 12 bp, Unknown
  misc_feature (1)..( 12): Result.004 file - promoters50/1378088
gcaaattgtttt

SEQ ID NO: 165508 - DNA, 12 bp, Unknown
  misc_feature (1)..( 12): Result.004 file - promoters50/1378088
gtaaattatttt

SEQ ID NO: 165509 - DNA, 12 bp, Unknown
  misc_feature (1)..( 12): Result.004 file - promoters50/1378088
gtagatttggga

SEQ ID NO: 165510 - DNA, 10 bp, Unknown
  misc_feature (1)..( 10): Result.004 file - promoters50/1378088
aaaatctgga

SEQ ID NO: 165511 - DNA, 10 bp, Unknown
  misc_feature (1)..( 10): Result.004 file - promoters50/1378088
aaaatcatta

SEQ ID NO: 165512 - DNA, 10 bp, Unknown
  misc_feature (1)..( 10): Result.004 file - promoters50/1378088
aaaaacattg

SEQ ID NO: 165513 - DNA, 10 bp, Unknown
  misc_feature (1)..( 10): Result.004 file - promoters50/1378088
aaaaacatat

SEQ ID NO: 165514 - DNA, 10 bp, Unknown
  misc_feature (1)..( 10): Result.004 file - promoters50/1378088
caaattatta

SEQ ID NO: 165515 - DNA, 10 bp, Unknown
  misc_feature (1)..( 10): Result.004 file - promoters50/1378088
taaaacaatt

SEQ ID NO: 165516 - DNA, 10 bp, Unknown
  misc_feature (1)..( 10): Result.004 file - promoters50/1378088
aaaaaaagaa

SEQ ID NO: 165517 - DNA, 11 bp, Unknown
  misc_feature (1)..( 11): Result.004 file - promoters50/1378088
taaaaatctat

SEQ ID NO: 165518 - DNA, 11 bp, Unknown
  misc_feature (1)..( 11): Result.004 file - promoters50/1378088
taaaaattaga

SEQ ID NO: 165519 - DNA, 11 bp, Unknown
  misc_feature (1)..( 11): Result.004 file - promoters50/1378088
acaaaattaac

SEQ ID NO: 165520 - DNA, 11 bp, Unknown
  misc_feature (1)..( 11): Result.004 file - promoters50/1378088
actaaattagt

SEQ ID NO: 165521 - DNA, 11 bp, Unknown
  misc_feature (1)..( 11): Result.004 file - promoters50/1378088
gcttaatttaa

SEQ ID NO: 165522 - DNA, 11 bp, Unknown
  misc_feature (1)..( 11): Result.004 file - promoters50/1378088
ttttaatcaac

SEQ ID NO: 165523 - DNA, 10 bp, Unknown
  misc_feature (1)..( 10): Result.004 file - promoters50/1378088
aaaattttac

SEQ ID NO: 165524 - DNA, 10 bp, Unknown
  misc_feature (1)..( 10): Result.004 file - promoters50/1378088
ttaattttgg

SEQ ID NO: 165525 - DNA, 11 bp, Unknown
  misc_feature (1)..( 11): Result.004 file - promoters50/1378088
taaagttttaa

SEQ ID NO: 165526 - DNA, 11 bp, Unknown
  misc_feature (1)..( 11): Result.004 file - promoters50/1378088
tactattttac

SEQ ID NO: 165527 - DNA, 11 bp, Unknown
  misc_feature (1)..( 11): Result.004 file - promoters50/1378088
actaatttagc

SEQ ID NO: 165528 - DNA, 11 bp, Unknown
  misc_feature (1)..( 11): Result.004 file - promoters50/1378088
taaagtcacat

SEQ ID NO: 165529 - DNA, 10 bp, Unknown
  misc_feature (1)..( 10): Result.004 file - promoters50/1378088
attttataat

SEQ ID NO: 165530 - DNA, 10 bp, Unknown
  misc_feature (1)..( 10): Result.004 file - promoters50/1378088
tctttttaat

SEQ ID NO: 165531 - DNA, 10 bp, Unknown
  misc_feature (1)..( 10): Result.004 file - promoters50/1378088
actttaaaat

SEQ ID NO: 165532 - DNA, 10 bp, Unknown
  misc_feature (1)..( 10): Result.004 file - promoters50/1378088
attttatagg

SEQ ID NO: 165533 - DNA, 10 bp, Unknown
  misc_feature (1)..( 10): Result.004 file - promoters50/1378088
tagttataac

SEQ ID NO: 165534 - DNA, 10 bp, Unknown
  misc_feature (1)..( 10): Result.004 file - promoters50/1378088
cctttaaaca

SEQ ID NO: 165535 - DNA, 13 bp, Unknown
  misc_feature (1)..( 13): Result.004 file - promoters50/1378088
gttagaaataaaa

SEQ ID NO: 165536 - DNA, 13 bp, Unknown
  misc_feature (1)..( 13): Result.004 file - promoters50/1378088
gttaaaaactaaa

SEQ ID NO: 165537 - DNA, 13 bp, Unknown
  misc_feature (1)..( 13): Result.004 file - promoters50/1378088
cttataaaacaat

SEQ ID NO: 165538 - DNA, 13 bp, Unknown
  misc_feature (1)..( 13): Result.004 file - promoters50/1378088
agtaaaaaaacaa

SEQ ID NO: 165539 - DNA, 13 bp, Unknown
  misc_feature (1)..( 13): Result.004 file - promoters50/1378088
gcgtgaaatacta

SEQ ID NO: 165540 - DNA, 13 bp, Unknown
  misc_feature (1)..( 13): Result.004 file - promoters50/1378088
attataagaagaa

SEQ ID NO: 165541 - DNA, 13 bp, Unknown
  misc_feature (1)..( 13): Result.004 file - promoters50/1378088
attacaaaaagaa

SEQ ID NO: 165542 - DNA, 13 bp, Unknown
  misc_feature (1)..( 13): Result.004 file - promoters50/1378088
taaaaattgggtt

SEQ ID NO: 165543 - DNA, 13 bp, Unknown
  misc_feature (1)..( 13): Result.004 file - promoters50/1378088
taaaaagagaaaa

SEQ ID NO: 165544 - DNA, 13 bp, Unknown
  misc_feature (1)..( 13): Result.004 file - promoters50/1378088
taataatccttat

SEQ ID NO: 165545 - DNA, 13 bp, Unknown
  misc_feature (1)..( 13): Result.004 file - promoters50/1378088
taaaaaaacaatt

SEQ ID NO: 165546 - DNA, 13 bp, Unknown
  misc_feature (1)..( 13): Result.004 file - promoters50/1378088
caaacattacaaa

SEQ ID NO: 165547 - DNA, 13 bp, Unknown
  misc_feature (1)..( 13): Result.004 file - promoters50/1378088
taagaagaaaaaa

SEQ ID NO: 165548 - DNA, 13 bp, Unknown
  misc_feature (1)..( 13): Result.004 file - promoters50/1378088
actacagtactat

SEQ ID NO: 165549 - DNA, 8 bp, Unknown
  misc_feature (1)..( 8): Result.004 file - promoters50/1378088
aatcatat

SEQ ID NO: 165550 - DNA, 8 bp, Unknown
  misc_feature (1)..( 8): Result.004 file - promoters50/1378088
tttcatat

SEQ ID NO: 165551 - DNA, 8 bp, Unknown
  misc_feature (1)..( 8): Result.004 file - promoters50/1378088
aattataa

SEQ ID NO: 165552 - DNA, 8 bp, Unknown
  misc_feature (1)..( 8): Result.004 file - promoters50/1378088
acttataa

SEQ ID NO: 165553 - DNA, 8 bp, Unknown
  misc_feature (1)..( 8): Result.004 file - promoters50/1378088
tttaatag

SEQ ID NO: 165554 - DNA, 9 bp, Unknown
  misc_feature (1)..( 9): Result.004 file - promoters50/1378088
gattagtag

SEQ ID NO: 165555 - DNA, 13 bp, Unknown
  misc_feature (1)..( 13): Result.004 file - promoters50/1378088
ttagaagaagtta

SEQ ID NO: 165556 - DNA, 13 bp, Unknown
  misc_feature (1)..( 13): Result.004 file - promoters50/1378088
ttataagaagaaa

SEQ ID NO: 165557 - DNA, 13 bp, Unknown
  misc_feature (1)..( 13): Result.004 file - promoters50/1378088
taaaaagagaaaa

SEQ ID NO: 165558 - DNA, 13 bp, Unknown
  misc_feature (1)..( 13): Result.004 file - promoters50/1378088
taaaaactttgtt

SEQ ID NO: 165559 - DNA, 13 bp, Unknown
  misc_feature (1)..( 13): Result.004 file - promoters50/1378088
caaaaagaaaaaa

SEQ ID NO: 165560 - DNA, 13 bp, Unknown
  misc_feature (1)..( 13): Result.004 file - promoters50/1378287
ttataaaacaatt

SEQ ID NO: 165561 - DNA, 20 bp, Unknown
  misc_feature (1)..( 20): Result.004 file - promoters50/1378287
aaaattgaaactttttagaa

SEQ ID NO: 165562 - DNA, 20 bp, Unknown
  misc_feature (1)..( 20): Result.004 file - promoters50/1378287
tgaatttaaagcttcacatt

SEQ ID NO: 165563 - DNA, 20 bp, Unknown
  misc_feature (1)..( 20): Result.004 file - promoters50/1378287
caaatcgaagaaagcagagg

SEQ ID NO: 165564 - DNA, 20 bp, Unknown
  misc_feature (1)..( 20): Result.004 file - promoters50/1378287
tgaatttgtaattaaccaat

SEQ ID NO: 165565 - DNA, 20 bp, Unknown
  misc_feature (1)..( 20): Result.004 file - promoters50/1378287
cttttttaaaaaactatata

SEQ ID NO: 165566 - DNA, 20 bp, Unknown
  misc_feature (1)..( 20): Result.004 file - promoters50/1378333
caattttaagaaagtatata

SEQ ID NO: 165567 - DNA, 7 bp, Unknown
  misc_feature (1)..( 7): Result.004 file - promoters50/1378333
gctaaaa

SEQ ID NO: 165568 - DNA, 7 bp, Unknown
  misc_feature (1)..( 7): Result.004 file - promoters50/1378333
gctgaaa

SEQ ID NO: 165569 - DNA, 7 bp, Unknown
  misc_feature (1)..( 7): Result.004 file - promoters50/1378357
tctgaaa

SEQ ID NO: 165570 - DNA, 9 bp, Unknown
  misc_feature (1)..( 9): Result.004 file - promoters50/1378357
gaggtagat

SEQ ID NO: 165571 - DNA, 9 bp, Unknown
  misc_feature (1)..( 9): Result.004 file - promoters50/1378357
gaggaagaa

SEQ ID NO: 165572 - DNA, 9 bp, Unknown
  misc_feature (1)..( 9): Result.004 file - promoters50/1378393
gaataagaa

SEQ ID NO: 165573 - DNA, 12 bp, Unknown
  misc_feature (1)..( 12): Result.004 file - promoters50/1378393
cggataagcaaa

SEQ ID NO: 165574 - DNA, 12 bp, Unknown
  misc_feature (1)..( 12): Result.004 file - promoters50/1378393
tagataagtaaa

SEQ ID NO: 165575 - DNA, 12 bp, Unknown
  misc_feature (1)..( 12): Result.004 file - promoters50/1378393
cagaaaagaaat

SEQ ID NO: 165576 - DNA, 12 bp, Unknown
  misc_feature (1)..( 12): Result.004 file - promoters50/1378393
aaaaaaaataaa

SEQ ID NO: 165577 - DNA, 12 bp, Unknown
  misc_feature (1)..( 12): Result.004 file - promoters50/1378393
ttgtaaagattt

SEQ ID NO: 165578 - DNA, 12 bp, Unknown
  misc_feature (1)..( 12): Result.004 file - promoters50/1378393
aagaaaagaaag

SEQ ID NO: 165579 - DNA, 12 bp, Unknown
  misc_feature (1)..( 12): Result.004 file - promoters50/1378393
aagaaaatctgc

SEQ ID NO: 165580 - DNA, 9 bp, Unknown
  misc_feature (1)..( 9): Result.004 file - promoters50/1378393
taaaataaa

SEQ ID NO: 165581 - DNA, 9 bp, Unknown
  misc_feature (1)..( 9): Result.004 file - promoters50/1378393
aaaaagaaa

SEQ ID NO: 165582 - DNA, 9 bp, Unknown
  misc_feature (1)..( 9): Result.004 file - promoters50/1378393
caaactaaa

SEQ ID NO: 165583 - DNA, 9 bp, Unknown
  misc_feature (1)..( 9): Result.004 file - promoters50/1378393
caatctata

SEQ ID NO: 165584 - DNA, 10 bp, Unknown
  misc_feature (1)..( 10): Result.004 file - promoters50/1378393
caaaatgaaa

SEQ ID NO: 165585 - DNA, 10 bp, Unknown
  misc_feature (1)..( 10): Result.004 file - promoters50/1378400
ataaattaat

SEQ ID NO: 165586 - DNA, 8 bp, Unknown
  misc_feature (1)..( 8): Result.004 file - promoters50/1378400
gaaaagaa

SEQ ID NO: 165587 - DNA, 8 bp, Unknown
  misc_feature (1)..( 8): Result.004 file - promoters50/1378400
gaagagaa

SEQ ID NO: 165588 - DNA, 8 bp, Unknown
  misc_feature (1)..( 8): Result.004 file - promoters50/1378400
gaaaagaa

SEQ ID NO: 165589 - DNA, 14 bp, Unknown
  misc_feature (1)..( 14): Result.004 file - promoters50/1378400
agagagagagagag

SEQ ID NO: 165590 - DNA, 14 bp, Unknown
  misc_feature (1)..( 14): Result.004 file - promoters50/1378400
agagagagaggtga

SEQ ID NO: 165591 - DNA, 14 bp, Unknown
  misc_feature (1)..( 14): Result.004 file - promoters50/1378400
agagagagagagag

SEQ ID NO: 165592 - DNA, 8 bp, Unknown
  misc_feature (1)..( 8): Result.004 file - promoters50/1378400
gaagagaa

SEQ ID NO: 165593 - DNA, 8 bp, Unknown
  misc_feature (1)..( 8): Result.004 file - promoters50/1378400
gaaaagaa

SEQ ID NO: 165594 - DNA, 8 bp, Unknown
  misc_feature (1)..( 8): Result.004 file - promoters50/1378458
gaagagaa

SEQ ID NO: 165595 - DNA, 8 bp, Unknown
  misc_feature (1)..( 8): Result.004 file - promoters50/1378458
gaagcaaa

SEQ ID NO: 165596 - DNA, 8 bp, Unknown
  misc_feature (1)..( 8): Result.004 file - promoters50/1378458
aaagaaaa

SEQ ID NO: 165597 - DNA, 8 bp, Unknown
  misc_feature (1)..( 8): Result.004 file - promoters50/1378528
aaagaata

SEQ ID NO: 165598 - DNA, 13 bp, Unknown
  misc_feature (1)..( 13): Result.004 file - promoters50/1378528
tcttgtaaataat

SEQ ID NO: 165599 - DNA, 7 bp, Unknown
  misc_feature (1)..( 7): Result.004 file - promoters50/1378528
aaataaa

SEQ ID NO: 165600 - DNA, 13 bp, Unknown
  misc_feature (1)..( 13): Result.004 file - promoters50/1378528
tcttttaattaaa

SEQ ID NO: 165601 - DNA, 13 bp, Unknown
  misc_feature (1)..( 13): Result.004 file - promoters50/1378528
gatattaaataat

SEQ ID NO: 165602 - DNA, 13 bp, Unknown
  misc_feature (1)..( 13): Result.004 file - promoters50/1378528
gcttttaattaaa

SEQ ID NO: 165603 - DNA, 13 bp, Unknown
  misc_feature (1)..( 13): Result.004 file - promoters50/1378528
tttttgaattcca

SEQ ID NO: 165604 - DNA, 13 bp, Unknown
  misc_feature (1)..( 13): Result.004 file - promoters50/1378528
taattttgaaaag

SEQ ID NO: 165605 - DNA, 13 bp, Unknown
  misc_feature (1)..( 13): Result.004 file - promoters50/1378528
aaaaaatgaaaaa

SEQ ID NO: 165606 - DNA, 13 bp, Unknown
  misc_feature (1)..( 13): Result.004 file - promoters50/1378528
ttttaattaaatg

SEQ ID NO: 165607 - DNA, 11 bp, Unknown
  misc_feature (1)..( 11): Result.004 file - promoters50/1378528
ttatcgaaaaa

SEQ ID NO: 165608 - DNA, 13 bp, Unknown
  misc_feature (1)..( 13): Result.004 file - promoters50/1378528
aaataatcaaata

SEQ ID NO: 165609 - DNA, 13 bp, Unknown
  misc_feature (1)..( 13): Result.004 file - promoters50/1378528
ttttaattaaacc

SEQ ID NO: 165610 - DNA, 13 bp, Unknown
  misc_feature (1)..( 13): Result.004 file - promoters50/1378528
aaataattttgaa

SEQ ID NO: 165611 - DNA, 13 bp, Unknown
  misc_feature (1)..( 13): Result.004 file - promoters50/1378528
tagtaatattggt

SEQ ID NO: 165612 - DNA, 13 bp, Unknown
  misc_feature (1)..( 13): Result.004 file - promoters50/1378528
aaaagtttttgaa

SEQ ID NO: 165613 - DNA, 13 bp, Unknown
  misc_feature (1)..( 13): Result.004 file - promoters50/1378528
ttttaattaaatg

SEQ ID NO: 165614 - DNA, 13 bp, Unknown
  misc_feature (1)..( 13): Result.004 file - promoters50/1378528
atttaatgatatt

SEQ ID NO: 165615 - DNA, 13 bp, Unknown
  misc_feature (1)..( 13): Result.004 file - promoters50/1378528
ttttaattaaacc

SEQ ID NO: 165616 - DNA, 11 bp, Unknown
  misc_feature (1)..( 11): Result.004 file - promoters50/1378528
ataatttaaca

SEQ ID NO: 165617 - DNA, 11 bp, Unknown
  misc_feature (1)..( 11): Result.004 file - promoters50/1378528
gtaattttctt

SEQ ID NO: 165618 - DNA, 11 bp, Unknown
  misc_feature (1)..( 11): Result.004 file - promoters50/1378528
atagtttagaa

SEQ ID NO: 165619 - DNA, 11 bp, Unknown
  misc_feature (1)..( 11): Result.004 file - promoters50/1378528
atattttgatt

SEQ ID NO: 165620 - DNA, 11 bp, Unknown
  misc_feature (1)..( 11): Result.004 file - promoters50/1378528
atattgtgatt

SEQ ID NO: 165621 - DNA, 11 bp, Unknown
  misc_feature (1)..( 11): Result.004 file - promoters50/1378528
tgagtttatat

SEQ ID NO: 165622 - DNA, 9 bp, Unknown
  misc_feature (1)..( 9): Result.004 file - promoters50/1378528
aatttttac

SEQ ID NO: 165623 - DNA, 9 bp, Unknown
  misc_feature (1)..( 9): Result.004 file - promoters50/1378528
aattcttat

SEQ ID NO: 165624 - DNA, 9 bp, Unknown
  misc_feature (1)..( 9): Result.004 file - promoters50/1378528
aattttcta

SEQ ID NO: 165625 - DNA, 9 bp, Unknown
  misc_feature (1)..( 9): Result.004 file - promoters50/1378528
aattttgat

SEQ ID NO: 165626 - DNA, 9 bp, Unknown
  misc_feature (1)..( 9): Result.004 file - promoters50/1378528
gattgtctt

SEQ ID NO: 165627 - DNA, 9 bp, Unknown
  misc_feature (1)..( 9): Result.004 file - promoters50/1378558
tattctgat

SEQ ID NO: 165628 - DNA, 10 bp, Unknown
  misc_feature (1)..( 10): Result.004 file - promoters50/1378558
attttatttt

SEQ ID NO: 165629 - DNA, 10 bp, Unknown
  misc_feature (1)..( 10): Result.004 file - promoters50/1378558
attttgtttt

SEQ ID NO: 165630 - DNA, 10 bp, Unknown
  misc_feature (1)..( 10): Result.004 file - promoters50/1378558
aggttgttta

SEQ ID NO: 165631 - DNA, 9 bp, Unknown
  misc_feature (1)..( 9): Result.004 file - promoters50/1378558
acattttta

SEQ ID NO: 165632 - DNA, 9 bp, Unknown
  misc_feature (1)..( 9): Result.004 file - promoters50/1378558
gtattttta

SEQ ID NO: 165633 - DNA, 9 bp, Unknown
  misc_feature (1)..( 9): Result.004 file - promoters50/1378577
gtatcttta

SEQ ID NO: 165634 - DNA, 10 bp, Unknown
  misc_feature (1)..( 10): Result.004 file - promoters50/1378577
ttagcttctt

SEQ ID NO: 165635 - DNA, 10 bp, Unknown
  misc_feature (1)..( 10): Result.004 file - promoters50/1378577
ttatcttctt

SEQ ID NO: 165636 - DNA, 10 bp, Unknown
  misc_feature (1)..( 10): Result.004 file - promoters50/1378592
ttagctttaa

SEQ ID NO: 165637 - DNA, 13 bp, Unknown
  misc_feature (1)..( 13): Result.004 file - promoters50/1378592
tcatagtaagata

SEQ ID NO: 165638 - DNA, 13 bp, Unknown
  misc_feature (1)..( 13): Result.004 file - promoters50/1378592
tgatattaaatca

SEQ ID NO: 165639 - DNA, 13 bp, Unknown
  misc_feature (1)..( 13): Result.004 file - promoters50/1378592
atatactaatgat

SEQ ID NO: 165640 - DNA, 13 bp, Unknown
  misc_feature (1)..( 13): Result.004 file - promoters50/1378592
cagtagtgagatc

SEQ ID NO: 165641 - DNA, 13 bp, Unknown
  misc_feature (1)..( 13): Result.004 file - promoters50/1378592
gaatattaaatca

SEQ ID NO: 165642 - DNA, 13 bp, Unknown
  misc_feature (1)..( 13): Result.004 file - promoters50/1378592
gaacattggattt

SEQ ID NO: 165643 - DNA, 13 bp, Unknown
  misc_feature (1)..( 13): Result.004 file - promoters50/1378592
taactttaccaaa

SEQ ID NO: 165644 - DNA, 13 bp, Unknown
  misc_feature (1)..( 13): Result.004 file - promoters50/1378592
tggctttactata

SEQ ID NO: 165645 - DNA, 13 bp, Unknown
  misc_feature (1)..( 13): Result.004 file - promoters50/1378592
taaatttaaaact

SEQ ID NO: 165646 - DNA, 13 bp, Unknown
  misc_feature (1)..( 13): Result.004 file - promoters50/1378592
aaattttcccaaa

SEQ ID NO: 165647 - DNA, 13 bp, Unknown
  misc_feature (1)..( 13): Result.004 file - promoters50/1378592
taaatttaatttg

SEQ ID NO: 165648 - DNA, 13 bp, Unknown
  misc_feature (1)..( 13): Result.004 file - promoters50/1378622
aaaccctaattat

SEQ ID NO: 165649 - DNA, 14 bp, Unknown
  misc_feature (1)..( 14): Result.004 file - promoters50/1378622
ataaagatttaacc

SEQ ID NO: 165650 - DNA, 14 bp, Unknown
  misc_feature (1)..( 14): Result.004 file - promoters50/1378622
gataagattgccgt

SEQ ID NO: 165651 - DNA, 14 bp, Unknown
  misc_feature (1)..( 14): Result.004 file - promoters50/1378622
taaaagatttgatt

SEQ ID NO: 165652 - DNA, 14 bp, Unknown
  misc_feature (1)..( 14): Result.004 file - promoters50/1378622
cttgagataaaatt

SEQ ID NO: 165653 - DNA, 14 bp, Unknown
  misc_feature (1)..( 14): Result.004 file - promoters50/1378622
gatgagattagctg

SEQ ID NO: 165654 - DNA, 15 bp, Unknown
  misc_feature (1)..( 15): Result.004 file - promoters50/1378622
ttaaaaacttcttgc

SEQ ID NO: 165655 - DNA, 11 bp, Unknown
  misc_feature (1)..( 11): Result.004 file - promoters50/1378622
tttacaataat

SEQ ID NO: 165656 - DNA, 11 bp, Unknown
  misc_feature (1)..( 11): Result.004 file - promoters50/1378622
gttataattat

SEQ ID NO: 165657 - DNA, 11 bp, Unknown
  misc_feature (1)..( 11): Result.004 file - promoters50/1378622
gaaataattat

SEQ ID NO: 165658 - DNA, 11 bp, Unknown
  misc_feature (1)..( 11): Result.004 file - promoters50/1378622
gttttaactta

SEQ ID NO: 165659 - DNA, 11 bp, Unknown
  misc_feature (1)..( 11): Result.004 file - promoters50/1378622
gttttaacgag

SEQ ID NO: 165660 - DNA, 13 bp, Unknown
  misc_feature (1)..( 13): Result.004 file - promoters50/1378622
ataaaattataaa

SEQ ID NO: 165661 - DNA, 13 bp, Unknown
  misc_feature (1)..( 13): Result.004 file - promoters50/1378622
ccggaattttaac

SEQ ID NO: 165662 - DNA, 13 bp, Unknown
  misc_feature (1)..( 13): Result.004 file - promoters50/1378622
atacaatgatatt

SEQ ID NO: 165663 - DNA, 14 bp, Unknown
  misc_feature (1)..( 14): Result.004 file - promoters50/1378622
atccacttattaat

SEQ ID NO: 165664 - DNA, 14 bp, Unknown
  misc_feature (1)..( 14): Result.004 file - promoters50/1378622
ttaacctttgacca

SEQ ID NO: 165665 - DNA, 13 bp, Unknown
  misc_feature (1)..( 13): Result.004 file - promoters50/1378622
acaaataaaaatt

SEQ ID NO: 165666 - DNA, 13 bp, Unknown
  misc_feature (1)..( 13): Result.004 file - promoters50/1378622
cctcttaaatatt

SEQ ID NO: 165667 - DNA, 13 bp, Unknown
  misc_feature (1)..( 13): Result.004 file - promoters50/1378622
caaattaaagtcg

SEQ ID NO: 165668 - DNA, 13 bp, Unknown
  misc_feature (1)..( 13): Result.004 file - promoters50/1378622
tagcttgaatcaa

SEQ ID NO: 165669 - DNA, 13 bp, Unknown
  misc_feature (1)..( 13): Result.004 file - promoters50/1378622
atcgatgaatcct

SEQ ID NO: 165670 - DNA, 12 bp, Unknown
  misc_feature (1)..( 12): Result.004 file - promoters50/1378622
aaatacaataaa

SEQ ID NO: 165671 - DNA, 12 bp, Unknown
  misc_feature (1)..( 12): Result.004 file - promoters50/1378622
agataaaatttc

SEQ ID NO: 165672 - DNA, 12 bp, Unknown
  misc_feature (1)..( 12): Result.004 file - promoters50/1378622
agataagattgc

SEQ ID NO: 165673 - DNA, 12 bp, Unknown
  misc_feature (1)..( 12): Result.004 file - promoters50/1378622
tgatgagattag

SEQ ID NO: 165674 - DNA, 13 bp, Unknown
  misc_feature (1)..( 13): Result.004 file - promoters50/1378622
tttaaaaacttct

SEQ ID NO: 165675 - DNA, 16 bp, Unknown
  misc_feature (1)..( 16): Result.004 file - promoters50/1378622
attgattcaaaattct

SEQ ID NO: 165676 - DNA, 16 bp, Unknown
  misc_feature (1)..( 16): Result.004 file - promoters50/1378622
cttgaatcaatatttt

SEQ ID NO: 165677 - DNA, 16 bp, Unknown
  misc_feature (1)..( 16): Result.004 file - promoters50/1378622
gtgacaataaaagtct

SEQ ID NO: 165678 - DNA, 16 bp, Unknown
  misc_feature (1)..( 16): Result.004 file - promoters50/1378622
cttaaatatttttcat

SEQ ID NO: 165679 - DNA, 16 bp, Unknown
  misc_feature (1)..( 16): Result.004 file - promoters50/1378636
tttccatccatatgtt

SEQ ID NO: 165680 - DNA, 7 bp, Unknown
  misc_feature (1)..( 7): Result.004 file - promoters50/1378636
tttactt

SEQ ID NO: 165681 - DNA, 7 bp, Unknown
  misc_feature (1)..( 7): Result.004 file - promoters50/1378636
tttactc

SEQ ID NO: 165682 - DNA, 7 bp, Unknown
  misc_feature (1)..( 7): Result.004 file - promoters50/1378636
attactt

SEQ ID NO: 165683 - DNA, 8 bp, Unknown
  misc_feature (1)..( 8): Result.004 file - promoters50/1378636
tcaaattt

SEQ ID NO: 165684 - DNA, 8 bp, Unknown
  misc_feature (1)..( 8): Result.004 file - promoters50/1378636
ttaaattt

SEQ ID NO: 165685 - DNA, 8 bp, Unknown
  misc_feature (1)..( 8): Result.004 file - promoters50/1378636
tcatattg

SEQ ID NO: 165686 - DNA, 7 bp, Unknown
  misc_feature (1)..( 7): Result.004 file - promoters50/1378636
tgagaaa

SEQ ID NO: 165687 - DNA, 7 bp, Unknown
  misc_feature (1)..( 7): Result.004 file - promoters50/1378636
tgacaaa

SEQ ID NO: 165688 - DNA, 7 bp, Unknown
  misc_feature (1)..( 7): Result.004 file - promoters50/1378636
tgaaaaa

SEQ ID NO: 165689 - DNA, 8 bp, Unknown
  misc_feature (1)..( 8): Result.004 file - promoters50/1378636
aaaagaaa

SEQ ID NO: 165690 - DNA, 8 bp, Unknown
  misc_feature (1)..( 8): Result.004 file - promoters50/1378636
caaagaag

SEQ ID NO: 165691 - DNA, 8 bp, Unknown
  misc_feature (1)..( 8): Result.004 file - promoters50/1378692
aaaacaaa

SEQ ID NO: 165692 - DNA, 10 bp, Unknown
  misc_feature (1)..( 10): Result.004 file - promoters50/1378692
attttataat

SEQ ID NO: 165693 - DNA, 10 bp, Unknown
  misc_feature (1)..( 10): Result.004 file - promoters50/1378692
ctttcataaa

SEQ ID NO: 165694 - DNA, 11 bp, Unknown
  misc_feature (1)..( 11): Result.004 file - promoters50/1378692
tttctaataat

SEQ ID NO: 165695 - DNA, 11 bp, Unknown
  misc_feature (1)..( 11): Result.004 file - promoters50/1378692
tgatttataat

SEQ ID NO: 165696 - DNA, 11 bp, Unknown
  misc_feature (1)..( 11): Result.004 file - promoters50/1378692
ttattcataga

SEQ ID NO: 165697 - DNA, 11 bp, Unknown
  misc_feature (1)..( 11): Result.004 file - promoters50/1378788
ggatgtatgca

SEQ ID NO: 165698 - DNA, 7 bp, Unknown
  misc_feature (1)..( 7): Result.004 file - promoters50/1378788
attgaac

SEQ ID NO: 165699 - DNA, 7 bp, Unknown
  misc_feature (1)..( 7): Result.004 file - promoters50/1378788
tttgaac

SEQ ID NO: 165700 - DNA, 7 bp, Unknown
  misc_feature (1)..( 7): Result.004 file - promoters50/1378788
atttaac

SEQ ID NO: 165701 - DNA, 10 bp, Unknown
  misc_feature (1)..( 10): Result.004 file - promoters50/1378788
gattttctaa

SEQ ID NO: 165702 - DNA, 10 bp, Unknown
  misc_feature (1)..( 10): Result.004 file - promoters50/1378788
aatttactaa

SEQ ID NO: 165703 - DNA, 10 bp, Unknown
  misc_feature (1)..( 10): Result.004 file - promoters50/1378788
aatttagact

SEQ ID NO: 165704 - DNA, 9 bp, Unknown
  misc_feature (1)..( 9): Result.004 file - promoters50/1378788
cgtgtgttt

SEQ ID NO: 165705 - DNA, 9 bp, Unknown
  misc_feature (1)..( 9): Result.004 file - promoters50/1378788
cgtgtgtaa

SEQ ID NO: 165706 - DNA, 9 bp, Unknown
  misc_feature (1)..( 9): Result.004 file - promoters50/1378788
attgttttt

SEQ ID NO: 165707 - DNA, 12 bp, Unknown
  misc_feature (1)..( 12): Result.004 file - promoters50/1378788
cccatattttat

SEQ ID NO: 165708 - DNA, 12 bp, Unknown
  misc_feature (1)..( 12): Result.004 file - promoters50/1378788
tttataatttat

SEQ ID NO: 165709 - DNA, 12 bp, Unknown
  misc_feature (1)..( 12): Result.004 file - promoters50/1378800
tttattatttga

SEQ ID NO: 165710 - DNA, 8 bp, Unknown
  misc_feature (1)..( 8): Result.004 file - promoters50/1378800
gtttcttt

SEQ ID NO: 165711 - DNA, 8 bp, Unknown
  misc_feature (1)..( 8): Result.004 file - promoters50/1378800
gttttttt

SEQ ID NO: 165712 - DNA, 8 bp, Unknown
  misc_feature (1)..( 8): Result.004 file - promoters50/1378800
ttttcttt

SEQ ID NO: 165713 - DNA, 7 bp, Unknown
  misc_feature (1)..( 7): Result.004 file - promoters50/1378800
ctttctt

SEQ ID NO: 165714 - DNA, 7 bp, Unknown
  misc_feature (1)..( 7): Result.004 file - promoters50/1378800
ctttctt

SEQ ID NO: 165715 - DNA, 7 bp, Unknown
  misc_feature (1)..( 7): Result.004 file - promoters50/1378800
ttttctt

SEQ ID NO: 165716 - DNA, 8 bp, Unknown
  misc_feature (1)..( 8): Result.004 file - promoters50/1378800
tttaaaaa

SEQ ID NO: 165717 - DNA, 8 bp, Unknown
  misc_feature (1)..( 8): Result.004 file - promoters50/1378800
cataaaaa

SEQ ID NO: 165718 - DNA, 8 bp, Unknown
  misc_feature (1)..( 8): Result.004 file - promoters50/1378800
catataaa

SEQ ID NO: 165719 - DNA, 6 bp, Unknown
  misc_feature (1)..( 6): Result.004 file - promoters50/1378800
gttttt

SEQ ID NO: 165720 - DNA, 6 bp, Unknown
  misc_feature (1)..( 6): Result.004 file - promoters50/1378800
gttttt

SEQ ID NO: 165721 - DNA, 6 bp, Unknown
  misc_feature (1)..( 6): Result.004 file - promoters50/1378800
gttttt

SEQ ID NO: 165722 - DNA, 10 bp, Unknown
  misc_feature (1)..( 10): Result.004 file - promoters50/1378800
attttttaaa

SEQ ID NO: 165723 - DNA, 10 bp, Unknown
  misc_feature (1)..( 10): Result.004 file - promoters50/1378800
atttttctta

SEQ ID NO: 165724 - DNA, 10 bp, Unknown
  misc_feature (1)..( 10): Result.004 file - promoters50/1378823
gtttttttta

SEQ ID NO: 165725 - DNA, 8 bp, Unknown
  misc_feature (1)..( 8): Result.004 file - promoters50/1378823
ctatctct

SEQ ID NO: 165726 - DNA, 8 bp, Unknown
  misc_feature (1)..( 8): Result.004 file - promoters50/1378823
ttatatct

SEQ ID NO: 165727 - DNA, 8 bp, Unknown
  misc_feature (1)..( 8): Result.004 file - promoters50/1378823
ttagatcg

SEQ ID NO: 165728 - DNA, 8 bp, Unknown
  misc_feature (1)..( 8): Result.004 file - promoters50/1378823
atcatttt

SEQ ID NO: 165729 - DNA, 9 bp, Unknown
  misc_feature (1)..( 9): Result.004 file - promoters50/1378823
tatcatttt

SEQ ID NO: 165730 - DNA, 9 bp, Unknown
  misc_feature (1)..( 9): Result.004 file - promoters50/1378876
tatgattaa

SEQ ID NO: 165731 - DNA, 9 bp, Unknown
  misc_feature (1)..( 9): Result.004 file - promoters50/1378876
tgtatggct

SEQ ID NO: 165732 - DNA, 9 bp, Unknown
  misc_feature (1)..( 9): Result.004 file - promoters50/1378876
tgtatggat

SEQ ID NO: 165733 - DNA, 9 bp, Unknown
  misc_feature (1)..( 9): Result.004 file - promoters50/1378876
tctatcgct

SEQ ID NO: 165734 - DNA, 8 bp, Unknown
  misc_feature (1)..( 8): Result.004 file - promoters50/1378876
aagaaacc

SEQ ID NO: 165735 - DNA, 8 bp, Unknown
  misc_feature (1)..( 8): Result.004 file - promoters50/1378876
aagaaagt

SEQ ID NO: 165736 - DNA, 8 bp, Unknown
  misc_feature (1)..( 8): Result.004 file - promoters50/1378888
gagacagt

SEQ ID NO: 165737 - DNA, 11 bp, Unknown
  misc_feature (1)..( 11): Result.004 file - promoters50/1378888
caagtatctga

SEQ ID NO: 165738 - DNA, 11 bp, Unknown
  misc_feature (1)..( 11): Result.004 file - promoters50/1378888
caattattttc

SEQ ID NO: 165739 - DNA, 11 bp, Unknown
  misc_feature (1)..( 11): Result.004 file - promoters50/1378888
aaagtttctga

SEQ ID NO: 165740 - DNA, 8 bp, Unknown
  misc_feature (1)..( 8): Result.004 file - promoters50/1378888
atatttca

SEQ ID NO: 165741 - DNA, 8 bp, Unknown
  misc_feature (1)..( 8): Result.004 file - promoters50/1378888
atatttgt

SEQ ID NO: 165742 - DNA, 8 bp, Unknown
  misc_feature (1)..( 8): Result.004 file - promoters50/1379005
gtatctgt

SEQ ID NO: 165743 - DNA, 9 bp, Unknown
  misc_feature (1)..( 9): Result.004 file - promoters50/1379005
ttacagtta

SEQ ID NO: 165744 - DNA, 9 bp, Unknown
  misc_feature (1)..( 9): Result.004 file - promoters50/1379005
aaacattta

SEQ ID NO: 165745 - DNA, 9 bp, Unknown
  misc_feature (1)..( 9): Result.004 file - promoters50/1379005
ttatagtca

SEQ ID NO: 165746 - DNA, 9 bp, Unknown
  misc_feature (1)..( 9): Result.004 file - promoters50/1379005
aaacactta

SEQ ID NO: 165747 - DNA, 9 bp, Unknown
  misc_feature (1)..( 9): Result.004 file - promoters50/1379005
tttcattta

SEQ ID NO: 165748 - DNA, 9 bp, Unknown
  misc_feature (1)..( 9): Result.004 file - promoters50/1379005
attcactta

SEQ ID NO: 165749 - DNA, 12 bp, Unknown
  misc_feature (1)..( 12): Result.004 file - promoters50/1379005
ttttaattcttt

SEQ ID NO: 165750 - DNA, 12 bp, Unknown
  misc_feature (1)..( 12): Result.004 file - promoters50/1379005
tataaattctga

SEQ ID NO: 165751 - DNA, 12 bp, Unknown
  misc_feature (1)..( 12): Result.004 file - promoters50/1379005
ttttacttcaac

SEQ ID NO: 165752 - DNA, 13 bp, Unknown
  misc_feature (1)..( 13): Result.004 file - promoters50/1379005
ttagtgattttac

SEQ ID NO: 165753 - DNA, 13 bp, Unknown
  misc_feature (1)..( 13): Result.004 file - promoters50/1379005
aattaagttctat

SEQ ID NO: 165754 - DNA, 13 bp, Unknown
  misc_feature (1)..( 13): Result.004 file - promoters50/1379005
ccagaaattctac

SEQ ID NO: 165755 - DNA, 13 bp, Unknown
  misc_feature (1)..( 13): Result.004 file - promoters50/1379014
aagtaaataagtt

SEQ ID NO: 165756 - DNA, 7 bp, Unknown
  misc_feature (1)..( 7): Result.004 file - promoters50/1379014
catgcaa

SEQ ID NO: 165757 - DNA, 7 bp, Unknown
  misc_feature (1)..( 7): Result.004 file - promoters50/1379014
catacaa

SEQ ID NO: 165758 - DNA, 7 bp, Unknown
  misc_feature (1)..( 7): Result.004 file - promoters50/1379014
gatgcaa

SEQ ID NO: 165759 - DNA, 8 bp, Unknown
  misc_feature (1)..( 8): Result.004 file - promoters50/1379014
aatttacc

SEQ ID NO: 165760 - DNA, 8 bp, Unknown
  misc_feature (1)..( 8): Result.004 file - promoters50/1379014
aatttaaa

SEQ ID NO: 165761 - DNA, 8 bp, Unknown
  misc_feature (1)..( 8): Result.004 file - promoters50/1379037
aattcaaa

SEQ ID NO: 165762 - DNA, 11 bp, Unknown
  misc_feature (1)..( 11): Result.004 file - promoters50/1379037
tttaaataaaa

SEQ ID NO: 165763 - DNA, 11 bp, Unknown
  misc_feature (1)..( 11): Result.004 file - promoters50/1379037
ttcaaataaaa

SEQ ID NO: 165764 - DNA, 11 bp, Unknown
  misc_feature (1)..( 11): Result.004 file - promoters50/1379037
ttctaatatcc

SEQ ID NO: 165765 - DNA, 10 bp, Unknown
  misc_feature (1)..( 10): Result.004 file - promoters50/1379037
ctaaaatagt

SEQ ID NO: 165766 - DNA, 10 bp, Unknown
  misc_feature (1)..( 10): Result.004 file - promoters50/1379037
tcaaaatagc

SEQ ID NO: 165767 - DNA, 10 bp, Unknown
  misc_feature (1)..( 10): Result.004 file - promoters50/1379037
ctacaatttt

SEQ ID NO: 165768 - DNA, 10 bp, Unknown
  misc_feature (1)..( 10): Result.004 file - promoters50/1379037
tcaaaaagca

SEQ ID NO: 165769 - DNA, 9 bp, Unknown
  misc_feature (1)..( 9): Result.004 file - promoters50/1379037
aagaaaaaa

SEQ ID NO: 165770 - DNA, 9 bp, Unknown
  misc_feature (1)..( 9): Result.004 file - promoters50/1379037
aagaaacct

SEQ ID NO: 165771 - DNA, 9 bp, Unknown
  misc_feature (1)..( 9): Result.004 file - promoters50/1379037
aagaaaaaa

SEQ ID NO: 165772 - DNA, 11 bp, Unknown
  misc_feature (1)..( 11): Result.004 file - promoters50/1379037
aaaaaactcaa

SEQ ID NO: 165773 - DNA, 11 bp, Unknown
  misc_feature (1)..( 11): Result.004 file - promoters50/1379037
agaaacctcaa

SEQ ID NO: 165774 - DNA, 11 bp, Unknown
  misc_feature (1)..( 11): Result.004 file - promoters50/1379037
aaaaaacttag

SEQ ID NO: 165775 - DNA, 12 bp, Unknown
  misc_feature (1)..( 12): Result.004 file - promoters50/1379037
aaataaatggaa

SEQ ID NO: 165776 - DNA, 12 bp, Unknown
  misc_feature (1)..( 12): Result.004 file - promoters50/1379037
taataattggcg

SEQ ID NO: 165777 - DNA, 12 bp, Unknown
  misc_feature (1)..( 12): Result.004 file - promoters50/1379037
aaagaaagggaa

SEQ ID NO: 165778 - DNA, 8 bp, Unknown
  misc_feature (1)..( 8): Result.004 file - promoters50/1379037
gacaaaaa

SEQ ID NO: 165779 - DNA, 8 bp, Unknown
  misc_feature (1)..( 8): Result.004 file - promoters50/1379037
aacaaaaa

SEQ ID NO: 165780 - DNA, 8 bp, Unknown
  misc_feature (1)..( 8): Result.004 file - promoters50/1379037
gaaagaaa

SEQ ID NO: 165781 - DNA, 9 bp, Unknown
  misc_feature (1)..( 9): Result.004 file - promoters50/1379037
caagtaaga

SEQ ID NO: 165782 - DNA, 9 bp, Unknown
  misc_feature (1)..( 9): Result.004 file - promoters50/1379037
aaagtaaag

SEQ ID NO: 165783 - DNA, 9 bp, Unknown
  misc_feature (1)..( 9): Result.004 file - promoters50/1379037
aaagaaaag

SEQ ID NO: 165784 - DNA, 9 bp, Unknown
  misc_feature (1)..( 9): Result.004 file - promoters50/1379037
agaaagtaa

SEQ ID NO: 165785 - DNA, 9 bp, Unknown
  misc_feature (1)..( 9): Result.004 file - promoters50/1379037
agaaagaaa

SEQ ID NO: 165786 - DNA, 9 bp, Unknown
  misc_feature (1)..( 9): Result.004 file - promoters50/1379037
tgaaacaaa

SEQ ID NO: 165787 - DNA, 10 bp, Unknown
  misc_feature (1)..( 10): Result.004 file - promoters50/1379037
aataagaaaa

SEQ ID NO: 165788 - DNA, 10 bp, Unknown
  misc_feature (1)..( 10): Result.004 file - promoters50/1379037
gaaaagaaaa

SEQ ID NO: 165789 - DNA, 11 bp, Unknown
  misc_feature (1)..( 11): Result.004 file - promoters50/1379037
ggaaatgaaat

SEQ ID NO: 165790 - DNA, 9 bp, Unknown
  misc_feature (1)..( 9): Result.004 file - promoters50/1379037
aaataaatg

SEQ ID NO: 165791 - DNA, 9 bp, Unknown
  misc_feature (1)..( 9): Result.004 file - promoters50/1379037
aaataaaat

SEQ ID NO: 165792 - DNA, 10 bp, Unknown
  misc_feature (1)..( 10): Result.004 file - promoters50/1379043
aaatgaaata

SEQ ID NO: 165793 - DNA, 9 bp, Unknown
  misc_feature (1)..( 9): Result.004 file - promoters50/1379043
gtatataac

SEQ ID NO: 165794 - DNA, 9 bp, Unknown
  misc_feature (1)..( 9): Result.004 file - promoters50/1379043
gtatatata

SEQ ID NO: 165795 - DNA, 9 bp, Unknown
  misc_feature (1)..( 9): Result.004 file - promoters50/1379043
ttatttatt

SEQ ID NO: 165796 - DNA, 9 bp, Unknown
  misc_feature (1)..( 9): Result.004 file - promoters50/1379050
gtataaata

SEQ ID NO: 165797 - DNA, 11 bp, Unknown
  misc_feature (1)..( 11): Result.004 file - promoters50/1379050
tgaaggaaaat

SEQ ID NO: 165798 - DNA, 11 bp, Unknown
  misc_feature (1)..( 11): Result.004 file - promoters50/1379050
tgaatgaaatc

SEQ ID NO: 165799 - DNA, 11 bp, Unknown
  misc_feature (1)..( 11): Result.004 file - promoters50/1379050
tgagtgaaaaa

SEQ ID NO: 165800 - DNA, 11 bp, Unknown
  misc_feature (1)..( 11): Result.004 file - promoters50/1379050
attttgaaaaa

SEQ ID NO: 165801 - DNA, 12 bp, Unknown
  misc_feature (1)..( 12): Result.004 file - promoters50/1379050
ttgttgtaaagt

SEQ ID NO: 165802 - DNA, 9 bp, Unknown
  misc_feature (1)..( 9): Result.004 file - promoters50/1379050
aaggaaaat

SEQ ID NO: 165803 - DNA, 9 bp, Unknown
  misc_feature (1)..( 9): Result.004 file - promoters50/1379050
attgaaaat

SEQ ID NO: 165804 - DNA, 9 bp, Unknown
  misc_feature (1)..( 9): Result.004 file - promoters50/1379050
aattaaaaa

SEQ ID NO: 165805 - DNA, 9 bp, Unknown
  misc_feature (1)..( 9): Result.004 file - promoters50/1379050
aattaagtt

SEQ ID NO: 165806 - DNA, 9 bp, Unknown
  misc_feature (1)..( 9): Result.004 file - promoters50/1379075
gttgacaat

SEQ ID NO: 165807 - DNA, 9 bp, Unknown
  misc_feature (1)..( 9): Result.004 file - promoters50/1379075
taaattaaa

SEQ ID NO: 165808 - DNA, 9 bp, Unknown
  misc_feature (1)..( 9): Result.004 file - promoters50/1379075
ataattaaa

SEQ ID NO: 165809 - DNA, 9 bp, Unknown
  misc_feature (1)..( 9): Result.004 file - promoters50/1379075
aaaaataac

SEQ ID NO: 165810 - DNA, 9 bp, Unknown
  misc_feature (1)..( 9): Result.004 file - promoters50/1379075
taagttatt

SEQ ID NO: 165811 - DNA, 12 bp, Unknown
  misc_feature (1)..( 12): Result.004 file - promoters50/1379075
attaaaaaataa

SEQ ID NO: 165812 - DNA, 12 bp, Unknown
  misc_feature (1)..( 12): Result.004 file - promoters50/1379075
atttaaaattaa

SEQ ID NO: 165813 - DNA, 12 bp, Unknown
  misc_feature (1)..( 12): Result.004 file - promoters50/1379075
ttgtaatatttg

SEQ ID NO: 165814 - DNA, 12 bp, Unknown
  misc_feature (1)..( 12): Result.004 file - promoters50/1379075
tcatcatattta

SEQ ID NO: 165815 - DNA, 10 bp, Unknown
  misc_feature (1)..( 10): Result.004 file - promoters50/1379075
agaataaaca

SEQ ID NO: 165816 - DNA, 10 bp, Unknown
  misc_feature (1)..( 10): Result.004 file - promoters50/1379075
accataaaca

SEQ ID NO: 165817 - DNA, 10 bp, Unknown
  misc_feature (1)..( 10): Result.004 file - promoters50/1379075
taaataaaaa

SEQ ID NO: 165818 - DNA, 10 bp, Unknown
  misc_feature (1)..( 10): Result.004 file - promoters50/1379075
ccaaaaagga

SEQ ID NO: 165819 - DNA, 10 bp, Unknown
  misc_feature (1)..( 10): Result.004 file - promoters50/1379075
cttttaaata

SEQ ID NO: 165820 - DNA, 10 bp, Unknown
  misc_feature (1)..( 10): Result.004 file - promoters50/1379075
ctttttaatg

SEQ ID NO: 165821 - DNA, 10 bp, Unknown
  misc_feature (1)..( 10): Result.004 file - promoters50/1379075
catttatata

SEQ ID NO: 165822 - DNA, 10 bp, Unknown
  misc_feature (1)..( 10): Result.004 file - promoters50/1379075
attttatatc

SEQ ID NO: 165823 - DNA, 17 bp, Unknown
  misc_feature (1)..( 17): Result.004 file - promoters50/1379075
agtttaattctcagttt

SEQ ID NO: 165824 - DNA, 17 bp, Unknown
  misc_feature (1)..( 17): Result.004 file - promoters50/1379075
cttttcattttcaattt

SEQ ID NO: 165825 - DNA, 17 bp, Unknown
  misc_feature (1)..( 17): Result.004 file - promoters50/1379075
ttattaattgtaaaaga

SEQ ID NO: 165826 - DNA, 17 bp, Unknown
  misc_feature (1)..( 17): Result.004 file - promoters50/1379075
cttttcatatgtgagac

SEQ ID NO: 165827 - DNA, 11 bp, Unknown
  misc_feature (1)..( 11): Result.004 file - promoters50/1379075
ttctttttctt

SEQ ID NO: 165828 - DNA, 11 bp, Unknown
  misc_feature (1)..( 11): Result.004 file - promoters50/1379075
ttctttttgta

SEQ ID NO: 165829 - DNA, 11 bp, Unknown
  misc_feature (1)..( 11): Result.004 file - promoters50/1379075
ttttttatcta

SEQ ID NO: 165830 - DNA, 11 bp, Unknown
  misc_feature (1)..( 11): Result.004 file - promoters50/1379075
aactttttcta

SEQ ID NO: 165831 - DNA, 11 bp, Unknown
  misc_feature (1)..( 11): Result.004 file - promoters50/1379075
tgcatttatga

SEQ ID NO: 165832 - DNA, 11 bp, Unknown
  misc_feature (1)..( 11): Result.004 file - promoters50/1379075
ttcatttatat

SEQ ID NO: 165833 - DNA, 11 bp, Unknown
  misc_feature (1)..( 11): Result.004 file - promoters50/1379075
ttctttttaat

SEQ ID NO: 165834 - DNA, 11 bp, Unknown
  misc_feature (1)..( 11): Result.004 file - promoters50/1379141
agattttatat

SEQ ID NO: 165835 - DNA, 7 bp, Unknown
  misc_feature (1)..( 7): Result.004 file - promoters50/1379141
atataat

SEQ ID NO: 165836 - DNA, 7 bp, Unknown
  misc_feature (1)..( 7): Result.004 file - promoters50/1379141
ataaaat

SEQ ID NO: 165837 - DNA, 7 bp, Unknown
  misc_feature (1)..( 7): Result.004 file - promoters50/1379141
ataaaat

SEQ ID NO: 165838 - DNA, 8 bp, Unknown
  misc_feature (1)..( 8): Result.004 file - promoters50/1379141
aagttgat

SEQ ID NO: 165839 - DNA, 8 bp, Unknown
  misc_feature (1)..( 8): Result.004 file - promoters50/1379141
aagttgtt

SEQ ID NO: 165840 - DNA, 8 bp, Unknown
  misc_feature (1)..( 8): Result.004 file - promoters50/1379166
tagttgat

SEQ ID NO: 165841 - DNA, 9 bp, Unknown
  misc_feature (1)..( 9): Result.004 file - promoters50/1379166
attaaataa

SEQ ID NO: 165842 - DNA, 9 bp, Unknown
  misc_feature (1)..( 9): Result.004 file - promoters50/1379166
tctaaataa

SEQ ID NO: 165843 - DNA, 9 bp, Unknown
  misc_feature (1)..( 9): Result.004 file - promoters50/1379166
tctaaattg

SEQ ID NO: 165844 - DNA, 7 bp, Unknown
  misc_feature (1)..( 7): Result.004 file - promoters50/1379166
agaagag

SEQ ID NO: 165845 - DNA, 7 bp, Unknown
  misc_feature (1)..( 7): Result.004 file - promoters50/1379166
agaagaa

SEQ ID NO: 165846 - DNA, 7 bp, Unknown
  misc_feature (1)..( 7): Result.004 file - promoters50/1379166
agaagag

SEQ ID NO: 165847 - DNA, 8 bp, Unknown
  misc_feature (1)..( 8): Result.004 file - promoters50/1379166
atcgcgaa

SEQ ID NO: 165848 - DNA, 8 bp, Unknown
  misc_feature (1)..( 8): Result.004 file - promoters50/1379166
atcgagaa

SEQ ID NO: 165849 - DNA, 8 bp, Unknown
  misc_feature (1)..( 8): Result.004 file - promoters50/1379166
cccgagaa

SEQ ID NO: 165850 - DNA, 8 bp, Unknown
  misc_feature (1)..( 8): Result.004 file - promoters50/1379166
taaaccaa

SEQ ID NO: 165851 - DNA, 8 bp, Unknown
  misc_feature (1)..( 8): Result.004 file - promoters50/1379166
caaaacaa

SEQ ID NO: 165852 - DNA, 8 bp, Unknown
  misc_feature (1)..( 8): Result.004 file - promoters50/1379166
taacccaa

SEQ ID NO: 165853 - DNA, 11 bp, Unknown
  misc_feature (1)..( 11): Result.004 file - promoters50/1379166
aagagtaaaaa

SEQ ID NO: 165854 - DNA, 11 bp, Unknown
  misc_feature (1)..( 11): Result.004 file - promoters50/1379166
gagagtaaaaa

SEQ ID NO: 165855 - DNA, 11 bp, Unknown
  misc_feature (1)..( 11): Result.004 file - promoters50/1379166
gagagcaaaga

SEQ ID NO: 165856 - DNA, 8 bp, Unknown
  misc_feature (1)..( 8): Result.004 file - promoters50/1379166
gaaagata

SEQ ID NO: 165857 - DNA, 8 bp, Unknown
  misc_feature (1)..( 8): Result.004 file - promoters50/1379166
gaaagaag

SEQ ID NO: 165858 - DNA, 8 bp, Unknown
  misc_feature (1)..( 8): Result.004 file - promoters50/1379166
gaaggaag

SEQ ID NO: 165859 - DNA, 9 bp, Unknown
  misc_feature (1)..( 9): Result.004 file - promoters50/1379166
aacccacta

SEQ ID NO: 165860 - DNA, 9 bp, Unknown
  misc_feature (1)..( 9): Result.004 file - promoters50/1379166
aacccaaaa

SEQ ID NO: 165861 - DNA, 9 bp, Unknown
  misc_feature (1)..( 9): Result.004 file - promoters50/1379201
aaccgaaaa

SEQ ID NO: 165862 - DNA, 9 bp, Unknown
  misc_feature (1)..( 9): Result.004 file - promoters50/1379201
tgcatttgc

SEQ ID NO: 165863 - DNA, 9 bp, Unknown
  misc_feature (1)..( 9): Result.004 file - promoters50/1379201
caaatttgc

SEQ ID NO: 165864 - DNA, 9 bp, Unknown
  misc_feature (1)..( 9): Result.004 file - promoters50/1379201
aaaatttgt

SEQ ID NO: 165865 - DNA, 9 bp, Unknown
  misc_feature (1)..( 9): Result.004 file - promoters50/1379201
caattttga

SEQ ID NO: 165866 - DNA, 10 bp, Unknown
  misc_feature (1)..( 10): Result.004 file - promoters50/1379201
gctattggtt

SEQ ID NO: 165867 - DNA, 10 bp, Unknown
  misc_feature (1)..( 10): Result.004 file - promoters50/1379201
aaaatttgtt

SEQ ID NO: 165868 - DNA, 10 bp, Unknown
  misc_feature (1)..( 10): Result.004 file - promoters50/1379201
caaatttgcc

SEQ ID NO: 165869 - DNA, 10 bp, Unknown
  misc_feature (1)..( 10): Result.004 file - promoters50/1379201
caattttgaa

SEQ ID NO: 165870 - DNA, 11 bp, Unknown
  misc_feature (1)..( 11): Result.004 file - promoters50/1379201
gaagaacacac

SEQ ID NO: 165871 - DNA, 11 bp, Unknown
  misc_feature (1)..( 11): Result.004 file - promoters50/1379201
gaaaaacacac

SEQ ID NO: 165872 - DNA, 11 bp, Unknown
  misc_feature (1)..( 11): Result.004 file - promoters50/1379201
gggaaacccac

SEQ ID NO: 165873 - DNA, 11 bp, Unknown
  misc_feature (1)..( 11): Result.004 file - promoters50/1379201
tcaaaacactt

SEQ ID NO: 165874 - DNA, 8 bp, Unknown
  misc_feature (1)..( 8): Result.004 file - promoters50/1379201
tttactta

SEQ ID NO: 165875 - DNA, 8 bp, Unknown
  misc_feature (1)..( 8): Result.004 file - promoters50/1379201
attattta

SEQ ID NO: 165876 - DNA, 8 bp, Unknown
  misc_feature (1)..( 8): Result.004 file - promoters50/1379201
tataatta

SEQ ID NO: 165877 - DNA, 8 bp, Unknown
  misc_feature (1)..( 8): Result.004 file - promoters50/1379201
tatatatt

SEQ ID NO: 165878 - DNA, 9 bp, Unknown
  misc_feature (1)..( 9): Result.004 file - promoters50/1379201
acataatta

SEQ ID NO: 165879 - DNA, 9 bp, Unknown
  misc_feature (1)..( 9): Result.004 file - promoters50/1379201
acattattt

SEQ ID NO: 165880 - DNA, 9 bp, Unknown
  misc_feature (1)..( 9): Result.004 file - promoters50/1379201
tcattatta

SEQ ID NO: 165881 - DNA, 9 bp, Unknown
  misc_feature (1)..( 9): Result.004 file - promoters50/1379201
atataatta

SEQ ID NO: 165882 - DNA, 8 bp, Unknown
  misc_feature (1)..( 8): Result.004 file - promoters50/1379201
aactaaaa

SEQ ID NO: 165883 - DNA, 8 bp, Unknown
  misc_feature (1)..( 8): Result.004 file - promoters50/1379201
tacttaaa

SEQ ID NO: 165884 - DNA, 8 bp, Unknown
  misc_feature (1)..( 8): Result.004 file - promoters50/1379201
aacaaaaa

SEQ ID NO: 165885 - DNA, 8 bp, Unknown
  misc_feature (1)..( 8): Result.004 file - promoters50/1379213
cacatcaa

SEQ ID NO: 165886 - DNA, 8 bp, Unknown
  misc_feature (1)..( 8): Result.004 file - promoters50/1379213
atattttt

SEQ ID NO: 165887 - DNA, 8 bp, Unknown
  misc_feature (1)..( 8): Result.004 file - promoters50/1379213
ataatttc

SEQ ID NO: 165888 - DNA, 8 bp, Unknown
  misc_feature (1)..( 8): Result.004 file - promoters50/1379229
ggattttt

SEQ ID NO: 165889 - DNA, 8 bp, Unknown
  misc_feature (1)..( 8): Result.004 file - promoters50/1379229
gaagaaag

SEQ ID NO: 165890 - DNA, 8 bp, Unknown
  misc_feature (1)..( 8): Result.004 file - promoters50/1379229
aaagaaaa

SEQ ID NO: 165891 - DNA, 8 bp, Unknown
  misc_feature (1)..( 8): Result.004 file - promoters50/1379229
gaaaaaag

SEQ ID NO: 165892 - DNA, 9 bp, Unknown
  misc_feature (1)..( 9): Result.004 file - promoters50/1379229
aaaacaaac

SEQ ID NO: 165893 - DNA, 8 bp, Unknown
  misc_feature (1)..( 8): Result.004 file - promoters50/1379229
taaaagaa

SEQ ID NO: 165894 - DNA, 8 bp, Unknown
  misc_feature (1)..( 8): Result.004 file - promoters50/1379229
taatagat

SEQ ID NO: 165895 - DNA, 8 bp, Unknown
  misc_feature (1)..( 8): Result.004 file - promoters50/1379229
gaaaagaa

SEQ ID NO: 165896 - DNA, 8 bp, Unknown
  misc_feature (1)..( 8): Result.004 file - promoters50/1379229
taacagat

SEQ ID NO: 165897 - DNA, 8 bp, Unknown
  misc_feature (1)..( 8): Result.004 file - promoters50/1379229
aaagacac

SEQ ID NO: 165898 - DNA, 8 bp, Unknown
  misc_feature (1)..( 8): Result.004 file - promoters50/1379229
aaaaacac

SEQ ID NO: 165899 - DNA, 8 bp, Unknown
  misc_feature (1)..( 8): Result.004 file - promoters50/1379229
aaacaaac

SEQ ID NO: 165900 - DNA, 8 bp, Unknown
  misc_feature (1)..( 8): Result.004 file - promoters50/1379239
aaaaaaga

SEQ ID NO: 165901 - DNA, 8 bp, Unknown
  misc_feature (1)..( 8): Result.004 file - promoters50/1379239
gaaagaaa

SEQ ID NO: 165902 - DNA, 8 bp, Unknown
  misc_feature (1)..( 8): Result.004 file - promoters50/1379239
taaacaaa

SEQ ID NO: 165903 - DNA, 8 bp, Unknown
  misc_feature (1)..( 8): Result.004 file - promoters50/1379239
acaacaaa

SEQ ID NO: 165904 - DNA, 9 bp, Unknown
  misc_feature (1)..( 9): Result.004 file - promoters50/1379239
aaattaaac

SEQ ID NO: 165905 - DNA, 9 bp, Unknown
  misc_feature (1)..( 9): Result.004 file - promoters50/1379239
ctattaaac

SEQ ID NO: 165906 - DNA, 9 bp, Unknown
  misc_feature (1)..( 9): Result.004 file - promoters50/1379239
aaatcaaat

SEQ ID NO: 165907 - DNA, 9 bp, Unknown
  misc_feature (1)..( 9): Result.004 file - promoters50/1379239
tataaaaac

SEQ ID NO: 165908 - DNA, 9 bp, Unknown
  misc_feature (1)..( 9): Result.004 file - promoters50/1379239
gataaaaac

SEQ ID NO: 165909 - DNA, 9 bp, Unknown
  misc_feature (1)..( 9): Result.004 file - promoters50/1379295
tataaacac

SEQ ID NO: 165910 - DNA, 12 bp, Unknown
  misc_feature (1)..( 12): Result.004 file - promoters50/1379295
aaaaaagaaaaa

SEQ ID NO: 165911 - DNA, 12 bp, Unknown
  misc_feature (1)..( 12): Result.004 file - promoters50/1379295
aaaaaagaaaaa

SEQ ID NO: 165912 - DNA, 12 bp, Unknown
  misc_feature (1)..( 12): Result.004 file - promoters50/1379313
gaaaaagaaaag

SEQ ID NO: 165913 - DNA, 7 bp, Unknown
  misc_feature (1)..( 7): Result.004 file - promoters50/1379313
gtcaaac

SEQ ID NO: 165914 - DNA, 7 bp, Unknown
  misc_feature (1)..( 7): Result.004 file - promoters50/1379313
atcaaac

SEQ ID NO: 165915 - DNA, 7 bp, Unknown
  misc_feature (1)..( 7): Result.004 file - promoters50/1379362
atcaaag

SEQ ID NO: 165916 - DNA, 9 bp, Unknown
  misc_feature (1)..( 9): Result.004 file - promoters50/1379362
atacttttt

SEQ ID NO: 165917 - DNA, 9 bp, Unknown
  misc_feature (1)..( 9): Result.004 file - promoters50/1379362
ataatttaa

SEQ ID NO: 165918 - DNA, 9 bp, Unknown
  misc_feature (1)..( 9): Result.004 file - promoters50/1379362
ataatataa

SEQ ID NO: 165919 - DNA, 8 bp, Unknown
  misc_feature (1)..( 8): Result.004 file - promoters50/1379362
aaacatac

SEQ ID NO: 165920 - DNA, 8 bp, Unknown
  misc_feature (1)..( 8): Result.004 file - promoters50/1379362
aaaaataa

SEQ ID NO: 165921 - DNA, 8 bp, Unknown
  misc_feature (1)..( 8): Result.004 file - promoters50/1379362
aaaattaa

SEQ ID NO: 165922 - DNA, 7 bp, Unknown
  misc_feature (1)..( 7): Result.004 file - promoters50/1379362
gatatat

SEQ ID NO: 165923 - DNA, 7 bp, Unknown
  misc_feature (1)..( 7): Result.004 file - promoters50/1379362
aatatat

SEQ ID NO: 165924 - DNA, 7 bp, Unknown
  misc_feature (1)..( 7): Result.004 file - promoters50/1379366
aatataa

SEQ ID NO: 165925 - DNA, 8 bp, Unknown
  misc_feature (1)..( 8): Result.004 file - promoters50/1379366
ttaaaaaa

SEQ ID NO: 165926 - DNA, 8 bp, Unknown
  misc_feature (1)..( 8): Result.004 file - promoters50/1379366
ttaagaaa

SEQ ID NO: 165927 - DNA, 8 bp, Unknown
  misc_feature (1)..( 8): Result.004 file - promoters50/1379366
ttaacaaa

SEQ ID NO: 165928 - DNA, 7 bp, Unknown
  misc_feature (1)..( 7): Result.004 file - promoters50/1379366
agagaaa

SEQ ID NO: 165929 - DNA, 7 bp, Unknown
  misc_feature (1)..( 7): Result.004 file - promoters50/1379366
agagaaa

SEQ ID NO: 165930 - DNA, 7 bp, Unknown
  misc_feature (1)..( 7): Result.004 file - promoters50/1379366
cgagaaa

SEQ ID NO: 165931 - DNA, 8 bp, Unknown
  misc_feature (1)..( 8): Result.004 file - promoters50/1379366
acgaagaa

SEQ ID NO: 165932 - DNA, 8 bp, Unknown
  misc_feature (1)..( 8): Result.004 file - promoters50/1379366
acgatgaa

SEQ ID NO: 165933 - DNA, 8 bp, Unknown
  misc_feature (1)..( 8): Result.004 file - promoters50/1379366
tagatgaa

SEQ ID NO: 165934 - DNA, 7 bp, Unknown
  misc_feature (1)..( 7): Result.004 file - promoters50/1379366
agaggaa

SEQ ID NO: 165935 - DNA, 7 bp, Unknown
  misc_feature (1)..( 7): Result.004 file - promoters50/1379366
agatgaa

SEQ ID NO: 165936 - DNA, 7 bp, Unknown
  misc_feature (1)..( 7): Result.004 file - promoters50/1379366
cgatgaa

SEQ ID NO: 165937 - DNA, 8 bp, Unknown
  misc_feature (1)..( 8): Result.004 file - promoters50/1379366
tctccaca

SEQ ID NO: 165938 - DNA, 8 bp, Unknown
  misc_feature (1)..( 8): Result.004 file - promoters50/1379366
tcttcact

SEQ ID NO: 165939 - DNA, 8 bp, Unknown
  misc_feature (1)..( 8): Result.004 file - promoters50/1379366
tctacaca

SEQ ID NO: 165940 - DNA, 9 bp, Unknown
  misc_feature (1)..( 9): Result.004 file - promoters50/1379366
tgtctcatt

SEQ ID NO: 165941 - DNA, 9 bp, Unknown
  misc_feature (1)..( 9): Result.004 file - promoters50/1379366
tgtgtcata

SEQ ID NO: 165942 - DNA, 9 bp, Unknown
  misc_feature (1)..( 9): Result.004 file - promoters50/1379450
gatctaatt

SEQ ID NO: 165943 - DNA, 10 bp, Unknown
  misc_feature (1)..( 10): Result.004 file - promoters50/1379450
agacgaagga

SEQ ID NO: 165944 - DNA, 10 bp, Unknown
  misc_feature (1)..( 10): Result.004 file - promoters50/1379450
agaggaagaa

SEQ ID NO: 165945 - DNA, 10 bp, Unknown
  misc_feature (1)..( 10): Result.004 file - promoters50/1379450
ttagggagaa

SEQ ID NO: 165946 - DNA, 11 bp, Unknown
  misc_feature (1)..( 11): Result.004 file - promoters50/1379450
gagaaagaaag

SEQ ID NO: 165947 - DNA, 11 bp, Unknown
  misc_feature (1)..( 11): Result.004 file - promoters50/1379450
gagaaagaaag

SEQ ID NO: 165948 - DNA, 11 bp, Unknown
  misc_feature (1)..( 11): Result.004 file - promoters50/1379496
gacaaaaaaaa

SEQ ID NO: 165949 - DNA, 10 bp, Unknown
  misc_feature (1)..( 10): Result.004 file - promoters50/1379496
actaaatttt

SEQ ID NO: 165950 - DNA, 10 bp, Unknown
  misc_feature (1)..( 10): Result.004 file - promoters50/1379496
actaaatcac

SEQ ID NO: 165951 - DNA, 10 bp, Unknown
  misc_feature (1)..( 10): Result.004 file - promoters50/1379496
aataaattag

SEQ ID NO: 165952 - DNA, 10 bp, Unknown
  misc_feature (1)..( 10): Result.004 file - promoters50/1379496
cctacatttt

SEQ ID NO: 165953 - DNA, 10 bp, Unknown
  misc_feature (1)..( 10): Result.004 file - promoters50/1379496
tttacttttt

SEQ ID NO: 165954 - DNA, 10 bp, Unknown
  misc_feature (1)..( 10): Result.004 file - promoters50/1379496
gattcatttt

SEQ ID NO: 165955 - DNA, 14 bp, Unknown
  misc_feature (1)..( 14): Result.004 file - promoters50/1379496
atttttcttctttt

SEQ ID NO: 165956 - DNA, 14 bp, Unknown
  misc_feature (1)..( 14): Result.004 file - promoters50/1379496
cattttcttatttt

SEQ ID NO: 165957 - DNA, 14 bp, Unknown
  misc_feature (1)..( 14): Result.004 file - promoters50/1379496
gtttttccttatat

SEQ ID NO: 165958 - DNA, 14 bp, Unknown
  misc_feature (1)..( 14): Result.004 file - promoters50/1379496
gtctttctctactg

SEQ ID NO: 165959 - DNA, 14 bp, Unknown
  misc_feature (1)..( 14): Result.004 file - promoters50/1379496
catattcgtaaaaa

SEQ ID NO: 165960 - DNA, 14 bp, Unknown
  misc_feature (1)..( 14): Result.004 file - promoters50/1379496
gattttataatata

SEQ ID NO: 165961 - DNA, 9 bp, Unknown
  misc_feature (1)..( 9): Result.004 file - promoters50/1379496
tataaatta

SEQ ID NO: 165962 - DNA, 9 bp, Unknown
  misc_feature (1)..( 9): Result.004 file - promoters50/1379496
tcaaaatta

SEQ ID NO: 165963 - DNA, 9 bp, Unknown
  misc_feature (1)..( 9): Result.004 file - promoters50/1379496
taaaaattg

SEQ ID NO: 165964 - DNA, 9 bp, Unknown
  misc_feature (1)..( 9): Result.004 file - promoters50/1379496
tcaaaattt

SEQ ID NO: 165965 - DNA, 9 bp, Unknown
  misc_feature (1)..( 9): Result.004 file - promoters50/1379496
ccaaaatgc

SEQ ID NO: 165966 - DNA, 9 bp, Unknown
  misc_feature (1)..( 9): Result.004 file - promoters50/1379496
taataatcc

SEQ ID NO: 165967 - DNA, 12 bp, Unknown
  misc_feature (1)..( 12): Result.004 file - promoters50/1379496
tttaaaaattaa

SEQ ID NO: 165968 - DNA, 12 bp, Unknown
  misc_feature (1)..( 12): Result.004 file - promoters50/1379496
tctaaaaatgta

SEQ ID NO: 165969 - DNA, 12 bp, Unknown
  misc_feature (1)..( 12): Result.004 file - promoters50/1379496
cccaaaaattcg

SEQ ID NO: 165970 - DNA, 12 bp, Unknown
  misc_feature (1)..( 12): Result.004 file - promoters50/1379496
atacaaaattga

SEQ ID NO: 165971 - DNA, 12 bp, Unknown
  misc_feature (1)..( 12): Result.004 file - promoters50/1379496
aataaaaatctt

SEQ ID NO: 165972 - DNA, 12 bp, Unknown
  misc_feature (1)..( 12): Result.004 file - promoters50/1379496
gtcaaaaaaggc

SEQ ID NO: 165973 - DNA, 12 bp, Unknown
  misc_feature (1)..( 12): Result.004 file - promoters50/1379496
gaagcaaattgt

SEQ ID NO: 165974 - DNA, 12 bp, Unknown
  misc_feature (1)..( 12): Result.004 file - promoters50/1379496
aataaagatgct

SEQ ID NO: 165975 - DNA, 10 bp, Unknown
  misc_feature (1)..( 10): Result.004 file - promoters50/1379496
aattttcata

SEQ ID NO: 165976 - DNA, 10 bp, Unknown
  misc_feature (1)..( 10): Result.004 file - promoters50/1379496
ccgtttaata

SEQ ID NO: 165977 - DNA, 10 bp, Unknown
  misc_feature (1)..( 10): Result.004 file - promoters50/1379496
atccttcata

SEQ ID NO: 165978 - DNA, 10 bp, Unknown
  misc_feature (1)..( 10): Result.004 file - promoters50/1379496
cattttcaaa

SEQ ID NO: 165979 - DNA, 10 bp, Unknown
  misc_feature (1)..( 10): Result.004 file - promoters50/1379496
atatttcatg

SEQ ID NO: 165980 - DNA, 10 bp, Unknown
  misc_feature (1)..( 10): Result.004 file - promoters50/1379496
cattttctta

SEQ ID NO: 165981 - DNA, 10 bp, Unknown
  misc_feature (1)..( 10): Result.004 file - promoters50/1379496
ttttttaaag

SEQ ID NO: 165982 - DNA, 11 bp, Unknown
  misc_feature (1)..( 11): Result.004 file - promoters50/1379496
gaatattattc

SEQ ID NO: 165983 - DNA, 11 bp, Unknown
  misc_feature (1)..( 11): Result.004 file - promoters50/1379496
tacaattattc

SEQ ID NO: 165984 - DNA, 11 bp, Unknown
  misc_feature (1)..( 11): Result.004 file - promoters50/1379496
ttatattataa

SEQ ID NO: 165985 - DNA, 11 bp, Unknown
  misc_feature (1)..( 11): Result.004 file - promoters50/1379496
tttaataattt

SEQ ID NO: 165986 - DNA, 11 bp, Unknown
  misc_feature (1)..( 11): Result.004 file - promoters50/1379496
atttgtaattt

SEQ ID NO: 165987 - DNA, 11 bp, Unknown
  misc_feature (1)..( 11): Result.004 file - promoters50/1379586
ttaaattcttc

SEQ ID NO: 165988 - DNA, 11 bp, Unknown
  misc_feature (1)..( 11): Result.004 file - promoters50/1379586
aatataaaatt

SEQ ID NO: 165989 - DNA, 11 bp, Unknown
  misc_feature (1)..( 11): Result.004 file - promoters50/1379586
aatatatagaa

SEQ ID NO: 165990 - DNA, 11 bp, Unknown
  misc_feature (1)..( 11): Result.004 file - promoters50/1379586
catatacaatg

SEQ ID NO: 165991 - DNA, 11 bp, Unknown
  misc_feature (1)..( 11): Result.004 file - promoters50/1379586
aatatagagac

SEQ ID NO: 165992 - DNA, 11 bp, Unknown
  misc_feature (1)..( 11): Result.004 file - promoters50/1379586
tctctacaata

SEQ ID NO: 165993 - DNA, 11 bp, Unknown
  misc_feature (1)..( 11): Result.004 file - promoters50/1379607
ttgtaacaatg

SEQ ID NO: 165994 - DNA, 18 bp, Unknown
  misc_feature (1)..( 18): Result.004 file - promoters50/1379607
tatctctgatatattaat

SEQ ID NO: 165995 - DNA, 18 bp, Unknown
  misc_feature (1)..( 18): Result.004 file - promoters50/1379607
ttgaatcaatattttatc

SEQ ID NO: 165996 - DNA, 18 bp, Unknown
  misc_feature (1)..( 18): Result.004 file - promoters50/1379607
tcttttgtatattttaca

SEQ ID NO: 165997 - DNA, 18 bp, Unknown
  misc_feature (1)..( 18): Result.004 file - promoters50/1379607
aataacttctattatatc

SEQ ID NO: 165998 - DNA, 18 bp, Unknown
  misc_feature (1)..( 18): Result.004 file - promoters50/1379607
ttgattcaaaattctcta

SEQ ID NO: 165999 - DNA, 18 bp, Unknown
  misc_feature (1)..( 18): Result.004 file - promoters50/1379691
tcaagagaaaatttgatg

SEQ ID NO: 166000 - DNA, 8 bp, Unknown
  misc_feature (1)..( 8): Result.004 file - promoters50/1379691
cttttaag

SEQ ID NO: 166001 - DNA, 8 bp, Unknown
  misc_feature (1)..( 8): Result.004 file - promoters50/1379691
cttgtaag

SEQ ID NO: 166002 - DNA, 8 bp, Unknown
  misc_feature (1)..( 8): Result.004 file - promoters50/1379691
aatttaag

SEQ ID NO: 166003 - DNA, 9 bp, Unknown
  misc_feature (1)..( 9): Result.004 file - promoters50/1379691
aattaataa

SEQ ID NO: 166004 - DNA, 9 bp, Unknown
  misc_feature (1)..( 9): Result.004 file - promoters50/1379691
ttttattaa

SEQ ID NO: 166005 - DNA, 9 bp, Unknown
  misc_feature (1)..( 9): Result.004 file - promoters50/1379691
aattagtaa

SEQ ID NO: 166006 - DNA, 9 bp, Unknown
  misc_feature (1)..( 9): Result.004 file - promoters50/1379691
tcagaagaa

SEQ ID NO: 166007 - DNA, 9 bp, Unknown
  misc_feature (1)..( 9): Result.004 file - promoters50/1379691
tcataagaa

SEQ ID NO: 166008 - DNA, 9 bp, Unknown
  misc_feature (1)..( 9): Result.004 file - promoters50/1379719
taataaacg

SEQ ID NO: 166009 - DNA, 10 bp, Unknown
  misc_feature (1)..( 10): Result.004 file - promoters50/1379719
gatttgtggt

SEQ ID NO: 166010 - DNA, 10 bp, Unknown
  misc_feature (1)..( 10): Result.004 file - promoters50/1379719
tttttttggt

SEQ ID NO: 166011 - DNA, 10 bp, Unknown
  misc_feature (1)..( 10): Result.004 file - promoters50/1379777
gatatgtatc

SEQ ID NO: 166012 - DNA, 9 bp, Unknown
  misc_feature (1)..( 9): Result.004 file - promoters50/1379777
aaacaaaac

SEQ ID NO: 166013 - DNA, 9 bp, Unknown
  misc_feature (1)..( 9): Result.004 file - promoters50/1379777
tgacacaac

SEQ ID NO: 166014 - DNA, 9 bp, Unknown
  misc_feature (1)..( 9): Result.004 file - promoters50/1379893
tgacacaac

SEQ ID NO: 166015 - DNA, 9 bp, Unknown
  misc_feature (1)..( 9): Result.004 file - promoters50/1379893
attttgatc

SEQ ID NO: 166016 - DNA, 9 bp, Unknown
  misc_feature (1)..( 9): Result.004 file - promoters50/1379893
aatttcatc

SEQ ID NO: 166017 - DNA, 9 bp, Unknown
  misc_feature (1)..( 9): Result.004 file - promoters50/1379893
aatttcata

SEQ ID NO: 166018 - DNA, 8 bp, Unknown
  misc_feature (1)..( 8): Result.004 file - promoters50/1379893
tttgtatt

SEQ ID NO: 166019 - DNA, 8 bp, Unknown
  misc_feature (1)..( 8): Result.004 file - promoters50/1379893
tatgtatt

SEQ ID NO: 166020 - DNA, 8 bp, Unknown
  misc_feature (1)..( 8): Result.004 file - promoters50/1379916
tttgtatt

SEQ ID NO: 166021 - DNA, 10 bp, Unknown
  misc_feature (1)..( 10): Result.004 file - promoters50/1379916
cttgttcttt

SEQ ID NO: 166022 - DNA, 10 bp, Unknown
  misc_feature (1)..( 10): Result.004 file - promoters50/1379916
tttgtttttt

SEQ ID NO: 166023 - DNA, 10 bp, Unknown
  misc_feature (1)..( 10): Result.004 file - promoters50/1379916
gttggttact

SEQ ID NO: 166024 - DNA, 10 bp, Unknown
  misc_feature (1)..( 10): Result.004 file - promoters50/1379916
cttaacaaaa

SEQ ID NO: 166025 - DNA, 10 bp, Unknown
  misc_feature (1)..( 10): Result.004 file - promoters50/1379916
tataataaaa

SEQ ID NO: 166026 - DNA, 10 bp, Unknown
  misc_feature (1)..( 10): Result.004 file - promoters50/1379916
tatagtaaga

SEQ ID NO: 166027 - DNA, 8 bp, Unknown
  misc_feature (1)..( 8): Result.004 file - promoters50/1379916
ctttcttg

SEQ ID NO: 166028 - DNA, 8 bp, Unknown
  misc_feature (1)..( 8): Result.004 file - promoters50/1379916
gttttttg

SEQ ID NO: 166029 - DNA, 8 bp, Unknown
  misc_feature (1)..( 8): Result.004 file - promoters50/1379916
gttatttg

SEQ ID NO: 166030 - DNA, 10 bp, Unknown
  misc_feature (1)..( 10): Result.004 file - promoters50/1379916
tctttttctt

SEQ ID NO: 166031 - DNA, 10 bp, Unknown
  misc_feature (1)..( 10): Result.004 file - promoters50/1379916
tctttttcga

SEQ ID NO: 166032 - DNA, 10 bp, Unknown
  misc_feature (1)..( 10): Result.004 file - promoters50/1379916
gattttggat

SEQ ID NO: 166033 - DNA, 9 bp, Unknown
  misc_feature (1)..( 9): Result.004 file - promoters50/1379916
aattatttc

SEQ ID NO: 166034 - DNA, 9 bp, Unknown
  misc_feature (1)..( 9): Result.004 file - promoters50/1379916
aattgtttt

SEQ ID NO: 166035 - DNA, 9 bp, Unknown
  misc_feature (1)..( 9): Result.004 file - promoters50/1379928
gtttgtttt

SEQ ID NO: 166036 - DNA, 11 bp, Unknown
  misc_feature (1)..( 11): Result.004 file - promoters50/1379928
aaaagaaattg

SEQ ID NO: 166037 - DNA, 11 bp, Unknown
  misc_feature (1)..( 11): Result.004 file - promoters50/1379928
aaaacaaaaaa

SEQ ID NO: 166038 - DNA, 11 bp, Unknown
  misc_feature (1)..( 11): Result.004 file - promoters50/1379928
ggaagaaattg

SEQ ID NO: 166039 - DNA, 11 bp, Unknown
  misc_feature (1)..( 11): Result.004 file - promoters50/1379981
cgaagaacgaa

SEQ ID NO: 166040 - DNA, 8 bp, Unknown
  misc_feature (1)..( 8): Result.004 file - promoters50/1379981
ttttttaa

SEQ ID NO: 166041 - DNA, 8 bp, Unknown
  misc_feature (1)..( 8): Result.004 file - promoters50/1379981
tttattat

SEQ ID NO: 166042 - DNA, 8 bp, Unknown
  misc_feature (1)..( 8): Result.004 file - promoters50/1379981
cattttaa

SEQ ID NO: 166043 - DNA, 9 bp, Unknown
  misc_feature (1)..( 9): Result.004 file - promoters50/1379981
taaattaaa

SEQ ID NO: 166044 - DNA, 9 bp, Unknown
  misc_feature (1)..( 9): Result.004 file - promoters50/1379981
aaaagtaaa

SEQ ID NO: 166045 - DNA, 9 bp, Unknown
  misc_feature (1)..( 9): Result.004 file - promoters50/1379981
taaatttat

SEQ ID NO: 166046 - DNA, 8 bp, Unknown
  misc_feature (1)..( 8): Result.004 file - promoters50/1379981
ttaaaaag

SEQ ID NO: 166047 - DNA, 8 bp, Unknown
  misc_feature (1)..( 8): Result.004 file - promoters50/1379981
gaaaaaag

SEQ ID NO: 166048 - DNA, 8 bp, Unknown
  misc_feature (1)..( 8): Result.004 file - promoters50/1379981
ttataaag

SEQ ID NO: 166049 - DNA, 10 bp, Unknown
  misc_feature (1)..( 10): Result.004 file - promoters50/1379981
cttaaataat

SEQ ID NO: 166050 - DNA, 10 bp, Unknown
  misc_feature (1)..( 10): Result.004 file - promoters50/1379981
cacaaagaat

SEQ ID NO: 166051 - DNA, 10 bp, Unknown
  misc_feature (1)..( 10): Result.004 file - promoters50/1380020
cttaaatatt

SEQ ID NO: 166052 - DNA, 9 bp, Unknown
  misc_feature (1)..( 9): Result.004 file - promoters50/1380020
tcaaattga

SEQ ID NO: 166053 - DNA, 9 bp, Unknown
  misc_feature (1)..( 9): Result.004 file - promoters50/1380020
tcatatttt

SEQ ID NO: 166054 - DNA, 9 bp, Unknown
  misc_feature (1)..( 9): Result.004 file - promoters50/1380020
acaaattgc

SEQ ID NO: 166055 - DNA, 9 bp, Unknown
  misc_feature (1)..( 9): Result.004 file - promoters50/1380085
aaaaaatga

SEQ ID NO: 166056 - DNA, 11 bp, Unknown
  misc_feature (1)..( 11): Result.004 file - promoters50/1380085
atttttgaatg

SEQ ID NO: 166057 - DNA, 11 bp, Unknown
  misc_feature (1)..( 11): Result.004 file - promoters50/1380085
gattttaaatg

SEQ ID NO: 166058 - DNA, 12 bp, Unknown
  misc_feature (1)..( 12): Result.004 file - promoters50/1380135
aattattggatc

SEQ ID NO: 166059 - DNA, 8 bp, Unknown
  misc_feature (1)..( 8): Result.004 file - promoters50/1380135
aacaataa

SEQ ID NO: 166060 - DNA, 8 bp, Unknown
  misc_feature (1)..( 8): Result.004 file - promoters50/1380135
tacaatat

SEQ ID NO: 166061 - DNA, 8 bp, Unknown
  misc_feature (1)..( 8): Result.004 file - promoters50/1380135
caaaatta

SEQ ID NO: 166062 - DNA, 8 bp, Unknown
  misc_feature (1)..( 8): Result.004 file - promoters50/1380135
atcaatat

SEQ ID NO: 166063 - DNA, 8 bp, Unknown
  misc_feature (1)..( 8): Result.004 file - promoters50/1380135
aataatag

SEQ ID NO: 166064 - DNA, 8 bp, Unknown
  misc_feature (1)..( 8): Result.004 file - promoters50/1380135
aattatat

SEQ ID NO: 166065 - DNA, 8 bp, Unknown
  misc_feature (1)..( 8): Result.004 file - promoters50/1380135
aattgtat

SEQ ID NO: 166066 - DNA, 8 bp, Unknown
  misc_feature (1)..( 8): Result.004 file - promoters50/1380135
tattgtat

SEQ ID NO: 166067 - DNA, 9 bp, Unknown
  misc_feature (1)..( 9): Result.004 file - promoters50/1380135
gaagaaaaa

SEQ ID NO: 166068 - DNA, 9 bp, Unknown
  misc_feature (1)..( 9): Result.004 file - promoters50/1380135
gaataaaaa

SEQ ID NO: 166069 - DNA, 9 bp, Unknown
  misc_feature (1)..( 9): Result.004 file - promoters50/1380135
tcagaaaag

SEQ ID NO: 166070 - DNA, 9 bp, Unknown
  misc_feature (1)..( 9): Result.004 file - promoters50/1380163
caataaact

SEQ ID NO: 166071 - DNA, 8 bp, Unknown
  misc_feature (1)..( 8): Result.004 file - promoters50/1380163
aaataatt

SEQ ID NO: 166072 - DNA, 8 bp, Unknown
  misc_feature (1)..( 8): Result.004 file - promoters50/1380163
caataatt

SEQ ID NO: 166073 - DNA, 8 bp, Unknown
  misc_feature (1)..( 8): Result.004 file - promoters50/1380163
caataaca

SEQ ID NO: 166074 - DNA, 8 bp, Unknown
  misc_feature (1)..( 8): Result.004 file - promoters50/1380163
taaaacca

SEQ ID NO: 166075 - DNA, 8 bp, Unknown
  misc_feature (1)..( 8): Result.004 file - promoters50/1380163
taacaccc

SEQ ID NO: 166076 - DNA, 8 bp, Unknown
  misc_feature (1)..( 8): Result.004 file - promoters50/1380224
taaatcaa

SEQ ID NO: 166077 - DNA, 10 bp, Unknown
  misc_feature (1)..( 10): Result.004 file - promoters50/1380224
ctcattatag

SEQ ID NO: 166078 - DNA, 10 bp, Unknown
  misc_feature (1)..( 10): Result.004 file - promoters50/1380224
atcaatatta

SEQ ID NO: 166079 - DNA, 10 bp, Unknown
  misc_feature (1)..( 10): Result.004 file - promoters50/1380224
ctcattaatt

SEQ ID NO: 166080 - DNA, 10 bp, Unknown
  misc_feature (1)..( 10): Result.004 file - promoters50/1380224
tcgaatattt

SEQ ID NO: 166081 - DNA, 10 bp, Unknown
  misc_feature (1)..( 10): Result.004 file - promoters50/1380309
gagaacattt

SEQ ID NO: 166082 - DNA, 12 bp, Unknown
  misc_feature (1)..( 12): Result.004 file - promoters50/1380309
aacttaaacttt

SEQ ID NO: 166083 - DNA, 12 bp, Unknown
  misc_feature (1)..( 12): Result.004 file - promoters50/1380309
acgttagactca

SEQ ID NO: 166084 - DNA, 12 bp, Unknown
  misc_feature (1)..( 12): Result.004 file - promoters50/1380309
taattaaagttt

SEQ ID NO: 166085 - DNA, 12 bp, Unknown
  misc_feature (1)..( 12): Result.004 file - promoters50/1380309
gagtaaaaattt

SEQ ID NO: 166086 - DNA, 12 bp, Unknown
  misc_feature (1)..( 12): Result.004 file - promoters50/1380309
ttactaaaataa

SEQ ID NO: 166087 - DNA, 12 bp, Unknown
  misc_feature (1)..( 12): Result.004 file - promoters50/1380309
agtctaagacaa

SEQ ID NO: 166088 - DNA, 12 bp, Unknown
  misc_feature (1)..( 12): Result.004 file - promoters50/1380309
ttcttagacccg

SEQ ID NO: 166089 - DNA, 11 bp, Unknown
  misc_feature (1)..( 11): Result.004 file - promoters50/1380309
aacacaaatca

SEQ ID NO: 166090 - DNA, 11 bp, Unknown
  misc_feature (1)..( 11): Result.004 file - promoters50/1380309
aacataaaaag

SEQ ID NO: 166091 - DNA, 11 bp, Unknown
  misc_feature (1)..( 11): Result.004 file - promoters50/1380309
gtaacaaatct

SEQ ID NO: 166092 - DNA, 11 bp, Unknown
  misc_feature (1)..( 11): Result.004 file - promoters50/1380309
aatataaacct

SEQ ID NO: 166093 - DNA, 11 bp, Unknown
  misc_feature (1)..( 11): Result.004 file - promoters50/1380309
agaataaaaag

SEQ ID NO: 166094 - DNA, 11 bp, Unknown
  misc_feature (1)..( 11): Result.004 file - promoters50/1380309
tacataattgt

SEQ ID NO: 166095 - DNA, 14 bp, Unknown
  misc_feature (1)..( 14): Result.004 file - promoters50/1380309
acaatcaagaagag

SEQ ID NO: 166096 - DNA, 14 bp, Unknown
  misc_feature (1)..( 14): Result.004 file - promoters50/1380309
aaaaacaaaaagta

SEQ ID NO: 166097 - DNA, 15 bp, Unknown
  misc_feature (1)..( 15): Result.004 file - promoters50/1380309
tttccaaataaagaa

SEQ ID NO: 166098 - DNA, 15 bp, Unknown
  misc_feature (1)..( 15): Result.004 file - promoters50/1380309
aagttaaataaatag

SEQ ID NO: 166099 - DNA, 15 bp, Unknown
  misc_feature (1)..( 15): Result.004 file - promoters50/1380309
acataaaataaatac

SEQ ID NO: 166100 - DNA, 15 bp, Unknown
  misc_feature (1)..( 15): Result.004 file - promoters50/1380389
tgtcccataaaaaat

SEQ ID NO: 166101 - DNA, 12 bp, Unknown
  misc_feature (1)..( 12): Result.004 file - promoters50/1380389
taaatcaaaatg

SEQ ID NO: 166102 - DNA, 12 bp, Unknown
  misc_feature (1)..( 12): Result.004 file - promoters50/1380389
cgaatcaatatg

SEQ ID NO: 166103 - DNA, 12 bp, Unknown
  misc_feature (1)..( 12): Result.004 file - promoters50/1380389
taaaacaattat

SEQ ID NO: 166104 - DNA, 12 bp, Unknown
  misc_feature (1)..( 12): Result.004 file - promoters50/1380389
gtcttcaataga

SEQ ID NO: 166105 - DNA, 12 bp, Unknown
  misc_feature (1)..( 12): Result.004 file - promoters50/1380389
ccaaacgattcc

SEQ ID NO: 166106 - DNA, 11 bp, Unknown
  misc_feature (1)..( 11): Result.004 file - promoters50/1380389
aaattttgaat

SEQ ID NO: 166107 - DNA, 11 bp, Unknown
  misc_feature (1)..( 11): Result.004 file - promoters50/1380389
tggttttgact

SEQ ID NO: 166108 - DNA, 11 bp, Unknown
  misc_feature (1)..( 11): Result.004 file - promoters50/1380389
atcttttcaat

SEQ ID NO: 166109 - DNA, 11 bp, Unknown
  misc_feature (1)..( 11): Result.004 file - promoters50/1380389
ttctgttcgta

SEQ ID NO: 166110 - DNA, 11 bp, Unknown
  misc_feature (1)..( 11): Result.004 file - promoters50/1380389
atctgttctca

SEQ ID NO: 166111 - DNA, 11 bp, Unknown
  misc_feature (1)..( 11): Result.004 file - promoters50/1380389
caaaaatatca

SEQ ID NO: 166112 - DNA, 11 bp, Unknown
  misc_feature (1)..( 11): Result.004 file - promoters50/1380389
caaaattatat

SEQ ID NO: 166113 - DNA, 11 bp, Unknown
  misc_feature (1)..( 11): Result.004 file - promoters50/1380389
gaaagatatgg

SEQ ID NO: 166114 - DNA, 11 bp, Unknown
  misc_feature (1)..( 11): Result.004 file - promoters50/1380389
caatatttgta

SEQ ID NO: 166115 - DNA, 11 bp, Unknown
  misc_feature (1)..( 11): Result.004 file - promoters50/1380389
cttatatatgt

SEQ ID NO: 166116 - DNA, 11 bp, Unknown
  misc_feature (1)..( 11): Result.004 file - promoters50/1380389
ttataaatcaa

SEQ ID NO: 166117 - DNA, 11 bp, Unknown
  misc_feature (1)..( 11): Result.004 file - promoters50/1380389
caatagatctt

SEQ ID NO: 166118 - DNA, 11 bp, Unknown
  misc_feature (1)..( 11): Result.004 file - promoters50/1380389
atttaaaacaa

SEQ ID NO: 166119 - DNA, 11 bp, Unknown
  misc_feature (1)..( 11): Result.004 file - promoters50/1380389
caaaagaaacg

SEQ ID NO: 166120 - DNA, 11 bp, Unknown
  misc_feature (1)..( 11): Result.004 file - promoters50/1380418
caaacgattcc

SEQ ID NO: 166121 - DNA, 12 bp, Unknown
  misc_feature (1)..( 12): Result.004 file - promoters50/1380418
agtttctatttt

SEQ ID NO: 166122 - DNA, 12 bp, Unknown
  misc_feature (1)..( 12): Result.004 file - promoters50/1380418
agtttctcattg

SEQ ID NO: 166123 - DNA, 12 bp, Unknown
  misc_feature (1)..( 12): Result.004 file - promoters50/1380418
cctttttcataa

SEQ ID NO: 166124 - DNA, 12 bp, Unknown
  misc_feature (1)..( 12): Result.004 file - promoters50/1380418
atgttcatacca

SEQ ID NO: 166125 - DNA, 12 bp, Unknown
  misc_feature (1)..( 12): Result.004 file - promoters50/1380418
ccttattcaaga

SEQ ID NO: 166126 - DNA, 12 bp, Unknown
  misc_feature (1)..( 12): Result.004 file - promoters50/1380418
tcttatgcaaga

SEQ ID NO: 166127 - DNA, 12 bp, Unknown
  misc_feature (1)..( 12): Result.004 file - promoters50/1380418
tatttttcttct

SEQ ID NO: 166128 - DNA, 10 bp, Unknown
  misc_feature (1)..( 10): Result.004 file - promoters50/1380418
atttctagat

SEQ ID NO: 166129 - DNA, 10 bp, Unknown
  misc_feature (1)..( 10): Result.004 file - promoters50/1380418
tattcaagat

SEQ ID NO: 166130 - DNA, 10 bp, Unknown
  misc_feature (1)..( 10): Result.004 file - promoters50/1380418
ttttctagca

SEQ ID NO: 166131 - DNA, 10 bp, Unknown
  misc_feature (1)..( 10): Result.004 file - promoters50/1380418
caatctcgat

SEQ ID NO: 166132 - DNA, 10 bp, Unknown
  misc_feature (1)..( 10): Result.004 file - promoters50/1380418
ttttctttct

SEQ ID NO: 166133 - DNA, 10 bp, Unknown
  misc_feature (1)..( 10): Result.004 file - promoters50/1380424
ttttctcaag

SEQ ID NO: 166134 - DNA, 7 bp, Unknown
  misc_feature (1)..( 7): Result.004 file - promoters50/1380424
attccag

SEQ ID NO: 166135 - DNA, 7 bp, Unknown
  misc_feature (1)..( 7): Result.004 file - promoters50/1380424
attccaa

SEQ ID NO: 166136 - DNA, 7 bp, Unknown
  misc_feature (1)..( 7): Result.004 file - promoters50/1380424
attgcaa

SEQ ID NO: 166137 - DNA, 7 bp, Unknown
  misc_feature (1)..( 7): Result.004 file - promoters50/1380424
agaaatt

SEQ ID NO: 166138 - DNA, 7 bp, Unknown
  misc_feature (1)..( 7): Result.004 file - promoters50/1380424
tgaaatt

SEQ ID NO: 166139 - DNA, 7 bp, Unknown
  misc_feature (1)..( 7): Result.004 file - promoters50/1380437
tgaaata

SEQ ID NO: 166140 - DNA, 7 bp, Unknown
  misc_feature (1)..( 7): Result.004 file - promoters50/1380437
aacaaaa

SEQ ID NO: 166141 - DNA, 7 bp, Unknown
  misc_feature (1)..( 7): Result.004 file - promoters50/1380437
aactaaa

SEQ ID NO: 166142 - DNA, 7 bp, Unknown
  misc_feature (1)..( 7): Result.004 file - promoters50/1380437
cacaaaa

SEQ ID NO: 166143 - DNA, 9 bp, Unknown
  misc_feature (1)..( 9): Result.004 file - promoters50/1380437
gaagaaaag

SEQ ID NO: 166144 - DNA, 9 bp, Unknown
  misc_feature (1)..( 9): Result.004 file - promoters50/1380437
aaagaaaag

SEQ ID NO: 166145 - DNA, 9 bp, Unknown
  misc_feature (1)..( 9): Result.004 file - promoters50/1380519
aaagtaaag

SEQ ID NO: 166146 - DNA, 9 bp, Unknown
  misc_feature (1)..( 9): Result.004 file - promoters50/1380519
tctcaaact

SEQ ID NO: 166147 - DNA, 9 bp, Unknown
  misc_feature (1)..( 9): Result.004 file - promoters50/1380519
tctaaaaag

SEQ ID NO: 166148 - DNA, 9 bp, Unknown
  misc_feature (1)..( 9): Result.004 file - promoters50/1380519
tatcatact

SEQ ID NO: 166149 - DNA, 8 bp, Unknown
  misc_feature (1)..( 8): Result.004 file - promoters50/1380519
gagcaaaa

SEQ ID NO: 166150 - DNA, 8 bp, Unknown
  misc_feature (1)..( 8): Result.004 file - promoters50/1380519
gagaaaaa

SEQ ID NO: 166151 - DNA, 8 bp, Unknown
  misc_feature (1)..( 8): Result.004 file - promoters50/1380708
gagcaatg

SEQ ID NO: 166152 - DNA, 7 bp, Unknown
  misc_feature (1)..( 7): Result.004 file - promoters50/1380708
aattttt

SEQ ID NO: 166153 - DNA, 7 bp, Unknown
  misc_feature (1)..( 7): Result.004 file - promoters50/1380708
aattttt

SEQ ID NO: 166154 - DNA, 7 bp, Unknown
  misc_feature (1)..( 7): Result.004 file - promoters50/1380708
gattttt

SEQ ID NO: 166155 - DNA, 11 bp, Unknown
  misc_feature (1)..( 11): Result.004 file - promoters50/1380708
taacatttttt

SEQ ID NO: 166156 - DNA, 11 bp, Unknown
  misc_feature (1)..( 11): Result.004 file - promoters50/1380708
agaattttttt

SEQ ID NO: 166157 - DNA, 11 bp, Unknown
  misc_feature (1)..( 11): Result.004 file - promoters50/1380708
taagatttttg

SEQ ID NO: 166158 - DNA, 9 bp, Unknown
  misc_feature (1)..( 9): Result.004 file - promoters50/1380708
tttaatcag

SEQ ID NO: 166159 - DNA, 9 bp, Unknown
  misc_feature (1)..( 9): Result.004 file - promoters50/1380708
tttattcag

SEQ ID NO: 166160 - DNA, 9 bp, Unknown
  misc_feature (1)..( 9): Result.004 file - promoters50/1380738
gttattcga

SEQ ID NO: 166161 - DNA, 16 bp, Unknown
  misc_feature (1)..( 16): Result.004 file - promoters50/1380738
attacattatttttat

SEQ ID NO: 166162 - DNA, 16 bp, Unknown
  misc_feature (1)..( 16): Result.004 file - promoters50/1380738
cctacaatataagata

SEQ ID NO: 166163 - DNA, 16 bp, Unknown
  misc_feature (1)..( 16): Result.004 file - promoters50/1380738
attaaattaacaaaac

SEQ ID NO: 166164 - DNA, 16 bp, Unknown
  misc_feature (1)..( 16): Result.004 file - promoters50/1380738
ttattaatatgagata

SEQ ID NO: 166165 - DNA, 16 bp, Unknown
  misc_feature (1)..( 16): Result.004 file - promoters50/1380738
ttgacatacaagccat

SEQ ID NO: 166166 - DNA, 16 bp, Unknown
  misc_feature (1)..( 16): Result.004 file - promoters50/1380738
tttaaatacatcaata

SEQ ID NO: 166167 - DNA, 16 bp, Unknown
  misc_feature (1)..( 16): Result.004 file - promoters50/1380738
tttaatttattcctat

SEQ ID NO: 166168 - DNA, 13 bp, Unknown
  misc_feature (1)..( 13): Result.004 file - promoters50/1380738
actaattccaaac

SEQ ID NO: 166169 - DNA, 13 bp, Unknown
  misc_feature (1)..( 13): Result.004 file - promoters50/1380738
taagattacaaag

SEQ ID NO: 166170 - DNA, 13 bp, Unknown
  misc_feature (1)..( 13): Result.004 file - promoters50/1380738
ttttattaaaaac

SEQ ID NO: 166171 - DNA, 13 bp, Unknown
  misc_feature (1)..( 13): Result.004 file - promoters50/1380738
ttttcttaaaagt

SEQ ID NO: 166172 - DNA, 13 bp, Unknown
  misc_feature (1)..( 13): Result.004 file - promoters50/1380738
tgtcatttaaacc

SEQ ID NO: 166173 - DNA, 13 bp, Unknown
  misc_feature (1)..( 13): Result.004 file - promoters50/1380738
aggaaagaaaaac

SEQ ID NO: 166174 - DNA, 15 bp, Unknown
  misc_feature (1)..( 15): Result.004 file - promoters50/1380738
ttatttttaccaacc

SEQ ID NO: 166175 - DNA, 15 bp, Unknown
  misc_feature (1)..( 15): Result.004 file - promoters50/1380738
ttattattaactaaa

SEQ ID NO: 166176 - DNA, 15 bp, Unknown
  misc_feature (1)..( 15): Result.004 file - promoters50/1380738
gaatttttagtagat

SEQ ID NO: 166177 - DNA, 15 bp, Unknown
  misc_feature (1)..( 15): Result.004 file - promoters50/1380738
ctttttttcccaaag

SEQ ID NO: 166178 - DNA, 15 bp, Unknown
  misc_feature (1)..( 15): Result.004 file - promoters50/1380738
aagtttttctgttta

SEQ ID NO: 166179 - DNA, 15 bp, Unknown
  misc_feature (1)..( 15): Result.004 file - promoters50/1380738
atattaataattaaa

SEQ ID NO: 166180 - DNA, 15 bp, Unknown
  misc_feature (1)..( 15): Result.004 file - promoters50/1380738
tgatttatcctaagc

SEQ ID NO: 166181 - DNA, 11 bp, Unknown
  misc_feature (1)..( 11): Result.004 file - promoters50/1380738
cttaaatttaa

SEQ ID NO: 166182 - DNA, 11 bp, Unknown
  misc_feature (1)..( 11): Result.004 file - promoters50/1380738
tttaaatttat

SEQ ID NO: 166183 - DNA, 11 bp, Unknown
  misc_feature (1)..( 11): Result.004 file - promoters50/1380738
aatgtatttaa

SEQ ID NO: 166184 - DNA, 11 bp, Unknown
  misc_feature (1)..( 11): Result.004 file - promoters50/1380738
taacaatttag

SEQ ID NO: 166185 - DNA, 11 bp, Unknown
  misc_feature (1)..( 11): Result.004 file - promoters50/1380738
cttaaatggct

SEQ ID NO: 166186 - DNA, 11 bp, Unknown
  misc_feature (1)..( 11): Result.004 file - promoters50/1380797
ttttaatgatt

SEQ ID NO: 166187 - DNA, 8 bp, Unknown
  misc_feature (1)..( 8): Result.004 file - promoters50/1380797
cttatgga

SEQ ID NO: 166188 - DNA, 8 bp, Unknown
  misc_feature (1)..( 8): Result.004 file - promoters50/1380797
attatgga

SEQ ID NO: 166189 - DNA, 8 bp, Unknown
  misc_feature (1)..( 8): Result.004 file - promoters50/1380797
attttgga

SEQ ID NO: 166190 - DNA, 7 bp, Unknown
  misc_feature (1)..( 7): Result.004 file - promoters50/1380797
aatcaat

SEQ ID NO: 166191 - DNA, 7 bp, Unknown
  misc_feature (1)..( 7): Result.004 file - promoters50/1380797
aatgaat

SEQ ID NO: 166192 - DNA, 7 bp, Unknown
  misc_feature (1)..( 7): Result.004 file - promoters50/1380797
aatgaat

SEQ ID NO: 166193 - DNA, 7 bp, Unknown
  misc_feature (1)..( 7): Result.004 file - promoters50/1380797
aaaaagt

SEQ ID NO: 166194 - DNA, 7 bp, Unknown
  misc_feature (1)..( 7): Result.004 file - promoters50/1380797
aaatagt

SEQ ID NO: 166195 - DNA, 7 bp, Unknown
  misc_feature (1)..( 7): Result.004 file - promoters50/1380849
aaacata

SEQ ID NO: 166196 - DNA, 12 bp, Unknown
  misc_feature (1)..( 12): Result.004 file - promoters50/1380849
cttatttttctt

SEQ ID NO: 166197 - DNA, 12 bp, Unknown
  misc_feature (1)..( 12): Result.004 file - promoters50/1380849
cttgtttccaag

SEQ ID NO: 166198 - DNA, 12 bp, Unknown
  misc_feature (1)..( 12): Result.004 file - promoters50/1380849
tttatttttctt

SEQ ID NO: 166199 - DNA, 12 bp, Unknown
  misc_feature (1)..( 12): Result.004 file - promoters50/1380849
tgtatttttttt

SEQ ID NO: 166200 - DNA, 16 bp, Unknown
  misc_feature (1)..( 16): Result.004 file - promoters50/1380849
ttaggaatctttgaga

SEQ ID NO: 166201 - DNA, 16 bp, Unknown
  misc_feature (1)..( 16): Result.004 file - promoters50/1380849
gagttttgtttttaga

SEQ ID NO: 166202 - DNA, 16 bp, Unknown
  misc_feature (1)..( 16): Result.004 file - promoters50/1380849
tgattaatatttgaag

SEQ ID NO: 166203 - DNA, 16 bp, Unknown
  misc_feature (1)..( 16): Result.004 file - promoters50/1380849
tgataaatcttttttt

SEQ ID NO: 166204 - DNA, 8 bp, Unknown
  misc_feature (1)..( 8): Result.004 file - promoters50/1380849
gaatcttt

SEQ ID NO: 166205 - DNA, 8 bp, Unknown
  misc_feature (1)..( 8): Result.004 file - promoters50/1380849
aaatcttt

SEQ ID NO: 166206 - DNA, 9 bp, Unknown
  misc_feature (1)..( 9): Result.004 file - promoters50/1380849
agatcattt

SEQ ID NO: 166207 - DNA, 9 bp, Unknown
  misc_feature (1)..( 9): Result.004 file - promoters50/1380849
aaatgttta

SEQ ID NO: 166208 - DNA, 9 bp, Unknown
  misc_feature (1)..( 9): Result.004 file - promoters50/1380849
aatttatta

SEQ ID NO: 166209 - DNA, 9 bp, Unknown
  misc_feature (1)..( 9): Result.004 file - promoters50/1380849
tttttttta

SEQ ID NO: 166210 - DNA, 9 bp, Unknown
  misc_feature (1)..( 9): Result.004 file - promoters50/1380849
aattaatta

SEQ ID NO: 166211 - DNA, 9 bp, Unknown
  misc_feature (1)..( 9): Result.004 file - promoters50/1380849
aaaaaatta

SEQ ID NO: 166212 - DNA, 11 bp, Unknown
  misc_feature (1)..( 11): Result.004 file - promoters50/1380849
atgttagtttg

SEQ ID NO: 166213 - DNA, 11 bp, Unknown
  misc_feature (1)..( 11): Result.004 file - promoters50/1380849
tttatagattg

SEQ ID NO: 166214 - DNA, 11 bp, Unknown
  misc_feature (1)..( 11): Result.004 file - promoters50/1380849
tttttagatca

SEQ ID NO: 166215 - DNA, 11 bp, Unknown
  misc_feature (1)..( 11): Result.004 file - promoters50/1380947
cagttagatct

SEQ ID NO: 166216 - DNA, 7 bp, Unknown
  misc_feature (1)..( 7): Result.004 file - promoters50/1380947
gatcgaa

SEQ ID NO: 166217 - DNA, 7 bp, Unknown
  misc_feature (1)..( 7): Result.004 file - promoters50/1380947
gatggaa

SEQ ID NO: 166218 - DNA, 7 bp, Unknown
  misc_feature (1)..( 7): Result.004 file - promoters50/1380947
gatcgat

SEQ ID NO: 166219 - DNA, 7 bp, Unknown
  misc_feature (1)..( 7): Result.004 file - promoters50/1380963
gatggat

SEQ ID NO: 166220 - DNA, 10 bp, Unknown
  misc_feature (1)..( 10): Result.004 file - promoters50/1380963
tattatatat

SEQ ID NO: 166221 - DNA, 10 bp, Unknown
  misc_feature (1)..( 10): Result.004 file - promoters50/1380963
tatcatattt

SEQ ID NO: 166222 - DNA, 10 bp, Unknown
  misc_feature (1)..( 10): Result.004 file - promoters50/1380963
caatatataa

SEQ ID NO: 166223 - DNA, 10 bp, Unknown
  misc_feature (1)..( 10): Result.004 file - promoters50/1380963
acttatgtaa

SEQ ID NO: 166224 - DNA, 7 bp, Unknown
  misc_feature (1)..( 7): Result.004 file - promoters50/1380963
tatatat

SEQ ID NO: 166225 - DNA, 7 bp, Unknown
  misc_feature (1)..( 7): Result.004 file - promoters50/1380963
gatatat

SEQ ID NO: 166226 - DNA, 7 bp, Unknown
  misc_feature (1)..( 7): Result.004 file - promoters50/1380963
tatataa

SEQ ID NO: 166227 - DNA, 7 bp, Unknown
  misc_feature (1)..( 7): Result.004 file - promoters50/1380963
tatgtaa

SEQ ID NO: 166228 - DNA, 12 bp, Unknown
  misc_feature (1)..( 12): Result.004 file - promoters50/1380963
gattattatttc

SEQ ID NO: 166229 - DNA, 12 bp, Unknown
  misc_feature (1)..( 12): Result.004 file - promoters50/1380963
aattcttaatgt

SEQ ID NO: 166230 - DNA, 12 bp, Unknown
  misc_feature (1)..( 12): Result.004 file - promoters50/1380963
tataatttatgc

SEQ ID NO: 166231 - DNA, 12 bp, Unknown
  misc_feature (1)..( 12): Result.004 file - promoters50/1380963
taaaattaatgc

SEQ ID NO: 166232 - DNA, 11 bp, Unknown
  misc_feature (1)..( 11): Result.004 file - promoters50/1380963
tcaaccaatta

SEQ ID NO: 166233 - DNA, 11 bp, Unknown
  misc_feature (1)..( 11): Result.004 file - promoters50/1380963
cttaccaattg

SEQ ID NO: 166234 - DNA, 11 bp, Unknown
  misc_feature (1)..( 11): Result.004 file - promoters50/1380963
tcaatcaaggc

SEQ ID NO: 166235 - DNA, 11 bp, Unknown
  misc_feature (1)..( 11): Result.004 file - promoters50/1381002
caaaccatttg

SEQ ID NO: 166236 - DNA, 16 bp, Unknown
  misc_feature (1)..( 16): Result.004 file - promoters50/1381002
tattaaattttaattg

SEQ ID NO: 166237 - DNA, 16 bp, Unknown
  misc_feature (1)..( 16): Result.004 file - promoters50/1381002
tcaaaaactttcataa

SEQ ID NO: 166238 - DNA, 16 bp, Unknown
  misc_feature (1)..( 16): Result.004 file - promoters50/1381002
tatcaaattgacttgt

SEQ ID NO: 166239 - DNA, 16 bp, Unknown
  misc_feature (1)..( 16): Result.004 file - promoters50/1381002
catgttactttcttaa

SEQ ID NO: 166240 - DNA, 16 bp, Unknown
  misc_feature (1)..( 16): Result.004 file - promoters50/1381002
attcttacttgttcta

SEQ ID NO: 166241 - DNA, 16 bp, Unknown
  misc_feature (1)..( 16): Result.004 file - promoters50/1381002
tttcagattctgattt

SEQ ID NO: 166242 - DNA, 14 bp, Unknown
  misc_feature (1)..( 14): Result.004 file - promoters50/1381002
acattaaataatat

SEQ ID NO: 166243 - DNA, 14 bp, Unknown
  misc_feature (1)..( 14): Result.004 file - promoters50/1381002
gactaaaataaagg

SEQ ID NO: 166244 - DNA, 14 bp, Unknown
  misc_feature (1)..( 14): Result.004 file - promoters50/1381002
gagtcaattatagg

SEQ ID NO: 166245 - DNA, 14 bp, Unknown
  misc_feature (1)..( 14): Result.004 file - promoters50/1381002
actacaattaagcc

SEQ ID NO: 166246 - DNA, 14 bp, Unknown
  misc_feature (1)..( 14): Result.004 file - promoters50/1381002
gagagaaaaaaaag

SEQ ID NO: 166247 - DNA, 14 bp, Unknown
  misc_feature (1)..( 14): Result.004 file - promoters50/1381033
aatggaataaaatc

SEQ ID NO: 166248 - DNA, 11 bp, Unknown
  misc_feature (1)..( 11): Result.004 file - promoters50/1381033
ttatacatatg

SEQ ID NO: 166249 - DNA, 11 bp, Unknown
  misc_feature (1)..( 11): Result.004 file - promoters50/1381033
tgataaatatg

SEQ ID NO: 166250 - DNA, 11 bp, Unknown
  misc_feature (1)..( 11): Result.004 file - promoters50/1381033
ttatacataac

SEQ ID NO: 166251 - DNA, 11 bp, Unknown
  misc_feature (1)..( 11): Result.004 file - promoters50/1381097
ttaaaaatatc

SEQ ID NO: 166252 - DNA, 12 bp, Unknown
  misc_feature (1)..( 12): Result.004 file - promoters50/1381097
ttttgcaatttt

SEQ ID NO: 166253 - DNA, 12 bp, Unknown
  misc_feature (1)..( 12): Result.004 file - promoters50/1381097
taaggcaaattt

SEQ ID NO: 166254 - DNA, 8 bp, Unknown
  misc_feature (1)..( 8): Result.004 file - promoters50/1381097
ataatttt

SEQ ID NO: 166255 - DNA, 12 bp, Unknown
  misc_feature (1)..( 12): Result.004 file - promoters50/1381097
taagccaaacgc

SEQ ID NO: 166256 - DNA, 9 bp, Unknown
  misc_feature (1)..( 9): Result.004 file - promoters50/1381097
tattgaaat

SEQ ID NO: 166257 - DNA, 9 bp, Unknown
  misc_feature (1)..( 9): Result.004 file - promoters50/1381097
tattaaaaa

SEQ ID NO: 166258 - DNA, 9 bp, Unknown
  misc_feature (1)..( 9): Result.004 file - promoters50/1381097
tcatgaaat

SEQ ID NO: 166259 - DNA, 10 bp, Unknown
  misc_feature (1)..( 10): Result.004 file - promoters50/1381097
tttatacaat

SEQ ID NO: 166260 - DNA, 10 bp, Unknown
  misc_feature (1)..( 10): Result.004 file - promoters50/1381097
tttatataat

SEQ ID NO: 166261 - DNA, 10 bp, Unknown
  misc_feature (1)..( 10): Result.004 file - promoters50/1381097
cttatatcat

SEQ ID NO: 166262 - DNA, 9 bp, Unknown
  misc_feature (1)..( 9): Result.004 file - promoters50/1381097
agaaaataa

SEQ ID NO: 166263 - DNA, 9 bp, Unknown
  misc_feature (1)..( 9): Result.004 file - promoters50/1381097
agaaaaaat

SEQ ID NO: 166264 - DNA, 9 bp, Unknown
  misc_feature (1)..( 9): Result.004 file - promoters50/1381097
tgaaaaaat

SEQ ID NO: 166265 - DNA, 9 bp, Unknown
  misc_feature (1)..( 9): Result.004 file - promoters50/1381097
aaaataata

SEQ ID NO: 166266 - DNA, 9 bp, Unknown
  misc_feature (1)..( 9): Result.004 file - promoters50/1381097
gaaaaaata

SEQ ID NO: 166267 - DNA, 9 bp, Unknown
  misc_feature (1)..( 9): Result.004 file - promoters50/1381097
gaaaaaatt

SEQ ID NO: 166268 - DNA, 13 bp, Unknown
  misc_feature (1)..( 13): Result.004 file - promoters50/1381097
ttgattcttaatt

SEQ ID NO: 166269 - DNA, 13 bp, Unknown
  misc_feature (1)..( 13): Result.004 file - promoters50/1381097
ttgatttttaaat

SEQ ID NO: 166270 - DNA, 13 bp, Unknown
  misc_feature (1)..( 13): Result.004 file - promoters50/1381097
aagagtttcaaat

SEQ ID NO: 166271 - DNA, 15 bp, Unknown
  misc_feature (1)..( 15): Result.004 file - promoters50/1381097
tttggaaatgtgttt

SEQ ID NO: 166272 - DNA, 15 bp, Unknown
  misc_feature (1)..( 15): Result.004 file - promoters50/1381097
tttggatatgtattt

SEQ ID NO: 166273 - DNA, 15 bp, Unknown
  misc_feature (1)..( 15): Result.004 file - promoters50/1381097
gtgggatataattta

SEQ ID NO: 166274 - DNA, 9 bp, Unknown
  misc_feature (1)..( 9): Result.004 file - promoters50/1381097
ccaaacttt

SEQ ID NO: 166275 - DNA, 9 bp, Unknown
  misc_feature (1)..( 9): Result.004 file - promoters50/1381097
ccaaatttt

SEQ ID NO: 166276 - DNA, 9 bp, Unknown
  misc_feature (1)..( 9): Result.004 file - promoters50/1381119
ccaaacgca

SEQ ID NO: 166277 - DNA, 13 bp, Unknown
  misc_feature (1)..( 13): Result.004 file - promoters50/1381119
actattttatata

SEQ ID NO: 166278 - DNA, 13 bp, Unknown
  misc_feature (1)..( 13): Result.004 file - promoters50/1381119
ttaattttaaata

SEQ ID NO: 166279 - DNA, 13 bp, Unknown
  misc_feature (1)..( 13): Result.004 file - promoters50/1381119
ttagttttggttc

SEQ ID NO: 166280 - DNA, 10 bp, Unknown
  misc_feature (1)..( 10): Result.004 file - promoters50/1381119
tttactattt

SEQ ID NO: 166281 - DNA, 10 bp, Unknown
  misc_feature (1)..( 10): Result.004 file - promoters50/1381119
tagactgttt

SEQ ID NO: 166282 - DNA, 10 bp, Unknown
  misc_feature (1)..( 10): Result.004 file - promoters50/1381119
tttagtatcc

SEQ ID NO: 166283 - DNA, 7 bp, Unknown
  misc_feature (1)..( 7): Result.004 file - promoters50/1381119
tattttc

SEQ ID NO: 166284 - DNA, 7 bp, Unknown
  misc_feature (1)..( 7): Result.004 file - promoters50/1381119
tattttt

SEQ ID NO: 166285 - DNA, 8 bp, Unknown
  misc_feature (1)..( 8): Result.004 file - promoters50/1381119
aattgtta

SEQ ID NO: 166286 - DNA, 9 bp, Unknown
  misc_feature (1)..( 9): Result.004 file - promoters50/1381119
ttttgaata

SEQ ID NO: 166287 - DNA, 9 bp, Unknown
  misc_feature (1)..( 9): Result.004 file - promoters50/1381119
tttttaatt

SEQ ID NO: 166288 - DNA, 9 bp, Unknown
  misc_feature (1)..( 9): Result.004 file - promoters50/1381119
ggtttaatt

SEQ ID NO: 166289 - DNA, 10 bp, Unknown
  misc_feature (1)..( 10): Result.004 file - promoters50/1381119
tttcaattat

SEQ ID NO: 166290 - DNA, 10 bp, Unknown
  misc_feature (1)..( 10): Result.004 file - promoters50/1381119
tttcatttat

SEQ ID NO: 166291 - DNA, 10 bp, Unknown
  misc_feature (1)..( 10): Result.004 file - promoters50/1381155
tttcatcact

SEQ ID NO: 166292 - DNA, 9 bp, Unknown
  misc_feature (1)..( 9): Result.004 file - promoters50/1381155
tttctactt

SEQ ID NO: 166293 - DNA, 9 bp, Unknown
  misc_feature (1)..( 9): Result.004 file - promoters50/1381155
tttcttctt

SEQ ID NO: 166294 - DNA, 9 bp, Unknown
  misc_feature (1)..( 9): Result.004 file - promoters50/1381187
ttgctactt

SEQ ID NO: 166295 - DNA, 13 bp, Unknown
  misc_feature (1)..( 13): Result.004 file - promoters50/1381187
aatcgtacattat

SEQ ID NO: 166296 - DNA, 13 bp, Unknown
  misc_feature (1)..( 13): Result.004 file - promoters50/1381187
aattatacattat

SEQ ID NO: 166297 - DNA, 13 bp, Unknown
  misc_feature (1)..( 13): Result.004 file - promoters50/1381187
aattatatatttt

SEQ ID NO: 166298 - DNA, 7 bp, Unknown
  misc_feature (1)..( 7): Result.004 file - promoters50/1381187
tttctca

SEQ ID NO: 166299 - DNA, 7 bp, Unknown
  misc_feature (1)..( 7): Result.004 file - promoters50/1381187
gttctca

SEQ ID NO: 166300 - DNA, 7 bp, Unknown
  misc_feature (1)..( 7): Result.004 file - promoters50/1381187
tttctct

SEQ ID NO: 166301 - DNA, 8 bp, Unknown
  misc_feature (1)..( 8): Result.004 file - promoters50/1381187
aaagacat

SEQ ID NO: 166302 - DNA, 8 bp, Unknown
  misc_feature (1)..( 8): Result.004 file - promoters50/1381187
aaagccat

SEQ ID NO: 166303 - DNA, 8 bp, Unknown
  misc_feature (1)..( 8): Result.004 file - promoters50/1381187
caagagat

SEQ ID NO: 166304 - DNA, 8 bp, Unknown
  misc_feature (1)..( 8): Result.004 file - promoters50/1381187
gtaataaa

SEQ ID NO: 166305 - DNA, 8 bp, Unknown
  misc_feature (1)..( 8): Result.004 file - promoters50/1381187
tgaataaa

SEQ ID NO: 166306 - DNA, 9 bp, Unknown
  misc_feature (1)..( 9): Result.004 file - promoters50/1381187
tgaatgaaa

SEQ ID NO: 166307 - DNA, 9 bp, Unknown
  misc_feature (1)..( 9): Result.004 file - promoters50/1381187
ctcattttt

SEQ ID NO: 166308 - DNA, 9 bp, Unknown
  misc_feature (1)..( 9): Result.004 file - promoters50/1381187
ctcactttt

SEQ ID NO: 166309 - DNA, 9 bp, Unknown
  misc_feature (1)..( 9): Result.004 file - promoters50/1381187
cacactttt

SEQ ID NO: 166310 - DNA, 8 bp, Unknown
  misc_feature (1)..( 8): Result.004 file - promoters50/1381187
taacttat

SEQ ID NO: 166311 - DNA, 8 bp, Unknown
  misc_feature (1)..( 8): Result.004 file - promoters50/1381187
taaattaa

SEQ ID NO: 166312 - DNA, 8 bp, Unknown
  misc_feature (1)..( 8): Result.004 file - promoters50/1381187
ttaattaa

SEQ ID NO: 166313 - DNA, 9 bp, Unknown
  misc_feature (1)..( 9): Result.004 file - promoters50/1381187
attgctttc

SEQ ID NO: 166314 - DNA, 9 bp, Unknown
  misc_feature (1)..( 9): Result.004 file - promoters50/1381187
tttggtttc

SEQ ID NO: 166315 - DNA, 9 bp, Unknown
  misc_feature (1)..( 9): Result.004 file - promoters50/1381187
tttagtttg

SEQ ID NO: 166316 - DNA, 8 bp, Unknown
  misc_feature (1)..( 8): Result.004 file - promoters50/1381187
tttagttt

SEQ ID NO: 166317 - DNA, 8 bp, Unknown
  misc_feature (1)..( 8): Result.004 file - promoters50/1381187
tttagtgt

SEQ ID NO: 166318 - DNA, 8 bp, Unknown
  misc_feature (1)..( 8): Result.004 file - promoters50/1381195
tttggttt

SEQ ID NO: 166319 - DNA, 7 bp, Unknown
  misc_feature (1)..( 7): Result.004 file - promoters50/1381195
taattgg

SEQ ID NO: 166320 - DNA, 7 bp, Unknown
  misc_feature (1)..( 7): Result.004 file - promoters50/1381195
taagtgg

SEQ ID NO: 166321 - DNA, 7 bp, Unknown
  misc_feature (1)..( 7): Result.004 file - promoters50/1381321
taaatgg

SEQ ID NO: 166322 - DNA, 14 bp, Unknown
  misc_feature (1)..( 14): Result.004 file - promoters50/1381321
tcaaagagaaattc

SEQ ID NO: 166323 - DNA, 14 bp, Unknown
  misc_feature (1)..( 14): Result.004 file - promoters50/1381321
ggacagagacattc

SEQ ID NO: 166324 - DNA, 14 bp, Unknown
  misc_feature (1)..( 14): Result.004 file - promoters50/1381334
tcaaagtgaattat

SEQ ID NO: 166325 - DNA, 8 bp, Unknown
  misc_feature (1)..( 8): Result.004 file - promoters50/1381334
ttatatta

SEQ ID NO: 166326 - DNA, 8 bp, Unknown
  misc_feature (1)..( 8): Result.004 file - promoters50/1381334
ttaaattg

SEQ ID NO: 166327 - DNA, 8 bp, Unknown
  misc_feature (1)..( 8): Result.004 file - promoters50/1381342
ccaaattg

SEQ ID NO: 166328 - DNA, 8 bp, Unknown
  misc_feature (1)..( 8): Result.004 file - promoters50/1381342
ttattttc

SEQ ID NO: 166329 - DNA, 8 bp, Unknown
  misc_feature (1)..( 8): Result.004 file - promoters50/1381342
ttactttg

SEQ ID NO: 166330 - DNA, 8 bp, Unknown
  misc_feature (1)..( 8): Result.004 file - promoters50/1381342
tttctttt

SEQ ID NO: 166331 - DNA, 9 bp, Unknown
  misc_feature (1)..( 9): Result.004 file - promoters50/1381342
tttttcttc

SEQ ID NO: 166332 - DNA, 9 bp, Unknown
  misc_feature (1)..( 9): Result.004 file - promoters50/1381342
tttttctca

SEQ ID NO: 166333 - DNA, 9 bp, Unknown
  misc_feature (1)..( 9): Result.004 file - promoters50/1381387
cgtttctca

SEQ ID NO: 166334 - DNA, 13 bp, Unknown
  misc_feature (1)..( 13): Result.004 file - promoters50/1381387
attgtgttttacg

SEQ ID NO: 166335 - DNA, 13 bp, Unknown
  misc_feature (1)..( 13): Result.004 file - promoters50/1381387
aatgtgatttacg

SEQ ID NO: 166336 - DNA, 13 bp, Unknown
  misc_feature (1)..( 13): Result.004 file - promoters50/1381387
ttaatgatttcat

SEQ ID NO: 166337 - DNA, 13 bp, Unknown
  misc_feature (1)..( 13): Result.004 file - promoters50/1381387
tatccgaattatt

SEQ ID NO: 166338 - DNA, 13 bp, Unknown
  misc_feature (1)..( 13): Result.004 file - promoters50/1381387
ttattgatttcac

SEQ ID NO: 166339 - DNA, 13 bp, Unknown
  misc_feature (1)..( 13): Result.004 file - promoters50/1381457
aatatgaatttgc

SEQ ID NO: 166340 - DNA, 11 bp, Unknown
  misc_feature (1)..( 11): Result.004 file - promoters50/1381457
ggcttttgacc

SEQ ID NO: 166341 - DNA, 11 bp, Unknown
  misc_feature (1)..( 11): Result.004 file - promoters50/1381457
aggttttgaaa

SEQ ID NO: 166342 - DNA, 11 bp, Unknown
  misc_feature (1)..( 11): Result.004 file - promoters50/1381457
agattttgatt

SEQ ID NO: 166343 - DNA, 11 bp, Unknown
  misc_feature (1)..( 11): Result.004 file - promoters50/1381457
ggcttatgaat

SEQ ID NO: 166344 - DNA, 11 bp, Unknown
  misc_feature (1)..( 11): Result.004 file - promoters50/1381457
gtcttatgtgg

SEQ ID NO: 166345 - DNA, 11 bp, Unknown
  misc_feature (1)..( 11): Result.004 file - promoters50/1381457
tctgtttcatt

SEQ ID NO: 166346 - DNA, 11 bp, Unknown
  misc_feature (1)..( 11): Result.004 file - promoters50/1381481
taagtataaat

SEQ ID NO: 166347 - DNA, 11 bp, Unknown
  misc_feature (1)..( 11): Result.004 file - promoters50/1381481
aaaacataaat

SEQ ID NO: 166348 - DNA, 11 bp, Unknown
  misc_feature (1)..( 11): Result.004 file - promoters50/1381481
aaaaaataaat

SEQ ID NO: 166349 - DNA, 11 bp, Unknown
  misc_feature (1)..( 11): Result.004 file - promoters50/1381481
tgaacatacct

SEQ ID NO: 166350 - DNA, 6 bp, Unknown
  misc_feature (1)..( 6): Result.004 file - promoters50/1381481
tttcga

SEQ ID NO: 166351 - DNA, 6 bp, Unknown
  misc_feature (1)..( 6): Result.004 file - promoters50/1381481
tttcga

SEQ ID NO: 166352 - DNA, 6 bp, Unknown
  misc_feature (1)..( 6): Result.004 file - promoters50/1381491
tttcga

SEQ ID NO: 166353 - DNA, 8 bp, Unknown
  misc_feature (1)..( 8): Result.004 file - promoters50/1381491
caatttaa

SEQ ID NO: 166354 - DNA, 8 bp, Unknown
  misc_feature (1)..( 8): Result.004 file - promoters50/1381491
acatttaa

SEQ ID NO: 166355 - DNA, 8 bp, Unknown
  misc_feature (1)..( 8): Result.004 file - promoters50/1381491
acatataa

SEQ ID NO: 166356 - DNA, 8 bp, Unknown
  misc_feature (1)..( 8): Result.004 file - promoters50/1381491
aaacacaa

SEQ ID NO: 166357 - DNA, 8 bp, Unknown
  misc_feature (1)..( 8): Result.004 file - promoters50/1381491
aaaaacat

SEQ ID NO: 166358 - DNA, 8 bp, Unknown
  misc_feature (1)..( 8): Result.004 file - promoters50/1381491
ggacacaa

SEQ ID NO: 166359 - DNA, 11 bp, Unknown
  misc_feature (1)..( 11): Result.004 file - promoters50/1381491
gaagaaaaaca

SEQ ID NO: 166360 - DNA, 11 bp, Unknown
  misc_feature (1)..( 11): Result.004 file - promoters50/1381491
gaagcaaaacc

SEQ ID NO: 166361 - DNA, 11 bp, Unknown
  misc_feature (1)..( 11): Result.004 file - promoters50/1381491
atctcaaaacc

SEQ ID NO: 166362 - DNA, 10 bp, Unknown
  misc_feature (1)..( 10): Result.004 file - promoters50/1381491
aaaaacagct

SEQ ID NO: 166363 - DNA, 10 bp, Unknown
  misc_feature (1)..( 10): Result.004 file - promoters50/1381491
caaaacaacc

SEQ ID NO: 166364 - DNA, 11 bp, Unknown
  misc_feature (1)..( 11): Result.004 file - promoters50/1381491
aaagaactctt

SEQ ID NO: 166365 - DNA, 8 bp, Unknown
  misc_feature (1)..( 8): Result.004 file - promoters50/1381491
attaaatc

SEQ ID NO: 166366 - DNA, 8 bp, Unknown
  misc_feature (1)..( 8): Result.004 file - promoters50/1381491
attgaatt

SEQ ID NO: 166367 - DNA, 8 bp, Unknown
  misc_feature (1)..( 8): Result.004 file - promoters50/1381491
tctgaatt

SEQ ID NO: 166368 - DNA, 14 bp, Unknown
  misc_feature (1)..( 14): Result.004 file - promoters50/1381491
tctttcttatataa

SEQ ID NO: 166369 - DNA, 14 bp, Unknown
  misc_feature (1)..( 14): Result.004 file - promoters50/1381491
tctctcttacataa

SEQ ID NO: 166370 - DNA, 14 bp, Unknown
  misc_feature (1)..( 14): Result.004 file - promoters50/1381491
aaacccatatataa

SEQ ID NO: 166371 - DNA, 8 bp, Unknown
  misc_feature (1)..( 8): Result.004 file - promoters50/1381491
acatttaa

SEQ ID NO: 166372 - DNA, 8 bp, Unknown
  misc_feature (1)..( 8): Result.004 file - promoters50/1381491
acatataa

SEQ ID NO: 166373 - DNA, 8 bp, Unknown
  misc_feature (1)..( 8): Result.004 file - promoters50/1381491
acatttaa

SEQ ID NO: 166374 - DNA, 7 bp, Unknown
  misc_feature (1)..( 7): Result.004 file - promoters50/1381491
gttttag

SEQ ID NO: 166375 - DNA, 7 bp, Unknown
  misc_feature (1)..( 7): Result.004 file - promoters50/1381491
gttttat

SEQ ID NO: 166376 - DNA, 7 bp, Unknown
  misc_feature (1)..( 7): Result.004 file - promoters50/1381491
tttttat

SEQ ID NO: 166377 - DNA, 9 bp, Unknown
  misc_feature (1)..( 9): Result.004 file - promoters50/1381491
taagacaat

SEQ ID NO: 166378 - DNA, 9 bp, Unknown
  misc_feature (1)..( 9): Result.004 file - promoters50/1381491
aaagaaaat

SEQ ID NO: 166379 - DNA, 9 bp, Unknown
  misc_feature (1)..( 9): Result.004 file - promoters50/1381537
aaagaaaga

SEQ ID NO: 166380 - DNA, 9 bp, Unknown
  misc_feature (1)..( 9): Result.004 file - promoters50/1381537
taaaacaaa

SEQ ID NO: 166381 - DNA, 9 bp, Unknown
  misc_feature (1)..( 9): Result.004 file - promoters50/1381537
taaaccaat

SEQ ID NO: 166382 - DNA, 9 bp, Unknown
  misc_feature (1)..( 9): Result.004 file - promoters50/1381537
caaaataaa

SEQ ID NO: 166383 - DNA, 11 bp, Unknown
  misc_feature (1)..( 11): Result.004 file - promoters50/1381537
aaaatccttta

SEQ ID NO: 166384 - DNA, 11 bp, Unknown
  misc_feature (1)..( 11): Result.004 file - promoters50/1381537
aaaatgctttg

SEQ ID NO: 166385 - DNA, 11 bp, Unknown
  misc_feature (1)..( 11): Result.004 file - promoters50/1381537
attttccttta

SEQ ID NO: 166386 - DNA, 8 bp, Unknown
  misc_feature (1)..( 8): Result.004 file - promoters50/1381537
atttgtta

SEQ ID NO: 166387 - DNA, 8 bp, Unknown
  misc_feature (1)..( 8): Result.004 file - promoters50/1381537
ttttgttt

SEQ ID NO: 166388 - DNA, 8 bp, Unknown
  misc_feature (1)..( 8): Result.004 file - promoters50/1381563
ttttcttt

SEQ ID NO: 166389 - DNA, 14 bp, Unknown
  misc_feature (1)..( 14): Result.004 file - promoters50/1381563
tgaatttgatgaat

SEQ ID NO: 166390 - DNA, 14 bp, Unknown
  misc_feature (1)..( 14): Result.004 file - promoters50/1381563
acctgctgaagaaa

SEQ ID NO: 166391 - DNA, 14 bp, Unknown
  misc_feature (1)..( 14): Result.004 file - promoters50/1381563
ttccacggataaat

SEQ ID NO: 166392 - DNA, 14 bp, Unknown
  misc_feature (1)..( 14): Result.004 file - promoters50/1381563
tgaatatgatgatg

SEQ ID NO: 166393 - DNA, 14 bp, Unknown
  misc_feature (1)..( 14): Result.004 file - promoters50/1381563
caaagtagataaaa

SEQ ID NO: 166394 - DNA, 14 bp, Unknown
  misc_feature (1)..( 14): Result.004 file - promoters50/1381563
taatttacataaaa

SEQ ID NO: 166395 - DNA, 12 bp, Unknown
  misc_feature (1)..( 12): Result.004 file - promoters50/1381563
ttttagaaaaaa

SEQ ID NO: 166396 - DNA, 12 bp, Unknown
  misc_feature (1)..( 12): Result.004 file - promoters50/1381563
cattacaaaaag

SEQ ID NO: 166397 - DNA, 12 bp, Unknown
  misc_feature (1)..( 12): Result.004 file - promoters50/1381563
gtttagaagaag

SEQ ID NO: 166398 - DNA, 12 bp, Unknown
  misc_feature (1)..( 12): Result.004 file - promoters50/1381563
ttttaaaaactt

SEQ ID NO: 166399 - DNA, 12 bp, Unknown
  misc_feature (1)..( 12): Result.004 file - promoters50/1381563
agaaggaaaaaa

SEQ ID NO: 166400 - DNA, 12 bp, Unknown
  misc_feature (1)..( 12): Result.004 file - promoters50/1381563
ccttataaaaca

SEQ ID NO: 166401 - DNA, 12 bp, Unknown
  misc_feature (1)..( 12): Result.004 file - promoters50/1381563
aggtacaaactt

SEQ ID NO: 166402 - DNA, 17 bp, Unknown
  misc_feature (1)..( 17): Result.004 file - promoters50/1381563
ttctttgaatttgatga

SEQ ID NO: 166403 - DNA, 17 bp, Unknown
  misc_feature (1)..( 17): Result.004 file - promoters50/1381563
atatttaaatgggccta

SEQ ID NO: 166404 - DNA, 17 bp, Unknown
  misc_feature (1)..( 17): Result.004 file - promoters50/1381563
tgatttttggtggtgaa

SEQ ID NO: 166405 - DNA, 17 bp, Unknown
  misc_feature (1)..( 17): Result.004 file - promoters50/1381563
aggtctgaatatgatga

SEQ ID NO: 166406 - DNA, 17 bp, Unknown
  misc_feature (1)..( 17): Result.004 file - promoters50/1381563
cactttaaaatcacatc

SEQ ID NO: 166407 - DNA, 18 bp, Unknown
  misc_feature (1)..( 18): Result.004 file - promoters50/1381563
gattttataatataaata

SEQ ID NO: 166408 - DNA, 14 bp, Unknown
  misc_feature (1)..( 14): Result.004 file - promoters50/1381563
attttaaaaaggag

SEQ ID NO: 166409 - DNA, 14 bp, Unknown
  misc_feature (1)..( 14): Result.004 file - promoters50/1381563
ttcgtaaaaattta

SEQ ID NO: 166410 - DNA, 14 bp, Unknown
  misc_feature (1)..( 14): Result.004 file - promoters50/1381563
tttttaaagttcca

SEQ ID NO: 166411 - DNA, 14 bp, Unknown
  misc_feature (1)..( 14): Result.004 file - promoters50/1381563
atacgaaagattgt

SEQ ID NO: 166412 - DNA, 14 bp, Unknown
  misc_feature (1)..( 14): Result.004 file - promoters50/1381563
tcgctaaaagttta

SEQ ID NO: 166413 - DNA, 14 bp, Unknown
  misc_feature (1)..( 14): Result.004 file - promoters50/1381563
gatgtaaaaggtct

SEQ ID NO: 166414 - DNA, 9 bp, Unknown
  misc_feature (1)..( 9): Result.004 file - promoters50/1381563
caaacatta

SEQ ID NO: 166415 - DNA, 9 bp, Unknown
  misc_feature (1)..( 9): Result.004 file - promoters50/1381563
caaacttta

SEQ ID NO: 166416 - DNA, 9 bp, Unknown
  misc_feature (1)..( 9): Result.004 file - promoters50/1381563
taaaaattg

SEQ ID NO: 166417 - DNA, 9 bp, Unknown
  misc_feature (1)..( 9): Result.004 file - promoters50/1381563
taataatcc

SEQ ID NO: 166418 - DNA, 9 bp, Unknown
  misc_feature (1)..( 9): Result.004 file - promoters50/1381563
taaagtttt

SEQ ID NO: 166419 - DNA, 9 bp, Unknown
  misc_feature (1)..( 9): Result.004 file - promoters50/1381579
ctaactttg

SEQ ID NO: 166420 - DNA, 13 bp, Unknown
  misc_feature (1)..( 13): Result.004 file - promoters50/1381579
aagaaactgagaa

SEQ ID NO: 166421 - DNA, 13 bp, Unknown
  misc_feature (1)..( 13): Result.004 file - promoters50/1381579
atgccacttagag

SEQ ID NO: 166422 - DNA, 13 bp, Unknown
  misc_feature (1)..( 13): Result.004 file - promoters50/1381579
atgccaattaact

SEQ ID NO: 166423 - DNA, 13 bp, Unknown
  misc_feature (1)..( 13): Result.004 file - promoters50/1381579
tagcccattataa

SEQ ID NO: 166424 - DNA, 13 bp, Unknown
  misc_feature (1)..( 13): Result.004 file - promoters50/1381579
aataacattgtaa

SEQ ID NO: 166425 - DNA, 8 bp, Unknown
  misc_feature (1)..( 8): Result.004 file - promoters50/1381579
gtttctat

SEQ ID NO: 166426 - DNA, 8 bp, Unknown
  misc_feature (1)..( 8): Result.004 file - promoters50/1381579
tcttctat

SEQ ID NO: 166427 - DNA, 8 bp, Unknown
  misc_feature (1)..( 8): Result.004 file - promoters50/1381579
atttatat

SEQ ID NO: 166428 - DNA, 8 bp, Unknown
  misc_feature (1)..( 8): Result.004 file - promoters50/1381579
ttttctac

SEQ ID NO: 166429 - DNA, 8 bp, Unknown
  misc_feature (1)..( 8): Result.004 file - promoters50/1381647
ttttctcg

SEQ ID NO: 166430 - DNA, 12 bp, Unknown
  misc_feature (1)..( 12): Result.004 file - promoters50/1381647
aaaagtctgaat

SEQ ID NO: 166431 - DNA, 12 bp, Unknown
  misc_feature (1)..( 12): Result.004 file - promoters50/1381647
ataagtttgata

SEQ ID NO: 166432 - DNA, 12 bp, Unknown
  misc_feature (1)..( 12): Result.004 file - promoters50/1381647
ctttctcttaat

SEQ ID NO: 166433 - DNA, 12 bp, Unknown
  misc_feature (1)..( 12): Result.004 file - promoters50/1381704
atatgttgaacc

SEQ ID NO: 166434 - DNA, 13 bp, Unknown
  misc_feature (1)..( 13): Result.004 file - promoters50/1381704
agtaataaaataa

SEQ ID NO: 166435 - DNA, 13 bp, Unknown
  misc_feature (1)..( 13): Result.004 file - promoters50/1381704
aataaaaaaacta

SEQ ID NO: 166436 - DNA, 13 bp, Unknown
  misc_feature (1)..( 13): Result.004 file - promoters50/1381704
agttatatgaaaa

SEQ ID NO: 166437 - DNA, 13 bp, Unknown
  misc_feature (1)..( 13): Result.004 file - promoters50/1381704
cgttataatggtc

SEQ ID NO: 166438 - DNA, 13 bp, Unknown
  misc_feature (1)..( 13): Result.004 file - promoters50/1381704
atcaaaaaccaac

SEQ ID NO: 166439 - DNA, 13 bp, Unknown
  misc_feature (1)..( 13): Result.004 file - promoters50/1381704
tgacaaaactaac

SEQ ID NO: 166440 - DNA, 9 bp, Unknown
  misc_feature (1)..( 9): Result.004 file - promoters50/1381704
ataaaataa

SEQ ID NO: 166441 - DNA, 9 bp, Unknown
  misc_feature (1)..( 9): Result.004 file - promoters50/1381704
caaaactaa

SEQ ID NO: 166442 - DNA, 9 bp, Unknown
  misc_feature (1)..( 9): Result.004 file - promoters50/1381704
gtaaaataa

SEQ ID NO: 166443 - DNA, 9 bp, Unknown
  misc_feature (1)..( 9): Result.004 file - promoters50/1381704
agaaacaaa

SEQ ID NO: 166444 - DNA, 9 bp, Unknown
  misc_feature (1)..( 9): Result.004 file - promoters50/1381704
aaaaactaa

SEQ ID NO: 166445 - DNA, 9 bp, Unknown
  misc_feature (1)..( 9): Result.004 file - promoters50/1381818
aaaaaccaa

SEQ ID NO: 166446 - DNA, 13 bp, Unknown
  misc_feature (1)..( 13): Result.004 file - promoters50/1381818
acaattaacttat

SEQ ID NO: 166447 - DNA, 13 bp, Unknown
  misc_feature (1)..( 13): Result.004 file - promoters50/1381818
gtaatgaaccagt

SEQ ID NO: 166448 - DNA, 13 bp, Unknown
  misc_feature (1)..( 13): Result.004 file - promoters50/1381818
aaagttaactttg

SEQ ID NO: 166449 - DNA, 13 bp, Unknown
  misc_feature (1)..( 13): Result.004 file - promoters50/1381818
tatattaactttg

SEQ ID NO: 166450 - DNA, 13 bp, Unknown
  misc_feature (1)..( 13): Result.004 file - promoters50/1381818
aatattaaccttg

SEQ ID NO: 166451 - DNA, 13 bp, Unknown
  misc_feature (1)..( 13): Result.004 file - promoters50/1381818
caaataaacatat

SEQ ID NO: 166452 - DNA, 13 bp, Unknown
  misc_feature (1)..( 13): Result.004 file - promoters50/1381818
acaaaaaaagcta

SEQ ID NO: 166453 - DNA, 14 bp, Unknown
  misc_feature (1)..( 14): Result.004 file - promoters50/1381818
tataagaaaatata

SEQ ID NO: 166454 - DNA, 14 bp, Unknown
  misc_feature (1)..( 14): Result.004 file - promoters50/1381818
tttaaaaaaagaag

SEQ ID NO: 166455 - DNA, 14 bp, Unknown
  misc_feature (1)..( 14): Result.004 file - promoters50/1381818
tatgagaaatcata

SEQ ID NO: 166456 - DNA, 14 bp, Unknown
  misc_feature (1)..( 14): Result.004 file - promoters50/1381818
ctatccaaaatgaa

SEQ ID NO: 166457 - DNA, 14 bp, Unknown
  misc_feature (1)..( 14): Result.004 file - promoters50/1381818
tataaataaatttt

SEQ ID NO: 166458 - DNA, 14 bp, Unknown
  misc_feature (1)..( 14): Result.004 file - promoters50/1381818
actaattaatggat

SEQ ID NO: 166459 - DNA, 9 bp, Unknown
  misc_feature (1)..( 9): Result.004 file - promoters50/1381818
aaaataaac

SEQ ID NO: 166460 - DNA, 9 bp, Unknown
  misc_feature (1)..( 9): Result.004 file - promoters50/1381818
taaataaat

SEQ ID NO: 166461 - DNA, 9 bp, Unknown
  misc_feature (1)..( 9): Result.004 file - promoters50/1381818
taaaaaaaa

SEQ ID NO: 166462 - DNA, 9 bp, Unknown
  misc_feature (1)..( 9): Result.004 file - promoters50/1381818
aaaacaaac

SEQ ID NO: 166463 - DNA, 9 bp, Unknown
  misc_feature (1)..( 9): Result.004 file - promoters50/1381818
acaacaaag

SEQ ID NO: 166464 - DNA, 9 bp, Unknown
  misc_feature (1)..( 9): Result.004 file - promoters50/1381818
taaaaaaag

SEQ ID NO: 166465 - DNA, 8 bp, Unknown
  misc_feature (1)..( 8): Result.004 file - promoters50/1381818
aaaaacaa

SEQ ID NO: 166466 - DNA, 8 bp, Unknown
  misc_feature (1)..( 8): Result.004 file - promoters50/1381818
caaaacat

SEQ ID NO: 166467 - DNA, 8 bp, Unknown
  misc_feature (1)..( 8): Result.004 file - promoters50/1381818
taaaaaaa

SEQ ID NO: 166468 - DNA, 8 bp, Unknown
  misc_feature (1)..( 8): Result.004 file - promoters50/1381818
taaataaa

SEQ ID NO: 166469 - DNA, 8 bp, Unknown
  misc_feature (1)..( 8): Result.004 file - promoters50/1381818
gaaatcat

SEQ ID NO: 166470 - DNA, 8 bp, Unknown
  misc_feature (1)..( 8): Result.004 file - promoters50/1381818
taattaat

SEQ ID NO: 166471 - DNA, 12 bp, Unknown
  misc_feature (1)..( 12): Result.004 file - promoters50/1381818
catattattagt

SEQ ID NO: 166472 - DNA, 12 bp, Unknown
  misc_feature (1)..( 12): Result.004 file - promoters50/1381818
gatataattatt

SEQ ID NO: 166473 - DNA, 12 bp, Unknown
  misc_feature (1)..( 12): Result.004 file - promoters50/1381818
aatattattagc

SEQ ID NO: 166474 - DNA, 12 bp, Unknown
  misc_feature (1)..( 12): Result.004 file - promoters50/1381818
catcttaatatg

SEQ ID NO: 166475 - DNA, 12 bp, Unknown
  misc_feature (1)..( 12): Result.004 file - promoters50/1381818
ttaatgattttg

SEQ ID NO: 166476 - DNA, 12 bp, Unknown
  misc_feature (1)..( 12): Result.004 file - promoters50/1381896
cgaattctttaa

SEQ ID NO: 166477 - DNA, 12 bp, Unknown
  misc_feature (1)..( 12): Result.004 file - promoters50/1381896
aagaatatatat

SEQ ID NO: 166478 - DNA, 12 bp, Unknown
  misc_feature (1)..( 12): Result.004 file - promoters50/1381896
taagatatttat

SEQ ID NO: 166479 - DNA, 12 bp, Unknown
  misc_feature (1)..( 12): Result.004 file - promoters50/1381896
gaagatacgatc

SEQ ID NO: 166480 - DNA, 12 bp, Unknown
  misc_feature (1)..( 12): Result.004 file - promoters50/1381903
ggagacattcgc

SEQ ID NO: 166481 - DNA, 8 bp, Unknown
  misc_feature (1)..( 8): Result.004 file - promoters50/1381903
catagatt

SEQ ID NO: 166482 - DNA, 8 bp, Unknown
  misc_feature (1)..( 8): Result.004 file - promoters50/1381903
aatagatc

SEQ ID NO: 166483 - DNA, 8 bp, Unknown
  misc_feature (1)..( 8): Result.004 file - promoters50/1381903
catcgatt

SEQ ID NO: 166484 - DNA, 8 bp, Unknown
  misc_feature (1)..( 8): Result.004 file - promoters50/1381903
gatccatt

SEQ ID NO: 166485 - DNA, 12 bp, Unknown
  misc_feature (1)..( 12): Result.004 file - promoters50/1381903
aacttaatagtt

SEQ ID NO: 166486 - DNA, 12 bp, Unknown
  misc_feature (1)..( 12): Result.004 file - promoters50/1381903
aactcaattgtt

SEQ ID NO: 166487 - DNA, 12 bp, Unknown
  misc_feature (1)..( 12): Result.004 file - promoters50/1381903
acccaaatggtt

SEQ ID NO: 166488 - DNA, 7 bp, Unknown
  misc_feature (1)..( 7): Result.004 file - promoters50/1381903
ctaaatt

SEQ ID NO: 166489 - DNA, 7 bp, Unknown
  misc_feature (1)..( 7): Result.004 file - promoters50/1381903
ctaaata

SEQ ID NO: 166490 - DNA, 7 bp, Unknown
  misc_feature (1)..( 7): Result.004 file - promoters50/1381903
ttaaatt

SEQ ID NO: 166491 - DNA, 8 bp, Unknown
  misc_feature (1)..( 8): Result.004 file - promoters50/1381903
ttttattt

SEQ ID NO: 166492 - DNA, 8 bp, Unknown
  misc_feature (1)..( 8): Result.004 file - promoters50/1381903
tttgattt

SEQ ID NO: 166493 - DNA, 8 bp, Unknown
  misc_feature (1)..( 8): Result.004 file - promoters50/1381903
cttgattt

SEQ ID NO: 166494 - DNA, 8 bp, Unknown
  misc_feature (1)..( 8): Result.004 file - promoters50/1381903
atgaaact

SEQ ID NO: 166495 - DNA, 8 bp, Unknown
  misc_feature (1)..( 8): Result.004 file - promoters50/1381903
atgaaata

SEQ ID NO: 166496 - DNA, 8 bp, Unknown
  misc_feature (1)..( 8): Result.004 file - promoters50/1381911
ctgatata

SEQ ID NO: 166497 - DNA, 8 bp, Unknown
  misc_feature (1)..( 8): Result.004 file - promoters50/1381911
taatattg

SEQ ID NO: 166498 - DNA, 8 bp, Unknown
  misc_feature (1)..( 8): Result.004 file - promoters50/1381911
caattttg

SEQ ID NO: 166499 - DNA, 8 bp, Unknown
  misc_feature (1)..( 8): Result.004 file - promoters50/1381911
taacattt

SEQ ID NO: 166500 - DNA, 8 bp, Unknown
  misc_feature (1)..( 8): Result.004 file - promoters50/1381911
aaaagaaa

SEQ ID NO: 166501 - DNA, 8 bp, Unknown
  misc_feature (1)..( 8): Result.004 file - promoters50/1381911
aaatgaaa

SEQ ID NO: 166502 - DNA, 8 bp, Unknown
  misc_feature (1)..( 8): Result.004 file - promoters50/1381911
aaatgaga

SEQ ID NO: 166503 - DNA, 8 bp, Unknown
  misc_feature (1)..( 8): Result.004 file - promoters50/1381911
ttataact

SEQ ID NO: 166504 - DNA, 8 bp, Unknown
  misc_feature (1)..( 8): Result.004 file - promoters50/1381911
ttattact

SEQ ID NO: 166505 - DNA, 8 bp, Unknown
  misc_feature (1)..( 8): Result.004 file - promoters50/1381911
ttattaag

SEQ ID NO: 166506 - DNA, 8 bp, Unknown
  misc_feature (1)..( 8): Result.004 file - promoters50/1381911
catattga

SEQ ID NO: 166507 - DNA, 8 bp, Unknown
  misc_feature (1)..( 8): Result.004 file - promoters50/1381911
catattaa

SEQ ID NO: 166508 - DNA, 8 bp, Unknown
  misc_feature (1)..( 8): Result.004 file - promoters50/1381915
gataataa

SEQ ID NO: 166509 - DNA, 8 bp, Unknown
  misc_feature (1)..( 8): Result.004 file - promoters50/1381915
ccactaag

SEQ ID NO: 166510 - DNA, 8 bp, Unknown
  misc_feature (1)..( 8): Result.004 file - promoters50/1381915
ccacaaag

SEQ ID NO: 166511 - DNA, 8 bp, Unknown
  misc_feature (1)..( 8): Result.004 file - promoters50/1381915
tcactaaa

SEQ ID NO: 166512 - DNA, 8 bp, Unknown
  misc_feature (1)..( 8): Result.004 file - promoters50/1381915
tccaattg

SEQ ID NO: 166513 - DNA, 8 bp, Unknown
  misc_feature (1)..( 8): Result.004 file - promoters50/1381915
tcctattt

SEQ ID NO: 166514 - DNA, 8 bp, Unknown
  misc_feature (1)..( 8): Result.004 file - promoters50/1381926
cgctattt

SEQ ID NO: 166515 - DNA, 13 bp, Unknown
  misc_feature (1)..( 13): Result.004 file - promoters50/1381926
attgtgttttacg

SEQ ID NO: 166516 - DNA, 13 bp, Unknown
  misc_feature (1)..( 13): Result.004 file - promoters50/1381926
aatgtgatttacg

SEQ ID NO: 166517 - DNA, 13 bp, Unknown
  misc_feature (1)..( 13): Result.004 file - promoters50/1381926
aatatgaatttgc

SEQ ID NO: 166518 - DNA, 13 bp, Unknown
  misc_feature (1)..( 13): Result.004 file - promoters50/1381926
ttaatgatttcat

SEQ ID NO: 166519 - DNA, 13 bp, Unknown
  misc_feature (1)..( 13): Result.004 file - promoters50/1381926
cgaattattgacg

SEQ ID NO: 166520 - DNA, 13 bp, Unknown
  misc_feature (1)..( 13): Result.004 file - promoters50/1382033
ttattgatttcac

SEQ ID NO: 166521 - DNA, 9 bp, Unknown
  misc_feature (1)..( 9): Result.004 file - promoters50/1382033
tttgttttt

SEQ ID NO: 166522 - DNA, 9 bp, Unknown
  misc_feature (1)..( 9): Result.004 file - promoters50/1382033
cttgctttt

SEQ ID NO: 166523 - DNA, 9 bp, Unknown
  misc_feature (1)..( 9): Result.004 file - promoters50/1382033
tttgttttc

SEQ ID NO: 166524 - DNA, 9 bp, Unknown
  misc_feature (1)..( 9): Result.004 file - promoters50/1382033
caaattgaa

SEQ ID NO: 166525 - DNA, 9 bp, Unknown
  misc_feature (1)..( 9): Result.004 file - promoters50/1382033
caaattgga

SEQ ID NO: 166526 - DNA, 9 bp, Unknown
  misc_feature (1)..( 9): Result.004 file - promoters50/1382084
ataatcgga

SEQ ID NO: 166527 - DNA, 11 bp, Unknown
  misc_feature (1)..( 11): Result.004 file - promoters50/1382084
tggtcaactat

SEQ ID NO: 166528 - DNA, 11 bp, Unknown
  misc_feature (1)..( 11): Result.004 file - promoters50/1382084
tttgcaattat

SEQ ID NO: 166529 - DNA, 11 bp, Unknown
  misc_feature (1)..( 11): Result.004 file - promoters50/1382084
tttgaaattgc

SEQ ID NO: 166530 - DNA, 8 bp, Unknown
  misc_feature (1)..( 8): Result.004 file - promoters50/1382084
atttgatg

SEQ ID NO: 166531 - DNA, 8 bp, Unknown
  misc_feature (1)..( 8): Result.004 file - promoters50/1382084
atttaatg

SEQ ID NO: 166532 - DNA, 8 bp, Unknown
  misc_feature (1)..( 8): Result.004 file - promoters50/1382119
atttaaac

SEQ ID NO: 166533 - DNA, 12 bp, Unknown
  misc_feature (1)..( 12): Result.004 file - promoters50/1382119
cgacaatgaaac

SEQ ID NO: 166534 - DNA, 12 bp, Unknown
  misc_feature (1)..( 12): Result.004 file - promoters50/1382119
tataaattaaat

SEQ ID NO: 166535 - DNA, 12 bp, Unknown
  misc_feature (1)..( 12): Result.004 file - promoters50/1382119
cacgtattaaat

SEQ ID NO: 166536 - DNA, 12 bp, Unknown
  misc_feature (1)..( 12): Result.004 file - promoters50/1382119
tttccattaaag

SEQ ID NO: 166537 - DNA, 12 bp, Unknown
  misc_feature (1)..( 12): Result.004 file - promoters50/1382119
tatgaattatga

SEQ ID NO: 166538 - DNA, 12 bp, Unknown
  misc_feature (1)..( 12): Result.004 file - promoters50/1382119
ttcaaatttaag

SEQ ID NO: 166539 - DNA, 17 bp, Unknown
  misc_feature (1)..( 17): Result.004 file - promoters50/1382119
accaaaataaataaatt

SEQ ID NO: 166540 - DNA, 17 bp, Unknown
  misc_feature (1)..( 17): Result.004 file - promoters50/1382119
gaaaatataaataaaaa

SEQ ID NO: 166541 - DNA, 17 bp, Unknown
  misc_feature (1)..( 17): Result.004 file - promoters50/1382119
aattttataaagaaccc

SEQ ID NO: 166542 - DNA, 17 bp, Unknown
  misc_feature (1)..( 17): Result.004 file - promoters50/1382119
atttttttaatcaaaag

SEQ ID NO: 166543 - DNA, 17 bp, Unknown
  misc_feature (1)..( 17): Result.004 file - promoters50/1382119
aattttataaaaggagc

SEQ ID NO: 166544 - DNA, 17 bp, Unknown
  misc_feature (1)..( 17): Result.004 file - promoters50/1382119
cacaacaaaaatacaaa

SEQ ID NO: 166545 - DNA, 17 bp, Unknown
  misc_feature (1)..( 17): Result.004 file - promoters50/1382119
aggtagagaaataccga

SEQ ID NO: 166546 - DNA, 13 bp, Unknown
  misc_feature (1)..( 13): Result.004 file - promoters50/1382119
aaattaaatgcta

SEQ ID NO: 166547 - DNA, 13 bp, Unknown
  misc_feature (1)..( 13): Result.004 file - promoters50/1382119
taatcaaaagtgt

SEQ ID NO: 166548 - DNA, 13 bp, Unknown
  misc_feature (1)..( 13): Result.004 file - promoters50/1382119
aaataaaaaaaga

SEQ ID NO: 166549 - DNA, 13 bp, Unknown
  misc_feature (1)..( 13): Result.004 file - promoters50/1382119
caaaaaacccaat

SEQ ID NO: 166550 - DNA, 13 bp, Unknown
  misc_feature (1)..( 13): Result.004 file - promoters50/1382119
caaaaatacaaat

SEQ ID NO: 166551 - DNA, 13 bp, Unknown
  misc_feature (1)..( 13): Result.004 file - promoters50/1382128
gaaataccgaatt

SEQ ID NO: 166552 - DNA, 7 bp, Unknown
  misc_feature (1)..( 7): Result.004 file - promoters50/1382128
aaaaaaa

SEQ ID NO: 166553 - DNA, 7 bp, Unknown
  misc_feature (1)..( 7): Result.004 file - promoters50/1382128
aaaaaat

SEQ ID NO: 166554 - DNA, 7 bp, Unknown
  misc_feature (1)..( 7): Result.004 file - promoters50/1382134
aaataat

SEQ ID NO: 166555 - DNA, 15 bp, Unknown
  misc_feature (1)..( 15): Result.004 file - promoters50/1382134
tacagtgaaattgaa

SEQ ID NO: 166556 - DNA, 15 bp, Unknown
  misc_feature (1)..( 15): Result.004 file - promoters50/1382134
aattatgatatttaa

SEQ ID NO: 166557 - DNA, 15 bp, Unknown
  misc_feature (1)..( 15): Result.004 file - promoters50/1382134
aattttgatttttaa

SEQ ID NO: 166558 - DNA, 12 bp, Unknown
  misc_feature (1)..( 12): Result.004 file - promoters50/1382134
gctaaacattag

SEQ ID NO: 166559 - DNA, 12 bp, Unknown
  misc_feature (1)..( 12): Result.004 file - promoters50/1382134
aataaacatagt

SEQ ID NO: 166560 - DNA, 12 bp, Unknown
  misc_feature (1)..( 12): Result.004 file - promoters50/1382134
aattaactctaa

SEQ ID NO: 166561 - DNA, 12 bp, Unknown
  misc_feature (1)..( 12): Result.004 file - promoters50/1382134
acttaactgtaa

SEQ ID NO: 166562 - DNA, 10 bp, Unknown
  misc_feature (1)..( 10): Result.004 file - promoters50/1382134
aaatatatgg

SEQ ID NO: 166563 - DNA, 10 bp, Unknown
  misc_feature (1)..( 10): Result.004 file - promoters50/1382134
taatatattt

SEQ ID NO: 166564 - DNA, 11 bp, Unknown
  misc_feature (1)..( 11): Result.004 file - promoters50/1382134
taatattataa

SEQ ID NO: 166565 - DNA, 11 bp, Unknown
  misc_feature (1)..( 11): Result.004 file - promoters50/1382134
gcatattttaa

SEQ ID NO: 166566 - DNA, 12 bp, Unknown
  misc_feature (1)..( 12): Result.004 file - promoters50/1382134
taacactttttc

SEQ ID NO: 166567 - DNA, 12 bp, Unknown
  misc_feature (1)..( 12): Result.004 file - promoters50/1382134
cgacaattttta

SEQ ID NO: 166568 - DNA, 12 bp, Unknown
  misc_feature (1)..( 12): Result.004 file - promoters50/1382134
taaaactaccat

SEQ ID NO: 166569 - DNA, 12 bp, Unknown
  misc_feature (1)..( 12): Result.004 file - promoters50/1382134
tgttggttttta

SEQ ID NO: 166570 - DNA, 8 bp, Unknown
  misc_feature (1)..( 8): Result.004 file - promoters50/1382134
taatttaa

SEQ ID NO: 166571 - DNA, 8 bp, Unknown
  misc_feature (1)..( 8): Result.004 file - promoters50/1382134
aaatttaa

SEQ ID NO: 166572 - DNA, 8 bp, Unknown
  misc_feature (1)..( 8): Result.004 file - promoters50/1382134
aaaattat

SEQ ID NO: 166573 - DNA, 12 bp, Unknown
  misc_feature (1)..( 12): Result.004 file - promoters50/1382134
ttttaatatttt

SEQ ID NO: 166574 - DNA, 12 bp, Unknown
  misc_feature (1)..( 12): Result.004 file - promoters50/1382134
gttttatatttt

SEQ ID NO: 166575 - DNA, 12 bp, Unknown
  misc_feature (1)..( 12): Result.004 file - promoters50/1382202
tttttataatta

SEQ ID NO: 166576 - DNA, 12 bp, Unknown
  misc_feature (1)..( 12): Result.004 file - promoters50/1382202
cagatcaaacta

SEQ ID NO: 166577 - DNA, 12 bp, Unknown
  misc_feature (1)..( 12): Result.004 file - promoters50/1382202
cagaacaaactg

SEQ ID NO: 166578 - DNA, 12 bp, Unknown
  misc_feature (1)..( 12): Result.004 file - promoters50/1382202
tagctccaagaa

SEQ ID NO: 166579 - DNA, 12 bp, Unknown
  misc_feature (1)..( 12): Result.004 file - promoters50/1382202
tgaaagaaagaa

SEQ ID NO: 166580 - DNA, 8 bp, Unknown
  misc_feature (1)..( 8): Result.004 file - promoters50/1382202
ggaaagct

SEQ ID NO: 166581 - DNA, 8 bp, Unknown
  misc_feature (1)..( 8): Result.004 file - promoters50/1382202
tgaaagca

SEQ ID NO: 166582 - DNA, 8 bp, Unknown
  misc_feature (1)..( 8): Result.004 file - promoters50/1382202
tgatagca

SEQ ID NO: 166583 - DNA, 9 bp, Unknown
  misc_feature (1)..( 9): Result.004 file - promoters50/1382202
ccatttctt

SEQ ID NO: 166584 - DNA, 9 bp, Unknown
  misc_feature (1)..( 9): Result.004 file - promoters50/1382202
caattactt

SEQ ID NO: 166585 - DNA, 9 bp, Unknown
  misc_feature (1)..( 9): Result.004 file - promoters50/1382202
caatcactt

SEQ ID NO: 166586 - DNA, 9 bp, Unknown
  misc_feature (1)..( 9): Result.004 file - promoters50/1382202
gaagatatg

SEQ ID NO: 166587 - DNA, 9 bp, Unknown
  misc_feature (1)..( 9): Result.004 file - promoters50/1382202
gaagatgag

SEQ ID NO: 166588 - DNA, 9 bp, Unknown
  misc_feature (1)..( 9): Result.004 file - promoters50/1382215
gaaaatatg

SEQ ID NO: 166589 - DNA, 9 bp, Unknown
  misc_feature (1)..( 9): Result.004 file - promoters50/1382215
cttttttaa

SEQ ID NO: 166590 - DNA, 9 bp, Unknown
  misc_feature (1)..( 9): Result.004 file - promoters50/1382215
aatttttat

SEQ ID NO: 166591 - DNA, 10 bp, Unknown
  misc_feature (1)..( 10): Result.004 file - promoters50/1382215
acttgtttcc

SEQ ID NO: 166592 - DNA, 10 bp, Unknown
  misc_feature (1)..( 10): Result.004 file - promoters50/1382215
acatgtatcc

SEQ ID NO: 166593 - DNA, 7 bp, Unknown
  misc_feature (1)..( 7): Result.004 file - promoters50/1382215
aaagaaa

SEQ ID NO: 166594 - DNA, 7 bp, Unknown
  misc_feature (1)..( 7): Result.004 file - promoters50/1382215
aaataaa

SEQ ID NO: 166595 - DNA, 8 bp, Unknown
  misc_feature (1)..( 8): Result.004 file - promoters50/1382281
gaatcaaa

SEQ ID NO: 166596 - DNA, 9 bp, Unknown
  misc_feature (1)..( 9): Result.004 file - promoters50/1382281
caaataaat

SEQ ID NO: 166597 - DNA, 9 bp, Unknown
  misc_feature (1)..( 9): Result.004 file - promoters50/1382281
taaatgaat

SEQ ID NO: 166598 - DNA, 9 bp, Unknown
  misc_feature (1)..( 9): Result.004 file - promoters50/1382281
taaatgtta

SEQ ID NO: 166599 - DNA, 12 bp, Unknown
  misc_feature (1)..( 12): Result.004 file - promoters50/1382281
tatatttaaaat

SEQ ID NO: 166600 - DNA, 12 bp, Unknown
  misc_feature (1)..( 12): Result.004 file - promoters50/1382281
agagtttcaaat

SEQ ID NO: 166601 - DNA, 12 bp, Unknown
  misc_feature (1)..( 12): Result.004 file - promoters50/1382281
tatttttgaaat

SEQ ID NO: 166602 - DNA, 12 bp, Unknown
  misc_feature (1)..( 12): Result.004 file - promoters50/1382281
tgtgtttcaaaa

SEQ ID NO: 166603 - DNA, 9 bp, Unknown
  misc_feature (1)..( 9): Result.004 file - promoters50/1382281
aaaataaat

SEQ ID NO: 166604 - DNA, 9 bp, Unknown
  misc_feature (1)..( 9): Result.004 file - promoters50/1382281
aaaataaat

SEQ ID NO: 166605 - DNA, 9 bp, Unknown
  misc_feature (1)..( 9): Result.004 file - promoters50/1382281
aaaagatat

SEQ ID NO: 166606 - DNA, 6 bp, Unknown
  misc_feature (1)..( 6): Result.004 file - promoters50/1382281
taaatg

SEQ ID NO: 166607 - DNA, 6 bp, Unknown
  misc_feature (1)..( 6): Result.004 file - promoters50/1382281
taaatg

SEQ ID NO: 166608 - DNA, 6 bp, Unknown
  misc_feature (1)..( 6): Result.004 file - promoters50/1382281
taaatg

SEQ ID NO: 166609 - DNA, 11 bp, Unknown
  misc_feature (1)..( 11): Result.004 file - promoters50/1382281
ttttcgaaaaa

SEQ ID NO: 166610 - DNA, 11 bp, Unknown
  misc_feature (1)..( 11): Result.004 file - promoters50/1382281
ctttcgacatt

SEQ ID NO: 166611 - DNA, 11 bp, Unknown
  misc_feature (1)..( 11): Result.004 file - promoters50/1382302
ttttcgaaaaa

SEQ ID NO: 166612 - DNA, 9 bp, Unknown
  misc_feature (1)..( 9): Result.004 file - promoters50/1382302
taataaagt

SEQ ID NO: 166613 - DNA, 9 bp, Unknown
  misc_feature (1)..( 9): Result.004 file - promoters50/1382302
taatacagt

SEQ ID NO: 166614 - DNA, 9 bp, Unknown
  misc_feature (1)..( 9): Result.004 file - promoters50/1382302
caataaata

SEQ ID NO: 166615 - DNA, 9 bp, Unknown
  misc_feature (1)..( 9): Result.004 file - promoters50/1382302
ttatagagt

SEQ ID NO: 166616 - DNA, 9 bp, Unknown
  misc_feature (1)..( 9): Result.004 file - promoters50/1382302
taaaacaaa

SEQ ID NO: 166617 - DNA, 9 bp, Unknown
  misc_feature (1)..( 9): Result.004 file - promoters50/1382302
caaaaaaat

SEQ ID NO: 166618 - DNA, 12 bp, Unknown
  misc_feature (1)..( 12): Result.004 file - promoters50/1382302
caatacaatgaa

SEQ ID NO: 166619 - DNA, 12 bp, Unknown
  misc_feature (1)..( 12): Result.004 file - promoters50/1382302
atatataattta

SEQ ID NO: 166620 - DNA, 12 bp, Unknown
  misc_feature (1)..( 12): Result.004 file - promoters50/1382302
gtttacaataaa

SEQ ID NO: 166621 - DNA, 13 bp, Unknown
  misc_feature (1)..( 13): Result.004 file - promoters50/1382302
ttatagatatttt

SEQ ID NO: 166622 - DNA, 13 bp, Unknown
  misc_feature (1)..( 13): Result.004 file - promoters50/1382347
ttaaagagacaga

SEQ ID NO: 166623 - DNA, 8 bp, Unknown
  misc_feature (1)..( 8): Result.004 file - promoters50/1382347
tttggatt

SEQ ID NO: 166624 - DNA, 8 bp, Unknown
  misc_feature (1)..( 8): Result.004 file - promoters50/1382347
ttttgatt

SEQ ID NO: 166625 - DNA, 8 bp, Unknown
  misc_feature (1)..( 8): Result.004 file - promoters50/1382347
ctttcatt

SEQ ID NO: 166626 - DNA, 8 bp, Unknown
  misc_feature (1)..( 8): Result.004 file - promoters50/1382347
ctatcaaa

SEQ ID NO: 166627 - DNA, 8 bp, Unknown
  misc_feature (1)..( 8): Result.004 file - promoters50/1382347
atattaaa

SEQ ID NO: 166628 - DNA, 8 bp, Unknown
  misc_feature (1)..( 8): Result.004 file - promoters50/1382347
ctatcatt

SEQ ID NO: 166629 - DNA, 8 bp, Unknown
  misc_feature (1)..( 8): Result.004 file - promoters50/1382347
ttatcaaa

SEQ ID NO: 166630 - DNA, 9 bp, Unknown
  misc_feature (1)..( 9): Result.004 file - promoters50/1382347
tttgattgt

SEQ ID NO: 166631 - DNA, 9 bp, Unknown
  misc_feature (1)..( 9): Result.004 file - promoters50/1382347
aatgaatgt

SEQ ID NO: 166632 - DNA, 9 bp, Unknown
  misc_feature (1)..( 9): Result.004 file - promoters50/1382347
cttgattga

SEQ ID NO: 166633 - DNA, 9 bp, Unknown
  misc_feature (1)..( 9): Result.004 file - promoters50/1382347
ctttatttc

SEQ ID NO: 166634 - DNA, 9 bp, Unknown
  misc_feature (1)..( 9): Result.004 file - promoters50/1382347
tctatttat

SEQ ID NO: 166635 - DNA, 9 bp, Unknown
  misc_feature (1)..( 9): Result.004 file - promoters50/1382347
tctatatat

SEQ ID NO: 166636 - DNA, 9 bp, Unknown
  misc_feature (1)..( 9): Result.004 file - promoters50/1382347
gctatttaa

SEQ ID NO: 166637 - DNA, 9 bp, Unknown
  misc_feature (1)..( 9): Result.004 file - promoters50/1382347
tataaatat

SEQ ID NO: 166638 - DNA, 9 bp, Unknown
  misc_feature (1)..( 9): Result.004 file - promoters50/1382347
cttctcttt

SEQ ID NO: 166639 - DNA, 9 bp, Unknown
  misc_feature (1)..( 9): Result.004 file - promoters50/1382347
cttcttttt

SEQ ID NO: 166640 - DNA, 9 bp, Unknown
  misc_feature (1)..( 9): Result.004 file - promoters50/1382347
ttcctcttt

SEQ ID NO: 166641 - DNA, 7 bp, Unknown
  misc_feature (1)..( 7): Result.004 file - promoters50/1382347
taaattt

SEQ ID NO: 166642 - DNA, 7 bp, Unknown
  misc_feature (1)..( 7): Result.004 file - promoters50/1382347
taaatta

SEQ ID NO: 166643 - DNA, 7 bp, Unknown
  misc_feature (1)..( 7): Result.004 file - promoters50/1382347
caaattt

SEQ ID NO: 166644 - DNA, 7 bp, Unknown
  misc_feature (1)..( 7): Result.004 file - promoters50/1382347
aattttt

SEQ ID NO: 166645 - DNA, 7 bp, Unknown
  misc_feature (1)..( 7): Result.004 file - promoters50/1382347
tattttt

SEQ ID NO: 166646 - DNA, 7 bp, Unknown
  misc_feature (1)..( 7): Result.004 file - promoters50/1382347
tatcttt

SEQ ID NO: 166647 - DNA, 8 bp, Unknown
  misc_feature (1)..( 8): Result.004 file - promoters50/1382347
tgttttgt

SEQ ID NO: 166648 - DNA, 8 bp, Unknown
  misc_feature (1)..( 8): Result.004 file - promoters50/1382347
tgttttac

SEQ ID NO: 166649 - DNA, 8 bp, Unknown
  misc_feature (1)..( 8): Result.004 file - promoters50/1382347
tgttatgt

SEQ ID NO: 166650 - DNA, 10 bp, Unknown
  misc_feature (1)..( 10): Result.004 file - promoters50/1382347
aacaaaaacg

SEQ ID NO: 166651 - DNA, 10 bp, Unknown
  misc_feature (1)..( 10): Result.004 file - promoters50/1382347
agaaaaaacg

SEQ ID NO: 166652 - DNA, 10 bp, Unknown
  misc_feature (1)..( 10): Result.004 file - promoters50/1382347
aacaagaacc

SEQ ID NO: 166653 - DNA, 7 bp, Unknown
  misc_feature (1)..( 7): Result.004 file - promoters50/1382347
tatataa

SEQ ID NO: 166654 - DNA, 7 bp, Unknown
  misc_feature (1)..( 7): Result.004 file - promoters50/1382347
aatataa

SEQ ID NO: 166655 - DNA, 7 bp, Unknown
  misc_feature (1)..( 7): Result.004 file - promoters50/1382347
aatctaa

SEQ ID NO: 166656 - DNA, 8 bp, Unknown
  misc_feature (1)..( 8): Result.004 file - promoters50/1382347
taaccatt

SEQ ID NO: 166657 - DNA, 8 bp, Unknown
  misc_feature (1)..( 8): Result.004 file - promoters50/1382347
gaacaatt

SEQ ID NO: 166658 - DNA, 8 bp, Unknown
  misc_feature (1)..( 8): Result.004 file - promoters50/1382347
taaacata

SEQ ID NO: 166659 - DNA, 7 bp, Unknown
  misc_feature (1)..( 7): Result.004 file - promoters50/1382347
ttaacca

SEQ ID NO: 166660 - DNA, 7 bp, Unknown
  misc_feature (1)..( 7): Result.004 file - promoters50/1382347
ttaaccg

SEQ ID NO: 166661 - DNA, 7 bp, Unknown
  misc_feature (1)..( 7): Result.004 file - promoters50/1382505
taaacat

SEQ ID NO: 166662 - DNA, 8 bp, Unknown
  misc_feature (1)..( 8): Result.004 file - promoters50/1382505
atatatca

SEQ ID NO: 166663 - DNA, 8 bp, Unknown
  misc_feature (1)..( 8): Result.004 file - promoters50/1382505
atatatgt

SEQ ID NO: 166664 - DNA, 8 bp, Unknown
  misc_feature (1)..( 8): Result.004 file - promoters50/1382505
ttatatgt

SEQ ID NO: 166665 - DNA, 9 bp, Unknown
  misc_feature (1)..( 9): Result.004 file - promoters50/1382505
attttatct

SEQ ID NO: 166666 - DNA, 9 bp, Unknown
  misc_feature (1)..( 9): Result.004 file - promoters50/1382505
attttaaag

SEQ ID NO: 166667 - DNA, 9 bp, Unknown
  misc_feature (1)..( 9): Result.004 file - promoters50/1382505
ggtttaaaa

SEQ ID NO: 166668 - DNA, 7 bp, Unknown
  misc_feature (1)..( 7): Result.004 file - promoters50/1382505
cttattt

SEQ ID NO: 166669 - DNA, 7 bp, Unknown
  misc_feature (1)..( 7): Result.004 file - promoters50/1382505
attattt

SEQ ID NO: 166670 - DNA, 7 bp, Unknown
  misc_feature (1)..( 7): Result.004 file - promoters50/1382505
attgttt

SEQ ID NO: 166671 - DNA, 8 bp, Unknown
  misc_feature (1)..( 8): Result.004 file - promoters50/1382505
gaggaaat

SEQ ID NO: 166672 - DNA, 8 bp, Unknown
  misc_feature (1)..( 8): Result.004 file - promoters50/1382505
caggaaat

SEQ ID NO: 166673 - DNA, 8 bp, Unknown
  misc_feature (1)..( 8): Result.004 file - promoters50/1382505
cagtaaaa

SEQ ID NO: 166674 - DNA, 9 bp, Unknown
  misc_feature (1)..( 9): Result.004 file - promoters50/1382505
atgtttatt

SEQ ID NO: 166675 - DNA, 9 bp, Unknown
  misc_feature (1)..( 9): Result.004 file - promoters50/1382505
atgtttata

SEQ ID NO: 166676 - DNA, 9 bp, Unknown
  misc_feature (1)..( 9): Result.004 file - promoters50/1382505
taatttata

SEQ ID NO: 166677 - DNA, 8 bp, Unknown
  misc_feature (1)..( 8): Result.004 file - promoters50/1382505
ttagtttg

SEQ ID NO: 166678 - DNA, 8 bp, Unknown
  misc_feature (1)..( 8): Result.004 file - promoters50/1382505
ttaattta

SEQ ID NO: 166679 - DNA, 8 bp, Unknown
  misc_feature (1)..( 8): Result.004 file - promoters50/1382505
ttaagtta

SEQ ID NO: 166680 - DNA, 7 bp, Unknown
  misc_feature (1)..( 7): Result.004 file - promoters50/1382505
tttcatt

SEQ ID NO: 166681 - DNA, 7 bp, Unknown
  misc_feature (1)..( 7): Result.004 file - promoters50/1382505
tttcatg

SEQ ID NO: 166682 - DNA, 7 bp, Unknown
  misc_feature (1)..( 7): Result.004 file - promoters50/1382581
tttgatg

SEQ ID NO: 166683 - DNA, 8 bp, Unknown
  misc_feature (1)..( 8): Result.004 file - promoters50/1382581
aagtaaaa

SEQ ID NO: 166684 - DNA, 8 bp, Unknown
  misc_feature (1)..( 8): Result.004 file - promoters50/1382581
tggtaaaa

SEQ ID NO: 166685 - DNA, 8 bp, Unknown
  misc_feature (1)..( 8): Result.004 file - promoters50/1382581
aagtaaat

SEQ ID NO: 166686 - DNA, 8 bp, Unknown
  misc_feature (1)..( 8): Result.004 file - promoters50/1382581
aagcaaaa

SEQ ID NO: 166687 - DNA, 9 bp, Unknown
  misc_feature (1)..( 9): Result.004 file - promoters50/1382581
taataaaag

SEQ ID NO: 166688 - DNA, 9 bp, Unknown
  misc_feature (1)..( 9): Result.004 file - promoters50/1382581
taacaaaat

SEQ ID NO: 166689 - DNA, 9 bp, Unknown
  misc_feature (1)..( 9): Result.004 file - promoters50/1382581
tattaaaag

SEQ ID NO: 166690 - DNA, 9 bp, Unknown
  misc_feature (1)..( 9): Result.004 file - promoters50/1382581
aaaccaaac

SEQ ID NO: 166691 - DNA, 15 bp, Unknown
  misc_feature (1)..( 15): Result.004 file - promoters50/1382581
ttctgggtttggttt

SEQ ID NO: 166692 - DNA, 15 bp, Unknown
  misc_feature (1)..( 15): Result.004 file - promoters50/1382581
cgcttaatttgtttt

SEQ ID NO: 166693 - DNA, 15 bp, Unknown
  misc_feature (1)..( 15): Result.004 file - promoters50/1382581
taagaaatatgttaa

SEQ ID NO: 166694 - DNA, 15 bp, Unknown
  misc_feature (1)..( 15): Result.004 file - promoters50/1382581
taagaaatatgtttt

SEQ ID NO: 166695 - DNA, 20 bp, Unknown
  misc_feature (1)..( 20): Result.004 file - promoters50/1382581
catatattctatcaatataa

SEQ ID NO: 166696 - DNA, 20 bp, Unknown
  misc_feature (1)..( 20): Result.004 file - promoters50/1382581
catattttctatataaaccc

SEQ ID NO: 166697 - DNA, 20 bp, Unknown
  misc_feature (1)..( 20): Result.004 file - promoters50/1382581
gttctaatctatttaacccc

SEQ ID NO: 166698 - DNA, 20 bp, Unknown
  misc_feature (1)..( 20): Result.004 file - promoters50/1382581
tccactatatatataaaccc

SEQ ID NO: 166699 - DNA, 13 bp, Unknown
  misc_feature (1)..( 13): Result.004 file - promoters50/1382581
tcaatataaatat

SEQ ID NO: 166700 - DNA, 13 bp, Unknown
  misc_feature (1)..( 13): Result.004 file - promoters50/1382581
tctatataaaccc

SEQ ID NO: 166701 - DNA, 13 bp, Unknown
  misc_feature (1)..( 13): Result.004 file - promoters50/1382581
tatatataaaccc

SEQ ID NO: 166702 - DNA, 13 bp, Unknown
  misc_feature (1)..( 13): Result.004 file - promoters50/1382709
tctatttaacccc

SEQ ID NO: 166703 - DNA, 13 bp, Unknown
  misc_feature (1)..( 13): Result.004 file - promoters50/1382709
ataataatccatt

SEQ ID NO: 166704 - DNA, 13 bp, Unknown
  misc_feature (1)..( 13): Result.004 file - promoters50/1382709
aatacaatacatg

SEQ ID NO: 166705 - DNA, 13 bp, Unknown
  misc_feature (1)..( 13): Result.004 file - promoters50/1382709
aattcaataccga

SEQ ID NO: 166706 - DNA, 13 bp, Unknown
  misc_feature (1)..( 13): Result.004 file - promoters50/1382709
aaagtcttacatg

SEQ ID NO: 166707 - DNA, 7 bp, Unknown
  misc_feature (1)..( 7): Result.004 file - promoters50/1382709
cataaaa

SEQ ID NO: 166708 - DNA, 7 bp, Unknown
  misc_feature (1)..( 7): Result.004 file - promoters50/1382709
aataaaa

SEQ ID NO: 166709 - DNA, 7 bp, Unknown
  misc_feature (1)..( 7): Result.004 file - promoters50/1382709
cattaaa

SEQ ID NO: 166710 - DNA, 7 bp, Unknown
  misc_feature (1)..( 7): Result.004 file - promoters50/1382709
aatcaaa

SEQ ID NO: 166711 - DNA, 10 bp, Unknown
  misc_feature (1)..( 10): Result.004 file - promoters50/1382709
aaaacaataa

SEQ ID NO: 166712 - DNA, 10 bp, Unknown
  misc_feature (1)..( 10): Result.004 file - promoters50/1382709
aaaacagcca

SEQ ID NO: 166713 - DNA, 10 bp, Unknown
  misc_feature (1)..( 10): Result.004 file - promoters50/1382709
taaacattaa

SEQ ID NO: 166714 - DNA, 10 bp, Unknown
  misc_feature (1)..( 10): Result.004 file - promoters50/1382713
caaagaattg

SEQ ID NO: 166715 - DNA, 8 bp, Unknown
  misc_feature (1)..( 8): Result.004 file - promoters50/1382713
atgactta

SEQ ID NO: 166716 - DNA, 8 bp, Unknown
  misc_feature (1)..( 8): Result.004 file - promoters50/1382713
atgactac

SEQ ID NO: 166717 - DNA, 8 bp, Unknown
  misc_feature (1)..( 8): Result.004 file - promoters50/1382713
ttgattta

SEQ ID NO: 166718 - DNA, 7 bp, Unknown
  misc_feature (1)..( 7): Result.004 file - promoters50/1382713
attctgt

SEQ ID NO: 166719 - DNA, 7 bp, Unknown
  misc_feature (1)..( 7): Result.004 file - promoters50/1382713
attgtgt

SEQ ID NO: 166720 - DNA, 7 bp, Unknown
  misc_feature (1)..( 7): Result.004 file - promoters50/1382713
tttgtgt

SEQ ID NO: 166721 - DNA, 8 bp, Unknown
  misc_feature (1)..( 8): Result.004 file - promoters50/1382713
ggaataaa

SEQ ID NO: 166722 - DNA, 8 bp, Unknown
  misc_feature (1)..( 8): Result.004 file - promoters50/1382713
tgaagaaa

SEQ ID NO: 166723 - DNA, 8 bp, Unknown
  misc_feature (1)..( 8): Result.004 file - promoters50/1382713
tgaagaat

SEQ ID NO: 166724 - DNA, 8 bp, Unknown
  misc_feature (1)..( 8): Result.004 file - promoters50/1382713
cttattct

SEQ ID NO: 166725 - DNA, 8 bp, Unknown
  misc_feature (1)..( 8): Result.004 file - promoters50/1382713
attattct

SEQ ID NO: 166726 - DNA, 8 bp, Unknown
  misc_feature (1)..( 8): Result.004 file - promoters50/1382959
atttttca

SEQ ID NO: 166727 - DNA, 10 bp, Unknown
  misc_feature (1)..( 10): Result.004 file - promoters50/1382959
gctaataaat

SEQ ID NO: 166728 - DNA, 10 bp, Unknown
  misc_feature (1)..( 10): Result.004 file - promoters50/1382959
acaaataaac

SEQ ID NO: 166729 - DNA, 10 bp, Unknown
  misc_feature (1)..( 10): Result.004 file - promoters50/1382959
gtaaataaat

SEQ ID NO: 166730 - DNA, 10 bp, Unknown
  misc_feature (1)..( 10): Result.004 file - promoters50/1382959
acacataatg

SEQ ID NO: 166731 - DNA, 10 bp, Unknown
  misc_feature (1)..( 10): Result.004 file - promoters50/1382959
agaaagaaag

SEQ ID NO: 166732 - DNA, 10 bp, Unknown
  misc_feature (1)..( 10): Result.004 file - promoters50/1382959
gtaaataatt

SEQ ID NO: 166733 - DNA, 10 bp, Unknown
  misc_feature (1)..( 10): Result.004 file - promoters50/1382959
aaaaagaacg

SEQ ID NO: 166734 - DNA, 11 bp, Unknown
  misc_feature (1)..( 11): Result.004 file - promoters50/1382959
cttgtatgttg

SEQ ID NO: 166735 - DNA, 11 bp, Unknown
  misc_feature (1)..( 11): Result.004 file - promoters50/1382959
cgaatattttg

SEQ ID NO: 166736 - DNA, 11 bp, Unknown
  misc_feature (1)..( 11): Result.004 file - promoters50/1382959
gttatatttac

SEQ ID NO: 166737 - DNA, 11 bp, Unknown
  misc_feature (1)..( 11): Result.004 file - promoters50/1382959
tgcataattaa

SEQ ID NO: 166738 - DNA, 11 bp, Unknown
  misc_feature (1)..( 11): Result.004 file - promoters50/1382959
ttaatgtttac

SEQ ID NO: 166739 - DNA, 11 bp, Unknown
  misc_feature (1)..( 11): Result.004 file - promoters50/1382959
taaataatata

SEQ ID NO: 166740 - DNA, 10 bp, Unknown
  misc_feature (1)..( 10): Result.004 file - promoters50/1382959
aaagtatttt

SEQ ID NO: 166741 - DNA, 10 bp, Unknown
  misc_feature (1)..( 10): Result.004 file - promoters50/1382959
caactatttt

SEQ ID NO: 166742 - DNA, 11 bp, Unknown
  misc_feature (1)..( 11): Result.004 file - promoters50/1382959
aaattatcttt

SEQ ID NO: 166743 - DNA, 11 bp, Unknown
  misc_feature (1)..( 11): Result.004 file - promoters50/1382959
tttttatttta

SEQ ID NO: 166744 - DNA, 11 bp, Unknown
  misc_feature (1)..( 11): Result.004 file - promoters50/1382959
accatttcttt

SEQ ID NO: 166745 - DNA, 11 bp, Unknown
  misc_feature (1)..( 11): Result.004 file - promoters50/1383066
ccgctatttgt

SEQ ID NO: 166746 - DNA, 8 bp, Unknown
  misc_feature (1)..( 8): Result.004 file - promoters50/1383066
attccagg

SEQ ID NO: 166747 - DNA, 8 bp, Unknown
  misc_feature (1)..( 8): Result.004 file - promoters50/1383066
attacaga

SEQ ID NO: 166748 - DNA, 8 bp, Unknown
  misc_feature (1)..( 8): Result.004 file - promoters50/1383066
attaaaga

SEQ ID NO: 166749 - DNA, 7 bp, Unknown
  misc_feature (1)..( 7): Result.004 file - promoters50/1383066
aaacagc

SEQ ID NO: 166750 - DNA, 7 bp, Unknown
  misc_feature (1)..( 7): Result.004 file - promoters50/1383066
aaaaagc

SEQ ID NO: 166751 - DNA, 7 bp, Unknown
  misc_feature (1)..( 7): Result.004 file - promoters50/1383066
aaaaaat

SEQ ID NO: 166752 - DNA, 7 bp, Unknown
  misc_feature (1)..( 7): Result.004 file - promoters50/1383066
gaacaaa

SEQ ID NO: 166753 - DNA, 7 bp, Unknown
  misc_feature (1)..( 7): Result.004 file - promoters50/1383066
gaaaaaa

SEQ ID NO: 166754 - DNA, 7 bp, Unknown
  misc_feature (1)..( 7): Result.004 file - promoters50/1383074
caaaaaa

SEQ ID NO: 166755 - DNA, 10 bp, Unknown
  misc_feature (1)..( 10): Result.004 file - promoters50/1383074
aaatacaaag

SEQ ID NO: 166756 - DNA, 10 bp, Unknown
  misc_feature (1)..( 10): Result.004 file - promoters50/1383074
aaataaaaat

SEQ ID NO: 166757 - DNA, 10 bp, Unknown
  misc_feature (1)..( 10): Result.004 file - promoters50/1383074
atttacaaag

SEQ ID NO: 166758 - DNA, 10 bp, Unknown
  misc_feature (1)..( 10): Result.004 file - promoters50/1383074
aaataaaaaa

SEQ ID NO: 166759 - DNA, 12 bp, Unknown
  misc_feature (1)..( 12): Result.004 file - promoters50/1383074
atatatatatat

SEQ ID NO: 166760 - DNA, 12 bp, Unknown
  misc_feature (1)..( 12): Result.004 file - promoters50/1383074
atacatataaca

SEQ ID NO: 166761 - DNA, 12 bp, Unknown
  misc_feature (1)..( 12): Result.004 file - promoters50/1383074
tttcatttaatt

SEQ ID NO: 166762 - DNA, 12 bp, Unknown
  misc_feature (1)..( 12): Result.004 file - promoters50/1383074
ttgagtttgatt

SEQ ID NO: 166763 - DNA, 14 bp, Unknown
  misc_feature (1)..( 14): Result.004 file - promoters50/1383074
aaaaaatcaaaagt

SEQ ID NO: 166764 - DNA, 14 bp, Unknown
  misc_feature (1)..( 14): Result.004 file - promoters50/1383074
aaaaaaaaaaaaaa

SEQ ID NO: 166765 - DNA, 15 bp, Unknown
  misc_feature (1)..( 15): Result.004 file - promoters50/1383074
aaataaaatatgaaa

SEQ ID NO: 166766 - DNA, 15 bp, Unknown
  misc_feature (1)..( 15): Result.004 file - promoters50/1383074
aaacaaagaaacaaa

SEQ ID NO: 166767 - DNA, 11 bp, Unknown
  misc_feature (1)..( 11): Result.004 file - promoters50/1383074
gtttcgaatat

SEQ ID NO: 166768 - DNA, 11 bp, Unknown
  misc_feature (1)..( 11): Result.004 file - promoters50/1383074
ctttctaatct

SEQ ID NO: 166769 - DNA, 11 bp, Unknown
  misc_feature (1)..( 11): Result.004 file - promoters50/1383074
taatctattct

SEQ ID NO: 166770 - DNA, 11 bp, Unknown
  misc_feature (1)..( 11): Result.004 file - promoters50/1383102
ctttcttttaa

SEQ ID NO: 166771 - DNA, 11 bp, Unknown
  misc_feature (1)..( 11): Result.004 file - promoters50/1383102
ataatcacttc

SEQ ID NO: 166772 - DNA, 11 bp, Unknown
  misc_feature (1)..( 11): Result.004 file - promoters50/1383102
ataatcataaa

SEQ ID NO: 166773 - DNA, 11 bp, Unknown
  misc_feature (1)..( 11): Result.004 file - promoters50/1383102
ataatgataaa

SEQ ID NO: 166774 - DNA, 7 bp, Unknown
  misc_feature (1)..( 7): Result.004 file - promoters50/1383102
aattatt

SEQ ID NO: 166775 - DNA, 7 bp, Unknown
  misc_feature (1)..( 7): Result.004 file - promoters50/1383102
cattatt

SEQ ID NO: 166776 - DNA, 7 bp, Unknown
  misc_feature (1)..( 7): Result.004 file - promoters50/1383144
aattatt

SEQ ID NO: 166777 - DNA, 7 bp, Unknown
  misc_feature (1)..( 7): Result.004 file - promoters50/1383144
aaatttt

SEQ ID NO: 166778 - DNA, 7 bp, Unknown
  misc_feature (1)..( 7): Result.004 file - promoters50/1383144
aaatttc

SEQ ID NO: 166779 - DNA, 8 bp, Unknown
  misc_feature (1)..( 8): Result.004 file - promoters50/1383144
aatattca

SEQ ID NO: 166780 - DNA, 8 bp, Unknown
  misc_feature (1)..( 8): Result.004 file - promoters50/1383144
ataatttt

SEQ ID NO: 166781 - DNA, 13 bp, Unknown
  misc_feature (1)..( 13): Result.004 file - promoters50/1383144
tttcttaatattc

SEQ ID NO: 166782 - DNA, 13 bp, Unknown
  misc_feature (1)..( 13): Result.004 file - promoters50/1383144
tattataatatta

SEQ ID NO: 166783 - DNA, 13 bp, Unknown
  misc_feature (1)..( 13): Result.004 file - promoters50/1383144
ttttttagtatac

SEQ ID NO: 166784 - DNA, 13 bp, Unknown
  misc_feature (1)..( 13): Result.004 file - promoters50/1383144
ctgaagaatattc

SEQ ID NO: 166785 - DNA, 13 bp, Unknown
  misc_feature (1)..( 13): Result.004 file - promoters50/1383214
gaaaacaatattg

SEQ ID NO: 166786 - DNA, 9 bp, Unknown
  misc_feature (1)..( 9): Result.004 file - promoters50/1383214
cataaattt

SEQ ID NO: 166787 - DNA, 9 bp, Unknown
  misc_feature (1)..( 9): Result.004 file - promoters50/1383214
tttaagttt

SEQ ID NO: 166788 - DNA, 9 bp, Unknown
  misc_feature (1)..( 9): Result.004 file - promoters50/1383214
tttgagtta

SEQ ID NO: 166789 - DNA, 8 bp, Unknown
  misc_feature (1)..( 8): Result.004 file - promoters50/1383214
atggtcat

SEQ ID NO: 166790 - DNA, 8 bp, Unknown
  misc_feature (1)..( 8): Result.004 file - promoters50/1383214
atggtcag

SEQ ID NO: 166791 - DNA, 8 bp, Unknown
  misc_feature (1)..( 8): Result.004 file - promoters50/1383214
taggtcat

SEQ ID NO: 166792 - DNA, 9 bp, Unknown
  misc_feature (1)..( 9): Result.004 file - promoters50/1383214
ctatatata

SEQ ID NO: 166793 - DNA, 9 bp, Unknown
  misc_feature (1)..( 9): Result.004 file - promoters50/1383214
atatataaa

SEQ ID NO: 166794 - DNA, 9 bp, Unknown
  misc_feature (1)..( 9): Result.004 file - promoters50/1383214
atatctata

SEQ ID NO: 166795 - DNA, 9 bp, Unknown
  misc_feature (1)..( 9): Result.004 file - promoters50/1383214
ctataatta

SEQ ID NO: 166796 - DNA, 8 bp, Unknown
  misc_feature (1)..( 8): Result.004 file - promoters50/1383214
cataatca

SEQ ID NO: 166797 - DNA, 8 bp, Unknown
  misc_feature (1)..( 8): Result.004 file - promoters50/1383214
cataattt

SEQ ID NO: 166798 - DNA, 8 bp, Unknown
  misc_feature (1)..( 8): Result.004 file - promoters50/1383214
catcatca

SEQ ID NO: 166799 - DNA, 7 bp, Unknown
  misc_feature (1)..( 7): Result.004 file - promoters50/1383214
atggttt

SEQ ID NO: 166800 - DNA, 7 bp, Unknown
  misc_feature (1)..( 7): Result.004 file - promoters50/1383214
ttggttt

SEQ ID NO: 166801 - DNA, 7 bp, Unknown
  misc_feature (1)..( 7): Result.004 file - promoters50/1383214
atgcttt

SEQ ID NO: 166802 - DNA, 7 bp, Unknown
  misc_feature (1)..( 7): Result.004 file - promoters50/1383214
ttaagtt

SEQ ID NO: 166803 - DNA, 7 bp, Unknown
  misc_feature (1)..( 7): Result.004 file - promoters50/1383214
ttaagtt

SEQ ID NO: 166804 - DNA, 7 bp, Unknown
  misc_feature (1)..( 7): Result.004 file - promoters50/1383312
ttaagta

SEQ ID NO: 166805 - DNA, 10 bp, Unknown
  misc_feature (1)..( 10): Result.004 file - promoters50/1383312
tggaaacaat

SEQ ID NO: 166806 - DNA, 10 bp, Unknown
  misc_feature (1)..( 10): Result.004 file - promoters50/1383312
tggagacagc

SEQ ID NO: 166807 - DNA, 10 bp, Unknown
  misc_feature (1)..( 10): Result.004 file - promoters50/1383312
ttgaatcaat

SEQ ID NO: 166808 - DNA, 11 bp, Unknown
  misc_feature (1)..( 11): Result.004 file - promoters50/1383312
taatttctttt

SEQ ID NO: 166809 - DNA, 11 bp, Unknown
  misc_feature (1)..( 11): Result.004 file - promoters50/1383312
tgatttgtttt

SEQ ID NO: 166810 - DNA, 11 bp, Unknown
  misc_feature (1)..( 11): Result.004 file - promoters50/1383312
taatctcttgt

SEQ ID NO: 166811 - DNA, 11 bp, Unknown
  misc_feature (1)..( 11): Result.004 file - promoters50/1383312
gatattgattt

SEQ ID NO: 166812 - DNA, 8 bp, Unknown
  misc_feature (1)..( 8): Result.004 file - promoters50/1383312
acaatttt

SEQ ID NO: 166813 - DNA, 8 bp, Unknown
  misc_feature (1)..( 8): Result.004 file - promoters50/1383312
tcaacttt

SEQ ID NO: 166814 - DNA, 8 bp, Unknown
  misc_feature (1)..( 8): Result.004 file - promoters50/1383322
tcaacttc

SEQ ID NO: 166815 - DNA, 8 bp, Unknown
  misc_feature (1)..( 8): Result.004 file - promoters50/1383322
tttgttga

SEQ ID NO: 166816 - DNA, 8 bp, Unknown
  misc_feature (1)..( 8): Result.004 file - promoters50/1383322
tttgatga

SEQ ID NO: 166817 - DNA, 8 bp, Unknown
  misc_feature (1)..( 8): Result.004 file - promoters50/1383341
tttaatgt

SEQ ID NO: 166818 - DNA, 11 bp, Unknown
  misc_feature (1)..( 11): Result.004 file - promoters50/1383341
caattaatctc

SEQ ID NO: 166819 - DNA, 11 bp, Unknown
  misc_feature (1)..( 11): Result.004 file - promoters50/1383341
tttttattcta

SEQ ID NO: 166820 - DNA, 11 bp, Unknown
  misc_feature (1)..( 11): Result.004 file - promoters50/1383341
attttaatctc

SEQ ID NO: 166821 - DNA, 11 bp, Unknown
  misc_feature (1)..( 11): Result.004 file - promoters50/1383341
attttagaaaa

SEQ ID NO: 166822 - DNA, 12 bp, Unknown
  misc_feature (1)..( 12): Result.004 file - promoters50/1383341
tgttgtattcta

SEQ ID NO: 166823 - DNA, 12 bp, Unknown
  misc_feature (1)..( 12): Result.004 file - promoters50/1383356
tttttgattcag

SEQ ID NO: 166824 - DNA, 10 bp, Unknown
  misc_feature (1)..( 10): Result.004 file - promoters50/1383356
ttttagaaaa

SEQ ID NO: 166825 - DNA, 10 bp, Unknown
  misc_feature (1)..( 10): Result.004 file - promoters50/1383356
aattacaaaa

SEQ ID NO: 166826 - DNA, 10 bp, Unknown
  misc_feature (1)..( 10): Result.004 file - promoters50/1383386
aataacagtt

SEQ ID NO: 166827 - DNA, 8 bp, Unknown
  misc_feature (1)..( 8): Result.004 file - promoters50/1383386
tttcctta

SEQ ID NO: 166828 - DNA, 8 bp, Unknown
  misc_feature (1)..( 8): Result.004 file - promoters50/1383386
ttttcttt

SEQ ID NO: 166829 - DNA, 8 bp, Unknown
  misc_feature (1)..( 8): Result.004 file - promoters50/1383386
tttcgtta

SEQ ID NO: 166830 - DNA, 8 bp, Unknown
  misc_feature (1)..( 8): Result.004 file - promoters50/1383386
ttttctta

SEQ ID NO: 166831 - DNA, 9 bp, Unknown
  misc_feature (1)..( 9): Result.004 file - promoters50/1383386
gaatgtctc

SEQ ID NO: 166832 - DNA, 9 bp, Unknown
  misc_feature (1)..( 9): Result.004 file - promoters50/1383386
aattgtctc

SEQ ID NO: 166833 - DNA, 9 bp, Unknown
  misc_feature (1)..( 9): Result.004 file - promoters50/1383386
aaatctcta

SEQ ID NO: 166834 - DNA, 9 bp, Unknown
  misc_feature (1)..( 9): Result.004 file - promoters50/1383386
aaatctggg

SEQ ID NO: 166835 - DNA, 10 bp, Unknown
  misc_feature (1)..( 10): Result.004 file - promoters50/1383386
ttgttatatg

SEQ ID NO: 166836 - DNA, 10 bp, Unknown
  misc_feature (1)..( 10): Result.004 file - promoters50/1383386
tatttatatt

SEQ ID NO: 166837 - DNA, 10 bp, Unknown
  misc_feature (1)..( 10): Result.004 file - promoters50/1383386
gttttaaatg

SEQ ID NO: 166838 - DNA, 11 bp, Unknown
  misc_feature (1)..( 11): Result.004 file - promoters50/1383386
ttattcatata

SEQ ID NO: 166839 - DNA, 10 bp, Unknown
  misc_feature (1)..( 10): Result.004 file - promoters50/1383386
atataattta

SEQ ID NO: 166840 - DNA, 10 bp, Unknown
  misc_feature (1)..( 10): Result.004 file - promoters50/1383386
ttataatatt

SEQ ID NO: 166841 - DNA, 10 bp, Unknown
  misc_feature (1)..( 10): Result.004 file - promoters50/1383386
atataagatg

SEQ ID NO: 166842 - DNA, 10 bp, Unknown
  misc_feature (1)..( 10): Result.004 file - promoters50/1383430
atatgattta

SEQ ID NO: 166843 - DNA, 8 bp, Unknown
  misc_feature (1)..( 8): Result.004 file - promoters50/1383430
tttttctg

SEQ ID NO: 166844 - DNA, 8 bp, Unknown
  misc_feature (1)..( 8): Result.004 file - promoters50/1383430
cttttctt

SEQ ID NO: 166845 - DNA, 8 bp, Unknown
  misc_feature (1)..( 8): Result.004 file - promoters50/1383430
gttttcta

SEQ ID NO: 166846 - DNA, 8 bp, Unknown
  misc_feature (1)..( 8): Result.004 file - promoters50/1383430
ggtttcta

SEQ ID NO: 166847 - DNA, 8 bp, Unknown
  misc_feature (1)..( 8): Result.004 file - promoters50/1383485
cttttcct

SEQ ID NO: 166848 - DNA, 14 bp, Unknown
  misc_feature (1)..( 14): Result.004 file - promoters50/1383485
ctcaaaaaaaaaaa

SEQ ID NO: 166849 - DNA, 14 bp, Unknown
  misc_feature (1)..( 14): Result.004 file - promoters50/1383485
ctcaataaagtaga

SEQ ID NO: 166850 - DNA, 15 bp, Unknown
  misc_feature (1)..( 15): Result.004 file - promoters50/1383485
actaaaagaaataaa

SEQ ID NO: 166851 - DNA, 15 bp, Unknown
  misc_feature (1)..( 15): Result.004 file - promoters50/1383485
gtcaaaattggaaga

SEQ ID NO: 166852 - DNA, 15 bp, Unknown
  misc_feature (1)..( 15): Result.004 file - promoters50/1383485
accaataattgtcaa

SEQ ID NO: 166853 - DNA, 15 bp, Unknown
  misc_feature (1)..( 15): Result.004 file - promoters50/1383485
acaaaattaactaag

SEQ ID NO: 166854 - DNA, 15 bp, Unknown
  misc_feature (1)..( 15): Result.004 file - promoters50/1383485
gagaataataacatt

SEQ ID NO: 166855 - DNA, 12 bp, Unknown
  misc_feature (1)..( 12): Result.004 file - promoters50/1383485
catattatcaat

SEQ ID NO: 166856 - DNA, 12 bp, Unknown
  misc_feature (1)..( 12): Result.004 file - promoters50/1383485
aagattttcaaa

SEQ ID NO: 166857 - DNA, 12 bp, Unknown
  misc_feature (1)..( 12): Result.004 file - promoters50/1383485
tgcatgttatat

SEQ ID NO: 166858 - DNA, 12 bp, Unknown
  misc_feature (1)..( 12): Result.004 file - promoters50/1383485
atcattggacag

SEQ ID NO: 166859 - DNA, 12 bp, Unknown
  misc_feature (1)..( 12): Result.004 file - promoters50/1383485
attaagttcaaa

SEQ ID NO: 166860 - DNA, 12 bp, Unknown
  misc_feature (1)..( 12): Result.004 file - promoters50/1383506
aagatgttaagg

SEQ ID NO: 166861 - DNA, 7 bp, Unknown
  misc_feature (1)..( 7): Result.004 file - promoters50/1383506
ttgccag

SEQ ID NO: 166862 - DNA, 7 bp, Unknown
  misc_feature (1)..( 7): Result.004 file - promoters50/1383506
atgccag

SEQ ID NO: 166863 - DNA, 7 bp, Unknown
  misc_feature (1)..( 7): Result.004 file - promoters50/1383506
atgccaa

SEQ ID NO: 166864 - DNA, 13 bp, Unknown
  misc_feature (1)..( 13): Result.004 file - promoters50/1383506
tgccttcatccct

SEQ ID NO: 166865 - DNA, 13 bp, Unknown
  misc_feature (1)..( 13): Result.004 file - promoters50/1383506
cttgttcagccct

SEQ ID NO: 166866 - DNA, 13 bp, Unknown
  misc_feature (1)..( 13): Result.004 file - promoters50/1383506
tgccttcatcgtc

SEQ ID NO: 166867 - DNA, 10 bp, Unknown
  misc_feature (1)..( 10): Result.004 file - promoters50/1383506
tgagattgga

SEQ ID NO: 166868 - DNA, 10 bp, Unknown
  misc_feature (1)..( 10): Result.004 file - promoters50/1383506
gaagatggga

SEQ ID NO: 166869 - DNA, 10 bp, Unknown
  misc_feature (1)..( 10): Result.004 file - promoters50/1383514
gaaaatgctg

SEQ ID NO: 166870 - DNA, 10 bp, Unknown
  misc_feature (1)..( 10): Result.004 file - promoters50/1383514
acttttaaat

SEQ ID NO: 166871 - DNA, 10 bp, Unknown
  misc_feature (1)..( 10): Result.004 file - promoters50/1383514
gattttaatc

SEQ ID NO: 166872 - DNA, 10 bp, Unknown
  misc_feature (1)..( 10): Result.004 file - promoters50/1383514
catttgaaat

SEQ ID NO: 166873 - DNA, 10 bp, Unknown
  misc_feature (1)..( 10): Result.004 file - promoters50/1383514
gattttatat

SEQ ID NO: 166874 - DNA, 10 bp, Unknown
  misc_feature (1)..( 10): Result.004 file - promoters50/1383514
tattctaacc

SEQ ID NO: 166875 - DNA, 11 bp, Unknown
  misc_feature (1)..( 11): Result.004 file - promoters50/1383514
tatttgtaatc

SEQ ID NO: 166876 - DNA, 10 bp, Unknown
  misc_feature (1)..( 10): Result.004 file - promoters50/1383514
taattaaact

SEQ ID NO: 166877 - DNA, 10 bp, Unknown
  misc_feature (1)..( 10): Result.004 file - promoters50/1383514
gaataaaagc

SEQ ID NO: 166878 - DNA, 10 bp, Unknown
  misc_feature (1)..( 10): Result.004 file - promoters50/1383514
aaatcaaatg

SEQ ID NO: 166879 - DNA, 10 bp, Unknown
  misc_feature (1)..( 10): Result.004 file - promoters50/1383514
tgataaaatg

SEQ ID NO: 166880 - DNA, 10 bp, Unknown
  misc_feature (1)..( 10): Result.004 file - promoters50/1383514
taatatgaga

SEQ ID NO: 166881 - DNA, 10 bp, Unknown
  misc_feature (1)..( 10): Result.004 file - promoters50/1383514
gtgtaacatg

SEQ ID NO: 166882 - DNA, 11 bp, Unknown
  misc_feature (1)..( 11): Result.004 file - promoters50/1383514
gaataaaatgt

SEQ ID NO: 166883 - DNA, 11 bp, Unknown
  misc_feature (1)..( 11): Result.004 file - promoters50/1383514
cagtaaaatat

SEQ ID NO: 166884 - DNA, 11 bp, Unknown
  misc_feature (1)..( 11): Result.004 file - promoters50/1383514
atataaaataa

SEQ ID NO: 166885 - DNA, 11 bp, Unknown
  misc_feature (1)..( 11): Result.004 file - promoters50/1383514
gtataaaatac

SEQ ID NO: 166886 - DNA, 11 bp, Unknown
  misc_feature (1)..( 11): Result.004 file - promoters50/1383514
cagtaaaaaaa

SEQ ID NO: 166887 - DNA, 11 bp, Unknown
  misc_feature (1)..( 11): Result.004 file - promoters50/1383514
ttacaaagtat

SEQ ID NO: 166888 - DNA, 9 bp, Unknown
  misc_feature (1)..( 9): Result.004 file - promoters50/1383514
atttgttac

SEQ ID NO: 166889 - DNA, 9 bp, Unknown
  misc_feature (1)..( 9): Result.004 file - promoters50/1383514
ttttgttat

SEQ ID NO: 166890 - DNA, 9 bp, Unknown
  misc_feature (1)..( 9): Result.004 file - promoters50/1383514
atttgtaat

SEQ ID NO: 166891 - DNA, 9 bp, Unknown
  misc_feature (1)..( 9): Result.004 file - promoters50/1383514
atttgttta

SEQ ID NO: 166892 - DNA, 9 bp, Unknown
  misc_feature (1)..( 9): Result.004 file - promoters50/1383514
gtttcttac

SEQ ID NO: 166893 - DNA, 9 bp, Unknown
  misc_feature (1)..( 9): Result.004 file - promoters50/1383514
atttgaaat

SEQ ID NO: 166894 - DNA, 11 bp, Unknown
  misc_feature (1)..( 11): Result.004 file - promoters50/1383514
atataaatagt

SEQ ID NO: 166895 - DNA, 11 bp, Unknown
  misc_feature (1)..( 11): Result.004 file - promoters50/1383514
atataaatacc

SEQ ID NO: 166896 - DNA, 11 bp, Unknown
  misc_feature (1)..( 11): Result.004 file - promoters50/1383514
taataaataca

SEQ ID NO: 166897 - DNA, 11 bp, Unknown
  misc_feature (1)..( 11): Result.004 file - promoters50/1383514
ctataaataga

SEQ ID NO: 166898 - DNA, 11 bp, Unknown
  misc_feature (1)..( 11): Result.004 file - promoters50/1383514
ctataaataga

SEQ ID NO: 166899 - DNA, 11 bp, Unknown
  misc_feature (1)..( 11): Result.004 file - promoters50/1383518
ctctcaatata

SEQ ID NO: 166900 - DNA, 8 bp, Unknown
  misc_feature (1)..( 8): Result.004 file - promoters50/1383518
aaactaaa

SEQ ID NO: 166901 - DNA, 8 bp, Unknown
  misc_feature (1)..( 8): Result.004 file - promoters50/1383518
atactaaa

SEQ ID NO: 166902 - DNA, 8 bp, Unknown
  misc_feature (1)..( 8): Result.004 file - promoters50/1383518
ataataat

SEQ ID NO: 166903 - DNA, 12 bp, Unknown
  misc_feature (1)..( 12): Result.004 file - promoters50/1383518
accaaaaacaaa

SEQ ID NO: 166904 - DNA, 12 bp, Unknown
  misc_feature (1)..( 12): Result.004 file - promoters50/1383518
ataacaaataaa

SEQ ID NO: 166905 - DNA, 12 bp, Unknown
  misc_feature (1)..( 12): Result.004 file - promoters50/1383518
accaaaaacaat

SEQ ID NO: 166906 - DNA, 9 bp, Unknown
  misc_feature (1)..( 9): Result.004 file - promoters50/1383518
atataaata

SEQ ID NO: 166907 - DNA, 9 bp, Unknown
  misc_feature (1)..( 9): Result.004 file - promoters50/1383518
ctatatata

SEQ ID NO: 166908 - DNA, 9 bp, Unknown
  misc_feature (1)..( 9): Result.004 file - promoters50/1383518
atataaaca

SEQ ID NO: 166909 - DNA, 9 bp, Unknown
  misc_feature (1)..( 9): Result.004 file - promoters50/1383518
aaaaaatga

SEQ ID NO: 166910 - DNA, 9 bp, Unknown
  misc_feature (1)..( 9): Result.004 file - promoters50/1383518
aaataataa

SEQ ID NO: 166911 - DNA, 9 bp, Unknown
  misc_feature (1)..( 9): Result.004 file - promoters50/1383518
tcatactaa

SEQ ID NO: 166912 - DNA, 8 bp, Unknown
  misc_feature (1)..( 8): Result.004 file - promoters50/1383518
aatgatac

SEQ ID NO: 166913 - DNA, 8 bp, Unknown
  misc_feature (1)..( 8): Result.004 file - promoters50/1383518
aataataa

SEQ ID NO: 166914 - DNA, 8 bp, Unknown
  misc_feature (1)..( 8): Result.004 file - promoters50/1383518
catactaa

SEQ ID NO: 166915 - DNA, 11 bp, Unknown
  misc_feature (1)..( 11): Result.004 file - promoters50/1383518
ttaatgtttgt

SEQ ID NO: 166916 - DNA, 11 bp, Unknown
  misc_feature (1)..( 11): Result.004 file - promoters50/1383518
ttaatgttaag

SEQ ID NO: 166917 - DNA, 11 bp, Unknown
  misc_feature (1)..( 11): Result.004 file - promoters50/1383552
aatatgtaaag

SEQ ID NO: 166918 - DNA, 11 bp, Unknown
  misc_feature (1)..( 11): Result.004 file - promoters50/1383552
aggcccacttt

SEQ ID NO: 166919 - DNA, 11 bp, Unknown
  misc_feature (1)..( 11): Result.004 file - promoters50/1383552
cggcccatcaa

SEQ ID NO: 166920 - DNA, 11 bp, Unknown
  misc_feature (1)..( 11): Result.004 file - promoters50/1383552
tggcccataag

SEQ ID NO: 166921 - DNA, 11 bp, Unknown
  misc_feature (1)..( 11): Result.004 file - promoters50/1383552
aggcccatata

SEQ ID NO: 166922 - DNA, 11 bp, Unknown
  misc_feature (1)..( 11): Result.004 file - promoters50/1383552
aggcccattat

SEQ ID NO: 166923 - DNA, 11 bp, Unknown
  misc_feature (1)..( 11): Result.004 file - promoters50/1383552
gggcctataag

SEQ ID NO: 166924 - DNA, 12 bp, Unknown
  misc_feature (1)..( 12): Result.004 file - promoters50/1383552
aaaagtaaatct

SEQ ID NO: 166925 - DNA, 12 bp, Unknown
  misc_feature (1)..( 12): Result.004 file - promoters50/1383552
aaaaataaacta

SEQ ID NO: 166926 - DNA, 12 bp, Unknown
  misc_feature (1)..( 12): Result.004 file - promoters50/1383552
tagagtaaacca

SEQ ID NO: 166927 - DNA, 12 bp, Unknown
  misc_feature (1)..( 12): Result.004 file - promoters50/1383552
taaattaatata

SEQ ID NO: 166928 - DNA, 12 bp, Unknown
  misc_feature (1)..( 12): Result.004 file - promoters50/1383552
aactttaaaaac

SEQ ID NO: 166929 - DNA, 12 bp, Unknown
  misc_feature (1)..( 12): Result.004 file - promoters50/1383552
cgatgtaaaaat

SEQ ID NO: 166930 - DNA, 10 bp, Unknown
  misc_feature (1)..( 10): Result.004 file - promoters50/1383552
catatgattg

SEQ ID NO: 166931 - DNA, 10 bp, Unknown
  misc_feature (1)..( 10): Result.004 file - promoters50/1383552
ttaatgtttg

SEQ ID NO: 166932 - DNA, 10 bp, Unknown
  misc_feature (1)..( 10): Result.004 file - promoters50/1383552
ttaatttttt

SEQ ID NO: 166933 - DNA, 10 bp, Unknown
  misc_feature (1)..( 10): Result.004 file - promoters50/1383552
ataatttact

SEQ ID NO: 166934 - DNA, 10 bp, Unknown
  misc_feature (1)..( 10): Result.004 file - promoters50/1383552
ataatttagt

SEQ ID NO: 166935 - DNA, 11 bp, Unknown
  misc_feature (1)..( 11): Result.004 file - promoters50/1383552
ctcattcttta

SEQ ID NO: 166936 - DNA, 11 bp, Unknown
  misc_feature (1)..( 11): Result.004 file - promoters50/1383552
tatatataaat

SEQ ID NO: 166937 - DNA, 11 bp, Unknown
  misc_feature (1)..( 11): Result.004 file - promoters50/1383552
tatttatgaat

SEQ ID NO: 166938 - DNA, 11 bp, Unknown
  misc_feature (1)..( 11): Result.004 file - promoters50/1383552
ccactataaaa

SEQ ID NO: 166939 - DNA, 11 bp, Unknown
  misc_feature (1)..( 11): Result.004 file - promoters50/1383552
catatatactt

SEQ ID NO: 166940 - DNA, 11 bp, Unknown
  misc_feature (1)..( 11): Result.004 file - promoters50/1383552
ccactataaat

SEQ ID NO: 166941 - DNA, 11 bp, Unknown
  misc_feature (1)..( 11): Result.004 file - promoters50/1383569
actatataacc

SEQ ID NO: 166942 - DNA, 8 bp, Unknown
  misc_feature (1)..( 8): Result.004 file - promoters50/1383569
atttgaat

SEQ ID NO: 166943 - DNA, 8 bp, Unknown
  misc_feature (1)..( 8): Result.004 file - promoters50/1383569
attttaat

SEQ ID NO: 166944 - DNA, 8 bp, Unknown
  misc_feature (1)..( 8): Result.004 file - promoters50/1383569
attttaaa

SEQ ID NO: 166945 - DNA, 8 bp, Unknown
  misc_feature (1)..( 8): Result.004 file - promoters50/1383569
attttaca

SEQ ID NO: 166946 - DNA, 14 bp, Unknown
  misc_feature (1)..( 14): Result.004 file - promoters50/1383569
ataatagtttaaaa

SEQ ID NO: 166947 - DNA, 14 bp, Unknown
  misc_feature (1)..( 14): Result.004 file - promoters50/1383569
atattagctggtgc

SEQ ID NO: 166948 - DNA, 14 bp, Unknown
  misc_feature (1)..( 14): Result.004 file - promoters50/1383569
ccattggctggtgc

SEQ ID NO: 166949 - DNA, 7 bp, Unknown
  misc_feature (1)..( 7): Result.004 file - promoters50/1383569
gaagatg

SEQ ID NO: 166950 - DNA, 7 bp, Unknown
  misc_feature (1)..( 7): Result.004 file - promoters50/1383569
taagatg

SEQ ID NO: 166951 - DNA, 7 bp, Unknown
  misc_feature (1)..( 7): Result.004 file - promoters50/1383569
taagatt

SEQ ID NO: 166952 - DNA, 11 bp, Unknown
  misc_feature (1)..( 11): Result.004 file - promoters50/1383569
aatgaaatagt

SEQ ID NO: 166953 - DNA, 11 bp, Unknown
  misc_feature (1)..( 11): Result.004 file - promoters50/1383569
taagaaatagt

SEQ ID NO: 166954 - DNA, 11 bp, Unknown
  misc_feature (1)..( 11): Result.004 file - promoters50/1383569
aataaaataaa

SEQ ID NO: 166955 - DNA, 7 bp, Unknown
  misc_feature (1)..( 7): Result.004 file - promoters50/1383569
atttaaa

SEQ ID NO: 166956 - DNA, 7 bp, Unknown
  misc_feature (1)..( 7): Result.004 file - promoters50/1383569
gtttaaa

SEQ ID NO: 166957 - DNA, 7 bp, Unknown
  misc_feature (1)..( 7): Result.004 file - promoters50/1383569
atttaaa

SEQ ID NO: 166958 - DNA, 10 bp, Unknown
  misc_feature (1)..( 10): Result.004 file - promoters50/1383569
aatataaact

SEQ ID NO: 166959 - DNA, 10 bp, Unknown
  misc_feature (1)..( 10): Result.004 file - promoters50/1383569
agtttaaact

SEQ ID NO: 166960 - DNA, 10 bp, Unknown
  misc_feature (1)..( 10): Result.004 file - promoters50/1383569
aatttaaaca

SEQ ID NO: 166961 - DNA, 13 bp, Unknown
  misc_feature (1)..( 13): Result.004 file - promoters50/1383569
aatattaaaataa

SEQ ID NO: 166962 - DNA, 13 bp, Unknown
  misc_feature (1)..( 13): Result.004 file - promoters50/1383569
aatattaatataa

SEQ ID NO: 166963 - DNA, 13 bp, Unknown
  misc_feature (1)..( 13): Result.004 file - promoters50/1383569
aatttaaacagaa

SEQ ID NO: 166964 - DNA, 7 bp, Unknown
  misc_feature (1)..( 7): Result.004 file - promoters50/1383569
aattgat

SEQ ID NO: 166965 - DNA, 7 bp, Unknown
  misc_feature (1)..( 7): Result.004 file - promoters50/1383569
gattgat

SEQ ID NO: 166966 - DNA, 7 bp, Unknown
  misc_feature (1)..( 7): Result.004 file - promoters50/1383572
gattgaa

SEQ ID NO: 166967 - DNA, 13 bp, Unknown
  misc_feature (1)..( 13): Result.004 file - promoters50/1383572
ccaaagaaaaaat

SEQ ID NO: 166968 - DNA, 13 bp, Unknown
  misc_feature (1)..( 13): Result.004 file - promoters50/1383572
tgaaagaatatct

SEQ ID NO: 166969 - DNA, 13 bp, Unknown
  misc_feature (1)..( 13): Result.004 file - promoters50/1383572
cgaaagaaacaat

SEQ ID NO: 166970 - DNA, 13 bp, Unknown
  misc_feature (1)..( 13): Result.004 file - promoters50/1383572
tgaaaaaattcac

SEQ ID NO: 166971 - DNA, 8 bp, Unknown
  misc_feature (1)..( 8): Result.004 file - promoters50/1383572
gatatata

SEQ ID NO: 166972 - DNA, 8 bp, Unknown
  misc_feature (1)..( 8): Result.004 file - promoters50/1383572
gatgtatt

SEQ ID NO: 166973 - DNA, 8 bp, Unknown
  misc_feature (1)..( 8): Result.004 file - promoters50/1383572
tatggatt

SEQ ID NO: 166974 - DNA, 7 bp, Unknown
  misc_feature (1)..( 7): Result.004 file - promoters50/1383572
tttatta

SEQ ID NO: 166975 - DNA, 7 bp, Unknown
  misc_feature (1)..( 7): Result.004 file - promoters50/1383572
tttattt

SEQ ID NO: 166976 - DNA, 7 bp, Unknown
  misc_feature (1)..( 7): Result.004 file - promoters50/1383572
ttaataa

SEQ ID NO: 166977 - DNA, 9 bp, Unknown
  misc_feature (1)..( 9): Result.004 file - promoters50/1383572
tttcaaatg

SEQ ID NO: 166978 - DNA, 9 bp, Unknown
  misc_feature (1)..( 9): Result.004 file - promoters50/1383572
ttttaaata

SEQ ID NO: 166979 - DNA, 9 bp, Unknown
  misc_feature (1)..( 9): Result.004 file - promoters50/1383572
tcataaata

SEQ ID NO: 166980 - DNA, 7 bp, Unknown
  misc_feature (1)..( 7): Result.004 file - promoters50/1383572
aaaataa

SEQ ID NO: 166981 - DNA, 7 bp, Unknown
  misc_feature (1)..( 7): Result.004 file - promoters50/1383572
taaataa

SEQ ID NO: 166982 - DNA, 7 bp, Unknown
  misc_feature (1)..( 7): Result.004 file - promoters50/1383572
taaatat

SEQ ID NO: 166983 - DNA, 7 bp, Unknown
  misc_feature (1)..( 7): Result.004 file - promoters50/1383572
attaaat

SEQ ID NO: 166984 - DNA, 7 bp, Unknown
  misc_feature (1)..( 7): Result.004 file - promoters50/1383572
attaaat

SEQ ID NO: 166985 - DNA, 7 bp, Unknown
  misc_feature (1)..( 7): Result.004 file - promoters50/1383572
aataaaa

SEQ ID NO: 166986 - DNA, 11 bp, Unknown
  misc_feature (1)..( 11): Result.004 file - promoters50/1383572
aaagaaaaaat

SEQ ID NO: 166987 - DNA, 11 bp, Unknown
  misc_feature (1)..( 11): Result.004 file - promoters50/1383572
tttgaaaaaat

SEQ ID NO: 166988 - DNA, 11 bp, Unknown
  misc_feature (1)..( 11): Result.004 file - promoters50/1383572
aaagaaacaat

SEQ ID NO: 166989 - DNA, 11 bp, Unknown
  misc_feature (1)..( 11): Result.004 file - promoters50/1383572
cctgaaagaat

SEQ ID NO: 166990 - DNA, 8 bp, Unknown
  misc_feature (1)..( 8): Result.004 file - promoters50/1383572
ataaattt

SEQ ID NO: 166991 - DNA, 8 bp, Unknown
  misc_feature (1)..( 8): Result.004 file - promoters50/1383572
acaaattt

SEQ ID NO: 166992 - DNA, 8 bp, Unknown
  misc_feature (1)..( 8): Result.004 file - promoters50/1383572
acaaatta

SEQ ID NO: 166993 - DNA, 11 bp, Unknown
  misc_feature (1)..( 11): Result.004 file - promoters50/1383572
ctttattaaaa

SEQ ID NO: 166994 - DNA, 11 bp, Unknown
  misc_feature (1)..( 11): Result.004 file - promoters50/1383572
gtatattaata

SEQ ID NO: 166995 - DNA, 11 bp, Unknown
  misc_feature (1)..( 11): Result.004 file - promoters50/1383572
gtatattcata

SEQ ID NO: 166996 - DNA, 10 bp, Unknown
  misc_feature (1)..( 10): Result.004 file - promoters50/1383572
aaattaaaat

SEQ ID NO: 166997 - DNA, 10 bp, Unknown
  misc_feature (1)..( 10): Result.004 file - promoters50/1383572
aaattcaaaa

SEQ ID NO: 166998 - DNA, 10 bp, Unknown
  misc_feature (1)..( 10): Result.004 file - promoters50/1383572
aaattcttca

SEQ ID NO: 166999 - DNA, 10 bp, Unknown
  misc_feature (1)..( 10): Result.004 file - promoters50/1383572
actttcaaaa

SEQ ID NO: 167000 - DNA, 8 bp, Unknown
  misc_feature (1)..( 8): Result.004 file - promoters50/1383572
tgaaatgt

SEQ ID NO: 167001 - DNA, 8 bp, Unknown
  misc_feature (1)..( 8): Result.004 file - promoters50/1383572
tgaaatca

SEQ ID NO: 167002 - DNA, 8 bp, Unknown
  misc_feature (1)..( 8): Result.004 file - promoters50/1383602
tgagatca

SEQ ID NO: 167003 - DNA, 7 bp, Unknown
  misc_feature (1)..( 7): Result.004 file - promoters50/1383602
caaaaaa

SEQ ID NO: 167004 - DNA, 7 bp, Unknown
  misc_feature (1)..( 7): Result.004 file - promoters50/1383602
caataaa

SEQ ID NO: 167005 - DNA, 7 bp, Unknown
  misc_feature (1)..( 7): Result.004 file - promoters50/1383602
gaaaaaa

SEQ ID NO: 167006 - DNA, 10 bp, Unknown
  misc_feature (1)..( 10): Result.004 file - promoters50/1383602
gaattaaccc

SEQ ID NO: 167007 - DNA, 10 bp, Unknown
  misc_feature (1)..( 10): Result.004 file - promoters50/1383602
atattgaccc

SEQ ID NO: 167008 - DNA, 10 bp, Unknown
  misc_feature (1)..( 10): Result.004 file - promoters50/1383602
atactgaagg

SEQ ID NO: 167009 - DNA, 8 bp, Unknown
  misc_feature (1)..( 8): Result.004 file - promoters50/1383602
aattttag

SEQ ID NO: 167010 - DNA, 8 bp, Unknown
  misc_feature (1)..( 8): Result.004 file - promoters50/1383602
aatcttat

SEQ ID NO: 167011 - DNA, 8 bp, Unknown
  misc_feature (1)..( 8): Result.004 file - promoters50/1383602
aatcctat

SEQ ID NO: 167012 - DNA, 10 bp, Unknown
  misc_feature (1)..( 10): Result.004 file - promoters50/1383602
agtaaacgac

SEQ ID NO: 167013 - DNA, 10 bp, Unknown
  misc_feature (1)..( 10): Result.004 file - promoters50/1383602
attaaaagac

SEQ ID NO: 167014 - DNA, 10 bp, Unknown
  misc_feature (1)..( 10): Result.004 file - promoters50/1383602
attgaaacag

SEQ ID NO: 167015 - DNA, 8 bp, Unknown
  misc_feature (1)..( 8): Result.004 file - promoters50/1383602
atttacaa

SEQ ID NO: 167016 - DNA, 8 bp, Unknown
  misc_feature (1)..( 8): Result.004 file - promoters50/1383602
attaacac

SEQ ID NO: 167017 - DNA, 8 bp, Unknown
  misc_feature (1)..( 8): Result.004 file - promoters50/1383602
atttttaa

SEQ ID NO: 167018 - DNA, 7 bp, Unknown
  misc_feature (1)..( 7): Result.004 file - promoters50/1383602
acaaaag

SEQ ID NO: 167019 - DNA, 7 bp, Unknown
  misc_feature (1)..( 7): Result.004 file - promoters50/1383602
gcaaaag

SEQ ID NO: 167020 - DNA, 7 bp, Unknown
  misc_feature (1)..( 7): Result.004 file - promoters50/1383624
gcaaaag

SEQ ID NO: 167021 - DNA, 13 bp, Unknown
  misc_feature (1)..( 13): Result.004 file - promoters50/1383624
aatttagttttaa

SEQ ID NO: 167022 - DNA, 13 bp, Unknown
  misc_feature (1)..( 13): Result.004 file - promoters50/1383624
aatttatttttag

SEQ ID NO: 167023 - DNA, 13 bp, Unknown
  misc_feature (1)..( 13): Result.004 file - promoters50/1383624
atgacttttgtag

SEQ ID NO: 167024 - DNA, 9 bp, Unknown
  misc_feature (1)..( 9): Result.004 file - promoters50/1383624
tgcaaaatt

SEQ ID NO: 167025 - DNA, 9 bp, Unknown
  misc_feature (1)..( 9): Result.004 file - promoters50/1383624
gaaaaaatt

SEQ ID NO: 167026 - DNA, 10 bp, Unknown
  misc_feature (1)..( 10): Result.004 file - promoters50/1383677
tgaaagaata

SEQ ID NO: 167027 - DNA, 8 bp, Unknown
  misc_feature (1)..( 8): Result.004 file - promoters50/1383677
tagctata

SEQ ID NO: 167028 - DNA, 8 bp, Unknown
  misc_feature (1)..( 8): Result.004 file - promoters50/1383677
tagatata

SEQ ID NO: 167029 - DNA, 8 bp, Unknown
  misc_feature (1)..( 8): Result.004 file - promoters50/1383677
tagataag

SEQ ID NO: 167030 - DNA, 7 bp, Unknown
  misc_feature (1)..( 7): Result.004 file - promoters50/1383677
aatattt

SEQ ID NO: 167031 - DNA, 7 bp, Unknown
  misc_feature (1)..( 7): Result.004 file - promoters50/1383677
tatattt

SEQ ID NO: 167032 - DNA, 7 bp, Unknown
  misc_feature (1)..( 7): Result.004 file - promoters50/1383677
aatattg

SEQ ID NO: 167033 - DNA, 8 bp, Unknown
  misc_feature (1)..( 8): Result.004 file - promoters50/1383677
ataaaaac

SEQ ID NO: 167034 - DNA, 8 bp, Unknown
  misc_feature (1)..( 8): Result.004 file - promoters50/1383677
ttaataac

SEQ ID NO: 167035 - DNA, 8 bp, Unknown
  misc_feature (1)..( 8): Result.004 file - promoters50/1383919
ttactaag

SEQ ID NO: 167036 - DNA, 7 bp, Unknown
  misc_feature (1)..( 7): Result.004 file - promoters50/1383919
catagaa

SEQ ID NO: 167037 - DNA, 7 bp, Unknown
  misc_feature (1)..( 7): Result.004 file - promoters50/1383919
catagag

SEQ ID NO: 167038 - DNA, 7 bp, Unknown
  misc_feature (1)..( 7): Result.004 file - promoters50/1383919
aatagaa

SEQ ID NO: 167039 - DNA, 11 bp, Unknown
  misc_feature (1)..( 11): Result.004 file - promoters50/1383919
aatatacaaaa

SEQ ID NO: 167040 - DNA, 11 bp, Unknown
  misc_feature (1)..( 11): Result.004 file - promoters50/1383919
aatagacaaaa

SEQ ID NO: 167041 - DNA, 11 bp, Unknown
  misc_feature (1)..( 11): Result.004 file - promoters50/1383919
tacatacaaaa

SEQ ID NO: 167042 - DNA, 10 bp, Unknown
  misc_feature (1)..( 10): Result.004 file - promoters50/1383919
aaatcaaagg

SEQ ID NO: 167043 - DNA, 10 bp, Unknown
  misc_feature (1)..( 10): Result.004 file - promoters50/1383919
aaaacaaaat

SEQ ID NO: 167044 - DNA, 10 bp, Unknown
  misc_feature (1)..( 10): Result.004 file - promoters50/1384016
catacaaaat

SEQ ID NO: 167045 - DNA, 13 bp, Unknown
  misc_feature (1)..( 13): Result.004 file - promoters50/1384016
ttttttcttattc

SEQ ID NO: 167046 - DNA, 13 bp, Unknown
  misc_feature (1)..( 13): Result.004 file - promoters50/1384016
ggttttattattc

SEQ ID NO: 167047 - DNA, 13 bp, Unknown
  misc_feature (1)..( 13): Result.004 file - promoters50/1384016
aatttacttagga

SEQ ID NO: 167048 - DNA, 13 bp, Unknown
  misc_feature (1)..( 13): Result.004 file - promoters50/1384016
tagattattacat

SEQ ID NO: 167049 - DNA, 13 bp, Unknown
  misc_feature (1)..( 13): Result.004 file - promoters50/1384016
ggttttagtatat

SEQ ID NO: 167050 - DNA, 13 bp, Unknown
  misc_feature (1)..( 13): Result.004 file - promoters50/1384016
agttttatcaaaa

SEQ ID NO: 167051 - DNA, 13 bp, Unknown
  misc_feature (1)..( 13): Result.004 file - promoters50/1384016
gttaataataaat

SEQ ID NO: 167052 - DNA, 13 bp, Unknown
  misc_feature (1)..( 13): Result.004 file - promoters50/1384016
tttagtaacaaaa

SEQ ID NO: 167053 - DNA, 13 bp, Unknown
  misc_feature (1)..( 13): Result.004 file - promoters50/1384016
tgtaaaaattata

SEQ ID NO: 167054 - DNA, 13 bp, Unknown
  misc_feature (1)..( 13): Result.004 file - promoters50/1384016
gcttcaaacaaaa

SEQ ID NO: 167055 - DNA, 13 bp, Unknown
  misc_feature (1)..( 13): Result.004 file - promoters50/1384016
ttttgtaaatttt

SEQ ID NO: 167056 - DNA, 13 bp, Unknown
  misc_feature (1)..( 13): Result.004 file - promoters50/1384016
tatgaaaaaaaaa

SEQ ID NO: 167057 - DNA, 13 bp, Unknown
  misc_feature (1)..( 13): Result.004 file - promoters50/1384016
ttttaaaatttag

SEQ ID NO: 167058 - DNA, 11 bp, Unknown
  misc_feature (1)..( 11): Result.004 file - promoters50/1384016
aattaaataaa

SEQ ID NO: 167059 - DNA, 11 bp, Unknown
  misc_feature (1)..( 11): Result.004 file - promoters50/1384016
ttttaaataga

SEQ ID NO: 167060 - DNA, 11 bp, Unknown
  misc_feature (1)..( 11): Result.004 file - promoters50/1384016
tattatatagc

SEQ ID NO: 167061 - DNA, 11 bp, Unknown
  misc_feature (1)..( 11): Result.004 file - promoters50/1384016
ctctaaaaaaa

SEQ ID NO: 167062 - DNA, 11 bp, Unknown
  misc_feature (1)..( 11): Result.004 file - promoters50/1384016
cttttaatatt

SEQ ID NO: 167063 - DNA, 11 bp, Unknown
  misc_feature (1)..( 11): Result.004 file - promoters50/1384016
tattatcaaag

SEQ ID NO: 167064 - DNA, 11 bp, Unknown
  misc_feature (1)..( 11): Result.004 file - promoters50/1384016
tattatcaatg

SEQ ID NO: 167065 - DNA, 11 bp, Unknown
  misc_feature (1)..( 11): Result.004 file - promoters50/1384016
tattatttcaa

SEQ ID NO: 167066 - DNA, 12 bp, Unknown
  misc_feature (1)..( 12): Result.004 file - promoters50/1384016
tttttaatttct

SEQ ID NO: 167067 - DNA, 12 bp, Unknown
  misc_feature (1)..( 12): Result.004 file - promoters50/1384016
acaataatttac

SEQ ID NO: 167068 - DNA, 12 bp, Unknown
  misc_feature (1)..( 12): Result.004 file - promoters50/1384016
tcaattatttta

SEQ ID NO: 167069 - DNA, 12 bp, Unknown
  misc_feature (1)..( 12): Result.004 file - promoters50/1384016
tttttactttta

SEQ ID NO: 167070 - DNA, 12 bp, Unknown
  misc_feature (1)..( 12): Result.004 file - promoters50/1384016
aaaatagtttac

SEQ ID NO: 167071 - DNA, 12 bp, Unknown
  misc_feature (1)..( 12): Result.004 file - promoters50/1384016
aaaaaagttttt

SEQ ID NO: 167072 - DNA, 8 bp, Unknown
  misc_feature (1)..( 8): Result.004 file - promoters50/1384016
ggaaaaaa

SEQ ID NO: 167073 - DNA, 8 bp, Unknown
  misc_feature (1)..( 8): Result.004 file - promoters50/1384016
ttaaaaaa

SEQ ID NO: 167074 - DNA, 9 bp, Unknown
  misc_feature (1)..( 9): Result.004 file - promoters50/1384016
ttaaacaaa

SEQ ID NO: 167075 - DNA, 9 bp, Unknown
  misc_feature (1)..( 9): Result.004 file - promoters50/1384016
agaaagaaa

SEQ ID NO: 167076 - DNA, 9 bp, Unknown
  misc_feature (1)..( 9): Result.004 file - promoters50/1384016
aaaaaaaaa

SEQ ID NO: 167077 - DNA, 9 bp, Unknown
  misc_feature (1)..( 9): Result.004 file - promoters50/1384016
agaaacaaa

SEQ ID NO: 167078 - DNA, 9 bp, Unknown
  misc_feature (1)..( 9): Result.004 file - promoters50/1384016
atgatgaaa

SEQ ID NO: 167079 - DNA, 14 bp, Unknown
  misc_feature (1)..( 14): Result.004 file - promoters50/1384016
atttgaaggcccaa

SEQ ID NO: 167080 - DNA, 14 bp, Unknown
  misc_feature (1)..( 14): Result.004 file - promoters50/1384016
tgtcataggcccat

SEQ ID NO: 167081 - DNA, 14 bp, Unknown
  misc_feature (1)..( 14): Result.004 file - promoters50/1384016
atttgatggcccat

SEQ ID NO: 167082 - DNA, 14 bp, Unknown
  misc_feature (1)..( 14): Result.004 file - promoters50/1384016
acctaaaggcccaa

SEQ ID NO: 167083 - DNA, 14 bp, Unknown
  misc_feature (1)..( 14): Result.004 file - promoters50/1384016
aaagtttgggccaa

SEQ ID NO: 167084 - DNA, 14 bp, Unknown
  misc_feature (1)..( 14): Result.004 file - promoters50/1384016
tatccttgggcttt

SEQ ID NO: 167085 - DNA, 14 bp, Unknown
  misc_feature (1)..( 14): Result.004 file - promoters50/1384016
ttttcttttaccct

SEQ ID NO: 167086 - DNA, 14 bp, Unknown
  misc_feature (1)..( 14): Result.004 file - promoters50/1384016
atttattttagatt

SEQ ID NO: 167087 - DNA, 14 bp, Unknown
  misc_feature (1)..( 14): Result.004 file - promoters50/1384016
taatcttttttaga

SEQ ID NO: 167088 - DNA, 14 bp, Unknown
  misc_feature (1)..( 14): Result.004 file - promoters50/1384016
catccttatacttc

SEQ ID NO: 167089 - DNA, 14 bp, Unknown
  misc_feature (1)..( 14): Result.004 file - promoters50/1384016
tttgcttctttgga

SEQ ID NO: 167090 - DNA, 14 bp, Unknown
  misc_feature (1)..( 14): Result.004 file - promoters50/1384016
ccctatattaaatt

SEQ ID NO: 167091 - DNA, 11 bp, Unknown
  misc_feature (1)..( 11): Result.004 file - promoters50/1384016
acatatatata

SEQ ID NO: 167092 - DNA, 11 bp, Unknown
  misc_feature (1)..( 11): Result.004 file - promoters50/1384016
ttataaatatt

SEQ ID NO: 167093 - DNA, 11 bp, Unknown
  misc_feature (1)..( 11): Result.004 file - promoters50/1384016
ttatacataat

SEQ ID NO: 167094 - DNA, 11 bp, Unknown
  misc_feature (1)..( 11): Result.004 file - promoters50/1384016
agacaaataga

SEQ ID NO: 167095 - DNA, 11 bp, Unknown
  misc_feature (1)..( 11): Result.004 file - promoters50/1384016
ttattaataaa

SEQ ID NO: 167096 - DNA, 11 bp, Unknown
  misc_feature (1)..( 11): Result.004 file - promoters50/1384016
gtttaaacatt

SEQ ID NO: 167097 - DNA, 10 bp, Unknown
  misc_feature (1)..( 10): Result.004 file - promoters50/1384016
taacaaaaaa

SEQ ID NO: 167098 - DNA, 10 bp, Unknown
  misc_feature (1)..( 10): Result.004 file - promoters50/1384016
tttcaaaaat

SEQ ID NO: 167099 - DNA, 10 bp, Unknown
  misc_feature (1)..( 10): Result.004 file - promoters50/1384016
tatgaaaaaa

SEQ ID NO: 167100 - DNA, 10 bp, Unknown
  misc_feature (1)..( 10): Result.004 file - promoters50/1384016
aaacaaaact

SEQ ID NO: 167101 - DNA, 10 bp, Unknown
  misc_feature (1)..( 10): Result.004 file - promoters50/1384016
ttttaaaatt

SEQ ID NO: 167102 - DNA, 10 bp, Unknown
  misc_feature (1)..( 10): Result.004 file - promoters50/1384016
atgtaaaaat

SEQ ID NO: 167103 - DNA, 15 bp, Unknown
  misc_feature (1)..( 15): Result.004 file - promoters50/1384016
tataaaaaatttttt

SEQ ID NO: 167104 - DNA, 15 bp, Unknown
  misc_feature (1)..( 15): Result.004 file - promoters50/1384016
aagaaaaaaaaaaaa

SEQ ID NO: 167105 - DNA, 15 bp, Unknown
  misc_feature (1)..( 15): Result.004 file - promoters50/1384016
gggaaagattaaaca

SEQ ID NO: 167106 - DNA, 15 bp, Unknown
  misc_feature (1)..( 15): Result.004 file - promoters50/1384016
atgaaatattttttt

SEQ ID NO: 167107 - DNA, 15 bp, Unknown
  misc_feature (1)..( 15): Result.004 file - promoters50/1384016
aagaaacaaagtaaa

SEQ ID NO: 167108 - DNA, 15 bp, Unknown
  misc_feature (1)..( 15): Result.004 file - promoters50/1384016
tagaaagaaataata

SEQ ID NO: 167109 - DNA, 12 bp, Unknown
  misc_feature (1)..( 12): Result.004 file - promoters50/1384016
ctttttttgttt

SEQ ID NO: 167110 - DNA, 12 bp, Unknown
  misc_feature (1)..( 12): Result.004 file - promoters50/1384016
cttttttttttt

SEQ ID NO: 167111 - DNA, 12 bp, Unknown
  misc_feature (1)..( 12): Result.004 file - promoters50/1384016
tgattttggttt

SEQ ID NO: 167112 - DNA, 12 bp, Unknown
  misc_feature (1)..( 12): Result.004 file - promoters50/1384016
acgtttttgtct

SEQ ID NO: 167113 - DNA, 12 bp, Unknown
  misc_feature (1)..( 12): Result.004 file - promoters50/1384016
atgtttttgctg

SEQ ID NO: 167114 - DNA, 12 bp, Unknown
  misc_feature (1)..( 12): Result.004 file - promoters50/1384161
gtttttcggtta

SEQ ID NO: 167115 - DNA, 9 bp, Unknown
  misc_feature (1)..( 9): Result.004 file - promoters50/1384161
ttttaacta

SEQ ID NO: 167116 - DNA, 9 bp, Unknown
  misc_feature (1)..( 9): Result.004 file - promoters50/1384161
tttgaactt

SEQ ID NO: 167117 - DNA, 9 bp, Unknown
  misc_feature (1)..( 9): Result.004 file - promoters50/1384161
ttttcactt

SEQ ID NO: 167118 - DNA, 9 bp, Unknown
  misc_feature (1)..( 9): Result.004 file - promoters50/1384161
aattaacta

SEQ ID NO: 167119 - DNA, 9 bp, Unknown
  misc_feature (1)..( 9): Result.004 file - promoters50/1384261
cctgaacta

SEQ ID NO: 167120 - DNA, 9 bp, Unknown
  misc_feature (1)..( 9): Result.004 file - promoters50/1384261
aaaagaaga

SEQ ID NO: 167121 - DNA, 9 bp, Unknown
  misc_feature (1)..( 9): Result.004 file - promoters50/1384261
caaaaaagc

SEQ ID NO: 167122 - DNA, 9 bp, Unknown
  misc_feature (1)..( 9): Result.004 file - promoters50/1384261
caaaaaaca

SEQ ID NO: 167123 - DNA, 9 bp, Unknown
  misc_feature (1)..( 9): Result.004 file - promoters50/1384261
gcaaaaagt

SEQ ID NO: 167124 - DNA, 9 bp, Unknown
  misc_feature (1)..( 9): Result.004 file - promoters50/1384261
aaaacaaca

SEQ ID NO: 167125 - DNA, 9 bp, Unknown
  misc_feature (1)..( 9): Result.004 file - promoters50/1384261
ttaaatagt

SEQ ID NO: 167126 - DNA, 10 bp, Unknown
  misc_feature (1)..( 10): Result.004 file - promoters50/1384261
actaatattt

SEQ ID NO: 167127 - DNA, 10 bp, Unknown
  misc_feature (1)..( 10): Result.004 file - promoters50/1384261
acttatagat

SEQ ID NO: 167128 - DNA, 10 bp, Unknown
  misc_feature (1)..( 10): Result.004 file - promoters50/1384261
cataacatta

SEQ ID NO: 167129 - DNA, 10 bp, Unknown
  misc_feature (1)..( 10): Result.004 file - promoters50/1384261
tctaacatgt

SEQ ID NO: 167130 - DNA, 10 bp, Unknown
  misc_feature (1)..( 10): Result.004 file - promoters50/1384261
cattatcgat

SEQ ID NO: 167131 - DNA, 10 bp, Unknown
  misc_feature (1)..( 10): Result.004 file - promoters50/1384261
ttttaccgac

SEQ ID NO: 167132 - DNA, 11 bp, Unknown
  misc_feature (1)..( 11): Result.004 file - promoters50/1384261
aaaaaagaaaa

SEQ ID NO: 167133 - DNA, 11 bp, Unknown
  misc_feature (1)..( 11): Result.004 file - promoters50/1384261
gctaaacaaaa

SEQ ID NO: 167134 - DNA, 11 bp, Unknown
  misc_feature (1)..( 11): Result.004 file - promoters50/1384261
tccaaaaaagc

SEQ ID NO: 167135 - DNA, 11 bp, Unknown
  misc_feature (1)..( 11): Result.004 file - promoters50/1384261
tgcaaaaagta

SEQ ID NO: 167136 - DNA, 11 bp, Unknown
  misc_feature (1)..( 11): Result.004 file - promoters50/1384261
tccaaaacaac

SEQ ID NO: 167137 - DNA, 11 bp, Unknown
  misc_feature (1)..( 11): Result.004 file - promoters50/1384261
attaaatagtt

SEQ ID NO: 167138 - DNA, 8 bp, Unknown
  misc_feature (1)..( 8): Result.004 file - promoters50/1384261
aaaaaagg

SEQ ID NO: 167139 - DNA, 8 bp, Unknown
  misc_feature (1)..( 8): Result.004 file - promoters50/1384261
aaaaaaat

SEQ ID NO: 167140 - DNA, 8 bp, Unknown
  misc_feature (1)..( 8): Result.004 file - promoters50/1384261
aaacaagt

SEQ ID NO: 167141 - DNA, 8 bp, Unknown
  misc_feature (1)..( 8): Result.004 file - promoters50/1384261
aaaaaata

SEQ ID NO: 167142 - DNA, 8 bp, Unknown
  misc_feature (1)..( 8): Result.004 file - promoters50/1384261
aaactagt

SEQ ID NO: 167143 - DNA, 8 bp, Unknown
  misc_feature (1)..( 8): Result.004 file - promoters50/1384261
aaaatatc

SEQ ID NO: 167144 - DNA, 10 bp, Unknown
  misc_feature (1)..( 10): Result.004 file - promoters50/1384261
caatttagct

SEQ ID NO: 167145 - DNA, 10 bp, Unknown
  misc_feature (1)..( 10): Result.004 file - promoters50/1384261
taatttaaaa

SEQ ID NO: 167146 - DNA, 10 bp, Unknown
  misc_feature (1)..( 10): Result.004 file - promoters50/1384261
aaatttaaaa

SEQ ID NO: 167147 - DNA, 10 bp, Unknown
  misc_feature (1)..( 10): Result.004 file - promoters50/1384261
taattttgac

SEQ ID NO: 167148 - DNA, 10 bp, Unknown
  misc_feature (1)..( 10): Result.004 file - promoters50/1384261
gtttttgatt

SEQ ID NO: 167149 - DNA, 10 bp, Unknown
  misc_feature (1)..( 10): Result.004 file - promoters50/1384261
aaaattaacc

SEQ ID NO: 167150 - DNA, 12 bp, Unknown
  misc_feature (1)..( 12): Result.004 file - promoters50/1384261
aacacaataaca

SEQ ID NO: 167151 - DNA, 12 bp, Unknown
  misc_feature (1)..( 12): Result.004 file - promoters50/1384261
aacaaaattaac

SEQ ID NO: 167152 - DNA, 12 bp, Unknown
  misc_feature (1)..( 12): Result.004 file - promoters50/1384261
atcacaatacat

SEQ ID NO: 167153 - DNA, 12 bp, Unknown
  misc_feature (1)..( 12): Result.004 file - promoters50/1384261
tttaaaattttc

SEQ ID NO: 167154 - DNA, 12 bp, Unknown
  misc_feature (1)..( 12): Result.004 file - promoters50/1384261
atcaaaatgaat

SEQ ID NO: 167155 - DNA, 12 bp, Unknown
  misc_feature (1)..( 12): Result.004 file - promoters50/1384329
tcttaaatttaa

SEQ ID NO: 167156 - DNA, 23 bp, Unknown
  misc_feature (1)..( 23): Result.004 file - promoters50/1384329
tttggttacatagtagtatgtat

SEQ ID NO: 167157 - DNA, 23 bp, Unknown
  misc_feature (1)..( 23): Result.004 file - promoters50/1384329
ttaagtaacatagactcacaaac

SEQ ID NO: 167158 - DNA, 23 bp, Unknown
  misc_feature (1)..( 23): Result.004 file - promoters50/1384329
attgtttaaataaaagtaactta

SEQ ID NO: 167159 - DNA, 23 bp, Unknown
  misc_feature (1)..( 23): Result.004 file - promoters50/1384329
attattttaatacgtacaaaagc

SEQ ID NO: 167160 - DNA, 23 bp, Unknown
  misc_feature (1)..( 23): Result.004 file - promoters50/1384329
aatcataaaataaaaaataaaaa

SEQ ID NO: 167161 - DNA, 23 bp, Unknown
  misc_feature (1)..( 23): Result.004 file - promoters50/1384329
tttgtttagtgtctaagttatat

SEQ ID NO: 167162 - DNA, 23 bp, Unknown
  misc_feature (1)..( 23): Result.004 file - promoters50/1384329
catcatcaaacaaaaataaatta

SEQ ID NO: 167163 - DNA, 12 bp, Unknown
  misc_feature (1)..( 12): Result.004 file - promoters50/1384329
tgaatattaaac

SEQ ID NO: 167164 - DNA, 12 bp, Unknown
  misc_feature (1)..( 12): Result.004 file - promoters50/1384329
tgactattatag

SEQ ID NO: 167165 - DNA, 12 bp, Unknown
  misc_feature (1)..( 12): Result.004 file - promoters50/1384329
aatataataaaa

SEQ ID NO: 167166 - DNA, 12 bp, Unknown
  misc_feature (1)..( 12): Result.004 file - promoters50/1384329
attatataatag

SEQ ID NO: 167167 - DNA, 12 bp, Unknown
  misc_feature (1)..( 12): Result.004 file - promoters50/1384329
cccctaaaaaaa

SEQ ID NO: 167168 - DNA, 12 bp, Unknown
  misc_feature (1)..( 12): Result.004 file - promoters50/1384329
tttgtatttaag

SEQ ID NO: 167169 - DNA, 8 bp, Unknown
  misc_feature (1)..( 8): Result.004 file - promoters50/1384329
atatttaa

SEQ ID NO: 167170 - DNA, 8 bp, Unknown
  misc_feature (1)..( 8): Result.004 file - promoters50/1384329
atattttg

SEQ ID NO: 167171 - DNA, 8 bp, Unknown
  misc_feature (1)..( 8): Result.004 file - promoters50/1384329
atatataa

SEQ ID NO: 167172 - DNA, 8 bp, Unknown
  misc_feature (1)..( 8): Result.004 file - promoters50/1384329
atacaata

SEQ ID NO: 167173 - DNA, 8 bp, Unknown
  misc_feature (1)..( 8): Result.004 file - promoters50/1384329
atatttat

SEQ ID NO: 167174 - DNA, 8 bp, Unknown
  misc_feature (1)..( 8): Result.004 file - promoters50/1384329
ttattttt

SEQ ID NO: 167175 - DNA, 12 bp, Unknown
  misc_feature (1)..( 12): Result.004 file - promoters50/1384329
attttaatatct

SEQ ID NO: 167176 - DNA, 12 bp, Unknown
  misc_feature (1)..( 12): Result.004 file - promoters50/1384329
tctataatatac

SEQ ID NO: 167177 - DNA, 12 bp, Unknown
  misc_feature (1)..( 12): Result.004 file - promoters50/1384329
tatataatagct

SEQ ID NO: 167178 - DNA, 12 bp, Unknown
  misc_feature (1)..( 12): Result.004 file - promoters50/1384329
ataataaaatgg

SEQ ID NO: 167179 - DNA, 12 bp, Unknown
  misc_feature (1)..( 12): Result.004 file - promoters50/1384329
cccctaaaaaaa

SEQ ID NO: 167180 - DNA, 12 bp, Unknown
  misc_feature (1)..( 12): Result.004 file - promoters50/1384329
tatttaagttga

SEQ ID NO: 167181 - DNA, 13 bp, Unknown
  misc_feature (1)..( 13): Result.004 file - promoters50/1384329
ctatttatacccc

SEQ ID NO: 167182 - DNA, 13 bp, Unknown
  misc_feature (1)..( 13): Result.004 file - promoters50/1384329
gtatttaaacccc

SEQ ID NO: 167183 - DNA, 13 bp, Unknown
  misc_feature (1)..( 13): Result.004 file - promoters50/1384329
ctatttataaatg

SEQ ID NO: 167184 - DNA, 13 bp, Unknown
  misc_feature (1)..( 13): Result.004 file - promoters50/1384329
cactttatataaa

SEQ ID NO: 167185 - DNA, 13 bp, Unknown
  misc_feature (1)..( 13): Result.004 file - promoters50/1384329
ctatatatacaca

SEQ ID NO: 167186 - DNA, 13 bp, Unknown
  misc_feature (1)..( 13): Result.004 file - promoters50/1384329
atataaatagact

SEQ ID NO: 167187 - DNA, 20 bp, Unknown
  misc_feature (1)..( 20): Result.004 file - promoters50/1384329
acattttcattattttaata

SEQ ID NO: 167188 - DNA, 11 bp, Unknown
  misc_feature (1)..( 11): Result.004 file - promoters50/1384329
ttatttgtgtt

SEQ ID NO: 167189 - DNA, 20 bp, Unknown
  misc_feature (1)..( 20): Result.004 file - promoters50/1384329
aaaacaaaattgtttaaata

SEQ ID NO: 167190 - DNA, 13 bp, Unknown
  misc_feature (1)..( 13): Result.004 file - promoters50/1384329
atcaaattaaatt

SEQ ID NO: 167191 - DNA, 20 bp, Unknown
  misc_feature (1)..( 20): Result.004 file - promoters50/1384329
aacatgtttttgtttagtgt

SEQ ID NO: 167192 - DNA, 20 bp, Unknown
  misc_feature (1)..( 20): Result.004 file - promoters50/1384329
aaacaaaaataaattatacg

SEQ ID NO: 167193 - DNA, 20 bp, Unknown
  misc_feature (1)..( 20): Result.004 file - promoters50/1384329
ataaaataaaaaataaaaat

SEQ ID NO: 167194 - DNA, 10 bp, Unknown
  misc_feature (1)..( 10): Result.004 file - promoters50/1384329
ttttaatctg

SEQ ID NO: 167195 - DNA, 10 bp, Unknown
  misc_feature (1)..( 10): Result.004 file - promoters50/1384329
ttttaatcat

SEQ ID NO: 167196 - DNA, 10 bp, Unknown
  misc_feature (1)..( 10): Result.004 file - promoters50/1384329
atttaattta

SEQ ID NO: 167197 - DNA, 10 bp, Unknown
  misc_feature (1)..( 10): Result.004 file - promoters50/1384329
ttttaatata

SEQ ID NO: 167198 - DNA, 10 bp, Unknown
  misc_feature (1)..( 10): Result.004 file - promoters50/1384329
ctttagtcaa

SEQ ID NO: 167199 - DNA, 10 bp, Unknown
  misc_feature (1)..( 10): Result.004 file - promoters50/1384329
gtttactata

SEQ ID NO: 167200 - DNA, 10 bp, Unknown
  misc_feature (1)..( 10): Result.004 file - promoters50/1384329
attattttag

SEQ ID NO: 167201 - DNA, 10 bp, Unknown
  misc_feature (1)..( 10): Result.004 file - promoters50/1384329
tgtatattat

SEQ ID NO: 167202 - DNA, 10 bp, Unknown
  misc_feature (1)..( 10): Result.004 file - promoters50/1384329
attatattat

SEQ ID NO: 167203 - DNA, 10 bp, Unknown
  misc_feature (1)..( 10): Result.004 file - promoters50/1384329
taaatattac

SEQ ID NO: 167204 - DNA, 10 bp, Unknown
  misc_feature (1)..( 10): Result.004 file - promoters50/1384329
cccatattat

SEQ ID NO: 167205 - DNA, 10 bp, Unknown
  misc_feature (1)..( 10): Result.004 file - promoters50/1384732
tttggtttat

SEQ ID NO: 167206 - DNA, 10 bp, Unknown
  misc_feature (1)..( 10): Result.004 file - promoters50/1384732
cacaacatag

SEQ ID NO: 167207 - DNA, 10 bp, Unknown
  misc_feature (1)..( 10): Result.004 file - promoters50/1384732
ctcaaaatat

SEQ ID NO: 167208 - DNA, 10 bp, Unknown
  misc_feature (1)..( 10): Result.004 file - promoters50/1384732
tccaagatag

SEQ ID NO: 167209 - DNA, 10 bp, Unknown
  misc_feature (1)..( 10): Result.004 file - promoters50/1384921
ctctaaataa

SEQ ID NO: 167210 - DNA, 10 bp, Unknown
  misc_feature (1)..( 10): Result.004 file - promoters50/1384921
catatataac

SEQ ID NO: 167211 - DNA, 10 bp, Unknown
  misc_feature (1)..( 10): Result.004 file - promoters50/1384921
aatatatatg

SEQ ID NO: 167212 - DNA, 10 bp, Unknown
  misc_feature (1)..( 10): Result.004 file - promoters50/1384921
actatgtaaa

SEQ ID NO: 167213 - DNA, 10 bp, Unknown
  misc_feature (1)..( 10): Result.004 file - promoters50/1384921
caaaaataaa

SEQ ID NO: 167214 - DNA, 10 bp, Unknown
  misc_feature (1)..( 10): Result.004 file - promoters50/1384921
gaaacatatc

SEQ ID NO: 167215 - DNA, 10 bp, Unknown
  misc_feature (1)..( 10): Result.004 file - promoters50/1384921
gacatgtcaa

SEQ ID NO: 167216 - DNA, 10 bp, Unknown
  misc_feature (1)..( 10): Result.004 file - promoters50/1385263
ttaaagtaaa

SEQ ID NO: 167217 - DNA, 6 bp, Unknown
  misc_feature (1)..( 6): Result.004 file - promoters50/1385263
gttaaa

SEQ ID NO: 167218 - DNA, 6 bp, Unknown
  misc_feature (1)..( 6): Result.004 file - promoters50/1385263
gttaaa

SEQ ID NO: 167219 - DNA, 7 bp, Unknown
  misc_feature (1)..( 7): Result.004 file - promoters50/1385263
gttcaaa

SEQ ID NO: 167220 - DNA, 8 bp, Unknown
  misc_feature (1)..( 8): Result.004 file - promoters50/1385263
ttgtgatg

SEQ ID NO: 167221 - DNA, 8 bp, Unknown
  misc_feature (1)..( 8): Result.004 file - promoters50/1385263
ttgttatg

SEQ ID NO: 167222 - DNA, 8 bp, Unknown
  misc_feature (1)..( 8): Result.004 file - promoters50/1385263
ttgggatt

SEQ ID NO: 167223 - DNA, 16 bp, Unknown
  misc_feature (1)..( 16): Result.004 file - promoters50/1385263
caactctaactaaaaa

SEQ ID NO: 167224 - DNA, 16 bp, Unknown
  misc_feature (1)..( 16): Result.004 file - promoters50/1385263
cattcatatgtaaaaa

SEQ ID NO: 167225 - DNA, 16 bp, Unknown
  misc_feature (1)..( 16): Result.004 file - promoters50/1385263
tttgttcacttaaatc

SEQ ID NO: 167226 - DNA, 16 bp, Unknown
  misc_feature (1)..( 16): Result.004 file - promoters50/1385263
ttttttcagttaatca

SEQ ID NO: 167227 - DNA, 8 bp, Unknown
  misc_feature (1)..( 8): Result.004 file - promoters50/1385263
aaaactaa

SEQ ID NO: 167228 - DNA, 8 bp, Unknown
  misc_feature (1)..( 8): Result.004 file - promoters50/1385263
aaaactgt

SEQ ID NO: 167229 - DNA, 8 bp, Unknown
  misc_feature (1)..( 8): Result.004 file - promoters50/1385263
aaaataaa

SEQ ID NO: 167230 - DNA, 12 bp, Unknown
  misc_feature (1)..( 12): Result.004 file - promoters50/1385263
ctccttccaaac

SEQ ID NO: 167231 - DNA, 12 bp, Unknown
  misc_feature (1)..( 12): Result.004 file - promoters50/1385263
gtccatcccaac

SEQ ID NO: 167232 - DNA, 12 bp, Unknown
  misc_feature (1)..( 12): Result.004 file - promoters50/1385263
gtcaatccttct

SEQ ID NO: 167233 - DNA, 7 bp, Unknown
  misc_feature (1)..( 7): Result.004 file - promoters50/1385263
agatttt

SEQ ID NO: 167234 - DNA, 7 bp, Unknown
  misc_feature (1)..( 7): Result.004 file - promoters50/1385263
agattta

SEQ ID NO: 167235 - DNA, 7 bp, Unknown
  misc_feature (1)..( 7): Result.004 file - promoters50/1385263
agactta

SEQ ID NO: 167236 - DNA, 10 bp, Unknown
  misc_feature (1)..( 10): Result.004 file - promoters50/1385263
tgttttattt

SEQ ID NO: 167237 - DNA, 10 bp, Unknown
  misc_feature (1)..( 10): Result.004 file - promoters50/1385263
tgttttctta

SEQ ID NO: 167238 - DNA, 10 bp, Unknown
  misc_feature (1)..( 10): Result.004 file - promoters50/1385263
cgtttttttt

SEQ ID NO: 167239 - DNA, 9 bp, Unknown
  misc_feature (1)..( 9): Result.004 file - promoters50/1385263
ttcacttgt

SEQ ID NO: 167240 - DNA, 9 bp, Unknown
  misc_feature (1)..( 9): Result.004 file - promoters50/1385263
ttctcttga

SEQ ID NO: 167241 - DNA, 9 bp, Unknown
  misc_feature (1)..( 9): Result.004 file - promoters50/1385347
tccacgtgt

SEQ ID NO: 167242 - DNA, 10 bp, Unknown
  misc_feature (1)..( 10): Result.004 file - promoters50/1385347
ataattttta

SEQ ID NO: 167243 - DNA, 10 bp, Unknown
  misc_feature (1)..( 10): Result.004 file - promoters50/1385347
gtaattttct

SEQ ID NO: 167244 - DNA, 10 bp, Unknown
  misc_feature (1)..( 10): Result.004 file - promoters50/1385347
atagtttaga

SEQ ID NO: 167245 - DNA, 10 bp, Unknown
  misc_feature (1)..( 10): Result.004 file - promoters50/1385347
gaaatgttca

SEQ ID NO: 167246 - DNA, 10 bp, Unknown
  misc_feature (1)..( 10): Result.004 file - promoters50/1385347
tgaatcttct

SEQ ID NO: 167247 - DNA, 10 bp, Unknown
  misc_feature (1)..( 10): Result.004 file - promoters50/1385347
aaaatgtgaa

SEQ ID NO: 167248 - DNA, 15 bp, Unknown
  misc_feature (1)..( 15): Result.004 file - promoters50/1385347
atagctaaagtctat

SEQ ID NO: 167249 - DNA, 15 bp, Unknown
  misc_feature (1)..( 15): Result.004 file - promoters50/1385347
aaatctaaattctta

SEQ ID NO: 167250 - DNA, 15 bp, Unknown
  misc_feature (1)..( 15): Result.004 file - promoters50/1385347
gaagctaaaacaacg

SEQ ID NO: 167251 - DNA, 15 bp, Unknown
  misc_feature (1)..( 15): Result.004 file - promoters50/1385347
cccatttcattttta

SEQ ID NO: 167252 - DNA, 15 bp, Unknown
  misc_feature (1)..( 15): Result.004 file - promoters50/1385347
tatcttcaatttaac

SEQ ID NO: 167253 - DNA, 15 bp, Unknown
  misc_feature (1)..( 15): Result.004 file - promoters50/1385347
gaaactaaaattatt

SEQ ID NO: 167254 - DNA, 15 bp, Unknown
  misc_feature (1)..( 15): Result.004 file - promoters50/1385347
taagtaactttttta

SEQ ID NO: 167255 - DNA, 13 bp, Unknown
  misc_feature (1)..( 13): Result.004 file - promoters50/1385347
aaaaataattttt

SEQ ID NO: 167256 - DNA, 13 bp, Unknown
  misc_feature (1)..( 13): Result.004 file - promoters50/1385347
acaaaaaatgtga

SEQ ID NO: 167257 - DNA, 13 bp, Unknown
  misc_feature (1)..( 13): Result.004 file - promoters50/1385347
gaaaataaatata

SEQ ID NO: 167258 - DNA, 13 bp, Unknown
  misc_feature (1)..( 13): Result.004 file - promoters50/1385347
cttgatagtttag

SEQ ID NO: 167259 - DNA, 13 bp, Unknown
  misc_feature (1)..( 13): Result.004 file - promoters50/1385347
acaaactgtgaaa

SEQ ID NO: 167260 - DNA, 13 bp, Unknown
  misc_feature (1)..( 13): Result.004 file - promoters50/1385347
taacacagaaatg

SEQ ID NO: 167261 - DNA, 13 bp, Unknown
  misc_feature (1)..( 13): Result.004 file - promoters50/1385376
agaaatgaaggaa

SEQ ID NO: 167262 - DNA, 9 bp, Unknown
  misc_feature (1)..( 9): Result.004 file - promoters50/1385376
taaaaaatt

SEQ ID NO: 167263 - DNA, 9 bp, Unknown
  misc_feature (1)..( 9): Result.004 file - promoters50/1385376
taaaagatt

SEQ ID NO: 167264 - DNA, 9 bp, Unknown
  misc_feature (1)..( 9): Result.004 file - promoters50/1385376
gataagatt

SEQ ID NO: 167265 - DNA, 7 bp, Unknown
  misc_feature (1)..( 7): Result.004 file - promoters50/1385376
ttggttt

SEQ ID NO: 167266 - DNA, 7 bp, Unknown
  misc_feature (1)..( 7): Result.004 file - promoters50/1385376
ttgattt

SEQ ID NO: 167267 - DNA, 7 bp, Unknown
  misc_feature (1)..( 7): Result.004 file - promoters50/1385376
ttggttg

SEQ ID NO: 167268 - DNA, 9 bp, Unknown
  misc_feature (1)..( 9): Result.004 file - promoters50/1385376
tttgatttt

SEQ ID NO: 167269 - DNA, 9 bp, Unknown
  misc_feature (1)..( 9): Result.004 file - promoters50/1385376
tttggtttt

SEQ ID NO: 167270 - DNA, 9 bp, Unknown
  misc_feature (1)..( 9): Result.004 file - promoters50/1385655
cttggttgg

SEQ ID NO: 167271 - DNA, 19 bp, Unknown
  misc_feature (1)..( 19): Result.004 file - promoters50/1385655
atttttttgtctaggtttt

SEQ ID NO: 167272 - DNA, 19 bp, Unknown
  misc_feature (1)..( 19): Result.004 file - promoters50/1385655
atttttttttctatgtttt

SEQ ID NO: 167273 - DNA, 19 bp, Unknown
  misc_feature (1)..( 19): Result.004 file - promoters50/1386125
gctcgattctagtggtttt

SEQ ID NO: 167274 - DNA, 10 bp, Unknown
  misc_feature (1)..( 10): Result.004 file - promoters50/1386125
atttccagct

SEQ ID NO: 167275 - DNA, 10 bp, Unknown
  misc_feature (1)..( 10): Result.004 file - promoters50/1386125
attttcagta

SEQ ID NO: 167276 - DNA, 10 bp, Unknown
  misc_feature (1)..( 10): Result.004 file - promoters50/1386215
cttttaagta

SEQ ID NO: 167277 - DNA, 10 bp, Unknown
  misc_feature (1)..( 10): Result.004 file - promoters50/1386215
aaaatgtgaa

SEQ ID NO: 167278 - DNA, 10 bp, Unknown
  misc_feature (1)..( 10): Result.004 file - promoters50/1386215
aaaatttgaa

SEQ ID NO: 167279 - DNA, 10 bp, Unknown
  misc_feature (1)..( 10): Result.004 file - promoters50/1386215
agaatttgac

SEQ ID NO: 167280 - DNA, 10 bp, Unknown
  misc_feature (1)..( 10): Result.004 file - promoters50/1386215
caaatgttgc

SEQ ID NO: 167281 - DNA, 10 bp, Unknown
  misc_feature (1)..( 10): Result.004 file - promoters50/1386215
aaaatgtatc

SEQ ID NO: 167282 - DNA, 10 bp, Unknown
  misc_feature (1)..( 10): Result.004 file - promoters50/1386215
aaaatgttat

SEQ ID NO: 167283 - DNA, 12 bp, Unknown
  misc_feature (1)..( 12): Result.004 file - promoters50/1386215
attcataatttg

SEQ ID NO: 167284 - DNA, 12 bp, Unknown
  misc_feature (1)..( 12): Result.004 file - promoters50/1386215
gttcaaaatttt

SEQ ID NO: 167285 - DNA, 12 bp, Unknown
  misc_feature (1)..( 12): Result.004 file - promoters50/1386215
aaatgtaatttg

SEQ ID NO: 167286 - DNA, 12 bp, Unknown
  misc_feature (1)..( 12): Result.004 file - promoters50/1386215
attcatgaccaa

SEQ ID NO: 167287 - DNA, 12 bp, Unknown
  misc_feature (1)..( 12): Result.004 file - promoters50/1386215
aggaaaaattac

SEQ ID NO: 167288 - DNA, 12 bp, Unknown
  misc_feature (1)..( 12): Result.004 file - promoters50/1386387
aaccaaaattgt

SEQ ID NO: 167289 - DNA, 9 bp, Unknown
  misc_feature (1)..( 9): Result.004 file - promoters50/1386387
cttttctgc

SEQ ID NO: 167290 - DNA, 9 bp, Unknown
  misc_feature (1)..( 9): Result.004 file - promoters50/1386387
gctttttgc

SEQ ID NO: 167291 - DNA, 9 bp, Unknown
  misc_feature (1)..( 9): Result.004 file - promoters50/1386444
tcttcctct

SEQ ID NO: 167292 - DNA, 10 bp, Unknown
  misc_feature (1)..( 10): Result.004 file - promoters50/1386444
aagttttttt

SEQ ID NO: 167293 - DNA, 10 bp, Unknown
  misc_feature (1)..( 10): Result.004 file - promoters50/1386444
atgtttcttt

SEQ ID NO: 167294 - DNA, 10 bp, Unknown
  misc_feature (1)..( 10): Result.004 file - promoters50/1386444
aagcttttaa

SEQ ID NO: 167295 - DNA, 7 bp, Unknown
  misc_feature (1)..( 7): Result.004 file - promoters50/1386444
aacagat

SEQ ID NO: 167296 - DNA, 7 bp, Unknown
  misc_feature (1)..( 7): Result.004 file - promoters50/1386444
aacagaa

SEQ ID NO: 167297 - DNA, 7 bp, Unknown
  misc_feature (1)..( 7): Result.004 file - promoters50/1386444
aaccgat

SEQ ID NO: 167298 - DNA, 8 bp, Unknown
  misc_feature (1)..( 8): Result.004 file - promoters50/1386444
taaagttt

SEQ ID NO: 167299 - DNA, 8 bp, Unknown
  misc_feature (1)..( 8): Result.004 file - promoters50/1386444
taaatttt

SEQ ID NO: 167300 - DNA, 8 bp, Unknown
  misc_feature (1)..( 8): Result.004 file - promoters50/1386444
taaattcg

SEQ ID NO: 167301 - DNA, 6 bp, Unknown
  misc_feature (1)..( 6): Result.004 file - promoters50/1386444
acattt

SEQ ID NO: 167302 - DNA, 6 bp, Unknown
  misc_feature (1)..( 6): Result.004 file - promoters50/1386444
acattt

SEQ ID NO: 167303 - DNA, 6 bp, Unknown
  misc_feature (1)..( 6): Result.004 file - promoters50/1386444
acattt

SEQ ID NO: 167304 - DNA, 8 bp, Unknown
  misc_feature (1)..( 8): Result.004 file - promoters50/1386444
gagaagca

SEQ ID NO: 167305 - DNA, 8 bp, Unknown
  misc_feature (1)..( 8): Result.004 file - promoters50/1386444
aagaggca

SEQ ID NO: 167306 - DNA, 8 bp, Unknown
  misc_feature (1)..( 8): Result.004 file - promoters50/1386609
aagaggtc

SEQ ID NO: 167307 - DNA, 8 bp, Unknown
  misc_feature (1)..( 8): Result.004 file - promoters50/1386609
acaagata

SEQ ID NO: 167308 - DNA, 8 bp, Unknown
  misc_feature (1)..( 8): Result.004 file - promoters50/1386609
acatgatt

SEQ ID NO: 167309 - DNA, 8 bp, Unknown
  misc_feature (1)..( 8): Result.004 file - promoters50/1386609
ggaagata

SEQ ID NO: 167310 - DNA, 10 bp, Unknown
  misc_feature (1)..( 10): Result.004 file - promoters50/1386609
tttgatgatt

SEQ ID NO: 167311 - DNA, 10 bp, Unknown
  misc_feature (1)..( 10): Result.004 file - promoters50/1386609
tttgatgatg

SEQ ID NO: 167312 - DNA, 10 bp, Unknown
  misc_feature (1)..( 10): Result.004 file - promoters50/1386609
agtgaggatg

SEQ ID NO: 167313 - DNA, 8 bp, Unknown
  misc_feature (1)..( 8): Result.004 file - promoters50/1386609
tgttattg

SEQ ID NO: 167314 - DNA, 8 bp, Unknown
  misc_feature (1)..( 8): Result.004 file - promoters50/1386609
tgtttttg

SEQ ID NO: 167315 - DNA, 8 bp, Unknown
  misc_feature (1)..( 8): Result.004 file - promoters50/1386628
tggtattt

SEQ ID NO: 167316 - DNA, 10 bp, Unknown
  misc_feature (1)..( 10): Result.004 file - promoters50/1386628
gttttttatg

SEQ ID NO: 167317 - DNA, 10 bp, Unknown
  misc_feature (1)..( 10): Result.004 file - promoters50/1386628
atttcttact

SEQ ID NO: 167318 - DNA, 10 bp, Unknown
  misc_feature (1)..( 10): Result.004 file - promoters50/1386628
atttgttaat

SEQ ID NO: 167319 - DNA, 10 bp, Unknown
  misc_feature (1)..( 10): Result.004 file - promoters50/1386628
atttcttaca

SEQ ID NO: 167320 - DNA, 10 bp, Unknown
  misc_feature (1)..( 10): Result.004 file - promoters50/1386628
agttgataat

SEQ ID NO: 167321 - DNA, 10 bp, Unknown
  misc_feature (1)..( 10): Result.004 file - promoters50/1386749
gtttgttgac

SEQ ID NO: 167322 - DNA, 10 bp, Unknown
  misc_feature (1)..( 10): Result.004 file - promoters50/1386749
atctaaattt

SEQ ID NO: 167323 - DNA, 10 bp, Unknown
  misc_feature (1)..( 10): Result.004 file - promoters50/1386749
ttctcaattt

SEQ ID NO: 167324 - DNA, 10 bp, Unknown
  misc_feature (1)..( 10): Result.004 file - promoters50/1386749
atcaaaatat

SEQ ID NO: 167325 - DNA, 10 bp, Unknown
  misc_feature (1)..( 10): Result.004 file - promoters50/1386749
gtttaaattg

SEQ ID NO: 167326 - DNA, 10 bp, Unknown
  misc_feature (1)..( 10): Result.004 file - promoters50/1386749
taaaaaaaaa

SEQ ID NO: 167327 - DNA, 10 bp, Unknown
  misc_feature (1)..( 10): Result.004 file - promoters50/1386749
caaaacaaaa

SEQ ID NO: 167328 - DNA, 10 bp, Unknown
  misc_feature (1)..( 10): Result.004 file - promoters50/1386749
caaaacccga

SEQ ID NO: 167329 - DNA, 9 bp, Unknown
  misc_feature (1)..( 9): Result.004 file - promoters50/1386749
tatcagcta

SEQ ID NO: 167330 - DNA, 9 bp, Unknown
  misc_feature (1)..( 9): Result.004 file - promoters50/1386749
tattagcta

SEQ ID NO: 167331 - DNA, 9 bp, Unknown
  misc_feature (1)..( 9): Result.004 file - promoters50/1386749
tattagatc

SEQ ID NO: 167332 - DNA, 7 bp, Unknown
  misc_feature (1)..( 7): Result.004 file - promoters50/1386749
taaatta

SEQ ID NO: 167333 - DNA, 7 bp, Unknown
  misc_feature (1)..( 7): Result.004 file - promoters50/1386749
taaattg

SEQ ID NO: 167334 - DNA, 7 bp, Unknown
  misc_feature (1)..( 7): Result.004 file - promoters50/1386778
caaattg

SEQ ID NO: 167335 - DNA, 9 bp, Unknown
  misc_feature (1)..( 9): Result.004 file - promoters50/1386778
aaacaaaaa

SEQ ID NO: 167336 - DNA, 9 bp, Unknown
  misc_feature (1)..( 9): Result.004 file - promoters50/1386778
aaacaaaaa

SEQ ID NO: 167337 - DNA, 9 bp, Unknown
  misc_feature (1)..( 9): Result.004 file - promoters50/1386778
aaagaaagc

SEQ ID NO: 167338 - DNA, 9 bp, Unknown
  misc_feature (1)..( 9): Result.004 file - promoters50/1386778
acaaagaac

SEQ ID NO: 167339 - DNA, 9 bp, Unknown
  misc_feature (1)..( 9): Result.004 file - promoters50/1386778
gaaaagaaa

SEQ ID NO: 167340 - DNA, 10 bp, Unknown
  misc_feature (1)..( 10): Result.004 file - promoters50/1386778
ggaaatgaaa

SEQ ID NO: 167341 - DNA, 14 bp, Unknown
  misc_feature (1)..( 14): Result.004 file - promoters50/1386778
taataaaaaaaagg

SEQ ID NO: 167342 - DNA, 14 bp, Unknown
  misc_feature (1)..( 14): Result.004 file - promoters50/1386778
gtatataaacaagg

SEQ ID NO: 167343 - DNA, 14 bp, Unknown
  misc_feature (1)..( 14): Result.004 file - promoters50/1386786
gtatatatttattt

SEQ ID NO: 167344 - DNA, 9 bp, Unknown
  misc_feature (1)..( 9): Result.004 file - promoters50/1386786
tttttaatt

SEQ ID NO: 167345 - DNA, 9 bp, Unknown
  misc_feature (1)..( 9): Result.004 file - promoters50/1386786
attttcatt

SEQ ID NO: 167346 - DNA, 9 bp, Unknown
  misc_feature (1)..( 9): Result.004 file - promoters50/1386786
tttttaatt

SEQ ID NO: 167347 - DNA, 9 bp, Unknown
  misc_feature (1)..( 9): Result.004 file - promoters50/1386786
gtttccata

SEQ ID NO: 167348 - DNA, 9 bp, Unknown
  misc_feature (1)..( 9): Result.004 file - promoters50/1386861
gatttatta

SEQ ID NO: 167349 - DNA, 10 bp, Unknown
  misc_feature (1)..( 10): Result.004 file - promoters50/1386861
ttaatttata

SEQ ID NO: 167350 - DNA, 10 bp, Unknown
  misc_feature (1)..( 10): Result.004 file - promoters50/1386861
ctaaattatc

SEQ ID NO: 167351 - DNA, 10 bp, Unknown
  misc_feature (1)..( 10): Result.004 file - promoters50/1386861
atcattcata

SEQ ID NO: 167352 - DNA, 10 bp, Unknown
  misc_feature (1)..( 10): Result.004 file - promoters50/1386861
gagattgata

SEQ ID NO: 167353 - DNA, 10 bp, Unknown
  misc_feature (1)..( 10): Result.004 file - promoters50/1387088
ttaatttgat

SEQ ID NO: 167354 - DNA, 11 bp, Unknown
  misc_feature (1)..( 11): Result.004 file - promoters50/1387088
agataaagtaa

SEQ ID NO: 167355 - DNA, 11 bp, Unknown
  misc_feature (1)..( 11): Result.004 file - promoters50/1387088
agattaagggt

SEQ ID NO: 167356 - DNA, 11 bp, Unknown
  misc_feature (1)..( 11): Result.004 file - promoters50/1387117
ccattaaaggt

SEQ ID NO: 167357 - DNA, 10 bp, Unknown
  misc_feature (1)..( 10): Result.004 file - promoters50/1387117
agataattta

SEQ ID NO: 167358 - DNA, 10 bp, Unknown
  misc_feature (1)..( 10): Result.004 file - promoters50/1387117
agaaaatttc

SEQ ID NO: 167359 - DNA, 10 bp, Unknown
  misc_feature (1)..( 10): Result.004 file - promoters50/1387117
gacaaattta

SEQ ID NO: 167360 - DNA, 14 bp, Unknown
  misc_feature (1)..( 14): Result.004 file - promoters50/1387117
caaccaaaaaacct

SEQ ID NO: 167361 - DNA, 14 bp, Unknown
  misc_feature (1)..( 14): Result.004 file - promoters50/1387117
aatccaaaatggac

SEQ ID NO: 167362 - DNA, 14 bp, Unknown
  misc_feature (1)..( 14): Result.004 file - promoters50/1387117
aatccacaattgac

SEQ ID NO: 167363 - DNA, 10 bp, Unknown
  misc_feature (1)..( 10): Result.004 file - promoters50/1387117
aaaaaaaaaa

SEQ ID NO: 167364 - DNA, 10 bp, Unknown
  misc_feature (1)..( 10): Result.004 file - promoters50/1387117
aaaaagaaaa

SEQ ID NO: 167365 - DNA, 10 bp, Unknown
  misc_feature (1)..( 10): Result.004 file - promoters50/1387117
gaaaagatca

SEQ ID NO: 167366 - DNA, 10 bp, Unknown
  misc_feature (1)..( 10): Result.004 file - promoters50/1387117
gatatgatat

SEQ ID NO: 167367 - DNA, 10 bp, Unknown
  misc_feature (1)..( 10): Result.004 file - promoters50/1387117
tatataatat

SEQ ID NO: 167368 - DNA, 10 bp, Unknown
  misc_feature (1)..( 10): Result.004 file - promoters50/1387123
tatataatcc

SEQ ID NO: 167369 - DNA, 12 bp, Unknown
  misc_feature (1)..( 12): Result.004 file - promoters50/1387123
gcctcaacgaaa

SEQ ID NO: 167370 - DNA, 12 bp, Unknown
  misc_feature (1)..( 12): Result.004 file - promoters50/1387123
cttgtaacgaac

SEQ ID NO: 167371 - DNA, 12 bp, Unknown
  misc_feature (1)..( 12): Result.004 file - promoters50/1387123
gaaccaactaaa

SEQ ID NO: 167372 - DNA, 12 bp, Unknown
  misc_feature (1)..( 12): Result.004 file - promoters50/1387123
aacataacaaaa

SEQ ID NO: 167373 - DNA, 12 bp, Unknown
  misc_feature (1)..( 12): Result.004 file - promoters50/1387123
atatcaataata

SEQ ID NO: 167374 - DNA, 15 bp, Unknown
  misc_feature (1)..( 15): Result.004 file - promoters50/1387123
aaataattttcaaag

SEQ ID NO: 167375 - DNA, 15 bp, Unknown
  misc_feature (1)..( 15): Result.004 file - promoters50/1387123
aaatcattttttccg

SEQ ID NO: 167376 - DNA, 15 bp, Unknown
  misc_feature (1)..( 15): Result.004 file - promoters50/1387123
ttctaatttaattat

SEQ ID NO: 167377 - DNA, 15 bp, Unknown
  misc_feature (1)..( 15): Result.004 file - promoters50/1387123
cgttaatttcattta

SEQ ID NO: 167378 - DNA, 15 bp, Unknown
  misc_feature (1)..( 15): Result.004 file - promoters50/1387123
atcaaatttcatctg

SEQ ID NO: 167379 - DNA, 15 bp, Unknown
  misc_feature (1)..( 15): Result.004 file - promoters50/1387123
atgcaatttgattat

SEQ ID NO: 167380 - DNA, 9 bp, Unknown
  misc_feature (1)..( 9): Result.004 file - promoters50/1387123
attattata

SEQ ID NO: 167381 - DNA, 9 bp, Unknown
  misc_feature (1)..( 9): Result.004 file - promoters50/1387123
actatcata

SEQ ID NO: 167382 - DNA, 9 bp, Unknown
  misc_feature (1)..( 9): Result.004 file - promoters50/1387123
tcaatcata

SEQ ID NO: 167383 - DNA, 9 bp, Unknown
  misc_feature (1)..( 9): Result.004 file - promoters50/1387123
acaaacata

SEQ ID NO: 167384 - DNA, 9 bp, Unknown
  misc_feature (1)..( 9): Result.004 file - promoters50/1387123
tcaataata

SEQ ID NO: 167385 - DNA, 10 bp, Unknown
  misc_feature (1)..( 10): Result.004 file - promoters50/1387123
aaatgaaaaa

SEQ ID NO: 167386 - DNA, 10 bp, Unknown
  misc_feature (1)..( 10): Result.004 file - promoters50/1387123
aaattaaaac

SEQ ID NO: 167387 - DNA, 10 bp, Unknown
  misc_feature (1)..( 10): Result.004 file - promoters50/1387123
aaattaaaac

SEQ ID NO: 167388 - DNA, 11 bp, Unknown
  misc_feature (1)..( 11): Result.004 file - promoters50/1387123
aaagttacaaa

SEQ ID NO: 167389 - DNA, 11 bp, Unknown
  misc_feature (1)..( 11): Result.004 file - promoters50/1387123
agtatttaatt

SEQ ID NO: 167390 - DNA, 10 bp, Unknown
  misc_feature (1)..( 10): Result.004 file - promoters50/1387123
tcaaccatag

SEQ ID NO: 167391 - DNA, 10 bp, Unknown
  misc_feature (1)..( 10): Result.004 file - promoters50/1387123
acaaacataa

SEQ ID NO: 167392 - DNA, 10 bp, Unknown
  misc_feature (1)..( 10): Result.004 file - promoters50/1387123
tcaatcatat

SEQ ID NO: 167393 - DNA, 10 bp, Unknown
  misc_feature (1)..( 10): Result.004 file - promoters50/1387123
actatcataa

SEQ ID NO: 167394 - DNA, 10 bp, Unknown
  misc_feature (1)..( 10): Result.004 file - promoters50/1387123
aaaaaaataa

SEQ ID NO: 167395 - DNA, 11 bp, Unknown
  misc_feature (1)..( 11): Result.004 file - promoters50/1387123
tataatttatt

SEQ ID NO: 167396 - DNA, 11 bp, Unknown
  misc_feature (1)..( 11): Result.004 file - promoters50/1387123
tatatttttta

SEQ ID NO: 167397 - DNA, 11 bp, Unknown
  misc_feature (1)..( 11): Result.004 file - promoters50/1387123
tctaatttaat

SEQ ID NO: 167398 - DNA, 11 bp, Unknown
  misc_feature (1)..( 11): Result.004 file - promoters50/1387123
gttaatttcat

SEQ ID NO: 167399 - DNA, 11 bp, Unknown
  misc_feature (1)..( 11): Result.004 file - promoters50/1387140
tcaaatttcat

SEQ ID NO: 167400 - DNA, 8 bp, Unknown
  misc_feature (1)..( 8): Result.004 file - promoters50/1387140
gagtattt

SEQ ID NO: 167401 - DNA, 8 bp, Unknown
  misc_feature (1)..( 8): Result.004 file - promoters50/1387140
gagtataa

SEQ ID NO: 167402 - DNA, 8 bp, Unknown
  misc_feature (1)..( 8): Result.004 file - promoters50/1387140
cagttttt

SEQ ID NO: 167403 - DNA, 7 bp, Unknown
  misc_feature (1)..( 7): Result.004 file - promoters50/1387140
atgaaaa

SEQ ID NO: 167404 - DNA, 7 bp, Unknown
  misc_feature (1)..( 7): Result.004 file - promoters50/1387140
ttgaaaa

SEQ ID NO: 167405 - DNA, 7 bp, Unknown
  misc_feature (1)..( 7): Result.004 file - promoters50/1387194
ttgaaat

SEQ ID NO: 167406 - DNA, 9 bp, Unknown
  misc_feature (1)..( 9): Result.004 file - promoters50/1387194
ctttttatt

SEQ ID NO: 167407 - DNA, 9 bp, Unknown
  misc_feature (1)..( 9): Result.004 file - promoters50/1387194
attttaatt

SEQ ID NO: 167408 - DNA, 9 bp, Unknown
  misc_feature (1)..( 9): Result.004 file - promoters50/1387194
attgtaaaa

SEQ ID NO: 167409 - DNA, 9 bp, Unknown
  misc_feature (1)..( 9): Result.004 file - promoters50/1387211
aatgtaaac

SEQ ID NO: 167410 - DNA, 13 bp, Unknown
  misc_feature (1)..( 13): Result.004 file - promoters50/1387211
gattttaataaaa

SEQ ID NO: 167411 - DNA, 13 bp, Unknown
  misc_feature (1)..( 13): Result.004 file - promoters50/1387211
tttttcaattcca

SEQ ID NO: 167412 - DNA, 13 bp, Unknown
  misc_feature (1)..( 13): Result.004 file - promoters50/1387211
gatcttaattcgt

SEQ ID NO: 167413 - DNA, 13 bp, Unknown
  misc_feature (1)..( 13): Result.004 file - promoters50/1387211
tatgttaacaaaa

SEQ ID NO: 167414 - DNA, 13 bp, Unknown
  misc_feature (1)..( 13): Result.004 file - promoters50/1387211
tattctaaaaagt

SEQ ID NO: 167415 - DNA, 13 bp, Unknown
  misc_feature (1)..( 13): Result.004 file - promoters50/1387211
tttattaacaaac

SEQ ID NO: 167416 - DNA, 8 bp, Unknown
  misc_feature (1)..( 8): Result.004 file - promoters50/1387211
tattttat

SEQ ID NO: 167417 - DNA, 8 bp, Unknown
  misc_feature (1)..( 8): Result.004 file - promoters50/1387211
aattatat

SEQ ID NO: 167418 - DNA, 8 bp, Unknown
  misc_feature (1)..( 8): Result.004 file - promoters50/1387211
tatttttg

SEQ ID NO: 167419 - DNA, 8 bp, Unknown
  misc_feature (1)..( 8): Result.004 file - promoters50/1387211
gatttttt

SEQ ID NO: 167420 - DNA, 8 bp, Unknown
  misc_feature (1)..( 8): Result.004 file - promoters50/1387211
tatttttg

SEQ ID NO: 167421 - DNA, 8 bp, Unknown
  misc_feature (1)..( 8): Result.004 file - promoters50/1387265
gatttttg

SEQ ID NO: 167422 - DNA, 7 bp, Unknown
  misc_feature (1)..( 7): Result.004 file - promoters50/1387265
ctgatga

SEQ ID NO: 167423 - DNA, 7 bp, Unknown
  misc_feature (1)..( 7): Result.004 file - promoters50/1387265
ctgatgt

SEQ ID NO: 167424 - DNA, 7 bp, Unknown
  misc_feature (1)..( 7): Result.004 file - promoters50/1387336
atgatga

SEQ ID NO: 167425 - DNA, 8 bp, Unknown
  misc_feature (1)..( 8): Result.004 file - promoters50/1387336
cttcaaat

SEQ ID NO: 167426 - DNA, 8 bp, Unknown
  misc_feature (1)..( 8): Result.004 file - promoters50/1387336
attcaaat

SEQ ID NO: 167427 - DNA, 8 bp, Unknown
  misc_feature (1)..( 8): Result.004 file - promoters50/1387349
attcaagc

SEQ ID NO: 167428 - DNA, 12 bp, Unknown
  misc_feature (1)..( 12): Result.004 file - promoters50/1387349
tacagagtcgtg

SEQ ID NO: 167429 - DNA, 12 bp, Unknown
  misc_feature (1)..( 12): Result.004 file - promoters50/1387349
gacaaagtatct

SEQ ID NO: 167430 - DNA, 12 bp, Unknown
  misc_feature (1)..( 12): Result.004 file - promoters50/1387349
gacaaaaacaaa

SEQ ID NO: 167431 - DNA, 12 bp, Unknown
  misc_feature (1)..( 12): Result.004 file - promoters50/1387349
tttaaaatatat

SEQ ID NO: 167432 - DNA, 12 bp, Unknown
  misc_feature (1)..( 12): Result.004 file - promoters50/1387349
aggaaaacataa

SEQ ID NO: 167433 - DNA, 12 bp, Unknown
  misc_feature (1)..( 12): Result.004 file - promoters50/1387349
gaacaaatatat

SEQ ID NO: 167434 - DNA, 15 bp, Unknown
  misc_feature (1)..( 15): Result.004 file - promoters50/1387349
gctaaacaaaaactc

SEQ ID NO: 167435 - DNA, 15 bp, Unknown
  misc_feature (1)..( 15): Result.004 file - promoters50/1387349
atctcacaaagacta

SEQ ID NO: 167436 - DNA, 15 bp, Unknown
  misc_feature (1)..( 15): Result.004 file - promoters50/1387349
aaagactaaaaactc

SEQ ID NO: 167437 - DNA, 15 bp, Unknown
  misc_feature (1)..( 15): Result.004 file - promoters50/1387349
tcttgacacaaacac

SEQ ID NO: 167438 - DNA, 15 bp, Unknown
  misc_feature (1)..( 15): Result.004 file - promoters50/1387349
ttgatacacatctcg

SEQ ID NO: 167439 - DNA, 15 bp, Unknown
  misc_feature (1)..( 15): Result.004 file - promoters50/1387352
gaagaccacaaacgg

SEQ ID NO: 167440 - DNA, 9 bp, Unknown
  misc_feature (1)..( 9): Result.004 file - promoters50/1387352
ttaaaaagt

SEQ ID NO: 167441 - DNA, 9 bp, Unknown
  misc_feature (1)..( 9): Result.004 file - promoters50/1387352
ttataaata

SEQ ID NO: 167442 - DNA, 9 bp, Unknown
  misc_feature (1)..( 9): Result.004 file - promoters50/1387352
ttatacata

SEQ ID NO: 167443 - DNA, 8 bp, Unknown
  misc_feature (1)..( 8): Result.004 file - promoters50/1387352
gaaaatgg

SEQ ID NO: 167444 - DNA, 8 bp, Unknown
  misc_feature (1)..( 8): Result.004 file - promoters50/1387352
aaaattgg

SEQ ID NO: 167445 - DNA, 8 bp, Unknown
  misc_feature (1)..( 8): Result.004 file - promoters50/1387352
taaaatta

SEQ ID NO: 167446 - DNA, 13 bp, Unknown
  misc_feature (1)..( 13): Result.004 file - promoters50/1387352
atacgaataaagt

SEQ ID NO: 167447 - DNA, 13 bp, Unknown
  misc_feature (1)..( 13): Result.004 file - promoters50/1387352
tttgtaatatagt

SEQ ID NO: 167448 - DNA, 13 bp, Unknown
  misc_feature (1)..( 13): Result.004 file - promoters50/1387352
ataagaataaaat

SEQ ID NO: 167449 - DNA, 10 bp, Unknown
  misc_feature (1)..( 10): Result.004 file - promoters50/1387352
aaaagttagg

SEQ ID NO: 167450 - DNA, 10 bp, Unknown
  misc_feature (1)..( 10): Result.004 file - promoters50/1387352
taaaattagg

SEQ ID NO: 167451 - DNA, 10 bp, Unknown
  misc_feature (1)..( 10): Result.004 file - promoters50/1387352
taaaattgga

SEQ ID NO: 167452 - DNA, 7 bp, Unknown
  misc_feature (1)..( 7): Result.004 file - promoters50/1387352
gataaaa

SEQ ID NO: 167453 - DNA, 7 bp, Unknown
  misc_feature (1)..( 7): Result.004 file - promoters50/1387352
cataaaa

SEQ ID NO: 167454 - DNA, 7 bp, Unknown
  misc_feature (1)..( 7): Result.004 file - promoters50/1387352
cataaac

SEQ ID NO: 167455 - DNA, 8 bp, Unknown
  misc_feature (1)..( 8): Result.004 file - promoters50/1387352
tttactaa

SEQ ID NO: 167456 - DNA, 8 bp, Unknown
  misc_feature (1)..( 8): Result.004 file - promoters50/1387352
tttattaa

SEQ ID NO: 167457 - DNA, 8 bp, Unknown
  misc_feature (1)..( 8): Result.004 file - promoters50/1387356
gttattac

SEQ ID NO: 167458 - DNA, 9 bp, Unknown
  misc_feature (1)..( 9): Result.004 file - promoters50/1387356
gcagagtaa

SEQ ID NO: 167459 - DNA, 9 bp, Unknown
  misc_feature (1)..( 9): Result.004 file - promoters50/1387356
taagaataa

SEQ ID NO: 167460 - DNA, 9 bp, Unknown
  misc_feature (1)..( 9): Result.004 file - promoters50/1387356
taaaaatgt

SEQ ID NO: 167461 - DNA, 6 bp, Unknown
  misc_feature (1)..( 6): Result.004 file - promoters50/1387356
ttaaaa

SEQ ID NO: 167462 - DNA, 6 bp, Unknown
  misc_feature (1)..( 6): Result.004 file - promoters50/1387356
ttaaaa

SEQ ID NO: 167463 - DNA, 6 bp, Unknown
  misc_feature (1)..( 6): Result.004 file - promoters50/1387356
ttaaaa

SEQ ID NO: 167464 - DNA, 13 bp, Unknown
  misc_feature (1)..( 13): Result.004 file - promoters50/1387356
aaagatagacaga

SEQ ID NO: 167465 - DNA, 13 bp, Unknown
  misc_feature (1)..( 13): Result.004 file - promoters50/1387356
aaagaaagaaaga

SEQ ID NO: 167466 - DNA, 13 bp, Unknown
  misc_feature (1)..( 13): Result.004 file - promoters50/1387356
aaagaaaaacaaa

SEQ ID NO: 167467 - DNA, 9 bp, Unknown
  misc_feature (1)..( 9): Result.004 file - promoters50/1387356
aaaaaagtt

SEQ ID NO: 167468 - DNA, 9 bp, Unknown
  misc_feature (1)..( 9): Result.004 file - promoters50/1387356
ttaaaagtt

SEQ ID NO: 167469 - DNA, 10 bp, Unknown
  misc_feature (1)..( 10): Result.004 file - promoters50/1387356
aaaataagtt

SEQ ID NO: 167470 - DNA, 10 bp, Unknown
  misc_feature (1)..( 10): Result.004 file - promoters50/1387356
aaactaagaa

SEQ ID NO: 167471 - DNA, 8 bp, Unknown
  misc_feature (1)..( 8): Result.004 file - promoters50/1387356
caaaagga

SEQ ID NO: 167472 - DNA, 8 bp, Unknown
  misc_feature (1)..( 8): Result.004 file - promoters50/1387356
caaaagaa

SEQ ID NO: 167473 - DNA, 8 bp, Unknown
  misc_feature (1)..( 8): Result.004 file - promoters50/1387356
aaaatgaa

SEQ ID NO: 167474 - DNA, 7 bp, Unknown
  misc_feature (1)..( 7): Result.004 file - promoters50/1387356
cacacgt

SEQ ID NO: 167475 - DNA, 7 bp, Unknown
  misc_feature (1)..( 7): Result.004 file - promoters50/1387356
tacacgt

SEQ ID NO: 167476 - DNA, 7 bp, Unknown
  misc_feature (1)..( 7): Result.004 file - promoters50/1387356
tacacgt

SEQ ID NO: 167477 - DNA, 12 bp, Unknown
  misc_feature (1)..( 12): Result.004 file - promoters50/1387356
caatacaagata

SEQ ID NO: 167478 - DNA, 12 bp, Unknown
  misc_feature (1)..( 12): Result.004 file - promoters50/1387356
atatacaaatta

SEQ ID NO: 167479 - DNA, 12 bp, Unknown
  misc_feature (1)..( 12): Result.004 file - promoters50/1387368
aaaaacaaaaca

SEQ ID NO: 167480 - DNA, 9 bp, Unknown
  misc_feature (1)..( 9): Result.004 file - promoters50/1387368
tacaaaagt

SEQ ID NO: 167481 - DNA, 9 bp, Unknown
  misc_feature (1)..( 9): Result.004 file - promoters50/1387368
aacacaaga

SEQ ID NO: 167482 - DNA, 9 bp, Unknown
  misc_feature (1)..( 9): Result.004 file - promoters50/1387368
aacaataca

SEQ ID NO: 167483 - DNA, 10 bp, Unknown
  misc_feature (1)..( 10): Result.004 file - promoters50/1387368
tgagaagaaa

SEQ ID NO: 167484 - DNA, 10 bp, Unknown
  misc_feature (1)..( 10): Result.004 file - promoters50/1387368
ggagaagaaa

SEQ ID NO: 167485 - DNA, 10 bp, Unknown
  misc_feature (1)..( 10): Result.004 file - promoters50/1387417
agagaaagct

SEQ ID NO: 167486 - DNA, 7 bp, Unknown
  misc_feature (1)..( 7): Result.004 file - promoters50/1387417
ttcttat

SEQ ID NO: 167487 - DNA, 7 bp, Unknown
  misc_feature (1)..( 7): Result.004 file - promoters50/1387417
ttcttac

SEQ ID NO: 167488 - DNA, 7 bp, Unknown
  misc_feature (1)..( 7): Result.004 file - promoters50/1387417
ttcatat

SEQ ID NO: 167489 - DNA, 9 bp, Unknown
  misc_feature (1)..( 9): Result.004 file - promoters50/1387417
catgatttc

SEQ ID NO: 167490 - DNA, 9 bp, Unknown
  misc_feature (1)..( 9): Result.004 file - promoters50/1387417
aatgttttc

SEQ ID NO: 167491 - DNA, 9 bp, Unknown
  misc_feature (1)..( 9): Result.004 file - promoters50/1387417
aatgctttg

SEQ ID NO: 167492 - DNA, 8 bp, Unknown
  misc_feature (1)..( 8): Result.004 file - promoters50/1387417
aatgatcg

SEQ ID NO: 167493 - DNA, 8 bp, Unknown
  misc_feature (1)..( 8): Result.004 file - promoters50/1387417
tgtgatcg

SEQ ID NO: 167494 - DNA, 8 bp, Unknown
  misc_feature (1)..( 8): Result.004 file - promoters50/1387417
tgtaatcg

SEQ ID NO: 167495 - DNA, 8 bp, Unknown
  misc_feature (1)..( 8): Result.004 file - promoters50/1387417
ctttactg

SEQ ID NO: 167496 - DNA, 8 bp, Unknown
  misc_feature (1)..( 8): Result.004 file - promoters50/1387417
attttctg

SEQ ID NO: 167497 - DNA, 8 bp, Unknown
  misc_feature (1)..( 8): Result.004 file - promoters50/1387417
attttcaa

SEQ ID NO: 167498 - DNA, 9 bp, Unknown
  misc_feature (1)..( 9): Result.004 file - promoters50/1387417
atttggtaa

SEQ ID NO: 167499 - DNA, 9 bp, Unknown
  misc_feature (1)..( 9): Result.004 file - promoters50/1387417
ttttgctaa

SEQ ID NO: 167500 - DNA, 9 bp, Unknown
  misc_feature (1)..( 9): Result.004 file - promoters50/1387421
ttttgcttc

SEQ ID NO: 167501 - DNA, 12 bp, Unknown
  misc_feature (1)..( 12): Result.004 file - promoters50/1387421
cacaaaatgata

SEQ ID NO: 167502 - DNA, 12 bp, Unknown
  misc_feature (1)..( 12): Result.004 file - promoters50/1387421
aacaaaaatcgt

SEQ ID NO: 167503 - DNA, 12 bp, Unknown
  misc_feature (1)..( 12): Result.004 file - promoters50/1387421
cacaaaatgact

SEQ ID NO: 167504 - DNA, 12 bp, Unknown
  misc_feature (1)..( 12): Result.004 file - promoters50/1387421
aagaaaatgact

SEQ ID NO: 167505 - DNA, 10 bp, Unknown
  misc_feature (1)..( 10): Result.004 file - promoters50/1387421
gaaaggtaat

SEQ ID NO: 167506 - DNA, 10 bp, Unknown
  misc_feature (1)..( 10): Result.004 file - promoters50/1387421
ggaagataaa

SEQ ID NO: 167507 - DNA, 10 bp, Unknown
  misc_feature (1)..( 10): Result.004 file - promoters50/1387421
gaaacgtaaa

SEQ ID NO: 167508 - DNA, 10 bp, Unknown
  misc_feature (1)..( 10): Result.004 file - promoters50/1387421
gtaagaaaaa

SEQ ID NO: 167509 - DNA, 10 bp, Unknown
  misc_feature (1)..( 10): Result.004 file - promoters50/1387421
taaaatatgc

SEQ ID NO: 167510 - DNA, 10 bp, Unknown
  misc_feature (1)..( 10): Result.004 file - promoters50/1387421
taaattattt

SEQ ID NO: 167511 - DNA, 10 bp, Unknown
  misc_feature (1)..( 10): Result.004 file - promoters50/1387421
tatattattt

SEQ ID NO: 167512 - DNA, 10 bp, Unknown
  misc_feature (1)..( 10): Result.004 file - promoters50/1387421
ttaattccca

SEQ ID NO: 167513 - DNA, 11 bp, Unknown
  misc_feature (1)..( 11): Result.004 file - promoters50/1387421
cgcagttaact

SEQ ID NO: 167514 - DNA, 11 bp, Unknown
  misc_feature (1)..( 11): Result.004 file - promoters50/1387421
tgtagttaaag

SEQ ID NO: 167515 - DNA, 11 bp, Unknown
  misc_feature (1)..( 11): Result.004 file - promoters50/1387421
tgttgttatta

SEQ ID NO: 167516 - DNA, 11 bp, Unknown
  misc_feature (1)..( 11): Result.004 file - promoters50/1387429
agtagtttttg

SEQ ID NO: 167517 - DNA, 9 bp, Unknown
  misc_feature (1)..( 9): Result.004 file - promoters50/1387429
aatgatttg

SEQ ID NO: 167518 - DNA, 9 bp, Unknown
  misc_feature (1)..( 9): Result.004 file - promoters50/1387429
cttgaattg

SEQ ID NO: 167519 - DNA, 9 bp, Unknown
  misc_feature (1)..( 9): Result.004 file - promoters50/1387429
aataatttc

SEQ ID NO: 167520 - DNA, 9 bp, Unknown
  misc_feature (1)..( 9): Result.004 file - promoters50/1387429
gatgattgg

SEQ ID NO: 167521 - DNA, 9 bp, Unknown
  misc_feature (1)..( 9): Result.004 file - promoters50/1387429
aaaaaataa

SEQ ID NO: 167522 - DNA, 11 bp, Unknown
  misc_feature (1)..( 11): Result.004 file - promoters50/1387429
tgttactttca

SEQ ID NO: 167523 - DNA, 11 bp, Unknown
  misc_feature (1)..( 11): Result.004 file - promoters50/1387429
agttaatttct

SEQ ID NO: 167524 - DNA, 11 bp, Unknown
  misc_feature (1)..( 11): Result.004 file - promoters50/1387429
tgtaacttcag

SEQ ID NO: 167525 - DNA, 11 bp, Unknown
  misc_feature (1)..( 11): Result.004 file - promoters50/1387429
cataaattcat

SEQ ID NO: 167526 - DNA, 11 bp, Unknown
  misc_feature (1)..( 11): Result.004 file - promoters50/1387429
ccaaaatatct

SEQ ID NO: 167527 - DNA, 8 bp, Unknown
  misc_feature (1)..( 8): Result.004 file - promoters50/1387429
caatttat

SEQ ID NO: 167528 - DNA, 8 bp, Unknown
  misc_feature (1)..( 8): Result.004 file - promoters50/1387429
caaattat

SEQ ID NO: 167529 - DNA, 8 bp, Unknown
  misc_feature (1)..( 8): Result.004 file - promoters50/1387429
gaaattag

SEQ ID NO: 167530 - DNA, 8 bp, Unknown
  misc_feature (1)..( 8): Result.004 file - promoters50/1387429
caaattct

SEQ ID NO: 167531 - DNA, 8 bp, Unknown
  misc_feature (1)..( 8): Result.004 file - promoters50/1387429
aaaatcta

SEQ ID NO: 167532 - DNA, 7 bp, Unknown
  misc_feature (1)..( 7): Result.004 file - promoters50/1387429
gaaatta

SEQ ID NO: 167533 - DNA, 7 bp, Unknown
  misc_feature (1)..( 7): Result.004 file - promoters50/1387429
gaaattg

SEQ ID NO: 167534 - DNA, 7 bp, Unknown
  misc_feature (1)..( 7): Result.004 file - promoters50/1387429
caaatta

SEQ ID NO: 167535 - DNA, 7 bp, Unknown
  misc_feature (1)..( 7): Result.004 file - promoters50/1387429
caaattc

SEQ ID NO: 167536 - DNA, 7 bp, Unknown
  misc_feature (1)..( 7): Result.004 file - promoters50/1387505
aaaatct

SEQ ID NO: 167537 - DNA, 8 bp, Unknown
  misc_feature (1)..( 8): Result.004 file - promoters50/1387505
aatgcaaa

SEQ ID NO: 167538 - DNA, 8 bp, Unknown
  misc_feature (1)..( 8): Result.004 file - promoters50/1387505
aatgtaaa

SEQ ID NO: 167539 - DNA, 8 bp, Unknown
  misc_feature (1)..( 8): Result.004 file - promoters50/1387505
gatgcaag

SEQ ID NO: 167540 - DNA, 9 bp, Unknown
  misc_feature (1)..( 9): Result.004 file - promoters50/1387505
aatgaaatc

SEQ ID NO: 167541 - DNA, 9 bp, Unknown
  misc_feature (1)..( 9): Result.004 file - promoters50/1387505
aattaaatg

SEQ ID NO: 167542 - DNA, 9 bp, Unknown
  misc_feature (1)..( 9): Result.004 file - promoters50/1387524
cctgagatc

SEQ ID NO: 167543 - DNA, 13 bp, Unknown
  misc_feature (1)..( 13): Result.004 file - promoters50/1387524
cattatgtatagg

SEQ ID NO: 167544 - DNA, 13 bp, Unknown
  misc_feature (1)..( 13): Result.004 file - promoters50/1387524
tgttatctattgt

SEQ ID NO: 167545 - DNA, 13 bp, Unknown
  misc_feature (1)..( 13): Result.004 file - promoters50/1387524
tgttatcaattgt

SEQ ID NO: 167546 - DNA, 8 bp, Unknown
  misc_feature (1)..( 8): Result.004 file - promoters50/1387524
agagaaaa

SEQ ID NO: 167547 - DNA, 8 bp, Unknown
  misc_feature (1)..( 8): Result.004 file - promoters50/1387524
agaaaaaa

SEQ ID NO: 167548 - DNA, 8 bp, Unknown
  misc_feature (1)..( 8): Result.004 file - promoters50/1387524
ggaaaacc

SEQ ID NO: 167549 - DNA, 8 bp, Unknown
  misc_feature (1)..( 8): Result.004 file - promoters50/1387524
agataaaa

SEQ ID NO: 167550 - DNA, 9 bp, Unknown
  misc_feature (1)..( 9): Result.004 file - promoters50/1387524
gaaaacact

SEQ ID NO: 167551 - DNA, 9 bp, Unknown
  misc_feature (1)..( 9): Result.004 file - promoters50/1387524
aaaaaaact

SEQ ID NO: 167552 - DNA, 9 bp, Unknown
  misc_feature (1)..( 9): Result.004 file - promoters50/1387524
gaaaacctt

SEQ ID NO: 167553 - DNA, 10 bp, Unknown
  misc_feature (1)..( 10): Result.004 file - promoters50/1387524
agggataaaa

SEQ ID NO: 167554 - DNA, 10 bp, Unknown
  misc_feature (1)..( 10): Result.004 file - promoters50/1387524
attaataaaa

SEQ ID NO: 167555 - DNA, 10 bp, Unknown
  misc_feature (1)..( 10): Result.004 file - promoters50/1387524
aggggtaaaa

SEQ ID NO: 167556 - DNA, 10 bp, Unknown
  misc_feature (1)..( 10): Result.004 file - promoters50/1387524
aaaaataaat

SEQ ID NO: 167557 - DNA, 7 bp, Unknown
  misc_feature (1)..( 7): Result.004 file - promoters50/1387524
aaataga

SEQ ID NO: 167558 - DNA, 7 bp, Unknown
  misc_feature (1)..( 7): Result.004 file - promoters50/1387524
aaaaaga

SEQ ID NO: 167559 - DNA, 7 bp, Unknown
  misc_feature (1)..( 7): Result.004 file - promoters50/1387524
aaaaaaa

SEQ ID NO: 167560 - DNA, 9 bp, Unknown
  misc_feature (1)..( 9): Result.004 file - promoters50/1387524
taatcatct

SEQ ID NO: 167561 - DNA, 9 bp, Unknown
  misc_feature (1)..( 9): Result.004 file - promoters50/1387524
taattatca

SEQ ID NO: 167562 - DNA, 9 bp, Unknown
  misc_feature (1)..( 9): Result.004 file - promoters50/1387524
ttcttatca

SEQ ID NO: 167563 - DNA, 9 bp, Unknown
  misc_feature (1)..( 9): Result.004 file - promoters50/1387524
agtaaaaat

SEQ ID NO: 167564 - DNA, 9 bp, Unknown
  misc_feature (1)..( 9): Result.004 file - promoters50/1387524
agtaaagac

SEQ ID NO: 167565 - DNA, 9 bp, Unknown
  misc_feature (1)..( 9): Result.004 file - promoters50/1387524
tttaaataa

SEQ ID NO: 167566 - DNA, 8 bp, Unknown
  misc_feature (1)..( 8): Result.004 file - promoters50/1387524
gaaacaaa

SEQ ID NO: 167567 - DNA, 8 bp, Unknown
  misc_feature (1)..( 8): Result.004 file - promoters50/1387524
gaaagaaa

SEQ ID NO: 167568 - DNA, 8 bp, Unknown
  misc_feature (1)..( 8): Result.004 file - promoters50/1387524
agaagaaa

SEQ ID NO: 167569 - DNA, 10 bp, Unknown
  misc_feature (1)..( 10): Result.004 file - promoters50/1387524
ggaaatgaaa

SEQ ID NO: 167570 - DNA, 10 bp, Unknown
  misc_feature (1)..( 10): Result.004 file - promoters50/1387524
ggaaaagaaa

SEQ ID NO: 167571 - DNA, 10 bp, Unknown
  misc_feature (1)..( 10): Result.004 file - promoters50/1387524
tataaagaag

SEQ ID NO: 167572 - DNA, 6 bp, Unknown
  misc_feature (1)..( 6): Result.004 file - promoters50/1387524
ttttaa

SEQ ID NO: 167573 - DNA, 6 bp, Unknown
  misc_feature (1)..( 6): Result.004 file - promoters50/1387524
ttttaa

SEQ ID NO: 167574 - DNA, 7 bp, Unknown
  misc_feature (1)..( 7): Result.004 file - promoters50/1387547
tttgtaa

SEQ ID NO: 167575 - DNA, 9 bp, Unknown
  misc_feature (1)..( 9): Result.004 file - promoters50/1387547
ttattgtct

SEQ ID NO: 167576 - DNA, 9 bp, Unknown
  misc_feature (1)..( 9): Result.004 file - promoters50/1387547
ttattgcaa

SEQ ID NO: 167577 - DNA, 9 bp, Unknown
  misc_feature (1)..( 9): Result.004 file - promoters50/1387580
ttaatgtct

SEQ ID NO: 167578 - DNA, 10 bp, Unknown
  misc_feature (1)..( 10): Result.004 file - promoters50/1387580
gtaagaaaat

SEQ ID NO: 167579 - DNA, 10 bp, Unknown
  misc_feature (1)..( 10): Result.004 file - promoters50/1387580
gtaaaaaaaa

SEQ ID NO: 167580 - DNA, 10 bp, Unknown
  misc_feature (1)..( 10): Result.004 file - promoters50/1387587
acaaaaaaaa

SEQ ID NO: 167581 - DNA, 11 bp, Unknown
  misc_feature (1)..( 11): Result.004 file - promoters50/1387587
ttttgaagaac

SEQ ID NO: 167582 - DNA, 11 bp, Unknown
  misc_feature (1)..( 11): Result.004 file - promoters50/1387587
ttttggagaac

SEQ ID NO: 167583 - DNA, 11 bp, Unknown
  misc_feature (1)..( 11): Result.004 file - promoters50/1387587
tttcgaaataa

SEQ ID NO: 167584 - DNA, 7 bp, Unknown
  misc_feature (1)..( 7): Result.004 file - promoters50/1387587
agtaaac

SEQ ID NO: 167585 - DNA, 7 bp, Unknown
  misc_feature (1)..( 7): Result.004 file - promoters50/1387587
agtaaaa

SEQ ID NO: 167586 - DNA, 7 bp, Unknown
  misc_feature (1)..( 7): Result.004 file - promoters50/1387587
ggtaaaa

SEQ ID NO: 167587 - DNA, 10 bp, Unknown
  misc_feature (1)..( 10): Result.004 file - promoters50/1387587
atggttaaaa

SEQ ID NO: 167588 - DNA, 10 bp, Unknown
  misc_feature (1)..( 10): Result.004 file - promoters50/1387587
atggtaaaaa

SEQ ID NO: 167589 - DNA, 10 bp, Unknown
  misc_feature (1)..( 10): Result.004 file - promoters50/1387590
ctagtaaaac

SEQ ID NO: 167590 - DNA, 9 bp, Unknown
  misc_feature (1)..( 9): Result.004 file - promoters50/1387590
ctatttcaa

SEQ ID NO: 167591 - DNA, 9 bp, Unknown
  misc_feature (1)..( 9): Result.004 file - promoters50/1387590
agattacaa

SEQ ID NO: 167592 - DNA, 9 bp, Unknown
  misc_feature (1)..( 9): Result.004 file - promoters50/1387590
ctatttcgt

SEQ ID NO: 167593 - DNA, 11 bp, Unknown
  misc_feature (1)..( 11): Result.004 file - promoters50/1387590
tataacaacac

SEQ ID NO: 167594 - DNA, 11 bp, Unknown
  misc_feature (1)..( 11): Result.004 file - promoters50/1387590
tatgacatcac

SEQ ID NO: 167595 - DNA, 11 bp, Unknown
  misc_feature (1)..( 11): Result.004 file - promoters50/1387590
gaagacaacaa

SEQ ID NO: 167596 - DNA, 8 bp, Unknown
  misc_feature (1)..( 8): Result.004 file - promoters50/1387590
ttcaataa

SEQ ID NO: 167597 - DNA, 8 bp, Unknown
  misc_feature (1)..( 8): Result.004 file - promoters50/1387590
ttcaatca

SEQ ID NO: 167598 - DNA, 8 bp, Unknown
  misc_feature (1)..( 8): Result.004 file - promoters50/1387590
atcaataa

SEQ ID NO: 167599 - DNA, 10 bp, Unknown
  misc_feature (1)..( 10): Result.004 file - promoters50/1387590
gattttgagt

SEQ ID NO: 167600 - DNA, 10 bp, Unknown
  misc_feature (1)..( 10): Result.004 file - promoters50/1387590
tgttttcagt

SEQ ID NO: 167601 - DNA, 10 bp, Unknown
  misc_feature (1)..( 10): Result.004 file - promoters50/1387605
gattttgatt

SEQ ID NO: 167602 - DNA, 8 bp, Unknown
  misc_feature (1)..( 8): Result.004 file - promoters50/1387605
tttttaaa

SEQ ID NO: 167603 - DNA, 8 bp, Unknown
  misc_feature (1)..( 8): Result.004 file - promoters50/1387605
actttaaa

SEQ ID NO: 167604 - DNA, 8 bp, Unknown
  misc_feature (1)..( 8): Result.004 file - promoters50/1387616
actctaaa

SEQ ID NO: 167605 - DNA, 10 bp, Unknown
  misc_feature (1)..( 10): Result.004 file - promoters50/1387616
ctagatatat

SEQ ID NO: 167606 - DNA, 10 bp, Unknown
  misc_feature (1)..( 10): Result.004 file - promoters50/1387616
atagatatgc

SEQ ID NO: 167607 - DNA, 10 bp, Unknown
  misc_feature (1)..( 10): Result.004 file - promoters50/1387616
ctaaatactc

SEQ ID NO: 167608 - DNA, 10 bp, Unknown
  misc_feature (1)..( 10): Result.004 file - promoters50/1387616
gtagataagt

SEQ ID NO: 167609 - DNA, 10 bp, Unknown
  misc_feature (1)..( 10): Result.004 file - promoters50/1387616
gcaaatcctc

SEQ ID NO: 167610 - DNA, 10 bp, Unknown
  misc_feature (1)..( 10): Result.004 file - promoters50/1387616
atagagaagc

SEQ ID NO: 167611 - DNA, 11 bp, Unknown
  misc_feature (1)..( 11): Result.004 file - promoters50/1387616
ttaaaaaaaga

SEQ ID NO: 167612 - DNA, 11 bp, Unknown
  misc_feature (1)..( 11): Result.004 file - promoters50/1387616
tcaaacaaatg

SEQ ID NO: 167613 - DNA, 11 bp, Unknown
  misc_feature (1)..( 11): Result.004 file - promoters50/1387616
ttaagaaaagc

SEQ ID NO: 167614 - DNA, 11 bp, Unknown
  misc_feature (1)..( 11): Result.004 file - promoters50/1387616
tctagacaaga

SEQ ID NO: 167615 - DNA, 11 bp, Unknown
  misc_feature (1)..( 11): Result.004 file - promoters50/1387616
agtagagaaga

SEQ ID NO: 167616 - DNA, 11 bp, Unknown
  misc_feature (1)..( 11): Result.004 file - promoters50/1387628
ccgaaagaaga

SEQ ID NO: 167617 - DNA, 7 bp, Unknown
  misc_feature (1)..( 7): Result.004 file - promoters50/1387628
gataaag

SEQ ID NO: 167618 - DNA, 7 bp, Unknown
  misc_feature (1)..( 7): Result.004 file - promoters50/1387628
tataaag

SEQ ID NO: 167619 - DNA, 7 bp, Unknown
  misc_feature (1)..( 7): Result.004 file - promoters50/1387628
tattaag

SEQ ID NO: 167620 - DNA, 9 bp, Unknown
  misc_feature (1)..( 9): Result.004 file - promoters50/1387628
taatttgtt

SEQ ID NO: 167621 - DNA, 9 bp, Unknown
  misc_feature (1)..( 9): Result.004 file - promoters50/1387628
caatttgtt

SEQ ID NO: 167622 - DNA, 9 bp, Unknown
  misc_feature (1)..( 9): Result.004 file - promoters50/1387628
taattttat

SEQ ID NO: 167623 - DNA, 9 bp, Unknown
  misc_feature (1)..( 9): Result.004 file - promoters50/1387628
agataaaat

SEQ ID NO: 167624 - DNA, 9 bp, Unknown
  misc_feature (1)..( 9): Result.004 file - promoters50/1387628
agaaaaaaa

SEQ ID NO: 167625 - DNA, 9 bp, Unknown
  misc_feature (1)..( 9): Result.004 file - promoters50/1387665
agataaaaa

SEQ ID NO: 167626 - DNA, 9 bp, Unknown
  misc_feature (1)..( 9): Result.004 file - promoters50/1387665
tttttttgt

SEQ ID NO: 167627 - DNA, 9 bp, Unknown
  misc_feature (1)..( 9): Result.004 file - promoters50/1387665
tttttttgt

SEQ ID NO: 167628 - DNA, 9 bp, Unknown
  misc_feature (1)..( 9): Result.004 file - promoters50/1387665
atattttgt

SEQ ID NO: 167629 - DNA, 7 bp, Unknown
  misc_feature (1)..( 7): Result.004 file - promoters50/1387665
aaactaa

SEQ ID NO: 167630 - DNA, 7 bp, Unknown
  misc_feature (1)..( 7): Result.004 file - promoters50/1387665
aaattaa

SEQ ID NO: 167631 - DNA, 7 bp, Unknown
  misc_feature (1)..( 7): Result.004 file - promoters50/1387665
aaattta

SEQ ID NO: 167632 - DNA, 7 bp, Unknown
  misc_feature (1)..( 7): Result.004 file - promoters50/1387665
atagtaa

SEQ ID NO: 167633 - DNA, 7 bp, Unknown
  misc_feature (1)..( 7): Result.004 file - promoters50/1387665
gtagtaa

SEQ ID NO: 167634 - DNA, 7 bp, Unknown
  misc_feature (1)..( 7): Result.004 file - promoters50/1387671
atagtaa

SEQ ID NO: 167635 - DNA, 16 bp, Unknown
  misc_feature (1)..( 16): Result.004 file - promoters50/1387671
cactatttaaagctcg

SEQ ID NO: 167636 - DNA, 16 bp, Unknown
  misc_feature (1)..( 16): Result.004 file - promoters50/1387671
ttactattaaagccgc

SEQ ID NO: 167637 - DNA, 15 bp, Unknown
  misc_feature (1)..( 15): Result.004 file - promoters50/1387671
tttaattaaaaccct

SEQ ID NO: 167638 - DNA, 16 bp, Unknown
  misc_feature (1)..( 16): Result.004 file - promoters50/1387671
cactatataaagacaa

SEQ ID NO: 167639 - DNA, 16 bp, Unknown
  misc_feature (1)..( 16): Result.004 file - promoters50/1387671
tcgtatataaagacgc

SEQ ID NO: 167640 - DNA, 16 bp, Unknown
  misc_feature (1)..( 16): Result.004 file - promoters50/1387793
atatttatatagataa

SEQ ID NO: 167641 - DNA, 10 bp, Unknown
  misc_feature (1)..( 10): Result.004 file - promoters50/1387793
ttaaaagcta

SEQ ID NO: 167642 - DNA, 10 bp, Unknown
  misc_feature (1)..( 10): Result.004 file - promoters50/1387793
ttaaaatgaa

SEQ ID NO: 167643 - DNA, 10 bp, Unknown
  misc_feature (1)..( 10): Result.004 file - promoters50/1387793
ctaaaagata

SEQ ID NO: 167644 - DNA, 10 bp, Unknown
  misc_feature (1)..( 10): Result.004 file - promoters50/1387793
agaaaatata

SEQ ID NO: 167645 - DNA, 9 bp, Unknown
  misc_feature (1)..( 9): Result.004 file - promoters50/1387793
aaaacctta

SEQ ID NO: 167646 - DNA, 9 bp, Unknown
  misc_feature (1)..( 9): Result.004 file - promoters50/1387793
aaaaccatc

SEQ ID NO: 167647 - DNA, 9 bp, Unknown
  misc_feature (1)..( 9): Result.004 file - promoters50/1387793
taaaccatt

SEQ ID NO: 167648 - DNA, 9 bp, Unknown
  misc_feature (1)..( 9): Result.004 file - promoters50/1387793
aaatccatc

SEQ ID NO: 167649 - DNA, 8 bp, Unknown
  misc_feature (1)..( 8): Result.004 file - promoters50/1387793
caagaaag

SEQ ID NO: 167650 - DNA, 8 bp, Unknown
  misc_feature (1)..( 8): Result.004 file - promoters50/1387793
caaaaaaa

SEQ ID NO: 167651 - DNA, 8 bp, Unknown
  misc_feature (1)..( 8): Result.004 file - promoters50/1387793
taagaaaa

SEQ ID NO: 167652 - DNA, 8 bp, Unknown
  misc_feature (1)..( 8): Result.004 file - promoters50/1387818
taaaaaaa

SEQ ID NO: 167653 - DNA, 11 bp, Unknown
  misc_feature (1)..( 11): Result.004 file - promoters50/1387818
gaagacataaa

SEQ ID NO: 167654 - DNA, 11 bp, Unknown
  misc_feature (1)..( 11): Result.004 file - promoters50/1387818
acagaaataga

SEQ ID NO: 167655 - DNA, 11 bp, Unknown
  misc_feature (1)..( 11): Result.004 file - promoters50/1387818
ttcgaaaacac

SEQ ID NO: 167656 - DNA, 11 bp, Unknown
  misc_feature (1)..( 11): Result.004 file - promoters50/1387818
aaacaaaaact

SEQ ID NO: 167657 - DNA, 11 bp, Unknown
  misc_feature (1)..( 11): Result.004 file - promoters50/1387818
aacgaaatctg

SEQ ID NO: 167658 - DNA, 11 bp, Unknown
  misc_feature (1)..( 11): Result.004 file - promoters50/1387818
tgaaaaatact

SEQ ID NO: 167659 - DNA, 11 bp, Unknown
  misc_feature (1)..( 11): Result.004 file - promoters50/1387818
aatttttctct

SEQ ID NO: 167660 - DNA, 11 bp, Unknown
  misc_feature (1)..( 11): Result.004 file - promoters50/1387818
cattcttcttg

SEQ ID NO: 167661 - DNA, 11 bp, Unknown
  misc_feature (1)..( 11): Result.004 file - promoters50/1387818
catttttgtgc

SEQ ID NO: 167662 - DNA, 11 bp, Unknown
  misc_feature (1)..( 11): Result.004 file - promoters50/1387818
aattttcttta

SEQ ID NO: 167663 - DNA, 11 bp, Unknown
  misc_feature (1)..( 11): Result.004 file - promoters50/1387818
ggtttttgtgt

SEQ ID NO: 167664 - DNA, 11 bp, Unknown
  misc_feature (1)..( 11): Result.004 file - promoters50/1387818
ctttcgtcttg

SEQ ID NO: 167665 - DNA, 11 bp, Unknown
  misc_feature (1)..( 11): Result.004 file - promoters50/1387906
tcgtcttcttc

SEQ ID NO: 167666 - DNA, 11 bp, Unknown
  misc_feature (1)..( 11): Result.004 file - promoters50/1387906
atataacaaca

SEQ ID NO: 167667 - DNA, 11 bp, Unknown
  misc_feature (1)..( 11): Result.004 file - promoters50/1387906
ttttaataaca

SEQ ID NO: 167668 - DNA, 11 bp, Unknown
  misc_feature (1)..( 11): Result.004 file - promoters50/1387906
ttttactaact

SEQ ID NO: 167669 - DNA, 11 bp, Unknown
  misc_feature (1)..( 11): Result.004 file - promoters50/1387906
ttttaccttgt

SEQ ID NO: 167670 - DNA, 12 bp, Unknown
  misc_feature (1)..( 12): Result.004 file - promoters50/1387906
attaaatttgtt

SEQ ID NO: 167671 - DNA, 12 bp, Unknown
  misc_feature (1)..( 12): Result.004 file - promoters50/1387906
tcaaaatctgtt

SEQ ID NO: 167672 - DNA, 11 bp, Unknown
  misc_feature (1)..( 11): Result.004 file - promoters50/1387906
ataaatttgag

SEQ ID NO: 167673 - DNA, 11 bp, Unknown
  misc_feature (1)..( 11): Result.004 file - promoters50/1387906
taaaatcgaac

SEQ ID NO: 167674 - DNA, 12 bp, Unknown
  misc_feature (1)..( 12): Result.004 file - promoters50/1387935
ttataatgattc

SEQ ID NO: 167675 - DNA, 10 bp, Unknown
  misc_feature (1)..( 10): Result.004 file - promoters50/1387935
tttgaattta

SEQ ID NO: 167676 - DNA, 10 bp, Unknown
  misc_feature (1)..( 10): Result.004 file - promoters50/1387935
attgtattta

SEQ ID NO: 167677 - DNA, 10 bp, Unknown
  misc_feature (1)..( 10): Result.004 file - promoters50/1387935
tttgaaacta

SEQ ID NO: 167678 - DNA, 10 bp, Unknown
  misc_feature (1)..( 10): Result.004 file - promoters50/1387935
attgtttttt

SEQ ID NO: 167679 - DNA, 10 bp, Unknown
  misc_feature (1)..( 10): Result.004 file - promoters50/1387935
catgtatttg

SEQ ID NO: 167680 - DNA, 12 bp, Unknown
  misc_feature (1)..( 12): Result.004 file - promoters50/1387935
caatcaatggtt

SEQ ID NO: 167681 - DNA, 12 bp, Unknown
  misc_feature (1)..( 12): Result.004 file - promoters50/1387935
caaacaaaaggc

SEQ ID NO: 167682 - DNA, 12 bp, Unknown
  misc_feature (1)..( 12): Result.004 file - promoters50/1387935
aaatcaattgtt

SEQ ID NO: 167683 - DNA, 12 bp, Unknown
  misc_feature (1)..( 12): Result.004 file - promoters50/1387935
gaaataaaagat

SEQ ID NO: 167684 - DNA, 12 bp, Unknown
  misc_feature (1)..( 12): Result.004 file - promoters50/1387935
tatacaagtaga

SEQ ID NO: 167685 - DNA, 9 bp, Unknown
  misc_feature (1)..( 9): Result.004 file - promoters50/1387935
caaagaagg

SEQ ID NO: 167686 - DNA, 9 bp, Unknown
  misc_feature (1)..( 9): Result.004 file - promoters50/1387935
aaaagaaga

SEQ ID NO: 167687 - DNA, 9 bp, Unknown
  misc_feature (1)..( 9): Result.004 file - promoters50/1387935
taaacaaga

SEQ ID NO: 167688 - DNA, 9 bp, Unknown
  misc_feature (1)..( 9): Result.004 file - promoters50/1387935
aaaagatgt

SEQ ID NO: 167689 - DNA, 9 bp, Unknown
  misc_feature (1)..( 9): Result.004 file - promoters50/1387947
tatacaagt

SEQ ID NO: 167690 - DNA, 12 bp, Unknown
  misc_feature (1)..( 12): Result.004 file - promoters50/1387947
gaaggaaaagaa

SEQ ID NO: 167691 - DNA, 12 bp, Unknown
  misc_feature (1)..( 12): Result.004 file - promoters50/1387947
gaaagaacgtga

SEQ ID NO: 167692 - DNA, 12 bp, Unknown
  misc_feature (1)..( 12): Result.004 file - promoters50/1387947
caaggaaaggag

SEQ ID NO: 167693 - DNA, 12 bp, Unknown
  misc_feature (1)..( 12): Result.004 file - promoters50/1387947
aaaaaaacttga

SEQ ID NO: 167694 - DNA, 12 bp, Unknown
  misc_feature (1)..( 12): Result.004 file - promoters50/1387947
taaagcttctga

SEQ ID NO: 167695 - DNA, 12 bp, Unknown
  misc_feature (1)..( 12): Result.004 file - promoters50/1387947
caaaaaaagtta

SEQ ID NO: 167696 - DNA, 13 bp, Unknown
  misc_feature (1)..( 13): Result.004 file - promoters50/1387947
caattaaaaaaat

SEQ ID NO: 167697 - DNA, 13 bp, Unknown
  misc_feature (1)..( 13): Result.004 file - promoters50/1387947
gatcaaaataaac

SEQ ID NO: 167698 - DNA, 13 bp, Unknown
  misc_feature (1)..( 13): Result.004 file - promoters50/1387947
attagaaatatat

SEQ ID NO: 167699 - DNA, 13 bp, Unknown
  misc_feature (1)..( 13): Result.004 file - promoters50/1387947
ttagtaaaagaat

SEQ ID NO: 167700 - DNA, 13 bp, Unknown
  misc_feature (1)..( 13): Result.004 file - promoters50/1387947
ctaaacaatatat

SEQ ID NO: 167701 - DNA, 13 bp, Unknown
  misc_feature (1)..( 13): Result.004 file - promoters50/1388009
caatcatatatat

SEQ ID NO: 167702 - DNA, 11 bp, Unknown
  misc_feature (1)..( 11): Result.004 file - promoters50/1388009
tatgaaaatat

SEQ ID NO: 167703 - DNA, 11 bp, Unknown
  misc_feature (1)..( 11): Result.004 file - promoters50/1388009
tattaaagtat

SEQ ID NO: 167704 - DNA, 11 bp, Unknown
  misc_feature (1)..( 11): Result.004 file - promoters50/1388009
tattaaattat

SEQ ID NO: 167705 - DNA, 7 bp, Unknown
  misc_feature (1)..( 7): Result.004 file - promoters50/1388009
tttttac

SEQ ID NO: 167706 - DNA, 7 bp, Unknown
  misc_feature (1)..( 7): Result.004 file - promoters50/1388009
attttac

SEQ ID NO: 167707 - DNA, 7 bp, Unknown
  misc_feature (1)..( 7): Result.004 file - promoters50/1388009
attttag

SEQ ID NO: 167708 - DNA, 10 bp, Unknown
  misc_feature (1)..( 10): Result.004 file - promoters50/1388009
cgaaatcata

SEQ ID NO: 167709 - DNA, 10 bp, Unknown
  misc_feature (1)..( 10): Result.004 file - promoters50/1388009
acaaataata

SEQ ID NO: 167710 - DNA, 10 bp, Unknown
  misc_feature (1)..( 10): Result.004 file - promoters50/1388009
cgaattcaaa

SEQ ID NO: 167711 - DNA, 9 bp, Unknown
  misc_feature (1)..( 9): Result.004 file - promoters50/1388009
acattataa

SEQ ID NO: 167712 - DNA, 9 bp, Unknown
  misc_feature (1)..( 9): Result.004 file - promoters50/1388009
aaattataa

SEQ ID NO: 167713 - DNA, 9 bp, Unknown
  misc_feature (1)..( 9): Result.004 file - promoters50/1388009
aaattatta

SEQ ID NO: 167714 - DNA, 8 bp, Unknown
  misc_feature (1)..( 8): Result.004 file - promoters50/1388009
atattttc

SEQ ID NO: 167715 - DNA, 8 bp, Unknown
  misc_feature (1)..( 8): Result.004 file - promoters50/1388009
atatttta

SEQ ID NO: 167716 - DNA, 8 bp, Unknown
  misc_feature (1)..( 8): Result.004 file - promoters50/1388009
tcatttta

SEQ ID NO: 167717 - DNA, 9 bp, Unknown
  misc_feature (1)..( 9): Result.004 file - promoters50/1388009
tatatgacg

SEQ ID NO: 167718 - DNA, 9 bp, Unknown
  misc_feature (1)..( 9): Result.004 file - promoters50/1388009
tatatgtta

SEQ ID NO: 167719 - DNA, 9 bp, Unknown
  misc_feature (1)..( 9): Result.004 file - promoters50/1388069
tatatatat

SEQ ID NO: 167720 - DNA, 11 bp, Unknown
  misc_feature (1)..( 11): Result.004 file - promoters50/1388069
caattaaaaaa

SEQ ID NO: 167721 - DNA, 11 bp, Unknown
  misc_feature (1)..( 11): Result.004 file - promoters50/1388069
caattgaaaat

SEQ ID NO: 167722 - DNA, 11 bp, Unknown
  misc_feature (1)..( 11): Result.004 file - promoters50/1388069
taaataaacct

SEQ ID NO: 167723 - DNA, 11 bp, Unknown
  misc_feature (1)..( 11): Result.004 file - promoters50/1388069
aaaccaaaaaa

SEQ ID NO: 167724 - DNA, 11 bp, Unknown
  misc_feature (1)..( 11): Result.004 file - promoters50/1388069
ccactaaaaac

SEQ ID NO: 167725 - DNA, 11 bp, Unknown
  misc_feature (1)..( 11): Result.004 file - promoters50/1388423
aaaataaaccc

SEQ ID NO: 167726 - DNA, 8 bp, Unknown
  misc_feature (1)..( 8): Result.004 file - promoters50/1388423
aaaaacat

SEQ ID NO: 167727 - DNA, 8 bp, Unknown
  misc_feature (1)..( 8): Result.004 file - promoters50/1388423
aaacacaa

SEQ ID NO: 167728 - DNA, 8 bp, Unknown
  misc_feature (1)..( 8): Result.004 file - promoters50/1388423
ggacacaa

SEQ ID NO: 167729 - DNA, 11 bp, Unknown
  misc_feature (1)..( 11): Result.004 file - promoters50/1388423
gaagcaaaacc

SEQ ID NO: 167730 - DNA, 11 bp, Unknown
  misc_feature (1)..( 11): Result.004 file - promoters50/1388423
gaagaaaaaca

SEQ ID NO: 167731 - DNA, 11 bp, Unknown
  misc_feature (1)..( 11): Result.004 file - promoters50/1388423
atctcaaaacc

SEQ ID NO: 167732 - DNA, 8 bp, Unknown
  misc_feature (1)..( 8): Result.004 file - promoters50/1388423
tctgaatt

SEQ ID NO: 167733 - DNA, 8 bp, Unknown
  misc_feature (1)..( 8): Result.004 file - promoters50/1388423
attgaatt

SEQ ID NO: 167734 - DNA, 8 bp, Unknown
  misc_feature (1)..( 8): Result.004 file - promoters50/1388423
attaaatc

SEQ ID NO: 167735 - DNA, 8 bp, Unknown
  misc_feature (1)..( 8): Result.004 file - promoters50/1388423
taacttgg

SEQ ID NO: 167736 - DNA, 8 bp, Unknown
  misc_feature (1)..( 8): Result.004 file - promoters50/1388423
aaacttgg

SEQ ID NO: 167737 - DNA, 9 bp, Unknown
  misc_feature (1)..( 9): Result.004 file - promoters50/1388423
aaaccttga

SEQ ID NO: 167738 - DNA, 7 bp, Unknown
  misc_feature (1)..( 7): Result.004 file - promoters50/1388423
acataac

SEQ ID NO: 167739 - DNA, 7 bp, Unknown
  misc_feature (1)..( 7): Result.004 file - promoters50/1388423
acacaac

SEQ ID NO: 167740 - DNA, 7 bp, Unknown
  misc_feature (1)..( 7): Result.004 file - promoters50/1388438
acacaag

SEQ ID NO: 167741 - DNA, 7 bp, Unknown
  misc_feature (1)..( 7): Result.004 file - promoters50/1388438
ccattaa

SEQ ID NO: 167742 - DNA, 7 bp, Unknown
  misc_feature (1)..( 7): Result.004 file - promoters50/1388438
ccattag

SEQ ID NO: 167743 - DNA, 7 bp, Unknown
  misc_feature (1)..( 7): Result.004 file - promoters50/1388444
ccactaa

SEQ ID NO: 167744 - DNA, 8 bp, Unknown
  misc_feature (1)..( 8): Result.004 file - promoters50/1388444
ttacattt

SEQ ID NO: 167745 - DNA, 8 bp, Unknown
  misc_feature (1)..( 8): Result.004 file - promoters50/1388444
ttacatta

SEQ ID NO: 167746 - DNA, 8 bp, Unknown
  misc_feature (1)..( 8): Result.004 file - promoters50/1388444
ttagatta

SEQ ID NO: 167747 - DNA, 10 bp, Unknown
  misc_feature (1)..( 10): Result.004 file - promoters50/1388444
tgtataaata

SEQ ID NO: 167748 - DNA, 10 bp, Unknown
  misc_feature (1)..( 10): Result.004 file - promoters50/1388444
tttattaata

SEQ ID NO: 167749 - DNA, 10 bp, Unknown
  misc_feature (1)..( 10): Result.004 file - promoters50/1388444
ttttttataa

SEQ ID NO: 167750 - DNA, 7 bp, Unknown
  misc_feature (1)..( 7): Result.004 file - promoters50/1388444
catatag

SEQ ID NO: 167751 - DNA, 7 bp, Unknown
  misc_feature (1)..( 7): Result.004 file - promoters50/1388444
catatat

SEQ ID NO: 167752 - DNA, 7 bp, Unknown
  misc_feature (1)..( 7): Result.004 file - promoters50/1388468
catttat

SEQ ID NO: 167753 - DNA, 11 bp, Unknown
  misc_feature (1)..( 11): Result.004 file - promoters50/1388468
atgtttattag

SEQ ID NO: 167754 - DNA, 11 bp, Unknown
  misc_feature (1)..( 11): Result.004 file - promoters50/1388468
atgttaattgg

SEQ ID NO: 167755 - DNA, 11 bp, Unknown
  misc_feature (1)..( 11): Result.004 file - promoters50/1388468
tagtttctgtt

SEQ ID NO: 167756 - DNA, 11 bp, Unknown
  misc_feature (1)..( 11): Result.004 file - promoters50/1388468
aaaaacaaaaa

SEQ ID NO: 167757 - DNA, 11 bp, Unknown
  misc_feature (1)..( 11): Result.004 file - promoters50/1388468
caaaagaaaaa

SEQ ID NO: 167758 - DNA, 11 bp, Unknown
  misc_feature (1)..( 11): Result.004 file - promoters50/1388468
caaaggaaggt

SEQ ID NO: 167759 - DNA, 8 bp, Unknown
  misc_feature (1)..( 8): Result.004 file - promoters50/1388468
aattaact

SEQ ID NO: 167760 - DNA, 8 bp, Unknown
  misc_feature (1)..( 8): Result.004 file - promoters50/1388468
aatttact

SEQ ID NO: 167761 - DNA, 8 bp, Unknown
  misc_feature (1)..( 8): Result.004 file - promoters50/1388484
aatttata

SEQ ID NO: 167762 - DNA, 8 bp, Unknown
  misc_feature (1)..( 8): Result.004 file - promoters50/1388484
gaatcaca

SEQ ID NO: 167763 - DNA, 8 bp, Unknown
  misc_feature (1)..( 8): Result.004 file - promoters50/1388484
gaatcaat

SEQ ID NO: 167764 - DNA, 8 bp, Unknown
  misc_feature (1)..( 8): Result.004 file - promoters50/1388484
taataaat

SEQ ID NO: 167765 - DNA, 7 bp, Unknown
  misc_feature (1)..( 7): Result.004 file - promoters50/1388484
cttcaat

SEQ ID NO: 167766 - DNA, 7 bp, Unknown
  misc_feature (1)..( 7): Result.004 file - promoters50/1388484
tttcaat

SEQ ID NO: 167767 - DNA, 7 bp, Unknown
  misc_feature (1)..( 7): Result.004 file - promoters50/1388484
tttcaaa

SEQ ID NO: 167768 - DNA, 9 bp, Unknown
  misc_feature (1)..( 9): Result.004 file - promoters50/1388484
gaattcaga

SEQ ID NO: 167769 - DNA, 9 bp, Unknown
  misc_feature (1)..( 9): Result.004 file - promoters50/1388484
gaatttaga

SEQ ID NO: 167770 - DNA, 9 bp, Unknown
  misc_feature (1)..( 9): Result.004 file - promoters50/1388484
taattcact

SEQ ID NO: 167771 - DNA, 8 bp, Unknown
  misc_feature (1)..( 8): Result.004 file - promoters50/1388484
agttattt

SEQ ID NO: 167772 - DNA, 8 bp, Unknown
  misc_feature (1)..( 8): Result.004 file - promoters50/1388484
agttcttt

SEQ ID NO: 167773 - DNA, 8 bp, Unknown
  misc_feature (1)..( 8): Result.004 file - promoters50/1388484
tgttattc

SEQ ID NO: 167774 - DNA, 10 bp, Unknown
  misc_feature (1)..( 10): Result.004 file - promoters50/1388484
tgcttatgat

SEQ ID NO: 167775 - DNA, 10 bp, Unknown
  misc_feature (1)..( 10): Result.004 file - promoters50/1388484
aacttttgat

SEQ ID NO: 167776 - DNA, 10 bp, Unknown
  misc_feature (1)..( 10): Result.004 file - promoters50/1388545
tgcatatgtt

SEQ ID NO: 167777 - DNA, 10 bp, Unknown
  misc_feature (1)..( 10): Result.004 file - promoters50/1388545
ctattaagca

SEQ ID NO: 167778 - DNA, 10 bp, Unknown
  misc_feature (1)..( 10): Result.004 file - promoters50/1388545
ttatgaagat

SEQ ID NO: 167779 - DNA, 10 bp, Unknown
  misc_feature (1)..( 10): Result.004 file - promoters50/1388545
aaatgatgat

SEQ ID NO: 167780 - DNA, 10 bp, Unknown
  misc_feature (1)..( 10): Result.004 file - promoters50/1388545
atatgaatca

SEQ ID NO: 167781 - DNA, 10 bp, Unknown
  misc_feature (1)..( 10): Result.004 file - promoters50/1388545
ttacgaatac

SEQ ID NO: 167782 - DNA, 10 bp, Unknown
  misc_feature (1)..( 10): Result.004 file - promoters50/1388593
gtatgattac

SEQ ID NO: 167783 - DNA, 8 bp, Unknown
  misc_feature (1)..( 8): Result.004 file - promoters50/1388593
attattta

SEQ ID NO: 167784 - DNA, 8 bp, Unknown
  misc_feature (1)..( 8): Result.004 file - promoters50/1388593
attatttt

SEQ ID NO: 167785 - DNA, 8 bp, Unknown
  misc_feature (1)..( 8): Result.004 file - promoters50/1388593
actatttt

SEQ ID NO: 167786 - DNA, 8 bp, Unknown
  misc_feature (1)..( 8): Result.004 file - promoters50/1388593
gaattata

SEQ ID NO: 167787 - DNA, 8 bp, Unknown
  misc_feature (1)..( 8): Result.004 file - promoters50/1388593
gaagtata

SEQ ID NO: 167788 - DNA, 8 bp, Unknown
  misc_feature (1)..( 8): Result.004 file - promoters50/1388593
aaagtagt

SEQ ID NO: 167789 - DNA, 11 bp, Unknown
  misc_feature (1)..( 11): Result.004 file - promoters50/1388593
aagaaagaagt

SEQ ID NO: 167790 - DNA, 11 bp, Unknown
  misc_feature (1)..( 11): Result.004 file - promoters50/1388593
aagaaaaaagt

SEQ ID NO: 167791 - DNA, 11 bp, Unknown
  misc_feature (1)..( 11): Result.004 file - promoters50/1388661
aagtaaaattc

SEQ ID NO: 167792 - DNA, 9 bp, Unknown
  misc_feature (1)..( 9): Result.004 file - promoters50/1388661
ttgttaatt

SEQ ID NO: 167793 - DNA, 9 bp, Unknown
  misc_feature (1)..( 9): Result.004 file - promoters50/1388661
ttgttactc

SEQ ID NO: 167794 - DNA, 9 bp, Unknown
  misc_feature (1)..( 9): Result.004 file - promoters50/1388661
atgtaaatt

SEQ ID NO: 167795 - DNA, 7 bp, Unknown
  misc_feature (1)..( 7): Result.004 file - promoters50/1388661
caaaaaa

SEQ ID NO: 167796 - DNA, 7 bp, Unknown
  misc_feature (1)..( 7): Result.004 file - promoters50/1388661
taaaaaa

SEQ ID NO: 167797 - DNA, 7 bp, Unknown
  misc_feature (1)..( 7): Result.004 file - promoters50/1388661
taaaaat

SEQ ID NO: 167798 - DNA, 9 bp, Unknown
  misc_feature (1)..( 9): Result.004 file - promoters50/1388661
tgaagaact

SEQ ID NO: 167799 - DNA, 9 bp, Unknown
  misc_feature (1)..( 9): Result.004 file - promoters50/1388661
aaaagtact

SEQ ID NO: 167800 - DNA, 9 bp, Unknown
  misc_feature (1)..( 9): Result.004 file - promoters50/1388661
aaaagtaaa

SEQ ID NO: 167801 - DNA, 10 bp, Unknown
  misc_feature (1)..( 10): Result.004 file - promoters50/1388661
ttttgttaat

SEQ ID NO: 167802 - DNA, 10 bp, Unknown
  misc_feature (1)..( 10): Result.004 file - promoters50/1388661
atttattaat

SEQ ID NO: 167803 - DNA, 10 bp, Unknown
  misc_feature (1)..( 10): Result.004 file - promoters50/1388688
atttattttt

SEQ ID NO: 167804 - DNA, 11 bp, Unknown
  misc_feature (1)..( 11): Result.004 file - promoters50/1388688
agatgtctttt

SEQ ID NO: 167805 - DNA, 11 bp, Unknown
  misc_feature (1)..( 11): Result.004 file - promoters50/1388688
agatatctaaa

SEQ ID NO: 167806 - DNA, 11 bp, Unknown
  misc_feature (1)..( 11): Result.004 file - promoters50/1388688
ctctatttaaa

SEQ ID NO: 167807 - DNA, 9 bp, Unknown
  misc_feature (1)..( 9): Result.004 file - promoters50/1388688
ctttactag

SEQ ID NO: 167808 - DNA, 9 bp, Unknown
  misc_feature (1)..( 9): Result.004 file - promoters50/1388688
gtttaatag

SEQ ID NO: 167809 - DNA, 9 bp, Unknown
  misc_feature (1)..( 9): Result.004 file - promoters50/1388688
gtttaaggt

SEQ ID NO: 167810 - DNA, 9 bp, Unknown
  misc_feature (1)..( 9): Result.004 file - promoters50/1388688
tgtcttttt

SEQ ID NO: 167811 - DNA, 9 bp, Unknown
  misc_feature (1)..( 9): Result.004 file - promoters50/1388688
actctattt

SEQ ID NO: 167812 - DNA, 9 bp, Unknown
  misc_feature (1)..( 9): Result.004 file - promoters50/1388688
tatctaaaa

SEQ ID NO: 167813 - DNA, 8 bp, Unknown
  misc_feature (1)..( 8): Result.004 file - promoters50/1388688
aacaaagt

SEQ ID NO: 167814 - DNA, 8 bp, Unknown
  misc_feature (1)..( 8): Result.004 file - promoters50/1388688
tacaaagt

SEQ ID NO: 167815 - DNA, 8 bp, Unknown
  misc_feature (1)..( 8): Result.004 file - promoters50/1388688
aacaaaac

SEQ ID NO: 167816 - DNA, 7 bp, Unknown
  misc_feature (1)..( 7): Result.004 file - promoters50/1388688
taaaaaa

SEQ ID NO: 167817 - DNA, 7 bp, Unknown
  misc_feature (1)..( 7): Result.004 file - promoters50/1388688
caaaaaa

SEQ ID NO: 167818 - DNA, 7 bp, Unknown
  misc_feature (1)..( 7): Result.004 file - promoters50/1388688
taaaaac

SEQ ID NO: 167819 - DNA, 13 bp, Unknown
  misc_feature (1)..( 13): Result.004 file - promoters50/1388688
ataatattttaat

SEQ ID NO: 167820 - DNA, 13 bp, Unknown
  misc_feature (1)..( 13): Result.004 file - promoters50/1388688
ctaatatttaaat

SEQ ID NO: 167821 - DNA, 13 bp, Unknown
  misc_feature (1)..( 13): Result.004 file - promoters50/1388688
ttaatttatcaat

SEQ ID NO: 167822 - DNA, 8 bp, Unknown
  misc_feature (1)..( 8): Result.004 file - promoters50/1388688
aaaattat

SEQ ID NO: 167823 - DNA, 8 bp, Unknown
  misc_feature (1)..( 8): Result.004 file - promoters50/1388688
aaaaatat

SEQ ID NO: 167824 - DNA, 8 bp, Unknown
  misc_feature (1)..( 8): Result.004 file - promoters50/1388688
aaaaaaca

SEQ ID NO: 167825 - DNA, 8 bp, Unknown
  misc_feature (1)..( 8): Result.004 file - promoters50/1388688
aaaaacgg

SEQ ID NO: 167826 - DNA, 8 bp, Unknown
  misc_feature (1)..( 8): Result.004 file - promoters50/1388688
aaaaacaa

SEQ ID NO: 167827 - DNA, 8 bp, Unknown
  misc_feature (1)..( 8): Result.004 file - promoters50/1388688
taaaacaa

SEQ ID NO: 167828 - DNA, 7 bp, Unknown
  misc_feature (1)..( 7): Result.004 file - promoters50/1388688
ttaattg

SEQ ID NO: 167829 - DNA, 7 bp, Unknown
  misc_feature (1)..( 7): Result.004 file - promoters50/1388688
ttaattt

SEQ ID NO: 167830 - DNA, 8 bp, Unknown
  misc_feature (1)..( 8): Result.004 file - promoters50/1388692
ttaaatta

SEQ ID NO: 167831 - DNA, 11 bp, Unknown
  misc_feature (1)..( 11): Result.004 file - promoters50/1388692
ttgtttttttg

SEQ ID NO: 167832 - DNA, 11 bp, Unknown
  misc_feature (1)..( 11): Result.004 file - promoters50/1388692
atgttatttaa

SEQ ID NO: 167833 - DNA, 11 bp, Unknown
  misc_feature (1)..( 11): Result.004 file - promoters50/1388692
ttgtctttcgc

SEQ ID NO: 167834 - DNA, 11 bp, Unknown
  misc_feature (1)..( 11): Result.004 file - promoters50/1388692
cttttatgtaa

SEQ ID NO: 167835 - DNA, 12 bp, Unknown
  misc_feature (1)..( 12): Result.004 file - promoters50/1388692
tttgtaaattgt

SEQ ID NO: 167836 - DNA, 12 bp, Unknown
  misc_feature (1)..( 12): Result.004 file - promoters50/1388692
attgtaaaagat

SEQ ID NO: 167837 - DNA, 13 bp, Unknown
  misc_feature (1)..( 13): Result.004 file - promoters50/1388692
attgttaaacata

SEQ ID NO: 167838 - DNA, 13 bp, Unknown
  misc_feature (1)..( 13): Result.004 file - promoters50/1388741
gcaggtaaaacct

SEQ ID NO: 167839 - DNA, 9 bp, Unknown
  misc_feature (1)..( 9): Result.004 file - promoters50/1388741
gaaaagatc

SEQ ID NO: 167840 - DNA, 9 bp, Unknown
  misc_feature (1)..( 9): Result.004 file - promoters50/1388741
aaaatgata

SEQ ID NO: 167841 - DNA, 9 bp, Unknown
  misc_feature (1)..( 9): Result.004 file - promoters50/1388741
aaaataata

SEQ ID NO: 167842 - DNA, 8 bp, Unknown
  misc_feature (1)..( 8): Result.004 file - promoters50/1388741
ggagaaaa

SEQ ID NO: 167843 - DNA, 8 bp, Unknown
  misc_feature (1)..( 8): Result.004 file - promoters50/1388741
aaagaaaa

SEQ ID NO: 167844 - DNA, 8 bp, Unknown
  misc_feature (1)..( 8): Result.004 file - promoters50/1388775
aaacaaaa

SEQ ID NO: 167845 - DNA, 8 bp, Unknown
  misc_feature (1)..( 8): Result.004 file - promoters50/1388775
aataaata

SEQ ID NO: 167846 - DNA, 8 bp, Unknown
  misc_feature (1)..( 8): Result.004 file - promoters50/1388775
aatatata

SEQ ID NO: 167847 - DNA, 8 bp, Unknown
  misc_feature (1)..( 8): Result.004 file - promoters50/1388775
aatttatt

SEQ ID NO: 167848 - DNA, 8 bp, Unknown
  misc_feature (1)..( 8): Result.004 file - promoters50/1388775
ataaatga

SEQ ID NO: 167849 - DNA, 8 bp, Unknown
  misc_feature (1)..( 8): Result.004 file - promoters50/1388775
ataaatgc

SEQ ID NO: 167850 - DNA, 8 bp, Unknown
  misc_feature (1)..( 8): Result.004 file - promoters50/1388793
acaaatgc

SEQ ID NO: 167851 - DNA, 19 bp, Unknown
  misc_feature (1)..( 19): Result.004 file - promoters50/1388793
aacaaactacaaaagttta

SEQ ID NO: 167852 - DNA, 19 bp, Unknown
  misc_feature (1)..( 19): Result.004 file - promoters50/1388793
ttagagcagaaaatgtttt

SEQ ID NO: 167853 - DNA, 19 bp, Unknown
  misc_feature (1)..( 19): Result.004 file - promoters50/1388793
agtttagggaaaatggatc

SEQ ID NO: 167854 - DNA, 19 bp, Unknown
  misc_feature (1)..( 19): Result.004 file - promoters50/1388793
ccaacacattcaatatttt

SEQ ID NO: 167855 - DNA, 8 bp, Unknown
  misc_feature (1)..( 8): Result.004 file - promoters50/1388793
aatgtttt

SEQ ID NO: 167856 - DNA, 8 bp, Unknown
  misc_feature (1)..( 8): Result.004 file - promoters50/1388793
aatatttt

SEQ ID NO: 167857 - DNA, 8 bp, Unknown
  misc_feature (1)..( 8): Result.004 file - promoters50/1388793
aatgtttt

SEQ ID NO: 167858 - DNA, 6 bp, Unknown
  misc_feature (1)..( 6): Result.004 file - promoters50/1388793
ttttac

SEQ ID NO: 167859 - DNA, 6 bp, Unknown
  misc_feature (1)..( 6): Result.004 file - promoters50/1388793
ttttac

SEQ ID NO: 167860 - DNA, 6 bp, Unknown
  misc_feature (1)..( 6): Result.004 file - promoters50/1388793
ttttac

SEQ ID NO: 167861 - DNA, 9 bp, Unknown
  misc_feature (1)..( 9): Result.004 file - promoters50/1388793
acattcaat

SEQ ID NO: 167862 - DNA, 9 bp, Unknown
  misc_feature (1)..( 9): Result.004 file - promoters50/1388793
acatttaat

SEQ ID NO: 167863 - DNA, 9 bp, Unknown
  misc_feature (1)..( 9): Result.004 file - promoters50/1388793
acattcaat

SEQ ID NO: 167864 - DNA, 6 bp, Unknown
  misc_feature (1)..( 6): Result.004 file - promoters50/1388793
cattat

SEQ ID NO: 167865 - DNA, 6 bp, Unknown
  misc_feature (1)..( 6): Result.004 file - promoters50/1388793
cattat

SEQ ID NO: 167866 - DNA, 6 bp, Unknown
  misc_feature (1)..( 6): Result.004 file - promoters50/1388793
cattat

SEQ ID NO: 167867 - DNA, 7 bp, Unknown
  misc_feature (1)..( 7): Result.004 file - promoters50/1388793
acgcaaa

SEQ ID NO: 167868 - DNA, 7 bp, Unknown
  misc_feature (1)..( 7): Result.004 file - promoters50/1388793
acggaaa

SEQ ID NO: 167869 - DNA, 7 bp, Unknown
  misc_feature (1)..( 7): Result.004 file - promoters50/1388793
acgcaaa

SEQ ID NO: 167870 - DNA, 7 bp, Unknown
  misc_feature (1)..( 7): Result.004 file - promoters50/1388793
aattatc

SEQ ID NO: 167871 - DNA, 7 bp, Unknown
  misc_feature (1)..( 7): Result.004 file - promoters50/1388793
cattatc

SEQ ID NO: 167872 - DNA, 7 bp, Unknown
  misc_feature (1)..( 7): Result.004 file - promoters50/1388793
cattata

SEQ ID NO: 167873 - DNA, 7 bp, Unknown
  misc_feature (1)..( 7): Result.004 file - promoters50/1388852
aattatc

SEQ ID NO: 167874 - DNA, 9 bp, Unknown
  misc_feature (1)..( 9): Result.004 file - promoters50/1388852
aaatatgaa

SEQ ID NO: 167875 - DNA, 9 bp, Unknown
  misc_feature (1)..( 9): Result.004 file - promoters50/1388852
aaacatgtg

SEQ ID NO: 167876 - DNA, 9 bp, Unknown
  misc_feature (1)..( 9): Result.004 file - promoters50/1388852
caataagaa

SEQ ID NO: 167877 - DNA, 6 bp, Unknown
  misc_feature (1)..( 6): Result.004 file - promoters50/1388852
tttttt

SEQ ID NO: 167878 - DNA, 6 bp, Unknown
  misc_feature (1)..( 6): Result.004 file - promoters50/1388852
tttttt

SEQ ID NO: 167879 - DNA, 6 bp, Unknown
  misc_feature (1)..( 6): Result.004 file - promoters50/1388852
tttttt

SEQ ID NO: 167880 - DNA, 12 bp, Unknown
  misc_feature (1)..( 12): Result.004 file - promoters50/1388852
ctttaccaattc

SEQ ID NO: 167881 - DNA, 12 bp, Unknown
  misc_feature (1)..( 12): Result.004 file - promoters50/1388852
ctttacaaacac

SEQ ID NO: 167882 - DNA, 12 bp, Unknown
  misc_feature (1)..( 12): Result.004 file - promoters50/1388864
tttttcaaacac

SEQ ID NO: 167883 - DNA, 7 bp, Unknown
  misc_feature (1)..( 7): Result.004 file - promoters50/1388864
ctcagag

SEQ ID NO: 167884 - DNA, 7 bp, Unknown
  misc_feature (1)..( 7): Result.004 file - promoters50/1388864
ctcagaa

SEQ ID NO: 167885 - DNA, 7 bp, Unknown
  misc_feature (1)..( 7): Result.004 file - promoters50/1388872
ctcggaa

SEQ ID NO: 167886 - DNA, 8 bp, Unknown
  misc_feature (1)..( 8): Result.004 file - promoters50/1388872
aattttta

SEQ ID NO: 167887 - DNA, 8 bp, Unknown
  misc_feature (1)..( 8): Result.004 file - promoters50/1388872
aatttttt

SEQ ID NO: 167888 - DNA, 8 bp, Unknown
  misc_feature (1)..( 8): Result.004 file - promoters50/1388872
aattttgg

SEQ ID NO: 167889 - DNA, 8 bp, Unknown
  misc_feature (1)..( 8): Result.004 file - promoters50/1388872
gatttttg

SEQ ID NO: 167890 - DNA, 7 bp, Unknown
  misc_feature (1)..( 7): Result.004 file - promoters50/1388872
tttcttt

SEQ ID NO: 167891 - DNA, 11 bp, Unknown
  misc_feature (1)..( 11): Result.004 file - promoters50/1388872
aatttttttct

SEQ ID NO: 167892 - DNA, 11 bp, Unknown
  misc_feature (1)..( 11): Result.004 file - promoters50/1388872
aattttgctga

SEQ ID NO: 167893 - DNA, 11 bp, Unknown
  misc_feature (1)..( 11): Result.004 file - promoters50/1388872
aatttggctcc

SEQ ID NO: 167894 - DNA, 11 bp, Unknown
  misc_feature (1)..( 11): Result.004 file - promoters50/1388872
aatgtggtgat

SEQ ID NO: 167895 - DNA, 11 bp, Unknown
  misc_feature (1)..( 11): Result.004 file - promoters50/1388872
aatttggatcc

SEQ ID NO: 167896 - DNA, 11 bp, Unknown
  misc_feature (1)..( 11): Result.004 file - promoters50/1388872
ataacattttt

SEQ ID NO: 167897 - DNA, 11 bp, Unknown
  misc_feature (1)..( 11): Result.004 file - promoters50/1388872
atatcatccaa

SEQ ID NO: 167898 - DNA, 11 bp, Unknown
  misc_feature (1)..( 11): Result.004 file - promoters50/1388872
ttaagattttt

SEQ ID NO: 167899 - DNA, 11 bp, Unknown
  misc_feature (1)..( 11): Result.004 file - promoters50/1388872
ttagaattttt

SEQ ID NO: 167900 - DNA, 10 bp, Unknown
  misc_feature (1)..( 10): Result.004 file - promoters50/1388910
tttctttgac

SEQ ID NO: 167901 - DNA, 12 bp, Unknown
  misc_feature (1)..( 12): Result.004 file - promoters50/1388910
ccattttgacta

SEQ ID NO: 167902 - DNA, 12 bp, Unknown
  misc_feature (1)..( 12): Result.004 file - promoters50/1388910
tatgtttaactg

SEQ ID NO: 167903 - DNA, 12 bp, Unknown
  misc_feature (1)..( 12): Result.004 file - promoters50/1388910
gttctttaacta

SEQ ID NO: 167904 - DNA, 12 bp, Unknown
  misc_feature (1)..( 12): Result.004 file - promoters50/1388910
tgtttttgattc

SEQ ID NO: 167905 - DNA, 12 bp, Unknown
  misc_feature (1)..( 12): Result.004 file - promoters50/1388910
acagtttaacaa

SEQ ID NO: 167906 - DNA, 12 bp, Unknown
  misc_feature (1)..( 12): Result.004 file - promoters50/1388910
tatgtttaatgg

SEQ ID NO: 167907 - DNA, 14 bp, Unknown
  misc_feature (1)..( 14): Result.004 file - promoters50/1388910
aataaaatggacgg

SEQ ID NO: 167908 - DNA, 14 bp, Unknown
  misc_feature (1)..( 14): Result.004 file - promoters50/1388910
actgaaatagactt

SEQ ID NO: 167909 - DNA, 14 bp, Unknown
  misc_feature (1)..( 14): Result.004 file - promoters50/1388910
ttaaaaatgcatgc

SEQ ID NO: 167910 - DNA, 14 bp, Unknown
  misc_feature (1)..( 14): Result.004 file - promoters50/1388910
tgtttaatggatta

SEQ ID NO: 167911 - DNA, 14 bp, Unknown
  misc_feature (1)..( 14): Result.004 file - promoters50/1388910
ttagaaacagactt

SEQ ID NO: 167912 - DNA, 14 bp, Unknown
  misc_feature (1)..( 14): Result.004 file - promoters50/1388910
ttaacaatttaaaa

SEQ ID NO: 167913 - DNA, 14 bp, Unknown
  misc_feature (1)..( 14): Result.004 file - promoters50/1388910
tgcgaaacaccctg

SEQ ID NO: 167914 - DNA, 11 bp, Unknown
  misc_feature (1)..( 11): Result.004 file - promoters50/1388910
gcaaatatcta

SEQ ID NO: 167915 - DNA, 11 bp, Unknown
  misc_feature (1)..( 11): Result.004 file - promoters50/1388910
tgaaatatttt

SEQ ID NO: 167916 - DNA, 11 bp, Unknown
  misc_feature (1)..( 11): Result.004 file - promoters50/1388910
taaaaaatcgt

SEQ ID NO: 167917 - DNA, 11 bp, Unknown
  misc_feature (1)..( 11): Result.004 file - promoters50/1388910
ggaaaaaacat

SEQ ID NO: 167918 - DNA, 12 bp, Unknown
  misc_feature (1)..( 12): Result.004 file - promoters50/1388910
ggaacaaaggag

SEQ ID NO: 167919 - DNA, 12 bp, Unknown
  misc_feature (1)..( 12): Result.004 file - promoters50/1388910
taaaacaataga

SEQ ID NO: 167920 - DNA, 12 bp, Unknown
  misc_feature (1)..( 12): Result.004 file - promoters50/1388973
actggaaattcg

SEQ ID NO: 167921 - DNA, 15 bp, Unknown
  misc_feature (1)..( 15): Result.004 file - promoters50/1388973
tgtcttattaaacaa

SEQ ID NO: 167922 - DNA, 15 bp, Unknown
  misc_feature (1)..( 15): Result.004 file - promoters50/1388973
attctaattgcagct

SEQ ID NO: 167923 - DNA, 15 bp, Unknown
  misc_feature (1)..( 15): Result.004 file - promoters50/1388973
tctcttatccaatct

SEQ ID NO: 167924 - DNA, 15 bp, Unknown
  misc_feature (1)..( 15): Result.004 file - promoters50/1388973
tgtctaattatacaa

SEQ ID NO: 167925 - DNA, 15 bp, Unknown
  misc_feature (1)..( 15): Result.004 file - promoters50/1388973
agtctaaagagttgt

SEQ ID NO: 167926 - DNA, 15 bp, Unknown
  misc_feature (1)..( 15): Result.004 file - promoters50/1389231
catctaaaaataaca

SEQ ID NO: 167927 - DNA, 9 bp, Unknown
  misc_feature (1)..( 9): Result.004 file - promoters50/1389231
ttttccttt

SEQ ID NO: 167928 - DNA, 9 bp, Unknown
  misc_feature (1)..( 9): Result.004 file - promoters50/1389231
tttttcttt

SEQ ID NO: 167929 - DNA, 9 bp, Unknown
  misc_feature (1)..( 9): Result.004 file - promoters50/1389231
attttattt

SEQ ID NO: 167930 - DNA, 8 bp, Unknown
  misc_feature (1)..( 8): Result.004 file - promoters50/1389231
ctttcatt

SEQ ID NO: 167931 - DNA, 8 bp, Unknown
  misc_feature (1)..( 8): Result.004 file - promoters50/1389231
ctttcaag

SEQ ID NO: 167932 - DNA, 8 bp, Unknown
  misc_feature (1)..( 8): Result.004 file - promoters50/1389231
attttatt

SEQ ID NO: 167933 - DNA, 8 bp, Unknown
  misc_feature (1)..( 8): Result.004 file - promoters50/1389231
attaacaa

SEQ ID NO: 167934 - DNA, 8 bp, Unknown
  misc_feature (1)..( 8): Result.004 file - promoters50/1389231
attaacac

SEQ ID NO: 167935 - DNA, 8 bp, Unknown
  misc_feature (1)..( 8): Result.004 file - promoters50/1389231
gttaacaa

SEQ ID NO: 167936 - DNA, 8 bp, Unknown
  misc_feature (1)..( 8): Result.004 file - promoters50/1389231
ttttcttt

SEQ ID NO: 167937 - DNA, 8 bp, Unknown
  misc_feature (1)..( 8): Result.004 file - promoters50/1389231
ttttattt

SEQ ID NO: 167938 - DNA, 8 bp, Unknown
  misc_feature (1)..( 8): Result.004 file - promoters50/1389231
ttttcttt

SEQ ID NO: 167939 - DNA, 9 bp, Unknown
  misc_feature (1)..( 9): Result.004 file - promoters50/1389231
aaataaaat

SEQ ID NO: 167940 - DNA, 9 bp, Unknown
  misc_feature (1)..( 9): Result.004 file - promoters50/1389231
aaatcaaat

SEQ ID NO: 167941 - DNA, 9 bp, Unknown
  misc_feature (1)..( 9): Result.004 file - promoters50/1389243
aaataaaat

SEQ ID NO: 167942 - DNA, 13 bp, Unknown
  misc_feature (1)..( 13): Result.004 file - promoters50/1389243
agtaatataaatt

SEQ ID NO: 167943 - DNA, 13 bp, Unknown
  misc_feature (1)..( 13): Result.004 file - promoters50/1389243
atgaatttaaatt

SEQ ID NO: 167944 - DNA, 13 bp, Unknown
  misc_feature (1)..( 13): Result.004 file - promoters50/1389243
atcaatttaaaaa

SEQ ID NO: 167945 - DNA, 13 bp, Unknown
  misc_feature (1)..( 13): Result.004 file - promoters50/1389243
agtaatatttgag

SEQ ID NO: 167946 - DNA, 13 bp, Unknown
  misc_feature (1)..( 13): Result.004 file - promoters50/1389243
tacaatttcactc

SEQ ID NO: 167947 - DNA, 13 bp, Unknown
  misc_feature (1)..( 13): Result.004 file - promoters50/1389243
attaagatttttt

SEQ ID NO: 167948 - DNA, 13 bp, Unknown
  misc_feature (1)..( 13): Result.004 file - promoters50/1389243
gagaatttttgta

SEQ ID NO: 167949 - DNA, 10 bp, Unknown
  misc_feature (1)..( 10): Result.004 file - promoters50/1389243
tcttaagaat

SEQ ID NO: 167950 - DNA, 10 bp, Unknown
  misc_feature (1)..( 10): Result.004 file - promoters50/1389243
gtataagaat

SEQ ID NO: 167951 - DNA, 10 bp, Unknown
  misc_feature (1)..( 10): Result.004 file - promoters50/1389243
atttaaaaat

SEQ ID NO: 167952 - DNA, 10 bp, Unknown
  misc_feature (1)..( 10): Result.004 file - promoters50/1389243
ttttaaagtt

SEQ ID NO: 167953 - DNA, 10 bp, Unknown
  misc_feature (1)..( 10): Result.004 file - promoters50/1389243
aattaagaaa

SEQ ID NO: 167954 - DNA, 10 bp, Unknown
  misc_feature (1)..( 10): Result.004 file - promoters50/1389250
cattcagatg

SEQ ID NO: 167955 - DNA, 7 bp, Unknown
  misc_feature (1)..( 7): Result.004 file - promoters50/1389250
catctat

SEQ ID NO: 167956 - DNA, 7 bp, Unknown
  misc_feature (1)..( 7): Result.004 file - promoters50/1389250
catttat

SEQ ID NO: 167957 - DNA, 7 bp, Unknown
  misc_feature (1)..( 7): Result.004 file - promoters50/1389250
catctat

SEQ ID NO: 167958 - DNA, 10 bp, Unknown
  misc_feature (1)..( 10): Result.004 file - promoters50/1389250
tatcttttca

SEQ ID NO: 167959 - DNA, 10 bp, Unknown
  misc_feature (1)..( 10): Result.004 file - promoters50/1389250
caacttgtca

SEQ ID NO: 167960 - DNA, 10 bp, Unknown
  misc_feature (1)..( 10): Result.004 file - promoters50/1389279
caatttgtac

SEQ ID NO: 167961 - DNA, 7 bp, Unknown
  misc_feature (1)..( 7): Result.004 file - promoters50/1389279
caatgtt

SEQ ID NO: 167962 - DNA, 7 bp, Unknown
  misc_feature (1)..( 7): Result.004 file - promoters50/1389279
caatgta

SEQ ID NO: 167963 - DNA, 7 bp, Unknown
  misc_feature (1)..( 7): Result.004 file - promoters50/1389279
gaatgtt

SEQ ID NO: 167964 - DNA, 7 bp, Unknown
  misc_feature (1)..( 7): Result.004 file - promoters50/1389279
agaaaaa

SEQ ID NO: 167965 - DNA, 7 bp, Unknown
  misc_feature (1)..( 7): Result.004 file - promoters50/1389279
ggaaaaa

SEQ ID NO: 167966 - DNA, 8 bp, Unknown
  misc_feature (1)..( 8): Result.004 file - promoters50/1389279
agacaaaa

SEQ ID NO: 167967 - DNA, 8 bp, Unknown
  misc_feature (1)..( 8): Result.004 file - promoters50/1389279
acaaaaat

SEQ ID NO: 167968 - DNA, 8 bp, Unknown
  misc_feature (1)..( 8): Result.004 file - promoters50/1389279
acaaaaaa

SEQ ID NO: 167969 - DNA, 8 bp, Unknown
  misc_feature (1)..( 8): Result.004 file - promoters50/1389279
gcaaaaat

SEQ ID NO: 167970 - DNA, 8 bp, Unknown
  misc_feature (1)..( 8): Result.004 file - promoters50/1389279
tatatata

SEQ ID NO: 167971 - DNA, 8 bp, Unknown
  misc_feature (1)..( 8): Result.004 file - promoters50/1389279
tatatata

SEQ ID NO: 167972 - DNA, 8 bp, Unknown
  misc_feature (1)..( 8): Result.004 file - promoters50/1389279
tatatata

SEQ ID NO: 167973 - DNA, 9 bp, Unknown
  misc_feature (1)..( 9): Result.004 file - promoters50/1389279
aaaataagc

SEQ ID NO: 167974 - DNA, 9 bp, Unknown
  misc_feature (1)..( 9): Result.004 file - promoters50/1389279
aaaacaagt

SEQ ID NO: 167975 - DNA, 9 bp, Unknown
  misc_feature (1)..( 9): Result.004 file - promoters50/1389301
aatacaagt

SEQ ID NO: 167976 - DNA, 11 bp, Unknown
  misc_feature (1)..( 11): Result.004 file - promoters50/1389301
taataaactga

SEQ ID NO: 167977 - DNA, 11 bp, Unknown
  misc_feature (1)..( 11): Result.004 file - promoters50/1389301
cgatatactga

SEQ ID NO: 167978 - DNA, 11 bp, Unknown
  misc_feature (1)..( 11): Result.004 file - promoters50/1389301
taatgaactac

SEQ ID NO: 167979 - DNA, 7 bp, Unknown
  misc_feature (1)..( 7): Result.004 file - promoters50/1389301
ttcttga

SEQ ID NO: 167980 - DNA, 7 bp, Unknown
  misc_feature (1)..( 7): Result.004 file - promoters50/1389301
ctcttga

SEQ ID NO: 167981 - DNA, 7 bp, Unknown
  misc_feature (1)..( 7): Result.004 file - promoters50/1389330
ctcctga

SEQ ID NO: 167982 - DNA, 6 bp, Unknown
  misc_feature (1)..( 6): Result.004 file - promoters50/1389330
tttaaa

SEQ ID NO: 167983 - DNA, 6 bp, Unknown
  misc_feature (1)..( 6): Result.004 file - promoters50/1389330
tttaaa

SEQ ID NO: 167984 - DNA, 6 bp, Unknown
  misc_feature (1)..( 6): Result.004 file - promoters50/1389330
tttaaa

SEQ ID NO: 167985 - DNA, 10 bp, Unknown
  misc_feature (1)..( 10): Result.004 file - promoters50/1389330
ttaacaataa

SEQ ID NO: 167986 - DNA, 10 bp, Unknown
  misc_feature (1)..( 10): Result.004 file - promoters50/1389330
ttaaaaatca

SEQ ID NO: 167987 - DNA, 10 bp, Unknown
  misc_feature (1)..( 10): Result.004 file - promoters50/1389401
gtaacaataa

SEQ ID NO: 167988 - DNA, 12 bp, Unknown
  misc_feature (1)..( 12): Result.004 file - promoters50/1389401
catgaaaaatta

SEQ ID NO: 167989 - DNA, 12 bp, Unknown
  misc_feature (1)..( 12): Result.004 file - promoters50/1389401
catgaataattt

SEQ ID NO: 167990 - DNA, 12 bp, Unknown
  misc_feature (1)..( 12): Result.004 file - promoters50/1389401
tagaaaatatta

SEQ ID NO: 167991 - DNA, 9 bp, Unknown
  misc_feature (1)..( 9): Result.004 file - promoters50/1389401
attatgtga

SEQ ID NO: 167992 - DNA, 9 bp, Unknown
  misc_feature (1)..( 9): Result.004 file - promoters50/1389401
attctgttt

SEQ ID NO: 167993 - DNA, 9 bp, Unknown
  misc_feature (1)..( 9): Result.004 file - promoters50/1389401
tctctcttt

SEQ ID NO: 167994 - DNA, 8 bp, Unknown
  misc_feature (1)..( 8): Result.004 file - promoters50/1389401
gcagattc

SEQ ID NO: 167995 - DNA, 8 bp, Unknown
  misc_feature (1)..( 8): Result.004 file - promoters50/1389401
acagattc

SEQ ID NO: 167996 - DNA, 8 bp, Unknown
  misc_feature (1)..( 8): Result.004 file - promoters50/1389401
acagatac

SEQ ID NO: 167997 - DNA, 7 bp, Unknown
  misc_feature (1)..( 7): Result.004 file - promoters50/1389401
aacaaag

SEQ ID NO: 167998 - DNA, 7 bp, Unknown
  misc_feature (1)..( 7): Result.004 file - promoters50/1389401
aacaaaa

SEQ ID NO: 167999 - DNA, 7 bp, Unknown
  misc_feature (1)..( 7): Result.004 file - promoters50/1389401
tacaaaa

SEQ ID NO: 168000 - DNA, 11 bp, Unknown
  misc_feature (1)..( 11): Result.004 file - promoters50/1389401
cataatcgact

SEQ ID NO: 168001 - DNA, 11 bp, Unknown
  misc_feature (1)..( 11): Result.004 file - promoters50/1389401
cataattacat

SEQ ID NO: 168002 - DNA, 11 bp, Unknown
  misc_feature (1)..( 11): Result.004 file - promoters50/1390146
tataattgcat

SEQ ID NO: 168003 - DNA, 12 bp, Unknown
  misc_feature (1)..( 12): Result.004 file - promoters50/1390146
tatatcaaaatt

SEQ ID NO: 168004 - DNA, 12 bp, Unknown
  misc_feature (1)..( 12): Result.004 file - promoters50/1390146
ggtataaaaaga

SEQ ID NO: 168005 - DNA, 12 bp, Unknown
  misc_feature (1)..( 12): Result.004 file - promoters50/1390146
ctttccaaaatg

SEQ ID NO: 168006 - DNA, 12 bp, Unknown
  misc_feature (1)..( 12): Result.004 file - promoters50/1390146
ggtgtaatgagt

SEQ ID NO: 168007 - DNA, 12 bp, Unknown
  misc_feature (1)..( 12): Result.004 file - promoters50/1390146
agtgtaacagat

SEQ ID NO: 168008 - DNA, 12 bp, Unknown
  misc_feature (1)..( 12): Result.004 file - promoters50/1390146
tgaggcaatatg

SEQ ID NO: 168009 - DNA, 10 bp, Unknown
  misc_feature (1)..( 10): Result.004 file - promoters50/1390146
aaatttgaac

SEQ ID NO: 168010 - DNA, 10 bp, Unknown
  misc_feature (1)..( 10): Result.004 file - promoters50/1390146
caatgtgaaa

SEQ ID NO: 168011 - DNA, 10 bp, Unknown
  misc_feature (1)..( 10): Result.004 file - promoters50/1390146
caatatgatt

SEQ ID NO: 168012 - DNA, 10 bp, Unknown
  misc_feature (1)..( 10): Result.004 file - promoters50/1390146
taatttcaac

SEQ ID NO: 168013 - DNA, 10 bp, Unknown
  misc_feature (1)..( 10): Result.004 file - promoters50/1390146
caaaatgtta

SEQ ID NO: 168014 - DNA, 10 bp, Unknown
  misc_feature (1)..( 10): Result.004 file - promoters50/1390240
caatttcaca

SEQ ID NO: 168015 - DNA, 10 bp, Unknown
  misc_feature (1)..( 10): Result.004 file - promoters50/1390240
aaaaagaaaa

SEQ ID NO: 168016 - DNA, 10 bp, Unknown
  misc_feature (1)..( 10): Result.004 file - promoters50/1390240
taaaagtaaa

SEQ ID NO: 168017 - DNA, 10 bp, Unknown
  misc_feature (1)..( 10): Result.004 file - promoters50/1390240
caaaataaac

SEQ ID NO: 168018 - DNA, 10 bp, Unknown
  misc_feature (1)..( 10): Result.004 file - promoters50/1390240
acaaatagaa

SEQ ID NO: 168019 - DNA, 10 bp, Unknown
  misc_feature (1)..( 10): Result.004 file - promoters50/1390240
aaaaatacag

SEQ ID NO: 168020 - DNA, 10 bp, Unknown
  misc_feature (1)..( 10): Result.004 file - promoters50/1390240
aaaaattttt

SEQ ID NO: 168021 - DNA, 8 bp, Unknown
  misc_feature (1)..( 8): Result.004 file - promoters50/1390240
gaaattta

SEQ ID NO: 168022 - DNA, 8 bp, Unknown
  misc_feature (1)..( 8): Result.004 file - promoters50/1390240
gaattttg

SEQ ID NO: 168023 - DNA, 8 bp, Unknown
  misc_feature (1)..( 8): Result.004 file - promoters50/1390240
taatttac

SEQ ID NO: 168024 - DNA, 8 bp, Unknown
  misc_feature (1)..( 8): Result.004 file - promoters50/1390240
gaaaaaat

SEQ ID NO: 168025 - DNA, 8 bp, Unknown
  misc_feature (1)..( 8): Result.004 file - promoters50/1390240
aaaatttt

SEQ ID NO: 168026 - DNA, 8 bp, Unknown
  misc_feature (1)..( 8): Result.004 file - promoters50/1390240
caaaataa

SEQ ID NO: 168027 - DNA, 8 bp, Unknown
  misc_feature (1)..( 8): Result.004 file - promoters50/1390240
gaaacaaa

SEQ ID NO: 168028 - DNA, 13 bp, Unknown
  misc_feature (1)..( 13): Result.004 file - promoters50/1390240
acttgttgacaaa

SEQ ID NO: 168029 - DNA, 13 bp, Unknown
  misc_feature (1)..( 13): Result.004 file - promoters50/1390240
acttgctgagcca

SEQ ID NO: 168030 - DNA, 13 bp, Unknown
  misc_feature (1)..( 13): Result.004 file - promoters50/1390240
ctctgtggactcc

SEQ ID NO: 168031 - DNA, 13 bp, Unknown
  misc_feature (1)..( 13): Result.004 file - promoters50/1390240
tccagttgacagt

SEQ ID NO: 168032 - DNA, 13 bp, Unknown
  misc_feature (1)..( 13): Result.004 file - promoters50/1390240
gcttgcttaacac

SEQ ID NO: 168033 - DNA, 14 bp, Unknown
  misc_feature (1)..( 14): Result.004 file - promoters50/1390240
tgatgtttgattaa

SEQ ID NO: 168034 - DNA, 14 bp, Unknown
  misc_feature (1)..( 14): Result.004 file - promoters50/1390240
gtttgccagattaa

SEQ ID NO: 168035 - DNA, 14 bp, Unknown
  misc_feature (1)..( 14): Result.004 file - promoters50/1390240
tgtctttgtatcaa

SEQ ID NO: 168036 - DNA, 14 bp, Unknown
  misc_feature (1)..( 14): Result.004 file - promoters50/1390240
catgtttatatttt

SEQ ID NO: 168037 - DNA, 14 bp, Unknown
  misc_feature (1)..( 14): Result.004 file - promoters50/1390240
catctctgtggact

SEQ ID NO: 168038 - DNA, 14 bp, Unknown
  misc_feature (1)..( 14): Result.004 file - promoters50/1390240
cactcttaaattat

SEQ ID NO: 168039 - DNA, 14 bp, Unknown
  misc_feature (1)..( 14): Result.004 file - promoters50/1390240
gatgtaaaaattat

SEQ ID NO: 168040 - DNA, 14 bp, Unknown
  misc_feature (1)..( 14): Result.004 file - promoters50/1390240
catctcttgtccag

SEQ ID NO: 168041 - DNA, 13 bp, Unknown
  misc_feature (1)..( 13): Result.004 file - promoters50/1390240
gatgattgtgaac

SEQ ID NO: 168042 - DNA, 13 bp, Unknown
  misc_feature (1)..( 13): Result.004 file - promoters50/1390240
aatgtttgcttct

SEQ ID NO: 168043 - DNA, 13 bp, Unknown
  misc_feature (1)..( 13): Result.004 file - promoters50/1390240
tgtttttgctgat

SEQ ID NO: 168044 - DNA, 13 bp, Unknown
  misc_feature (1)..( 13): Result.004 file - promoters50/1390240
tttgtttgttact

SEQ ID NO: 168045 - DNA, 13 bp, Unknown
  misc_feature (1)..( 13): Result.004 file - promoters50/1390240
aattttttgagta

SEQ ID NO: 168046 - DNA, 13 bp, Unknown
  misc_feature (1)..( 13): Result.004 file - promoters50/1391338
aatgttgggtttt

SEQ ID NO: 168047 - DNA, 8 bp, Unknown
  misc_feature (1)..( 8): Result.004 file - promoters50/1391338
aaaagatt

SEQ ID NO: 168048 - DNA, 8 bp, Unknown
  misc_feature (1)..( 8): Result.004 file - promoters50/1391338
aaaggatt

SEQ ID NO: 168049 - DNA, 8 bp, Unknown
  misc_feature (1)..( 8): Result.004 file - promoters50/1391361
aaaggagc

SEQ ID NO: 168050 - DNA, 8 bp, Unknown
  misc_feature (1)..( 8): Result.004 file - promoters50/1391361
tttctttt

SEQ ID NO: 168051 - DNA, 8 bp, Unknown
  misc_feature (1)..( 8): Result.004 file - promoters50/1391361
cttcgttt

SEQ ID NO: 168052 - DNA, 8 bp, Unknown
  misc_feature (1)..( 8): Result.004 file - promoters50/1391361
tctctttc

SEQ ID NO: 168053 - DNA, 11 bp, Unknown
  misc_feature (1)..( 11): Result.004 file - promoters50/1391361
aatataaaaat

SEQ ID NO: 168054 - DNA, 11 bp, Unknown
  misc_feature (1)..( 11): Result.004 file - promoters50/1391361
gatattaaaat

SEQ ID NO: 168055 - DNA, 11 bp, Unknown
  misc_feature (1)..( 11): Result.004 file - promoters50/1391420
gatatttgttt

SEQ ID NO: 168056 - DNA, 12 bp, Unknown
  misc_feature (1)..( 12): Result.004 file - promoters50/1391420
agaagattctcg

SEQ ID NO: 168057 - DNA, 12 bp, Unknown
  misc_feature (1)..( 12): Result.004 file - promoters50/1391420
cagagattcctc

SEQ ID NO: 168058 - DNA, 12 bp, Unknown
  misc_feature (1)..( 12): Result.004 file - promoters50/1391420
agaacattggat

SEQ ID NO: 168059 - DNA, 12 bp, Unknown
  misc_feature (1)..( 12): Result.004 file - promoters50/1391420
agacgattcggt

SEQ ID NO: 168060 - DNA, 12 bp, Unknown
  misc_feature (1)..( 12): Result.004 file - promoters50/1391420
ccaagaacttcc

SEQ ID NO: 168061 - DNA, 12 bp, Unknown
  misc_feature (1)..( 12): Result.004 file - promoters50/1391420
ttaagactcctc

SEQ ID NO: 168062 - DNA, 12 bp, Unknown
  misc_feature (1)..( 12): Result.004 file - promoters50/1391420
tttaatgggctt

SEQ ID NO: 168063 - DNA, 12 bp, Unknown
  misc_feature (1)..( 12): Result.004 file - promoters50/1391420
tttaatcaagtc

SEQ ID NO: 168064 - DNA, 12 bp, Unknown
  misc_feature (1)..( 12): Result.004 file - promoters50/1391420
cttattgggctt

SEQ ID NO: 168065 - DNA, 12 bp, Unknown
  misc_feature (1)..( 12): Result.004 file - promoters50/1391420
aagtttgggcca

SEQ ID NO: 168066 - DNA, 12 bp, Unknown
  misc_feature (1)..( 12): Result.004 file - promoters50/1391420
caaattgggccc

SEQ ID NO: 168067 - DNA, 12 bp, Unknown
  misc_feature (1)..( 12): Result.004 file - promoters50/1391420
acaaatgggcct

SEQ ID NO: 168068 - DNA, 13 bp, Unknown
  misc_feature (1)..( 13): Result.004 file - promoters50/1391420
ttaatgggcttta

SEQ ID NO: 168069 - DNA, 13 bp, Unknown
  misc_feature (1)..( 13): Result.004 file - promoters50/1391420
acattaggcttta

SEQ ID NO: 168070 - DNA, 13 bp, Unknown
  misc_feature (1)..( 13): Result.004 file - promoters50/1391420
ttattgggcttgg

SEQ ID NO: 168071 - DNA, 13 bp, Unknown
  misc_feature (1)..( 13): Result.004 file - promoters50/1391420
agtttgggccaac

SEQ ID NO: 168072 - DNA, 13 bp, Unknown
  misc_feature (1)..( 13): Result.004 file - promoters50/1391420
aaattgggcccaa

SEQ ID NO: 168073 - DNA, 13 bp, Unknown
  misc_feature (1)..( 13): Result.004 file - promoters50/1391535
caaatgggcctaa

SEQ ID NO: 168074 - DNA, 8 bp, Unknown
  misc_feature (1)..( 8): Result.004 file - promoters50/1391535
agtaaaac

SEQ ID NO: 168075 - DNA, 8 bp, Unknown
  misc_feature (1)..( 8): Result.004 file - promoters50/1391535
gataaaac

SEQ ID NO: 168076 - DNA, 8 bp, Unknown
  misc_feature (1)..( 8): Result.004 file - promoters50/1391535
agtgaaag

SEQ ID NO: 168077 - DNA, 8 bp, Unknown
  misc_feature (1)..( 8): Result.004 file - promoters50/1391535
aaacaaac

SEQ ID NO: 168078 - DNA, 8 bp, Unknown
  misc_feature (1)..( 8): Result.004 file - promoters50/1391535
aaagaaaa

SEQ ID NO: 168079 - DNA, 9 bp, Unknown
  misc_feature (1)..( 9): Result.004 file - promoters50/1391535
aaagtaaag

SEQ ID NO: 168080 - DNA, 9 bp, Unknown
  misc_feature (1)..( 9): Result.004 file - promoters50/1391535
attcaaatc

SEQ ID NO: 168081 - DNA, 9 bp, Unknown
  misc_feature (1)..( 9): Result.004 file - promoters50/1391535
attcaaaaa

SEQ ID NO: 168082 - DNA, 9 bp, Unknown
  misc_feature (1)..( 9): Result.004 file - promoters50/1391535
cgtcaaaaa

SEQ ID NO: 168083 - DNA, 8 bp, Unknown
  misc_feature (1)..( 8): Result.004 file - promoters50/1391535
aaattggt

SEQ ID NO: 168084 - DNA, 8 bp, Unknown
  misc_feature (1)..( 8): Result.004 file - promoters50/1391535
aaattggg

SEQ ID NO: 168085 - DNA, 8 bp, Unknown
  misc_feature (1)..( 8): Result.004 file - promoters50/1391535
taatcggg

SEQ ID NO: 168086 - DNA, 10 bp, Unknown
  misc_feature (1)..( 10): Result.004 file - promoters50/1391535
aaaaatcttg

SEQ ID NO: 168087 - DNA, 10 bp, Unknown
  misc_feature (1)..( 10): Result.004 file - promoters50/1391535
aaatatctta

SEQ ID NO: 168088 - DNA, 10 bp, Unknown
  misc_feature (1)..( 10): Result.004 file - promoters50/1391651
aaataaaata

SEQ ID NO: 168089 - DNA, 8 bp, Unknown
  misc_feature (1)..( 8): Result.004 file - promoters50/1391651
agaacaaa

SEQ ID NO: 168090 - DNA, 8 bp, Unknown
  misc_feature (1)..( 8): Result.004 file - promoters50/1391651
taaacaaa

SEQ ID NO: 168091 - DNA, 8 bp, Unknown
  misc_feature (1)..( 8): Result.004 file - promoters50/1391651
agagcaag

SEQ ID NO: 168092 - DNA, 7 bp, Unknown
  misc_feature (1)..( 7): Result.004 file - promoters50/1391651
taaagaa

SEQ ID NO: 168093 - DNA, 7 bp, Unknown
  misc_feature (1)..( 7): Result.004 file - promoters50/1391651
caaagaa

SEQ ID NO: 168094 - DNA, 7 bp, Unknown
  misc_feature (1)..( 7): Result.004 file - promoters50/1391765
caatgaa

SEQ ID NO: 168095 - DNA, 8 bp, Unknown
  misc_feature (1)..( 8): Result.004 file - promoters50/1391765
tatcttat

SEQ ID NO: 168096 - DNA, 8 bp, Unknown
  misc_feature (1)..( 8): Result.004 file - promoters50/1391765
tattttac

SEQ ID NO: 168097 - DNA, 8 bp, Unknown
  misc_feature (1)..( 8): Result.004 file - promoters50/1391765
cgttttac

SEQ ID NO: 168098 - DNA, 8 bp, Unknown
  misc_feature (1)..( 8): Result.004 file - promoters50/1391765
tgatcatc

SEQ ID NO: 168099 - DNA, 8 bp, Unknown
  misc_feature (1)..( 8): Result.004 file - promoters50/1391765
tgatcatt

SEQ ID NO: 168100 - DNA, 8 bp, Unknown
  misc_feature (1)..( 8): Result.004 file - promoters50/1392370
gtatcatt

SEQ ID NO: 168101 - DNA, 8 bp, Unknown
  misc_feature (1)..( 8): Result.004 file - promoters50/1392370
aattgatc

SEQ ID NO: 168102 - DNA, 8 bp, Unknown
  misc_feature (1)..( 8): Result.004 file - promoters50/1392370
aattgatt

SEQ ID NO: 168103 - DNA, 8 bp, Unknown
  misc_feature (1)..( 8): Result.004 file - promoters50/1392370
gattcatt

SEQ ID NO: 168104 - DNA, 9 bp, Unknown
  misc_feature (1)..( 9): Result.004 file - promoters50/1392370
atatctttt

SEQ ID NO: 168105 - DNA, 9 bp, Unknown
  misc_feature (1)..( 9): Result.004 file - promoters50/1392370
atatttttt

SEQ ID NO: 168106 - DNA, 9 bp, Unknown
  misc_feature (1)..( 9): Result.004 file - promoters50/1392370
aagtttttg

SEQ ID NO: 168107 - DNA, 10 bp, Unknown
  misc_feature (1)..( 10): Result.004 file - promoters50/1392370
ccttataaat

SEQ ID NO: 168108 - DNA, 10 bp, Unknown
  misc_feature (1)..( 10): Result.004 file - promoters50/1392370
ttctataaat

SEQ ID NO: 168109 - DNA, 10 bp, Unknown
  misc_feature (1)..( 10): Result.004 file - promoters50/1392427
ttctataagt

SEQ ID NO: 168110 - DNA, 8 bp, Unknown
  misc_feature (1)..( 8): Result.004 file - promoters50/1392427
aattcaaa

SEQ ID NO: 168111 - DNA, 8 bp, Unknown
  misc_feature (1)..( 8): Result.004 file - promoters50/1392427
aatacaaa

SEQ ID NO: 168112 - DNA, 8 bp, Unknown
  misc_feature (1)..( 8): Result.004 file - promoters50/1392427
gatataaa

SEQ ID NO: 168113 - DNA, 9 bp, Unknown
  misc_feature (1)..( 9): Result.004 file - promoters50/1392427
tgcacacct

SEQ ID NO: 168114 - DNA, 9 bp, Unknown
  misc_feature (1)..( 9): Result.004 file - promoters50/1392427
atcacgcct

SEQ ID NO: 168115 - DNA, 9 bp, Unknown
  misc_feature (1)..( 9): Result.004 file - promoters50/1393104
atcgcgcca

SEQ ID NO: 168116 - DNA, 7 bp, Unknown
  misc_feature (1)..( 7): Result.004 file - promoters50/1393104
atgtggt

SEQ ID NO: 168117 - DNA, 7 bp, Unknown
  misc_feature (1)..( 7): Result.004 file - promoters50/1393104
atgtgga

SEQ ID NO: 168118 - DNA, 7 bp, Unknown
  misc_feature (1)..( 7): Result.004 file - promoters50/1393139
atgagga

SEQ ID NO: 168119 - DNA, 13 bp, Unknown
  misc_feature (1)..( 13): Result.004 file - promoters50/1393139
tctacttttggta

SEQ ID NO: 168120 - DNA, 13 bp, Unknown
  misc_feature (1)..( 13): Result.004 file - promoters50/1393139
ttaactttttagt

SEQ ID NO: 168121 - DNA, 13 bp, Unknown
  misc_feature (1)..( 13): Result.004 file - promoters50/1393139
tcttcttttgtca

SEQ ID NO: 168122 - DNA, 13 bp, Unknown
  misc_feature (1)..( 13): Result.004 file - promoters50/1393139
ataacttttgagt

SEQ ID NO: 168123 - DNA, 13 bp, Unknown
  misc_feature (1)..( 13): Result.004 file - promoters50/1393139
agatcttttagtt

SEQ ID NO: 168124 - DNA, 13 bp, Unknown
  misc_feature (1)..( 13): Result.004 file - promoters50/1393139
tgatattttaatg

SEQ ID NO: 168125 - DNA, 11 bp, Unknown
  misc_feature (1)..( 11): Result.004 file - promoters50/1393139
cgatacaatac

SEQ ID NO: 168126 - DNA, 11 bp, Unknown
  misc_feature (1)..( 11): Result.004 file - promoters50/1393139
gaataaaatac

SEQ ID NO: 168127 - DNA, 11 bp, Unknown
  misc_feature (1)..( 11): Result.004 file - promoters50/1393139
caataaaagcc

SEQ ID NO: 168128 - DNA, 11 bp, Unknown
  misc_feature (1)..( 11): Result.004 file - promoters50/1393139
taataaaggtt

SEQ ID NO: 168129 - DNA, 11 bp, Unknown
  misc_feature (1)..( 11): Result.004 file - promoters50/1393139
taataatagag

SEQ ID NO: 168130 - DNA, 11 bp, Unknown
  misc_feature (1)..( 11): Result.004 file - promoters50/1393139
tttcaaagacg

SEQ ID NO: 168131 - DNA, 11 bp, Unknown
  misc_feature (1)..( 11): Result.004 file - promoters50/1393139
taagaaaatag

SEQ ID NO: 168132 - DNA, 11 bp, Unknown
  misc_feature (1)..( 11): Result.004 file - promoters50/1393173
attttaaatag

SEQ ID NO: 168133 - DNA, 11 bp, Unknown
  misc_feature (1)..( 11): Result.004 file - promoters50/1393173
aaaatgagata

SEQ ID NO: 168134 - DNA, 11 bp, Unknown
  misc_feature (1)..( 11): Result.004 file - promoters50/1393173
aaaatgagtta

SEQ ID NO: 168135 - DNA, 11 bp, Unknown
  misc_feature (1)..( 11): Result.004 file - promoters50/1393173
tgaatgtgata

SEQ ID NO: 168136 - DNA, 8 bp, Unknown
  misc_feature (1)..( 8): Result.004 file - promoters50/1393173
taaaaaaa

SEQ ID NO: 168137 - DNA, 8 bp, Unknown
  misc_feature (1)..( 8): Result.004 file - promoters50/1393173
taataaaa

SEQ ID NO: 168138 - DNA, 8 bp, Unknown
  misc_feature (1)..( 8): Result.004 file - promoters50/1393173
tataaaac

SEQ ID NO: 168139 - DNA, 10 bp, Unknown
  misc_feature (1)..( 10): Result.004 file - promoters50/1393173
ttgtgaagta

SEQ ID NO: 168140 - DNA, 10 bp, Unknown
  misc_feature (1)..( 10): Result.004 file - promoters50/1393173
atgtgtagta

SEQ ID NO: 168141 - DNA, 10 bp, Unknown
  misc_feature (1)..( 10): Result.004 file - promoters50/1393181
ttgtgaaaat

SEQ ID NO: 168142 - DNA, 9 bp, Unknown
  misc_feature (1)..( 9): Result.004 file - promoters50/1393181
tcactaata

SEQ ID NO: 168143 - DNA, 9 bp, Unknown
  misc_feature (1)..( 9): Result.004 file - promoters50/1393181
taactaatc

SEQ ID NO: 168144 - DNA, 9 bp, Unknown
  misc_feature (1)..( 9): Result.004 file - promoters50/1393181
ctactataa

SEQ ID NO: 168145 - DNA, 9 bp, Unknown
  misc_feature (1)..( 9): Result.004 file - promoters50/1393181
ttactaata

SEQ ID NO: 168146 - DNA, 9 bp, Unknown
  misc_feature (1)..( 9): Result.004 file - promoters50/1393181
ttactaata

SEQ ID NO: 168147 - DNA, 19 bp, Unknown
  misc_feature (1)..( 19): Result.004 file - promoters50/1393181
caaattaaaaaaaaaatct

SEQ ID NO: 168148 - DNA, 19 bp, Unknown
  misc_feature (1)..( 19): Result.004 file - promoters50/1393181
aagattataaaaaaagtct

SEQ ID NO: 168149 - DNA, 19 bp, Unknown
  misc_feature (1)..( 19): Result.004 file - promoters50/1393181
caaattcaaagaacataga

SEQ ID NO: 168150 - DNA, 19 bp, Unknown
  misc_feature (1)..( 19): Result.004 file - promoters50/1393181
ttaaaaaaaaaaaaaaatt

SEQ ID NO: 168151 - DNA, 19 bp, Unknown
  misc_feature (1)..( 19): Result.004 file - promoters50/1393181
ctaattttaattttgttat

SEQ ID NO: 168152 - DNA, 8 bp, Unknown
  misc_feature (1)..( 8): Result.004 file - promoters50/1393181
aaattttt

SEQ ID NO: 168153 - DNA, 8 bp, Unknown
  misc_feature (1)..( 8): Result.004 file - promoters50/1393181
aaatcttt

SEQ ID NO: 168154 - DNA, 8 bp, Unknown
  misc_feature (1)..( 8): Result.004 file - promoters50/1393181
taatttta

SEQ ID NO: 168155 - DNA, 8 bp, Unknown
  misc_feature (1)..( 8): Result.004 file - promoters50/1393181
taatttta

SEQ ID NO: 168156 - DNA, 8 bp, Unknown
  misc_feature (1)..( 8): Result.004 file - promoters50/1393181
taatttta

SEQ ID NO: 168157 - DNA, 9 bp, Unknown
  misc_feature (1)..( 9): Result.004 file - promoters50/1393181
tttttaaat

SEQ ID NO: 168158 - DNA, 9 bp, Unknown
  misc_feature (1)..( 9): Result.004 file - promoters50/1393181
atttaaaat

SEQ ID NO: 168159 - DNA, 10 bp, Unknown
  misc_feature (1)..( 10): Result.004 file - promoters50/1393181
atttgtaatg

SEQ ID NO: 168160 - DNA, 10 bp, Unknown
  misc_feature (1)..( 10): Result.004 file - promoters50/1393181
gcttttaatt

SEQ ID NO: 168161 - DNA, 10 bp, Unknown
  misc_feature (1)..( 10): Result.004 file - promoters50/1393181
tttgttattg

SEQ ID NO: 168162 - DNA, 10 bp, Unknown
  misc_feature (1)..( 10): Result.004 file - promoters50/1393181
tttggtttac

SEQ ID NO: 168163 - DNA, 11 bp, Unknown
  misc_feature (1)..( 11): Result.004 file - promoters50/1393181
tgttttgtccc

SEQ ID NO: 168164 - DNA, 11 bp, Unknown
  misc_feature (1)..( 11): Result.004 file - promoters50/1393181
atttttgtcgg

SEQ ID NO: 168165 - DNA, 11 bp, Unknown
  misc_feature (1)..( 11): Result.004 file - promoters50/1393181
acttttgttat

SEQ ID NO: 168166 - DNA, 11 bp, Unknown
  misc_feature (1)..( 11): Result.004 file - promoters50/1393181
ttttttggggg

SEQ ID NO: 168167 - DNA, 11 bp, Unknown
  misc_feature (1)..( 11): Result.004 file - promoters50/1393181
attttagtcgg

SEQ ID NO: 168168 - DNA, 12 bp, Unknown
  misc_feature (1)..( 12): Result.004 file - promoters50/1393181
agatttttaaat

SEQ ID NO: 168169 - DNA, 12 bp, Unknown
  misc_feature (1)..( 12): Result.004 file - promoters50/1393181
agattattaaat

SEQ ID NO: 168170 - DNA, 12 bp, Unknown
  misc_feature (1)..( 12): Result.004 file - promoters50/1393181
aaattattaaag

SEQ ID NO: 168171 - DNA, 10 bp, Unknown
  misc_feature (1)..( 10): Result.004 file - promoters50/1393181
attatcaaaa

SEQ ID NO: 168172 - DNA, 12 bp, Unknown
  misc_feature (1)..( 12): Result.004 file - promoters50/1393181
caattatttatc

SEQ ID NO: 168173 - DNA, 13 bp, Unknown
  misc_feature (1)..( 13): Result.004 file - promoters50/1393181
tccacttagtctt

SEQ ID NO: 168174 - DNA, 13 bp, Unknown
  misc_feature (1)..( 13): Result.004 file - promoters50/1393181
atattttagtcgg

SEQ ID NO: 168175 - DNA, 13 bp, Unknown
  misc_feature (1)..( 13): Result.004 file - promoters50/1393181
acatttttgtcgg

SEQ ID NO: 168176 - DNA, 13 bp, Unknown
  misc_feature (1)..( 13): Result.004 file - promoters50/1393181
tcattttactttt

SEQ ID NO: 168177 - DNA, 13 bp, Unknown
  misc_feature (1)..( 13): Result.004 file - promoters50/1393187
tcatcttatttct

SEQ ID NO: 168178 - DNA, 8 bp, Unknown
  misc_feature (1)..( 8): Result.004 file - promoters50/1393187
aataaatc

SEQ ID NO: 168179 - DNA, 8 bp, Unknown
  misc_feature (1)..( 8): Result.004 file - promoters50/1393187
actaaatc

SEQ ID NO: 168180 - DNA, 8 bp, Unknown
  misc_feature (1)..( 8): Result.004 file - promoters50/1393187
aataaata

SEQ ID NO: 168181 - DNA, 7 bp, Unknown
  misc_feature (1)..( 7): Result.004 file - promoters50/1393187
aactaaa

SEQ ID NO: 168182 - DNA, 7 bp, Unknown
  misc_feature (1)..( 7): Result.004 file - promoters50/1393187
aactaag

SEQ ID NO: 168183 - DNA, 7 bp, Unknown
  misc_feature (1)..( 7): Result.004 file - promoters50/1393187
gactaaa

SEQ ID NO: 168184 - DNA, 7 bp, Unknown
  misc_feature (1)..( 7): Result.004 file - promoters50/1393187
ataaaag

SEQ ID NO: 168185 - DNA, 7 bp, Unknown
  misc_feature (1)..( 7): Result.004 file - promoters50/1393187
gtaaaag

SEQ ID NO: 168186 - DNA, 7 bp, Unknown
  misc_feature (1)..( 7): Result.004 file - promoters50/1393187
atataag

SEQ ID NO: 168187 - DNA, 9 bp, Unknown
  misc_feature (1)..( 9): Result.004 file - promoters50/1393187
aaaaaaaga

SEQ ID NO: 168188 - DNA, 9 bp, Unknown
  misc_feature (1)..( 9): Result.004 file - promoters50/1393187
aaaaaagaa

SEQ ID NO: 168189 - DNA, 10 bp, Unknown
  misc_feature (1)..( 10): Result.004 file - promoters50/1393187
aaagaaagaa

SEQ ID NO: 168190 - DNA, 8 bp, Unknown
  misc_feature (1)..( 8): Result.004 file - promoters50/1393187
atttgaat

SEQ ID NO: 168191 - DNA, 8 bp, Unknown
  misc_feature (1)..( 8): Result.004 file - promoters50/1393187
atttaaat

SEQ ID NO: 168192 - DNA, 8 bp, Unknown
  misc_feature (1)..( 8): Result.004 file - promoters50/1393187
atttgaat

SEQ ID NO: 168193 - DNA, 6 bp, Unknown
  misc_feature (1)..( 6): Result.004 file - promoters50/1393187
aaattt

SEQ ID NO: 168194 - DNA, 6 bp, Unknown
  misc_feature (1)..( 6): Result.004 file - promoters50/1393187
aaattt

SEQ ID NO: 168195 - DNA, 6 bp, Unknown
  misc_feature (1)..( 6): Result.004 file - promoters50/1393187
aaattt

SEQ ID NO: 168196 - DNA, 7 bp, Unknown
  misc_feature (1)..( 7): Result.004 file - promoters50/1393187
gactaat

SEQ ID NO: 168197 - DNA, 7 bp, Unknown
  misc_feature (1)..( 7): Result.004 file - promoters50/1393187
gacaaat

SEQ ID NO: 168198 - DNA, 7 bp, Unknown
  misc_feature (1)..( 7): Result.004 file - promoters50/1393226
gactaat

SEQ ID NO: 168199 - DNA, 12 bp, Unknown
  misc_feature (1)..( 12): Result.004 file - promoters50/1393226
tttttcttatat

SEQ ID NO: 168200 - DNA, 12 bp, Unknown
  misc_feature (1)..( 12): Result.004 file - promoters50/1393226
tttctctttata

SEQ ID NO: 168201 - DNA, 12 bp, Unknown
  misc_feature (1)..( 12): Result.004 file - promoters50/1393226
ttcctatttaaa

SEQ ID NO: 168202 - DNA, 12 bp, Unknown
  misc_feature (1)..( 12): Result.004 file - promoters50/1393226
atttactttttt

SEQ ID NO: 168203 - DNA, 12 bp, Unknown
  misc_feature (1)..( 12): Result.004 file - promoters50/1393226
atcctatttaaa

SEQ ID NO: 168204 - DNA, 12 bp, Unknown
  misc_feature (1)..( 12): Result.004 file - promoters50/1393226
ttttaaagcttt

SEQ ID NO: 168205 - DNA, 12 bp, Unknown
  misc_feature (1)..( 12): Result.004 file - promoters50/1393226
cccctatataaa

SEQ ID NO: 168206 - DNA, 16 bp, Unknown
  misc_feature (1)..( 16): Result.004 file - promoters50/1393226
tttttcttatattaga

SEQ ID NO: 168207 - DNA, 16 bp, Unknown
  misc_feature (1)..( 16): Result.004 file - promoters50/1393226
ttctctttatattaag

SEQ ID NO: 168208 - DNA, 16 bp, Unknown
  misc_feature (1)..( 16): Result.004 file - promoters50/1393226
tcctatttaaatttta

SEQ ID NO: 168209 - DNA, 16 bp, Unknown
  misc_feature (1)..( 16): Result.004 file - promoters50/1393226
cttcccctatataaag

SEQ ID NO: 168210 - DNA, 16 bp, Unknown
  misc_feature (1)..( 16): Result.004 file - promoters50/1393226
ttgcctttatcatctc

SEQ ID NO: 168211 - DNA, 16 bp, Unknown
  misc_feature (1)..( 16): Result.004 file - promoters50/1393226
tcctatttaaaccaat

SEQ ID NO: 168212 - DNA, 16 bp, Unknown
  misc_feature (1)..( 16): Result.004 file - promoters50/1393226
tttattttaaagcttt

SEQ ID NO: 168213 - DNA, 16 bp, Unknown
  misc_feature (1)..( 16): Result.004 file - promoters50/1393226
tcaccaatgatgattt

SEQ ID NO: 168214 - DNA, 16 bp, Unknown
  misc_feature (1)..( 16): Result.004 file - promoters50/1393226
taacaaataatgtttt

SEQ ID NO: 168215 - DNA, 16 bp, Unknown
  misc_feature (1)..( 16): Result.004 file - promoters50/1393226
ttgacaattatgtgat

SEQ ID NO: 168216 - DNA, 16 bp, Unknown
  misc_feature (1)..( 16): Result.004 file - promoters50/1393226
gtgaggataatggttt

SEQ ID NO: 168217 - DNA, 16 bp, Unknown
  misc_feature (1)..( 16): Result.004 file - promoters50/1393226
ctcagtacaatattta

SEQ ID NO: 168218 - DNA, 16 bp, Unknown
  misc_feature (1)..( 16): Result.004 file - promoters50/1393226
ttgtcaatttttcgtc

SEQ ID NO: 168219 - DNA, 11 bp, Unknown
  misc_feature (1)..( 11): Result.004 file - promoters50/1393226
tttgttaatgt

SEQ ID NO: 168220 - DNA, 11 bp, Unknown
  misc_feature (1)..( 11): Result.004 file - promoters50/1393226
tttgtttatga

SEQ ID NO: 168221 - DNA, 11 bp, Unknown
  misc_feature (1)..( 11): Result.004 file - promoters50/1393226
cttgttaattg

SEQ ID NO: 168222 - DNA, 11 bp, Unknown
  misc_feature (1)..( 11): Result.004 file - promoters50/1393226
gttgtatatta

SEQ ID NO: 168223 - DNA, 11 bp, Unknown
  misc_feature (1)..( 11): Result.004 file - promoters50/1393226
aggttttatat

SEQ ID NO: 168224 - DNA, 11 bp, Unknown
  misc_feature (1)..( 11): Result.004 file - promoters50/1393284
caattttataa

SEQ ID NO: 168225 - DNA, 13 bp, Unknown
  misc_feature (1)..( 13): Result.004 file - promoters50/1393284
accctactttttt

SEQ ID NO: 168226 - DNA, 13 bp, Unknown
  misc_feature (1)..( 13): Result.004 file - promoters50/1393284
aatttactttttt

SEQ ID NO: 168227 - DNA, 13 bp, Unknown
  misc_feature (1)..( 13): Result.004 file - promoters50/1393284
gatttaattttgt

SEQ ID NO: 168228 - DNA, 13 bp, Unknown
  misc_feature (1)..( 13): Result.004 file - promoters50/1393284
gatataagaaact

SEQ ID NO: 168229 - DNA, 13 bp, Unknown
  misc_feature (1)..( 13): Result.004 file - promoters50/1393284
ctggacattgtgt

SEQ ID NO: 168230 - DNA, 13 bp, Unknown
  misc_feature (1)..( 13): Result.004 file - promoters50/1393288
tcttttatttatt

SEQ ID NO: 168231 - DNA, 8 bp, Unknown
  misc_feature (1)..( 8): Result.004 file - promoters50/1393288
caaaattg

SEQ ID NO: 168232 - DNA, 8 bp, Unknown
  misc_feature (1)..( 8): Result.004 file - promoters50/1393288
aaaaatta

SEQ ID NO: 168233 - DNA, 8 bp, Unknown
  misc_feature (1)..( 8): Result.004 file - promoters50/1393288
ctaaattg

SEQ ID NO: 168234 - DNA, 8 bp, Unknown
  misc_feature (1)..( 8): Result.004 file - promoters50/1393288
caaaatta

SEQ ID NO: 168235 - DNA, 10 bp, Unknown
  misc_feature (1)..( 10): Result.004 file - promoters50/1393288
ttttgaaatc

SEQ ID NO: 168236 - DNA, 10 bp, Unknown
  misc_feature (1)..( 10): Result.004 file - promoters50/1393288
tcgcgaaatc

SEQ ID NO: 168237 - DNA, 10 bp, Unknown
  misc_feature (1)..( 10): Result.004 file - promoters50/1393288
ttttcaaatt

SEQ ID NO: 168238 - DNA, 10 bp, Unknown
  misc_feature (1)..( 10): Result.004 file - promoters50/1393288
acctcaaatg

SEQ ID NO: 168239 - DNA, 8 bp, Unknown
  misc_feature (1)..( 8): Result.004 file - promoters50/1393288
ttgtttga

SEQ ID NO: 168240 - DNA, 8 bp, Unknown
  misc_feature (1)..( 8): Result.004 file - promoters50/1393288
ttgtttta

SEQ ID NO: 168241 - DNA, 8 bp, Unknown
  misc_feature (1)..( 8): Result.004 file - promoters50/1393288
gtgtttga

SEQ ID NO: 168242 - DNA, 8 bp, Unknown
  misc_feature (1)..( 8): Result.004 file - promoters50/1393288
ctgtgtga

SEQ ID NO: 168243 - DNA, 16 bp, Unknown
  misc_feature (1)..( 16): Result.004 file - promoters50/1393288
aaaattttggtaattt

SEQ ID NO: 168244 - DNA, 16 bp, Unknown
  misc_feature (1)..( 16): Result.004 file - promoters50/1393288
tcaattttgctaaaaa

SEQ ID NO: 168245 - DNA, 16 bp, Unknown
  misc_feature (1)..( 16): Result.004 file - promoters50/1393288
ctcaatttggtaattt

SEQ ID NO: 168246 - DNA, 16 bp, Unknown
  misc_feature (1)..( 16): Result.004 file - promoters50/1393326
atcatttttttctaga

SEQ ID NO: 168247 - DNA, 13 bp, Unknown
  misc_feature (1)..( 13): Result.004 file - promoters50/1393326
taattttcatcaa

SEQ ID NO: 168248 - DNA, 13 bp, Unknown
  misc_feature (1)..( 13): Result.004 file - promoters50/1393326
caattttagttat

SEQ ID NO: 168249 - DNA, 13 bp, Unknown
  misc_feature (1)..( 13): Result.004 file - promoters50/1393326
ttattttcttttt

SEQ ID NO: 168250 - DNA, 13 bp, Unknown
  misc_feature (1)..( 13): Result.004 file - promoters50/1393326
taatattcgaatt

SEQ ID NO: 168251 - DNA, 13 bp, Unknown
  misc_feature (1)..( 13): Result.004 file - promoters50/1393326
taattttaagaag

SEQ ID NO: 168252 - DNA, 13 bp, Unknown
  misc_feature (1)..( 13): Result.004 file - promoters50/1393326
taatttttggcgg

SEQ ID NO: 168253 - DNA, 13 bp, Unknown
  misc_feature (1)..( 13): Result.004 file - promoters50/1393326
tcgtttttttttt

SEQ ID NO: 168254 - DNA, 9 bp, Unknown
  misc_feature (1)..( 9): Result.004 file - promoters50/1393326
cttttaata

SEQ ID NO: 168255 - DNA, 9 bp, Unknown
  misc_feature (1)..( 9): Result.004 file - promoters50/1393326
gttttaatc

SEQ ID NO: 168256 - DNA, 9 bp, Unknown
  misc_feature (1)..( 9): Result.004 file - promoters50/1393326
tttttaatt

SEQ ID NO: 168257 - DNA, 9 bp, Unknown
  misc_feature (1)..( 9): Result.004 file - promoters50/1393326
ctttttata

SEQ ID NO: 168258 - DNA, 9 bp, Unknown
  misc_feature (1)..( 9): Result.004 file - promoters50/1393326
attttaaga

SEQ ID NO: 168259 - DNA, 10 bp, Unknown
  misc_feature (1)..( 10): Result.004 file - promoters50/1393326
atttctaata

SEQ ID NO: 168260 - DNA, 9 bp, Unknown
  misc_feature (1)..( 9): Result.004 file - promoters50/1393326
agaacaaat

SEQ ID NO: 168261 - DNA, 9 bp, Unknown
  misc_feature (1)..( 9): Result.004 file - promoters50/1393326
ttcacaaat

SEQ ID NO: 168262 - DNA, 9 bp, Unknown
  misc_feature (1)..( 9): Result.004 file - promoters50/1393326
aggaaaaaa

SEQ ID NO: 168263 - DNA, 9 bp, Unknown
  misc_feature (1)..( 9): Result.004 file - promoters50/1393326
tcgacaaat

SEQ ID NO: 168264 - DNA, 9 bp, Unknown
  misc_feature (1)..( 9): Result.004 file - promoters50/1393326
gagaaaaag

SEQ ID NO: 168265 - DNA, 9 bp, Unknown
  misc_feature (1)..( 9): Result.004 file - promoters50/1393326
gagagaaag

SEQ ID NO: 168266 - DNA, 9 bp, Unknown
  misc_feature (1)..( 9): Result.004 file - promoters50/1393342
ttaagaaag

SEQ ID NO: 168267 - DNA, 12 bp, Unknown
  misc_feature (1)..( 12): Result.004 file - promoters50/1393342
ctgataaatatg

SEQ ID NO: 168268 - DNA, 12 bp, Unknown
  misc_feature (1)..( 12): Result.004 file - promoters50/1393342
attatacatatg

SEQ ID NO: 168269 - DNA, 12 bp, Unknown
  misc_feature (1)..( 12): Result.004 file - promoters50/1393342
attaaacataac

SEQ ID NO: 168270 - DNA, 13 bp, Unknown
  misc_feature (1)..( 13): Result.004 file - promoters50/1393342
ttatattaaacag

SEQ ID NO: 168271 - DNA, 13 bp, Unknown
  misc_feature (1)..( 13): Result.004 file - promoters50/1393342
tgatatgaaaata

SEQ ID NO: 168272 - DNA, 13 bp, Unknown
  misc_feature (1)..( 13): Result.004 file - promoters50/1393342
ttatgttattgtt

SEQ ID NO: 168273 - DNA, 13 bp, Unknown
  misc_feature (1)..( 13): Result.004 file - promoters50/1393342
attttttaatcag

SEQ ID NO: 168274 - DNA, 10 bp, Unknown
  misc_feature (1)..( 10): Result.004 file - promoters50/1393342
atatctttca

SEQ ID NO: 168275 - DNA, 10 bp, Unknown
  misc_feature (1)..( 10): Result.004 file - promoters50/1393342
atatcattcg

SEQ ID NO: 168276 - DNA, 10 bp, Unknown
  misc_feature (1)..( 10): Result.004 file - promoters50/1393342
ggttctgtca

SEQ ID NO: 168277 - DNA, 7 bp, Unknown
  misc_feature (1)..( 7): Result.004 file - promoters50/1393342
tttattc

SEQ ID NO: 168278 - DNA, 7 bp, Unknown
  misc_feature (1)..( 7): Result.004 file - promoters50/1393342
ttttttc

SEQ ID NO: 168279 - DNA, 7 bp, Unknown
  misc_feature (1)..( 7): Result.004 file - promoters50/1393342
atttttc

SEQ ID NO: 168280 - DNA, 16 bp, Unknown
  misc_feature (1)..( 16): Result.004 file - promoters50/1393342
ccactagataataatt

SEQ ID NO: 168281 - DNA, 16 bp, Unknown
  misc_feature (1)..( 16): Result.004 file - promoters50/1393342
aaacgagataatgatt

SEQ ID NO: 168282 - DNA, 16 bp, Unknown
  misc_feature (1)..( 16): Result.004 file - promoters50/1393342
aaacgtgatattcgcg

SEQ ID NO: 168283 - DNA, 7 bp, Unknown
  misc_feature (1)..( 7): Result.004 file - promoters50/1393342
aaaaaaa

SEQ ID NO: 168284 - DNA, 7 bp, Unknown
  misc_feature (1)..( 7): Result.004 file - promoters50/1393342
aaacaaa

SEQ ID NO: 168285 - DNA, 7 bp, Unknown
  misc_feature (1)..( 7): Result.004 file - promoters50/1393342
acacaaa

SEQ ID NO: 168286 - DNA, 7 bp, Unknown
  misc_feature (1)..( 7): Result.004 file - promoters50/1393342
tttctct

SEQ ID NO: 168287 - DNA, 7 bp, Unknown
  misc_feature (1)..( 7): Result.004 file - promoters50/1393342
tttttct

SEQ ID NO: 168288 - DNA, 7 bp, Unknown
  misc_feature (1)..( 7): Result.004 file - promoters50/1393367
tttttta

SEQ ID NO: 168289 - DNA, 8 bp, Unknown
  misc_feature (1)..( 8): Result.004 file - promoters50/1393367
gatagaca

SEQ ID NO: 168290 - DNA, 8 bp, Unknown
  misc_feature (1)..( 8): Result.004 file - promoters50/1393367
aatataca

SEQ ID NO: 168291 - DNA, 8 bp, Unknown
  misc_feature (1)..( 8): Result.004 file - promoters50/1393367
aatataat

SEQ ID NO: 168292 - DNA, 7 bp, Unknown
  misc_feature (1)..( 7): Result.004 file - promoters50/1393367
ttctaaa

SEQ ID NO: 168293 - DNA, 7 bp, Unknown
  misc_feature (1)..( 7): Result.004 file - promoters50/1393367
ttcaaaa

SEQ ID NO: 168294 - DNA, 7 bp, Unknown
  misc_feature (1)..( 7): Result.004 file - promoters50/1393367
ttcaaac

SEQ ID NO: 168295 - DNA, 12 bp, Unknown
  misc_feature (1)..( 12): Result.004 file - promoters50/1393367
attgtttgcttt

SEQ ID NO: 168296 - DNA, 12 bp, Unknown
  misc_feature (1)..( 12): Result.004 file - promoters50/1393367
attatttgtttt

SEQ ID NO: 168297 - DNA, 12 bp, Unknown
  misc_feature (1)..( 12): Result.004 file - promoters50/1393367
caccgttgtttt

SEQ ID NO: 168298 - DNA, 7 bp, Unknown
  misc_feature (1)..( 7): Result.004 file - promoters50/1393367
tttcaat

SEQ ID NO: 168299 - DNA, 7 bp, Unknown
  misc_feature (1)..( 7): Result.004 file - promoters50/1393367
tttcaaa

SEQ ID NO: 168300 - DNA, 7 bp, Unknown
  misc_feature (1)..( 7): Result.004 file - promoters50/1393367
cttcaaa

SEQ ID NO: 168301 - DNA, 7 bp, Unknown
  misc_feature (1)..( 7): Result.004 file - promoters50/1393367
aaagaaa

SEQ ID NO: 168302 - DNA, 7 bp, Unknown
  misc_feature (1)..( 7): Result.004 file - promoters50/1393367
aaagaag

SEQ ID NO: 168303 - DNA, 7 bp, Unknown
  misc_feature (1)..( 7): Result.004 file - promoters50/1393371
caagaag

SEQ ID NO: 168304 - DNA, 12 bp, Unknown
  misc_feature (1)..( 12): Result.004 file - promoters50/1393371
tcactcacatca

SEQ ID NO: 168305 - DNA, 12 bp, Unknown
  misc_feature (1)..( 12): Result.004 file - promoters50/1393371
ctgatcaaatca

SEQ ID NO: 168306 - DNA, 12 bp, Unknown
  misc_feature (1)..( 12): Result.004 file - promoters50/1393383
tcaatcacatgc

SEQ ID NO: 168307 - DNA, 12 bp, Unknown
  misc_feature (1)..( 12): Result.004 file - promoters50/1393383
agaaaataaaaa

SEQ ID NO: 168308 - DNA, 12 bp, Unknown
  misc_feature (1)..( 12): Result.004 file - promoters50/1393383
agaaaataaaaa

SEQ ID NO: 168309 - DNA, 12 bp, Unknown
  misc_feature (1)..( 12): Result.004 file - promoters50/1393383
tgtatataaaaa

SEQ ID NO: 168310 - DNA, 12 bp, Unknown
  misc_feature (1)..( 12): Result.004 file - promoters50/1393383
cgcaaacaagac

SEQ ID NO: 168311 - DNA, 12 bp, Unknown
  misc_feature (1)..( 12): Result.004 file - promoters50/1393383
atgatacaaaac

SEQ ID NO: 168312 - DNA, 12 bp, Unknown
  misc_feature (1)..( 12): Result.004 file - promoters50/1393478
gtaaaacgagaa

SEQ ID NO: 168313 - DNA, 15 bp, Unknown
  misc_feature (1)..( 15): Result.004 file - promoters50/1393478
caattggttaatata

SEQ ID NO: 168314 - DNA, 15 bp, Unknown
  misc_feature (1)..( 15): Result.004 file - promoters50/1393478
gatttagttgataat

SEQ ID NO: 168315 - DNA, 15 bp, Unknown
  misc_feature (1)..( 15): Result.004 file - promoters50/1393478
tccttttataagata

SEQ ID NO: 168316 - DNA, 15 bp, Unknown
  misc_feature (1)..( 15): Result.004 file - promoters50/1393478
catagtattaataat

SEQ ID NO: 168317 - DNA, 15 bp, Unknown
  misc_feature (1)..( 15): Result.004 file - promoters50/1393478
gtgattgttaacagg

SEQ ID NO: 168318 - DNA, 15 bp, Unknown
  misc_feature (1)..( 15): Result.004 file - promoters50/1393478
gtgtttgttgacaga

SEQ ID NO: 168319 - DNA, 12 bp, Unknown
  misc_feature (1)..( 12): Result.004 file - promoters50/1393478
cctcataacaac

SEQ ID NO: 168320 - DNA, 12 bp, Unknown
  misc_feature (1)..( 12): Result.004 file - promoters50/1393478
agaagtaataac

SEQ ID NO: 168321 - DNA, 12 bp, Unknown
  misc_feature (1)..( 12): Result.004 file - promoters50/1393478
gatgttaataat

SEQ ID NO: 168322 - DNA, 12 bp, Unknown
  misc_feature (1)..( 12): Result.004 file - promoters50/1393478
tcttgtaaaaat

SEQ ID NO: 168323 - DNA, 12 bp, Unknown
  misc_feature (1)..( 12): Result.004 file - promoters50/1393478
tcttataaaaaa

SEQ ID NO: 168324 - DNA, 12 bp, Unknown
  misc_feature (1)..( 12): Result.004 file - promoters50/1393492
tcttttaacttc

SEQ ID NO: 168325 - DNA, 13 bp, Unknown
  misc_feature (1)..( 13): Result.004 file - promoters50/1393492
ggtgtataaattg

SEQ ID NO: 168326 - DNA, 13 bp, Unknown
  misc_feature (1)..( 13): Result.004 file - promoters50/1393492
ctcctataaattg

SEQ ID NO: 168327 - DNA, 13 bp, Unknown
  misc_feature (1)..( 13): Result.004 file - promoters50/1393492
ttagtataaataa

SEQ ID NO: 168328 - DNA, 13 bp, Unknown
  misc_feature (1)..( 13): Result.004 file - promoters50/1393492
ctcttatatattc

SEQ ID NO: 168329 - DNA, 13 bp, Unknown
  misc_feature (1)..( 13): Result.004 file - promoters50/1393492
cttctatatatat

SEQ ID NO: 168330 - DNA, 13 bp, Unknown
  misc_feature (1)..( 13): Result.004 file - promoters50/1393492
tgtctatatataa

SEQ ID NO: 168331 - DNA, 8 bp, Unknown
  misc_feature (1)..( 8): Result.004 file - promoters50/1393492
cattgttt

SEQ ID NO: 168332 - DNA, 8 bp, Unknown
  misc_feature (1)..( 8): Result.004 file - promoters50/1393492
ttttgttt

SEQ ID NO: 168333 - DNA, 8 bp, Unknown
  misc_feature (1)..( 8): Result.004 file - promoters50/1393492
catttttt

SEQ ID NO: 168334 - DNA, 8 bp, Unknown
  misc_feature (1)..( 8): Result.004 file - promoters50/1393492
tatttttt

SEQ ID NO: 168335 - DNA, 9 bp, Unknown
  misc_feature (1)..( 9): Result.004 file - promoters50/1393492
catttattt

SEQ ID NO: 168336 - DNA, 9 bp, Unknown
  misc_feature (1)..( 9): Result.004 file - promoters50/1393498
tttttcttg

SEQ ID NO: 168337 - DNA, 13 bp, Unknown
  misc_feature (1)..( 13): Result.004 file - promoters50/1393498
ggaatattaaatg

SEQ ID NO: 168338 - DNA, 13 bp, Unknown
  misc_feature (1)..( 13): Result.004 file - promoters50/1393498
tgcatattattat

SEQ ID NO: 168339 - DNA, 13 bp, Unknown
  misc_feature (1)..( 13): Result.004 file - promoters50/1393498
gatttattaaatg

SEQ ID NO: 168340 - DNA, 13 bp, Unknown
  misc_feature (1)..( 13): Result.004 file - promoters50/1393498
ccaattttaagaa

SEQ ID NO: 168341 - DNA, 13 bp, Unknown
  misc_feature (1)..( 13): Result.004 file - promoters50/1393498
tcaaatttaagtc

SEQ ID NO: 168342 - DNA, 13 bp, Unknown
  misc_feature (1)..( 13): Result.004 file - promoters50/1393498
ccaaatttggtga

SEQ ID NO: 168343 - DNA, 10 bp, Unknown
  misc_feature (1)..( 10): Result.004 file - promoters50/1393498
aaaattgtgt

SEQ ID NO: 168344 - DNA, 10 bp, Unknown
  misc_feature (1)..( 10): Result.004 file - promoters50/1393498
gaaactgtag

SEQ ID NO: 168345 - DNA, 10 bp, Unknown
  misc_feature (1)..( 10): Result.004 file - promoters50/1393498
taaatatttg

SEQ ID NO: 168346 - DNA, 10 bp, Unknown
  misc_feature (1)..( 10): Result.004 file - promoters50/1393498
gagattgtga

SEQ ID NO: 168347 - DNA, 10 bp, Unknown
  misc_feature (1)..( 10): Result.004 file - promoters50/1393498
aaaaatgtct

SEQ ID NO: 168348 - DNA, 10 bp, Unknown
  misc_feature (1)..( 10): Result.004 file - promoters50/1393498
taaatataaa

SEQ ID NO: 168349 - DNA, 10 bp, Unknown
  misc_feature (1)..( 10): Result.004 file - promoters50/1393498
ataatagaaa

SEQ ID NO: 168350 - DNA, 12 bp, Unknown
  misc_feature (1)..( 12): Result.004 file - promoters50/1393498
atgttgttcata

SEQ ID NO: 168351 - DNA, 12 bp, Unknown
  misc_feature (1)..( 12): Result.005 file - promoters50/1393498
atgtggttaatt

SEQ ID NO: 168352 - DNA, 12 bp, Unknown
  misc_feature (1)..( 12): Result.005 file - promoters50/1393498
atgttgtaagta

SEQ ID NO: 168353 - DNA, 12 bp, Unknown
  misc_feature (1)..( 12): Result.005 file - promoters50/1393498
atgttttaatat

SEQ ID NO: 168354 - DNA, 12 bp, Unknown
  misc_feature (1)..( 12): Result.005 file - promoters50/1393498
tttttttaatac

SEQ ID NO: 168355 - DNA, 12 bp, Unknown
  misc_feature (1)..( 12): Result.005 file - promoters50/1393498
ccattttattaa

SEQ ID NO: 168356 - DNA, 10 bp, Unknown
  misc_feature (1)..( 10): Result.005 file - promoters50/1393576
tatgaagtta

SEQ ID NO: 168357 - DNA, 10 bp, Unknown
  misc_feature (1)..( 10): Result.005 file - promoters50/1393576
aatgatgttg

SEQ ID NO: 168358 - DNA, 10 bp, Unknown
  misc_feature (1)..( 10): Result.005 file - promoters50/1393576
aatgattttg

SEQ ID NO: 168359 - DNA, 11 bp, Unknown
  misc_feature (1)..( 11): Result.005 file - promoters50/1393576
ccaaataaatg

SEQ ID NO: 168360 - DNA, 11 bp, Unknown
  misc_feature (1)..( 11): Result.005 file - promoters50/1393576
ccaaataaaaa

SEQ ID NO: 168361 - DNA, 11 bp, Unknown
  misc_feature (1)..( 11): Result.005 file - promoters50/1393576
ttaaaaaaatg

SEQ ID NO: 168362 - DNA, 10 bp, Unknown
  misc_feature (1)..( 10): Result.005 file - promoters50/1393576
atacttaaat

SEQ ID NO: 168363 - DNA, 10 bp, Unknown
  misc_feature (1)..( 10): Result.005 file - promoters50/1393576
aaacttaaat

SEQ ID NO: 168364 - DNA, 10 bp, Unknown
  misc_feature (1)..( 10): Result.005 file - promoters50/1393576
aaaattagat

SEQ ID NO: 168365 - DNA, 13 bp, Unknown
  misc_feature (1)..( 13): Result.005 file - promoters50/1393576
tacatcaataaaa

SEQ ID NO: 168366 - DNA, 13 bp, Unknown
  misc_feature (1)..( 13): Result.005 file - promoters50/1393576
tacatcaattaaa

SEQ ID NO: 168367 - DNA, 13 bp, Unknown
  misc_feature (1)..( 13): Result.005 file - promoters50/1393576
gacagcaatagct

SEQ ID NO: 168368 - DNA, 8 bp, Unknown
  misc_feature (1)..( 8): Result.005 file - promoters50/1393576
acaaaacg

SEQ ID NO: 168369 - DNA, 8 bp, Unknown
  misc_feature (1)..( 8): Result.005 file - promoters50/1393576
acaaaaac

SEQ ID NO: 168370 - DNA, 8 bp, Unknown
  misc_feature (1)..( 8): Result.005 file - promoters50/1393576
gcaaaaaa

SEQ ID NO: 168371 - DNA, 8 bp, Unknown
  misc_feature (1)..( 8): Result.005 file - promoters50/1393576
gatatgaa

SEQ ID NO: 168372 - DNA, 8 bp, Unknown
  misc_feature (1)..( 8): Result.005 file - promoters50/1393576
gatatgtc

SEQ ID NO: 168373 - DNA, 8 bp, Unknown
  misc_feature (1)..( 8): Result.005 file - promoters50/1393576
gatgtgtc

SEQ ID NO: 168374 - DNA, 8 bp, Unknown
  misc_feature (1)..( 8): Result.005 file - promoters50/1393576
ttctaaaa

SEQ ID NO: 168375 - DNA, 8 bp, Unknown
  misc_feature (1)..( 8): Result.005 file - promoters50/1393576
ttcaaaat

SEQ ID NO: 168376 - DNA, 8 bp, Unknown
  misc_feature (1)..( 8): Result.005 file - promoters50/1393576
ctcacaat

SEQ ID NO: 168377 - DNA, 8 bp, Unknown
  misc_feature (1)..( 8): Result.005 file - promoters50/1393576
ctaaaatg

SEQ ID NO: 168378 - DNA, 8 bp, Unknown
  misc_feature (1)..( 8): Result.005 file - promoters50/1393576
aaaaaatg

SEQ ID NO: 168379 - DNA, 8 bp, Unknown
  misc_feature (1)..( 8): Result.005 file - promoters50/1393576
aaaaaata

SEQ ID NO: 168380 - DNA, 9 bp, Unknown
  misc_feature (1)..( 9): Result.005 file - promoters50/1393576
tttcattac

SEQ ID NO: 168381 - DNA, 9 bp, Unknown
  misc_feature (1)..( 9): Result.005 file - promoters50/1393576
tttcattac

SEQ ID NO: 168382 - DNA, 9 bp, Unknown
  misc_feature (1)..( 9): Result.005 file - promoters50/1393576
tttaatttc

SEQ ID NO: 168383 - DNA, 10 bp, Unknown
  misc_feature (1)..( 10): Result.005 file - promoters50/1393576
aaataaatcc

SEQ ID NO: 168384 - DNA, 10 bp, Unknown
  misc_feature (1)..( 10): Result.005 file - promoters50/1393576
acttaaatcc

SEQ ID NO: 168385 - DNA, 10 bp, Unknown
  misc_feature (1)..( 10): Result.005 file - promoters50/1393576
aaataaataa

SEQ ID NO: 168386 - DNA, 12 bp, Unknown
  misc_feature (1)..( 12): Result.005 file - promoters50/1393596
ttttaaaatttt

SEQ ID NO: 168387 - DNA, 12 bp, Unknown
  misc_feature (1)..( 12): Result.005 file - promoters50/1393596
ttataaaataca

SEQ ID NO: 168388 - DNA, 12 bp, Unknown
  misc_feature (1)..( 12): Result.005 file - promoters50/1393596
tttcaaaatcac

SEQ ID NO: 168389 - DNA, 12 bp, Unknown
  misc_feature (1)..( 12): Result.005 file - promoters50/1393596
aaacaaaacttt

SEQ ID NO: 168390 - DNA, 12 bp, Unknown
  misc_feature (1)..( 12): Result.005 file - promoters50/1393596
atatataatatt

SEQ ID NO: 168391 - DNA, 12 bp, Unknown
  misc_feature (1)..( 12): Result.005 file - promoters50/1393596
tagcaaaataac

SEQ ID NO: 168392 - DNA, 14 bp, Unknown
  misc_feature (1)..( 14): Result.005 file - promoters50/1393596
actttaaattacga

SEQ ID NO: 168393 - DNA, 14 bp, Unknown
  misc_feature (1)..( 14): Result.005 file - promoters50/1393596
actgtaaattacgt

SEQ ID NO: 168394 - DNA, 14 bp, Unknown
  misc_feature (1)..( 14): Result.005 file - promoters50/1393596
attttaaaaaaaga

SEQ ID NO: 168395 - DNA, 14 bp, Unknown
  misc_feature (1)..( 14): Result.005 file - promoters50/1393596
agtttagattcttc

SEQ ID NO: 168396 - DNA, 14 bp, Unknown
  misc_feature (1)..( 14): Result.005 file - promoters50/1393596
cgattagaaacaga

SEQ ID NO: 168397 - DNA, 14 bp, Unknown
  misc_feature (1)..( 14): Result.005 file - promoters50/1393596
tgataagagtcttg

SEQ ID NO: 168398 - DNA, 9 bp, Unknown
  misc_feature (1)..( 9): Result.005 file - promoters50/1393599
tactaatta

SEQ ID NO: 168399 - DNA, 9 bp, Unknown
  misc_feature (1)..( 9): Result.005 file - promoters50/1393599
taccaatat

SEQ ID NO: 168400 - DNA, 9 bp, Unknown
  misc_feature (1)..( 9): Result.005 file - promoters50/1393599
aaccaatat

SEQ ID NO: 168401 - DNA, 8 bp, Unknown
  misc_feature (1)..( 8): Result.005 file - promoters50/1393599
actgcaca

SEQ ID NO: 168402 - DNA, 8 bp, Unknown
  misc_feature (1)..( 8): Result.005 file - promoters50/1393599
tctgtaca

SEQ ID NO: 168403 - DNA, 8 bp, Unknown
  misc_feature (1)..( 8): Result.005 file - promoters50/1393599
actggaca

SEQ ID NO: 168404 - DNA, 6 bp, Unknown
  misc_feature (1)..( 6): Result.005 file - promoters50/1393599
aaaaaa

SEQ ID NO: 168405 - DNA, 6 bp, Unknown
  misc_feature (1)..( 6): Result.005 file - promoters50/1393599
aaaaaa

SEQ ID NO: 168406 - DNA, 7 bp, Unknown
  misc_feature (1)..( 7): Result.005 file - promoters50/1393599
aaacaaa

SEQ ID NO: 168407 - DNA, 10 bp, Unknown
  misc_feature (1)..( 10): Result.005 file - promoters50/1393599
gcctatagat

SEQ ID NO: 168408 - DNA, 10 bp, Unknown
  misc_feature (1)..( 10): Result.005 file - promoters50/1393599
tggaatagat

SEQ ID NO: 168409 - DNA, 10 bp, Unknown
  misc_feature (1)..( 10): Result.005 file - promoters50/1393599
tggaaaagaa

SEQ ID NO: 168410 - DNA, 11 bp, Unknown
  misc_feature (1)..( 11): Result.005 file - promoters50/1393599
agataaacaaa

SEQ ID NO: 168411 - DNA, 11 bp, Unknown
  misc_feature (1)..( 11): Result.005 file - promoters50/1393599
cttaaaagaaa

SEQ ID NO: 168412 - DNA, 11 bp, Unknown
  misc_feature (1)..( 11): Result.005 file - promoters50/1393599
agaaaaataaa

SEQ ID NO: 168413 - DNA, 13 bp, Unknown
  misc_feature (1)..( 13): Result.005 file - promoters50/1393599
caaccaaacccac

SEQ ID NO: 168414 - DNA, 13 bp, Unknown
  misc_feature (1)..( 13): Result.005 file - promoters50/1393599
caacaaaaaccac

SEQ ID NO: 168415 - DNA, 13 bp, Unknown
  misc_feature (1)..( 13): Result.005 file - promoters50/1393599
gatccaaccccaa

SEQ ID NO: 168416 - DNA, 7 bp, Unknown
  misc_feature (1)..( 7): Result.005 file - promoters50/1393620
caaatta

SEQ ID NO: 168417 - DNA, 7 bp, Unknown
  misc_feature (1)..( 7): Result.005 file - promoters50/1393620
caaattt

SEQ ID NO: 168418 - DNA, 7 bp, Unknown
  misc_feature (1)..( 7): Result.005 file - promoters50/1393620
aaaatta

SEQ ID NO: 168419 - DNA, 11 bp, Unknown
  misc_feature (1)..( 11): Result.005 file - promoters50/1393620
gagttgcggtc

SEQ ID NO: 168420 - DNA, 11 bp, Unknown
  misc_feature (1)..( 11): Result.005 file - promoters50/1393620
gaggtgctgcg

SEQ ID NO: 168421 - DNA, 10 bp, Unknown
  misc_feature (1)..( 10): Result.005 file - promoters50/1393620
agtggcggtc

SEQ ID NO: 168422 - DNA, 13 bp, Unknown
  misc_feature (1)..( 13): Result.005 file - promoters50/1393642
atcttttgtagac

SEQ ID NO: 168423 - DNA, 13 bp, Unknown
  misc_feature (1)..( 13): Result.005 file - promoters50/1393642
atcttttgtaact

SEQ ID NO: 168424 - DNA, 13 bp, Unknown
  misc_feature (1)..( 13): Result.005 file - promoters50/1393642
cttggttggaact

SEQ ID NO: 168425 - DNA, 8 bp, Unknown
  misc_feature (1)..( 8): Result.005 file - promoters50/1393651
aaatcaaa

SEQ ID NO: 168426 - DNA, 8 bp, Unknown
  misc_feature (1)..( 8): Result.005 file - promoters50/1393651
caataaaa

SEQ ID NO: 168427 - DNA, 8 bp, Unknown
  misc_feature (1)..( 8): Result.005 file - promoters50/1393651
aaaccaaa

SEQ ID NO: 168428 - DNA, 9 bp, Unknown
  misc_feature (1)..( 9): Result.005 file - promoters50/1393665
ttataaaca

SEQ ID NO: 168429 - DNA, 9 bp, Unknown
  misc_feature (1)..( 9): Result.005 file - promoters50/1393665
ttagaaatg

SEQ ID NO: 168430 - DNA, 9 bp, Unknown
  misc_feature (1)..( 9): Result.005 file - promoters50/1393665
tgagagatg

SEQ ID NO: 168431 - DNA, 10 bp, Unknown
  misc_feature (1)..( 10): Result.005 file - promoters50/1393665
accaaatgaa

SEQ ID NO: 168432 - DNA, 10 bp, Unknown
  misc_feature (1)..( 10): Result.005 file - promoters50/1393665
aagaaatgaa

SEQ ID NO: 168433 - DNA, 10 bp, Unknown
  misc_feature (1)..( 10): Result.005 file - promoters50/1393665
accaattgat

SEQ ID NO: 168434 - DNA, 9 bp, Unknown
  misc_feature (1)..( 9): Result.005 file - promoters50/1393665
aattcgaaa

SEQ ID NO: 168435 - DNA, 9 bp, Unknown
  misc_feature (1)..( 9): Result.005 file - promoters50/1393665
aattcgacg

SEQ ID NO: 168436 - DNA, 9 bp, Unknown
  misc_feature (1)..( 9): Result.005 file - promoters50/1393665
acttcgacg

SEQ ID NO: 168437 - DNA, 9 bp, Unknown
  misc_feature (1)..( 9): Result.005 file - promoters50/1393677
tttttattg

SEQ ID NO: 168438 - DNA, 9 bp, Unknown
  misc_feature (1)..( 9): Result.005 file - promoters50/1393677
gatttgttg

SEQ ID NO: 168439 - DNA, 10 bp, Unknown
  misc_feature (1)..( 10): Result.005 file - promoters50/1393677
ttttctattc

SEQ ID NO: 168440 - DNA, 12 bp, Unknown
  misc_feature (1)..( 12): Result.005 file - promoters50/1393677
gaaacacaaata

SEQ ID NO: 168441 - DNA, 12 bp, Unknown
  misc_feature (1)..( 12): Result.005 file - promoters50/1393677
gaaacagaaata

SEQ ID NO: 168442 - DNA, 12 bp, Unknown
  misc_feature (1)..( 12): Result.005 file - promoters50/1393677
taaaaagtttaa

SEQ ID NO: 168443 - DNA, 7 bp, Unknown
  misc_feature (1)..( 7): Result.005 file - promoters50/1393677
aagaaaa

SEQ ID NO: 168444 - DNA, 7 bp, Unknown
  misc_feature (1)..( 7): Result.005 file - promoters50/1393677
cagaaaa

SEQ ID NO: 168445 - DNA, 7 bp, Unknown
  misc_feature (1)..( 7): Result.005 file - promoters50/1393677
aagaaaa

SEQ ID NO: 168446 - DNA, 9 bp, Unknown
  misc_feature (1)..( 9): Result.005 file - promoters50/1393677
caattaaaa

SEQ ID NO: 168447 - DNA, 9 bp, Unknown
  misc_feature (1)..( 9): Result.005 file - promoters50/1393677
taataaaaa

SEQ ID NO: 168448 - DNA, 9 bp, Unknown
  misc_feature (1)..( 9): Result.005 file - promoters50/1393677
aaatagttt

SEQ ID NO: 168449 - DNA, 13 bp, Unknown
  misc_feature (1)..( 13): Result.005 file - promoters50/1393684
atatttttagtaa

SEQ ID NO: 168450 - DNA, 13 bp, Unknown
  misc_feature (1)..( 13): Result.005 file - promoters50/1393684
ataatttgagtta

SEQ ID NO: 168451 - DNA, 13 bp, Unknown
  misc_feature (1)..( 13): Result.005 file - promoters50/1393684
gcaattttagcct

SEQ ID NO: 168452 - DNA, 13 bp, Unknown
  misc_feature (1)..( 13): Result.005 file - promoters50/1393684
aatttcttactaa

SEQ ID NO: 168453 - DNA, 13 bp, Unknown
  misc_feature (1)..( 13): Result.005 file - promoters50/1393684
caaatgtgattgc

SEQ ID NO: 168454 - DNA, 13 bp, Unknown
  misc_feature (1)..( 13): Result.005 file - promoters50/1393684
tcaatgttaagcc

SEQ ID NO: 168455 - DNA, 13 bp, Unknown
  misc_feature (1)..( 13): Result.005 file - promoters50/1393684
tgaatggtaaatc

SEQ ID NO: 168456 - DNA, 11 bp, Unknown
  misc_feature (1)..( 11): Result.005 file - promoters50/1393684
ccttttaaaaa

SEQ ID NO: 168457 - DNA, 11 bp, Unknown
  misc_feature (1)..( 11): Result.005 file - promoters50/1393684
ccttataaata

SEQ ID NO: 168458 - DNA, 11 bp, Unknown
  misc_feature (1)..( 11): Result.005 file - promoters50/1393684
atctataaagc

SEQ ID NO: 168459 - DNA, 11 bp, Unknown
  misc_feature (1)..( 11): Result.005 file - promoters50/1393684
tcctataatta

SEQ ID NO: 168460 - DNA, 11 bp, Unknown
  misc_feature (1)..( 11): Result.005 file - promoters50/1393684
atatataaaga

SEQ ID NO: 168461 - DNA, 11 bp, Unknown
  misc_feature (1)..( 11): Result.005 file - promoters50/1393684
atatataaaac

SEQ ID NO: 168462 - DNA, 11 bp, Unknown
  misc_feature (1)..( 11): Result.005 file - promoters50/1393684
cactatatata

SEQ ID NO: 168463 - DNA, 12 bp, Unknown
  misc_feature (1)..( 12): Result.005 file - promoters50/1393684
atatctataaag

SEQ ID NO: 168464 - DNA, 12 bp, Unknown
  misc_feature (1)..( 12): Result.005 file - promoters50/1393684
atatatataaag

SEQ ID NO: 168465 - DNA, 12 bp, Unknown
  misc_feature (1)..( 12): Result.005 file - promoters50/1393684
tcatatataaaa

SEQ ID NO: 168466 - DNA, 12 bp, Unknown
  misc_feature (1)..( 12): Result.005 file - promoters50/1393684
ctccttataaat

SEQ ID NO: 168467 - DNA, 12 bp, Unknown
  misc_feature (1)..( 12): Result.005 file - promoters50/1393684
ctatatatattc

SEQ ID NO: 168468 - DNA, 12 bp, Unknown
  misc_feature (1)..( 12): Result.005 file - promoters50/1393684
cctcctataatt

SEQ ID NO: 168469 - DNA, 7 bp, Unknown
  misc_feature (1)..( 7): Result.005 file - promoters50/1393725
attgtat

SEQ ID NO: 168470 - DNA, 7 bp, Unknown
  misc_feature (1)..( 7): Result.005 file - promoters50/1393725
attgtaa

SEQ ID NO: 168471 - DNA, 7 bp, Unknown
  misc_feature (1)..( 7): Result.005 file - promoters50/1393725
attttat

SEQ ID NO: 168472 - DNA, 8 bp, Unknown
  misc_feature (1)..( 8): Result.005 file - promoters50/1393725
tctctcac

SEQ ID NO: 168473 - DNA, 8 bp, Unknown
  misc_feature (1)..( 8): Result.005 file - promoters50/1393725
tctatcat

SEQ ID NO: 168474 - DNA, 8 bp, Unknown
  misc_feature (1)..( 8): Result.005 file - promoters50/1393725
attctcac

SEQ ID NO: 168475 - DNA, 10 bp, Unknown
  misc_feature (1)..( 10): Result.005 file - promoters50/1393725
atacaacatt

SEQ ID NO: 168476 - DNA, 10 bp, Unknown
  misc_feature (1)..( 10): Result.005 file - promoters50/1393725
atgcaagatt

SEQ ID NO: 168477 - DNA, 10 bp, Unknown
  misc_feature (1)..( 10): Result.005 file - promoters50/1393725
atataacaaa

SEQ ID NO: 168478 - DNA, 9 bp, Unknown
  misc_feature (1)..( 9): Result.005 file - promoters50/1393725
taaaattct

SEQ ID NO: 168479 - DNA, 9 bp, Unknown
  misc_feature (1)..( 9): Result.005 file - promoters50/1393725
aaaacttct

SEQ ID NO: 168480 - DNA, 9 bp, Unknown
  misc_feature (1)..( 9): Result.005 file - promoters50/1393725
aaaacctct

SEQ ID NO: 168481 - DNA, 8 bp, Unknown
  misc_feature (1)..( 8): Result.005 file - promoters50/1393725
ttagtttt

SEQ ID NO: 168482 - DNA, 8 bp, Unknown
  misc_feature (1)..( 8): Result.005 file - promoters50/1393725
ttaatttt

SEQ ID NO: 168483 - DNA, 9 bp, Unknown
  misc_feature (1)..( 9): Result.005 file - promoters50/1393725
aaaatgttt

SEQ ID NO: 168484 - DNA, 13 bp, Unknown
  misc_feature (1)..( 13): Result.005 file - promoters50/1393725
aaaacattggtaa

SEQ ID NO: 168485 - DNA, 13 bp, Unknown
  misc_feature (1)..( 13): Result.005 file - promoters50/1393725
aaaccatttggag

SEQ ID NO: 168486 - DNA, 13 bp, Unknown
  misc_feature (1)..( 13): Result.005 file - promoters50/1393725
gaaatatttgtaa

SEQ ID NO: 168487 - DNA, 9 bp, Unknown
  misc_feature (1)..( 9): Result.005 file - promoters50/1393725
aaaacctct

SEQ ID NO: 168488 - DNA, 9 bp, Unknown
  misc_feature (1)..( 9): Result.005 file - promoters50/1393725
aaaaccaag

SEQ ID NO: 168489 - DNA, 9 bp, Unknown
  misc_feature (1)..( 9): Result.005 file - promoters50/1393725
aaaacttct

SEQ ID NO: 168490 - DNA, 12 bp, Unknown
  misc_feature (1)..( 12): Result.005 file - promoters50/1393725
ctcttattctca

SEQ ID NO: 168491 - DNA, 12 bp, Unknown
  misc_feature (1)..( 12): Result.005 file - promoters50/1393725
ctcttattacat

SEQ ID NO: 168492 - DNA, 12 bp, Unknown
  misc_feature (1)..( 12): Result.005 file - promoters50/1393725
cttttattttca

SEQ ID NO: 168493 - DNA, 9 bp, Unknown
  misc_feature (1)..( 9): Result.005 file - promoters50/1393725
ttattctca

SEQ ID NO: 168494 - DNA, 9 bp, Unknown
  misc_feature (1)..( 9): Result.005 file - promoters50/1393725
agattctct

SEQ ID NO: 168495 - DNA, 9 bp, Unknown
  misc_feature (1)..( 9): Result.005 file - promoters50/1393725
ttattttca

SEQ ID NO: 168496 - DNA, 9 bp, Unknown
  misc_feature (1)..( 9): Result.005 file - promoters50/1393725
tactaattg

SEQ ID NO: 168497 - DNA, 9 bp, Unknown
  misc_feature (1)..( 9): Result.005 file - promoters50/1393725
taccaattg

SEQ ID NO: 168498 - DNA, 9 bp, Unknown
  misc_feature (1)..( 9): Result.005 file - promoters50/1393725
aaccatttg

SEQ ID NO: 168499 - DNA, 12 bp, Unknown
  misc_feature (1)..( 12): Result.005 file - promoters50/1393751
tactcacatatg

SEQ ID NO: 168500 - DNA, 12 bp, Unknown
  misc_feature (1)..( 12): Result.005 file - promoters50/1393751
aactcaccggag

SEQ ID NO: 168501 - DNA, 12 bp, Unknown
  misc_feature (1)..( 12): Result.005 file - promoters50/1393751
tactaacatatg

SEQ ID NO: 168502 - DNA, 12 bp, Unknown
  misc_feature (1)..( 12): Result.005 file - promoters50/1393751
tcaaaacataat

SEQ ID NO: 168503 - DNA, 12 bp, Unknown
  misc_feature (1)..( 12): Result.005 file - promoters50/1393751
atgtgacataaa

SEQ ID NO: 168504 - DNA, 6 bp, Unknown
  misc_feature (1)..( 6): Result.005 file - promoters50/1393761
tttttt

SEQ ID NO: 168505 - DNA, 6 bp, Unknown
  misc_feature (1)..( 6): Result.005 file - promoters50/1393761
tttttt

SEQ ID NO: 168506 - DNA, 6 bp, Unknown
  misc_feature (1)..( 6): Result.005 file - promoters50/1393761
tttttt

SEQ ID NO: 168507 - DNA, 9 bp, Unknown
  misc_feature (1)..( 9): Result.005 file - promoters50/1393761
aaatgaaat

SEQ ID NO: 168508 - DNA, 9 bp, Unknown
  misc_feature (1)..( 9): Result.005 file - promoters50/1393761
aaataaaat

SEQ ID NO: 168509 - DNA, 9 bp, Unknown
  misc_feature (1)..( 9): Result.005 file - promoters50/1393761
aaacgaaaa

SEQ ID NO: 168510 - DNA, 7 bp, Unknown
  misc_feature (1)..( 7): Result.005 file - promoters50/1393761
ctgggtc

SEQ ID NO: 168511 - DNA, 7 bp, Unknown
  misc_feature (1)..( 7): Result.005 file - promoters50/1393761
ctgtgtc

SEQ ID NO: 168512 - DNA, 7 bp, Unknown
  misc_feature (1)..( 7): Result.005 file - promoters50/1393761
ttgtgtc

SEQ ID NO: 168513 - DNA, 10 bp, Unknown
  misc_feature (1)..( 10): Result.005 file - promoters50/1393761
cgatttcaac

SEQ ID NO: 168514 - DNA, 10 bp, Unknown
  misc_feature (1)..( 10): Result.005 file - promoters50/1393761
ctatttaaac

SEQ ID NO: 168515 - DNA, 10 bp, Unknown
  misc_feature (1)..( 10): Result.005 file - promoters50/1393761
ctagttactt

SEQ ID NO: 168516 - DNA, 9 bp, Unknown
  misc_feature (1)..( 9): Result.005 file - promoters50/1393761
aagctaaat

SEQ ID NO: 168517 - DNA, 9 bp, Unknown
  misc_feature (1)..( 9): Result.005 file - promoters50/1393761
aagttaata

SEQ ID NO: 168518 - DNA, 9 bp, Unknown
  misc_feature (1)..( 9): Result.005 file - promoters50/1393761
cagttaata

SEQ ID NO: 168519 - DNA, 8 bp, Unknown
  misc_feature (1)..( 8): Result.005 file - promoters50/1393761
cttgattc

SEQ ID NO: 168520 - DNA, 8 bp, Unknown
  misc_feature (1)..( 8): Result.005 file - promoters50/1393761
tttgattg

SEQ ID NO: 168521 - DNA, 8 bp, Unknown
  misc_feature (1)..( 8): Result.005 file - promoters50/1393761
tttgtttg

SEQ ID NO: 168522 - DNA, 12 bp, Unknown
  misc_feature (1)..( 12): Result.005 file - promoters50/1393777
taaaaaatgttt

SEQ ID NO: 168523 - DNA, 12 bp, Unknown
  misc_feature (1)..( 12): Result.005 file - promoters50/1393777
tcaaaattgtta

SEQ ID NO: 168524 - DNA, 12 bp, Unknown
  misc_feature (1)..( 12): Result.005 file - promoters50/1393777
ctgcaatggttt

SEQ ID NO: 168525 - DNA, 12 bp, Unknown
  misc_feature (1)..( 12): Result.005 file - promoters50/1393777
taagaaacaaat

SEQ ID NO: 168526 - DNA, 12 bp, Unknown
  misc_feature (1)..( 12): Result.005 file - promoters50/1393777
tggccattgttg

SEQ ID NO: 168527 - DNA, 12 bp, Unknown
  misc_feature (1)..( 12): Result.005 file - promoters50/1393777
cccatattttta

SEQ ID NO: 168528 - DNA, 12 bp, Unknown
  misc_feature (1)..( 12): Result.005 file - promoters50/1393777
acattattttat

SEQ ID NO: 168529 - DNA, 11 bp, Unknown
  misc_feature (1)..( 11): Result.005 file - promoters50/1393777
caattttattt

SEQ ID NO: 168530 - DNA, 11 bp, Unknown
  misc_feature (1)..( 11): Result.005 file - promoters50/1393777
atattttatct

SEQ ID NO: 168531 - DNA, 11 bp, Unknown
  misc_feature (1)..( 11): Result.005 file - promoters50/1393777
ttcgtttcttt

SEQ ID NO: 168532 - DNA, 11 bp, Unknown
  misc_feature (1)..( 11): Result.005 file - promoters50/1393777
tctctttattt

SEQ ID NO: 168533 - DNA, 11 bp, Unknown
  misc_feature (1)..( 11): Result.005 file - promoters50/1393777
caactttcatt

SEQ ID NO: 168534 - DNA, 11 bp, Unknown
  misc_feature (1)..( 11): Result.005 file - promoters50/1393777
tctttttgttt

SEQ ID NO: 168535 - DNA, 11 bp, Unknown
  misc_feature (1)..( 11): Result.005 file - promoters50/1393777
ttattttaatc

SEQ ID NO: 168536 - DNA, 11 bp, Unknown
  misc_feature (1)..( 11): Result.005 file - promoters50/1393777
ttttattttat

SEQ ID NO: 168537 - DNA, 11 bp, Unknown
  misc_feature (1)..( 11): Result.005 file - promoters50/1393777
tataattttag

SEQ ID NO: 168538 - DNA, 11 bp, Unknown
  misc_feature (1)..( 11): Result.005 file - promoters50/1393777
atttatttttc

SEQ ID NO: 168539 - DNA, 11 bp, Unknown
  misc_feature (1)..( 11): Result.005 file - promoters50/1393777
tttcatttgag

SEQ ID NO: 168540 - DNA, 11 bp, Unknown
  misc_feature (1)..( 11): Result.005 file - promoters50/1393777
tccgattgtag

SEQ ID NO: 168541 - DNA, 11 bp, Unknown
  misc_feature (1)..( 11): Result.005 file - promoters50/1393777
gtttctttaac

SEQ ID NO: 168542 - DNA, 15 bp, Unknown
  misc_feature (1)..( 15): Result.005 file - promoters50/1393777
tattttttgatataa

SEQ ID NO: 168543 - DNA, 15 bp, Unknown
  misc_feature (1)..( 15): Result.005 file - promoters50/1393777
ttagtgttgttattt

SEQ ID NO: 168544 - DNA, 16 bp, Unknown
  misc_feature (1)..( 16): Result.005 file - promoters50/1393777
cgcggtttggataacc

SEQ ID NO: 168545 - DNA, 16 bp, Unknown
  misc_feature (1)..( 16): Result.005 file - promoters50/1393777
tttatttatgattttt

SEQ ID NO: 168546 - DNA, 16 bp, Unknown
  misc_feature (1)..( 16): Result.005 file - promoters50/1393777
attgtttatggaaaat

SEQ ID NO: 168547 - DNA, 16 bp, Unknown
  misc_feature (1)..( 16): Result.005 file - promoters50/1393777
tttctttatacacttt

SEQ ID NO: 168548 - DNA, 16 bp, Unknown
  misc_feature (1)..( 16): Result.005 file - promoters50/1393777
tatttttcttgtacca

SEQ ID NO: 168549 - DNA, 16 bp, Unknown
  misc_feature (1)..( 16): Result.005 file - promoters50/1393777
aatgttttttttgtac

SEQ ID NO: 168550 - DNA, 17 bp, Unknown
  misc_feature (1)..( 17): Result.005 file - promoters50/1393777
ctaaaatttaaacgtaa

SEQ ID NO: 168551 - DNA, 17 bp, Unknown
  misc_feature (1)..( 17): Result.005 file - promoters50/1393777
catataattaaacaaag

SEQ ID NO: 168552 - DNA, 17 bp, Unknown
  misc_feature (1)..( 17): Result.005 file - promoters50/1393777
tcttttattaaaaactt

SEQ ID NO: 168553 - DNA, 17 bp, Unknown
  misc_feature (1)..( 17): Result.005 file - promoters50/1393777
aaaacaaataaaatatg

SEQ ID NO: 168554 - DNA, 17 bp, Unknown
  misc_feature (1)..( 17): Result.005 file - promoters50/1393777
catattattaaatttac

SEQ ID NO: 168555 - DNA, 17 bp, Unknown
  misc_feature (1)..( 17): Result.005 file - promoters50/1393777
tcggatcatatgactca

SEQ ID NO: 168556 - DNA, 17 bp, Unknown
  misc_feature (1)..( 17): Result.005 file - promoters50/1393777
ttcatacacaaaaaaaa

SEQ ID NO: 168557 - DNA, 10 bp, Unknown
  misc_feature (1)..( 10): Result.005 file - promoters50/1393777
aaaattatat

SEQ ID NO: 168558 - DNA, 10 bp, Unknown
  misc_feature (1)..( 10): Result.005 file - promoters50/1393777
taaattctat

SEQ ID NO: 168559 - DNA, 10 bp, Unknown
  misc_feature (1)..( 10): Result.005 file - promoters50/1393777
ctttttatat

SEQ ID NO: 168560 - DNA, 10 bp, Unknown
  misc_feature (1)..( 10): Result.005 file - promoters50/1393777
taaattagag

SEQ ID NO: 168561 - DNA, 10 bp, Unknown
  misc_feature (1)..( 10): Result.005 file - promoters50/1393777
aaaattgaca

SEQ ID NO: 168562 - DNA, 10 bp, Unknown
  misc_feature (1)..( 10): Result.005 file - promoters50/1393777
taagttacag

SEQ ID NO: 168563 - DNA, 10 bp, Unknown
  misc_feature (1)..( 10): Result.005 file - promoters50/1393777
tagattctag

SEQ ID NO: 168564 - DNA, 12 bp, Unknown
  misc_feature (1)..( 12): Result.005 file - promoters50/1393777
tttattttttga

SEQ ID NO: 168565 - DNA, 12 bp, Unknown
  misc_feature (1)..( 12): Result.005 file - promoters50/1393777
agcattgtttat

SEQ ID NO: 168566 - DNA, 12 bp, Unknown
  misc_feature (1)..( 12): Result.005 file - promoters50/1393777
tttatttatgat

SEQ ID NO: 168567 - DNA, 12 bp, Unknown
  misc_feature (1)..( 12): Result.005 file - promoters50/1393777
tttatttttctt

SEQ ID NO: 168568 - DNA, 12 bp, Unknown
  misc_feature (1)..( 12): Result.005 file - promoters50/1393777
aatgtttttttt

SEQ ID NO: 168569 - DNA, 12 bp, Unknown
  misc_feature (1)..( 12): Result.005 file - promoters50/1393777
gttatttttttc

SEQ ID NO: 168570 - DNA, 13 bp, Unknown
  misc_feature (1)..( 13): Result.005 file - promoters50/1393777
agtctttctttat

SEQ ID NO: 168571 - DNA, 7 bp, Unknown
  misc_feature (1)..( 7): Result.005 file - promoters50/1393777
tttattt

SEQ ID NO: 168572 - DNA, 7 bp, Unknown
  misc_feature (1)..( 7): Result.005 file - promoters50/1393777
tttattt

SEQ ID NO: 168573 - DNA, 7 bp, Unknown
  misc_feature (1)..( 7): Result.005 file - promoters50/1393777
tttattt

SEQ ID NO: 168574 - DNA, 8 bp, Unknown
  misc_feature (1)..( 8): Result.005 file - promoters50/1393777
tttcattt

SEQ ID NO: 168575 - DNA, 8 bp, Unknown
  misc_feature (1)..( 8): Result.005 file - promoters50/1393777
tgttattt

SEQ ID NO: 168576 - DNA, 8 bp, Unknown
  misc_feature (1)..( 8): Result.005 file - promoters50/1393777
tttttttt

SEQ ID NO: 168577 - DNA, 9 bp, Unknown
  misc_feature (1)..( 9): Result.005 file - promoters50/1393777
aatttataa

SEQ ID NO: 168578 - DNA, 9 bp, Unknown
  misc_feature (1)..( 9): Result.005 file - promoters50/1393777
aattaataa

SEQ ID NO: 168579 - DNA, 9 bp, Unknown
  misc_feature (1)..( 9): Result.005 file - promoters50/1393777
tatttattt

SEQ ID NO: 168580 - DNA, 9 bp, Unknown
  misc_feature (1)..( 9): Result.005 file - promoters50/1393777
cgtttcttt

SEQ ID NO: 168581 - DNA, 9 bp, Unknown
  misc_feature (1)..( 9): Result.005 file - promoters50/1393777
tctttgttt

SEQ ID NO: 168582 - DNA, 9 bp, Unknown
  misc_feature (1)..( 9): Result.005 file - promoters50/1393777
tttttgttt

SEQ ID NO: 168583 - DNA, 13 bp, Unknown
  misc_feature (1)..( 13): Result.005 file - promoters50/1393777
acatataattaaa

SEQ ID NO: 168584 - DNA, 13 bp, Unknown
  misc_feature (1)..( 13): Result.005 file - promoters50/1393777
acaaataaaatat

SEQ ID NO: 168585 - DNA, 13 bp, Unknown
  misc_feature (1)..( 13): Result.005 file - promoters50/1393777
tcatattattaaa

SEQ ID NO: 168586 - DNA, 14 bp, Unknown
  misc_feature (1)..( 14): Result.005 file - promoters50/1393777
taatattcatacac

SEQ ID NO: 168587 - DNA, 14 bp, Unknown
  misc_feature (1)..( 14): Result.005 file - promoters50/1393777
tcatatgactcagc

SEQ ID NO: 168588 - DNA, 14 bp, Unknown
  misc_feature (1)..( 14): Result.005 file - promoters50/1393777
atttattaatctta

SEQ ID NO: 168589 - DNA, 15 bp, Unknown
  misc_feature (1)..( 15): Result.005 file - promoters50/1393787
tgattaatttctcta

SEQ ID NO: 168590 - DNA, 15 bp, Unknown
  misc_feature (1)..( 15): Result.005 file - promoters50/1393787
ggatgaatttatttt

SEQ ID NO: 168591 - DNA, 15 bp, Unknown
  misc_feature (1)..( 15): Result.005 file - promoters50/1393787
ggattaatgtctctt

SEQ ID NO: 168592 - DNA, 15 bp, Unknown
  misc_feature (1)..( 15): Result.005 file - promoters50/1393787
ttatgaatctgctaa

SEQ ID NO: 168593 - DNA, 15 bp, Unknown
  misc_feature (1)..( 15): Result.005 file - promoters50/1393787
ttatgaatccgaaac

SEQ ID NO: 168594 - DNA, 15 bp, Unknown
  misc_feature (1)..( 15): Result.005 file - promoters50/1393787
agttagttctcttgc

SEQ ID NO: 168595 - DNA, 14 bp, Unknown
  misc_feature (1)..( 14): Result.005 file - promoters50/1393787
ttaaaaaatcaaaa

SEQ ID NO: 168596 - DNA, 14 bp, Unknown
  misc_feature (1)..( 14): Result.005 file - promoters50/1393787
tcaaaaaaaaaagt

SEQ ID NO: 168597 - DNA, 14 bp, Unknown
  misc_feature (1)..( 14): Result.005 file - promoters50/1393787
ataaaaatttttct

SEQ ID NO: 168598 - DNA, 14 bp, Unknown
  misc_feature (1)..( 14): Result.005 file - promoters50/1393787
tcaaataatgtaat

SEQ ID NO: 168599 - DNA, 14 bp, Unknown
  misc_feature (1)..( 14): Result.005 file - promoters50/1393787
acgtataatttaat

SEQ ID NO: 168600 - DNA, 14 bp, Unknown
  misc_feature (1)..( 14): Result.005 file - promoters50/1393787
ataaaaattcaaaa

SEQ ID NO: 168601 - DNA, 11 bp, Unknown
  misc_feature (1)..( 11): Result.005 file - promoters50/1393802
taaccaaaaaa

SEQ ID NO: 168602 - DNA, 11 bp, Unknown
  misc_feature (1)..( 11): Result.005 file - promoters50/1393802
taacctaaaaa

SEQ ID NO: 168603 - DNA, 11 bp, Unknown
  misc_feature (1)..( 11): Result.005 file - promoters50/1393802
tcagctaaaat

SEQ ID NO: 168604 - DNA, 9 bp, Unknown
  misc_feature (1)..( 9): Result.005 file - promoters50/1393802
agaaatctt

SEQ ID NO: 168605 - DNA, 9 bp, Unknown
  misc_feature (1)..( 9): Result.005 file - promoters50/1393802
tgaaacctt

SEQ ID NO: 168606 - DNA, 9 bp, Unknown
  misc_feature (1)..( 9): Result.005 file - promoters50/1393802
agaaataca

SEQ ID NO: 168607 - DNA, 12 bp, Unknown
  misc_feature (1)..( 12): Result.005 file - promoters50/1393802
aaacataaagtt

SEQ ID NO: 168608 - DNA, 12 bp, Unknown
  misc_feature (1)..( 12): Result.005 file - promoters50/1393802
aaacacaaaagt

SEQ ID NO: 168609 - DNA, 12 bp, Unknown
  misc_feature (1)..( 12): Result.005 file - promoters50/1393802
ttacaaaaagtt

SEQ ID NO: 168610 - DNA, 12 bp, Unknown
  misc_feature (1)..( 12): Result.005 file - promoters50/1393802
taaagttagaga

SEQ ID NO: 168611 - DNA, 12 bp, Unknown
  misc_feature (1)..( 12): Result.005 file - promoters50/1393802
aaaagttcatct

SEQ ID NO: 168612 - DNA, 12 bp, Unknown
  misc_feature (1)..( 12): Result.005 file - promoters50/1393802
taaagtgttaca

SEQ ID NO: 168613 - DNA, 12 bp, Unknown
  misc_feature (1)..( 12): Result.005 file - promoters50/1393802
caaacttcatct

SEQ ID NO: 168614 - DNA, 8 bp, Unknown
  misc_feature (1)..( 8): Result.005 file - promoters50/1393802
attgtttt

SEQ ID NO: 168615 - DNA, 8 bp, Unknown
  misc_feature (1)..( 8): Result.005 file - promoters50/1393802
attttttt

SEQ ID NO: 168616 - DNA, 8 bp, Unknown
  misc_feature (1)..( 8): Result.005 file - promoters50/1393802
ctttctta

SEQ ID NO: 168617 - DNA, 13 bp, Unknown
  misc_feature (1)..( 13): Result.005 file - promoters50/1393802
ataatttaatcac

SEQ ID NO: 168618 - DNA, 13 bp, Unknown
  misc_feature (1)..( 13): Result.005 file - promoters50/1393802
agttattaatcac

SEQ ID NO: 168619 - DNA, 13 bp, Unknown
  misc_feature (1)..( 13): Result.005 file - promoters50/1393802
agtgattcatctt

SEQ ID NO: 168620 - DNA, 9 bp, Unknown
  misc_feature (1)..( 9): Result.005 file - promoters50/1393802
actatgaaa

SEQ ID NO: 168621 - DNA, 9 bp, Unknown
  misc_feature (1)..( 9): Result.005 file - promoters50/1393802
tttattaaa

SEQ ID NO: 168622 - DNA, 9 bp, Unknown
  misc_feature (1)..( 9): Result.005 file - promoters50/1393802
ttttttaaa

SEQ ID NO: 168623 - DNA, 16 bp, Unknown
  misc_feature (1)..( 16): Result.005 file - promoters50/1393805
tatcaattaatctcac

SEQ ID NO: 168624 - DNA, 16 bp, Unknown
  misc_feature (1)..( 16): Result.005 file - promoters50/1393805
tcatttttattctatt

SEQ ID NO: 168625 - DNA, 17 bp, Unknown
  misc_feature (1)..( 17): Result.005 file - promoters50/1393805
atttgttgtattctaaa

SEQ ID NO: 168626 - DNA, 16 bp, Unknown
  misc_feature (1)..( 16): Result.005 file - promoters50/1393805
taaattttaatctctg

SEQ ID NO: 168627 - DNA, 17 bp, Unknown
  misc_feature (1)..( 17): Result.005 file - promoters50/1393805
atgtttttgattcagga

SEQ ID NO: 168628 - DNA, 17 bp, Unknown
  misc_feature (1)..( 17): Result.005 file - promoters50/1393805
ttcttttttattacact

SEQ ID NO: 168629 - DNA, 17 bp, Unknown
  misc_feature (1)..( 17): Result.005 file - promoters50/1393805
caacacgttcttctttt

SEQ ID NO: 168630 - DNA, 6 bp, Unknown
  misc_feature (1)..( 6): Result.005 file - promoters50/1393808
atccat

SEQ ID NO: 168631 - DNA, 6 bp, Unknown
  misc_feature (1)..( 6): Result.005 file - promoters50/1393808
atccat

SEQ ID NO: 168632 - DNA, 6 bp, Unknown
  misc_feature (1)..( 6): Result.005 file - promoters50/1393808
atccat

SEQ ID NO: 168633 - DNA, 11 bp, Unknown
  misc_feature (1)..( 11): Result.005 file - promoters50/1393812
tcgttctcaaa

SEQ ID NO: 168634 - DNA, 11 bp, Unknown
  misc_feature (1)..( 11): Result.005 file - promoters50/1393812
tctctctgaaa

SEQ ID NO: 168635 - DNA, 11 bp, Unknown
  misc_feature (1)..( 11): Result.005 file - promoters50/1393812
tcgtgctcaca

SEQ ID NO: 168636 - DNA, 11 bp, Unknown
  misc_feature (1)..( 11): Result.005 file - promoters50/1393812
ttgattataaa

SEQ ID NO: 168637 - DNA, 11 bp, Unknown
  misc_feature (1)..( 11): Result.005 file - promoters50/1393812
ttggttataaa

SEQ ID NO: 168638 - DNA, 11 bp, Unknown
  misc_feature (1)..( 11): Result.005 file - promoters50/1393812
gtgagtatgaa

SEQ ID NO: 168639 - DNA, 9 bp, Unknown
  misc_feature (1)..( 9): Result.005 file - promoters50/1393812
aaactgaat

SEQ ID NO: 168640 - DNA, 9 bp, Unknown
  misc_feature (1)..( 9): Result.005 file - promoters50/1393812
aaacagaat

SEQ ID NO: 168641 - DNA, 9 bp, Unknown
  misc_feature (1)..( 9): Result.005 file - promoters50/1393812
aaaatgaaa

SEQ ID NO: 168642 - DNA, 8 bp, Unknown
  misc_feature (1)..( 8): Result.005 file - promoters50/1393812
gaataacc

SEQ ID NO: 168643 - DNA, 8 bp, Unknown
  misc_feature (1)..( 8): Result.005 file - promoters50/1393812
gaataaat

SEQ ID NO: 168644 - DNA, 8 bp, Unknown
  misc_feature (1)..( 8): Result.005 file - promoters50/1393812
aaataacc

SEQ ID NO: 168645 - DNA, 8 bp, Unknown
  misc_feature (1)..( 8): Result.005 file - promoters50/1393812
atataacc

SEQ ID NO: 168646 - DNA, 7 bp, Unknown
  misc_feature (1)..( 7): Result.005 file - promoters50/1393812
aacttat

SEQ ID NO: 168647 - DNA, 7 bp, Unknown
  misc_feature (1)..( 7): Result.005 file - promoters50/1393812
tacttat

SEQ ID NO: 168648 - DNA, 7 bp, Unknown
  misc_feature (1)..( 7): Result.005 file - promoters50/1393812
aacttat

SEQ ID NO: 168649 - DNA, 10 bp, Unknown
  misc_feature (1)..( 10): Result.005 file - promoters50/1393812
ttctttttga

SEQ ID NO: 168650 - DNA, 10 bp, Unknown
  misc_feature (1)..( 10): Result.005 file - promoters50/1393812
ttctttttat

SEQ ID NO: 168651 - DNA, 10 bp, Unknown
  misc_feature (1)..( 10): Result.005 file - promoters50/1393812
gcttttgtat

SEQ ID NO: 168652 - DNA, 8 bp, Unknown
  misc_feature (1)..( 8): Result.005 file - promoters50/1393812
ataaccaa

SEQ ID NO: 168653 - DNA, 8 bp, Unknown
  misc_feature (1)..( 8): Result.005 file - promoters50/1393812
ataaccaa

SEQ ID NO: 168654 - DNA, 8 bp, Unknown
  misc_feature (1)..( 8): Result.005 file - promoters50/1393812
ataacctt

SEQ ID NO: 168655 - DNA, 12 bp, Unknown
  misc_feature (1)..( 12): Result.005 file - promoters50/1393812
tgggccctaaag

SEQ ID NO: 168656 - DNA, 12 bp, Unknown
  misc_feature (1)..( 12): Result.005 file - promoters50/1393812
tgggcccattaa

SEQ ID NO: 168657 - DNA, 12 bp, Unknown
  misc_feature (1)..( 12): Result.005 file - promoters50/1393812
taggcccattaa

SEQ ID NO: 168658 - DNA, 8 bp, Unknown
  misc_feature (1)..( 8): Result.005 file - promoters50/1393812
gctaacta

SEQ ID NO: 168659 - DNA, 8 bp, Unknown
  misc_feature (1)..( 8): Result.005 file - promoters50/1393812
tataacta

SEQ ID NO: 168660 - DNA, 8 bp, Unknown
  misc_feature (1)..( 8): Result.005 file - promoters50/1393812
tatcactt

SEQ ID NO: 168661 - DNA, 8 bp, Unknown
  misc_feature (1)..( 8): Result.005 file - promoters50/1393827
agttatct

SEQ ID NO: 168662 - DNA, 8 bp, Unknown
  misc_feature (1)..( 8): Result.005 file - promoters50/1393827
cgttttct

SEQ ID NO: 168663 - DNA, 8 bp, Unknown
  misc_feature (1)..( 8): Result.005 file - promoters50/1393827
agttataa

SEQ ID NO: 168664 - DNA, 7 bp, Unknown
  misc_feature (1)..( 7): Result.005 file - promoters50/1393827
ttttctg

SEQ ID NO: 168665 - DNA, 7 bp, Unknown
  misc_feature (1)..( 7): Result.005 file - promoters50/1393827
ttttctg

SEQ ID NO: 168666 - DNA, 8 bp, Unknown
  misc_feature (1)..( 8): Result.005 file - promoters50/1393827
tttgtcta

SEQ ID NO: 168667 - DNA, 11 bp, Unknown
  misc_feature (1)..( 11): Result.005 file - promoters50/1393827
tcttattagat

SEQ ID NO: 168668 - DNA, 11 bp, Unknown
  misc_feature (1)..( 11): Result.005 file - promoters50/1393827
tctaatttcat

SEQ ID NO: 168669 - DNA, 11 bp, Unknown
  misc_feature (1)..( 11): Result.005 file - promoters50/1393827
cattattggat

SEQ ID NO: 168670 - DNA, 8 bp, Unknown
  misc_feature (1)..( 8): Result.005 file - promoters50/1393827
tatcaaat

SEQ ID NO: 168671 - DNA, 8 bp, Unknown
  misc_feature (1)..( 8): Result.005 file - promoters50/1393827
aatcaaat

SEQ ID NO: 168672 - DNA, 8 bp, Unknown
  misc_feature (1)..( 8): Result.005 file - promoters50/1393827
aattaaaa

SEQ ID NO: 168673 - DNA, 10 bp, Unknown
  misc_feature (1)..( 10): Result.005 file - promoters50/1393827
attctccaca

SEQ ID NO: 168674 - DNA, 10 bp, Unknown
  misc_feature (1)..( 10): Result.005 file - promoters50/1393827
aacttccaca

SEQ ID NO: 168675 - DNA, 10 bp, Unknown
  misc_feature (1)..( 10): Result.005 file - promoters50/1393827
aacctccacg

SEQ ID NO: 168676 - DNA, 12 bp, Unknown
  misc_feature (1)..( 12): Result.005 file - promoters50/1393827
taagatacgaaa

SEQ ID NO: 168677 - DNA, 12 bp, Unknown
  misc_feature (1)..( 12): Result.005 file - promoters50/1393827
taaaataagaaa

SEQ ID NO: 168678 - DNA, 13 bp, Unknown
  misc_feature (1)..( 13): Result.005 file - promoters50/1393827
gtcataaagcaaa

SEQ ID NO: 168679 - DNA, 24 bp, Unknown
  misc_feature (1)..( 24): Result.005 file - promoters50/1393845
tattttatttatttattataattc

SEQ ID NO: 168680 - DNA, 19 bp, Unknown
  misc_feature (1)..( 19): Result.005 file - promoters50/1393845
atgaaacttaatatacgtt

SEQ ID NO: 168681 - DNA, 21 bp, Unknown
  misc_feature (1)..( 21): Result.005 file - promoters50/1393845
aacttagcattaaaatattcg

SEQ ID NO: 168682 - DNA, 24 bp, Unknown
  misc_feature (1)..( 24): Result.005 file - promoters50/1393845
tttttttttttttttttttaaatt

SEQ ID NO: 168683 - DNA, 14 bp, Unknown
  misc_feature (1)..( 14): Result.005 file - promoters50/1393845
agttataattgtac

SEQ ID NO: 168684 - DNA, 24 bp, Unknown
  misc_feature (1)..( 24): Result.005 file - promoters50/1393845
ctgactttttctaaaaaaaattcg

SEQ ID NO: 168685 - DNA, 10 bp, Unknown
  misc_feature (1)..( 10): Result.005 file - promoters50/1393845
attcaaaatg

SEQ ID NO: 168686 - DNA, 10 bp, Unknown
  misc_feature (1)..( 10): Result.005 file - promoters50/1393845
cttcaaagaa

SEQ ID NO: 168687 - DNA, 11 bp, Unknown
  misc_feature (1)..( 11): Result.005 file - promoters50/1393845
attcgaaatgg

SEQ ID NO: 168688 - DNA, 11 bp, Unknown
  misc_feature (1)..( 11): Result.005 file - promoters50/1393845
cttcaaattcg

SEQ ID NO: 168689 - DNA, 11 bp, Unknown
  misc_feature (1)..( 11): Result.005 file - promoters50/1393845
tctgcaaatca

SEQ ID NO: 168690 - DNA, 11 bp, Unknown
  misc_feature (1)..( 11): Result.005 file - promoters50/1393845
tacagaaatgg

SEQ ID NO: 168691 - DNA, 11 bp, Unknown
  misc_feature (1)..( 11): Result.005 file - promoters50/1393845
attagaaaaga

SEQ ID NO: 168692 - DNA, 12 bp, Unknown
  misc_feature (1)..( 12): Result.005 file - promoters50/1393845
atataattttaa

SEQ ID NO: 168693 - DNA, 12 bp, Unknown
  misc_feature (1)..( 12): Result.005 file - promoters50/1393845
tcataatttagg

SEQ ID NO: 168694 - DNA, 12 bp, Unknown
  misc_feature (1)..( 12): Result.005 file - promoters50/1393845
aattaatttact

SEQ ID NO: 168695 - DNA, 12 bp, Unknown
  misc_feature (1)..( 12): Result.005 file - promoters50/1393845
tggaaatttacc

SEQ ID NO: 168696 - DNA, 12 bp, Unknown
  misc_feature (1)..( 12): Result.005 file - promoters50/1393845
tcaaaattcata

SEQ ID NO: 168697 - DNA, 12 bp, Unknown
  misc_feature (1)..( 12): Result.005 file - promoters50/1393845
aacggatttatt

SEQ ID NO: 168698 - DNA, 12 bp, Unknown
  misc_feature (1)..( 12): Result.005 file - promoters50/1393845
aaaaattaaaat

SEQ ID NO: 168699 - DNA, 12 bp, Unknown
  misc_feature (1)..( 12): Result.005 file - promoters50/1393845
gaattctaaaat

SEQ ID NO: 168700 - DNA, 12 bp, Unknown
  misc_feature (1)..( 12): Result.005 file - promoters50/1393845
tatgattaaaaa

SEQ ID NO: 168701 - DNA, 12 bp, Unknown
  misc_feature (1)..( 12): Result.005 file - promoters50/1393845
aattcttaaatt

SEQ ID NO: 168702 - DNA, 12 bp, Unknown
  misc_feature (1)..( 12): Result.005 file - promoters50/1393845
ctttattaaatt

SEQ ID NO: 168703 - DNA, 12 bp, Unknown
  misc_feature (1)..( 12): Result.005 file - promoters50/1393845
tcgttctaaaaa

SEQ ID NO: 168704 - DNA, 9 bp, Unknown
  misc_feature (1)..( 9): Result.005 file - promoters50/1393935
aaaagcaaa

SEQ ID NO: 168705 - DNA, 9 bp, Unknown
  misc_feature (1)..( 9): Result.005 file - promoters50/1393935
ataagcaaa

SEQ ID NO: 168706 - DNA, 9 bp, Unknown
  misc_feature (1)..( 9): Result.005 file - promoters50/1393935
aaaagaaaa

SEQ ID NO: 168707 - DNA, 8 bp, Unknown
  misc_feature (1)..( 8): Result.005 file - promoters50/1393954
tcaaggaa

SEQ ID NO: 168708 - DNA, 8 bp, Unknown
  misc_feature (1)..( 8): Result.005 file - promoters50/1393954
tcaaggtt

SEQ ID NO: 168709 - DNA, 8 bp, Unknown
  misc_feature (1)..( 8): Result.005 file - promoters50/1393954
tcacggtt

SEQ ID NO: 168710 - DNA, 9 bp, Unknown
  misc_feature (1)..( 9): Result.005 file - promoters50/1393954
tatctttat

SEQ ID NO: 168711 - DNA, 9 bp, Unknown
  misc_feature (1)..( 9): Result.005 file - promoters50/1393954
tatatttat

SEQ ID NO: 168712 - DNA, 9 bp, Unknown
  misc_feature (1)..( 9): Result.005 file - promoters50/1393954
tatctttag

SEQ ID NO: 168713 - DNA, 11 bp, Unknown
  misc_feature (1)..( 11): Result.005 file - promoters50/1393954
tctgaattcaa

SEQ ID NO: 168714 - DNA, 11 bp, Unknown
  misc_feature (1)..( 11): Result.005 file - promoters50/1393954
gttgaattttt

SEQ ID NO: 168715 - DNA, 11 bp, Unknown
  misc_feature (1)..( 11): Result.005 file - promoters50/1393954
gttgacttttt

SEQ ID NO: 168716 - DNA, 8 bp, Unknown
  misc_feature (1)..( 8): Result.005 file - promoters50/1393954
cgaacaaa

SEQ ID NO: 168717 - DNA, 8 bp, Unknown
  misc_feature (1)..( 8): Result.005 file - promoters50/1393954
tgaaaaaa

SEQ ID NO: 168718 - DNA, 8 bp, Unknown
  misc_feature (1)..( 8): Result.005 file - promoters50/1393954
tgtgcaaa

SEQ ID NO: 168719 - DNA, 8 bp, Unknown
  misc_feature (1)..( 8): Result.005 file - promoters50/1394008
aaagattt

SEQ ID NO: 168720 - DNA, 8 bp, Unknown
  misc_feature (1)..( 8): Result.005 file - promoters50/1394008
aaagatga

SEQ ID NO: 168721 - DNA, 8 bp, Unknown
  misc_feature (1)..( 8): Result.005 file - promoters50/1394008
aaagattt

SEQ ID NO: 168722 - DNA, 7 bp, Unknown
  misc_feature (1)..( 7): Result.005 file - promoters50/1394034
taagttt

SEQ ID NO: 168723 - DNA, 7 bp, Unknown
  misc_feature (1)..( 7): Result.005 file - promoters50/1394034
taacttt

SEQ ID NO: 168724 - DNA, 7 bp, Unknown
  misc_feature (1)..( 7): Result.005 file - promoters50/1394034
taatttt

SEQ ID NO: 168725 - DNA, 10 bp, Unknown
  misc_feature (1)..( 10): Result.005 file - promoters50/1394110
taataaacaa

SEQ ID NO: 168726 - DNA, 10 bp, Unknown
  misc_feature (1)..( 10): Result.005 file - promoters50/1394110
caataaaagt

SEQ ID NO: 168727 - DNA, 10 bp, Unknown
  misc_feature (1)..( 10): Result.005 file - promoters50/1394110
caaaaaaagg

SEQ ID NO: 168728 - DNA, 10 bp, Unknown
  misc_feature (1)..( 10): Result.005 file - promoters50/1394110
gtataaaaga

SEQ ID NO: 168729 - DNA, 10 bp, Unknown
  misc_feature (1)..( 10): Result.005 file - promoters50/1394110
atatacaagt

SEQ ID NO: 168730 - DNA, 10 bp, Unknown
  misc_feature (1)..( 10): Result.005 file - promoters50/1394110
aaacaaaata

SEQ ID NO: 168731 - DNA, 10 bp, Unknown
  misc_feature (1)..( 10): Result.005 file - promoters50/1394110
aaagaaagct

SEQ ID NO: 168732 - DNA, 10 bp, Unknown
  misc_feature (1)..( 10): Result.005 file - promoters50/1394110
tgacaaaata

SEQ ID NO: 168733 - DNA, 10 bp, Unknown
  misc_feature (1)..( 10): Result.005 file - promoters50/1394110
atacacaatc

SEQ ID NO: 168734 - DNA, 10 bp, Unknown
  misc_feature (1)..( 10): Result.005 file - promoters50/1394110
agacacaatg

SEQ ID NO: 168735 - DNA, 10 bp, Unknown
  misc_feature (1)..( 10): Result.005 file - promoters50/1394110
ttttccaaat

SEQ ID NO: 168736 - DNA, 10 bp, Unknown
  misc_feature (1)..( 10): Result.005 file - promoters50/1394110
ttttcaaaaa

SEQ ID NO: 168737 - DNA, 10 bp, Unknown
  misc_feature (1)..( 10): Result.005 file - promoters50/1394110
ccatccaaat

SEQ ID NO: 168738 - DNA, 10 bp, Unknown
  misc_feature (1)..( 10): Result.005 file - promoters50/1394110
acgtcaaaaa

SEQ ID NO: 168739 - DNA, 8 bp, Unknown
  misc_feature (1)..( 8): Result.005 file - promoters50/1394110
attcaaat

SEQ ID NO: 168740 - DNA, 8 bp, Unknown
  misc_feature (1)..( 8): Result.005 file - promoters50/1394110
attgaaac

SEQ ID NO: 168741 - DNA, 9 bp, Unknown
  misc_feature (1)..( 9): Result.005 file - promoters50/1394110
atatcaaat

SEQ ID NO: 168742 - DNA, 9 bp, Unknown
  misc_feature (1)..( 9): Result.005 file - promoters50/1394110
atataaaaa

SEQ ID NO: 168743 - DNA, 13 bp, Unknown
  misc_feature (1)..( 13): Result.005 file - promoters50/1394110
aaatttcatacat

SEQ ID NO: 168744 - DNA, 13 bp, Unknown
  misc_feature (1)..( 13): Result.005 file - promoters50/1394110
aaatttcaaacat

SEQ ID NO: 168745 - DNA, 13 bp, Unknown
  misc_feature (1)..( 13): Result.005 file - promoters50/1394110
aaatttattcata

SEQ ID NO: 168746 - DNA, 13 bp, Unknown
  misc_feature (1)..( 13): Result.005 file - promoters50/1394110
tcttttcaaaaaa

SEQ ID NO: 168747 - DNA, 9 bp, Unknown
  misc_feature (1)..( 9): Result.005 file - promoters50/1394110
cgaaattta

SEQ ID NO: 168748 - DNA, 9 bp, Unknown
  misc_feature (1)..( 9): Result.005 file - promoters50/1394110
aaaaatttg

SEQ ID NO: 168749 - DNA, 9 bp, Unknown
  misc_feature (1)..( 9): Result.005 file - promoters50/1394110
aaaaattta

SEQ ID NO: 168750 - DNA, 9 bp, Unknown
  misc_feature (1)..( 9): Result.005 file - promoters50/1394110
gaaaatttt

SEQ ID NO: 168751 - DNA, 9 bp, Unknown
  misc_feature (1)..( 9): Result.005 file - promoters50/1394178
tttttttct

SEQ ID NO: 168752 - DNA, 9 bp, Unknown
  misc_feature (1)..( 9): Result.005 file - promoters50/1394178
ttttattct

SEQ ID NO: 168753 - DNA, 9 bp, Unknown
  misc_feature (1)..( 9): Result.005 file - promoters50/1394178
tttctttct

SEQ ID NO: 168754 - DNA, 9 bp, Unknown
  misc_feature (1)..( 9): Result.005 file - promoters50/1394178
tttttctta

SEQ ID NO: 168755 - DNA, 9 bp, Unknown
  misc_feature (1)..( 9): Result.005 file - promoters50/1394178
tttttttta

SEQ ID NO: 168756 - DNA, 9 bp, Unknown
  misc_feature (1)..( 9): Result.005 file - promoters50/1394178
tgtttcttt

SEQ ID NO: 168757 - DNA, 6 bp, Unknown
  misc_feature (1)..( 6): Result.005 file - promoters50/1394178
gttttt

SEQ ID NO: 168758 - DNA, 6 bp, Unknown
  misc_feature (1)..( 6): Result.005 file - promoters50/1394178
gttttt

SEQ ID NO: 168759 - DNA, 6 bp, Unknown
  misc_feature (1)..( 6): Result.005 file - promoters50/1394178
gttttt

SEQ ID NO: 168760 - DNA, 9 bp, Unknown
  misc_feature (1)..( 9): Result.005 file - promoters50/1394178
attttcaaa

SEQ ID NO: 168761 - DNA, 9 bp, Unknown
  misc_feature (1)..( 9): Result.005 file - promoters50/1394178
ttttttaaa

SEQ ID NO: 168762 - DNA, 9 bp, Unknown
  misc_feature (1)..( 9): Result.005 file - promoters50/1394178
ttttttaca

SEQ ID NO: 168763 - DNA, 8 bp, Unknown
  misc_feature (1)..( 8): Result.005 file - promoters50/1394178
catataaa

SEQ ID NO: 168764 - DNA, 8 bp, Unknown
  misc_feature (1)..( 8): Result.005 file - promoters50/1394178
cataaaaa

SEQ ID NO: 168765 - DNA, 8 bp, Unknown
  misc_feature (1)..( 8): Result.005 file - promoters50/1394178
tttaaaaa

SEQ ID NO: 168766 - DNA, 17 bp, Unknown
  misc_feature (1)..( 17): Result.005 file - promoters50/1394302
tatgttaaaaaataaaa

SEQ ID NO: 168767 - DNA, 17 bp, Unknown
  misc_feature (1)..( 17): Result.005 file - promoters50/1394302
actgtttaaaaagaaaa

SEQ ID NO: 168768 - DNA, 17 bp, Unknown
  misc_feature (1)..( 17): Result.005 file - promoters50/1394302
actttttctatcaaggt

SEQ ID NO: 168769 - DNA, 8 bp, Unknown
  misc_feature (1)..( 8): Result.005 file - promoters50/1394302
acgttaat

SEQ ID NO: 168770 - DNA, 8 bp, Unknown
  misc_feature (1)..( 8): Result.005 file - promoters50/1394302
ttgttaat

SEQ ID NO: 168771 - DNA, 8 bp, Unknown
  misc_feature (1)..( 8): Result.005 file - promoters50/1394302
ttgttaaa

SEQ ID NO: 168772 - DNA, 8 bp, Unknown
  misc_feature (1)..( 8): Result.005 file - promoters50/1394302
aaaacaaa

SEQ ID NO: 168773 - DNA, 8 bp, Unknown
  misc_feature (1)..( 8): Result.005 file - promoters50/1394302
aaaacaag

SEQ ID NO: 168774 - DNA, 8 bp, Unknown
  misc_feature (1)..( 8): Result.005 file - promoters50/1394302
gaaagaaa

SEQ ID NO: 168775 - DNA, 12 bp, Unknown
  misc_feature (1)..( 12): Result.005 file - promoters50/1394310
ataacatacaaa

SEQ ID NO: 168776 - DNA, 12 bp, Unknown
  misc_feature (1)..( 12): Result.005 file - promoters50/1394310
aatatgtacaaa

SEQ ID NO: 168777 - DNA, 12 bp, Unknown
  misc_feature (1)..( 12): Result.005 file - promoters50/1394310
atatcataaaaa

SEQ ID NO: 168778 - DNA, 10 bp, Unknown
  misc_feature (1)..( 10): Result.005 file - promoters50/1394310
cttgatatca

SEQ ID NO: 168779 - DNA, 10 bp, Unknown
  misc_feature (1)..( 10): Result.005 file - promoters50/1394310
ctttataagt

SEQ ID NO: 168780 - DNA, 10 bp, Unknown
  misc_feature (1)..( 10): Result.005 file - promoters50/1394310
aatgaaatca

SEQ ID NO: 168781 - DNA, 16 bp, Unknown
  misc_feature (1)..( 16): Result.005 file - promoters50/1394310
agtggcatttcaccgt

SEQ ID NO: 168782 - DNA, 16 bp, Unknown
  misc_feature (1)..( 16): Result.005 file - promoters50/1394310
atctttattttaccgt

SEQ ID NO: 168783 - DNA, 16 bp, Unknown
  misc_feature (1)..( 16): Result.005 file - promoters50/1394310
atccttatattagaaa

SEQ ID NO: 168784 - DNA, 8 bp, Unknown
  misc_feature (1)..( 8): Result.005 file - promoters50/1394310
tctatata

SEQ ID NO: 168785 - DNA, 8 bp, Unknown
  misc_feature (1)..( 8): Result.005 file - promoters50/1394310
actatata

SEQ ID NO: 168786 - DNA, 8 bp, Unknown
  misc_feature (1)..( 8): Result.005 file - promoters50/1394310
tctttatg

SEQ ID NO: 168787 - DNA, 7 bp, Unknown
  misc_feature (1)..( 7): Result.005 file - promoters50/1394327
gcaaaaa

SEQ ID NO: 168788 - DNA, 7 bp, Unknown
  misc_feature (1)..( 7): Result.005 file - promoters50/1394327
gcaaaac

SEQ ID NO: 168789 - DNA, 7 bp, Unknown
  misc_feature (1)..( 7): Result.005 file - promoters50/1394327
tcaaaaa

SEQ ID NO: 168790 - DNA, 10 bp, Unknown
  misc_feature (1)..( 10): Result.005 file - promoters50/1394327
atagggacat

SEQ ID NO: 168791 - DNA, 10 bp, Unknown
  misc_feature (1)..( 10): Result.005 file - promoters50/1394327
atatggaaaa

SEQ ID NO: 168792 - DNA, 10 bp, Unknown
  misc_feature (1)..( 10): Result.005 file - promoters50/1394327
aaatgtaaaa

SEQ ID NO: 168793 - DNA, 9 bp, Unknown
  misc_feature (1)..( 9): Result.005 file - promoters50/1394327
caagactta

SEQ ID NO: 168794 - DNA, 9 bp, Unknown
  misc_feature (1)..( 9): Result.005 file - promoters50/1394327
caaaacttt

SEQ ID NO: 168795 - DNA, 9 bp, Unknown
  misc_feature (1)..( 9): Result.005 file - promoters50/1394327
gaaaatttt

SEQ ID NO: 168796 - DNA, 8 bp, Unknown
  misc_feature (1)..( 8): Result.005 file - promoters50/1394327
attgtttc

SEQ ID NO: 168797 - DNA, 8 bp, Unknown
  misc_feature (1)..( 8): Result.005 file - promoters50/1394327
attgttta

SEQ ID NO: 168798 - DNA, 8 bp, Unknown
  misc_feature (1)..( 8): Result.005 file - promoters50/1394327
tttgttta

SEQ ID NO: 168799 - DNA, 8 bp, Unknown
  misc_feature (1)..( 8): Result.005 file - promoters50/1394447
aggagaaa

SEQ ID NO: 168800 - DNA, 8 bp, Unknown
  misc_feature (1)..( 8): Result.005 file - promoters50/1394447
aggataaa

SEQ ID NO: 168801 - DNA, 8 bp, Unknown
  misc_feature (1)..( 8): Result.005 file - promoters50/1394447
ctgataaa

SEQ ID NO: 168802 - DNA, 10 bp, Unknown
  misc_feature (1)..( 10): Result.005 file - promoters50/1394447
tattttcaca

SEQ ID NO: 168803 - DNA, 10 bp, Unknown
  misc_feature (1)..( 10): Result.005 file - promoters50/1394447
tatttttctc

SEQ ID NO: 168804 - DNA, 10 bp, Unknown
  misc_feature (1)..( 10): Result.005 file - promoters50/1394447
cattttcctc

SEQ ID NO: 168805 - DNA, 7 bp, Unknown
  misc_feature (1)..( 7): Result.005 file - promoters50/1394447
ctgaaaa

SEQ ID NO: 168806 - DNA, 7 bp, Unknown
  misc_feature (1)..( 7): Result.005 file - promoters50/1394447
atgaaaa

SEQ ID NO: 168807 - DNA, 7 bp, Unknown
  misc_feature (1)..( 7): Result.005 file - promoters50/1394447
atgaaac

SEQ ID NO: 168808 - DNA, 10 bp, Unknown
  misc_feature (1)..( 10): Result.005 file - promoters50/1394447
gctgaataaa

SEQ ID NO: 168809 - DNA, 10 bp, Unknown
  misc_feature (1)..( 10): Result.005 file - promoters50/1394447
atttaataaa

SEQ ID NO: 168810 - DNA, 10 bp, Unknown
  misc_feature (1)..( 10): Result.005 file - promoters50/1394447
atttaataat

SEQ ID NO: 168811 - DNA, 8 bp, Unknown
  misc_feature (1)..( 8): Result.005 file - promoters50/1394451
caattata

SEQ ID NO: 168812 - DNA, 8 bp, Unknown
  misc_feature (1)..( 8): Result.005 file - promoters50/1394451
taattatg

SEQ ID NO: 168813 - DNA, 8 bp, Unknown
  misc_feature (1)..( 8): Result.005 file - promoters50/1394451
tgattatg

SEQ ID NO: 168814 - DNA, 8 bp, Unknown
  misc_feature (1)..( 8): Result.005 file - promoters50/1394451
taattaaa

SEQ ID NO: 168815 - DNA, 10 bp, Unknown
  misc_feature (1)..( 10): Result.005 file - promoters50/1394451
atcacgaaca

SEQ ID NO: 168816 - DNA, 10 bp, Unknown
  misc_feature (1)..( 10): Result.005 file - promoters50/1394451
atcacggaga

SEQ ID NO: 168817 - DNA, 10 bp, Unknown
  misc_feature (1)..( 10): Result.005 file - promoters50/1394451
ctcaaggaaa

SEQ ID NO: 168818 - DNA, 10 bp, Unknown
  misc_feature (1)..( 10): Result.005 file - promoters50/1394451
aggaaggaaa

SEQ ID NO: 168819 - DNA, 13 bp, Unknown
  misc_feature (1)..( 13): Result.005 file - promoters50/1394473
aacgacaaatagc

SEQ ID NO: 168820 - DNA, 13 bp, Unknown
  misc_feature (1)..( 13): Result.005 file - promoters50/1394473
aacgtcaaaaagc

SEQ ID NO: 168821 - DNA, 13 bp, Unknown
  misc_feature (1)..( 13): Result.005 file - promoters50/1394473
taattcaaaaaaa

SEQ ID NO: 168822 - DNA, 9 bp, Unknown
  misc_feature (1)..( 9): Result.005 file - promoters50/1394473
ttaatatat

SEQ ID NO: 168823 - DNA, 9 bp, Unknown
  misc_feature (1)..( 9): Result.005 file - promoters50/1394473
agaatttat

SEQ ID NO: 168824 - DNA, 9 bp, Unknown
  misc_feature (1)..( 9): Result.005 file - promoters50/1394473
ttagtataa

SEQ ID NO: 168825 - DNA, 9 bp, Unknown
  misc_feature (1)..( 9): Result.005 file - promoters50/1394473
ccaaaccaa

SEQ ID NO: 168826 - DNA, 9 bp, Unknown
  misc_feature (1)..( 9): Result.005 file - promoters50/1394473
tcaaatcaa

SEQ ID NO: 168827 - DNA, 9 bp, Unknown
  misc_feature (1)..( 9): Result.005 file - promoters50/1394473
tcatatcac

SEQ ID NO: 168828 - DNA, 9 bp, Unknown
  misc_feature (1)..( 9): Result.005 file - promoters50/1394473
aataaagat

SEQ ID NO: 168829 - DNA, 9 bp, Unknown
  misc_feature (1)..( 9): Result.005 file - promoters50/1394473
aataaatgc

SEQ ID NO: 168830 - DNA, 9 bp, Unknown
  misc_feature (1)..( 9): Result.005 file - promoters50/1394473
aaaaaaaga

SEQ ID NO: 168831 - DNA, 12 bp, Unknown
  misc_feature (1)..( 12): Result.005 file - promoters50/1394473
aaataaagataa

SEQ ID NO: 168832 - DNA, 12 bp, Unknown
  misc_feature (1)..( 12): Result.005 file - promoters50/1394473
atgcaaacataa

SEQ ID NO: 168833 - DNA, 12 bp, Unknown
  misc_feature (1)..( 12): Result.005 file - promoters50/1394473
aaaaaaagacag

SEQ ID NO: 168834 - DNA, 9 bp, Unknown
  misc_feature (1)..( 9): Result.005 file - promoters50/1394473
agtatataa

SEQ ID NO: 168835 - DNA, 9 bp, Unknown
  misc_feature (1)..( 9): Result.005 file - promoters50/1394473
catatatac

SEQ ID NO: 168836 - DNA, 9 bp, Unknown
  misc_feature (1)..( 9): Result.005 file - promoters50/1394473
catatttac

SEQ ID NO: 168837 - DNA, 9 bp, Unknown
  misc_feature (1)..( 9): Result.005 file - promoters50/1394480
aaactttaa

SEQ ID NO: 168838 - DNA, 9 bp, Unknown
  misc_feature (1)..( 9): Result.005 file - promoters50/1394480
aaaatttct

SEQ ID NO: 168839 - DNA, 9 bp, Unknown
  misc_feature (1)..( 9): Result.005 file - promoters50/1394480
aaaatctct

SEQ ID NO: 168840 - DNA, 8 bp, Unknown
  misc_feature (1)..( 8): Result.005 file - promoters50/1394480
tttgaaac

SEQ ID NO: 168841 - DNA, 8 bp, Unknown
  misc_feature (1)..( 8): Result.005 file - promoters50/1394480
tgtgaaac

SEQ ID NO: 168842 - DNA, 8 bp, Unknown
  misc_feature (1)..( 8): Result.005 file - promoters50/1394480
tgtgaaaa

SEQ ID NO: 168843 - DNA, 9 bp, Unknown
  misc_feature (1)..( 9): Result.005 file - promoters50/1394480
gatatttct

SEQ ID NO: 168844 - DNA, 9 bp, Unknown
  misc_feature (1)..( 9): Result.005 file - promoters50/1394480
aaaatttct

SEQ ID NO: 168845 - DNA, 9 bp, Unknown
  misc_feature (1)..( 9): Result.005 file - promoters50/1394480
aaaatctct

SEQ ID NO: 168846 - DNA, 14 bp, Unknown
  misc_feature (1)..( 14): Result.005 file - promoters50/1394510
taagatttttgttg

SEQ ID NO: 168847 - DNA, 14 bp, Unknown
  misc_feature (1)..( 14): Result.005 file - promoters50/1394510
tagaatttttttct

SEQ ID NO: 168848 - DNA, 14 bp, Unknown
  misc_feature (1)..( 14): Result.005 file - promoters50/1394510
taacattttttaat

SEQ ID NO: 168849 - DNA, 14 bp, Unknown
  misc_feature (1)..( 14): Result.005 file - promoters50/1394510
ggagactttgggtg

SEQ ID NO: 168850 - DNA, 14 bp, Unknown
  misc_feature (1)..( 14): Result.005 file - promoters50/1394510
aacaattttagtta

SEQ ID NO: 168851 - DNA, 14 bp, Unknown
  misc_feature (1)..( 14): Result.005 file - promoters50/1394510
tattctttttcttg

SEQ ID NO: 168852 - DNA, 14 bp, Unknown
  misc_feature (1)..( 14): Result.005 file - promoters50/1394510
tccaattttgggca

SEQ ID NO: 168853 - DNA, 14 bp, Unknown
  misc_feature (1)..( 14): Result.005 file - promoters50/1394510
taaactaatttaaa

SEQ ID NO: 168854 - DNA, 14 bp, Unknown
  misc_feature (1)..( 14): Result.005 file - promoters50/1394510
acatgtaatttttc

SEQ ID NO: 168855 - DNA, 15 bp, Unknown
  misc_feature (1)..( 15): Result.005 file - promoters50/1394510
acatttaactttatt

SEQ ID NO: 168856 - DNA, 16 bp, Unknown
  misc_feature (1)..( 16): Result.005 file - promoters50/1394510
ctttttaatatttcat

SEQ ID NO: 168857 - DNA, 16 bp, Unknown
  misc_feature (1)..( 16): Result.005 file - promoters50/1394510
cacaaaactatataaa

SEQ ID NO: 168858 - DNA, 16 bp, Unknown
  misc_feature (1)..( 16): Result.005 file - promoters50/1394510
aatgataatatcttga

SEQ ID NO: 168859 - DNA, 10 bp, Unknown
  misc_feature (1)..( 10): Result.005 file - promoters50/1394510
acattctcaa

SEQ ID NO: 168860 - DNA, 10 bp, Unknown
  misc_feature (1)..( 10): Result.005 file - promoters50/1394510
taattttcag

SEQ ID NO: 168861 - DNA, 10 bp, Unknown
  misc_feature (1)..( 10): Result.005 file - promoters50/1394510
catttcacaa

SEQ ID NO: 168862 - DNA, 10 bp, Unknown
  misc_feature (1)..( 10): Result.005 file - promoters50/1394510
catttctcat

SEQ ID NO: 168863 - DNA, 10 bp, Unknown
  misc_feature (1)..( 10): Result.005 file - promoters50/1394510
taactttatt

SEQ ID NO: 168864 - DNA, 10 bp, Unknown
  misc_feature (1)..( 10): Result.005 file - promoters50/1394510
aaactatata

SEQ ID NO: 168865 - DNA, 13 bp, Unknown
  misc_feature (1)..( 13): Result.005 file - promoters50/1394510
tttaacattctca

SEQ ID NO: 168866 - DNA, 13 bp, Unknown
  misc_feature (1)..( 13): Result.005 file - promoters50/1394510
gataagattacta

SEQ ID NO: 168867 - DNA, 13 bp, Unknown
  misc_feature (1)..( 13): Result.005 file - promoters50/1394510
tttcacaaatcct

SEQ ID NO: 168868 - DNA, 13 bp, Unknown
  misc_feature (1)..( 13): Result.005 file - promoters50/1394510
cataatattattg

SEQ ID NO: 168869 - DNA, 13 bp, Unknown
  misc_feature (1)..( 13): Result.005 file - promoters50/1394510
tttaatatttcat

SEQ ID NO: 168870 - DNA, 13 bp, Unknown
  misc_feature (1)..( 13): Result.005 file - promoters50/1394510
tgtaatttttcat

SEQ ID NO: 168871 - DNA, 9 bp, Unknown
  misc_feature (1)..( 9): Result.005 file - promoters50/1394514
tattttaca

SEQ ID NO: 168872 - DNA, 9 bp, Unknown
  misc_feature (1)..( 9): Result.005 file - promoters50/1394514
aattttagt

SEQ ID NO: 168873 - DNA, 9 bp, Unknown
  misc_feature (1)..( 9): Result.005 file - promoters50/1394514
aatttgagt

SEQ ID NO: 168874 - DNA, 11 bp, Unknown
  misc_feature (1)..( 11): Result.005 file - promoters50/1394514
ttaattgaacc

SEQ ID NO: 168875 - DNA, 11 bp, Unknown
  misc_feature (1)..( 11): Result.005 file - promoters50/1394514
ttagttgtttc

SEQ ID NO: 168876 - DNA, 11 bp, Unknown
  misc_feature (1)..( 11): Result.005 file - promoters50/1394514
acaatttgagt

SEQ ID NO: 168877 - DNA, 10 bp, Unknown
  misc_feature (1)..( 10): Result.005 file - promoters50/1394514
aaactgttta

SEQ ID NO: 168878 - DNA, 10 bp, Unknown
  misc_feature (1)..( 10): Result.005 file - promoters50/1394514
aaaatgttag

SEQ ID NO: 168879 - DNA, 10 bp, Unknown
  misc_feature (1)..( 10): Result.005 file - promoters50/1394514
caaatgatag

SEQ ID NO: 168880 - DNA, 9 bp, Unknown
  misc_feature (1)..( 9): Result.005 file - promoters50/1394514
catgattga

SEQ ID NO: 168881 - DNA, 9 bp, Unknown
  misc_feature (1)..( 9): Result.005 file - promoters50/1394514
cattattgt

SEQ ID NO: 168882 - DNA, 9 bp, Unknown
  misc_feature (1)..( 9): Result.005 file - promoters50/1394514
aagtattgt

SEQ ID NO: 168883 - DNA, 8 bp, Unknown
  misc_feature (1)..( 8): Result.005 file - promoters50/1394545
catctaac

SEQ ID NO: 168884 - DNA, 8 bp, Unknown
  misc_feature (1)..( 8): Result.005 file - promoters50/1394545
aatctaat

SEQ ID NO: 168885 - DNA, 8 bp, Unknown
  misc_feature (1)..( 8): Result.005 file - promoters50/1394545
catctaac

SEQ ID NO: 168886 - DNA, 12 bp, Unknown
  misc_feature (1)..( 12): Result.005 file - promoters50/1394592
tttaaaataata

SEQ ID NO: 168887 - DNA, 12 bp, Unknown
  misc_feature (1)..( 12): Result.005 file - promoters50/1394592
tttagaatccta

SEQ ID NO: 168888 - DNA, 12 bp, Unknown
  misc_feature (1)..( 12): Result.005 file - promoters50/1394592
tttagaatttga

SEQ ID NO: 168889 - DNA, 12 bp, Unknown
  misc_feature (1)..( 12): Result.005 file - promoters50/1394592
tccaaaataaaa

SEQ ID NO: 168890 - DNA, 12 bp, Unknown
  misc_feature (1)..( 12): Result.005 file - promoters50/1394592
tgaagaatctga

SEQ ID NO: 168891 - DNA, 12 bp, Unknown
  misc_feature (1)..( 12): Result.005 file - promoters50/1394592
cagaaacaaacc

SEQ ID NO: 168892 - DNA, 8 bp, Unknown
  misc_feature (1)..( 8): Result.005 file - promoters50/1394610
aaaactcc

SEQ ID NO: 168893 - DNA, 8 bp, Unknown
  misc_feature (1)..( 8): Result.005 file - promoters50/1394610
taaactct

SEQ ID NO: 168894 - DNA, 8 bp, Unknown
  misc_feature (1)..( 8): Result.005 file - promoters50/1394610
taaattct

SEQ ID NO: 168895 - DNA, 6 bp, Unknown
  misc_feature (1)..( 6): Result.005 file - promoters50/1394610
ctcttt

SEQ ID NO: 168896 - DNA, 6 bp, Unknown
  misc_feature (1)..( 6): Result.005 file - promoters50/1394610
ctcttt

SEQ ID NO: 168897 - DNA, 6 bp, Unknown
  misc_feature (1)..( 6): Result.005 file - promoters50/1394610
ctcttt

SEQ ID NO: 168898 - DNA, 11 bp, Unknown
  misc_feature (1)..( 11): Result.005 file - promoters50/1394610
aataataactt

SEQ ID NO: 168899 - DNA, 11 bp, Unknown
  misc_feature (1)..( 11): Result.005 file - promoters50/1394610
cataatagctt

SEQ ID NO: 168900 - DNA, 11 bp, Unknown
  misc_feature (1)..( 11): Result.005 file - promoters50/1394610
tctaattttgg

SEQ ID NO: 168901 - DNA, 11 bp, Unknown
  misc_feature (1)..( 11): Result.005 file - promoters50/1394610
tctgattagaa

SEQ ID NO: 168902 - DNA, 11 bp, Unknown
  misc_feature (1)..( 11): Result.005 file - promoters50/1394610
taactttggcc

SEQ ID NO: 168903 - DNA, 11 bp, Unknown
  misc_feature (1)..( 11): Result.005 file - promoters50/1394610
ttactttgctt

SEQ ID NO: 168904 - DNA, 11 bp, Unknown
  misc_feature (1)..( 11): Result.005 file - promoters50/1394610
taattttggta

SEQ ID NO: 168905 - DNA, 11 bp, Unknown
  misc_feature (1)..( 11): Result.005 file - promoters50/1394610
caaatctgatt

SEQ ID NO: 168906 - DNA, 8 bp, Unknown
  misc_feature (1)..( 8): Result.005 file - promoters50/1394610
ataatttt

SEQ ID NO: 168907 - DNA, 8 bp, Unknown
  misc_feature (1)..( 8): Result.005 file - promoters50/1394610
ataattac

SEQ ID NO: 168908 - DNA, 8 bp, Unknown
  misc_feature (1)..( 8): Result.005 file - promoters50/1394610
ctaatttt

SEQ ID NO: 168909 - DNA, 19 bp, Unknown
  misc_feature (1)..( 19): Result.005 file - promoters50/1394625
caaattaaaaaaaaaatct

SEQ ID NO: 168910 - DNA, 19 bp, Unknown
  misc_feature (1)..( 19): Result.005 file - promoters50/1394625
aagattataaaaaaagtct

SEQ ID NO: 168911 - DNA, 19 bp, Unknown
  misc_feature (1)..( 19): Result.005 file - promoters50/1394625
caaattcaaagaacataga

SEQ ID NO: 168912 - DNA, 19 bp, Unknown
  misc_feature (1)..( 19): Result.005 file - promoters50/1394625
ataattaattttctcggtc

SEQ ID NO: 168913 - DNA, 19 bp, Unknown
  misc_feature (1)..( 19): Result.005 file - promoters50/1394625
ttaaaaaaaaaaaaaaatt

SEQ ID NO: 168914 - DNA, 19 bp, Unknown
  misc_feature (1)..( 19): Result.005 file - promoters50/1394625
ctaattttaattttgttat

SEQ ID NO: 168915 - DNA, 8 bp, Unknown
  misc_feature (1)..( 8): Result.005 file - promoters50/1394625
aaattttt

SEQ ID NO: 168916 - DNA, 8 bp, Unknown
  misc_feature (1)..( 8): Result.005 file - promoters50/1394625
aaatcttt

SEQ ID NO: 168917 - DNA, 8 bp, Unknown
  misc_feature (1)..( 8): Result.005 file - promoters50/1394625
taatttta

SEQ ID NO: 168918 - DNA, 8 bp, Unknown
  misc_feature (1)..( 8): Result.005 file - promoters50/1394625
taatttta

SEQ ID NO: 168919 - DNA, 8 bp, Unknown
  misc_feature (1)..( 8): Result.005 file - promoters50/1394625
taatttta

SEQ ID NO: 168920 - DNA, 8 bp, Unknown
  misc_feature (1)..( 8): Result.005 file - promoters50/1394625
taattttc

SEQ ID NO: 168921 - DNA, 10 bp, Unknown
  misc_feature (1)..( 10): Result.005 file - promoters50/1394625
ttttttaaat

SEQ ID NO: 168922 - DNA, 10 bp, Unknown
  misc_feature (1)..( 10): Result.005 file - promoters50/1394625
aatttaaaat

SEQ ID NO: 168923 - DNA, 10 bp, Unknown
  misc_feature (1)..( 10): Result.005 file - promoters50/1394625
gcttttaatt

SEQ ID NO: 168924 - DNA, 11 bp, Unknown
  misc_feature (1)..( 11): Result.005 file - promoters50/1394625
ttttgttattg

SEQ ID NO: 168925 - DNA, 11 bp, Unknown
  misc_feature (1)..( 11): Result.005 file - promoters50/1394625
atttgtaatga

SEQ ID NO: 168926 - DNA, 11 bp, Unknown
  misc_feature (1)..( 11): Result.005 file - promoters50/1394625
tttggtttacg

SEQ ID NO: 168927 - DNA, 9 bp, Unknown
  misc_feature (1)..( 9): Result.005 file - promoters50/1394625
caaagatgt

SEQ ID NO: 168928 - DNA, 9 bp, Unknown
  misc_feature (1)..( 9): Result.005 file - promoters50/1394625
aaaatatgt

SEQ ID NO: 168929 - DNA, 9 bp, Unknown
  misc_feature (1)..( 9): Result.005 file - promoters50/1394625
aaaataaaa

SEQ ID NO: 168930 - DNA, 9 bp, Unknown
  misc_feature (1)..( 9): Result.005 file - promoters50/1394625
cgaatatgc

SEQ ID NO: 168931 - DNA, 9 bp, Unknown
  misc_feature (1)..( 9): Result.005 file - promoters50/1394625
taaacataa

SEQ ID NO: 168932 - DNA, 9 bp, Unknown
  misc_feature (1)..( 9): Result.005 file - promoters50/1394625
agaacatgg

SEQ ID NO: 168933 - DNA, 11 bp, Unknown
  misc_feature (1)..( 11): Result.005 file - promoters50/1394625
atttaatcaaa

SEQ ID NO: 168934 - DNA, 11 bp, Unknown
  misc_feature (1)..( 11): Result.005 file - promoters50/1394625
atttaataaaa

SEQ ID NO: 168935 - DNA, 11 bp, Unknown
  misc_feature (1)..( 11): Result.005 file - promoters50/1394625
atttaaaaaaa

SEQ ID NO: 168936 - DNA, 11 bp, Unknown
  misc_feature (1)..( 11): Result.005 file - promoters50/1394625
gaagcataaaa

SEQ ID NO: 168937 - DNA, 11 bp, Unknown
  misc_feature (1)..( 11): Result.005 file - promoters50/1394625
gtataataagt

SEQ ID NO: 168938 - DNA, 11 bp, Unknown
  misc_feature (1)..( 11): Result.005 file - promoters50/1394625
ttatagtaacg

SEQ ID NO: 168939 - DNA, 12 bp, Unknown
  misc_feature (1)..( 12): Result.005 file - promoters50/1394625
agatttttaaat

SEQ ID NO: 168940 - DNA, 12 bp, Unknown
  misc_feature (1)..( 12): Result.005 file - promoters50/1394625
agattattaaat

SEQ ID NO: 168941 - DNA, 12 bp, Unknown
  misc_feature (1)..( 12): Result.005 file - promoters50/1394625
aaattattaaag

SEQ ID NO: 168942 - DNA, 10 bp, Unknown
  misc_feature (1)..( 10): Result.005 file - promoters50/1394625
attatcaaaa

SEQ ID NO: 168943 - DNA, 12 bp, Unknown
  misc_feature (1)..( 12): Result.005 file - promoters50/1394625
caattatttatc

SEQ ID NO: 168944 - DNA, 12 bp, Unknown
  misc_feature (1)..( 12): Result.005 file - promoters50/1394625
acacaattaaac

SEQ ID NO: 168945 - DNA, 12 bp, Unknown
  misc_feature (1)..( 12): Result.005 file - promoters50/1394643
gttttatatatt

SEQ ID NO: 168946 - DNA, 12 bp, Unknown
  misc_feature (1)..( 12): Result.005 file - promoters50/1394643
gttatatgtatt

SEQ ID NO: 168947 - DNA, 12 bp, Unknown
  misc_feature (1)..( 12): Result.005 file - promoters50/1394643
gttttagaatat

SEQ ID NO: 168948 - DNA, 12 bp, Unknown
  misc_feature (1)..( 12): Result.005 file - promoters50/1394643
tctttataacaa

SEQ ID NO: 168949 - DNA, 13 bp, Unknown
  misc_feature (1)..( 13): Result.005 file - promoters50/1394643
atttaatacgttt

SEQ ID NO: 168950 - DNA, 13 bp, Unknown
  misc_feature (1)..( 13): Result.005 file - promoters50/1394643
tattaataatttt

SEQ ID NO: 168951 - DNA, 13 bp, Unknown
  misc_feature (1)..( 13): Result.005 file - promoters50/1394643
tattaagaatttg

SEQ ID NO: 168952 - DNA, 13 bp, Unknown
  misc_feature (1)..( 13): Result.005 file - promoters50/1394643
aattattaaactt

SEQ ID NO: 168953 - DNA, 13 bp, Unknown
  misc_feature (1)..( 13): Result.005 file - promoters50/1394643
aaaagcgaatttg

SEQ ID NO: 168954 - DNA, 12 bp, Unknown
  misc_feature (1)..( 12): Result.005 file - promoters50/1394643
atatttggtttt

SEQ ID NO: 168955 - DNA, 12 bp, Unknown
  misc_feature (1)..( 12): Result.005 file - promoters50/1394643
aattttagttat

SEQ ID NO: 168956 - DNA, 12 bp, Unknown
  misc_feature (1)..( 12): Result.005 file - promoters50/1394643
gaatttgatttt

SEQ ID NO: 168957 - DNA, 12 bp, Unknown
  misc_feature (1)..( 12): Result.005 file - promoters50/1394643
gaatttgtttga

SEQ ID NO: 168958 - DNA, 13 bp, Unknown
  misc_feature (1)..( 13): Result.005 file - promoters50/1394643
tatagtacattta

SEQ ID NO: 168959 - DNA, 13 bp, Unknown
  misc_feature (1)..( 13): Result.005 file - promoters50/1394643
aatattacgttta

SEQ ID NO: 168960 - DNA, 13 bp, Unknown
  misc_feature (1)..( 13): Result.005 file - promoters50/1394643
gatagtaaaaaga

SEQ ID NO: 168961 - DNA, 13 bp, Unknown
  misc_feature (1)..( 13): Result.005 file - promoters50/1394643
atatacacatttc

SEQ ID NO: 168962 - DNA, 13 bp, Unknown
  misc_feature (1)..( 13): Result.005 file - promoters50/1394643
aattttaataatt

SEQ ID NO: 168963 - DNA, 7 bp, Unknown
  misc_feature (1)..( 7): Result.005 file - promoters50/1394643
tttgata

SEQ ID NO: 168964 - DNA, 7 bp, Unknown
  misc_feature (1)..( 7): Result.005 file - promoters50/1394643
tttgatt

SEQ ID NO: 168965 - DNA, 7 bp, Unknown
  misc_feature (1)..( 7): Result.005 file - promoters50/1394643
tttgatt

SEQ ID NO: 168966 - DNA, 7 bp, Unknown
  misc_feature (1)..( 7): Result.005 file - promoters50/1394643
tttaatt

SEQ ID NO: 168967 - DNA, 11 bp, Unknown
  misc_feature (1)..( 11): Result.005 file - promoters50/1394643
tgtcttataga

SEQ ID NO: 168968 - DNA, 11 bp, Unknown
  misc_feature (1)..( 11): Result.005 file - promoters50/1394643
cttcttatatc

SEQ ID NO: 168969 - DNA, 11 bp, Unknown
  misc_feature (1)..( 11): Result.005 file - promoters50/1394643
aaaattagatc

SEQ ID NO: 168970 - DNA, 11 bp, Unknown
  misc_feature (1)..( 11): Result.005 file - promoters50/1394643
ctttttaaaaa

SEQ ID NO: 168971 - DNA, 9 bp, Unknown
  misc_feature (1)..( 9): Result.005 file - promoters50/1394676
tttggttga

SEQ ID NO: 168972 - DNA, 9 bp, Unknown
  misc_feature (1)..( 9): Result.005 file - promoters50/1394676
tttgtttga

SEQ ID NO: 168973 - DNA, 9 bp, Unknown
  misc_feature (1)..( 9): Result.005 file - promoters50/1394676
tttgatttt

SEQ ID NO: 168974 - DNA, 9 bp, Unknown
  misc_feature (1)..( 9): Result.005 file - promoters50/1394697
aatcataaa

SEQ ID NO: 168975 - DNA, 9 bp, Unknown
  misc_feature (1)..( 9): Result.005 file - promoters50/1394697
aattatata

SEQ ID NO: 168976 - DNA, 9 bp, Unknown
  misc_feature (1)..( 9): Result.005 file - promoters50/1394697
aatcagaaa

SEQ ID NO: 168977 - DNA, 9 bp, Unknown
  misc_feature (1)..( 9): Result.005 file - promoters50/1394697
tattttata

SEQ ID NO: 168978 - DNA, 9 bp, Unknown
  misc_feature (1)..( 9): Result.005 file - promoters50/1394697
aatgatatg

SEQ ID NO: 168979 - DNA, 9 bp, Unknown
  misc_feature (1)..( 9): Result.005 file - promoters50/1394697
tgttttatt

SEQ ID NO: 168980 - DNA, 9 bp, Unknown
  misc_feature (1)..( 9): Result.005 file - promoters50/1394697
tatccgaat

SEQ ID NO: 168981 - DNA, 19 bp, Unknown
  misc_feature (1)..( 19): Result.005 file - promoters50/1394697
ttattaaaatatttttcaa

SEQ ID NO: 168982 - DNA, 19 bp, Unknown
  misc_feature (1)..( 19): Result.005 file - promoters50/1394697
tctttataatgaaactgaa

SEQ ID NO: 168983 - DNA, 19 bp, Unknown
  misc_feature (1)..( 19): Result.005 file - promoters50/1394697
tttatataaaaaaaaacta

SEQ ID NO: 168984 - DNA, 19 bp, Unknown
  misc_feature (1)..( 19): Result.005 file - promoters50/1394697
actttttaaatggcgtggc

SEQ ID NO: 168985 - DNA, 19 bp, Unknown
  misc_feature (1)..( 19): Result.005 file - promoters50/1394697
acttttctacggtacatta

SEQ ID NO: 168986 - DNA, 19 bp, Unknown
  misc_feature (1)..( 19): Result.005 file - promoters50/1394697
caacaaaaacaaaacaaat

SEQ ID NO: 168987 - DNA, 11 bp, Unknown
  misc_feature (1)..( 11): Result.005 file - promoters50/1394697
gaaaacaattt

SEQ ID NO: 168988 - DNA, 11 bp, Unknown
  misc_feature (1)..( 11): Result.005 file - promoters50/1394697
gcaaataattc

SEQ ID NO: 168989 - DNA, 11 bp, Unknown
  misc_feature (1)..( 11): Result.005 file - promoters50/1394697
ttcaacaatag

SEQ ID NO: 168990 - DNA, 11 bp, Unknown
  misc_feature (1)..( 11): Result.005 file - promoters50/1394697
ttcgacaaatg

SEQ ID NO: 168991 - DNA, 12 bp, Unknown
  misc_feature (1)..( 12): Result.005 file - promoters50/1394697
tgcaactaattt

SEQ ID NO: 168992 - DNA, 12 bp, Unknown
  misc_feature (1)..( 12): Result.005 file - promoters50/1394697
ataaactaattt

SEQ ID NO: 168993 - DNA, 7 bp, Unknown
  misc_feature (1)..( 7): Result.005 file - promoters50/1394767
caattaa

SEQ ID NO: 168994 - DNA, 7 bp, Unknown
  misc_feature (1)..( 7): Result.005 file - promoters50/1394767
aaattaa

SEQ ID NO: 168995 - DNA, 7 bp, Unknown
  misc_feature (1)..( 7): Result.005 file - promoters50/1394767
caattac

SEQ ID NO: 168996 - DNA, 13 bp, Unknown
  misc_feature (1)..( 13): Result.005 file - promoters50/1394795
actatataaactc

SEQ ID NO: 168997 - DNA, 13 bp, Unknown
  misc_feature (1)..( 13): Result.005 file - promoters50/1394795
ttcatataaataa

SEQ ID NO: 168998 - DNA, 13 bp, Unknown
  misc_feature (1)..( 13): Result.005 file - promoters50/1394795
catatatataagt

SEQ ID NO: 168999 - DNA, 13 bp, Unknown
  misc_feature (1)..( 13): Result.005 file - promoters50/1394795
tctacatatccat

SEQ ID NO: 169000 - DNA, 13 bp, Unknown
  misc_feature (1)..( 13): Result.005 file - promoters50/1394795
tatatataaagtt

SEQ ID NO: 169001 - DNA, 13 bp, Unknown
  misc_feature (1)..( 13): Result.005 file - promoters50/1394795
agtatatatactc

SEQ ID NO: 169002 - DNA, 13 bp, Unknown
  misc_feature (1)..( 13): Result.005 file - promoters50/1394795
tctacacttaacc

SEQ ID NO: 169003 - DNA, 20 bp, Unknown
  misc_feature (1)..( 20): Result.005 file - promoters50/1394819
acaaaatgtcttatcaactt

SEQ ID NO: 169004 - DNA, 20 bp, Unknown
  misc_feature (1)..( 20): Result.005 file - promoters50/1394819
ggaaaaggtcctatcatctt

SEQ ID NO: 169005 - DNA, 20 bp, Unknown
  misc_feature (1)..( 20): Result.005 file - promoters50/1394819
acataattcattcataaacg

SEQ ID NO: 169006 - DNA, 12 bp, Unknown
  misc_feature (1)..( 12): Result.005 file - promoters50/1394842
taaggattggtt

SEQ ID NO: 169007 - DNA, 12 bp, Unknown
  misc_feature (1)..( 12): Result.005 file - promoters50/1394842
taagaatttgtt

SEQ ID NO: 169008 - DNA, 12 bp, Unknown
  misc_feature (1)..( 12): Result.005 file - promoters50/1394842
atcggattaggg

SEQ ID NO: 169009 - DNA, 8 bp, Unknown
  misc_feature (1)..( 8): Result.005 file - promoters50/1394842
attgtgtt

SEQ ID NO: 169010 - DNA, 8 bp, Unknown
  misc_feature (1)..( 8): Result.005 file - promoters50/1394842
tttgtgtt

SEQ ID NO: 169011 - DNA, 8 bp, Unknown
  misc_feature (1)..( 8): Result.005 file - promoters50/1394842
attttgtt

SEQ ID NO: 169012 - DNA, 8 bp, Unknown
  misc_feature (1)..( 8): Result.005 file - promoters50/1394842
taaaccgg

SEQ ID NO: 169013 - DNA, 8 bp, Unknown
  misc_feature (1)..( 8): Result.005 file - promoters50/1394842
gaaatcgg

SEQ ID NO: 169014 - DNA, 8 bp, Unknown
  misc_feature (1)..( 8): Result.005 file - promoters50/1394842
taacccga

SEQ ID NO: 169015 - DNA, 8 bp, Unknown
  misc_feature (1)..( 8): Result.005 file - promoters50/1394842
ttttttgt

SEQ ID NO: 169016 - DNA, 8 bp, Unknown
  misc_feature (1)..( 8): Result.005 file - promoters50/1394842
ggttttgt

SEQ ID NO: 169017 - DNA, 8 bp, Unknown
  misc_feature (1)..( 8): Result.005 file - promoters50/1394842
ggtgttgg

SEQ ID NO: 169018 - DNA, 8 bp, Unknown
  misc_feature (1)..( 8): Result.005 file - promoters50/1394842
gattttgg

SEQ ID NO: 169019 - DNA, 8 bp, Unknown
  misc_feature (1)..( 8): Result.005 file - promoters50/1394842
gattttgt

SEQ ID NO: 169020 - DNA, 8 bp, Unknown
  misc_feature (1)..( 8): Result.005 file - promoters50/1394842
gattgtgt

SEQ ID NO: 169021 - DNA, 7 bp, Unknown
  misc_feature (1)..( 7): Result.005 file - promoters50/1394861
attgaag

SEQ ID NO: 169022 - DNA, 7 bp, Unknown
  misc_feature (1)..( 7): Result.005 file - promoters50/1394861
attgaaa

SEQ ID NO: 169023 - DNA, 7 bp, Unknown
  misc_feature (1)..( 7): Result.005 file - promoters50/1394861
gttgaaa

SEQ ID NO: 169024 - DNA, 10 bp, Unknown
  misc_feature (1)..( 10): Result.005 file - promoters50/1394861
ggcaatttat

SEQ ID NO: 169025 - DNA, 10 bp, Unknown
  misc_feature (1)..( 10): Result.005 file - promoters50/1394861
ggccatttta

SEQ ID NO: 169026 - DNA, 10 bp, Unknown
  misc_feature (1)..( 10): Result.005 file - promoters50/1394861
tgccttttta

SEQ ID NO: 169027 - DNA, 8 bp, Unknown
  misc_feature (1)..( 8): Result.005 file - promoters50/1394861
aaacaaaa

SEQ ID NO: 169028 - DNA, 8 bp, Unknown
  misc_feature (1)..( 8): Result.005 file - promoters50/1394861
caactaaa

SEQ ID NO: 169029 - DNA, 8 bp, Unknown
  misc_feature (1)..( 8): Result.005 file - promoters50/1394861
aaagaaag

SEQ ID NO: 169030 - DNA, 10 bp, Unknown
  misc_feature (1)..( 10): Result.005 file - promoters50/1394861
gttctttaag

SEQ ID NO: 169031 - DNA, 10 bp, Unknown
  misc_feature (1)..( 10): Result.005 file - promoters50/1394861
gttcttaaag

SEQ ID NO: 169032 - DNA, 10 bp, Unknown
  misc_feature (1)..( 10): Result.005 file - promoters50/1394861
attcttattt

SEQ ID NO: 169033 - DNA, 8 bp, Unknown
  misc_feature (1)..( 8): Result.005 file - promoters50/1394861
attgtatt

SEQ ID NO: 169034 - DNA, 8 bp, Unknown
  misc_feature (1)..( 8): Result.005 file - promoters50/1394861
attttatt

SEQ ID NO: 169035 - DNA, 8 bp, Unknown
  misc_feature (1)..( 8): Result.005 file - promoters50/1394861
tttttatg

SEQ ID NO: 169036 - DNA, 9 bp, Unknown
  misc_feature (1)..( 9): Result.005 file - promoters50/1394884
aattttttt

SEQ ID NO: 169037 - DNA, 9 bp, Unknown
  misc_feature (1)..( 9): Result.005 file - promoters50/1394884
cattttttt

SEQ ID NO: 169038 - DNA, 9 bp, Unknown
  misc_feature (1)..( 9): Result.005 file - promoters50/1394884
aattttaat

SEQ ID NO: 169039 - DNA, 8 bp, Unknown
  misc_feature (1)..( 8): Result.005 file - promoters50/1394884
gtttattt

SEQ ID NO: 169040 - DNA, 8 bp, Unknown
  misc_feature (1)..( 8): Result.005 file - promoters50/1394884
atttgttt

SEQ ID NO: 169041 - DNA, 8 bp, Unknown
  misc_feature (1)..( 8): Result.005 file - promoters50/1394884
atttgtat

SEQ ID NO: 169042 - DNA, 9 bp, Unknown
  misc_feature (1)..( 9): Result.005 file - promoters50/1394884
atttctata

SEQ ID NO: 169043 - DNA, 9 bp, Unknown
  misc_feature (1)..( 9): Result.005 file - promoters50/1394884
atttgtata

SEQ ID NO: 169044 - DNA, 9 bp, Unknown
  misc_feature (1)..( 9): Result.005 file - promoters50/1394884
atttgtttg

SEQ ID NO: 169045 - DNA, 7 bp, Unknown
  misc_feature (1)..( 7): Result.005 file - promoters50/1394884
aatttat

SEQ ID NO: 169046 - DNA, 7 bp, Unknown
  misc_feature (1)..( 7): Result.005 file - promoters50/1394884
aatttaa

SEQ ID NO: 169047 - DNA, 7 bp, Unknown
  misc_feature (1)..( 7): Result.005 file - promoters50/1394884
tatttaa

SEQ ID NO: 169048 - DNA, 10 bp, Unknown
  misc_feature (1)..( 10): Result.005 file - promoters50/1394884
gaattatatt

SEQ ID NO: 169049 - DNA, 10 bp, Unknown
  misc_feature (1)..( 10): Result.005 file - promoters50/1394884
ttcttatatc

SEQ ID NO: 169050 - DNA, 10 bp, Unknown
  misc_feature (1)..( 10): Result.005 file - promoters50/1394884
gaaatatata

SEQ ID NO: 169051 - DNA, 10 bp, Unknown
  misc_feature (1)..( 10): Result.005 file - promoters50/1394884
aaattagatc

SEQ ID NO: 169052 - DNA, 11 bp, Unknown
  misc_feature (1)..( 11): Result.005 file - promoters50/1394884
ctgaattatat

SEQ ID NO: 169053 - DNA, 11 bp, Unknown
  misc_feature (1)..( 11): Result.005 file - promoters50/1394884
ctgtattgcag

SEQ ID NO: 169054 - DNA, 11 bp, Unknown
  misc_feature (1)..( 11): Result.005 file - promoters50/1394884
tagaaatatat

SEQ ID NO: 169055 - DNA, 9 bp, Unknown
  misc_feature (1)..( 9): Result.005 file - promoters50/1394884
ttctcttag

SEQ ID NO: 169056 - DNA, 9 bp, Unknown
  misc_feature (1)..( 9): Result.005 file - promoters50/1394884
taatcttag

SEQ ID NO: 169057 - DNA, 9 bp, Unknown
  misc_feature (1)..( 9): Result.005 file - promoters50/1394884
taatattaa

SEQ ID NO: 169058 - DNA, 6 bp, Unknown
  misc_feature (1)..( 6): Result.005 file - promoters50/1394884
tataat

SEQ ID NO: 169059 - DNA, 6 bp, Unknown
  misc_feature (1)..( 6): Result.005 file - promoters50/1394884
tataat

SEQ ID NO: 169060 - DNA, 6 bp, Unknown
  misc_feature (1)..( 6): Result.005 file - promoters50/1394884
tataat

SEQ ID NO: 169061 - DNA, 6 bp, Unknown
  misc_feature (1)..( 6): Result.005 file - promoters50/1394884
atttaa

SEQ ID NO: 169062 - DNA, 6 bp, Unknown
  misc_feature (1)..( 6): Result.005 file - promoters50/1394884
atttaa

SEQ ID NO: 169063 - DNA, 6 bp, Unknown
  misc_feature (1)..( 6): Result.005 file - promoters50/1394884
atttaa

SEQ ID NO: 169064 - DNA, 8 bp, Unknown
  misc_feature (1)..( 8): Result.005 file - promoters50/1394978
atcaacat

SEQ ID NO: 169065 - DNA, 8 bp, Unknown
  misc_feature (1)..( 8): Result.005 file - promoters50/1394978
atcaacca

SEQ ID NO: 169066 - DNA, 8 bp, Unknown
  misc_feature (1)..( 8): Result.005 file - promoters50/1394978
atcaacat

SEQ ID NO: 169067 - DNA, 10 bp, Unknown
  misc_feature (1)..( 10): Result.005 file - promoters50/1394978
atcaacatta

SEQ ID NO: 169068 - DNA, 10 bp, Unknown
  misc_feature (1)..( 10): Result.005 file - promoters50/1394978
ataaacttta

SEQ ID NO: 169069 - DNA, 10 bp, Unknown
  misc_feature (1)..( 10): Result.005 file - promoters50/1394978
atcaacatag

SEQ ID NO: 169070 - DNA, 10 bp, Unknown
  misc_feature (1)..( 10): Result.005 file - promoters50/1394978
acaaacattg

SEQ ID NO: 169071 - DNA, 12 bp, Unknown
  misc_feature (1)..( 12): Result.005 file - promoters50/1394978
caatatcattta

SEQ ID NO: 169072 - DNA, 12 bp, Unknown
  misc_feature (1)..( 12): Result.005 file - promoters50/1394978
caatttcattta

SEQ ID NO: 169073 - DNA, 12 bp, Unknown
  misc_feature (1)..( 12): Result.005 file - promoters50/1394978
tttttttattgt

SEQ ID NO: 169074 - DNA, 8 bp, Unknown
  misc_feature (1)..( 8): Result.005 file - promoters50/1394978
cttatatc

SEQ ID NO: 169075 - DNA, 8 bp, Unknown
  misc_feature (1)..( 8): Result.005 file - promoters50/1394978
tttatatc

SEQ ID NO: 169076 - DNA, 8 bp, Unknown
  misc_feature (1)..( 8): Result.005 file - promoters50/1394978
cttttatg

SEQ ID NO: 169077 - DNA, 8 bp, Unknown
  misc_feature (1)..( 8): Result.005 file - promoters50/1394978
tagaaaaa

SEQ ID NO: 169078 - DNA, 8 bp, Unknown
  misc_feature (1)..( 8): Result.005 file - promoters50/1394978
cagaaaaa

SEQ ID NO: 169079 - DNA, 8 bp, Unknown
  misc_feature (1)..( 8): Result.005 file - promoters50/1394978
taggaaat

SEQ ID NO: 169080 - DNA, 14 bp, Unknown
  misc_feature (1)..( 14): Result.005 file - promoters50/1394978
aaacaccattttaa

SEQ ID NO: 169081 - DNA, 14 bp, Unknown
  misc_feature (1)..( 14): Result.005 file - promoters50/1394978
aaaaaccttttttt

SEQ ID NO: 169082 - DNA, 14 bp, Unknown
  misc_feature (1)..( 14): Result.005 file - promoters50/1394978
ttggttgattttaa

SEQ ID NO: 169083 - DNA, 9 bp, Unknown
  misc_feature (1)..( 9): Result.005 file - promoters50/1394978
aaaagagaa

SEQ ID NO: 169084 - DNA, 9 bp, Unknown
  misc_feature (1)..( 9): Result.005 file - promoters50/1394978
cgaagagaa

SEQ ID NO: 169085 - DNA, 9 bp, Unknown
  misc_feature (1)..( 9): Result.005 file - promoters50/1394978
aaaagagaa

SEQ ID NO: 169086 - DNA, 9 bp, Unknown
  misc_feature (1)..( 9): Result.005 file - promoters50/1394978
ttaaattcc

SEQ ID NO: 169087 - DNA, 9 bp, Unknown
  misc_feature (1)..( 9): Result.005 file - promoters50/1394978
gtaaaatcc

SEQ ID NO: 169088 - DNA, 9 bp, Unknown
  misc_feature (1)..( 9): Result.005 file - promoters50/1394978
gtataattt

SEQ ID NO: 169089 - DNA, 10 bp, Unknown
  misc_feature (1)..( 10): Result.005 file - promoters50/1394978
aaaaataaag

SEQ ID NO: 169090 - DNA, 10 bp, Unknown
  misc_feature (1)..( 10): Result.005 file - promoters50/1394978
aaaattaaaa

SEQ ID NO: 169091 - DNA, 10 bp, Unknown
  misc_feature (1)..( 10): Result.005 file - promoters50/1394978
tcaattaagt

SEQ ID NO: 169092 - DNA, 8 bp, Unknown
  misc_feature (1)..( 8): Result.005 file - promoters50/1394978
tgtatatc

SEQ ID NO: 169093 - DNA, 8 bp, Unknown
  misc_feature (1)..( 8): Result.005 file - promoters50/1394978
tgtataat

SEQ ID NO: 169094 - DNA, 8 bp, Unknown
  misc_feature (1)..( 8): Result.005 file - promoters50/1394978
agtaaaat

SEQ ID NO: 169095 - DNA, 9 bp, Unknown
  misc_feature (1)..( 9): Result.005 file - promoters50/1395027
taaactaat

SEQ ID NO: 169096 - DNA, 9 bp, Unknown
  misc_feature (1)..( 9): Result.005 file - promoters50/1395027
aaaactaat

SEQ ID NO: 169097 - DNA, 9 bp, Unknown
  misc_feature (1)..( 9): Result.005 file - promoters50/1395027
taatctatg

SEQ ID NO: 169098 - DNA, 10 bp, Unknown
  misc_feature (1)..( 10): Result.005 file - promoters50/1395027
ataaataata

SEQ ID NO: 169099 - DNA, 10 bp, Unknown
  misc_feature (1)..( 10): Result.005 file - promoters50/1395027
ataaattata

SEQ ID NO: 169100 - DNA, 10 bp, Unknown
  misc_feature (1)..( 10): Result.005 file - promoters50/1395027
ggaaataatc

SEQ ID NO: 169101 - DNA, 8 bp, Unknown
  misc_feature (1)..( 8): Result.005 file - promoters50/1395027
aaagcaaa

SEQ ID NO: 169102 - DNA, 8 bp, Unknown
  misc_feature (1)..( 8): Result.005 file - promoters50/1395027
aaaacaaa

SEQ ID NO: 169103 - DNA, 8 bp, Unknown
  misc_feature (1)..( 8): Result.005 file - promoters50/1395027
aaaaaaaa

SEQ ID NO: 169104 - DNA, 8 bp, Unknown
  misc_feature (1)..( 8): Result.005 file - promoters50/1395027
aaaatatg

SEQ ID NO: 169105 - DNA, 8 bp, Unknown
  misc_feature (1)..( 8): Result.005 file - promoters50/1395027
aaaataca

SEQ ID NO: 169106 - DNA, 8 bp, Unknown
  misc_feature (1)..( 8): Result.005 file - promoters50/1395027
gaaatata

SEQ ID NO: 169107 - DNA, 8 bp, Unknown
  misc_feature (1)..( 8): Result.005 file - promoters50/1395046
actataaa

SEQ ID NO: 169108 - DNA, 8 bp, Unknown
  misc_feature (1)..( 8): Result.005 file - promoters50/1395046
tctataaa

SEQ ID NO: 169109 - DNA, 8 bp, Unknown
  misc_feature (1)..( 8): Result.005 file - promoters50/1395046
tctctaaa

SEQ ID NO: 169110 - DNA, 14 bp, Unknown
  misc_feature (1)..( 14): Result.005 file - promoters50/1395066
tttggaactgagta

SEQ ID NO: 169111 - DNA, 14 bp, Unknown
  misc_feature (1)..( 14): Result.005 file - promoters50/1395066
tttggaaatgagta

SEQ ID NO: 169112 - DNA, 14 bp, Unknown
  misc_feature (1)..( 14): Result.005 file - promoters50/1395066
ttagaaaatgcgta

SEQ ID NO: 169113 - DNA, 14 bp, Unknown
  misc_feature (1)..( 14): Result.005 file - promoters50/1395066
tttgaaaaaaaact

SEQ ID NO: 169114 - DNA, 14 bp, Unknown
  misc_feature (1)..( 14): Result.005 file - promoters50/1395066
aatgaaaactccca

SEQ ID NO: 169115 - DNA, 9 bp, Unknown
  misc_feature (1)..( 9): Result.005 file - promoters50/1395066
aataacaaa

SEQ ID NO: 169116 - DNA, 9 bp, Unknown
  misc_feature (1)..( 9): Result.005 file - promoters50/1395066
acgaacaaa

SEQ ID NO: 169117 - DNA, 10 bp, Unknown
  misc_feature (1)..( 10): Result.005 file - promoters50/1395066
agtaactaaa

SEQ ID NO: 169118 - DNA, 10 bp, Unknown
  misc_feature (1)..( 10): Result.005 file - promoters50/1395066
agtaactaac

SEQ ID NO: 169119 - DNA, 10 bp, Unknown
  misc_feature (1)..( 10): Result.005 file - promoters50/1395066
agaaaccaaa

SEQ ID NO: 169120 - DNA, 9 bp, Unknown
  misc_feature (1)..( 9): Result.005 file - promoters50/1395095
ttttctttc

SEQ ID NO: 169121 - DNA, 9 bp, Unknown
  misc_feature (1)..( 9): Result.005 file - promoters50/1395095
atttatttc

SEQ ID NO: 169122 - DNA, 9 bp, Unknown
  misc_feature (1)..( 9): Result.005 file - promoters50/1395095
atttttttt

SEQ ID NO: 169123 - DNA, 9 bp, Unknown
  misc_feature (1)..( 9): Result.005 file - promoters50/1395095
ttttatttc

SEQ ID NO: 169124 - DNA, 9 bp, Unknown
  misc_feature (1)..( 9): Result.005 file - promoters50/1395095
tcttctttt

SEQ ID NO: 169125 - DNA, 9 bp, Unknown
  misc_feature (1)..( 9): Result.005 file - promoters50/1395095
ctttgtttt

SEQ ID NO: 169126 - DNA, 9 bp, Unknown
  misc_feature (1)..( 9): Result.005 file - promoters50/1395095
atttgttgt

SEQ ID NO: 169127 - DNA, 9 bp, Unknown
  misc_feature (1)..( 9): Result.005 file - promoters50/1395095
gatttttgt

SEQ ID NO: 169128 - DNA, 7 bp, Unknown
  misc_feature (1)..( 7): Result.005 file - promoters50/1395128
atatgtg

SEQ ID NO: 169129 - DNA, 7 bp, Unknown
  misc_feature (1)..( 7): Result.005 file - promoters50/1395128
atatgta

SEQ ID NO: 169130 - DNA, 7 bp, Unknown
  misc_feature (1)..( 7): Result.005 file - promoters50/1395128
ttatgta

SEQ ID NO: 169131 - DNA, 10 bp, Unknown
  misc_feature (1)..( 10): Result.005 file - promoters50/1395128
ataattaaat

SEQ ID NO: 169132 - DNA, 10 bp, Unknown
  misc_feature (1)..( 10): Result.005 file - promoters50/1395128
ataactaaat

SEQ ID NO: 169133 - DNA, 10 bp, Unknown
  misc_feature (1)..( 10): Result.005 file - promoters50/1395128
ctaattaaca

SEQ ID NO: 169134 - DNA, 12 bp, Unknown
  misc_feature (1)..( 12): Result.005 file - promoters50/1395128
tttatataaacc

SEQ ID NO: 169135 - DNA, 12 bp, Unknown
  misc_feature (1)..( 12): Result.005 file - promoters50/1395128
ttaatagaaaca

SEQ ID NO: 169136 - DNA, 12 bp, Unknown
  misc_feature (1)..( 12): Result.005 file - promoters50/1395128
aaaataaaaaaa

SEQ ID NO: 169137 - DNA, 12 bp, Unknown
  misc_feature (1)..( 12): Result.005 file - promoters50/1395128
aaaacaaaaaaa

SEQ ID NO: 169138 - DNA, 9 bp, Unknown
  misc_feature (1)..( 9): Result.005 file - promoters50/1395128
acagatgac

SEQ ID NO: 169139 - DNA, 9 bp, Unknown
  misc_feature (1)..( 9): Result.005 file - promoters50/1395128
acagatgaa

SEQ ID NO: 169140 - DNA, 9 bp, Unknown
  misc_feature (1)..( 9): Result.005 file - promoters50/1395128
gaagaagaa

SEQ ID NO: 169141 - DNA, 9 bp, Unknown
  misc_feature (1)..( 9): Result.005 file - promoters50/1395128
tcaaacaaa

SEQ ID NO: 169142 - DNA, 9 bp, Unknown
  misc_feature (1)..( 9): Result.005 file - promoters50/1395128
agaaaaaaa

SEQ ID NO: 169143 - DNA, 9 bp, Unknown
  misc_feature (1)..( 9): Result.005 file - promoters50/1395128
tcaaacatg

SEQ ID NO: 169144 - DNA, 7 bp, Unknown
  misc_feature (1)..( 7): Result.005 file - promoters50/1395128
ccaattg

SEQ ID NO: 169145 - DNA, 7 bp, Unknown
  misc_feature (1)..( 7): Result.005 file - promoters50/1395128
ccaattt

SEQ ID NO: 169146 - DNA, 7 bp, Unknown
  misc_feature (1)..( 7): Result.005 file - promoters50/1395128
acaattt

SEQ ID NO: 169147 - DNA, 9 bp, Unknown
  misc_feature (1)..( 9): Result.005 file - promoters50/1395128
tttatcaaa

SEQ ID NO: 169148 - DNA, 9 bp, Unknown
  misc_feature (1)..( 9): Result.005 file - promoters50/1395128
tttaccaaa

SEQ ID NO: 169149 - DNA, 9 bp, Unknown
  misc_feature (1)..( 9): Result.005 file - promoters50/1395128
tttatcaac

SEQ ID NO: 169150 - DNA, 12 bp, Unknown
  misc_feature (1)..( 12): Result.005 file - promoters50/1395128
taataaagagag

SEQ ID NO: 169151 - DNA, 12 bp, Unknown
  misc_feature (1)..( 12): Result.005 file - promoters50/1395128
taacaaaaagaa

SEQ ID NO: 169152 - DNA, 12 bp, Unknown
  misc_feature (1)..( 12): Result.005 file - promoters50/1395128
atagaaaacgaa

SEQ ID NO: 169153 - DNA, 9 bp, Unknown
  misc_feature (1)..( 9): Result.005 file - promoters50/1395128
ctttatcaa

SEQ ID NO: 169154 - DNA, 9 bp, Unknown
  misc_feature (1)..( 9): Result.005 file - promoters50/1395128
cttgatcca

SEQ ID NO: 169155 - DNA, 9 bp, Unknown
  misc_feature (1)..( 9): Result.005 file - promoters50/1395128
atttaccaa

SEQ ID NO: 169156 - DNA, 7 bp, Unknown
  misc_feature (1)..( 7): Result.005 file - promoters50/1395128
attttgt

SEQ ID NO: 169157 - DNA, 7 bp, Unknown
  misc_feature (1)..( 7): Result.005 file - promoters50/1395128
tttttgt

SEQ ID NO: 169158 - DNA, 7 bp, Unknown
  misc_feature (1)..( 7): Result.005 file - promoters50/1395128
attttgc

SEQ ID NO: 169159 - DNA, 10 bp, Unknown
  misc_feature (1)..( 10): Result.005 file - promoters50/1395128
gaaacaagac

SEQ ID NO: 169160 - DNA, 10 bp, Unknown
  misc_feature (1)..( 10): Result.005 file - promoters50/1395128
aaaacaaaaa

SEQ ID NO: 169161 - DNA, 10 bp, Unknown
  misc_feature (1)..( 10): Result.005 file - promoters50/1395128
aaaataaaaa

SEQ ID NO: 169162 - DNA, 7 bp, Unknown
  misc_feature (1)..( 7): Result.005 file - promoters50/1395142
aggttat

SEQ ID NO: 169163 - DNA, 7 bp, Unknown
  misc_feature (1)..( 7): Result.005 file - promoters50/1395142
gggttat

SEQ ID NO: 169164 - DNA, 7 bp, Unknown
  misc_feature (1)..( 7): Result.005 file - promoters50/1395142
gggatat

SEQ ID NO: 169165 - DNA, 9 bp, Unknown
  misc_feature (1)..( 9): Result.005 file - promoters50/1395142
atttaccaa

SEQ ID NO: 169166 - DNA, 9 bp, Unknown
  misc_feature (1)..( 9): Result.005 file - promoters50/1395142
atttacaat

SEQ ID NO: 169167 - DNA, 8 bp, Unknown
  misc_feature (1)..( 8): Result.005 file - promoters50/1395142
tttagaat

SEQ ID NO: 169168 - DNA, 11 bp, Unknown
  misc_feature (1)..( 11): Result.005 file - promoters50/1395185
attatgtttta

SEQ ID NO: 169169 - DNA, 11 bp, Unknown
  misc_feature (1)..( 11): Result.005 file - promoters50/1395185
acaatgattta

SEQ ID NO: 169170 - DNA, 11 bp, Unknown
  misc_feature (1)..( 11): Result.005 file - promoters50/1395185
attaggtttct

SEQ ID NO: 169171 - DNA, 9 bp, Unknown
  misc_feature (1)..( 9): Result.005 file - promoters50/1395185
taagctaaa

SEQ ID NO: 169172 - DNA, 9 bp, Unknown
  misc_feature (1)..( 9): Result.005 file - promoters50/1395185
aaagcaaaa

SEQ ID NO: 169173 - DNA, 10 bp, Unknown
  misc_feature (1)..( 10): Result.005 file - promoters50/1395185
gaaggcaagt

SEQ ID NO: 169174 - DNA, 10 bp, Unknown
  misc_feature (1)..( 10): Result.005 file - promoters50/1395185
tgaagcaaac

SEQ ID NO: 169175 - DNA, 8 bp, Unknown
  misc_feature (1)..( 8): Result.005 file - promoters50/1395215
ttgttagt

SEQ ID NO: 169176 - DNA, 8 bp, Unknown
  misc_feature (1)..( 8): Result.005 file - promoters50/1395215
ttgctagt

SEQ ID NO: 169177 - DNA, 8 bp, Unknown
  misc_feature (1)..( 8): Result.005 file - promoters50/1395215
ttgttatc

SEQ ID NO: 169178 - DNA, 8 bp, Unknown
  misc_feature (1)..( 8): Result.005 file - promoters50/1395215
aaaacaac

SEQ ID NO: 169179 - DNA, 8 bp, Unknown
  misc_feature (1)..( 8): Result.005 file - promoters50/1395215
gaaacaaa

SEQ ID NO: 169180 - DNA, 8 bp, Unknown
  misc_feature (1)..( 8): Result.005 file - promoters50/1395215
gaaagaaa

SEQ ID NO: 169181 - DNA, 9 bp, Unknown
  misc_feature (1)..( 9): Result.005 file - promoters50/1395254
ttttctatt

SEQ ID NO: 169182 - DNA, 9 bp, Unknown
  misc_feature (1)..( 9): Result.005 file - promoters50/1395254
ttttttatt

SEQ ID NO: 169183 - DNA, 9 bp, Unknown
  misc_feature (1)..( 9): Result.005 file - promoters50/1395254
cgtttaatt

SEQ ID NO: 169184 - DNA, 8 bp, Unknown
  misc_feature (1)..( 8): Result.005 file - promoters50/1395254
cttgtttg

SEQ ID NO: 169185 - DNA, 8 bp, Unknown
  misc_feature (1)..( 8): Result.005 file - promoters50/1395254
attgtttg

SEQ ID NO: 169186 - DNA, 8 bp, Unknown
  misc_feature (1)..( 8): Result.005 file - promoters50/1395254
attttttt

SEQ ID NO: 169187 - DNA, 9 bp, Unknown
  misc_feature (1)..( 9): Result.005 file - promoters50/1395254
taaaaacag

SEQ ID NO: 169188 - DNA, 9 bp, Unknown
  misc_feature (1)..( 9): Result.005 file - promoters50/1395254
cataaacag

SEQ ID NO: 169189 - DNA, 9 bp, Unknown
  misc_feature (1)..( 9): Result.005 file - promoters50/1395254
taacaacaa

SEQ ID NO: 169190 - DNA, 8 bp, Unknown
  misc_feature (1)..( 8): Result.005 file - promoters50/1395254
attaatga

SEQ ID NO: 169191 - DNA, 8 bp, Unknown
  misc_feature (1)..( 8): Result.005 file - promoters50/1395254
attgatga

SEQ ID NO: 169192 - DNA, 8 bp, Unknown
  misc_feature (1)..( 8): Result.005 file - promoters50/1395254
attactga

SEQ ID NO: 169193 - DNA, 8 bp, Unknown
  misc_feature (1)..( 8): Result.005 file - promoters50/1395254
aaatctct

SEQ ID NO: 169194 - DNA, 8 bp, Unknown
  misc_feature (1)..( 8): Result.005 file - promoters50/1395254
aaatctaa

SEQ ID NO: 169195 - DNA, 8 bp, Unknown
  misc_feature (1)..( 8): Result.005 file - promoters50/1395254
taatttaa

SEQ ID NO: 169196 - DNA, 6 bp, Unknown
  misc_feature (1)..( 6): Result.005 file - promoters50/1395254
attttt

SEQ ID NO: 169197 - DNA, 6 bp, Unknown
  misc_feature (1)..( 6): Result.005 file - promoters50/1395254
attttt

SEQ ID NO: 169198 - DNA, 7 bp, Unknown
  misc_feature (1)..( 7): Result.005 file - promoters50/1395254
attgttt

SEQ ID NO: 169199 - DNA, 8 bp, Unknown
  misc_feature (1)..( 8): Result.005 file - promoters50/1395270
aattattt

SEQ ID NO: 169200 - DNA, 8 bp, Unknown
  misc_feature (1)..( 8): Result.005 file - promoters50/1395270
aattatcg

SEQ ID NO: 169201 - DNA, 8 bp, Unknown
  misc_feature (1)..( 8): Result.005 file - promoters50/1395270
aattattt

SEQ ID NO: 169202 - DNA, 13 bp, Unknown
  misc_feature (1)..( 13): Result.005 file - promoters50/1395390
acaaatatatata

SEQ ID NO: 169203 - DNA, 13 bp, Unknown
  misc_feature (1)..( 13): Result.005 file - promoters50/1395390
acaaatattttta

SEQ ID NO: 169204 - DNA, 13 bp, Unknown
  misc_feature (1)..( 13): Result.005 file - promoters50/1395390
acaaatctattaa

SEQ ID NO: 169205 - DNA, 13 bp, Unknown
  misc_feature (1)..( 13): Result.005 file - promoters50/1395390
aacaattttttta

SEQ ID NO: 169206 - DNA, 8 bp, Unknown
  misc_feature (1)..( 8): Result.005 file - promoters50/1395390
agaatttt

SEQ ID NO: 169207 - DNA, 8 bp, Unknown
  misc_feature (1)..( 8): Result.005 file - promoters50/1395390
agaatttc

SEQ ID NO: 169208 - DNA, 8 bp, Unknown
  misc_feature (1)..( 8): Result.005 file - promoters50/1395390
ataatttt

SEQ ID NO: 169209 - DNA, 8 bp, Unknown
  misc_feature (1)..( 8): Result.005 file - promoters50/1395390
ataattta

SEQ ID NO: 169210 - DNA, 10 bp, Unknown
  misc_feature (1)..( 10): Result.005 file - promoters50/1395390
actttttaaa

SEQ ID NO: 169211 - DNA, 10 bp, Unknown
  misc_feature (1)..( 10): Result.005 file - promoters50/1395390
tgtttttaaa

SEQ ID NO: 169212 - DNA, 10 bp, Unknown
  misc_feature (1)..( 10): Result.005 file - promoters50/1395390
agttttttgt

SEQ ID NO: 169213 - DNA, 10 bp, Unknown
  misc_feature (1)..( 10): Result.005 file - promoters50/1395390
tgtatttgca

SEQ ID NO: 169214 - DNA, 9 bp, Unknown
  misc_feature (1)..( 9): Result.005 file - promoters50/1395390
attaaaaaa

SEQ ID NO: 169215 - DNA, 9 bp, Unknown
  misc_feature (1)..( 9): Result.005 file - promoters50/1395390
attacaaat

SEQ ID NO: 169216 - DNA, 9 bp, Unknown
  misc_feature (1)..( 9): Result.005 file - promoters50/1395390
acaaaaaaa

SEQ ID NO: 169217 - DNA, 8 bp, Unknown
  misc_feature (1)..( 8): Result.005 file - promoters50/1395390
tttttttc

SEQ ID NO: 169218 - DNA, 8 bp, Unknown
  misc_feature (1)..( 8): Result.005 file - promoters50/1395390
atttattc

SEQ ID NO: 169219 - DNA, 8 bp, Unknown
  misc_feature (1)..( 8): Result.005 file - promoters50/1395390
attaattt

SEQ ID NO: 169220 - DNA, 12 bp, Unknown
  misc_feature (1)..( 12): Result.005 file - promoters50/1395390
agcataacattc

SEQ ID NO: 169221 - DNA, 12 bp, Unknown
  misc_feature (1)..( 12): Result.005 file - promoters50/1395390
aaaataaaattt

SEQ ID NO: 169222 - DNA, 12 bp, Unknown
  misc_feature (1)..( 12): Result.005 file - promoters50/1395390
aaaagaaaataa

SEQ ID NO: 169223 - DNA, 12 bp, Unknown
  misc_feature (1)..( 12): Result.005 file - promoters50/1395390
agtgtaaagttt

SEQ ID NO: 169224 - DNA, 10 bp, Unknown
  misc_feature (1)..( 10): Result.005 file - promoters50/1395390
aactttctta

SEQ ID NO: 169225 - DNA, 10 bp, Unknown
  misc_feature (1)..( 10): Result.005 file - promoters50/1395390
aattttttta

SEQ ID NO: 169226 - DNA, 10 bp, Unknown
  misc_feature (1)..( 10): Result.005 file - promoters50/1395390
aatattttta

SEQ ID NO: 169227 - DNA, 10 bp, Unknown
  misc_feature (1)..( 10): Result.005 file - promoters50/1395390
aatattttta

SEQ ID NO: 169228 - DNA, 12 bp, Unknown
  misc_feature (1)..( 12): Result.005 file - promoters50/1395390
ttctatctttaa

SEQ ID NO: 169229 - DNA, 12 bp, Unknown
  misc_feature (1)..( 12): Result.005 file - promoters50/1395390
acttatcattaa

SEQ ID NO: 169230 - DNA, 12 bp, Unknown
  misc_feature (1)..( 12): Result.005 file - promoters50/1395390
atttattcaaga

SEQ ID NO: 169231 - DNA, 7 bp, Unknown
  misc_feature (1)..( 7): Result.005 file - promoters50/1395390
attttcc

SEQ ID NO: 169232 - DNA, 7 bp, Unknown
  misc_feature (1)..( 7): Result.005 file - promoters50/1395390
attttct

SEQ ID NO: 169233 - DNA, 7 bp, Unknown
  misc_feature (1)..( 7): Result.005 file - promoters50/1395390
cttttct

SEQ ID NO: 169234 - DNA, 13 bp, Unknown
  misc_feature (1)..( 13): Result.005 file - promoters50/1395390
ttttaaataacat

SEQ ID NO: 169235 - DNA, 13 bp, Unknown
  misc_feature (1)..( 13): Result.005 file - promoters50/1395390
acttaaatctgaa

SEQ ID NO: 169236 - DNA, 14 bp, Unknown
  misc_feature (1)..( 14): Result.005 file - promoters50/1395390
aattataattaaca

SEQ ID NO: 169237 - DNA, 7 bp, Unknown
  misc_feature (1)..( 7): Result.005 file - promoters50/1395390
aaaataa

SEQ ID NO: 169238 - DNA, 7 bp, Unknown
  misc_feature (1)..( 7): Result.005 file - promoters50/1395390
aaattaa

SEQ ID NO: 169239 - DNA, 7 bp, Unknown
  misc_feature (1)..( 7): Result.005 file - promoters50/1395390
caattaa

SEQ ID NO: 169240 - DNA, 8 bp, Unknown
  misc_feature (1)..( 8): Result.005 file - promoters50/1395390
taaacttt

SEQ ID NO: 169241 - DNA, 8 bp, Unknown
  misc_feature (1)..( 8): Result.005 file - promoters50/1395390
taaagttt

SEQ ID NO: 169242 - DNA, 8 bp, Unknown
  misc_feature (1)..( 8): Result.005 file - promoters50/1395390
taaaattt

SEQ ID NO: 169243 - DNA, 8 bp, Unknown
  misc_feature (1)..( 8): Result.005 file - promoters50/1395421
gaagaaga

SEQ ID NO: 169244 - DNA, 8 bp, Unknown
  misc_feature (1)..( 8): Result.005 file - promoters50/1395421
gaagaaga

SEQ ID NO: 169245 - DNA, 8 bp, Unknown
  misc_feature (1)..( 8): Result.005 file - promoters50/1395421
gaagaaag

SEQ ID NO: 169246 - DNA, 14 bp, Unknown
  misc_feature (1)..( 14): Result.005 file - promoters50/1395421
caatgtttctcgaa

SEQ ID NO: 169247 - DNA, 14 bp, Unknown
  misc_feature (1)..( 14): Result.005 file - promoters50/1395421
tcaattttcttgaa

SEQ ID NO: 169248 - DNA, 14 bp, Unknown
  misc_feature (1)..( 14): Result.005 file - promoters50/1395421
ttggatttttggca

SEQ ID NO: 169249 - DNA, 11 bp, Unknown
  misc_feature (1)..( 11): Result.005 file - promoters50/1395421
cccaatgtttc

SEQ ID NO: 169250 - DNA, 11 bp, Unknown
  misc_feature (1)..( 11): Result.005 file - promoters50/1395421
ttgaatttttg

SEQ ID NO: 169251 - DNA, 11 bp, Unknown
  misc_feature (1)..( 11): Result.005 file - promoters50/1395421
ttggatttttg

SEQ ID NO: 169252 - DNA, 11 bp, Unknown
  misc_feature (1)..( 11): Result.005 file - promoters50/1395481
aatactagtag

SEQ ID NO: 169253 - DNA, 11 bp, Unknown
  misc_feature (1)..( 11): Result.005 file - promoters50/1395481
tatactactag

SEQ ID NO: 169254 - DNA, 11 bp, Unknown
  misc_feature (1)..( 11): Result.005 file - promoters50/1395481
aatactgaagg

SEQ ID NO: 169255 - DNA, 8 bp, Unknown
  misc_feature (1)..( 8): Result.005 file - promoters50/1395485
tctttttg

SEQ ID NO: 169256 - DNA, 8 bp, Unknown
  misc_feature (1)..( 8): Result.005 file - promoters50/1395485
tctgtttc

SEQ ID NO: 169257 - DNA, 8 bp, Unknown
  misc_feature (1)..( 8): Result.005 file - promoters50/1395485
acttcttg

SEQ ID NO: 169258 - DNA, 13 bp, Unknown
  misc_feature (1)..( 13): Result.005 file - promoters50/1395534
actttataaaaaa

SEQ ID NO: 169259 - DNA, 13 bp, Unknown
  misc_feature (1)..( 13): Result.005 file - promoters50/1395534
ggtttgtaataaa

SEQ ID NO: 169260 - DNA, 13 bp, Unknown
  misc_feature (1)..( 13): Result.005 file - promoters50/1395534
actttataatgat

SEQ ID NO: 169261 - DNA, 9 bp, Unknown
  misc_feature (1)..( 9): Result.005 file - promoters50/1395534
ttaaaaaaa

SEQ ID NO: 169262 - DNA, 9 bp, Unknown
  misc_feature (1)..( 9): Result.005 file - promoters50/1395534
gcaaagaaa

SEQ ID NO: 169263 - DNA, 9 bp, Unknown
  misc_feature (1)..( 9): Result.005 file - promoters50/1395534
gcaaagaac

SEQ ID NO: 169264 - DNA, 6 bp, Unknown
  misc_feature (1)..( 6): Result.005 file - promoters50/1395534
ttttca

SEQ ID NO: 169265 - DNA, 6 bp, Unknown
  misc_feature (1)..( 6): Result.005 file - promoters50/1395534
ttttca

SEQ ID NO: 169266 - DNA, 6 bp, Unknown
  misc_feature (1)..( 6): Result.005 file - promoters50/1395534
ttttca

SEQ ID NO: 169267 - DNA, 8 bp, Unknown
  misc_feature (1)..( 8): Result.005 file - promoters50/1395534
actccagc

SEQ ID NO: 169268 - DNA, 8 bp, Unknown
  misc_feature (1)..( 8): Result.005 file - promoters50/1395534
actccatt

SEQ ID NO: 169269 - DNA, 8 bp, Unknown
  misc_feature (1)..( 8): Result.005 file - promoters50/1395534
tctcaatt

SEQ ID NO: 169270 - DNA, 10 bp, Unknown
  misc_feature (1)..( 10): Result.005 file - promoters50/1395568
aaatgtggca

SEQ ID NO: 169271 - DNA, 10 bp, Unknown
  misc_feature (1)..( 10): Result.005 file - promoters50/1395568
aaatgtatcg

SEQ ID NO: 169272 - DNA, 10 bp, Unknown
  misc_feature (1)..( 10): Result.005 file - promoters50/1395568
taatttattt

SEQ ID NO: 169273 - DNA, 10 bp, Unknown
  misc_feature (1)..( 10): Result.005 file - promoters50/1395568
tcattttttt

SEQ ID NO: 169274 - DNA, 10 bp, Unknown
  misc_feature (1)..( 10): Result.005 file - promoters50/1395568
ccattttcgt

SEQ ID NO: 169275 - DNA, 10 bp, Unknown
  misc_feature (1)..( 10): Result.005 file - promoters50/1395568
acatgtttta

SEQ ID NO: 169276 - DNA, 7 bp, Unknown
  misc_feature (1)..( 7): Result.005 file - promoters50/1395605
gatataa

SEQ ID NO: 169277 - DNA, 7 bp, Unknown
  misc_feature (1)..( 7): Result.005 file - promoters50/1395605
gatatat

SEQ ID NO: 169278 - DNA, 7 bp, Unknown
  misc_feature (1)..( 7): Result.005 file - promoters50/1395605
tatataa

SEQ ID NO: 169279 - DNA, 8 bp, Unknown
  misc_feature (1)..( 8): Result.005 file - promoters50/1395605
tgaaccac

SEQ ID NO: 169280 - DNA, 8 bp, Unknown
  misc_feature (1)..( 8): Result.005 file - promoters50/1395605
ggaatcac

SEQ ID NO: 169281 - DNA, 8 bp, Unknown
  misc_feature (1)..( 8): Result.005 file - promoters50/1395605
tgacccaa

SEQ ID NO: 169282 - DNA, 9 bp, Unknown
  misc_feature (1)..( 9): Result.005 file - promoters50/1395605
cataaaaca

SEQ ID NO: 169283 - DNA, 9 bp, Unknown
  misc_feature (1)..( 9): Result.005 file - promoters50/1395605
cataaaatt

SEQ ID NO: 169284 - DNA, 9 bp, Unknown
  misc_feature (1)..( 9): Result.005 file - promoters50/1395605
tctaatatt

SEQ ID NO: 169285 - DNA, 11 bp, Unknown
  misc_feature (1)..( 11): Result.005 file - promoters50/1395605
tttctctacgc

SEQ ID NO: 169286 - DNA, 11 bp, Unknown
  misc_feature (1)..( 11): Result.005 file - promoters50/1395605
attctcttatt

SEQ ID NO: 169287 - DNA, 11 bp, Unknown
  misc_feature (1)..( 11): Result.005 file - promoters50/1395605
attcttttatt

SEQ ID NO: 169288 - DNA, 7 bp, Unknown
  misc_feature (1)..( 7): Result.005 file - promoters50/1395605
aatatat

SEQ ID NO: 169289 - DNA, 7 bp, Unknown
  misc_feature (1)..( 7): Result.005 file - promoters50/1395605
aatatat

SEQ ID NO: 169290 - DNA, 7 bp, Unknown
  misc_feature (1)..( 7): Result.005 file - promoters50/1395605
gatatat

SEQ ID NO: 169291 - DNA, 10 bp, Unknown
  misc_feature (1)..( 10): Result.005 file - promoters50/1395728
cctttgagaa

SEQ ID NO: 169292 - DNA, 10 bp, Unknown
  misc_feature (1)..( 10): Result.005 file - promoters50/1395728
aaagtgagaa

SEQ ID NO: 169293 - DNA, 10 bp, Unknown
  misc_feature (1)..( 10): Result.005 file - promoters50/1395728
cctttgagat

SEQ ID NO: 169294 - DNA, 13 bp, Unknown
  misc_feature (1)..( 13): Result.005 file - promoters50/1395781
taattataagcaa

SEQ ID NO: 169295 - DNA, 13 bp, Unknown
  misc_feature (1)..( 13): Result.005 file - promoters50/1395781
aaatgatatgaga

SEQ ID NO: 169296 - DNA, 13 bp, Unknown
  misc_feature (1)..( 13): Result.005 file - promoters50/1395781
taattactctaat

SEQ ID NO: 169297 - DNA, 13 bp, Unknown
  misc_feature (1)..( 13): Result.005 file - promoters50/1395781
taataactctaat

SEQ ID NO: 169298 - DNA, 13 bp, Unknown
  misc_feature (1)..( 13): Result.005 file - promoters50/1395781
taaatacaaatat

SEQ ID NO: 169299 - DNA, 13 bp, Unknown
  misc_feature (1)..( 13): Result.005 file - promoters50/1395781
aagtgaatggtca

SEQ ID NO: 169300 - DNA, 10 bp, Unknown
  misc_feature (1)..( 10): Result.005 file - promoters50/1395781
catttttgtc

SEQ ID NO: 169301 - DNA, 10 bp, Unknown
  misc_feature (1)..( 10): Result.005 file - promoters50/1395781
catttttgtg

SEQ ID NO: 169302 - DNA, 10 bp, Unknown
  misc_feature (1)..( 10): Result.005 file - promoters50/1395781
ttaatttgtc

SEQ ID NO: 169303 - DNA, 10 bp, Unknown
  misc_feature (1)..( 10): Result.005 file - promoters50/1395781
tattattgtc

SEQ ID NO: 169304 - DNA, 10 bp, Unknown
  misc_feature (1)..( 10): Result.005 file - promoters50/1395781
cattttaagt

SEQ ID NO: 169305 - DNA, 10 bp, Unknown
  misc_feature (1)..( 10): Result.005 file - promoters50/1395781
aatctgttga

SEQ ID NO: 169306 - DNA, 8 bp, Unknown
  misc_feature (1)..( 8): Result.005 file - promoters50/1395790
aactatgg

SEQ ID NO: 169307 - DNA, 8 bp, Unknown
  misc_feature (1)..( 8): Result.005 file - promoters50/1395790
aacaatga

SEQ ID NO: 169308 - DNA, 8 bp, Unknown
  misc_feature (1)..( 8): Result.005 file - promoters50/1395790
aaaaatat

SEQ ID NO: 169309 - DNA, 8 bp, Unknown
  misc_feature (1)..( 8): Result.005 file - promoters50/1395790
atcaatga

SEQ ID NO: 169310 - DNA, 9 bp, Unknown
  misc_feature (1)..( 9): Result.005 file - promoters50/1395790
gtattgttg

SEQ ID NO: 169311 - DNA, 9 bp, Unknown
  misc_feature (1)..( 9): Result.005 file - promoters50/1395790
gtattgtta

SEQ ID NO: 169312 - DNA, 9 bp, Unknown
  misc_feature (1)..( 9): Result.005 file - promoters50/1395790
atatttttg

SEQ ID NO: 169313 - DNA, 8 bp, Unknown
  misc_feature (1)..( 8): Result.005 file - promoters50/1395806
acaaaagc

SEQ ID NO: 169314 - DNA, 8 bp, Unknown
  misc_feature (1)..( 8): Result.005 file - promoters50/1395806
acaaaata

SEQ ID NO: 169315 - DNA, 8 bp, Unknown
  misc_feature (1)..( 8): Result.005 file - promoters50/1395806
acaaaagg

SEQ ID NO: 169316 - DNA, 8 bp, Unknown
  misc_feature (1)..( 8): Result.005 file - promoters50/1395806
tcaatata

SEQ ID NO: 169317 - DNA, 12 bp, Unknown
  misc_feature (1)..( 12): Result.005 file - promoters50/1395806
atagaaacaaat

SEQ ID NO: 169318 - DNA, 12 bp, Unknown
  misc_feature (1)..( 12): Result.005 file - promoters50/1395806
atagagacaaaa

SEQ ID NO: 169319 - DNA, 12 bp, Unknown
  misc_feature (1)..( 12): Result.005 file - promoters50/1395806
ggagaaaaaaaa

SEQ ID NO: 169320 - DNA, 12 bp, Unknown
  misc_feature (1)..( 12): Result.005 file - promoters50/1395806
atttgtacaaaa

SEQ ID NO: 169321 - DNA, 9 bp, Unknown
  misc_feature (1)..( 9): Result.005 file - promoters50/1395806
ataatgaat

SEQ ID NO: 169322 - DNA, 9 bp, Unknown
  misc_feature (1)..( 9): Result.005 file - promoters50/1395806
aaaatgaat

SEQ ID NO: 169323 - DNA, 9 bp, Unknown
  misc_feature (1)..( 9): Result.005 file - promoters50/1395806
aaaacgaac

SEQ ID NO: 169324 - DNA, 9 bp, Unknown
  misc_feature (1)..( 9): Result.005 file - promoters50/1395806
aaaatgaaa

SEQ ID NO: 169325 - DNA, 11 bp, Unknown
  misc_feature (1)..( 11): Result.005 file - promoters50/1395806
attatcaaagc

SEQ ID NO: 169326 - DNA, 11 bp, Unknown
  misc_feature (1)..( 11): Result.005 file - promoters50/1395806
attttcaaagc

SEQ ID NO: 169327 - DNA, 11 bp, Unknown
  misc_feature (1)..( 11): Result.005 file - promoters50/1395806
gttttaaaaac

SEQ ID NO: 169328 - DNA, 11 bp, Unknown
  misc_feature (1)..( 11): Result.005 file - promoters50/1395806
aatttaaaatg

SEQ ID NO: 169329 - DNA, 10 bp, Unknown
  misc_feature (1)..( 10): Result.005 file - promoters50/1395824
ttcaaatata

SEQ ID NO: 169330 - DNA, 10 bp, Unknown
  misc_feature (1)..( 10): Result.005 file - promoters50/1395824
cacaaacata

SEQ ID NO: 169331 - DNA, 10 bp, Unknown
  misc_feature (1)..( 10): Result.005 file - promoters50/1395824
ttcagataaa

SEQ ID NO: 169332 - DNA, 10 bp, Unknown
  misc_feature (1)..( 10): Result.005 file - promoters50/1395824
gagaaagata

SEQ ID NO: 169333 - DNA, 10 bp, Unknown
  misc_feature (1)..( 10): Result.005 file - promoters50/1395824
aacaatcatc

SEQ ID NO: 169334 - DNA, 15 bp, Unknown
  misc_feature (1)..( 15): Result.005 file - promoters50/1395824
gtaatttgcaataat

SEQ ID NO: 169335 - DNA, 15 bp, Unknown
  misc_feature (1)..( 15): Result.005 file - promoters50/1395824
caaataagcaaaaat

SEQ ID NO: 169336 - DNA, 15 bp, Unknown
  misc_feature (1)..( 15): Result.005 file - promoters50/1395824
aatattttcaaaatc

SEQ ID NO: 169337 - DNA, 15 bp, Unknown
  misc_feature (1)..( 15): Result.005 file - promoters50/1395824
aggttaatcacaatg

SEQ ID NO: 169338 - DNA, 15 bp, Unknown
  misc_feature (1)..( 15): Result.005 file - promoters50/1395824
acatgattaaacatt

SEQ ID NO: 169339 - DNA, 14 bp, Unknown
  misc_feature (1)..( 14): Result.005 file - promoters50/1395824
aattttaaaaaagc

SEQ ID NO: 169340 - DNA, 14 bp, Unknown
  misc_feature (1)..( 14): Result.005 file - promoters50/1395824
caagtcaaataagc

SEQ ID NO: 169341 - DNA, 14 bp, Unknown
  misc_feature (1)..( 14): Result.005 file - promoters50/1395824
attttcaaaatcaa

SEQ ID NO: 169342 - DNA, 14 bp, Unknown
  misc_feature (1)..( 14): Result.005 file - promoters50/1395824
ttaatcacaatgct

SEQ ID NO: 169343 - DNA, 12 bp, Unknown
  misc_feature (1)..( 12): Result.005 file - promoters50/1395824
agtggataaatc

SEQ ID NO: 169344 - DNA, 12 bp, Unknown
  misc_feature (1)..( 12): Result.005 file - promoters50/1395824
atgcgataaacg

SEQ ID NO: 169345 - DNA, 12 bp, Unknown
  misc_feature (1)..( 12): Result.005 file - promoters50/1395824
atgcaataaacg

SEQ ID NO: 169346 - DNA, 12 bp, Unknown
  misc_feature (1)..( 12): Result.005 file - promoters50/1395824
tagcagtaatca

SEQ ID NO: 169347 - DNA, 12 bp, Unknown
  misc_feature (1)..( 12): Result.005 file - promoters50/1395824
aagcaataaaag

SEQ ID NO: 169348 - DNA, 9 bp, Unknown
  misc_feature (1)..( 9): Result.005 file - promoters50/1395828
acacctaac

SEQ ID NO: 169349 - DNA, 9 bp, Unknown
  misc_feature (1)..( 9): Result.005 file - promoters50/1395828
gaaccaaac

SEQ ID NO: 169350 - DNA, 9 bp, Unknown
  misc_feature (1)..( 9): Result.005 file - promoters50/1395828
gaatcaatc

SEQ ID NO: 169351 - DNA, 10 bp, Unknown
  misc_feature (1)..( 10): Result.005 file - promoters50/1395828
aactaactca

SEQ ID NO: 169352 - DNA, 10 bp, Unknown
  misc_feature (1)..( 10): Result.005 file - promoters50/1395828
aaccaacaat

SEQ ID NO: 169353 - DNA, 10 bp, Unknown
  misc_feature (1)..( 10): Result.005 file - promoters50/1395828
tcccaataat

SEQ ID NO: 169354 - DNA, 7 bp, Unknown
  misc_feature (1)..( 7): Result.005 file - promoters50/1395836
attacat

SEQ ID NO: 169355 - DNA, 7 bp, Unknown
  misc_feature (1)..( 7): Result.005 file - promoters50/1395836
attacag

SEQ ID NO: 169356 - DNA, 7 bp, Unknown
  misc_feature (1)..( 7): Result.005 file - promoters50/1395836
atttcat

SEQ ID NO: 169357 - DNA, 8 bp, Unknown
  misc_feature (1)..( 8): Result.005 file - promoters50/1395836
attcgaag

SEQ ID NO: 169358 - DNA, 8 bp, Unknown
  misc_feature (1)..( 8): Result.005 file - promoters50/1395836
atttgaat

SEQ ID NO: 169359 - DNA, 8 bp, Unknown
  misc_feature (1)..( 8): Result.005 file - promoters50/1395836
gattgaat

SEQ ID NO: 169360 - DNA, 10 bp, Unknown
  misc_feature (1)..( 10): Result.005 file - promoters50/1395836
ttgaagatta

SEQ ID NO: 169361 - DNA, 10 bp, Unknown
  misc_feature (1)..( 10): Result.005 file - promoters50/1395836
ttggagactg

SEQ ID NO: 169362 - DNA, 10 bp, Unknown
  misc_feature (1)..( 10): Result.005 file - promoters50/1395836
aggaagttta

SEQ ID NO: 169363 - DNA, 7 bp, Unknown
  misc_feature (1)..( 7): Result.005 file - promoters50/1395836
aaaccgg

SEQ ID NO: 169364 - DNA, 7 bp, Unknown
  misc_feature (1)..( 7): Result.005 file - promoters50/1395836
aaagcgg

SEQ ID NO: 169365 - DNA, 7 bp, Unknown
  misc_feature (1)..( 7): Result.005 file - promoters50/1395836
gaagcgg

SEQ ID NO: 169366 - DNA, 10 bp, Unknown
  misc_feature (1)..( 10): Result.005 file - promoters50/1395836
gcgaatatgc

SEQ ID NO: 169367 - DNA, 10 bp, Unknown
  misc_feature (1)..( 10): Result.005 file - promoters50/1395836
gagaaaatgg

SEQ ID NO: 169368 - DNA, 10 bp, Unknown
  misc_feature (1)..( 10): Result.005 file - promoters50/1395836
gagaaactgg

SEQ ID NO: 169369 - DNA, 13 bp, Unknown
  misc_feature (1)..( 13): Result.005 file - promoters50/1395839
agtttatttttct

SEQ ID NO: 169370 - DNA, 13 bp, Unknown
  misc_feature (1)..( 13): Result.005 file - promoters50/1395839
tgtttagttttgg

SEQ ID NO: 169371 - DNA, 13 bp, Unknown
  misc_feature (1)..( 13): Result.005 file - promoters50/1395839
agttgatttattt

SEQ ID NO: 169372 - DNA, 13 bp, Unknown
  misc_feature (1)..( 13): Result.005 file - promoters50/1395839
agtatatatatat

SEQ ID NO: 169373 - DNA, 13 bp, Unknown
  misc_feature (1)..( 13): Result.005 file - promoters50/1395839
tactgatttgttt

SEQ ID NO: 169374 - DNA, 13 bp, Unknown
  misc_feature (1)..( 13): Result.005 file - promoters50/1395839
ccatgaattggca

SEQ ID NO: 169375 - DNA, 11 bp, Unknown
  misc_feature (1)..( 11): Result.005 file - promoters50/1395972
ctcaaaatagc

SEQ ID NO: 169376 - DNA, 11 bp, Unknown
  misc_feature (1)..( 11): Result.005 file - promoters50/1395972
actaaaatagt

SEQ ID NO: 169377 - DNA, 11 bp, Unknown
  misc_feature (1)..( 11): Result.005 file - promoters50/1395972
gtcaaaaagca

SEQ ID NO: 169378 - DNA, 11 bp, Unknown
  misc_feature (1)..( 11): Result.005 file - promoters50/1395972
cctacaatttt

SEQ ID NO: 169379 - DNA, 11 bp, Unknown
  misc_feature (1)..( 11): Result.005 file - promoters50/1395972
tcaaaaaaaaa

SEQ ID NO: 169380 - DNA, 9 bp, Unknown
  misc_feature (1)..( 9): Result.005 file - promoters50/1395972
aacagaaag

SEQ ID NO: 169381 - DNA, 9 bp, Unknown
  misc_feature (1)..( 9): Result.005 file - promoters50/1395972
ttcagaaac

SEQ ID NO: 169382 - DNA, 9 bp, Unknown
  misc_feature (1)..( 9): Result.005 file - promoters50/1395972
aacaaaaac

SEQ ID NO: 169383 - DNA, 9 bp, Unknown
  misc_feature (1)..( 9): Result.005 file - promoters50/1395972
aggagaaag

SEQ ID NO: 169384 - DNA, 9 bp, Unknown
  misc_feature (1)..( 9): Result.005 file - promoters50/1396022
ttgttgttg

SEQ ID NO: 169385 - DNA, 9 bp, Unknown
  misc_feature (1)..( 9): Result.005 file - promoters50/1396022
atgtttttg

SEQ ID NO: 169386 - DNA, 9 bp, Unknown
  misc_feature (1)..( 9): Result.005 file - promoters50/1396022
ttgatgtaa

SEQ ID NO: 169387 - DNA, 9 bp, Unknown
  misc_feature (1)..( 9): Result.005 file - promoters50/1396022
ttaaagttt

SEQ ID NO: 169388 - DNA, 9 bp, Unknown
  misc_feature (1)..( 9): Result.005 file - promoters50/1396022
ttaaagtcg

SEQ ID NO: 169389 - DNA, 9 bp, Unknown
  misc_feature (1)..( 9): Result.005 file - promoters50/1396022
tgaaactcg

SEQ ID NO: 169390 - DNA, 9 bp, Unknown
  misc_feature (1)..( 9): Result.005 file - promoters50/1396022
cttctttgg

SEQ ID NO: 169391 - DNA, 9 bp, Unknown
  misc_feature (1)..( 9): Result.005 file - promoters50/1396022
cttgtttaa

SEQ ID NO: 169392 - DNA, 9 bp, Unknown
  misc_feature (1)..( 9): Result.005 file - promoters50/1396022
gttgtttaa

SEQ ID NO: 169393 - DNA, 9 bp, Unknown
  misc_feature (1)..( 9): Result.005 file - promoters50/1396022
aaaaacaaa

SEQ ID NO: 169394 - DNA, 9 bp, Unknown
  misc_feature (1)..( 9): Result.005 file - promoters50/1396022
gaaatcaaa

SEQ ID NO: 169395 - DNA, 9 bp, Unknown
  misc_feature (1)..( 9): Result.005 file - promoters50/1396022
gaaattaaa

SEQ ID NO: 169396 - DNA, 13 bp, Unknown
  misc_feature (1)..( 13): Result.005 file - promoters50/1396057
acaaataaaaatt

SEQ ID NO: 169397 - DNA, 13 bp, Unknown
  misc_feature (1)..( 13): Result.005 file - promoters50/1396057
cctcttaaatatt

SEQ ID NO: 169398 - DNA, 13 bp, Unknown
  misc_feature (1)..( 13): Result.005 file - promoters50/1396057
tagcttgaatcaa

SEQ ID NO: 169399 - DNA, 13 bp, Unknown
  misc_feature (1)..( 13): Result.005 file - promoters50/1396057
ttgattcaaaatt

SEQ ID NO: 169400 - DNA, 10 bp, Unknown
  misc_feature (1)..( 10): Result.005 file - promoters50/1396057
ggtatttgtt

SEQ ID NO: 169401 - DNA, 10 bp, Unknown
  misc_feature (1)..( 10): Result.005 file - promoters50/1396057
tatatatgtt

SEQ ID NO: 169402 - DNA, 10 bp, Unknown
  misc_feature (1)..( 10): Result.005 file - promoters50/1396057
ggtgtttgca

SEQ ID NO: 169403 - DNA, 10 bp, Unknown
  misc_feature (1)..( 10): Result.005 file - promoters50/1396057
aatatttata

SEQ ID NO: 169404 - DNA, 13 bp, Unknown
  misc_feature (1)..( 13): Result.005 file - promoters50/1396057
ataaaattataaa

SEQ ID NO: 169405 - DNA, 13 bp, Unknown
  misc_feature (1)..( 13): Result.005 file - promoters50/1396057
atacaatgatatt

SEQ ID NO: 169406 - DNA, 13 bp, Unknown
  misc_feature (1)..( 13): Result.005 file - promoters50/1396057
ccggaattttaac

SEQ ID NO: 169407 - DNA, 13 bp, Unknown
  misc_feature (1)..( 13): Result.005 file - promoters50/1396057
ttaacctttgacc

SEQ ID NO: 169408 - DNA, 12 bp, Unknown
  misc_feature (1)..( 12): Result.005 file - promoters50/1396057
tctatttatcta

SEQ ID NO: 169409 - DNA, 12 bp, Unknown
  misc_feature (1)..( 12): Result.005 file - promoters50/1396057
aatttttttcta

SEQ ID NO: 169410 - DNA, 12 bp, Unknown
  misc_feature (1)..( 12): Result.005 file - promoters50/1396057
cacctttctctt

SEQ ID NO: 169411 - DNA, 12 bp, Unknown
  misc_feature (1)..( 12): Result.005 file - promoters50/1396057
attgttttggtt

SEQ ID NO: 169412 - DNA, 11 bp, Unknown
  misc_feature (1)..( 11): Result.005 file - promoters50/1396085
ttctttgttca

SEQ ID NO: 169413 - DNA, 11 bp, Unknown
  misc_feature (1)..( 11): Result.005 file - promoters50/1396085
atttttattct

SEQ ID NO: 169414 - DNA, 11 bp, Unknown
  misc_feature (1)..( 11): Result.005 file - promoters50/1396085
aaatttgttgt

SEQ ID NO: 169415 - DNA, 11 bp, Unknown
  misc_feature (1)..( 11): Result.005 file - promoters50/1396085
aaatatgttaa

SEQ ID NO: 169416 - DNA, 11 bp, Unknown
  misc_feature (1)..( 11): Result.005 file - promoters50/1396085
aattttaatct

SEQ ID NO: 169417 - DNA, 11 bp, Unknown
  misc_feature (1)..( 11): Result.005 file - promoters50/1396085
gaccttaatct

SEQ ID NO: 169418 - DNA, 10 bp, Unknown
  misc_feature (1)..( 10): Result.005 file - promoters50/1396085
aaaatagcct

SEQ ID NO: 169419 - DNA, 10 bp, Unknown
  misc_feature (1)..( 10): Result.005 file - promoters50/1396085
aaaataaact

SEQ ID NO: 169420 - DNA, 10 bp, Unknown
  misc_feature (1)..( 10): Result.005 file - promoters50/1396085
caaataaatc

SEQ ID NO: 169421 - DNA, 10 bp, Unknown
  misc_feature (1)..( 10): Result.005 file - promoters50/1396085
aaaaaaaact

SEQ ID NO: 169422 - DNA, 10 bp, Unknown
  misc_feature (1)..( 10): Result.005 file - promoters50/1396085
aaagtaattt

SEQ ID NO: 169423 - DNA, 10 bp, Unknown
  misc_feature (1)..( 10): Result.005 file - promoters50/1396085
acagtagttt

SEQ ID NO: 169424 - DNA, 10 bp, Unknown
  misc_feature (1)..( 10): Result.005 file - promoters50/1396085
acattagcgg

SEQ ID NO: 169425 - DNA, 10 bp, Unknown
  misc_feature (1)..( 10): Result.005 file - promoters50/1396085
aattctcaat

SEQ ID NO: 169426 - DNA, 10 bp, Unknown
  misc_feature (1)..( 10): Result.005 file - promoters50/1396085
ttttctcagt

SEQ ID NO: 169427 - DNA, 10 bp, Unknown
  misc_feature (1)..( 10): Result.005 file - promoters50/1396085
atttcttaat

SEQ ID NO: 169428 - DNA, 10 bp, Unknown
  misc_feature (1)..( 10): Result.005 file - promoters50/1396085
atttcttctc

SEQ ID NO: 169429 - DNA, 10 bp, Unknown
  misc_feature (1)..( 10): Result.005 file - promoters50/1396085
tttttttagt

SEQ ID NO: 169430 - DNA, 10 bp, Unknown
  misc_feature (1)..( 10): Result.005 file - promoters50/1396085
gcttcttatt

SEQ ID NO: 169431 - DNA, 6 bp, Unknown
  misc_feature (1)..( 6): Result.005 file - promoters50/1396104
atcaaa

SEQ ID NO: 169432 - DNA, 6 bp, Unknown
  misc_feature (1)..( 6): Result.005 file - promoters50/1396104
atcaaa

SEQ ID NO: 169433 - DNA, 6 bp, Unknown
  misc_feature (1)..( 6): Result.005 file - promoters50/1396104
atcaaa

SEQ ID NO: 169434 - DNA, 7 bp, Unknown
  misc_feature (1)..( 7): Result.005 file - promoters50/1396123
ttattat

SEQ ID NO: 169435 - DNA, 7 bp, Unknown
  misc_feature (1)..( 7): Result.005 file - promoters50/1396123
ttaatat

SEQ ID NO: 169436 - DNA, 7 bp, Unknown
  misc_feature (1)..( 7): Result.005 file - promoters50/1396123
ttattaa

SEQ ID NO: 169437 - DNA, 7 bp, Unknown
  misc_feature (1)..( 7): Result.005 file - promoters50/1396123
tattaaa

SEQ ID NO: 169438 - DNA, 7 bp, Unknown
  misc_feature (1)..( 7): Result.005 file - promoters50/1396123
tattaat

SEQ ID NO: 169439 - DNA, 7 bp, Unknown
  misc_feature (1)..( 7): Result.005 file - promoters50/1396123
tattaaa

SEQ ID NO: 169440 - DNA, 16 bp, Unknown
  misc_feature (1)..( 16): Result.005 file - promoters50/1396123
ttatcaaagttatatt

SEQ ID NO: 169441 - DNA, 16 bp, Unknown
  misc_feature (1)..( 16): Result.005 file - promoters50/1396123
aaactattaatatatt

SEQ ID NO: 169442 - DNA, 16 bp, Unknown
  misc_feature (1)..( 16): Result.005 file - promoters50/1396123
ttattaaagttatata

SEQ ID NO: 169443 - DNA, 8 bp, Unknown
  misc_feature (1)..( 8): Result.005 file - promoters50/1396123
aattatca

SEQ ID NO: 169444 - DNA, 8 bp, Unknown
  misc_feature (1)..( 8): Result.005 file - promoters50/1396123
tattatca

SEQ ID NO: 169445 - DNA, 8 bp, Unknown
  misc_feature (1)..( 8): Result.005 file - promoters50/1396123
aataatcg

SEQ ID NO: 169446 - DNA, 12 bp, Unknown
  misc_feature (1)..( 12): Result.005 file - promoters50/1396123
aaaaatactttg

SEQ ID NO: 169447 - DNA, 12 bp, Unknown
  misc_feature (1)..( 12): Result.005 file - promoters50/1396123
tataattctttg

SEQ ID NO: 169448 - DNA, 12 bp, Unknown
  misc_feature (1)..( 12): Result.005 file - promoters50/1396123
aaaaatactcaa

SEQ ID NO: 169449 - DNA, 9 bp, Unknown
  misc_feature (1)..( 9): Result.005 file - promoters50/1396123
attaaaatt

SEQ ID NO: 169450 - DNA, 9 bp, Unknown
  misc_feature (1)..( 9): Result.005 file - promoters50/1396123
attaaaatc

SEQ ID NO: 169451 - DNA, 9 bp, Unknown
  misc_feature (1)..( 9): Result.005 file - promoters50/1396123
gtcaaaatc

SEQ ID NO: 169452 - DNA, 11 bp, Unknown
  misc_feature (1)..( 11): Result.005 file - promoters50/1396127
ataaaattgag

SEQ ID NO: 169453 - DNA, 11 bp, Unknown
  misc_feature (1)..( 11): Result.005 file - promoters50/1396127
ttaatattgga

SEQ ID NO: 169454 - DNA, 11 bp, Unknown
  misc_feature (1)..( 11): Result.005 file - promoters50/1396127
tcaaaattgcg

SEQ ID NO: 169455 - DNA, 11 bp, Unknown
  misc_feature (1)..( 11): Result.005 file - promoters50/1396127
gtaatatagga

SEQ ID NO: 169456 - DNA, 11 bp, Unknown
  misc_feature (1)..( 11): Result.005 file - promoters50/1396127
ttaacatatca

SEQ ID NO: 169457 - DNA, 11 bp, Unknown
  misc_feature (1)..( 11): Result.005 file - promoters50/1396127
gtagtatgtac

SEQ ID NO: 169458 - DNA, 11 bp, Unknown
  misc_feature (1)..( 11): Result.005 file - promoters50/1396127
ataaattaatt

SEQ ID NO: 169459 - DNA, 11 bp, Unknown
  misc_feature (1)..( 11): Result.005 file - promoters50/1396127
ataaagtaatt

SEQ ID NO: 169460 - DNA, 11 bp, Unknown
  misc_feature (1)..( 11): Result.005 file - promoters50/1396127
agaaaataaac

SEQ ID NO: 169461 - DNA, 11 bp, Unknown
  misc_feature (1)..( 11): Result.005 file - promoters50/1396127
caaaaataata

SEQ ID NO: 169462 - DNA, 11 bp, Unknown
  misc_feature (1)..( 11): Result.005 file - promoters50/1396127
ataaataaggt

SEQ ID NO: 169463 - DNA, 11 bp, Unknown
  misc_feature (1)..( 11): Result.005 file - promoters50/1396127
agaagagaatt

SEQ ID NO: 169464 - DNA, 12 bp, Unknown
  misc_feature (1)..( 12): Result.005 file - promoters50/1396147
atcttaatttca

SEQ ID NO: 169465 - DNA, 12 bp, Unknown
  misc_feature (1)..( 12): Result.005 file - promoters50/1396147
atattactttta

SEQ ID NO: 169466 - DNA, 12 bp, Unknown
  misc_feature (1)..( 12): Result.005 file - promoters50/1396147
atcctaatcaac

SEQ ID NO: 169467 - DNA, 12 bp, Unknown
  misc_feature (1)..( 12): Result.005 file - promoters50/1396147
aattaactatta

SEQ ID NO: 169468 - DNA, 12 bp, Unknown
  misc_feature (1)..( 12): Result.005 file - promoters50/1396147
ttccaaatatac

SEQ ID NO: 169469 - DNA, 12 bp, Unknown
  misc_feature (1)..( 12): Result.005 file - promoters50/1396147
ttcataattatc

SEQ ID NO: 169470 - DNA, 9 bp, Unknown
  misc_feature (1)..( 9): Result.005 file - promoters50/1396147
gatattcct

SEQ ID NO: 169471 - DNA, 9 bp, Unknown
  misc_feature (1)..( 9): Result.005 file - promoters50/1396147
tataatcca

SEQ ID NO: 169472 - DNA, 9 bp, Unknown
  misc_feature (1)..( 9): Result.005 file - promoters50/1396147
tccattcct

SEQ ID NO: 169473 - DNA, 9 bp, Unknown
  misc_feature (1)..( 9): Result.005 file - promoters50/1396147
aatattctc

SEQ ID NO: 169474 - DNA, 9 bp, Unknown
  misc_feature (1)..( 9): Result.005 file - promoters50/1396147
agtaaacca

SEQ ID NO: 169475 - DNA, 9 bp, Unknown
  misc_feature (1)..( 9): Result.005 file - promoters50/1396147
tccattccg

SEQ ID NO: 169476 - DNA, 13 bp, Unknown
  misc_feature (1)..( 13): Result.005 file - promoters50/1396147
tcaaataaaccat

SEQ ID NO: 169477 - DNA, 13 bp, Unknown
  misc_feature (1)..( 13): Result.005 file - promoters50/1396147
aaaaataactttc

SEQ ID NO: 169478 - DNA, 13 bp, Unknown
  misc_feature (1)..( 13): Result.005 file - promoters50/1396147
tcaaaaaaagaat

SEQ ID NO: 169479 - DNA, 13 bp, Unknown
  misc_feature (1)..( 13): Result.005 file - promoters50/1396147
ggaaaaaaaaaat

SEQ ID NO: 169480 - DNA, 13 bp, Unknown
  misc_feature (1)..( 13): Result.005 file - promoters50/1396147
acaaaaaaattca

SEQ ID NO: 169481 - DNA, 13 bp, Unknown
  misc_feature (1)..( 13): Result.005 file - promoters50/1396147
ctaaaaaaaaggg

SEQ ID NO: 169482 - DNA, 12 bp, Unknown
  misc_feature (1)..( 12): Result.005 file - promoters50/1396147
attcaaataaac

SEQ ID NO: 169483 - DNA, 12 bp, Unknown
  misc_feature (1)..( 12): Result.005 file - promoters50/1396147
ggtcaaattcga

SEQ ID NO: 169484 - DNA, 12 bp, Unknown
  misc_feature (1)..( 12): Result.005 file - promoters50/1396147
attccaatctct

SEQ ID NO: 169485 - DNA, 12 bp, Unknown
  misc_feature (1)..( 12): Result.005 file - promoters50/1396147
taacaaatttct

SEQ ID NO: 169486 - DNA, 12 bp, Unknown
  misc_feature (1)..( 12): Result.005 file - promoters50/1396147
agtcaaatatca

SEQ ID NO: 169487 - DNA, 12 bp, Unknown
  misc_feature (1)..( 12): Result.005 file - promoters50/1396147
gctcttgactcc

SEQ ID NO: 169488 - DNA, 14 bp, Unknown
  misc_feature (1)..( 14): Result.005 file - promoters50/1396147
aaacttttttttta

SEQ ID NO: 169489 - DNA, 14 bp, Unknown
  misc_feature (1)..( 14): Result.005 file - promoters50/1396147
aaactttttctaat

SEQ ID NO: 169490 - DNA, 14 bp, Unknown
  misc_feature (1)..( 14): Result.005 file - promoters50/1396147
aaaattttctggtt

SEQ ID NO: 169491 - DNA, 15 bp, Unknown
  misc_feature (1)..( 15): Result.005 file - promoters50/1396147
gtcgtttgttttatc

SEQ ID NO: 169492 - DNA, 15 bp, Unknown
  misc_feature (1)..( 15): Result.005 file - promoters50/1396147
catatttttataaat

SEQ ID NO: 169493 - DNA, 15 bp, Unknown
  misc_feature (1)..( 15): Result.005 file - promoters50/1396147
ctcgtcagtttcatc

SEQ ID NO: 169494 - DNA, 11 bp, Unknown
  misc_feature (1)..( 11): Result.005 file - promoters50/1396147
aaatttctagt

SEQ ID NO: 169495 - DNA, 11 bp, Unknown
  misc_feature (1)..( 11): Result.005 file - promoters50/1396147
ctttttctaat

SEQ ID NO: 169496 - DNA, 12 bp, Unknown
  misc_feature (1)..( 12): Result.005 file - promoters50/1396147
tcaaattcgagt

SEQ ID NO: 169497 - DNA, 11 bp, Unknown
  misc_feature (1)..( 11): Result.005 file - promoters50/1396147
aattttctggt

SEQ ID NO: 169498 - DNA, 12 bp, Unknown
  misc_feature (1)..( 12): Result.005 file - promoters50/1396147
gttttatctgtt

SEQ ID NO: 169499 - DNA, 12 bp, Unknown
  misc_feature (1)..( 12): Result.005 file - promoters50/1396147
gtttcatcaagc

SEQ ID NO: 169500 - DNA, 10 bp, Unknown
  misc_feature (1)..( 10): Result.005 file - promoters50/1396147
tatttagaaa

SEQ ID NO: 169501 - DNA, 10 bp, Unknown
  misc_feature (1)..( 10): Result.005 file - promoters50/1396147
tttttataaa

SEQ ID NO: 169502 - DNA, 10 bp, Unknown
  misc_feature (1)..( 10): Result.005 file - promoters50/1396147
tttttctaat

SEQ ID NO: 169503 - DNA, 10 bp, Unknown
  misc_feature (1)..( 10): Result.005 file - promoters50/1396147
attttctggt

SEQ ID NO: 169504 - DNA, 10 bp, Unknown
  misc_feature (1)..( 10): Result.005 file - promoters50/1396147
gttttatctg

SEQ ID NO: 169505 - DNA, 10 bp, Unknown
  misc_feature (1)..( 10): Result.005 file - promoters50/1396147
gtttcatcaa

SEQ ID NO: 169506 - DNA, 11 bp, Unknown
  misc_feature (1)..( 11): Result.005 file - promoters50/1396147
ttttttttaac

SEQ ID NO: 169507 - DNA, 11 bp, Unknown
  misc_feature (1)..( 11): Result.005 file - promoters50/1396147
atatttttata

SEQ ID NO: 169508 - DNA, 11 bp, Unknown
  misc_feature (1)..( 11): Result.005 file - promoters50/1396147
tttgttttatc

SEQ ID NO: 169509 - DNA, 11 bp, Unknown
  misc_feature (1)..( 11): Result.005 file - promoters50/1396147
ctttttctaat

SEQ ID NO: 169510 - DNA, 11 bp, Unknown
  misc_feature (1)..( 11): Result.005 file - promoters50/1396147
aattttctggt

SEQ ID NO: 169511 - DNA, 11 bp, Unknown
  misc_feature (1)..( 11): Result.005 file - promoters50/1396147
tcagtttcatc

SEQ ID NO: 169512 - DNA, 13 bp, Unknown
  misc_feature (1)..( 13): Result.005 file - promoters50/1396151
ttcaaaccctccc

SEQ ID NO: 169513 - DNA, 13 bp, Unknown
  misc_feature (1)..( 13): Result.005 file - promoters50/1396151
ttcaaaattctct

SEQ ID NO: 169514 - DNA, 13 bp, Unknown
  misc_feature (1)..( 13): Result.005 file - promoters50/1396151
ttgaatcaatatt

SEQ ID NO: 169515 - DNA, 7 bp, Unknown
  misc_feature (1)..( 7): Result.005 file - promoters50/1396151
tatttca

SEQ ID NO: 169516 - DNA, 7 bp, Unknown
  misc_feature (1)..( 7): Result.005 file - promoters50/1396151
tatttct

SEQ ID NO: 169517 - DNA, 7 bp, Unknown
  misc_feature (1)..( 7): Result.005 file - promoters50/1396151
aatttct

SEQ ID NO: 169518 - DNA, 13 bp, Unknown
  misc_feature (1)..( 13): Result.005 file - promoters50/1396151
aagaaacaagctt

SEQ ID NO: 169519 - DNA, 13 bp, Unknown
  misc_feature (1)..( 13): Result.005 file - promoters50/1396151
ttgaatcaatatt

SEQ ID NO: 169520 - DNA, 13 bp, Unknown
  misc_feature (1)..( 13): Result.005 file - promoters50/1396151
ttgattcaaaatt

SEQ ID NO: 169521 - DNA, 7 bp, Unknown
  misc_feature (1)..( 7): Result.005 file - promoters50/1396163
aattaaa

SEQ ID NO: 169522 - DNA, 7 bp, Unknown
  misc_feature (1)..( 7): Result.005 file - promoters50/1396163
gattaaa

SEQ ID NO: 169523 - DNA, 7 bp, Unknown
  misc_feature (1)..( 7): Result.005 file - promoters50/1396163
aattaaa

SEQ ID NO: 169524 - DNA, 13 bp, Unknown
  misc_feature (1)..( 13): Result.005 file - promoters50/1396182
cgttgtaatcggg

SEQ ID NO: 169525 - DNA, 13 bp, Unknown
  misc_feature (1)..( 13): Result.005 file - promoters50/1396182
agtctaaattggg

SEQ ID NO: 169526 - DNA, 13 bp, Unknown
  misc_feature (1)..( 13): Result.005 file - promoters50/1396182
ctgtgtgatcgaa

SEQ ID NO: 169527 - DNA, 13 bp, Unknown
  misc_feature (1)..( 13): Result.005 file - promoters50/1396182
gaaaatgatcgtg

SEQ ID NO: 169528 - DNA, 13 bp, Unknown
  misc_feature (1)..( 13): Result.005 file - promoters50/1396182
ctgtttgatactc

SEQ ID NO: 169529 - DNA, 12 bp, Unknown
  misc_feature (1)..( 12): Result.005 file - promoters50/1396238
aagtcaaataag

SEQ ID NO: 169530 - DNA, 12 bp, Unknown
  misc_feature (1)..( 12): Result.005 file - promoters50/1396238
cagtcaaatatg

SEQ ID NO: 169531 - DNA, 12 bp, Unknown
  misc_feature (1)..( 12): Result.005 file - promoters50/1396238
aagttaaaatta

SEQ ID NO: 169532 - DNA, 12 bp, Unknown
  misc_feature (1)..( 12): Result.005 file - promoters50/1396238
ctgtcaaagaag

SEQ ID NO: 169533 - DNA, 12 bp, Unknown
  misc_feature (1)..( 12): Result.005 file - promoters50/1396238
atgatgaagaag

SEQ ID NO: 169534 - DNA, 10 bp, Unknown
  misc_feature (1)..( 10): Result.005 file - promoters50/1396256
aaaaatgaat

SEQ ID NO: 169535 - DNA, 10 bp, Unknown
  misc_feature (1)..( 10): Result.005 file - promoters50/1396256
aaatatgtta

SEQ ID NO: 169536 - DNA, 10 bp, Unknown
  misc_feature (1)..( 10): Result.005 file - promoters50/1396256
taaaatgcta

SEQ ID NO: 169537 - DNA, 10 bp, Unknown
  misc_feature (1)..( 10): Result.005 file - promoters50/1396256
atataagttt

SEQ ID NO: 169538 - DNA, 10 bp, Unknown
  misc_feature (1)..( 10): Result.005 file - promoters50/1396256
atttaacttt

SEQ ID NO: 169539 - DNA, 10 bp, Unknown
  misc_feature (1)..( 10): Result.005 file - promoters50/1396256
ataaatgcta

SEQ ID NO: 169540 - DNA, 9 bp, Unknown
  misc_feature (1)..( 9): Result.005 file - promoters50/1396285
ttttccttt

SEQ ID NO: 169541 - DNA, 9 bp, Unknown
  misc_feature (1)..( 9): Result.005 file - promoters50/1396285
tttttctta

SEQ ID NO: 169542 - DNA, 10 bp, Unknown
  misc_feature (1)..( 10): Result.005 file - promoters50/1396285
ttctccatta

SEQ ID NO: 169543 - DNA, 10 bp, Unknown
  misc_feature (1)..( 10): Result.005 file - promoters50/1396285
tttttcctgc

SEQ ID NO: 169544 - DNA, 9 bp, Unknown
  misc_feature (1)..( 9): Result.005 file - promoters50/1396285
tatttttgt

SEQ ID NO: 169545 - DNA, 9 bp, Unknown
  misc_feature (1)..( 9): Result.005 file - promoters50/1396285
tattttaca

SEQ ID NO: 169546 - DNA, 10 bp, Unknown
  misc_feature (1)..( 10): Result.005 file - promoters50/1396285
tactttttta

SEQ ID NO: 169547 - DNA, 10 bp, Unknown
  misc_feature (1)..( 10): Result.005 file - promoters50/1396285
ttgtttatta

SEQ ID NO: 169548 - DNA, 8 bp, Unknown
  misc_feature (1)..( 8): Result.005 file - promoters50/1396285
attaaatc

SEQ ID NO: 169549 - DNA, 8 bp, Unknown
  misc_feature (1)..( 8): Result.005 file - promoters50/1396285
cataaatc

SEQ ID NO: 169550 - DNA, 8 bp, Unknown
  misc_feature (1)..( 8): Result.005 file - promoters50/1396285
attaaatt

SEQ ID NO: 169551 - DNA, 8 bp, Unknown
  misc_feature (1)..( 8): Result.005 file - promoters50/1396285
tttaaata

SEQ ID NO: 169552 - DNA, 10 bp, Unknown
  misc_feature (1)..( 10): Result.005 file - promoters50/1396285
tctaaaatat

SEQ ID NO: 169553 - DNA, 10 bp, Unknown
  misc_feature (1)..( 10): Result.005 file - promoters50/1396285
cacaaattat

SEQ ID NO: 169554 - DNA, 10 bp, Unknown
  misc_feature (1)..( 10): Result.005 file - promoters50/1396285
taaaaaatag

SEQ ID NO: 169555 - DNA, 10 bp, Unknown
  misc_feature (1)..( 10): Result.005 file - promoters50/1396285
tcttaaataa

SEQ ID NO: 169556 - DNA, 7 bp, Unknown
  misc_feature (1)..( 7): Result.005 file - promoters50/1396296
gatgatt

SEQ ID NO: 169557 - DNA, 7 bp, Unknown
  misc_feature (1)..( 7): Result.005 file - promoters50/1396296
catgatt

SEQ ID NO: 169558 - DNA, 7 bp, Unknown
  misc_feature (1)..( 7): Result.005 file - promoters50/1396296
gatgatc

SEQ ID NO: 169559 - DNA, 7 bp, Unknown
  misc_feature (1)..( 7): Result.005 file - promoters50/1396296
ttttttt

SEQ ID NO: 169560 - DNA, 7 bp, Unknown
  misc_feature (1)..( 7): Result.005 file - promoters50/1396296
tttgttt

SEQ ID NO: 169561 - DNA, 7 bp, Unknown
  misc_feature (1)..( 7): Result.005 file - promoters50/1396296
ttttttc

SEQ ID NO: 169562 - DNA, 7 bp, Unknown
  misc_feature (1)..( 7): Result.005 file - promoters50/1396296
tttgaat

SEQ ID NO: 169563 - DNA, 7 bp, Unknown
  misc_feature (1)..( 7): Result.005 file - promoters50/1396296
tttgaag

SEQ ID NO: 169564 - DNA, 7 bp, Unknown
  misc_feature (1)..( 7): Result.005 file - promoters50/1396296
tttcaag

SEQ ID NO: 169565 - DNA, 12 bp, Unknown
  misc_feature (1)..( 12): Result.005 file - promoters50/1396308
gacgaaaaaggg

SEQ ID NO: 169566 - DNA, 9 bp, Unknown
  misc_feature (1)..( 9): Result.005 file - promoters50/1396308
taaaaagtc

SEQ ID NO: 169567 - DNA, 12 bp, Unknown
  misc_feature (1)..( 12): Result.005 file - promoters50/1396308
gaccaaaaaaag

SEQ ID NO: 169568 - DNA, 9 bp, Unknown
  misc_feature (1)..( 9): Result.005 file - promoters50/1396308
taaaaatga

SEQ ID NO: 169569 - DNA, 12 bp, Unknown
  misc_feature (1)..( 12): Result.005 file - promoters50/1396308
gtccaaaaatct

SEQ ID NO: 169570 - DNA, 12 bp, Unknown
  misc_feature (1)..( 12): Result.005 file - promoters50/1396308
gaccaagaatct

SEQ ID NO: 169571 - DNA, 11 bp, Unknown
  misc_feature (1)..( 11): Result.005 file - promoters50/1396308
taattttgtat

SEQ ID NO: 169572 - DNA, 11 bp, Unknown
  misc_feature (1)..( 11): Result.005 file - promoters50/1396308
tgtttttgttt

SEQ ID NO: 169573 - DNA, 11 bp, Unknown
  misc_feature (1)..( 11): Result.005 file - promoters50/1396308
taaatttgttt

SEQ ID NO: 169574 - DNA, 11 bp, Unknown
  misc_feature (1)..( 11): Result.005 file - promoters50/1396308
tgactttgttg

SEQ ID NO: 169575 - DNA, 11 bp, Unknown
  misc_feature (1)..( 11): Result.005 file - promoters50/1396308
ctgatttattt

SEQ ID NO: 169576 - DNA, 11 bp, Unknown
  misc_feature (1)..( 11): Result.005 file - promoters50/1396308
aaaatttgcta

SEQ ID NO: 169577 - DNA, 10 bp, Unknown
  misc_feature (1)..( 10): Result.005 file - promoters50/1396308
taatttatgt

SEQ ID NO: 169578 - DNA, 10 bp, Unknown
  misc_feature (1)..( 10): Result.005 file - promoters50/1396308
atatttattt

SEQ ID NO: 169579 - DNA, 10 bp, Unknown
  misc_feature (1)..( 10): Result.005 file - promoters50/1396308
tgatttattt

SEQ ID NO: 169580 - DNA, 10 bp, Unknown
  misc_feature (1)..( 10): Result.005 file - promoters50/1396308
aaatatatat

SEQ ID NO: 169581 - DNA, 10 bp, Unknown
  misc_feature (1)..( 10): Result.005 file - promoters50/1396308
aaatttgttt

SEQ ID NO: 169582 - DNA, 10 bp, Unknown
  misc_feature (1)..( 10): Result.005 file - promoters50/1396308
aaatttgcta

SEQ ID NO: 169583 - DNA, 9 bp, Unknown
  misc_feature (1)..( 9): Result.005 file - promoters50/1396308
ttattatac

SEQ ID NO: 169584 - DNA, 9 bp, Unknown
  misc_feature (1)..( 9): Result.005 file - promoters50/1396308
atataataa

SEQ ID NO: 169585 - DNA, 9 bp, Unknown
  misc_feature (1)..( 9): Result.005 file - promoters50/1396308
atataataa

SEQ ID NO: 169586 - DNA, 9 bp, Unknown
  misc_feature (1)..( 9): Result.005 file - promoters50/1396308
ttataatgt

SEQ ID NO: 169587 - DNA, 9 bp, Unknown
  misc_feature (1)..( 9): Result.005 file - promoters50/1396308
atataaaat

SEQ ID NO: 169588 - DNA, 9 bp, Unknown
  misc_feature (1)..( 9): Result.005 file - promoters50/1396308
gtttaataa

SEQ ID NO: 169589 - DNA, 9 bp, Unknown
  misc_feature (1)..( 9): Result.005 file - promoters50/1396308
atataacaa

SEQ ID NO: 169590 - DNA, 11 bp, Unknown
  misc_feature (1)..( 11): Result.005 file - promoters50/1396308
ttgatccaaac

SEQ ID NO: 169591 - DNA, 11 bp, Unknown
  misc_feature (1)..( 11): Result.005 file - promoters50/1396308
tcaatcaaaag

SEQ ID NO: 169592 - DNA, 11 bp, Unknown
  misc_feature (1)..( 11): Result.005 file - promoters50/1396308
attatcctaac

SEQ ID NO: 169593 - DNA, 11 bp, Unknown
  misc_feature (1)..( 11): Result.005 file - promoters50/1396308
caaatcaaatt

SEQ ID NO: 169594 - DNA, 11 bp, Unknown
  misc_feature (1)..( 11): Result.005 file - promoters50/1396308
cctttcaaata

SEQ ID NO: 169595 - DNA, 11 bp, Unknown
  misc_feature (1)..( 11): Result.005 file - promoters50/1396308
tcaattaaaag

SEQ ID NO: 169596 - DNA, 11 bp, Unknown
  misc_feature (1)..( 11): Result.005 file - promoters50/1396308
ggtgtaaacga

SEQ ID NO: 169597 - DNA, 11 bp, Unknown
  misc_feature (1)..( 11): Result.005 file - promoters50/1396308
tttgtcaacga

SEQ ID NO: 169598 - DNA, 11 bp, Unknown
  misc_feature (1)..( 11): Result.005 file - promoters50/1396308
ggtgtaatgct

SEQ ID NO: 169599 - DNA, 11 bp, Unknown
  misc_feature (1)..( 11): Result.005 file - promoters50/1396308
tcttttatcac

SEQ ID NO: 169600 - DNA, 11 bp, Unknown
  misc_feature (1)..( 11): Result.005 file - promoters50/1396308
tgtttgccaaa

SEQ ID NO: 169601 - DNA, 11 bp, Unknown
  misc_feature (1)..( 11): Result.005 file - promoters50/1396308
cgtataacaat

SEQ ID NO: 169602 - DNA, 11 bp, Unknown
  misc_feature (1)..( 11): Result.005 file - promoters50/1396308
ataaaaaataa

SEQ ID NO: 169603 - DNA, 11 bp, Unknown
  misc_feature (1)..( 11): Result.005 file - promoters50/1396308
gcctaaaatat

SEQ ID NO: 169604 - DNA, 11 bp, Unknown
  misc_feature (1)..( 11): Result.005 file - promoters50/1396308
ataataaatag

SEQ ID NO: 169605 - DNA, 11 bp, Unknown
  misc_feature (1)..( 11): Result.005 file - promoters50/1396308
atctcaaataa

SEQ ID NO: 169606 - DNA, 11 bp, Unknown
  misc_feature (1)..( 11): Result.005 file - promoters50/1396308
ataacaaatca

SEQ ID NO: 169607 - DNA, 11 bp, Unknown
  misc_feature (1)..( 11): Result.005 file - promoters50/1396308
ataacaatttg

SEQ ID NO: 169608 - DNA, 11 bp, Unknown
  misc_feature (1)..( 11): Result.005 file - promoters50/1396308
tataatagtaa

SEQ ID NO: 169609 - DNA, 11 bp, Unknown
  misc_feature (1)..( 11): Result.005 file - promoters50/1396308
cataataaata

SEQ ID NO: 169610 - DNA, 11 bp, Unknown
  misc_feature (1)..( 11): Result.005 file - promoters50/1396308
tataatataat

SEQ ID NO: 169611 - DNA, 11 bp, Unknown
  misc_feature (1)..( 11): Result.005 file - promoters50/1396308
tataatgaatt

SEQ ID NO: 169612 - DNA, 11 bp, Unknown
  misc_feature (1)..( 11): Result.005 file - promoters50/1396308
aataaggaatt

SEQ ID NO: 169613 - DNA, 11 bp, Unknown
  misc_feature (1)..( 11): Result.005 file - promoters50/1396308
gatagtgaacc

SEQ ID NO: 169614 - DNA, 12 bp, Unknown
  misc_feature (1)..( 12): Result.005 file - promoters50/1396312
aaaaataaataa

SEQ ID NO: 169615 - DNA, 12 bp, Unknown
  misc_feature (1)..( 12): Result.005 file - promoters50/1396312
attaataaagct

SEQ ID NO: 169616 - DNA, 12 bp, Unknown
  misc_feature (1)..( 12): Result.005 file - promoters50/1396312
ttaaataaagca

SEQ ID NO: 169617 - DNA, 12 bp, Unknown
  misc_feature (1)..( 12): Result.005 file - promoters50/1396312
gaaaattaactc

SEQ ID NO: 169618 - DNA, 12 bp, Unknown
  misc_feature (1)..( 12): Result.005 file - promoters50/1396312
gaaaattccttt

SEQ ID NO: 169619 - DNA, 12 bp, Unknown
  misc_feature (1)..( 12): Result.005 file - promoters50/1396312
ttatattatata

SEQ ID NO: 169620 - DNA, 12 bp, Unknown
  misc_feature (1)..( 12): Result.005 file - promoters50/1396312
aatattaacctt

SEQ ID NO: 169621 - DNA, 12 bp, Unknown
  misc_feature (1)..( 12): Result.005 file - promoters50/1396312
attattaacatt

SEQ ID NO: 169622 - DNA, 12 bp, Unknown
  misc_feature (1)..( 12): Result.005 file - promoters50/1396312
gtttttaacctt

SEQ ID NO: 169623 - DNA, 12 bp, Unknown
  misc_feature (1)..( 12): Result.005 file - promoters50/1396312
atttttaattca

SEQ ID NO: 169624 - DNA, 12 bp, Unknown
  misc_feature (1)..( 12): Result.005 file - promoters50/1396312
cacatttacatc

SEQ ID NO: 169625 - DNA, 12 bp, Unknown
  misc_feature (1)..( 12): Result.005 file - promoters50/1396312
ttttttaacaaa

SEQ ID NO: 169626 - DNA, 10 bp, Unknown
  misc_feature (1)..( 10): Result.005 file - promoters50/1396312
taacgaaaaa

SEQ ID NO: 169627 - DNA, 10 bp, Unknown
  misc_feature (1)..( 10): Result.005 file - promoters50/1396312
aaacaaaaaa

SEQ ID NO: 169628 - DNA, 10 bp, Unknown
  misc_feature (1)..( 10): Result.005 file - promoters50/1396312
aaacatataa

SEQ ID NO: 169629 - DNA, 10 bp, Unknown
  misc_feature (1)..( 10): Result.005 file - promoters50/1396312
tcccaaaaac

SEQ ID NO: 169630 - DNA, 10 bp, Unknown
  misc_feature (1)..( 10): Result.005 file - promoters50/1396312
cgtcaaaaaa

SEQ ID NO: 169631 - DNA, 10 bp, Unknown
  misc_feature (1)..( 10): Result.005 file - promoters50/1396312
atacaaatag

SEQ ID NO: 169632 - DNA, 12 bp, Unknown
  misc_feature (1)..( 12): Result.005 file - promoters50/1396312
ttcttaaacaaa

SEQ ID NO: 169633 - DNA, 12 bp, Unknown
  misc_feature (1)..( 12): Result.005 file - promoters50/1396312
ttctgaaacttc

SEQ ID NO: 169634 - DNA, 12 bp, Unknown
  misc_feature (1)..( 12): Result.005 file - promoters50/1396312
ttaagaaactaa

SEQ ID NO: 169635 - DNA, 12 bp, Unknown
  misc_feature (1)..( 12): Result.005 file - promoters50/1396312
tcaggaaaataa

SEQ ID NO: 169636 - DNA, 12 bp, Unknown
  misc_feature (1)..( 12): Result.005 file - promoters50/1396312
attggaaaaagg

SEQ ID NO: 169637 - DNA, 12 bp, Unknown
  misc_feature (1)..( 12): Result.005 file - promoters50/1396312
tactgaaaaaga

SEQ ID NO: 169638 - DNA, 7 bp, Unknown
  misc_feature (1)..( 7): Result.005 file - promoters50/1396320
tttcagt

SEQ ID NO: 169639 - DNA, 7 bp, Unknown
  misc_feature (1)..( 7): Result.005 file - promoters50/1396320
cttcagt

SEQ ID NO: 169640 - DNA, 7 bp, Unknown
  misc_feature (1)..( 7): Result.005 file - promoters50/1396320
cttcaga

SEQ ID NO: 169641 - DNA, 9 bp, Unknown
  misc_feature (1)..( 9): Result.005 file - promoters50/1396354
aatatatac

SEQ ID NO: 169642 - DNA, 9 bp, Unknown
  misc_feature (1)..( 9): Result.005 file - promoters50/1396354
tctatataa

SEQ ID NO: 169643 - DNA, 9 bp, Unknown
  misc_feature (1)..( 9): Result.005 file - promoters50/1396354
aatatatat

SEQ ID NO: 169644 - DNA, 9 bp, Unknown
  misc_feature (1)..( 9): Result.005 file - promoters50/1396354
cataaatac

SEQ ID NO: 169645 - DNA, 9 bp, Unknown
  misc_feature (1)..( 9): Result.005 file - promoters50/1396354
actatttaa

SEQ ID NO: 169646 - DNA, 9 bp, Unknown
  misc_feature (1)..( 9): Result.005 file - promoters50/1396354
cctagttac

SEQ ID NO: 169647 - DNA, 13 bp, Unknown
  misc_feature (1)..( 13): Result.005 file - promoters50/1396364
tagttgattcgtt

SEQ ID NO: 169648 - DNA, 13 bp, Unknown
  misc_feature (1)..( 13): Result.005 file - promoters50/1396364
atttttatttgtt

SEQ ID NO: 169649 - DNA, 13 bp, Unknown
  misc_feature (1)..( 13): Result.005 file - promoters50/1396364
tagtttattcgag

SEQ ID NO: 169650 - DNA, 14 bp, Unknown
  misc_feature (1)..( 14): Result.005 file - promoters50/1396364
tgaaatgtttagtt

SEQ ID NO: 169651 - DNA, 8 bp, Unknown
  misc_feature (1)..( 8): Result.005 file - promoters50/1396364
tattaatg

SEQ ID NO: 169652 - DNA, 8 bp, Unknown
  misc_feature (1)..( 8): Result.005 file - promoters50/1396364
tattaata

SEQ ID NO: 169653 - DNA, 8 bp, Unknown
  misc_feature (1)..( 8): Result.005 file - promoters50/1396364
agttaatg

SEQ ID NO: 169654 - DNA, 8 bp, Unknown
  misc_feature (1)..( 8): Result.005 file - promoters50/1396364
ggttaatt

SEQ ID NO: 169655 - DNA, 7 bp, Unknown
  misc_feature (1)..( 7): Result.005 file - promoters50/1396364
aatatta

SEQ ID NO: 169656 - DNA, 7 bp, Unknown
  misc_feature (1)..( 7): Result.005 file - promoters50/1396364
aatattt

SEQ ID NO: 169657 - DNA, 7 bp, Unknown
  misc_feature (1)..( 7): Result.005 file - promoters50/1396364
aatgttt

SEQ ID NO: 169658 - DNA, 7 bp, Unknown
  misc_feature (1)..( 7): Result.005 file - promoters50/1396364
aatgttt

SEQ ID NO: 169659 - DNA, 8 bp, Unknown
  misc_feature (1)..( 8): Result.005 file - promoters50/1396364
tttagtgg

SEQ ID NO: 169660 - DNA, 8 bp, Unknown
  misc_feature (1)..( 8): Result.005 file - promoters50/1396364
tttagttt

SEQ ID NO: 169661 - DNA, 8 bp, Unknown
  misc_feature (1)..( 8): Result.005 file - promoters50/1396364
tttagtta

SEQ ID NO: 169662 - DNA, 8 bp, Unknown
  misc_feature (1)..( 8): Result.005 file - promoters50/1396364
cttatttt

SEQ ID NO: 169663 - DNA, 11 bp, Unknown
  misc_feature (1)..( 11): Result.005 file - promoters50/1396364
tacgtaacatg

SEQ ID NO: 169664 - DNA, 11 bp, Unknown
  misc_feature (1)..( 11): Result.005 file - promoters50/1396364
tacgttacaat

SEQ ID NO: 169665 - DNA, 11 bp, Unknown
  misc_feature (1)..( 11): Result.005 file - promoters50/1396364
gtattaatatg

SEQ ID NO: 169666 - DNA, 11 bp, Unknown
  misc_feature (1)..( 11): Result.005 file - promoters50/1396364
tacgttttttt

SEQ ID NO: 169667 - DNA, 9 bp, Unknown
  misc_feature (1)..( 9): Result.005 file - promoters50/1396383
gttaattta

SEQ ID NO: 169668 - DNA, 9 bp, Unknown
  misc_feature (1)..( 9): Result.005 file - promoters50/1396383
gttgattat

SEQ ID NO: 169669 - DNA, 9 bp, Unknown
  misc_feature (1)..( 9): Result.005 file - promoters50/1396383
tataattta

SEQ ID NO: 169670 - DNA, 8 bp, Unknown
  misc_feature (1)..( 8): Result.005 file - promoters50/1396399
taatgatg

SEQ ID NO: 169671 - DNA, 8 bp, Unknown
  misc_feature (1)..( 8): Result.005 file - promoters50/1396399
taatgaat

SEQ ID NO: 169672 - DNA, 8 bp, Unknown
  misc_feature (1)..( 8): Result.005 file - promoters50/1396399
taattaat

SEQ ID NO: 169673 - DNA, 11 bp, Unknown
  misc_feature (1)..( 11): Result.005 file - promoters50/1396407
aaaagaaaaac

SEQ ID NO: 169674 - DNA, 11 bp, Unknown
  misc_feature (1)..( 11): Result.005 file - promoters50/1396407
gaaagaatcaa

SEQ ID NO: 169675 - DNA, 11 bp, Unknown
  misc_feature (1)..( 11): Result.005 file - promoters50/1396407
gaaggaaacaa

SEQ ID NO: 169676 - DNA, 10 bp, Unknown
  misc_feature (1)..( 10): Result.005 file - promoters50/1396425
aataatttga

SEQ ID NO: 169677 - DNA, 10 bp, Unknown
  misc_feature (1)..( 10): Result.005 file - promoters50/1396425
ttgcatttga

SEQ ID NO: 169678 - DNA, 10 bp, Unknown
  misc_feature (1)..( 10): Result.005 file - promoters50/1396425
ttgaatttga

SEQ ID NO: 169679 - DNA, 7 bp, Unknown
  misc_feature (1)..( 7): Result.005 file - promoters50/1396425
agtgact

SEQ ID NO: 169680 - DNA, 7 bp, Unknown
  misc_feature (1)..( 7): Result.005 file - promoters50/1396425
agtgact

SEQ ID NO: 169681 - DNA, 7 bp, Unknown
  misc_feature (1)..( 7): Result.005 file - promoters50/1396425
agttact

SEQ ID NO: 169682 - DNA, 7 bp, Unknown
  misc_feature (1)..( 7): Result.005 file - promoters50/1396425
atagaat

SEQ ID NO: 169683 - DNA, 7 bp, Unknown
  misc_feature (1)..( 7): Result.005 file - promoters50/1396425
ataaaat

SEQ ID NO: 169684 - DNA, 7 bp, Unknown
  misc_feature (1)..( 7): Result.005 file - promoters50/1396425
ataaaat

SEQ ID NO: 169685 - DNA, 10 bp, Unknown
  misc_feature (1)..( 10): Result.005 file - promoters50/1396425
gttaatttgg

SEQ ID NO: 169686 - DNA, 10 bp, Unknown
  misc_feature (1)..( 10): Result.005 file - promoters50/1396425
ttgaatttga

SEQ ID NO: 169687 - DNA, 10 bp, Unknown
  misc_feature (1)..( 10): Result.005 file - promoters50/1396425
ttgcatttga

SEQ ID NO: 169688 - DNA, 7 bp, Unknown
  misc_feature (1)..( 7): Result.005 file - promoters50/1396425
cactatt

SEQ ID NO: 169689 - DNA, 7 bp, Unknown
  misc_feature (1)..( 7): Result.005 file - promoters50/1396425
caccatt

SEQ ID NO: 169690 - DNA, 7 bp, Unknown
  misc_feature (1)..( 7): Result.005 file - promoters50/1396425
aaccatt

SEQ ID NO: 169691 - DNA, 8 bp, Unknown
  misc_feature (1)..( 8): Result.005 file - promoters50/1396425
taattcaa

SEQ ID NO: 169692 - DNA, 8 bp, Unknown
  misc_feature (1)..( 8): Result.005 file - promoters50/1396425
taattctt

SEQ ID NO: 169693 - DNA, 8 bp, Unknown
  misc_feature (1)..( 8): Result.005 file - promoters50/1396425
caattctt

SEQ ID NO: 169694 - DNA, 10 bp, Unknown
  misc_feature (1)..( 10): Result.005 file - promoters50/1396462
taaaaagtaa

SEQ ID NO: 169695 - DNA, 10 bp, Unknown
  misc_feature (1)..( 10): Result.005 file - promoters50/1396462
taataagtaa

SEQ ID NO: 169696 - DNA, 10 bp, Unknown
  misc_feature (1)..( 10): Result.005 file - promoters50/1396462
taaaaatatc

SEQ ID NO: 169697 - DNA, 10 bp, Unknown
  misc_feature (1)..( 10): Result.005 file - promoters50/1396462
aaacaaattt

SEQ ID NO: 169698 - DNA, 10 bp, Unknown
  misc_feature (1)..( 10): Result.005 file - promoters50/1396462
aaagaaagct

SEQ ID NO: 169699 - DNA, 10 bp, Unknown
  misc_feature (1)..( 10): Result.005 file - promoters50/1396462
ctacaatttt

SEQ ID NO: 169700 - DNA, 9 bp, Unknown
  misc_feature (1)..( 9): Result.005 file - promoters50/1396462
ttttgaaaa

SEQ ID NO: 169701 - DNA, 9 bp, Unknown
  misc_feature (1)..( 9): Result.005 file - promoters50/1396462
tttggaaaa

SEQ ID NO: 169702 - DNA, 9 bp, Unknown
  misc_feature (1)..( 9): Result.005 file - promoters50/1396462
ccttgaaac

SEQ ID NO: 169703 - DNA, 9 bp, Unknown
  misc_feature (1)..( 9): Result.005 file - promoters50/1396462
tgaaaaaaa

SEQ ID NO: 169704 - DNA, 9 bp, Unknown
  misc_feature (1)..( 9): Result.005 file - promoters50/1396462
gaaaagaaa

SEQ ID NO: 169705 - DNA, 10 bp, Unknown
  misc_feature (1)..( 10): Result.005 file - promoters50/1396462
ggaaatgaaa

SEQ ID NO: 169706 - DNA, 11 bp, Unknown
  misc_feature (1)..( 11): Result.005 file - promoters50/1396462
aaaaaaaaagt

SEQ ID NO: 169707 - DNA, 11 bp, Unknown
  misc_feature (1)..( 11): Result.005 file - promoters50/1396462
aaaataaaata

SEQ ID NO: 169708 - DNA, 11 bp, Unknown
  misc_feature (1)..( 11): Result.005 file - promoters50/1396462
gaaatgaaata

SEQ ID NO: 169709 - DNA, 9 bp, Unknown
  misc_feature (1)..( 9): Result.005 file - promoters50/1396462
aaaaggaaa

SEQ ID NO: 169710 - DNA, 9 bp, Unknown
  misc_feature (1)..( 9): Result.005 file - promoters50/1396462
aaaaggaga

SEQ ID NO: 169711 - DNA, 9 bp, Unknown
  misc_feature (1)..( 9): Result.005 file - promoters50/1396462
taaagtaaa

SEQ ID NO: 169712 - DNA, 14 bp, Unknown
  misc_feature (1)..( 14): Result.005 file - promoters50/1396469
ttttttatagatta

SEQ ID NO: 169713 - DNA, 14 bp, Unknown
  misc_feature (1)..( 14): Result.005 file - promoters50/1396469
ttttctataaatta

SEQ ID NO: 169714 - DNA, 14 bp, Unknown
  misc_feature (1)..( 14): Result.005 file - promoters50/1396469
ctttatatagagac

SEQ ID NO: 169715 - DNA, 14 bp, Unknown
  misc_feature (1)..( 14): Result.005 file - promoters50/1396469
agagctaaaaacgg

SEQ ID NO: 169716 - DNA, 14 bp, Unknown
  misc_feature (1)..( 14): Result.005 file - promoters50/1396469
tcagatatacattg

SEQ ID NO: 169717 - DNA, 12 bp, Unknown
  misc_feature (1)..( 12): Result.005 file - promoters50/1396469
aatcacatatta

SEQ ID NO: 169718 - DNA, 12 bp, Unknown
  misc_feature (1)..( 12): Result.005 file - promoters50/1396469
actcatatatat

SEQ ID NO: 169719 - DNA, 12 bp, Unknown
  misc_feature (1)..( 12): Result.005 file - promoters50/1396469
acgtatatataa

SEQ ID NO: 169720 - DNA, 12 bp, Unknown
  misc_feature (1)..( 12): Result.005 file - promoters50/1396469
actcatatatat

SEQ ID NO: 169721 - DNA, 12 bp, Unknown
  misc_feature (1)..( 12): Result.005 file - promoters50/1396469
tacaatataaac

SEQ ID NO: 169722 - DNA, 13 bp, Unknown
  misc_feature (1)..( 13): Result.005 file - promoters50/1396469
tcacatattaaca

SEQ ID NO: 169723 - DNA, 13 bp, Unknown
  misc_feature (1)..( 13): Result.005 file - promoters50/1396469
tacaatataaaca

SEQ ID NO: 169724 - DNA, 13 bp, Unknown
  misc_feature (1)..( 13): Result.005 file - promoters50/1396469
tcatatatataca

SEQ ID NO: 169725 - DNA, 13 bp, Unknown
  misc_feature (1)..( 13): Result.005 file - promoters50/1396469
acgtatatataaa

SEQ ID NO: 169726 - DNA, 13 bp, Unknown
  misc_feature (1)..( 13): Result.005 file - promoters50/1396469
actcatatatatc

SEQ ID NO: 169727 - DNA, 15 bp, Unknown
  misc_feature (1)..( 15): Result.005 file - promoters50/1396469
acaaacattaagatg

SEQ ID NO: 169728 - DNA, 15 bp, Unknown
  misc_feature (1)..( 15): Result.005 file - promoters50/1396469
acaaactttttttac

SEQ ID NO: 169729 - DNA, 15 bp, Unknown
  misc_feature (1)..( 15): Result.005 file - promoters50/1396469
tcaaattttttttct

SEQ ID NO: 169730 - DNA, 15 bp, Unknown
  misc_feature (1)..( 15): Result.005 file - promoters50/1396469
ttgacttttctttct

SEQ ID NO: 169731 - DNA, 15 bp, Unknown
  misc_feature (1)..( 15): Result.005 file - promoters50/1396469
accaatttttagtca

SEQ ID NO: 169732 - DNA, 9 bp, Unknown
  misc_feature (1)..( 9): Result.005 file - promoters50/1396469
cgaactaat

SEQ ID NO: 169733 - DNA, 9 bp, Unknown
  misc_feature (1)..( 9): Result.005 file - promoters50/1396469
cgaactaaa

SEQ ID NO: 169734 - DNA, 9 bp, Unknown
  misc_feature (1)..( 9): Result.005 file - promoters50/1396469
acaactaaa

SEQ ID NO: 169735 - DNA, 9 bp, Unknown
  misc_feature (1)..( 9): Result.005 file - promoters50/1396469
cctactaaa

SEQ ID NO: 169736 - DNA, 9 bp, Unknown
  misc_feature (1)..( 9): Result.005 file - promoters50/1396469
tatacgaaa

SEQ ID NO: 169737 - DNA, 10 bp, Unknown
  misc_feature (1)..( 10): Result.005 file - promoters50/1396482
aaaccaatat

SEQ ID NO: 169738 - DNA, 10 bp, Unknown
  misc_feature (1)..( 10): Result.005 file - promoters50/1396482
aaaacaaaac

SEQ ID NO: 169739 - DNA, 10 bp, Unknown
  misc_feature (1)..( 10): Result.005 file - promoters50/1396482
ataacaaata

SEQ ID NO: 169740 - DNA, 10 bp, Unknown
  misc_feature (1)..( 10): Result.005 file - promoters50/1396482
gaaccaatct

SEQ ID NO: 169741 - DNA, 10 bp, Unknown
  misc_feature (1)..( 10): Result.005 file - promoters50/1396482
aaaacacaaa

SEQ ID NO: 169742 - DNA, 10 bp, Unknown
  misc_feature (1)..( 10): Result.005 file - promoters50/1396482
ccgccattct

SEQ ID NO: 169743 - DNA, 7 bp, Unknown
  misc_feature (1)..( 7): Result.005 file - promoters50/1396519
atataaa

SEQ ID NO: 169744 - DNA, 7 bp, Unknown
  misc_feature (1)..( 7): Result.005 file - promoters50/1396519
atataaa

SEQ ID NO: 169745 - DNA, 7 bp, Unknown
  misc_feature (1)..( 7): Result.005 file - promoters50/1396519
atataat

SEQ ID NO: 169746 - DNA, 8 bp, Unknown
  misc_feature (1)..( 8): Result.005 file - promoters50/1396519
aaaatttt

SEQ ID NO: 169747 - DNA, 8 bp, Unknown
  misc_feature (1)..( 8): Result.005 file - promoters50/1396519
aaacttta

SEQ ID NO: 169748 - DNA, 8 bp, Unknown
  misc_feature (1)..( 8): Result.005 file - promoters50/1396519
gtaatttt

SEQ ID NO: 169749 - DNA, 10 bp, Unknown
  misc_feature (1)..( 10): Result.005 file - promoters50/1396519
ccaaaacatc

SEQ ID NO: 169750 - DNA, 10 bp, Unknown
  misc_feature (1)..( 10): Result.005 file - promoters50/1396519
ctaaaatatc

SEQ ID NO: 169751 - DNA, 10 bp, Unknown
  misc_feature (1)..( 10): Result.005 file - promoters50/1396519
ctagaattct

SEQ ID NO: 169752 - DNA, 13 bp, Unknown
  misc_feature (1)..( 13): Result.005 file - promoters50/1396519
acattttcagata

SEQ ID NO: 169753 - DNA, 13 bp, Unknown
  misc_feature (1)..( 13): Result.005 file - promoters50/1396519
acatttttagata

SEQ ID NO: 169754 - DNA, 13 bp, Unknown
  misc_feature (1)..( 13): Result.005 file - promoters50/1396519
gttaatttacata

SEQ ID NO: 169755 - DNA, 9 bp, Unknown
  misc_feature (1)..( 9): Result.005 file - promoters50/1396539
ttcttcctt

SEQ ID NO: 169756 - DNA, 9 bp, Unknown
  misc_feature (1)..( 9): Result.005 file - promoters50/1396539
ttcttcagt

SEQ ID NO: 169757 - DNA, 9 bp, Unknown
  misc_feature (1)..( 9): Result.005 file - promoters50/1396539
ctcttaagt

SEQ ID NO: 169758 - DNA, 9 bp, Unknown
  misc_feature (1)..( 9): Result.005 file - promoters50/1396665
atttatttt

SEQ ID NO: 169759 - DNA, 9 bp, Unknown
  misc_feature (1)..( 9): Result.005 file - promoters50/1396665
aattatttt

SEQ ID NO: 169760 - DNA, 9 bp, Unknown
  misc_feature (1)..( 9): Result.005 file - promoters50/1396665
aatcattct

SEQ ID NO: 169761 - DNA, 8 bp, Unknown
  misc_feature (1)..( 8): Result.005 file - promoters50/1396665
taaaactt

SEQ ID NO: 169762 - DNA, 8 bp, Unknown
  misc_feature (1)..( 8): Result.005 file - promoters50/1396665
aaaaactt

SEQ ID NO: 169763 - DNA, 9 bp, Unknown
  misc_feature (1)..( 9): Result.005 file - promoters50/1396665
aaacaactg

SEQ ID NO: 169764 - DNA, 10 bp, Unknown
  misc_feature (1)..( 10): Result.005 file - promoters50/1396721
tgagattgaa

SEQ ID NO: 169765 - DNA, 10 bp, Unknown
  misc_feature (1)..( 10): Result.005 file - promoters50/1396721
aagaattgaa

SEQ ID NO: 169766 - DNA, 10 bp, Unknown
  misc_feature (1)..( 10): Result.005 file - promoters50/1396721
tgagagtgat

SEQ ID NO: 169767 - DNA, 11 bp, Unknown
  misc_feature (1)..( 11): Result.005 file - promoters50/1396721
catgacttcat

SEQ ID NO: 169768 - DNA, 11 bp, Unknown
  misc_feature (1)..( 11): Result.005 file - promoters50/1396721
tgtgactccat

SEQ ID NO: 169769 - DNA, 11 bp, Unknown
  misc_feature (1)..( 11): Result.005 file - promoters50/1396721
cattactataa

SEQ ID NO: 169770 - DNA, 9 bp, Unknown
  misc_feature (1)..( 9): Result.005 file - promoters50/1396767
taaacaaaa

SEQ ID NO: 169771 - DNA, 9 bp, Unknown
  misc_feature (1)..( 9): Result.005 file - promoters50/1396767
caaactaaa

SEQ ID NO: 169772 - DNA, 9 bp, Unknown
  misc_feature (1)..( 9): Result.005 file - promoters50/1396767
caagctaga

SEQ ID NO: 169773 - DNA, 8 bp, Unknown
  misc_feature (1)..( 8): Result.005 file - promoters50/1396767
gttagaaa

SEQ ID NO: 169774 - DNA, 8 bp, Unknown
  misc_feature (1)..( 8): Result.005 file - promoters50/1396767
cttacaaa

SEQ ID NO: 169775 - DNA, 8 bp, Unknown
  misc_feature (1)..( 8): Result.005 file - promoters50/1396767
cttacatt

SEQ ID NO: 169776 - DNA, 11 bp, Unknown
  misc_feature (1)..( 11): Result.005 file - promoters50/1396816
tatctcacaat

SEQ ID NO: 169777 - DNA, 11 bp, Unknown
  misc_feature (1)..( 11): Result.005 file - promoters50/1396816
cctatcacaat

SEQ ID NO: 169778 - DNA, 11 bp, Unknown
  misc_feature (1)..( 11): Result.005 file - promoters50/1396816
tatttcacaga

SEQ ID NO: 169779 - DNA, 11 bp, Unknown
  misc_feature (1)..( 11): Result.005 file - promoters50/1396816
tagctcacacg

SEQ ID NO: 169780 - DNA, 11 bp, Unknown
  misc_feature (1)..( 11): Result.005 file - promoters50/1396816
aggttcacaga

SEQ ID NO: 169781 - DNA, 11 bp, Unknown
  misc_feature (1)..( 11): Result.005 file - promoters50/1396816
tctctcacctt

SEQ ID NO: 169782 - DNA, 11 bp, Unknown
  misc_feature (1)..( 11): Result.005 file - promoters50/1396816
gctaatttgaa

SEQ ID NO: 169783 - DNA, 11 bp, Unknown
  misc_feature (1)..( 11): Result.005 file - promoters50/1396816
tttaattttaa

SEQ ID NO: 169784 - DNA, 11 bp, Unknown
  misc_feature (1)..( 11): Result.005 file - promoters50/1396816
gataatttgtc

SEQ ID NO: 169785 - DNA, 11 bp, Unknown
  misc_feature (1)..( 11): Result.005 file - promoters50/1396816
gatgatttgag

SEQ ID NO: 169786 - DNA, 11 bp, Unknown
  misc_feature (1)..( 11): Result.005 file - promoters50/1396816
attgatgacgt

SEQ ID NO: 169787 - DNA, 11 bp, Unknown
  misc_feature (1)..( 11): Result.005 file - promoters50/1396816
tgagatttatg

SEQ ID NO: 169788 - DNA, 11 bp, Unknown
  misc_feature (1)..( 11): Result.005 file - promoters50/1396816
aaagaaaaact

SEQ ID NO: 169789 - DNA, 11 bp, Unknown
  misc_feature (1)..( 11): Result.005 file - promoters50/1396816
gacgaagaact

SEQ ID NO: 169790 - DNA, 11 bp, Unknown
  misc_feature (1)..( 11): Result.005 file - promoters50/1396816
atggaattttg

SEQ ID NO: 169791 - DNA, 11 bp, Unknown
  misc_feature (1)..( 11): Result.005 file - promoters50/1396816
tctgaatttta

SEQ ID NO: 169792 - DNA, 11 bp, Unknown
  misc_feature (1)..( 11): Result.005 file - promoters50/1396816
atgtaatttat

SEQ ID NO: 169793 - DNA, 11 bp, Unknown
  misc_feature (1)..( 11): Result.005 file - promoters50/1396816
tgtgaacttag

SEQ ID NO: 169794 - DNA, 15 bp, Unknown
  misc_feature (1)..( 15): Result.005 file - promoters50/1396877
tctgtctagttcggt

SEQ ID NO: 169795 - DNA, 15 bp, Unknown
  misc_feature (1)..( 15): Result.005 file - promoters50/1396877
tctctcttgtttggt

SEQ ID NO: 169796 - DNA, 15 bp, Unknown
  misc_feature (1)..( 15): Result.005 file - promoters50/1396877
aaattctagtaaatg

SEQ ID NO: 169797 - DNA, 7 bp, Unknown
  misc_feature (1)..( 7): Result.005 file - promoters50/1396877
caaatca

SEQ ID NO: 169798 - DNA, 7 bp, Unknown
  misc_feature (1)..( 7): Result.005 file - promoters50/1396877
caattca

SEQ ID NO: 169799 - DNA, 7 bp, Unknown
  misc_feature (1)..( 7): Result.005 file - promoters50/1396877
aaaatca

SEQ ID NO: 169800 - DNA, 11 bp, Unknown
  misc_feature (1)..( 11): Result.005 file - promoters50/1396877
tctgaagattt

SEQ ID NO: 169801 - DNA, 11 bp, Unknown
  misc_feature (1)..( 11): Result.005 file - promoters50/1396877
tctgcagattc

SEQ ID NO: 169802 - DNA, 11 bp, Unknown
  misc_feature (1)..( 11): Result.005 file - promoters50/1396877
aattcagattt

SEQ ID NO: 169803 - DNA, 8 bp, Unknown
  misc_feature (1)..( 8): Result.005 file - promoters50/1396877
aatacatt

SEQ ID NO: 169804 - DNA, 8 bp, Unknown
  misc_feature (1)..( 8): Result.005 file - promoters50/1396877
aatacaat

SEQ ID NO: 169805 - DNA, 8 bp, Unknown
  misc_feature (1)..( 8): Result.005 file - promoters50/1396877
tatataat

SEQ ID NO: 169806 - DNA, 9 bp, Unknown
  misc_feature (1)..( 9): Result.005 file - promoters50/1396885
gttattcct

SEQ ID NO: 169807 - DNA, 9 bp, Unknown
  misc_feature (1)..( 9): Result.005 file - promoters50/1396885
atgattcct

SEQ ID NO: 169808 - DNA, 9 bp, Unknown
  misc_feature (1)..( 9): Result.005 file - promoters50/1396885
atgattccc

SEQ ID NO: 169809 - DNA, 11 bp, Unknown
  misc_feature (1)..( 11): Result.005 file - promoters50/1396989
tgctaaaccaa

SEQ ID NO: 169810 - DNA, 11 bp, Unknown
  misc_feature (1)..( 11): Result.005 file - promoters50/1396989
tgcaaaaccaa

SEQ ID NO: 169811 - DNA, 11 bp, Unknown
  misc_feature (1)..( 11): Result.005 file - promoters50/1396989
ctcaaaaccta

SEQ ID NO: 169812 - DNA, 10 bp, Unknown
  misc_feature (1)..( 10): Result.005 file - promoters50/1397029
tttcgatgta

SEQ ID NO: 169813 - DNA, 10 bp, Unknown
  misc_feature (1)..( 10): Result.005 file - promoters50/1397029
ttttgatttg

SEQ ID NO: 169814 - DNA, 10 bp, Unknown
  misc_feature (1)..( 10): Result.005 file - promoters50/1397029
ctttgctttg

SEQ ID NO: 169815 - DNA, 12 bp, Unknown
  misc_feature (1)..( 12): Result.005 file - promoters50/1397029
ttattttcagta

SEQ ID NO: 169816 - DNA, 12 bp, Unknown
  misc_feature (1)..( 12): Result.005 file - promoters50/1397029
aacttttaagta

SEQ ID NO: 169817 - DNA, 12 bp, Unknown
  misc_feature (1)..( 12): Result.005 file - promoters50/1397029
aacctttatgta

SEQ ID NO: 169818 - DNA, 9 bp, Unknown
  misc_feature (1)..( 9): Result.005 file - promoters50/1397029
taatcgttt

SEQ ID NO: 169819 - DNA, 9 bp, Unknown
  misc_feature (1)..( 9): Result.005 file - promoters50/1397029
caatccttt

SEQ ID NO: 169820 - DNA, 9 bp, Unknown
  misc_feature (1)..( 9): Result.005 file - promoters50/1397029
taagcgtag

SEQ ID NO: 169821 - DNA, 7 bp, Unknown
  misc_feature (1)..( 7): Result.005 file - promoters50/1397029
ttttagt

SEQ ID NO: 169822 - DNA, 7 bp, Unknown
  misc_feature (1)..( 7): Result.005 file - promoters50/1397029
ttttaga

SEQ ID NO: 169823 - DNA, 7 bp, Unknown
  misc_feature (1)..( 7): Result.005 file - promoters50/1397029
gtttagt

SEQ ID NO: 169824 - DNA, 12 bp, Unknown
  misc_feature (1)..( 12): Result.005 file - promoters50/1397029
cgggtttatgtt

SEQ ID NO: 169825 - DNA, 12 bp, Unknown
  misc_feature (1)..( 12): Result.005 file - promoters50/1397029
aacctttatgta

SEQ ID NO: 169826 - DNA, 12 bp, Unknown
  misc_feature (1)..( 12): Result.005 file - promoters50/1397029
aacttttaagta

SEQ ID NO: 169827 - DNA, 9 bp, Unknown
  misc_feature (1)..( 9): Result.005 file - promoters50/1397033
gaatagatt

SEQ ID NO: 169828 - DNA, 9 bp, Unknown
  misc_feature (1)..( 9): Result.005 file - promoters50/1397033
caatagaaa

SEQ ID NO: 169829 - DNA, 9 bp, Unknown
  misc_feature (1)..( 9): Result.005 file - promoters50/1397033
caacagatg

SEQ ID NO: 169830 - DNA, 9 bp, Unknown
  misc_feature (1)..( 9): Result.005 file - promoters50/1397033
aaataaaaa

SEQ ID NO: 169831 - DNA, 9 bp, Unknown
  misc_feature (1)..( 9): Result.005 file - promoters50/1397033
tacagtttc

SEQ ID NO: 169832 - DNA, 9 bp, Unknown
  misc_feature (1)..( 9): Result.005 file - promoters50/1397033
tacattttt

SEQ ID NO: 169833 - DNA, 9 bp, Unknown
  misc_feature (1)..( 9): Result.005 file - promoters50/1397033
gttattttt

SEQ ID NO: 169834 - DNA, 9 bp, Unknown
  misc_feature (1)..( 9): Result.005 file - promoters50/1397033
agtattttc

SEQ ID NO: 169835 - DNA, 8 bp, Unknown
  misc_feature (1)..( 8): Result.005 file - promoters50/1397033
attcttta

SEQ ID NO: 169836 - DNA, 8 bp, Unknown
  misc_feature (1)..( 8): Result.005 file - promoters50/1397033
attattta

SEQ ID NO: 169837 - DNA, 8 bp, Unknown
  misc_feature (1)..( 8): Result.005 file - promoters50/1397033
catcttta

SEQ ID NO: 169838 - DNA, 8 bp, Unknown
  misc_feature (1)..( 8): Result.005 file - promoters50/1397033
attttttg

SEQ ID NO: 169839 - DNA, 8 bp, Unknown
  misc_feature (1)..( 8): Result.005 file - promoters50/1397033
atttttct

SEQ ID NO: 169840 - DNA, 11 bp, Unknown
  misc_feature (1)..( 11): Result.005 file - promoters50/1397080
gaaaaacaaaa

SEQ ID NO: 169841 - DNA, 11 bp, Unknown
  misc_feature (1)..( 11): Result.005 file - promoters50/1397080
acaaatcaaat

SEQ ID NO: 169842 - DNA, 11 bp, Unknown
  misc_feature (1)..( 11): Result.005 file - promoters50/1397080
taaaaacgggt

SEQ ID NO: 169843 - DNA, 11 bp, Unknown
  misc_feature (1)..( 11): Result.005 file - promoters50/1397080
gaataacgata

SEQ ID NO: 169844 - DNA, 11 bp, Unknown
  misc_feature (1)..( 11): Result.005 file - promoters50/1397080
ttccatcgaat

SEQ ID NO: 169845 - DNA, 11 bp, Unknown
  misc_feature (1)..( 11): Result.005 file - promoters50/1397080
ctccaacgaac

SEQ ID NO: 169846 - DNA, 12 bp, Unknown
  misc_feature (1)..( 12): Result.005 file - promoters50/1397125
cagtcaacttgt

SEQ ID NO: 169847 - DNA, 12 bp, Unknown
  misc_feature (1)..( 12): Result.005 file - promoters50/1397125
caggcaaaacca

SEQ ID NO: 169848 - DNA, 12 bp, Unknown
  misc_feature (1)..( 12): Result.005 file - promoters50/1397125
aagttaactttg

SEQ ID NO: 169849 - DNA, 12 bp, Unknown
  misc_feature (1)..( 12): Result.005 file - promoters50/1397125
ctggaaacttta

SEQ ID NO: 169850 - DNA, 12 bp, Unknown
  misc_feature (1)..( 12): Result.005 file - promoters50/1397125
caattaacttat

SEQ ID NO: 169851 - DNA, 12 bp, Unknown
  misc_feature (1)..( 12): Result.005 file - promoters50/1397125
atattaaccttg

SEQ ID NO: 169852 - DNA, 9 bp, Unknown
  misc_feature (1)..( 9): Result.005 file - promoters50/1397125
ccaaaattg

SEQ ID NO: 169853 - DNA, 9 bp, Unknown
  misc_feature (1)..( 9): Result.005 file - promoters50/1397125
gtaaaattt

SEQ ID NO: 169854 - DNA, 9 bp, Unknown
  misc_feature (1)..( 9): Result.005 file - promoters50/1397125
ggaaacttt

SEQ ID NO: 169855 - DNA, 9 bp, Unknown
  misc_feature (1)..( 9): Result.005 file - promoters50/1397125
ataagatta

SEQ ID NO: 169856 - DNA, 9 bp, Unknown
  misc_feature (1)..( 9): Result.005 file - promoters50/1397125
gttaacttt

SEQ ID NO: 169857 - DNA, 9 bp, Unknown
  misc_feature (1)..( 9): Result.005 file - promoters50/1397125
attaactta

SEQ ID NO: 169858 - DNA, 9 bp, Unknown
  misc_feature (1)..( 9): Result.005 file - promoters50/1397125
ttaaccttg

SEQ ID NO: 169859 - DNA, 9 bp, Unknown
  misc_feature (1)..( 9): Result.005 file - promoters50/1397125
atttatttc

SEQ ID NO: 169860 - DNA, 9 bp, Unknown
  misc_feature (1)..( 9): Result.005 file - promoters50/1397125
taatatttc

SEQ ID NO: 169861 - DNA, 9 bp, Unknown
  misc_feature (1)..( 9): Result.005 file - promoters50/1397125
tgttatttt

SEQ ID NO: 169862 - DNA, 9 bp, Unknown
  misc_feature (1)..( 9): Result.005 file - promoters50/1397125
taatcttta

SEQ ID NO: 169863 - DNA, 9 bp, Unknown
  misc_feature (1)..( 9): Result.005 file - promoters50/1397125
gaattttta

SEQ ID NO: 169864 - DNA, 9 bp, Unknown
  misc_feature (1)..( 9): Result.005 file - promoters50/1397125
taattttgc

SEQ ID NO: 169865 - DNA, 11 bp, Unknown
  misc_feature (1)..( 11): Result.005 file - promoters50/1397125
taaaaaaaact

SEQ ID NO: 169866 - DNA, 11 bp, Unknown
  misc_feature (1)..( 11): Result.005 file - promoters50/1397125
aaaaataaact

SEQ ID NO: 169867 - DNA, 11 bp, Unknown
  misc_feature (1)..( 11): Result.005 file - promoters50/1397125
taaaaaaaaaa

SEQ ID NO: 169868 - DNA, 11 bp, Unknown
  misc_feature (1)..( 11): Result.005 file - promoters50/1397125
attacaaaact

SEQ ID NO: 169869 - DNA, 11 bp, Unknown
  misc_feature (1)..( 11): Result.005 file - promoters50/1397125
caaaaataaga

SEQ ID NO: 169870 - DNA, 11 bp, Unknown
  misc_feature (1)..( 11): Result.005 file - promoters50/1397125
tctgataaatt

SEQ ID NO: 169871 - DNA, 12 bp, Unknown
  misc_feature (1)..( 12): Result.005 file - promoters50/1397178
tctatttatcta

SEQ ID NO: 169872 - DNA, 12 bp, Unknown
  misc_feature (1)..( 12): Result.005 file - promoters50/1397178
aatttttttcta

SEQ ID NO: 169873 - DNA, 12 bp, Unknown
  misc_feature (1)..( 12): Result.005 file - promoters50/1397178
attgttttggtt

SEQ ID NO: 169874 - DNA, 7 bp, Unknown
  misc_feature (1)..( 7): Result.005 file - promoters50/1397178
atttttc

SEQ ID NO: 169875 - DNA, 7 bp, Unknown
  misc_feature (1)..( 7): Result.005 file - promoters50/1397178
atttttt

SEQ ID NO: 169876 - DNA, 8 bp, Unknown
  misc_feature (1)..( 8): Result.005 file - promoters50/1397178
attgtttt

SEQ ID NO: 169877 - DNA, 10 bp, Unknown
  misc_feature (1)..( 10): Result.005 file - promoters50/1397178
aaaaatttaa

SEQ ID NO: 169878 - DNA, 10 bp, Unknown
  misc_feature (1)..( 10): Result.005 file - promoters50/1397178
aaagatttga

SEQ ID NO: 169879 - DNA, 10 bp, Unknown
  misc_feature (1)..( 10): Result.005 file - promoters50/1397178
aaaactttaa

SEQ ID NO: 169880 - DNA, 10 bp, Unknown
  misc_feature (1)..( 10): Result.005 file - promoters50/1397178
taagattgcc

SEQ ID NO: 169881 - DNA, 8 bp, Unknown
  misc_feature (1)..( 8): Result.005 file - promoters50/1397178
agatttaa

SEQ ID NO: 169882 - DNA, 8 bp, Unknown
  misc_feature (1)..( 8): Result.005 file - promoters50/1397178
caatttaa

SEQ ID NO: 169883 - DNA, 8 bp, Unknown
  misc_feature (1)..( 8): Result.005 file - promoters50/1397178
caatttat

SEQ ID NO: 169884 - DNA, 9 bp, Unknown
  misc_feature (1)..( 9): Result.005 file - promoters50/1397178
ggtatttgt

SEQ ID NO: 169885 - DNA, 9 bp, Unknown
  misc_feature (1)..( 9): Result.005 file - promoters50/1397178
ggtgtttgc

SEQ ID NO: 169886 - DNA, 9 bp, Unknown
  misc_feature (1)..( 9): Result.005 file - promoters50/1397178
tttatttga

SEQ ID NO: 169887 - DNA, 9 bp, Unknown
  misc_feature (1)..( 9): Result.005 file - promoters50/1397178
atgatttga

SEQ ID NO: 169888 - DNA, 10 bp, Unknown
  misc_feature (1)..( 10): Result.005 file - promoters50/1397178
ttacaataat

SEQ ID NO: 169889 - DNA, 10 bp, Unknown
  misc_feature (1)..( 10): Result.005 file - promoters50/1397178
ttataattat

SEQ ID NO: 169890 - DNA, 10 bp, Unknown
  misc_feature (1)..( 10): Result.005 file - promoters50/1397178
aaataattat

SEQ ID NO: 169891 - DNA, 12 bp, Unknown
  misc_feature (1)..( 12): Result.005 file - promoters50/1397178
taataaaattat

SEQ ID NO: 169892 - DNA, 12 bp, Unknown
  misc_feature (1)..( 12): Result.005 file - promoters50/1397178
taaaaaaccgga

SEQ ID NO: 169893 - DNA, 13 bp, Unknown
  misc_feature (1)..( 13): Result.005 file - promoters50/1397178
gtatacaatgata

SEQ ID NO: 169894 - DNA, 13 bp, Unknown
  misc_feature (1)..( 13): Result.005 file - promoters50/1397178
ataaaattataaa

SEQ ID NO: 169895 - DNA, 13 bp, Unknown
  misc_feature (1)..( 13): Result.005 file - promoters50/1397178
ccggaattttaac

SEQ ID NO: 169896 - DNA, 13 bp, Unknown
  misc_feature (1)..( 13): Result.005 file - promoters50/1397178
atacaatgatatt

SEQ ID NO: 169897 - DNA, 13 bp, Unknown
  misc_feature (1)..( 13): Result.005 file - promoters50/1397178
ttaacctttgacc

SEQ ID NO: 169898 - DNA, 9 bp, Unknown
  misc_feature (1)..( 9): Result.005 file - promoters50/1397178
ttgtataaa

SEQ ID NO: 169899 - DNA, 9 bp, Unknown
  misc_feature (1)..( 9): Result.005 file - promoters50/1397178
tcatataaa

SEQ ID NO: 169900 - DNA, 9 bp, Unknown
  misc_feature (1)..( 9): Result.005 file - promoters50/1397178
tcaaataaa

SEQ ID NO: 169901 - DNA, 8 bp, Unknown
  misc_feature (1)..( 8): Result.005 file - promoters50/1397178
attttttt

SEQ ID NO: 169902 - DNA, 8 bp, Unknown
  misc_feature (1)..( 8): Result.005 file - promoters50/1397178
attgtttt

SEQ ID NO: 169903 - DNA, 8 bp, Unknown
  misc_feature (1)..( 8): Result.005 file - promoters50/1397178
attttttt

SEQ ID NO: 169904 - DNA, 10 bp, Unknown
  misc_feature (1)..( 10): Result.005 file - promoters50/1397178
aataaaaatt

SEQ ID NO: 169905 - DNA, 10 bp, Unknown
  misc_feature (1)..( 10): Result.005 file - promoters50/1397178
cttaaatatt

SEQ ID NO: 169906 - DNA, 10 bp, Unknown
  misc_feature (1)..( 10): Result.005 file - promoters50/1397178
cttgaatcaa

SEQ ID NO: 169907 - DNA, 9 bp, Unknown
  misc_feature (1)..( 9): Result.005 file - promoters50/1397178
aataattaa

SEQ ID NO: 169908 - DNA, 9 bp, Unknown
  misc_feature (1)..( 9): Result.005 file - promoters50/1397178
aataattat

SEQ ID NO: 169909 - DNA, 9 bp, Unknown
  misc_feature (1)..( 9): Result.005 file - promoters50/1397178
tataattat

SEQ ID NO: 169910 - DNA, 14 bp, Unknown
  misc_feature (1)..( 14): Result.005 file - promoters50/1397178
cttgaatcaatatt

SEQ ID NO: 169911 - DNA, 14 bp, Unknown
  misc_feature (1)..( 14): Result.005 file - promoters50/1397178
attgattcaaaatt

SEQ ID NO: 169912 - DNA, 14 bp, Unknown
  misc_feature (1)..( 14): Result.005 file - promoters50/1397178
cttaaatatttttc

SEQ ID NO: 169913 - DNA, 10 bp, Unknown
  misc_feature (1)..( 10): Result.005 file - promoters50/1397195
aattcgaagc

SEQ ID NO: 169914 - DNA, 10 bp, Unknown
  misc_feature (1)..( 10): Result.005 file - promoters50/1397195
agttcgaatt

SEQ ID NO: 169915 - DNA, 10 bp, Unknown
  misc_feature (1)..( 10): Result.005 file - promoters50/1397195
aattccaagc

SEQ ID NO: 169916 - DNA, 7 bp, Unknown
  misc_feature (1)..( 7): Result.005 file - promoters50/1397195
tttagtt

SEQ ID NO: 169917 - DNA, 7 bp, Unknown
  misc_feature (1)..( 7): Result.005 file - promoters50/1397195
ttttgtt

SEQ ID NO: 169918 - DNA, 8 bp, Unknown
  misc_feature (1)..( 8): Result.005 file - promoters50/1397195
tttcagta

SEQ ID NO: 169919 - DNA, 11 bp, Unknown
  misc_feature (1)..( 11): Result.005 file - promoters50/1397203
ataaaaaactc

SEQ ID NO: 169920 - DNA, 11 bp, Unknown
  misc_feature (1)..( 11): Result.005 file - promoters50/1397203
tggaaacactt

SEQ ID NO: 169921 - DNA, 11 bp, Unknown
  misc_feature (1)..( 11): Result.005 file - promoters50/1397203
tccaaaaaaga

SEQ ID NO: 169922 - DNA, 12 bp, Unknown
  misc_feature (1)..( 12): Result.005 file - promoters50/1397203
aacaaacaactc

SEQ ID NO: 169923 - DNA, 12 bp, Unknown
  misc_feature (1)..( 12): Result.005 file - promoters50/1397203
aaaaagaaaata

SEQ ID NO: 169924 - DNA, 12 bp, Unknown
  misc_feature (1)..( 12): Result.005 file - promoters50/1397203
cagcaacaacaa

SEQ ID NO: 169925 - DNA, 12 bp, Unknown
  misc_feature (1)..( 12): Result.005 file - promoters50/1397231
gaacaaaattgt

SEQ ID NO: 169926 - DNA, 12 bp, Unknown
  misc_feature (1)..( 12): Result.005 file - promoters50/1397231
taacaaaacaat

SEQ ID NO: 169927 - DNA, 12 bp, Unknown
  misc_feature (1)..( 12): Result.005 file - promoters50/1397231
atacataataat

SEQ ID NO: 169928 - DNA, 12 bp, Unknown
  misc_feature (1)..( 12): Result.005 file - promoters50/1397231
acccaagacatt

SEQ ID NO: 169929 - DNA, 12 bp, Unknown
  misc_feature (1)..( 12): Result.005 file - promoters50/1397231
taataaactctt

SEQ ID NO: 169930 - DNA, 12 bp, Unknown
  misc_feature (1)..( 12): Result.005 file - promoters50/1397231
cttgaagacatt

SEQ ID NO: 169931 - DNA, 12 bp, Unknown
  misc_feature (1)..( 12): Result.005 file - promoters50/1397231
gtatatatattt

SEQ ID NO: 169932 - DNA, 10 bp, Unknown
  misc_feature (1)..( 10): Result.005 file - promoters50/1397251
acataagatt

SEQ ID NO: 169933 - DNA, 10 bp, Unknown
  misc_feature (1)..( 10): Result.005 file - promoters50/1397251
acaaaagttc

SEQ ID NO: 169934 - DNA, 10 bp, Unknown
  misc_feature (1)..( 10): Result.005 file - promoters50/1397251
atctaagata

SEQ ID NO: 169935 - DNA, 9 bp, Unknown
  misc_feature (1)..( 9): Result.005 file - promoters50/1397251
gccaataga

SEQ ID NO: 169936 - DNA, 9 bp, Unknown
  misc_feature (1)..( 9): Result.005 file - promoters50/1397251
gcctatagt

SEQ ID NO: 169937 - DNA, 9 bp, Unknown
  misc_feature (1)..( 9): Result.005 file - promoters50/1397251
aagaataga

SEQ ID NO: 169938 - DNA, 11 bp, Unknown
  misc_feature (1)..( 11): Result.005 file - promoters50/1397263
caccaccgatt

SEQ ID NO: 169939 - DNA, 11 bp, Unknown
  misc_feature (1)..( 11): Result.005 file - promoters50/1397263
ctgatccgatt

SEQ ID NO: 169940 - DNA, 11 bp, Unknown
  misc_feature (1)..( 11): Result.005 file - promoters50/1397263
ggcaacccatt

SEQ ID NO: 169941 - DNA, 11 bp, Unknown
  misc_feature (1)..( 11): Result.005 file - promoters50/1397263
gcaaaccaaac

SEQ ID NO: 169942 - DNA, 11 bp, Unknown
  misc_feature (1)..( 11): Result.005 file - promoters50/1397263
taaaactaaaa

SEQ ID NO: 169943 - DNA, 11 bp, Unknown
  misc_feature (1)..( 11): Result.005 file - promoters50/1397263
agtaactaaaa

SEQ ID NO: 169944 - DNA, 8 bp, Unknown
  misc_feature (1)..( 8): Result.005 file - promoters50/1397263
ataaaaat

SEQ ID NO: 169945 - DNA, 8 bp, Unknown
  misc_feature (1)..( 8): Result.005 file - promoters50/1397263
ataataat

SEQ ID NO: 169946 - DNA, 8 bp, Unknown
  misc_feature (1)..( 8): Result.005 file - promoters50/1397263
gtaataat

SEQ ID NO: 169947 - DNA, 8 bp, Unknown
  misc_feature (1)..( 8): Result.005 file - promoters50/1397263
ttaataaa

SEQ ID NO: 169948 - DNA, 8 bp, Unknown
  misc_feature (1)..( 8): Result.005 file - promoters50/1397263
ataataaa

SEQ ID NO: 169949 - DNA, 8 bp, Unknown
  misc_feature (1)..( 8): Result.005 file - promoters50/1397263
ttaaaaaa

SEQ ID NO: 169950 - DNA, 11 bp, Unknown
  misc_feature (1)..( 11): Result.005 file - promoters50/1397332
ccctctaaacc

SEQ ID NO: 169951 - DNA, 11 bp, Unknown
  misc_feature (1)..( 11): Result.005 file - promoters50/1397332
atgtttaaacc

SEQ ID NO: 169952 - DNA, 11 bp, Unknown
  misc_feature (1)..( 11): Result.005 file - promoters50/1397332
cccactaaacc

SEQ ID NO: 169953 - DNA, 13 bp, Unknown
  misc_feature (1)..( 13): Result.005 file - promoters50/1397350
gtctcatggattc

SEQ ID NO: 169954 - DNA, 13 bp, Unknown
  misc_feature (1)..( 13): Result.005 file - promoters50/1397350
gtttcaaggattc

SEQ ID NO: 169955 - DNA, 13 bp, Unknown
  misc_feature (1)..( 13): Result.005 file - promoters50/1397350
gtctgatggataa

SEQ ID NO: 169956 - DNA, 13 bp, Unknown
  misc_feature (1)..( 13): Result.005 file - promoters50/1397350
atcaaatgtattg

SEQ ID NO: 169957 - DNA, 11 bp, Unknown
  misc_feature (1)..( 11): Result.005 file - promoters50/1397350
aaaattaaaat

SEQ ID NO: 169958 - DNA, 11 bp, Unknown
  misc_feature (1)..( 11): Result.005 file - promoters50/1397350
atttttacaat

SEQ ID NO: 169959 - DNA, 11 bp, Unknown
  misc_feature (1)..( 11): Result.005 file - promoters50/1397350
aaaattaaata

SEQ ID NO: 169960 - DNA, 11 bp, Unknown
  misc_feature (1)..( 11): Result.005 file - promoters50/1397350
atgattaaaca

SEQ ID NO: 169961 - DNA, 9 bp, Unknown
  misc_feature (1)..( 9): Result.005 file - promoters50/1397350
attaaaatt

SEQ ID NO: 169962 - DNA, 9 bp, Unknown
  misc_feature (1)..( 9): Result.005 file - promoters50/1397350
aataaaatt

SEQ ID NO: 169963 - DNA, 9 bp, Unknown
  misc_feature (1)..( 9): Result.005 file - promoters50/1397350
aataaaata

SEQ ID NO: 169964 - DNA, 9 bp, Unknown
  misc_feature (1)..( 9): Result.005 file - promoters50/1397350
aatgaaata

SEQ ID NO: 169965 - DNA, 8 bp, Unknown
  misc_feature (1)..( 8): Result.005 file - promoters50/1397425
tcatgatt

SEQ ID NO: 169966 - DNA, 8 bp, Unknown
  misc_feature (1)..( 8): Result.005 file - promoters50/1397425
tcataatt

SEQ ID NO: 169967 - DNA, 8 bp, Unknown
  misc_feature (1)..( 8): Result.005 file - promoters50/1397425
tcataata

SEQ ID NO: 169968 - DNA, 8 bp, Unknown
  misc_feature (1)..( 8): Result.005 file - promoters50/1397425
atatgtaa

SEQ ID NO: 169969 - DNA, 8 bp, Unknown
  misc_feature (1)..( 8): Result.005 file - promoters50/1397425
ataagtat

SEQ ID NO: 169970 - DNA, 8 bp, Unknown
  misc_feature (1)..( 8): Result.005 file - promoters50/1397425
gtatataa

SEQ ID NO: 169971 - DNA, 7 bp, Unknown
  misc_feature (1)..( 7): Result.005 file - promoters50/1397445
acaaaat

SEQ ID NO: 169972 - DNA, 7 bp, Unknown
  misc_feature (1)..( 7): Result.005 file - promoters50/1397445
tcaaaat

SEQ ID NO: 169973 - DNA, 7 bp, Unknown
  misc_feature (1)..( 7): Result.005 file - promoters50/1397445
tcagaat

SEQ ID NO: 169974 - DNA, 7 bp, Unknown
  misc_feature (1)..( 7): Result.005 file - promoters50/1397445
acaaaac

SEQ ID NO: 169975 - DNA, 7 bp, Unknown
  misc_feature (1)..( 7): Result.005 file - promoters50/1397445
acaaaaa

SEQ ID NO: 169976 - DNA, 7 bp, Unknown
  misc_feature (1)..( 7): Result.005 file - promoters50/1397445
gcaaaac

SEQ ID NO: 169977 - DNA, 11 bp, Unknown
  misc_feature (1)..( 11): Result.005 file - promoters50/1397461
tcttaataatg

SEQ ID NO: 169978 - DNA, 11 bp, Unknown
  misc_feature (1)..( 11): Result.005 file - promoters50/1397461
aaagaataatc

SEQ ID NO: 169979 - DNA, 11 bp, Unknown
  misc_feature (1)..( 11): Result.005 file - promoters50/1397461
cgttactaaaa

SEQ ID NO: 169980 - DNA, 11 bp, Unknown
  misc_feature (1)..( 11): Result.005 file - promoters50/1397461
attaaataatg

SEQ ID NO: 169981 - DNA, 11 bp, Unknown
  misc_feature (1)..( 11): Result.005 file - promoters50/1397461
agcaaagaatt

SEQ ID NO: 169982 - DNA, 11 bp, Unknown
  misc_feature (1)..( 11): Result.005 file - promoters50/1397461
gtcaaagaatc

SEQ ID NO: 169983 - DNA, 11 bp, Unknown
  misc_feature (1)..( 11): Result.005 file - promoters50/1397461
gtcgaagttgt

SEQ ID NO: 169984 - DNA, 12 bp, Unknown
  misc_feature (1)..( 12): Result.005 file - promoters50/1397461
acgaaaatcatc

SEQ ID NO: 169985 - DNA, 12 bp, Unknown
  misc_feature (1)..( 12): Result.005 file - promoters50/1397461
tctcaaaacatt

SEQ ID NO: 169986 - DNA, 12 bp, Unknown
  misc_feature (1)..( 12): Result.005 file - promoters50/1397461
caaaaaatcggg

SEQ ID NO: 169987 - DNA, 12 bp, Unknown
  misc_feature (1)..( 12): Result.005 file - promoters50/1397461
caacaaatgcat

SEQ ID NO: 169988 - DNA, 12 bp, Unknown
  misc_feature (1)..( 12): Result.005 file - promoters50/1397461
gccaaactcggt

SEQ ID NO: 169989 - DNA, 12 bp, Unknown
  misc_feature (1)..( 12): Result.005 file - promoters50/1397461
acaaaaaacaat

SEQ ID NO: 169990 - DNA, 12 bp, Unknown
  misc_feature (1)..( 12): Result.005 file - promoters50/1397461
aaacgaaaatca

SEQ ID NO: 169991 - DNA, 12 bp, Unknown
  misc_feature (1)..( 12): Result.005 file - promoters50/1397461
aaacaaaaaaca

SEQ ID NO: 169992 - DNA, 12 bp, Unknown
  misc_feature (1)..( 12): Result.005 file - promoters50/1397461
caacaaatgcat

SEQ ID NO: 169993 - DNA, 12 bp, Unknown
  misc_feature (1)..( 12): Result.005 file - promoters50/1397461
tgtcaaaaaatc

SEQ ID NO: 169994 - DNA, 12 bp, Unknown
  misc_feature (1)..( 12): Result.005 file - promoters50/1397461
tctcaaaacatt

SEQ ID NO: 169995 - DNA, 12 bp, Unknown
  misc_feature (1)..( 12): Result.005 file - promoters50/1397461
ggccaaactcgg

SEQ ID NO: 169996 - DNA, 10 bp, Unknown
  misc_feature (1)..( 10): Result.005 file - promoters50/1397461
caattaatct

SEQ ID NO: 169997 - DNA, 10 bp, Unknown
  misc_feature (1)..( 10): Result.005 file - promoters50/1397461
atattaattt

SEQ ID NO: 169998 - DNA, 10 bp, Unknown
  misc_feature (1)..( 10): Result.005 file - promoters50/1397461
gtaataataa

SEQ ID NO: 169999 - DNA, 10 bp, Unknown
  misc_feature (1)..( 10): Result.005 file - promoters50/1397461
atattatttt

SEQ ID NO: 170000 - DNA, 11 bp, Unknown
  misc_feature (1)..( 11): Result.005 file - promoters50/1397461
cgattatattt

SEQ ID NO: 170001 - DNA, 11 bp, Unknown
  misc_feature (1)..( 11): Result.005 file - promoters50/1397461
tttttacattg

SEQ ID NO: 170002 - DNA, 22 bp, Unknown
  misc_feature (1)..( 22): Result.005 file - promoters50/1397461
aaagaacttaatttttttttgt

SEQ ID NO: 170003 - DNA, 22 bp, Unknown
  misc_feature (1)..( 22): Result.005 file - promoters50/1397461
taacaacttaattctttttaca

SEQ ID NO: 170004 - DNA, 22 bp, Unknown
  misc_feature (1)..( 22): Result.005 file - promoters50/1397461
aaagagcttattaagatagcaa

SEQ ID NO: 170005 - DNA, 22 bp, Unknown
  misc_feature (1)..( 22): Result.005 file - promoters50/1397461
ttttcaccagatttttagtaaa

SEQ ID NO: 170006 - DNA, 22 bp, Unknown
  misc_feature (1)..( 22): Result.005 file - promoters50/1397461
ccgacttttgagtctatttcaa

SEQ ID NO: 170007 - DNA, 22 bp, Unknown
  misc_feature (1)..( 22): Result.005 file - promoters50/1397461
tgcttttcaaaatctatctcaa

SEQ ID NO: 170008 - DNA, 13 bp, Unknown
  misc_feature (1)..( 13): Result.005 file - promoters50/1397500
agtgccaatcgca

SEQ ID NO: 170009 - DNA, 13 bp, Unknown
  misc_feature (1)..( 13): Result.005 file - promoters50/1397500
agttccaaccaat

SEQ ID NO: 170010 - DNA, 13 bp, Unknown
  misc_feature (1)..( 13): Result.005 file - promoters50/1397500
gctgctaattttt

SEQ ID NO: 170011 - DNA, 13 bp, Unknown
  misc_feature (1)..( 13): Result.005 file - promoters50/1397500
aatgctaaatgat

SEQ ID NO: 170012 - DNA, 13 bp, Unknown
  misc_feature (1)..( 13): Result.005 file - promoters50/1397500
tcacctactttgg

SEQ ID NO: 170013 - DNA, 13 bp, Unknown
  misc_feature (1)..( 13): Result.005 file - promoters50/1397500
tccctcactttgg

SEQ ID NO: 170014 - DNA, 11 bp, Unknown
  misc_feature (1)..( 11): Result.005 file - promoters50/1397500
tgccaatcgca

SEQ ID NO: 170015 - DNA, 11 bp, Unknown
  misc_feature (1)..( 11): Result.005 file - promoters50/1397500
aaccaatcata

SEQ ID NO: 170016 - DNA, 11 bp, Unknown
  misc_feature (1)..( 11): Result.005 file - promoters50/1397500
tgctaattttt

SEQ ID NO: 170017 - DNA, 11 bp, Unknown
  misc_feature (1)..( 11): Result.005 file - promoters50/1397500
aaacaaacatg

SEQ ID NO: 170018 - DNA, 11 bp, Unknown
  misc_feature (1)..( 11): Result.005 file - promoters50/1397500
acctactttgg

SEQ ID NO: 170019 - DNA, 11 bp, Unknown
  misc_feature (1)..( 11): Result.005 file - promoters50/1397500
cctcactttgg

SEQ ID NO: 170020 - DNA, 14 bp, Unknown
  misc_feature (1)..( 14): Result.005 file - promoters50/1397500
aagagcaaataatt

SEQ ID NO: 170021 - DNA, 14 bp, Unknown
  misc_feature (1)..( 14): Result.005 file - promoters50/1397500
atttgaaaacaatt

SEQ ID NO: 170022 - DNA, 14 bp, Unknown
  misc_feature (1)..( 14): Result.005 file - promoters50/1397500
tatatcaaatacta

SEQ ID NO: 170023 - DNA, 14 bp, Unknown
  misc_feature (1)..( 14): Result.005 file - promoters50/1397500
aaaattcaacaata

SEQ ID NO: 170024 - DNA, 14 bp, Unknown
  misc_feature (1)..( 14): Result.005 file - promoters50/1397500
ttcgacaaatggag

SEQ ID NO: 170025 - DNA, 14 bp, Unknown
  misc_feature (1)..( 14): Result.005 file - promoters50/1397500
accgaaaaaaacga

SEQ ID NO: 170026 - DNA, 14 bp, Unknown
  misc_feature (1)..( 14): Result.005 file - promoters50/1397500
gttatcaaaaatgt

SEQ ID NO: 170027 - DNA, 14 bp, Unknown
  misc_feature (1)..( 14): Result.005 file - promoters50/1397500
ttgttaaaaaaaaa

SEQ ID NO: 170028 - DNA, 11 bp, Unknown
  misc_feature (1)..( 11): Result.005 file - promoters50/1397500
ataattattca

SEQ ID NO: 170029 - DNA, 11 bp, Unknown
  misc_feature (1)..( 11): Result.005 file - promoters50/1397500
attattattat

SEQ ID NO: 170030 - DNA, 11 bp, Unknown
  misc_feature (1)..( 11): Result.005 file - promoters50/1397500
ataaatatatc

SEQ ID NO: 170031 - DNA, 11 bp, Unknown
  misc_feature (1)..( 11): Result.005 file - promoters50/1397500
tattttattca

SEQ ID NO: 170032 - DNA, 11 bp, Unknown
  misc_feature (1)..( 11): Result.005 file - promoters50/1397500
tatattatgaa

SEQ ID NO: 170033 - DNA, 11 bp, Unknown
  misc_feature (1)..( 11): Result.005 file - promoters50/1397500
tacaatattag

SEQ ID NO: 170034 - DNA, 10 bp, Unknown
  misc_feature (1)..( 10): Result.005 file - promoters50/1397500
ataatttaca

SEQ ID NO: 170035 - DNA, 10 bp, Unknown
  misc_feature (1)..( 10): Result.005 file - promoters50/1397500
tggatttacg

SEQ ID NO: 170036 - DNA, 10 bp, Unknown
  misc_feature (1)..( 10): Result.005 file - promoters50/1397500
tctatttact

SEQ ID NO: 170037 - DNA, 10 bp, Unknown
  misc_feature (1)..( 10): Result.005 file - promoters50/1397500
aagatttatc

SEQ ID NO: 170038 - DNA, 10 bp, Unknown
  misc_feature (1)..( 10): Result.005 file - promoters50/1397500
aagagttaaa

SEQ ID NO: 170039 - DNA, 10 bp, Unknown
  misc_feature (1)..( 10): Result.005 file - promoters50/1397500
tagatatatc

SEQ ID NO: 170040 - DNA, 8 bp, Unknown
  misc_feature (1)..( 8): Result.005 file - promoters50/1397546
ggagttac

SEQ ID NO: 170041 - DNA, 8 bp, Unknown
  misc_feature (1)..( 8): Result.005 file - promoters50/1397546
agagttaa

SEQ ID NO: 170042 - DNA, 8 bp, Unknown
  misc_feature (1)..( 8): Result.005 file - promoters50/1397546
agacttaa

SEQ ID NO: 170043 - DNA, 10 bp, Unknown
  misc_feature (1)..( 10): Result.005 file - promoters50/1397568
caatctaaga

SEQ ID NO: 170044 - DNA, 10 bp, Unknown
  misc_feature (1)..( 10): Result.005 file - promoters50/1397568
caatttaacg

SEQ ID NO: 170045 - DNA, 10 bp, Unknown
  misc_feature (1)..( 10): Result.005 file - promoters50/1397568
ttttttgacg

SEQ ID NO: 170046 - DNA, 10 bp, Unknown
  misc_feature (1)..( 10): Result.005 file - promoters50/1397568
gtttttgaat

SEQ ID NO: 170047 - DNA, 9 bp, Unknown
  misc_feature (1)..( 9): Result.005 file - promoters50/1397568
attttgaga

SEQ ID NO: 170048 - DNA, 9 bp, Unknown
  misc_feature (1)..( 9): Result.005 file - promoters50/1397568
attgtgagt

SEQ ID NO: 170049 - DNA, 9 bp, Unknown
  misc_feature (1)..( 9): Result.005 file - promoters50/1397568
tttttgacg

SEQ ID NO: 170050 - DNA, 9 bp, Unknown
  misc_feature (1)..( 9): Result.005 file - promoters50/1397568
aatttaacg

SEQ ID NO: 170051 - DNA, 9 bp, Unknown
  misc_feature (1)..( 9): Result.005 file - promoters50/1397568
atttaaaat

SEQ ID NO: 170052 - DNA, 9 bp, Unknown
  misc_feature (1)..( 9): Result.005 file - promoters50/1397568
ctttcaaac

SEQ ID NO: 170053 - DNA, 9 bp, Unknown
  misc_feature (1)..( 9): Result.005 file - promoters50/1397568
tattataat

SEQ ID NO: 170054 - DNA, 9 bp, Unknown
  misc_feature (1)..( 9): Result.005 file - promoters50/1397568
ttttaaaaa

SEQ ID NO: 170055 - DNA, 9 bp, Unknown
  misc_feature (1)..( 9): Result.005 file - promoters50/1397582
ctaattttc

SEQ ID NO: 170056 - DNA, 9 bp, Unknown
  misc_feature (1)..( 9): Result.005 file - promoters50/1397582
ataaattta

SEQ ID NO: 170057 - DNA, 9 bp, Unknown
  misc_feature (1)..( 9): Result.005 file - promoters50/1397582
ctaactttc

SEQ ID NO: 170058 - DNA, 10 bp, Unknown
  misc_feature (1)..( 10): Result.005 file - promoters50/1397594
gaataattgt

SEQ ID NO: 170059 - DNA, 10 bp, Unknown
  misc_feature (1)..( 10): Result.005 file - promoters50/1397594
gaacaattac

SEQ ID NO: 170060 - DNA, 10 bp, Unknown
  misc_feature (1)..( 10): Result.005 file - promoters50/1397594
taataattta

SEQ ID NO: 170061 - DNA, 10 bp, Unknown
  misc_feature (1)..( 10): Result.005 file - promoters50/1397594
tggtaattta

SEQ ID NO: 170062 - DNA, 11 bp, Unknown
  misc_feature (1)..( 11): Result.005 file - promoters50/1397594
ccttgttttat

SEQ ID NO: 170063 - DNA, 11 bp, Unknown
  misc_feature (1)..( 11): Result.005 file - promoters50/1397594
cctcgttgtaa

SEQ ID NO: 170064 - DNA, 11 bp, Unknown
  misc_feature (1)..( 11): Result.005 file - promoters50/1397594
cttcggtgttg

SEQ ID NO: 170065 - DNA, 11 bp, Unknown
  misc_feature (1)..( 11): Result.005 file - promoters50/1397594
attgggttttg

SEQ ID NO: 170066 - DNA, 8 bp, Unknown
  misc_feature (1)..( 8): Result.005 file - promoters50/1397594
atttgttt

SEQ ID NO: 170067 - DNA, 8 bp, Unknown
  misc_feature (1)..( 8): Result.005 file - promoters50/1397594
ttttcttt

SEQ ID NO: 170068 - DNA, 8 bp, Unknown
  misc_feature (1)..( 8): Result.005 file - promoters50/1397594
atttgtta

SEQ ID NO: 170069 - DNA, 8 bp, Unknown
  misc_feature (1)..( 8): Result.005 file - promoters50/1397594
atttcctt

SEQ ID NO: 170070 - DNA, 9 bp, Unknown
  misc_feature (1)..( 9): Result.005 file - promoters50/1397594
gtttttggg

SEQ ID NO: 170071 - DNA, 9 bp, Unknown
  misc_feature (1)..( 9): Result.005 file - promoters50/1397594
atttttgtt

SEQ ID NO: 170072 - DNA, 9 bp, Unknown
  misc_feature (1)..( 9): Result.005 file - promoters50/1397594
atttttgca

SEQ ID NO: 170073 - DNA, 9 bp, Unknown
  misc_feature (1)..( 9): Result.005 file - promoters50/1397594
aattttgtt

SEQ ID NO: 170074 - DNA, 12 bp, Unknown
  misc_feature (1)..( 12): Result.005 file - promoters50/1397700
aatttctagaaa

SEQ ID NO: 170075 - DNA, 12 bp, Unknown
  misc_feature (1)..( 12): Result.005 file - promoters50/1397700
caattcaagaga

SEQ ID NO: 170076 - DNA, 12 bp, Unknown
  misc_feature (1)..( 12): Result.005 file - promoters50/1397700
ttattaaagctt

SEQ ID NO: 170077 - DNA, 12 bp, Unknown
  misc_feature (1)..( 12): Result.005 file - promoters50/1397700
ttatcaaaaaaa

SEQ ID NO: 170078 - DNA, 12 bp, Unknown
  misc_feature (1)..( 12): Result.005 file - promoters50/1397700
atgtcaaaaaga

SEQ ID NO: 170079 - DNA, 12 bp, Unknown
  misc_feature (1)..( 12): Result.005 file - promoters50/1397700
ttgataaagaga

SEQ ID NO: 170080 - DNA, 13 bp, Unknown
  misc_feature (1)..( 13): Result.005 file - promoters50/1397700
gtaaacaaaagat

SEQ ID NO: 170081 - DNA, 13 bp, Unknown
  misc_feature (1)..( 13): Result.005 file - promoters50/1397700
agaaacaaagtaa

SEQ ID NO: 170082 - DNA, 13 bp, Unknown
  misc_feature (1)..( 13): Result.005 file - promoters50/1397700
cgaaccaatgtga

SEQ ID NO: 170083 - DNA, 13 bp, Unknown
  misc_feature (1)..( 13): Result.005 file - promoters50/1397700
aaaaagaaaagag

SEQ ID NO: 170084 - DNA, 13 bp, Unknown
  misc_feature (1)..( 13): Result.005 file - promoters50/1397700
aaaaagatggtta

SEQ ID NO: 170085 - DNA, 13 bp, Unknown
  misc_feature (1)..( 13): Result.005 file - promoters50/1397700
ataaagagataag

SEQ ID NO: 170086 - DNA, 18 bp, Unknown
  misc_feature (1)..( 18): Result.005 file - promoters50/1397700
ttacttttaacaaaacaa

SEQ ID NO: 170087 - DNA, 18 bp, Unknown
  misc_feature (1)..( 18): Result.005 file - promoters50/1397700
tgtattttatcaaaaaaa

SEQ ID NO: 170088 - DNA, 18 bp, Unknown
  misc_feature (1)..( 18): Result.005 file - promoters50/1397700
tgtgttttagtttctttt

SEQ ID NO: 170089 - DNA, 18 bp, Unknown
  misc_feature (1)..( 18): Result.005 file - promoters50/1397700
gatagcttattaaagctt

SEQ ID NO: 170090 - DNA, 18 bp, Unknown
  misc_feature (1)..( 18): Result.005 file - promoters50/1397700
ttagacatgtcaaaaaga

SEQ ID NO: 170091 - DNA, 18 bp, Unknown
  misc_feature (1)..( 18): Result.005 file - promoters50/1397700
acccgattgataaagaga

SEQ ID NO: 170092 - DNA, 10 bp, Unknown
  misc_feature (1)..( 10): Result.005 file - promoters50/1397717
taaaaaaaag

SEQ ID NO: 170093 - DNA, 10 bp, Unknown
  misc_feature (1)..( 10): Result.005 file - promoters50/1397717
taaaaataag

SEQ ID NO: 170094 - DNA, 10 bp, Unknown
  misc_feature (1)..( 10): Result.005 file - promoters50/1397717
cacaaatgag

SEQ ID NO: 170095 - DNA, 10 bp, Unknown
  misc_feature (1)..( 10): Result.005 file - promoters50/1397717
caaaaataat

SEQ ID NO: 170096 - DNA, 8 bp, Unknown
  misc_feature (1)..( 8): Result.005 file - promoters50/1397717
aagaaatt

SEQ ID NO: 170097 - DNA, 8 bp, Unknown
  misc_feature (1)..( 8): Result.005 file - promoters50/1397717
aagaaaaa

SEQ ID NO: 170098 - DNA, 8 bp, Unknown
  misc_feature (1)..( 8): Result.005 file - promoters50/1397717
tagaaaaa

SEQ ID NO: 170099 - DNA, 8 bp, Unknown
  misc_feature (1)..( 8): Result.005 file - promoters50/1397717
caaagtaa

SEQ ID NO: 170100 - DNA, 8 bp, Unknown
  misc_feature (1)..( 8): Result.005 file - promoters50/1397717
aaaaataa

SEQ ID NO: 170101 - DNA, 8 bp, Unknown
  misc_feature (1)..( 8): Result.005 file - promoters50/1397717
aaaaataa

SEQ ID NO: 170102 - DNA, 12 bp, Unknown
  misc_feature (1)..( 12): Result.005 file - promoters50/1397753
ttctcaaattgt

SEQ ID NO: 170103 - DNA, 12 bp, Unknown
  misc_feature (1)..( 12): Result.005 file - promoters50/1397753
ttctaaaataat

SEQ ID NO: 170104 - DNA, 12 bp, Unknown
  misc_feature (1)..( 12): Result.005 file - promoters50/1397753
gaagaaaaaaat

SEQ ID NO: 170105 - DNA, 12 bp, Unknown
  misc_feature (1)..( 12): Result.005 file - promoters50/1397753
ctaataaatatt

SEQ ID NO: 170106 - DNA, 12 bp, Unknown
  misc_feature (1)..( 12): Result.005 file - promoters50/1397753
taccaaactaaa

SEQ ID NO: 170107 - DNA, 12 bp, Unknown
  misc_feature (1)..( 12): Result.005 file - promoters50/1397753
cactaaaacaga

SEQ ID NO: 170108 - DNA, 12 bp, Unknown
  misc_feature (1)..( 12): Result.005 file - promoters50/1397753
aaataaaatatg

SEQ ID NO: 170109 - DNA, 15 bp, Unknown
  misc_feature (1)..( 15): Result.005 file - promoters50/1397753
aatgttttagtggtc

SEQ ID NO: 170110 - DNA, 15 bp, Unknown
  misc_feature (1)..( 15): Result.005 file - promoters50/1397753
tatgatttccttata

SEQ ID NO: 170111 - DNA, 15 bp, Unknown
  misc_feature (1)..( 15): Result.005 file - promoters50/1397753
tctgttttatttttc

SEQ ID NO: 170112 - DNA, 15 bp, Unknown
  misc_feature (1)..( 15): Result.005 file - promoters50/1397753
tataattatgtggtc

SEQ ID NO: 170113 - DNA, 15 bp, Unknown
  misc_feature (1)..( 15): Result.005 file - promoters50/1397753
tgggattttcttaat

SEQ ID NO: 170114 - DNA, 15 bp, Unknown
  misc_feature (1)..( 15): Result.005 file - promoters50/1397753
agctttttggggttt

SEQ ID NO: 170115 - DNA, 12 bp, Unknown
  misc_feature (1)..( 12): Result.005 file - promoters50/1397753
ttttattaaatc

SEQ ID NO: 170116 - DNA, 12 bp, Unknown
  misc_feature (1)..( 12): Result.005 file - promoters50/1397753
aactatcaaatt

SEQ ID NO: 170117 - DNA, 12 bp, Unknown
  misc_feature (1)..( 12): Result.005 file - promoters50/1397753
agttaataaata

SEQ ID NO: 170118 - DNA, 12 bp, Unknown
  misc_feature (1)..( 12): Result.005 file - promoters50/1397753
tgttaatcactt

SEQ ID NO: 170119 - DNA, 12 bp, Unknown
  misc_feature (1)..( 12): Result.005 file - promoters50/1397753
ctcatataaata

SEQ ID NO: 170120 - DNA, 12 bp, Unknown
  misc_feature (1)..( 12): Result.005 file - promoters50/1397753
agttaatatttc

SEQ ID NO: 170121 - DNA, 12 bp, Unknown
  misc_feature (1)..( 12): Result.005 file - promoters50/1397821
gaattgattatg

SEQ ID NO: 170122 - DNA, 12 bp, Unknown
  misc_feature (1)..( 12): Result.005 file - promoters50/1397821
tctttggttaat

SEQ ID NO: 170123 - DNA, 12 bp, Unknown
  misc_feature (1)..( 12): Result.005 file - promoters50/1397821
taattcattgta

SEQ ID NO: 170124 - DNA, 12 bp, Unknown
  misc_feature (1)..( 12): Result.005 file - promoters50/1397821
gaattgatgtac

SEQ ID NO: 170125 - DNA, 12 bp, Unknown
  misc_feature (1)..( 12): Result.005 file - promoters50/1397821
gaaatgaaatat

SEQ ID NO: 170126 - DNA, 12 bp, Unknown
  misc_feature (1)..( 12): Result.005 file - promoters50/1397821
agcttgttgttt

SEQ ID NO: 170127 - DNA, 12 bp, Unknown
  misc_feature (1)..( 12): Result.005 file - promoters50/1397821
ggatcgtttttt

SEQ ID NO: 170128 - DNA, 11 bp, Unknown
  misc_feature (1)..( 11): Result.005 file - promoters50/1397821
tcaagtttgag

SEQ ID NO: 170129 - DNA, 11 bp, Unknown
  misc_feature (1)..( 11): Result.005 file - promoters50/1397821
aagagtctgat

SEQ ID NO: 170130 - DNA, 11 bp, Unknown
  misc_feature (1)..( 11): Result.005 file - promoters50/1397821
tcaattttgct

SEQ ID NO: 170131 - DNA, 11 bp, Unknown
  misc_feature (1)..( 11): Result.005 file - promoters50/1397821
ctaattttaat

SEQ ID NO: 170132 - DNA, 11 bp, Unknown
  misc_feature (1)..( 11): Result.005 file - promoters50/1397821
acgagcctgat

SEQ ID NO: 170133 - DNA, 11 bp, Unknown
  misc_feature (1)..( 11): Result.005 file - promoters50/1397821
ttcagtttctc

SEQ ID NO: 170134 - DNA, 9 bp, Unknown
  misc_feature (1)..( 9): Result.005 file - promoters50/1397821
aaaacattg

SEQ ID NO: 170135 - DNA, 9 bp, Unknown
  misc_feature (1)..( 9): Result.005 file - promoters50/1397821
aaaacattg

SEQ ID NO: 170136 - DNA, 9 bp, Unknown
  misc_feature (1)..( 9): Result.005 file - promoters50/1397821
aaaacagtg

SEQ ID NO: 170137 - DNA, 9 bp, Unknown
  misc_feature (1)..( 9): Result.005 file - promoters50/1397821
aaaaaattc

SEQ ID NO: 170138 - DNA, 10 bp, Unknown
  misc_feature (1)..( 10): Result.005 file - promoters50/1397821
aaaataatat

SEQ ID NO: 170139 - DNA, 10 bp, Unknown
  misc_feature (1)..( 10): Result.005 file - promoters50/1397821
tttaacattt

SEQ ID NO: 170140 - DNA, 14 bp, Unknown
  misc_feature (1)..( 14): Result.005 file - promoters50/1397852
cccaaaataatttg

SEQ ID NO: 170141 - DNA, 14 bp, Unknown
  misc_feature (1)..( 14): Result.005 file - promoters50/1397852
agaaaattaattga

SEQ ID NO: 170142 - DNA, 14 bp, Unknown
  misc_feature (1)..( 14): Result.005 file - promoters50/1397852
cccaaactaaccgg

SEQ ID NO: 170143 - DNA, 14 bp, Unknown
  misc_feature (1)..( 14): Result.005 file - promoters50/1397852
aaattcataatttg

SEQ ID NO: 170144 - DNA, 14 bp, Unknown
  misc_feature (1)..( 14): Result.005 file - promoters50/1397852
aaccacttaccatc

SEQ ID NO: 170145 - DNA, 14 bp, Unknown
  misc_feature (1)..( 14): Result.005 file - promoters50/1397852
attaaactatggca

SEQ ID NO: 170146 - DNA, 13 bp, Unknown
  misc_feature (1)..( 13): Result.005 file - promoters50/1397852
tgcaaacaagttt

SEQ ID NO: 170147 - DNA, 13 bp, Unknown
  misc_feature (1)..( 13): Result.005 file - promoters50/1397852
ataaaaaaagagg

SEQ ID NO: 170148 - DNA, 13 bp, Unknown
  misc_feature (1)..( 13): Result.005 file - promoters50/1397852
aacaaaaaaaacc

SEQ ID NO: 170149 - DNA, 13 bp, Unknown
  misc_feature (1)..( 13): Result.005 file - promoters50/1397852
ataaaataaatta

SEQ ID NO: 170150 - DNA, 13 bp, Unknown
  misc_feature (1)..( 13): Result.005 file - promoters50/1397852
cagaaagaaaacc

SEQ ID NO: 170151 - DNA, 13 bp, Unknown
  misc_feature (1)..( 13): Result.005 file - promoters50/1397852
ataacataatctc

SEQ ID NO: 170152 - DNA, 13 bp, Unknown
  misc_feature (1)..( 13): Result.005 file - promoters50/1397867
aatgatttcattt

SEQ ID NO: 170153 - DNA, 13 bp, Unknown
  misc_feature (1)..( 13): Result.005 file - promoters50/1397867
acgttcttctttt

SEQ ID NO: 170154 - DNA, 13 bp, Unknown
  misc_feature (1)..( 13): Result.005 file - promoters50/1397867
ttcacattctttt

SEQ ID NO: 170155 - DNA, 13 bp, Unknown
  misc_feature (1)..( 13): Result.005 file - promoters50/1397867
atctaattcttaa

SEQ ID NO: 170156 - DNA, 13 bp, Unknown
  misc_feature (1)..( 13): Result.005 file - promoters50/1397867
tttggattctttc

SEQ ID NO: 170157 - DNA, 13 bp, Unknown
  misc_feature (1)..( 13): Result.005 file - promoters50/1397867
tttggtttctagg

SEQ ID NO: 170158 - DNA, 13 bp, Unknown
  misc_feature (1)..( 13): Result.005 file - promoters50/1397867
aatggttttagaa

SEQ ID NO: 170159 - DNA, 8 bp, Unknown
  misc_feature (1)..( 8): Result.005 file - promoters50/1397898
gaattatt

SEQ ID NO: 170160 - DNA, 8 bp, Unknown
  misc_feature (1)..( 8): Result.005 file - promoters50/1397898
gaatgatt

SEQ ID NO: 170161 - DNA, 8 bp, Unknown
  misc_feature (1)..( 8): Result.005 file - promoters50/1397898
taatgata

SEQ ID NO: 170162 - DNA, 8 bp, Unknown
  misc_feature (1)..( 8): Result.005 file - promoters50/1397898
taatgaga

SEQ ID NO: 170163 - DNA, 13 bp, Unknown
  misc_feature (1)..( 13): Result.005 file - promoters50/1397898
cttgattacatga

SEQ ID NO: 170164 - DNA, 13 bp, Unknown
  misc_feature (1)..( 13): Result.005 file - promoters50/1397898
tatgattatatga

SEQ ID NO: 170165 - DNA, 13 bp, Unknown
  misc_feature (1)..( 13): Result.005 file - promoters50/1397898
tattatttgacaa

SEQ ID NO: 170166 - DNA, 13 bp, Unknown
  misc_feature (1)..( 13): Result.005 file - promoters50/1397898
aacgatgatacag

SEQ ID NO: 170167 - DNA, 11 bp, Unknown
  misc_feature (1)..( 11): Result.005 file - promoters50/1397923
accttttacga

SEQ ID NO: 170168 - DNA, 11 bp, Unknown
  misc_feature (1)..( 11): Result.005 file - promoters50/1397923
ttattttacta

SEQ ID NO: 170169 - DNA, 11 bp, Unknown
  misc_feature (1)..( 11): Result.005 file - promoters50/1397923
agattttataa

SEQ ID NO: 170170 - DNA, 11 bp, Unknown
  misc_feature (1)..( 11): Result.005 file - promoters50/1397923
ttattttatag

SEQ ID NO: 170171 - DNA, 11 bp, Unknown
  misc_feature (1)..( 11): Result.005 file - promoters50/1397923
tccttttccta

SEQ ID NO: 170172 - DNA, 11 bp, Unknown
  misc_feature (1)..( 11): Result.005 file - promoters50/1397923
caatttgatat

SEQ ID NO: 170173 - DNA, 11 bp, Unknown
  misc_feature (1)..( 11): Result.005 file - promoters50/1397923
ttttttttttg

SEQ ID NO: 170174 - DNA, 10 bp, Unknown
  misc_feature (1)..( 10): Result.005 file - promoters50/1397923
ttagatatgt

SEQ ID NO: 170175 - DNA, 10 bp, Unknown
  misc_feature (1)..( 10): Result.005 file - promoters50/1397923
ttacataaaa

SEQ ID NO: 170176 - DNA, 10 bp, Unknown
  misc_feature (1)..( 10): Result.005 file - promoters50/1397923
ttaaatatag

SEQ ID NO: 170177 - DNA, 10 bp, Unknown
  misc_feature (1)..( 10): Result.005 file - promoters50/1397923
ctagatttgt

SEQ ID NO: 170178 - DNA, 10 bp, Unknown
  misc_feature (1)..( 10): Result.005 file - promoters50/1397923
gtaggtatac

SEQ ID NO: 170179 - DNA, 10 bp, Unknown
  misc_feature (1)..( 10): Result.005 file - promoters50/1397923
ctacttaaca

SEQ ID NO: 170180 - DNA, 10 bp, Unknown
  misc_feature (1)..( 10): Result.005 file - promoters50/1397923
tatgatttgt

SEQ ID NO: 170181 - DNA, 11 bp, Unknown
  misc_feature (1)..( 11): Result.005 file - promoters50/1397923
gtttttgattt

SEQ ID NO: 170182 - DNA, 11 bp, Unknown
  misc_feature (1)..( 11): Result.005 file - promoters50/1397923
ttttatgaaac

SEQ ID NO: 170183 - DNA, 11 bp, Unknown
  misc_feature (1)..( 11): Result.005 file - promoters50/1397923
tattttaattt

SEQ ID NO: 170184 - DNA, 11 bp, Unknown
  misc_feature (1)..( 11): Result.005 file - promoters50/1397923
ttttttggaca

SEQ ID NO: 170185 - DNA, 11 bp, Unknown
  misc_feature (1)..( 11): Result.005 file - promoters50/1397923
gttattgcaga

SEQ ID NO: 170186 - DNA, 11 bp, Unknown
  misc_feature (1)..( 11): Result.005 file - promoters50/1397923
gttaatgcggt

SEQ ID NO: 170187 - DNA, 17 bp, Unknown
  misc_feature (1)..( 17): Result.005 file - promoters50/1397923
gtagtaaaagtttatgg

SEQ ID NO: 170188 - DNA, 17 bp, Unknown
  misc_feature (1)..( 17): Result.005 file - promoters50/1397923
gaaataaaagatgtata

SEQ ID NO: 170189 - DNA, 17 bp, Unknown
  misc_feature (1)..( 17): Result.005 file - promoters50/1397923
acaagaaaaaaaaaatg

SEQ ID NO: 170190 - DNA, 17 bp, Unknown
  misc_feature (1)..( 17): Result.005 file - promoters50/1397923
actctaaaaattgtcaa

SEQ ID NO: 170191 - DNA, 17 bp, Unknown
  misc_feature (1)..( 17): Result.005 file - promoters50/1397923
gaaataaaaattgggtt

SEQ ID NO: 170192 - DNA, 17 bp, Unknown
  misc_feature (1)..( 17): Result.005 file - promoters50/1397923
agaagaaaaaaaacatt

SEQ ID NO: 170193 - DNA, 14 bp, Unknown
  misc_feature (1)..( 14): Result.005 file - promoters50/1397923
ataataattttttt

SEQ ID NO: 170194 - DNA, 9 bp, Unknown
  misc_feature (1)..( 9): Result.005 file - promoters50/1397923
aatatttac

SEQ ID NO: 170195 - DNA, 14 bp, Unknown
  misc_feature (1)..( 14): Result.005 file - promoters50/1397923
aatactcttttttt

SEQ ID NO: 170196 - DNA, 14 bp, Unknown
  misc_feature (1)..( 14): Result.005 file - promoters50/1397923
gtgataatttcacg

SEQ ID NO: 170197 - DNA, 14 bp, Unknown
  misc_feature (1)..( 14): Result.005 file - promoters50/1397923
ataaaaatttgatt

SEQ ID NO: 170198 - DNA, 14 bp, Unknown
  misc_feature (1)..( 14): Result.005 file - promoters50/1397923
gttataattgtaca

SEQ ID NO: 170199 - DNA, 11 bp, Unknown
  misc_feature (1)..( 11): Result.005 file - promoters50/1397923
aaatttgtaaa

SEQ ID NO: 170200 - DNA, 11 bp, Unknown
  misc_feature (1)..( 11): Result.005 file - promoters50/1397923
aaatttgaaaa

SEQ ID NO: 170201 - DNA, 11 bp, Unknown
  misc_feature (1)..( 11): Result.005 file - promoters50/1397923
ttttttataaa

SEQ ID NO: 170202 - DNA, 11 bp, Unknown
  misc_feature (1)..( 11): Result.005 file - promoters50/1397923
ctttttgtagg

SEQ ID NO: 170203 - DNA, 11 bp, Unknown
  misc_feature (1)..( 11): Result.005 file - promoters50/1397923
acatttttaag

SEQ ID NO: 170204 - DNA, 11 bp, Unknown
  misc_feature (1)..( 11): Result.005 file - promoters50/1397923
ttttttttatt

SEQ ID NO: 170205 - DNA, 8 bp, Unknown
  misc_feature (1)..( 8): Result.005 file - promoters50/1398069
caattttt

SEQ ID NO: 170206 - DNA, 8 bp, Unknown
  misc_feature (1)..( 8): Result.005 file - promoters50/1398069
caactttt

SEQ ID NO: 170207 - DNA, 8 bp, Unknown
  misc_feature (1)..( 8): Result.005 file - promoters50/1398069
caaccttt

SEQ ID NO: 170208 - DNA, 8 bp, Unknown
  misc_feature (1)..( 8): Result.005 file - promoters50/1398069
atatcaga

SEQ ID NO: 170209 - DNA, 8 bp, Unknown
  misc_feature (1)..( 8): Result.005 file - promoters50/1398069
gtataaga

SEQ ID NO: 170210 - DNA, 8 bp, Unknown
  misc_feature (1)..( 8): Result.005 file - promoters50/1398069
atatcaaa

SEQ ID NO: 170211 - DNA, 8 bp, Unknown
  misc_feature (1)..( 8): Result.005 file - promoters50/1398069
aataattg

SEQ ID NO: 170212 - DNA, 8 bp, Unknown
  misc_feature (1)..( 8): Result.005 file - promoters50/1398069
aataattg

SEQ ID NO: 170213 - DNA, 8 bp, Unknown
  misc_feature (1)..( 8): Result.005 file - promoters50/1398069
aatcatta

SEQ ID NO: 170214 - DNA, 9 bp, Unknown
  misc_feature (1)..( 9): Result.005 file - promoters50/1398069
caaactccc

SEQ ID NO: 170215 - DNA, 9 bp, Unknown
  misc_feature (1)..( 9): Result.005 file - promoters50/1398069
caaaatcca

SEQ ID NO: 170216 - DNA, 9 bp, Unknown
  misc_feature (1)..( 9): Result.005 file - promoters50/1398069
ataaatcca

SEQ ID NO: 170217 - DNA, 8 bp, Unknown
  misc_feature (1)..( 8): Result.005 file - promoters50/1398069
aacaaaaa

SEQ ID NO: 170218 - DNA, 8 bp, Unknown
  misc_feature (1)..( 8): Result.005 file - promoters50/1398069
aacaaaat

SEQ ID NO: 170219 - DNA, 8 bp, Unknown
  misc_feature (1)..( 8): Result.005 file - promoters50/1398069
tccaaaat

SEQ ID NO: 170220 - DNA, 8 bp, Unknown
  misc_feature (1)..( 8): Result.005 file - promoters50/1398081
ttatatca

SEQ ID NO: 170221 - DNA, 8 bp, Unknown
  misc_feature (1)..( 8): Result.005 file - promoters50/1398081
tcatatca

SEQ ID NO: 170222 - DNA, 8 bp, Unknown
  misc_feature (1)..( 8): Result.005 file - promoters50/1398081
ttagatcg

SEQ ID NO: 170223 - DNA, 8 bp, Unknown
  misc_feature (1)..( 8): Result.005 file - promoters50/1398081
agataagt

SEQ ID NO: 170224 - DNA, 8 bp, Unknown
  misc_feature (1)..( 8): Result.005 file - promoters50/1398081
taataagt

SEQ ID NO: 170225 - DNA, 8 bp, Unknown
  misc_feature (1)..( 8): Result.005 file - promoters50/1398081
agagaaga

SEQ ID NO: 170226 - DNA, 6 bp, Unknown
  misc_feature (1)..( 6): Result.005 file - promoters50/1398081
agtaaa

SEQ ID NO: 170227 - DNA, 6 bp, Unknown
  misc_feature (1)..( 6): Result.005 file - promoters50/1398081
agtaaa

SEQ ID NO: 170228 - DNA, 6 bp, Unknown
  misc_feature (1)..( 6): Result.005 file - promoters50/1398081
agtaaa

SEQ ID NO: 170229 - DNA, 14 bp, Unknown
  misc_feature (1)..( 14): Result.005 file - promoters50/1398081
caacaaaatttggt

SEQ ID NO: 170230 - DNA, 14 bp, Unknown
  misc_feature (1)..( 14): Result.005 file - promoters50/1398081
caataaaagttgca

SEQ ID NO: 170231 - DNA, 14 bp, Unknown
  misc_feature (1)..( 14): Result.005 file - promoters50/1398081
cctacaattttgtt

SEQ ID NO: 170232 - DNA, 14 bp, Unknown
  misc_feature (1)..( 14): Result.005 file - promoters50/1398081
atacataattcata

SEQ ID NO: 170233 - DNA, 15 bp, Unknown
  misc_feature (1)..( 15): Result.005 file - promoters50/1398081
attggttatcttttg

SEQ ID NO: 170234 - DNA, 15 bp, Unknown
  misc_feature (1)..( 15): Result.005 file - promoters50/1398081
atttgttatctattg

SEQ ID NO: 170235 - DNA, 15 bp, Unknown
  misc_feature (1)..( 15): Result.005 file - promoters50/1398081
ctaggatatttttta

SEQ ID NO: 170236 - DNA, 15 bp, Unknown
  misc_feature (1)..( 15): Result.005 file - promoters50/1398081
atgaagaatattttc

SEQ ID NO: 170237 - DNA, 9 bp, Unknown
  misc_feature (1)..( 9): Result.005 file - promoters50/1398081
ttagatatg

SEQ ID NO: 170238 - DNA, 9 bp, Unknown
  misc_feature (1)..( 9): Result.005 file - promoters50/1398081
ttaaataaa

SEQ ID NO: 170239 - DNA, 9 bp, Unknown
  misc_feature (1)..( 9): Result.005 file - promoters50/1398081
caaaataaa

SEQ ID NO: 170240 - DNA, 11 bp, Unknown
  misc_feature (1)..( 11): Result.005 file - promoters50/1398114
aaagaaatgaa

SEQ ID NO: 170241 - DNA, 11 bp, Unknown
  misc_feature (1)..( 11): Result.005 file - promoters50/1398114
ggagagatgag

SEQ ID NO: 170242 - DNA, 11 bp, Unknown
  misc_feature (1)..( 11): Result.005 file - promoters50/1398114
aaacaaaccac

SEQ ID NO: 170243 - DNA, 11 bp, Unknown
  misc_feature (1)..( 11): Result.005 file - promoters50/1398114
ctagagattgt

SEQ ID NO: 170244 - DNA, 11 bp, Unknown
  misc_feature (1)..( 11): Result.005 file - promoters50/1398114
acagagttgat

SEQ ID NO: 170245 - DNA, 11 bp, Unknown
  misc_feature (1)..( 11): Result.005 file - promoters50/1398114
ctcaggttgat

SEQ ID NO: 170246 - DNA, 14 bp, Unknown
  misc_feature (1)..( 14): Result.005 file - promoters50/1398114
ttacacaagtttcc

SEQ ID NO: 170247 - DNA, 14 bp, Unknown
  misc_feature (1)..( 14): Result.005 file - promoters50/1398114
tgacacaaacaccc

SEQ ID NO: 170248 - DNA, 14 bp, Unknown
  misc_feature (1)..( 14): Result.005 file - promoters50/1398114
ccacacgagtagac

SEQ ID NO: 170249 - DNA, 14 bp, Unknown
  misc_feature (1)..( 14): Result.005 file - promoters50/1398114
gaacacaattttaa

SEQ ID NO: 170250 - DNA, 14 bp, Unknown
  misc_feature (1)..( 14): Result.005 file - promoters50/1398114
tataccaaatttaa

SEQ ID NO: 170251 - DNA, 14 bp, Unknown
  misc_feature (1)..( 14): Result.005 file - promoters50/1398114
atacaaaagttatc

SEQ ID NO: 170252 - DNA, 12 bp, Unknown
  misc_feature (1)..( 12): Result.005 file - promoters50/1398124
aaattattttaa

SEQ ID NO: 170253 - DNA, 12 bp, Unknown
  misc_feature (1)..( 12): Result.005 file - promoters50/1398124
atgttatattaa

SEQ ID NO: 170254 - DNA, 12 bp, Unknown
  misc_feature (1)..( 12): Result.005 file - promoters50/1398124
tttcaatattgg

SEQ ID NO: 170255 - DNA, 12 bp, Unknown
  misc_feature (1)..( 12): Result.005 file - promoters50/1398124
aacttattttat

SEQ ID NO: 170256 - DNA, 12 bp, Unknown
  misc_feature (1)..( 12): Result.005 file - promoters50/1398124
gttttgaattca

SEQ ID NO: 170257 - DNA, 12 bp, Unknown
  misc_feature (1)..( 12): Result.005 file - promoters50/1398124
ctatcatattat

SEQ ID NO: 170258 - DNA, 12 bp, Unknown
  misc_feature (1)..( 12): Result.005 file - promoters50/1398124
tatctattttgt

SEQ ID NO: 170259 - DNA, 10 bp, Unknown
  misc_feature (1)..( 10): Result.005 file - promoters50/1398226
aaattcttgg

SEQ ID NO: 170260 - DNA, 10 bp, Unknown
  misc_feature (1)..( 10): Result.005 file - promoters50/1398226
aaattcttca

SEQ ID NO: 170261 - DNA, 10 bp, Unknown
  misc_feature (1)..( 10): Result.005 file - promoters50/1398226
aaagtcttgg

SEQ ID NO: 170262 - DNA, 11 bp, Unknown
  misc_feature (1)..( 11): Result.005 file - promoters50/1398337
taaacacaaac

SEQ ID NO: 170263 - DNA, 11 bp, Unknown
  misc_feature (1)..( 11): Result.005 file - promoters50/1398337
gaaacaaaaac

SEQ ID NO: 170264 - DNA, 11 bp, Unknown
  misc_feature (1)..( 11): Result.005 file - promoters50/1398337
gaaagaaagct

SEQ ID NO: 170265 - DNA, 10 bp, Unknown
  misc_feature (1)..( 10): Result.005 file - promoters50/1398337
ctaaattggg

SEQ ID NO: 170266 - DNA, 10 bp, Unknown
  misc_feature (1)..( 10): Result.005 file - promoters50/1398337
tgtaatcggg

SEQ ID NO: 170267 - DNA, 10 bp, Unknown
  misc_feature (1)..( 10): Result.005 file - promoters50/1398337
tgtgatcgaa

SEQ ID NO: 170268 - DNA, 8 bp, Unknown
  misc_feature (1)..( 8): Result.005 file - promoters50/1398337
ggttttgt

SEQ ID NO: 170269 - DNA, 8 bp, Unknown
  misc_feature (1)..( 8): Result.005 file - promoters50/1398337
ggtgttgg

SEQ ID NO: 170270 - DNA, 8 bp, Unknown
  misc_feature (1)..( 8): Result.005 file - promoters50/1398337
ctcgttgt

SEQ ID NO: 170271 - DNA, 8 bp, Unknown
  misc_feature (1)..( 8): Result.005 file - promoters50/1398345
aaaaatat

SEQ ID NO: 170272 - DNA, 8 bp, Unknown
  misc_feature (1)..( 8): Result.005 file - promoters50/1398345
aaaaatat

SEQ ID NO: 170273 - DNA, 8 bp, Unknown
  misc_feature (1)..( 8): Result.005 file - promoters50/1398345
aaatatat

SEQ ID NO: 170274 - DNA, 8 bp, Unknown
  misc_feature (1)..( 8): Result.005 file - promoters50/1398345
aaaaataa

SEQ ID NO: 170275 - DNA, 8 bp, Unknown
  misc_feature (1)..( 8): Result.005 file - promoters50/1398345
aaacatat

SEQ ID NO: 170276 - DNA, 9 bp, Unknown
  misc_feature (1)..( 9): Result.005 file - promoters50/1398345
caaaaagta

SEQ ID NO: 170277 - DNA, 9 bp, Unknown
  misc_feature (1)..( 9): Result.005 file - promoters50/1398345
ataaaagta

SEQ ID NO: 170278 - DNA, 9 bp, Unknown
  misc_feature (1)..( 9): Result.005 file - promoters50/1398345
taaaaagtt

SEQ ID NO: 170279 - DNA, 9 bp, Unknown
  misc_feature (1)..( 9): Result.005 file - promoters50/1398345
atataaggc

SEQ ID NO: 170280 - DNA, 9 bp, Unknown
  misc_feature (1)..( 9): Result.005 file - promoters50/1398345
ataaaaaca

SEQ ID NO: 170281 - DNA, 9 bp, Unknown
  misc_feature (1)..( 9): Result.005 file - promoters50/1398345
tgattccat

SEQ ID NO: 170282 - DNA, 9 bp, Unknown
  misc_feature (1)..( 9): Result.005 file - promoters50/1398345
aaattccaa

SEQ ID NO: 170283 - DNA, 9 bp, Unknown
  misc_feature (1)..( 9): Result.005 file - promoters50/1398345
agattacat

SEQ ID NO: 170284 - DNA, 9 bp, Unknown
  misc_feature (1)..( 9): Result.005 file - promoters50/1398345
ggattacag

SEQ ID NO: 170285 - DNA, 9 bp, Unknown
  misc_feature (1)..( 9): Result.005 file - promoters50/1398345
agattagta

SEQ ID NO: 170286 - DNA, 15 bp, Unknown
  misc_feature (1)..( 15): Result.005 file - promoters50/1398345
cattagaccattacg

SEQ ID NO: 170287 - DNA, 15 bp, Unknown
  misc_feature (1)..( 15): Result.005 file - promoters50/1398345
aattagagtttgctt

SEQ ID NO: 170288 - DNA, 15 bp, Unknown
  misc_feature (1)..( 15): Result.005 file - promoters50/1398345
aataagaatcaattt

SEQ ID NO: 170289 - DNA, 15 bp, Unknown
  misc_feature (1)..( 15): Result.005 file - promoters50/1398345
gataagaaaaacaaa

SEQ ID NO: 170290 - DNA, 15 bp, Unknown
  misc_feature (1)..( 15): Result.005 file - promoters50/1398345
aataacaaaaataaa

SEQ ID NO: 170291 - DNA, 18 bp, Unknown
  misc_feature (1)..( 18): Result.005 file - promoters50/1398345
tcaaacatataacaaaga

SEQ ID NO: 170292 - DNA, 18 bp, Unknown
  misc_feature (1)..( 18): Result.005 file - promoters50/1398345
acattaatataatatctc

SEQ ID NO: 170293 - DNA, 18 bp, Unknown
  misc_feature (1)..( 18): Result.005 file - promoters50/1398345
aaaaacttatactattgt

SEQ ID NO: 170294 - DNA, 18 bp, Unknown
  misc_feature (1)..( 18): Result.005 file - promoters50/1398345
aaaatcttactaatcaaa

SEQ ID NO: 170295 - DNA, 19 bp, Unknown
  misc_feature (1)..( 19): Result.005 file - promoters50/1398345
caaatattaataattaaat

SEQ ID NO: 170296 - DNA, 14 bp, Unknown
  misc_feature (1)..( 14): Result.005 file - promoters50/1398345
aaagaaaattaact

SEQ ID NO: 170297 - DNA, 14 bp, Unknown
  misc_feature (1)..( 14): Result.005 file - promoters50/1398345
aaataaaaataaat

SEQ ID NO: 170298 - DNA, 14 bp, Unknown
  misc_feature (1)..( 14): Result.005 file - promoters50/1398345
attaataattaaat

SEQ ID NO: 170299 - DNA, 14 bp, Unknown
  misc_feature (1)..( 14): Result.005 file - promoters50/1398345
cttactaatcaaat

SEQ ID NO: 170300 - DNA, 14 bp, Unknown
  misc_feature (1)..( 14): Result.005 file - promoters50/1398345
tttcaaaaagaaat

SEQ ID NO: 170301 - DNA, 9 bp, Unknown
  misc_feature (1)..( 9): Result.005 file - promoters50/1398401
gaaatagtt

SEQ ID NO: 170302 - DNA, 9 bp, Unknown
  misc_feature (1)..( 9): Result.005 file - promoters50/1398401
gaaattgtt

SEQ ID NO: 170303 - DNA, 9 bp, Unknown
  misc_feature (1)..( 9): Result.005 file - promoters50/1398401
gaaatatct

SEQ ID NO: 170304 - DNA, 9 bp, Unknown
  misc_feature (1)..( 9): Result.005 file - promoters50/1398401
aaaattggc

SEQ ID NO: 170305 - DNA, 9 bp, Unknown
  misc_feature (1)..( 9): Result.005 file - promoters50/1398401
aaaatttct

SEQ ID NO: 170306 - DNA, 16 bp, Unknown
  misc_feature (1)..( 16): Result.005 file - promoters50/1398401
aaattaccaaaaattc

SEQ ID NO: 170307 - DNA, 16 bp, Unknown
  misc_feature (1)..( 16): Result.005 file - promoters50/1398401
atatcatcaagaatca

SEQ ID NO: 170308 - DNA, 16 bp, Unknown
  misc_feature (1)..( 16): Result.005 file - promoters50/1398401
aaattatcaaaaggat

SEQ ID NO: 170309 - DNA, 16 bp, Unknown
  misc_feature (1)..( 16): Result.005 file - promoters50/1398401
tactttcccaaagtat

SEQ ID NO: 170310 - DNA, 16 bp, Unknown
  misc_feature (1)..( 16): Result.005 file - promoters50/1398401
ccattatcttcttcgg

SEQ ID NO: 170311 - DNA, 8 bp, Unknown
  misc_feature (1)..( 8): Result.005 file - promoters50/1398409
aaagtaat

SEQ ID NO: 170312 - DNA, 8 bp, Unknown
  misc_feature (1)..( 8): Result.005 file - promoters50/1398409
aaaataat

SEQ ID NO: 170313 - DNA, 8 bp, Unknown
  misc_feature (1)..( 8): Result.005 file - promoters50/1398409
aaactaaa

SEQ ID NO: 170314 - DNA, 8 bp, Unknown
  misc_feature (1)..( 8): Result.005 file - promoters50/1398409
aaattaac

SEQ ID NO: 170315 - DNA, 9 bp, Unknown
  misc_feature (1)..( 9): Result.005 file - promoters50/1398409
aaccttaca

SEQ ID NO: 170316 - DNA, 9 bp, Unknown
  misc_feature (1)..( 9): Result.005 file - promoters50/1398409
aagcttaca

SEQ ID NO: 170317 - DNA, 9 bp, Unknown
  misc_feature (1)..( 9): Result.005 file - promoters50/1398409
aagcatacc

SEQ ID NO: 170318 - DNA, 8 bp, Unknown
  misc_feature (1)..( 8): Result.005 file - promoters50/1398409
tgaagaaa

SEQ ID NO: 170319 - DNA, 8 bp, Unknown
  misc_feature (1)..( 8): Result.005 file - promoters50/1398409
ctaagaaa

SEQ ID NO: 170320 - DNA, 8 bp, Unknown
  misc_feature (1)..( 8): Result.005 file - promoters50/1398409
ctatgaat

SEQ ID NO: 170321 - DNA, 10 bp, Unknown
  misc_feature (1)..( 10): Result.005 file - promoters50/1398409
taaacaaaat

SEQ ID NO: 170322 - DNA, 10 bp, Unknown
  misc_feature (1)..( 10): Result.005 file - promoters50/1398409
taaactaaat

SEQ ID NO: 170323 - DNA, 10 bp, Unknown
  misc_feature (1)..( 10): Result.005 file - promoters50/1398409
caaattaacg

SEQ ID NO: 170324 - DNA, 10 bp, Unknown
  misc_feature (1)..( 10): Result.005 file - promoters50/1398409
gaaaataatg

SEQ ID NO: 170325 - DNA, 10 bp, Unknown
  misc_feature (1)..( 10): Result.005 file - promoters50/1398409
cccacacttt

SEQ ID NO: 170326 - DNA, 10 bp, Unknown
  misc_feature (1)..( 10): Result.005 file - promoters50/1398409
atcacatttt

SEQ ID NO: 170327 - DNA, 10 bp, Unknown
  misc_feature (1)..( 10): Result.005 file - promoters50/1398409
atcaaattaa

SEQ ID NO: 170328 - DNA, 9 bp, Unknown
  misc_feature (1)..( 9): Result.005 file - promoters50/1398409
agtaaattt

SEQ ID NO: 170329 - DNA, 9 bp, Unknown
  misc_feature (1)..( 9): Result.005 file - promoters50/1398409
agtatatta

SEQ ID NO: 170330 - DNA, 9 bp, Unknown
  misc_feature (1)..( 9): Result.005 file - promoters50/1398409
atcatatta

SEQ ID NO: 170331 - DNA, 12 bp, Unknown
  misc_feature (1)..( 12): Result.005 file - promoters50/1398409
cggttagagaaa

SEQ ID NO: 170332 - DNA, 12 bp, Unknown
  misc_feature (1)..( 12): Result.005 file - promoters50/1398409
tataaagaaaaa

SEQ ID NO: 170333 - DNA, 12 bp, Unknown
  misc_feature (1)..( 12): Result.005 file - promoters50/1398409
atataaggaaat

SEQ ID NO: 170334 - DNA, 9 bp, Unknown
  misc_feature (1)..( 9): Result.005 file - promoters50/1398413
taaaatcat

SEQ ID NO: 170335 - DNA, 9 bp, Unknown
  misc_feature (1)..( 9): Result.005 file - promoters50/1398413
taaactcat

SEQ ID NO: 170336 - DNA, 9 bp, Unknown
  misc_feature (1)..( 9): Result.005 file - promoters50/1398413
ataaatcat

SEQ ID NO: 170337 - DNA, 8 bp, Unknown
  misc_feature (1)..( 8): Result.005 file - promoters50/1398413
acaatatt

SEQ ID NO: 170338 - DNA, 8 bp, Unknown
  misc_feature (1)..( 8): Result.005 file - promoters50/1398413
tcaatatt

SEQ ID NO: 170339 - DNA, 8 bp, Unknown
  misc_feature (1)..( 8): Result.005 file - promoters50/1398413
tcaataaa

SEQ ID NO: 170340 - DNA, 8 bp, Unknown
  misc_feature (1)..( 8): Result.005 file - promoters50/1398431
caattaaa

SEQ ID NO: 170341 - DNA, 8 bp, Unknown
  misc_feature (1)..( 8): Result.005 file - promoters50/1398431
aaattaaa

SEQ ID NO: 170342 - DNA, 8 bp, Unknown
  misc_feature (1)..( 8): Result.005 file - promoters50/1398431
aaattagg

SEQ ID NO: 170343 - DNA, 7 bp, Unknown
  misc_feature (1)..( 7): Result.005 file - promoters50/1398431
aaaatta

SEQ ID NO: 170344 - DNA, 7 bp, Unknown
  misc_feature (1)..( 7): Result.005 file - promoters50/1398431
aaaatta

SEQ ID NO: 170345 - DNA, 7 bp, Unknown
  misc_feature (1)..( 7): Result.005 file - promoters50/1398431
gaaatta

SEQ ID NO: 170346 - DNA, 13 bp, Unknown
  misc_feature (1)..( 13): Result.005 file - promoters50/1398444
ggctaaactaact

SEQ ID NO: 170347 - DNA, 13 bp, Unknown
  misc_feature (1)..( 13): Result.005 file - promoters50/1398444
aaaaaaaataact

SEQ ID NO: 170348 - DNA, 13 bp, Unknown
  misc_feature (1)..( 13): Result.005 file - promoters50/1398444
aaagaaaataaac

SEQ ID NO: 170349 - DNA, 9 bp, Unknown
  misc_feature (1)..( 9): Result.005 file - promoters50/1398444
attcaaggt

SEQ ID NO: 170350 - DNA, 9 bp, Unknown
  misc_feature (1)..( 9): Result.005 file - promoters50/1398444
attgaagct

SEQ ID NO: 170351 - DNA, 9 bp, Unknown
  misc_feature (1)..( 9): Result.005 file - promoters50/1398444
tatgatgct

SEQ ID NO: 170352 - DNA, 10 bp, Unknown
  misc_feature (1)..( 10): Result.005 file - promoters50/1398444
gattaaaatg

SEQ ID NO: 170353 - DNA, 10 bp, Unknown
  misc_feature (1)..( 10): Result.005 file - promoters50/1398444
ggttaatatg

SEQ ID NO: 170354 - DNA, 10 bp, Unknown
  misc_feature (1)..( 10): Result.005 file - promoters50/1398444
gatgaaaaat

SEQ ID NO: 170355 - DNA, 8 bp, Unknown
  misc_feature (1)..( 8): Result.005 file - promoters50/1398444
tctaattt

SEQ ID NO: 170356 - DNA, 8 bp, Unknown
  misc_feature (1)..( 8): Result.005 file - promoters50/1398444
tataattt

SEQ ID NO: 170357 - DNA, 8 bp, Unknown
  misc_feature (1)..( 8): Result.005 file - promoters50/1398444
tctagttt

SEQ ID NO: 170358 - DNA, 7 bp, Unknown
  misc_feature (1)..( 7): Result.005 file - promoters50/1398444
tataatt

SEQ ID NO: 170359 - DNA, 7 bp, Unknown
  misc_feature (1)..( 7): Result.005 file - promoters50/1398444
tatgatt

SEQ ID NO: 170360 - DNA, 7 bp, Unknown
  misc_feature (1)..( 7): Result.005 file - promoters50/1398444
aatgatt

SEQ ID NO: 170361 - DNA, 9 bp, Unknown
  misc_feature (1)..( 9): Result.005 file - promoters50/1398444
gaaacaaag

SEQ ID NO: 170362 - DNA, 9 bp, Unknown
  misc_feature (1)..( 9): Result.005 file - promoters50/1398444
gaaataaac

SEQ ID NO: 170363 - DNA, 9 bp, Unknown
  misc_feature (1)..( 9): Result.005 file - promoters50/1398444
ctgacaaag

SEQ ID NO: 170364 - DNA, 11 bp, Unknown
  misc_feature (1)..( 11): Result.005 file - promoters50/1398444
aaactattata

SEQ ID NO: 170365 - DNA, 11 bp, Unknown
  misc_feature (1)..( 11): Result.005 file - promoters50/1398444
aaattataaat

SEQ ID NO: 170366 - DNA, 11 bp, Unknown
  misc_feature (1)..( 11): Result.005 file - promoters50/1398444
aaagtataaat

SEQ ID NO: 170367 - DNA, 7 bp, Unknown
  misc_feature (1)..( 7): Result.005 file - promoters50/1398444
ggaatga

SEQ ID NO: 170368 - DNA, 7 bp, Unknown
  misc_feature (1)..( 7): Result.005 file - promoters50/1398444
ggattga

SEQ ID NO: 170369 - DNA, 7 bp, Unknown
  misc_feature (1)..( 7): Result.005 file - promoters50/1398444
tgattga

SEQ ID NO: 170370 - DNA, 7 bp, Unknown
  misc_feature (1)..( 7): Result.005 file - promoters50/1398451
aactaat

SEQ ID NO: 170371 - DNA, 7 bp, Unknown
  misc_feature (1)..( 7): Result.005 file - promoters50/1398451
aactaat

SEQ ID NO: 170372 - DNA, 7 bp, Unknown
  misc_feature (1)..( 7): Result.005 file - promoters50/1398451
aacaaat

SEQ ID NO: 170373 - DNA, 8 bp, Unknown
  misc_feature (1)..( 8): Result.005 file - promoters50/1398451
tcatattt

SEQ ID NO: 170374 - DNA, 8 bp, Unknown
  misc_feature (1)..( 8): Result.005 file - promoters50/1398451
tcatatta

SEQ ID NO: 170375 - DNA, 9 bp, Unknown
  misc_feature (1)..( 9): Result.005 file - promoters50/1398451
ggataattt

SEQ ID NO: 170376 - DNA, 8 bp, Unknown
  misc_feature (1)..( 8): Result.005 file - promoters50/1398451
taaatatc

SEQ ID NO: 170377 - DNA, 8 bp, Unknown
  misc_feature (1)..( 8): Result.005 file - promoters50/1398451
taactata

SEQ ID NO: 170378 - DNA, 8 bp, Unknown
  misc_feature (1)..( 8): Result.005 file - promoters50/1398451
aaattaat

SEQ ID NO: 170379 - DNA, 9 bp, Unknown
  misc_feature (1)..( 9): Result.005 file - promoters50/1398451
agatatttc

SEQ ID NO: 170380 - DNA, 9 bp, Unknown
  misc_feature (1)..( 9): Result.005 file - promoters50/1398451
tattatttc

SEQ ID NO: 170381 - DNA, 9 bp, Unknown
  misc_feature (1)..( 9): Result.005 file - promoters50/1398451
tattattta

SEQ ID NO: 170382 - DNA, 8 bp, Unknown
  misc_feature (1)..( 8): Result.005 file - promoters50/1398504
gaaagaag

SEQ ID NO: 170383 - DNA, 8 bp, Unknown
  misc_feature (1)..( 8): Result.005 file - promoters50/1398504
ggaagaag

SEQ ID NO: 170384 - DNA, 9 bp, Unknown
  misc_feature (1)..( 9): Result.005 file - promoters50/1398504
ggaacgaat

SEQ ID NO: 170385 - DNA, 8 bp, Unknown
  misc_feature (1)..( 8): Result.005 file - promoters50/1398504
tcggagaa

SEQ ID NO: 170386 - DNA, 8 bp, Unknown
  misc_feature (1)..( 8): Result.005 file - promoters50/1398504
tcgaagaa

SEQ ID NO: 170387 - DNA, 8 bp, Unknown
  misc_feature (1)..( 8): Result.005 file - promoters50/1398504
tggaagaa

SEQ ID NO: 170388 - DNA, 15 bp, Unknown
  misc_feature (1)..( 15): Result.005 file - promoters50/1398545
tcggatagttcaatt

SEQ ID NO: 170389 - DNA, 15 bp, Unknown
  misc_feature (1)..( 15): Result.005 file - promoters50/1398545
gaaaatagtttacta

SEQ ID NO: 170390 - DNA, 15 bp, Unknown
  misc_feature (1)..( 15): Result.005 file - promoters50/1398545
tttgttagttcaaaa

SEQ ID NO: 170391 - DNA, 15 bp, Unknown
  misc_feature (1)..( 15): Result.005 file - promoters50/1398545
taaaaaagtgttgag

SEQ ID NO: 170392 - DNA, 15 bp, Unknown
  misc_feature (1)..( 15): Result.005 file - promoters50/1398545
gattcatcttcaaaa

SEQ ID NO: 170393 - DNA, 15 bp, Unknown
  misc_feature (1)..( 15): Result.005 file - promoters50/1398545
taaaaaaaagtaatg

SEQ ID NO: 170394 - DNA, 15 bp, Unknown
  misc_feature (1)..( 15): Result.005 file - promoters50/1398545
taataaaatttcaca

SEQ ID NO: 170395 - DNA, 10 bp, Unknown
  misc_feature (1)..( 10): Result.005 file - promoters50/1398545
tttataaata

SEQ ID NO: 170396 - DNA, 10 bp, Unknown
  misc_feature (1)..( 10): Result.005 file - promoters50/1398545
tttatacata

SEQ ID NO: 170397 - DNA, 10 bp, Unknown
  misc_feature (1)..( 10): Result.005 file - promoters50/1398545
cctattaata

SEQ ID NO: 170398 - DNA, 10 bp, Unknown
  misc_feature (1)..( 10): Result.005 file - promoters50/1398545
cttataaaaa

SEQ ID NO: 170399 - DNA, 11 bp, Unknown
  misc_feature (1)..( 11): Result.005 file - promoters50/1398545
attagtaaaag

SEQ ID NO: 170400 - DNA, 11 bp, Unknown
  misc_feature (1)..( 11): Result.005 file - promoters50/1398545
tgtaataataa

SEQ ID NO: 170401 - DNA, 12 bp, Unknown
  misc_feature (1)..( 12): Result.005 file - promoters50/1398545
gaaataatattt

SEQ ID NO: 170402 - DNA, 12 bp, Unknown
  misc_feature (1)..( 12): Result.005 file - promoters50/1398545
gaaatatttttt

SEQ ID NO: 170403 - DNA, 12 bp, Unknown
  misc_feature (1)..( 12): Result.005 file - promoters50/1398545
aaaataaataca

SEQ ID NO: 170404 - DNA, 12 bp, Unknown
  misc_feature (1)..( 12): Result.005 file - promoters50/1398545
agaataaaaaca

SEQ ID NO: 170405 - DNA, 12 bp, Unknown
  misc_feature (1)..( 12): Result.005 file - promoters50/1398545
gaaaaaaaaaaa

SEQ ID NO: 170406 - DNA, 12 bp, Unknown
  misc_feature (1)..( 12): Result.005 file - promoters50/1398545
aacataaattgt

SEQ ID NO: 170407 - DNA, 9 bp, Unknown
  misc_feature (1)..( 9): Result.005 file - promoters50/1398545
gtttcggtt

SEQ ID NO: 170408 - DNA, 9 bp, Unknown
  misc_feature (1)..( 9): Result.005 file - promoters50/1398545
attttggtt

SEQ ID NO: 170409 - DNA, 9 bp, Unknown
  misc_feature (1)..( 9): Result.005 file - promoters50/1398545
tctttggtt

SEQ ID NO: 170410 - DNA, 9 bp, Unknown
  misc_feature (1)..( 9): Result.005 file - promoters50/1398545
aagttggtt

SEQ ID NO: 170411 - DNA, 9 bp, Unknown
  misc_feature (1)..( 9): Result.005 file - promoters50/1398545
attttgcta

SEQ ID NO: 170412 - DNA, 9 bp, Unknown
  misc_feature (1)..( 9): Result.005 file - promoters50/1398545
attttgcac

SEQ ID NO: 170413 - DNA, 15 bp, Unknown
  misc_feature (1)..( 15): Result.005 file - promoters50/1398545
ctaaaggcccaattt

SEQ ID NO: 170414 - DNA, 15 bp, Unknown
  misc_feature (1)..( 15): Result.005 file - promoters50/1398545
ttttcggcccaccgg

SEQ ID NO: 170415 - DNA, 15 bp, Unknown
  misc_feature (1)..( 15): Result.005 file - promoters50/1398545
ctaaaggcccaataa

SEQ ID NO: 170416 - DNA, 15 bp, Unknown
  misc_feature (1)..( 15): Result.005 file - promoters50/1398545
gtgaaagcccaaaac

SEQ ID NO: 170417 - DNA, 15 bp, Unknown
  misc_feature (1)..( 15): Result.005 file - promoters50/1398545
ggaatggcccagtaa

SEQ ID NO: 170418 - DNA, 15 bp, Unknown
  misc_feature (1)..( 15): Result.005 file - promoters50/1398545
tagaaagcccattaa

SEQ ID NO: 170419 - DNA, 12 bp, Unknown
  misc_feature (1)..( 12): Result.005 file - promoters50/1398558
tgaaaaagtaat

SEQ ID NO: 170420 - DNA, 12 bp, Unknown
  misc_feature (1)..( 12): Result.005 file - promoters50/1398558
tcaaaaggtatc

SEQ ID NO: 170421 - DNA, 12 bp, Unknown
  misc_feature (1)..( 12): Result.005 file - promoters50/1398558
tgataaactaat

SEQ ID NO: 170422 - DNA, 12 bp, Unknown
  misc_feature (1)..( 12): Result.005 file - promoters50/1398558
caataaagtagt

SEQ ID NO: 170423 - DNA, 9 bp, Unknown
  misc_feature (1)..( 9): Result.005 file - promoters50/1398558
cacaaacaa

SEQ ID NO: 170424 - DNA, 9 bp, Unknown
  misc_feature (1)..( 9): Result.005 file - promoters50/1398558
aacaatcaa

SEQ ID NO: 170425 - DNA, 9 bp, Unknown
  misc_feature (1)..( 9): Result.005 file - promoters50/1398558
aacaatcac

SEQ ID NO: 170426 - DNA, 9 bp, Unknown
  misc_feature (1)..( 9): Result.005 file - promoters50/1398558
cacaatcct

SEQ ID NO: 170427 - DNA, 13 bp, Unknown
  misc_feature (1)..( 13): Result.005 file - promoters50/1398565
aatataaaaatat

SEQ ID NO: 170428 - DNA, 13 bp, Unknown
  misc_feature (1)..( 13): Result.005 file - promoters50/1398565
tatatgaaaatat

SEQ ID NO: 170429 - DNA, 13 bp, Unknown
  misc_feature (1)..( 13): Result.005 file - promoters50/1398565
aatctaaaaacta

SEQ ID NO: 170430 - DNA, 13 bp, Unknown
  misc_feature (1)..( 13): Result.005 file - promoters50/1398565
tatcaaaaaataa

SEQ ID NO: 170431 - DNA, 13 bp, Unknown
  misc_feature (1)..( 13): Result.005 file - promoters50/1398565
ttaataaaacgag

SEQ ID NO: 170432 - DNA, 13 bp, Unknown
  misc_feature (1)..( 13): Result.005 file - promoters50/1398565
ttagtaaaacctt

SEQ ID NO: 170433 - DNA, 13 bp, Unknown
  misc_feature (1)..( 13): Result.005 file - promoters50/1398565
gttatatatatga

SEQ ID NO: 170434 - DNA, 13 bp, Unknown
  misc_feature (1)..( 13): Result.005 file - promoters50/1398565
agtatataaaatg

SEQ ID NO: 170435 - DNA, 13 bp, Unknown
  misc_feature (1)..( 13): Result.005 file - promoters50/1398565
catatatatccgc

SEQ ID NO: 170436 - DNA, 13 bp, Unknown
  misc_feature (1)..( 13): Result.005 file - promoters50/1398565
tctatataaatcc

SEQ ID NO: 170437 - DNA, 13 bp, Unknown
  misc_feature (1)..( 13): Result.005 file - promoters50/1398565
tctatataatagt

SEQ ID NO: 170438 - DNA, 13 bp, Unknown
  misc_feature (1)..( 13): Result.005 file - promoters50/1398565
tatatataccctt

SEQ ID NO: 170439 - DNA, 13 bp, Unknown
  misc_feature (1)..( 13): Result.005 file - promoters50/1398565
ccaatataaaatg

SEQ ID NO: 170440 - DNA, 19 bp, Unknown
  misc_feature (1)..( 19): Result.005 file - promoters50/1398573
agatagacattcttaaatt

SEQ ID NO: 170441 - DNA, 19 bp, Unknown
  misc_feature (1)..( 19): Result.005 file - promoters50/1398573
tgactaacattcgtgaacg

SEQ ID NO: 170442 - DNA, 19 bp, Unknown
  misc_feature (1)..( 19): Result.005 file - promoters50/1398573
tgcttaacactcttaaatt

SEQ ID NO: 170443 - DNA, 19 bp, Unknown
  misc_feature (1)..( 19): Result.005 file - promoters50/1398573
gaaataaaattaatgtatt

SEQ ID NO: 170444 - DNA, 19 bp, Unknown
  misc_feature (1)..( 19): Result.005 file - promoters50/1398573
aaagaaaaataataactta

SEQ ID NO: 170445 - DNA, 19 bp, Unknown
  misc_feature (1)..( 19): Result.005 file - promoters50/1398573
aataaaaaatctttttatt

SEQ ID NO: 170446 - DNA, 21 bp, Unknown
  misc_feature (1)..( 21): Result.005 file - promoters50/1398573
acattcttaaattcccactat

SEQ ID NO: 170447 - DNA, 21 bp, Unknown
  misc_feature (1)..( 21): Result.005 file - promoters50/1398573
atcttcataatcagttacgtc

SEQ ID NO: 170448 - DNA, 21 bp, Unknown
  misc_feature (1)..( 21): Result.005 file - promoters50/1398573
acactcttaaattattctcaa

SEQ ID NO: 170449 - DNA, 21 bp, Unknown
  misc_feature (1)..( 21): Result.005 file - promoters50/1398573
ttgaaataaaattaatgtatt

SEQ ID NO: 170450 - DNA, 21 bp, Unknown
  misc_feature (1)..( 21): Result.005 file - promoters50/1398573
aaaagaaaaaagaaaaataat

SEQ ID NO: 170451 - DNA, 21 bp, Unknown
  misc_feature (1)..( 21): Result.005 file - promoters50/1398573
ggaataaaaaatctttttatt

SEQ ID NO: 170452 - DNA, 7 bp, Unknown
  misc_feature (1)..( 7): Result.005 file - promoters50/1398638
atgtttt

SEQ ID NO: 170453 - DNA, 7 bp, Unknown
  misc_feature (1)..( 7): Result.005 file - promoters50/1398638
atgattt

SEQ ID NO: 170454 - DNA, 7 bp, Unknown
  misc_feature (1)..( 7): Result.005 file - promoters50/1398638
ttgattt

SEQ ID NO: 170455 - DNA, 9 bp, Unknown
  misc_feature (1)..( 9): Result.005 file - promoters50/1398638
taaattttt

SEQ ID NO: 170456 - DNA, 9 bp, Unknown
  misc_feature (1)..( 9): Result.005 file - promoters50/1398638
taaattttc

SEQ ID NO: 170457 - DNA, 9 bp, Unknown
  misc_feature (1)..( 9): Result.005 file - promoters50/1398638
cagattttc

SEQ ID NO: 170458 - DNA, 7 bp, Unknown
  misc_feature (1)..( 7): Result.005 file - promoters50/1398638
catttaa

SEQ ID NO: 170459 - DNA, 7 bp, Unknown
  misc_feature (1)..( 7): Result.005 file - promoters50/1398638
catttat

SEQ ID NO: 170460 - DNA, 7 bp, Unknown
  misc_feature (1)..( 7): Result.005 file - promoters50/1398638
catatat

SEQ ID NO: 170461 - DNA, 9 bp, Unknown
  misc_feature (1)..( 9): Result.005 file - promoters50/1398704
tccgatcat

SEQ ID NO: 170462 - DNA, 9 bp, Unknown
  misc_feature (1)..( 9): Result.005 file - promoters50/1398704
accgttcat

SEQ ID NO: 170463 - DNA, 9 bp, Unknown
  misc_feature (1)..( 9): Result.005 file - promoters50/1398704
accgttaaa

SEQ ID NO: 170464 - DNA, 10 bp, Unknown
  misc_feature (1)..( 10): Result.005 file - promoters50/1398704
caattatatc

SEQ ID NO: 170465 - DNA, 10 bp, Unknown
  misc_feature (1)..( 10): Result.005 file - promoters50/1398704
ttgatatatc

SEQ ID NO: 170466 - DNA, 10 bp, Unknown
  misc_feature (1)..( 10): Result.005 file - promoters50/1398704
caaatatata

SEQ ID NO: 170467 - DNA, 10 bp, Unknown
  misc_feature (1)..( 10): Result.005 file - promoters50/1398704
cctttttgaa

SEQ ID NO: 170468 - DNA, 10 bp, Unknown
  misc_feature (1)..( 10): Result.005 file - promoters50/1398704
tttttttgtt

SEQ ID NO: 170469 - DNA, 11 bp, Unknown
  misc_feature (1)..( 11): Result.005 file - promoters50/1398704
ttttatttgtt

SEQ ID NO: 170470 - DNA, 14 bp, Unknown
  misc_feature (1)..( 14): Result.005 file - promoters50/1398704
attgttgttttgct

SEQ ID NO: 170471 - DNA, 14 bp, Unknown
  misc_feature (1)..( 14): Result.005 file - promoters50/1398704
attgttttttttgt

SEQ ID NO: 170472 - DNA, 15 bp, Unknown
  misc_feature (1)..( 15): Result.005 file - promoters50/1398704
ttatttttatttgtt

SEQ ID NO: 170473 - DNA, 14 bp, Unknown
  misc_feature (1)..( 14): Result.005 file - promoters50/1398704
tccacacaataaac

SEQ ID NO: 170474 - DNA, 14 bp, Unknown
  misc_feature (1)..( 14): Result.005 file - promoters50/1398704
aaaacaaaatgtca

SEQ ID NO: 170475 - DNA, 14 bp, Unknown
  misc_feature (1)..( 14): Result.005 file - promoters50/1398704
aaaacaaatcataa

SEQ ID NO: 170476 - DNA, 14 bp, Unknown
  misc_feature (1)..( 14): Result.005 file - promoters50/1398704
tgcataaaatctca

SEQ ID NO: 170477 - DNA, 9 bp, Unknown
  misc_feature (1)..( 9): Result.005 file - promoters50/1398704
gtggaactt

SEQ ID NO: 170478 - DNA, 9 bp, Unknown
  misc_feature (1)..( 9): Result.005 file - promoters50/1398704
aatgaactt

SEQ ID NO: 170479 - DNA, 9 bp, Unknown
  misc_feature (1)..( 9): Result.005 file - promoters50/1398704
aatcaacta

SEQ ID NO: 170480 - DNA, 9 bp, Unknown
  misc_feature (1)..( 9): Result.005 file - promoters50/1398704
aaaatatat

SEQ ID NO: 170481 - DNA, 9 bp, Unknown
  misc_feature (1)..( 9): Result.005 file - promoters50/1398704
aaattattt

SEQ ID NO: 170482 - DNA, 9 bp, Unknown
  misc_feature (1)..( 9): Result.005 file - promoters50/1398704
atattgttt

SEQ ID NO: 170483 - DNA, 10 bp, Unknown
  misc_feature (1)..( 10): Result.005 file - promoters50/1398737
gattagtttc

SEQ ID NO: 170484 - DNA, 10 bp, Unknown
  misc_feature (1)..( 10): Result.005 file - promoters50/1398737
atttatttta

SEQ ID NO: 170485 - DNA, 10 bp, Unknown
  misc_feature (1)..( 10): Result.005 file - promoters50/1398737
cattggttag

SEQ ID NO: 170486 - DNA, 10 bp, Unknown
  misc_feature (1)..( 10): Result.005 file - promoters50/1398737
gatcagtacc

SEQ ID NO: 170487 - DNA, 10 bp, Unknown
  misc_feature (1)..( 10): Result.005 file - promoters50/1398737
aatttgtttg

SEQ ID NO: 170488 - DNA, 10 bp, Unknown
  misc_feature (1)..( 10): Result.005 file - promoters50/1398737
gtatggctag

SEQ ID NO: 170489 - DNA, 10 bp, Unknown
  misc_feature (1)..( 10): Result.005 file - promoters50/1398737
ttatatatta

SEQ ID NO: 170490 - DNA, 10 bp, Unknown
  misc_feature (1)..( 10): Result.005 file - promoters50/1398737
agatatttta

SEQ ID NO: 170491 - DNA, 11 bp, Unknown
  misc_feature (1)..( 11): Result.005 file - promoters50/1398737
aacccatatta

SEQ ID NO: 170492 - DNA, 10 bp, Unknown
  misc_feature (1)..( 10): Result.005 file - promoters50/1398737
taagaaattg

SEQ ID NO: 170493 - DNA, 10 bp, Unknown
  misc_feature (1)..( 10): Result.005 file - promoters50/1398737
caagaaaact

SEQ ID NO: 170494 - DNA, 11 bp, Unknown
  misc_feature (1)..( 11): Result.005 file - promoters50/1398737
aaagcaaacaa

SEQ ID NO: 170495 - DNA, 15 bp, Unknown
  misc_feature (1)..( 15): Result.005 file - promoters50/1398737
aagttaataactatt

SEQ ID NO: 170496 - DNA, 15 bp, Unknown
  misc_feature (1)..( 15): Result.005 file - promoters50/1398737
agaataataatttaa

SEQ ID NO: 170497 - DNA, 15 bp, Unknown
  misc_feature (1)..( 15): Result.005 file - promoters50/1398737
gtgttgatatacgag

SEQ ID NO: 170498 - DNA, 15 bp, Unknown
  misc_feature (1)..( 15): Result.005 file - promoters50/1398737
aaaaaaagaacaata

SEQ ID NO: 170499 - DNA, 15 bp, Unknown
  misc_feature (1)..( 15): Result.005 file - promoters50/1398737
atgattggaacaaat

SEQ ID NO: 170500 - DNA, 15 bp, Unknown
  misc_feature (1)..( 15): Result.005 file - promoters50/1398737
gtgttgatcgataat

SEQ ID NO: 170501 - DNA, 7 bp, Unknown
  misc_feature (1)..( 7): Result.005 file - promoters50/1398784
ataaaat

SEQ ID NO: 170502 - DNA, 7 bp, Unknown
  misc_feature (1)..( 7): Result.005 file - promoters50/1398784
ataaaat

SEQ ID NO: 170503 - DNA, 7 bp, Unknown
  misc_feature (1)..( 7): Result.005 file - promoters50/1398784
ctaaaat

SEQ ID NO: 170504 - DNA, 11 bp, Unknown
  misc_feature (1)..( 11): Result.005 file - promoters50/1398784
gaaaattaaag

SEQ ID NO: 170505 - DNA, 11 bp, Unknown
  misc_feature (1)..( 11): Result.005 file - promoters50/1398784
aaaacttaaat

SEQ ID NO: 170506 - DNA, 11 bp, Unknown
  misc_feature (1)..( 11): Result.005 file - promoters50/1398784
gaaaactaaag

SEQ ID NO: 170507 - DNA, 10 bp, Unknown
  misc_feature (1)..( 10): Result.005 file - promoters50/1398784
gaagaaagaa

SEQ ID NO: 170508 - DNA, 10 bp, Unknown
  misc_feature (1)..( 10): Result.005 file - promoters50/1398784
aaagaaaaat

SEQ ID NO: 170509 - DNA, 11 bp, Unknown
  misc_feature (1)..( 11): Result.005 file - promoters50/1398784
aaagtaaaatc

SEQ ID NO: 170510 - DNA, 7 bp, Unknown
  misc_feature (1)..( 7): Result.005 file - promoters50/1398846
tttgtta

SEQ ID NO: 170511 - DNA, 7 bp, Unknown
  misc_feature (1)..( 7): Result.005 file - promoters50/1398846
tttgtta

SEQ ID NO: 170512 - DNA, 7 bp, Unknown
  misc_feature (1)..( 7): Result.005 file - promoters50/1398846
attgtta

SEQ ID NO: 170513 - DNA, 9 bp, Unknown
  misc_feature (1)..( 9): Result.005 file - promoters50/1398846
ttaattaga

SEQ ID NO: 170514 - DNA, 9 bp, Unknown
  misc_feature (1)..( 9): Result.005 file - promoters50/1398846
ttaattaaa

SEQ ID NO: 170515 - DNA, 9 bp, Unknown
  misc_feature (1)..( 9): Result.005 file - promoters50/1398846
taaattaaa

SEQ ID NO: 170516 - DNA, 16 bp, Unknown
  misc_feature (1)..( 16): Result.005 file - promoters50/1398853
tgtaaaaaacgttacg

SEQ ID NO: 170517 - DNA, 16 bp, Unknown
  misc_feature (1)..( 16): Result.005 file - promoters50/1398853
tccaaaaaatagaaga

SEQ ID NO: 170518 - DNA, 16 bp, Unknown
  misc_feature (1)..( 16): Result.005 file - promoters50/1398853
ttcaaaaaaaatggta

SEQ ID NO: 170519 - DNA, 16 bp, Unknown
  misc_feature (1)..( 16): Result.005 file - promoters50/1398853
cagaaaaagatgataa

SEQ ID NO: 170520 - DNA, 9 bp, Unknown
  misc_feature (1)..( 9): Result.005 file - promoters50/1398853
cttttcttg

SEQ ID NO: 170521 - DNA, 9 bp, Unknown
  misc_feature (1)..( 9): Result.005 file - promoters50/1398853
attttattg

SEQ ID NO: 170522 - DNA, 9 bp, Unknown
  misc_feature (1)..( 9): Result.005 file - promoters50/1398853
ttttaattc

SEQ ID NO: 170523 - DNA, 9 bp, Unknown
  misc_feature (1)..( 9): Result.005 file - promoters50/1398853
attctataa

SEQ ID NO: 170524 - DNA, 8 bp, Unknown
  misc_feature (1)..( 8): Result.005 file - promoters50/1398892
atttaaat

SEQ ID NO: 170525 - DNA, 8 bp, Unknown
  misc_feature (1)..( 8): Result.005 file - promoters50/1398892
gtttaaat

SEQ ID NO: 170526 - DNA, 8 bp, Unknown
  misc_feature (1)..( 8): Result.005 file - promoters50/1398892
attgaaat

SEQ ID NO: 170527 - DNA, 9 bp, Unknown
  misc_feature (1)..( 9): Result.005 file - promoters50/1398936
ttttcttct

SEQ ID NO: 170528 - DNA, 9 bp, Unknown
  misc_feature (1)..( 9): Result.005 file - promoters50/1398936
ttttcttag

SEQ ID NO: 170529 - DNA, 9 bp, Unknown
  misc_feature (1)..( 9): Result.005 file - promoters50/1398936
atttcatct

SEQ ID NO: 170530 - DNA, 12 bp, Unknown
  misc_feature (1)..( 12): Result.005 file - promoters50/1399037
tagaaaaatgga

SEQ ID NO: 170531 - DNA, 12 bp, Unknown
  misc_feature (1)..( 12): Result.005 file - promoters50/1399037
gggaaaaaacat

SEQ ID NO: 170532 - DNA, 12 bp, Unknown
  misc_feature (1)..( 12): Result.005 file - promoters50/1399037
ctaaaaaatcgt

SEQ ID NO: 170533 - DNA, 12 bp, Unknown
  misc_feature (1)..( 12): Result.005 file - promoters50/1399037
tagagaaacaaa

SEQ ID NO: 170534 - DNA, 13 bp, Unknown
  misc_feature (1)..( 13): Result.005 file - promoters50/1399037
cggaacaaaggag

SEQ ID NO: 170535 - DNA, 13 bp, Unknown
  misc_feature (1)..( 13): Result.005 file - promoters50/1399037
tactggaaattcg

SEQ ID NO: 170536 - DNA, 12 bp, Unknown
  misc_feature (1)..( 12): Result.005 file - promoters50/1399037
gtaaattcattt

SEQ ID NO: 170537 - DNA, 12 bp, Unknown
  misc_feature (1)..( 12): Result.005 file - promoters50/1399037
tccaatacatat

SEQ ID NO: 170538 - DNA, 12 bp, Unknown
  misc_feature (1)..( 12): Result.005 file - promoters50/1399037
ttcaattttaaa

SEQ ID NO: 170539 - DNA, 12 bp, Unknown
  misc_feature (1)..( 12): Result.005 file - promoters50/1399037
tcaaactcaaac

SEQ ID NO: 170540 - DNA, 12 bp, Unknown
  misc_feature (1)..( 12): Result.005 file - promoters50/1399037
caatatacttat

SEQ ID NO: 170541 - DNA, 12 bp, Unknown
  misc_feature (1)..( 12): Result.005 file - promoters50/1399037
atctgtttaaac

SEQ ID NO: 170542 - DNA, 8 bp, Unknown
  misc_feature (1)..( 8): Result.005 file - promoters50/1399074
cgtataga

SEQ ID NO: 170543 - DNA, 8 bp, Unknown
  misc_feature (1)..( 8): Result.005 file - promoters50/1399074
agtaaaga

SEQ ID NO: 170544 - DNA, 8 bp, Unknown
  misc_feature (1)..( 8): Result.005 file - promoters50/1399074
agtaaaaa

SEQ ID NO: 170545 - DNA, 10 bp, Unknown
  misc_feature (1)..( 10): Result.005 file - promoters50/1399074
ttaaggaagc

SEQ ID NO: 170546 - DNA, 10 bp, Unknown
  misc_feature (1)..( 10): Result.005 file - promoters50/1399074
gaaagaaagc

SEQ ID NO: 170547 - DNA, 10 bp, Unknown
  misc_feature (1)..( 10): Result.005 file - promoters50/1399074
gaaacaaaaa

SEQ ID NO: 170548 - DNA, 10 bp, Unknown
  misc_feature (1)..( 10): Result.005 file - promoters50/1399074
ggagaagcat

SEQ ID NO: 170549 - DNA, 10 bp, Unknown
  misc_feature (1)..( 10): Result.005 file - promoters50/1399074
ggaaaagaaa

SEQ ID NO: 170550 - DNA, 10 bp, Unknown
  misc_feature (1)..( 10): Result.005 file - promoters50/1399074
ggaaatgaaa

SEQ ID NO: 170551 - DNA, 9 bp, Unknown
  misc_feature (1)..( 9): Result.005 file - promoters50/1399140
gaaagacta

SEQ ID NO: 170552 - DNA, 9 bp, Unknown
  misc_feature (1)..( 9): Result.005 file - promoters50/1399140
gaaagattg

SEQ ID NO: 170553 - DNA, 9 bp, Unknown
  misc_feature (1)..( 9): Result.005 file - promoters50/1399140
taaagcttg

SEQ ID NO: 170554 - DNA, 9 bp, Unknown
  misc_feature (1)..( 9): Result.005 file - promoters50/1399140
taaaaattt

SEQ ID NO: 170555 - DNA, 9 bp, Unknown
  misc_feature (1)..( 9): Result.005 file - promoters50/1399140
taataatat

SEQ ID NO: 170556 - DNA, 9 bp, Unknown
  misc_feature (1)..( 9): Result.005 file - promoters50/1399140
gcataatat

SEQ ID NO: 170557 - DNA, 12 bp, Unknown
  misc_feature (1)..( 12): Result.005 file - promoters50/1399210
aatgtaaacaac

SEQ ID NO: 170558 - DNA, 12 bp, Unknown
  misc_feature (1)..( 12): Result.005 file - promoters50/1399210
tttataaacact

SEQ ID NO: 170559 - DNA, 12 bp, Unknown
  misc_feature (1)..( 12): Result.005 file - promoters50/1399210
aatttaaataac

SEQ ID NO: 170560 - DNA, 12 bp, Unknown
  misc_feature (1)..( 12): Result.005 file - promoters50/1399210
aatttagtataa

SEQ ID NO: 170561 - DNA, 7 bp, Unknown
  misc_feature (1)..( 7): Result.005 file - promoters50/1399210
cttttgg

SEQ ID NO: 170562 - DNA, 7 bp, Unknown
  misc_feature (1)..( 7): Result.005 file - promoters50/1399210
cttttgg

SEQ ID NO: 170563 - DNA, 7 bp, Unknown
  misc_feature (1)..( 7): Result.005 file - promoters50/1399210
attttgg

SEQ ID NO: 170564 - DNA, 12 bp, Unknown
  misc_feature (1)..( 12): Result.005 file - promoters50/1399210
ttactataaatt

SEQ ID NO: 170565 - DNA, 12 bp, Unknown
  misc_feature (1)..( 12): Result.005 file - promoters50/1399210
ttattatatatt

SEQ ID NO: 170566 - DNA, 12 bp, Unknown
  misc_feature (1)..( 12): Result.005 file - promoters50/1399210
agtctaaaaata

SEQ ID NO: 170567 - DNA, 8 bp, Unknown
  misc_feature (1)..( 8): Result.005 file - promoters50/1399210
gttttgtt

SEQ ID NO: 170568 - DNA, 8 bp, Unknown
  misc_feature (1)..( 8): Result.005 file - promoters50/1399210
ttttagtt

SEQ ID NO: 170569 - DNA, 8 bp, Unknown
  misc_feature (1)..( 8): Result.005 file - promoters50/1399210
gttttgta

SEQ ID NO: 170570 - DNA, 15 bp, Unknown
  misc_feature (1)..( 15): Result.005 file - promoters50/1399265
cttgtttcaaatagt

SEQ ID NO: 170571 - DNA, 15 bp, Unknown
  misc_feature (1)..( 15): Result.005 file - promoters50/1399265
agtatttaaaataat

SEQ ID NO: 170572 - DNA, 15 bp, Unknown
  misc_feature (1)..( 15): Result.005 file - promoters50/1399265
agtttttaaggtttt

SEQ ID NO: 170573 - DNA, 15 bp, Unknown
  misc_feature (1)..( 15): Result.005 file - promoters50/1399265
gaattctaaaatctt

SEQ ID NO: 170574 - DNA, 15 bp, Unknown
  misc_feature (1)..( 15): Result.005 file - promoters50/1399265
ggagaagaaactctc

SEQ ID NO: 170575 - DNA, 15 bp, Unknown
  misc_feature (1)..( 15): Result.005 file - promoters50/1399265
attgttgaaattctt

SEQ ID NO: 170576 - DNA, 14 bp, Unknown
  misc_feature (1)..( 14): Result.005 file - promoters50/1399265
caacaatagaggtt

SEQ ID NO: 170577 - DNA, 14 bp, Unknown
  misc_feature (1)..( 14): Result.005 file - promoters50/1399265
aaacaatttatatt

SEQ ID NO: 170578 - DNA, 14 bp, Unknown
  misc_feature (1)..( 14): Result.005 file - promoters50/1399265
caacaacttatatg

SEQ ID NO: 170579 - DNA, 14 bp, Unknown
  misc_feature (1)..( 14): Result.005 file - promoters50/1399265
aaaaaatgttatct

SEQ ID NO: 170580 - DNA, 14 bp, Unknown
  misc_feature (1)..( 14): Result.005 file - promoters50/1399265
gaaacacttattca

SEQ ID NO: 170581 - DNA, 14 bp, Unknown
  misc_feature (1)..( 14): Result.005 file - promoters50/1399265
tcatatattataaa

SEQ ID NO: 170582 - DNA, 14 bp, Unknown
  misc_feature (1)..( 14): Result.005 file - promoters50/1399265
tttaatttcttcac

SEQ ID NO: 170583 - DNA, 14 bp, Unknown
  misc_feature (1)..( 14): Result.005 file - promoters50/1399265
cttattttatgaaa

SEQ ID NO: 170584 - DNA, 14 bp, Unknown
  misc_feature (1)..( 14): Result.005 file - promoters50/1399265
tttagtttagaatt

SEQ ID NO: 170585 - DNA, 14 bp, Unknown
  misc_feature (1)..( 14): Result.005 file - promoters50/1399265
tttatattataaaa

SEQ ID NO: 170586 - DNA, 14 bp, Unknown
  misc_feature (1)..( 14): Result.005 file - promoters50/1399265
tttaaaaaatgtta

SEQ ID NO: 170587 - DNA, 14 bp, Unknown
  misc_feature (1)..( 14): Result.005 file - promoters50/1399265
cttattcacattgc

SEQ ID NO: 170588 - DNA, 10 bp, Unknown
  misc_feature (1)..( 10): Result.005 file - promoters50/1399265
tcatttttgt

SEQ ID NO: 170589 - DNA, 10 bp, Unknown
  misc_feature (1)..( 10): Result.005 file - promoters50/1399265
atatttttcc

SEQ ID NO: 170590 - DNA, 10 bp, Unknown
  misc_feature (1)..( 10): Result.005 file - promoters50/1399265
ttattttatg

SEQ ID NO: 170591 - DNA, 10 bp, Unknown
  misc_feature (1)..( 10): Result.005 file - promoters50/1399265
ttatttagaa

SEQ ID NO: 170592 - DNA, 10 bp, Unknown
  misc_feature (1)..( 10): Result.005 file - promoters50/1399265
gtctttttcc

SEQ ID NO: 170593 - DNA, 10 bp, Unknown
  misc_feature (1)..( 10): Result.005 file - promoters50/1399265
atattattgt

SEQ ID NO: 170594 - DNA, 8 bp, Unknown
  misc_feature (1)..( 8): Result.005 file - promoters50/1399265
tcataaaa

SEQ ID NO: 170595 - DNA, 8 bp, Unknown
  misc_feature (1)..( 8): Result.005 file - promoters50/1399265
ttataaaa

SEQ ID NO: 170596 - DNA, 9 bp, Unknown
  misc_feature (1)..( 9): Result.005 file - promoters50/1399265
aaatacaaa

SEQ ID NO: 170597 - DNA, 9 bp, Unknown
  misc_feature (1)..( 9): Result.005 file - promoters50/1399265
ttagaaaaa

SEQ ID NO: 170598 - DNA, 9 bp, Unknown
  misc_feature (1)..( 9): Result.005 file - promoters50/1399265
gaattcaaa

SEQ ID NO: 170599 - DNA, 9 bp, Unknown
  misc_feature (1)..( 9): Result.005 file - promoters50/1399265
taatacaat

SEQ ID NO: 170600 - DNA, 10 bp, Unknown
  misc_feature (1)..( 10): Result.005 file - promoters50/1399265
gatatttttt

SEQ ID NO: 170601 - DNA, 10 bp, Unknown
  misc_feature (1)..( 10): Result.005 file - promoters50/1399265
gttatttttg

SEQ ID NO: 170602 - DNA, 10 bp, Unknown
  misc_feature (1)..( 10): Result.005 file - promoters50/1399265
gatactttta

SEQ ID NO: 170603 - DNA, 10 bp, Unknown
  misc_feature (1)..( 10): Result.005 file - promoters50/1399265
actatttttt

SEQ ID NO: 170604 - DNA, 10 bp, Unknown
  misc_feature (1)..( 10): Result.005 file - promoters50/1399265
ggtactttca

SEQ ID NO: 170605 - DNA, 10 bp, Unknown
  misc_feature (1)..( 10): Result.005 file - promoters50/1399265
gctatttctt

SEQ ID NO: 170606 - DNA, 10 bp, Unknown
  misc_feature (1)..( 10): Result.005 file - promoters50/1399265
ggtacttgac

SEQ ID NO: 170607 - DNA, 17 bp, Unknown
  misc_feature (1)..( 17): Result.005 file - promoters50/1399277
ataaacacaaaaatttt

SEQ ID NO: 170608 - DNA, 17 bp, Unknown
  misc_feature (1)..( 17): Result.005 file - promoters50/1399277
ttaaacacaaaagttca

SEQ ID NO: 170609 - DNA, 17 bp, Unknown
  misc_feature (1)..( 17): Result.005 file - promoters50/1399277
ttaatcacaaaaacttt

SEQ ID NO: 170610 - DNA, 17 bp, Unknown
  misc_feature (1)..( 17): Result.005 file - promoters50/1399277
ttaatcacgtacgatac

SEQ ID NO: 170611 - DNA, 7 bp, Unknown
  misc_feature (1)..( 7): Result.005 file - promoters50/1399277
aagattt

SEQ ID NO: 170612 - DNA, 7 bp, Unknown
  misc_feature (1)..( 7): Result.005 file - promoters50/1399277
aagattt

SEQ ID NO: 170613 - DNA, 7 bp, Unknown
  misc_feature (1)..( 7): Result.005 file - promoters50/1399277
aagatta

SEQ ID NO: 170614 - DNA, 8 bp, Unknown
  misc_feature (1)..( 8): Result.005 file - promoters50/1399277
atttttta

SEQ ID NO: 170615 - DNA, 8 bp, Unknown
  misc_feature (1)..( 8): Result.005 file - promoters50/1399277
attttttt

SEQ ID NO: 170616 - DNA, 8 bp, Unknown
  misc_feature (1)..( 8): Result.005 file - promoters50/1399277
ctttctta

SEQ ID NO: 170617 - DNA, 9 bp, Unknown
  misc_feature (1)..( 9): Result.005 file - promoters50/1399277
attgttttt

SEQ ID NO: 170618 - DNA, 8 bp, Unknown
  misc_feature (1)..( 8): Result.005 file - promoters50/1399277
ataaccac

SEQ ID NO: 170619 - DNA, 8 bp, Unknown
  misc_feature (1)..( 8): Result.005 file - promoters50/1399277
atacccac

SEQ ID NO: 170620 - DNA, 8 bp, Unknown
  misc_feature (1)..( 8): Result.005 file - promoters50/1399277
cgaacaac

SEQ ID NO: 170621 - DNA, 9 bp, Unknown
  misc_feature (1)..( 9): Result.005 file - promoters50/1399277
aaaacaatt

SEQ ID NO: 170622 - DNA, 9 bp, Unknown
  misc_feature (1)..( 9): Result.005 file - promoters50/1399277
aaaacaaag

SEQ ID NO: 170623 - DNA, 9 bp, Unknown
  misc_feature (1)..( 9): Result.005 file - promoters50/1399277
ttaacgatt

SEQ ID NO: 170624 - DNA, 9 bp, Unknown
  misc_feature (1)..( 9): Result.005 file - promoters50/1399277
aaaaatttt

SEQ ID NO: 170625 - DNA, 9 bp, Unknown
  misc_feature (1)..( 9): Result.005 file - promoters50/1399277
aaaagtttt

SEQ ID NO: 170626 - DNA, 9 bp, Unknown
  misc_feature (1)..( 9): Result.005 file - promoters50/1399277
aaaaatcaa

SEQ ID NO: 170627 - DNA, 9 bp, Unknown
  misc_feature (1)..( 9): Result.005 file - promoters50/1399277
aaaagttca

SEQ ID NO: 170628 - DNA, 8 bp, Unknown
  misc_feature (1)..( 8): Result.005 file - promoters50/1399277
ttataaaa

SEQ ID NO: 170629 - DNA, 8 bp, Unknown
  misc_feature (1)..( 8): Result.005 file - promoters50/1399277
ttacaaaa

SEQ ID NO: 170630 - DNA, 8 bp, Unknown
  misc_feature (1)..( 8): Result.005 file - promoters50/1399277
acacaaaa

SEQ ID NO: 170631 - DNA, 7 bp, Unknown
  misc_feature (1)..( 7): Result.005 file - promoters50/1399277
gataaaa

SEQ ID NO: 170632 - DNA, 7 bp, Unknown
  misc_feature (1)..( 7): Result.005 file - promoters50/1399277
gataaag

SEQ ID NO: 170633 - DNA, 7 bp, Unknown
  misc_feature (1)..( 7): Result.005 file - promoters50/1399277
tataaag

SEQ ID NO: 170634 - DNA, 8 bp, Unknown
  misc_feature (1)..( 8): Result.005 file - promoters50/1399277
aaaccaat

SEQ ID NO: 170635 - DNA, 8 bp, Unknown
  misc_feature (1)..( 8): Result.005 file - promoters50/1399277
ttaccaat

SEQ ID NO: 170636 - DNA, 8 bp, Unknown
  misc_feature (1)..( 8): Result.005 file - promoters50/1399277
aaaacaat

SEQ ID NO: 170637 - DNA, 7 bp, Unknown
  misc_feature (1)..( 7): Result.005 file - promoters50/1399277
tatttaa

SEQ ID NO: 170638 - DNA, 7 bp, Unknown
  misc_feature (1)..( 7): Result.005 file - promoters50/1399277
tatttat

SEQ ID NO: 170639 - DNA, 7 bp, Unknown
  misc_feature (1)..( 7): Result.005 file - promoters50/1399277
aattttt

SEQ ID NO: 170640 - DNA, 9 bp, Unknown
  misc_feature (1)..( 9): Result.005 file - promoters50/1399277
ttttttaaa

SEQ ID NO: 170641 - DNA, 9 bp, Unknown
  misc_feature (1)..( 9): Result.005 file - promoters50/1399277
tttattaaa

SEQ ID NO: 170642 - DNA, 9 bp, Unknown
  misc_feature (1)..( 9): Result.005 file - promoters50/1399277
actatgaaa

SEQ ID NO: 170643 - DNA, 9 bp, Unknown
  misc_feature (1)..( 9): Result.005 file - promoters50/1399325
aaataaatc

SEQ ID NO: 170644 - DNA, 9 bp, Unknown
  misc_feature (1)..( 9): Result.005 file - promoters50/1399325
aaataaact

SEQ ID NO: 170645 - DNA, 10 bp, Unknown
  misc_feature (1)..( 10): Result.005 file - promoters50/1399325
aaagtaattt

SEQ ID NO: 170646 - DNA, 10 bp, Unknown
  misc_feature (1)..( 10): Result.005 file - promoters50/1399325
aaattaaatc

SEQ ID NO: 170647 - DNA, 10 bp, Unknown
  misc_feature (1)..( 10): Result.005 file - promoters50/1399325
aaaatattcg

SEQ ID NO: 170648 - DNA, 10 bp, Unknown
  misc_feature (1)..( 10): Result.005 file - promoters50/1399325
acagtagttt

SEQ ID NO: 170649 - DNA, 11 bp, Unknown
  misc_feature (1)..( 11): Result.005 file - promoters50/1399325
atcttaaattt

SEQ ID NO: 170650 - DNA, 11 bp, Unknown
  misc_feature (1)..( 11): Result.005 file - promoters50/1399325
cttttaatttt

SEQ ID NO: 170651 - DNA, 11 bp, Unknown
  misc_feature (1)..( 11): Result.005 file - promoters50/1399325
tatcaaaatta

SEQ ID NO: 170652 - DNA, 11 bp, Unknown
  misc_feature (1)..( 11): Result.005 file - promoters50/1399325
atctgaaatca

SEQ ID NO: 170653 - DNA, 11 bp, Unknown
  misc_feature (1)..( 11): Result.005 file - promoters50/1399325
aaaagaaatta

SEQ ID NO: 170654 - DNA, 11 bp, Unknown
  misc_feature (1)..( 11): Result.005 file - promoters50/1399325
tctagaaattc

SEQ ID NO: 170655 - DNA, 10 bp, Unknown
  misc_feature (1)..( 10): Result.005 file - promoters50/1399345
gtttttgtaa

SEQ ID NO: 170656 - DNA, 10 bp, Unknown
  misc_feature (1)..( 10): Result.005 file - promoters50/1399345
agttttgtaa

SEQ ID NO: 170657 - DNA, 10 bp, Unknown
  misc_feature (1)..( 10): Result.005 file - promoters50/1399345
atttttggtt

SEQ ID NO: 170658 - DNA, 10 bp, Unknown
  misc_feature (1)..( 10): Result.005 file - promoters50/1399345
agtgttgaga

SEQ ID NO: 170659 - DNA, 10 bp, Unknown
  misc_feature (1)..( 10): Result.005 file - promoters50/1399345
atttttactt

SEQ ID NO: 170660 - DNA, 10 bp, Unknown
  misc_feature (1)..( 10): Result.005 file - promoters50/1399345
gtttttgatg

SEQ ID NO: 170661 - DNA, 12 bp, Unknown
  misc_feature (1)..( 12): Result.005 file - promoters50/1399345
aataataactct

SEQ ID NO: 170662 - DNA, 12 bp, Unknown
  misc_feature (1)..( 12): Result.005 file - promoters50/1399345
attaataaattt

SEQ ID NO: 170663 - DNA, 12 bp, Unknown
  misc_feature (1)..( 12): Result.005 file - promoters50/1399345
aatattaatttg

SEQ ID NO: 170664 - DNA, 12 bp, Unknown
  misc_feature (1)..( 12): Result.005 file - promoters50/1399345
tatactaaagtt

SEQ ID NO: 170665 - DNA, 13 bp, Unknown
  misc_feature (1)..( 13): Result.005 file - promoters50/1399345
aaaacatataaaa

SEQ ID NO: 170666 - DNA, 13 bp, Unknown
  misc_feature (1)..( 13): Result.005 file - promoters50/1399345
ttttaacaaaaca

SEQ ID NO: 170667 - DNA, 16 bp, Unknown
  misc_feature (1)..( 16): Result.005 file - promoters50/1399345
aacttaattcttttta

SEQ ID NO: 170668 - DNA, 16 bp, Unknown
  misc_feature (1)..( 16): Result.005 file - promoters50/1399345
aacttaattttttttt

SEQ ID NO: 170669 - DNA, 16 bp, Unknown
  misc_feature (1)..( 16): Result.005 file - promoters50/1399345
cacggtattctttagt

SEQ ID NO: 170670 - DNA, 16 bp, Unknown
  misc_feature (1)..( 16): Result.005 file - promoters50/1399345
attgtaatccttttgt

SEQ ID NO: 170671 - DNA, 16 bp, Unknown
  misc_feature (1)..( 16): Result.005 file - promoters50/1399345
ttataataggttttta

SEQ ID NO: 170672 - DNA, 16 bp, Unknown
  misc_feature (1)..( 16): Result.005 file - promoters50/1399345
ttctctattttattat

SEQ ID NO: 170673 - DNA, 11 bp, Unknown
  misc_feature (1)..( 11): Result.005 file - promoters50/1399345
gttttgtatta

SEQ ID NO: 170674 - DNA, 11 bp, Unknown
  misc_feature (1)..( 11): Result.005 file - promoters50/1399345
tttttgtttaa

SEQ ID NO: 170675 - DNA, 11 bp, Unknown
  misc_feature (1)..( 11): Result.005 file - promoters50/1399345
ctttagtaaaa

SEQ ID NO: 170676 - DNA, 11 bp, Unknown
  misc_feature (1)..( 11): Result.005 file - promoters50/1399345
tttttatttct

SEQ ID NO: 170677 - DNA, 11 bp, Unknown
  misc_feature (1)..( 11): Result.005 file - promoters50/1399345
atatagcaaaa

SEQ ID NO: 170678 - DNA, 11 bp, Unknown
  misc_feature (1)..( 11): Result.005 file - promoters50/1399345
cttttgttgtt

SEQ ID NO: 170679 - DNA, 10 bp, Unknown
  misc_feature (1)..( 10): Result.005 file - promoters50/1399409
atatatttaa

SEQ ID NO: 170680 - DNA, 10 bp, Unknown
  misc_feature (1)..( 10): Result.005 file - promoters50/1399409
acataattat

SEQ ID NO: 170681 - DNA, 10 bp, Unknown
  misc_feature (1)..( 10): Result.005 file - promoters50/1399409
acaaaattat

SEQ ID NO: 170682 - DNA, 6 bp, Unknown
  misc_feature (1)..( 6): Result.005 file - promoters50/1399413
tctttg

SEQ ID NO: 170683 - DNA, 6 bp, Unknown
  misc_feature (1)..( 6): Result.005 file - promoters50/1399413
tctttg

SEQ ID NO: 170684 - DNA, 6 bp, Unknown
  misc_feature (1)..( 6): Result.005 file - promoters50/1399413
tctttg

SEQ ID NO: 170685 - DNA, 9 bp, Unknown
  misc_feature (1)..( 9): Result.005 file - promoters50/1399413
aaacttaac

SEQ ID NO: 170686 - DNA, 9 bp, Unknown
  misc_feature (1)..( 9): Result.005 file - promoters50/1399413
aaaattaaa

SEQ ID NO: 170687 - DNA, 9 bp, Unknown
  misc_feature (1)..( 9): Result.005 file - promoters50/1399413
tcaattaaa

SEQ ID NO: 170688 - DNA, 9 bp, Unknown
  misc_feature (1)..( 9): Result.005 file - promoters50/1399413
tctatataa

SEQ ID NO: 170689 - DNA, 9 bp, Unknown
  misc_feature (1)..( 9): Result.005 file - promoters50/1399413
tctatataa

SEQ ID NO: 170690 - DNA, 9 bp, Unknown
  misc_feature (1)..( 9): Result.005 file - promoters50/1399413
agtatataa

SEQ ID NO: 170691 - DNA, 7 bp, Unknown
  misc_feature (1)..( 7): Result.005 file - promoters50/1399413
attaaaa

SEQ ID NO: 170692 - DNA, 7 bp, Unknown
  misc_feature (1)..( 7): Result.005 file - promoters50/1399413
attaaaa

SEQ ID NO: 170693 - DNA, 8 bp, Unknown
  misc_feature (1)..( 8): Result.005 file - promoters50/1399413
cttataaa

SEQ ID NO: 170694 - DNA, 8 bp, Unknown
  misc_feature (1)..( 8): Result.005 file - promoters50/1399413
gaaaccta

SEQ ID NO: 170695 - DNA, 8 bp, Unknown
  misc_feature (1)..( 8): Result.005 file - promoters50/1399413
aaaatcta

SEQ ID NO: 170696 - DNA, 9 bp, Unknown
  misc_feature (1)..( 9): Result.005 file - promoters50/1399413
aaatatctt

SEQ ID NO: 170697 - DNA, 10 bp, Unknown
  misc_feature (1)..( 10): Result.005 file - promoters50/1399413
atcatttaaa

SEQ ID NO: 170698 - DNA, 10 bp, Unknown
  misc_feature (1)..( 10): Result.005 file - promoters50/1399413
atcaattaaa

SEQ ID NO: 170699 - DNA, 10 bp, Unknown
  misc_feature (1)..( 10): Result.005 file - promoters50/1399413
caaaattaaa

SEQ ID NO: 170700 - DNA, 12 bp, Unknown
  misc_feature (1)..( 12): Result.005 file - promoters50/1399417
taaaggcccaat

SEQ ID NO: 170701 - DNA, 12 bp, Unknown
  misc_feature (1)..( 12): Result.005 file - promoters50/1399417
tttaggcccatt

SEQ ID NO: 170702 - DNA, 12 bp, Unknown
  misc_feature (1)..( 12): Result.005 file - promoters50/1399417
taaaggcccaat

SEQ ID NO: 170703 - DNA, 12 bp, Unknown
  misc_feature (1)..( 12): Result.005 file - promoters50/1399417
ccgaggcccaat

SEQ ID NO: 170704 - DNA, 10 bp, Unknown
  misc_feature (1)..( 10): Result.005 file - promoters50/1399469
tcttccaaat

SEQ ID NO: 170705 - DNA, 10 bp, Unknown
  misc_feature (1)..( 10): Result.005 file - promoters50/1399469
tcttgcaagg

SEQ ID NO: 170706 - DNA, 10 bp, Unknown
  misc_feature (1)..( 10): Result.005 file - promoters50/1399469
tgttggaagg

SEQ ID NO: 170707 - DNA, 7 bp, Unknown
  misc_feature (1)..( 7): Result.005 file - promoters50/1399469
aaacttt

SEQ ID NO: 170708 - DNA, 7 bp, Unknown
  misc_feature (1)..( 7): Result.005 file - promoters50/1399469
aaaattt

SEQ ID NO: 170709 - DNA, 7 bp, Unknown
  misc_feature (1)..( 7): Result.005 file - promoters50/1399469
aaaattc

SEQ ID NO: 170710 - DNA, 11 bp, Unknown
  misc_feature (1)..( 11): Result.005 file - promoters50/1399541
tcctttaaaca

SEQ ID NO: 170711 - DNA, 11 bp, Unknown
  misc_feature (1)..( 11): Result.005 file - promoters50/1399541
tcctataagtc

SEQ ID NO: 170712 - DNA, 11 bp, Unknown
  misc_feature (1)..( 11): Result.005 file - promoters50/1399541
cactttaaaat

SEQ ID NO: 170713 - DNA, 11 bp, Unknown
  misc_feature (1)..( 11): Result.005 file - promoters50/1399541
ttttttaaaag

SEQ ID NO: 170714 - DNA, 12 bp, Unknown
  misc_feature (1)..( 12): Result.005 file - promoters50/1399541
agttttagaatc

SEQ ID NO: 170715 - DNA, 12 bp, Unknown
  misc_feature (1)..( 12): Result.005 file - promoters50/1399541
gtatttaaaata

SEQ ID NO: 170716 - DNA, 12 bp, Unknown
  misc_feature (1)..( 12): Result.005 file - promoters50/1399541
ttttgtactaat

SEQ ID NO: 170717 - DNA, 14 bp, Unknown
  misc_feature (1)..( 14): Result.005 file - promoters50/1399541
taaacattaaattg

SEQ ID NO: 170718 - DNA, 14 bp, Unknown
  misc_feature (1)..( 14): Result.005 file - promoters50/1399541
taaaaatttacact

SEQ ID NO: 170719 - DNA, 14 bp, Unknown
  misc_feature (1)..( 14): Result.005 file - promoters50/1399541
aaaagattccattg

SEQ ID NO: 170720 - DNA, 14 bp, Unknown
  misc_feature (1)..( 14): Result.005 file - promoters50/1399541
aaaagattttataa

SEQ ID NO: 170721 - DNA, 14 bp, Unknown
  misc_feature (1)..( 14): Result.005 file - promoters50/1399541
ccaagcttctattg

SEQ ID NO: 170722 - DNA, 14 bp, Unknown
  misc_feature (1)..( 14): Result.005 file - promoters50/1399541
tttagaatcctaat

SEQ ID NO: 170723 - DNA, 8 bp, Unknown
  misc_feature (1)..( 8): Result.005 file - promoters50/1399541
tttcaaac

SEQ ID NO: 170724 - DNA, 8 bp, Unknown
  misc_feature (1)..( 8): Result.005 file - promoters50/1399541
tttaaaat

SEQ ID NO: 170725 - DNA, 8 bp, Unknown
  misc_feature (1)..( 8): Result.005 file - promoters50/1399541
gttcaaaa

SEQ ID NO: 170726 - DNA, 8 bp, Unknown
  misc_feature (1)..( 8): Result.005 file - promoters50/1399541
tttagaat

SEQ ID NO: 170727 - DNA, 8 bp, Unknown
  misc_feature (1)..( 8): Result.005 file - promoters50/1399541
tatctaat

SEQ ID NO: 170728 - DNA, 8 bp, Unknown
  misc_feature (1)..( 8): Result.005 file - promoters50/1399541
attacaat

SEQ ID NO: 170729 - DNA, 13 bp, Unknown
  misc_feature (1)..( 13): Result.005 file - promoters50/1399541
aagcttctattga

SEQ ID NO: 170730 - DNA, 13 bp, Unknown
  misc_feature (1)..( 13): Result.005 file - promoters50/1399541
tctaatctattat

SEQ ID NO: 170731 - DNA, 13 bp, Unknown
  misc_feature (1)..( 13): Result.005 file - promoters50/1399541
aagattccattgg

SEQ ID NO: 170732 - DNA, 13 bp, Unknown
  misc_feature (1)..( 13): Result.005 file - promoters50/1399541
tagaatcctaatt

SEQ ID NO: 170733 - DNA, 13 bp, Unknown
  misc_feature (1)..( 13): Result.005 file - promoters50/1399541
aagtatttaaaat

SEQ ID NO: 170734 - DNA, 13 bp, Unknown
  misc_feature (1)..( 13): Result.005 file - promoters50/1399541
taaattacaatta

SEQ ID NO: 170735 - DNA, 14 bp, Unknown
  misc_feature (1)..( 14): Result.005 file - promoters50/1399541
taattttcataact

SEQ ID NO: 170736 - DNA, 14 bp, Unknown
  misc_feature (1)..( 14): Result.005 file - promoters50/1399541
aatctttaataatt

SEQ ID NO: 170737 - DNA, 15 bp, Unknown
  misc_feature (1)..( 15): Result.005 file - promoters50/1399541
ataatttacataaaa

SEQ ID NO: 170738 - DNA, 15 bp, Unknown
  misc_feature (1)..( 15): Result.005 file - promoters50/1399541
tattatctaatcctt

SEQ ID NO: 170739 - DNA, 15 bp, Unknown
  misc_feature (1)..( 15): Result.005 file - promoters50/1399541
tgtcatcaaatgtag

SEQ ID NO: 170740 - DNA, 15 bp, Unknown
  misc_feature (1)..( 15): Result.005 file - promoters50/1399541
taaattacaattatt

SEQ ID NO: 170741 - DNA, 11 bp, Unknown
  misc_feature (1)..( 11): Result.005 file - promoters50/1399638
tcctaacttaa

SEQ ID NO: 170742 - DNA, 11 bp, Unknown
  misc_feature (1)..( 11): Result.005 file - promoters50/1399638
tccaaacttta

SEQ ID NO: 170743 - DNA, 11 bp, Unknown
  misc_feature (1)..( 11): Result.005 file - promoters50/1399638
aaagaacataa

SEQ ID NO: 170744 - DNA, 10 bp, Unknown
  misc_feature (1)..( 10): Result.005 file - promoters50/1399638
taaccactaa

SEQ ID NO: 170745 - DNA, 10 bp, Unknown
  misc_feature (1)..( 10): Result.005 file - promoters50/1399638
taaacaccat

SEQ ID NO: 170746 - DNA, 10 bp, Unknown
  misc_feature (1)..( 10): Result.005 file - promoters50/1399638
aaaacaccat

SEQ ID NO: 170747 - DNA, 11 bp, Unknown
  misc_feature (1)..( 11): Result.005 file - promoters50/1399658
aaaaaaatctt

SEQ ID NO: 170748 - DNA, 11 bp, Unknown
  misc_feature (1)..( 11): Result.005 file - promoters50/1399658
agaaaaatgat

SEQ ID NO: 170749 - DNA, 11 bp, Unknown
  misc_feature (1)..( 11): Result.005 file - promoters50/1399658
caaaaaataat

SEQ ID NO: 170750 - DNA, 11 bp, Unknown
  misc_feature (1)..( 11): Result.005 file - promoters50/1399658
aaaaaaatcta

SEQ ID NO: 170751 - DNA, 11 bp, Unknown
  misc_feature (1)..( 11): Result.005 file - promoters50/1399658
tgaataattca

SEQ ID NO: 170752 - DNA, 11 bp, Unknown
  misc_feature (1)..( 11): Result.005 file - promoters50/1399658
attaaaatgtt

SEQ ID NO: 170753 - DNA, 11 bp, Unknown
  misc_feature (1)..( 11): Result.005 file - promoters50/1399658
tttaaaatttt

SEQ ID NO: 170754 - DNA, 11 bp, Unknown
  misc_feature (1)..( 11): Result.005 file - promoters50/1399658
tagaaactttt

SEQ ID NO: 170755 - DNA, 9 bp, Unknown
  misc_feature (1)..( 9): Result.005 file - promoters50/1399658
ggtcaaatt

SEQ ID NO: 170756 - DNA, 9 bp, Unknown
  misc_feature (1)..( 9): Result.005 file - promoters50/1399658
attcaaata

SEQ ID NO: 170757 - DNA, 9 bp, Unknown
  misc_feature (1)..( 9): Result.005 file - promoters50/1399658
taacaaatt

SEQ ID NO: 170758 - DNA, 9 bp, Unknown
  misc_feature (1)..( 9): Result.005 file - promoters50/1399658
attctaatt

SEQ ID NO: 170759 - DNA, 9 bp, Unknown
  misc_feature (1)..( 9): Result.005 file - promoters50/1399658
attccaatc

SEQ ID NO: 170760 - DNA, 9 bp, Unknown
  misc_feature (1)..( 9): Result.005 file - promoters50/1399658
catccaatc

SEQ ID NO: 170761 - DNA, 12 bp, Unknown
  misc_feature (1)..( 12): Result.005 file - promoters50/1399658
aaaaaagaattt

SEQ ID NO: 170762 - DNA, 12 bp, Unknown
  misc_feature (1)..( 12): Result.005 file - promoters50/1399658
caaacagatgtt

SEQ ID NO: 170763 - DNA, 12 bp, Unknown
  misc_feature (1)..( 12): Result.005 file - promoters50/1399658
gctaaagaaaat

SEQ ID NO: 170764 - DNA, 12 bp, Unknown
  misc_feature (1)..( 12): Result.005 file - promoters50/1399658
gaaaaaaaaaat

SEQ ID NO: 170765 - DNA, 12 bp, Unknown
  misc_feature (1)..( 12): Result.005 file - promoters50/1399658
cttcaagaaatg

SEQ ID NO: 170766 - DNA, 12 bp, Unknown
  misc_feature (1)..( 12): Result.005 file - promoters50/1399658
caaaaaaattca

SEQ ID NO: 170767 - DNA, 12 bp, Unknown
  misc_feature (1)..( 12): Result.005 file - promoters50/1399726
ccaattcattta

SEQ ID NO: 170768 - DNA, 12 bp, Unknown
  misc_feature (1)..( 12): Result.005 file - promoters50/1399726
ccaattaatttt

SEQ ID NO: 170769 - DNA, 12 bp, Unknown
  misc_feature (1)..( 12): Result.005 file - promoters50/1399726
ctaattcacaaa

SEQ ID NO: 170770 - DNA, 12 bp, Unknown
  misc_feature (1)..( 12): Result.005 file - promoters50/1399726
aaaattcctttc

SEQ ID NO: 170771 - DNA, 12 bp, Unknown
  misc_feature (1)..( 12): Result.005 file - promoters50/1399726
gtaataaatgag

SEQ ID NO: 170772 - DNA, 12 bp, Unknown
  misc_feature (1)..( 12): Result.005 file - promoters50/1399726
aatcataatttt

SEQ ID NO: 170773 - DNA, 19 bp, Unknown
  misc_feature (1)..( 19): Result.005 file - promoters50/1399726
aagatatttaaaacaaatt

SEQ ID NO: 170774 - DNA, 19 bp, Unknown
  misc_feature (1)..( 19): Result.005 file - promoters50/1399726
ttttattttaaaattaaag

SEQ ID NO: 170775 - DNA, 20 bp, Unknown
  misc_feature (1)..( 20): Result.005 file - promoters50/1399726
ttaactagttaaaaatgcat

SEQ ID NO: 170776 - DNA, 20 bp, Unknown
  misc_feature (1)..( 20): Result.005 file - promoters50/1399726
gtttgattctaagattaagt

SEQ ID NO: 170777 - DNA, 20 bp, Unknown
  misc_feature (1)..( 20): Result.005 file - promoters50/1399726
tcgaagtattacaattgctt

SEQ ID NO: 170778 - DNA, 20 bp, Unknown
  misc_feature (1)..( 20): Result.005 file - promoters50/1399726
gaagttgaatcgaattgagt

SEQ ID NO: 170779 - DNA, 20 bp, Unknown
  misc_feature (1)..( 20): Result.005 file - promoters50/1399726
atgagaaatcataatagaga

SEQ ID NO: 170780 - DNA, 12 bp, Unknown
  misc_feature (1)..( 12): Result.005 file - promoters50/1399726
aaaatgaaaaac

SEQ ID NO: 170781 - DNA, 12 bp, Unknown
  misc_feature (1)..( 12): Result.005 file - promoters50/1399726
aaaaagaaaacc

SEQ ID NO: 170782 - DNA, 12 bp, Unknown
  misc_feature (1)..( 12): Result.005 file - promoters50/1399726
ataataaaaaaa

SEQ ID NO: 170783 - DNA, 12 bp, Unknown
  misc_feature (1)..( 12): Result.005 file - promoters50/1399726
aaaatgggcact

SEQ ID NO: 170784 - DNA, 12 bp, Unknown
  misc_feature (1)..( 12): Result.005 file - promoters50/1399726
tggatgataaac

SEQ ID NO: 170785 - DNA, 12 bp, Unknown
  misc_feature (1)..( 12): Result.005 file - promoters50/1399726
caaaaaatattc

SEQ ID NO: 170786 - DNA, 12 bp, Unknown
  misc_feature (1)..( 12): Result.005 file - promoters50/1399726
tttataaacaca

SEQ ID NO: 170787 - DNA, 9 bp, Unknown
  misc_feature (1)..( 9): Result.005 file - promoters50/1399726
ataaagtac

SEQ ID NO: 170788 - DNA, 9 bp, Unknown
  misc_feature (1)..( 9): Result.005 file - promoters50/1399726
acaaaatac

SEQ ID NO: 170789 - DNA, 9 bp, Unknown
  misc_feature (1)..( 9): Result.005 file - promoters50/1399726
ataaattac

SEQ ID NO: 170790 - DNA, 9 bp, Unknown
  misc_feature (1)..( 9): Result.005 file - promoters50/1399726
tcaaaattt

SEQ ID NO: 170791 - DNA, 9 bp, Unknown
  misc_feature (1)..( 9): Result.005 file - promoters50/1399726
ataaatttt

SEQ ID NO: 170792 - DNA, 9 bp, Unknown
  misc_feature (1)..( 9): Result.005 file - promoters50/1399726
agaaagaca

SEQ ID NO: 170793 - DNA, 9 bp, Unknown
  misc_feature (1)..( 9): Result.005 file - promoters50/1399726
atagattag

SEQ ID NO: 170794 - DNA, 14 bp, Unknown
  misc_feature (1)..( 14): Result.005 file - promoters50/1399726
atgaaaaacgaaaa

SEQ ID NO: 170795 - DNA, 14 bp, Unknown
  misc_feature (1)..( 14): Result.005 file - promoters50/1399726
aaaaaaaaagaaga

SEQ ID NO: 170796 - DNA, 14 bp, Unknown
  misc_feature (1)..( 14): Result.005 file - promoters50/1399726
atgataaacttaaa

SEQ ID NO: 170797 - DNA, 14 bp, Unknown
  misc_feature (1)..( 14): Result.005 file - promoters50/1399726
ggtaaaaaagaaaa

SEQ ID NO: 170798 - DNA, 14 bp, Unknown
  misc_feature (1)..( 14): Result.005 file - promoters50/1399726
gtcaaaaaatattc

SEQ ID NO: 170799 - DNA, 14 bp, Unknown
  misc_feature (1)..( 14): Result.005 file - promoters50/1399726
tttataaacacatg

SEQ ID NO: 170800 - DNA, 11 bp, Unknown
  misc_feature (1)..( 11): Result.005 file - promoters50/1399726
ataaatatcta

SEQ ID NO: 170801 - DNA, 11 bp, Unknown
  misc_feature (1)..( 11): Result.005 file - promoters50/1399726
atatatatata

SEQ ID NO: 170802 - DNA, 11 bp, Unknown
  misc_feature (1)..( 11): Result.005 file - promoters50/1399726
tcgaatctctc

SEQ ID NO: 170803 - DNA, 11 bp, Unknown
  misc_feature (1)..( 11): Result.005 file - promoters50/1399726
tgaaatatttt

SEQ ID NO: 170804 - DNA, 11 bp, Unknown
  misc_feature (1)..( 11): Result.005 file - promoters50/1399726
gtaaattaatt

SEQ ID NO: 170805 - DNA, 11 bp, Unknown
  misc_feature (1)..( 11): Result.005 file - promoters50/1399726
acaaattcatt

SEQ ID NO: 170806 - DNA, 11 bp, Unknown
  misc_feature (1)..( 11): Result.005 file - promoters50/1399726
aatgattaata

SEQ ID NO: 170807 - DNA, 14 bp, Unknown
  misc_feature (1)..( 14): Result.005 file - promoters50/1399726
gagcttgtataagt

SEQ ID NO: 170808 - DNA, 14 bp, Unknown
  misc_feature (1)..( 14): Result.005 file - promoters50/1399726
taccttttatttat

SEQ ID NO: 170809 - DNA, 14 bp, Unknown
  misc_feature (1)..( 14): Result.005 file - promoters50/1399726
taatgtttaaagaa

SEQ ID NO: 170810 - DNA, 14 bp, Unknown
  misc_feature (1)..( 14): Result.005 file - promoters50/1399726
gacagttaaaattc

SEQ ID NO: 170811 - DNA, 14 bp, Unknown
  misc_feature (1)..( 14): Result.005 file - promoters50/1399726
tatacagtaacatt

SEQ ID NO: 170812 - DNA, 14 bp, Unknown
  misc_feature (1)..( 14): Result.005 file - promoters50/1399726
tttcttttgttttc

SEQ ID NO: 170813 - DNA, 12 bp, Unknown
  misc_feature (1)..( 12): Result.005 file - promoters50/1399726
tgatacttggta

SEQ ID NO: 170814 - DNA, 12 bp, Unknown
  misc_feature (1)..( 12): Result.005 file - promoters50/1399726
gttaactttgta

SEQ ID NO: 170815 - DNA, 12 bp, Unknown
  misc_feature (1)..( 12): Result.005 file - promoters50/1399726
aattacttgcac

SEQ ID NO: 170816 - DNA, 12 bp, Unknown
  misc_feature (1)..( 12): Result.005 file - promoters50/1399726
aagaactttaat

SEQ ID NO: 170817 - DNA, 12 bp, Unknown
  misc_feature (1)..( 12): Result.005 file - promoters50/1399726
ttgttcttcgat

SEQ ID NO: 170818 - DNA, 12 bp, Unknown
  misc_feature (1)..( 12): Result.005 file - promoters50/1399726
atatggttgttc

SEQ ID NO: 170819 - DNA, 15 bp, Unknown
  misc_feature (1)..( 15): Result.005 file - promoters50/1399726
atattaataattaaa

SEQ ID NO: 170820 - DNA, 15 bp, Unknown
  misc_feature (1)..( 15): Result.005 file - promoters50/1399726
tccataataatttag

SEQ ID NO: 170821 - DNA, 15 bp, Unknown
  misc_feature (1)..( 15): Result.005 file - promoters50/1399726
ttattattaactaaa

SEQ ID NO: 170822 - DNA, 15 bp, Unknown
  misc_feature (1)..( 15): Result.005 file - promoters50/1399726
aaagtaataataaca

SEQ ID NO: 170823 - DNA, 16 bp, Unknown
  misc_feature (1)..( 16): Result.005 file - promoters50/1399726
caatcagtaagttacc

SEQ ID NO: 170824 - DNA, 16 bp, Unknown
  misc_feature (1)..( 16): Result.005 file - promoters50/1399726
ttactattaatcatgg

SEQ ID NO: 170825 - DNA, 8 bp, Unknown
  misc_feature (1)..( 8): Result.005 file - promoters50/1399760
attttact

SEQ ID NO: 170826 - DNA, 8 bp, Unknown
  misc_feature (1)..( 8): Result.005 file - promoters50/1399760
atttaact

SEQ ID NO: 170827 - DNA, 8 bp, Unknown
  misc_feature (1)..( 8): Result.005 file - promoters50/1399760
attttaaa

SEQ ID NO: 170828 - DNA, 8 bp, Unknown
  misc_feature (1)..( 8): Result.005 file - promoters50/1403185
catcttta

SEQ ID NO: 170829 - DNA, 8 bp, Unknown
  misc_feature (1)..( 8): Result.005 file - promoters50/1403185
catctttt

SEQ ID NO: 170830 - DNA, 9 bp, Unknown
  misc_feature (1)..( 9): Result.005 file - promoters50/1403185
gttctgttc

SEQ ID NO: 170831 - DNA, 7 bp, Unknown
  misc_feature (1)..( 7): Result.005 file - promoters50/1403210
ttgaaat

SEQ ID NO: 170832 - DNA, 7 bp, Unknown
  misc_feature (1)..( 7): Result.005 file - promoters50/1403210
ttgaaaa

SEQ ID NO: 170833 - DNA, 7 bp, Unknown
  misc_feature (1)..( 7): Result.005 file - promoters50/1403210
tttaaaa

SEQ ID NO: 170834 - DNA, 10 bp, Unknown
  misc_feature (1)..( 10): Result.005 file - promoters50/1411578
gtcaaattta

SEQ ID NO: 170835 - DNA, 10 bp, Unknown
  misc_feature (1)..( 10): Result.005 file - promoters50/1411578
aaaaaactta

SEQ ID NO: 170836 - DNA, 10 bp, Unknown
  misc_feature (1)..( 10): Result.005 file - promoters50/1411578
gtctaattcg

SEQ ID NO: 170837 - DNA, 10 bp, Unknown
  misc_feature (1)..( 10): Result.005 file - promoters50/1411578
tcgaaactta

SEQ ID NO: 170838 - DNA, 9 bp, Unknown
  misc_feature (1)..( 9): Result.005 file - promoters50/1411578
agtagttca

SEQ ID NO: 170839 - DNA, 9 bp, Unknown
  misc_feature (1)..( 9): Result.005 file - promoters50/1411578
aaaagttca

SEQ ID NO: 170840 - DNA, 9 bp, Unknown
  misc_feature (1)..( 9): Result.005 file - promoters50/1411578
gttagatca

SEQ ID NO: 170841 - DNA, 9 bp, Unknown
  misc_feature (1)..( 9): Result.005 file - promoters50/1411578
gttagatcg

SEQ ID NO: 170842 - DNA, 9 bp, Unknown
  misc_feature (1)..( 9): Result.005 file - promoters50/1411578
ggtagatcc

SEQ ID NO: 170843 - DNA, 7 bp, Unknown
  misc_feature (1)..( 7): Result.005 file - promoters50/1411598
acaaaaa

SEQ ID NO: 170844 - DNA, 7 bp, Unknown
  misc_feature (1)..( 7): Result.005 file - promoters50/1411598
acataaa

SEQ ID NO: 170845 - DNA, 7 bp, Unknown
  misc_feature (1)..( 7): Result.005 file - promoters50/1411598
ccataaa

SEQ ID NO: 170846 - DNA, 11 bp, Unknown
  misc_feature (1)..( 11): Result.005 file - promoters50/1411616
tattgtttttc

SEQ ID NO: 170847 - DNA, 11 bp, Unknown
  misc_feature (1)..( 11): Result.005 file - promoters50/1411616
cgctgttttcc

SEQ ID NO: 170848 - DNA, 11 bp, Unknown
  misc_feature (1)..( 11): Result.005 file - promoters50/1411616
tattatttgtg

SEQ ID NO: 170849 - DNA, 11 bp, Unknown
  misc_feature (1)..( 11): Result.005 file - promoters50/1411616
catcgtttttg

SEQ ID NO: 170850 - DNA, 11 bp, Unknown
  misc_feature (1)..( 11): Result.005 file - promoters50/1411616
aattattttat

SEQ ID NO: 170851 - DNA, 11 bp, Unknown
  misc_feature (1)..( 11): Result.005 file - promoters50/1411616
tgatatttttt

SEQ ID NO: 170852 - DNA, 8 bp, Unknown
  misc_feature (1)..( 8): Result.005 file - promoters50/1411628
ccttccca

SEQ ID NO: 170853 - DNA, 8 bp, Unknown
  misc_feature (1)..( 8): Result.005 file - promoters50/1411628
ccttcctt

SEQ ID NO: 170854 - DNA, 8 bp, Unknown
  misc_feature (1)..( 8): Result.005 file - promoters50/1411628
ccttcctt

SEQ ID NO: 170855 - DNA, 8 bp, Unknown
  misc_feature (1)..( 8): Result.005 file - promoters50/1411628
ctttcttt

SEQ ID NO: 170856 - DNA, 11 bp, Unknown
  misc_feature (1)..( 11): Result.005 file - promoters50/1411628
ttaaatttgaa

SEQ ID NO: 170857 - DNA, 11 bp, Unknown
  misc_feature (1)..( 11): Result.005 file - promoters50/1411628
tgaaaattgtt

SEQ ID NO: 170858 - DNA, 11 bp, Unknown
  misc_feature (1)..( 11): Result.005 file - promoters50/1411628
ttatattttga

SEQ ID NO: 170859 - DNA, 11 bp, Unknown
  misc_feature (1)..( 11): Result.005 file - promoters50/1411628
aaacaattgtt

SEQ ID NO: 170860 - DNA, 9 bp, Unknown
  misc_feature (1)..( 9): Result.005 file - promoters50/1411628
ggatacatg

SEQ ID NO: 170861 - DNA, 9 bp, Unknown
  misc_feature (1)..( 9): Result.005 file - promoters50/1411628
caataaatg

SEQ ID NO: 170862 - DNA, 9 bp, Unknown
  misc_feature (1)..( 9): Result.005 file - promoters50/1411628
caacaaaca

SEQ ID NO: 170863 - DNA, 9 bp, Unknown
  misc_feature (1)..( 9): Result.005 file - promoters50/1411628
caaaaaact

SEQ ID NO: 170864 - DNA, 10 bp, Unknown
  misc_feature (1)..( 10): Result.005 file - promoters50/1411628
tgtatgtata

SEQ ID NO: 170865 - DNA, 10 bp, Unknown
  misc_feature (1)..( 10): Result.005 file - promoters50/1411628
tgtatttata

SEQ ID NO: 170866 - DNA, 10 bp, Unknown
  misc_feature (1)..( 10): Result.005 file - promoters50/1411628
attatttagc

SEQ ID NO: 170867 - DNA, 10 bp, Unknown
  misc_feature (1)..( 10): Result.005 file - promoters50/1411628
cgaatttttt

SEQ ID NO: 170868 - DNA, 9 bp, Unknown
  misc_feature (1)..( 9): Result.005 file - promoters50/1411703
tatacaaac

SEQ ID NO: 170869 - DNA, 9 bp, Unknown
  misc_feature (1)..( 9): Result.005 file - promoters50/1411703
aataaaaaa

SEQ ID NO: 170870 - DNA, 9 bp, Unknown
  misc_feature (1)..( 9): Result.005 file - promoters50/1411703
tataaaatg

SEQ ID NO: 170871 - DNA, 9 bp, Unknown
  misc_feature (1)..( 9): Result.005 file - promoters50/1411703
actaaaaat

SEQ ID NO: 170872 - DNA, 9 bp, Unknown
  misc_feature (1)..( 9): Result.005 file - promoters50/1411703
tattaaagt

SEQ ID NO: 170873 - DNA, 9 bp, Unknown
  misc_feature (1)..( 9): Result.005 file - promoters50/1411703
tattaaagt

SEQ ID NO: 170874 - DNA, 9 bp, Unknown
  misc_feature (1)..( 9): Result.005 file - promoters50/1411703
tgtaacatg

SEQ ID NO: 170875 - DNA, 9 bp, Unknown
  misc_feature (1)..( 9): Result.005 file - promoters50/1411722
aaaatataa

SEQ ID NO: 170876 - DNA, 9 bp, Unknown
  misc_feature (1)..( 9): Result.005 file - promoters50/1411722
ccaatttaa

SEQ ID NO: 170877 - DNA, 10 bp, Unknown
  misc_feature (1)..( 10): Result.005 file - promoters50/1411722
aaaactatgg

SEQ ID NO: 170878 - DNA, 10 bp, Unknown
  misc_feature (1)..( 10): Result.005 file - promoters50/1411722
tcaacaatga

SEQ ID NO: 170879 - DNA, 7 bp, Unknown
  misc_feature (1)..( 7): Result.005 file - promoters50/1411730
caaatca

SEQ ID NO: 170880 - DNA, 7 bp, Unknown
  misc_feature (1)..( 7): Result.005 file - promoters50/1411730
caaatct

SEQ ID NO: 170881 - DNA, 7 bp, Unknown
  misc_feature (1)..( 7): Result.005 file - promoters50/1411730
aaaatct

SEQ ID NO: 170882 - DNA, 7 bp, Unknown
  misc_feature (1)..( 7): Result.005 file - promoters50/1411730
ttaattc

SEQ ID NO: 170883 - DNA, 7 bp, Unknown
  misc_feature (1)..( 7): Result.005 file - promoters50/1411730
ttaattt

SEQ ID NO: 170884 - DNA, 7 bp, Unknown
  misc_feature (1)..( 7): Result.005 file - promoters50/1411730
taaatca

SEQ ID NO: 170885 - DNA, 8 bp, Unknown
  misc_feature (1)..( 8): Result.005 file - promoters50/1411730
aaaacaaa

SEQ ID NO: 170886 - DNA, 8 bp, Unknown
  misc_feature (1)..( 8): Result.005 file - promoters50/1411730
aaaaaaaa

SEQ ID NO: 170887 - DNA, 8 bp, Unknown
  misc_feature (1)..( 8): Result.005 file - promoters50/1411730
aaaacaag

SEQ ID NO: 170888 - DNA, 8 bp, Unknown
  misc_feature (1)..( 8): Result.005 file - promoters50/1411730
aaagcaaa

SEQ ID NO: 170889 - DNA, 8 bp, Unknown
  misc_feature (1)..( 8): Result.005 file - promoters50/1411730
actaaaag

SEQ ID NO: 170890 - DNA, 8 bp, Unknown
  misc_feature (1)..( 8): Result.005 file - promoters50/1411730
actgaaat

SEQ ID NO: 170891 - DNA, 8 bp, Unknown
  misc_feature (1)..( 8): Result.005 file - promoters50/1411730
actgtaat

SEQ ID NO: 170892 - DNA, 9 bp, Unknown
  misc_feature (1)..( 9): Result.005 file - promoters50/1411730
agtctaaaa

SEQ ID NO: 170893 - DNA, 9 bp, Unknown
  misc_feature (1)..( 9): Result.005 file - promoters50/1411730
agtttaaca

SEQ ID NO: 170894 - DNA, 9 bp, Unknown
  misc_feature (1)..( 9): Result.005 file - promoters50/1411730
tgtccaaaa

SEQ ID NO: 170895 - DNA, 8 bp, Unknown
  misc_feature (1)..( 8): Result.005 file - promoters50/1411730
cccattct

SEQ ID NO: 170896 - DNA, 8 bp, Unknown
  misc_feature (1)..( 8): Result.005 file - promoters50/1411730
cccattcc

SEQ ID NO: 170897 - DNA, 8 bp, Unknown
  misc_feature (1)..( 8): Result.005 file - promoters50/1411730
ctcattcc

SEQ ID NO: 170898 - DNA, 9 bp, Unknown
  misc_feature (1)..( 9): Result.005 file - promoters50/1411730
taactggaa

SEQ ID NO: 170899 - DNA, 9 bp, Unknown
  misc_feature (1)..( 9): Result.005 file - promoters50/1411730
taacttgaa

SEQ ID NO: 170900 - DNA, 9 bp, Unknown
  misc_feature (1)..( 9): Result.005 file - promoters50/1411730
taagttgca

SEQ ID NO: 170901 - DNA, 10 bp, Unknown
  misc_feature (1)..( 10): Result.005 file - promoters50/1411730
cgaaactaaa

SEQ ID NO: 170902 - DNA, 10 bp, Unknown
  misc_feature (1)..( 10): Result.005 file - promoters50/1411730
taaaaataaa

SEQ ID NO: 170903 - DNA, 11 bp, Unknown
  misc_feature (1)..( 11): Result.005 file - promoters50/1411730
gtaacaatcta

SEQ ID NO: 170904 - DNA, 13 bp, Unknown
  misc_feature (1)..( 13): Result.005 file - promoters50/1411762
atcttgtatctat

SEQ ID NO: 170905 - DNA, 13 bp, Unknown
  misc_feature (1)..( 13): Result.005 file - promoters50/1411762
atcttatatatat

SEQ ID NO: 170906 - DNA, 13 bp, Unknown
  misc_feature (1)..( 13): Result.005 file - promoters50/1411762
tttctatatataa

SEQ ID NO: 170907 - DNA, 9 bp, Unknown
  misc_feature (1)..( 9): Result.005 file - promoters50/1411762
acaaacctt

SEQ ID NO: 170908 - DNA, 9 bp, Unknown
  misc_feature (1)..( 9): Result.005 file - promoters50/1411762
acataccaa

SEQ ID NO: 170909 - DNA, 9 bp, Unknown
  misc_feature (1)..( 9): Result.005 file - promoters50/1411762
atatatcaa

SEQ ID NO: 170910 - DNA, 7 bp, Unknown
  misc_feature (1)..( 7): Result.005 file - promoters50/1411762
caaaact

SEQ ID NO: 170911 - DNA, 7 bp, Unknown
  misc_feature (1)..( 7): Result.005 file - promoters50/1411762
aaaaact

SEQ ID NO: 170912 - DNA, 8 bp, Unknown
  misc_feature (1)..( 8): Result.005 file - promoters50/1411762
aaaagact

SEQ ID NO: 170913 - DNA, 8 bp, Unknown
  misc_feature (1)..( 8): Result.005 file - promoters50/1411786
tttatttt

SEQ ID NO: 170914 - DNA, 8 bp, Unknown
  misc_feature (1)..( 8): Result.005 file - promoters50/1411786
aatatttt

SEQ ID NO: 170915 - DNA, 8 bp, Unknown
  misc_feature (1)..( 8): Result.005 file - promoters50/1411786
attattaa

SEQ ID NO: 170916 - DNA, 7 bp, Unknown
  misc_feature (1)..( 7): Result.005 file - promoters50/1411786
gatatac

SEQ ID NO: 170917 - DNA, 7 bp, Unknown
  misc_feature (1)..( 7): Result.005 file - promoters50/1411786
gatatat

SEQ ID NO: 170918 - DNA, 7 bp, Unknown
  misc_feature (1)..( 7): Result.005 file - promoters50/1411786
aatatat

SEQ ID NO: 170919 - DNA, 7 bp, Unknown
  misc_feature (1)..( 7): Result.005 file - promoters50/1411786
atacatt

SEQ ID NO: 170920 - DNA, 7 bp, Unknown
  misc_feature (1)..( 7): Result.005 file - promoters50/1411786
atatatt

SEQ ID NO: 170921 - DNA, 7 bp, Unknown
  misc_feature (1)..( 7): Result.005 file - promoters50/1411786
atatatg

SEQ ID NO: 170922 - DNA, 7 bp, Unknown
  misc_feature (1)..( 7): Result.005 file - promoters50/1413159
ctgtgat

SEQ ID NO: 170923 - DNA, 7 bp, Unknown
  misc_feature (1)..( 7): Result.005 file - promoters50/1413159
ttgtgat

SEQ ID NO: 170924 - DNA, 7 bp, Unknown
  misc_feature (1)..( 7): Result.005 file - promoters50/1413159
ttgtgaa

SEQ ID NO: 170925 - DNA, 9 bp, Unknown
  misc_feature (1)..( 9): Result.005 file - promoters50/1413191
cttaattta

SEQ ID NO: 170926 - DNA, 9 bp, Unknown
  misc_feature (1)..( 9): Result.005 file - promoters50/1413191
tttaattag

SEQ ID NO: 170927 - DNA, 9 bp, Unknown
  misc_feature (1)..( 9): Result.005 file - promoters50/1413191
cttattttt

SEQ ID NO: 170928 - DNA, 9 bp, Unknown
  misc_feature (1)..( 9): Result.005 file - promoters50/1413191
tataattta

SEQ ID NO: 170929 - DNA, 9 bp, Unknown
  misc_feature (1)..( 9): Result.005 file - promoters50/1413191
tttatttct

SEQ ID NO: 170930 - DNA, 9 bp, Unknown
  misc_feature (1)..( 9): Result.005 file - promoters50/1413191
agtatctct

SEQ ID NO: 170931 - DNA, 8 bp, Unknown
  misc_feature (1)..( 8): Result.005 file - promoters50/1413191
atataaaa

SEQ ID NO: 170932 - DNA, 8 bp, Unknown
  misc_feature (1)..( 8): Result.005 file - promoters50/1413191
atataaat

SEQ ID NO: 170933 - DNA, 8 bp, Unknown
  misc_feature (1)..( 8): Result.005 file - promoters50/1413191
ctataaag

SEQ ID NO: 170934 - DNA, 8 bp, Unknown
  misc_feature (1)..( 8): Result.005 file - promoters50/1413191
atataagt

SEQ ID NO: 170935 - DNA, 8 bp, Unknown
  misc_feature (1)..( 8): Result.005 file - promoters50/1413191
ttataaaa

SEQ ID NO: 170936 - DNA, 8 bp, Unknown
  misc_feature (1)..( 8): Result.005 file - promoters50/1413191
atataagt

SEQ ID NO: 170937 - DNA, 11 bp, Unknown
  misc_feature (1)..( 11): Result.005 file - promoters50/1413191
atttgttttac

SEQ ID NO: 170938 - DNA, 11 bp, Unknown
  misc_feature (1)..( 11): Result.005 file - promoters50/1413191
gtttctttttt

SEQ ID NO: 170939 - DNA, 11 bp, Unknown
  misc_feature (1)..( 11): Result.005 file - promoters50/1413191
ttttatttgtc

SEQ ID NO: 170940 - DNA, 11 bp, Unknown
  misc_feature (1)..( 11): Result.005 file - promoters50/1413191
ttttgttgtta

SEQ ID NO: 170941 - DNA, 11 bp, Unknown
  misc_feature (1)..( 11): Result.005 file - promoters50/1413191
atttgtagtga

SEQ ID NO: 170942 - DNA, 11 bp, Unknown
  misc_feature (1)..( 11): Result.005 file - promoters50/1413191
gcttctttttt

SEQ ID NO: 170943 - DNA, 13 bp, Unknown
  misc_feature (1)..( 13): Result.005 file - promoters50/1413191
ttgacttttttat

SEQ ID NO: 170944 - DNA, 13 bp, Unknown
  misc_feature (1)..( 13): Result.005 file - promoters50/1413191
ctttgtttcttaa

SEQ ID NO: 170945 - DNA, 13 bp, Unknown
  misc_feature (1)..( 13): Result.005 file - promoters50/1413191
ttgtctttttatt

SEQ ID NO: 170946 - DNA, 13 bp, Unknown
  misc_feature (1)..( 13): Result.005 file - promoters50/1413191
cttctttttttgg

SEQ ID NO: 170947 - DNA, 14 bp, Unknown
  misc_feature (1)..( 14): Result.005 file - promoters50/1413191
ttctaaaatcttaa

SEQ ID NO: 170948 - DNA, 14 bp, Unknown
  misc_feature (1)..( 14): Result.005 file - promoters50/1413191
aatgattgtctgcc

SEQ ID NO: 170949 - DNA, 12 bp, Unknown
  misc_feature (1)..( 12): Result.005 file - promoters50/1413191
agatttaaaata

SEQ ID NO: 170950 - DNA, 12 bp, Unknown
  misc_feature (1)..( 12): Result.005 file - promoters50/1413191
tgatataagatg

SEQ ID NO: 170951 - DNA, 12 bp, Unknown
  misc_feature (1)..( 12): Result.005 file - promoters50/1413191
atttttaaatat

SEQ ID NO: 170952 - DNA, 12 bp, Unknown
  misc_feature (1)..( 12): Result.005 file - promoters50/1413191
agatttatttct

SEQ ID NO: 170953 - DNA, 12 bp, Unknown
  misc_feature (1)..( 12): Result.005 file - promoters50/1413191
taatttaatgca

SEQ ID NO: 170954 - DNA, 12 bp, Unknown
  misc_feature (1)..( 12): Result.005 file - promoters50/1413191
agctttaattag

SEQ ID NO: 170955 - DNA, 15 bp, Unknown
  misc_feature (1)..( 15): Result.005 file - promoters50/1413191
tttcaaaataattca

SEQ ID NO: 170956 - DNA, 15 bp, Unknown
  misc_feature (1)..( 15): Result.005 file - promoters50/1413191
attccaaagaattat

SEQ ID NO: 170957 - DNA, 15 bp, Unknown
  misc_feature (1)..( 15): Result.005 file - promoters50/1413191
tatgcaaataatttt

SEQ ID NO: 170958 - DNA, 15 bp, Unknown
  misc_feature (1)..( 15): Result.005 file - promoters50/1413191
tttacaagttgaatt

SEQ ID NO: 170959 - DNA, 15 bp, Unknown
  misc_feature (1)..( 15): Result.005 file - promoters50/1413191
cgctcaagtaatttt

SEQ ID NO: 170960 - DNA, 15 bp, Unknown
  misc_feature (1)..( 15): Result.005 file - promoters50/1413191
ttctgaagaaattag

SEQ ID NO: 170961 - DNA, 15 bp, Unknown
  misc_feature (1)..( 15): Result.005 file - promoters50/1413191
gaatcaagaaacagt

SEQ ID NO: 170962 - DNA, 10 bp, Unknown
  misc_feature (1)..( 10): Result.005 file - promoters50/1413191
aaattataga

SEQ ID NO: 170963 - DNA, 10 bp, Unknown
  misc_feature (1)..( 10): Result.005 file - promoters50/1413191
gaatcatatg

SEQ ID NO: 170964 - DNA, 10 bp, Unknown
  misc_feature (1)..( 10): Result.005 file - promoters50/1413191
taattatttg

SEQ ID NO: 170965 - DNA, 10 bp, Unknown
  misc_feature (1)..( 10): Result.005 file - promoters50/1413191
aaataataag

SEQ ID NO: 170966 - DNA, 10 bp, Unknown
  misc_feature (1)..( 10): Result.005 file - promoters50/1413191
aaataaaaaa

SEQ ID NO: 170967 - DNA, 10 bp, Unknown
  misc_feature (1)..( 10): Result.005 file - promoters50/1413191
aatttattta

SEQ ID NO: 170968 - DNA, 9 bp, Unknown
  misc_feature (1)..( 9): Result.005 file - promoters50/1413211
atagtcaac

SEQ ID NO: 170969 - DNA, 9 bp, Unknown
  misc_feature (1)..( 9): Result.005 file - promoters50/1413211
ttagtcata

SEQ ID NO: 170970 - DNA, 9 bp, Unknown
  misc_feature (1)..( 9): Result.005 file - promoters50/1413211
ataatcaac

SEQ ID NO: 170971 - DNA, 9 bp, Unknown
  misc_feature (1)..( 9): Result.005 file - promoters50/1413211
aaaatagaa

SEQ ID NO: 170972 - DNA, 9 bp, Unknown
  misc_feature (1)..( 9): Result.005 file - promoters50/1413211
aaaaaagaa

SEQ ID NO: 170973 - DNA, 9 bp, Unknown
  misc_feature (1)..( 9): Result.005 file - promoters50/1413211
aaaatattt

SEQ ID NO: 170974 - DNA, 13 bp, Unknown
  misc_feature (1)..( 13): Result.005 file - promoters50/1413211
tgatgaaaaggat

SEQ ID NO: 170975 - DNA, 13 bp, Unknown
  misc_feature (1)..( 13): Result.005 file - promoters50/1413211
tgatgtaaatgat

SEQ ID NO: 170976 - DNA, 13 bp, Unknown
  misc_feature (1)..( 13): Result.005 file - promoters50/1413211
aatttaaaatgaa

SEQ ID NO: 170977 - DNA, 7 bp, Unknown
  misc_feature (1)..( 7): Result.005 file - promoters50/1413211
agatagt

SEQ ID NO: 170978 - DNA, 7 bp, Unknown
  misc_feature (1)..( 7): Result.005 file - promoters50/1413211
agatagt

SEQ ID NO: 170979 - DNA, 7 bp, Unknown
  misc_feature (1)..( 7): Result.005 file - promoters50/1413211
tgatata

SEQ ID NO: 170980 - DNA, 9 bp, Unknown
  misc_feature (1)..( 9): Result.005 file - promoters50/1413211
atttaaaat

SEQ ID NO: 170981 - DNA, 9 bp, Unknown
  misc_feature (1)..( 9): Result.005 file - promoters50/1413211
atttaatta

SEQ ID NO: 170982 - DNA, 9 bp, Unknown
  misc_feature (1)..( 9): Result.005 file - promoters50/1413211
ttttgatta

SEQ ID NO: 170983 - DNA, 9 bp, Unknown
  misc_feature (1)..( 9): Result.005 file - promoters50/1413211
aatgaatat

SEQ ID NO: 170984 - DNA, 9 bp, Unknown
  misc_feature (1)..( 9): Result.005 file - promoters50/1413211
tttgattat

SEQ ID NO: 170985 - DNA, 9 bp, Unknown
  misc_feature (1)..( 9): Result.005 file - promoters50/1413211
tttaattac

SEQ ID NO: 170986 - DNA, 10 bp, Unknown
  misc_feature (1)..( 10): Result.005 file - promoters50/1420845
aaagactttc

SEQ ID NO: 170987 - DNA, 10 bp, Unknown
  misc_feature (1)..( 10): Result.005 file - promoters50/1420845
aaagagtttc

SEQ ID NO: 170988 - DNA, 10 bp, Unknown
  misc_feature (1)..( 10): Result.005 file - promoters50/1420845
ttggagtttt

SEQ ID NO: 170989 - DNA, 9 bp, Unknown
  misc_feature (1)..( 9): Result.005 file - promoters50/1420853
ttctacatg

SEQ ID NO: 170990 - DNA, 9 bp, Unknown
  misc_feature (1)..( 9): Result.005 file - promoters50/1420853
ttcgacatt

SEQ ID NO: 170991 - DNA, 9 bp, Unknown
  misc_feature (1)..( 9): Result.005 file - promoters50/1420853
cccgatatt

SEQ ID NO: 170992 - DNA, 11 bp, Unknown
  misc_feature (1)..( 11): Result.005 file - promoters50/1420853
tattatggttt

SEQ ID NO: 170993 - DNA, 11 bp, Unknown
  misc_feature (1)..( 11): Result.005 file - promoters50/1420853
gaatatgtttt

SEQ ID NO: 170994 - DNA, 11 bp, Unknown
  misc_feature (1)..( 11): Result.005 file - promoters50/1420853
tattattgtta

SEQ ID NO: 170995 - DNA, 14 bp, Unknown
  misc_feature (1)..( 14): Result.005 file - promoters50/1420853
cgtatttaaacccc

SEQ ID NO: 170996 - DNA, 14 bp, Unknown
  misc_feature (1)..( 14): Result.005 file - promoters50/1420853
cgtatgtaatcgaa

SEQ ID NO: 170997 - DNA, 14 bp, Unknown
  misc_feature (1)..( 14): Result.005 file - promoters50/1420853
cctatttatacccc

SEQ ID NO: 170998 - DNA, 9 bp, Unknown
  misc_feature (1)..( 9): Result.005 file - promoters50/1420853
aaggcttta

SEQ ID NO: 170999 - DNA, 9 bp, Unknown
  misc_feature (1)..( 9): Result.005 file - promoters50/1420853
caggattta

SEQ ID NO: 171000 - DNA, 9 bp, Unknown
  misc_feature (1)..( 9): Result.005 file - promoters50/1420853
aaggctttt

SEQ ID NO: 171001 - DNA, 7 bp, Unknown
  misc_feature (1)..( 7): Result.005 file - promoters50/1420853
atgtctg

SEQ ID NO: 171002 - DNA, 7 bp, Unknown
  misc_feature (1)..( 7): Result.005 file - promoters50/1420853
atgtctt

SEQ ID NO: 171003 - DNA, 7 bp, Unknown
  misc_feature (1)..( 7): Result.005 file - promoters50/1420853
ttgtctg

SEQ ID NO: 171004 - DNA, 7 bp, Unknown
  misc_feature (1)..( 7): Result.005 file - promoters50/1420853
caaatgc

SEQ ID NO: 171005 - DNA, 7 bp, Unknown
  misc_feature (1)..( 7): Result.005 file - promoters50/1420853
taaatgc

SEQ ID NO: 171006 - DNA, 7 bp, Unknown
  misc_feature (1)..( 7): Result.005 file - promoters50/1420853
taaatga

SEQ ID NO: 171007 - DNA, 11 bp, Unknown
  misc_feature (1)..( 11): Result.005 file - promoters50/1440857
ttgacataatt

SEQ ID NO: 171008 - DNA, 11 bp, Unknown
  misc_feature (1)..( 11): Result.005 file - promoters50/1440857
ttgccatgatg

SEQ ID NO: 171009 - DNA, 11 bp, Unknown
  misc_feature (1)..( 11): Result.005 file - promoters50/1440857
ctgatataatt

SEQ ID NO: 171010 - DNA, 8 bp, Unknown
  misc_feature (1)..( 8): Result.005 file - promoters50/1440857
tttagtca

SEQ ID NO: 171011 - DNA, 8 bp, Unknown
  misc_feature (1)..( 8): Result.005 file - promoters50/1440857
tttggtct

SEQ ID NO: 171012 - DNA, 8 bp, Unknown
  misc_feature (1)..( 8): Result.005 file - promoters50/1440857
gttagtca

SEQ ID NO: 171013 - DNA, 11 bp, Unknown
  misc_feature (1)..( 11): Result.005 file - promoters50/1440865
aactaaaaata

SEQ ID NO: 171014 - DNA, 11 bp, Unknown
  misc_feature (1)..( 11): Result.005 file - promoters50/1440865
cttgaaaaatg

SEQ ID NO: 171015 - DNA, 11 bp, Unknown
  misc_feature (1)..( 11): Result.005 file - promoters50/1440865
acctaaatata

SEQ ID NO: 171016 - DNA, 11 bp, Unknown
  misc_feature (1)..( 11): Result.005 file - promoters50/1440865
accttaatgat

SEQ ID NO: 171017 - DNA, 7 bp, Unknown
  misc_feature (1)..( 7): Result.005 file - promoters50/1440865
agcaagt

SEQ ID NO: 171018 - DNA, 7 bp, Unknown
  misc_feature (1)..( 7): Result.005 file - promoters50/1440865
agcgagt

SEQ ID NO: 171019 - DNA, 7 bp, Unknown
  misc_feature (1)..( 7): Result.005 file - promoters50/1440865
agcaagt

SEQ ID NO: 171020 - DNA, 10 bp, Unknown
  misc_feature (1)..( 10): Result.005 file - promoters50/1440865
taagattcca

SEQ ID NO: 171021 - DNA, 10 bp, Unknown
  misc_feature (1)..( 10): Result.005 file - promoters50/1440865
taacatttgg

SEQ ID NO: 171022 - DNA, 10 bp, Unknown
  misc_feature (1)..( 10): Result.005 file - promoters50/1440865
acacattttc

SEQ ID NO: 171023 - DNA, 10 bp, Unknown
  misc_feature (1)..( 10): Result.005 file - promoters50/1440865
tttcattttc

SEQ ID NO: 171024 - DNA, 8 bp, Unknown
  misc_feature (1)..( 8): Result.005 file - promoters50/1440865
tcataagg

SEQ ID NO: 171025 - DNA, 8 bp, Unknown
  misc_feature (1)..( 8): Result.005 file - promoters50/1440865
tcaaaagc

SEQ ID NO: 171026 - DNA, 8 bp, Unknown
  misc_feature (1)..( 8): Result.005 file - promoters50/1440865
caaaaagc

SEQ ID NO: 171027 - DNA, 7 bp, Unknown
  misc_feature (1)..( 7): Result.005 file - promoters50/1440865
gacattt

SEQ ID NO: 171028 - DNA, 7 bp, Unknown
  misc_feature (1)..( 7): Result.005 file - promoters50/1440865
gaccttt

SEQ ID NO: 171029 - DNA, 7 bp, Unknown
  misc_feature (1)..( 7): Result.005 file - promoters50/1440865
tacattt

SEQ ID NO: 171030 - DNA, 12 bp, Unknown
  misc_feature (1)..( 12): Result.005 file - promoters50/1440865
ttttaattatta

SEQ ID NO: 171031 - DNA, 12 bp, Unknown
  misc_feature (1)..( 12): Result.005 file - promoters50/1440865
agacaatgatta

SEQ ID NO: 171032 - DNA, 12 bp, Unknown
  misc_feature (1)..( 12): Result.005 file - promoters50/1440865
tttgaataattc

SEQ ID NO: 171033 - DNA, 8 bp, Unknown
  misc_feature (1)..( 8): Result.005 file - promoters50/1440865
accaaaac

SEQ ID NO: 171034 - DNA, 8 bp, Unknown
  misc_feature (1)..( 8): Result.005 file - promoters50/1440865
acctaaat

SEQ ID NO: 171035 - DNA, 8 bp, Unknown
  misc_feature (1)..( 8): Result.005 file - promoters50/1440865
accttaat

SEQ ID NO: 171036 - DNA, 11 bp, Unknown
  misc_feature (1)..( 11): Result.005 file - promoters50/1440865
gtattaattta

SEQ ID NO: 171037 - DNA, 11 bp, Unknown
  misc_feature (1)..( 11): Result.005 file - promoters50/1440865
tttttaaatta

SEQ ID NO: 171038 - DNA, 12 bp, Unknown
  misc_feature (1)..( 12): Result.005 file - promoters50/1440865
tttttcaaaaaa

SEQ ID NO: 171039 - DNA, 8 bp, Unknown
  misc_feature (1)..( 8): Result.005 file - promoters50/1440865
tctttagt

SEQ ID NO: 171040 - DNA, 8 bp, Unknown
  misc_feature (1)..( 8): Result.005 file - promoters50/1440865
tcttgagt

SEQ ID NO: 171041 - DNA, 8 bp, Unknown
  misc_feature (1)..( 8): Result.005 file - promoters50/1440865
tcttgaaa

SEQ ID NO: 171042 - DNA, 8 bp, Unknown
  misc_feature (1)..( 8): Result.005 file - promoters50/1440865
cacaagta

SEQ ID NO: 171043 - DNA, 8 bp, Unknown
  misc_feature (1)..( 8): Result.005 file - promoters50/1440865
agcaagta

SEQ ID NO: 171044 - DNA, 8 bp, Unknown
  misc_feature (1)..( 8): Result.005 file - promoters50/1440865
agcgagtt

SEQ ID NO: 171045 - DNA, 8 bp, Unknown
  misc_feature (1)..( 8): Result.005 file - promoters50/1440865
ctttgtct

SEQ ID NO: 171046 - DNA, 8 bp, Unknown
  misc_feature (1)..( 8): Result.005 file - promoters50/1440865
ctttttct

SEQ ID NO: 171047 - DNA, 8 bp, Unknown
  misc_feature (1)..( 8): Result.005 file - promoters50/1440865
tattttct

SEQ ID NO: 171048 - DNA, 9 bp, Unknown
  misc_feature (1)..( 9): Result.005 file - promoters50/1440865
tttcaaaaa

SEQ ID NO: 171049 - DNA, 9 bp, Unknown
  misc_feature (1)..( 9): Result.005 file - promoters50/1440865
ccgcaaaaa

SEQ ID NO: 171050 - DNA, 9 bp, Unknown
  misc_feature (1)..( 9): Result.005 file - promoters50/1440865
tttcacaaa

SEQ ID NO: 171051 - DNA, 7 bp, Unknown
  misc_feature (1)..( 7): Result.005 file - promoters50/1440865
ctttttt

SEQ ID NO: 171052 - DNA, 7 bp, Unknown
  misc_feature (1)..( 7): Result.005 file - promoters50/1440865
atttttt

SEQ ID NO: 171053 - DNA, 7 bp, Unknown
  misc_feature (1)..( 7): Result.005 file - promoters50/1440865
atttttg

SEQ ID NO: 171054 - DNA, 7 bp, Unknown
  misc_feature (1)..( 7): Result.005 file - promoters50/1440865
cctttat

SEQ ID NO: 171055 - DNA, 7 bp, Unknown
  misc_feature (1)..( 7): Result.005 file - promoters50/1440865
tctttat

SEQ ID NO: 171056 - DNA, 7 bp, Unknown
  misc_feature (1)..( 7): Result.005 file - promoters50/1440865
cctttac

SEQ ID NO: 171057 - DNA, 7 bp, Unknown
  misc_feature (1)..( 7): Result.005 file - promoters50/1440873
ataaaaa

SEQ ID NO: 171058 - DNA, 7 bp, Unknown
  misc_feature (1)..( 7): Result.005 file - promoters50/1440873
ctaaaaa

SEQ ID NO: 171059 - DNA, 7 bp, Unknown
  misc_feature (1)..( 7): Result.005 file - promoters50/1440873
ataaaat

SEQ ID NO: 171060 - DNA, 7 bp, Unknown
  misc_feature (1)..( 7): Result.005 file - promoters50/1440873
gtaaaaa

SEQ ID NO: 171061 - DNA, 7 bp, Unknown
  misc_feature (1)..( 7): Result.005 file - promoters50/1440873
atagaaa

SEQ ID NO: 171062 - DNA, 7 bp, Unknown
  misc_feature (1)..( 7): Result.005 file - promoters50/1440873
ttaaaaa

SEQ ID NO: 171063 - DNA, 11 bp, Unknown
  misc_feature (1)..( 11): Result.005 file - promoters50/1440967
caatttgttta

SEQ ID NO: 171064 - DNA, 11 bp, Unknown
  misc_feature (1)..( 11): Result.005 file - promoters50/1440967
gactttttttt

SEQ ID NO: 171065 - DNA, 11 bp, Unknown
  misc_feature (1)..( 11): Result.005 file - promoters50/1440967
caagttgtaac

SEQ ID NO: 171066 - DNA, 11 bp, Unknown
  misc_feature (1)..( 11): Result.005 file - promoters50/1440967
tagtttttttt

SEQ ID NO: 171067 - DNA, 11 bp, Unknown
  misc_feature (1)..( 11): Result.005 file - promoters50/1440967
taatttgtctc

SEQ ID NO: 171068 - DNA, 11 bp, Unknown
  misc_feature (1)..( 11): Result.005 file - promoters50/1440967
taggttttaac

SEQ ID NO: 171069 - DNA, 13 bp, Unknown
  misc_feature (1)..( 13): Result.005 file - promoters50/1440967
atgacccaaaaga

SEQ ID NO: 171070 - DNA, 13 bp, Unknown
  misc_feature (1)..( 13): Result.005 file - promoters50/1440967
attataaaaaaga

SEQ ID NO: 171071 - DNA, 13 bp, Unknown
  misc_feature (1)..( 13): Result.005 file - promoters50/1440967
atatccaaaaaga

SEQ ID NO: 171072 - DNA, 13 bp, Unknown
  misc_feature (1)..( 13): Result.005 file - promoters50/1440967
attaaaaaaaagg

SEQ ID NO: 171073 - DNA, 13 bp, Unknown
  misc_feature (1)..( 13): Result.005 file - promoters50/1440967
tcaatcaataaga

SEQ ID NO: 171074 - DNA, 13 bp, Unknown
  misc_feature (1)..( 13): Result.005 file - promoters50/1440967
ttctcaaataaca

SEQ ID NO: 171075 - DNA, 13 bp, Unknown
  misc_feature (1)..( 13): Result.005 file - promoters50/1440967
aaatccaaataca

SEQ ID NO: 171076 - DNA, 13 bp, Unknown
  misc_feature (1)..( 13): Result.005 file - promoters50/1440967
atatcaaaagaca

SEQ ID NO: 171077 - DNA, 13 bp, Unknown
  misc_feature (1)..( 13): Result.005 file - promoters50/1440967
cacatcaaataaa

SEQ ID NO: 171078 - DNA, 13 bp, Unknown
  misc_feature (1)..( 13): Result.005 file - promoters50/1440967
tttttcaagtaat

SEQ ID NO: 171079 - DNA, 13 bp, Unknown
  misc_feature (1)..( 13): Result.005 file - promoters50/1440967
ttatgaaattaac

SEQ ID NO: 171080 - DNA, 13 bp, Unknown
  misc_feature (1)..( 13): Result.005 file - promoters50/1440967
gttttgatccacg

SEQ ID NO: 171081 - DNA, 13 bp, Unknown
  misc_feature (1)..( 13): Result.005 file - promoters50/1440967
tgattaagaaaaa

SEQ ID NO: 171082 - DNA, 13 bp, Unknown
  misc_feature (1)..( 13): Result.005 file - promoters50/1440967
gaataagatttta

SEQ ID NO: 171083 - DNA, 13 bp, Unknown
  misc_feature (1)..( 13): Result.005 file - promoters50/1440967
cgagaagattcta

SEQ ID NO: 171084 - DNA, 13 bp, Unknown
  misc_feature (1)..( 13): Result.005 file - promoters50/1440967
ttataaaattact

SEQ ID NO: 171085 - DNA, 13 bp, Unknown
  misc_feature (1)..( 13): Result.005 file - promoters50/1440967
gtgggagatatta

SEQ ID NO: 171086 - DNA, 13 bp, Unknown
  misc_feature (1)..( 13): Result.005 file - promoters50/1440967
ttataaatttgga

SEQ ID NO: 171087 - DNA, 13 bp, Unknown
  misc_feature (1)..( 13): Result.005 file - promoters50/1440967
ctatgaaagttta

SEQ ID NO: 171088 - DNA, 10 bp, Unknown
  misc_feature (1)..( 10): Result.005 file - promoters50/1441020
attttaaata

SEQ ID NO: 171089 - DNA, 10 bp, Unknown
  misc_feature (1)..( 10): Result.005 file - promoters50/1441020
cttttcaatt

SEQ ID NO: 171090 - DNA, 10 bp, Unknown
  misc_feature (1)..( 10): Result.005 file - promoters50/1441020
atttccaatt

SEQ ID NO: 171091 - DNA, 10 bp, Unknown
  misc_feature (1)..( 10): Result.005 file - promoters50/1441020
cttgtcacga

SEQ ID NO: 171092 - DNA, 11 bp, Unknown
  misc_feature (1)..( 11): Result.005 file - promoters50/1441020
aactttttaga

SEQ ID NO: 171093 - DNA, 11 bp, Unknown
  misc_feature (1)..( 11): Result.005 file - promoters50/1441020
aacgttttggg

SEQ ID NO: 171094 - DNA, 11 bp, Unknown
  misc_feature (1)..( 11): Result.005 file - promoters50/1441020
aacattttgaa

SEQ ID NO: 171095 - DNA, 11 bp, Unknown
  misc_feature (1)..( 11): Result.005 file - promoters50/1441020
tatattatgaa

SEQ ID NO: 171096 - DNA, 9 bp, Unknown
  misc_feature (1)..( 9): Result.005 file - promoters50/1441020
ttttagaaa

SEQ ID NO: 171097 - DNA, 9 bp, Unknown
  misc_feature (1)..( 9): Result.005 file - promoters50/1441020
attttgaag

SEQ ID NO: 171098 - DNA, 9 bp, Unknown
  misc_feature (1)..( 9): Result.005 file - promoters50/1441020
ctgttgaag

SEQ ID NO: 171099 - DNA, 9 bp, Unknown
  misc_feature (1)..( 9): Result.005 file - promoters50/1441020
attatgaaa

SEQ ID NO: 171100 - DNA, 9 bp, Unknown
  misc_feature (1)..( 9): Result.005 file - promoters50/1441044
aactaaacc

SEQ ID NO: 171101 - DNA, 9 bp, Unknown
  misc_feature (1)..( 9): Result.005 file - promoters50/1441044
aactaatca

SEQ ID NO: 171102 - DNA, 9 bp, Unknown
  misc_feature (1)..( 9): Result.005 file - promoters50/1441044
aactaaacc

SEQ ID NO: 171103 - DNA, 9 bp, Unknown
  misc_feature (1)..( 9): Result.005 file - promoters50/1441044
tactaaaga

SEQ ID NO: 171104 - DNA, 13 bp, Unknown
  misc_feature (1)..( 13): Result.005 file - promoters50/1441044
tcaaatttttttt

SEQ ID NO: 171105 - DNA, 13 bp, Unknown
  misc_feature (1)..( 13): Result.005 file - promoters50/1441044
acaaacttttttt

SEQ ID NO: 171106 - DNA, 13 bp, Unknown
  misc_feature (1)..( 13): Result.005 file - promoters50/1441044
accaatttttagt

SEQ ID NO: 171107 - DNA, 13 bp, Unknown
  misc_feature (1)..( 13): Result.005 file - promoters50/1441044
acaaacattaaga

SEQ ID NO: 171108 - DNA, 12 bp, Unknown
  misc_feature (1)..( 12): Result.005 file - promoters50/1441044
actcatatatat

SEQ ID NO: 171109 - DNA, 12 bp, Unknown
  misc_feature (1)..( 12): Result.005 file - promoters50/1441044
actcatatatat

SEQ ID NO: 171110 - DNA, 12 bp, Unknown
  misc_feature (1)..( 12): Result.005 file - promoters50/1441044
acgtatatataa

SEQ ID NO: 171111 - DNA, 12 bp, Unknown
  misc_feature (1)..( 12): Result.005 file - promoters50/1441044
aatcacatatta

SEQ ID NO: 171112 - DNA, 12 bp, Unknown
  misc_feature (1)..( 12): Result.005 file - promoters50/1441069
aaacataattat

SEQ ID NO: 171113 - DNA, 12 bp, Unknown
  misc_feature (1)..( 12): Result.005 file - promoters50/1441069
aaatataagtat

SEQ ID NO: 171114 - DNA, 12 bp, Unknown
  misc_feature (1)..( 12): Result.005 file - promoters50/1441069
aaatcaaattat

SEQ ID NO: 171115 - DNA, 10 bp, Unknown
  misc_feature (1)..( 10): Result.005 file - promoters50/1441069
taagaatttt

SEQ ID NO: 171116 - DNA, 10 bp, Unknown
  misc_feature (1)..( 10): Result.005 file - promoters50/1441069
aaagaatcaa

SEQ ID NO: 171117 - DNA, 10 bp, Unknown
  misc_feature (1)..( 10): Result.005 file - promoters50/1441069
aaagtatcaa

SEQ ID NO: 171118 - DNA, 8 bp, Unknown
  misc_feature (1)..( 8): Result.005 file - promoters50/1441134
attaacac

SEQ ID NO: 171119 - DNA, 8 bp, Unknown
  misc_feature (1)..( 8): Result.005 file - promoters50/1441134
attaacaa

SEQ ID NO: 171120 - DNA, 8 bp, Unknown
  misc_feature (1)..( 8): Result.005 file - promoters50/1441134
tttaacaa

SEQ ID NO: 171121 - DNA, 10 bp, Unknown
  misc_feature (1)..( 10): Result.005 file - promoters50/1441145
catatataat

SEQ ID NO: 171122 - DNA, 10 bp, Unknown
  misc_feature (1)..( 10): Result.005 file - promoters50/1441145
aatatattct

SEQ ID NO: 171123 - DNA, 10 bp, Unknown
  misc_feature (1)..( 10): Result.005 file - promoters50/1441145
cataaataat

SEQ ID NO: 171124 - DNA, 10 bp, Unknown
  misc_feature (1)..( 10): Result.005 file - promoters50/1441145
aaaaaattat

SEQ ID NO: 171125 - DNA, 7 bp, Unknown
  misc_feature (1)..( 7): Result.005 file - promoters50/1441145
aacaaat

SEQ ID NO: 171126 - DNA, 7 bp, Unknown
  misc_feature (1)..( 7): Result.005 file - promoters50/1441145
aacaaaa

SEQ ID NO: 171127 - DNA, 7 bp, Unknown
  misc_feature (1)..( 7): Result.005 file - promoters50/1441145
cacaaaa

SEQ ID NO: 171128 - DNA, 9 bp, Unknown
  misc_feature (1)..( 9): Result.005 file - promoters50/1441145
gaatttcaa

SEQ ID NO: 171129 - DNA, 9 bp, Unknown
  misc_feature (1)..( 9): Result.005 file - promoters50/1441145
gaattttag

SEQ ID NO: 171130 - DNA, 9 bp, Unknown
  misc_feature (1)..( 9): Result.005 file - promoters50/1441145
aaatgtcaa

SEQ ID NO: 171131 - DNA, 7 bp, Unknown
  misc_feature (1)..( 7): Result.005 file - promoters50/1441145
tttaata

SEQ ID NO: 171132 - DNA, 7 bp, Unknown
  misc_feature (1)..( 7): Result.005 file - promoters50/1441145
attaata

SEQ ID NO: 171133 - DNA, 7 bp, Unknown
  misc_feature (1)..( 7): Result.005 file - promoters50/1441145
attcata

SEQ ID NO: 171134 - DNA, 10 bp, Unknown
  misc_feature (1)..( 10): Result.005 file - promoters50/1441145
atatacaaat

SEQ ID NO: 171135 - DNA, 10 bp, Unknown
  misc_feature (1)..( 10): Result.005 file - promoters50/1441145
atatataaat

SEQ ID NO: 171136 - DNA, 10 bp, Unknown
  misc_feature (1)..( 10): Result.005 file - promoters50/1441145
tcatacaaaa

SEQ ID NO: 171137 - DNA, 10 bp, Unknown
  misc_feature (1)..( 10): Result.005 file - promoters50/1441145
gtggataaat

SEQ ID NO: 171138 - DNA, 7 bp, Unknown
  misc_feature (1)..( 7): Result.005 file - promoters50/1441145
attttaa

SEQ ID NO: 171139 - DNA, 7 bp, Unknown
  misc_feature (1)..( 7): Result.005 file - promoters50/1441145
attttaa

SEQ ID NO: 171140 - DNA, 7 bp, Unknown
  misc_feature (1)..( 7): Result.005 file - promoters50/1441145
attttag

SEQ ID NO: 171141 - DNA, 10 bp, Unknown
  misc_feature (1)..( 10): Result.005 file - promoters50/1441145
aaatacatat

SEQ ID NO: 171142 - DNA, 10 bp, Unknown
  misc_feature (1)..( 10): Result.005 file - promoters50/1441145
aaattcatat

SEQ ID NO: 171143 - DNA, 10 bp, Unknown
  misc_feature (1)..( 10): Result.005 file - promoters50/1441145
atattaataa

SEQ ID NO: 171144 - DNA, 9 bp, Unknown
  misc_feature (1)..( 9): Result.005 file - promoters50/1441145
ttaaaaaag

SEQ ID NO: 171145 - DNA, 9 bp, Unknown
  misc_feature (1)..( 9): Result.005 file - promoters50/1441145
ttaataaac

SEQ ID NO: 171146 - DNA, 9 bp, Unknown
  misc_feature (1)..( 9): Result.005 file - promoters50/1441145
tgtataaac

SEQ ID NO: 171147 - DNA, 11 bp, Unknown
  misc_feature (1)..( 11): Result.005 file - promoters50/1441170
aaaatcaaata

SEQ ID NO: 171148 - DNA, 11 bp, Unknown
  misc_feature (1)..( 11): Result.005 file - promoters50/1441170
aaagtcacgaa

SEQ ID NO: 171149 - DNA, 11 bp, Unknown
  misc_feature (1)..( 11): Result.005 file - promoters50/1441170
gaaaccaaaag

SEQ ID NO: 171150 - DNA, 11 bp, Unknown
  misc_feature (1)..( 11): Result.005 file - promoters50/1441170
acaatcaaaaa

SEQ ID NO: 171151 - DNA, 11 bp, Unknown
  misc_feature (1)..( 11): Result.005 file - promoters50/1441170
aaaattaaaag

SEQ ID NO: 171152 - DNA, 11 bp, Unknown
  misc_feature (1)..( 11): Result.005 file - promoters50/1441170
atagccacaag

SEQ ID NO: 171153 - DNA, 11 bp, Unknown
  misc_feature (1)..( 11): Result.005 file - promoters50/1441170
gccaccaagtg

SEQ ID NO: 171154 - DNA, 11 bp, Unknown
  misc_feature (1)..( 11): Result.005 file - promoters50/1441170
aacaccaaaga

SEQ ID NO: 171155 - DNA, 11 bp, Unknown
  misc_feature (1)..( 11): Result.005 file - promoters50/1441170
caaaccaaaaa

SEQ ID NO: 171156 - DNA, 11 bp, Unknown
  misc_feature (1)..( 11): Result.005 file - promoters50/1441170
aaaaacaaaaa

SEQ ID NO: 171157 - DNA, 11 bp, Unknown
  misc_feature (1)..( 11): Result.005 file - promoters50/1441170
agtaccaaaca

SEQ ID NO: 171158 - DNA, 11 bp, Unknown
  misc_feature (1)..( 11): Result.005 file - promoters50/1441170
aaaaataaaac

SEQ ID NO: 171159 - DNA, 9 bp, Unknown
  misc_feature (1)..( 9): Result.005 file - promoters50/1441174
agtttattt

SEQ ID NO: 171160 - DNA, 9 bp, Unknown
  misc_feature (1)..( 9): Result.005 file - promoters50/1441174
agttttttt

SEQ ID NO: 171161 - DNA, 9 bp, Unknown
  misc_feature (1)..( 9): Result.005 file - promoters50/1441174
agtgttttt

SEQ ID NO: 171162 - DNA, 9 bp, Unknown
  misc_feature (1)..( 9): Result.005 file - promoters50/1441174
agacaaact

SEQ ID NO: 171163 - DNA, 9 bp, Unknown
  misc_feature (1)..( 9): Result.005 file - promoters50/1441174
agataaaga

SEQ ID NO: 171164 - DNA, 9 bp, Unknown
  misc_feature (1)..( 9): Result.005 file - promoters50/1441174
ggataaaga

SEQ ID NO: 171165 - DNA, 9 bp, Unknown
  misc_feature (1)..( 9): Result.005 file - promoters50/1441184
atgtataaa

SEQ ID NO: 171166 - DNA, 9 bp, Unknown
  misc_feature (1)..( 9): Result.005 file - promoters50/1441184
cactataaa

SEQ ID NO: 171167 - DNA, 9 bp, Unknown
  misc_feature (1)..( 9): Result.005 file - promoters50/1441184
tcttataaa

SEQ ID NO: 171168 - DNA, 9 bp, Unknown
  misc_feature (1)..( 9): Result.005 file - promoters50/1441184
aactataaa

SEQ ID NO: 171169 - DNA, 9 bp, Unknown
  misc_feature (1)..( 9): Result.005 file - promoters50/1441184
gtatataaa

SEQ ID NO: 171170 - DNA, 9 bp, Unknown
  misc_feature (1)..( 9): Result.005 file - promoters50/1441184
ttatataaa

SEQ ID NO: 171171 - DNA, 9 bp, Unknown
  misc_feature (1)..( 9): Result.005 file - promoters50/1441184
tactttaac

SEQ ID NO: 171172 - DNA, 9 bp, Unknown
  misc_feature (1)..( 9): Result.005 file - promoters50/1441184
acaaattta

SEQ ID NO: 171173 - DNA, 9 bp, Unknown
  misc_feature (1)..( 9): Result.005 file - promoters50/1441184
tcaattttt

SEQ ID NO: 171174 - DNA, 9 bp, Unknown
  misc_feature (1)..( 9): Result.005 file - promoters50/1441184
acatattgg

SEQ ID NO: 171175 - DNA, 9 bp, Unknown
  misc_feature (1)..( 9): Result.005 file - promoters50/1441184
acattttgt

SEQ ID NO: 171176 - DNA, 9 bp, Unknown
  misc_feature (1)..( 9): Result.005 file - promoters50/1441184
taattttgc

SEQ ID NO: 171177 - DNA, 9 bp, Unknown
  misc_feature (1)..( 9): Result.005 file - promoters50/1441184
tcatcttgt

SEQ ID NO: 171178 - DNA, 9 bp, Unknown
  misc_feature (1)..( 9): Result.005 file - promoters50/1441237
aagagatta

SEQ ID NO: 171179 - DNA, 9 bp, Unknown
  misc_feature (1)..( 9): Result.005 file - promoters50/1441237
gagaaattc

SEQ ID NO: 171180 - DNA, 9 bp, Unknown
  misc_feature (1)..( 9): Result.005 file - promoters50/1441237
aacaaattc

SEQ ID NO: 171181 - DNA, 9 bp, Unknown
  misc_feature (1)..( 9): Result.005 file - promoters50/1441237
aagaaatcc

SEQ ID NO: 171182 - DNA, 9 bp, Unknown
  misc_feature (1)..( 9): Result.005 file - promoters50/1441237
tacaaattc

SEQ ID NO: 171183 - DNA, 9 bp, Unknown
  misc_feature (1)..( 9): Result.005 file - promoters50/1441237
aaggaatga

SEQ ID NO: 171184 - DNA, 14 bp, Unknown
  misc_feature (1)..( 14): Result.005 file - promoters50/1441237
actatttttagggt

SEQ ID NO: 171185 - DNA, 14 bp, Unknown
  misc_feature (1)..( 14): Result.005 file - promoters50/1441237
gttatttttgaaga

SEQ ID NO: 171186 - DNA, 14 bp, Unknown
  misc_feature (1)..( 14): Result.005 file - promoters50/1441237
aatattttaattca

SEQ ID NO: 171187 - DNA, 14 bp, Unknown
  misc_feature (1)..( 14): Result.005 file - promoters50/1441237
tttagtttgaatcg

SEQ ID NO: 171188 - DNA, 14 bp, Unknown
  misc_feature (1)..( 14): Result.005 file - promoters50/1441237
gttttttttttttt

SEQ ID NO: 171189 - DNA, 14 bp, Unknown
  misc_feature (1)..( 14): Result.005 file - promoters50/1441237
attattttacttaa

SEQ ID NO: 171190 - DNA, 14 bp, Unknown
  misc_feature (1)..( 14): Result.005 file - promoters50/1441237
ttcattttaaatca

SEQ ID NO: 171191 - DNA, 10 bp, Unknown
  misc_feature (1)..( 10): Result.005 file - promoters50/1441237
tatatataca

SEQ ID NO: 171192 - DNA, 10 bp, Unknown
  misc_feature (1)..( 10): Result.005 file - promoters50/1441237
cttatataaa

SEQ ID NO: 171193 - DNA, 10 bp, Unknown
  misc_feature (1)..( 10): Result.005 file - promoters50/1441237
agtatataaa

SEQ ID NO: 171194 - DNA, 10 bp, Unknown
  misc_feature (1)..( 10): Result.005 file - promoters50/1441237
gataaatatc

SEQ ID NO: 171195 - DNA, 10 bp, Unknown
  misc_feature (1)..( 10): Result.005 file - promoters50/1441237
tataaataaa

SEQ ID NO: 171196 - DNA, 10 bp, Unknown
  misc_feature (1)..( 10): Result.005 file - promoters50/1441237
tataaatatc

SEQ ID NO: 171197 - DNA, 10 bp, Unknown
  misc_feature (1)..( 10): Result.005 file - promoters50/1441237
tataaaatca

SEQ ID NO: 171198 - DNA, 10 bp, Unknown
  misc_feature (1)..( 10): Result.005 file - promoters50/1441237
cataaaagca

SEQ ID NO: 171199 - DNA, 10 bp, Unknown
  misc_feature (1)..( 10): Result.005 file - promoters50/1441237
ttcttcattt

SEQ ID NO: 171200 - DNA, 10 bp, Unknown
  misc_feature (1)..( 10): Result.005 file - promoters50/1441237
cgcttcataa

SEQ ID NO: 171201 - DNA, 10 bp, Unknown
  misc_feature (1)..( 10): Result.005 file - promoters50/1441237
atctttataa

SEQ ID NO: 171202 - DNA, 10 bp, Unknown
  misc_feature (1)..( 10): Result.005 file - promoters50/1441237
atctttatac

SEQ ID NO: 171203 - DNA, 10 bp, Unknown
  misc_feature (1)..( 10): Result.005 file - promoters50/1441237
caatttttaa

SEQ ID NO: 171204 - DNA, 10 bp, Unknown
  misc_feature (1)..( 10): Result.005 file - promoters50/1441237
aaatttgtaa

SEQ ID NO: 171205 - DNA, 10 bp, Unknown
  misc_feature (1)..( 10): Result.005 file - promoters50/1441237
tataaacaaa

SEQ ID NO: 171206 - DNA, 10 bp, Unknown
  misc_feature (1)..( 10): Result.005 file - promoters50/1441237
tataaaatca

SEQ ID NO: 171207 - DNA, 10 bp, Unknown
  misc_feature (1)..( 10): Result.005 file - promoters50/1441237
tataaataaa

SEQ ID NO: 171208 - DNA, 10 bp, Unknown
  misc_feature (1)..( 10): Result.005 file - promoters50/1441237
tataaatatc

SEQ ID NO: 171209 - DNA, 10 bp, Unknown
  misc_feature (1)..( 10): Result.005 file - promoters50/1441237
tataaactct

SEQ ID NO: 171210 - DNA, 10 bp, Unknown
  misc_feature (1)..( 10): Result.005 file - promoters50/1441237
gataaatatc

SEQ ID NO: 171211 - DNA, 10 bp, Unknown
  misc_feature (1)..( 10): Result.005 file - promoters50/1441237
cataaaagca

SEQ ID NO: 171212 - DNA, 15 bp, Unknown
  misc_feature (1)..( 15): Result.005 file - promoters50/1441237
aaacttataattatg

SEQ ID NO: 171213 - DNA, 15 bp, Unknown
  misc_feature (1)..( 15): Result.005 file - promoters50/1441237
caaataataataatg

SEQ ID NO: 171214 - DNA, 15 bp, Unknown
  misc_feature (1)..( 15): Result.005 file - promoters50/1441237
atctttataagtata

SEQ ID NO: 171215 - DNA, 15 bp, Unknown
  misc_feature (1)..( 15): Result.005 file - promoters50/1441237
cgcttcataacaaaa

SEQ ID NO: 171216 - DNA, 15 bp, Unknown
  misc_feature (1)..( 15): Result.005 file - promoters50/1441237
atctttatacaaaac

SEQ ID NO: 171217 - DNA, 15 bp, Unknown
  misc_feature (1)..( 15): Result.005 file - promoters50/1441237
aaatttgtaacttca

SEQ ID NO: 171218 - DNA, 18 bp, Unknown
  misc_feature (1)..( 18): Result.005 file - promoters50/1441249
aatgattcaaaattatca

SEQ ID NO: 171219 - DNA, 18 bp, Unknown
  misc_feature (1)..( 18): Result.005 file - promoters50/1441249
gattttcccaaattacat

SEQ ID NO: 171220 - DNA, 18 bp, Unknown
  misc_feature (1)..( 18): Result.005 file - promoters50/1441249
acaatgtacaaaatataa

SEQ ID NO: 171221 - DNA, 18 bp, Unknown
  misc_feature (1)..( 18): Result.005 file - promoters50/1441249
aatgtttctaaattctaa

SEQ ID NO: 171222 - DNA, 18 bp, Unknown
  misc_feature (1)..( 18): Result.005 file - promoters50/1441249
tctcacactatattttaa

SEQ ID NO: 171223 - DNA, 18 bp, Unknown
  misc_feature (1)..( 18): Result.005 file - promoters50/1441249
aatgattcaaaattatca

SEQ ID NO: 171224 - DNA, 18 bp, Unknown
  misc_feature (1)..( 18): Result.005 file - promoters50/1441249
caatgtacaaaatataat

SEQ ID NO: 171225 - DNA, 18 bp, Unknown
  misc_feature (1)..( 18): Result.005 file - promoters50/1441249
aatgtttctaaattctaa

SEQ ID NO: 171226 - DNA, 18 bp, Unknown
  misc_feature (1)..( 18): Result.005 file - promoters50/1441249
tctcacactatattttaa

SEQ ID NO: 171227 - DNA, 11 bp, Unknown
  misc_feature (1)..( 11): Result.005 file - promoters50/1441249
tagctaaaatt

SEQ ID NO: 171228 - DNA, 11 bp, Unknown
  misc_feature (1)..( 11): Result.005 file - promoters50/1441249
attctacaata

SEQ ID NO: 171229 - DNA, 11 bp, Unknown
  misc_feature (1)..( 11): Result.005 file - promoters50/1441249
attatacatat

SEQ ID NO: 171230 - DNA, 12 bp, Unknown
  misc_feature (1)..( 12): Result.005 file - promoters50/1441249
ctgataaatatg

SEQ ID NO: 171231 - DNA, 12 bp, Unknown
  misc_feature (1)..( 12): Result.005 file - promoters50/1441249
tttatacataac

SEQ ID NO: 171232 - DNA, 12 bp, Unknown
  misc_feature (1)..( 12): Result.005 file - promoters50/1441249
attatacatatg

SEQ ID NO: 171233 - DNA, 12 bp, Unknown
  misc_feature (1)..( 12): Result.005 file - promoters50/1441249
tttatacataac

SEQ ID NO: 171234 - DNA, 12 bp, Unknown
  misc_feature (1)..( 12): Result.005 file - promoters50/1441249
attctacaataa

SEQ ID NO: 171235 - DNA, 12 bp, Unknown
  misc_feature (1)..( 12): Result.005 file - promoters50/1441249
ctgataaatatg

SEQ ID NO: 171236 - DNA, 10 bp, Unknown
  misc_feature (1)..( 10): Result.005 file - promoters50/1441249
tgatatgaaa

SEQ ID NO: 171237 - DNA, 10 bp, Unknown
  misc_feature (1)..( 10): Result.005 file - promoters50/1441249
ttatattaaa

SEQ ID NO: 171238 - DNA, 10 bp, Unknown
  misc_feature (1)..( 10): Result.005 file - promoters50/1441249
ttatacataa

SEQ ID NO: 171239 - DNA, 10 bp, Unknown
  misc_feature (1)..( 10): Result.005 file - promoters50/1441249
caataataac

SEQ ID NO: 171240 - DNA, 9 bp, Unknown
  misc_feature (1)..( 9): Result.005 file - promoters50/1441326
aaagtcttg

SEQ ID NO: 171241 - DNA, 9 bp, Unknown
  misc_feature (1)..( 9): Result.005 file - promoters50/1441326
aaagtcacc

SEQ ID NO: 171242 - DNA, 9 bp, Unknown
  misc_feature (1)..( 9): Result.005 file - promoters50/1441326
aaagttttg

SEQ ID NO: 171243 - DNA, 9 bp, Unknown
  misc_feature (1)..( 9): Result.005 file - promoters50/1441326
aaaaaatta

SEQ ID NO: 171244 - DNA, 9 bp, Unknown
  misc_feature (1)..( 9): Result.005 file - promoters50/1441326
aaataatct

SEQ ID NO: 171245 - DNA, 9 bp, Unknown
  misc_feature (1)..( 9): Result.005 file - promoters50/1441326
caaacatta

SEQ ID NO: 171246 - DNA, 7 bp, Unknown
  misc_feature (1)..( 7): Result.005 file - promoters50/1441326
gaaaaaa

SEQ ID NO: 171247 - DNA, 7 bp, Unknown
  misc_feature (1)..( 7): Result.005 file - promoters50/1441326
caaaaaa

SEQ ID NO: 171248 - DNA, 7 bp, Unknown
  misc_feature (1)..( 7): Result.005 file - promoters50/1441326
caataaa

SEQ ID NO: 171249 - DNA, 13 bp, Unknown
  misc_feature (1)..( 13): Result.005 file - promoters50/1441395
aaagaatcaaatc

SEQ ID NO: 171250 - DNA, 13 bp, Unknown
  misc_feature (1)..( 13): Result.005 file - promoters50/1441395
acagaataaaaac

SEQ ID NO: 171251 - DNA, 13 bp, Unknown
  misc_feature (1)..( 13): Result.005 file - promoters50/1441395
aaaaaatcaaaaa

SEQ ID NO: 171252 - DNA, 13 bp, Unknown
  misc_feature (1)..( 13): Result.005 file - promoters50/1441395
attcaatcaaatc

SEQ ID NO: 171253 - DNA, 13 bp, Unknown
  misc_feature (1)..( 13): Result.005 file - promoters50/1441395
taagaaaaaaaaa

SEQ ID NO: 171254 - DNA, 13 bp, Unknown
  misc_feature (1)..( 13): Result.005 file - promoters50/1441395
ataaaaccaagac

SEQ ID NO: 171255 - DNA, 10 bp, Unknown
  misc_feature (1)..( 10): Result.005 file - promoters50/1441460
ttatgatttc

SEQ ID NO: 171256 - DNA, 10 bp, Unknown
  misc_feature (1)..( 10): Result.005 file - promoters50/1441460
aaatgttttg

SEQ ID NO: 171257 - DNA, 10 bp, Unknown
  misc_feature (1)..( 10): Result.005 file - promoters50/1441460
ttatgctttt

SEQ ID NO: 171258 - DNA, 10 bp, Unknown
  misc_feature (1)..( 10): Result.005 file - promoters50/1441460
caattttttg

SEQ ID NO: 171259 - DNA, 10 bp, Unknown
  misc_feature (1)..( 10): Result.005 file - promoters50/1441460
taattttaat

SEQ ID NO: 171260 - DNA, 10 bp, Unknown
  misc_feature (1)..( 10): Result.005 file - promoters50/1441460
aaattttaca

SEQ ID NO: 171261 - DNA, 11 bp, Unknown
  misc_feature (1)..( 11): Result.005 file - promoters50/1441465
taaaattaacc

SEQ ID NO: 171262 - DNA, 11 bp, Unknown
  misc_feature (1)..( 11): Result.005 file - promoters50/1441465
taatattattc

SEQ ID NO: 171263 - DNA, 11 bp, Unknown
  misc_feature (1)..( 11): Result.005 file - promoters50/1441465
tattatttgat

SEQ ID NO: 171264 - DNA, 12 bp, Unknown
  misc_feature (1)..( 12): Result.005 file - promoters50/1441465
taatcatactta

SEQ ID NO: 171265 - DNA, 12 bp, Unknown
  misc_feature (1)..( 12): Result.005 file - promoters50/1441465
ccataattgttt

SEQ ID NO: 171266 - DNA, 12 bp, Unknown
  misc_feature (1)..( 12): Result.005 file - promoters50/1441465
tctttattatac

SEQ ID NO: 171267 - DNA, 13 bp, Unknown
  misc_feature (1)..( 13): Result.005 file - promoters50/1441533
aaatttcaaattt

SEQ ID NO: 171268 - DNA, 13 bp, Unknown
  misc_feature (1)..( 13): Result.005 file - promoters50/1441533
aaatttcaaagac

SEQ ID NO: 171269 - DNA, 13 bp, Unknown
  misc_feature (1)..( 13): Result.005 file - promoters50/1441533
cattttcaatttt

SEQ ID NO: 171270 - DNA, 13 bp, Unknown
  misc_feature (1)..( 13): Result.005 file - promoters50/1441533
taattttagcaag

SEQ ID NO: 171271 - DNA, 14 bp, Unknown
  misc_feature (1)..( 14): Result.005 file - promoters50/1441533
aactttgcaatgag

SEQ ID NO: 171272 - DNA, 14 bp, Unknown
  misc_feature (1)..( 14): Result.005 file - promoters50/1441533
ttggattcagagaa

SEQ ID NO: 171273 - DNA, 7 bp, Unknown
  misc_feature (1)..( 7): Result.005 file - promoters50/1441539
tgatttg

SEQ ID NO: 171274 - DNA, 7 bp, Unknown
  misc_feature (1)..( 7): Result.005 file - promoters50/1441539
tgaattg

SEQ ID NO: 171275 - DNA, 7 bp, Unknown
  misc_feature (1)..( 7): Result.005 file - promoters50/1441539
ggaattg

SEQ ID NO: 171276 - DNA, 10 bp, Unknown
  misc_feature (1)..( 10): Result.005 file - promoters50/1441539
aattttcttt

SEQ ID NO: 171277 - DNA, 10 bp, Unknown
  misc_feature (1)..( 10): Result.005 file - promoters50/1441539
ggttttgttt

SEQ ID NO: 171278 - DNA, 10 bp, Unknown
  misc_feature (1)..( 10): Result.005 file - promoters50/1441539
ggtgttggtg

SEQ ID NO: 171279 - DNA, 11 bp, Unknown
  misc_feature (1)..( 11): Result.005 file - promoters50/1441548
taaacatatta

SEQ ID NO: 171280 - DNA, 11 bp, Unknown
  misc_feature (1)..( 11): Result.005 file - promoters50/1441548
taaaaatatcc

SEQ ID NO: 171281 - DNA, 11 bp, Unknown
  misc_feature (1)..( 11): Result.005 file - promoters50/1441548
agaacaaattt

SEQ ID NO: 171282 - DNA, 11 bp, Unknown
  misc_feature (1)..( 11): Result.005 file - promoters50/1441548
acaagaaattt

SEQ ID NO: 171283 - DNA, 11 bp, Unknown
  misc_feature (1)..( 11): Result.005 file - promoters50/1441548
gaagcaaattg

SEQ ID NO: 171284 - DNA, 16 bp, Unknown
  misc_feature (1)..( 16): Result.005 file - promoters50/1441548
atttttaaaaatacaa

SEQ ID NO: 171285 - DNA, 16 bp, Unknown
  misc_feature (1)..( 16): Result.005 file - promoters50/1441548
tatataacaaaaacaa

SEQ ID NO: 171286 - DNA, 16 bp, Unknown
  misc_feature (1)..( 16): Result.005 file - promoters50/1441548
ccttataataatacag

SEQ ID NO: 171287 - DNA, 16 bp, Unknown
  misc_feature (1)..( 16): Result.005 file - promoters50/1441548
aaaaataaaaataaaa

SEQ ID NO: 171288 - DNA, 16 bp, Unknown
  misc_feature (1)..( 16): Result.005 file - promoters50/1441548
tccaatccaaatacgc

SEQ ID NO: 171289 - DNA, 9 bp, Unknown
  misc_feature (1)..( 9): Result.005 file - promoters50/1441548
aaacattgt

SEQ ID NO: 171290 - DNA, 9 bp, Unknown
  misc_feature (1)..( 9): Result.005 file - promoters50/1441548
caacattat

SEQ ID NO: 171291 - DNA, 9 bp, Unknown
  misc_feature (1)..( 9): Result.005 file - promoters50/1441548
aaaaattta

SEQ ID NO: 171292 - DNA, 9 bp, Unknown
  misc_feature (1)..( 9): Result.005 file - promoters50/1441548
aaaaataat

SEQ ID NO: 171293 - DNA, 9 bp, Unknown
  misc_feature (1)..( 9): Result.005 file - promoters50/1441548
caaaattaa

SEQ ID NO: 171294 - DNA, 9 bp, Unknown
  misc_feature (1)..( 9): Result.005 file - promoters50/1441548
caagattca

SEQ ID NO: 171295 - DNA, 16 bp, Unknown
  misc_feature (1)..( 16): Result.005 file - promoters50/1441548
caaattaaatcagagg

SEQ ID NO: 171296 - DNA, 16 bp, Unknown
  misc_feature (1)..( 16): Result.005 file - promoters50/1441548
aaaaataaatcaacgt

SEQ ID NO: 171297 - DNA, 16 bp, Unknown
  misc_feature (1)..( 16): Result.005 file - promoters50/1441548
aaaaataaaaataaaa

SEQ ID NO: 171298 - DNA, 16 bp, Unknown
  misc_feature (1)..( 16): Result.005 file - promoters50/1441548
aaacataatcaattga

SEQ ID NO: 171299 - DNA, 16 bp, Unknown
  misc_feature (1)..( 16): Result.005 file - promoters50/1441548
aaaaataaagaaacct

SEQ ID NO: 171300 - DNA, 8 bp, Unknown
  misc_feature (1)..( 8): Result.005 file - promoters50/1441569
aattttgt

SEQ ID NO: 171301 - DNA, 8 bp, Unknown
  misc_feature (1)..( 8): Result.005 file - promoters50/1441569
aattttgt

SEQ ID NO: 171302 - DNA, 8 bp, Unknown
  misc_feature (1)..( 8): Result.005 file - promoters50/1441569
cattttgt

SEQ ID NO: 171303 - DNA, 11 bp, Unknown
  misc_feature (1)..( 11): Result.005 file - promoters50/1441569
gtatttttttt

SEQ ID NO: 171304 - DNA, 11 bp, Unknown
  misc_feature (1)..( 11): Result.005 file - promoters50/1441569
cagtttttttt

SEQ ID NO: 171305 - DNA, 11 bp, Unknown
  misc_feature (1)..( 11): Result.005 file - promoters50/1441569
tcattattttt

SEQ ID NO: 171306 - DNA, 12 bp, Unknown
  misc_feature (1)..( 12): Result.005 file - promoters50/1441569
gtatttcttttt

SEQ ID NO: 171307 - DNA, 8 bp, Unknown
  misc_feature (1)..( 8): Result.005 file - promoters50/1441569
tataaata

SEQ ID NO: 171308 - DNA, 8 bp, Unknown
  misc_feature (1)..( 8): Result.005 file - promoters50/1441569
tatatata

SEQ ID NO: 171309 - DNA, 8 bp, Unknown
  misc_feature (1)..( 8): Result.005 file - promoters50/1441569
tataaaaa

SEQ ID NO: 171310 - DNA, 8 bp, Unknown
  misc_feature (1)..( 8): Result.005 file - promoters50/1441569
gatatatc

SEQ ID NO: 171311 - DNA, 8 bp, Unknown
  misc_feature (1)..( 8): Result.005 file - promoters50/1441569
aatatatt

SEQ ID NO: 171312 - DNA, 8 bp, Unknown
  misc_feature (1)..( 8): Result.005 file - promoters50/1441569
aataaatt

SEQ ID NO: 171313 - DNA, 10 bp, Unknown
  misc_feature (1)..( 10): Result.005 file - promoters50/1441569
caataattta

SEQ ID NO: 171314 - DNA, 10 bp, Unknown
  misc_feature (1)..( 10): Result.005 file - promoters50/1441569
aaatacttta

SEQ ID NO: 171315 - DNA, 10 bp, Unknown
  misc_feature (1)..( 10): Result.005 file - promoters50/1441569
aaatacaatt

SEQ ID NO: 171316 - DNA, 12 bp, Unknown
  misc_feature (1)..( 12): Result.005 file - promoters50/1441569
aatcacaaaaac

SEQ ID NO: 171317 - DNA, 12 bp, Unknown
  misc_feature (1)..( 12): Result.005 file - promoters50/1441569
aattacaaaaaa

SEQ ID NO: 171318 - DNA, 12 bp, Unknown
  misc_feature (1)..( 12): Result.005 file - promoters50/1441569
aagagaaaaaac

SEQ ID NO: 171319 - DNA, 7 bp, Unknown
  misc_feature (1)..( 7): Result.005 file - promoters50/1441569
tttctta

SEQ ID NO: 171320 - DNA, 7 bp, Unknown
  misc_feature (1)..( 7): Result.005 file - promoters50/1441569
tttctta

SEQ ID NO: 171321 - DNA, 7 bp, Unknown
  misc_feature (1)..( 7): Result.005 file - promoters50/1441569
tttcttt

SEQ ID NO: 171322 - DNA, 9 bp, Unknown
  misc_feature (1)..( 9): Result.005 file - promoters50/1441569
cttgtacaa

SEQ ID NO: 171323 - DNA, 9 bp, Unknown
  misc_feature (1)..( 9): Result.005 file - promoters50/1441569
cttgttcaa

SEQ ID NO: 171324 - DNA, 9 bp, Unknown
  misc_feature (1)..( 9): Result.005 file - promoters50/1441569
tttgtactt

SEQ ID NO: 171325 - DNA, 9 bp, Unknown
  misc_feature (1)..( 9): Result.005 file - promoters50/1441614
ccattttac

SEQ ID NO: 171326 - DNA, 9 bp, Unknown
  misc_feature (1)..( 9): Result.005 file - promoters50/1441614
agattttac

SEQ ID NO: 171327 - DNA, 9 bp, Unknown
  misc_feature (1)..( 9): Result.005 file - promoters50/1441614
ccattttcg

SEQ ID NO: 171328 - DNA, 9 bp, Unknown
  misc_feature (1)..( 9): Result.005 file - promoters50/1441614
ccatttagt

SEQ ID NO: 171329 - DNA, 7 bp, Unknown
  misc_feature (1)..( 7): Result.005 file - promoters50/1441614
tgtgttt

SEQ ID NO: 171330 - DNA, 7 bp, Unknown
  misc_feature (1)..( 7): Result.005 file - promoters50/1441614
tgtgttg

SEQ ID NO: 171331 - DNA, 7 bp, Unknown
  misc_feature (1)..( 7): Result.005 file - promoters50/1441614
tgtgttt

SEQ ID NO: 171332 - DNA, 8 bp, Unknown
  misc_feature (1)..( 8): Result.005 file - promoters50/1441614
tgtttttt

SEQ ID NO: 171333 - DNA, 8 bp, Unknown
  misc_feature (1)..( 8): Result.005 file - promoters50/1441614
tatttttt

SEQ ID NO: 171334 - DNA, 8 bp, Unknown
  misc_feature (1)..( 8): Result.005 file - promoters50/1441614
tgtgtttc

SEQ ID NO: 171335 - DNA, 13 bp, Unknown
  misc_feature (1)..( 13): Result.005 file - promoters50/1441614
ctatctccatttt

SEQ ID NO: 171336 - DNA, 13 bp, Unknown
  misc_feature (1)..( 13): Result.005 file - promoters50/1441614
ctatgtccattta

SEQ ID NO: 171337 - DNA, 13 bp, Unknown
  misc_feature (1)..( 13): Result.005 file - promoters50/1441614
tgcaaaccatttt

SEQ ID NO: 171338 - DNA, 7 bp, Unknown
  misc_feature (1)..( 7): Result.005 file - promoters50/1441614
tttttag

SEQ ID NO: 171339 - DNA, 7 bp, Unknown
  misc_feature (1)..( 7): Result.005 file - promoters50/1441614
tttttat

SEQ ID NO: 171340 - DNA, 7 bp, Unknown
  misc_feature (1)..( 7): Result.005 file - promoters50/1441614
cttttat

SEQ ID NO: 171341 - DNA, 13 bp, Unknown
  misc_feature (1)..( 13): Result.005 file - promoters50/1441651
tgttataaatttc

SEQ ID NO: 171342 - DNA, 13 bp, Unknown
  misc_feature (1)..( 13): Result.005 file - promoters50/1441651
tgtgataaataag

SEQ ID NO: 171343 - DNA, 13 bp, Unknown
  misc_feature (1)..( 13): Result.005 file - promoters50/1441651
tcgcgtaagtttt

SEQ ID NO: 171344 - DNA, 13 bp, Unknown
  misc_feature (1)..( 13): Result.005 file - promoters50/1441651
ccatgtaattttc

SEQ ID NO: 171345 - DNA, 9 bp, Unknown
  misc_feature (1)..( 9): Result.005 file - promoters50/1441651
tgtttattt

SEQ ID NO: 171346 - DNA, 9 bp, Unknown
  misc_feature (1)..( 9): Result.005 file - promoters50/1441651
tgtttattt

SEQ ID NO: 171347 - DNA, 10 bp, Unknown
  misc_feature (1)..( 10): Result.005 file - promoters50/1441651
tttttacttt

SEQ ID NO: 171348 - DNA, 7 bp, Unknown
  misc_feature (1)..( 7): Result.005 file - promoters50/1441651
tgataaa

SEQ ID NO: 171349 - DNA, 7 bp, Unknown
  misc_feature (1)..( 7): Result.005 file - promoters50/1441651
tgaaaaa

SEQ ID NO: 171350 - DNA, 7 bp, Unknown
  misc_feature (1)..( 7): Result.005 file - promoters50/1441651
tgaaaac

SEQ ID NO: 171351 - DNA, 12 bp, Unknown
  misc_feature (1)..( 12): Result.005 file - promoters50/1441657
ataatttgcaag

SEQ ID NO: 171352 - DNA, 12 bp, Unknown
  misc_feature (1)..( 12): Result.005 file - promoters50/1441657
ataatttcgagg

SEQ ID NO: 171353 - DNA, 12 bp, Unknown
  misc_feature (1)..( 12): Result.005 file - promoters50/1441657
ttaatttgatag

SEQ ID NO: 171354 - DNA, 12 bp, Unknown
  misc_feature (1)..( 12): Result.005 file - promoters50/1441657
cccatttgattt

SEQ ID NO: 171355 - DNA, 12 bp, Unknown
  misc_feature (1)..( 12): Result.005 file - promoters50/1441657
tcgctttgataa

SEQ ID NO: 171356 - DNA, 12 bp, Unknown
  misc_feature (1)..( 12): Result.005 file - promoters50/1441657
agacttggatat

SEQ ID NO: 171357 - DNA, 9 bp, Unknown
  misc_feature (1)..( 9): Result.005 file - promoters50/1441722
tgcgtcagt

SEQ ID NO: 171358 - DNA, 9 bp, Unknown
  misc_feature (1)..( 9): Result.005 file - promoters50/1441722
tgcctcagg

SEQ ID NO: 171359 - DNA, 9 bp, Unknown
  misc_feature (1)..( 9): Result.005 file - promoters50/1441722
tctgtcagt

SEQ ID NO: 171360 - DNA, 7 bp, Unknown
  misc_feature (1)..( 7): Result.005 file - promoters50/1441722
caattta

SEQ ID NO: 171361 - DNA, 7 bp, Unknown
  misc_feature (1)..( 7): Result.005 file - promoters50/1441722
caatttc

SEQ ID NO: 171362 - DNA, 7 bp, Unknown
  misc_feature (1)..( 7): Result.005 file - promoters50/1441722
aaattta

SEQ ID NO: 171363 - DNA, 9 bp, Unknown
  misc_feature (1)..( 9): Result.005 file - promoters50/1441762
gatcacttt

SEQ ID NO: 171364 - DNA, 9 bp, Unknown
  misc_feature (1)..( 9): Result.005 file - promoters50/1441762
aatctcttt

SEQ ID NO: 171365 - DNA, 9 bp, Unknown
  misc_feature (1)..( 9): Result.005 file - promoters50/1441762
aatctccaa

SEQ ID NO: 171366 - DNA, 7 bp, Unknown
  misc_feature (1)..( 7): Result.005 file - promoters50/1441762
taagtta

SEQ ID NO: 171367 - DNA, 7 bp, Unknown
  misc_feature (1)..( 7): Result.005 file - promoters50/1441762
taattta

SEQ ID NO: 171368 - DNA, 7 bp, Unknown
  misc_feature (1)..( 7): Result.005 file - promoters50/1441762
taatttt

SEQ ID NO: 171369 - DNA, 12 bp, Unknown
  misc_feature (1)..( 12): Result.005 file - promoters50/1441814
agtaatatttga

SEQ ID NO: 171370 - DNA, 12 bp, Unknown
  misc_feature (1)..( 12): Result.005 file - promoters50/1441814
gagtatatttta

SEQ ID NO: 171371 - DNA, 12 bp, Unknown
  misc_feature (1)..( 12): Result.005 file - promoters50/1441814
cttaaaattgag

SEQ ID NO: 171372 - DNA, 12 bp, Unknown
  misc_feature (1)..( 12): Result.005 file - promoters50/1441814
cttacaatttca

SEQ ID NO: 171373 - DNA, 12 bp, Unknown
  misc_feature (1)..( 12): Result.005 file - promoters50/1441814
ttgtaaattttg

SEQ ID NO: 171374 - DNA, 12 bp, Unknown
  misc_feature (1)..( 12): Result.005 file - promoters50/1441814
caaaatattgca

SEQ ID NO: 171375 - DNA, 12 bp, Unknown
  misc_feature (1)..( 12): Result.005 file - promoters50/1441814
taataaagtatg

SEQ ID NO: 171376 - DNA, 11 bp, Unknown
  misc_feature (1)..( 11): Result.005 file - promoters50/1441814
ctttgcttaca

SEQ ID NO: 171377 - DNA, 11 bp, Unknown
  misc_feature (1)..( 11): Result.005 file - promoters50/1441814
ttttacttttt

SEQ ID NO: 171378 - DNA, 11 bp, Unknown
  misc_feature (1)..( 11): Result.005 file - promoters50/1441814
tttttcttttc

SEQ ID NO: 171379 - DNA, 11 bp, Unknown
  misc_feature (1)..( 11): Result.005 file - promoters50/1441814
gttttcttcca

SEQ ID NO: 171380 - DNA, 11 bp, Unknown
  misc_feature (1)..( 11): Result.005 file - promoters50/1441814
ttttaccagtg

SEQ ID NO: 171381 - DNA, 11 bp, Unknown
  misc_feature (1)..( 11): Result.005 file - promoters50/1441814
atatacttttt

SEQ ID NO: 171382 - DNA, 11 bp, Unknown
  misc_feature (1)..( 11): Result.005 file - promoters50/1441814
atattcttgct

SEQ ID NO: 171383 - DNA, 14 bp, Unknown
  misc_feature (1)..( 14): Result.005 file - promoters50/1441814
caacaatgtacaaa

SEQ ID NO: 171384 - DNA, 14 bp, Unknown
  misc_feature (1)..( 14): Result.005 file - promoters50/1441814
caataatttacatt

SEQ ID NO: 171385 - DNA, 14 bp, Unknown
  misc_feature (1)..( 14): Result.005 file - promoters50/1441814
gtataattttatat

SEQ ID NO: 171386 - DNA, 14 bp, Unknown
  misc_feature (1)..( 14): Result.005 file - promoters50/1441814
aagacatgtaaaat

SEQ ID NO: 171387 - DNA, 14 bp, Unknown
  misc_feature (1)..( 14): Result.005 file - promoters50/1441814
tgaaaatttatacg

SEQ ID NO: 171388 - DNA, 14 bp, Unknown
  misc_feature (1)..( 14): Result.005 file - promoters50/1441814
gaataataaaatgt

SEQ ID NO: 171389 - DNA, 10 bp, Unknown
  misc_feature (1)..( 10): Result.005 file - promoters50/1441835
ctataaaaag

SEQ ID NO: 171390 - DNA, 10 bp, Unknown
  misc_feature (1)..( 10): Result.005 file - promoters50/1441835
atataaaaat

SEQ ID NO: 171391 - DNA, 10 bp, Unknown
  misc_feature (1)..( 10): Result.005 file - promoters50/1441835
aaatagaaga

SEQ ID NO: 171392 - DNA, 10 bp, Unknown
  misc_feature (1)..( 10): Result.005 file - promoters50/1441835
gtattaaaat

SEQ ID NO: 171393 - DNA, 10 bp, Unknown
  misc_feature (1)..( 10): Result.005 file - promoters50/1441835
atataaacag

SEQ ID NO: 171394 - DNA, 10 bp, Unknown
  misc_feature (1)..( 10): Result.005 file - promoters50/1441835
agtttaaaat

SEQ ID NO: 171395 - DNA, 14 bp, Unknown
  misc_feature (1)..( 14): Result.005 file - promoters50/1441835
attaattaatcgaa

SEQ ID NO: 171396 - DNA, 14 bp, Unknown
  misc_feature (1)..( 14): Result.005 file - promoters50/1441835
attaataaattttg

SEQ ID NO: 171397 - DNA, 14 bp, Unknown
  misc_feature (1)..( 14): Result.005 file - promoters50/1441835
aataaataatcatt

SEQ ID NO: 171398 - DNA, 14 bp, Unknown
  misc_feature (1)..( 14): Result.005 file - promoters50/1441835
acaaaacaattcaa

SEQ ID NO: 171399 - DNA, 14 bp, Unknown
  misc_feature (1)..( 14): Result.005 file - promoters50/1441835
gttaaaaaatccaa

SEQ ID NO: 171400 - DNA, 14 bp, Unknown
  misc_feature (1)..( 14): Result.005 file - promoters50/1441835
atcaatatattttt

SEQ ID NO: 171401 - DNA, 12 bp, Unknown
  misc_feature (1)..( 12): Result.005 file - promoters50/1441841
ttggattttgca

SEQ ID NO: 171402 - DNA, 12 bp, Unknown
  misc_feature (1)..( 12): Result.005 file - promoters50/1441841
tccaattttgta

SEQ ID NO: 171403 - DNA, 12 bp, Unknown
  misc_feature (1)..( 12): Result.005 file - promoters50/1441841
atgtattttgtg

SEQ ID NO: 171404 - DNA, 12 bp, Unknown
  misc_feature (1)..( 12): Result.005 file - promoters50/1441841
aaaacttttgca

SEQ ID NO: 171405 - DNA, 12 bp, Unknown
  misc_feature (1)..( 12): Result.005 file - promoters50/1441841
atcaaatttgtt

SEQ ID NO: 171406 - DNA, 12 bp, Unknown
  misc_feature (1)..( 12): Result.005 file - promoters50/1441841
gtcaaattccac

SEQ ID NO: 171407 - DNA, 12 bp, Unknown
  misc_feature (1)..( 12): Result.005 file - promoters50/1441841
atgtctttttca

SEQ ID NO: 171408 - DNA, 14 bp, Unknown
  misc_feature (1)..( 14): Result.005 file - promoters50/1441841
aaatttgttataac

SEQ ID NO: 171409 - DNA, 14 bp, Unknown
  misc_feature (1)..( 14): Result.005 file - promoters50/1441841
tcattttttaattt

SEQ ID NO: 171410 - DNA, 14 bp, Unknown
  misc_feature (1)..( 14): Result.005 file - promoters50/1441841
caattttgtagata

SEQ ID NO: 171411 - DNA, 14 bp, Unknown
  misc_feature (1)..( 14): Result.005 file - promoters50/1441841
tcattgtttaattt

SEQ ID NO: 171412 - DNA, 14 bp, Unknown
  misc_feature (1)..( 14): Result.005 file - promoters50/1441841
ccacggtttaataa

SEQ ID NO: 171413 - DNA, 14 bp, Unknown
  misc_feature (1)..( 14): Result.005 file - promoters50/1441841
tcgttttgtgaaat

SEQ ID NO: 171414 - DNA, 10 bp, Unknown
  misc_feature (1)..( 10): Result.005 file - promoters50/1441859
atttattttg

SEQ ID NO: 171415 - DNA, 10 bp, Unknown
  misc_feature (1)..( 10): Result.005 file - promoters50/1441859
taatatttta

SEQ ID NO: 171416 - DNA, 10 bp, Unknown
  misc_feature (1)..( 10): Result.005 file - promoters50/1441859
tcttaattta

SEQ ID NO: 171417 - DNA, 10 bp, Unknown
  misc_feature (1)..( 10): Result.005 file - promoters50/1441859
aaatatcttg

SEQ ID NO: 171418 - DNA, 10 bp, Unknown
  misc_feature (1)..( 10): Result.005 file - promoters50/1441859
ctttattttt

SEQ ID NO: 171419 - DNA, 10 bp, Unknown
  misc_feature (1)..( 10): Result.005 file - promoters50/1441859
cttttttttt

SEQ ID NO: 171420 - DNA, 15 bp, Unknown
  misc_feature (1)..( 15): Result.005 file - promoters50/1441912
ccatgaattggcact

SEQ ID NO: 171421 - DNA, 15 bp, Unknown
  misc_feature (1)..( 15): Result.005 file - promoters50/1441912
tattgatttgttcct

SEQ ID NO: 171422 - DNA, 15 bp, Unknown
  misc_feature (1)..( 15): Result.005 file - promoters50/1441912
ttgtgatttggtgac

SEQ ID NO: 171423 - DNA, 15 bp, Unknown
  misc_feature (1)..( 15): Result.005 file - promoters50/1441912
tatttattttagatt

SEQ ID NO: 171424 - DNA, 15 bp, Unknown
  misc_feature (1)..( 15): Result.005 file - promoters50/1441912
acatgattttgtgaa

SEQ ID NO: 171425 - DNA, 15 bp, Unknown
  misc_feature (1)..( 15): Result.005 file - promoters50/1441912
tatctattttagatt

SEQ ID NO: 171426 - DNA, 8 bp, Unknown
  misc_feature (1)..( 8): Result.005 file - promoters50/1441937
caatttat

SEQ ID NO: 171427 - DNA, 8 bp, Unknown
  misc_feature (1)..( 8): Result.005 file - promoters50/1441937
taatgtat

SEQ ID NO: 171428 - DNA, 8 bp, Unknown
  misc_feature (1)..( 8): Result.005 file - promoters50/1441937
caatttgc

SEQ ID NO: 171429 - DNA, 8 bp, Unknown
  misc_feature (1)..( 8): Result.005 file - promoters50/1441937
taaaacaa

SEQ ID NO: 171430 - DNA, 8 bp, Unknown
  misc_feature (1)..( 8): Result.005 file - promoters50/1441937
aaaatcaa

SEQ ID NO: 171431 - DNA, 8 bp, Unknown
  misc_feature (1)..( 8): Result.005 file - promoters50/1441937
aaaatcgt

SEQ ID NO: 171432 - DNA, 8 bp, Unknown
  misc_feature (1)..( 8): Result.005 file - promoters50/1441937
taacaata

SEQ ID NO: 171433 - DNA, 8 bp, Unknown
  misc_feature (1)..( 8): Result.005 file - promoters50/1441937
taaaaatc

SEQ ID NO: 171434 - DNA, 8 bp, Unknown
  misc_feature (1)..( 8): Result.005 file - promoters50/1441937
ttaaaatc

SEQ ID NO: 171435 - DNA, 8 bp, Unknown
  misc_feature (1)..( 8): Result.005 file - promoters50/1441937
atgtcttg

SEQ ID NO: 171436 - DNA, 8 bp, Unknown
  misc_feature (1)..( 8): Result.005 file - promoters50/1441937
ctgtgttg

SEQ ID NO: 171437 - DNA, 8 bp, Unknown
  misc_feature (1)..( 8): Result.005 file - promoters50/1441937
ctgtgtct

SEQ ID NO: 171438 - DNA, 8 bp, Unknown
  misc_feature (1)..( 8): Result.005 file - promoters50/1441937
tcttattt

SEQ ID NO: 171439 - DNA, 8 bp, Unknown
  misc_feature (1)..( 8): Result.005 file - promoters50/1441937
tcttgttt

SEQ ID NO: 171440 - DNA, 8 bp, Unknown
  misc_feature (1)..( 8): Result.005 file - promoters50/1441937
tctggttg

SEQ ID NO: 171441 - DNA, 8 bp, Unknown
  misc_feature (1)..( 8): Result.005 file - promoters50/1441959
attataca

SEQ ID NO: 171442 - DNA, 8 bp, Unknown
  misc_feature (1)..( 8): Result.005 file - promoters50/1441959
tctataca

SEQ ID NO: 171443 - DNA, 8 bp, Unknown
  misc_feature (1)..( 8): Result.005 file - promoters50/1441959
tctttact

SEQ ID NO: 171444 - DNA, 7 bp, Unknown
  misc_feature (1)..( 7): Result.005 file - promoters50/1441959
aatattt

SEQ ID NO: 171445 - DNA, 7 bp, Unknown
  misc_feature (1)..( 7): Result.005 file - promoters50/1441959
aattttt

SEQ ID NO: 171446 - DNA, 7 bp, Unknown
  misc_feature (1)..( 7): Result.005 file - promoters50/1441959
aattttg

SEQ ID NO: 171447 - DNA, 7 bp, Unknown
  misc_feature (1)..( 7): Result.005 file - promoters50/1441959
ttaattt

SEQ ID NO: 171448 - DNA, 7 bp, Unknown
  misc_feature (1)..( 7): Result.005 file - promoters50/1441959
ataattt

SEQ ID NO: 171449 - DNA, 7 bp, Unknown
  misc_feature (1)..( 7): Result.005 file - promoters50/1441959
atatttt

SEQ ID NO: 171450 - DNA, 9 bp, Unknown
  misc_feature (1)..( 9): Result.005 file - promoters50/1441963
aaaaattat

SEQ ID NO: 171451 - DNA, 9 bp, Unknown
  misc_feature (1)..( 9): Result.005 file - promoters50/1441963
aaaaatttt

SEQ ID NO: 171452 - DNA, 9 bp, Unknown
  misc_feature (1)..( 9): Result.005 file - promoters50/1441963
aaaaaaagt

SEQ ID NO: 171453 - DNA, 9 bp, Unknown
  misc_feature (1)..( 9): Result.005 file - promoters50/1441963
acaaattta

SEQ ID NO: 171454 - DNA, 7 bp, Unknown
  misc_feature (1)..( 7): Result.005 file - promoters50/1441963
gtaaaaa

SEQ ID NO: 171455 - DNA, 7 bp, Unknown
  misc_feature (1)..( 7): Result.005 file - promoters50/1441963
ataaaaa

SEQ ID NO: 171456 - DNA, 8 bp, Unknown
  misc_feature (1)..( 8): Result.005 file - promoters50/1441963
ataataaa

SEQ ID NO: 171457 - DNA, 8 bp, Unknown
  misc_feature (1)..( 8): Result.005 file - promoters50/1441963
tcaataaa

SEQ ID NO: 171458 - DNA, 9 bp, Unknown
  misc_feature (1)..( 9): Result.005 file - promoters50/1441963
aaatattat

SEQ ID NO: 171459 - DNA, 9 bp, Unknown
  misc_feature (1)..( 9): Result.005 file - promoters50/1441963
aaaaattag

SEQ ID NO: 171460 - DNA, 9 bp, Unknown
  misc_feature (1)..( 9): Result.005 file - promoters50/1441963
gattattat

SEQ ID NO: 171461 - DNA, 9 bp, Unknown
  misc_feature (1)..( 9): Result.005 file - promoters50/1441963
ctttattat

SEQ ID NO: 171462 - DNA, 10 bp, Unknown
  misc_feature (1)..( 10): Result.005 file - promoters50/1441963
aaatttaata

SEQ ID NO: 171463 - DNA, 10 bp, Unknown
  misc_feature (1)..( 10): Result.005 file - promoters50/1441963
aaatataaga

SEQ ID NO: 171464 - DNA, 10 bp, Unknown
  misc_feature (1)..( 10): Result.005 file - promoters50/1441963
caatacaaga

SEQ ID NO: 171465 - DNA, 10 bp, Unknown
  misc_feature (1)..( 10): Result.005 file - promoters50/1441963
aaacatactc

SEQ ID NO: 171466 - DNA, 8 bp, Unknown
  misc_feature (1)..( 8): Result.005 file - promoters50/1441963
cttaaaga

SEQ ID NO: 171467 - DNA, 8 bp, Unknown
  misc_feature (1)..( 8): Result.005 file - promoters50/1441963
attaaaga

SEQ ID NO: 171468 - DNA, 8 bp, Unknown
  misc_feature (1)..( 8): Result.005 file - promoters50/1441963
tctaaaat

SEQ ID NO: 171469 - DNA, 8 bp, Unknown
  misc_feature (1)..( 8): Result.005 file - promoters50/1441963
tataaaac

SEQ ID NO: 171470 - DNA, 8 bp, Unknown
  misc_feature (1)..( 8): Result.005 file - promoters50/1441970
ctcttgtt

SEQ ID NO: 171471 - DNA, 8 bp, Unknown
  misc_feature (1)..( 8): Result.005 file - promoters50/1441970
atctcgtt

SEQ ID NO: 171472 - DNA, 8 bp, Unknown
  misc_feature (1)..( 8): Result.005 file - promoters50/1441970
ctcttgac

SEQ ID NO: 171473 - DNA, 7 bp, Unknown
  misc_feature (1)..( 7): Result.005 file - promoters50/1441970
gtttttc

SEQ ID NO: 171474 - DNA, 7 bp, Unknown
  misc_feature (1)..( 7): Result.005 file - promoters50/1441970
ctttttc

SEQ ID NO: 171475 - DNA, 7 bp, Unknown
  misc_feature (1)..( 7): Result.005 file - promoters50/1441970
gtttttg

SEQ ID NO: 171476 - DNA, 9 bp, Unknown
  misc_feature (1)..( 9): Result.005 file - promoters50/1441970
ttgttattg

SEQ ID NO: 171477 - DNA, 9 bp, Unknown
  misc_feature (1)..( 9): Result.005 file - promoters50/1441970
atgttcttg

SEQ ID NO: 171478 - DNA, 9 bp, Unknown
  misc_feature (1)..( 9): Result.005 file - promoters50/1441970
atgatctcg

SEQ ID NO: 171479 - DNA, 9 bp, Unknown
  misc_feature (1)..( 9): Result.005 file - promoters50/1441970
acattcatt

SEQ ID NO: 171480 - DNA, 9 bp, Unknown
  misc_feature (1)..( 9): Result.005 file - promoters50/1441970
gcatttatt

SEQ ID NO: 171481 - DNA, 9 bp, Unknown
  misc_feature (1)..( 9): Result.005 file - promoters50/1441970
acattcgaa

SEQ ID NO: 171482 - DNA, 8 bp, Unknown
  misc_feature (1)..( 8): Result.005 file - promoters50/1441970
cttttttt

SEQ ID NO: 171483 - DNA, 8 bp, Unknown
  misc_feature (1)..( 8): Result.005 file - promoters50/1441970
attttttt

SEQ ID NO: 171484 - DNA, 8 bp, Unknown
  misc_feature (1)..( 8): Result.005 file - promoters50/1441970
atttttct

SEQ ID NO: 171485 - DNA, 8 bp, Unknown
  misc_feature (1)..( 8): Result.005 file - promoters50/1441970
ttttttta

SEQ ID NO: 171486 - DNA, 8 bp, Unknown
  misc_feature (1)..( 8): Result.005 file - promoters50/1441970
atttttta

SEQ ID NO: 171487 - DNA, 8 bp, Unknown
  misc_feature (1)..( 8): Result.005 file - promoters50/1441970
atttttct

SEQ ID NO: 171488 - DNA, 10 bp, Unknown
  misc_feature (1)..( 10): Result.005 file - promoters50/1441985
caaattttgt

SEQ ID NO: 171489 - DNA, 10 bp, Unknown
  misc_feature (1)..( 10): Result.005 file - promoters50/1441985
acaattttgt

SEQ ID NO: 171490 - DNA, 10 bp, Unknown
  misc_feature (1)..( 10): Result.005 file - promoters50/1441985
tacattttgt

SEQ ID NO: 171491 - DNA, 10 bp, Unknown
  misc_feature (1)..( 10): Result.005 file - promoters50/1441985
acagtttctt

SEQ ID NO: 171492 - DNA, 11 bp, Unknown
  misc_feature (1)..( 11): Result.005 file - promoters50/1441985
gtatttttttt

SEQ ID NO: 171493 - DNA, 11 bp, Unknown
  misc_feature (1)..( 11): Result.005 file - promoters50/1441985
cagtttttttt

SEQ ID NO: 171494 - DNA, 11 bp, Unknown
  misc_feature (1)..( 11): Result.005 file - promoters50/1441985
tcattattttt

SEQ ID NO: 171495 - DNA, 12 bp, Unknown
  misc_feature (1)..( 12): Result.005 file - promoters50/1441985
gtatttcttttt

SEQ ID NO: 171496 - DNA, 8 bp, Unknown
  misc_feature (1)..( 8): Result.005 file - promoters50/1441985
ttttgttg

SEQ ID NO: 171497 - DNA, 8 bp, Unknown
  misc_feature (1)..( 8): Result.005 file - promoters50/1441985
ttttgtcg

SEQ ID NO: 171498 - DNA, 8 bp, Unknown
  misc_feature (1)..( 8): Result.005 file - promoters50/1441985
ttttgtat

SEQ ID NO: 171499 - DNA, 8 bp, Unknown
  misc_feature (1)..( 8): Result.005 file - promoters50/1441985
ctttatcg

SEQ ID NO: 171500 - DNA, 9 bp, Unknown
  misc_feature (1)..( 9): Result.005 file - promoters50/1441985
ttaatatat

SEQ ID NO: 171501 - DNA, 9 bp, Unknown
  misc_feature (1)..( 9): Result.005 file - promoters50/1441985
aaaatataa

SEQ ID NO: 171502 - DNA, 9 bp, Unknown
  misc_feature (1)..( 9): Result.005 file - promoters50/1441985
aaaaaataa

SEQ ID NO: 171503 - DNA, 9 bp, Unknown
  misc_feature (1)..( 9): Result.005 file - promoters50/1441985
aaagaattt

SEQ ID NO: 171504 - DNA, 11 bp, Unknown
  misc_feature (1)..( 11): Result.005 file - promoters50/1441985
aatcacaaaaa

SEQ ID NO: 171505 - DNA, 11 bp, Unknown
  misc_feature (1)..( 11): Result.005 file - promoters50/1441985
aattacaaaaa

SEQ ID NO: 171506 - DNA, 11 bp, Unknown
  misc_feature (1)..( 11): Result.005 file - promoters50/1441985
aaatactatga

SEQ ID NO: 171507 - DNA, 11 bp, Unknown
  misc_feature (1)..( 11): Result.005 file - promoters50/1441985
aaaaacacttt

SEQ ID NO: 171508 - DNA, 8 bp, Unknown
  misc_feature (1)..( 8): Result.005 file - promoters50/1441988
ttaaaaaa

SEQ ID NO: 171509 - DNA, 8 bp, Unknown
  misc_feature (1)..( 8): Result.005 file - promoters50/1441988
acaaaaaa

SEQ ID NO: 171510 - DNA, 8 bp, Unknown
  misc_feature (1)..( 8): Result.005 file - promoters50/1441988
acataaac

SEQ ID NO: 171511 - DNA, 10 bp, Unknown
  misc_feature (1)..( 10): Result.005 file - promoters50/1441990
aaacagaaaa

SEQ ID NO: 171512 - DNA, 10 bp, Unknown
  misc_feature (1)..( 10): Result.005 file - promoters50/1441990
gaacacaaag

SEQ ID NO: 171513 - DNA, 11 bp, Unknown
  misc_feature (1)..( 11): Result.005 file - promoters50/1441990
aactagataat

SEQ ID NO: 171514 - DNA, 11 bp, Unknown
  misc_feature (1)..( 11): Result.005 file - promoters50/1441990
ctagagaaaat

SEQ ID NO: 171515 - DNA, 11 bp, Unknown
  misc_feature (1)..( 11): Result.005 file - promoters50/1441990
aaaaagaaatg

SEQ ID NO: 171516 - DNA, 11 bp, Unknown
  misc_feature (1)..( 11): Result.005 file - promoters50/1441990
gagaataaaaa

SEQ ID NO: 171517 - DNA, 9 bp, Unknown
  misc_feature (1)..( 9): Result.005 file - promoters50/1441990
atatataaa

SEQ ID NO: 171518 - DNA, 9 bp, Unknown
  misc_feature (1)..( 9): Result.005 file - promoters50/1441990
atatatata

SEQ ID NO: 171519 - DNA, 9 bp, Unknown
  misc_feature (1)..( 9): Result.005 file - promoters50/1441990
ttatataga

SEQ ID NO: 171520 - DNA, 9 bp, Unknown
  misc_feature (1)..( 9): Result.005 file - promoters50/1441990
ataaaaagc

SEQ ID NO: 171521 - DNA, 9 bp, Unknown
  misc_feature (1)..( 9): Result.005 file - promoters50/1441990
atatataaa

SEQ ID NO: 171522 - DNA, 9 bp, Unknown
  misc_feature (1)..( 9): Result.005 file - promoters50/1441990
ttaaatagc

SEQ ID NO: 171523 - DNA, 11 bp, Unknown
  misc_feature (1)..( 11): Result.005 file - promoters50/1441990
tgttttaaaag

SEQ ID NO: 171524 - DNA, 11 bp, Unknown
  misc_feature (1)..( 11): Result.005 file - promoters50/1441990
agttataaatc

SEQ ID NO: 171525 - DNA, 11 bp, Unknown
  misc_feature (1)..( 11): Result.005 file - promoters50/1441990
tctttcaaaat

SEQ ID NO: 171526 - DNA, 11 bp, Unknown
  misc_feature (1)..( 11): Result.005 file - promoters50/1441990
agttatgaatc

SEQ ID NO: 171527 - DNA, 11 bp, Unknown
  misc_feature (1)..( 11): Result.005 file - promoters50/1441990
aaaaccaaaat

SEQ ID NO: 171528 - DNA, 11 bp, Unknown
  misc_feature (1)..( 11): Result.005 file - promoters50/1441990
ggcggcaaaat

SEQ ID NO: 171529 - DNA, 10 bp, Unknown
  misc_feature (1)..( 10): Result.005 file - promoters50/1442015
aaagaagaca

SEQ ID NO: 171530 - DNA, 10 bp, Unknown
  misc_feature (1)..( 10): Result.005 file - promoters50/1442015
aaagaagaag

SEQ ID NO: 171531 - DNA, 10 bp, Unknown
  misc_feature (1)..( 10): Result.005 file - promoters50/1442015
gaagaagaag

SEQ ID NO: 171532 - DNA, 10 bp, Unknown
  misc_feature (1)..( 10): Result.005 file - promoters50/1442015
ccagaaggaa

SEQ ID NO: 171533 - DNA, 6 bp, Unknown
  misc_feature (1)..( 6): Result.005 file - promoters50/1442015
tttttt

SEQ ID NO: 171534 - DNA, 6 bp, Unknown
  misc_feature (1)..( 6): Result.005 file - promoters50/1442015
tttttt

SEQ ID NO: 171535 - DNA, 6 bp, Unknown
  misc_feature (1)..( 6): Result.005 file - promoters50/1442015
tttttt

SEQ ID NO: 171536 - DNA, 11 bp, Unknown
  misc_feature (1)..( 11): Result.005 file - promoters50/1442015
ttaaatgaaga

SEQ ID NO: 171537 - DNA, 11 bp, Unknown
  misc_feature (1)..( 11): Result.005 file - promoters50/1442015
agaaatgaatt

SEQ ID NO: 171538 - DNA, 11 bp, Unknown
  misc_feature (1)..( 11): Result.005 file - promoters50/1442015
agaagtgaatt

SEQ ID NO: 171539 - DNA, 10 bp, Unknown
  misc_feature (1)..( 10): Result.005 file - promoters50/1442015
attctattag

SEQ ID NO: 171540 - DNA, 10 bp, Unknown
  misc_feature (1)..( 10): Result.005 file - promoters50/1442015
attctgttat

SEQ ID NO: 171541 - DNA, 10 bp, Unknown
  misc_feature (1)..( 10): Result.005 file - promoters50/1442015
acgctgttat

SEQ ID NO: 171542 - DNA, 10 bp, Unknown
  misc_feature (1)..( 10): Result.005 file - promoters50/1442104
caaacttatt

SEQ ID NO: 171543 - DNA, 10 bp, Unknown
  misc_feature (1)..( 10): Result.005 file - promoters50/1442104
ttttcttatt

SEQ ID NO: 171544 - DNA, 10 bp, Unknown
  misc_feature (1)..( 10): Result.005 file - promoters50/1442104
ttttcatatt

SEQ ID NO: 171545 - DNA, 10 bp, Unknown
  misc_feature (1)..( 10): Result.005 file - promoters50/1442104
ctacatttta

SEQ ID NO: 171546 - DNA, 10 bp, Unknown
  misc_feature (1)..( 10): Result.005 file - promoters50/1442104
ttggatttta

SEQ ID NO: 171547 - DNA, 10 bp, Unknown
  misc_feature (1)..( 10): Result.005 file - promoters50/1442104
ttggattttt

SEQ ID NO: 171548 - DNA, 12 bp, Unknown
  misc_feature (1)..( 12): Result.005 file - promoters50/1442156
atatagttataa

SEQ ID NO: 171549 - DNA, 12 bp, Unknown
  misc_feature (1)..( 12): Result.005 file - promoters50/1442156
aaataattaaac

SEQ ID NO: 171550 - DNA, 12 bp, Unknown
  misc_feature (1)..( 12): Result.005 file - promoters50/1442156
aaatagtttcaa

SEQ ID NO: 171551 - DNA, 12 bp, Unknown
  misc_feature (1)..( 12): Result.005 file - promoters50/1442156
ttattgttttct

SEQ ID NO: 171552 - DNA, 12 bp, Unknown
  misc_feature (1)..( 12): Result.005 file - promoters50/1442156
agaaagaatcaa

SEQ ID NO: 171553 - DNA, 12 bp, Unknown
  misc_feature (1)..( 12): Result.005 file - promoters50/1442156
aaaaagttgcaa

SEQ ID NO: 171554 - DNA, 10 bp, Unknown
  misc_feature (1)..( 10): Result.005 file - promoters50/1442156
caaaaaataa

SEQ ID NO: 171555 - DNA, 10 bp, Unknown
  misc_feature (1)..( 10): Result.005 file - promoters50/1442156
gaaaaaaaaa

SEQ ID NO: 171556 - DNA, 10 bp, Unknown
  misc_feature (1)..( 10): Result.005 file - promoters50/1442156
taaaaaagga

SEQ ID NO: 171557 - DNA, 10 bp, Unknown
  misc_feature (1)..( 10): Result.005 file - promoters50/1442156
taaaagataa

SEQ ID NO: 171558 - DNA, 11 bp, Unknown
  misc_feature (1)..( 11): Result.005 file - promoters50/1442156
taaacaaaatc

SEQ ID NO: 171559 - DNA, 11 bp, Unknown
  misc_feature (1)..( 11): Result.005 file - promoters50/1442156
gaaaaagtctt

SEQ ID NO: 171560 - DNA, 9 bp, Unknown
  misc_feature (1)..( 9): Result.005 file - promoters50/1442179
actcaacaa

SEQ ID NO: 171561 - DNA, 9 bp, Unknown
  misc_feature (1)..( 9): Result.005 file - promoters50/1442179
tgtcatcaa

SEQ ID NO: 171562 - DNA, 9 bp, Unknown
  misc_feature (1)..( 9): Result.005 file - promoters50/1442179
actaaactc

SEQ ID NO: 171563 - DNA, 9 bp, Unknown
  misc_feature (1)..( 9): Result.005 file - promoters50/1442179
tctatactg

SEQ ID NO: 171564 - DNA, 10 bp, Unknown
  misc_feature (1)..( 10): Result.005 file - promoters50/1442189
ggctactaga

SEQ ID NO: 171565 - DNA, 10 bp, Unknown
  misc_feature (1)..( 10): Result.005 file - promoters50/1442189
aaaaactaga

SEQ ID NO: 171566 - DNA, 10 bp, Unknown
  misc_feature (1)..( 10): Result.005 file - promoters50/1442189
aaaaattagt

SEQ ID NO: 171567 - DNA, 7 bp, Unknown
  misc_feature (1)..( 7): Result.005 file - promoters50/1442189
caaaaaa

SEQ ID NO: 171568 - DNA, 7 bp, Unknown
  misc_feature (1)..( 7): Result.005 file - promoters50/1442189
caataaa

SEQ ID NO: 171569 - DNA, 7 bp, Unknown
  misc_feature (1)..( 7): Result.005 file - promoters50/1442189
caataat

SEQ ID NO: 171570 - DNA, 12 bp, Unknown
  misc_feature (1)..( 12): Result.005 file - promoters50/1442189
aaaaatataatt

SEQ ID NO: 171571 - DNA, 12 bp, Unknown
  misc_feature (1)..( 12): Result.005 file - promoters50/1442189
aaatatatcaat

SEQ ID NO: 171572 - DNA, 12 bp, Unknown
  misc_feature (1)..( 12): Result.005 file - promoters50/1442189
ataagtatctca

SEQ ID NO: 171573 - DNA, 9 bp, Unknown
  misc_feature (1)..( 9): Result.005 file - promoters50/1442189
aaatgatat

SEQ ID NO: 171574 - DNA, 9 bp, Unknown
  misc_feature (1)..( 9): Result.005 file - promoters50/1442189
caataatat

SEQ ID NO: 171575 - DNA, 9 bp, Unknown
  misc_feature (1)..( 9): Result.005 file - promoters50/1442189
caataaacc

SEQ ID NO: 171576 - DNA, 6 bp, Unknown
  misc_feature (1)..( 6): Result.005 file - promoters50/1442189
aagata

SEQ ID NO: 171577 - DNA, 6 bp, Unknown
  misc_feature (1)..( 6): Result.005 file - promoters50/1442189
aagata

SEQ ID NO: 171578 - DNA, 6 bp, Unknown
  misc_feature (1)..( 6): Result.005 file - promoters50/1442189
aagata

SEQ ID NO: 171579 - DNA, 10 bp, Unknown
  misc_feature (1)..( 10): Result.005 file - promoters50/1442218
ataaagaaag

SEQ ID NO: 171580 - DNA, 10 bp, Unknown
  misc_feature (1)..( 10): Result.005 file - promoters50/1442218
atagagaata

SEQ ID NO: 171581 - DNA, 10 bp, Unknown
  misc_feature (1)..( 10): Result.005 file - promoters50/1442218
gcaaagaaag

SEQ ID NO: 171582 - DNA, 11 bp, Unknown
  misc_feature (1)..( 11): Result.005 file - promoters50/1442218
aaagaaagaag

SEQ ID NO: 171583 - DNA, 11 bp, Unknown
  misc_feature (1)..( 11): Result.005 file - promoters50/1442218
ggagaaagaag

SEQ ID NO: 171584 - DNA, 11 bp, Unknown
  misc_feature (1)..( 11): Result.005 file - promoters50/1442218
aaagaaagtag

SEQ ID NO: 171585 - DNA, 10 bp, Unknown
  misc_feature (1)..( 10): Result.005 file - promoters50/1442218
aagaaggtga

SEQ ID NO: 171586 - DNA, 10 bp, Unknown
  misc_feature (1)..( 10): Result.005 file - promoters50/1442218
gaagaggtga

SEQ ID NO: 171587 - DNA, 10 bp, Unknown
  misc_feature (1)..( 10): Result.005 file - promoters50/1442218
gagaaagtgt

SEQ ID NO: 171588 - DNA, 10 bp, Unknown
  misc_feature (1)..( 10): Result.005 file - promoters50/1442218
gagaaagaag

SEQ ID NO: 171589 - DNA, 7 bp, Unknown
  misc_feature (1)..( 7): Result.005 file - promoters50/1442218
tgaagag

SEQ ID NO: 171590 - DNA, 7 bp, Unknown
  misc_feature (1)..( 7): Result.005 file - promoters50/1442218
agaagag

SEQ ID NO: 171591 - DNA, 7 bp, Unknown
  misc_feature (1)..( 7): Result.005 file - promoters50/1442218
agaagaa

SEQ ID NO: 171592 - DNA, 10 bp, Unknown
  misc_feature (1)..( 10): Result.005 file - promoters50/1442218
aaggagaaag

SEQ ID NO: 171593 - DNA, 10 bp, Unknown
  misc_feature (1)..( 10): Result.005 file - promoters50/1442218
aagtagagaa

SEQ ID NO: 171594 - DNA, 10 bp, Unknown
  misc_feature (1)..( 10): Result.005 file - promoters50/1442218
gcgtagagaa

SEQ ID NO: 171595 - DNA, 7 bp, Unknown
  misc_feature (1)..( 7): Result.005 file - promoters50/1442218
aagtaga

SEQ ID NO: 171596 - DNA, 7 bp, Unknown
  misc_feature (1)..( 7): Result.005 file - promoters50/1442218
aagaaga

SEQ ID NO: 171597 - DNA, 7 bp, Unknown
  misc_feature (1)..( 7): Result.005 file - promoters50/1442218
gagaaga

SEQ ID NO: 171598 - DNA, 10 bp, Unknown
  misc_feature (1)..( 10): Result.005 file - promoters50/1442233
attcttctac

SEQ ID NO: 171599 - DNA, 10 bp, Unknown
  misc_feature (1)..( 10): Result.005 file - promoters50/1442233
attcttatca

SEQ ID NO: 171600 - DNA, 10 bp, Unknown
  misc_feature (1)..( 10): Result.005 file - promoters50/1442233
gttctaatca

SEQ ID NO: 171601 - DNA, 9 bp, Unknown
  misc_feature (1)..( 9): Result.005 file - promoters50/1442233
tttggaaga

SEQ ID NO: 171602 - DNA, 9 bp, Unknown
  misc_feature (1)..( 9): Result.005 file - promoters50/1442233
tttggatca

SEQ ID NO: 171603 - DNA, 9 bp, Unknown
  misc_feature (1)..( 9): Result.005 file - promoters50/1442233
cttggttca

SEQ ID NO: 171604 - DNA, 8 bp, Unknown
  misc_feature (1)..( 8): Result.005 file - promoters50/1442233
atttattt

SEQ ID NO: 171605 - DNA, 8 bp, Unknown
  misc_feature (1)..( 8): Result.005 file - promoters50/1442233
atttatgt

SEQ ID NO: 171606 - DNA, 8 bp, Unknown
  misc_feature (1)..( 8): Result.005 file - promoters50/1442233
ttttcttt

SEQ ID NO: 171607 - DNA, 15 bp, Unknown
  misc_feature (1)..( 15): Result.005 file - promoters50/1442240
tttttgatattgcta

SEQ ID NO: 171608 - DNA, 15 bp, Unknown
  misc_feature (1)..( 15): Result.005 file - promoters50/1442240
cgtttgataaaagaa

SEQ ID NO: 171609 - DNA, 15 bp, Unknown
  misc_feature (1)..( 15): Result.005 file - promoters50/1442240
attttgacatcatag

SEQ ID NO: 171610 - DNA, 15 bp, Unknown
  misc_feature (1)..( 15): Result.005 file - promoters50/1442240
tgttggatttttagg

SEQ ID NO: 171611 - DNA, 15 bp, Unknown
  misc_feature (1)..( 15): Result.005 file - promoters50/1442240
tgtttcatatgttat

SEQ ID NO: 171612 - DNA, 15 bp, Unknown
  misc_feature (1)..( 15): Result.005 file - promoters50/1442240
ctttcgaccaataac

SEQ ID NO: 171613 - DNA, 15 bp, Unknown
  misc_feature (1)..( 15): Result.005 file - promoters50/1442240
ctttcgaccaataac

SEQ ID NO: 171614 - DNA, 18 bp, Unknown
  misc_feature (1)..( 18): Result.005 file - promoters50/1442240
aacagtttgctgtcaaca

SEQ ID NO: 171615 - DNA, 18 bp, Unknown
  misc_feature (1)..( 18): Result.005 file - promoters50/1442240
gacattttgttacgagtt

SEQ ID NO: 171616 - DNA, 18 bp, Unknown
  misc_feature (1)..( 18): Result.005 file - promoters50/1442240
aacattttggttttgata

SEQ ID NO: 171617 - DNA, 18 bp, Unknown
  misc_feature (1)..( 18): Result.005 file - promoters50/1442240
tttcttttggtttcttgc

SEQ ID NO: 171618 - DNA, 18 bp, Unknown
  misc_feature (1)..( 18): Result.005 file - promoters50/1442240
aactttttctaatagaat

SEQ ID NO: 171619 - DNA, 18 bp, Unknown
  misc_feature (1)..( 18): Result.005 file - promoters50/1442240
ctcattttgacatcatag

SEQ ID NO: 171620 - DNA, 18 bp, Unknown
  misc_feature (1)..( 18): Result.005 file - promoters50/1442240
aatctttcgaccaataac

SEQ ID NO: 171621 - DNA, 15 bp, Unknown
  misc_feature (1)..( 15): Result.005 file - promoters50/1442240
ctttcgaccaataac

SEQ ID NO: 171622 - DNA, 12 bp, Unknown
  misc_feature (1)..( 12): Result.005 file - promoters50/1442244
gcagttacaaaa

SEQ ID NO: 171623 - DNA, 12 bp, Unknown
  misc_feature (1)..( 12): Result.005 file - promoters50/1442244
gcagttccaata

SEQ ID NO: 171624 - DNA, 12 bp, Unknown
  misc_feature (1)..( 12): Result.005 file - promoters50/1442244
ttctttaaaaaa

SEQ ID NO: 171625 - DNA, 9 bp, Unknown
  misc_feature (1)..( 9): Result.005 file - promoters50/1442244
ggatcatta

SEQ ID NO: 171626 - DNA, 9 bp, Unknown
  misc_feature (1)..( 9): Result.005 file - promoters50/1442244
acatcttta

SEQ ID NO: 171627 - DNA, 9 bp, Unknown
  misc_feature (1)..( 9): Result.005 file - promoters50/1442244
acatctttg

SEQ ID NO: 171628 - DNA, 12 bp, Unknown
  misc_feature (1)..( 12): Result.005 file - promoters50/1442244
atgtaatgacac

SEQ ID NO: 171629 - DNA, 12 bp, Unknown
  misc_feature (1)..( 12): Result.005 file - promoters50/1442244
atggaatagatc

SEQ ID NO: 171630 - DNA, 12 bp, Unknown
  misc_feature (1)..( 12): Result.005 file - promoters50/1442244
aagtaataacac

SEQ ID NO: 171631 - DNA, 7 bp, Unknown
  misc_feature (1)..( 7): Result.005 file - promoters50/1442244
taaaaaa

SEQ ID NO: 171632 - DNA, 7 bp, Unknown
  misc_feature (1)..( 7): Result.005 file - promoters50/1442244
gaaaaaa

SEQ ID NO: 171633 - DNA, 7 bp, Unknown
  misc_feature (1)..( 7): Result.005 file - promoters50/1442244
taaaaag

SEQ ID NO: 171634 - DNA, 8 bp, Unknown
  misc_feature (1)..( 8): Result.005 file - promoters50/1442244
attgaaaa

SEQ ID NO: 171635 - DNA, 8 bp, Unknown
  misc_feature (1)..( 8): Result.005 file - promoters50/1442244
attaaaaa

SEQ ID NO: 171636 - DNA, 8 bp, Unknown
  misc_feature (1)..( 8): Result.005 file - promoters50/1442244
attaaaag

SEQ ID NO: 171637 - DNA, 11 bp, Unknown
  misc_feature (1)..( 11): Result.005 file - promoters50/1442316
aaagaaaacaa

SEQ ID NO: 171638 - DNA, 11 bp, Unknown
  misc_feature (1)..( 11): Result.005 file - promoters50/1442316
attgaaaacta

SEQ ID NO: 171639 - DNA, 11 bp, Unknown
  misc_feature (1)..( 11): Result.005 file - promoters50/1442316
aaataaaacag

SEQ ID NO: 171640 - DNA, 11 bp, Unknown
  misc_feature (1)..( 11): Result.005 file - promoters50/1442316
taaaaaaatct

SEQ ID NO: 171641 - DNA, 11 bp, Unknown
  misc_feature (1)..( 11): Result.005 file - promoters50/1442316
aatgagaacat

SEQ ID NO: 171642 - DNA, 11 bp, Unknown
  misc_feature (1)..( 11): Result.005 file - promoters50/1442316
ctatgaaataa

SEQ ID NO: 171643 - DNA, 10 bp, Unknown
  misc_feature (1)..( 10): Result.005 file - promoters50/1442316
aaacaatttt

SEQ ID NO: 171644 - DNA, 10 bp, Unknown
  misc_feature (1)..( 10): Result.005 file - promoters50/1442316
ttacaaattt

SEQ ID NO: 171645 - DNA, 10 bp, Unknown
  misc_feature (1)..( 10): Result.005 file - promoters50/1442316
taacaattga

SEQ ID NO: 171646 - DNA, 10 bp, Unknown
  misc_feature (1)..( 10): Result.005 file - promoters50/1442316
aaataatgag

SEQ ID NO: 171647 - DNA, 10 bp, Unknown
  misc_feature (1)..( 10): Result.005 file - promoters50/1442316
aaaaaaatct

SEQ ID NO: 171648 - DNA, 10 bp, Unknown
  misc_feature (1)..( 10): Result.005 file - promoters50/1442316
taacaaataa

SEQ ID NO: 171649 - DNA, 16 bp, Unknown
  misc_feature (1)..( 16): Result.005 file - promoters50/1442316
aaaagaataaaagaaa

SEQ ID NO: 171650 - DNA, 16 bp, Unknown
  misc_feature (1)..( 16): Result.005 file - promoters50/1442316
taattaataaaaacta

SEQ ID NO: 171651 - DNA, 16 bp, Unknown
  misc_feature (1)..( 16): Result.005 file - promoters50/1442316
attttattaaaacaaa

SEQ ID NO: 171652 - DNA, 16 bp, Unknown
  misc_feature (1)..( 16): Result.005 file - promoters50/1442316
aggcaaagaaaagagg

SEQ ID NO: 171653 - DNA, 16 bp, Unknown
  misc_feature (1)..( 16): Result.005 file - promoters50/1442316
atttaaataaatacaa

SEQ ID NO: 171654 - DNA, 16 bp, Unknown
  misc_feature (1)..( 16): Result.005 file - promoters50/1442316
tgcccaattaaaaata

SEQ ID NO: 171655 - DNA, 12 bp, Unknown
  misc_feature (1)..( 12): Result.005 file - promoters50/1442316
attgtaatttag

SEQ ID NO: 171656 - DNA, 12 bp, Unknown
  misc_feature (1)..( 12): Result.005 file - promoters50/1442316
tttgcaattgaa

SEQ ID NO: 171657 - DNA, 12 bp, Unknown
  misc_feature (1)..( 12): Result.005 file - promoters50/1442316
caaataatttga

SEQ ID NO: 171658 - DNA, 12 bp, Unknown
  misc_feature (1)..( 12): Result.005 file - promoters50/1442316
attataagcaaa

SEQ ID NO: 171659 - DNA, 12 bp, Unknown
  misc_feature (1)..( 12): Result.005 file - promoters50/1442316
aagagaatcata

SEQ ID NO: 171660 - DNA, 12 bp, Unknown
  misc_feature (1)..( 12): Result.005 file - promoters50/1442316
actataagctag

SEQ ID NO: 171661 - DNA, 11 bp, Unknown
  misc_feature (1)..( 11): Result.005 file - promoters50/1442326
ctttgttgttg

SEQ ID NO: 171662 - DNA, 11 bp, Unknown
  misc_feature (1)..( 11): Result.005 file - promoters50/1442326
ccatgtttttg

SEQ ID NO: 171663 - DNA, 11 bp, Unknown
  misc_feature (1)..( 11): Result.005 file - promoters50/1442326
tcaacttgttg

SEQ ID NO: 171664 - DNA, 11 bp, Unknown
  misc_feature (1)..( 11): Result.005 file - promoters50/1442326
ttatgatttgc

SEQ ID NO: 171665 - DNA, 11 bp, Unknown
  misc_feature (1)..( 11): Result.005 file - promoters50/1442326
ctatgctttgg

SEQ ID NO: 171666 - DNA, 11 bp, Unknown
  misc_feature (1)..( 11): Result.005 file - promoters50/1442326
acttgctgagc

SEQ ID NO: 171667 - DNA, 17 bp, Unknown
  misc_feature (1)..( 17): Result.005 file - promoters50/1442408
gaccttaaaaaatcaaa

SEQ ID NO: 171668 - DNA, 17 bp, Unknown
  misc_feature (1)..( 17): Result.005 file - promoters50/1442408
tatatcaaacaataaaa

SEQ ID NO: 171669 - DNA, 17 bp, Unknown
  misc_feature (1)..( 17): Result.005 file - promoters50/1442408
cttttgaaaaaacccaa

SEQ ID NO: 171670 - DNA, 17 bp, Unknown
  misc_feature (1)..( 17): Result.005 file - promoters50/1442408
gacattataaaatacag

SEQ ID NO: 171671 - DNA, 17 bp, Unknown
  misc_feature (1)..( 17): Result.005 file - promoters50/1442408
tttccgaataaatcttg

SEQ ID NO: 171672 - DNA, 17 bp, Unknown
  misc_feature (1)..( 17): Result.005 file - promoters50/1442408
aagcatcgacatctttt

SEQ ID NO: 171673 - DNA, 12 bp, Unknown
  misc_feature (1)..( 12): Result.005 file - promoters50/1442408
gactctttttct

SEQ ID NO: 171674 - DNA, 12 bp, Unknown
  misc_feature (1)..( 12): Result.005 file - promoters50/1442408
gcttcttttaca

SEQ ID NO: 171675 - DNA, 12 bp, Unknown
  misc_feature (1)..( 12): Result.005 file - promoters50/1442408
gtctctttttct

SEQ ID NO: 171676 - DNA, 12 bp, Unknown
  misc_feature (1)..( 12): Result.005 file - promoters50/1442408
gacactttagaa

SEQ ID NO: 171677 - DNA, 12 bp, Unknown
  misc_feature (1)..( 12): Result.005 file - promoters50/1442408
ttctctttttct

SEQ ID NO: 171678 - DNA, 12 bp, Unknown
  misc_feature (1)..( 12): Result.005 file - promoters50/1442408
ccttcctttgat

SEQ ID NO: 171679 - DNA, 8 bp, Unknown
  misc_feature (1)..( 8): Result.005 file - promoters50/1442423
attatttg

SEQ ID NO: 171680 - DNA, 8 bp, Unknown
  misc_feature (1)..( 8): Result.005 file - promoters50/1442423
attctttt

SEQ ID NO: 171681 - DNA, 8 bp, Unknown
  misc_feature (1)..( 8): Result.005 file - promoters50/1442423
cttctttt

SEQ ID NO: 171682 - DNA, 8 bp, Unknown
  misc_feature (1)..( 8): Result.005 file - promoters50/1442423
tgaaaatc

SEQ ID NO: 171683 - DNA, 8 bp, Unknown
  misc_feature (1)..( 8): Result.005 file - promoters50/1442423
ataaaatc

SEQ ID NO: 171684 - DNA, 8 bp, Unknown
  misc_feature (1)..( 8): Result.005 file - promoters50/1442423
atacaatt

SEQ ID NO: 171685 - DNA, 6 bp, Unknown
  misc_feature (1)..( 6): Result.005 file - promoters50/1442423
tataaa

SEQ ID NO: 171686 - DNA, 6 bp, Unknown
  misc_feature (1)..( 6): Result.005 file - promoters50/1442423
tataaa

SEQ ID NO: 171687 - DNA, 6 bp, Unknown
  misc_feature (1)..( 6): Result.005 file - promoters50/1442423
tataaa

SEQ ID NO: 171688 - DNA, 10 bp, Unknown
  misc_feature (1)..( 10): Result.005 file - promoters50/1442423
acgaaagtta

SEQ ID NO: 171689 - DNA, 10 bp, Unknown
  misc_feature (1)..( 10): Result.005 file - promoters50/1442423
ataaaattta

SEQ ID NO: 171690 - DNA, 10 bp, Unknown
  misc_feature (1)..( 10): Result.005 file - promoters50/1442423
atataatttt

SEQ ID NO: 171691 - DNA, 8 bp, Unknown
  misc_feature (1)..( 8): Result.005 file - promoters50/1442423
tctttact

SEQ ID NO: 171692 - DNA, 8 bp, Unknown
  misc_feature (1)..( 8): Result.005 file - promoters50/1442423
tctttaat

SEQ ID NO: 171693 - DNA, 8 bp, Unknown
  misc_feature (1)..( 8): Result.005 file - promoters50/1442423
tctataat

SEQ ID NO: 171694 - DNA, 10 bp, Unknown
  misc_feature (1)..( 10): Result.005 file - promoters50/1442427
taaatttaaa

SEQ ID NO: 171695 - DNA, 10 bp, Unknown
  misc_feature (1)..( 10): Result.005 file - promoters50/1442427
taaatttgct

SEQ ID NO: 171696 - DNA, 10 bp, Unknown
  misc_feature (1)..( 10): Result.005 file - promoters50/1442427
tgaatctgct

SEQ ID NO: 171697 - DNA, 18 bp, Unknown
  misc_feature (1)..( 18): Result.005 file - promoters50/1442452
tttatattttagctgtct

SEQ ID NO: 171698 - DNA, 18 bp, Unknown
  misc_feature (1)..( 18): Result.005 file - promoters50/1442452
tttgtattttagagaaat

SEQ ID NO: 171699 - DNA, 18 bp, Unknown
  misc_feature (1)..( 18): Result.005 file - promoters50/1442452
aatcatgtttagaaaaat

SEQ ID NO: 171700 - DNA, 10 bp, Unknown
  misc_feature (1)..( 10): Result.005 file - promoters50/1442452
tcattttaaa

SEQ ID NO: 171701 - DNA, 10 bp, Unknown
  misc_feature (1)..( 10): Result.005 file - promoters50/1442452
aattttgaaa

SEQ ID NO: 171702 - DNA, 10 bp, Unknown
  misc_feature (1)..( 10): Result.005 file - promoters50/1442452
aattttgatg

SEQ ID NO: 171703 - DNA, 10 bp, Unknown
  misc_feature (1)..( 10): Result.005 file - promoters50/1442452
aaactgttag

SEQ ID NO: 171704 - DNA, 10 bp, Unknown
  misc_feature (1)..( 10): Result.005 file - promoters50/1442452
aaaatgttag

SEQ ID NO: 171705 - DNA, 10 bp, Unknown
  misc_feature (1)..( 10): Result.005 file - promoters50/1442452
taaattttaa

SEQ ID NO: 171706 - DNA, 8 bp, Unknown
  misc_feature (1)..( 8): Result.005 file - promoters50/1442452
actataaa

SEQ ID NO: 171707 - DNA, 8 bp, Unknown
  misc_feature (1)..( 8): Result.005 file - promoters50/1442452
tatataaa

SEQ ID NO: 171708 - DNA, 8 bp, Unknown
  misc_feature (1)..( 8): Result.005 file - promoters50/1442452
tatataat

SEQ ID NO: 171709 - DNA, 11 bp, Unknown
  misc_feature (1)..( 11): Result.005 file - promoters50/1442452
tttcaacggtt

SEQ ID NO: 171710 - DNA, 11 bp, Unknown
  misc_feature (1)..( 11): Result.005 file - promoters50/1442452
atccaacggca

SEQ ID NO: 171711 - DNA, 11 bp, Unknown
  misc_feature (1)..( 11): Result.005 file - promoters50/1442452
atcgaacagca

SEQ ID NO: 171712 - DNA, 9 bp, Unknown
  misc_feature (1)..( 9): Result.005 file - promoters50/1442468
ttttgtttg

SEQ ID NO: 171713 - DNA, 9 bp, Unknown
  misc_feature (1)..( 9): Result.005 file - promoters50/1442468
attttttta

SEQ ID NO: 171714 - DNA, 9 bp, Unknown
  misc_feature (1)..( 9): Result.005 file - promoters50/1442468
atttttttg

SEQ ID NO: 171715 - DNA, 9 bp, Unknown
  misc_feature (1)..( 9): Result.005 file - promoters50/1442468
gttttttct

SEQ ID NO: 171716 - DNA, 9 bp, Unknown
  misc_feature (1)..( 9): Result.005 file - promoters50/1442468
atttcttca

SEQ ID NO: 171717 - DNA, 9 bp, Unknown
  misc_feature (1)..( 9): Result.005 file - promoters50/1442468
attgcttat

SEQ ID NO: 171718 - DNA, 9 bp, Unknown
  misc_feature (1)..( 9): Result.005 file - promoters50/1442468
cctaaacat

SEQ ID NO: 171719 - DNA, 9 bp, Unknown
  misc_feature (1)..( 9): Result.005 file - promoters50/1442468
tctaaacaa

SEQ ID NO: 171720 - DNA, 9 bp, Unknown
  misc_feature (1)..( 9): Result.005 file - promoters50/1442468
gttaaacat

SEQ ID NO: 171721 - DNA, 9 bp, Unknown
  misc_feature (1)..( 9): Result.005 file - promoters50/1442468
ccttaacaa

SEQ ID NO: 171722 - DNA, 9 bp, Unknown
  misc_feature (1)..( 9): Result.005 file - promoters50/1442468
cataagcat

SEQ ID NO: 171723 - DNA, 16 bp, Unknown
  misc_feature (1)..( 16): Result.005 file - promoters50/1442468
tggttttggtttttgt

SEQ ID NO: 171724 - DNA, 16 bp, Unknown
  misc_feature (1)..( 16): Result.005 file - promoters50/1442468
agtcttttgtttttgt

SEQ ID NO: 171725 - DNA, 16 bp, Unknown
  misc_feature (1)..( 16): Result.005 file - promoters50/1442468
tctctaatttttatgt

SEQ ID NO: 171726 - DNA, 16 bp, Unknown
  misc_feature (1)..( 16): Result.005 file - promoters50/1442468
ataatttcgtttctca

SEQ ID NO: 171727 - DNA, 16 bp, Unknown
  misc_feature (1)..( 16): Result.005 file - promoters50/1442468
ataaattcttttctta

SEQ ID NO: 171728 - DNA, 10 bp, Unknown
  misc_feature (1)..( 10): Result.005 file - promoters50/1442468
cgtatgtaaa

SEQ ID NO: 171729 - DNA, 10 bp, Unknown
  misc_feature (1)..( 10): Result.005 file - promoters50/1442468
aaattgtaaa

SEQ ID NO: 171730 - DNA, 10 bp, Unknown
  misc_feature (1)..( 10): Result.005 file - promoters50/1442468
aaattataat

SEQ ID NO: 171731 - DNA, 10 bp, Unknown
  misc_feature (1)..( 10): Result.005 file - promoters50/1442468
aaaatatata

SEQ ID NO: 171732 - DNA, 10 bp, Unknown
  misc_feature (1)..( 10): Result.005 file - promoters50/1442468
aattgatatt

SEQ ID NO: 171733 - DNA, 10 bp, Unknown
  misc_feature (1)..( 10): Result.005 file - promoters50/1442468
gaaacaggcc

SEQ ID NO: 171734 - DNA, 10 bp, Unknown
  misc_feature (1)..( 10): Result.005 file - promoters50/1442468
gaaacaaaaa

SEQ ID NO: 171735 - DNA, 10 bp, Unknown
  misc_feature (1)..( 10): Result.005 file - promoters50/1442468
aaaacagcaa

SEQ ID NO: 171736 - DNA, 10 bp, Unknown
  misc_feature (1)..( 10): Result.005 file - promoters50/1442468
taaaaaaaaa

SEQ ID NO: 171737 - DNA, 10 bp, Unknown
  misc_feature (1)..( 10): Result.005 file - promoters50/1442468
aaaacataac

SEQ ID NO: 171738 - DNA, 13 bp, Unknown
  misc_feature (1)..( 13): Result.005 file - promoters50/1442476
ccaatcataaaag

SEQ ID NO: 171739 - DNA, 13 bp, Unknown
  misc_feature (1)..( 13): Result.005 file - promoters50/1442476
agaatcattaatc

SEQ ID NO: 171740 - DNA, 13 bp, Unknown
  misc_feature (1)..( 13): Result.005 file - promoters50/1442476
tggatctttagat

SEQ ID NO: 171741 - DNA, 13 bp, Unknown
  misc_feature (1)..( 13): Result.005 file - promoters50/1442476
agagtcaaaattt

SEQ ID NO: 171742 - DNA, 13 bp, Unknown
  misc_feature (1)..( 13): Result.005 file - promoters50/1442476
tgcttctttggat

SEQ ID NO: 171743 - DNA, 13 bp, Unknown
  misc_feature (1)..( 13): Result.005 file - promoters50/1442476
gaattctttcaaa

SEQ ID NO: 171744 - DNA, 13 bp, Unknown
  misc_feature (1)..( 13): Result.005 file - promoters50/1442476
ctcgtataattct

SEQ ID NO: 171745 - DNA, 13 bp, Unknown
  misc_feature (1)..( 13): Result.005 file - promoters50/1442476
ctcttatgatttg

SEQ ID NO: 171746 - DNA, 13 bp, Unknown
  misc_feature (1)..( 13): Result.005 file - promoters50/1442476
tgtgtatcattct

SEQ ID NO: 171747 - DNA, 13 bp, Unknown
  misc_feature (1)..( 13): Result.005 file - promoters50/1442476
cttccatgttttt

SEQ ID NO: 171748 - DNA, 13 bp, Unknown
  misc_feature (1)..( 13): Result.005 file - promoters50/1442476
tgagtttgatttg

SEQ ID NO: 171749 - DNA, 13 bp, Unknown
  misc_feature (1)..( 13): Result.005 file - promoters50/1442476
ttcttattggaag

SEQ ID NO: 171750 - DNA, 13 bp, Unknown
  misc_feature (1)..( 13): Result.005 file - promoters50/1442476
ctcttaaaagtct

SEQ ID NO: 171751 - DNA, 13 bp, Unknown
  misc_feature (1)..( 13): Result.005 file - promoters50/1442476
aagaaaaaaaaaa

SEQ ID NO: 171752 - DNA, 13 bp, Unknown
  misc_feature (1)..( 13): Result.005 file - promoters50/1442476
aagaaacaaagta

SEQ ID NO: 171753 - DNA, 13 bp, Unknown
  misc_feature (1)..( 13): Result.005 file - promoters50/1442476
tccaaacaaaaca

SEQ ID NO: 171754 - DNA, 13 bp, Unknown
  misc_feature (1)..( 13): Result.005 file - promoters50/1442476
ttcaatcaaatcg

SEQ ID NO: 171755 - DNA, 13 bp, Unknown
  misc_feature (1)..( 13): Result.005 file - promoters50/1442476
ataaaaccaagac

SEQ ID NO: 171756 - DNA, 13 bp, Unknown
  misc_feature (1)..( 13): Result.005 file - promoters50/1442476
cagacaccaagac

SEQ ID NO: 171757 - DNA, 13 bp, Unknown
  misc_feature (1)..( 13): Result.005 file - promoters50/1442504
gaagtgatgacca

SEQ ID NO: 171758 - DNA, 13 bp, Unknown
  misc_feature (1)..( 13): Result.005 file - promoters50/1442504
gaagtgaagacca

SEQ ID NO: 171759 - DNA, 13 bp, Unknown
  misc_feature (1)..( 13): Result.005 file - promoters50/1442504
cctttgatgattg

SEQ ID NO: 171760 - DNA, 13 bp, Unknown
  misc_feature (1)..( 13): Result.005 file - promoters50/1442504
gttaggatcattc

SEQ ID NO: 171761 - DNA, 13 bp, Unknown
  misc_feature (1)..( 13): Result.005 file - promoters50/1442504
atccggatcagga

SEQ ID NO: 171762 - DNA, 13 bp, Unknown
  misc_feature (1)..( 13): Result.005 file - promoters50/1442504
acatggattattc

SEQ ID NO: 171763 - DNA, 8 bp, Unknown
  misc_feature (1)..( 8): Result.005 file - promoters50/1442544
aaagttga

SEQ ID NO: 171764 - DNA, 8 bp, Unknown
  misc_feature (1)..( 8): Result.005 file - promoters50/1442544
aaagttat

SEQ ID NO: 171765 - DNA, 8 bp, Unknown
  misc_feature (1)..( 8): Result.005 file - promoters50/1442544
gaagttga

SEQ ID NO: 171766 - DNA, 9 bp, Unknown
  misc_feature (1)..( 9): Result.005 file - promoters50/1442544
agaaaacta

SEQ ID NO: 171767 - DNA, 9 bp, Unknown
  misc_feature (1)..( 9): Result.005 file - promoters50/1442544
agaaaactc

SEQ ID NO: 171768 - DNA, 9 bp, Unknown
  misc_feature (1)..( 9): Result.005 file - promoters50/1442544
cagaaacta

SEQ ID NO: 171769 - DNA, 12 bp, Unknown
  misc_feature (1)..( 12): Result.005 file - promoters50/1442548
gcccaaatttaa

SEQ ID NO: 171770 - DNA, 12 bp, Unknown
  misc_feature (1)..( 12): Result.005 file - promoters50/1442548
tactatatttaa

SEQ ID NO: 171771 - DNA, 12 bp, Unknown
  misc_feature (1)..( 12): Result.005 file - promoters50/1442548
tttcacatttca

SEQ ID NO: 171772 - DNA, 12 bp, Unknown
  misc_feature (1)..( 12): Result.005 file - promoters50/1442548
taatgtatctaa

SEQ ID NO: 171773 - DNA, 9 bp, Unknown
  misc_feature (1)..( 9): Result.005 file - promoters50/1442548
aataacaat

SEQ ID NO: 171774 - DNA, 9 bp, Unknown
  misc_feature (1)..( 9): Result.005 file - promoters50/1442548
cctaagaat

SEQ ID NO: 171775 - DNA, 9 bp, Unknown
  misc_feature (1)..( 9): Result.005 file - promoters50/1442548
aataacaat

SEQ ID NO: 171776 - DNA, 13 bp, Unknown
  misc_feature (1)..( 13): Result.005 file - promoters50/1442548
cttggttggaact

SEQ ID NO: 171777 - DNA, 13 bp, Unknown
  misc_feature (1)..( 13): Result.005 file - promoters50/1442548
atcttttgtaact

SEQ ID NO: 171778 - DNA, 13 bp, Unknown
  misc_feature (1)..( 13): Result.005 file - promoters50/1442548
atcttttgtagac

SEQ ID NO: 171779 - DNA, 7 bp, Unknown
  misc_feature (1)..( 7): Result.005 file - promoters50/1442552
aaaattc

SEQ ID NO: 171780 - DNA, 7 bp, Unknown
  misc_feature (1)..( 7): Result.005 file - promoters50/1442552
aaaattg

SEQ ID NO: 171781 - DNA, 7 bp, Unknown
  misc_feature (1)..( 7): Result.005 file - promoters50/1442552
gaaattc

SEQ ID NO: 171782 - DNA, 20 bp, Unknown
  misc_feature (1)..( 20): Result.005 file - promoters50/1442592
tccacgtcatcaatcctcgt

SEQ ID NO: 171783 - DNA, 20 bp, Unknown
  misc_feature (1)..( 20): Result.005 file - promoters50/1442592
ggatcgttatctgcaaccgt

SEQ ID NO: 171784 - DNA, 20 bp, Unknown
  misc_feature (1)..( 20): Result.005 file - promoters50/1442592
cccatctcatcgatcctcgt

SEQ ID NO: 171785 - DNA, 20 bp, Unknown
  misc_feature (1)..( 20): Result.005 file - promoters50/1442592
tccacgtcacgcatccgcgt

SEQ ID NO: 171786 - DNA, 20 bp, Unknown
  misc_feature (1)..( 20): Result.005 file - promoters50/1442592
ataacattatctaacggtga

SEQ ID NO: 171787 - DNA, 20 bp, Unknown
  misc_feature (1)..( 20): Result.005 file - promoters50/1442592
tccgcgtgattgtttattat

SEQ ID NO: 171788 - DNA, 12 bp, Unknown
  misc_feature (1)..( 12): Result.005 file - promoters50/1442592
atatatacatga

SEQ ID NO: 171789 - DNA, 12 bp, Unknown
  misc_feature (1)..( 12): Result.005 file - promoters50/1442592
gtatataaatga

SEQ ID NO: 171790 - DNA, 12 bp, Unknown
  misc_feature (1)..( 12): Result.005 file - promoters50/1442592
ttatataaacaa

SEQ ID NO: 171791 - DNA, 12 bp, Unknown
  misc_feature (1)..( 12): Result.005 file - promoters50/1442592
gtatatataata

SEQ ID NO: 171792 - DNA, 12 bp, Unknown
  misc_feature (1)..( 12): Result.005 file - promoters50/1442592
gtatataaactc

SEQ ID NO: 171793 - DNA, 12 bp, Unknown
  misc_feature (1)..( 12): Result.005 file - promoters50/1442592
ataaatatcccc

SEQ ID NO: 171794 - DNA, 12 bp, Unknown
  misc_feature (1)..( 12): Result.005 file - promoters50/1442592
tactataaaatc

SEQ ID NO: 171795 - DNA, 12 bp, Unknown
  misc_feature (1)..( 12): Result.005 file - promoters50/1442592
ccccataaaagc

SEQ ID NO: 171796 - DNA, 11 bp, Unknown
  misc_feature (1)..( 11): Result.005 file - promoters50/1442592
aaaagagatta

SEQ ID NO: 171797 - DNA, 11 bp, Unknown
  misc_feature (1)..( 11): Result.005 file - promoters50/1442592
tagagaaattc

SEQ ID NO: 171798 - DNA, 11 bp, Unknown
  misc_feature (1)..( 11): Result.005 file - promoters50/1442592
acaacaaattc

SEQ ID NO: 171799 - DNA, 11 bp, Unknown
  misc_feature (1)..( 11): Result.005 file - promoters50/1442592
tttagaaaaat

SEQ ID NO: 171800 - DNA, 11 bp, Unknown
  misc_feature (1)..( 11): Result.005 file - promoters50/1442592
gtaagaaatcc

SEQ ID NO: 171801 - DNA, 11 bp, Unknown
  misc_feature (1)..( 11): Result.005 file - promoters50/1442592
aaaaggaatga

SEQ ID NO: 171802 - DNA, 13 bp, Unknown
  misc_feature (1)..( 13): Result.005 file - promoters50/1442592
ctatttttagggt

SEQ ID NO: 171803 - DNA, 13 bp, Unknown
  misc_feature (1)..( 13): Result.005 file - promoters50/1442592
ttatttttgaaga

SEQ ID NO: 171804 - DNA, 13 bp, Unknown
  misc_feature (1)..( 13): Result.005 file - promoters50/1442592
atattttaattca

SEQ ID NO: 171805 - DNA, 13 bp, Unknown
  misc_feature (1)..( 13): Result.005 file - promoters50/1442592
tcattttaaatca

SEQ ID NO: 171806 - DNA, 13 bp, Unknown
  misc_feature (1)..( 13): Result.005 file - promoters50/1442592
ttagtttgaatcg

SEQ ID NO: 171807 - DNA, 13 bp, Unknown
  misc_feature (1)..( 13): Result.005 file - promoters50/1442592
ttattttacttaa

SEQ ID NO: 171808 - DNA, 19 bp, Unknown
  misc_feature (1)..( 19): Result.005 file - promoters50/1442592
cttgtgttaaatatgaata

SEQ ID NO: 171809 - DNA, 19 bp, Unknown
  misc_feature (1)..( 19): Result.005 file - promoters50/1442592
aaaatgttagataggaaaa

SEQ ID NO: 171810 - DNA, 19 bp, Unknown
  misc_feature (1)..( 19): Result.005 file - promoters50/1442592
aaactgttagtgcaagcct

SEQ ID NO: 171811 - DNA, 19 bp, Unknown
  misc_feature (1)..( 19): Result.005 file - promoters50/1442592
taaattttaaaattattca

SEQ ID NO: 171812 - DNA, 19 bp, Unknown
  misc_feature (1)..( 19): Result.005 file - promoters50/1442592
tgagaaatagatttgaaaa

SEQ ID NO: 171813 - DNA, 20 bp, Unknown
  misc_feature (1)..( 20): Result.005 file - promoters50/1442592
taaattttgaaataatttca

SEQ ID NO: 171814 - DNA, 20 bp, Unknown
  misc_feature (1)..( 20): Result.005 file - promoters50/1442592
taagcccagaaaaagctgat

SEQ ID NO: 171815 - DNA, 11 bp, Unknown
  misc_feature (1)..( 11): Result.005 file - promoters50/1442592
tttcgatgtat

SEQ ID NO: 171816 - DNA, 11 bp, Unknown
  misc_feature (1)..( 11): Result.005 file - promoters50/1442592
ttttgatgaat

SEQ ID NO: 171817 - DNA, 11 bp, Unknown
  misc_feature (1)..( 11): Result.005 file - promoters50/1442592
ttttgaagaat

SEQ ID NO: 171818 - DNA, 11 bp, Unknown
  misc_feature (1)..( 11): Result.005 file - promoters50/1442592
gtttgaatcgt

SEQ ID NO: 171819 - DNA, 11 bp, Unknown
  misc_feature (1)..( 11): Result.005 file - promoters50/1442592
atttgctgaat

SEQ ID NO: 171820 - DNA, 11 bp, Unknown
  misc_feature (1)..( 11): Result.005 file - promoters50/1442592
ttttaattcat

SEQ ID NO: 171821 - DNA, 12 bp, Unknown
  misc_feature (1)..( 12): Result.005 file - promoters50/1442592
cattttaaatca

SEQ ID NO: 171822 - DNA, 12 bp, Unknown
  misc_feature (1)..( 12): Result.005 file - promoters50/1442592
attttgaaagag

SEQ ID NO: 171823 - DNA, 12 bp, Unknown
  misc_feature (1)..( 12): Result.005 file - promoters50/1442592
agtttgaatcgt

SEQ ID NO: 171824 - DNA, 12 bp, Unknown
  misc_feature (1)..( 12): Result.005 file - promoters50/1442592
tattttaattca

SEQ ID NO: 171825 - DNA, 12 bp, Unknown
  misc_feature (1)..( 12): Result.005 file - promoters50/1442592
aattttgatgaa

SEQ ID NO: 171826 - DNA, 12 bp, Unknown
  misc_feature (1)..( 12): Result.005 file - promoters50/1442592
gatttgctgaat

SEQ ID NO: 171827 - DNA, 14 bp, Unknown
  misc_feature (1)..( 14): Result.005 file - promoters50/1442649
cacatttgttcaac

SEQ ID NO: 171828 - DNA, 14 bp, Unknown
  misc_feature (1)..( 14): Result.005 file - promoters50/1442649
ttaaatagttcaaa

SEQ ID NO: 171829 - DNA, 14 bp, Unknown
  misc_feature (1)..( 14): Result.005 file - promoters50/1442649
ttgcaatgttaaac

SEQ ID NO: 171830 - DNA, 14 bp, Unknown
  misc_feature (1)..( 14): Result.005 file - promoters50/1442649
atcagatgtacaag

SEQ ID NO: 171831 - DNA, 14 bp, Unknown
  misc_feature (1)..( 14): Result.005 file - promoters50/1442649
atgcataattcaac

SEQ ID NO: 171832 - DNA, 14 bp, Unknown
  misc_feature (1)..( 14): Result.005 file - promoters50/1442649
atattatgctaaat

SEQ ID NO: 171833 - DNA, 14 bp, Unknown
  misc_feature (1)..( 14): Result.005 file - promoters50/1442649
tatactaatttaac

SEQ ID NO: 171834 - DNA, 14 bp, Unknown
  misc_feature (1)..( 14): Result.005 file - promoters50/1442649
tgaatcaattaaac

SEQ ID NO: 171835 - DNA, 13 bp, Unknown
  misc_feature (1)..( 13): Result.005 file - promoters50/1442649
tcaatctttgtac

SEQ ID NO: 171836 - DNA, 13 bp, Unknown
  misc_feature (1)..( 13): Result.005 file - promoters50/1442649
aaaatctttgtag

SEQ ID NO: 171837 - DNA, 13 bp, Unknown
  misc_feature (1)..( 13): Result.005 file - promoters50/1442649
atttcatttatac

SEQ ID NO: 171838 - DNA, 13 bp, Unknown
  misc_feature (1)..( 13): Result.005 file - promoters50/1442649
tcaatctttcaaa

SEQ ID NO: 171839 - DNA, 13 bp, Unknown
  misc_feature (1)..( 13): Result.005 file - promoters50/1442649
aatggggttatac

SEQ ID NO: 171840 - DNA, 13 bp, Unknown
  misc_feature (1)..( 13): Result.005 file - promoters50/1442649
cgaaagatctgaa

SEQ ID NO: 171841 - DNA, 8 bp, Unknown
  misc_feature (1)..( 8): Result.005 file - promoters50/1442649
aaaacaat

SEQ ID NO: 171842 - DNA, 8 bp, Unknown
  misc_feature (1)..( 8): Result.005 file - promoters50/1442649
gaaacaaa

SEQ ID NO: 171843 - DNA, 9 bp, Unknown
  misc_feature (1)..( 9): Result.005 file - promoters50/1442649
aaaactaat

SEQ ID NO: 171844 - DNA, 9 bp, Unknown
  misc_feature (1)..( 9): Result.005 file - promoters50/1442649
ttaacaaat

SEQ ID NO: 171845 - DNA, 9 bp, Unknown
  misc_feature (1)..( 9): Result.005 file - promoters50/1442649
ctaaccata

SEQ ID NO: 171846 - DNA, 9 bp, Unknown
  misc_feature (1)..( 9): Result.005 file - promoters50/1442649
tgaaccatt

SEQ ID NO: 171847 - DNA, 14 bp, Unknown
  misc_feature (1)..( 14): Result.005 file - promoters50/1442777
gtccataacttgaa

SEQ ID NO: 171848 - DNA, 14 bp, Unknown
  misc_feature (1)..( 14): Result.005 file - promoters50/1442777
atgtataactaagc

SEQ ID NO: 171849 - DNA, 14 bp, Unknown
  misc_feature (1)..( 14): Result.005 file - promoters50/1442777
atgtataactttat

SEQ ID NO: 171850 - DNA, 14 bp, Unknown
  misc_feature (1)..( 14): Result.005 file - promoters50/1442777
atttgtaacttcag

SEQ ID NO: 171851 - DNA, 14 bp, Unknown
  misc_feature (1)..( 14): Result.005 file - promoters50/1442777
caaaatatctttat

SEQ ID NO: 171852 - DNA, 14 bp, Unknown
  misc_feature (1)..( 14): Result.005 file - promoters50/1442777
atgtatataccaca

SEQ ID NO: 171853 - DNA, 11 bp, Unknown
  misc_feature (1)..( 11): Result.005 file - promoters50/1442777
tgtatataaac

SEQ ID NO: 171854 - DNA, 11 bp, Unknown
  misc_feature (1)..( 11): Result.005 file - promoters50/1442777
tatatatacat

SEQ ID NO: 171855 - DNA, 11 bp, Unknown
  misc_feature (1)..( 11): Result.005 file - promoters50/1442777
tgtatataaat

SEQ ID NO: 171856 - DNA, 11 bp, Unknown
  misc_feature (1)..( 11): Result.005 file - promoters50/1442777
tttatatatta

SEQ ID NO: 171857 - DNA, 11 bp, Unknown
  misc_feature (1)..( 11): Result.005 file - promoters50/1442777
tatatataata

SEQ ID NO: 171858 - DNA, 11 bp, Unknown
  misc_feature (1)..( 11): Result.005 file - promoters50/1442777
tacctataaat

SEQ ID NO: 171859 - DNA, 10 bp, Unknown
  misc_feature (1)..( 10): Result.005 file - promoters50/1442777
aaatctgatg

SEQ ID NO: 171860 - DNA, 10 bp, Unknown
  misc_feature (1)..( 10): Result.005 file - promoters50/1442777
taatgtgaca

SEQ ID NO: 171861 - DNA, 10 bp, Unknown
  misc_feature (1)..( 10): Result.005 file - promoters50/1442777
taatgtaatt

SEQ ID NO: 171862 - DNA, 10 bp, Unknown
  misc_feature (1)..( 10): Result.005 file - promoters50/1442777
taatgcgacc

SEQ ID NO: 171863 - DNA, 10 bp, Unknown
  misc_feature (1)..( 10): Result.005 file - promoters50/1442777
ttgtgtcaca

SEQ ID NO: 171864 - DNA, 10 bp, Unknown
  misc_feature (1)..( 10): Result.005 file - promoters50/1442777
ttttgggtca

SEQ ID NO: 171865 - DNA, 15 bp, Unknown
  misc_feature (1)..( 15): Result.005 file - promoters50/1442777
aaattaatattgtca

SEQ ID NO: 171866 - DNA, 15 bp, Unknown
  misc_feature (1)..( 15): Result.005 file - promoters50/1442777
gaaataattttgttt

SEQ ID NO: 171867 - DNA, 15 bp, Unknown
  misc_feature (1)..( 15): Result.005 file - promoters50/1442777
atgtaaattttgaaa

SEQ ID NO: 171868 - DNA, 15 bp, Unknown
  misc_feature (1)..( 15): Result.005 file - promoters50/1442777
tctaaaatattgttc

SEQ ID NO: 171869 - DNA, 15 bp, Unknown
  misc_feature (1)..( 15): Result.005 file - promoters50/1442777
aaagtaagattttca

SEQ ID NO: 171870 - DNA, 15 bp, Unknown
  misc_feature (1)..( 15): Result.005 file - promoters50/1442777
ggctttttttagttg

SEQ ID NO: 171871 - DNA, 20 bp, Unknown
  misc_feature (1)..( 20): Result.005 file - promoters50/1442777
tcaagctgaatggtccataa

SEQ ID NO: 171872 - DNA, 20 bp, Unknown
  misc_feature (1)..( 20): Result.005 file - promoters50/1442777
tcaggctaaatttgttatgt

SEQ ID NO: 171873 - DNA, 20 bp, Unknown
  misc_feature (1)..( 20): Result.005 file - promoters50/1442777
gatgtataactttatgttat

SEQ ID NO: 171874 - DNA, 20 bp, Unknown
  misc_feature (1)..( 20): Result.005 file - promoters50/1442777
ccaaaatatctttataagta

SEQ ID NO: 171875 - DNA, 20 bp, Unknown
  misc_feature (1)..( 20): Result.005 file - promoters50/1442777
tattatacgttttaaaagta

SEQ ID NO: 171876 - DNA, 20 bp, Unknown
  misc_feature (1)..( 20): Result.005 file - promoters50/1442777
attagaaaaaagtcttgggt

SEQ ID NO: 171877 - DNA, 10 bp, Unknown
  misc_feature (1)..( 10): Result.005 file - promoters50/1442848
atttcaaatt

SEQ ID NO: 171878 - DNA, 10 bp, Unknown
  misc_feature (1)..( 10): Result.005 file - promoters50/1442848
attacaaaaa

SEQ ID NO: 171879 - DNA, 11 bp, Unknown
  misc_feature (1)..( 11): Result.005 file - promoters50/1442848
tttaccaaatt

SEQ ID NO: 171880 - DNA, 11 bp, Unknown
  misc_feature (1)..( 11): Result.005 file - promoters50/1442848
atcacctaatt

SEQ ID NO: 171881 - DNA, 11 bp, Unknown
  misc_feature (1)..( 11): Result.005 file - promoters50/1442887
gatcataatta

SEQ ID NO: 171882 - DNA, 11 bp, Unknown
  misc_feature (1)..( 11): Result.005 file - promoters50/1442887
ttacatgatta

SEQ ID NO: 171883 - DNA, 11 bp, Unknown
  misc_feature (1)..( 11): Result.005 file - promoters50/1442887
ttatatgatcg

SEQ ID NO: 171884 - DNA, 6 bp, Unknown
  misc_feature (1)..( 6): Result.005 file - promoters50/1442887
ttgggt

SEQ ID NO: 171885 - DNA, 6 bp, Unknown
  misc_feature (1)..( 6): Result.005 file - promoters50/1442887
ttgggt

SEQ ID NO: 171886 - DNA, 6 bp, Unknown
  misc_feature (1)..( 6): Result.005 file - promoters50/1442887
ttgggt

SEQ ID NO: 171887 - DNA, 7 bp, Unknown
  misc_feature (1)..( 7): Result.005 file - promoters50/1442887
tatatca

SEQ ID NO: 171888 - DNA, 7 bp, Unknown
  misc_feature (1)..( 7): Result.005 file - promoters50/1442887
aatatca

SEQ ID NO: 171889 - DNA, 7 bp, Unknown
  misc_feature (1)..( 7): Result.005 file - promoters50/1442887
aatatct

SEQ ID NO: 171890 - DNA, 8 bp, Unknown
  misc_feature (1)..( 8): Result.005 file - promoters50/1442887
attttggt

SEQ ID NO: 171891 - DNA, 8 bp, Unknown
  misc_feature (1)..( 8): Result.005 file - promoters50/1442887
tgtttggt

SEQ ID NO: 171892 - DNA, 8 bp, Unknown
  misc_feature (1)..( 8): Result.005 file - promoters50/1442887
tgttgggt

SEQ ID NO: 171893 - DNA, 9 bp, Unknown
  misc_feature (1)..( 9): Result.005 file - promoters50/1442887
gaaagaaag

SEQ ID NO: 171894 - DNA, 9 bp, Unknown
  misc_feature (1)..( 9): Result.005 file - promoters50/1442887
gaaacaaaa

SEQ ID NO: 171895 - DNA, 9 bp, Unknown
  misc_feature (1)..( 9): Result.005 file - promoters50/1442887
taaaaaaag

SEQ ID NO: 171896 - DNA, 9 bp, Unknown
  misc_feature (1)..( 9): Result.005 file - promoters50/1442887
aaagaaaag

SEQ ID NO: 171897 - DNA, 9 bp, Unknown
  misc_feature (1)..( 9): Result.005 file - promoters50/1442887
aaagtaaag

SEQ ID NO: 171898 - DNA, 9 bp, Unknown
  misc_feature (1)..( 9): Result.005 file - promoters50/1442887
taagtaaaa

SEQ ID NO: 171899 - DNA, 8 bp, Unknown
  misc_feature (1)..( 8): Result.005 file - promoters50/1442945
attataat

SEQ ID NO: 171900 - DNA, 8 bp, Unknown
  misc_feature (1)..( 8): Result.005 file - promoters50/1442945
attttaat

SEQ ID NO: 171901 - DNA, 8 bp, Unknown
  misc_feature (1)..( 8): Result.005 file - promoters50/1442945
tttataag

SEQ ID NO: 171902 - DNA, 8 bp, Unknown
  misc_feature (1)..( 8): Result.005 file - promoters50/1442945
cttttaat

SEQ ID NO: 171903 - DNA, 10 bp, Unknown
  misc_feature (1)..( 10): Result.005 file - promoters50/1442945
acataattaa

SEQ ID NO: 171904 - DNA, 10 bp, Unknown
  misc_feature (1)..( 10): Result.005 file - promoters50/1442945
ttttaattaa

SEQ ID NO: 171905 - DNA, 10 bp, Unknown
  misc_feature (1)..( 10): Result.005 file - promoters50/1442945
gaataaataa

SEQ ID NO: 171906 - DNA, 10 bp, Unknown
  misc_feature (1)..( 10): Result.005 file - promoters50/1442945
ttttcattca

SEQ ID NO: 171907 - DNA, 10 bp, Unknown
  misc_feature (1)..( 10): Result.005 file - promoters50/1442967
tgtaaaggtc

SEQ ID NO: 171908 - DNA, 10 bp, Unknown
  misc_feature (1)..( 10): Result.005 file - promoters50/1442967
gataagggta

SEQ ID NO: 171909 - DNA, 10 bp, Unknown
  misc_feature (1)..( 10): Result.005 file - promoters50/1442967
ccagaaggtc

SEQ ID NO: 171910 - DNA, 10 bp, Unknown
  misc_feature (1)..( 10): Result.005 file - promoters50/1442967
gattagggtt

SEQ ID NO: 171911 - DNA, 9 bp, Unknown
  misc_feature (1)..( 9): Result.005 file - promoters50/1442967
aaagaaacc

SEQ ID NO: 171912 - DNA, 9 bp, Unknown
  misc_feature (1)..( 9): Result.005 file - promoters50/1442967
taagaaaat

SEQ ID NO: 171913 - DNA, 9 bp, Unknown
  misc_feature (1)..( 9): Result.005 file - promoters50/1442967
aaagaaacg

SEQ ID NO: 171914 - DNA, 9 bp, Unknown
  misc_feature (1)..( 9): Result.005 file - promoters50/1442967
gtagaaaat

SEQ ID NO: 171915 - DNA, 10 bp, Unknown
  misc_feature (1)..( 10): Result.005 file - promoters50/1442967
tcaatagtta

SEQ ID NO: 171916 - DNA, 10 bp, Unknown
  misc_feature (1)..( 10): Result.005 file - promoters50/1442967
tcagtagtta

SEQ ID NO: 171917 - DNA, 10 bp, Unknown
  misc_feature (1)..( 10): Result.005 file - promoters50/1442967
taagtagtag

SEQ ID NO: 171918 - DNA, 10 bp, Unknown
  misc_feature (1)..( 10): Result.005 file - promoters50/1442967
tgagtggttt

SEQ ID NO: 171919 - DNA, 9 bp, Unknown
  misc_feature (1)..( 9): Result.005 file - promoters50/1442975
agaaaacga

SEQ ID NO: 171920 - DNA, 9 bp, Unknown
  misc_feature (1)..( 9): Result.005 file - promoters50/1442975
tgaaaacta

SEQ ID NO: 171921 - DNA, 9 bp, Unknown
  misc_feature (1)..( 9): Result.005 file - promoters50/1442975
tgaacactg

SEQ ID NO: 171922 - DNA, 9 bp, Unknown
  misc_feature (1)..( 9): Result.005 file - promoters50/1442975
tgagaacat

SEQ ID NO: 171923 - DNA, 9 bp, Unknown
  misc_feature (1)..( 9): Result.005 file - promoters50/1442975
acaaaacta

SEQ ID NO: 171924 - DNA, 11 bp, Unknown
  misc_feature (1)..( 11): Result.005 file - promoters50/1443011
aattatattat

SEQ ID NO: 171925 - DNA, 11 bp, Unknown
  misc_feature (1)..( 11): Result.005 file - promoters50/1443011
aataataatat

SEQ ID NO: 171926 - DNA, 11 bp, Unknown
  misc_feature (1)..( 11): Result.005 file - promoters50/1443011
cattttcagat

SEQ ID NO: 171927 - DNA, 11 bp, Unknown
  misc_feature (1)..( 11): Result.005 file - promoters50/1443019
tctgtttcttc

SEQ ID NO: 171928 - DNA, 11 bp, Unknown
  misc_feature (1)..( 11): Result.005 file - promoters50/1443019
ttggtttctag

SEQ ID NO: 171929 - DNA, 11 bp, Unknown
  misc_feature (1)..( 11): Result.005 file - promoters50/1443019
acggtttcttg

SEQ ID NO: 171930 - DNA, 11 bp, Unknown
  misc_feature (1)..( 11): Result.005 file - promoters50/1443019
ttggtatctat

SEQ ID NO: 171931 - DNA, 11 bp, Unknown
  misc_feature (1)..( 11): Result.005 file - promoters50/1443019
acggttttgta

SEQ ID NO: 171932 - DNA, 11 bp, Unknown
  misc_feature (1)..( 11): Result.005 file - promoters50/1443019
cttgtttattg

SEQ ID NO: 171933 - DNA, 12 bp, Unknown
  misc_feature (1)..( 12): Result.005 file - promoters50/1443021
atacaatatatc

SEQ ID NO: 171934 - DNA, 12 bp, Unknown
  misc_feature (1)..( 12): Result.005 file - promoters50/1443021
tcaaaatttatc

SEQ ID NO: 171935 - DNA, 12 bp, Unknown
  misc_feature (1)..( 12): Result.005 file - promoters50/1443021
tcagaatttgga

SEQ ID NO: 171936 - DNA, 10 bp, Unknown
  misc_feature (1)..( 10): Result.005 file - promoters50/1443021
caataaatat

SEQ ID NO: 171937 - DNA, 10 bp, Unknown
  misc_feature (1)..( 10): Result.005 file - promoters50/1443021
caacaaaagc

SEQ ID NO: 171938 - DNA, 10 bp, Unknown
  misc_feature (1)..( 10): Result.005 file - promoters50/1443021
ttatatatat

SEQ ID NO: 171939 - DNA, 8 bp, Unknown
  misc_feature (1)..( 8): Result.005 file - promoters50/1443021
ttgaaaat

SEQ ID NO: 171940 - DNA, 8 bp, Unknown
  misc_feature (1)..( 8): Result.005 file - promoters50/1443021
atgaaaac

SEQ ID NO: 171941 - DNA, 8 bp, Unknown
  misc_feature (1)..( 8): Result.005 file - promoters50/1443021
atgacaac

SEQ ID NO: 171942 - DNA, 8 bp, Unknown
  misc_feature (1)..( 8): Result.005 file - promoters50/1443021
aaaccttg

SEQ ID NO: 171943 - DNA, 8 bp, Unknown
  misc_feature (1)..( 8): Result.005 file - promoters50/1443021
aaagcttg

SEQ ID NO: 171944 - DNA, 8 bp, Unknown
  misc_feature (1)..( 8): Result.005 file - promoters50/1443021
tgagcttg

SEQ ID NO: 171945 - DNA, 12 bp, Unknown
  misc_feature (1)..( 12): Result.005 file - promoters50/1443029
aaaagtttttgt

SEQ ID NO: 171946 - DNA, 12 bp, Unknown
  misc_feature (1)..( 12): Result.005 file - promoters50/1443029
gtttgttgttgg

SEQ ID NO: 171947 - DNA, 12 bp, Unknown
  misc_feature (1)..( 12): Result.005 file - promoters50/1443029
gtatctttttgt

SEQ ID NO: 171948 - DNA, 12 bp, Unknown
  misc_feature (1)..( 12): Result.005 file - promoters50/1443029
tttagttttgta

SEQ ID NO: 171949 - DNA, 12 bp, Unknown
  misc_feature (1)..( 12): Result.005 file - promoters50/1443029
tatccttttcaa

SEQ ID NO: 171950 - DNA, 12 bp, Unknown
  misc_feature (1)..( 12): Result.005 file - promoters50/1443029
tttacttttaac

SEQ ID NO: 171951 - DNA, 9 bp, Unknown
  misc_feature (1)..( 9): Result.005 file - promoters50/1443029
tcaaaaata

SEQ ID NO: 171952 - DNA, 9 bp, Unknown
  misc_feature (1)..( 9): Result.005 file - promoters50/1443029
ttaaaaata

SEQ ID NO: 171953 - DNA, 9 bp, Unknown
  misc_feature (1)..( 9): Result.005 file - promoters50/1443029
acaaaaaag

SEQ ID NO: 171954 - DNA, 9 bp, Unknown
  misc_feature (1)..( 9): Result.005 file - promoters50/1443029
gtaaaaatt

SEQ ID NO: 171955 - DNA, 9 bp, Unknown
  misc_feature (1)..( 9): Result.005 file - promoters50/1443029
caaaacatt

SEQ ID NO: 171956 - DNA, 9 bp, Unknown
  misc_feature (1)..( 9): Result.005 file - promoters50/1443029
ttaaaaact

SEQ ID NO: 171957 - DNA, 9 bp, Unknown
  misc_feature (1)..( 9): Result.005 file - promoters50/1443029
agatttatg

SEQ ID NO: 171958 - DNA, 9 bp, Unknown
  misc_feature (1)..( 9): Result.005 file - promoters50/1443029
caatttata

SEQ ID NO: 171959 - DNA, 9 bp, Unknown
  misc_feature (1)..( 9): Result.005 file - promoters50/1443029
agatgtata

SEQ ID NO: 171960 - DNA, 9 bp, Unknown
  misc_feature (1)..( 9): Result.005 file - promoters50/1443029
aaatttacg

SEQ ID NO: 171961 - DNA, 9 bp, Unknown
  misc_feature (1)..( 9): Result.005 file - promoters50/1443029
cgatgtaaa

SEQ ID NO: 171962 - DNA, 9 bp, Unknown
  misc_feature (1)..( 9): Result.005 file - promoters50/1443029
cgatataaa

SEQ ID NO: 171963 - DNA, 10 bp, Unknown
  misc_feature (1)..( 10): Result.005 file - promoters50/1443067
gataacttta

SEQ ID NO: 171964 - DNA, 10 bp, Unknown
  misc_feature (1)..( 10): Result.005 file - promoters50/1443067
gataacctta

SEQ ID NO: 171965 - DNA, 10 bp, Unknown
  misc_feature (1)..( 10): Result.005 file - promoters50/1443067
cataagcttg

SEQ ID NO: 171966 - DNA, 9 bp, Unknown
  misc_feature (1)..( 9): Result.005 file - promoters50/1443067
aacattttg

SEQ ID NO: 171967 - DNA, 9 bp, Unknown
  misc_feature (1)..( 9): Result.005 file - promoters50/1443067
aacgttttg

SEQ ID NO: 171968 - DNA, 9 bp, Unknown
  misc_feature (1)..( 9): Result.005 file - promoters50/1443067
cacatttaa

SEQ ID NO: 171969 - DNA, 10 bp, Unknown
  misc_feature (1)..( 10): Result.005 file - promoters50/1443067
tttgaagcaa

SEQ ID NO: 171970 - DNA, 10 bp, Unknown
  misc_feature (1)..( 10): Result.005 file - promoters50/1443067
tttaaagctt

SEQ ID NO: 171971 - DNA, 10 bp, Unknown
  misc_feature (1)..( 10): Result.005 file - promoters50/1443067
aacaaagctt

SEQ ID NO: 171972 - DNA, 13 bp, Unknown
  misc_feature (1)..( 13): Result.005 file - promoters50/1443075
ttggcatttacaa

SEQ ID NO: 171973 - DNA, 13 bp, Unknown
  misc_feature (1)..( 13): Result.005 file - promoters50/1443075
aaataattttcaa

SEQ ID NO: 171974 - DNA, 13 bp, Unknown
  misc_feature (1)..( 13): Result.005 file - promoters50/1443075
aaatcattttttc

SEQ ID NO: 171975 - DNA, 9 bp, Unknown
  misc_feature (1)..( 9): Result.005 file - promoters50/1443083
tatagaaaa

SEQ ID NO: 171976 - DNA, 9 bp, Unknown
  misc_feature (1)..( 9): Result.005 file - promoters50/1443083
catataaat

SEQ ID NO: 171977 - DNA, 9 bp, Unknown
  misc_feature (1)..( 9): Result.005 file - promoters50/1443083
tatagaatg

SEQ ID NO: 171978 - DNA, 9 bp, Unknown
  misc_feature (1)..( 9): Result.005 file - promoters50/1443083
tttataaag

SEQ ID NO: 171979 - DNA, 9 bp, Unknown
  misc_feature (1)..( 9): Result.005 file - promoters50/1443083
caaataaat

SEQ ID NO: 171980 - DNA, 9 bp, Unknown
  misc_feature (1)..( 9): Result.005 file - promoters50/1443083
gaaacaaat

SEQ ID NO: 171981 - DNA, 9 bp, Unknown
  misc_feature (1)..( 9): Result.005 file - promoters50/1443083
ttaaccaat

SEQ ID NO: 171982 - DNA, 8 bp, Unknown
  misc_feature (1)..( 8): Result.005 file - promoters50/1443083
aaaaaaaa

SEQ ID NO: 171983 - DNA, 8 bp, Unknown
  misc_feature (1)..( 8): Result.005 file - promoters50/1443083
aaataaaa

SEQ ID NO: 171984 - DNA, 8 bp, Unknown
  misc_feature (1)..( 8): Result.005 file - promoters50/1443083
aaataaat

SEQ ID NO: 171985 - DNA, 8 bp, Unknown
  misc_feature (1)..( 8): Result.005 file - promoters50/1443083
aaacaaat

SEQ ID NO: 171986 - DNA, 8 bp, Unknown
  misc_feature (1)..( 8): Result.005 file - promoters50/1443083
taaccaat

SEQ ID NO: 171987 - DNA, 8 bp, Unknown
  misc_feature (1)..( 8): Result.005 file - promoters50/1443083
taaccata

SEQ ID NO: 171988 - DNA, 19 bp, Unknown
  misc_feature (1)..( 19): Result.005 file - promoters50/1443083
aatcattaacaaatacgaa

SEQ ID NO: 171989 - DNA, 19 bp, Unknown
  misc_feature (1)..( 19): Result.005 file - promoters50/1443083
ttgaggaaacaaatttttt

SEQ ID NO: 171990 - DNA, 19 bp, Unknown
  misc_feature (1)..( 19): Result.005 file - promoters50/1443083
cacaaaagacaaataaatc

SEQ ID NO: 171991 - DNA, 19 bp, Unknown
  misc_feature (1)..( 19): Result.005 file - promoters50/1443083
aatccttaaccaataagat

SEQ ID NO: 171992 - DNA, 17 bp, Unknown
  misc_feature (1)..( 17): Result.005 file - promoters50/1443083
acaaaaacaaattgttt

SEQ ID NO: 171993 - DNA, 19 bp, Unknown
  misc_feature (1)..( 19): Result.005 file - promoters50/1443083
aatggctaaccatatttga

SEQ ID NO: 171994 - DNA, 10 bp, Unknown
  misc_feature (1)..( 10): Result.005 file - promoters50/1443083
aaaaaaaata

SEQ ID NO: 171995 - DNA, 10 bp, Unknown
  misc_feature (1)..( 10): Result.005 file - promoters50/1443083
gaaataaatg

SEQ ID NO: 171996 - DNA, 10 bp, Unknown
  misc_feature (1)..( 10): Result.005 file - promoters50/1443083
taaataaaat

SEQ ID NO: 171997 - DNA, 10 bp, Unknown
  misc_feature (1)..( 10): Result.005 file - promoters50/1443083
tagatagatg

SEQ ID NO: 171998 - DNA, 10 bp, Unknown
  misc_feature (1)..( 10): Result.005 file - promoters50/1443083
cttatagatg

SEQ ID NO: 171999 - DNA, 10 bp, Unknown
  misc_feature (1)..( 10): Result.005 file - promoters50/1443083
gaaatagtat

SEQ ID NO: 172000 - DNA, 7 bp, Unknown
  misc_feature (1)..( 7): Result.005 file - promoters50/1443083
tattttc

SEQ ID NO: 172001 - DNA, 7 bp, Unknown
  misc_feature (1)..( 7): Result.005 file - promoters50/1443083
tatttta

SEQ ID NO: 172002 - DNA, 7 bp, Unknown
  misc_feature (1)..( 7): Result.005 file - promoters50/1443083
tattttt

SEQ ID NO: 172003 - DNA, 7 bp, Unknown
  misc_feature (1)..( 7): Result.005 file - promoters50/1443083
aatttta

SEQ ID NO: 172004 - DNA, 7 bp, Unknown
  misc_feature (1)..( 7): Result.005 file - promoters50/1443083
gatttta

SEQ ID NO: 172005 - DNA, 7 bp, Unknown
  misc_feature (1)..( 7): Result.005 file - promoters50/1443083
tatgtta

SEQ ID NO: 172006 - DNA, 11 bp, Unknown
  misc_feature (1)..( 11): Result.005 file - promoters50/1443083
cggtttcttga

SEQ ID NO: 172007 - DNA, 11 bp, Unknown
  misc_feature (1)..( 11): Result.005 file - promoters50/1443083
cactttcttcc

SEQ ID NO: 172008 - DNA, 11 bp, Unknown
  misc_feature (1)..( 11): Result.005 file - promoters50/1443083
aaatttattgt

SEQ ID NO: 172009 - DNA, 11 bp, Unknown
  misc_feature (1)..( 11): Result.005 file - promoters50/1443083
aatgttcttga

SEQ ID NO: 172010 - DNA, 11 bp, Unknown
  misc_feature (1)..( 11): Result.005 file - promoters50/1443083
attgtacttat

SEQ ID NO: 172011 - DNA, 11 bp, Unknown
  misc_feature (1)..( 11): Result.005 file - promoters50/1443083
aatgtatctac

SEQ ID NO: 172012 - DNA, 9 bp, Unknown
  misc_feature (1)..( 9): Result.005 file - promoters50/1443114
acaaagatt

SEQ ID NO: 172013 - DNA, 9 bp, Unknown
  misc_feature (1)..( 9): Result.005 file - promoters50/1443114
gaaaaaatt

SEQ ID NO: 172014 - DNA, 9 bp, Unknown
  misc_feature (1)..( 9): Result.005 file - promoters50/1443114
tcaaagacg

SEQ ID NO: 172015 - DNA, 9 bp, Unknown
  misc_feature (1)..( 9): Result.005 file - promoters50/1443114
tcagagata

SEQ ID NO: 172016 - DNA, 16 bp, Unknown
  misc_feature (1)..( 16): Result.005 file - promoters50/1443114
atctaaaaatggctat

SEQ ID NO: 172017 - DNA, 16 bp, Unknown
  misc_feature (1)..( 16): Result.005 file - promoters50/1443114
tagaaaaaatttattc

SEQ ID NO: 172018 - DNA, 16 bp, Unknown
  misc_feature (1)..( 16): Result.005 file - promoters50/1443114
cccaaaaactaagaat

SEQ ID NO: 172019 - DNA, 16 bp, Unknown
  misc_feature (1)..( 16): Result.005 file - promoters50/1443114
ccagaacaatatagca

SEQ ID NO: 172020 - DNA, 16 bp, Unknown
  misc_feature (1)..( 16): Result.005 file - promoters50/1443114
ccacaaccaaacggaa

SEQ ID NO: 172021 - DNA, 11 bp, Unknown
  misc_feature (1)..( 11): Result.005 file - promoters50/1443114
caatttaaatt

SEQ ID NO: 172022 - DNA, 11 bp, Unknown
  misc_feature (1)..( 11): Result.005 file - promoters50/1443114
gcatttaaatt

SEQ ID NO: 172023 - DNA, 11 bp, Unknown
  misc_feature (1)..( 11): Result.005 file - promoters50/1443114
gcaattagtac

SEQ ID NO: 172024 - DNA, 11 bp, Unknown
  misc_feature (1)..( 11): Result.005 file - promoters50/1443114
aaagttagttt

SEQ ID NO: 172025 - DNA, 13 bp, Unknown
  misc_feature (1)..( 13): Result.005 file - promoters50/1443114
tacaaaaatgtaa

SEQ ID NO: 172026 - DNA, 13 bp, Unknown
  misc_feature (1)..( 13): Result.005 file - promoters50/1443114
aagaaaaaagtaa

SEQ ID NO: 172027 - DNA, 13 bp, Unknown
  misc_feature (1)..( 13): Result.005 file - promoters50/1443114
gagaaaaaacaga

SEQ ID NO: 172028 - DNA, 13 bp, Unknown
  misc_feature (1)..( 13): Result.005 file - promoters50/1443114
gaggaaacatact

SEQ ID NO: 172029 - DNA, 12 bp, Unknown
  misc_feature (1)..( 12): Result.005 file - promoters50/1443178
aaagaaagaaaa

SEQ ID NO: 172030 - DNA, 12 bp, Unknown
  misc_feature (1)..( 12): Result.005 file - promoters50/1443178
aaataaaaacgg

SEQ ID NO: 172031 - DNA, 12 bp, Unknown
  misc_feature (1)..( 12): Result.005 file - promoters50/1443178
tgataacaacgg

SEQ ID NO: 172032 - DNA, 8 bp, Unknown
  misc_feature (1)..( 8): Result.005 file - promoters50/1443178
aaaaaccg

SEQ ID NO: 172033 - DNA, 8 bp, Unknown
  misc_feature (1)..( 8): Result.005 file - promoters50/1443178
aaaaacct

SEQ ID NO: 172034 - DNA, 8 bp, Unknown
  misc_feature (1)..( 8): Result.005 file - promoters50/1443178
ctaaaccg

SEQ ID NO: 172035 - DNA, 11 bp, Unknown
  misc_feature (1)..( 11): Result.005 file - promoters50/1443184
caaatgtgatt

SEQ ID NO: 172036 - DNA, 11 bp, Unknown
  misc_feature (1)..( 11): Result.005 file - promoters50/1443184
ataatttgagt

SEQ ID NO: 172037 - DNA, 11 bp, Unknown
  misc_feature (1)..( 11): Result.005 file - promoters50/1443184
atatttttagt

SEQ ID NO: 172038 - DNA, 10 bp, Unknown
  misc_feature (1)..( 10): Result.005 file - promoters50/1443184
aatttatcaa

SEQ ID NO: 172039 - DNA, 10 bp, Unknown
  misc_feature (1)..( 10): Result.005 file - promoters50/1443184
aatatataca

SEQ ID NO: 172040 - DNA, 10 bp, Unknown
  misc_feature (1)..( 10): Result.005 file - promoters50/1443184
agtttatttt

SEQ ID NO: 172041 - DNA, 11 bp, Unknown
  misc_feature (1)..( 11): Result.005 file - promoters50/1443184
agaaaaattgt

SEQ ID NO: 172042 - DNA, 11 bp, Unknown
  misc_feature (1)..( 11): Result.005 file - promoters50/1443184
agagaaaggat

SEQ ID NO: 172043 - DNA, 11 bp, Unknown
  misc_feature (1)..( 11): Result.005 file - promoters50/1443184
aaacaaagatt

SEQ ID NO: 172044 - DNA, 9 bp, Unknown
  misc_feature (1)..( 9): Result.005 file - promoters50/1443184
atatataaa

SEQ ID NO: 172045 - DNA, 9 bp, Unknown
  misc_feature (1)..( 9): Result.005 file - promoters50/1443184
atctataaa

SEQ ID NO: 172046 - DNA, 9 bp, Unknown
  misc_feature (1)..( 9): Result.005 file - promoters50/1443184
ccttataaa

SEQ ID NO: 172047 - DNA, 9 bp, Unknown
  misc_feature (1)..( 9): Result.005 file - promoters50/1443184
ccttttaaa

SEQ ID NO: 172048 - DNA, 8 bp, Unknown
  misc_feature (1)..( 8): Result.005 file - promoters50/1443184
aggaggaa

SEQ ID NO: 172049 - DNA, 8 bp, Unknown
  misc_feature (1)..( 8): Result.005 file - promoters50/1443184
aggaggaa

SEQ ID NO: 172050 - DNA, 8 bp, Unknown
  misc_feature (1)..( 8): Result.005 file - promoters50/1443184
tggaggat

SEQ ID NO: 172051 - DNA, 8 bp, Unknown
  misc_feature (1)..( 8): Result.005 file - promoters50/1443184
gttacaaa

SEQ ID NO: 172052 - DNA, 8 bp, Unknown
  misc_feature (1)..( 8): Result.005 file - promoters50/1443184
gttacaac

SEQ ID NO: 172053 - DNA, 8 bp, Unknown
  misc_feature (1)..( 8): Result.005 file - promoters50/1443184
gttataac

SEQ ID NO: 172054 - DNA, 18 bp, Unknown
  misc_feature (1)..( 18): Result.005 file - promoters50/1443192
aaaaattattaaagtata

SEQ ID NO: 172055 - DNA, 18 bp, Unknown
  misc_feature (1)..( 18): Result.005 file - promoters50/1443192
aaagattattaaattata

SEQ ID NO: 172056 - DNA, 18 bp, Unknown
  misc_feature (1)..( 18): Result.005 file - promoters50/1443192
aaaatttatctgtaaatg

SEQ ID NO: 172057 - DNA, 11 bp, Unknown
  misc_feature (1)..( 11): Result.005 file - promoters50/1443192
attacagtact

SEQ ID NO: 172058 - DNA, 18 bp, Unknown
  misc_feature (1)..( 18): Result.005 file - promoters50/1443192
tctcatttttaatcaaaa

SEQ ID NO: 172059 - DNA, 11 bp, Unknown
  misc_feature (1)..( 11): Result.005 file - promoters50/1443192
atttactaata

SEQ ID NO: 172060 - DNA, 11 bp, Unknown
  misc_feature (1)..( 11): Result.005 file - promoters50/1443192
aattattaaag

SEQ ID NO: 172061 - DNA, 11 bp, Unknown
  misc_feature (1)..( 11): Result.005 file - promoters50/1443192
atttacttaat

SEQ ID NO: 172062 - DNA, 11 bp, Unknown
  misc_feature (1)..( 11): Result.005 file - promoters50/1443192
ttttgctatac

SEQ ID NO: 172063 - DNA, 11 bp, Unknown
  misc_feature (1)..( 11): Result.005 file - promoters50/1443192
aaataccaatc

SEQ ID NO: 172064 - DNA, 11 bp, Unknown
  misc_feature (1)..( 11): Result.005 file - promoters50/1443192
ttataataatt

SEQ ID NO: 172065 - DNA, 13 bp, Unknown
  misc_feature (1)..( 13): Result.005 file - promoters50/1443192
ataattttagaga

SEQ ID NO: 172066 - DNA, 13 bp, Unknown
  misc_feature (1)..( 13): Result.005 file - promoters50/1443192
ctaattttaattt

SEQ ID NO: 172067 - DNA, 13 bp, Unknown
  misc_feature (1)..( 13): Result.005 file - promoters50/1443192
ataattatttggt

SEQ ID NO: 172068 - DNA, 13 bp, Unknown
  misc_feature (1)..( 13): Result.005 file - promoters50/1443192
atcattttcattt

SEQ ID NO: 172069 - DNA, 13 bp, Unknown
  misc_feature (1)..( 13): Result.005 file - promoters50/1443192
tacattttgtaac

SEQ ID NO: 172070 - DNA, 10 bp, Unknown
  misc_feature (1)..( 10): Result.005 file - promoters50/1443192
ctatatatat

SEQ ID NO: 172071 - DNA, 10 bp, Unknown
  misc_feature (1)..( 10): Result.005 file - promoters50/1443192
ttatttatat

SEQ ID NO: 172072 - DNA, 10 bp, Unknown
  misc_feature (1)..( 10): Result.005 file - promoters50/1443192
ctatataaac

SEQ ID NO: 172073 - DNA, 10 bp, Unknown
  misc_feature (1)..( 10): Result.005 file - promoters50/1443192
gtatatataa

SEQ ID NO: 172074 - DNA, 10 bp, Unknown
  misc_feature (1)..( 10): Result.005 file - promoters50/1443192
gtctataaat

SEQ ID NO: 172075 - DNA, 13 bp, Unknown
  misc_feature (1)..( 13): Result.005 file - promoters50/1443256
attcttaatttca

SEQ ID NO: 172076 - DNA, 13 bp, Unknown
  misc_feature (1)..( 13): Result.005 file - promoters50/1443256
atttttattttca

SEQ ID NO: 172077 - DNA, 13 bp, Unknown
  misc_feature (1)..( 13): Result.005 file - promoters50/1443256
acgtttaaacaat

SEQ ID NO: 172078 - DNA, 13 bp, Unknown
  misc_feature (1)..( 13): Result.005 file - promoters50/1443256
gttcataactgtt

SEQ ID NO: 172079 - DNA, 13 bp, Unknown
  misc_feature (1)..( 13): Result.005 file - promoters50/1443256
gttcttatcactg

SEQ ID NO: 172080 - DNA, 13 bp, Unknown
  misc_feature (1)..( 13): Result.005 file - promoters50/1443256
tctcttatgaact

SEQ ID NO: 172081 - DNA, 8 bp, Unknown
  misc_feature (1)..( 8): Result.005 file - promoters50/1443271
cattaaat

SEQ ID NO: 172082 - DNA, 8 bp, Unknown
  misc_feature (1)..( 8): Result.005 file - promoters50/1443271
cataaaaa

SEQ ID NO: 172083 - DNA, 8 bp, Unknown
  misc_feature (1)..( 8): Result.005 file - promoters50/1443271
ggtaaaaa

SEQ ID NO: 172084 - DNA, 8 bp, Unknown
  misc_feature (1)..( 8): Result.005 file - promoters50/1443271
tctttttc

SEQ ID NO: 172085 - DNA, 8 bp, Unknown
  misc_feature (1)..( 8): Result.005 file - promoters50/1443271
tgtttttc

SEQ ID NO: 172086 - DNA, 8 bp, Unknown
  misc_feature (1)..( 8): Result.005 file - promoters50/1443271
tgttttta

SEQ ID NO: 172087 - DNA, 9 bp, Unknown
  misc_feature (1)..( 9): Result.005 file - promoters50/1443271
gtttaattt

SEQ ID NO: 172088 - DNA, 9 bp, Unknown
  misc_feature (1)..( 9): Result.005 file - promoters50/1443271
ttttaattt

SEQ ID NO: 172089 - DNA, 9 bp, Unknown
  misc_feature (1)..( 9): Result.005 file - promoters50/1443271
gtttaaacc

SEQ ID NO: 172090 - DNA, 8 bp, Unknown
  misc_feature (1)..( 8): Result.005 file - promoters50/1443271
aaacatta

SEQ ID NO: 172091 - DNA, 8 bp, Unknown
  misc_feature (1)..( 8): Result.005 file - promoters50/1443271
aaaaatta

SEQ ID NO: 172092 - DNA, 8 bp, Unknown
  misc_feature (1)..( 8): Result.005 file - promoters50/1443271
aaaaatta

SEQ ID NO: 172093 - DNA, 9 bp, Unknown
  misc_feature (1)..( 9): Result.005 file - promoters50/1443276
aatttaata

SEQ ID NO: 172094 - DNA, 9 bp, Unknown
  misc_feature (1)..( 9): Result.005 file - promoters50/1443276
catttaatg

SEQ ID NO: 172095 - DNA, 9 bp, Unknown
  misc_feature (1)..( 9): Result.005 file - promoters50/1443276
aatttaata

SEQ ID NO: 172096 - DNA, 8 bp, Unknown
  misc_feature (1)..( 8): Result.005 file - promoters50/1443276
aaaaggaa

SEQ ID NO: 172097 - DNA, 8 bp, Unknown
  misc_feature (1)..( 8): Result.005 file - promoters50/1443276
aaatggaa

SEQ ID NO: 172098 - DNA, 8 bp, Unknown
  misc_feature (1)..( 8): Result.005 file - promoters50/1443276
aaaacgaa

SEQ ID NO: 172099 - DNA, 10 bp, Unknown
  misc_feature (1)..( 10): Result.005 file - promoters50/1443276
cgttattatg

SEQ ID NO: 172100 - DNA, 10 bp, Unknown
  misc_feature (1)..( 10): Result.005 file - promoters50/1443276
aaatattatt

SEQ ID NO: 172101 - DNA, 10 bp, Unknown
  misc_feature (1)..( 10): Result.005 file - promoters50/1443276
aaataatatt

SEQ ID NO: 172102 - DNA, 9 bp, Unknown
  misc_feature (1)..( 9): Result.005 file - promoters50/1443276
gactaaaag

SEQ ID NO: 172103 - DNA, 9 bp, Unknown
  misc_feature (1)..( 9): Result.005 file - promoters50/1443276
gactataag

SEQ ID NO: 172104 - DNA, 9 bp, Unknown
  misc_feature (1)..( 9): Result.005 file - promoters50/1443276
aactaaaat

SEQ ID NO: 172105 - DNA, 8 bp, Unknown
  misc_feature (1)..( 8): Result.005 file - promoters50/1443276
aaagtcta

SEQ ID NO: 172106 - DNA, 8 bp, Unknown
  misc_feature (1)..( 8): Result.005 file - promoters50/1443276
taagtctc

SEQ ID NO: 172107 - DNA, 8 bp, Unknown
  misc_feature (1)..( 8): Result.005 file - promoters50/1443276
aaaatcta

SEQ ID NO: 172108 - DNA, 8 bp, Unknown
  misc_feature (1)..( 8): Result.005 file - promoters50/1443276
tcaataaa

SEQ ID NO: 172109 - DNA, 8 bp, Unknown
  misc_feature (1)..( 8): Result.005 file - promoters50/1443276
tcattaaa

SEQ ID NO: 172110 - DNA, 8 bp, Unknown
  misc_feature (1)..( 8): Result.005 file - promoters50/1443276
tcaagaaa

SEQ ID NO: 172111 - DNA, 10 bp, Unknown
  misc_feature (1)..( 10): Result.005 file - promoters50/1443276
atacaaaaaa

SEQ ID NO: 172112 - DNA, 10 bp, Unknown
  misc_feature (1)..( 10): Result.005 file - promoters50/1443276
tattaaaaaa

SEQ ID NO: 172113 - DNA, 10 bp, Unknown
  misc_feature (1)..( 10): Result.005 file - promoters50/1443276
caagaaaaac

SEQ ID NO: 172114 - DNA, 8 bp, Unknown
  misc_feature (1)..( 8): Result.005 file - promoters50/1443276
agaaaaat

SEQ ID NO: 172115 - DNA, 8 bp, Unknown
  misc_feature (1)..( 8): Result.005 file - promoters50/1443276
acaaaaat

SEQ ID NO: 172116 - DNA, 8 bp, Unknown
  misc_feature (1)..( 8): Result.005 file - promoters50/1443276
agaaaaac

SEQ ID NO: 172117 - DNA, 11 bp, Unknown
  misc_feature (1)..( 11): Result.005 file - promoters50/1443276
tataaaaaagg

SEQ ID NO: 172118 - DNA, 11 bp, Unknown
  misc_feature (1)..( 11): Result.005 file - promoters50/1443276
tatataaatgc

SEQ ID NO: 172119 - DNA, 11 bp, Unknown
  misc_feature (1)..( 11): Result.005 file - promoters50/1443276
aataaatacat

SEQ ID NO: 172120 - DNA, 9 bp, Unknown
  misc_feature (1)..( 9): Result.005 file - promoters50/1443276
aaataaatg

SEQ ID NO: 172121 - DNA, 9 bp, Unknown
  misc_feature (1)..( 9): Result.005 file - promoters50/1443276
aaacaaaaa

SEQ ID NO: 172122 - DNA, 9 bp, Unknown
  misc_feature (1)..( 9): Result.005 file - promoters50/1443276
caacaaaaa

SEQ ID NO: 172123 - DNA, 8 bp, Unknown
  misc_feature (1)..( 8): Result.005 file - promoters50/1443283
gaaaaatg

SEQ ID NO: 172124 - DNA, 8 bp, Unknown
  misc_feature (1)..( 8): Result.005 file - promoters50/1443283
taaaaatg

SEQ ID NO: 172125 - DNA, 8 bp, Unknown
  misc_feature (1)..( 8): Result.005 file - promoters50/1443283
taacaatg

SEQ ID NO: 172126 - DNA, 15 bp, Unknown
  misc_feature (1)..( 15): Result.005 file - promoters50/1443306
agtataaaatacttt

SEQ ID NO: 172127 - DNA, 15 bp, Unknown
  misc_feature (1)..( 15): Result.005 file - promoters50/1443306
aactaaaaatatatt

SEQ ID NO: 172128 - DNA, 15 bp, Unknown
  misc_feature (1)..( 15): Result.005 file - promoters50/1443306
caagtaagatatttt

SEQ ID NO: 172129 - DNA, 15 bp, Unknown
  misc_feature (1)..( 15): Result.005 file - promoters50/1443306
agtatataattttag

SEQ ID NO: 172130 - DNA, 15 bp, Unknown
  misc_feature (1)..( 15): Result.005 file - promoters50/1443306
tttaaaaaatgttat

SEQ ID NO: 172131 - DNA, 16 bp, Unknown
  misc_feature (1)..( 16): Result.005 file - promoters50/1443306
gaaataacaattgaag

SEQ ID NO: 172132 - DNA, 16 bp, Unknown
  misc_feature (1)..( 16): Result.005 file - promoters50/1443306
ttacaaaaaaattcac

SEQ ID NO: 172133 - DNA, 16 bp, Unknown
  misc_feature (1)..( 16): Result.005 file - promoters50/1443306
tccacaataatttagg

SEQ ID NO: 172134 - DNA, 21 bp, Unknown
  misc_feature (1)..( 21): Result.005 file - promoters50/1443306
ttctttttcgagaatacaaag

SEQ ID NO: 172135 - DNA, 21 bp, Unknown
  misc_feature (1)..( 21): Result.005 file - promoters50/1443306
tactttatcgtccaatcaatc

SEQ ID NO: 172136 - DNA, 21 bp, Unknown
  misc_feature (1)..( 21): Result.005 file - promoters50/1443306
gtatttttttttaatatatat

SEQ ID NO: 172137 - DNA, 21 bp, Unknown
  misc_feature (1)..( 21): Result.005 file - promoters50/1443306
aatattattgtccaactagtg

SEQ ID NO: 172138 - DNA, 21 bp, Unknown
  misc_feature (1)..( 21): Result.005 file - promoters50/1443306
atcagtatcgtccaaacaatc

SEQ ID NO: 172139 - DNA, 21 bp, Unknown
  misc_feature (1)..( 21): Result.005 file - promoters50/1443306
atcattatttttactcagtaa

SEQ ID NO: 172140 - DNA, 21 bp, Unknown
  misc_feature (1)..( 21): Result.005 file - promoters50/1443306
ttcattttcaattttttttac

SEQ ID NO: 172141 - DNA, 21 bp, Unknown
  misc_feature (1)..( 21): Result.005 file - promoters50/1443306
agaattctcactttgtatgtt

SEQ ID NO: 172142 - DNA, 12 bp, Unknown
  misc_feature (1)..( 12): Result.005 file - promoters50/1443306
aatctataaaaa

SEQ ID NO: 172143 - DNA, 12 bp, Unknown
  misc_feature (1)..( 12): Result.005 file - promoters50/1443306
taactataaata

SEQ ID NO: 172144 - DNA, 12 bp, Unknown
  misc_feature (1)..( 12): Result.005 file - promoters50/1443306
tatatataaata

SEQ ID NO: 172145 - DNA, 12 bp, Unknown
  misc_feature (1)..( 12): Result.005 file - promoters50/1443306
tcaatataaata

SEQ ID NO: 172146 - DNA, 12 bp, Unknown
  misc_feature (1)..( 12): Result.005 file - promoters50/1443306
ttcatataaata

SEQ ID NO: 172147 - DNA, 12 bp, Unknown
  misc_feature (1)..( 12): Result.005 file - promoters50/1443306
actatatatatc

SEQ ID NO: 172148 - DNA, 14 bp, Unknown
  misc_feature (1)..( 14): Result.005 file - promoters50/1443306
actaattttagcaa

SEQ ID NO: 172149 - DNA, 14 bp, Unknown
  misc_feature (1)..( 14): Result.005 file - promoters50/1443306
ttcaatttttttta

SEQ ID NO: 172150 - DNA, 14 bp, Unknown
  misc_feature (1)..( 14): Result.005 file - promoters50/1443306
tttaatattatatc

SEQ ID NO: 172151 - DNA, 14 bp, Unknown
  misc_feature (1)..( 14): Result.005 file - promoters50/1443306
aataatagtataaa

SEQ ID NO: 172152 - DNA, 14 bp, Unknown
  misc_feature (1)..( 14): Result.005 file - promoters50/1443306
attatttttactca

SEQ ID NO: 172153 - DNA, 14 bp, Unknown
  misc_feature (1)..( 14): Result.005 file - promoters50/1443306
tgtattttttttta

SEQ ID NO: 172154 - DNA, 14 bp, Unknown
  misc_feature (1)..( 14): Result.005 file - promoters50/1443306
gtcatcagtatcgt

SEQ ID NO: 172155 - DNA, 14 bp, Unknown
  misc_feature (1)..( 14): Result.005 file - promoters50/1443306
agaattctcacttt

SEQ ID NO: 172156 - DNA, 11 bp, Unknown
  misc_feature (1)..( 11): Result.005 file - promoters50/1443306
tatttgtaatc

SEQ ID NO: 172157 - DNA, 11 bp, Unknown
  misc_feature (1)..( 11): Result.005 file - promoters50/1443306
gatttgttaca

SEQ ID NO: 172158 - DNA, 11 bp, Unknown
  misc_feature (1)..( 11): Result.005 file - promoters50/1443306
tctttttaatg

SEQ ID NO: 172159 - DNA, 11 bp, Unknown
  misc_feature (1)..( 11): Result.005 file - promoters50/1443306
aatttttttaa

SEQ ID NO: 172160 - DNA, 11 bp, Unknown
  misc_feature (1)..( 11): Result.005 file - promoters50/1443306
attttgttatt

SEQ ID NO: 172161 - DNA, 12 bp, Unknown
  misc_feature (1)..( 12): Result.005 file - promoters50/1443306
tattattttcac

SEQ ID NO: 172162 - DNA, 7 bp, Unknown
  misc_feature (1)..( 7): Result.005 file - promoters50/1443306
taaaaat

SEQ ID NO: 172163 - DNA, 7 bp, Unknown
  misc_feature (1)..( 7): Result.005 file - promoters50/1443306
taaaaaa

SEQ ID NO: 172164 - DNA, 7 bp, Unknown
  misc_feature (1)..( 7): Result.005 file - promoters50/1443306
taacaat

SEQ ID NO: 172165 - DNA, 7 bp, Unknown
  misc_feature (1)..( 7): Result.005 file - promoters50/1443306
caaaaaa

SEQ ID NO: 172166 - DNA, 7 bp, Unknown
  misc_feature (1)..( 7): Result.005 file - promoters50/1443306
caaaaaa

SEQ ID NO: 172167 - DNA, 7 bp, Unknown
  misc_feature (1)..( 7): Result.005 file - promoters50/1443306
taacaaa

SEQ ID NO: 172168 - DNA, 11 bp, Unknown
  misc_feature (1)..( 11): Result.005 file - promoters50/1443306
ttttgctatac

SEQ ID NO: 172169 - DNA, 11 bp, Unknown
  misc_feature (1)..( 11): Result.005 file - promoters50/1443306
atttactaata

SEQ ID NO: 172170 - DNA, 11 bp, Unknown
  misc_feature (1)..( 11): Result.005 file - promoters50/1443306
ttttgcaattg

SEQ ID NO: 172171 - DNA, 11 bp, Unknown
  misc_feature (1)..( 11): Result.005 file - promoters50/1443306
tgttattaact

SEQ ID NO: 172172 - DNA, 11 bp, Unknown
  misc_feature (1)..( 11): Result.005 file - promoters50/1443306
cttttcaagat

SEQ ID NO: 172173 - DNA, 11 bp, Unknown
  misc_feature (1)..( 11): Result.005 file - promoters50/1443306
aaatacaaata

SEQ ID NO: 172174 - DNA, 9 bp, Unknown
  misc_feature (1)..( 9): Result.005 file - promoters50/1443338
tcttataat

SEQ ID NO: 172175 - DNA, 9 bp, Unknown
  misc_feature (1)..( 9): Result.005 file - promoters50/1443338
tcttataaa

SEQ ID NO: 172176 - DNA, 9 bp, Unknown
  misc_feature (1)..( 9): Result.005 file - promoters50/1443338
aattacaat

SEQ ID NO: 172177 - DNA, 10 bp, Unknown
  misc_feature (1)..( 10): Result.005 file - promoters50/1443342
atagttaacc

SEQ ID NO: 172178 - DNA, 10 bp, Unknown
  misc_feature (1)..( 10): Result.005 file - promoters50/1443342
ataattaaca

SEQ ID NO: 172179 - DNA, 10 bp, Unknown
  misc_feature (1)..( 10): Result.005 file - promoters50/1443342
gactttaacc

SEQ ID NO: 172180 - DNA, 15 bp, Unknown
  misc_feature (1)..( 15): Result.005 file - promoters50/1443342
ttcatataagttaat

SEQ ID NO: 172181 - DNA, 15 bp, Unknown
  misc_feature (1)..( 15): Result.005 file - promoters50/1443342
ttcatatatgttaag

SEQ ID NO: 172182 - DNA, 15 bp, Unknown
  misc_feature (1)..( 15): Result.005 file - promoters50/1443342
aaatgtttagttaat

SEQ ID NO: 172183 - DNA, 14 bp, Unknown
  misc_feature (1)..( 14): Result.005 file - promoters50/1443342
aattttctttttgt

SEQ ID NO: 172184 - DNA, 14 bp, Unknown
  misc_feature (1)..( 14): Result.005 file - promoters50/1443342
caatttctatttgt

SEQ ID NO: 172185 - DNA, 14 bp, Unknown
  misc_feature (1)..( 14): Result.005 file - promoters50/1443342
caagttcaattact

SEQ ID NO: 172186 - DNA, 11 bp, Unknown
  misc_feature (1)..( 11): Result.005 file - promoters50/1443349
tcgtgatgaag

SEQ ID NO: 172187 - DNA, 11 bp, Unknown
  misc_feature (1)..( 11): Result.005 file - promoters50/1443349
ttttgatgaat

SEQ ID NO: 172188 - DNA, 11 bp, Unknown
  misc_feature (1)..( 11): Result.005 file - promoters50/1443349
aaaagatgaag

SEQ ID NO: 172189 - DNA, 11 bp, Unknown
  misc_feature (1)..( 11): Result.005 file - promoters50/1443349
tttcgatgtat

SEQ ID NO: 172190 - DNA, 11 bp, Unknown
  misc_feature (1)..( 11): Result.005 file - promoters50/1443349
ttttgaagaat

SEQ ID NO: 172191 - DNA, 11 bp, Unknown
  misc_feature (1)..( 11): Result.005 file - promoters50/1443349
tttagatactt

SEQ ID NO: 172192 - DNA, 16 bp, Unknown
  misc_feature (1)..( 16): Result.005 file - promoters50/1443349
tgagaaatagatttga

SEQ ID NO: 172193 - DNA, 16 bp, Unknown
  misc_feature (1)..( 16): Result.005 file - promoters50/1443349
taaaagtaagattttc

SEQ ID NO: 172194 - DNA, 16 bp, Unknown
  misc_feature (1)..( 16): Result.005 file - promoters50/1443349
aaaaaaagagatctga

SEQ ID NO: 172195 - DNA, 16 bp, Unknown
  misc_feature (1)..( 16): Result.005 file - promoters50/1443349
aaaaaaagagaagaaa

SEQ ID NO: 172196 - DNA, 16 bp, Unknown
  misc_feature (1)..( 16): Result.005 file - promoters50/1443349
taggaaaaagttgtta

SEQ ID NO: 172197 - DNA, 16 bp, Unknown
  misc_feature (1)..( 16): Result.005 file - promoters50/1443349
ccagaaaaagctgatt

SEQ ID NO: 172198 - DNA, 11 bp, Unknown
  misc_feature (1)..( 11): Result.005 file - promoters50/1443349
gtatataaact

SEQ ID NO: 172199 - DNA, 11 bp, Unknown
  misc_feature (1)..( 11): Result.005 file - promoters50/1443349
atatataataa

SEQ ID NO: 172200 - DNA, 11 bp, Unknown
  misc_feature (1)..( 11): Result.005 file - promoters50/1443349
ctttataaata

SEQ ID NO: 172201 - DNA, 11 bp, Unknown
  misc_feature (1)..( 11): Result.005 file - promoters50/1443349
acctataaata

SEQ ID NO: 172202 - DNA, 11 bp, Unknown
  misc_feature (1)..( 11): Result.005 file - promoters50/1443349
ttatatataaa

SEQ ID NO: 172203 - DNA, 11 bp, Unknown
  misc_feature (1)..( 11): Result.005 file - promoters50/1443349
gtatataaatg

SEQ ID NO: 172204 - DNA, 11 bp, Unknown
  misc_feature (1)..( 11): Result.005 file - promoters50/1443349
ttatataaaca

SEQ ID NO: 172205 - DNA, 11 bp, Unknown
  misc_feature (1)..( 11): Result.005 file - promoters50/1443349
gacgataaata

SEQ ID NO: 172206 - DNA, 15 bp, Unknown
  misc_feature (1)..( 15): Result.005 file - promoters50/1443349
ctcgcttcataacaa

SEQ ID NO: 172207 - DNA, 15 bp, Unknown
  misc_feature (1)..( 15): Result.005 file - promoters50/1443349
atatctttataagta

SEQ ID NO: 172208 - DNA, 15 bp, Unknown
  misc_feature (1)..( 15): Result.005 file - promoters50/1443349
agttcttcatttcca

SEQ ID NO: 172209 - DNA, 15 bp, Unknown
  misc_feature (1)..( 15): Result.005 file - promoters50/1443349
tacgttttaaaagta

SEQ ID NO: 172210 - DNA, 15 bp, Unknown
  misc_feature (1)..( 15): Result.005 file - promoters50/1443349
aacaatttttaaatt

SEQ ID NO: 172211 - DNA, 15 bp, Unknown
  misc_feature (1)..( 15): Result.005 file - promoters50/1443349
ataactttatgttat

SEQ ID NO: 172212 - DNA, 15 bp, Unknown
  misc_feature (1)..( 15): Result.005 file - promoters50/1443349
caatctttatacaaa

SEQ ID NO: 172213 - DNA, 16 bp, Unknown
  misc_feature (1)..( 16): Result.005 file - promoters50/1443349
tatacgttttaaaagt

SEQ ID NO: 172214 - DNA, 16 bp, Unknown
  misc_feature (1)..( 16): Result.005 file - promoters50/1443349
aacaatttttaaattt

SEQ ID NO: 172215 - DNA, 16 bp, Unknown
  misc_feature (1)..( 16): Result.005 file - promoters50/1443349
atatctttataagtat

SEQ ID NO: 172216 - DNA, 16 bp, Unknown
  misc_feature (1)..( 16): Result.005 file - promoters50/1443349
ataactttatgttatt

SEQ ID NO: 172217 - DNA, 16 bp, Unknown
  misc_feature (1)..( 16): Result.005 file - promoters50/1443349
gaaaacttataattat

SEQ ID NO: 172218 - DNA, 16 bp, Unknown
  misc_feature (1)..( 16): Result.005 file - promoters50/1443349
caatctttatacaaaa

SEQ ID NO: 172219 - DNA, 12 bp, Unknown
  misc_feature (1)..( 12): Result.005 file - promoters50/1443349
aaaaatatatac

SEQ ID NO: 172220 - DNA, 12 bp, Unknown
  misc_feature (1)..( 12): Result.005 file - promoters50/1443349
tttaatatgtac

SEQ ID NO: 172221 - DNA, 12 bp, Unknown
  misc_feature (1)..( 12): Result.005 file - promoters50/1443349
gatagtatatac

SEQ ID NO: 172222 - DNA, 12 bp, Unknown
  misc_feature (1)..( 12): Result.005 file - promoters50/1443349
tagaatatgttt

SEQ ID NO: 172223 - DNA, 12 bp, Unknown
  misc_feature (1)..( 12): Result.005 file - promoters50/1443349
caaaatttgtat

SEQ ID NO: 172224 - DNA, 12 bp, Unknown
  misc_feature (1)..( 12): Result.005 file - promoters50/1443349
agcaatatttta

SEQ ID NO: 172225 - DNA, 15 bp, Unknown
  misc_feature (1)..( 15): Result.005 file - promoters50/1443349
aaattttaaaattat

SEQ ID NO: 172226 - DNA, 15 bp, Unknown
  misc_feature (1)..( 15): Result.005 file - promoters50/1443349
tgattctaaaatatt

SEQ ID NO: 172227 - DNA, 15 bp, Unknown
  misc_feature (1)..( 15): Result.005 file - promoters50/1443349
aaatgttagatagga

SEQ ID NO: 172228 - DNA, 15 bp, Unknown
  misc_feature (1)..( 15): Result.005 file - promoters50/1443349
attttttaaaatata

SEQ ID NO: 172229 - DNA, 15 bp, Unknown
  misc_feature (1)..( 15): Result.005 file - promoters50/1443349
aggagaagaaatata

SEQ ID NO: 172230 - DNA, 15 bp, Unknown
  misc_feature (1)..( 15): Result.005 file - promoters50/1443349
ccattgtgaaataat

SEQ ID NO: 172231 - DNA, 9 bp, Unknown
  misc_feature (1)..( 9): Result.005 file - promoters50/1443356
cactgatta

SEQ ID NO: 172232 - DNA, 9 bp, Unknown
  misc_feature (1)..( 9): Result.005 file - promoters50/1443356
tactaattt

SEQ ID NO: 172233 - DNA, 9 bp, Unknown
  misc_feature (1)..( 9): Result.005 file - promoters50/1443356
caccgattt

SEQ ID NO: 172234 - DNA, 9 bp, Unknown
  misc_feature (1)..( 9): Result.005 file - promoters50/1443356
tggtaattt

SEQ ID NO: 172235 - DNA, 9 bp, Unknown
  misc_feature (1)..( 9): Result.005 file - promoters50/1443356
atccgattc

SEQ ID NO: 172236 - DNA, 9 bp, Unknown
  misc_feature (1)..( 9): Result.005 file - promoters50/1443356
aacccattc

SEQ ID NO: 172237 - DNA, 11 bp, Unknown
  misc_feature (1)..( 11): Result.005 file - promoters50/1443356
gtacaattttc

SEQ ID NO: 172238 - DNA, 11 bp, Unknown
  misc_feature (1)..( 11): Result.005 file - promoters50/1443356
atacaatattt

SEQ ID NO: 172239 - DNA, 11 bp, Unknown
  misc_feature (1)..( 11): Result.005 file - promoters50/1443356
aaacaaatttc

SEQ ID NO: 172240 - DNA, 11 bp, Unknown
  misc_feature (1)..( 11): Result.005 file - promoters50/1443356
caacaatagag

SEQ ID NO: 172241 - DNA, 12 bp, Unknown
  misc_feature (1)..( 12): Result.005 file - promoters50/1443356
aaacgaatcaat

SEQ ID NO: 172242 - DNA, 12 bp, Unknown
  misc_feature (1)..( 12): Result.005 file - promoters50/1443356
aaacgattccaa

SEQ ID NO: 172243 - DNA, 12 bp, Unknown
  misc_feature (1)..( 12): Result.005 file - promoters50/1443356
acatcaattttg

SEQ ID NO: 172244 - DNA, 9 bp, Unknown
  misc_feature (1)..( 9): Result.005 file - promoters50/1443387
atcaaccag

SEQ ID NO: 172245 - DNA, 9 bp, Unknown
  misc_feature (1)..( 9): Result.005 file - promoters50/1443387
atcaaccat

SEQ ID NO: 172246 - DNA, 9 bp, Unknown
  misc_feature (1)..( 9): Result.005 file - promoters50/1443387
tccaaacat

SEQ ID NO: 172247 - DNA, 8 bp, Unknown
  misc_feature (1)..( 8): Result.005 file - promoters50/1443387
aaaattgg

SEQ ID NO: 172248 - DNA, 8 bp, Unknown
  misc_feature (1)..( 8): Result.005 file - promoters50/1443387
aaaattga

SEQ ID NO: 172249 - DNA, 8 bp, Unknown
  misc_feature (1)..( 8): Result.005 file - promoters50/1443387
aaaacaat

SEQ ID NO: 172250 - DNA, 13 bp, Unknown
  misc_feature (1)..( 13): Result.005 file - promoters50/1443387
ctactcatttatc

SEQ ID NO: 172251 - DNA, 13 bp, Unknown
  misc_feature (1)..( 13): Result.005 file - promoters50/1443387
ttgttcaattact

SEQ ID NO: 172252 - DNA, 13 bp, Unknown
  misc_feature (1)..( 13): Result.005 file - promoters50/1443387
ttggtcatttact

SEQ ID NO: 172253 - DNA, 12 bp, Unknown
  misc_feature (1)..( 12): Result.005 file - promoters50/1443418
ttttattataaa

SEQ ID NO: 172254 - DNA, 12 bp, Unknown
  misc_feature (1)..( 12): Result.005 file - promoters50/1443418
ttttattgccgc

SEQ ID NO: 172255 - DNA, 12 bp, Unknown
  misc_feature (1)..( 12): Result.005 file - promoters50/1443418
atttcttaacct

SEQ ID NO: 172256 - DNA, 12 bp, Unknown
  misc_feature (1)..( 12): Result.005 file - promoters50/1443418
atttatttacta

SEQ ID NO: 172257 - DNA, 12 bp, Unknown
  misc_feature (1)..( 12): Result.005 file - promoters50/1443418
ggttattaatta

SEQ ID NO: 172258 - DNA, 12 bp, Unknown
  misc_feature (1)..( 12): Result.005 file - promoters50/1443418
gtttgtttaaca

SEQ ID NO: 172259 - DNA, 12 bp, Unknown
  misc_feature (1)..( 12): Result.005 file - promoters50/1443418
ttctgtttcaca

SEQ ID NO: 172260 - DNA, 10 bp, Unknown
  misc_feature (1)..( 10): Result.005 file - promoters50/1443418
gtatatttag

SEQ ID NO: 172261 - DNA, 10 bp, Unknown
  misc_feature (1)..( 10): Result.005 file - promoters50/1443418
ttttatttaa

SEQ ID NO: 172262 - DNA, 10 bp, Unknown
  misc_feature (1)..( 10): Result.005 file - promoters50/1443418
atttaattaa

SEQ ID NO: 172263 - DNA, 10 bp, Unknown
  misc_feature (1)..( 10): Result.005 file - promoters50/1443418
gttttttttt

SEQ ID NO: 172264 - DNA, 10 bp, Unknown
  misc_feature (1)..( 10): Result.005 file - promoters50/1443418
attcatttaa

SEQ ID NO: 172265 - DNA, 10 bp, Unknown
  misc_feature (1)..( 10): Result.005 file - promoters50/1443418
ccaaaattaa

SEQ ID NO: 172266 - DNA, 13 bp, Unknown
  misc_feature (1)..( 13): Result.005 file - promoters50/1443418
gatttaaagacaa

SEQ ID NO: 172267 - DNA, 13 bp, Unknown
  misc_feature (1)..( 13): Result.005 file - promoters50/1443418
tgtttaaaacaaa

SEQ ID NO: 172268 - DNA, 13 bp, Unknown
  misc_feature (1)..( 13): Result.005 file - promoters50/1443418
catttaaataaac

SEQ ID NO: 172269 - DNA, 13 bp, Unknown
  misc_feature (1)..( 13): Result.005 file - promoters50/1443418
tgttcaaaattgg

SEQ ID NO: 172270 - DNA, 13 bp, Unknown
  misc_feature (1)..( 13): Result.005 file - promoters50/1443418
tgttcaaggcttg

SEQ ID NO: 172271 - DNA, 13 bp, Unknown
  misc_feature (1)..( 13): Result.005 file - promoters50/1443418
taaacaaaattgg

SEQ ID NO: 172272 - DNA, 12 bp, Unknown
  misc_feature (1)..( 12): Result.005 file - promoters50/1443418
aaaatataaata

SEQ ID NO: 172273 - DNA, 12 bp, Unknown
  misc_feature (1)..( 12): Result.005 file - promoters50/1443418
tttatataagtg

SEQ ID NO: 172274 - DNA, 12 bp, Unknown
  misc_feature (1)..( 12): Result.005 file - promoters50/1443418
tatatataaata

SEQ ID NO: 172275 - DNA, 12 bp, Unknown
  misc_feature (1)..( 12): Result.005 file - promoters50/1443418
tttatacaaatc

SEQ ID NO: 172276 - DNA, 12 bp, Unknown
  misc_feature (1)..( 12): Result.005 file - promoters50/1443418
cacttataaata

SEQ ID NO: 172277 - DNA, 12 bp, Unknown
  misc_feature (1)..( 12): Result.005 file - promoters50/1443418
tatatatagaaa

SEQ ID NO: 172278 - DNA, 12 bp, Unknown
  misc_feature (1)..( 12): Result.005 file - promoters50/1443418
gctatttaagta

SEQ ID NO: 172279 - DNA, 11 bp, Unknown
  misc_feature (1)..( 11): Result.005 file - promoters50/1443418
ttataaagtta

SEQ ID NO: 172280 - DNA, 11 bp, Unknown
  misc_feature (1)..( 11): Result.005 file - promoters50/1443418
ttataatcaat

SEQ ID NO: 172281 - DNA, 11 bp, Unknown
  misc_feature (1)..( 11): Result.005 file - promoters50/1443418
gtataatgtta

SEQ ID NO: 172282 - DNA, 11 bp, Unknown
  misc_feature (1)..( 11): Result.005 file - promoters50/1443418
atagaatgttt

SEQ ID NO: 172283 - DNA, 11 bp, Unknown
  misc_feature (1)..( 11): Result.005 file - promoters50/1443418
taagaatgtca

SEQ ID NO: 172284 - DNA, 11 bp, Unknown
  misc_feature (1)..( 11): Result.005 file - promoters50/1443418
taacaatattt

SEQ ID NO: 172285 - DNA, 14 bp, Unknown
  misc_feature (1)..( 14): Result.005 file - promoters50/1443418
tttaaaagttaaaa

SEQ ID NO: 172286 - DNA, 14 bp, Unknown
  misc_feature (1)..( 14): Result.005 file - promoters50/1443418
ttaaaaagctaaaa

SEQ ID NO: 172287 - DNA, 14 bp, Unknown
  misc_feature (1)..( 14): Result.005 file - promoters50/1443418
aaaaaaagtcataa

SEQ ID NO: 172288 - DNA, 14 bp, Unknown
  misc_feature (1)..( 14): Result.005 file - promoters50/1443418
tttaaatcattaga

SEQ ID NO: 172289 - DNA, 14 bp, Unknown
  misc_feature (1)..( 14): Result.005 file - promoters50/1443418
ttaaaatcaagaat

SEQ ID NO: 172290 - DNA, 14 bp, Unknown
  misc_feature (1)..( 14): Result.005 file - promoters50/1443418
aataaagagaagta

SEQ ID NO: 172291 - DNA, 11 bp, Unknown
  misc_feature (1)..( 11): Result.005 file - promoters50/1443418
ttgttttattt

SEQ ID NO: 172292 - DNA, 11 bp, Unknown
  misc_feature (1)..( 11): Result.005 file - promoters50/1443418
aaatttaatta

SEQ ID NO: 172293 - DNA, 11 bp, Unknown
  misc_feature (1)..( 11): Result.005 file - promoters50/1443418
aagttttaaat

SEQ ID NO: 172294 - DNA, 11 bp, Unknown
  misc_feature (1)..( 11): Result.005 file - promoters50/1443418
aggtttttttt

SEQ ID NO: 172295 - DNA, 11 bp, Unknown
  misc_feature (1)..( 11): Result.005 file - promoters50/1443418
tcatttaagtc

SEQ ID NO: 172296 - DNA, 11 bp, Unknown
  misc_feature (1)..( 11): Result.005 file - promoters50/1443418
aaaattaaaat

SEQ ID NO: 172297 - DNA, 7 bp, Unknown
  misc_feature (1)..( 7): Result.005 file - promoters50/1443472
atgtata

SEQ ID NO: 172298 - DNA, 7 bp, Unknown
  misc_feature (1)..( 7): Result.005 file - promoters50/1443472
atgtatt

SEQ ID NO: 172299 - DNA, 7 bp, Unknown
  misc_feature (1)..( 7): Result.005 file - promoters50/1443472
atggatt

SEQ ID NO: 172300 - DNA, 8 bp, Unknown
  misc_feature (1)..( 8): Result.005 file - promoters50/1443472
ctgtattt

SEQ ID NO: 172301 - DNA, 8 bp, Unknown
  misc_feature (1)..( 8): Result.005 file - promoters50/1443472
ctgtgttt

SEQ ID NO: 172302 - DNA, 8 bp, Unknown
  misc_feature (1)..( 8): Result.005 file - promoters50/1443472
ctgtgtga

SEQ ID NO: 172303 - DNA, 7 bp, Unknown
  misc_feature (1)..( 7): Result.005 file - promoters50/1443475
ttttttc

SEQ ID NO: 172304 - DNA, 7 bp, Unknown
  misc_feature (1)..( 7): Result.005 file - promoters50/1443475
ttttttc

SEQ ID NO: 172305 - DNA, 7 bp, Unknown
  misc_feature (1)..( 7): Result.005 file - promoters50/1443475
ttttttt

SEQ ID NO: 172306 - DNA, 8 bp, Unknown
  misc_feature (1)..( 8): Result.005 file - promoters50/1443475
caagttta

SEQ ID NO: 172307 - DNA, 8 bp, Unknown
  misc_feature (1)..( 8): Result.005 file - promoters50/1443475
caagtttt

SEQ ID NO: 172308 - DNA, 8 bp, Unknown
  misc_feature (1)..( 8): Result.005 file - promoters50/1443475
ccagtttt

SEQ ID NO: 172309 - DNA, 9 bp, Unknown
  misc_feature (1)..( 9): Result.005 file - promoters50/1443479
caaataaag

SEQ ID NO: 172310 - DNA, 9 bp, Unknown
  misc_feature (1)..( 9): Result.005 file - promoters50/1443479
taaaaaaaa

SEQ ID NO: 172311 - DNA, 9 bp, Unknown
  misc_feature (1)..( 9): Result.005 file - promoters50/1443479
caaatagta

SEQ ID NO: 172312 - DNA, 9 bp, Unknown
  misc_feature (1)..( 9): Result.005 file - promoters50/1443479
ctaagaaac

SEQ ID NO: 172313 - DNA, 9 bp, Unknown
  misc_feature (1)..( 9): Result.005 file - promoters50/1443479
ttaaaaatg

SEQ ID NO: 172314 - DNA, 9 bp, Unknown
  misc_feature (1)..( 9): Result.005 file - promoters50/1443479
agaaaaagt

SEQ ID NO: 172315 - DNA, 11 bp, Unknown
  misc_feature (1)..( 11): Result.005 file - promoters50/1443479
tttcaaatcac

SEQ ID NO: 172316 - DNA, 11 bp, Unknown
  misc_feature (1)..( 11): Result.005 file - promoters50/1443479
tttcgaatcca

SEQ ID NO: 172317 - DNA, 11 bp, Unknown
  misc_feature (1)..( 11): Result.005 file - promoters50/1443479
ttttaaaaatg

SEQ ID NO: 172318 - DNA, 11 bp, Unknown
  misc_feature (1)..( 11): Result.005 file - promoters50/1443479
tccaaaatcat

SEQ ID NO: 172319 - DNA, 11 bp, Unknown
  misc_feature (1)..( 11): Result.005 file - promoters50/1443479
agagaaaacat

SEQ ID NO: 172320 - DNA, 11 bp, Unknown
  misc_feature (1)..( 11): Result.005 file - promoters50/1443479
tgttaaaaaaa

SEQ ID NO: 172321 - DNA, 12 bp, Unknown
  misc_feature (1)..( 12): Result.005 file - promoters50/1443509
ttatattttttt

SEQ ID NO: 172322 - DNA, 12 bp, Unknown
  misc_feature (1)..( 12): Result.005 file - promoters50/1443509
taatagtttctt

SEQ ID NO: 172323 - DNA, 12 bp, Unknown
  misc_feature (1)..( 12): Result.005 file - promoters50/1443509
gaatttttttaa

SEQ ID NO: 172324 - DNA, 12 bp, Unknown
  misc_feature (1)..( 12): Result.005 file - promoters50/1443509
caatatttggtc

SEQ ID NO: 172325 - DNA, 12 bp, Unknown
  misc_feature (1)..( 12): Result.005 file - promoters50/1443509
taagagttttac

SEQ ID NO: 172326 - DNA, 12 bp, Unknown
  misc_feature (1)..( 12): Result.005 file - promoters50/1443509
gacactttttaa

SEQ ID NO: 172327 - DNA, 15 bp, Unknown
  misc_feature (1)..( 15): Result.005 file - promoters50/1443509
tctctactatataaa

SEQ ID NO: 172328 - DNA, 15 bp, Unknown
  misc_feature (1)..( 15): Result.005 file - promoters50/1443509
gaaaatgtatatata

SEQ ID NO: 172329 - DNA, 15 bp, Unknown
  misc_feature (1)..( 15): Result.005 file - promoters50/1443509
aacgcactatataaa

SEQ ID NO: 172330 - DNA, 15 bp, Unknown
  misc_feature (1)..( 15): Result.005 file - promoters50/1443509
ggtttctaatataaa

SEQ ID NO: 172331 - DNA, 15 bp, Unknown
  misc_feature (1)..( 15): Result.005 file - promoters50/1443509
cttcaccaatataat

SEQ ID NO: 172332 - DNA, 15 bp, Unknown
  misc_feature (1)..( 15): Result.005 file - promoters50/1443509
tctctactatataaa

SEQ ID NO: 172333 - DNA, 7 bp, Unknown
  misc_feature (1)..( 7): Result.005 file - promoters50/1443527
gtggtat

SEQ ID NO: 172334 - DNA, 7 bp, Unknown
  misc_feature (1)..( 7): Result.005 file - promoters50/1443527
gtgatat

SEQ ID NO: 172335 - DNA, 7 bp, Unknown
  misc_feature (1)..( 7): Result.005 file - promoters50/1443527
gtgatac

SEQ ID NO: 172336 - DNA, 10 bp, Unknown
  misc_feature (1)..( 10): Result.005 file - promoters50/1443683
atatataaag

SEQ ID NO: 172337 - DNA, 10 bp, Unknown
  misc_feature (1)..( 10): Result.005 file - promoters50/1443683
ttatatagat

SEQ ID NO: 172338 - DNA, 10 bp, Unknown
  misc_feature (1)..( 10): Result.005 file - promoters50/1443683
ccatataaat

SEQ ID NO: 172339 - DNA, 10 bp, Unknown
  misc_feature (1)..( 10): Result.005 file - promoters50/1443683
atatatactt

SEQ ID NO: 172340 - DNA, 10 bp, Unknown
  misc_feature (1)..( 10): Result.005 file - promoters50/1443683
atatattaaa

SEQ ID NO: 172341 - DNA, 10 bp, Unknown
  misc_feature (1)..( 10): Result.005 file - promoters50/1443683
tactataaat

SEQ ID NO: 172342 - DNA, 14 bp, Unknown
  misc_feature (1)..( 14): Result.005 file - promoters50/1443687
aaacttattttttt

SEQ ID NO: 172343 - DNA, 14 bp, Unknown
  misc_feature (1)..( 14): Result.005 file - promoters50/1443687
aaatttatcatcag

SEQ ID NO: 172344 - DNA, 14 bp, Unknown
  misc_feature (1)..( 14): Result.005 file - promoters50/1443687
aaatttatttgttt

SEQ ID NO: 172345 - DNA, 14 bp, Unknown
  misc_feature (1)..( 14): Result.005 file - promoters50/1443687
taatatatcatata

SEQ ID NO: 172346 - DNA, 14 bp, Unknown
  misc_feature (1)..( 14): Result.005 file - promoters50/1443687
gaatatatctcaag

SEQ ID NO: 172347 - DNA, 14 bp, Unknown
  misc_feature (1)..( 14): Result.005 file - promoters50/1443687
taggttattttgaa

SEQ ID NO: 172348 - DNA, 13 bp, Unknown
  misc_feature (1)..( 13): Result.005 file - promoters50/1443687
tttaacaaagcat

SEQ ID NO: 172349 - DNA, 13 bp, Unknown
  misc_feature (1)..( 13): Result.005 file - promoters50/1443687
tttcacagtttat

SEQ ID NO: 172350 - DNA, 13 bp, Unknown
  misc_feature (1)..( 13): Result.005 file - promoters50/1443687
cttaaaaaacata

SEQ ID NO: 172351 - DNA, 13 bp, Unknown
  misc_feature (1)..( 13): Result.005 file - promoters50/1443687
tatcaaagaacaa

SEQ ID NO: 172352 - DNA, 13 bp, Unknown
  misc_feature (1)..( 13): Result.005 file - promoters50/1443687
atctcaaggacaa

SEQ ID NO: 172353 - DNA, 10 bp, Unknown
  misc_feature (1)..( 10): Result.005 file - promoters50/1443687
tttaacaaag

SEQ ID NO: 172354 - DNA, 10 bp, Unknown
  misc_feature (1)..( 10): Result.005 file - promoters50/1443687
aagaacaaat

SEQ ID NO: 172355 - DNA, 10 bp, Unknown
  misc_feature (1)..( 10): Result.005 file - promoters50/1443687
cttaaaaaac

SEQ ID NO: 172356 - DNA, 10 bp, Unknown
  misc_feature (1)..( 10): Result.005 file - promoters50/1443687
acgaataaaa

SEQ ID NO: 172357 - DNA, 10 bp, Unknown
  misc_feature (1)..( 10): Result.005 file - promoters50/1443687
cctaactaat

SEQ ID NO: 172358 - DNA, 10 bp, Unknown
  misc_feature (1)..( 10): Result.005 file - promoters50/1443687
aaggacaatg

SEQ ID NO: 172359 - DNA, 9 bp, Unknown
  misc_feature (1)..( 9): Result.005 file - promoters50/1443687
tattttgtt

SEQ ID NO: 172360 - DNA, 9 bp, Unknown
  misc_feature (1)..( 9): Result.005 file - promoters50/1443687
tattttgaa

SEQ ID NO: 172361 - DNA, 10 bp, Unknown
  misc_feature (1)..( 10): Result.005 file - promoters50/1443687
ttttcttgtt

SEQ ID NO: 172362 - DNA, 10 bp, Unknown
  misc_feature (1)..( 10): Result.005 file - promoters50/1443687
aggttttgaa

SEQ ID NO: 172363 - DNA, 10 bp, Unknown
  misc_feature (1)..( 10): Result.005 file - promoters50/1443687
cccttttgaa

SEQ ID NO: 172364 - DNA, 8 bp, Unknown
  misc_feature (1)..( 8): Result.005 file - promoters50/1443687
caaagcat

SEQ ID NO: 172365 - DNA, 8 bp, Unknown
  misc_feature (1)..( 8): Result.005 file - promoters50/1443687
aaaaacat

SEQ ID NO: 172366 - DNA, 8 bp, Unknown
  misc_feature (1)..( 8): Result.005 file - promoters50/1443687
aaaaactt

SEQ ID NO: 172367 - DNA, 9 bp, Unknown
  misc_feature (1)..( 9): Result.005 file - promoters50/1443687
aaagaacaa

SEQ ID NO: 172368 - DNA, 9 bp, Unknown
  misc_feature (1)..( 9): Result.005 file - promoters50/1443687
caaggacaa

SEQ ID NO: 172369 - DNA, 11 bp, Unknown
  misc_feature (1)..( 11): Result.005 file - promoters50/1443687
tcttattttac

SEQ ID NO: 172370 - DNA, 11 bp, Unknown
  misc_feature (1)..( 11): Result.005 file - promoters50/1443687
taaaattttag

SEQ ID NO: 172371 - DNA, 11 bp, Unknown
  misc_feature (1)..( 11): Result.005 file - promoters50/1443687
aactcttttac

SEQ ID NO: 172372 - DNA, 11 bp, Unknown
  misc_feature (1)..( 11): Result.005 file - promoters50/1443687
tcttctttttc

SEQ ID NO: 172373 - DNA, 11 bp, Unknown
  misc_feature (1)..( 11): Result.005 file - promoters50/1443687
aaaaactttat

SEQ ID NO: 172374 - DNA, 11 bp, Unknown
  misc_feature (1)..( 11): Result.005 file - promoters50/1443687
ctaaagtttaa

SEQ ID NO: 172375 - DNA, 7 bp, Unknown
  misc_feature (1)..( 7): Result.005 file - promoters50/1443711
aatataa

SEQ ID NO: 172376 - DNA, 7 bp, Unknown
  misc_feature (1)..( 7): Result.005 file - promoters50/1443711
aatatag

SEQ ID NO: 172377 - DNA, 7 bp, Unknown
  misc_feature (1)..( 7): Result.005 file - promoters50/1443711
aatttag

SEQ ID NO: 172378 - DNA, 10 bp, Unknown
  misc_feature (1)..( 10): Result.005 file - promoters50/1443711
attataaagt

SEQ ID NO: 172379 - DNA, 10 bp, Unknown
  misc_feature (1)..( 10): Result.005 file - promoters50/1443711
attttaaaat

SEQ ID NO: 172380 - DNA, 10 bp, Unknown
  misc_feature (1)..( 10): Result.005 file - promoters50/1443711
attagaatat

SEQ ID NO: 172381 - DNA, 9 bp, Unknown
  misc_feature (1)..( 9): Result.005 file - promoters50/1444131
atattaaca

SEQ ID NO: 172382 - DNA, 9 bp, Unknown
  misc_feature (1)..( 9): Result.005 file - promoters50/1444131
aaatttaca

SEQ ID NO: 172383 - DNA, 9 bp, Unknown
  misc_feature (1)..( 9): Result.005 file - promoters50/1444131
aaagttaaa

SEQ ID NO: 172384 - DNA, 9 bp, Unknown
  misc_feature (1)..( 9): Result.005 file - promoters50/1444131
atctttaca

SEQ ID NO: 172385 - DNA, 9 bp, Unknown
  misc_feature (1)..( 9): Result.005 file - promoters50/1444131
atagttaaa

SEQ ID NO: 172386 - DNA, 9 bp, Unknown
  misc_feature (1)..( 9): Result.005 file - promoters50/1444131
ctagttaat

SEQ ID NO: 172387 - DNA, 9 bp, Unknown
  misc_feature (1)..( 9): Result.005 file - promoters50/1444131
ttatttctt

SEQ ID NO: 172388 - DNA, 9 bp, Unknown
  misc_feature (1)..( 9): Result.005 file - promoters50/1444131
atatgtctg

SEQ ID NO: 172389 - DNA, 9 bp, Unknown
  misc_feature (1)..( 9): Result.005 file - promoters50/1444131
gtttttttc

SEQ ID NO: 172390 - DNA, 9 bp, Unknown
  misc_feature (1)..( 9): Result.005 file - promoters50/1444131
atttttttc

SEQ ID NO: 172391 - DNA, 9 bp, Unknown
  misc_feature (1)..( 9): Result.005 file - promoters50/1444131
ttattttgc

SEQ ID NO: 172392 - DNA, 9 bp, Unknown
  misc_feature (1)..( 9): Result.005 file - promoters50/1444131
ctttttttg

SEQ ID NO: 172393 - DNA, 9 bp, Unknown
  misc_feature (1)..( 9): Result.005 file - promoters50/1444131
ttatatctt

SEQ ID NO: 172394 - DNA, 9 bp, Unknown
  misc_feature (1)..( 9): Result.005 file - promoters50/1444156
aaaataaaa

SEQ ID NO: 172395 - DNA, 9 bp, Unknown
  misc_feature (1)..( 9): Result.005 file - promoters50/1444156
aaaataaaa

SEQ ID NO: 172396 - DNA, 9 bp, Unknown
  misc_feature (1)..( 9): Result.005 file - promoters50/1444156
gaaatgaaa

SEQ ID NO: 172397 - DNA, 10 bp, Unknown
  misc_feature (1)..( 10): Result.005 file - promoters50/1444156
ataaaagagt

SEQ ID NO: 172398 - DNA, 10 bp, Unknown
  misc_feature (1)..( 10): Result.005 file - promoters50/1444156
ggaaaagaaa

SEQ ID NO: 172399 - DNA, 10 bp, Unknown
  misc_feature (1)..( 10): Result.005 file - promoters50/1444156
ggaaatgaaa

SEQ ID NO: 172400 - DNA, 7 bp, Unknown
  misc_feature (1)..( 7): Result.005 file - promoters50/1444156
tttaatg

SEQ ID NO: 172401 - DNA, 7 bp, Unknown
  misc_feature (1)..( 7): Result.005 file - promoters50/1444156
tttaata

SEQ ID NO: 172402 - DNA, 7 bp, Unknown
  misc_feature (1)..( 7): Result.005 file - promoters50/1444156
gttaata

SEQ ID NO: 172403 - DNA, 11 bp, Unknown
  misc_feature (1)..( 11): Result.005 file - promoters50/1444156
cttcaaacaca

SEQ ID NO: 172404 - DNA, 11 bp, Unknown
  misc_feature (1)..( 11): Result.005 file - promoters50/1444156
cttgaaacaaa

SEQ ID NO: 172405 - DNA, 11 bp, Unknown
  misc_feature (1)..( 11): Result.005 file - promoters50/1444156
ggagaaagaaa

SEQ ID NO: 172406 - DNA, 9 bp, Unknown
  misc_feature (1)..( 9): Result.005 file - promoters50/1444156
aaatgaaga

SEQ ID NO: 172407 - DNA, 9 bp, Unknown
  misc_feature (1)..( 9): Result.005 file - promoters50/1444156
cgatggaga

SEQ ID NO: 172408 - DNA, 9 bp, Unknown
  misc_feature (1)..( 9): Result.005 file - promoters50/1444156
aaatgaaat

SEQ ID NO: 172409 - DNA, 9 bp, Unknown
  misc_feature (1)..( 9): Result.005 file - promoters50/1444180
gatacaaaa

SEQ ID NO: 172410 - DNA, 9 bp, Unknown
  misc_feature (1)..( 9): Result.005 file - promoters50/1444180
gaaacaaaa

SEQ ID NO: 172411 - DNA, 9 bp, Unknown
  misc_feature (1)..( 9): Result.005 file - promoters50/1444180
gaaagaaag

SEQ ID NO: 172412 - DNA, 7 bp, Unknown
  misc_feature (1)..( 7): Result.005 file - promoters50/1444180
tcatata

SEQ ID NO: 172413 - DNA, 7 bp, Unknown
  misc_feature (1)..( 7): Result.005 file - promoters50/1444180
tcatatc

SEQ ID NO: 172414 - DNA, 7 bp, Unknown
  misc_feature (1)..( 7): Result.005 file - promoters50/1444180
tcatatc

SEQ ID NO: 172415 - DNA, 9 bp, Unknown
  misc_feature (1)..( 9): Result.005 file - promoters50/1444180
ctatttttg

SEQ ID NO: 172416 - DNA, 9 bp, Unknown
  misc_feature (1)..( 9): Result.005 file - promoters50/1444180
atatctttg

SEQ ID NO: 172417 - DNA, 9 bp, Unknown
  misc_feature (1)..( 9): Result.005 file - promoters50/1444180
ataacttga

SEQ ID NO: 172418 - DNA, 8 bp, Unknown
  misc_feature (1)..( 8): Result.005 file - promoters50/1444180
gtatatat

SEQ ID NO: 172419 - DNA, 8 bp, Unknown
  misc_feature (1)..( 8): Result.005 file - promoters50/1444180
gtatataa

SEQ ID NO: 172420 - DNA, 8 bp, Unknown
  misc_feature (1)..( 8): Result.005 file - promoters50/1444180
gtatctaa

SEQ ID NO: 172421 - DNA, 11 bp, Unknown
  misc_feature (1)..( 11): Result.005 file - promoters50/1444196
tttttgtaatt

SEQ ID NO: 172422 - DNA, 11 bp, Unknown
  misc_feature (1)..( 11): Result.005 file - promoters50/1444196
cacttgtaaga

SEQ ID NO: 172423 - DNA, 11 bp, Unknown
  misc_feature (1)..( 11): Result.005 file - promoters50/1444196
tttttgaaatt

SEQ ID NO: 172424 - DNA, 11 bp, Unknown
  misc_feature (1)..( 11): Result.005 file - promoters50/1444196
tgattgaaaat

SEQ ID NO: 172425 - DNA, 10 bp, Unknown
  misc_feature (1)..( 10): Result.005 file - promoters50/1444196
tcttctgttt

SEQ ID NO: 172426 - DNA, 10 bp, Unknown
  misc_feature (1)..( 10): Result.005 file - promoters50/1444196
gcttttgtca

SEQ ID NO: 172427 - DNA, 10 bp, Unknown
  misc_feature (1)..( 10): Result.005 file - promoters50/1444196
tgatctgttt

SEQ ID NO: 172428 - DNA, 10 bp, Unknown
  misc_feature (1)..( 10): Result.005 file - promoters50/1444196
tcttcttcgg

SEQ ID NO: 172429 - DNA, 14 bp, Unknown
  misc_feature (1)..( 14): Result.005 file - promoters50/1444400
tgtgttcgtttggt

SEQ ID NO: 172430 - DNA, 14 bp, Unknown
  misc_feature (1)..( 14): Result.005 file - promoters50/1444400
tgtggtcggctaaa

SEQ ID NO: 172431 - DNA, 14 bp, Unknown
  misc_feature (1)..( 14): Result.005 file - promoters50/1444400
gatgttcgtttggt

SEQ ID NO: 172432 - DNA, 14 bp, Unknown
  misc_feature (1)..( 14): Result.005 file - promoters50/1444400
tgtagtcttgactg

SEQ ID NO: 172433 - DNA, 7 bp, Unknown
  misc_feature (1)..( 7): Result.005 file - promoters50/1444430
attcttt

SEQ ID NO: 172434 - DNA, 7 bp, Unknown
  misc_feature (1)..( 7): Result.005 file - promoters50/1444430
attcttt

SEQ ID NO: 172435 - DNA, 7 bp, Unknown
  misc_feature (1)..( 7): Result.005 file - promoters50/1444430
attattt

SEQ ID NO: 172436 - DNA, 14 bp, Unknown
  misc_feature (1)..( 14): Result.005 file - promoters50/1444441
aattattttaaata

SEQ ID NO: 172437 - DNA, 14 bp, Unknown
  misc_feature (1)..( 14): Result.005 file - promoters50/1444441
ttttaatttctttt

SEQ ID NO: 172438 - DNA, 14 bp, Unknown
  misc_feature (1)..( 14): Result.005 file - promoters50/1444441
caataatttacgaa

SEQ ID NO: 172439 - DNA, 14 bp, Unknown
  misc_feature (1)..( 14): Result.005 file - promoters50/1444441
aaagtttttgtaat

SEQ ID NO: 172440 - DNA, 14 bp, Unknown
  misc_feature (1)..( 14): Result.005 file - promoters50/1444441
tatccttttcaatt

SEQ ID NO: 172441 - DNA, 14 bp, Unknown
  misc_feature (1)..( 14): Result.005 file - promoters50/1444441
cttgtgtttgatta

SEQ ID NO: 172442 - DNA, 14 bp, Unknown
  misc_feature (1)..( 14): Result.005 file - promoters50/1444441
aaatagtttactat

SEQ ID NO: 172443 - DNA, 9 bp, Unknown
  misc_feature (1)..( 9): Result.005 file - promoters50/1444441
attttaaat

SEQ ID NO: 172444 - DNA, 9 bp, Unknown
  misc_feature (1)..( 9): Result.005 file - promoters50/1444441
tttttaatt

SEQ ID NO: 172445 - DNA, 10 bp, Unknown
  misc_feature (1)..( 10): Result.005 file - promoters50/1444441
cttttcaatt

SEQ ID NO: 172446 - DNA, 10 bp, Unknown
  misc_feature (1)..( 10): Result.005 file - promoters50/1444441
ttttgtaata

SEQ ID NO: 172447 - DNA, 10 bp, Unknown
  misc_feature (1)..( 10): Result.005 file - promoters50/1444441
gtttgattag

SEQ ID NO: 172448 - DNA, 10 bp, Unknown
  misc_feature (1)..( 10): Result.005 file - promoters50/1444441
aattgtgata

SEQ ID NO: 172449 - DNA, 14 bp, Unknown
  misc_feature (1)..( 14): Result.005 file - promoters50/1444441
tttataaatatttt

SEQ ID NO: 172450 - DNA, 14 bp, Unknown
  misc_feature (1)..( 14): Result.005 file - promoters50/1444441
cacatatatatagt

SEQ ID NO: 172451 - DNA, 14 bp, Unknown
  misc_feature (1)..( 14): Result.005 file - promoters50/1444441
tttatacataataa

SEQ ID NO: 172452 - DNA, 14 bp, Unknown
  misc_feature (1)..( 14): Result.005 file - promoters50/1444441
gttattaataaatt

SEQ ID NO: 172453 - DNA, 14 bp, Unknown
  misc_feature (1)..( 14): Result.005 file - promoters50/1444441
tcaattaatctttt

SEQ ID NO: 172454 - DNA, 14 bp, Unknown
  misc_feature (1)..( 14): Result.005 file - promoters50/1444441
tgtaataataactc

SEQ ID NO: 172455 - DNA, 14 bp, Unknown
  misc_feature (1)..( 14): Result.005 file - promoters50/1444441
ttgattagtaaaag

SEQ ID NO: 172456 - DNA, 14 bp, Unknown
  misc_feature (1)..( 14): Result.005 file - promoters50/1444441
actatttttaatta

SEQ ID NO: 172457 - DNA, 14 bp, Unknown
  misc_feature (1)..( 14): Result.005 file - promoters50/1444441
tggttttataatcg

SEQ ID NO: 172458 - DNA, 14 bp, Unknown
  misc_feature (1)..( 14): Result.005 file - promoters50/1444441
ctaattttgtcaaa

SEQ ID NO: 172459 - DNA, 14 bp, Unknown
  misc_feature (1)..( 14): Result.005 file - promoters50/1444441
ataaattttgatta

SEQ ID NO: 172460 - DNA, 14 bp, Unknown
  misc_feature (1)..( 14): Result.005 file - promoters50/1444441
ctatttttttatct

SEQ ID NO: 172461 - DNA, 14 bp, Unknown
  misc_feature (1)..( 14): Result.005 file - promoters50/1444441
aactcttttgaagt

SEQ ID NO: 172462 - DNA, 14 bp, Unknown
  misc_feature (1)..( 14): Result.005 file - promoters50/1444441
taatcttttggggt

SEQ ID NO: 172463 - DNA, 15 bp, Unknown
  misc_feature (1)..( 15): Result.005 file - promoters50/1444441
cgggtttttcggtta

SEQ ID NO: 172464 - DNA, 15 bp, Unknown
  misc_feature (1)..( 15): Result.005 file - promoters50/1444441
gacgtttttgtctat

SEQ ID NO: 172465 - DNA, 15 bp, Unknown
  misc_feature (1)..( 15): Result.005 file - promoters50/1444441
acggtttactaaggt

SEQ ID NO: 172466 - DNA, 15 bp, Unknown
  misc_feature (1)..( 15): Result.005 file - promoters50/1444441
tctttttttgtttct

SEQ ID NO: 172467 - DNA, 15 bp, Unknown
  misc_feature (1)..( 15): Result.005 file - promoters50/1444441
ttacttttttttttt

SEQ ID NO: 172468 - DNA, 15 bp, Unknown
  misc_feature (1)..( 15): Result.005 file - promoters50/1444441
accatttttgttcca

SEQ ID NO: 172469 - DNA, 17 bp, Unknown
  misc_feature (1)..( 17): Result.005 file - promoters50/1444441
attatttaatctagaaa

SEQ ID NO: 172470 - DNA, 17 bp, Unknown
  misc_feature (1)..( 17): Result.005 file - promoters50/1444441
taaattcaatcaaatcg

SEQ ID NO: 172471 - DNA, 17 bp, Unknown
  misc_feature (1)..( 17): Result.005 file - promoters50/1444441
atttttttatctataaa

SEQ ID NO: 172472 - DNA, 17 bp, Unknown
  misc_feature (1)..( 17): Result.005 file - promoters50/1444441
atggttttataatcgat

SEQ ID NO: 172473 - DNA, 17 bp, Unknown
  misc_feature (1)..( 17): Result.005 file - promoters50/1444441
aatattcaactatacat

SEQ ID NO: 172474 - DNA, 17 bp, Unknown
  misc_feature (1)..( 17): Result.005 file - promoters50/1444441
agaataaaaacagtgat

SEQ ID NO: 172475 - DNA, 13 bp, Unknown
  misc_feature (1)..( 13): Result.005 file - promoters50/1444441
aaatattttataa

SEQ ID NO: 172476 - DNA, 13 bp, Unknown
  misc_feature (1)..( 13): Result.005 file - promoters50/1444441
tattattttttgt

SEQ ID NO: 172477 - DNA, 13 bp, Unknown
  misc_feature (1)..( 13): Result.005 file - promoters50/1444441
taatcttttgggg

SEQ ID NO: 172478 - DNA, 13 bp, Unknown
  misc_feature (1)..( 13): Result.005 file - promoters50/1444441
ttttaatttcttt

SEQ ID NO: 172479 - DNA, 13 bp, Unknown
  misc_feature (1)..( 13): Result.005 file - promoters50/1444441
cttgtgtttgatt

SEQ ID NO: 172480 - DNA, 13 bp, Unknown
  misc_feature (1)..( 13): Result.005 file - promoters50/1444441
taatgtttttcta

SEQ ID NO: 172481 - DNA, 13 bp, Unknown
  misc_feature (1)..( 13): Result.005 file - promoters50/1444441
aactcttttgaag

SEQ ID NO: 172482 - DNA, 10 bp, Unknown
  misc_feature (1)..( 10): Result.005 file - promoters50/1444441
aaatattttc

SEQ ID NO: 172483 - DNA, 10 bp, Unknown
  misc_feature (1)..( 10): Result.005 file - promoters50/1444441
ttctattttt

SEQ ID NO: 172484 - DNA, 10 bp, Unknown
  misc_feature (1)..( 10): Result.005 file - promoters50/1444441
taatcttttg

SEQ ID NO: 172485 - DNA, 10 bp, Unknown
  misc_feature (1)..( 10): Result.005 file - promoters50/1444441
atttcttttc

SEQ ID NO: 172486 - DNA, 10 bp, Unknown
  misc_feature (1)..( 10): Result.005 file - promoters50/1444441
taatgttttt

SEQ ID NO: 172487 - DNA, 10 bp, Unknown
  misc_feature (1)..( 10): Result.005 file - promoters50/1444441
aactcttttg

SEQ ID NO: 172488 - DNA, 17 bp, Unknown
  misc_feature (1)..( 17): Result.005 file - promoters50/1444443
aactaaaaagtataaaa

SEQ ID NO: 172489 - DNA, 17 bp, Unknown
  misc_feature (1)..( 17): Result.005 file - promoters50/1444443
ggctagaaagtataaaa

SEQ ID NO: 172490 - DNA, 17 bp, Unknown
  misc_feature (1)..( 17): Result.005 file - promoters50/1444443
aacgaaacctatataac

SEQ ID NO: 172491 - DNA, 7 bp, Unknown
  misc_feature (1)..( 7): Result.005 file - promoters50/1444443
tttattt

SEQ ID NO: 172492 - DNA, 7 bp, Unknown
  misc_feature (1)..( 7): Result.005 file - promoters50/1444443
cttattt

SEQ ID NO: 172493 - DNA, 7 bp, Unknown
  misc_feature (1)..( 7): Result.005 file - promoters50/1444443
tttattt

SEQ ID NO: 172494 - DNA, 8 bp, Unknown
  misc_feature (1)..( 8): Result.005 file - promoters50/1444443
gtgtgttt

SEQ ID NO: 172495 - DNA, 8 bp, Unknown
  misc_feature (1)..( 8): Result.005 file - promoters50/1444443
atgttttt

SEQ ID NO: 172496 - DNA, 8 bp, Unknown
  misc_feature (1)..( 8): Result.005 file - promoters50/1444443
atgctttt

SEQ ID NO: 172497 - DNA, 7 bp, Unknown
  misc_feature (1)..( 7): Result.005 file - promoters50/1444448
tgtttta

SEQ ID NO: 172498 - DNA, 7 bp, Unknown
  misc_feature (1)..( 7): Result.005 file - promoters50/1444448
tgtttta

SEQ ID NO: 172499 - DNA, 7 bp, Unknown
  misc_feature (1)..( 7): Result.005 file - promoters50/1444448
tgttttt

SEQ ID NO: 172500 - DNA, 8 bp, Unknown
  misc_feature (1)..( 8): Result.005 file - promoters50/1444448
ataaatta

SEQ ID NO: 172501 - DNA, 8 bp, Unknown
  misc_feature (1)..( 8): Result.005 file - promoters50/1444448
ataaatcg

SEQ ID NO: 172502 - DNA, 8 bp, Unknown
  misc_feature (1)..( 8): Result.005 file - promoters50/1444448
ataaaaaa

SEQ ID NO: 172503 - DNA, 8 bp, Unknown
  misc_feature (1)..( 8): Result.005 file - promoters50/1444448
ttaaattt

SEQ ID NO: 172504 - DNA, 8 bp, Unknown
  misc_feature (1)..( 8): Result.005 file - promoters50/1444448
ctaaattg

SEQ ID NO: 172505 - DNA, 8 bp, Unknown
  misc_feature (1)..( 8): Result.005 file - promoters50/1444448
taaaattc

SEQ ID NO: 172506 - DNA, 7 bp, Unknown
  misc_feature (1)..( 7): Result.005 file - promoters50/1444448
tttttga

SEQ ID NO: 172507 - DNA, 7 bp, Unknown
  misc_feature (1)..( 7): Result.005 file - promoters50/1444448
tttttga

SEQ ID NO: 172508 - DNA, 7 bp, Unknown
  misc_feature (1)..( 7): Result.005 file - promoters50/1444448
tttttgt

SEQ ID NO: 172509 - DNA, 11 bp, Unknown
  misc_feature (1)..( 11): Result.005 file - promoters50/1444473
cttggttattg

SEQ ID NO: 172510 - DNA, 11 bp, Unknown
  misc_feature (1)..( 11): Result.005 file - promoters50/1444473
ccatgtttttg

SEQ ID NO: 172511 - DNA, 11 bp, Unknown
  misc_feature (1)..( 11): Result.005 file - promoters50/1444473
tcatctttttc

SEQ ID NO: 172512 - DNA, 11 bp, Unknown
  misc_feature (1)..( 11): Result.005 file - promoters50/1444473
gaatctttcga

SEQ ID NO: 172513 - DNA, 11 bp, Unknown
  misc_feature (1)..( 11): Result.005 file - promoters50/1444473
tattgttttct

SEQ ID NO: 172514 - DNA, 11 bp, Unknown
  misc_feature (1)..( 11): Result.005 file - promoters50/1444473
tatagttttaa

SEQ ID NO: 172515 - DNA, 18 bp, Unknown
  misc_feature (1)..( 18): Result.005 file - promoters50/1444479
aaagattattaaattata

SEQ ID NO: 172516 - DNA, 18 bp, Unknown
  misc_feature (1)..( 18): Result.005 file - promoters50/1444479
aaaaattattaaagtata

SEQ ID NO: 172517 - DNA, 18 bp, Unknown
  misc_feature (1)..( 18): Result.005 file - promoters50/1444479
atgtcttataataattga

SEQ ID NO: 172518 - DNA, 18 bp, Unknown
  misc_feature (1)..( 18): Result.005 file - promoters50/1444479
tctcatttttaatcaaaa

SEQ ID NO: 172519 - DNA, 18 bp, Unknown
  misc_feature (1)..( 18): Result.005 file - promoters50/1444479
atacattataatagtatg

SEQ ID NO: 172520 - DNA, 16 bp, Unknown
  misc_feature (1)..( 16): Result.005 file - promoters50/1444479
atatttgtaatcgata

SEQ ID NO: 172521 - DNA, 10 bp, Unknown
  misc_feature (1)..( 10): Result.005 file - promoters50/1444479
attattaaag

SEQ ID NO: 172522 - DNA, 10 bp, Unknown
  misc_feature (1)..( 10): Result.005 file - promoters50/1444479
tttactaata

SEQ ID NO: 172523 - DNA, 10 bp, Unknown
  misc_feature (1)..( 10): Result.005 file - promoters50/1444479
tataataatt

SEQ ID NO: 172524 - DNA, 10 bp, Unknown
  misc_feature (1)..( 10): Result.005 file - promoters50/1444479
tttgctatac

SEQ ID NO: 172525 - DNA, 10 bp, Unknown
  misc_feature (1)..( 10): Result.005 file - promoters50/1444479
aataccaatc

SEQ ID NO: 172526 - DNA, 10 bp, Unknown
  misc_feature (1)..( 10): Result.005 file - promoters50/1444479
gttactattc

SEQ ID NO: 172527 - DNA, 10 bp, Unknown
  misc_feature (1)..( 10): Result.005 file - promoters50/1444479
actaaaaata

SEQ ID NO: 172528 - DNA, 13 bp, Unknown
  misc_feature (1)..( 13): Result.005 file - promoters50/1444479
ctaattttaattt

SEQ ID NO: 172529 - DNA, 13 bp, Unknown
  misc_feature (1)..( 13): Result.005 file - promoters50/1444479
ataattttagaga

SEQ ID NO: 172530 - DNA, 13 bp, Unknown
  misc_feature (1)..( 13): Result.005 file - promoters50/1444479
atcattttcattt

SEQ ID NO: 172531 - DNA, 13 bp, Unknown
  misc_feature (1)..( 13): Result.005 file - promoters50/1444479
ataattatttggt

SEQ ID NO: 172532 - DNA, 13 bp, Unknown
  misc_feature (1)..( 13): Result.005 file - promoters50/1444479
atactttatcgtc

SEQ ID NO: 172533 - DNA, 13 bp, Unknown
  misc_feature (1)..( 13): Result.005 file - promoters50/1444479
tacattttgtaac

SEQ ID NO: 172534 - DNA, 9 bp, Unknown
  misc_feature (1)..( 9): Result.005 file - promoters50/1444479
atattttag

SEQ ID NO: 172535 - DNA, 9 bp, Unknown
  misc_feature (1)..( 9): Result.005 file - promoters50/1444479
tcattttac

SEQ ID NO: 172536 - DNA, 9 bp, Unknown
  misc_feature (1)..( 9): Result.005 file - promoters50/1444479
ttattttta

SEQ ID NO: 172537 - DNA, 9 bp, Unknown
  misc_feature (1)..( 9): Result.005 file - promoters50/1444479
atattttcc

SEQ ID NO: 172538 - DNA, 9 bp, Unknown
  misc_feature (1)..( 9): Result.005 file - promoters50/1444479
taattttag

SEQ ID NO: 172539 - DNA, 10 bp, Unknown
  misc_feature (1)..( 10): Result.005 file - promoters50/1444479
cagtttttac

SEQ ID NO: 172540 - DNA, 10 bp, Unknown
  misc_feature (1)..( 10): Result.005 file - promoters50/1444479
ccatctttaa

SEQ ID NO: 172541 - DNA, 13 bp, Unknown
  misc_feature (1)..( 13): Result.005 file - promoters50/1444479
ttatttatatgtt

SEQ ID NO: 172542 - DNA, 13 bp, Unknown
  misc_feature (1)..( 13): Result.005 file - promoters50/1444479
ctatatatatctc

SEQ ID NO: 172543 - DNA, 13 bp, Unknown
  misc_feature (1)..( 13): Result.005 file - promoters50/1444479
gtatatataaata

SEQ ID NO: 172544 - DNA, 13 bp, Unknown
  misc_feature (1)..( 13): Result.005 file - promoters50/1444479
ctgtctatatgac

SEQ ID NO: 172545 - DNA, 13 bp, Unknown
  misc_feature (1)..( 13): Result.005 file - promoters50/1444479
ctatataaacaca

SEQ ID NO: 172546 - DNA, 13 bp, Unknown
  misc_feature (1)..( 13): Result.005 file - promoters50/1444479
gtgtctataaata

SEQ ID NO: 172547 - DNA, 13 bp, Unknown
  misc_feature (1)..( 13): Result.005 file - promoters50/1444479
aaatctataaaaa

SEQ ID NO: 172548 - DNA, 9 bp, Unknown
  misc_feature (1)..( 9): Result.005 file - promoters50/1444502
ttgaatata

SEQ ID NO: 172549 - DNA, 9 bp, Unknown
  misc_feature (1)..( 9): Result.005 file - promoters50/1444502
gagaatata

SEQ ID NO: 172550 - DNA, 9 bp, Unknown
  misc_feature (1)..( 9): Result.005 file - promoters50/1444502
ttgcataac

SEQ ID NO: 172551 - DNA, 9 bp, Unknown
  misc_feature (1)..( 9): Result.005 file - promoters50/1444502
tgaaatata

SEQ ID NO: 172552 - DNA, 10 bp, Unknown
  misc_feature (1)..( 10): Result.005 file - promoters50/1444502
cattttttgt

SEQ ID NO: 172553 - DNA, 10 bp, Unknown
  misc_feature (1)..( 10): Result.005 file - promoters50/1444502
aattctttct

SEQ ID NO: 172554 - DNA, 10 bp, Unknown
  misc_feature (1)..( 10): Result.005 file - promoters50/1444502
catattttat

SEQ ID NO: 172555 - DNA, 10 bp, Unknown
  misc_feature (1)..( 10): Result.005 file - promoters50/1444502
gattgtttgt

SEQ ID NO: 172556 - DNA, 10 bp, Unknown
  misc_feature (1)..( 10): Result.005 file - promoters50/1444502
gaaaaaaaag

SEQ ID NO: 172557 - DNA, 10 bp, Unknown
  misc_feature (1)..( 10): Result.005 file - promoters50/1444502
caaaaaaaaa

SEQ ID NO: 172558 - DNA, 10 bp, Unknown
  misc_feature (1)..( 10): Result.005 file - promoters50/1444502
gaagaaaaag

SEQ ID NO: 172559 - DNA, 10 bp, Unknown
  misc_feature (1)..( 10): Result.005 file - promoters50/1444502
attcaaaaag

SEQ ID NO: 172560 - DNA, 11 bp, Unknown
  misc_feature (1)..( 11): Result.005 file - promoters50/1444502
ttttgtttgtt

SEQ ID NO: 172561 - DNA, 11 bp, Unknown
  misc_feature (1)..( 11): Result.005 file - promoters50/1444502
atttgtttgta

SEQ ID NO: 172562 - DNA, 11 bp, Unknown
  misc_feature (1)..( 11): Result.005 file - promoters50/1444502
atttgtctgtt

SEQ ID NO: 172563 - DNA, 11 bp, Unknown
  misc_feature (1)..( 11): Result.005 file - promoters50/1444502
ttttgtttttg

SEQ ID NO: 172564 - DNA, 18 bp, Unknown
  misc_feature (1)..( 18): Result.005 file - promoters50/1444506
aaaaattattaaagtata

SEQ ID NO: 172565 - DNA, 18 bp, Unknown
  misc_feature (1)..( 18): Result.005 file - promoters50/1444506
aaagattattaaattata

SEQ ID NO: 172566 - DNA, 18 bp, Unknown
  misc_feature (1)..( 18): Result.005 file - promoters50/1444506
aaaatttatctgtaaatg

SEQ ID NO: 172567 - DNA, 18 bp, Unknown
  misc_feature (1)..( 18): Result.005 file - promoters50/1444506
aaaatatgaatataatga

SEQ ID NO: 172568 - DNA, 18 bp, Unknown
  misc_feature (1)..( 18): Result.005 file - promoters50/1444506
tatgtatattgcggatta

SEQ ID NO: 172569 - DNA, 18 bp, Unknown
  misc_feature (1)..( 18): Result.005 file - promoters50/1444506
aaaacatgagtactcgat

SEQ ID NO: 172570 - DNA, 18 bp, Unknown
  misc_feature (1)..( 18): Result.005 file - promoters50/1444506
ttaatatgagaaactaaa

SEQ ID NO: 172571 - DNA, 10 bp, Unknown
  misc_feature (1)..( 10): Result.005 file - promoters50/1444506
attttacttt

SEQ ID NO: 172572 - DNA, 10 bp, Unknown
  misc_feature (1)..( 10): Result.005 file - promoters50/1444506
attttagtcg

SEQ ID NO: 172573 - DNA, 10 bp, Unknown
  misc_feature (1)..( 10): Result.005 file - promoters50/1444506
tttttactca

SEQ ID NO: 172574 - DNA, 10 bp, Unknown
  misc_feature (1)..( 10): Result.005 file - promoters50/1444506
tttttaccct

SEQ ID NO: 172575 - DNA, 10 bp, Unknown
  misc_feature (1)..( 10): Result.005 file - promoters50/1444506
attttagcaa

SEQ ID NO: 172576 - DNA, 10 bp, Unknown
  misc_feature (1)..( 10): Result.005 file - promoters50/1444506
tctttaacaa

SEQ ID NO: 172577 - DNA, 12 bp, Unknown
  misc_feature (1)..( 12): Result.005 file - promoters50/1444506
actatatatatc

SEQ ID NO: 172578 - DNA, 12 bp, Unknown
  misc_feature (1)..( 12): Result.005 file - promoters50/1444506
tttatttatatg

SEQ ID NO: 172579 - DNA, 12 bp, Unknown
  misc_feature (1)..( 12): Result.005 file - promoters50/1444506
actctatataaa

SEQ ID NO: 172580 - DNA, 12 bp, Unknown
  misc_feature (1)..( 12): Result.005 file - promoters50/1444506
cgtatatataaa

SEQ ID NO: 172581 - DNA, 12 bp, Unknown
  misc_feature (1)..( 12): Result.005 file - promoters50/1444506
tgtctatatgac

SEQ ID NO: 172582 - DNA, 12 bp, Unknown
  misc_feature (1)..( 12): Result.005 file - promoters50/1444506
aatctataaaaa

SEQ ID NO: 172583 - DNA, 12 bp, Unknown
  misc_feature (1)..( 12): Result.005 file - promoters50/1444506
ttcgtatatgaa

SEQ ID NO: 172584 - DNA, 10 bp, Unknown
  misc_feature (1)..( 10): Result.005 file - promoters50/1444506
aattttgtta

SEQ ID NO: 172585 - DNA, 10 bp, Unknown
  misc_feature (1)..( 10): Result.005 file - promoters50/1444506
ctttttgttt

SEQ ID NO: 172586 - DNA, 10 bp, Unknown
  misc_feature (1)..( 10): Result.005 file - promoters50/1444506
agatttgtta

SEQ ID NO: 172587 - DNA, 10 bp, Unknown
  misc_feature (1)..( 10): Result.005 file - promoters50/1444506
ttatttgtaa

SEQ ID NO: 172588 - DNA, 10 bp, Unknown
  misc_feature (1)..( 10): Result.005 file - promoters50/1444506
gtatatgtta

SEQ ID NO: 172589 - DNA, 10 bp, Unknown
  misc_feature (1)..( 10): Result.005 file - promoters50/1444506
ttatttgaag

SEQ ID NO: 172590 - DNA, 10 bp, Unknown
  misc_feature (1)..( 10): Result.005 file - promoters50/1444514
attaataaag

SEQ ID NO: 172591 - DNA, 13 bp, Unknown
  misc_feature (1)..( 13): Result.005 file - promoters50/1444514
aaaattattaaag

SEQ ID NO: 172592 - DNA, 13 bp, Unknown
  misc_feature (1)..( 13): Result.005 file - promoters50/1444514
aaaatttatctgt

SEQ ID NO: 172593 - DNA, 13 bp, Unknown
  misc_feature (1)..( 13): Result.005 file - promoters50/1444514
atgattatttttt

SEQ ID NO: 172594 - DNA, 13 bp, Unknown
  misc_feature (1)..( 13): Result.005 file - promoters50/1444514
gaaaatatgaata

SEQ ID NO: 172595 - DNA, 13 bp, Unknown
  misc_feature (1)..( 13): Result.005 file - promoters50/1444514
taaaacatgagta

SEQ ID NO: 172596 - DNA, 13 bp, Unknown
  misc_feature (1)..( 13): Result.005 file - promoters50/1444514
aattattaaagta

SEQ ID NO: 172597 - DNA, 13 bp, Unknown
  misc_feature (1)..( 13): Result.005 file - promoters50/1444514
atttactaataga

SEQ ID NO: 172598 - DNA, 13 bp, Unknown
  misc_feature (1)..( 13): Result.005 file - promoters50/1444514
ttataataattga

SEQ ID NO: 172599 - DNA, 13 bp, Unknown
  misc_feature (1)..( 13): Result.005 file - promoters50/1444514
aatgattattttt

SEQ ID NO: 172600 - DNA, 13 bp, Unknown
  misc_feature (1)..( 13): Result.005 file - promoters50/1444514
ttttgctatactc

SEQ ID NO: 172601 - DNA, 13 bp, Unknown
  misc_feature (1)..( 13): Result.005 file - promoters50/1444514
aaaaactaaatga

SEQ ID NO: 172602 - DNA, 13 bp, Unknown
  misc_feature (1)..( 13): Result.005 file - promoters50/1444514
tgaatataatgag

SEQ ID NO: 172603 - DNA, 12 bp, Unknown
  misc_feature (1)..( 12): Result.005 file - promoters50/1444514
atttatttatat

SEQ ID NO: 172604 - DNA, 12 bp, Unknown
  misc_feature (1)..( 12): Result.005 file - promoters50/1444514
cactatatatat

SEQ ID NO: 172605 - DNA, 12 bp, Unknown
  misc_feature (1)..( 12): Result.005 file - promoters50/1444514
tcgtatatataa

SEQ ID NO: 172606 - DNA, 12 bp, Unknown
  misc_feature (1)..( 12): Result.005 file - promoters50/1444514
atttgtttatgt

SEQ ID NO: 172607 - DNA, 12 bp, Unknown
  misc_feature (1)..( 12): Result.005 file - promoters50/1444514
ctgtctatatga

SEQ ID NO: 172608 - DNA, 12 bp, Unknown
  misc_feature (1)..( 12): Result.005 file - promoters50/1444514
tactctatataa

SEQ ID NO: 172609 - DNA, 12 bp, Unknown
  misc_feature (1)..( 12): Result.005 file - promoters50/1444514
attcgtatatga

SEQ ID NO: 172610 - DNA, 12 bp, Unknown
  misc_feature (1)..( 12): Result.005 file - promoters50/1444514
ttcgaattcaaa

SEQ ID NO: 172611 - DNA, 12 bp, Unknown
  misc_feature (1)..( 12): Result.005 file - promoters50/1444514
cccgaaatcata

SEQ ID NO: 172612 - DNA, 12 bp, Unknown
  misc_feature (1)..( 12): Result.005 file - promoters50/1444514
taacaaataata

SEQ ID NO: 172613 - DNA, 12 bp, Unknown
  misc_feature (1)..( 12): Result.005 file - promoters50/1444514
ccctaaattcct

SEQ ID NO: 172614 - DNA, 12 bp, Unknown
  misc_feature (1)..( 12): Result.005 file - promoters50/1444514
agctaaaacatt

SEQ ID NO: 172615 - DNA, 12 bp, Unknown
  misc_feature (1)..( 12): Result.005 file - promoters50/1444514
gttgtaatcatt

SEQ ID NO: 172616 - DNA, 10 bp, Unknown
  misc_feature (1)..( 10): Result.005 file - promoters50/1444514
ctaattttaa

SEQ ID NO: 172617 - DNA, 10 bp, Unknown
  misc_feature (1)..( 10): Result.005 file - promoters50/1444514
aaaatgttat

SEQ ID NO: 172618 - DNA, 10 bp, Unknown
  misc_feature (1)..( 10): Result.005 file - promoters50/1444514
ctaattttag

SEQ ID NO: 172619 - DNA, 10 bp, Unknown
  misc_feature (1)..( 10): Result.005 file - promoters50/1444514
atttttttaa

SEQ ID NO: 172620 - DNA, 10 bp, Unknown
  misc_feature (1)..( 10): Result.005 file - promoters50/1444514
taaatgatat

SEQ ID NO: 172621 - DNA, 10 bp, Unknown
  misc_feature (1)..( 10): Result.005 file - promoters50/1444514
tatatgttac

SEQ ID NO: 172622 - DNA, 11 bp, Unknown
  misc_feature (1)..( 11): Result.005 file - promoters50/1444514
attatttgtaa

SEQ ID NO: 172623 - DNA, 10 bp, Unknown
  misc_feature (1)..( 10): Result.005 file - promoters50/1444514
aattttgtta

SEQ ID NO: 172624 - DNA, 10 bp, Unknown
  misc_feature (1)..( 10): Result.005 file - promoters50/1444514
ctttttgttt

SEQ ID NO: 172625 - DNA, 10 bp, Unknown
  misc_feature (1)..( 10): Result.005 file - promoters50/1444514
agatttgtta

SEQ ID NO: 172626 - DNA, 10 bp, Unknown
  misc_feature (1)..( 10): Result.005 file - promoters50/1444514
aatcttgttt

SEQ ID NO: 172627 - DNA, 10 bp, Unknown
  misc_feature (1)..( 10): Result.005 file - promoters50/1444514
tattttttta

SEQ ID NO: 172628 - DNA, 10 bp, Unknown
  misc_feature (1)..( 10): Result.005 file - promoters50/1444514
ttatttgtaa

SEQ ID NO: 172629 - DNA, 10 bp, Unknown
  misc_feature (1)..( 10): Result.005 file - promoters50/1444514
gtatatgtta

SEQ ID NO: 172630 - DNA, 7 bp, Unknown
  misc_feature (1)..( 7): Result.005 file - promoters50/1444567
atagaat

SEQ ID NO: 172631 - DNA, 7 bp, Unknown
  misc_feature (1)..( 7): Result.005 file - promoters50/1444567
atagaaa

SEQ ID NO: 172632 - DNA, 7 bp, Unknown
  misc_feature (1)..( 7): Result.005 file - promoters50/1444567
ttagaat

SEQ ID NO: 172633 - DNA, 11 bp, Unknown
  misc_feature (1)..( 11): Result.005 file - promoters50/1444567
aaaaataatct

SEQ ID NO: 172634 - DNA, 11 bp, Unknown
  misc_feature (1)..( 11): Result.005 file - promoters50/1444567
aaaaatcaatc

SEQ ID NO: 172635 - DNA, 11 bp, Unknown
  misc_feature (1)..( 11): Result.005 file - promoters50/1444567
ccaaattcaat

SEQ ID NO: 172636 - DNA, 7 bp, Unknown
  misc_feature (1)..( 7): Result.005 file - promoters50/1444567
ctaaaat

SEQ ID NO: 172637 - DNA, 7 bp, Unknown
  misc_feature (1)..( 7): Result.005 file - promoters50/1444567
ttaaaat

SEQ ID NO: 172638 - DNA, 7 bp, Unknown
  misc_feature (1)..( 7): Result.005 file - promoters50/1444567
ttataat

SEQ ID NO: 172639 - DNA, 7 bp, Unknown
  misc_feature (1)..( 7): Result.005 file - promoters50/1444567
aataatc

SEQ ID NO: 172640 - DNA, 7 bp, Unknown
  misc_feature (1)..( 7): Result.005 file - promoters50/1444567
aataatt

SEQ ID NO: 172641 - DNA, 7 bp, Unknown
  misc_feature (1)..( 7): Result.005 file - promoters50/1444567
tataatc

SEQ ID NO: 172642 - DNA, 11 bp, Unknown
  misc_feature (1)..( 11): Result.005 file - promoters50/1444567
aatctcagtga

SEQ ID NO: 172643 - DNA, 11 bp, Unknown
  misc_feature (1)..( 11): Result.005 file - promoters50/1444567
aaattcaatga

SEQ ID NO: 172644 - DNA, 11 bp, Unknown
  misc_feature (1)..( 11): Result.005 file - promoters50/1444567
aaaatcaatct

SEQ ID NO: 172645 - DNA, 7 bp, Unknown
  misc_feature (1)..( 7): Result.005 file - promoters50/1444607
aagagat

SEQ ID NO: 172646 - DNA, 7 bp, Unknown
  misc_feature (1)..( 7): Result.005 file - promoters50/1444607
aagagaa

SEQ ID NO: 172647 - DNA, 7 bp, Unknown
  misc_feature (1)..( 7): Result.005 file - promoters50/1444607
cagagaa

SEQ ID NO: 172648 - DNA, 15 bp, Unknown
  misc_feature (1)..( 15): Result.005 file - promoters50/1444629
aggattcttactttt

SEQ ID NO: 172649 - DNA, 15 bp, Unknown
  misc_feature (1)..( 15): Result.005 file - promoters50/1444629
tatatttttaaattt

SEQ ID NO: 172650 - DNA, 15 bp, Unknown
  misc_feature (1)..( 15): Result.005 file - promoters50/1444629
gagattctttggtgg

SEQ ID NO: 172651 - DNA, 15 bp, Unknown
  misc_feature (1)..( 15): Result.005 file - promoters50/1444629
atcattcgtacctcg

SEQ ID NO: 172652 - DNA, 15 bp, Unknown
  misc_feature (1)..( 15): Result.005 file - promoters50/1444629
ataatttgagcccta

SEQ ID NO: 172653 - DNA, 15 bp, Unknown
  misc_feature (1)..( 15): Result.005 file - promoters50/1444629
atcaattttaataac

SEQ ID NO: 172654 - DNA, 15 bp, Unknown
  misc_feature (1)..( 15): Result.005 file - promoters50/1444629
ttaaattttacattt

SEQ ID NO: 172655 - DNA, 9 bp, Unknown
  misc_feature (1)..( 9): Result.005 file - promoters50/1446208
taaagataa

SEQ ID NO: 172656 - DNA, 9 bp, Unknown
  misc_feature (1)..( 9): Result.005 file - promoters50/1446208
taaatatat

SEQ ID NO: 172657 - DNA, 9 bp, Unknown
  misc_feature (1)..( 9): Result.005 file - promoters50/1446208
agtagataa

SEQ ID NO: 172658 - DNA, 6 bp, Unknown
  misc_feature (1)..( 6): Result.005 file - promoters50/1446208
tacaaa

SEQ ID NO: 172659 - DNA, 6 bp, Unknown
  misc_feature (1)..( 6): Result.005 file - promoters50/1446208
tacaaa

SEQ ID NO: 172660 - DNA, 6 bp, Unknown
  misc_feature (1)..( 6): Result.005 file - promoters50/1446208
tacaaa

SEQ ID NO: 172661 - DNA, 9 bp, Unknown
  misc_feature (1)..( 9): Result.005 file - promoters50/1446208
cttttgatg

SEQ ID NO: 172662 - DNA, 9 bp, Unknown
  misc_feature (1)..( 9): Result.005 file - promoters50/1446208
attttaatg

SEQ ID NO: 172663 - DNA, 9 bp, Unknown
  misc_feature (1)..( 9): Result.005 file - promoters50/1446208
attttattt

SEQ ID NO: 172664 - DNA, 8 bp, Unknown
  misc_feature (1)..( 8): Result.005 file - promoters50/1446368
aaagatta

SEQ ID NO: 172665 - DNA, 8 bp, Unknown
  misc_feature (1)..( 8): Result.005 file - promoters50/1446368
aaaaattc

SEQ ID NO: 172666 - DNA, 9 bp, Unknown
  misc_feature (1)..( 9): Result.005 file - promoters50/1446368
aaataataa

SEQ ID NO: 172667 - DNA, 9 bp, Unknown
  misc_feature (1)..( 9): Result.005 file - promoters50/1446368
ataaacttc

SEQ ID NO: 172668 - DNA, 9 bp, Unknown
  misc_feature (1)..( 9): Result.005 file - promoters50/1446368
ctaaattaa

SEQ ID NO: 172669 - DNA, 9 bp, Unknown
  misc_feature (1)..( 9): Result.005 file - promoters50/1446368
ccaaaataa

SEQ ID NO: 172670 - DNA, 9 bp, Unknown
  misc_feature (1)..( 9): Result.005 file - promoters50/1446368
ataatttat

SEQ ID NO: 172671 - DNA, 9 bp, Unknown
  misc_feature (1)..( 9): Result.005 file - promoters50/1446368
ataattaac

SEQ ID NO: 172672 - DNA, 10 bp, Unknown
  misc_feature (1)..( 10): Result.005 file - promoters50/1446456
atactttttt

SEQ ID NO: 172673 - DNA, 10 bp, Unknown
  misc_feature (1)..( 10): Result.005 file - promoters50/1446456
tcccttttta

SEQ ID NO: 172674 - DNA, 10 bp, Unknown
  misc_feature (1)..( 10): Result.005 file - promoters50/1446456
atactttttc

SEQ ID NO: 172675 - DNA, 10 bp, Unknown
  misc_feature (1)..( 10): Result.005 file - promoters50/1446456
gtacatttat

SEQ ID NO: 172676 - DNA, 10 bp, Unknown
  misc_feature (1)..( 10): Result.005 file - promoters50/1446456
agcattttta

SEQ ID NO: 172677 - DNA, 8 bp, Unknown
  misc_feature (1)..( 8): Result.005 file - promoters50/1446456
caatgaat

SEQ ID NO: 172678 - DNA, 8 bp, Unknown
  misc_feature (1)..( 8): Result.005 file - promoters50/1446456
aaataaat

SEQ ID NO: 172679 - DNA, 8 bp, Unknown
  misc_feature (1)..( 8): Result.005 file - promoters50/1446456
caataaaa

SEQ ID NO: 172680 - DNA, 8 bp, Unknown
  misc_feature (1)..( 8): Result.005 file - promoters50/1446456
aaataacc

SEQ ID NO: 172681 - DNA, 8 bp, Unknown
  misc_feature (1)..( 8): Result.005 file - promoters50/1446456
aaaaaaag

SEQ ID NO: 172682 - DNA, 10 bp, Unknown
  misc_feature (1)..( 10): Result.005 file - promoters50/1446584
ttaaagttgg

SEQ ID NO: 172683 - DNA, 10 bp, Unknown
  misc_feature (1)..( 10): Result.005 file - promoters50/1446584
ataaatttgt

SEQ ID NO: 172684 - DNA, 10 bp, Unknown
  misc_feature (1)..( 10): Result.005 file - promoters50/1446584
ataaatagat

SEQ ID NO: 172685 - DNA, 10 bp, Unknown
  misc_feature (1)..( 10): Result.005 file - promoters50/1446584
aaagatttgt

SEQ ID NO: 172686 - DNA, 10 bp, Unknown
  misc_feature (1)..( 10): Result.005 file - promoters50/1446636
aaaatggaac

SEQ ID NO: 172687 - DNA, 10 bp, Unknown
  misc_feature (1)..( 10): Result.005 file - promoters50/1446636
gaaaaggata

SEQ ID NO: 172688 - DNA, 10 bp, Unknown
  misc_feature (1)..( 10): Result.005 file - promoters50/1446636
cttaaggata

SEQ ID NO: 172689 - DNA, 10 bp, Unknown
  misc_feature (1)..( 10): Result.005 file - promoters50/1446636
tgaaaggata

SEQ ID NO: 172690 - DNA, 10 bp, Unknown
  misc_feature (1)..( 10): Result.005 file - promoters50/1446636
tcaaacgatt

SEQ ID NO: 172691 - DNA, 10 bp, Unknown
  misc_feature (1)..( 10): Result.005 file - promoters50/1446636
ttaaagattt

SEQ ID NO: 172692 - DNA, 11 bp, Unknown
  misc_feature (1)..( 11): Result.005 file - promoters50/1446636
aattttgatta

SEQ ID NO: 172693 - DNA, 11 bp, Unknown
  misc_feature (1)..( 11): Result.005 file - promoters50/1446636
acttttgatgt

SEQ ID NO: 172694 - DNA, 11 bp, Unknown
  misc_feature (1)..( 11): Result.005 file - promoters50/1446636
atttttaatta

SEQ ID NO: 172695 - DNA, 11 bp, Unknown
  misc_feature (1)..( 11): Result.005 file - promoters50/1446636
aattttgtcaa

SEQ ID NO: 172696 - DNA, 11 bp, Unknown
  misc_feature (1)..( 11): Result.005 file - promoters50/1446636
acttctgaccc

SEQ ID NO: 172697 - DNA, 11 bp, Unknown
  misc_feature (1)..( 11): Result.005 file - promoters50/1446636
aatttttggtc

SEQ ID NO: 172698 - DNA, 11 bp, Unknown
  misc_feature (1)..( 11): Result.005 file - promoters50/1446636
tttttttacga

SEQ ID NO: 172699 - DNA, 9 bp, Unknown
  misc_feature (1)..( 9): Result.005 file - promoters50/1446636
aaattttga

SEQ ID NO: 172700 - DNA, 9 bp, Unknown
  misc_feature (1)..( 9): Result.005 file - promoters50/1446636
aaatttttg

SEQ ID NO: 172701 - DNA, 9 bp, Unknown
  misc_feature (1)..( 9): Result.005 file - promoters50/1446636
taattttgt

SEQ ID NO: 172702 - DNA, 9 bp, Unknown
  misc_feature (1)..( 9): Result.005 file - promoters50/1446636
ctattttta

SEQ ID NO: 172703 - DNA, 9 bp, Unknown
  misc_feature (1)..( 9): Result.005 file - promoters50/1446636
aaagtttgc

SEQ ID NO: 172704 - DNA, 9 bp, Unknown
  misc_feature (1)..( 9): Result.005 file - promoters50/1446636
tttttttta

SEQ ID NO: 172705 - DNA, 9 bp, Unknown
  misc_feature (1)..( 9): Result.005 file - promoters50/1446636
gaattgttc

SEQ ID NO: 172706 - DNA, 9 bp, Unknown
  misc_feature (1)..( 9): Result.005 file - promoters50/1446636
acattgtta

SEQ ID NO: 172707 - DNA, 9 bp, Unknown
  misc_feature (1)..( 9): Result.005 file - promoters50/1446636
agatttttc

SEQ ID NO: 172708 - DNA, 9 bp, Unknown
  misc_feature (1)..( 9): Result.005 file - promoters50/1446636
gggtttttc

SEQ ID NO: 172709 - DNA, 9 bp, Unknown
  misc_feature (1)..( 9): Result.005 file - promoters50/1446636
acgtttttg

SEQ ID NO: 172710 - DNA, 9 bp, Unknown
  misc_feature (1)..( 9): Result.005 file - promoters50/1446636
agatgtttg

SEQ ID NO: 172711 - DNA, 18 bp, Unknown
  misc_feature (1)..( 18): Result.005 file - promoters50/1446854
tataaccaaaaataatag

SEQ ID NO: 172712 - DNA, 18 bp, Unknown
  misc_feature (1)..( 18): Result.005 file - promoters50/1446854
ttttttataaagtaattt

SEQ ID NO: 172713 - DNA, 18 bp, Unknown
  misc_feature (1)..( 18): Result.005 file - promoters50/1446854
tataacccaaaattgacc

SEQ ID NO: 172714 - DNA, 18 bp, Unknown
  misc_feature (1)..( 18): Result.005 file - promoters50/1446854
agatcttggaagcaatag

SEQ ID NO: 172715 - DNA, 18 bp, Unknown
  misc_feature (1)..( 18): Result.005 file - promoters50/1446854
gaaacgctaaagtggttc

SEQ ID NO: 172716 - DNA, 18 bp, Unknown
  misc_feature (1)..( 18): Result.005 file - promoters50/1446854
acccacaaacagtagttt

SEQ ID NO: 172717 - DNA, 8 bp, Unknown
  misc_feature (1)..( 8): Result.005 file - promoters50/1447035
gttgagag

SEQ ID NO: 172718 - DNA, 8 bp, Unknown
  misc_feature (1)..( 8): Result.005 file - promoters50/1447035
gttgaggt

SEQ ID NO: 172719 - DNA, 8 bp, Unknown
  misc_feature (1)..( 8): Result.005 file - promoters50/1447035
gttgtgag

SEQ ID NO: 172720 - DNA, 8 bp, Unknown
  misc_feature (1)..( 8): Result.005 file - promoters50/1447035
gaataaat

SEQ ID NO: 172721 - DNA, 8 bp, Unknown
  misc_feature (1)..( 8): Result.005 file - promoters50/1447035
gaaaaaag

SEQ ID NO: 172722 - DNA, 9 bp, Unknown
  misc_feature (1)..( 9): Result.005 file - promoters50/1447035
caagtaaaa

SEQ ID NO: 172723 - DNA, 9 bp, Unknown
  misc_feature (1)..( 9): Result.005 file - promoters50/1447035
tatgtataa

SEQ ID NO: 172724 - DNA, 9 bp, Unknown
  misc_feature (1)..( 9): Result.005 file - promoters50/1447035
tatttatat

SEQ ID NO: 172725 - DNA, 9 bp, Unknown
  misc_feature (1)..( 9): Result.005 file - promoters50/1447035
tttgtataa

SEQ ID NO: 172726 - DNA, 8 bp, Unknown
  misc_feature (1)..( 8): Result.005 file - promoters50/1447035
taaattcc

SEQ ID NO: 172727 - DNA, 8 bp, Unknown
  misc_feature (1)..( 8): Result.005 file - promoters50/1447035
aaaattcg

SEQ ID NO: 172728 - DNA, 8 bp, Unknown
  misc_feature (1)..( 8): Result.005 file - promoters50/1447035
aaaagtcg

SEQ ID NO: 172729 - DNA, 12 bp, Unknown
  misc_feature (1)..( 12): Result.005 file - promoters50/1447217
aaaaaaaaaata

SEQ ID NO: 172730 - DNA, 12 bp, Unknown
  misc_feature (1)..( 12): Result.005 file - promoters50/1447217
caaaaaaaaaaa

SEQ ID NO: 172731 - DNA, 12 bp, Unknown
  misc_feature (1)..( 12): Result.005 file - promoters50/1447217
gaaaaaaaaaaa

SEQ ID NO: 172732 - DNA, 12 bp, Unknown
  misc_feature (1)..( 12): Result.005 file - promoters50/1447217
taaacaatttta

SEQ ID NO: 172733 - DNA, 10 bp, Unknown
  misc_feature (1)..( 10): Result.005 file - promoters50/1447217
caaaacaaaa

SEQ ID NO: 172734 - DNA, 10 bp, Unknown
  misc_feature (1)..( 10): Result.005 file - promoters50/1447217
aaatacaaaa

SEQ ID NO: 172735 - DNA, 10 bp, Unknown
  misc_feature (1)..( 10): Result.005 file - promoters50/1447217
aaaaacaaat

SEQ ID NO: 172736 - DNA, 10 bp, Unknown
  misc_feature (1)..( 10): Result.005 file - promoters50/1447217
atatataaac

SEQ ID NO: 172737 - DNA, 14 bp, Unknown
  misc_feature (1)..( 14): Result.005 file - promoters50/1447217
gaaatattttaaca

SEQ ID NO: 172738 - DNA, 14 bp, Unknown
  misc_feature (1)..( 14): Result.005 file - promoters50/1447217
gaaataatttagac

SEQ ID NO: 172739 - DNA, 14 bp, Unknown
  misc_feature (1)..( 14): Result.005 file - promoters50/1447217
tcttttttttaaca

SEQ ID NO: 172740 - DNA, 14 bp, Unknown
  misc_feature (1)..( 14): Result.005 file - promoters50/1447217
acattgatttatta

SEQ ID NO: 172741 - DNA, 8 bp, Unknown
  misc_feature (1)..( 8): Result.005 file - promoters50/1447217
tataatta

SEQ ID NO: 172742 - DNA, 8 bp, Unknown
  misc_feature (1)..( 8): Result.005 file - promoters50/1447217
gataattc

SEQ ID NO: 172743 - DNA, 8 bp, Unknown
  misc_feature (1)..( 8): Result.005 file - promoters50/1447217
tattattg

SEQ ID NO: 172744 - DNA, 8 bp, Unknown
  misc_feature (1)..( 8): Result.005 file - promoters50/1447217
catactta

SEQ ID NO: 172745 - DNA, 8 bp, Unknown
  misc_feature (1)..( 8): Result.005 file - promoters50/1447217
gaaaaaaa

SEQ ID NO: 172746 - DNA, 8 bp, Unknown
  misc_feature (1)..( 8): Result.005 file - promoters50/1447217
aaaacaaa

SEQ ID NO: 172747 - DNA, 9 bp, Unknown
  misc_feature (1)..( 9): Result.005 file - promoters50/1447217
aaatacaaa

SEQ ID NO: 172748 - DNA, 9 bp, Unknown
  misc_feature (1)..( 9): Result.005 file - promoters50/1447217
atatataaa

SEQ ID NO: 172749 - DNA, 9 bp, Unknown
  misc_feature (1)..( 9): Result.005 file - promoters50/1447228
ttgggagaa

SEQ ID NO: 172750 - DNA, 9 bp, Unknown
  misc_feature (1)..( 9): Result.005 file - promoters50/1447228
ttggaagag

SEQ ID NO: 172751 - DNA, 9 bp, Unknown
  misc_feature (1)..( 9): Result.005 file - promoters50/1447228
gatgaagag

SEQ ID NO: 172752 - DNA, 8 bp, Unknown
  misc_feature (1)..( 8): Result.005 file - promoters50/1447321
atttgaat

SEQ ID NO: 172753 - DNA, 8 bp, Unknown
  misc_feature (1)..( 8): Result.005 file - promoters50/1447321
ttttgaag

SEQ ID NO: 172754 - DNA, 8 bp, Unknown
  misc_feature (1)..( 8): Result.005 file - promoters50/1447321
ttttgaat

SEQ ID NO: 172755 - DNA, 8 bp, Unknown
  misc_feature (1)..( 8): Result.005 file - promoters50/1447321
ttttgaca

SEQ ID NO: 172756 - DNA, 12 bp, Unknown
  misc_feature (1)..( 12): Result.005 file - promoters50/1447321
aaaaatgtgaaa

SEQ ID NO: 172757 - DNA, 12 bp, Unknown
  misc_feature (1)..( 12): Result.005 file - promoters50/1447321
aaaaataatttt

SEQ ID NO: 172758 - DNA, 12 bp, Unknown
  misc_feature (1)..( 12): Result.005 file - promoters50/1447321
aaaaatcgtcat

SEQ ID NO: 172759 - DNA, 12 bp, Unknown
  misc_feature (1)..( 12): Result.005 file - promoters50/1447321
caaactgtgaaa

SEQ ID NO: 172760 - DNA, 14 bp, Unknown
  misc_feature (1)..( 14): Result.005 file - promoters50/1447321
tatccaattttaag

SEQ ID NO: 172761 - DNA, 14 bp, Unknown
  misc_feature (1)..( 14): Result.005 file - promoters50/1447321
attattattctaag

SEQ ID NO: 172762 - DNA, 14 bp, Unknown
  misc_feature (1)..( 14): Result.005 file - promoters50/1447321
aaccaaatttggtg

SEQ ID NO: 172763 - DNA, 14 bp, Unknown
  misc_feature (1)..( 14): Result.005 file - promoters50/1447321
aaccaaagtcaaca

SEQ ID NO: 172764 - DNA, 10 bp, Unknown
  misc_feature (1)..( 10): Result.005 file - promoters50/1447321
tgtactatta

SEQ ID NO: 172765 - DNA, 10 bp, Unknown
  misc_feature (1)..( 10): Result.005 file - promoters50/1447321
tgtaatattt

SEQ ID NO: 172766 - DNA, 10 bp, Unknown
  misc_feature (1)..( 10): Result.005 file - promoters50/1447321
aataattttt

SEQ ID NO: 172767 - DNA, 10 bp, Unknown
  misc_feature (1)..( 10): Result.005 file - promoters50/1447321
agtaattttc

SEQ ID NO: 172768 - DNA, 8 bp, Unknown
  misc_feature (1)..( 8): Result.005 file - promoters50/1447321
tcattttt

SEQ ID NO: 172769 - DNA, 8 bp, Unknown
  misc_feature (1)..( 8): Result.005 file - promoters50/1447321
taattttt

SEQ ID NO: 172770 - DNA, 8 bp, Unknown
  misc_feature (1)..( 8): Result.005 file - promoters50/1447321
taatattt

SEQ ID NO: 172771 - DNA, 8 bp, Unknown
  misc_feature (1)..( 8): Result.005 file - promoters50/1447321
taattttc

SEQ ID NO: 172772 - DNA, 10 bp, Unknown
  misc_feature (1)..( 10): Result.005 file - promoters50/1447352
tgcgaattct

SEQ ID NO: 172773 - DNA, 10 bp, Unknown
  misc_feature (1)..( 10): Result.005 file - promoters50/1447352
cttgaattca

SEQ ID NO: 172774 - DNA, 10 bp, Unknown
  misc_feature (1)..( 10): Result.005 file - promoters50/1447352
caataattca

SEQ ID NO: 172775 - DNA, 10 bp, Unknown
  misc_feature (1)..( 10): Result.005 file - promoters50/1447352
cttgtatttg

SEQ ID NO: 172776 - DNA, 11 bp, Unknown
  misc_feature (1)..( 11): Result.005 file - promoters50/1447379
tatgcaatacc

SEQ ID NO: 172777 - DNA, 11 bp, Unknown
  misc_feature (1)..( 11): Result.005 file - promoters50/1447379
aatgaaatttg

SEQ ID NO: 172778 - DNA, 11 bp, Unknown
  misc_feature (1)..( 11): Result.005 file - promoters50/1447379
aatgaaaggaa

SEQ ID NO: 172779 - DNA, 7 bp, Unknown
  misc_feature (1)..( 7): Result.005 file - promoters50/1447379
tttcctc

SEQ ID NO: 172780 - DNA, 7 bp, Unknown
  misc_feature (1)..( 7): Result.005 file - promoters50/1447379
cttcctc

SEQ ID NO: 172781 - DNA, 7 bp, Unknown
  misc_feature (1)..( 7): Result.005 file - promoters50/1447379
ttttctc

SEQ ID NO: 172782 - DNA, 10 bp, Unknown
  misc_feature (1)..( 10): Result.005 file - promoters50/1447425
acaaacaatt

SEQ ID NO: 172783 - DNA, 10 bp, Unknown
  misc_feature (1)..( 10): Result.005 file - promoters50/1447425
ttctacaatt

SEQ ID NO: 172784 - DNA, 10 bp, Unknown
  misc_feature (1)..( 10): Result.005 file - promoters50/1447425
taaaagaatc

SEQ ID NO: 172785 - DNA, 10 bp, Unknown
  misc_feature (1)..( 10): Result.005 file - promoters50/1447425
ttctaaaatc

SEQ ID NO: 172786 - DNA, 10 bp, Unknown
  misc_feature (1)..( 10): Result.005 file - promoters50/1447543
aaaaaaaaac

SEQ ID NO: 172787 - DNA, 10 bp, Unknown
  misc_feature (1)..( 10): Result.005 file - promoters50/1447543
gtacaaaaac

SEQ ID NO: 172788 - DNA, 10 bp, Unknown
  misc_feature (1)..( 10): Result.005 file - promoters50/1447543
tactaaaatt

SEQ ID NO: 172789 - DNA, 10 bp, Unknown
  misc_feature (1)..( 10): Result.005 file - promoters50/1447543
gaaaaactca

SEQ ID NO: 172790 - DNA, 10 bp, Unknown
  misc_feature (1)..( 10): Result.005 file - promoters50/1447543
ttaaaaatca

SEQ ID NO: 172791 - DNA, 11 bp, Unknown
  misc_feature (1)..( 11): Result.005 file - promoters50/1447543
agaagaaccag

SEQ ID NO: 172792 - DNA, 11 bp, Unknown
  misc_feature (1)..( 11): Result.005 file - promoters50/1447543
ataaaaataat

SEQ ID NO: 172793 - DNA, 8 bp, Unknown
  misc_feature (1)..( 8): Result.005 file - promoters50/1447543
taataaaa

SEQ ID NO: 172794 - DNA, 8 bp, Unknown
  misc_feature (1)..( 8): Result.005 file - promoters50/1447543
taataata

SEQ ID NO: 172795 - DNA, 9 bp, Unknown
  misc_feature (1)..( 9): Result.005 file - promoters50/1447543
caattaaat

SEQ ID NO: 172796 - DNA, 16 bp, Unknown
  misc_feature (1)..( 16): Result.005 file - promoters50/1447543
atgtaaattaaattct

SEQ ID NO: 172797 - DNA, 16 bp, Unknown
  misc_feature (1)..( 16): Result.005 file - promoters50/1447543
atgaaaaataaattta

SEQ ID NO: 172798 - DNA, 16 bp, Unknown
  misc_feature (1)..( 16): Result.005 file - promoters50/1447543
tttgtttataagttta

SEQ ID NO: 172799 - DNA, 9 bp, Unknown
  misc_feature (1)..( 9): Result.005 file - promoters50/1447543
ttaagttac

SEQ ID NO: 172800 - DNA, 9 bp, Unknown
  misc_feature (1)..( 9): Result.005 file - promoters50/1447543
ttaagttag

SEQ ID NO: 172801 - DNA, 9 bp, Unknown
  misc_feature (1)..( 9): Result.005 file - promoters50/1447543
ttaagtaag

SEQ ID NO: 172802 - DNA, 9 bp, Unknown
  misc_feature (1)..( 9): Result.005 file - promoters50/1447543
ttaattaag

SEQ ID NO: 172803 - DNA, 9 bp, Unknown
  misc_feature (1)..( 9): Result.005 file - promoters50/1447543
acaattaaa

SEQ ID NO: 172804 - DNA, 9 bp, Unknown
  misc_feature (1)..( 9): Result.005 file - promoters50/1447543
ttaagtaag

SEQ ID NO: 172805 - DNA, 8 bp, Unknown
  misc_feature (1)..( 8): Result.005 file - promoters50/1447543
aaaactat

SEQ ID NO: 172806 - DNA, 8 bp, Unknown
  misc_feature (1)..( 8): Result.005 file - promoters50/1447543
taaaatat

SEQ ID NO: 172807 - DNA, 8 bp, Unknown
  misc_feature (1)..( 8): Result.005 file - promoters50/1447543
aaaaataa

SEQ ID NO: 172808 - DNA, 14 bp, Unknown
  misc_feature (1)..( 14): Result.005 file - promoters50/1447543
tatctatttattct

SEQ ID NO: 172809 - DNA, 14 bp, Unknown
  misc_feature (1)..( 14): Result.005 file - promoters50/1447543
tatatatttttatt

SEQ ID NO: 172810 - DNA, 14 bp, Unknown
  misc_feature (1)..( 14): Result.005 file - promoters50/1447543
aatatctttgtatt

SEQ ID NO: 172811 - DNA, 9 bp, Unknown
  misc_feature (1)..( 9): Result.005 file - promoters50/1447543
ttttttatc

SEQ ID NO: 172812 - DNA, 9 bp, Unknown
  misc_feature (1)..( 9): Result.005 file - promoters50/1447543
atttctatc

SEQ ID NO: 172813 - DNA, 9 bp, Unknown
  misc_feature (1)..( 9): Result.005 file - promoters50/1447543
atttttatt

SEQ ID NO: 172814 - DNA, 8 bp, Unknown
  misc_feature (1)..( 8): Result.005 file - promoters50/1447543
ttaagatt

SEQ ID NO: 172815 - DNA, 8 bp, Unknown
  misc_feature (1)..( 8): Result.005 file - promoters50/1447543
gtaaaatt

SEQ ID NO: 172816 - DNA, 8 bp, Unknown
  misc_feature (1)..( 8): Result.005 file - promoters50/1447543
gtaaaata

SEQ ID NO: 172817 - DNA, 7 bp, Unknown
  misc_feature (1)..( 7): Result.005 file - promoters50/1447543
tcataat

SEQ ID NO: 172818 - DNA, 7 bp, Unknown
  misc_feature (1)..( 7): Result.005 file - promoters50/1447543
tcataat

SEQ ID NO: 172819 - DNA, 7 bp, Unknown
  misc_feature (1)..( 7): Result.005 file - promoters50/1447543
tcagaat

SEQ ID NO: 172820 - DNA, 8 bp, Unknown
  misc_feature (1)..( 8): Result.005 file - promoters50/1447577
tcaaatat

SEQ ID NO: 172821 - DNA, 8 bp, Unknown
  misc_feature (1)..( 8): Result.005 file - promoters50/1447577
ccaattat

SEQ ID NO: 172822 - DNA, 8 bp, Unknown
  misc_feature (1)..( 8): Result.005 file - promoters50/1447577
tcatataa

SEQ ID NO: 172823 - DNA, 9 bp, Unknown
  misc_feature (1)..( 9): Result.005 file - promoters50/1447577
aataattat

SEQ ID NO: 172824 - DNA, 9 bp, Unknown
  misc_feature (1)..( 9): Result.005 file - promoters50/1447577
aataattaa

SEQ ID NO: 172825 - DNA, 9 bp, Unknown
  misc_feature (1)..( 9): Result.005 file - promoters50/1447577
taaaattat

SEQ ID NO: 172826 - DNA, 8 bp, Unknown
  misc_feature (1)..( 8): Result.005 file - promoters50/1447577
actaataa

SEQ ID NO: 172827 - DNA, 7 bp, Unknown
  misc_feature (1)..( 7): Result.005 file - promoters50/1447577
ataataa

SEQ ID NO: 172828 - DNA, 8 bp, Unknown
  misc_feature (1)..( 8): Result.005 file - promoters50/1447577
aattatac

SEQ ID NO: 172829 - DNA, 7 bp, Unknown
  misc_feature (1)..( 7): Result.005 file - promoters50/1447577
aatgata

SEQ ID NO: 172830 - DNA, 7 bp, Unknown
  misc_feature (1)..( 7): Result.005 file - promoters50/1447577
aataata

SEQ ID NO: 172831 - DNA, 7 bp, Unknown
  misc_feature (1)..( 7): Result.005 file - promoters50/1447577
aattata

SEQ ID NO: 172832 - DNA, 8 bp, Unknown
  misc_feature (1)..( 8): Result.005 file - promoters50/1447577
tatagtgg

SEQ ID NO: 172833 - DNA, 8 bp, Unknown
  misc_feature (1)..( 8): Result.005 file - promoters50/1447577
gataatgg

SEQ ID NO: 172834 - DNA, 8 bp, Unknown
  misc_feature (1)..( 8): Result.005 file - promoters50/1447577
aatagtaa

SEQ ID NO: 172835 - DNA, 7 bp, Unknown
  misc_feature (1)..( 7): Result.005 file - promoters50/1447591
acaaaag

SEQ ID NO: 172836 - DNA, 7 bp, Unknown
  misc_feature (1)..( 7): Result.005 file - promoters50/1447591
acaaaaa

SEQ ID NO: 172837 - DNA, 7 bp, Unknown
  misc_feature (1)..( 7): Result.005 file - promoters50/1447591
tcaaaaa

SEQ ID NO: 172838 - DNA, 11 bp, Unknown
  misc_feature (1)..( 11): Result.005 file - promoters50/1447591
acagacaaaac

SEQ ID NO: 172839 - DNA, 11 bp, Unknown
  misc_feature (1)..( 11): Result.005 file - promoters50/1447591
aaagacagaac

SEQ ID NO: 172840 - DNA, 11 bp, Unknown
  misc_feature (1)..( 11): Result.005 file - promoters50/1447591
acaaacaaaaa

SEQ ID NO: 172841 - DNA, 7 bp, Unknown
  misc_feature (1)..( 7): Result.005 file - promoters50/1447591
tttggat

SEQ ID NO: 172842 - DNA, 7 bp, Unknown
  misc_feature (1)..( 7): Result.005 file - promoters50/1447591
ttttgat

SEQ ID NO: 172843 - DNA, 7 bp, Unknown
  misc_feature (1)..( 7): Result.005 file - promoters50/1447591
ttttatt

SEQ ID NO: 172844 - DNA, 10 bp, Unknown
  misc_feature (1)..( 10): Result.005 file - promoters50/1447646
aagataaaga

SEQ ID NO: 172845 - DNA, 10 bp, Unknown
  misc_feature (1)..( 10): Result.005 file - promoters50/1447646
gggataaaga

SEQ ID NO: 172846 - DNA, 10 bp, Unknown
  misc_feature (1)..( 10): Result.005 file - promoters50/1447646
tggataaaat

SEQ ID NO: 172847 - DNA, 10 bp, Unknown
  misc_feature (1)..( 10): Result.005 file - promoters50/1447646
cagaaaaaga

SEQ ID NO: 172848 - DNA, 10 bp, Unknown
  misc_feature (1)..( 10): Result.005 file - promoters50/1447646
aaggtaaacc

SEQ ID NO: 172849 - DNA, 10 bp, Unknown
  misc_feature (1)..( 10): Result.005 file - promoters50/1447646
cttgtagacc

SEQ ID NO: 172850 - DNA, 10 bp, Unknown
  misc_feature (1)..( 10): Result.005 file - promoters50/1447646
agaagttgaa

SEQ ID NO: 172851 - DNA, 10 bp, Unknown
  misc_feature (1)..( 10): Result.005 file - promoters50/1447646
tgaagttgac

SEQ ID NO: 172852 - DNA, 10 bp, Unknown
  misc_feature (1)..( 10): Result.005 file - promoters50/1447646
tgaatttgta

SEQ ID NO: 172853 - DNA, 10 bp, Unknown
  misc_feature (1)..( 10): Result.005 file - promoters50/1447646
gaaagatgaa

SEQ ID NO: 172854 - DNA, 10 bp, Unknown
  misc_feature (1)..( 10): Result.005 file - promoters50/1447646
acaagtagta

SEQ ID NO: 172855 - DNA, 10 bp, Unknown
  misc_feature (1)..( 10): Result.005 file - promoters50/1447646
tgaagaagaa

SEQ ID NO: 172856 - DNA, 10 bp, Unknown
  misc_feature (1)..( 10): Result.005 file - promoters50/1447646
ttaagaagct

SEQ ID NO: 172857 - DNA, 10 bp, Unknown
  misc_feature (1)..( 10): Result.005 file - promoters50/1447646
ttaagaaatg

SEQ ID NO: 172858 - DNA, 11 bp, Unknown
  misc_feature (1)..( 11): Result.005 file - promoters50/1447646
tgaagttgact

SEQ ID NO: 172859 - DNA, 11 bp, Unknown
  misc_feature (1)..( 11): Result.005 file - promoters50/1447646
gggagttcact

SEQ ID NO: 172860 - DNA, 11 bp, Unknown
  misc_feature (1)..( 11): Result.005 file - promoters50/1447646
tgaatttgtac

SEQ ID NO: 172861 - DNA, 11 bp, Unknown
  misc_feature (1)..( 11): Result.005 file - promoters50/1447646
gtgatttgcaa

SEQ ID NO: 172862 - DNA, 11 bp, Unknown
  misc_feature (1)..( 11): Result.005 file - promoters50/1447646
tgaatttaatc

SEQ ID NO: 172863 - DNA, 11 bp, Unknown
  misc_feature (1)..( 11): Result.005 file - promoters50/1447646
aagatttaaga

SEQ ID NO: 172864 - DNA, 10 bp, Unknown
  misc_feature (1)..( 10): Result.005 file - promoters50/1447646
gaaagaagtt

SEQ ID NO: 172865 - DNA, 10 bp, Unknown
  misc_feature (1)..( 10): Result.005 file - promoters50/1447646
tgaagaagaa

SEQ ID NO: 172866 - DNA, 10 bp, Unknown
  misc_feature (1)..( 10): Result.005 file - promoters50/1447646
aaaagaagac

SEQ ID NO: 172867 - DNA, 10 bp, Unknown
  misc_feature (1)..( 10): Result.005 file - promoters50/1447646
ttaagaagct

SEQ ID NO: 172868 - DNA, 10 bp, Unknown
  misc_feature (1)..( 10): Result.005 file - promoters50/1447646
gaaagaagtt

SEQ ID NO: 172869 - DNA, 10 bp, Unknown
  misc_feature (1)..( 10): Result.005 file - promoters50/1447646
gaaagatgaa

SEQ ID NO: 172870 - DNA, 10 bp, Unknown
  misc_feature (1)..( 10): Result.005 file - promoters50/1447646
ttaagaaatg

SEQ ID NO: 172871 - DNA, 9 bp, Unknown
  misc_feature (1)..( 9): Result.005 file - promoters50/1447646
attgatttc

SEQ ID NO: 172872 - DNA, 9 bp, Unknown
  misc_feature (1)..( 9): Result.005 file - promoters50/1447646
attgattta

SEQ ID NO: 172873 - DNA, 9 bp, Unknown
  misc_feature (1)..( 9): Result.005 file - promoters50/1447646
attaatttg

SEQ ID NO: 172874 - DNA, 9 bp, Unknown
  misc_feature (1)..( 9): Result.005 file - promoters50/1447646
tttgatttt

SEQ ID NO: 172875 - DNA, 9 bp, Unknown
  misc_feature (1)..( 9): Result.005 file - promoters50/1447646
attgatttc

SEQ ID NO: 172876 - DNA, 9 bp, Unknown
  misc_feature (1)..( 9): Result.005 file - promoters50/1447646
cttgttttt

SEQ ID NO: 172877 - DNA, 9 bp, Unknown
  misc_feature (1)..( 9): Result.005 file - promoters50/1447646
agggttttt

SEQ ID NO: 172878 - DNA, 9 bp, Unknown
  misc_feature (1)..( 9): Result.005 file - promoters50/1447646
ttttttttt

SEQ ID NO: 172879 - DNA, 9 bp, Unknown
  misc_feature (1)..( 9): Result.005 file - promoters50/1447646
tatttattt

SEQ ID NO: 172880 - DNA, 9 bp, Unknown
  misc_feature (1)..( 9): Result.005 file - promoters50/1447646
actttcttt

SEQ ID NO: 172881 - DNA, 9 bp, Unknown
  misc_feature (1)..( 9): Result.005 file - promoters50/1447646
tttttcttt

SEQ ID NO: 172882 - DNA, 9 bp, Unknown
  misc_feature (1)..( 9): Result.005 file - promoters50/1447646
gttttctag

SEQ ID NO: 172883 - DNA, 9 bp, Unknown
  misc_feature (1)..( 9): Result.005 file - promoters50/1447646
gctttctgc

SEQ ID NO: 172884 - DNA, 7 bp, Unknown
  misc_feature (1)..( 7): Result.005 file - promoters50/1447649
tgagtag

SEQ ID NO: 172885 - DNA, 7 bp, Unknown
  misc_feature (1)..( 7): Result.005 file - promoters50/1447649
tgagtac

SEQ ID NO: 172886 - DNA, 7 bp, Unknown
  misc_feature (1)..( 7): Result.005 file - promoters50/1447649
tgaatac

SEQ ID NO: 172887 - DNA, 9 bp, Unknown
  misc_feature (1)..( 9): Result.005 file - promoters50/1447686
aatatatgt

SEQ ID NO: 172888 - DNA, 9 bp, Unknown
  misc_feature (1)..( 9): Result.005 file - promoters50/1447686
aatatctgt

SEQ ID NO: 172889 - DNA, 9 bp, Unknown
  misc_feature (1)..( 9): Result.005 file - promoters50/1447686
tatatatat

SEQ ID NO: 172890 - DNA, 9 bp, Unknown
  misc_feature (1)..( 9): Result.005 file - promoters50/1447686
aatctatat

SEQ ID NO: 172891 - DNA, 9 bp, Unknown
  misc_feature (1)..( 9): Result.005 file - promoters50/1447686
aatccatag

SEQ ID NO: 172892 - DNA, 9 bp, Unknown
  misc_feature (1)..( 9): Result.005 file - promoters50/1447686
aataaataa

SEQ ID NO: 172893 - DNA, 10 bp, Unknown
  misc_feature (1)..( 10): Result.005 file - promoters50/1447686
ggaattaaga

SEQ ID NO: 172894 - DNA, 10 bp, Unknown
  misc_feature (1)..( 10): Result.005 file - promoters50/1447686
caaattaagt

SEQ ID NO: 172895 - DNA, 10 bp, Unknown
  misc_feature (1)..( 10): Result.005 file - promoters50/1447686
ttctttaaga

SEQ ID NO: 172896 - DNA, 10 bp, Unknown
  misc_feature (1)..( 10): Result.005 file - promoters50/1447686
caatttaaca

SEQ ID NO: 172897 - DNA, 10 bp, Unknown
  misc_feature (1)..( 10): Result.005 file - promoters50/1447686
gaaagtaaat

SEQ ID NO: 172898 - DNA, 10 bp, Unknown
  misc_feature (1)..( 10): Result.005 file - promoters50/1447686
gtctttcaca

SEQ ID NO: 172899 - DNA, 12 bp, Unknown
  misc_feature (1)..( 12): Result.005 file - promoters50/1447686
ttttactcaaca

SEQ ID NO: 172900 - DNA, 12 bp, Unknown
  misc_feature (1)..( 12): Result.005 file - promoters50/1447686
atttactaaacc

SEQ ID NO: 172901 - DNA, 13 bp, Unknown
  misc_feature (1)..( 13): Result.005 file - promoters50/1447686
ttttaacttaaat

SEQ ID NO: 172902 - DNA, 13 bp, Unknown
  misc_feature (1)..( 13): Result.005 file - promoters50/1447686
gtttaacctcgtt

SEQ ID NO: 172903 - DNA, 14 bp, Unknown
  misc_feature (1)..( 14): Result.005 file - promoters50/1447686
tctataacccaaaa

SEQ ID NO: 172904 - DNA, 14 bp, Unknown
  misc_feature (1)..( 14): Result.005 file - promoters50/1447686
attataaaaaaagt

SEQ ID NO: 172905 - DNA, 8 bp, Unknown
  misc_feature (1)..( 8): Result.005 file - promoters50/1447943
ttttgatc

SEQ ID NO: 172906 - DNA, 8 bp, Unknown
  misc_feature (1)..( 8): Result.005 file - promoters50/1447943
tttttatc

SEQ ID NO: 172907 - DNA, 8 bp, Unknown
  misc_feature (1)..( 8): Result.005 file - promoters50/1447943
ttttaatc

SEQ ID NO: 172908 - DNA, 14 bp, Unknown
  misc_feature (1)..( 14): Result.005 file - promoters50/1447953
ctacttttgattag

SEQ ID NO: 172909 - DNA, 14 bp, Unknown
  misc_feature (1)..( 14): Result.005 file - promoters50/1447953
aatattttaattca

SEQ ID NO: 172910 - DNA, 14 bp, Unknown
  misc_feature (1)..( 14): Result.005 file - promoters50/1447953
aaaaagttggttat

SEQ ID NO: 172911 - DNA, 14 bp, Unknown
  misc_feature (1)..( 14): Result.005 file - promoters50/1447953
ctacatttgtattt

SEQ ID NO: 172912 - DNA, 14 bp, Unknown
  misc_feature (1)..( 14): Result.005 file - promoters50/1447953
aaaatataaatcat

SEQ ID NO: 172913 - DNA, 14 bp, Unknown
  misc_feature (1)..( 14): Result.005 file - promoters50/1447953
ctgattttacacca

SEQ ID NO: 172914 - DNA, 14 bp, Unknown
  misc_feature (1)..( 14): Result.005 file - promoters50/1447953
ctggttttggttta

SEQ ID NO: 172915 - DNA, 13 bp, Unknown
  misc_feature (1)..( 13): Result.005 file - promoters50/1447953
atatctttataag

SEQ ID NO: 172916 - DNA, 13 bp, Unknown
  misc_feature (1)..( 13): Result.005 file - promoters50/1447953
caatctttataca

SEQ ID NO: 172917 - DNA, 13 bp, Unknown
  misc_feature (1)..( 13): Result.005 file - promoters50/1447953
ttataattatgca

SEQ ID NO: 172918 - DNA, 13 bp, Unknown
  misc_feature (1)..( 13): Result.005 file - promoters50/1447953
acaactttaaaag

SEQ ID NO: 172919 - DNA, 13 bp, Unknown
  misc_feature (1)..( 13): Result.005 file - promoters50/1447953
aaggttttatatg

SEQ ID NO: 172920 - DNA, 13 bp, Unknown
  misc_feature (1)..( 13): Result.005 file - promoters50/1447953
atattattatttc

SEQ ID NO: 172921 - DNA, 14 bp, Unknown
  misc_feature (1)..( 14): Result.005 file - promoters50/1447953
ctttataagtataa

SEQ ID NO: 172922 - DNA, 14 bp, Unknown
  misc_feature (1)..( 14): Result.005 file - promoters50/1447953
taatataagtaaca

SEQ ID NO: 172923 - DNA, 14 bp, Unknown
  misc_feature (1)..( 14): Result.005 file - promoters50/1447953
acttataattatgc

SEQ ID NO: 172924 - DNA, 14 bp, Unknown
  misc_feature (1)..( 14): Result.005 file - promoters50/1447953
ctttaaaagcctta

SEQ ID NO: 172925 - DNA, 14 bp, Unknown
  misc_feature (1)..( 14): Result.005 file - promoters50/1447953
aagatgaagtcaca

SEQ ID NO: 172926 - DNA, 14 bp, Unknown
  misc_feature (1)..( 14): Result.005 file - promoters50/1447953
ttttatatgtaaac

SEQ ID NO: 172927 - DNA, 14 bp, Unknown
  misc_feature (1)..( 14): Result.005 file - promoters50/1447953
tgatattattattt

SEQ ID NO: 172928 - DNA, 11 bp, Unknown
  misc_feature (1)..( 11): Result.005 file - promoters50/1447972
atctgctaatg

SEQ ID NO: 172929 - DNA, 11 bp, Unknown
  misc_feature (1)..( 11): Result.005 file - promoters50/1447972
ttttgctaaaa

SEQ ID NO: 172930 - DNA, 11 bp, Unknown
  misc_feature (1)..( 11): Result.005 file - promoters50/1447972
tttttctaaaa

SEQ ID NO: 172931 - DNA, 9 bp, Unknown
  misc_feature (1)..( 9): Result.005 file - promoters50/1447972
atttctctt

SEQ ID NO: 172932 - DNA, 9 bp, Unknown
  misc_feature (1)..( 9): Result.005 file - promoters50/1447972
atttctgcc

SEQ ID NO: 172933 - DNA, 9 bp, Unknown
  misc_feature (1)..( 9): Result.005 file - promoters50/1447972
atttcactt

SEQ ID NO: 172934 - DNA, 7 bp, Unknown
  misc_feature (1)..( 7): Result.005 file - promoters50/1447972
tttaaca

SEQ ID NO: 172935 - DNA, 7 bp, Unknown
  misc_feature (1)..( 7): Result.005 file - promoters50/1447972
attaaca

SEQ ID NO: 172936 - DNA, 7 bp, Unknown
  misc_feature (1)..( 7): Result.005 file - promoters50/1447972
tttcaca

SEQ ID NO: 172937 - DNA, 10 bp, Unknown
  misc_feature (1)..( 10): Result.005 file - promoters50/1447972
ccggatcgtt

SEQ ID NO: 172938 - DNA, 10 bp, Unknown
  misc_feature (1)..( 10): Result.005 file - promoters50/1447972
ccggttcggt

SEQ ID NO: 172939 - DNA, 10 bp, Unknown
  misc_feature (1)..( 10): Result.005 file - promoters50/1447972
tgcgttcggt

SEQ ID NO: 172940 - DNA, 9 bp, Unknown
  misc_feature (1)..( 9): Result.005 file - promoters50/1448009
caaaattga

SEQ ID NO: 172941 - DNA, 9 bp, Unknown
  misc_feature (1)..( 9): Result.005 file - promoters50/1448009
caacattat

SEQ ID NO: 172942 - DNA, 9 bp, Unknown
  misc_feature (1)..( 9): Result.005 file - promoters50/1448009
ggaaattga

SEQ ID NO: 172943 - DNA, 11 bp, Unknown
  misc_feature (1)..( 11): Result.005 file - promoters50/1448009
aattaagaagg

SEQ ID NO: 172944 - DNA, 11 bp, Unknown
  misc_feature (1)..( 11): Result.005 file - promoters50/1448009
aattatgaaaa

SEQ ID NO: 172945 - DNA, 12 bp, Unknown
  misc_feature (1)..( 12): Result.005 file - promoters50/1448009
caaaatggaaac

SEQ ID NO: 172946 - DNA, 12 bp, Unknown
  misc_feature (1)..( 12): Result.005 file - promoters50/1448012
tttgtttttgat

SEQ ID NO: 172947 - DNA, 12 bp, Unknown
  misc_feature (1)..( 12): Result.005 file - promoters50/1448012
tatgtctttgtt

SEQ ID NO: 172948 - DNA, 12 bp, Unknown
  misc_feature (1)..( 12): Result.005 file - promoters50/1448012
tttgttgttggg

SEQ ID NO: 172949 - DNA, 12 bp, Unknown
  misc_feature (1)..( 12): Result.005 file - promoters50/1448012
gatatcttcgtt

SEQ ID NO: 172950 - DNA, 13 bp, Unknown
  misc_feature (1)..( 13): Result.005 file - promoters50/1448012
ctagtttattgtt

SEQ ID NO: 172951 - DNA, 13 bp, Unknown
  misc_feature (1)..( 13): Result.005 file - promoters50/1448012
caaatttttactt

SEQ ID NO: 172952 - DNA, 12 bp, Unknown
  misc_feature (1)..( 12): Result.005 file - promoters50/1448012
attttgtttttg

SEQ ID NO: 172953 - DNA, 12 bp, Unknown
  misc_feature (1)..( 12): Result.005 file - promoters50/1448012
tctttgttagtt

SEQ ID NO: 172954 - DNA, 12 bp, Unknown
  misc_feature (1)..( 12): Result.005 file - promoters50/1448012
ggtttgttgttg

SEQ ID NO: 172955 - DNA, 12 bp, Unknown
  misc_feature (1)..( 12): Result.005 file - promoters50/1448012
tcttcgttttcc

SEQ ID NO: 172956 - DNA, 12 bp, Unknown
  misc_feature (1)..( 12): Result.005 file - promoters50/1448012
ttattgttacaa

SEQ ID NO: 172957 - DNA, 12 bp, Unknown
  misc_feature (1)..( 12): Result.005 file - promoters50/1448012
aatttttacttt

SEQ ID NO: 172958 - DNA, 16 bp, Unknown
  misc_feature (1)..( 16): Result.005 file - promoters50/1448022
ttaagcaaaaaaaatt

SEQ ID NO: 172959 - DNA, 16 bp, Unknown
  misc_feature (1)..( 16): Result.005 file - promoters50/1448022
ccttccaaaaatgaga

SEQ ID NO: 172960 - DNA, 16 bp, Unknown
  misc_feature (1)..( 16): Result.005 file - promoters50/1448022
attaagaaaataaata

SEQ ID NO: 172961 - DNA, 16 bp, Unknown
  misc_feature (1)..( 16): Result.005 file - promoters50/1448022
attaataaaaaaatat

SEQ ID NO: 172962 - DNA, 16 bp, Unknown
  misc_feature (1)..( 16): Result.005 file - promoters50/1448022
tccatgtaaataaaat

SEQ ID NO: 172963 - DNA, 16 bp, Unknown
  misc_feature (1)..( 16): Result.005 file - promoters50/1448022
tatatgaaaacaaaat

SEQ ID NO: 172964 - DNA, 11 bp, Unknown
  misc_feature (1)..( 11): Result.005 file - promoters50/1448022
tactatataca

SEQ ID NO: 172965 - DNA, 11 bp, Unknown
  misc_feature (1)..( 11): Result.005 file - promoters50/1448022
aactctattgt

SEQ ID NO: 172966 - DNA, 11 bp, Unknown
  misc_feature (1)..( 11): Result.005 file - promoters50/1448022
tactattactt

SEQ ID NO: 172967 - DNA, 11 bp, Unknown
  misc_feature (1)..( 11): Result.005 file - promoters50/1448022
gtgtcttttgt

SEQ ID NO: 172968 - DNA, 11 bp, Unknown
  misc_feature (1)..( 11): Result.005 file - promoters50/1448022
tatgattttgt

SEQ ID NO: 172969 - DNA, 11 bp, Unknown
  misc_feature (1)..( 11): Result.005 file - promoters50/1448022
aatccttttgt

SEQ ID NO: 172970 - DNA, 10 bp, Unknown
  misc_feature (1)..( 10): Result.005 file - promoters50/1448022
aatttatata

SEQ ID NO: 172971 - DNA, 10 bp, Unknown
  misc_feature (1)..( 10): Result.005 file - promoters50/1448022
tacttatatt

SEQ ID NO: 172972 - DNA, 10 bp, Unknown
  misc_feature (1)..( 10): Result.005 file - promoters50/1448022
attttttatc

SEQ ID NO: 172973 - DNA, 10 bp, Unknown
  misc_feature (1)..( 10): Result.005 file - promoters50/1448022
tacttttatt

SEQ ID NO: 172974 - DNA, 11 bp, Unknown
  misc_feature (1)..( 11): Result.005 file - promoters50/1448022
agttttgtata

SEQ ID NO: 172975 - DNA, 11 bp, Unknown
  misc_feature (1)..( 11): Result.005 file - promoters50/1448022
tatttgatttc

SEQ ID NO: 172976 - DNA, 9 bp, Unknown
  misc_feature (1)..( 9): Result.005 file - promoters50/1448022
aatatgtaa

SEQ ID NO: 172977 - DNA, 9 bp, Unknown
  misc_feature (1)..( 9): Result.005 file - promoters50/1448022
aatttgttg

SEQ ID NO: 172978 - DNA, 9 bp, Unknown
  misc_feature (1)..( 9): Result.005 file - promoters50/1448022
tatatataa

SEQ ID NO: 172979 - DNA, 9 bp, Unknown
  misc_feature (1)..( 9): Result.005 file - promoters50/1448022
aatgtgtgc

SEQ ID NO: 172980 - DNA, 9 bp, Unknown
  misc_feature (1)..( 9): Result.005 file - promoters50/1448022
tatttgtta

SEQ ID NO: 172981 - DNA, 9 bp, Unknown
  misc_feature (1)..( 9): Result.005 file - promoters50/1448022
gatacaaaa

SEQ ID NO: 172982 - DNA, 13 bp, Unknown
  misc_feature (1)..( 13): Result.005 file - promoters50/1448022
ttgtatattaaaa

SEQ ID NO: 172983 - DNA, 13 bp, Unknown
  misc_feature (1)..( 13): Result.005 file - promoters50/1448022
atgtatatgtcat

SEQ ID NO: 172984 - DNA, 13 bp, Unknown
  misc_feature (1)..( 13): Result.005 file - promoters50/1448022
tcttatatgaaaa

SEQ ID NO: 172985 - DNA, 13 bp, Unknown
  misc_feature (1)..( 13): Result.005 file - promoters50/1448022
gcgtataaaaaag

SEQ ID NO: 172986 - DNA, 13 bp, Unknown
  misc_feature (1)..( 13): Result.005 file - promoters50/1448022
atgtaaataaaat

SEQ ID NO: 172987 - DNA, 13 bp, Unknown
  misc_feature (1)..( 13): Result.005 file - promoters50/1448022
tgattaataaaaa

SEQ ID NO: 172988 - DNA, 22 bp, Unknown
  misc_feature (1)..( 22): Result.005 file - promoters50/1448022
aaaaaatcaaaatcaaaattaa

SEQ ID NO: 172989 - DNA, 22 bp, Unknown
  misc_feature (1)..( 22): Result.005 file - promoters50/1448022
tgtcatttaaaaccaagcccaa

SEQ ID NO: 172990 - DNA, 22 bp, Unknown
  misc_feature (1)..( 22): Result.005 file - promoters50/1448022
cttatatgaaaacaaaattaaa

SEQ ID NO: 172991 - DNA, 22 bp, Unknown
  misc_feature (1)..( 22): Result.005 file - promoters50/1448022
tgagatgattaataaaaaaata

SEQ ID NO: 172992 - DNA, 22 bp, Unknown
  misc_feature (1)..( 22): Result.005 file - promoters50/1448022
tgattaagaaaataaataatca

SEQ ID NO: 172993 - DNA, 22 bp, Unknown
  misc_feature (1)..( 22): Result.005 file - promoters50/1448022
aaaaaaagaaaaaaaattccat

SEQ ID NO: 172994 - DNA, 15 bp, Unknown
  misc_feature (1)..( 15): Result.005 file - promoters50/1448022
ttaagcaaaaaaaat

SEQ ID NO: 172995 - DNA, 15 bp, Unknown
  misc_feature (1)..( 15): Result.005 file - promoters50/1448022
ttaagttaaataaat

SEQ ID NO: 172996 - DNA, 15 bp, Unknown
  misc_feature (1)..( 15): Result.005 file - promoters50/1448022
attaagaaaataaat

SEQ ID NO: 172997 - DNA, 15 bp, Unknown
  misc_feature (1)..( 15): Result.005 file - promoters50/1448022
gattaataaaaaaat

SEQ ID NO: 172998 - DNA, 15 bp, Unknown
  misc_feature (1)..( 15): Result.005 file - promoters50/1448022
cttttttacatatta

SEQ ID NO: 172999 - DNA, 15 bp, Unknown
  misc_feature (1)..( 15): Result.005 file - promoters50/1448022
tccatgtaaataaaa

SEQ ID NO: 173000 - DNA, 12 bp, Unknown
  misc_feature (1)..( 12): Result.005 file - promoters50/1448022
aaaagaaagttg

SEQ ID NO: 173001 - DNA, 12 bp, Unknown
  misc_feature (1)..( 12): Result.005 file - promoters50/1448022
aaaacaaaccac

SEQ ID NO: 173002 - DNA, 12 bp, Unknown
  misc_feature (1)..( 12): Result.005 file - promoters50/1448022
caaagaaatgaa

SEQ ID NO: 173003 - DNA, 12 bp, Unknown
  misc_feature (1)..( 12): Result.005 file - promoters50/1448022
gaaataaattaa

SEQ ID NO: 173004 - DNA, 12 bp, Unknown
  misc_feature (1)..( 12): Result.005 file - promoters50/1448022
gagagatgagag

SEQ ID NO: 173005 - DNA, 12 bp, Unknown
  misc_feature (1)..( 12): Result.005 file - promoters50/1448022
tcaataagttaa

SEQ ID NO: 173006 - DNA, 11 bp, Unknown
  misc_feature (1)..( 11): Result.005 file - promoters50/1448022
ctatttgtaat

SEQ ID NO: 173007 - DNA, 11 bp, Unknown
  misc_feature (1)..( 11): Result.005 file - promoters50/1448022
tgttttctaac

SEQ ID NO: 173008 - DNA, 11 bp, Unknown
  misc_feature (1)..( 11): Result.005 file - promoters50/1448022
aaaattgtaat

SEQ ID NO: 173009 - DNA, 11 bp, Unknown
  misc_feature (1)..( 11): Result.005 file - promoters50/1448022
tcttttgtata

SEQ ID NO: 173010 - DNA, 11 bp, Unknown
  misc_feature (1)..( 11): Result.005 file - promoters50/1448022
aacattgtaaa

SEQ ID NO: 173011 - DNA, 11 bp, Unknown
  misc_feature (1)..( 11): Result.005 file - promoters50/1448022
tctattgtttt

SEQ ID NO: 173012 - DNA, 11 bp, Unknown
  misc_feature (1)..( 11): Result.005 file - promoters50/1448022
atattaaaaaa

SEQ ID NO: 173013 - DNA, 11 bp, Unknown
  misc_feature (1)..( 11): Result.005 file - promoters50/1448022
cgtataaaaaa

SEQ ID NO: 173014 - DNA, 11 bp, Unknown
  misc_feature (1)..( 11): Result.005 file - promoters50/1448022
aaaagaaaaaa

SEQ ID NO: 173015 - DNA, 11 bp, Unknown
  misc_feature (1)..( 11): Result.005 file - promoters50/1448022
tatatgaaaac

SEQ ID NO: 173016 - DNA, 11 bp, Unknown
  misc_feature (1)..( 11): Result.005 file - promoters50/1448022
agactaaaaaa

SEQ ID NO: 173017 - DNA, 12 bp, Unknown
  misc_feature (1)..( 12): Result.005 file - promoters50/1448022
caatcgaagaaa

SEQ ID NO: 173018 - DNA, 14 bp, Unknown
  misc_feature (1)..( 14): Result.005 file - promoters50/1448022
ctattgttttgaat

SEQ ID NO: 173019 - DNA, 14 bp, Unknown
  misc_feature (1)..( 14): Result.005 file - promoters50/1448022
attttgttttctaa

SEQ ID NO: 173020 - DNA, 14 bp, Unknown
  misc_feature (1)..( 14): Result.005 file - promoters50/1448022
aaattatttttaat

SEQ ID NO: 173021 - DNA, 14 bp, Unknown
  misc_feature (1)..( 14): Result.005 file - promoters50/1448022
cttttgttgttact

SEQ ID NO: 173022 - DNA, 14 bp, Unknown
  misc_feature (1)..( 14): Result.005 file - promoters50/1448022
tgtttgatgtttca

SEQ ID NO: 173023 - DNA, 14 bp, Unknown
  misc_feature (1)..( 14): Result.005 file - promoters50/1448022
cttttgtatatttt

SEQ ID NO: 173024 - DNA, 11 bp, Unknown
  misc_feature (1)..( 11): Result.005 file - promoters50/1448054
atttttctact

SEQ ID NO: 173025 - DNA, 11 bp, Unknown
  misc_feature (1)..( 11): Result.005 file - promoters50/1448054
ttttttcttgg

SEQ ID NO: 173026 - DNA, 12 bp, Unknown
  misc_feature (1)..( 12): Result.005 file - promoters50/1448054
ggattttcttcg

SEQ ID NO: 173027 - DNA, 11 bp, Unknown
  misc_feature (1)..( 11): Result.005 file - promoters50/1448054
gtttttcttaa

SEQ ID NO: 173028 - DNA, 12 bp, Unknown
  misc_feature (1)..( 12): Result.005 file - promoters50/1448054
tttatttcttgg

SEQ ID NO: 173029 - DNA, 12 bp, Unknown
  misc_feature (1)..( 12): Result.005 file - promoters50/1448054
tcatttgattga

SEQ ID NO: 173030 - DNA, 16 bp, Unknown
  misc_feature (1)..( 16): Result.005 file - promoters50/1448054
tacattttttggctct

SEQ ID NO: 173031 - DNA, 16 bp, Unknown
  misc_feature (1)..( 16): Result.005 file - promoters50/1448054
tttatttcttggttca

SEQ ID NO: 173032 - DNA, 16 bp, Unknown
  misc_feature (1)..( 16): Result.005 file - promoters50/1448054
tttttttcttggaatt

SEQ ID NO: 173033 - DNA, 16 bp, Unknown
  misc_feature (1)..( 16): Result.005 file - promoters50/1448054
cttgtttttcttaaat

SEQ ID NO: 173034 - DNA, 16 bp, Unknown
  misc_feature (1)..( 16): Result.005 file - promoters50/1448054
aatatatcttgattca

SEQ ID NO: 173035 - DNA, 16 bp, Unknown
  misc_feature (1)..( 16): Result.005 file - promoters50/1448054
gaactatcttctcatt

SEQ ID NO: 173036 - DNA, 16 bp, Unknown
  misc_feature (1)..( 16): Result.005 file - promoters50/1448054
gtcatagcttagctcc

SEQ ID NO: 173037 - DNA, 16 bp, Unknown
  misc_feature (1)..( 16): Result.005 file - promoters50/1448054
aagcaaaaaaatcaat

SEQ ID NO: 173038 - DNA, 16 bp, Unknown
  misc_feature (1)..( 16): Result.005 file - promoters50/1448054
tttgaaaaaaatggtt

SEQ ID NO: 173039 - DNA, 16 bp, Unknown
  misc_feature (1)..( 16): Result.005 file - promoters50/1448054
agagaagaaaatgaaa

SEQ ID NO: 173040 - DNA, 16 bp, Unknown
  misc_feature (1)..( 16): Result.005 file - promoters50/1448054
attgataaattaagct

SEQ ID NO: 173041 - DNA, 16 bp, Unknown
  misc_feature (1)..( 16): Result.005 file - promoters50/1448054
gtaatgtttaatcgat

SEQ ID NO: 173042 - DNA, 16 bp, Unknown
  misc_feature (1)..( 16): Result.005 file - promoters50/1448054
attgttaatcaaatgt

SEQ ID NO: 173043 - DNA, 13 bp, Unknown
  misc_feature (1)..( 13): Result.005 file - promoters50/1448078
caaactttattaa

SEQ ID NO: 173044 - DNA, 13 bp, Unknown
  misc_feature (1)..( 13): Result.005 file - promoters50/1448078
ttcactttatacc

SEQ ID NO: 173045 - DNA, 13 bp, Unknown
  misc_feature (1)..( 13): Result.005 file - promoters50/1448078
tgttgtttattaa

SEQ ID NO: 173046 - DNA, 13 bp, Unknown
  misc_feature (1)..( 13): Result.005 file - promoters50/1448078
aaaactttttata

SEQ ID NO: 173047 - DNA, 13 bp, Unknown
  misc_feature (1)..( 13): Result.005 file - promoters50/1448078
caaacattaacca

SEQ ID NO: 173048 - DNA, 13 bp, Unknown
  misc_feature (1)..( 13): Result.005 file - promoters50/1448078
caagcataaaaag

SEQ ID NO: 173049 - DNA, 14 bp, Unknown
  misc_feature (1)..( 14): Result.005 file - promoters50/1448078
tttccctttaattt

SEQ ID NO: 173050 - DNA, 14 bp, Unknown
  misc_feature (1)..( 14): Result.005 file - promoters50/1448078
ataaactttaaata

SEQ ID NO: 173051 - DNA, 14 bp, Unknown
  misc_feature (1)..( 14): Result.005 file - promoters50/1448078
atatactgtaattg

SEQ ID NO: 173052 - DNA, 14 bp, Unknown
  misc_feature (1)..( 14): Result.005 file - promoters50/1448078
aggttatgtatttg

SEQ ID NO: 173053 - DNA, 14 bp, Unknown
  misc_feature (1)..( 14): Result.005 file - promoters50/1448078
aagagttttaaaat

SEQ ID NO: 173054 - DNA, 14 bp, Unknown
  misc_feature (1)..( 14): Result.005 file - promoters50/1448078
cataacattataac

SEQ ID NO: 173055 - DNA, 12 bp, Unknown
  misc_feature (1)..( 12): Result.005 file - promoters50/1448078
tatagaattatt

SEQ ID NO: 173056 - DNA, 12 bp, Unknown
  misc_feature (1)..( 12): Result.005 file - promoters50/1448078
tataaaataaaa

SEQ ID NO: 173057 - DNA, 12 bp, Unknown
  misc_feature (1)..( 12): Result.005 file - promoters50/1448078
cataaaatcatt

SEQ ID NO: 173058 - DNA, 12 bp, Unknown
  misc_feature (1)..( 12): Result.005 file - promoters50/1448078
attagaatcgtg

SEQ ID NO: 173059 - DNA, 12 bp, Unknown
  misc_feature (1)..( 12): Result.005 file - promoters50/1448078
caaaaaataaag

SEQ ID NO: 173060 - DNA, 12 bp, Unknown
  misc_feature (1)..( 12): Result.005 file - promoters50/1448078
ttaaaaatagtt

SEQ ID NO: 173061 - DNA, 8 bp, Unknown
  misc_feature (1)..( 8): Result.005 file - promoters50/1448078
taaaaatg

SEQ ID NO: 173062 - DNA, 8 bp, Unknown
  misc_feature (1)..( 8): Result.005 file - promoters50/1448078
gaaaaata

SEQ ID NO: 173063 - DNA, 8 bp, Unknown
  misc_feature (1)..( 8): Result.005 file - promoters50/1448078
taaaaaat

SEQ ID NO: 173064 - DNA, 8 bp, Unknown
  misc_feature (1)..( 8): Result.005 file - promoters50/1448078
aaaaaatt

SEQ ID NO: 173065 - DNA, 9 bp, Unknown
  misc_feature (1)..( 9): Result.005 file - promoters50/1448078
aaataaatg

SEQ ID NO: 173066 - DNA, 9 bp, Unknown
  misc_feature (1)..( 9): Result.005 file - promoters50/1448078
aacaaaatt

SEQ ID NO: 173067 - DNA, 9 bp, Unknown
  misc_feature (1)..( 9): Result.005 file - promoters50/1448101
ttttctaat

SEQ ID NO: 173068 - DNA, 9 bp, Unknown
  misc_feature (1)..( 9): Result.005 file - promoters50/1448101
ttttcttgc

SEQ ID NO: 173069 - DNA, 9 bp, Unknown
  misc_feature (1)..( 9): Result.005 file - promoters50/1448101
ttttctaat

SEQ ID NO: 173070 - DNA, 7 bp, Unknown
  misc_feature (1)..( 7): Result.005 file - promoters50/1448101
tttgttc

SEQ ID NO: 173071 - DNA, 7 bp, Unknown
  misc_feature (1)..( 7): Result.005 file - promoters50/1448101
tttattc

SEQ ID NO: 173072 - DNA, 7 bp, Unknown
  misc_feature (1)..( 7): Result.005 file - promoters50/1448101
ttttttc

SEQ ID NO: 173073 - DNA, 8 bp, Unknown
  misc_feature (1)..( 8): Result.005 file - promoters50/1448101
aatatata

SEQ ID NO: 173074 - DNA, 8 bp, Unknown
  misc_feature (1)..( 8): Result.005 file - promoters50/1448101
aatgtata

SEQ ID NO: 173075 - DNA, 8 bp, Unknown
  misc_feature (1)..( 8): Result.005 file - promoters50/1448101
aatttatt

SEQ ID NO: 173076 - DNA, 12 bp, Unknown
  misc_feature (1)..( 12): Result.005 file - promoters50/1448105
taaatatgatat

SEQ ID NO: 173077 - DNA, 12 bp, Unknown
  misc_feature (1)..( 12): Result.005 file - promoters50/1448105
caaagatgaggt

SEQ ID NO: 173078 - DNA, 12 bp, Unknown
  misc_feature (1)..( 12): Result.005 file - promoters50/1448105
taaataagtaaa

SEQ ID NO: 173079 - DNA, 12 bp, Unknown
  misc_feature (1)..( 12): Result.005 file - promoters50/1448105
cagggatcaggc

SEQ ID NO: 173080 - DNA, 12 bp, Unknown
  misc_feature (1)..( 12): Result.005 file - promoters50/1448105
ttgcgatgagac

SEQ ID NO: 173081 - DNA, 12 bp, Unknown
  misc_feature (1)..( 12): Result.005 file - promoters50/1448105
tttggattaata

SEQ ID NO: 173082 - DNA, 13 bp, Unknown
  misc_feature (1)..( 13): Result.005 file - promoters50/1448105
attctaattaata

SEQ ID NO: 173083 - DNA, 11 bp, Unknown
  misc_feature (1)..( 11): Result.005 file - promoters50/1448105
gattaatactt

SEQ ID NO: 173084 - DNA, 11 bp, Unknown
  misc_feature (1)..( 11): Result.005 file - promoters50/1448105
tataaatactt

SEQ ID NO: 173085 - DNA, 11 bp, Unknown
  misc_feature (1)..( 11): Result.005 file - promoters50/1448105
gattaatacat

SEQ ID NO: 173086 - DNA, 11 bp, Unknown
  misc_feature (1)..( 11): Result.005 file - promoters50/1448105
aattaatacaa

SEQ ID NO: 173087 - DNA, 11 bp, Unknown
  misc_feature (1)..( 11): Result.005 file - promoters50/1448105
cacaaattctt

SEQ ID NO: 173088 - DNA, 11 bp, Unknown
  misc_feature (1)..( 11): Result.005 file - promoters50/1448105
gataaataagt

SEQ ID NO: 173089 - DNA, 8 bp, Unknown
  misc_feature (1)..( 8): Result.005 file - promoters50/1448105
atttattg

SEQ ID NO: 173090 - DNA, 8 bp, Unknown
  misc_feature (1)..( 8): Result.005 file - promoters50/1448105
ttttatta

SEQ ID NO: 173091 - DNA, 8 bp, Unknown
  misc_feature (1)..( 8): Result.005 file - promoters50/1448105
ttttgtta

SEQ ID NO: 173092 - DNA, 8 bp, Unknown
  misc_feature (1)..( 8): Result.005 file - promoters50/1448105
ttttgttg

SEQ ID NO: 173093 - DNA, 8 bp, Unknown
  misc_feature (1)..( 8): Result.005 file - promoters50/1448105
atttttta

SEQ ID NO: 173094 - DNA, 8 bp, Unknown
  misc_feature (1)..( 8): Result.005 file - promoters50/1448105
ttttaacc

SEQ ID NO: 173095 - DNA, 9 bp, Unknown
  misc_feature (1)..( 9): Result.005 file - promoters50/1448135
tgatacaaa

SEQ ID NO: 173096 - DNA, 9 bp, Unknown
  misc_feature (1)..( 9): Result.005 file - promoters50/1448135
agatacagt

SEQ ID NO: 173097 - DNA, 9 bp, Unknown
  misc_feature (1)..( 9): Result.005 file - promoters50/1448135
tgaaacaga

SEQ ID NO: 173098 - DNA, 9 bp, Unknown
  misc_feature (1)..( 9): Result.005 file - promoters50/1448135
cgatccaga

SEQ ID NO: 173099 - DNA, 9 bp, Unknown
  misc_feature (1)..( 9): Result.005 file - promoters50/1448135
agagacatc

SEQ ID NO: 173100 - DNA, 9 bp, Unknown
  misc_feature (1)..( 9): Result.005 file - promoters50/1448135
agatccata

SEQ ID NO: 173101 - DNA, 9 bp, Unknown
  misc_feature (1)..( 9): Result.005 file - promoters50/1448135
tgagccatc

SEQ ID NO: 173102 - DNA, 10 bp, Unknown
  misc_feature (1)..( 10): Result.005 file - promoters50/1448135
aaaaaaattc

SEQ ID NO: 173103 - DNA, 10 bp, Unknown
  misc_feature (1)..( 10): Result.005 file - promoters50/1448135
agaaaatttc

SEQ ID NO: 173104 - DNA, 11 bp, Unknown
  misc_feature (1)..( 11): Result.005 file - promoters50/1448135
aaaacaaatag

SEQ ID NO: 173105 - DNA, 11 bp, Unknown
  misc_feature (1)..( 11): Result.005 file - promoters50/1448135
gaagaacattt

SEQ ID NO: 173106 - DNA, 11 bp, Unknown
  misc_feature (1)..( 11): Result.005 file - promoters50/1448135
taaaaacagtg

SEQ ID NO: 173107 - DNA, 11 bp, Unknown
  misc_feature (1)..( 11): Result.005 file - promoters50/1448135
gaagaatatca

SEQ ID NO: 173108 - DNA, 13 bp, Unknown
  misc_feature (1)..( 13): Result.005 file - promoters50/1448135
aagaagaaaaaaa

SEQ ID NO: 173109 - DNA, 13 bp, Unknown
  misc_feature (1)..( 13): Result.005 file - promoters50/1448135
tcgaagaacattt

SEQ ID NO: 173110 - DNA, 13 bp, Unknown
  misc_feature (1)..( 13): Result.005 file - promoters50/1448135
aagaagaatatca

SEQ ID NO: 173111 - DNA, 13 bp, Unknown
  misc_feature (1)..( 13): Result.005 file - promoters50/1448135
taaaagaaaattt

SEQ ID NO: 173112 - DNA, 13 bp, Unknown
  misc_feature (1)..( 13): Result.005 file - promoters50/1448135
gaaaacaaataga

SEQ ID NO: 173113 - DNA, 13 bp, Unknown
  misc_feature (1)..( 13): Result.005 file - promoters50/1448135
aaaaacagtgatc

SEQ ID NO: 173114 - DNA, 9 bp, Unknown
  misc_feature (1)..( 9): Result.005 file - promoters50/1448197
atgaagacg

SEQ ID NO: 173115 - DNA, 9 bp, Unknown
  misc_feature (1)..( 9): Result.005 file - promoters50/1448197
atgaagaat

SEQ ID NO: 173116 - DNA, 9 bp, Unknown
  misc_feature (1)..( 9): Result.005 file - promoters50/1448197
tagaacaat

SEQ ID NO: 173117 - DNA, 8 bp, Unknown
  misc_feature (1)..( 8): Result.005 file - promoters50/1448197
tttttttt

SEQ ID NO: 173118 - DNA, 8 bp, Unknown
  misc_feature (1)..( 8): Result.005 file - promoters50/1448197
tttgtttt

SEQ ID NO: 173119 - DNA, 8 bp, Unknown
  misc_feature (1)..( 8): Result.005 file - promoters50/1448197
ttttttta

SEQ ID NO: 173120 - DNA, 15 bp, Unknown
  misc_feature (1)..( 15): Result.005 file - promoters50/1448197
tctcaattgtatcaa

SEQ ID NO: 173121 - DNA, 15 bp, Unknown
  misc_feature (1)..( 15): Result.005 file - promoters50/1448197
actttattttattac

SEQ ID NO: 173122 - DNA, 15 bp, Unknown
  misc_feature (1)..( 15): Result.005 file - promoters50/1448197
tttttattttatttt

SEQ ID NO: 173123 - DNA, 13 bp, Unknown
  misc_feature (1)..( 13): Result.005 file - promoters50/1448251
gacataaaaaaaa

SEQ ID NO: 173124 - DNA, 13 bp, Unknown
  misc_feature (1)..( 13): Result.005 file - promoters50/1448251
tgattaaagaaac

SEQ ID NO: 173125 - DNA, 13 bp, Unknown
  misc_feature (1)..( 13): Result.005 file - promoters50/1448251
acattaaattaaa

SEQ ID NO: 173126 - DNA, 13 bp, Unknown
  misc_feature (1)..( 13): Result.005 file - promoters50/1448251
gattgaaaaaaaa

SEQ ID NO: 173127 - DNA, 13 bp, Unknown
  misc_feature (1)..( 13): Result.005 file - promoters50/1448251
ataaaccagaaac

SEQ ID NO: 173128 - DNA, 13 bp, Unknown
  misc_feature (1)..( 13): Result.005 file - promoters50/1448251
acattaaccaaat

SEQ ID NO: 173129 - DNA, 14 bp, Unknown
  misc_feature (1)..( 14): Result.005 file - promoters50/1448251
aaaataaaaataaa

SEQ ID NO: 173130 - DNA, 14 bp, Unknown
  misc_feature (1)..( 14): Result.005 file - promoters50/1448251
gaaaaaaaaattga

SEQ ID NO: 173131 - DNA, 14 bp, Unknown
  misc_feature (1)..( 14): Result.005 file - promoters50/1448251
aaaagaaaaaattc

SEQ ID NO: 173132 - DNA, 14 bp, Unknown
  misc_feature (1)..( 14): Result.005 file - promoters50/1448251
tgaagagagaatct

SEQ ID NO: 173133 - DNA, 14 bp, Unknown
  misc_feature (1)..( 14): Result.005 file - promoters50/1448251
gatctgaaaattag

SEQ ID NO: 173134 - DNA, 14 bp, Unknown
  misc_feature (1)..( 14): Result.005 file - promoters50/1448251
aagtataaacttag

SEQ ID NO: 173135 - DNA, 14 bp, Unknown
  misc_feature (1)..( 14): Result.005 file - promoters50/1448251
caatgaaagtagtt

SEQ ID NO: 173136 - DNA, 14 bp, Unknown
  misc_feature (1)..( 14): Result.005 file - promoters50/1448251
ttatgaaagaagtt

SEQ ID NO: 173137 - DNA, 14 bp, Unknown
  misc_feature (1)..( 14): Result.005 file - promoters50/1448251
aaattaaacccatt

SEQ ID NO: 173138 - DNA, 14 bp, Unknown
  misc_feature (1)..( 14): Result.005 file - promoters50/1448251
tcatctaagttgtt

SEQ ID NO: 173139 - DNA, 14 bp, Unknown
  misc_feature (1)..( 14): Result.005 file - promoters50/1448251
ttgaaaaaaaaggg

SEQ ID NO: 173140 - DNA, 14 bp, Unknown
  misc_feature (1)..( 14): Result.005 file - promoters50/1448251
aaattaaccaagaa

SEQ ID NO: 173141 - DNA, 10 bp, Unknown
  misc_feature (1)..( 10): Result.005 file - promoters50/1448251
ttaactgaaa

SEQ ID NO: 173142 - DNA, 10 bp, Unknown
  misc_feature (1)..( 10): Result.005 file - promoters50/1448251
ataattgact

SEQ ID NO: 173143 - DNA, 10 bp, Unknown
  misc_feature (1)..( 10): Result.005 file - promoters50/1448251
ctaattgtgt

SEQ ID NO: 173144 - DNA, 10 bp, Unknown
  misc_feature (1)..( 10): Result.005 file - promoters50/1448251
tcaattttgt

SEQ ID NO: 173145 - DNA, 10 bp, Unknown
  misc_feature (1)..( 10): Result.005 file - promoters50/1448251
ataattttcc

SEQ ID NO: 173146 - DNA, 10 bp, Unknown
  misc_feature (1)..( 10): Result.005 file - promoters50/1448251
acaatttaaa

SEQ ID NO: 173147 - DNA, 10 bp, Unknown
  misc_feature (1)..( 10): Result.005 file - promoters50/1448256
aaacattgac

SEQ ID NO: 173148 - DNA, 10 bp, Unknown
  misc_feature (1)..( 10): Result.005 file - promoters50/1448256
aaagatttga

SEQ ID NO: 173149 - DNA, 10 bp, Unknown
  misc_feature (1)..( 10): Result.005 file - promoters50/1448256
taagattgcc

SEQ ID NO: 173150 - DNA, 10 bp, Unknown
  misc_feature (1)..( 10): Result.005 file - promoters50/1448256
tgagatttga

SEQ ID NO: 173151 - DNA, 9 bp, Unknown
  misc_feature (1)..( 9): Result.005 file - promoters50/1450092
atatgtaaa

SEQ ID NO: 173152 - DNA, 9 bp, Unknown
  misc_feature (1)..( 9): Result.005 file - promoters50/1450092
tgttgtaaa

SEQ ID NO: 173153 - DNA, 9 bp, Unknown
  misc_feature (1)..( 9): Result.005 file - promoters50/1450092
atatttaat

SEQ ID NO: 173154 - DNA, 18 bp, Unknown
  misc_feature (1)..( 18): Result.005 file - promoters50/1450099
tcacctcttttatggtaa

SEQ ID NO: 173155 - DNA, 18 bp, Unknown
  misc_feature (1)..( 18): Result.005 file - promoters50/1450099
gggtttattttattacaa

SEQ ID NO: 173156 - DNA, 18 bp, Unknown
  misc_feature (1)..( 18): Result.005 file - promoters50/1450099
tatgattttttattagct

SEQ ID NO: 173157 - DNA, 18 bp, Unknown
  misc_feature (1)..( 18): Result.005 file - promoters50/1450099
gaaaacaatttatattat

SEQ ID NO: 173158 - DNA, 18 bp, Unknown
  misc_feature (1)..( 18): Result.005 file - promoters50/1450099
aaaaagaatttataaatt

SEQ ID NO: 173159 - DNA, 18 bp, Unknown
  misc_feature (1)..( 18): Result.005 file - promoters50/1450099
aaaaagtgataaaacaat

SEQ ID NO: 173160 - DNA, 18 bp, Unknown
  misc_feature (1)..( 18): Result.005 file - promoters50/1450099
caaaagatttattcaaga

SEQ ID NO: 173161 - DNA, 12 bp, Unknown
  misc_feature (1)..( 12): Result.005 file - promoters50/1450099
gaataaaaaaac

SEQ ID NO: 173162 - DNA, 12 bp, Unknown
  misc_feature (1)..( 12): Result.005 file - promoters50/1450099
tagtaataaaat

SEQ ID NO: 173163 - DNA, 12 bp, Unknown
  misc_feature (1)..( 12): Result.005 file - promoters50/1450099
aagtaaaaaaca

SEQ ID NO: 173164 - DNA, 12 bp, Unknown
  misc_feature (1)..( 12): Result.005 file - promoters50/1450099
tagaaataaaaa

SEQ ID NO: 173165 - DNA, 12 bp, Unknown
  misc_feature (1)..( 12): Result.005 file - promoters50/1450099
gagttatatgaa

SEQ ID NO: 173166 - DNA, 12 bp, Unknown
  misc_feature (1)..( 12): Result.005 file - promoters50/1450099
ttttaaacattg

SEQ ID NO: 173167 - DNA, 16 bp, Unknown
  misc_feature (1)..( 16): Result.005 file - promoters50/1450099
atacatattgagttaa

SEQ ID NO: 173168 - DNA, 16 bp, Unknown
  misc_feature (1)..( 16): Result.005 file - promoters50/1450099
aacaaaaatgaattaa

SEQ ID NO: 173169 - DNA, 16 bp, Unknown
  misc_feature (1)..( 16): Result.005 file - promoters50/1450099
tacaaaattgaatcta

SEQ ID NO: 173170 - DNA, 16 bp, Unknown
  misc_feature (1)..( 16): Result.005 file - promoters50/1450099
cacaaaagcacttcgc

SEQ ID NO: 173171 - DNA, 16 bp, Unknown
  misc_feature (1)..( 16): Result.005 file - promoters50/1450099
atccaaattgaacaat

SEQ ID NO: 173172 - DNA, 16 bp, Unknown
  misc_feature (1)..( 16): Result.005 file - promoters50/1450099
tactaaacagaaccat

SEQ ID NO: 173173 - DNA, 15 bp, Unknown
  misc_feature (1)..( 15): Result.005 file - promoters50/1450099
taaaatatatttaat

SEQ ID NO: 173174 - DNA, 15 bp, Unknown
  misc_feature (1)..( 15): Result.005 file - promoters50/1450099
tgacatatttttata

SEQ ID NO: 173175 - DNA, 15 bp, Unknown
  misc_feature (1)..( 15): Result.005 file - promoters50/1450099
aaaaataatctcatt

SEQ ID NO: 173176 - DNA, 15 bp, Unknown
  misc_feature (1)..( 15): Result.005 file - promoters50/1450099
acaaatctattaact

SEQ ID NO: 173177 - DNA, 15 bp, Unknown
  misc_feature (1)..( 15): Result.005 file - promoters50/1450099
gatgacgtattgctg

SEQ ID NO: 173178 - DNA, 15 bp, Unknown
  misc_feature (1)..( 15): Result.005 file - promoters50/1450099
gatattgtagtgcaa

SEQ ID NO: 173179 - DNA, 15 bp, Unknown
  misc_feature (1)..( 15): Result.005 file - promoters50/1450099
aaaaagattttataa

SEQ ID NO: 173180 - DNA, 10 bp, Unknown
  misc_feature (1)..( 10): Result.005 file - promoters50/1450137
ctaacttttg

SEQ ID NO: 173181 - DNA, 10 bp, Unknown
  misc_feature (1)..( 10): Result.005 file - promoters50/1450137
ttaaatttta

SEQ ID NO: 173182 - DNA, 10 bp, Unknown
  misc_feature (1)..( 10): Result.005 file - promoters50/1450137
gaaacgtttg

SEQ ID NO: 173183 - DNA, 10 bp, Unknown
  misc_feature (1)..( 10): Result.005 file - promoters50/1450137
ctaactccgt

SEQ ID NO: 173184 - DNA, 11 bp, Unknown
  misc_feature (1)..( 11): Result.005 file - promoters50/1450137
aactttttaaa

SEQ ID NO: 173185 - DNA, 11 bp, Unknown
  misc_feature (1)..( 11): Result.005 file - promoters50/1450137
ccctttttttt

SEQ ID NO: 173186 - DNA, 11 bp, Unknown
  misc_feature (1)..( 11): Result.005 file - promoters50/1450137
taatttttaaa

SEQ ID NO: 173187 - DNA, 11 bp, Unknown
  misc_feature (1)..( 11): Result.005 file - promoters50/1450137
cccatttgcta

SEQ ID NO: 173188 - DNA, 7 bp, Unknown
  misc_feature (1)..( 7): Result.005 file - promoters50/1450224
ttttcta

SEQ ID NO: 173189 - DNA, 7 bp, Unknown
  misc_feature (1)..( 7): Result.005 file - promoters50/1450224
ttttcta

SEQ ID NO: 173190 - DNA, 7 bp, Unknown
  misc_feature (1)..( 7): Result.005 file - promoters50/1450224
ttttcta

SEQ ID NO: 173191 - DNA, 9 bp, Unknown
  misc_feature (1)..( 9): Result.005 file - promoters50/1450224
ttaaatgaa

SEQ ID NO: 173192 - DNA, 9 bp, Unknown
  misc_feature (1)..( 9): Result.005 file - promoters50/1450224
ctaaatgaa

SEQ ID NO: 173193 - DNA, 9 bp, Unknown
  misc_feature (1)..( 9): Result.005 file - promoters50/1450224
ttacatgtt

SEQ ID NO: 173194 - DNA, 8 bp, Unknown
  misc_feature (1)..( 8): Result.005 file - promoters50/1450224
tattttac

SEQ ID NO: 173195 - DNA, 8 bp, Unknown
  misc_feature (1)..( 8): Result.005 file - promoters50/1450224
tattttat

SEQ ID NO: 173196 - DNA, 8 bp, Unknown
  misc_feature (1)..( 8): Result.005 file - promoters50/1450224
aattatat

SEQ ID NO: 173197 - DNA, 8 bp, Unknown
  misc_feature (1)..( 8): Result.005 file - promoters50/1450224
tataaata

SEQ ID NO: 173198 - DNA, 8 bp, Unknown
  misc_feature (1)..( 8): Result.005 file - promoters50/1450224
tataaacc

SEQ ID NO: 173199 - DNA, 8 bp, Unknown
  misc_feature (1)..( 8): Result.005 file - promoters50/1450224
aataaaaa

SEQ ID NO: 173200 - DNA, 9 bp, Unknown
  misc_feature (1)..( 9): Result.005 file - promoters50/1450224
atacaaaat

SEQ ID NO: 173201 - DNA, 9 bp, Unknown
  misc_feature (1)..( 9): Result.005 file - promoters50/1450224
gaacacaat

SEQ ID NO: 173202 - DNA, 9 bp, Unknown
  misc_feature (1)..( 9): Result.005 file - promoters50/1450224
gaaaacaaa

SEQ ID NO: 173203 - DNA, 12 bp, Unknown
  misc_feature (1)..( 12): Result.005 file - promoters50/1450224
gacgttttgtat

SEQ ID NO: 173204 - DNA, 12 bp, Unknown
  misc_feature (1)..( 12): Result.005 file - promoters50/1450224
aataaattgtat

SEQ ID NO: 173205 - DNA, 12 bp, Unknown
  misc_feature (1)..( 12): Result.005 file - promoters50/1450224
aataaagtgtac

SEQ ID NO: 173206 - DNA, 7 bp, Unknown
  misc_feature (1)..( 7): Result.005 file - promoters50/1450224
aaagtat

SEQ ID NO: 173207 - DNA, 7 bp, Unknown
  misc_feature (1)..( 7): Result.005 file - promoters50/1450224
aaattat

SEQ ID NO: 173208 - DNA, 7 bp, Unknown
  misc_feature (1)..( 7): Result.005 file - promoters50/1450224
attttat

SEQ ID NO: 173209 - DNA, 9 bp, Unknown
  misc_feature (1)..( 9): Result.005 file - promoters50/1450224
aaaatgatc

SEQ ID NO: 173210 - DNA, 9 bp, Unknown
  misc_feature (1)..( 9): Result.005 file - promoters50/1450224
aaaataatc

SEQ ID NO: 173211 - DNA, 9 bp, Unknown
  misc_feature (1)..( 9): Result.005 file - promoters50/1450224
ttaataatc

SEQ ID NO: 173212 - DNA, 9 bp, Unknown
  misc_feature (1)..( 9): Result.005 file - promoters50/1450224
caaaaaatc

SEQ ID NO: 173213 - DNA, 9 bp, Unknown
  misc_feature (1)..( 9): Result.005 file - promoters50/1450224
tctaaaatc

SEQ ID NO: 173214 - DNA, 10 bp, Unknown
  misc_feature (1)..( 10): Result.005 file - promoters50/1450224
tcaaagaata

SEQ ID NO: 173215 - DNA, 12 bp, Unknown
  misc_feature (1)..( 12): Result.005 file - promoters50/1450224
gaacaaaagttt

SEQ ID NO: 173216 - DNA, 12 bp, Unknown
  misc_feature (1)..( 12): Result.005 file - promoters50/1450224
gaataaattgta

SEQ ID NO: 173217 - DNA, 12 bp, Unknown
  misc_feature (1)..( 12): Result.005 file - promoters50/1450224
aaataaagtgta

SEQ ID NO: 173218 - DNA, 9 bp, Unknown
  misc_feature (1)..( 9): Result.005 file - promoters50/1450290
ttttttaaa

SEQ ID NO: 173219 - DNA, 9 bp, Unknown
  misc_feature (1)..( 9): Result.005 file - promoters50/1450290
gattttaat

SEQ ID NO: 173220 - DNA, 9 bp, Unknown
  misc_feature (1)..( 9): Result.005 file - promoters50/1450290
gtttttatt

SEQ ID NO: 173221 - DNA, 9 bp, Unknown
  misc_feature (1)..( 9): Result.005 file - promoters50/1450290
aatttcaat

SEQ ID NO: 173222 - DNA, 9 bp, Unknown
  misc_feature (1)..( 9): Result.005 file - promoters50/1450290
aatttctca

SEQ ID NO: 173223 - DNA, 12 bp, Unknown
  misc_feature (1)..( 12): Result.005 file - promoters50/1450301
caataaaaaaat

SEQ ID NO: 173224 - DNA, 12 bp, Unknown
  misc_feature (1)..( 12): Result.005 file - promoters50/1450301
aaatgaaatatc

SEQ ID NO: 173225 - DNA, 12 bp, Unknown
  misc_feature (1)..( 12): Result.005 file - promoters50/1450301
atataaaagtga

SEQ ID NO: 173226 - DNA, 10 bp, Unknown
  misc_feature (1)..( 10): Result.005 file - promoters50/1450301
atttgttatc

SEQ ID NO: 173227 - DNA, 10 bp, Unknown
  misc_feature (1)..( 10): Result.005 file - promoters50/1450301
atttgttatc

SEQ ID NO: 173228 - DNA, 10 bp, Unknown
  misc_feature (1)..( 10): Result.005 file - promoters50/1450301
atttgtaaat

SEQ ID NO: 173229 - DNA, 14 bp, Unknown
  misc_feature (1)..( 14): Result.005 file - promoters50/1450309
aataaatggaaata

SEQ ID NO: 173230 - DNA, 14 bp, Unknown
  misc_feature (1)..( 14): Result.005 file - promoters50/1450309
tacaaagggatatt

SEQ ID NO: 173231 - DNA, 14 bp, Unknown
  misc_feature (1)..( 14): Result.005 file - promoters50/1450309
aatatatgtaaacg

SEQ ID NO: 173232 - DNA, 14 bp, Unknown
  misc_feature (1)..( 14): Result.005 file - promoters50/1450309
actttatttaaaaa

SEQ ID NO: 173233 - DNA, 14 bp, Unknown
  misc_feature (1)..( 14): Result.005 file - promoters50/1450309
gtcgtatctaagac

SEQ ID NO: 173234 - DNA, 14 bp, Unknown
  misc_feature (1)..( 14): Result.005 file - promoters50/1450309
gaataatctatgac

SEQ ID NO: 173235 - DNA, 10 bp, Unknown
  misc_feature (1)..( 10): Result.005 file - promoters50/1450309
aaaaaaaaaa

SEQ ID NO: 173236 - DNA, 10 bp, Unknown
  misc_feature (1)..( 10): Result.005 file - promoters50/1450309
ataaagaaag

SEQ ID NO: 173237 - DNA, 10 bp, Unknown
  misc_feature (1)..( 10): Result.005 file - promoters50/1450309
gaaaacaaaa

SEQ ID NO: 173238 - DNA, 10 bp, Unknown
  misc_feature (1)..( 10): Result.005 file - promoters50/1450309
aaaaacaaaa

SEQ ID NO: 173239 - DNA, 10 bp, Unknown
  misc_feature (1)..( 10): Result.005 file - promoters50/1450309
agaaagaaag

SEQ ID NO: 173240 - DNA, 10 bp, Unknown
  misc_feature (1)..( 10): Result.005 file - promoters50/1450309
ataaaaatat

SEQ ID NO: 173241 - DNA, 12 bp, Unknown
  misc_feature (1)..( 12): Result.005 file - promoters50/1450357
taagccaaacgc

SEQ ID NO: 173242 - DNA, 12 bp, Unknown
  misc_feature (1)..( 12): Result.005 file - promoters50/1450357
taaggcaaattt

SEQ ID NO: 173243 - DNA, 12 bp, Unknown
  misc_feature (1)..( 12): Result.005 file - promoters50/1450357
ttttgcaatttt

SEQ ID NO: 173244 - DNA, 9 bp, Unknown
  misc_feature (1)..( 9): Result.005 file - promoters50/1450357
gcaatctag

SEQ ID NO: 173245 - DNA, 9 bp, Unknown
  misc_feature (1)..( 9): Result.005 file - promoters50/1450357
caaatttag

SEQ ID NO: 173246 - DNA, 9 bp, Unknown
  misc_feature (1)..( 9): Result.005 file - promoters50/1450357
gcaattttt

SEQ ID NO: 173247 - DNA, 8 bp, Unknown
  misc_feature (1)..( 8): Result.005 file - promoters50/1450357
atagatat

SEQ ID NO: 173248 - DNA, 8 bp, Unknown
  misc_feature (1)..( 8): Result.005 file - promoters50/1450357
atatataa

SEQ ID NO: 173249 - DNA, 8 bp, Unknown
  misc_feature (1)..( 8): Result.005 file - promoters50/1450357
ttatataa

SEQ ID NO: 173250 - DNA, 11 bp, Unknown
  misc_feature (1)..( 11): Result.005 file - promoters50/1450365
acagacaacta

SEQ ID NO: 173251 - DNA, 11 bp, Unknown
  misc_feature (1)..( 11): Result.005 file - promoters50/1450365
acaaacatgtg

SEQ ID NO: 173252 - DNA, 11 bp, Unknown
  misc_feature (1)..( 11): Result.005 file - promoters50/1450365
tgaaacatata

SEQ ID NO: 173253 - DNA, 11 bp, Unknown
  misc_feature (1)..( 11): Result.005 file - promoters50/1450365
ataaatatata

SEQ ID NO: 173254 - DNA, 9 bp, Unknown
  misc_feature (1)..( 9): Result.005 file - promoters50/1450369
ttattgtgg

SEQ ID NO: 173255 - DNA, 9 bp, Unknown
  misc_feature (1)..( 9): Result.005 file - promoters50/1450369
ttactgttg

SEQ ID NO: 173256 - DNA, 9 bp, Unknown
  misc_feature (1)..( 9): Result.005 file - promoters50/1450369
cgactgttg

SEQ ID NO: 173257 - DNA, 8 bp, Unknown
  misc_feature (1)..( 8): Result.005 file - promoters50/1450384
tatatata

SEQ ID NO: 173258 - DNA, 8 bp, Unknown
  misc_feature (1)..( 8): Result.005 file - promoters50/1450384
tatttata

SEQ ID NO: 173259 - DNA, 8 bp, Unknown
  misc_feature (1)..( 8): Result.005 file - promoters50/1450384
tatacaga

SEQ ID NO: 173260 - DNA, 8 bp, Unknown
  misc_feature (1)..( 8): Result.005 file - promoters50/1450384
aatatagt

SEQ ID NO: 173261 - DNA, 8 bp, Unknown
  misc_feature (1)..( 8): Result.005 file - promoters50/1450384
atatagat

SEQ ID NO: 173262 - DNA, 8 bp, Unknown
  misc_feature (1)..( 8): Result.005 file - promoters50/1450384
ttattgat

SEQ ID NO: 173263 - DNA, 8 bp, Unknown
  misc_feature (1)..( 8): Result.005 file - promoters50/1450384
atatagtt

SEQ ID NO: 173264 - DNA, 12 bp, Unknown
  misc_feature (1)..( 12): Result.005 file - promoters50/1450384
tatgtgtaaata

SEQ ID NO: 173265 - DNA, 12 bp, Unknown
  misc_feature (1)..( 12): Result.005 file - promoters50/1450384
tatttgttaata

SEQ ID NO: 173266 - DNA, 12 bp, Unknown
  misc_feature (1)..( 12): Result.005 file - promoters50/1450384
tctttgctaatc

SEQ ID NO: 173267 - DNA, 10 bp, Unknown
  misc_feature (1)..( 10): Result.005 file - promoters50/1450384
ctttgtttca

SEQ ID NO: 173268 - DNA, 10 bp, Unknown
  misc_feature (1)..( 10): Result.005 file - promoters50/1450384
gtttctttgg

SEQ ID NO: 173269 - DNA, 11 bp, Unknown
  misc_feature (1)..( 11): Result.005 file - promoters50/1450384
atttggtttct

SEQ ID NO: 173270 - DNA, 9 bp, Unknown
  misc_feature (1)..( 9): Result.005 file - promoters50/1450455
tcatacaaa

SEQ ID NO: 173271 - DNA, 9 bp, Unknown
  misc_feature (1)..( 9): Result.005 file - promoters50/1450455
tcatacaaa

SEQ ID NO: 173272 - DNA, 9 bp, Unknown
  misc_feature (1)..( 9): Result.005 file - promoters50/1450455
caatacaat

SEQ ID NO: 173273 - DNA, 8 bp, Unknown
  misc_feature (1)..( 8): Result.005 file - promoters50/1450455
aaaagaaa

SEQ ID NO: 173274 - DNA, 8 bp, Unknown
  misc_feature (1)..( 8): Result.005 file - promoters50/1450455
caaataaa

SEQ ID NO: 173275 - DNA, 8 bp, Unknown
  misc_feature (1)..( 8): Result.005 file - promoters50/1450455
caaataat

SEQ ID NO: 173276 - DNA, 10 bp, Unknown
  misc_feature (1)..( 10): Result.005 file - promoters50/1450455
ttatatttct

SEQ ID NO: 173277 - DNA, 10 bp, Unknown
  misc_feature (1)..( 10): Result.005 file - promoters50/1450455
ttatatatct

SEQ ID NO: 173278 - DNA, 10 bp, Unknown
  misc_feature (1)..( 10): Result.005 file - promoters50/1450455
ccgtatatca

SEQ ID NO: 173279 - DNA, 20 bp, Unknown
  misc_feature (1)..( 20): Result.005 file - promoters50/1450459
gaagtcgtatttgtgtttaa

SEQ ID NO: 173280 - DNA, 20 bp, Unknown
  misc_feature (1)..( 20): Result.005 file - promoters50/1450459
tttttcgtctttggaattgg

SEQ ID NO: 173281 - DNA, 20 bp, Unknown
  misc_feature (1)..( 20): Result.005 file - promoters50/1450459
gaaatcggattagggtttcg

SEQ ID NO: 173282 - DNA, 20 bp, Unknown
  misc_feature (1)..( 20): Result.005 file - promoters50/1450459
tttactgtattagtgattaa

SEQ ID NO: 173283 - DNA, 20 bp, Unknown
  misc_feature (1)..( 20): Result.005 file - promoters50/1450459
gtggaacaattacatgatta

SEQ ID NO: 173284 - DNA, 9 bp, Unknown
  misc_feature (1)..( 9): Result.005 file - promoters50/1450473
taaaaaaaa

SEQ ID NO: 173285 - DNA, 9 bp, Unknown
  misc_feature (1)..( 9): Result.005 file - promoters50/1450473
caaaagaaa

SEQ ID NO: 173286 - DNA, 9 bp, Unknown
  misc_feature (1)..( 9): Result.005 file - promoters50/1450473
taaaaagct

SEQ ID NO: 173287 - DNA, 8 bp, Unknown
  misc_feature (1)..( 8): Result.005 file - promoters50/1450473
gaataaca

SEQ ID NO: 173288 - DNA, 8 bp, Unknown
  misc_feature (1)..( 8): Result.005 file - promoters50/1450473
gaacaaca

SEQ ID NO: 173289 - DNA, 8 bp, Unknown
  misc_feature (1)..( 8): Result.005 file - promoters50/1450473
caatagta

SEQ ID NO: 173290 - DNA, 7 bp, Unknown
  misc_feature (1)..( 7): Result.005 file - promoters50/1450473
agaagaa

SEQ ID NO: 173291 - DNA, 7 bp, Unknown
  misc_feature (1)..( 7): Result.005 file - promoters50/1450473
tgaagaa

SEQ ID NO: 173292 - DNA, 7 bp, Unknown
  misc_feature (1)..( 7): Result.005 file - promoters50/1450473
agaagaa

SEQ ID NO: 173293 - DNA, 8 bp, Unknown
  misc_feature (1)..( 8): Result.005 file - promoters50/1450473
agattttg

SEQ ID NO: 173294 - DNA, 8 bp, Unknown
  misc_feature (1)..( 8): Result.005 file - promoters50/1450473
agagtttg

SEQ ID NO: 173295 - DNA, 8 bp, Unknown
  misc_feature (1)..( 8): Result.005 file - promoters50/1450473
agaaattg

SEQ ID NO: 173296 - DNA, 8 bp, Unknown
  misc_feature (1)..( 8): Result.005 file - promoters50/1450473
ggaggagg

SEQ ID NO: 173297 - DNA, 8 bp, Unknown
  misc_feature (1)..( 8): Result.005 file - promoters50/1450473
ggagaagg

SEQ ID NO: 173298 - DNA, 8 bp, Unknown
  misc_feature (1)..( 8): Result.005 file - promoters50/1450473
agagaaga

SEQ ID NO: 173299 - DNA, 9 bp, Unknown
  misc_feature (1)..( 9): Result.005 file - promoters50/1450477
taatttaag

SEQ ID NO: 173300 - DNA, 9 bp, Unknown
  misc_feature (1)..( 9): Result.005 file - promoters50/1450477
taattgaag

SEQ ID NO: 173301 - DNA, 9 bp, Unknown
  misc_feature (1)..( 9): Result.005 file - promoters50/1450477
gctttgaag

SEQ ID NO: 173302 - DNA, 9 bp, Unknown
  misc_feature (1)..( 9): Result.005 file - promoters50/1450477
aagcactta

SEQ ID NO: 173303 - DNA, 9 bp, Unknown
  misc_feature (1)..( 9): Result.005 file - promoters50/1450477
tagcattta

SEQ ID NO: 173304 - DNA, 9 bp, Unknown
  misc_feature (1)..( 9): Result.005 file - promoters50/1450477
aagcacgaa

SEQ ID NO: 173305 - DNA, 9 bp, Unknown
  misc_feature (1)..( 9): Result.005 file - promoters50/1450477
atccctata

SEQ ID NO: 173306 - DNA, 9 bp, Unknown
  misc_feature (1)..( 9): Result.005 file - promoters50/1450477
atctctatt

SEQ ID NO: 173307 - DNA, 9 bp, Unknown
  misc_feature (1)..( 9): Result.005 file - promoters50/1450477
tactccatt

SEQ ID NO: 173308 - DNA, 8 bp, Unknown
  misc_feature (1)..( 8): Result.005 file - promoters50/1450526
ggaaaaat

SEQ ID NO: 173309 - DNA, 8 bp, Unknown
  misc_feature (1)..( 8): Result.005 file - promoters50/1450526
ctaaaaat

SEQ ID NO: 173310 - DNA, 8 bp, Unknown
  misc_feature (1)..( 8): Result.005 file - promoters50/1450526
ctaaaaaa

SEQ ID NO: 173311 - DNA, 7 bp, Unknown
  misc_feature (1)..( 7): Result.005 file - promoters50/1450537
catttgt

SEQ ID NO: 173312 - DNA, 7 bp, Unknown
  misc_feature (1)..( 7): Result.005 file - promoters50/1450537
catttga

SEQ ID NO: 173313 - DNA, 7 bp, Unknown
  misc_feature (1)..( 7): Result.005 file - promoters50/1450537
aatttga

SEQ ID NO: 173314 - DNA, 8 bp, Unknown
  misc_feature (1)..( 8): Result.005 file - promoters50/1450537
atttttta

SEQ ID NO: 173315 - DNA, 8 bp, Unknown
  misc_feature (1)..( 8): Result.005 file - promoters50/1450537
attgtttg

SEQ ID NO: 173316 - DNA, 8 bp, Unknown
  misc_feature (1)..( 8): Result.005 file - promoters50/1450537
ttttatta

SEQ ID NO: 173317 - DNA, 9 bp, Unknown
  misc_feature (1)..( 9): Result.005 file - promoters50/1450537
aaaaaatat

SEQ ID NO: 173318 - DNA, 9 bp, Unknown
  misc_feature (1)..( 9): Result.005 file - promoters50/1450537
ttgaaatat

SEQ ID NO: 173319 - DNA, 9 bp, Unknown
  misc_feature (1)..( 9): Result.005 file - promoters50/1450537
aaaaaataa

SEQ ID NO: 173320 - DNA, 8 bp, Unknown
  misc_feature (1)..( 8): Result.005 file - promoters50/1450537
aaaataca

SEQ ID NO: 173321 - DNA, 8 bp, Unknown
  misc_feature (1)..( 8): Result.005 file - promoters50/1450537
gaaaaaca

SEQ ID NO: 173322 - DNA, 8 bp, Unknown
  misc_feature (1)..( 8): Result.005 file - promoters50/1450537
aaaaaaca

SEQ ID NO: 173323 - DNA, 7 bp, Unknown
  misc_feature (1)..( 7): Result.005 file - promoters50/1450537
ggaaaat

SEQ ID NO: 173324 - DNA, 7 bp, Unknown
  misc_feature (1)..( 7): Result.005 file - promoters50/1450537
ggaaaaa

SEQ ID NO: 173325 - DNA, 7 bp, Unknown
  misc_feature (1)..( 7): Result.005 file - promoters50/1450537
agaaaaa

SEQ ID NO: 173326 - DNA, 9 bp, Unknown
  misc_feature (1)..( 9): Result.005 file - promoters50/1450549
aacataatt

SEQ ID NO: 173327 - DNA, 7 bp, Unknown
  misc_feature (1)..( 7): Result.005 file - promoters50/1450549
tataatt

SEQ ID NO: 173328 - DNA, 9 bp, Unknown
  misc_feature (1)..( 9): Result.005 file - promoters50/1450549
aacataata

SEQ ID NO: 173329 - DNA, 8 bp, Unknown
  misc_feature (1)..( 8): Result.005 file - promoters50/1450549
aaatctaa

SEQ ID NO: 173330 - DNA, 8 bp, Unknown
  misc_feature (1)..( 8): Result.005 file - promoters50/1450549
aaaactat

SEQ ID NO: 173331 - DNA, 8 bp, Unknown
  misc_feature (1)..( 8): Result.005 file - promoters50/1450549
aaagctaa

SEQ ID NO: 173332 - DNA, 8 bp, Unknown
  misc_feature (1)..( 8): Result.005 file - promoters50/1450549
aacataat

SEQ ID NO: 173333 - DNA, 8 bp, Unknown
  misc_feature (1)..( 8): Result.005 file - promoters50/1450549
aacaaaat

SEQ ID NO: 173334 - DNA, 8 bp, Unknown
  misc_feature (1)..( 8): Result.005 file - promoters50/1450549
aacaaatg

SEQ ID NO: 173335 - DNA, 7 bp, Unknown
  misc_feature (1)..( 7): Result.005 file - promoters50/1450549
taaataa

SEQ ID NO: 173336 - DNA, 7 bp, Unknown
  misc_feature (1)..( 7): Result.005 file - promoters50/1450549
taattaa

SEQ ID NO: 173337 - DNA, 7 bp, Unknown
  misc_feature (1)..( 7): Result.005 file - promoters50/1450549
aaaataa

SEQ ID NO: 173338 - DNA, 7 bp, Unknown
  misc_feature (1)..( 7): Result.005 file - promoters50/1450549
caaagag

SEQ ID NO: 173339 - DNA, 7 bp, Unknown
  misc_feature (1)..( 7): Result.005 file - promoters50/1450549
taaagag

SEQ ID NO: 173340 - DNA, 7 bp, Unknown
  misc_feature (1)..( 7): Result.005 file - promoters50/1450549
taaagac

SEQ ID NO: 173341 - DNA, 8 bp, Unknown
  misc_feature (1)..( 8): Result.005 file - promoters50/1450549
aaaattta

SEQ ID NO: 173342 - DNA, 8 bp, Unknown
  misc_feature (1)..( 8): Result.005 file - promoters50/1450549
aaaattat

SEQ ID NO: 173343 - DNA, 8 bp, Unknown
  misc_feature (1)..( 8): Result.005 file - promoters50/1450549
aaaactat

SEQ ID NO: 173344 - DNA, 11 bp, Unknown
  misc_feature (1)..( 11): Result.005 file - promoters50/1450593
caataatatta

SEQ ID NO: 173345 - DNA, 11 bp, Unknown
  misc_feature (1)..( 11): Result.005 file - promoters50/1450593
tcataatatta

SEQ ID NO: 173346 - DNA, 11 bp, Unknown
  misc_feature (1)..( 11): Result.005 file - promoters50/1450593
tcaaaatgatg

SEQ ID NO: 173347 - DNA, 11 bp, Unknown
  misc_feature (1)..( 11): Result.005 file - promoters50/1450593
aatactattca

SEQ ID NO: 173348 - DNA, 11 bp, Unknown
  misc_feature (1)..( 11): Result.005 file - promoters50/1450593
aatattataaa

SEQ ID NO: 173349 - DNA, 11 bp, Unknown
  misc_feature (1)..( 11): Result.005 file - promoters50/1450593
ttaacttttca

SEQ ID NO: 173350 - DNA, 16 bp, Unknown
  misc_feature (1)..( 16): Result.005 file - promoters50/1450593
tcctcgtttctttcac

SEQ ID NO: 173351 - DNA, 16 bp, Unknown
  misc_feature (1)..( 16): Result.005 file - promoters50/1450593
tcctcatttttcaatt

SEQ ID NO: 173352 - DNA, 17 bp, Unknown
  misc_feature (1)..( 17): Result.005 file - promoters50/1450593
tgatcacttttcaattt

SEQ ID NO: 173353 - DNA, 9 bp, Unknown
  misc_feature (1)..( 9): Result.005 file - promoters50/1450593
taaaattag

SEQ ID NO: 173354 - DNA, 9 bp, Unknown
  misc_feature (1)..( 9): Result.005 file - promoters50/1450593
taatattat

SEQ ID NO: 173355 - DNA, 9 bp, Unknown
  misc_feature (1)..( 9): Result.005 file - promoters50/1450593
ctatattat

SEQ ID NO: 173356 - DNA, 13 bp, Unknown
  misc_feature (1)..( 13): Result.005 file - promoters50/1450610
gagaatcttcttc

SEQ ID NO: 173357 - DNA, 13 bp, Unknown
  misc_feature (1)..( 13): Result.005 file - promoters50/1450610
aacaatctgcttc

SEQ ID NO: 173358 - DNA, 13 bp, Unknown
  misc_feature (1)..( 13): Result.005 file - promoters50/1450610
aagaatctgatgt

SEQ ID NO: 173359 - DNA, 13 bp, Unknown
  misc_feature (1)..( 13): Result.005 file - promoters50/1450610
aatctgtttcttc

SEQ ID NO: 173360 - DNA, 13 bp, Unknown
  misc_feature (1)..( 13): Result.005 file - promoters50/1450610
aagaatattccat

SEQ ID NO: 173361 - DNA, 13 bp, Unknown
  misc_feature (1)..( 13): Result.005 file - promoters50/1450610
aaaaatttgaaaa

SEQ ID NO: 173362 - DNA, 13 bp, Unknown
  misc_feature (1)..( 13): Result.005 file - promoters50/1450610
aaggatagagata

SEQ ID NO: 173363 - DNA, 9 bp, Unknown
  misc_feature (1)..( 9): Result.005 file - promoters50/1450637
taactcttt

SEQ ID NO: 173364 - DNA, 9 bp, Unknown
  misc_feature (1)..( 9): Result.005 file - promoters50/1450637
taattcttt

SEQ ID NO: 173365 - DNA, 9 bp, Unknown
  misc_feature (1)..( 9): Result.005 file - promoters50/1450637
ctattattt

SEQ ID NO: 173366 - DNA, 8 bp, Unknown
  misc_feature (1)..( 8): Result.005 file - promoters50/1450662
attgttaa

SEQ ID NO: 173367 - DNA, 8 bp, Unknown
  misc_feature (1)..( 8): Result.005 file - promoters50/1450662
attgtttt

SEQ ID NO: 173368 - DNA, 8 bp, Unknown
  misc_feature (1)..( 8): Result.005 file - promoters50/1450662
attttttt

SEQ ID NO: 173369 - DNA, 8 bp, Unknown
  misc_feature (1)..( 8): Result.005 file - promoters50/1450662
cttttttc

SEQ ID NO: 173370 - DNA, 9 bp, Unknown
  misc_feature (1)..( 9): Result.005 file - promoters50/1450662
ggttttgga

SEQ ID NO: 173371 - DNA, 9 bp, Unknown
  misc_feature (1)..( 9): Result.005 file - promoters50/1450662
tgttttgta

SEQ ID NO: 173372 - DNA, 9 bp, Unknown
  misc_feature (1)..( 9): Result.005 file - promoters50/1450662
ggttttaaa

SEQ ID NO: 173373 - DNA, 9 bp, Unknown
  misc_feature (1)..( 9): Result.005 file - promoters50/1450662
cattttttt

SEQ ID NO: 173374 - DNA, 10 bp, Unknown
  misc_feature (1)..( 10): Result.005 file - promoters50/1450662
atgtttgagt

SEQ ID NO: 173375 - DNA, 10 bp, Unknown
  misc_feature (1)..( 10): Result.005 file - promoters50/1450662
atgtttgagt

SEQ ID NO: 173376 - DNA, 10 bp, Unknown
  misc_feature (1)..( 10): Result.005 file - promoters50/1450662
gtgattattt

SEQ ID NO: 173377 - DNA, 10 bp, Unknown
  misc_feature (1)..( 10): Result.005 file - promoters50/1450662
aagattattg

SEQ ID NO: 173378 - DNA, 7 bp, Unknown
  misc_feature (1)..( 7): Result.005 file - promoters50/1450662
ttaaaat

SEQ ID NO: 173379 - DNA, 7 bp, Unknown
  misc_feature (1)..( 7): Result.005 file - promoters50/1450662
ataaaat

SEQ ID NO: 173380 - DNA, 7 bp, Unknown
  misc_feature (1)..( 7): Result.005 file - promoters50/1450662
ttaaaat

SEQ ID NO: 173381 - DNA, 7 bp, Unknown
  misc_feature (1)..( 7): Result.005 file - promoters50/1450662
atgtttc

SEQ ID NO: 173382 - DNA, 7 bp, Unknown
  misc_feature (1)..( 7): Result.005 file - promoters50/1450662
gtgtttc

SEQ ID NO: 173383 - DNA, 7 bp, Unknown
  misc_feature (1)..( 7): Result.005 file - promoters50/1450662
gtgttta

SEQ ID NO: 173384 - DNA, 11 bp, Unknown
  misc_feature (1)..( 11): Result.005 file - promoters50/1450662
acaattcagcc

SEQ ID NO: 173385 - DNA, 11 bp, Unknown
  misc_feature (1)..( 11): Result.005 file - promoters50/1450662
acaattaagcc

SEQ ID NO: 173386 - DNA, 11 bp, Unknown
  misc_feature (1)..( 11): Result.005 file - promoters50/1450662
ggaatgaagat

SEQ ID NO: 173387 - DNA, 10 bp, Unknown
  misc_feature (1)..( 10): Result.005 file - promoters50/1450678
tccttaataa

SEQ ID NO: 173388 - DNA, 10 bp, Unknown
  misc_feature (1)..( 10): Result.005 file - promoters50/1450678
attttaatat

SEQ ID NO: 173389 - DNA, 8 bp, Unknown
  misc_feature (1)..( 8): Result.005 file - promoters50/1450678
actaataa

SEQ ID NO: 173390 - DNA, 8 bp, Unknown
  misc_feature (1)..( 8): Result.005 file - promoters50/1450678
cttaatta

SEQ ID NO: 173391 - DNA, 11 bp, Unknown
  misc_feature (1)..( 11): Result.005 file - promoters50/1450678
gatttcaattt

SEQ ID NO: 173392 - DNA, 11 bp, Unknown
  misc_feature (1)..( 11): Result.005 file - promoters50/1450678
gtcgctaatat

SEQ ID NO: 173393 - DNA, 12 bp, Unknown
  misc_feature (1)..( 12): Result.005 file - promoters50/1450678
gaatgttttaat

SEQ ID NO: 173394 - DNA, 12 bp, Unknown
  misc_feature (1)..( 12): Result.005 file - promoters50/1450678
taatattttata

SEQ ID NO: 173395 - DNA, 12 bp, Unknown
  misc_feature (1)..( 12): Result.005 file - promoters50/1450678
atcgatttcaat

SEQ ID NO: 173396 - DNA, 12 bp, Unknown
  misc_feature (1)..( 12): Result.005 file - promoters50/1450678
cgatatttcaaa

SEQ ID NO: 173397 - DNA, 12 bp, Unknown
  misc_feature (1)..( 12): Result.005 file - promoters50/1450678
aaatattgttaa

SEQ ID NO: 173398 - DNA, 12 bp, Unknown
  misc_feature (1)..( 12): Result.005 file - promoters50/1450678
taatatgctcct

SEQ ID NO: 173399 - DNA, 12 bp, Unknown
  misc_feature (1)..( 12): Result.005 file - promoters50/1450678
tccacaaactac

SEQ ID NO: 173400 - DNA, 12 bp, Unknown
  misc_feature (1)..( 12): Result.005 file - promoters50/1450678
cccaaaaatttg

SEQ ID NO: 173401 - DNA, 12 bp, Unknown
  misc_feature (1)..( 12): Result.005 file - promoters50/1450678
tccacaacgatg

SEQ ID NO: 173402 - DNA, 12 bp, Unknown
  misc_feature (1)..( 12): Result.005 file - promoters50/1450678
aacaaaaacatt

SEQ ID NO: 173403 - DNA, 12 bp, Unknown
  misc_feature (1)..( 12): Result.005 file - promoters50/1450678
ttgacaataact

SEQ ID NO: 173404 - DNA, 12 bp, Unknown
  misc_feature (1)..( 12): Result.005 file - promoters50/1450678
tataaaaaaaaa

SEQ ID NO: 173405 - DNA, 8 bp, Unknown
  misc_feature (1)..( 8): Result.005 file - promoters50/1450682
atatattt

SEQ ID NO: 173406 - DNA, 8 bp, Unknown
  misc_feature (1)..( 8): Result.005 file - promoters50/1450682
atatatac

SEQ ID NO: 173407 - DNA, 8 bp, Unknown
  misc_feature (1)..( 8): Result.005 file - promoters50/1450682
atacatac

SEQ ID NO: 173408 - DNA, 12 bp, Unknown
  misc_feature (1)..( 12): Result.005 file - promoters50/1450770
ttggaaaagtga

SEQ ID NO: 173409 - DNA, 12 bp, Unknown
  misc_feature (1)..( 12): Result.005 file - promoters50/1450770
attttaaaatga

SEQ ID NO: 173410 - DNA, 12 bp, Unknown
  misc_feature (1)..( 12): Result.005 file - promoters50/1450770
ttttgaaattct

SEQ ID NO: 173411 - DNA, 9 bp, Unknown
  misc_feature (1)..( 9): Result.005 file - promoters50/1450770
aaaaaaagc

SEQ ID NO: 173412 - DNA, 9 bp, Unknown
  misc_feature (1)..( 9): Result.005 file - promoters50/1450770
tataaaagc

SEQ ID NO: 173413 - DNA, 9 bp, Unknown
  misc_feature (1)..( 9): Result.005 file - promoters50/1450770
tatataaga

SEQ ID NO: 173414 - DNA, 7 bp, Unknown
  misc_feature (1)..( 7): Result.005 file - promoters50/1450785
aaaccaa

SEQ ID NO: 173415 - DNA, 7 bp, Unknown
  misc_feature (1)..( 7): Result.005 file - promoters50/1450785
aaaacaa

SEQ ID NO: 173416 - DNA, 7 bp, Unknown
  misc_feature (1)..( 7): Result.005 file - promoters50/1450785
aaaccac

SEQ ID NO: 173417 - DNA, 8 bp, Unknown
  misc_feature (1)..( 8): Result.005 file - promoters50/1450785
cttcacca

SEQ ID NO: 173418 - DNA, 8 bp, Unknown
  misc_feature (1)..( 8): Result.005 file - promoters50/1450785
cttcacac

SEQ ID NO: 173419 - DNA, 8 bp, Unknown
  misc_feature (1)..( 8): Result.005 file - promoters50/1450785
attcatca

SEQ ID NO: 173420 - DNA, 9 bp, Unknown
  misc_feature (1)..( 9): Result.005 file - promoters50/1450785
gcttgagcc

SEQ ID NO: 173421 - DNA, 9 bp, Unknown
  misc_feature (1)..( 9): Result.005 file - promoters50/1450785
tcttaagct

SEQ ID NO: 173422 - DNA, 9 bp, Unknown
  misc_feature (1)..( 9): Result.005 file - promoters50/1450785
gattaagct

SEQ ID NO: 173423 - DNA, 9 bp, Unknown
  misc_feature (1)..( 9): Result.005 file - promoters50/1450785
gataaaggg

SEQ ID NO: 173424 - DNA, 8 bp, Unknown
  misc_feature (1)..( 8): Result.005 file - promoters50/1450785
tttctttt

SEQ ID NO: 173425 - DNA, 8 bp, Unknown
  misc_feature (1)..( 8): Result.005 file - promoters50/1450785
tttctttt

SEQ ID NO: 173426 - DNA, 8 bp, Unknown
  misc_feature (1)..( 8): Result.005 file - promoters50/1450785
ttccttta

SEQ ID NO: 173427 - DNA, 10 bp, Unknown
  misc_feature (1)..( 10): Result.005 file - promoters50/1450785
tctcaaaaca

SEQ ID NO: 173428 - DNA, 10 bp, Unknown
  misc_feature (1)..( 10): Result.005 file - promoters50/1450785
tctgaaaata

SEQ ID NO: 173429 - DNA, 10 bp, Unknown
  misc_feature (1)..( 10): Result.005 file - promoters50/1450785
gaccaataca

SEQ ID NO: 173430 - DNA, 8 bp, Unknown
  misc_feature (1)..( 8): Result.005 file - promoters50/1450785
ttgttaaa

SEQ ID NO: 173431 - DNA, 8 bp, Unknown
  misc_feature (1)..( 8): Result.005 file - promoters50/1450785
atgtaaaa

SEQ ID NO: 173432 - DNA, 8 bp, Unknown
  misc_feature (1)..( 8): Result.005 file - promoters50/1450785
atggaaac

SEQ ID NO: 173433 - DNA, 9 bp, Unknown
  misc_feature (1)..( 9): Result.005 file - promoters50/1450785
ttaaacaat

SEQ ID NO: 173434 - DNA, 9 bp, Unknown
  misc_feature (1)..( 9): Result.005 file - promoters50/1450785
ttaatcaat

SEQ ID NO: 173435 - DNA, 9 bp, Unknown
  misc_feature (1)..( 9): Result.005 file - promoters50/1450785
ttattcatg

SEQ ID NO: 173436 - DNA, 16 bp, Unknown
  misc_feature (1)..( 16): Result.005 file - promoters50/1450785
caacaacacaagaaga

SEQ ID NO: 173437 - DNA, 16 bp, Unknown
  misc_feature (1)..( 16): Result.005 file - promoters50/1450785
caaaaactcaagattt

SEQ ID NO: 173438 - DNA, 16 bp, Unknown
  misc_feature (1)..( 16): Result.005 file - promoters50/1450785
agagctctcaaggttt

SEQ ID NO: 173439 - DNA, 14 bp, Unknown
  misc_feature (1)..( 14): Result.005 file - promoters50/1450792
aaatctctaaaaaa

SEQ ID NO: 173440 - DNA, 14 bp, Unknown
  misc_feature (1)..( 14): Result.005 file - promoters50/1450792
ttagcactataaaa

SEQ ID NO: 173441 - DNA, 14 bp, Unknown
  misc_feature (1)..( 14): Result.005 file - promoters50/1450792
attccaaaataaaa

SEQ ID NO: 173442 - DNA, 14 bp, Unknown
  misc_feature (1)..( 14): Result.005 file - promoters50/1450792
aaatccctaaaacc

SEQ ID NO: 173443 - DNA, 14 bp, Unknown
  misc_feature (1)..( 14): Result.005 file - promoters50/1450792
aaatagaaagaaaa

SEQ ID NO: 173444 - DNA, 15 bp, Unknown
  misc_feature (1)..( 15): Result.005 file - promoters50/1450792
gagttccaaaacaaa

SEQ ID NO: 173445 - DNA, 15 bp, Unknown
  misc_feature (1)..( 15): Result.005 file - promoters50/1450792
ttcgagttataaaga

SEQ ID NO: 173446 - DNA, 8 bp, Unknown
  misc_feature (1)..( 8): Result.005 file - promoters50/1450834
aaagaaaa

SEQ ID NO: 173447 - DNA, 8 bp, Unknown
  misc_feature (1)..( 8): Result.005 file - promoters50/1450834
taagtaaa

SEQ ID NO: 173448 - DNA, 8 bp, Unknown
  misc_feature (1)..( 8): Result.005 file - promoters50/1450834
taaataat

SEQ ID NO: 173449 - DNA, 8 bp, Unknown
  misc_feature (1)..( 8): Result.005 file - promoters50/1450834
tttaattg

SEQ ID NO: 173450 - DNA, 8 bp, Unknown
  misc_feature (1)..( 8): Result.005 file - promoters50/1450834
ttttatta

SEQ ID NO: 173451 - DNA, 8 bp, Unknown
  misc_feature (1)..( 8): Result.005 file - promoters50/1450834
gtttatta

SEQ ID NO: 173452 - DNA, 10 bp, Unknown
  misc_feature (1)..( 10): Result.005 file - promoters50/1450834
agaactttct

SEQ ID NO: 173453 - DNA, 10 bp, Unknown
  misc_feature (1)..( 10): Result.005 file - promoters50/1450834
caaacattct

SEQ ID NO: 173454 - DNA, 10 bp, Unknown
  misc_feature (1)..( 10): Result.005 file - promoters50/1450834
agatcttata

SEQ ID NO: 173455 - DNA, 11 bp, Unknown
  misc_feature (1)..( 11): Result.005 file - promoters50/1450834
tttgtttgatt

SEQ ID NO: 173456 - DNA, 11 bp, Unknown
  misc_feature (1)..( 11): Result.005 file - promoters50/1450834
tttgtatgatt

SEQ ID NO: 173457 - DNA, 11 bp, Unknown
  misc_feature (1)..( 11): Result.005 file - promoters50/1450834
cgaatttgatt

SEQ ID NO: 173458 - DNA, 9 bp, Unknown
  misc_feature (1)..( 9): Result.005 file - promoters50/1455879
agtatataa

SEQ ID NO: 173459 - DNA, 9 bp, Unknown
  misc_feature (1)..( 9): Result.005 file - promoters50/1455879
tgtatatat

SEQ ID NO: 173460 - DNA, 9 bp, Unknown
  misc_feature (1)..( 9): Result.005 file - promoters50/1455879
catatatac

SEQ ID NO: 173461 - DNA, 9 bp, Unknown
  misc_feature (1)..( 9): Result.005 file - promoters50/1455879
catatttac

SEQ ID NO: 173462 - DNA, 11 bp, Unknown
  misc_feature (1)..( 11): Result.005 file - promoters50/1455908
tttcatacaac

SEQ ID NO: 173463 - DNA, 11 bp, Unknown
  misc_feature (1)..( 11): Result.005 file - promoters50/1455908
tttaataattt

SEQ ID NO: 173464 - DNA, 11 bp, Unknown
  misc_feature (1)..( 11): Result.005 file - promoters50/1455908
ggtaataatgt

SEQ ID NO: 173465 - DNA, 11 bp, Unknown
  misc_feature (1)..( 11): Result.005 file - promoters50/1455908
cttaatagatg

SEQ ID NO: 173466 - DNA, 11 bp, Unknown
  misc_feature (1)..( 11): Result.005 file - promoters50/1455908
atgaatcatgt

SEQ ID NO: 173467 - DNA, 11 bp, Unknown
  misc_feature (1)..( 11): Result.005 file - promoters50/1455908
cttatttgttc

SEQ ID NO: 173468 - DNA, 11 bp, Unknown
  misc_feature (1)..( 11): Result.005 file - promoters50/1455908
aatatttgtaa

SEQ ID NO: 173469 - DNA, 11 bp, Unknown
  misc_feature (1)..( 11): Result.005 file - promoters50/1455908
tggatttattc

SEQ ID NO: 173470 - DNA, 11 bp, Unknown
  misc_feature (1)..( 11): Result.005 file - promoters50/1455908
tggatttaaca

SEQ ID NO: 173471 - DNA, 11 bp, Unknown
  misc_feature (1)..( 11): Result.005 file - promoters50/1455908
ttaattgaact

SEQ ID NO: 173472 - DNA, 10 bp, Unknown
  misc_feature (1)..( 10): Result.005 file - promoters50/1455908
tatatttaaa

SEQ ID NO: 173473 - DNA, 10 bp, Unknown
  misc_feature (1)..( 10): Result.005 file - promoters50/1455908
aatgtttaaa

SEQ ID NO: 173474 - DNA, 10 bp, Unknown
  misc_feature (1)..( 10): Result.005 file - promoters50/1455908
tggatttaac

SEQ ID NO: 173475 - DNA, 10 bp, Unknown
  misc_feature (1)..( 10): Result.005 file - promoters50/1455908
tggatttatt

SEQ ID NO: 173476 - DNA, 7 bp, Unknown
  misc_feature (1)..( 7): Result.005 file - promoters50/1455912
aaagaat

SEQ ID NO: 173477 - DNA, 7 bp, Unknown
  misc_feature (1)..( 7): Result.005 file - promoters50/1455912
aaacaat

SEQ ID NO: 173478 - DNA, 7 bp, Unknown
  misc_feature (1)..( 7): Result.005 file - promoters50/1455912
aaacaaa

SEQ ID NO: 173479 - DNA, 7 bp, Unknown
  misc_feature (1)..( 7): Result.005 file - promoters50/1455912
ttggtta

SEQ ID NO: 173480 - DNA, 7 bp, Unknown
  misc_feature (1)..( 7): Result.005 file - promoters50/1455912
ttggtta

SEQ ID NO: 173481 - DNA, 7 bp, Unknown
  misc_feature (1)..( 7): Result.005 file - promoters50/1455912
ttgctta

SEQ ID NO: 173482 - DNA, 8 bp, Unknown
  misc_feature (1)..( 8): Result.005 file - promoters50/1455916
cattttga

SEQ ID NO: 173483 - DNA, 8 bp, Unknown
  misc_feature (1)..( 8): Result.005 file - promoters50/1455916
catttttt

SEQ ID NO: 173484 - DNA, 9 bp, Unknown
  misc_feature (1)..( 9): Result.005 file - promoters50/1455916
aattgtttt

SEQ ID NO: 173485 - DNA, 11 bp, Unknown
  misc_feature (1)..( 11): Result.005 file - promoters50/1455916
atacattataa

SEQ ID NO: 173486 - DNA, 11 bp, Unknown
  misc_feature (1)..( 11): Result.005 file - promoters50/1455916
tttttttataa

SEQ ID NO: 173487 - DNA, 11 bp, Unknown
  misc_feature (1)..( 11): Result.005 file - promoters50/1455916
tttatttatac

SEQ ID NO: 173488 - DNA, 8 bp, Unknown
  misc_feature (1)..( 8): Result.005 file - promoters50/1455916
ctcttaga

SEQ ID NO: 173489 - DNA, 8 bp, Unknown
  misc_feature (1)..( 8): Result.005 file - promoters50/1455916
ctcttaaa

SEQ ID NO: 173490 - DNA, 8 bp, Unknown
  misc_feature (1)..( 8): Result.005 file - promoters50/1455916
gtctaaaa

SEQ ID NO: 173491 - DNA, 8 bp, Unknown
  misc_feature (1)..( 8): Result.005 file - promoters50/1455928
atgtattt

SEQ ID NO: 173492 - DNA, 8 bp, Unknown
  misc_feature (1)..( 8): Result.005 file - promoters50/1455928
ctgtgttt

SEQ ID NO: 173493 - DNA, 8 bp, Unknown
  misc_feature (1)..( 8): Result.005 file - promoters50/1455928
atgtcttt

SEQ ID NO: 173494 - DNA, 8 bp, Unknown
  misc_feature (1)..( 8): Result.005 file - promoters50/1455928
aggtattt

SEQ ID NO: 173495 - DNA, 14 bp, Unknown
  misc_feature (1)..( 14): Result.005 file - promoters50/1455928
aattagtaaaaaac

SEQ ID NO: 173496 - DNA, 14 bp, Unknown
  misc_feature (1)..( 14): Result.005 file - promoters50/1455928
tttatccaaaaaac

SEQ ID NO: 173497 - DNA, 14 bp, Unknown
  misc_feature (1)..( 14): Result.005 file - promoters50/1455928
aattaataaaaact

SEQ ID NO: 173498 - DNA, 14 bp, Unknown
  misc_feature (1)..( 14): Result.005 file - promoters50/1455928
taacaatataaatg

SEQ ID NO: 173499 - DNA, 9 bp, Unknown
  misc_feature (1)..( 9): Result.005 file - promoters50/1455932
taataaagt

SEQ ID NO: 173500 - DNA, 9 bp, Unknown
  misc_feature (1)..( 9): Result.005 file - promoters50/1455932
caatatagt

SEQ ID NO: 173501 - DNA, 9 bp, Unknown
  misc_feature (1)..( 9): Result.005 file - promoters50/1455932
taaaaaaga

SEQ ID NO: 173502 - DNA, 8 bp, Unknown
  misc_feature (1)..( 8): Result.005 file - promoters50/1455932
atttgtat

SEQ ID NO: 173503 - DNA, 8 bp, Unknown
  misc_feature (1)..( 8): Result.005 file - promoters50/1455932
attggtag

SEQ ID NO: 173504 - DNA, 8 bp, Unknown
  misc_feature (1)..( 8): Result.005 file - promoters50/1455932
atttttat

SEQ ID NO: 173505 - DNA, 9 bp, Unknown
  misc_feature (1)..( 9): Result.005 file - promoters50/1455932
atgtctttg

SEQ ID NO: 173506 - DNA, 9 bp, Unknown
  misc_feature (1)..( 9): Result.005 file - promoters50/1455932
atgtttttg

SEQ ID NO: 173507 - DNA, 9 bp, Unknown
  misc_feature (1)..( 9): Result.005 file - promoters50/1455932
tggtttttc

SEQ ID NO: 173508 - DNA, 8 bp, Unknown
  misc_feature (1)..( 8): Result.005 file - promoters50/1455932
aaaaacaa

SEQ ID NO: 173509 - DNA, 8 bp, Unknown
  misc_feature (1)..( 8): Result.005 file - promoters50/1455932
aaaaactt

SEQ ID NO: 173510 - DNA, 8 bp, Unknown
  misc_feature (1)..( 8): Result.005 file - promoters50/1455932
taaatcaa

SEQ ID NO: 173511 - DNA, 11 bp, Unknown
  misc_feature (1)..( 11): Result.005 file - promoters50/1455932
ccttttattta

SEQ ID NO: 173512 - DNA, 11 bp, Unknown
  misc_feature (1)..( 11): Result.005 file - promoters50/1455932
ccttttgtttt

SEQ ID NO: 173513 - DNA, 11 bp, Unknown
  misc_feature (1)..( 11): Result.005 file - promoters50/1455932
ggatatgtttt

SEQ ID NO: 173514 - DNA, 11 bp, Unknown
  misc_feature (1)..( 11): Result.005 file - promoters50/1455932
aagcctttgaa

SEQ ID NO: 173515 - DNA, 11 bp, Unknown
  misc_feature (1)..( 11): Result.005 file - promoters50/1455932
aagcttttctt

SEQ ID NO: 173516 - DNA, 11 bp, Unknown
  misc_feature (1)..( 11): Result.005 file - promoters50/1455932
tttcttctctt

SEQ ID NO: 173517 - DNA, 7 bp, Unknown
  misc_feature (1)..( 7): Result.005 file - promoters50/1455936
ttagtta

SEQ ID NO: 173518 - DNA, 7 bp, Unknown
  misc_feature (1)..( 7): Result.005 file - promoters50/1455936
ttagttt

SEQ ID NO: 173519 - DNA, 7 bp, Unknown
  misc_feature (1)..( 7): Result.005 file - promoters50/1455936
ttaatta

SEQ ID NO: 173520 - DNA, 9 bp, Unknown
  misc_feature (1)..( 9): Result.005 file - promoters50/1455936
aaaagctaa

SEQ ID NO: 173521 - DNA, 9 bp, Unknown
  misc_feature (1)..( 9): Result.005 file - promoters50/1455936
aaatgctct

SEQ ID NO: 173522 - DNA, 9 bp, Unknown
  misc_feature (1)..( 9): Result.005 file - promoters50/1455936
aaaagctaa

SEQ ID NO: 173523 - DNA, 7 bp, Unknown
  misc_feature (1)..( 7): Result.005 file - promoters50/1455936
aatttaa

SEQ ID NO: 173524 - DNA, 7 bp, Unknown
  misc_feature (1)..( 7): Result.005 file - promoters50/1455936
aatttag

SEQ ID NO: 173525 - DNA, 7 bp, Unknown
  misc_feature (1)..( 7): Result.005 file - promoters50/1455936
gatttag

SEQ ID NO: 173526 - DNA, 8 bp, Unknown
  misc_feature (1)..( 8): Result.005 file - promoters50/1455936
aaaaatac

SEQ ID NO: 173527 - DNA, 8 bp, Unknown
  misc_feature (1)..( 8): Result.005 file - promoters50/1455936
aaaaataa

SEQ ID NO: 173528 - DNA, 9 bp, Unknown
  misc_feature (1)..( 9): Result.005 file - promoters50/1455936
aaacaataa

SEQ ID NO: 173529 - DNA, 8 bp, Unknown
  misc_feature (1)..( 8): Result.005 file - promoters50/1455936
aatataaa

SEQ ID NO: 173530 - DNA, 8 bp, Unknown
  misc_feature (1)..( 8): Result.005 file - promoters50/1455936
aatctaaa

SEQ ID NO: 173531 - DNA, 8 bp, Unknown
  misc_feature (1)..( 8): Result.005 file - promoters50/1455936
catataat

SEQ ID NO: 173532 - DNA, 8 bp, Unknown
  misc_feature (1)..( 8): Result.005 file - promoters50/1455936
atgaaaag

SEQ ID NO: 173533 - DNA, 8 bp, Unknown
  misc_feature (1)..( 8): Result.005 file - promoters50/1455936
atgaaaag

SEQ ID NO: 173534 - DNA, 8 bp, Unknown
  misc_feature (1)..( 8): Result.005 file - promoters50/1455936
ctgaaaat

SEQ ID NO: 173535 - DNA, 11 bp, Unknown
  misc_feature (1)..( 11): Result.005 file - promoters50/1455944
tgctaaaattg

SEQ ID NO: 173536 - DNA, 11 bp, Unknown
  misc_feature (1)..( 11): Result.005 file - promoters50/1455944
acgtaagattg

SEQ ID NO: 173537 - DNA, 11 bp, Unknown
  misc_feature (1)..( 11): Result.005 file - promoters50/1455944
aaataaaatgt

SEQ ID NO: 173538 - DNA, 11 bp, Unknown
  misc_feature (1)..( 11): Result.005 file - promoters50/1455944
aaagaaaacat

SEQ ID NO: 173539 - DNA, 11 bp, Unknown
  misc_feature (1)..( 11): Result.005 file - promoters50/1455944
atgtaatatgt

SEQ ID NO: 173540 - DNA, 12 bp, Unknown
  misc_feature (1)..( 12): Result.005 file - promoters50/1455944
aaaagaaaacaa

SEQ ID NO: 173541 - DNA, 12 bp, Unknown
  misc_feature (1)..( 12): Result.005 file - promoters50/1455944
taaataaagctt

SEQ ID NO: 173542 - DNA, 12 bp, Unknown
  misc_feature (1)..( 12): Result.005 file - promoters50/1455944
aaaatagattga

SEQ ID NO: 173543 - DNA, 12 bp, Unknown
  misc_feature (1)..( 12): Result.005 file - promoters50/1455944
taaagagataca

SEQ ID NO: 173544 - DNA, 12 bp, Unknown
  misc_feature (1)..( 12): Result.005 file - promoters50/1455944
acaataaagtag

SEQ ID NO: 173545 - DNA, 11 bp, Unknown
  misc_feature (1)..( 11): Result.005 file - promoters50/1455944
ttatttaaaca

SEQ ID NO: 173546 - DNA, 11 bp, Unknown
  misc_feature (1)..( 11): Result.005 file - promoters50/1455944
ctatataaacc

SEQ ID NO: 173547 - DNA, 11 bp, Unknown
  misc_feature (1)..( 11): Result.005 file - promoters50/1455944
ctatataatag

SEQ ID NO: 173548 - DNA, 11 bp, Unknown
  misc_feature (1)..( 11): Result.005 file - promoters50/1455944
gtatatatacc

SEQ ID NO: 173549 - DNA, 11 bp, Unknown
  misc_feature (1)..( 11): Result.005 file - promoters50/1455944
ctaaataaata

SEQ ID NO: 173550 - DNA, 9 bp, Unknown
  misc_feature (1)..( 9): Result.005 file - promoters50/1455948
tttcttgaa

SEQ ID NO: 173551 - DNA, 9 bp, Unknown
  misc_feature (1)..( 9): Result.005 file - promoters50/1455948
tttattgat

SEQ ID NO: 173552 - DNA, 9 bp, Unknown
  misc_feature (1)..( 9): Result.005 file - promoters50/1455948
ggtctagaa

SEQ ID NO: 173553 - DNA, 9 bp, Unknown
  misc_feature (1)..( 9): Result.005 file - promoters50/1455948
caaaacaaa

SEQ ID NO: 173554 - DNA, 9 bp, Unknown
  misc_feature (1)..( 9): Result.005 file - promoters50/1455948
aaaagcaaa

SEQ ID NO: 173555 - DNA, 9 bp, Unknown
  misc_feature (1)..( 9): Result.005 file - promoters50/1455948
caaaactcc

SEQ ID NO: 173556 - DNA, 8 bp, Unknown
  misc_feature (1)..( 8): Result.005 file - promoters50/1455948
tcaaaaaa

SEQ ID NO: 173557 - DNA, 8 bp, Unknown
  misc_feature (1)..( 8): Result.005 file - promoters50/1455948
ataaaaaa

SEQ ID NO: 173558 - DNA, 8 bp, Unknown
  misc_feature (1)..( 8): Result.005 file - promoters50/1455948
tcacaaag

SEQ ID NO: 173559 - DNA, 11 bp, Unknown
  misc_feature (1)..( 11): Result.005 file - promoters50/1455956
taaatttgtta

SEQ ID NO: 173560 - DNA, 11 bp, Unknown
  misc_feature (1)..( 11): Result.005 file - promoters50/1455956
taattttttca

SEQ ID NO: 173561 - DNA, 11 bp, Unknown
  misc_feature (1)..( 11): Result.005 file - promoters50/1455956
caaattttttt

SEQ ID NO: 173562 - DNA, 11 bp, Unknown
  misc_feature (1)..( 11): Result.005 file - promoters50/1455956
aagattcattg

SEQ ID NO: 173563 - DNA, 11 bp, Unknown
  misc_feature (1)..( 11): Result.005 file - promoters50/1455956
ttaattgtctc

SEQ ID NO: 173564 - DNA, 11 bp, Unknown
  misc_feature (1)..( 11): Result.005 file - promoters50/1455956
gatatttattt

SEQ ID NO: 173565 - DNA, 12 bp, Unknown
  misc_feature (1)..( 12): Result.005 file - promoters50/1455972
cacaaacataac

SEQ ID NO: 173566 - DNA, 12 bp, Unknown
  misc_feature (1)..( 12): Result.005 file - promoters50/1455972
ttcaaatatatt

SEQ ID NO: 173567 - DNA, 12 bp, Unknown
  misc_feature (1)..( 12): Result.005 file - promoters50/1455972
agtaaaaatatc

SEQ ID NO: 173568 - DNA, 12 bp, Unknown
  misc_feature (1)..( 12): Result.005 file - promoters50/1455972
aacaatcatcca

SEQ ID NO: 173569 - DNA, 12 bp, Unknown
  misc_feature (1)..( 12): Result.005 file - promoters50/1455972
gacagacagaaa

SEQ ID NO: 173570 - DNA, 12 bp, Unknown
  misc_feature (1)..( 12): Result.005 file - promoters50/1455972
ttcagataaaac

SEQ ID NO: 173571 - DNA, 12 bp, Unknown
  misc_feature (1)..( 12): Result.005 file - promoters50/1455972
aaaccatatatt

SEQ ID NO: 173572 - DNA, 16 bp, Unknown
  misc_feature (1)..( 16): Result.005 file - promoters50/1455972
aggttaatcacaatgc

SEQ ID NO: 173573 - DNA, 16 bp, Unknown
  misc_feature (1)..( 16): Result.005 file - promoters50/1455972
aatattttcaaaatca

SEQ ID NO: 173574 - DNA, 16 bp, Unknown
  misc_feature (1)..( 16): Result.005 file - promoters50/1455972
aataattttaaaaaag

SEQ ID NO: 173575 - DNA, 16 bp, Unknown
  misc_feature (1)..( 16): Result.005 file - promoters50/1455972
caaataagcaaaaatg

SEQ ID NO: 173576 - DNA, 16 bp, Unknown
  misc_feature (1)..( 16): Result.005 file - promoters50/1455972
tagggtttcgaaatct

SEQ ID NO: 173577 - DNA, 17 bp, Unknown
  misc_feature (1)..( 17): Result.005 file - promoters50/1455972
aggacagtcaaatatga

SEQ ID NO: 173578 - DNA, 11 bp, Unknown
  misc_feature (1)..( 11): Result.005 file - promoters50/1456000
aacaaaacaaa

SEQ ID NO: 173579 - DNA, 11 bp, Unknown
  misc_feature (1)..( 11): Result.005 file - promoters50/1456000
aacaaaacaaa

SEQ ID NO: 173580 - DNA, 12 bp, Unknown
  misc_feature (1)..( 12): Result.005 file - promoters50/1456000
gacataaattca

SEQ ID NO: 173581 - DNA, 12 bp, Unknown
  misc_feature (1)..( 12): Result.005 file - promoters50/1456000
tacaaaaacatt

SEQ ID NO: 173582 - DNA, 12 bp, Unknown
  misc_feature (1)..( 12): Result.005 file - promoters50/1456000
aaaaaaaaaaaa

SEQ ID NO: 173583 - DNA, 12 bp, Unknown
  misc_feature (1)..( 12): Result.005 file - promoters50/1456000
aaacaaaaaaaa

SEQ ID NO: 173584 - DNA, 12 bp, Unknown
  misc_feature (1)..( 12): Result.005 file - promoters50/1456000
tgacataaattc

SEQ ID NO: 173585 - DNA, 10 bp, Unknown
  misc_feature (1)..( 10): Result.005 file - promoters50/1456000
gagtaacaat

SEQ ID NO: 173586 - DNA, 10 bp, Unknown
  misc_feature (1)..( 10): Result.005 file - promoters50/1456000
gagcaacaga

SEQ ID NO: 173587 - DNA, 10 bp, Unknown
  misc_feature (1)..( 10): Result.005 file - promoters50/1456000
aaccaaaaga

SEQ ID NO: 173588 - DNA, 11 bp, Unknown
  misc_feature (1)..( 11): Result.005 file - promoters50/1456000
agaaaacaatc

SEQ ID NO: 173589 - DNA, 11 bp, Unknown
  misc_feature (1)..( 11): Result.005 file - promoters50/1456000
ataaaaaaatt

SEQ ID NO: 173590 - DNA, 11 bp, Unknown
  misc_feature (1)..( 11): Result.005 file - promoters50/1456000
tttaaaaaatc

SEQ ID NO: 173591 - DNA, 11 bp, Unknown
  misc_feature (1)..( 11): Result.005 file - promoters50/1456000
agaaaacaaaa

SEQ ID NO: 173592 - DNA, 13 bp, Unknown
  misc_feature (1)..( 13): Result.005 file - promoters50/1456000
gagtaaacacatc

SEQ ID NO: 173593 - DNA, 13 bp, Unknown
  misc_feature (1)..( 13): Result.005 file - promoters50/1456000
caaaaaaaacaaa

SEQ ID NO: 173594 - DNA, 13 bp, Unknown
  misc_feature (1)..( 13): Result.005 file - promoters50/1456000
caagaaaaaaaaa

SEQ ID NO: 173595 - DNA, 9 bp, Unknown
  misc_feature (1)..( 9): Result.005 file - promoters50/1456000
taaacaaag

SEQ ID NO: 173596 - DNA, 9 bp, Unknown
  misc_feature (1)..( 9): Result.005 file - promoters50/1456000
taaaaaaaa

SEQ ID NO: 173597 - DNA, 9 bp, Unknown
  misc_feature (1)..( 9): Result.005 file - promoters50/1456000
aaaagaaag

SEQ ID NO: 173598 - DNA, 8 bp, Unknown
  misc_feature (1)..( 8): Result.005 file - promoters50/1456000
caacagaa

SEQ ID NO: 173599 - DNA, 8 bp, Unknown
  misc_feature (1)..( 8): Result.005 file - promoters50/1456000
caaaagaa

SEQ ID NO: 173600 - DNA, 8 bp, Unknown
  misc_feature (1)..( 8): Result.005 file - promoters50/1456000
caacagat

SEQ ID NO: 173601 - DNA, 8 bp, Unknown
  misc_feature (1)..( 8): Result.005 file - promoters50/1456000
caaatatt

SEQ ID NO: 173602 - DNA, 8 bp, Unknown
  misc_feature (1)..( 8): Result.005 file - promoters50/1456000
aaaacatt

SEQ ID NO: 173603 - DNA, 8 bp, Unknown
  misc_feature (1)..( 8): Result.005 file - promoters50/1456000
aaaacaaa

SEQ ID NO: 173604 - DNA, 9 bp, Unknown
  misc_feature (1)..( 9): Result.005 file - promoters50/1456000
aaaatcatg

SEQ ID NO: 173605 - DNA, 9 bp, Unknown
  misc_feature (1)..( 9): Result.005 file - promoters50/1456000
ccaaaatta

SEQ ID NO: 173606 - DNA, 9 bp, Unknown
  misc_feature (1)..( 9): Result.005 file - promoters50/1456000
ccaaaaaag

SEQ ID NO: 173607 - DNA, 9 bp, Unknown
  misc_feature (1)..( 9): Result.005 file - promoters50/1456000
ccaaattta

SEQ ID NO: 173608 - DNA, 9 bp, Unknown
  misc_feature (1)..( 9): Result.005 file - promoters50/1456064
tacttaaaa

SEQ ID NO: 173609 - DNA, 9 bp, Unknown
  misc_feature (1)..( 9): Result.005 file - promoters50/1456064
agcttcaaa

SEQ ID NO: 173610 - DNA, 9 bp, Unknown
  misc_feature (1)..( 9): Result.005 file - promoters50/1456064
tttttaaaa

SEQ ID NO: 173611 - DNA, 9 bp, Unknown
  misc_feature (1)..( 9): Result.005 file - promoters50/1456064
tttttaaac

SEQ ID NO: 173612 - DNA, 8 bp, Unknown
  misc_feature (1)..( 8): Result.005 file - promoters50/1456064
gaaccttt

SEQ ID NO: 173613 - DNA, 8 bp, Unknown
  misc_feature (1)..( 8): Result.005 file - promoters50/1456064
aaactttt

SEQ ID NO: 173614 - DNA, 8 bp, Unknown
  misc_feature (1)..( 8): Result.005 file - promoters50/1456064
gaacctgc

SEQ ID NO: 173615 - DNA, 8 bp, Unknown
  misc_feature (1)..( 8): Result.005 file - promoters50/1456083
tatatata

SEQ ID NO: 173616 - DNA, 8 bp, Unknown
  misc_feature (1)..( 8): Result.005 file - promoters50/1456083
tatatatt

SEQ ID NO: 173617 - DNA, 8 bp, Unknown
  misc_feature (1)..( 8): Result.005 file - promoters50/1456083
tatatata

SEQ ID NO: 173618 - DNA, 8 bp, Unknown
  misc_feature (1)..( 8): Result.005 file - promoters50/1456083
tatataaa

SEQ ID NO: 173619 - DNA, 8 bp, Unknown
  misc_feature (1)..( 8): Result.005 file - promoters50/1456083
tatttata

SEQ ID NO: 173620 - DNA, 8 bp, Unknown
  misc_feature (1)..( 8): Result.005 file - promoters50/1456083
tttaaatt

SEQ ID NO: 173621 - DNA, 10 bp, Unknown
  misc_feature (1)..( 10): Result.005 file - promoters50/1456128
gttttttttt

SEQ ID NO: 173622 - DNA, 10 bp, Unknown
  misc_feature (1)..( 10): Result.005 file - promoters50/1456128
atttatttgt

SEQ ID NO: 173623 - DNA, 10 bp, Unknown
  misc_feature (1)..( 10): Result.005 file - promoters50/1456128
ttttattctc

SEQ ID NO: 173624 - DNA, 9 bp, Unknown
  misc_feature (1)..( 9): Result.005 file - promoters50/1456128
tttattaaa

SEQ ID NO: 173625 - DNA, 9 bp, Unknown
  misc_feature (1)..( 9): Result.005 file - promoters50/1456128
tgtatcaaa

SEQ ID NO: 173626 - DNA, 9 bp, Unknown
  misc_feature (1)..( 9): Result.005 file - promoters50/1456128
tttaataaa

SEQ ID NO: 173627 - DNA, 7 bp, Unknown
  misc_feature (1)..( 7): Result.005 file - promoters50/1456128
agaaaaa

SEQ ID NO: 173628 - DNA, 7 bp, Unknown
  misc_feature (1)..( 7): Result.005 file - promoters50/1456128
agaaaaa

SEQ ID NO: 173629 - DNA, 7 bp, Unknown
  misc_feature (1)..( 7): Result.005 file - promoters50/1456128
agaaaat

SEQ ID NO: 173630 - DNA, 8 bp, Unknown
  misc_feature (1)..( 8): Result.005 file - promoters50/1456128
aaaaaaaa

SEQ ID NO: 173631 - DNA, 8 bp, Unknown
  misc_feature (1)..( 8): Result.005 file - promoters50/1456128
gaaaaaaa

SEQ ID NO: 173632 - DNA, 8 bp, Unknown
  misc_feature (1)..( 8): Result.005 file - promoters50/1456128
gaataaat

SEQ ID NO: 173633 - DNA, 11 bp, Unknown
  misc_feature (1)..( 11): Result.005 file - promoters50/1456131
tttcatcaata

SEQ ID NO: 173634 - DNA, 11 bp, Unknown
  misc_feature (1)..( 11): Result.005 file - promoters50/1456131
cctcaacaaat

SEQ ID NO: 173635 - DNA, 11 bp, Unknown
  misc_feature (1)..( 11): Result.005 file - promoters50/1456131
ttttatcaata

SEQ ID NO: 173636 - DNA, 14 bp, Unknown
  misc_feature (1)..( 14): Result.005 file - promoters50/1456131
ctacaacaattatc

SEQ ID NO: 173637 - DNA, 14 bp, Unknown
  misc_feature (1)..( 14): Result.005 file - promoters50/1456131
agagaaccattggg

SEQ ID NO: 173638 - DNA, 14 bp, Unknown
  misc_feature (1)..( 14): Result.005 file - promoters50/1456131
caaaatcaatgatc

SEQ ID NO: 173639 - DNA, 14 bp, Unknown
  misc_feature (1)..( 14): Result.005 file - promoters50/1456131
caaaagcaatgtcc

SEQ ID NO: 173640 - DNA, 10 bp, Unknown
  misc_feature (1)..( 10): Result.005 file - promoters50/1456228
aaagaaaacc

SEQ ID NO: 173641 - DNA, 10 bp, Unknown
  misc_feature (1)..( 10): Result.005 file - promoters50/1456228
ttggaaaacc

SEQ ID NO: 173642 - DNA, 10 bp, Unknown
  misc_feature (1)..( 10): Result.005 file - promoters50/1456228
aaagaaaaaa

SEQ ID NO: 173643 - DNA, 8 bp, Unknown
  misc_feature (1)..( 8): Result.005 file - promoters50/1456228
tatttaaa

SEQ ID NO: 173644 - DNA, 8 bp, Unknown
  misc_feature (1)..( 8): Result.005 file - promoters50/1456228
tatataaa

SEQ ID NO: 173645 - DNA, 8 bp, Unknown
  misc_feature (1)..( 8): Result.005 file - promoters50/1456228
tatttatt

SEQ ID NO: 173646 - DNA, 10 bp, Unknown
  misc_feature (1)..( 10): Result.005 file - promoters50/1456228
aaatatgaat

SEQ ID NO: 173647 - DNA, 10 bp, Unknown
  misc_feature (1)..( 10): Result.005 file - promoters50/1456228
aaatatctta

SEQ ID NO: 173648 - DNA, 10 bp, Unknown
  misc_feature (1)..( 10): Result.005 file - promoters50/1456228
aaataaaata

SEQ ID NO: 173649 - DNA, 8 bp, Unknown
  misc_feature (1)..( 8): Result.005 file - promoters50/1456239
tacacaca

SEQ ID NO: 173650 - DNA, 8 bp, Unknown
  misc_feature (1)..( 8): Result.005 file - promoters50/1456239
tacacaaa

SEQ ID NO: 173651 - DNA, 8 bp, Unknown
  misc_feature (1)..( 8): Result.005 file - promoters50/1456239
cacaaaaa

SEQ ID NO: 173652 - DNA, 8 bp, Unknown
  misc_feature (1)..( 8): Result.005 file - promoters50/1456622
aaatattt

SEQ ID NO: 173653 - DNA, 8 bp, Unknown
  misc_feature (1)..( 8): Result.005 file - promoters50/1456622
taattttt

SEQ ID NO: 173654 - DNA, 8 bp, Unknown
  misc_feature (1)..( 8): Result.005 file - promoters50/1456622
aaatatag

SEQ ID NO: 173655 - DNA, 10 bp, Unknown
  misc_feature (1)..( 10): Result.005 file - promoters50/1456622
tataattatt

SEQ ID NO: 173656 - DNA, 10 bp, Unknown
  misc_feature (1)..( 10): Result.005 file - promoters50/1456622
gataattagt

SEQ ID NO: 173657 - DNA, 10 bp, Unknown
  misc_feature (1)..( 10): Result.005 file - promoters50/1456622
tattattatt

SEQ ID NO: 173658 - DNA, 11 bp, Unknown
  misc_feature (1)..( 11): Result.005 file - promoters50/1458991
agaattttttt

SEQ ID NO: 173659 - DNA, 11 bp, Unknown
  misc_feature (1)..( 11): Result.005 file - promoters50/1458991
tgaagtttttg

SEQ ID NO: 173660 - DNA, 11 bp, Unknown
  misc_feature (1)..( 11): Result.005 file - promoters50/1458991
gaggttttttt

SEQ ID NO: 173661 - DNA, 11 bp, Unknown
  misc_feature (1)..( 11): Result.005 file - promoters50/1458991
aatattttttt

SEQ ID NO: 173662 - DNA, 11 bp, Unknown
  misc_feature (1)..( 11): Result.005 file - promoters50/1458991
agactttgctt

SEQ ID NO: 173663 - DNA, 11 bp, Unknown
  misc_feature (1)..( 11): Result.005 file - promoters50/1458991
cacagttttag

SEQ ID NO: 173664 - DNA, 8 bp, Unknown
  misc_feature (1)..( 8): Result.005 file - promoters50/1459039
actataaa

SEQ ID NO: 173665 - DNA, 8 bp, Unknown
  misc_feature (1)..( 8): Result.005 file - promoters50/1459039
actataaa

SEQ ID NO: 173666 - DNA, 8 bp, Unknown
  misc_feature (1)..( 8): Result.005 file - promoters50/1459039
catataaa

SEQ ID NO: 173667 - DNA, 8 bp, Unknown
  misc_feature (1)..( 8): Result.005 file - promoters50/1459039
actataaa

SEQ ID NO: 173668 - DNA, 8 bp, Unknown
  misc_feature (1)..( 8): Result.005 file - promoters50/1459039
aatataaa

SEQ ID NO: 173669 - DNA, 8 bp, Unknown
  misc_feature (1)..( 8): Result.005 file - promoters50/1459039
tatataaa

SEQ ID NO: 173670 - DNA, 13 bp, Unknown
  misc_feature (1)..( 13): Result.005 file - promoters50/1459199
taatttatttgtg

SEQ ID NO: 173671 - DNA, 13 bp, Unknown
  misc_feature (1)..( 13): Result.005 file - promoters50/1459199
tcgtttacttgct

SEQ ID NO: 173672 - DNA, 13 bp, Unknown
  misc_feature (1)..( 13): Result.005 file - promoters50/1459199
tactttattctta

SEQ ID NO: 173673 - DNA, 13 bp, Unknown
  misc_feature (1)..( 13): Result.005 file - promoters50/1459199
acatttttttctg

SEQ ID NO: 173674 - DNA, 13 bp, Unknown
  misc_feature (1)..( 13): Result.005 file - promoters50/1459199
acatttattagtg

SEQ ID NO: 173675 - DNA, 13 bp, Unknown
  misc_feature (1)..( 13): Result.005 file - promoters50/1459199
taaattattctca

SEQ ID NO: 173676 - DNA, 12 bp, Unknown
  misc_feature (1)..( 12): Result.005 file - promoters50/1459199
ttaatatcttct

SEQ ID NO: 173677 - DNA, 12 bp, Unknown
  misc_feature (1)..( 12): Result.005 file - promoters50/1459199
tatttattttct

SEQ ID NO: 173678 - DNA, 12 bp, Unknown
  misc_feature (1)..( 12): Result.005 file - promoters50/1459199
attatattttca

SEQ ID NO: 173679 - DNA, 12 bp, Unknown
  misc_feature (1)..( 12): Result.005 file - promoters50/1459199
gttagatttttg

SEQ ID NO: 173680 - DNA, 12 bp, Unknown
  misc_feature (1)..( 12): Result.005 file - promoters50/1459199
gtttgatctttt

SEQ ID NO: 173681 - DNA, 12 bp, Unknown
  misc_feature (1)..( 12): Result.005 file - promoters50/1459199
aataggttttta

SEQ ID NO: 173682 - DNA, 12 bp, Unknown
  misc_feature (1)..( 12): Result.005 file - promoters50/1459223
attttgattaaa

SEQ ID NO: 173683 - DNA, 12 bp, Unknown
  misc_feature (1)..( 12): Result.005 file - promoters50/1459223
tttttaattatt

SEQ ID NO: 173684 - DNA, 12 bp, Unknown
  misc_feature (1)..( 12): Result.005 file - promoters50/1459223
cttttgaagttt

SEQ ID NO: 173685 - DNA, 12 bp, Unknown
  misc_feature (1)..( 12): Result.005 file - promoters50/1459223
ggtttggttacg

SEQ ID NO: 173686 - DNA, 12 bp, Unknown
  misc_feature (1)..( 12): Result.005 file - promoters50/1459223
gtgataaatatt

SEQ ID NO: 173687 - DNA, 12 bp, Unknown
  misc_feature (1)..( 12): Result.005 file - promoters50/1459223
tttttatctata

SEQ ID NO: 173688 - DNA, 17 bp, Unknown
  misc_feature (1)..( 17): Result.005 file - promoters50/1459223
taaattcaatcaaatcg

SEQ ID NO: 173689 - DNA, 17 bp, Unknown
  misc_feature (1)..( 17): Result.005 file - promoters50/1459223
attatttaatctagaaa

SEQ ID NO: 173690 - DNA, 17 bp, Unknown
  misc_feature (1)..( 17): Result.005 file - promoters50/1459223
aatattcaactatacat

SEQ ID NO: 173691 - DNA, 17 bp, Unknown
  misc_feature (1)..( 17): Result.005 file - promoters50/1459223
gatgtccaaacaaaaca

SEQ ID NO: 173692 - DNA, 17 bp, Unknown
  misc_feature (1)..( 17): Result.005 file - promoters50/1459223
ttgagtcaaagaaattc

SEQ ID NO: 173693 - DNA, 17 bp, Unknown
  misc_feature (1)..( 17): Result.005 file - promoters50/1459223
atttttttatctataaa

SEQ ID NO: 173694 - DNA, 10 bp, Unknown
  misc_feature (1)..( 10): Result.005 file - promoters50/1460386
gaaaaaattg

SEQ ID NO: 173695 - DNA, 10 bp, Unknown
  misc_feature (1)..( 10): Result.005 file - promoters50/1460386
taaacaattc

SEQ ID NO: 173696 - DNA, 10 bp, Unknown
  misc_feature (1)..( 10): Result.005 file - promoters50/1460386
gaataaatag

SEQ ID NO: 173697 - DNA, 10 bp, Unknown
  misc_feature (1)..( 10): Result.005 file - promoters50/1460386
aaaaacattg

SEQ ID NO: 173698 - DNA, 7 bp, Unknown
  misc_feature (1)..( 7): Result.005 file - promoters50/1461720
aaatata

SEQ ID NO: 173699 - DNA, 7 bp, Unknown
  misc_feature (1)..( 7): Result.005 file - promoters50/1461720
aaacata

SEQ ID NO: 173700 - DNA, 7 bp, Unknown
  misc_feature (1)..( 7): Result.005 file - promoters50/1461720
atatata

SEQ ID NO: 173701 - DNA, 10 bp, Unknown
  misc_feature (1)..( 10): Result.005 file - promoters50/1461720
atttatttga

SEQ ID NO: 173702 - DNA, 10 bp, Unknown
  misc_feature (1)..( 10): Result.005 file - promoters50/1461720
ctttatatga

SEQ ID NO: 173703 - DNA, 10 bp, Unknown
  misc_feature (1)..( 10): Result.005 file - promoters50/1461720
attaattgta

SEQ ID NO: 173704 - DNA, 10 bp, Unknown
  misc_feature (1)..( 10): Result.005 file - promoters50/1461720
tagagttatt

SEQ ID NO: 173705 - DNA, 10 bp, Unknown
  misc_feature (1)..( 10): Result.005 file - promoters50/1461720
attagtaatt

SEQ ID NO: 173706 - DNA, 10 bp, Unknown
  misc_feature (1)..( 10): Result.005 file - promoters50/1461720
attaataatt

SEQ ID NO: 173707 - DNA, 7 bp, Unknown
  misc_feature (1)..( 7): Result.005 file - promoters50/1461756
agaagaa

SEQ ID NO: 173708 - DNA, 7 bp, Unknown
  misc_feature (1)..( 7): Result.005 file - promoters50/1461756
agatgaa

SEQ ID NO: 173709 - DNA, 7 bp, Unknown
  misc_feature (1)..( 7): Result.005 file - promoters50/1461756
agaagag

SEQ ID NO: 173710 - DNA, 11 bp, Unknown
  misc_feature (1)..( 11): Result.005 file - promoters50/1461768
tgtctaagaaa

SEQ ID NO: 173711 - DNA, 11 bp, Unknown
  misc_feature (1)..( 11): Result.005 file - promoters50/1461768
tcttcaagaaa

SEQ ID NO: 173712 - DNA, 11 bp, Unknown
  misc_feature (1)..( 11): Result.005 file - promoters50/1461768
ttttcgagaat

SEQ ID NO: 173713 - DNA, 11 bp, Unknown
  misc_feature (1)..( 11): Result.005 file - promoters50/1461768
gtttcaagatg

SEQ ID NO: 173714 - DNA, 11 bp, Unknown
  misc_feature (1)..( 11): Result.005 file - promoters50/1461768
gttgcaacttg

SEQ ID NO: 173715 - DNA, 11 bp, Unknown
  misc_feature (1)..( 11): Result.005 file - promoters50/1461768
ttttcaaaatg

SEQ ID NO: 173716 - DNA, 14 bp, Unknown
  misc_feature (1)..( 14): Result.005 file - promoters50/1461768
tgtattatttcagg

SEQ ID NO: 173717 - DNA, 14 bp, Unknown
  misc_feature (1)..( 14): Result.005 file - promoters50/1461768
gatattataggaaa

SEQ ID NO: 173718 - DNA, 14 bp, Unknown
  misc_feature (1)..( 14): Result.005 file - promoters50/1461768
caaattcttttatt

SEQ ID NO: 173719 - DNA, 14 bp, Unknown
  misc_feature (1)..( 14): Result.005 file - promoters50/1461768
acgattctttaaat

SEQ ID NO: 173720 - DNA, 14 bp, Unknown
  misc_feature (1)..( 14): Result.005 file - promoters50/1461768
tgttttagttaaca

SEQ ID NO: 173721 - DNA, 14 bp, Unknown
  misc_feature (1)..( 14): Result.005 file - promoters50/1461768
aagattctcttatt

SEQ ID NO: 173722 - DNA, 12 bp, Unknown
  misc_feature (1)..( 12): Result.005 file - promoters50/1461768
gtttgagtgtat

SEQ ID NO: 173723 - DNA, 12 bp, Unknown
  misc_feature (1)..( 12): Result.005 file - promoters50/1461768
atctgactgtat

SEQ ID NO: 173724 - DNA, 12 bp, Unknown
  misc_feature (1)..( 12): Result.005 file - promoters50/1461768
atgggagtgtaa

SEQ ID NO: 173725 - DNA, 12 bp, Unknown
  misc_feature (1)..( 12): Result.005 file - promoters50/1461768
gttttagttaac

SEQ ID NO: 173726 - DNA, 12 bp, Unknown
  misc_feature (1)..( 12): Result.005 file - promoters50/1461768
cttttattttca

SEQ ID NO: 173727 - DNA, 12 bp, Unknown
  misc_feature (1)..( 12): Result.005 file - promoters50/1461768
aagttagtttag

SEQ ID NO: 173728 - DNA, 14 bp, Unknown
  misc_feature (1)..( 14): Result.005 file - promoters50/1461768
tcaagaaagtttaa

SEQ ID NO: 173729 - DNA, 14 bp, Unknown
  misc_feature (1)..( 14): Result.005 file - promoters50/1461768
tcatgaaagacatt

SEQ ID NO: 173730 - DNA, 14 bp, Unknown
  misc_feature (1)..( 14): Result.005 file - promoters50/1461768
ataagaaaatgggt

SEQ ID NO: 173731 - DNA, 14 bp, Unknown
  misc_feature (1)..( 14): Result.005 file - promoters50/1461768
atttgaaactttaa

SEQ ID NO: 173732 - DNA, 14 bp, Unknown
  misc_feature (1)..( 14): Result.005 file - promoters50/1461768
attggaaacacagc

SEQ ID NO: 173733 - DNA, 14 bp, Unknown
  misc_feature (1)..( 14): Result.005 file - promoters50/1461768
catttaattttttg

SEQ ID NO: 173734 - DNA, 14 bp, Unknown
  misc_feature (1)..( 14): Result.005 file - promoters50/1461768
gaattaaacgttac

SEQ ID NO: 173735 - DNA, 10 bp, Unknown
  misc_feature (1)..( 10): Result.005 file - promoters50/1461768
attatttcag

SEQ ID NO: 173736 - DNA, 10 bp, Unknown
  misc_feature (1)..( 10): Result.005 file - promoters50/1461768
tttattttca

SEQ ID NO: 173737 - DNA, 10 bp, Unknown
  misc_feature (1)..( 10): Result.005 file - promoters50/1461768
attctttaaa

SEQ ID NO: 173738 - DNA, 11 bp, Unknown
  misc_feature (1)..( 11): Result.005 file - promoters50/1461768
attctcttatt

SEQ ID NO: 173739 - DNA, 11 bp, Unknown
  misc_feature (1)..( 11): Result.005 file - promoters50/1461768
tttgttttagt

SEQ ID NO: 173740 - DNA, 11 bp, Unknown
  misc_feature (1)..( 11): Result.005 file - promoters50/1461768
gttagtttaga

SEQ ID NO: 173741 - DNA, 14 bp, Unknown
  misc_feature (1)..( 14): Result.005 file - promoters50/1461776
ttgtttgtttttat

SEQ ID NO: 173742 - DNA, 14 bp, Unknown
  misc_feature (1)..( 14): Result.005 file - promoters50/1461776
aacttggtttttca

SEQ ID NO: 173743 - DNA, 14 bp, Unknown
  misc_feature (1)..( 14): Result.005 file - promoters50/1461776
actttggatttatt

SEQ ID NO: 173744 - DNA, 14 bp, Unknown
  misc_feature (1)..( 14): Result.005 file - promoters50/1461776
aaccttgattaatt

SEQ ID NO: 173745 - DNA, 14 bp, Unknown
  misc_feature (1)..( 14): Result.005 file - promoters50/1461776
agataagttcttaa

SEQ ID NO: 173746 - DNA, 14 bp, Unknown
  misc_feature (1)..( 14): Result.005 file - promoters50/1461776
agatgagtttgagg

SEQ ID NO: 173747 - DNA, 14 bp, Unknown
  misc_feature (1)..( 14): Result.005 file - promoters50/1461776
cctagagattgtga

SEQ ID NO: 173748 - DNA, 11 bp, Unknown
  misc_feature (1)..( 11): Result.005 file - promoters50/1461776
catattttgct

SEQ ID NO: 173749 - DNA, 11 bp, Unknown
  misc_feature (1)..( 11): Result.005 file - promoters50/1461776
aatattttgca

SEQ ID NO: 173750 - DNA, 11 bp, Unknown
  misc_feature (1)..( 11): Result.005 file - promoters50/1461776
gatatttattt

SEQ ID NO: 173751 - DNA, 11 bp, Unknown
  misc_feature (1)..( 11): Result.005 file - promoters50/1461776
aattttttgtt

SEQ ID NO: 173752 - DNA, 11 bp, Unknown
  misc_feature (1)..( 11): Result.005 file - promoters50/1461776
ccttttttgtt

SEQ ID NO: 173753 - DNA, 11 bp, Unknown
  misc_feature (1)..( 11): Result.005 file - promoters50/1461776
agtatctatat

SEQ ID NO: 173754 - DNA, 13 bp, Unknown
  misc_feature (1)..( 13): Result.005 file - promoters50/1461776
gaatcttttatct

SEQ ID NO: 173755 - DNA, 13 bp, Unknown
  misc_feature (1)..( 13): Result.005 file - promoters50/1461776
gattaatttctct

SEQ ID NO: 173756 - DNA, 13 bp, Unknown
  misc_feature (1)..( 13): Result.005 file - promoters50/1461776
acaatttttttct

SEQ ID NO: 173757 - DNA, 13 bp, Unknown
  misc_feature (1)..( 13): Result.005 file - promoters50/1461776
agataagttctta

SEQ ID NO: 173758 - DNA, 13 bp, Unknown
  misc_feature (1)..( 13): Result.005 file - promoters50/1461776
agatgagtttgag

SEQ ID NO: 173759 - DNA, 13 bp, Unknown
  misc_feature (1)..( 13): Result.005 file - promoters50/1461776
ctagagattgtga

SEQ ID NO: 173760 - DNA, 11 bp, Unknown
  misc_feature (1)..( 11): Result.005 file - promoters50/1461780
ttttctcttcc

SEQ ID NO: 173761 - DNA, 11 bp, Unknown
  misc_feature (1)..( 11): Result.005 file - promoters50/1461780
tttactccatt

SEQ ID NO: 173762 - DNA, 11 bp, Unknown
  misc_feature (1)..( 11): Result.005 file - promoters50/1461780
aatactcaatt

SEQ ID NO: 173763 - DNA, 16 bp, Unknown
  misc_feature (1)..( 16): Result.005 file - promoters50/1461784
tatcaaataatataac

SEQ ID NO: 173764 - DNA, 16 bp, Unknown
  misc_feature (1)..( 16): Result.005 file - promoters50/1461784
catcaaataataaata

SEQ ID NO: 173765 - DNA, 16 bp, Unknown
  misc_feature (1)..( 16): Result.005 file - promoters50/1461784
ttgttaattatataca

SEQ ID NO: 173766 - DNA, 16 bp, Unknown
  misc_feature (1)..( 16): Result.005 file - promoters50/1461784
tataaaatattatata

SEQ ID NO: 173767 - DNA, 16 bp, Unknown
  misc_feature (1)..( 16): Result.005 file - promoters50/1461784
gattttataatataaa

SEQ ID NO: 173768 - DNA, 16 bp, Unknown
  misc_feature (1)..( 16): Result.005 file - promoters50/1461784
tttacggttttttaat

SEQ ID NO: 173769 - DNA, 12 bp, Unknown
  misc_feature (1)..( 12): Result.005 file - promoters50/1461784
tttaaaaaaata

SEQ ID NO: 173770 - DNA, 12 bp, Unknown
  misc_feature (1)..( 12): Result.005 file - promoters50/1461784
gataaaacaatc

SEQ ID NO: 173771 - DNA, 12 bp, Unknown
  misc_feature (1)..( 12): Result.005 file - promoters50/1461784
gtttaaactatt

SEQ ID NO: 173772 - DNA, 12 bp, Unknown
  misc_feature (1)..( 12): Result.005 file - promoters50/1461784
tttcaaataaga

SEQ ID NO: 173773 - DNA, 12 bp, Unknown
  misc_feature (1)..( 12): Result.005 file - promoters50/1461784
gttaaaatctta

SEQ ID NO: 173774 - DNA, 12 bp, Unknown
  misc_feature (1)..( 12): Result.005 file - promoters50/1461784
cataaaaatttg

SEQ ID NO: 173775 - DNA, 12 bp, Unknown
  misc_feature (1)..( 12): Result.005 file - promoters50/1461784
tttagaatttga

SEQ ID NO: 173776 - DNA, 12 bp, Unknown
  misc_feature (1)..( 12): Result.005 file - promoters50/1461784
tggagaatatga

SEQ ID NO: 173777 - DNA, 11 bp, Unknown
  misc_feature (1)..( 11): Result.005 file - promoters50/1461784
gtttaatatat

SEQ ID NO: 173778 - DNA, 11 bp, Unknown
  misc_feature (1)..( 11): Result.005 file - promoters50/1461784
cgacaatgtat

SEQ ID NO: 173779 - DNA, 11 bp, Unknown
  misc_feature (1)..( 11): Result.005 file - promoters50/1461784
ttttaatatta

SEQ ID NO: 173780 - DNA, 11 bp, Unknown
  misc_feature (1)..( 11): Result.005 file - promoters50/1461784
ttataatataa

SEQ ID NO: 173781 - DNA, 11 bp, Unknown
  misc_feature (1)..( 11): Result.005 file - promoters50/1461784
ttttaattttt

SEQ ID NO: 173782 - DNA, 11 bp, Unknown
  misc_feature (1)..( 11): Result.005 file - promoters50/1461784
ttttaaagttg

SEQ ID NO: 173783 - DNA, 13 bp, Unknown
  misc_feature (1)..( 13): Result.005 file - promoters50/1461784
ttataaaaagttt

SEQ ID NO: 173784 - DNA, 13 bp, Unknown
  misc_feature (1)..( 13): Result.005 file - promoters50/1461784
aattaaaatgttt

SEQ ID NO: 173785 - DNA, 13 bp, Unknown
  misc_feature (1)..( 13): Result.005 file - promoters50/1461784
gccttaaattttt

SEQ ID NO: 173786 - DNA, 13 bp, Unknown
  misc_feature (1)..( 13): Result.005 file - promoters50/1461784
ttataaaatatta

SEQ ID NO: 173787 - DNA, 13 bp, Unknown
  misc_feature (1)..( 13): Result.005 file - promoters50/1461784
tcataaaaaaaga

SEQ ID NO: 173788 - DNA, 13 bp, Unknown
  misc_feature (1)..( 13): Result.005 file - promoters50/1461784
ttttttaattttt

SEQ ID NO: 173789 - DNA, 11 bp, Unknown
  misc_feature (1)..( 11): Result.005 file - promoters50/1461784
gtttaaaaaaa

SEQ ID NO: 173790 - DNA, 11 bp, Unknown
  misc_feature (1)..( 11): Result.005 file - promoters50/1461784
gtttaaactat

SEQ ID NO: 173791 - DNA, 12 bp, Unknown
  misc_feature (1)..( 12): Result.005 file - promoters50/1461784
ttttcaaataag

SEQ ID NO: 173792 - DNA, 12 bp, Unknown
  misc_feature (1)..( 12): Result.005 file - promoters50/1461784
gagttaaaatct

SEQ ID NO: 173793 - DNA, 12 bp, Unknown
  misc_feature (1)..( 12): Result.005 file - promoters50/1461784
atttgaaaacaa

SEQ ID NO: 173794 - DNA, 12 bp, Unknown
  misc_feature (1)..( 12): Result.005 file - promoters50/1461784
tttagaatttga

SEQ ID NO: 173795 - DNA, 12 bp, Unknown
  misc_feature (1)..( 12): Result.005 file - promoters50/1461784
tggagaatatga

SEQ ID NO: 173796 - DNA, 9 bp, Unknown
  misc_feature (1)..( 9): Result.005 file - promoters50/1461784
taatattta

SEQ ID NO: 173797 - DNA, 9 bp, Unknown
  misc_feature (1)..( 9): Result.005 file - promoters50/1461784
taaaattaa

SEQ ID NO: 173798 - DNA, 9 bp, Unknown
  misc_feature (1)..( 9): Result.005 file - promoters50/1461784
aaatttttt

SEQ ID NO: 173799 - DNA, 9 bp, Unknown
  misc_feature (1)..( 9): Result.005 file - promoters50/1461784
caatttttt

SEQ ID NO: 173800 - DNA, 9 bp, Unknown
  misc_feature (1)..( 9): Result.005 file - promoters50/1461784
ggattttta

SEQ ID NO: 173801 - DNA, 9 bp, Unknown
  misc_feature (1)..( 9): Result.005 file - promoters50/1461784
actttttta

SEQ ID NO: 173802 - DNA, 9 bp, Unknown
  misc_feature (1)..( 9): Result.005 file - promoters50/1461784
caaaaataa

SEQ ID NO: 173803 - DNA, 11 bp, Unknown
  misc_feature (1)..( 11): Result.005 file - promoters50/1461784
aagtttaatat

SEQ ID NO: 173804 - DNA, 11 bp, Unknown
  misc_feature (1)..( 11): Result.005 file - promoters50/1461784
ttttttaattt

SEQ ID NO: 173805 - DNA, 11 bp, Unknown
  misc_feature (1)..( 11): Result.005 file - promoters50/1461784
ccttttaatat

SEQ ID NO: 173806 - DNA, 11 bp, Unknown
  misc_feature (1)..( 11): Result.005 file - promoters50/1461784
agattttataa

SEQ ID NO: 173807 - DNA, 11 bp, Unknown
  misc_feature (1)..( 11): Result.005 file - promoters50/1461784
caaattaaaat

SEQ ID NO: 173808 - DNA, 11 bp, Unknown
  misc_feature (1)..( 11): Result.005 file - promoters50/1461784
ttttttaaagt

SEQ ID NO: 173809 - DNA, 18 bp, Unknown
  misc_feature (1)..( 18): Result.005 file - promoters50/1461784
gaacatatattaaccaat

SEQ ID NO: 173810 - DNA, 18 bp, Unknown
  misc_feature (1)..( 18): Result.005 file - promoters50/1461784
cacaaaggattgaccact

SEQ ID NO: 173811 - DNA, 18 bp, Unknown
  misc_feature (1)..( 18): Result.005 file - promoters50/1461784
gaacaaatagtaaaacaa

SEQ ID NO: 173812 - DNA, 18 bp, Unknown
  misc_feature (1)..( 18): Result.005 file - promoters50/1461784
ttatattatgaaacgaat

SEQ ID NO: 173813 - DNA, 18 bp, Unknown
  misc_feature (1)..( 18): Result.005 file - promoters50/1461784
caatgaaaatgaaaacag

SEQ ID NO: 173814 - DNA, 18 bp, Unknown
  misc_feature (1)..( 18): Result.005 file - promoters50/1461784
gctccaatattaactgac

SEQ ID NO: 173815 - DNA, 14 bp, Unknown
  misc_feature (1)..( 14): Result.005 file - promoters50/1461791
atttgtgaaacaca

SEQ ID NO: 173816 - DNA, 14 bp, Unknown
  misc_feature (1)..( 14): Result.005 file - promoters50/1461791
gtccttgaaacaaa

SEQ ID NO: 173817 - DNA, 14 bp, Unknown
  misc_feature (1)..( 14): Result.005 file - promoters50/1461791
atttttgaagcaca

SEQ ID NO: 173818 - DNA, 14 bp, Unknown
  misc_feature (1)..( 14): Result.005 file - promoters50/1461791
aacaattaaataaa

SEQ ID NO: 173819 - DNA, 14 bp, Unknown
  misc_feature (1)..( 14): Result.005 file - promoters50/1461791
cactctaaaaaaaa

SEQ ID NO: 173820 - DNA, 14 bp, Unknown
  misc_feature (1)..( 14): Result.005 file - promoters50/1461791
atttttgacaataa

SEQ ID NO: 173821 - DNA, 10 bp, Unknown
  misc_feature (1)..( 10): Result.005 file - promoters50/1461791
ttgatatata

SEQ ID NO: 173822 - DNA, 10 bp, Unknown
  misc_feature (1)..( 10): Result.005 file - promoters50/1461791
tgtatatatt

SEQ ID NO: 173823 - DNA, 10 bp, Unknown
  misc_feature (1)..( 10): Result.005 file - promoters50/1461791
ggtatatata

SEQ ID NO: 173824 - DNA, 10 bp, Unknown
  misc_feature (1)..( 10): Result.005 file - promoters50/1461791
tttatagatt

SEQ ID NO: 173825 - DNA, 10 bp, Unknown
  misc_feature (1)..( 10): Result.005 file - promoters50/1461791
actataaata

SEQ ID NO: 173826 - DNA, 10 bp, Unknown
  misc_feature (1)..( 10): Result.005 file - promoters50/1461791
actttaaatt

SEQ ID NO: 173827 - DNA, 9 bp, Unknown
  misc_feature (1)..( 9): Result.005 file - promoters50/1461791
tatataaaa

SEQ ID NO: 173828 - DNA, 9 bp, Unknown
  misc_feature (1)..( 9): Result.005 file - promoters50/1461791
aatataaag

SEQ ID NO: 173829 - DNA, 9 bp, Unknown
  misc_feature (1)..( 9): Result.005 file - promoters50/1461791
tatatatat

SEQ ID NO: 173830 - DNA, 9 bp, Unknown
  misc_feature (1)..( 9): Result.005 file - promoters50/1461791
actataaat

SEQ ID NO: 173831 - DNA, 9 bp, Unknown
  misc_feature (1)..( 9): Result.005 file - promoters50/1461791
tatttattt

SEQ ID NO: 173832 - DNA, 9 bp, Unknown
  misc_feature (1)..( 9): Result.005 file - promoters50/1461791
actttaaat

SEQ ID NO: 173833 - DNA, 13 bp, Unknown
  misc_feature (1)..( 13): Result.005 file - promoters50/1461791
tttgttttaatta

SEQ ID NO: 173834 - DNA, 13 bp, Unknown
  misc_feature (1)..( 13): Result.005 file - promoters50/1461791
cttgttttctacc

SEQ ID NO: 173835 - DNA, 13 bp, Unknown
  misc_feature (1)..( 13): Result.005 file - promoters50/1461791
tttgtttacttta

SEQ ID NO: 173836 - DNA, 13 bp, Unknown
  misc_feature (1)..( 13): Result.005 file - promoters50/1461791
gaagttttagcaa

SEQ ID NO: 173837 - DNA, 13 bp, Unknown
  misc_feature (1)..( 13): Result.005 file - promoters50/1461791
tgattttttgcat

SEQ ID NO: 173838 - DNA, 13 bp, Unknown
  misc_feature (1)..( 13): Result.005 file - promoters50/1461791
ttcatttaagcaa

SEQ ID NO: 173839 - DNA, 14 bp, Unknown
  misc_feature (1)..( 14): Result.005 file - promoters50/1461791
aaacaaaaacattg

SEQ ID NO: 173840 - DNA, 14 bp, Unknown
  misc_feature (1)..( 14): Result.005 file - promoters50/1461791
tgacaataacttct

SEQ ID NO: 173841 - DNA, 14 bp, Unknown
  misc_feature (1)..( 14): Result.005 file - promoters50/1461791
ttaaataaatatct

SEQ ID NO: 173842 - DNA, 14 bp, Unknown
  misc_feature (1)..( 14): Result.005 file - promoters50/1461791
cacataaaactttg

SEQ ID NO: 173843 - DNA, 14 bp, Unknown
  misc_feature (1)..( 14): Result.005 file - promoters50/1461791
ctaaaaaaaaggat

SEQ ID NO: 173844 - DNA, 14 bp, Unknown
  misc_feature (1)..( 14): Result.005 file - promoters50/1461791
tgagaatcatggtg

SEQ ID NO: 173845 - DNA, 8 bp, Unknown
  misc_feature (1)..( 8): Result.005 file - promoters50/1461803
aataatta

SEQ ID NO: 173846 - DNA, 8 bp, Unknown
  misc_feature (1)..( 8): Result.005 file - promoters50/1461803
aataattt

SEQ ID NO: 173847 - DNA, 8 bp, Unknown
  misc_feature (1)..( 8): Result.005 file - promoters50/1461803
tatactta

SEQ ID NO: 173848 - DNA, 9 bp, Unknown
  misc_feature (1)..( 9): Result.005 file - promoters50/1461803
gctaagttt

SEQ ID NO: 173849 - DNA, 10 bp, Unknown
  misc_feature (1)..( 10): Result.005 file - promoters50/1461803
tttaatgtta

SEQ ID NO: 173850 - DNA, 10 bp, Unknown
  misc_feature (1)..( 10): Result.005 file - promoters50/1461803
cctaaattta

SEQ ID NO: 173851 - DNA, 11 bp, Unknown
  misc_feature (1)..( 11): Result.005 file - promoters50/1461803
ccaaatcttaa

SEQ ID NO: 173852 - DNA, 11 bp, Unknown
  misc_feature (1)..( 11): Result.005 file - promoters50/1461803
aataattttaa

SEQ ID NO: 173853 - DNA, 11 bp, Unknown
  misc_feature (1)..( 11): Result.005 file - promoters50/1461803
tttaatgttat

SEQ ID NO: 173854 - DNA, 11 bp, Unknown
  misc_feature (1)..( 11): Result.005 file - promoters50/1461803
gctaagtttga

SEQ ID NO: 173855 - DNA, 11 bp, Unknown
  misc_feature (1)..( 11): Result.005 file - promoters50/1461803
cctaaatttac

SEQ ID NO: 173856 - DNA, 11 bp, Unknown
  misc_feature (1)..( 11): Result.005 file - promoters50/1461803
gttaaatgtat

SEQ ID NO: 173857 - DNA, 8 bp, Unknown
  misc_feature (1)..( 8): Result.005 file - promoters50/1461837
gggattca

SEQ ID NO: 173858 - DNA, 8 bp, Unknown
  misc_feature (1)..( 8): Result.005 file - promoters50/1461837
tggattca

SEQ ID NO: 173859 - DNA, 8 bp, Unknown
  misc_feature (1)..( 8): Result.005 file - promoters50/1461837
tggatttt

SEQ ID NO: 173860 - DNA, 9 bp, Unknown
  misc_feature (1)..( 9): Result.005 file - promoters50/1461837
ttttgttat

SEQ ID NO: 173861 - DNA, 9 bp, Unknown
  misc_feature (1)..( 9): Result.005 file - promoters50/1461837
ttttgttat

SEQ ID NO: 173862 - DNA, 9 bp, Unknown
  misc_feature (1)..( 9): Result.005 file - promoters50/1461837
ctttgttct

SEQ ID NO: 173863 - DNA, 16 bp, Unknown
  misc_feature (1)..( 16): Result.005 file - promoters50/1461839
gaaaaagaaaaagaaa

SEQ ID NO: 173864 - DNA, 16 bp, Unknown
  misc_feature (1)..( 16): Result.005 file - promoters50/1461839
gaaaaagaaaaaaaga

SEQ ID NO: 173865 - DNA, 16 bp, Unknown
  misc_feature (1)..( 16): Result.005 file - promoters50/1461839
caaccagaaaagaaat

SEQ ID NO: 173866 - DNA, 16 bp, Unknown
  misc_feature (1)..( 16): Result.005 file - promoters50/1461839
tacaaacaaaaaaaat

SEQ ID NO: 173867 - DNA, 16 bp, Unknown
  misc_feature (1)..( 16): Result.005 file - promoters50/1461839
gatttagataagtaaa

SEQ ID NO: 173868 - DNA, 16 bp, Unknown
  misc_feature (1)..( 16): Result.005 file - promoters50/1461839
gtggcggataagcaaa

SEQ ID NO: 173869 - DNA, 16 bp, Unknown
  misc_feature (1)..( 16): Result.005 file - promoters50/1461839
aaatgacaaaactatt

SEQ ID NO: 173870 - DNA, 12 bp, Unknown
  misc_feature (1)..( 12): Result.005 file - promoters50/1461839
aaaagaaaaaaa

SEQ ID NO: 173871 - DNA, 12 bp, Unknown
  misc_feature (1)..( 12): Result.005 file - promoters50/1461839
aaaagaaagaat

SEQ ID NO: 173872 - DNA, 13 bp, Unknown
  misc_feature (1)..( 13): Result.005 file - promoters50/1461839
ataagtaaagtat

SEQ ID NO: 173873 - DNA, 13 bp, Unknown
  misc_feature (1)..( 13): Result.005 file - promoters50/1461839
gaaaagaaatatg

SEQ ID NO: 173874 - DNA, 13 bp, Unknown
  misc_feature (1)..( 13): Result.005 file - promoters50/1461839
acaaacaaaaaaa

SEQ ID NO: 173875 - DNA, 13 bp, Unknown
  misc_feature (1)..( 13): Result.005 file - promoters50/1461839
ataagcaaaaaca

SEQ ID NO: 173876 - DNA, 13 bp, Unknown
  misc_feature (1)..( 13): Result.005 file - promoters50/1461839
aatgacaaaacta

SEQ ID NO: 173877 - DNA, 16 bp, Unknown
  misc_feature (1)..( 16): Result.005 file - promoters50/1461839
aaagaaaagaaagaat

SEQ ID NO: 173878 - DNA, 16 bp, Unknown
  misc_feature (1)..( 16): Result.005 file - promoters50/1461839
aaaagaaagaatcaga

SEQ ID NO: 173879 - DNA, 16 bp, Unknown
  misc_feature (1)..( 16): Result.005 file - promoters50/1461839
ccagaaaagaaatatg

SEQ ID NO: 173880 - DNA, 16 bp, Unknown
  misc_feature (1)..( 16): Result.005 file - promoters50/1461839
aaacaaaaaaaataaa

SEQ ID NO: 173881 - DNA, 16 bp, Unknown
  misc_feature (1)..( 16): Result.005 file - promoters50/1461839
ttagataagtaaagta

SEQ ID NO: 173882 - DNA, 16 bp, Unknown
  misc_feature (1)..( 16): Result.005 file - promoters50/1461839
tgacaaaactattaaa

SEQ ID NO: 173883 - DNA, 17 bp, Unknown
  misc_feature (1)..( 17): Result.005 file - promoters50/1461839
aaaagaaaagaaagaat

SEQ ID NO: 173884 - DNA, 17 bp, Unknown
  misc_feature (1)..( 17): Result.005 file - promoters50/1461839
tttagataagtaaagta

SEQ ID NO: 173885 - DNA, 17 bp, Unknown
  misc_feature (1)..( 17): Result.005 file - promoters50/1461839
aaaagaaatatggataa

SEQ ID NO: 173886 - DNA, 17 bp, Unknown
  misc_feature (1)..( 17): Result.005 file - promoters50/1461839
caaacaaaaaaaataaa

SEQ ID NO: 173887 - DNA, 17 bp, Unknown
  misc_feature (1)..( 17): Result.005 file - promoters50/1461839
aaaagaaaagaaagaat

SEQ ID NO: 173888 - DNA, 17 bp, Unknown
  misc_feature (1)..( 17): Result.005 file - promoters50/1461839
atgacaaaactattaaa

SEQ ID NO: 173889 - DNA, 20 bp, Unknown
  misc_feature (1)..( 20): Result.005 file - promoters50/1461839
aaaaagctaattttgattca

SEQ ID NO: 173890 - DNA, 20 bp, Unknown
  misc_feature (1)..( 20): Result.005 file - promoters50/1461839
taatccctaattttacattt

SEQ ID NO: 173891 - DNA, 20 bp, Unknown
  misc_feature (1)..( 20): Result.005 file - promoters50/1461839
ggtacagtaatttgattttg

SEQ ID NO: 173892 - DNA, 20 bp, Unknown
  misc_feature (1)..( 20): Result.005 file - promoters50/1461839
aaaaaactaatcaggactaa

SEQ ID NO: 173893 - DNA, 20 bp, Unknown
  misc_feature (1)..( 20): Result.005 file - promoters50/1461839
aaaaagctaattttgattca

SEQ ID NO: 173894 - DNA, 20 bp, Unknown
  misc_feature (1)..( 20): Result.005 file - promoters50/1461839
gaaaattaaattttacattt

SEQ ID NO: 173895 - DNA, 20 bp, Unknown
  misc_feature (1)..( 20): Result.005 file - promoters50/1461839
tatttttaaattttcgtttt

SEQ ID NO: 173896 - DNA, 8 bp, Unknown
  misc_feature (1)..( 8): Result.005 file - promoters50/1461848
acgaaagt

SEQ ID NO: 173897 - DNA, 8 bp, Unknown
  misc_feature (1)..( 8): Result.005 file - promoters50/1461848
ctgaaagt

SEQ ID NO: 173898 - DNA, 8 bp, Unknown
  misc_feature (1)..( 8): Result.005 file - promoters50/1461848
ctgcaagc

SEQ ID NO: 173899 - DNA, 11 bp, Unknown
  misc_feature (1)..( 11): Result.005 file - promoters50/1461857
gttttcttgaa

SEQ ID NO: 173900 - DNA, 11 bp, Unknown
  misc_feature (1)..( 11): Result.005 file - promoters50/1461857
atttacttaat

SEQ ID NO: 173901 - DNA, 11 bp, Unknown
  misc_feature (1)..( 11): Result.005 file - promoters50/1461857
atttaattaat

SEQ ID NO: 173902 - DNA, 10 bp, Unknown
  misc_feature (1)..( 10): Result.005 file - promoters50/1461857
ctttattcaa

SEQ ID NO: 173903 - DNA, 10 bp, Unknown
  misc_feature (1)..( 10): Result.005 file - promoters50/1461857
ttttatgcaa

SEQ ID NO: 173904 - DNA, 10 bp, Unknown
  misc_feature (1)..( 10): Result.005 file - promoters50/1461857
ttttatcttc

SEQ ID NO: 173905 - DNA, 14 bp, Unknown
  misc_feature (1)..( 14): Result.005 file - promoters50/1465855
atggagaacatctt

SEQ ID NO: 173906 - DNA, 14 bp, Unknown
  misc_feature (1)..( 14): Result.005 file - promoters50/1465855
aagattaacaactt

SEQ ID NO: 173907 - DNA, 14 bp, Unknown
  misc_feature (1)..( 14): Result.005 file - promoters50/1465855
aattttatcatctt

SEQ ID NO: 173908 - DNA, 14 bp, Unknown
  misc_feature (1)..( 14): Result.005 file - promoters50/1465855
aacgttaacatgtg

SEQ ID NO: 173909 - DNA, 8 bp, Unknown
  misc_feature (1)..( 8): Result.005 file - promoters50/1465855
aatttttc

SEQ ID NO: 173910 - DNA, 8 bp, Unknown
  misc_feature (1)..( 8): Result.005 file - promoters50/1465855
aatatttc

SEQ ID NO: 173911 - DNA, 8 bp, Unknown
  misc_feature (1)..( 8): Result.005 file - promoters50/1465855
tatattta

SEQ ID NO: 173912 - DNA, 8 bp, Unknown
  misc_feature (1)..( 8): Result.005 file - promoters50/1465855
aatattaa

SEQ ID NO: 173913 - DNA, 6 bp, Unknown
  misc_feature (1)..( 6): Result.005 file - promoters50/1465863
tcgttt

SEQ ID NO: 173914 - DNA, 6 bp, Unknown
  misc_feature (1)..( 6): Result.005 file - promoters50/1465863
tcgttt

SEQ ID NO: 173915 - DNA, 7 bp, Unknown
  misc_feature (1)..( 7): Result.005 file - promoters50/1465863
tcgcttt

SEQ ID NO: 173916 - DNA, 9 bp, Unknown
  misc_feature (1)..( 9): Result.005 file - promoters50/1465863
ttcttagct

SEQ ID NO: 173917 - DNA, 9 bp, Unknown
  misc_feature (1)..( 9): Result.005 file - promoters50/1465863
ttcttatca

SEQ ID NO: 173918 - DNA, 9 bp, Unknown
  misc_feature (1)..( 9): Result.005 file - promoters50/1465863
atctgagct

SEQ ID NO: 173919 - DNA, 9 bp, Unknown
  misc_feature (1)..( 9): Result.005 file - promoters50/1465863
agaaagcgg

SEQ ID NO: 173920 - DNA, 9 bp, Unknown
  misc_feature (1)..( 9): Result.005 file - promoters50/1465863
agaaagctt

SEQ ID NO: 173921 - DNA, 9 bp, Unknown
  misc_feature (1)..( 9): Result.005 file - promoters50/1465863
tgaaacaaa

SEQ ID NO: 173922 - DNA, 8 bp, Unknown
  misc_feature (1)..( 8): Result.005 file - promoters50/1465863
gaaagatt

SEQ ID NO: 173923 - DNA, 8 bp, Unknown
  misc_feature (1)..( 8): Result.005 file - promoters50/1465863
gaaagaaa

SEQ ID NO: 173924 - DNA, 8 bp, Unknown
  misc_feature (1)..( 8): Result.005 file - promoters50/1465863
aaaacatt

SEQ ID NO: 173925 - DNA, 8 bp, Unknown
  misc_feature (1)..( 8): Result.005 file - promoters50/1465863
tccaaagt

SEQ ID NO: 173926 - DNA, 8 bp, Unknown
  misc_feature (1)..( 8): Result.005 file - promoters50/1465863
tccaaagg

SEQ ID NO: 173927 - DNA, 8 bp, Unknown
  misc_feature (1)..( 8): Result.005 file - promoters50/1465863
ctcaaagg

SEQ ID NO: 173928 - DNA, 9 bp, Unknown
  misc_feature (1)..( 9): Result.005 file - promoters50/1465863
ctagggttt

SEQ ID NO: 173929 - DNA, 9 bp, Unknown
  misc_feature (1)..( 9): Result.005 file - promoters50/1465863
ttagggttt

SEQ ID NO: 173930 - DNA, 9 bp, Unknown
  misc_feature (1)..( 9): Result.005 file - promoters50/1465863
ctagggttc

SEQ ID NO: 173931 - DNA, 8 bp, Unknown
  misc_feature (1)..( 8): Result.005 file - promoters50/1465863
agtttaat

SEQ ID NO: 173932 - DNA, 8 bp, Unknown
  misc_feature (1)..( 8): Result.005 file - promoters50/1465863
agtctaaa

SEQ ID NO: 173933 - DNA, 8 bp, Unknown
  misc_feature (1)..( 8): Result.005 file - promoters50/1465863
tttttaat

SEQ ID NO: 173934 - DNA, 9 bp, Unknown
  misc_feature (1)..( 9): Result.005 file - promoters50/1465863
tgatttttc

SEQ ID NO: 173935 - DNA, 9 bp, Unknown
  misc_feature (1)..( 9): Result.005 file - promoters50/1465863
atatttttt

SEQ ID NO: 173936 - DNA, 9 bp, Unknown
  misc_feature (1)..( 9): Result.005 file - promoters50/1465863
atattttct

SEQ ID NO: 173937 - DNA, 10 bp, Unknown
  misc_feature (1)..( 10): Result.005 file - promoters50/1465863
caatttgtta

SEQ ID NO: 173938 - DNA, 8 bp, Unknown
  misc_feature (1)..( 8): Result.005 file - promoters50/1470567
atctctta

SEQ ID NO: 173939 - DNA, 8 bp, Unknown
  misc_feature (1)..( 8): Result.005 file - promoters50/1470567
gactctta

SEQ ID NO: 173940 - DNA, 8 bp, Unknown
  misc_feature (1)..( 8): Result.005 file - promoters50/1470567
ctctctta

SEQ ID NO: 173941 - DNA, 8 bp, Unknown
  misc_feature (1)..( 8): Result.005 file - promoters50/1470567
ctctctaa

SEQ ID NO: 173942 - DNA, 8 bp, Unknown
  misc_feature (1)..( 8): Result.005 file - promoters50/1470567
tactctta

SEQ ID NO: 173943 - DNA, 8 bp, Unknown
  misc_feature (1)..( 8): Result.005 file - promoters50/1470567
tgctctta

SEQ ID NO: 173944 - DNA, 20 bp, Unknown
  misc_feature (1)..( 20): Result.005 file - promoters50/1470567
tgtaaatattcacttgaatt

SEQ ID NO: 173945 - DNA, 20 bp, Unknown
  misc_feature (1)..( 20): Result.005 file - promoters50/1470567
attaaattttctttttcttt

SEQ ID NO: 173946 - DNA, 20 bp, Unknown
  misc_feature (1)..( 20): Result.005 file - promoters50/1470567
tgttaatgggaataaggaaa

SEQ ID NO: 173947 - DNA, 20 bp, Unknown
  misc_feature (1)..( 20): Result.005 file - promoters50/1470567
tgacaatttttcaatttttg

SEQ ID NO: 173948 - DNA, 20 bp, Unknown
  misc_feature (1)..( 20): Result.005 file - promoters50/1470567
ggtcaattgtctcttagtta

SEQ ID NO: 173949 - DNA, 20 bp, Unknown
  misc_feature (1)..( 20): Result.005 file - promoters50/1470567
gatttagtttcgtttatggg

SEQ ID NO: 173950 - DNA, 12 bp, Unknown
  misc_feature (1)..( 12): Result.005 file - promoters50/1470567
gatatcttgcaa

SEQ ID NO: 173951 - DNA, 12 bp, Unknown
  misc_feature (1)..( 12): Result.005 file - promoters50/1470567
tgtattttgtgt

SEQ ID NO: 173952 - DNA, 12 bp, Unknown
  misc_feature (1)..( 12): Result.005 file - promoters50/1470567
ttaatcttccaa

SEQ ID NO: 173953 - DNA, 12 bp, Unknown
  misc_feature (1)..( 12): Result.005 file - promoters50/1470567
ctaatcttgtac

SEQ ID NO: 173954 - DNA, 12 bp, Unknown
  misc_feature (1)..( 12): Result.005 file - promoters50/1470567
tttatttttgtt

SEQ ID NO: 173955 - DNA, 12 bp, Unknown
  misc_feature (1)..( 12): Result.005 file - promoters50/1470567
tttaatttgttg

SEQ ID NO: 173956 - DNA, 16 bp, Unknown
  misc_feature (1)..( 16): Result.005 file - promoters50/1470582
atggattgttaaattt

SEQ ID NO: 173957 - DNA, 16 bp, Unknown
  misc_feature (1)..( 16): Result.005 file - promoters50/1470582
ttattcggtttaattt

SEQ ID NO: 173958 - DNA, 16 bp, Unknown
  misc_feature (1)..( 16): Result.005 file - promoters50/1470582
tattattcttaattta

SEQ ID NO: 173959 - DNA, 16 bp, Unknown
  misc_feature (1)..( 16): Result.005 file - promoters50/1470582
tattactcttttacaa

SEQ ID NO: 173960 - DNA, 16 bp, Unknown
  misc_feature (1)..( 16): Result.005 file - promoters50/1470582
ctctacacttcatttt

SEQ ID NO: 173961 - DNA, 16 bp, Unknown
  misc_feature (1)..( 16): Result.005 file - promoters50/1470582
aaaaaatctgaaaatc

SEQ ID NO: 173962 - DNA, 12 bp, Unknown
  misc_feature (1)..( 12): Result.005 file - promoters50/1470582
tttcttagttta

SEQ ID NO: 173963 - DNA, 12 bp, Unknown
  misc_feature (1)..( 12): Result.005 file - promoters50/1470582
attcttaattta

SEQ ID NO: 173964 - DNA, 12 bp, Unknown
  misc_feature (1)..( 12): Result.005 file - promoters50/1470582
tttcttgttgga

SEQ ID NO: 173965 - DNA, 12 bp, Unknown
  misc_feature (1)..( 12): Result.005 file - promoters50/1470582
attattactctt

SEQ ID NO: 173966 - DNA, 12 bp, Unknown
  misc_feature (1)..( 12): Result.005 file - promoters50/1470582
atcaagaattta

SEQ ID NO: 173967 - DNA, 12 bp, Unknown
  misc_feature (1)..( 12): Result.005 file - promoters50/1470582
aatctttattcg

SEQ ID NO: 173968 - DNA, 12 bp, Unknown
  misc_feature (1)..( 12): Result.005 file - promoters50/1470582
tttcttcagctg

SEQ ID NO: 173969 - DNA, 8 bp, Unknown
  misc_feature (1)..( 8): Result.005 file - promoters50/1470903
gaagagaa

SEQ ID NO: 173970 - DNA, 8 bp, Unknown
  misc_feature (1)..( 8): Result.005 file - promoters50/1470903
gaaaagaa

SEQ ID NO: 173971 - DNA, 8 bp, Unknown
  misc_feature (1)..( 8): Result.005 file - promoters50/1470903
gaaaagaa

SEQ ID NO: 173972 - DNA, 14 bp, Unknown
  misc_feature (1)..( 14): Result.005 file - promoters50/1470903
agagagagaggtga

SEQ ID NO: 173973 - DNA, 14 bp, Unknown
  misc_feature (1)..( 14): Result.005 file - promoters50/1470903
agagagagagagag

SEQ ID NO: 173974 - DNA, 14 bp, Unknown
  misc_feature (1)..( 14): Result.005 file - promoters50/1470903
agagagagagagag

SEQ ID NO: 173975 - DNA, 17 bp, Unknown
  misc_feature (1)..( 17): Result.005 file - promoters50/1470993
tttaaatgggcctaggc

SEQ ID NO: 173976 - DNA, 17 bp, Unknown
  misc_feature (1)..( 17): Result.005 file - promoters50/1470993
tttaaaatcacatcttc

SEQ ID NO: 173977 - DNA, 17 bp, Unknown
  misc_feature (1)..( 17): Result.005 file - promoters50/1470993
tttgaatttgatgaatc

SEQ ID NO: 173978 - DNA, 17 bp, Unknown
  misc_feature (1)..( 17): Result.005 file - promoters50/1470993
tctgaatatgatgatga

SEQ ID NO: 173979 - DNA, 17 bp, Unknown
  misc_feature (1)..( 17): Result.005 file - promoters50/1470993
tttgatcatgattggtg

SEQ ID NO: 173980 - DNA, 17 bp, Unknown
  misc_feature (1)..( 17): Result.005 file - promoters50/1470993
ccccattattacaaatt

SEQ ID NO: 173981 - DNA, 15 bp, Unknown
  misc_feature (1)..( 15): Result.005 file - promoters50/1470993
tgaagaaaggaattg

SEQ ID NO: 173982 - DNA, 15 bp, Unknown
  misc_feature (1)..( 15): Result.005 file - promoters50/1470993
tgatgaatggtgatg

SEQ ID NO: 173983 - DNA, 15 bp, Unknown
  misc_feature (1)..( 15): Result.005 file - promoters50/1470993
tgatgaatcaaatca

SEQ ID NO: 173984 - DNA, 15 bp, Unknown
  misc_feature (1)..( 15): Result.005 file - promoters50/1470993
tgatcatgattggtg

SEQ ID NO: 173985 - DNA, 15 bp, Unknown
  misc_feature (1)..( 15): Result.005 file - promoters50/1470993
ggataaattacaatt

SEQ ID NO: 173986 - DNA, 15 bp, Unknown
  misc_feature (1)..( 15): Result.005 file - promoters50/1470993
ccattattacaaatt

SEQ ID NO: 173987 - DNA, 10 bp, Unknown
  misc_feature (1)..( 10): Result.005 file - promoters50/1471001
atataattaa

SEQ ID NO: 173988 - DNA, 10 bp, Unknown
  misc_feature (1)..( 10): Result.005 file - promoters50/1471001
atatatttat

SEQ ID NO: 173989 - DNA, 10 bp, Unknown
  misc_feature (1)..( 10): Result.005 file - promoters50/1471001
cgatatgtat

SEQ ID NO: 173990 - DNA, 10 bp, Unknown
  misc_feature (1)..( 10): Result.005 file - promoters50/1471001
tttaatgtat

SEQ ID NO: 173991 - DNA, 7 bp, Unknown
  misc_feature (1)..( 7): Result.005 file - promoters50/1471001
atataaa

SEQ ID NO: 173992 - DNA, 7 bp, Unknown
  misc_feature (1)..( 7): Result.005 file - promoters50/1471001
ctataaa

SEQ ID NO: 173993 - DNA, 7 bp, Unknown
  misc_feature (1)..( 7): Result.005 file - promoters50/1471001
ttataaa

SEQ ID NO: 173994 - DNA, 7 bp, Unknown
  misc_feature (1)..( 7): Result.005 file - promoters50/1471001
ttataaa

SEQ ID NO: 173995 - DNA, 13 bp, Unknown
  misc_feature (1)..( 13): Result.005 file - promoters50/1471001
gttattaaattaa

SEQ ID NO: 173996 - DNA, 13 bp, Unknown
  misc_feature (1)..( 13): Result.005 file - promoters50/1471001
attatcaaatttt

SEQ ID NO: 173997 - DNA, 13 bp, Unknown
  misc_feature (1)..( 13): Result.005 file - promoters50/1471001
atgtgaaaatttt

SEQ ID NO: 173998 - DNA, 13 bp, Unknown
  misc_feature (1)..( 13): Result.005 file - promoters50/1471001
attatctagggac

SEQ ID NO: 173999 - DNA, 11 bp, Unknown
  misc_feature (1)..( 11): Result.005 file - promoters50/1471009
aaattaacaac

SEQ ID NO: 174000 - DNA, 11 bp, Unknown
  misc_feature (1)..( 11): Result.005 file - promoters50/1471009
cgaataacaat

SEQ ID NO: 174001 - DNA, 11 bp, Unknown
  misc_feature (1)..( 11): Result.005 file - promoters50/1471009
catttaacact

SEQ ID NO: 174002 - DNA, 11 bp, Unknown
  misc_feature (1)..( 11): Result.005 file - promoters50/1471009
aatttaacaac

SEQ ID NO: 174003 - DNA, 11 bp, Unknown
  misc_feature (1)..( 11): Result.005 file - promoters50/1471009
tcattaacatg

SEQ ID NO: 174004 - DNA, 11 bp, Unknown
  misc_feature (1)..( 11): Result.005 file - promoters50/1471009
taattacagta

SEQ ID NO: 174005 - DNA, 11 bp, Unknown
  misc_feature (1)..( 11): Result.005 file - promoters50/1471009
gtatttactac

SEQ ID NO: 174006 - DNA, 9 bp, Unknown
  misc_feature (1)..( 9): Result.005 file - promoters50/1471009
ataattagg

SEQ ID NO: 174007 - DNA, 9 bp, Unknown
  misc_feature (1)..( 9): Result.005 file - promoters50/1471009
ctaattaag

SEQ ID NO: 174008 - DNA, 9 bp, Unknown
  misc_feature (1)..( 9): Result.005 file - promoters50/1471009
atacttaaa

SEQ ID NO: 174009 - DNA, 9 bp, Unknown
  misc_feature (1)..( 9): Result.005 file - promoters50/1471009
ataaataaa

SEQ ID NO: 174010 - DNA, 9 bp, Unknown
  misc_feature (1)..( 9): Result.005 file - promoters50/1471009
ataaataag

SEQ ID NO: 174011 - DNA, 9 bp, Unknown
  misc_feature (1)..( 9): Result.005 file - promoters50/1471009
gaaatgaat

SEQ ID NO: 174012 - DNA, 11 bp, Unknown
  misc_feature (1)..( 11): Result.005 file - promoters50/1471009
tgatgatattc

SEQ ID NO: 174013 - DNA, 11 bp, Unknown
  misc_feature (1)..( 11): Result.005 file - promoters50/1471009
agataatagtc

SEQ ID NO: 174014 - DNA, 11 bp, Unknown
  misc_feature (1)..( 11): Result.005 file - promoters50/1471009
agaaaatttac

SEQ ID NO: 174015 - DNA, 11 bp, Unknown
  misc_feature (1)..( 11): Result.005 file - promoters50/1471009
actaaatttta

SEQ ID NO: 174016 - DNA, 11 bp, Unknown
  misc_feature (1)..( 11): Result.005 file - promoters50/1471009
cccaaatttta

SEQ ID NO: 174017 - DNA, 11 bp, Unknown
  misc_feature (1)..( 11): Result.005 file - promoters50/1471009
agacaattatt

SEQ ID NO: 174018 - DNA, 12 bp, Unknown
  misc_feature (1)..( 12): Result.005 file - promoters50/1471009
tcctatatatca

SEQ ID NO: 174019 - DNA, 12 bp, Unknown
  misc_feature (1)..( 12): Result.005 file - promoters50/1471009
tcctataaattg

SEQ ID NO: 174020 - DNA, 12 bp, Unknown
  misc_feature (1)..( 12): Result.005 file - promoters50/1471009
tcctataaatat

SEQ ID NO: 174021 - DNA, 12 bp, Unknown
  misc_feature (1)..( 12): Result.005 file - promoters50/1471009
ttctatatatat

SEQ ID NO: 174022 - DNA, 12 bp, Unknown
  misc_feature (1)..( 12): Result.005 file - promoters50/1471009
ttaaataaatac

SEQ ID NO: 174023 - DNA, 12 bp, Unknown
  misc_feature (1)..( 12): Result.005 file - promoters50/1471009
ttttatatataa

SEQ ID NO: 174024 - DNA, 12 bp, Unknown
  misc_feature (1)..( 12): Result.005 file - promoters50/1471009
tgagatataata

SEQ ID NO: 174025 - DNA, 11 bp, Unknown
  misc_feature (1)..( 11): Result.005 file - promoters50/1471009
gaaagaattaa

SEQ ID NO: 174026 - DNA, 11 bp, Unknown
  misc_feature (1)..( 11): Result.005 file - promoters50/1471009
caaagaatcgt

SEQ ID NO: 174027 - DNA, 11 bp, Unknown
  misc_feature (1)..( 11): Result.005 file - promoters50/1471009
gaacgaacagg

SEQ ID NO: 174028 - DNA, 11 bp, Unknown
  misc_feature (1)..( 11): Result.005 file - promoters50/1471009
aaaagaaataa

SEQ ID NO: 174029 - DNA, 11 bp, Unknown
  misc_feature (1)..( 11): Result.005 file - promoters50/1471009
caaaaaaaact

SEQ ID NO: 174030 - DNA, 11 bp, Unknown
  misc_feature (1)..( 11): Result.005 file - promoters50/1471009
taattaatatt

SEQ ID NO: 174031 - DNA, 7 bp, Unknown
  misc_feature (1)..( 7): Result.005 file - promoters50/1471009
ataaatt

SEQ ID NO: 174032 - DNA, 7 bp, Unknown
  misc_feature (1)..( 7): Result.005 file - promoters50/1471009
ataaata

SEQ ID NO: 174033 - DNA, 7 bp, Unknown
  misc_feature (1)..( 7): Result.005 file - promoters50/1471009
ataaata

SEQ ID NO: 174034 - DNA, 7 bp, Unknown
  misc_feature (1)..( 7): Result.005 file - promoters50/1471009
atatata

SEQ ID NO: 174035 - DNA, 7 bp, Unknown
  misc_feature (1)..( 7): Result.005 file - promoters50/1471009
atatata

SEQ ID NO: 174036 - DNA, 8 bp, Unknown
  misc_feature (1)..( 8): Result.005 file - promoters50/1471009
atataata

SEQ ID NO: 174037 - DNA, 12 bp, Unknown
  misc_feature (1)..( 12): Result.005 file - promoters50/1471041
agaattaaaatc

SEQ ID NO: 174038 - DNA, 12 bp, Unknown
  misc_feature (1)..( 12): Result.005 file - promoters50/1471041
aacattaatatc

SEQ ID NO: 174039 - DNA, 12 bp, Unknown
  misc_feature (1)..( 12): Result.005 file - promoters50/1471041
agaagtaaaggt

SEQ ID NO: 174040 - DNA, 12 bp, Unknown
  misc_feature (1)..( 12): Result.005 file - promoters50/1471041
attattaattta

SEQ ID NO: 174041 - DNA, 12 bp, Unknown
  misc_feature (1)..( 12): Result.005 file - promoters50/1471041
acttttatttta

SEQ ID NO: 174042 - DNA, 12 bp, Unknown
  misc_feature (1)..( 12): Result.005 file - promoters50/1471041
taaattaatttg

SEQ ID NO: 174043 - DNA, 13 bp, Unknown
  misc_feature (1)..( 13): Result.005 file - promoters50/1471041
ggtttgattagat

SEQ ID NO: 174044 - DNA, 13 bp, Unknown
  misc_feature (1)..( 13): Result.005 file - promoters50/1471041
tattttattacca

SEQ ID NO: 174045 - DNA, 13 bp, Unknown
  misc_feature (1)..( 13): Result.005 file - promoters50/1471041
aatttgatataca

SEQ ID NO: 174046 - DNA, 13 bp, Unknown
  misc_feature (1)..( 13): Result.005 file - promoters50/1471041
tatattattaatt

SEQ ID NO: 174047 - DNA, 13 bp, Unknown
  misc_feature (1)..( 13): Result.005 file - promoters50/1471041
tttttgattaaat

SEQ ID NO: 174048 - DNA, 13 bp, Unknown
  misc_feature (1)..( 13): Result.005 file - promoters50/1471041
acggagatcaaat

SEQ ID NO: 174049 - DNA, 8 bp, Unknown
  misc_feature (1)..( 8): Result.005 file - promoters50/1471073
aaaaaata

SEQ ID NO: 174050 - DNA, 8 bp, Unknown
  misc_feature (1)..( 8): Result.005 file - promoters50/1471073
aaaaaata

SEQ ID NO: 174051 - DNA, 8 bp, Unknown
  misc_feature (1)..( 8): Result.005 file - promoters50/1471073
taaaaatt

SEQ ID NO: 174052 - DNA, 7 bp, Unknown
  misc_feature (1)..( 7): Result.005 file - promoters50/1471073
aataaaa

SEQ ID NO: 174053 - DNA, 7 bp, Unknown
  misc_feature (1)..( 7): Result.005 file - promoters50/1471073
gataaaa

SEQ ID NO: 174054 - DNA, 7 bp, Unknown
  misc_feature (1)..( 7): Result.005 file - promoters50/1471073
aataaat

SEQ ID NO: 174055 - DNA, 8 bp, Unknown
  misc_feature (1)..( 8): Result.005 file - promoters50/1471073
ataaaata

SEQ ID NO: 174056 - DNA, 8 bp, Unknown
  misc_feature (1)..( 8): Result.005 file - promoters50/1471073
atataata

SEQ ID NO: 174057 - DNA, 8 bp, Unknown
  misc_feature (1)..( 8): Result.005 file - promoters50/1471073
ttaaaatg

SEQ ID NO: 174058 - DNA, 10 bp, Unknown
  misc_feature (1)..( 10): Result.005 file - promoters50/1471073
ataaaatcat

SEQ ID NO: 174059 - DNA, 10 bp, Unknown
  misc_feature (1)..( 10): Result.005 file - promoters50/1471073
agacaatcat

SEQ ID NO: 174060 - DNA, 10 bp, Unknown
  misc_feature (1)..( 10): Result.005 file - promoters50/1471073
ataaaaccat

SEQ ID NO: 174061 - DNA, 10 bp, Unknown
  misc_feature (1)..( 10): Result.005 file - promoters50/1471073
acttatttgc

SEQ ID NO: 174062 - DNA, 10 bp, Unknown
  misc_feature (1)..( 10): Result.005 file - promoters50/1471073
tattaattgc

SEQ ID NO: 174063 - DNA, 10 bp, Unknown
  misc_feature (1)..( 10): Result.005 file - promoters50/1471073
atttattttt

SEQ ID NO: 174064 - DNA, 8 bp, Unknown
  misc_feature (1)..( 8): Result.005 file - promoters50/1471073
attcaaat

SEQ ID NO: 174065 - DNA, 8 bp, Unknown
  misc_feature (1)..( 8): Result.005 file - promoters50/1471073
attaaaaa

SEQ ID NO: 174066 - DNA, 9 bp, Unknown
  misc_feature (1)..( 9): Result.005 file - promoters50/1471073
aataataat

SEQ ID NO: 174067 - DNA, 8 bp, Unknown
  misc_feature (1)..( 8): Result.005 file - promoters50/1471106
gttagtat

SEQ ID NO: 174068 - DNA, 8 bp, Unknown
  misc_feature (1)..( 8): Result.005 file - promoters50/1471106
tttattat

SEQ ID NO: 174069 - DNA, 8 bp, Unknown
  misc_feature (1)..( 8): Result.005 file - promoters50/1471106
attattat

SEQ ID NO: 174070 - DNA, 8 bp, Unknown
  misc_feature (1)..( 8): Result.005 file - promoters50/1471106
tttattaa

SEQ ID NO: 174071 - DNA, 8 bp, Unknown
  misc_feature (1)..( 8): Result.005 file - promoters50/1471106
attagttt

SEQ ID NO: 174072 - DNA, 8 bp, Unknown
  misc_feature (1)..( 8): Result.005 file - promoters50/1471106
cgtattaa

SEQ ID NO: 174073 - DNA, 15 bp, Unknown
  misc_feature (1)..( 15): Result.005 file - promoters50/1471114
agatatagtattgag

SEQ ID NO: 174074 - DNA, 15 bp, Unknown
  misc_feature (1)..( 15): Result.005 file - promoters50/1471114
attcctagaattgtt

SEQ ID NO: 174075 - DNA, 15 bp, Unknown
  misc_feature (1)..( 15): Result.005 file - promoters50/1471114
catgattgtattgtt

SEQ ID NO: 174076 - DNA, 15 bp, Unknown
  misc_feature (1)..( 15): Result.005 file - promoters50/1471114
gatacaagatttgag

SEQ ID NO: 174077 - DNA, 15 bp, Unknown
  misc_feature (1)..( 15): Result.005 file - promoters50/1471114
tcaaaatgttttgtt

SEQ ID NO: 174078 - DNA, 15 bp, Unknown
  misc_feature (1)..( 15): Result.005 file - promoters50/1471114
aaattttttgttgtt

SEQ ID NO: 174079 - DNA, 11 bp, Unknown
  misc_feature (1)..( 11): Result.005 file - promoters50/1471114
tgtaaaaatgt

SEQ ID NO: 174080 - DNA, 11 bp, Unknown
  misc_feature (1)..( 11): Result.005 file - promoters50/1471114
tgttaaacagt

SEQ ID NO: 174081 - DNA, 11 bp, Unknown
  misc_feature (1)..( 11): Result.005 file - promoters50/1471114
ggttaaataat

SEQ ID NO: 174082 - DNA, 11 bp, Unknown
  misc_feature (1)..( 11): Result.005 file - promoters50/1471114
gtttaaacagt

SEQ ID NO: 174083 - DNA, 11 bp, Unknown
  misc_feature (1)..( 11): Result.005 file - promoters50/1471114
aattatataaa

SEQ ID NO: 174084 - DNA, 11 bp, Unknown
  misc_feature (1)..( 11): Result.005 file - promoters50/1471114
agttgaatttt

SEQ ID NO: 174085 - DNA, 10 bp, Unknown
  misc_feature (1)..( 10): Result.005 file - promoters50/1471114
atctcactca

SEQ ID NO: 174086 - DNA, 10 bp, Unknown
  misc_feature (1)..( 10): Result.005 file - promoters50/1471114
taatcaatca

SEQ ID NO: 174087 - DNA, 10 bp, Unknown
  misc_feature (1)..( 10): Result.005 file - promoters50/1471114
gaataaattc

SEQ ID NO: 174088 - DNA, 10 bp, Unknown
  misc_feature (1)..( 10): Result.005 file - promoters50/1471114
aaatcaaaat

SEQ ID NO: 174089 - DNA, 10 bp, Unknown
  misc_feature (1)..( 10): Result.005 file - promoters50/1471114
gaatcaaacg

SEQ ID NO: 174090 - DNA, 10 bp, Unknown
  misc_feature (1)..( 10): Result.005 file - promoters50/1471114
aaataaaaat

SEQ ID NO: 174091 - DNA, 10 bp, Unknown
  misc_feature (1)..( 10): Result.005 file - promoters50/1471140
ctacttcttt

SEQ ID NO: 174092 - DNA, 10 bp, Unknown
  misc_feature (1)..( 10): Result.005 file - promoters50/1471140
ctaattctga

SEQ ID NO: 174093 - DNA, 10 bp, Unknown
  misc_feature (1)..( 10): Result.005 file - promoters50/1471140
cttatttcat

SEQ ID NO: 174094 - DNA, 10 bp, Unknown
  misc_feature (1)..( 10): Result.005 file - promoters50/1471140
ttaaatctaa

SEQ ID NO: 174095 - DNA, 11 bp, Unknown
  misc_feature (1)..( 11): Result.005 file - promoters50/1471140
tttatatctaa

SEQ ID NO: 174096 - DNA, 8 bp, Unknown
  misc_feature (1)..( 8): Result.005 file - promoters50/1471140
caaacaaa

SEQ ID NO: 174097 - DNA, 8 bp, Unknown
  misc_feature (1)..( 8): Result.005 file - promoters50/1471140
caaacaca

SEQ ID NO: 174098 - DNA, 8 bp, Unknown
  misc_feature (1)..( 8): Result.005 file - promoters50/1471140
aaaataaa

SEQ ID NO: 174099 - DNA, 8 bp, Unknown
  misc_feature (1)..( 8): Result.005 file - promoters50/1471140
aaaacaaa

SEQ ID NO: 174100 - DNA, 8 bp, Unknown
  misc_feature (1)..( 8): Result.005 file - promoters50/1471140
gaaagaaa

SEQ ID NO: 174101 - DNA, 10 bp, Unknown
  misc_feature (1)..( 10): Result.005 file - promoters50/1471140
agttttttat

SEQ ID NO: 174102 - DNA, 10 bp, Unknown
  misc_feature (1)..( 10): Result.005 file - promoters50/1471140
gatttattac

SEQ ID NO: 174103 - DNA, 10 bp, Unknown
  misc_feature (1)..( 10): Result.005 file - promoters50/1471140
gttttatttt

SEQ ID NO: 174104 - DNA, 10 bp, Unknown
  misc_feature (1)..( 10): Result.005 file - promoters50/1471140
aatttatcaa

SEQ ID NO: 174105 - DNA, 10 bp, Unknown
  misc_feature (1)..( 10): Result.005 file - promoters50/1471140
aatttatcaa

SEQ ID NO: 174106 - DNA, 10 bp, Unknown
  misc_feature (1)..( 10): Result.005 file - promoters50/1471140
catttattca

SEQ ID NO: 174107 - DNA, 11 bp, Unknown
  misc_feature (1)..( 11): Result.005 file - promoters50/1471140
attttatttgg

SEQ ID NO: 174108 - DNA, 11 bp, Unknown
  misc_feature (1)..( 11): Result.005 file - promoters50/1471140
cacatatttga

SEQ ID NO: 174109 - DNA, 11 bp, Unknown
  misc_feature (1)..( 11): Result.005 file - promoters50/1471140
atttaatttgt

SEQ ID NO: 174110 - DNA, 11 bp, Unknown
  misc_feature (1)..( 11): Result.005 file - promoters50/1471140
aattaattttg

SEQ ID NO: 174111 - DNA, 11 bp, Unknown
  misc_feature (1)..( 11): Result.005 file - promoters50/1471140
tctctatataa

SEQ ID NO: 174112 - DNA, 13 bp, Unknown
  misc_feature (1)..( 13): Result.005 file - promoters50/1471140
ggtctatctttct

SEQ ID NO: 174113 - DNA, 13 bp, Unknown
  misc_feature (1)..( 13): Result.005 file - promoters50/1471140
gatctatatttca

SEQ ID NO: 174114 - DNA, 13 bp, Unknown
  misc_feature (1)..( 13): Result.005 file - promoters50/1471140
gatttatttaaaa

SEQ ID NO: 174115 - DNA, 13 bp, Unknown
  misc_feature (1)..( 13): Result.005 file - promoters50/1471140
catcaatacttac

SEQ ID NO: 174116 - DNA, 7 bp, Unknown
  misc_feature (1)..( 7): Result.005 file - promoters50/1471140
tatttca

SEQ ID NO: 174117 - DNA, 9 bp, Unknown
  misc_feature (1)..( 9): Result.005 file - promoters50/1472766
atgaagatt

SEQ ID NO: 174118 - DNA, 9 bp, Unknown
  misc_feature (1)..( 9): Result.005 file - promoters50/1472766
ttgaagaat

SEQ ID NO: 174119 - DNA, 9 bp, Unknown
  misc_feature (1)..( 9): Result.005 file - promoters50/1472766
ttgaaaaat

SEQ ID NO: 174120 - DNA, 8 bp, Unknown
  misc_feature (1)..( 8): Result.005 file - promoters50/1472766
aaaagaag

SEQ ID NO: 174121 - DNA, 8 bp, Unknown
  misc_feature (1)..( 8): Result.005 file - promoters50/1472766
aaaacaag

SEQ ID NO: 174122 - DNA, 8 bp, Unknown
  misc_feature (1)..( 8): Result.005 file - promoters50/1472766
caaagaag

SEQ ID NO: 174123 - DNA, 12 bp, Unknown
  misc_feature (1)..( 12): Result.005 file - promoters50/1472778
tattaattagtc

SEQ ID NO: 174124 - DNA, 12 bp, Unknown
  misc_feature (1)..( 12): Result.005 file - promoters50/1472778
gattaattcttt

SEQ ID NO: 174125 - DNA, 12 bp, Unknown
  misc_feature (1)..( 12): Result.005 file - promoters50/1472778
tatgaattggat

SEQ ID NO: 174126 - DNA, 12 bp, Unknown
  misc_feature (1)..( 12): Result.005 file - promoters50/1472778
ttttatttcttt

SEQ ID NO: 174127 - DNA, 12 bp, Unknown
  misc_feature (1)..( 12): Result.005 file - promoters50/1472778
atttaatttgta

SEQ ID NO: 174128 - DNA, 12 bp, Unknown
  misc_feature (1)..( 12): Result.005 file - promoters50/1472778
ttttattataaa

SEQ ID NO: 174129 - DNA, 13 bp, Unknown
  misc_feature (1)..( 13): Result.005 file - promoters50/1472778
ggataacttgtaa

SEQ ID NO: 174130 - DNA, 13 bp, Unknown
  misc_feature (1)..( 13): Result.005 file - promoters50/1472778
ttctttaattttc

SEQ ID NO: 174131 - DNA, 13 bp, Unknown
  misc_feature (1)..( 13): Result.005 file - promoters50/1472778
aaccttacttttt

SEQ ID NO: 174132 - DNA, 13 bp, Unknown
  misc_feature (1)..( 13): Result.005 file - promoters50/1472778
tactgtaatgttc

SEQ ID NO: 174133 - DNA, 13 bp, Unknown
  misc_feature (1)..( 13): Result.005 file - promoters50/1472778
aattttaataaac

SEQ ID NO: 174134 - DNA, 13 bp, Unknown
  misc_feature (1)..( 13): Result.005 file - promoters50/1472778
ttcattaataaga

SEQ ID NO: 174135 - DNA, 13 bp, Unknown
  misc_feature (1)..( 13): Result.005 file - promoters50/1472778
gagatttattcat

SEQ ID NO: 174136 - DNA, 13 bp, Unknown
  misc_feature (1)..( 13): Result.005 file - promoters50/1472778
aatttgaattttc

SEQ ID NO: 174137 - DNA, 13 bp, Unknown
  misc_feature (1)..( 13): Result.005 file - promoters50/1472778
taattttcgtttc

SEQ ID NO: 174138 - DNA, 13 bp, Unknown
  misc_feature (1)..( 13): Result.005 file - promoters50/1472778
tttttttagtttg

SEQ ID NO: 174139 - DNA, 13 bp, Unknown
  misc_feature (1)..( 13): Result.005 file - promoters50/1472778
taatgttcactaa

SEQ ID NO: 174140 - DNA, 13 bp, Unknown
  misc_feature (1)..( 13): Result.005 file - promoters50/1472778
ctattttatttta

SEQ ID NO: 174141 - DNA, 13 bp, Unknown
  misc_feature (1)..( 13): Result.005 file - promoters50/1472778
aatgtttatttaa

SEQ ID NO: 174142 - DNA, 13 bp, Unknown
  misc_feature (1)..( 13): Result.005 file - promoters50/1472778
gaattttcctaca

SEQ ID NO: 174143 - DNA, 13 bp, Unknown
  misc_feature (1)..( 13): Result.005 file - promoters50/1472778
agatgatcaacaa

SEQ ID NO: 174144 - DNA, 13 bp, Unknown
  misc_feature (1)..( 13): Result.005 file - promoters50/1472778
ctataaaacgtgt

SEQ ID NO: 174145 - DNA, 13 bp, Unknown
  misc_feature (1)..( 13): Result.005 file - promoters50/1472778
gtttaaaacaaag

SEQ ID NO: 174146 - DNA, 13 bp, Unknown
  misc_feature (1)..( 13): Result.005 file - promoters50/1472778
gtatataacccaa

SEQ ID NO: 174147 - DNA, 13 bp, Unknown
  misc_feature (1)..( 13): Result.005 file - promoters50/1472778
aaataaaaagttt

SEQ ID NO: 174148 - DNA, 13 bp, Unknown
  misc_feature (1)..( 13): Result.005 file - promoters50/1472778
gtatattattaat

SEQ ID NO: 174149 - DNA, 13 bp, Unknown
  misc_feature (1)..( 13): Result.005 file - promoters50/1472778
cagcaaaacgaag

SEQ ID NO: 174150 - DNA, 13 bp, Unknown
  misc_feature (1)..( 13): Result.005 file - promoters50/1472778
ggttaaaaaagaa

SEQ ID NO: 174151 - DNA, 13 bp, Unknown
  misc_feature (1)..( 13): Result.005 file - promoters50/1472778
ggctaaaaatgac

SEQ ID NO: 174152 - DNA, 11 bp, Unknown
  misc_feature (1)..( 11): Result.005 file - promoters50/1472778
ggttattaatt

SEQ ID NO: 174153 - DNA, 11 bp, Unknown
  misc_feature (1)..( 11): Result.005 file - promoters50/1472778
ttttattataa

SEQ ID NO: 174154 - DNA, 11 bp, Unknown
  misc_feature (1)..( 11): Result.005 file - promoters50/1472778
agatatgaatt

SEQ ID NO: 174155 - DNA, 11 bp, Unknown
  misc_feature (1)..( 11): Result.005 file - promoters50/1472778
ttagatggatt

SEQ ID NO: 174156 - DNA, 11 bp, Unknown
  misc_feature (1)..( 11): Result.005 file - promoters50/1472778
attaatgtatt

SEQ ID NO: 174157 - DNA, 11 bp, Unknown
  misc_feature (1)..( 11): Result.005 file - promoters50/1472778
ctaaatggata

SEQ ID NO: 174158 - DNA, 11 bp, Unknown
  misc_feature (1)..( 11): Result.005 file - promoters50/1472778
ttttatttctt

SEQ ID NO: 174159 - DNA, 9 bp, Unknown
  misc_feature (1)..( 9): Result.005 file - promoters50/1472778
ctacagttc

SEQ ID NO: 174160 - DNA, 9 bp, Unknown
  misc_feature (1)..( 9): Result.005 file - promoters50/1472778
atacagtta

SEQ ID NO: 174161 - DNA, 9 bp, Unknown
  misc_feature (1)..( 9): Result.005 file - promoters50/1472778
aaacactta

SEQ ID NO: 174162 - DNA, 9 bp, Unknown
  misc_feature (1)..( 9): Result.005 file - promoters50/1472778
ataaagtta

SEQ ID NO: 174163 - DNA, 9 bp, Unknown
  misc_feature (1)..( 9): Result.005 file - promoters50/1472778
atacagtat

SEQ ID NO: 174164 - DNA, 9 bp, Unknown
  misc_feature (1)..( 9): Result.005 file - promoters50/1472778
tgacagtaa

SEQ ID NO: 174165 - DNA, 11 bp, Unknown
  misc_feature (1)..( 11): Result.005 file - promoters50/1472778
ttttatataaa

SEQ ID NO: 174166 - DNA, 11 bp, Unknown
  misc_feature (1)..( 11): Result.005 file - promoters50/1472778
taaaatagaaa

SEQ ID NO: 174167 - DNA, 11 bp, Unknown
  misc_feature (1)..( 11): Result.005 file - promoters50/1472778
tttcataaaaa

SEQ ID NO: 174168 - DNA, 11 bp, Unknown
  misc_feature (1)..( 11): Result.005 file - promoters50/1472778
acgcatgaaat

SEQ ID NO: 174169 - DNA, 11 bp, Unknown
  misc_feature (1)..( 11): Result.005 file - promoters50/1472778
ataaatataaa

SEQ ID NO: 174170 - DNA, 11 bp, Unknown
  misc_feature (1)..( 11): Result.005 file - promoters50/1472778
gataagaaaaa

SEQ ID NO: 174171 - DNA, 10 bp, Unknown
  misc_feature (1)..( 10): Result.005 file - promoters50/1472778
gaatcacttc

SEQ ID NO: 174172 - DNA, 10 bp, Unknown
  misc_feature (1)..( 10): Result.005 file - promoters50/1472778
gaaacactta

SEQ ID NO: 174173 - DNA, 10 bp, Unknown
  misc_feature (1)..( 10): Result.005 file - promoters50/1472778
gatacagtta

SEQ ID NO: 174174 - DNA, 10 bp, Unknown
  misc_feature (1)..( 10): Result.005 file - promoters50/1472778
tataaagtta

SEQ ID NO: 174175 - DNA, 10 bp, Unknown
  misc_feature (1)..( 10): Result.005 file - promoters50/1472778
gatacagtat

SEQ ID NO: 174176 - DNA, 10 bp, Unknown
  misc_feature (1)..( 10): Result.005 file - promoters50/1472778
atgacagtaa

SEQ ID NO: 174177 - DNA, 13 bp, Unknown
  misc_feature (1)..( 13): Result.005 file - promoters50/1472778
caaaatagacaaa

SEQ ID NO: 174178 - DNA, 13 bp, Unknown
  misc_feature (1)..( 13): Result.005 file - promoters50/1472778
taaaaaagaaata

SEQ ID NO: 174179 - DNA, 13 bp, Unknown
  misc_feature (1)..( 13): Result.005 file - promoters50/1472778
acaaaaagaaaaa

SEQ ID NO: 174180 - DNA, 13 bp, Unknown
  misc_feature (1)..( 13): Result.005 file - promoters50/1472778
taaaaaaactaat

SEQ ID NO: 174181 - DNA, 13 bp, Unknown
  misc_feature (1)..( 13): Result.005 file - promoters50/1472778
ggcaaaagataag

SEQ ID NO: 174182 - DNA, 13 bp, Unknown
  misc_feature (1)..( 13): Result.005 file - promoters50/1472778
ataaataaaagaa

SEQ ID NO: 174183 - DNA, 16 bp, Unknown
  misc_feature (1)..( 16): Result.005 file - promoters50/1472778
agctgtgttatattga

SEQ ID NO: 174184 - DNA, 16 bp, Unknown
  misc_feature (1)..( 16): Result.005 file - promoters50/1472778
ttattttttaaattag

SEQ ID NO: 174185 - DNA, 16 bp, Unknown
  misc_feature (1)..( 16): Result.005 file - promoters50/1472778
ctaacgtttatatata

SEQ ID NO: 174186 - DNA, 16 bp, Unknown
  misc_feature (1)..( 16): Result.005 file - promoters50/1472778
aacctttttataatca

SEQ ID NO: 174187 - DNA, 16 bp, Unknown
  misc_feature (1)..( 16): Result.005 file - promoters50/1472778
caaacaataaaattaa

SEQ ID NO: 174188 - DNA, 16 bp, Unknown
  misc_feature (1)..( 16): Result.005 file - promoters50/1472778
ttaataattaaattaa

SEQ ID NO: 174189 - DNA, 8 bp, Unknown
  misc_feature (1)..( 8): Result.005 file - promoters50/1472799
atcatatt

SEQ ID NO: 174190 - DNA, 8 bp, Unknown
  misc_feature (1)..( 8): Result.005 file - promoters50/1472799
atcatatt

SEQ ID NO: 174191 - DNA, 8 bp, Unknown
  misc_feature (1)..( 8): Result.005 file - promoters50/1472799
atcatatt

SEQ ID NO: 174192 - DNA, 8 bp, Unknown
  misc_feature (1)..( 8): Result.005 file - promoters50/1472799
gatttgtt

SEQ ID NO: 174193 - DNA, 8 bp, Unknown
  misc_feature (1)..( 8): Result.005 file - promoters50/1472799
gatatgta

SEQ ID NO: 174194 - DNA, 8 bp, Unknown
  misc_feature (1)..( 8): Result.005 file - promoters50/1472799
tgtttgtt

SEQ ID NO: 174195 - DNA, 12 bp, Unknown
  misc_feature (1)..( 12): Result.005 file - promoters50/1472799
agtttgttcaat

SEQ ID NO: 174196 - DNA, 12 bp, Unknown
  misc_feature (1)..( 12): Result.005 file - promoters50/1472799
agtatgttgttg

SEQ ID NO: 174197 - DNA, 12 bp, Unknown
  misc_feature (1)..( 12): Result.005 file - promoters50/1472799
gatttgttcaat

SEQ ID NO: 174198 - DNA, 7 bp, Unknown
  misc_feature (1)..( 7): Result.005 file - promoters50/1472799
tgtttgg

SEQ ID NO: 174199 - DNA, 7 bp, Unknown
  misc_feature (1)..( 7): Result.005 file - promoters50/1472799
tgtttgt

SEQ ID NO: 174200 - DNA, 7 bp, Unknown
  misc_feature (1)..( 7): Result.005 file - promoters50/1472799
agtttgt

SEQ ID NO: 174201 - DNA, 6 bp, Unknown
  misc_feature (1)..( 6): Result.005 file - promoters50/1472799
tttgtt

SEQ ID NO: 174202 - DNA, 6 bp, Unknown
  misc_feature (1)..( 6): Result.005 file - promoters50/1472799
tttgtt

SEQ ID NO: 174203 - DNA, 6 bp, Unknown
  misc_feature (1)..( 6): Result.005 file - promoters50/1472799
tttgtt

SEQ ID NO: 174204 - DNA, 9 bp, Unknown
  misc_feature (1)..( 9): Result.005 file - promoters50/1472799
tttgttgtg

SEQ ID NO: 174205 - DNA, 9 bp, Unknown
  misc_feature (1)..( 9): Result.005 file - promoters50/1472799
tttgtagtg

SEQ ID NO: 174206 - DNA, 9 bp, Unknown
  misc_feature (1)..( 9): Result.005 file - promoters50/1472799
attgtagct

SEQ ID NO: 174207 - DNA, 8 bp, Unknown
  misc_feature (1)..( 8): Result.005 file - promoters50/1472799
tgatttgg

SEQ ID NO: 174208 - DNA, 8 bp, Unknown
  misc_feature (1)..( 8): Result.005 file - promoters50/1472799
tgatttgt

SEQ ID NO: 174209 - DNA, 8 bp, Unknown
  misc_feature (1)..( 8): Result.005 file - promoters50/1472799
agatatgt

SEQ ID NO: 174210 - DNA, 8 bp, Unknown
  misc_feature (1)..( 8): Result.005 file - promoters50/1472908
aaaaattt

SEQ ID NO: 174211 - DNA, 8 bp, Unknown
  misc_feature (1)..( 8): Result.005 file - promoters50/1472908
aaaacttt

SEQ ID NO: 174212 - DNA, 8 bp, Unknown
  misc_feature (1)..( 8): Result.005 file - promoters50/1472908
aaaaaacc

SEQ ID NO: 174213 - DNA, 8 bp, Unknown
  misc_feature (1)..( 8): Result.005 file - promoters50/1472908
gaagaaaa

SEQ ID NO: 174214 - DNA, 8 bp, Unknown
  misc_feature (1)..( 8): Result.005 file - promoters50/1472908
gaagaaaa

SEQ ID NO: 174215 - DNA, 8 bp, Unknown
  misc_feature (1)..( 8): Result.005 file - promoters50/1472908
taagaaag

SEQ ID NO: 174216 - DNA, 8 bp, Unknown
  misc_feature (1)..( 8): Result.005 file - promoters50/1472908
taaaaaaa

SEQ ID NO: 174217 - DNA, 9 bp, Unknown
  misc_feature (1)..( 9): Result.005 file - promoters50/1472908
tttttaaaa

SEQ ID NO: 174218 - DNA, 9 bp, Unknown
  misc_feature (1)..( 9): Result.005 file - promoters50/1472908
tttataaac

SEQ ID NO: 174219 - DNA, 9 bp, Unknown
  misc_feature (1)..( 9): Result.005 file - promoters50/1472908
tatataaac

SEQ ID NO: 174220 - DNA, 11 bp, Unknown
  misc_feature (1)..( 11): Result.005 file - promoters50/1472908
aattaaggaaa

SEQ ID NO: 174221 - DNA, 11 bp, Unknown
  misc_feature (1)..( 11): Result.005 file - promoters50/1472908
aattaattttt

SEQ ID NO: 174222 - DNA, 11 bp, Unknown
  misc_feature (1)..( 11): Result.005 file - promoters50/1472908
gattgattttt

SEQ ID NO: 174223 - DNA, 9 bp, Unknown
  misc_feature (1)..( 9): Result.005 file - promoters50/1472908
attttctgt

SEQ ID NO: 174224 - DNA, 9 bp, Unknown
  misc_feature (1)..( 9): Result.005 file - promoters50/1472908
attttgtgt

SEQ ID NO: 174225 - DNA, 9 bp, Unknown
  misc_feature (1)..( 9): Result.005 file - promoters50/1472908
actgtatgt

SEQ ID NO: 174226 - DNA, 8 bp, Unknown
  misc_feature (1)..( 8): Result.005 file - promoters50/1472908
cttgtaga

SEQ ID NO: 174227 - DNA, 8 bp, Unknown
  misc_feature (1)..( 8): Result.005 file - promoters50/1472908
attgtagt

SEQ ID NO: 174228 - DNA, 8 bp, Unknown
  misc_feature (1)..( 8): Result.005 file - promoters50/1472908
cttgtaga

SEQ ID NO: 174229 - DNA, 8 bp, Unknown
  misc_feature (1)..( 8): Result.005 file - promoters50/1472908
aatttaac

SEQ ID NO: 174230 - DNA, 8 bp, Unknown
  misc_feature (1)..( 8): Result.005 file - promoters50/1472908
aatttaat

SEQ ID NO: 174231 - DNA, 8 bp, Unknown
  misc_feature (1)..( 8): Result.005 file - promoters50/1472908
tgtttaat

SEQ ID NO: 174232 - DNA, 10 bp, Unknown
  misc_feature (1)..( 10): Result.005 file - promoters50/1472908
ttttataatg

SEQ ID NO: 174233 - DNA, 10 bp, Unknown
  misc_feature (1)..( 10): Result.005 file - promoters50/1472908
ttttatgttt

SEQ ID NO: 174234 - DNA, 10 bp, Unknown
  misc_feature (1)..( 10): Result.005 file - promoters50/1472908
gtttctgttt

SEQ ID NO: 174235 - DNA, 10 bp, Unknown
  misc_feature (1)..( 10): Result.005 file - promoters50/1472908
ataatgattt

SEQ ID NO: 174236 - DNA, 10 bp, Unknown
  misc_feature (1)..( 10): Result.005 file - promoters50/1472908
tttatgtttt

SEQ ID NO: 174237 - DNA, 10 bp, Unknown
  misc_feature (1)..( 10): Result.005 file - promoters50/1472908
tttctgtttc

SEQ ID NO: 174238 - DNA, 8 bp, Unknown
  misc_feature (1)..( 8): Result.005 file - promoters50/1472908
gaaaaaaa

SEQ ID NO: 174239 - DNA, 8 bp, Unknown
  misc_feature (1)..( 8): Result.005 file - promoters50/1472908
taaaaaaa

SEQ ID NO: 174240 - DNA, 8 bp, Unknown
  misc_feature (1)..( 8): Result.005 file - promoters50/1472908
taagaaag

SEQ ID NO: 174241 - DNA, 13 bp, Unknown
  misc_feature (1)..( 13): Result.005 file - promoters50/1473010
acaaacacttaaa

SEQ ID NO: 174242 - DNA, 13 bp, Unknown
  misc_feature (1)..( 13): Result.005 file - promoters50/1473010
acaaaaactttat

SEQ ID NO: 174243 - DNA, 13 bp, Unknown
  misc_feature (1)..( 13): Result.005 file - promoters50/1473010
attaaaatttaat

SEQ ID NO: 174244 - DNA, 13 bp, Unknown
  misc_feature (1)..( 13): Result.005 file - promoters50/1473010
acacaaattcgag

SEQ ID NO: 174245 - DNA, 13 bp, Unknown
  misc_feature (1)..( 13): Result.005 file - promoters50/1473010
aaacgaattaaat

SEQ ID NO: 174246 - DNA, 8 bp, Unknown
  misc_feature (1)..( 8): Result.005 file - promoters50/1473010
aataaatt

SEQ ID NO: 174247 - DNA, 8 bp, Unknown
  misc_feature (1)..( 8): Result.005 file - promoters50/1473010
aataaaaa

SEQ ID NO: 174248 - DNA, 8 bp, Unknown
  misc_feature (1)..( 8): Result.005 file - promoters50/1473010
cataaaaa

SEQ ID NO: 174249 - DNA, 8 bp, Unknown
  misc_feature (1)..( 8): Result.005 file - promoters50/1473010
tatacaaa

SEQ ID NO: 174250 - DNA, 8 bp, Unknown
  misc_feature (1)..( 8): Result.005 file - promoters50/1473010
ttattaat

SEQ ID NO: 174251 - DNA, 8 bp, Unknown
  misc_feature (1)..( 8): Result.005 file - promoters50/1473010
ttattaaa

SEQ ID NO: 174252 - DNA, 8 bp, Unknown
  misc_feature (1)..( 8): Result.005 file - promoters50/1473010
gaattaaa

SEQ ID NO: 174253 - DNA, 8 bp, Unknown
  misc_feature (1)..( 8): Result.005 file - promoters50/1473010
ttatattc

SEQ ID NO: 174254 - DNA, 8 bp, Unknown
  misc_feature (1)..( 8): Result.005 file - promoters50/1473010
attaaagt

SEQ ID NO: 174255 - DNA, 8 bp, Unknown
  misc_feature (1)..( 8): Result.005 file - promoters50/1473010
attaaatt

SEQ ID NO: 174256 - DNA, 8 bp, Unknown
  misc_feature (1)..( 8): Result.005 file - promoters50/1473010
attaaaat

SEQ ID NO: 174257 - DNA, 8 bp, Unknown
  misc_feature (1)..( 8): Result.005 file - promoters50/1473010
tttatatt

SEQ ID NO: 174258 - DNA, 7 bp, Unknown
  misc_feature (1)..( 7): Result.005 file - promoters50/1473014
aagtcat

SEQ ID NO: 174259 - DNA, 7 bp, Unknown
  misc_feature (1)..( 7): Result.005 file - promoters50/1473014
aagtcag

SEQ ID NO: 174260 - DNA, 7 bp, Unknown
  misc_feature (1)..( 7): Result.005 file - promoters50/1473014
gagtcat

SEQ ID NO: 174261 - DNA, 13 bp, Unknown
  misc_feature (1)..( 13): Result.005 file - promoters50/1473014
gcttcttcaccca

SEQ ID NO: 174262 - DNA, 13 bp, Unknown
  misc_feature (1)..( 13): Result.005 file - promoters50/1473014
gcttattcactct

SEQ ID NO: 174263 - DNA, 13 bp, Unknown
  misc_feature (1)..( 13): Result.005 file - promoters50/1473014
acatgttcgctct

SEQ ID NO: 174264 - DNA, 13 bp, Unknown
  misc_feature (1)..( 13): Result.005 file - promoters50/1473014
acccattttctgc

SEQ ID NO: 174265 - DNA, 13 bp, Unknown
  misc_feature (1)..( 13): Result.005 file - promoters50/1473014
tagtcttttgtgc

SEQ ID NO: 174266 - DNA, 13 bp, Unknown
  misc_feature (1)..( 13): Result.005 file - promoters50/1473014
cccagtttcattg

SEQ ID NO: 174267 - DNA, 9 bp, Unknown
  misc_feature (1)..( 9): Result.005 file - promoters50/1473014
catatctaa

SEQ ID NO: 174268 - DNA, 9 bp, Unknown
  misc_feature (1)..( 9): Result.005 file - promoters50/1473014
tataactaa

SEQ ID NO: 174269 - DNA, 9 bp, Unknown
  misc_feature (1)..( 9): Result.005 file - promoters50/1473014
tataacatt

SEQ ID NO: 174270 - DNA, 9 bp, Unknown
  misc_feature (1)..( 9): Result.005 file - promoters50/1473014
catatcatc

SEQ ID NO: 174271 - DNA, 10 bp, Unknown
  misc_feature (1)..( 10): Result.005 file - promoters50/1473014
ttataactaa

SEQ ID NO: 174272 - DNA, 10 bp, Unknown
  misc_feature (1)..( 10): Result.005 file - promoters50/1473014
ttaaaaccct

SEQ ID NO: 174273 - DNA, 10 bp, Unknown
  misc_feature (1)..( 10): Result.005 file - promoters50/1473014
aaaaaaccct

SEQ ID NO: 174274 - DNA, 6 bp, Unknown
  misc_feature (1)..( 6): Result.005 file - promoters50/1473014
catttt

SEQ ID NO: 174275 - DNA, 6 bp, Unknown
  misc_feature (1)..( 6): Result.005 file - promoters50/1473014
catttt

SEQ ID NO: 174276 - DNA, 7 bp, Unknown
  misc_feature (1)..( 7): Result.005 file - promoters50/1473014
catattt

SEQ ID NO: 174277 - DNA, 7 bp, Unknown
  misc_feature (1)..( 7): Result.005 file - promoters50/1473050
atttttt

SEQ ID NO: 174278 - DNA, 7 bp, Unknown
  misc_feature (1)..( 7): Result.005 file - promoters50/1473050
atttttt

SEQ ID NO: 174279 - DNA, 7 bp, Unknown
  misc_feature (1)..( 7): Result.005 file - promoters50/1473050
atttttt

SEQ ID NO: 174280 - DNA, 7 bp, Unknown
  misc_feature (1)..( 7): Result.005 file - promoters50/1473050
gatgaaa

SEQ ID NO: 174281 - DNA, 7 bp, Unknown
  misc_feature (1)..( 7): Result.005 file - promoters50/1473050
gataaaa

SEQ ID NO: 174282 - DNA, 7 bp, Unknown
  misc_feature (1)..( 7): Result.005 file - promoters50/1473050
tatgaaa

SEQ ID NO: 174283 - DNA, 9 bp, Unknown
  misc_feature (1)..( 9): Result.005 file - promoters50/1473050
ttaaattat

SEQ ID NO: 174284 - DNA, 9 bp, Unknown
  misc_feature (1)..( 9): Result.005 file - promoters50/1473050
ttaaatccg

SEQ ID NO: 174285 - DNA, 9 bp, Unknown
  misc_feature (1)..( 9): Result.005 file - promoters50/1473050
ataaagtat

SEQ ID NO: 174286 - DNA, 8 bp, Unknown
  misc_feature (1)..( 8): Result.005 file - promoters50/1473050
aaaaccaa

SEQ ID NO: 174287 - DNA, 8 bp, Unknown
  misc_feature (1)..( 8): Result.005 file - promoters50/1473050
caaatcaa

SEQ ID NO: 174288 - DNA, 8 bp, Unknown
  misc_feature (1)..( 8): Result.005 file - promoters50/1473050
aaaaccta

SEQ ID NO: 174289 - DNA, 11 bp, Unknown
  misc_feature (1)..( 11): Result.005 file - promoters50/1473050
aaatcaaaatt

SEQ ID NO: 174290 - DNA, 11 bp, Unknown
  misc_feature (1)..( 11): Result.005 file - promoters50/1473050
aaatcataatg

SEQ ID NO: 174291 - DNA, 11 bp, Unknown
  misc_feature (1)..( 11): Result.005 file - promoters50/1473050
caaaaataatg

SEQ ID NO: 174292 - DNA, 7 bp, Unknown
  misc_feature (1)..( 7): Result.005 file - promoters50/1481416
accaaac

SEQ ID NO: 174293 - DNA, 7 bp, Unknown
  misc_feature (1)..( 7): Result.005 file - promoters50/1481416
accaaag

SEQ ID NO: 174294 - DNA, 7 bp, Unknown
  misc_feature (1)..( 7): Result.005 file - promoters50/1481416
accaaac

SEQ ID NO: 174295 - DNA, 7 bp, Unknown
  misc_feature (1)..( 7): Result.005 file - promoters50/1481416
ttaaaaa

SEQ ID NO: 174296 - DNA, 7 bp, Unknown
  misc_feature (1)..( 7): Result.005 file - promoters50/1481416
ttaaaat

SEQ ID NO: 174297 - DNA, 7 bp, Unknown
  misc_feature (1)..( 7): Result.005 file - promoters50/1481416
ataaaat

SEQ ID NO: 174298 - DNA, 12 bp, Unknown
  misc_feature (1)..( 12): Result.005 file - promoters50/1481416
aaggaatcaaac

SEQ ID NO: 174299 - DNA, 12 bp, Unknown
  misc_feature (1)..( 12): Result.005 file - promoters50/1481416
cttgaaccaaac

SEQ ID NO: 174300 - DNA, 12 bp, Unknown
  misc_feature (1)..( 12): Result.005 file - promoters50/1481416
aagcaattaaat

SEQ ID NO: 174301 - DNA, 9 bp, Unknown
  misc_feature (1)..( 9): Result.005 file - promoters50/1481416
ctatataaa

SEQ ID NO: 174302 - DNA, 9 bp, Unknown
  misc_feature (1)..( 9): Result.005 file - promoters50/1481416
caatataaa

SEQ ID NO: 174303 - DNA, 9 bp, Unknown
  misc_feature (1)..( 9): Result.005 file - promoters50/1481416
ctatataat

SEQ ID NO: 174304 - DNA, 7 bp, Unknown
  misc_feature (1)..( 7): Result.005 file - promoters50/1481416
aaaaata

SEQ ID NO: 174305 - DNA, 7 bp, Unknown
  misc_feature (1)..( 7): Result.005 file - promoters50/1481416
taaaata

SEQ ID NO: 174306 - DNA, 7 bp, Unknown
  misc_feature (1)..( 7): Result.005 file - promoters50/1481416
taaaatt

SEQ ID NO: 174307 - DNA, 7 bp, Unknown
  misc_feature (1)..( 7): Result.005 file - promoters50/1481416
aaaaaaa

SEQ ID NO: 174308 - DNA, 7 bp, Unknown
  misc_feature (1)..( 7): Result.005 file - promoters50/1481416
aaaaaat

SEQ ID NO: 174309 - DNA, 7 bp, Unknown
  misc_feature (1)..( 7): Result.005 file - promoters50/1481416
aaagaat

SEQ ID NO: 174310 - DNA, 9 bp, Unknown
  misc_feature (1)..( 9): Result.005 file - promoters50/1481516
gaggaagaa

SEQ ID NO: 174311 - DNA, 9 bp, Unknown
  misc_feature (1)..( 9): Result.005 file - promoters50/1481516
gaggaagat

SEQ ID NO: 174312 - DNA, 9 bp, Unknown
  misc_feature (1)..( 9): Result.005 file - promoters50/1481516
aaagaagaa

SEQ ID NO: 174313 - DNA, 7 bp, Unknown
  misc_feature (1)..( 7): Result.005 file - promoters50/1481516
tgttgcc

SEQ ID NO: 174314 - DNA, 7 bp, Unknown
  misc_feature (1)..( 7): Result.005 file - promoters50/1481516
tgttgct

SEQ ID NO: 174315 - DNA, 7 bp, Unknown
  misc_feature (1)..( 7): Result.005 file - promoters50/1481516
cgttgcc

SEQ ID NO: 174316 - DNA, 9 bp, Unknown
  misc_feature (1)..( 9): Result.005 file - promoters50/1481544
aaattgaca

SEQ ID NO: 174317 - DNA, 9 bp, Unknown
  misc_feature (1)..( 9): Result.005 file - promoters50/1481544
aaagtgatt

SEQ ID NO: 174318 - DNA, 9 bp, Unknown
  misc_feature (1)..( 9): Result.005 file - promoters50/1481544
atagttatt

SEQ ID NO: 174319 - DNA, 9 bp, Unknown
  misc_feature (1)..( 9): Result.005 file - promoters50/1481568
aagagtaag

SEQ ID NO: 174320 - DNA, 9 bp, Unknown
  misc_feature (1)..( 9): Result.005 file - promoters50/1481568
aagagtaaa

SEQ ID NO: 174321 - DNA, 9 bp, Unknown
  misc_feature (1)..( 9): Result.005 file - promoters50/1481568
ataagtaaa

SEQ ID NO: 174322 - DNA, 10 bp, Unknown
  misc_feature (1)..( 10): Result.005 file - promoters50/1481568
cgaattgaag

SEQ ID NO: 174323 - DNA, 10 bp, Unknown
  misc_feature (1)..( 10): Result.005 file - promoters50/1481568
ggaaatgaaa

SEQ ID NO: 174324 - DNA, 10 bp, Unknown
  misc_feature (1)..( 10): Result.005 file - promoters50/1481568
ggaaaagaaa

SEQ ID NO: 174325 - DNA, 9 bp, Unknown
  misc_feature (1)..( 9): Result.005 file - promoters50/1481572
agaatttgt

SEQ ID NO: 174326 - DNA, 9 bp, Unknown
  misc_feature (1)..( 9): Result.005 file - promoters50/1481572
agaatctgt

SEQ ID NO: 174327 - DNA, 9 bp, Unknown
  misc_feature (1)..( 9): Result.005 file - promoters50/1481572
acaatatgt

SEQ ID NO: 174328 - DNA, 8 bp, Unknown
  misc_feature (1)..( 8): Result.005 file - promoters50/1481572
ttgatatt

SEQ ID NO: 174329 - DNA, 8 bp, Unknown
  misc_feature (1)..( 8): Result.005 file - promoters50/1481572
tggatatt

SEQ ID NO: 174330 - DNA, 8 bp, Unknown
  misc_feature (1)..( 8): Result.005 file - promoters50/1481572
tggttatg

SEQ ID NO: 174331 - DNA, 11 bp, Unknown
  misc_feature (1)..( 11): Result.005 file - promoters50/1481572
caacttcgatc

SEQ ID NO: 174332 - DNA, 11 bp, Unknown
  misc_feature (1)..( 11): Result.005 file - promoters50/1481572
aaacttcatct

SEQ ID NO: 174333 - DNA, 11 bp, Unknown
  misc_feature (1)..( 11): Result.005 file - promoters50/1481572
aaagttcatct

SEQ ID NO: 174334 - DNA, 8 bp, Unknown
  misc_feature (1)..( 8): Result.005 file - promoters50/1481576
atttattt

SEQ ID NO: 174335 - DNA, 8 bp, Unknown
  misc_feature (1)..( 8): Result.005 file - promoters50/1481576
ttttgttt

SEQ ID NO: 174336 - DNA, 8 bp, Unknown
  misc_feature (1)..( 8): Result.005 file - promoters50/1481576
ttttgttg

SEQ ID NO: 174337 - DNA, 9 bp, Unknown
  misc_feature (1)..( 9): Result.005 file - promoters50/1481576
atatttgta

SEQ ID NO: 174338 - DNA, 9 bp, Unknown
  misc_feature (1)..( 9): Result.005 file - promoters50/1481576
atattagta

SEQ ID NO: 174339 - DNA, 9 bp, Unknown
  misc_feature (1)..( 9): Result.005 file - promoters50/1481576
ttattaagg

SEQ ID NO: 174340 - DNA, 12 bp, Unknown
  misc_feature (1)..( 12): Result.005 file - promoters50/1481606
ttttctaattaa

SEQ ID NO: 174341 - DNA, 12 bp, Unknown
  misc_feature (1)..( 12): Result.005 file - promoters50/1481606
aaacataaataa

SEQ ID NO: 174342 - DNA, 12 bp, Unknown
  misc_feature (1)..( 12): Result.005 file - promoters50/1481606
ttttctatttag

SEQ ID NO: 174343 - DNA, 12 bp, Unknown
  misc_feature (1)..( 12): Result.005 file - promoters50/1481606
aaacataaataa

SEQ ID NO: 174344 - DNA, 9 bp, Unknown
  misc_feature (1)..( 9): Result.005 file - promoters50/1481606
ttgcaactt

SEQ ID NO: 174345 - DNA, 9 bp, Unknown
  misc_feature (1)..( 9): Result.005 file - promoters50/1481606
taacaactt

SEQ ID NO: 174346 - DNA, 9 bp, Unknown
  misc_feature (1)..( 9): Result.005 file - promoters50/1481606
taacatctt

SEQ ID NO: 174347 - DNA, 7 bp, Unknown
  misc_feature (1)..( 7): Result.005 file - promoters50/1481606
atgatga

SEQ ID NO: 174348 - DNA, 7 bp, Unknown
  misc_feature (1)..( 7): Result.005 file - promoters50/1481606
atgttga

SEQ ID NO: 174349 - DNA, 7 bp, Unknown
  misc_feature (1)..( 7): Result.005 file - promoters50/1481606
atgttgc

SEQ ID NO: 174350 - DNA, 8 bp, Unknown
  misc_feature (1)..( 8): Result.005 file - promoters50/1481606
acatattt

SEQ ID NO: 174351 - DNA, 8 bp, Unknown
  misc_feature (1)..( 8): Result.005 file - promoters50/1481606
taatattt

SEQ ID NO: 174352 - DNA, 8 bp, Unknown
  misc_feature (1)..( 8): Result.005 file - promoters50/1481606
taatatta

SEQ ID NO: 174353 - DNA, 7 bp, Unknown
  misc_feature (1)..( 7): Result.005 file - promoters50/1481606
atgatgc

SEQ ID NO: 174354 - DNA, 7 bp, Unknown
  misc_feature (1)..( 7): Result.005 file - promoters50/1481606
atgttgc

SEQ ID NO: 174355 - DNA, 7 bp, Unknown
  misc_feature (1)..( 7): Result.005 file - promoters50/1481606
atgttga

SEQ ID NO: 174356 - DNA, 8 bp, Unknown
  misc_feature (1)..( 8): Result.005 file - promoters50/1481606
ttcttttc

SEQ ID NO: 174357 - DNA, 8 bp, Unknown
  misc_feature (1)..( 8): Result.005 file - promoters50/1481606
ttcgtttc

SEQ ID NO: 174358 - DNA, 8 bp, Unknown
  misc_feature (1)..( 8): Result.005 file - promoters50/1481606
ttctttaa

SEQ ID NO: 174359 - DNA, 11 bp, Unknown
  misc_feature (1)..( 11): Result.005 file - promoters50/1481658
taaaatgaata

SEQ ID NO: 174360 - DNA, 11 bp, Unknown
  misc_feature (1)..( 11): Result.005 file - promoters50/1481658
agaaatcaatg

SEQ ID NO: 174361 - DNA, 11 bp, Unknown
  misc_feature (1)..( 11): Result.005 file - promoters50/1481658
caaaatcatgg

SEQ ID NO: 174362 - DNA, 11 bp, Unknown
  misc_feature (1)..( 11): Result.005 file - promoters50/1481658
caaaaccatcc

SEQ ID NO: 174363 - DNA, 11 bp, Unknown
  misc_feature (1)..( 11): Result.005 file - promoters50/1481658
gcacaccctcc

SEQ ID NO: 174364 - DNA, 10 bp, Unknown
  misc_feature (1)..( 10): Result.005 file - promoters50/1481658
aaaatccatc

SEQ ID NO: 174365 - DNA, 10 bp, Unknown
  misc_feature (1)..( 10): Result.005 file - promoters50/1481658
aaaatcatgg

SEQ ID NO: 174366 - DNA, 10 bp, Unknown
  misc_feature (1)..( 10): Result.005 file - promoters50/1481658
aaaaccatcc

SEQ ID NO: 174367 - DNA, 10 bp, Unknown
  misc_feature (1)..( 10): Result.005 file - promoters50/1481658
gaaatcaatg

SEQ ID NO: 174368 - DNA, 10 bp, Unknown
  misc_feature (1)..( 10): Result.005 file - promoters50/1481658
cacaccctcc

SEQ ID NO: 174369 - DNA, 14 bp, Unknown
  misc_feature (1)..( 14): Result.005 file - promoters50/1481696
tacgttaaaaataa

SEQ ID NO: 174370 - DNA, 14 bp, Unknown
  misc_feature (1)..( 14): Result.005 file - promoters50/1481696
aactttaaaaactt

SEQ ID NO: 174371 - DNA, 14 bp, Unknown
  misc_feature (1)..( 14): Result.005 file - promoters50/1481696
cgatgtaaaaatta

SEQ ID NO: 174372 - DNA, 14 bp, Unknown
  misc_feature (1)..( 14): Result.005 file - promoters50/1481696
ttatttcaaatgac

SEQ ID NO: 174373 - DNA, 14 bp, Unknown
  misc_feature (1)..( 14): Result.005 file - promoters50/1481696
aactttgaaagcaa

SEQ ID NO: 174374 - DNA, 14 bp, Unknown
  misc_feature (1)..( 14): Result.005 file - promoters50/1481696
aacaacaaaatact

SEQ ID NO: 174375 - DNA, 10 bp, Unknown
  misc_feature (1)..( 10): Result.005 file - promoters50/1481696
ttaaatttac

SEQ ID NO: 174376 - DNA, 10 bp, Unknown
  misc_feature (1)..( 10): Result.005 file - promoters50/1481696
atcaatttat

SEQ ID NO: 174377 - DNA, 10 bp, Unknown
  misc_feature (1)..( 10): Result.005 file - promoters50/1481696
aaaaattttt

SEQ ID NO: 174378 - DNA, 10 bp, Unknown
  misc_feature (1)..( 10): Result.005 file - promoters50/1481696
tgaaattttc

SEQ ID NO: 174379 - DNA, 10 bp, Unknown
  misc_feature (1)..( 10): Result.005 file - promoters50/1481696
tgagatttat

SEQ ID NO: 174380 - DNA, 10 bp, Unknown
  misc_feature (1)..( 10): Result.005 file - promoters50/1481696
aaaaattgta

SEQ ID NO: 174381 - DNA, 12 bp, Unknown
  misc_feature (1)..( 12): Result.005 file - promoters50/1481851
cagaaatttggt

SEQ ID NO: 174382 - DNA, 12 bp, Unknown
  misc_feature (1)..( 12): Result.005 file - promoters50/1481851
tttgtgtttggt

SEQ ID NO: 174383 - DNA, 12 bp, Unknown
  misc_feature (1)..( 12): Result.005 file - promoters50/1481851
tttctgtttggg

SEQ ID NO: 174384 - DNA, 12 bp, Unknown
  misc_feature (1)..( 12): Result.005 file - promoters50/1481851
gttctttttgac

SEQ ID NO: 174385 - DNA, 12 bp, Unknown
  misc_feature (1)..( 12): Result.005 file - promoters50/1481851
cttcctttcttc

SEQ ID NO: 174386 - DNA, 12 bp, Unknown
  misc_feature (1)..( 12): Result.005 file - promoters50/1481851
ggtccattctct

SEQ ID NO: 174387 - DNA, 9 bp, Unknown
  misc_feature (1)..( 9): Result.005 file - promoters50/1481930
tgtcacata

SEQ ID NO: 174388 - DNA, 9 bp, Unknown
  misc_feature (1)..( 9): Result.005 file - promoters50/1481930
atacacata

SEQ ID NO: 174389 - DNA, 9 bp, Unknown
  misc_feature (1)..( 9): Result.005 file - promoters50/1481930
atacaaata

SEQ ID NO: 174390 - DNA, 7 bp, Unknown
  misc_feature (1)..( 7): Result.005 file - promoters50/1481930
tagtgtg

SEQ ID NO: 174391 - DNA, 7 bp, Unknown
  misc_feature (1)..( 7): Result.005 file - promoters50/1481930
aagtgtg

SEQ ID NO: 174392 - DNA, 7 bp, Unknown
  misc_feature (1)..( 7): Result.005 file - promoters50/1481930
aagtgtt

SEQ ID NO: 174393 - DNA, 7 bp, Unknown
  misc_feature (1)..( 7): Result.005 file - promoters50/1481930
aatataa

SEQ ID NO: 174394 - DNA, 7 bp, Unknown
  misc_feature (1)..( 7): Result.005 file - promoters50/1481930
aatatat

SEQ ID NO: 174395 - DNA, 7 bp, Unknown
  misc_feature (1)..( 7): Result.005 file - promoters50/1481930
gatatat

SEQ ID NO: 174396 - DNA, 7 bp, Unknown
  misc_feature (1)..( 7): Result.005 file - promoters50/1481961
tcttttt

SEQ ID NO: 174397 - DNA, 7 bp, Unknown
  misc_feature (1)..( 7): Result.005 file - promoters50/1481961
tcttttg

SEQ ID NO: 174398 - DNA, 7 bp, Unknown
  misc_feature (1)..( 7): Result.005 file - promoters50/1481961
acttttt

SEQ ID NO: 174399 - DNA, 7 bp, Unknown
  misc_feature (1)..( 7): Result.005 file - promoters50/1481961
tcttttc

SEQ ID NO: 174400 - DNA, 8 bp, Unknown
  misc_feature (1)..( 8): Result.005 file - promoters50/1481961
atttctta

SEQ ID NO: 174401 - DNA, 8 bp, Unknown
  misc_feature (1)..( 8): Result.005 file - promoters50/1481961
ttttttta

SEQ ID NO: 174402 - DNA, 8 bp, Unknown
  misc_feature (1)..( 8): Result.005 file - promoters50/1481961
attttttt

SEQ ID NO: 174403 - DNA, 8 bp, Unknown
  misc_feature (1)..( 8): Result.005 file - promoters50/1481961
agttttta

SEQ ID NO: 174404 - DNA, 9 bp, Unknown
  misc_feature (1)..( 9): Result.005 file - promoters50/1481961
aatcggttc

SEQ ID NO: 174405 - DNA, 9 bp, Unknown
  misc_feature (1)..( 9): Result.005 file - promoters50/1481961
tttcgtttc

SEQ ID NO: 174406 - DNA, 9 bp, Unknown
  misc_feature (1)..( 9): Result.005 file - promoters50/1481961
ttttgtttt

SEQ ID NO: 174407 - DNA, 9 bp, Unknown
  misc_feature (1)..( 9): Result.005 file - promoters50/1481961
attcgttgt

SEQ ID NO: 174408 - DNA, 11 bp, Unknown
  misc_feature (1)..( 11): Result.005 file - promoters50/1482017
cttttgtttag

SEQ ID NO: 174409 - DNA, 11 bp, Unknown
  misc_feature (1)..( 11): Result.005 file - promoters50/1482017
tttttgtttag

SEQ ID NO: 174410 - DNA, 11 bp, Unknown
  misc_feature (1)..( 11): Result.005 file - promoters50/1482017
atttttttctt

SEQ ID NO: 174411 - DNA, 11 bp, Unknown
  misc_feature (1)..( 11): Result.005 file - promoters50/1482017
tttttgttgca

SEQ ID NO: 174412 - DNA, 12 bp, Unknown
  misc_feature (1)..( 12): Result.005 file - promoters50/1482017
tttcttgtctaa

SEQ ID NO: 174413 - DNA, 12 bp, Unknown
  misc_feature (1)..( 12): Result.005 file - promoters50/1482017
tgatttatttaa

SEQ ID NO: 174414 - DNA, 14 bp, Unknown
  misc_feature (1)..( 14): Result.005 file - promoters50/1482017
taattaaataaaca

SEQ ID NO: 174415 - DNA, 14 bp, Unknown
  misc_feature (1)..( 14): Result.005 file - promoters50/1482017
tgtttagataaaac

SEQ ID NO: 174416 - DNA, 14 bp, Unknown
  misc_feature (1)..( 14): Result.005 file - promoters50/1482017
ttgtctaataaaaa

SEQ ID NO: 174417 - DNA, 14 bp, Unknown
  misc_feature (1)..( 14): Result.005 file - promoters50/1482017
tttttatatatata

SEQ ID NO: 174418 - DNA, 14 bp, Unknown
  misc_feature (1)..( 14): Result.005 file - promoters50/1482017
tttttctatgaaca

SEQ ID NO: 174419 - DNA, 14 bp, Unknown
  misc_feature (1)..( 14): Result.005 file - promoters50/1482017
aaatacactaaaaa

SEQ ID NO: 174420 - DNA, 10 bp, Unknown
  misc_feature (1)..( 10): Result.005 file - promoters50/1482017
atttttgttt

SEQ ID NO: 174421 - DNA, 10 bp, Unknown
  misc_feature (1)..( 10): Result.005 file - promoters50/1482017
cttttttttt

SEQ ID NO: 174422 - DNA, 10 bp, Unknown
  misc_feature (1)..( 10): Result.005 file - promoters50/1482017
attgttggga

SEQ ID NO: 174423 - DNA, 10 bp, Unknown
  misc_feature (1)..( 10): Result.005 file - promoters50/1482017
atttttatat

SEQ ID NO: 174424 - DNA, 10 bp, Unknown
  misc_feature (1)..( 10): Result.005 file - promoters50/1482017
gttttttcta

SEQ ID NO: 174425 - DNA, 10 bp, Unknown
  misc_feature (1)..( 10): Result.005 file - promoters50/1482017
tgttttgtgt

SEQ ID NO: 174426 - DNA, 12 bp, Unknown
  misc_feature (1)..( 12): Result.005 file - promoters50/1482017
tcaaatatgcac

SEQ ID NO: 174427 - DNA, 12 bp, Unknown
  misc_feature (1)..( 12): Result.005 file - promoters50/1482017
gcaaatacattt

SEQ ID NO: 174428 - DNA, 12 bp, Unknown
  misc_feature (1)..( 12): Result.005 file - promoters50/1482017
caaaatattata

SEQ ID NO: 174429 - DNA, 12 bp, Unknown
  misc_feature (1)..( 12): Result.005 file - promoters50/1482017
aaaaataacagt

SEQ ID NO: 174430 - DNA, 13 bp, Unknown
  misc_feature (1)..( 13): Result.005 file - promoters50/1482017
gaaagatatagca

SEQ ID NO: 174431 - DNA, 13 bp, Unknown
  misc_feature (1)..( 13): Result.005 file - promoters50/1482017
tttaaatactttt

SEQ ID NO: 174432 - DNA, 13 bp, Unknown
  misc_feature (1)..( 13): Result.005 file - promoters50/1482017
ccataatattatt

SEQ ID NO: 174433 - DNA, 10 bp, Unknown
  misc_feature (1)..( 10): Result.005 file - promoters50/1482017
atttatggat

SEQ ID NO: 174434 - DNA, 10 bp, Unknown
  misc_feature (1)..( 10): Result.005 file - promoters50/1482017
atttattcac

SEQ ID NO: 174435 - DNA, 10 bp, Unknown
  misc_feature (1)..( 10): Result.005 file - promoters50/1482017
atttatcaag

SEQ ID NO: 174436 - DNA, 10 bp, Unknown
  misc_feature (1)..( 10): Result.005 file - promoters50/1482017
atttctcatt

SEQ ID NO: 174437 - DNA, 10 bp, Unknown
  misc_feature (1)..( 10): Result.005 file - promoters50/1482017
attgatccta

SEQ ID NO: 174438 - DNA, 10 bp, Unknown
  misc_feature (1)..( 10): Result.005 file - promoters50/1482017
gtttcacatt

SEQ ID NO: 174439 - DNA, 11 bp, Unknown
  misc_feature (1)..( 11): Result.005 file - promoters50/1482017
aaacatttttg

SEQ ID NO: 174440 - DNA, 11 bp, Unknown
  misc_feature (1)..( 11): Result.005 file - promoters50/1482017
gaacaatttat

SEQ ID NO: 174441 - DNA, 11 bp, Unknown
  misc_feature (1)..( 11): Result.005 file - promoters50/1482017
aaataatcata

SEQ ID NO: 174442 - DNA, 11 bp, Unknown
  misc_feature (1)..( 11): Result.005 file - promoters50/1482017
tgttattgttg

SEQ ID NO: 174443 - DNA, 11 bp, Unknown
  misc_feature (1)..( 11): Result.005 file - promoters50/1482017
aggtattttta

SEQ ID NO: 174444 - DNA, 11 bp, Unknown
  misc_feature (1)..( 11): Result.005 file - promoters50/1482017
acttattatta

SEQ ID NO: 174445 - DNA, 12 bp, Unknown
  misc_feature (1)..( 12): Result.005 file - promoters50/1482017
aaacagttatat

SEQ ID NO: 174446 - DNA, 12 bp, Unknown
  misc_feature (1)..( 12): Result.005 file - promoters50/1482017
atacaattaatt

SEQ ID NO: 174447 - DNA, 12 bp, Unknown
  misc_feature (1)..( 12): Result.005 file - promoters50/1482017
aaagagtttaat

SEQ ID NO: 174448 - DNA, 12 bp, Unknown
  misc_feature (1)..( 12): Result.005 file - promoters50/1482017
aaatagtaatat

SEQ ID NO: 174449 - DNA, 12 bp, Unknown
  misc_feature (1)..( 12): Result.005 file - promoters50/1482017
ataaaataacaa

SEQ ID NO: 174450 - DNA, 12 bp, Unknown
  misc_feature (1)..( 12): Result.005 file - promoters50/1482017
taaaaatagaaa

SEQ ID NO: 174451 - DNA, 9 bp, Unknown
  misc_feature (1)..( 9): Result.005 file - promoters50/1482017
cgaataaaa

SEQ ID NO: 174452 - DNA, 9 bp, Unknown
  misc_feature (1)..( 9): Result.005 file - promoters50/1482017
ataattaaa

SEQ ID NO: 174453 - DNA, 9 bp, Unknown
  misc_feature (1)..( 9): Result.005 file - promoters50/1482017
agaataaac

SEQ ID NO: 174454 - DNA, 9 bp, Unknown
  misc_feature (1)..( 9): Result.005 file - promoters50/1482017
tagataaac

SEQ ID NO: 174455 - DNA, 9 bp, Unknown
  misc_feature (1)..( 9): Result.005 file - promoters50/1482017
gtaatgaaa

SEQ ID NO: 174456 - DNA, 9 bp, Unknown
  misc_feature (1)..( 9): Result.005 file - promoters50/1482017
ataatcaaa

SEQ ID NO: 174457 - DNA, 10 bp, Unknown
  misc_feature (1)..( 10): Result.005 file - promoters50/1482025
tttaagaaaa

SEQ ID NO: 174458 - DNA, 10 bp, Unknown
  misc_feature (1)..( 10): Result.005 file - promoters50/1482025
tttaagtaaa

SEQ ID NO: 174459 - DNA, 10 bp, Unknown
  misc_feature (1)..( 10): Result.005 file - promoters50/1482025
ggaaagaaag

SEQ ID NO: 174460 - DNA, 10 bp, Unknown
  misc_feature (1)..( 10): Result.005 file - promoters50/1482025
ggtaaataaa

SEQ ID NO: 174461 - DNA, 12 bp, Unknown
  misc_feature (1)..( 12): Result.005 file - promoters50/1482025
aatcactaaatt

SEQ ID NO: 174462 - DNA, 12 bp, Unknown
  misc_feature (1)..( 12): Result.005 file - promoters50/1482025
tcaaactaaata

SEQ ID NO: 174463 - DNA, 12 bp, Unknown
  misc_feature (1)..( 12): Result.005 file - promoters50/1482025
agataataaata

SEQ ID NO: 174464 - DNA, 12 bp, Unknown
  misc_feature (1)..( 12): Result.005 file - promoters50/1482025
aataactaatca

SEQ ID NO: 174465 - DNA, 9 bp, Unknown
  misc_feature (1)..( 9): Result.005 file - promoters50/1482201
agatacagt

SEQ ID NO: 174466 - DNA, 9 bp, Unknown
  misc_feature (1)..( 9): Result.005 file - promoters50/1482201
cgatccaga

SEQ ID NO: 174467 - DNA, 9 bp, Unknown
  misc_feature (1)..( 9): Result.005 file - promoters50/1482201
ttataaagt

SEQ ID NO: 174468 - DNA, 9 bp, Unknown
  misc_feature (1)..( 9): Result.005 file - promoters50/1482201
agagacatc

SEQ ID NO: 174469 - DNA, 9 bp, Unknown
  misc_feature (1)..( 9): Result.005 file - promoters50/1482201
aaagtcaga

SEQ ID NO: 174470 - DNA, 9 bp, Unknown
  misc_feature (1)..( 9): Result.005 file - promoters50/1482201
aaagtccct

SEQ ID NO: 174471 - DNA, 10 bp, Unknown
  misc_feature (1)..( 10): Result.005 file - promoters50/1482201
tcaatgcaag

SEQ ID NO: 174472 - DNA, 10 bp, Unknown
  misc_feature (1)..( 10): Result.005 file - promoters50/1482201
acaatgaaag

SEQ ID NO: 174473 - DNA, 10 bp, Unknown
  misc_feature (1)..( 10): Result.005 file - promoters50/1482201
tcaatgctta

SEQ ID NO: 174474 - DNA, 10 bp, Unknown
  misc_feature (1)..( 10): Result.005 file - promoters50/1482201
tcaattaaaa

SEQ ID NO: 174475 - DNA, 10 bp, Unknown
  misc_feature (1)..( 10): Result.005 file - promoters50/1482201
gtgattaaat

SEQ ID NO: 174476 - DNA, 10 bp, Unknown
  misc_feature (1)..( 10): Result.005 file - promoters50/1482201
aaaatccttg

SEQ ID NO: 174477 - DNA, 9 bp, Unknown
  misc_feature (1)..( 9): Result.005 file - promoters50/1482448
caatcaaaa

SEQ ID NO: 174478 - DNA, 9 bp, Unknown
  misc_feature (1)..( 9): Result.005 file - promoters50/1482448
aaatcaatg

SEQ ID NO: 174479 - DNA, 9 bp, Unknown
  misc_feature (1)..( 9): Result.005 file - promoters50/1482448
aaataaaaa

SEQ ID NO: 174480 - DNA, 9 bp, Unknown
  misc_feature (1)..( 9): Result.005 file - promoters50/1482448
caattaaat

SEQ ID NO: 174481 - DNA, 9 bp, Unknown
  misc_feature (1)..( 9): Result.005 file - promoters50/1482448
taatcaaat

SEQ ID NO: 174482 - DNA, 9 bp, Unknown
  misc_feature (1)..( 9): Result.005 file - promoters50/1482448
gaattaatt

SEQ ID NO: 174483 - DNA, 10 bp, Unknown
  misc_feature (1)..( 10): Result.005 file - promoters50/1482448
actatatata

SEQ ID NO: 174484 - DNA, 10 bp, Unknown
  misc_feature (1)..( 10): Result.005 file - promoters50/1482448
actatataat

SEQ ID NO: 174485 - DNA, 10 bp, Unknown
  misc_feature (1)..( 10): Result.005 file - promoters50/1482448
aatatatata

SEQ ID NO: 174486 - DNA, 10 bp, Unknown
  misc_feature (1)..( 10): Result.005 file - promoters50/1482448
tctatataat

SEQ ID NO: 174487 - DNA, 10 bp, Unknown
  misc_feature (1)..( 10): Result.005 file - promoters50/1482448
ctaatataaa

SEQ ID NO: 174488 - DNA, 10 bp, Unknown
  misc_feature (1)..( 10): Result.005 file - promoters50/1482448
ccaatataat

SEQ ID NO: 174489 - DNA, 10 bp, Unknown
  misc_feature (1)..( 10): Result.005 file - promoters50/1482457
taaaaagttt

SEQ ID NO: 174490 - DNA, 10 bp, Unknown
  misc_feature (1)..( 10): Result.005 file - promoters50/1482457
aggaaatttt

SEQ ID NO: 174491 - DNA, 10 bp, Unknown
  misc_feature (1)..( 10): Result.005 file - promoters50/1482457
taaaaagttt

SEQ ID NO: 174492 - DNA, 10 bp, Unknown
  misc_feature (1)..( 10): Result.005 file - promoters50/1532660
ttaaatttgt

SEQ ID NO: 174493 - DNA, 10 bp, Unknown
  misc_feature (1)..( 10): Result.005 file - promoters50/1532660
caaaatttac

SEQ ID NO: 174494 - DNA, 10 bp, Unknown
  misc_feature (1)..( 10): Result.005 file - promoters50/1532660
ttaactttaa

SEQ ID NO: 174495 - DNA, 10 bp, Unknown
  misc_feature (1)..( 10): Result.005 file - promoters50/1532660
gtaaatttgt

SEQ ID NO: 174496 - DNA, 10 bp, Unknown
  misc_feature (1)..( 10): Result.005 file - promoters50/1532660
cttaatttgg

SEQ ID NO: 174497 - DNA, 10 bp, Unknown
  misc_feature (1)..( 10): Result.005 file - promoters50/1532660
taaaatttgt

SEQ ID NO: 174498 - DNA, 10 bp, Unknown
  misc_feature (1)..( 10): Result.005 file - promoters50/1532660
gagaatatgg

SEQ ID NO: 174499 - DNA, 12 bp, Unknown
  misc_feature (1)..( 12): Result.005 file - promoters50/1532821
tactaacatatg

SEQ ID NO: 174500 - DNA, 12 bp, Unknown
  misc_feature (1)..( 12): Result.005 file - promoters50/1532821
tactcacatatg

SEQ ID NO: 174501 - DNA, 12 bp, Unknown
  misc_feature (1)..( 12): Result.005 file - promoters50/1532821
tcaaaacataat

SEQ ID NO: 174502 - DNA, 8 bp, Unknown
  misc_feature (1)..( 8): Result.005 file - promoters50/1532821
aaatattg

SEQ ID NO: 174503 - DNA, 8 bp, Unknown
  misc_feature (1)..( 8): Result.005 file - promoters50/1532821
caatcttg

SEQ ID NO: 174504 - DNA, 9 bp, Unknown
  misc_feature (1)..( 9): Result.005 file - promoters50/1532821
aaattatcc

SEQ ID NO: 174505 - DNA, 12 bp, Unknown
  misc_feature (1)..( 12): Result.005 file - promoters50/1532821
ccatcacgcgga

SEQ ID NO: 174506 - DNA, 12 bp, Unknown
  misc_feature (1)..( 12): Result.005 file - promoters50/1532821
ccaccacttttt

SEQ ID NO: 174507 - DNA, 12 bp, Unknown
  misc_feature (1)..( 12): Result.005 file - promoters50/1532821
atacctcttttt

SEQ ID NO: 174508 - DNA, 7 bp, Unknown
  misc_feature (1)..( 7): Result.005 file - promoters50/1532823
ttaatat

SEQ ID NO: 174509 - DNA, 7 bp, Unknown
  misc_feature (1)..( 7): Result.005 file - promoters50/1532823
ttattat

SEQ ID NO: 174510 - DNA, 7 bp, Unknown
  misc_feature (1)..( 7): Result.005 file - promoters50/1532823
ttattac

SEQ ID NO: 174511 - DNA, 9 bp, Unknown
  misc_feature (1)..( 9): Result.005 file - promoters50/1532925
cgtctgatt

SEQ ID NO: 174512 - DNA, 9 bp, Unknown
  misc_feature (1)..( 9): Result.005 file - promoters50/1532925
tttcttatt

SEQ ID NO: 174513 - DNA, 9 bp, Unknown
  misc_feature (1)..( 9): Result.005 file - promoters50/1532925
cgtttgaat

SEQ ID NO: 174514 - DNA, 9 bp, Unknown
  misc_feature (1)..( 9): Result.005 file - promoters50/1532925
gatttttta

SEQ ID NO: 174515 - DNA, 11 bp, Unknown
  misc_feature (1)..( 11): Result.005 file - promoters50/1532937
aattttgatta

SEQ ID NO: 174516 - DNA, 11 bp, Unknown
  misc_feature (1)..( 11): Result.005 file - promoters50/1532937
ggttttgacta

SEQ ID NO: 174517 - DNA, 11 bp, Unknown
  misc_feature (1)..( 11): Result.005 file - promoters50/1532937
tcttttgaagt

SEQ ID NO: 174518 - DNA, 11 bp, Unknown
  misc_feature (1)..( 11): Result.005 file - promoters50/1532937
atttttaatta

SEQ ID NO: 174519 - DNA, 11 bp, Unknown
  misc_feature (1)..( 11): Result.005 file - promoters50/1532937
tcttttggggt

SEQ ID NO: 174520 - DNA, 11 bp, Unknown
  misc_feature (1)..( 11): Result.005 file - promoters50/1532937
tcttttcacat

SEQ ID NO: 174521 - DNA, 14 bp, Unknown
  misc_feature (1)..( 14): Result.005 file - promoters50/1532937
cttcaaacaaaact

SEQ ID NO: 174522 - DNA, 14 bp, Unknown
  misc_feature (1)..( 14): Result.005 file - promoters50/1532937
cttcaaaattatat

SEQ ID NO: 174523 - DNA, 14 bp, Unknown
  misc_feature (1)..( 14): Result.005 file - promoters50/1532937
ctttaaaaacttct

SEQ ID NO: 174524 - DNA, 14 bp, Unknown
  misc_feature (1)..( 14): Result.005 file - promoters50/1532937
tttcaaaaatactt

SEQ ID NO: 174525 - DNA, 15 bp, Unknown
  misc_feature (1)..( 15): Result.005 file - promoters50/1532937
cttctaaaatcttaa

SEQ ID NO: 174526 - DNA, 15 bp, Unknown
  misc_feature (1)..( 15): Result.005 file - promoters50/1532937
gttttaaaatttagt

SEQ ID NO: 174527 - DNA, 15 bp, Unknown
  misc_feature (1)..( 15): Result.005 file - promoters50/1532937
aatctaaacgttaaa

SEQ ID NO: 174528 - DNA, 10 bp, Unknown
  misc_feature (1)..( 10): Result.005 file - promoters50/1532937
taataaattt

SEQ ID NO: 174529 - DNA, 10 bp, Unknown
  misc_feature (1)..( 10): Result.005 file - promoters50/1532937
gaataaaaat

SEQ ID NO: 174530 - DNA, 10 bp, Unknown
  misc_feature (1)..( 10): Result.005 file - promoters50/1532937
aaataaaata

SEQ ID NO: 174531 - DNA, 10 bp, Unknown
  misc_feature (1)..( 10): Result.005 file - promoters50/1532937
taataactct

SEQ ID NO: 174532 - DNA, 10 bp, Unknown
  misc_feature (1)..( 10): Result.005 file - promoters50/1532937
caattaatct

SEQ ID NO: 174533 - DNA, 10 bp, Unknown
  misc_feature (1)..( 10): Result.005 file - promoters50/1532937
ttataaatat

SEQ ID NO: 174534 - DNA, 10 bp, Unknown
  misc_feature (1)..( 10): Result.005 file - promoters50/1532937
acatatatat

SEQ ID NO: 174535 - DNA, 8 bp, Unknown
  misc_feature (1)..( 8): Result.005 file - promoters50/1532948
attccatt

SEQ ID NO: 174536 - DNA, 8 bp, Unknown
  misc_feature (1)..( 8): Result.005 file - promoters50/1532948
attccaaa

SEQ ID NO: 174537 - DNA, 8 bp, Unknown
  misc_feature (1)..( 8): Result.005 file - promoters50/1532948
tttccatt

SEQ ID NO: 174538 - DNA, 8 bp, Unknown
  misc_feature (1)..( 8): Result.005 file - promoters50/1532948
ttttgtaa

SEQ ID NO: 174539 - DNA, 8 bp, Unknown
  misc_feature (1)..( 8): Result.005 file - promoters50/1532948
ttttgttg

SEQ ID NO: 174540 - DNA, 8 bp, Unknown
  misc_feature (1)..( 8): Result.005 file - promoters50/1532948
ctttgtaa

SEQ ID NO: 174541 - DNA, 8 bp, Unknown
  misc_feature (1)..( 8): Result.005 file - promoters50/1532948
accaataa

SEQ ID NO: 174542 - DNA, 8 bp, Unknown
  misc_feature (1)..( 8): Result.005 file - promoters50/1532948
cccactaa

SEQ ID NO: 174543 - DNA, 8 bp, Unknown
  misc_feature (1)..( 8): Result.005 file - promoters50/1532948
cccactag

SEQ ID NO: 174544 - DNA, 9 bp, Unknown
  misc_feature (1)..( 9): Result.005 file - promoters50/1532948
ggagaaaaa

SEQ ID NO: 174545 - DNA, 9 bp, Unknown
  misc_feature (1)..( 9): Result.005 file - promoters50/1532948
ggagaaaac

SEQ ID NO: 174546 - DNA, 9 bp, Unknown
  misc_feature (1)..( 9): Result.005 file - promoters50/1532948
atggaaaaa

SEQ ID NO: 174547 - DNA, 12 bp, Unknown
  misc_feature (1)..( 12): Result.005 file - promoters50/1532948
gttggaatttag

SEQ ID NO: 174548 - DNA, 12 bp, Unknown
  misc_feature (1)..( 12): Result.005 file - promoters50/1532948
aaaagaaattaa

SEQ ID NO: 174549 - DNA, 12 bp, Unknown
  misc_feature (1)..( 12): Result.005 file - promoters50/1532948
aaatgaaatatc

SEQ ID NO: 174550 - DNA, 12 bp, Unknown
  misc_feature (1)..( 12): Result.005 file - promoters50/1532948
aaaagaaaataa

SEQ ID NO: 174551 - DNA, 12 bp, Unknown
  misc_feature (1)..( 12): Result.005 file - promoters50/1532948
ataagacaacac

SEQ ID NO: 174552 - DNA, 12 bp, Unknown
  misc_feature (1)..( 12): Result.005 file - promoters50/1532948
ttgagacaaaaa

SEQ ID NO: 174553 - DNA, 12 bp, Unknown
  misc_feature (1)..( 12): Result.005 file - promoters50/1532948
ttgaaacaaaaa

SEQ ID NO: 174554 - DNA, 6 bp, Unknown
  misc_feature (1)..( 6): Result.005 file - promoters50/1532948
agtaaa

SEQ ID NO: 174555 - DNA, 6 bp, Unknown
  misc_feature (1)..( 6): Result.005 file - promoters50/1532948
agtaaa

SEQ ID NO: 174556 - DNA, 6 bp, Unknown
  misc_feature (1)..( 6): Result.005 file - promoters50/1532948
agtaaa

SEQ ID NO: 174557 - DNA, 12 bp, Unknown
  misc_feature (1)..( 12): Result.005 file - promoters50/1532948
ttgaaacaaaaa

SEQ ID NO: 174558 - DNA, 12 bp, Unknown
  misc_feature (1)..( 12): Result.005 file - promoters50/1532948
gagaaagaaagc

SEQ ID NO: 174559 - DNA, 12 bp, Unknown
  misc_feature (1)..( 12): Result.005 file - promoters50/1532948
ttgagacaaaaa

SEQ ID NO: 174560 - DNA, 11 bp, Unknown
  misc_feature (1)..( 11): Result.005 file - promoters50/1532948
ggaaatgaaat

SEQ ID NO: 174561 - DNA, 11 bp, Unknown
  misc_feature (1)..( 11): Result.005 file - promoters50/1532948
ggaaaagaaaa

SEQ ID NO: 174562 - DNA, 11 bp, Unknown
  misc_feature (1)..( 11): Result.005 file - promoters50/1532948
caaaaagaaat

SEQ ID NO: 174563 - DNA, 8 bp, Unknown
  misc_feature (1)..( 8): Result.005 file - promoters50/1532975
taacttaa

SEQ ID NO: 174564 - DNA, 8 bp, Unknown
  misc_feature (1)..( 8): Result.005 file - promoters50/1532975
taacttga

SEQ ID NO: 174565 - DNA, 8 bp, Unknown
  misc_feature (1)..( 8): Result.005 file - promoters50/1532975
taatttaa

SEQ ID NO: 174566 - DNA, 10 bp, Unknown
  misc_feature (1)..( 10): Result.005 file - promoters50/1532975
tgtaatcggg

SEQ ID NO: 174567 - DNA, 10 bp, Unknown
  misc_feature (1)..( 10): Result.005 file - promoters50/1532975
ctaaattggg

SEQ ID NO: 174568 - DNA, 10 bp, Unknown
  misc_feature (1)..( 10): Result.005 file - promoters50/1532975
tgtgatcgaa

SEQ ID NO: 174569 - DNA, 9 bp, Unknown
  misc_feature (1)..( 9): Result.005 file - promoters50/1532975
tcgttgtaa

SEQ ID NO: 174570 - DNA, 9 bp, Unknown
  misc_feature (1)..( 9): Result.005 file - promoters50/1532975
tcggtgttg

SEQ ID NO: 174571 - DNA, 9 bp, Unknown
  misc_feature (1)..( 9): Result.005 file - promoters50/1532975
tgggttttg

SEQ ID NO: 174572 - DNA, 8 bp, Unknown
  misc_feature (1)..( 8): Result.005 file - promoters50/1533080
atattaac

SEQ ID NO: 174573 - DNA, 8 bp, Unknown
  misc_feature (1)..( 8): Result.005 file - promoters50/1533080
atattata

SEQ ID NO: 174574 - DNA, 8 bp, Unknown
  misc_feature (1)..( 8): Result.005 file - promoters50/1533080
ataatata

SEQ ID NO: 174575 - DNA, 9 bp, Unknown
  misc_feature (1)..( 9): Result.005 file - promoters50/1533080
gttatcaaa

SEQ ID NO: 174576 - DNA, 9 bp, Unknown
  misc_feature (1)..( 9): Result.005 file - promoters50/1533080
gttatcaat

SEQ ID NO: 174577 - DNA, 9 bp, Unknown
  misc_feature (1)..( 9): Result.005 file - promoters50/1533080
tttattaaa

SEQ ID NO: 174578 - DNA, 8 bp, Unknown
  misc_feature (1)..( 8): Result.005 file - promoters50/1533080
ttagatat

SEQ ID NO: 174579 - DNA, 8 bp, Unknown
  misc_feature (1)..( 8): Result.005 file - promoters50/1533080
ttatatat

SEQ ID NO: 174580 - DNA, 8 bp, Unknown
  misc_feature (1)..( 8): Result.005 file - promoters50/1533080
ttacataa

SEQ ID NO: 174581 - DNA, 8 bp, Unknown
  misc_feature (1)..( 8): Result.005 file - promoters50/1533080
acttaaaa

SEQ ID NO: 174582 - DNA, 8 bp, Unknown
  misc_feature (1)..( 8): Result.005 file - promoters50/1533080
tattaaaa

SEQ ID NO: 174583 - DNA, 8 bp, Unknown
  misc_feature (1)..( 8): Result.005 file - promoters50/1533080
tatgaaac

SEQ ID NO: 174584 - DNA, 9 bp, Unknown
  misc_feature (1)..( 9): Result.005 file - promoters50/1533080
tttttgatt

SEQ ID NO: 174585 - DNA, 9 bp, Unknown
  misc_feature (1)..( 9): Result.005 file - promoters50/1533080
tttatgaaa

SEQ ID NO: 174586 - DNA, 9 bp, Unknown
  misc_feature (1)..( 9): Result.005 file - promoters50/1533080
tatattaaa

SEQ ID NO: 174587 - DNA, 12 bp, Unknown
  misc_feature (1)..( 12): Result.005 file - promoters50/1533159
atatttaataaa

SEQ ID NO: 174588 - DNA, 12 bp, Unknown
  misc_feature (1)..( 12): Result.005 file - promoters50/1533159
aatcataaaaaa

SEQ ID NO: 174589 - DNA, 12 bp, Unknown
  misc_feature (1)..( 12): Result.005 file - promoters50/1533159
gtcgctaataaa

SEQ ID NO: 174590 - DNA, 12 bp, Unknown
  misc_feature (1)..( 12): Result.005 file - promoters50/1533159
atatataataat

SEQ ID NO: 174591 - DNA, 12 bp, Unknown
  misc_feature (1)..( 12): Result.005 file - promoters50/1533159
tttgataaaaga

SEQ ID NO: 174592 - DNA, 11 bp, Unknown
  misc_feature (1)..( 11): Result.005 file - promoters50/1533159
agtataaaatg

SEQ ID NO: 174593 - DNA, 12 bp, Unknown
  misc_feature (1)..( 12): Result.005 file - promoters50/1533159
catagtatgtat

SEQ ID NO: 174594 - DNA, 16 bp, Unknown
  misc_feature (1)..( 16): Result.005 file - promoters50/1533159
aaactttaactattta

SEQ ID NO: 174595 - DNA, 16 bp, Unknown
  misc_feature (1)..( 16): Result.005 file - promoters50/1533159
tataaataattataaa

SEQ ID NO: 174596 - DNA, 16 bp, Unknown
  misc_feature (1)..( 16): Result.005 file - promoters50/1533159
tgattttaaaaaaaaa

SEQ ID NO: 174597 - DNA, 16 bp, Unknown
  misc_feature (1)..( 16): Result.005 file - promoters50/1533159
aaatgacaataataaa

SEQ ID NO: 174598 - DNA, 16 bp, Unknown
  misc_feature (1)..( 16): Result.005 file - promoters50/1533159
atatttttataaatag

SEQ ID NO: 174599 - DNA, 16 bp, Unknown
  misc_feature (1)..( 16): Result.005 file - promoters50/1533159
atatttttaatatata

SEQ ID NO: 174600 - DNA, 16 bp, Unknown
  misc_feature (1)..( 16): Result.005 file - promoters50/1533159
tttttttaacaaattt

SEQ ID NO: 174601 - DNA, 11 bp, Unknown
  misc_feature (1)..( 11): Result.005 file - promoters50/1533159
agtttaatatt

SEQ ID NO: 174602 - DNA, 11 bp, Unknown
  misc_feature (1)..( 11): Result.005 file - promoters50/1533159
cgtttgataaa

SEQ ID NO: 174603 - DNA, 11 bp, Unknown
  misc_feature (1)..( 11): Result.005 file - promoters50/1533159
agtataaaatg

SEQ ID NO: 174604 - DNA, 11 bp, Unknown
  misc_feature (1)..( 11): Result.005 file - promoters50/1533159
ataataatatt

SEQ ID NO: 174605 - DNA, 11 bp, Unknown
  misc_feature (1)..( 11): Result.005 file - promoters50/1533159
ccaatcataaa

SEQ ID NO: 174606 - DNA, 11 bp, Unknown
  misc_feature (1)..( 11): Result.005 file - promoters50/1533159
atcatagtatg

SEQ ID NO: 174607 - DNA, 11 bp, Unknown
  misc_feature (1)..( 11): Result.005 file - promoters50/1533159
caacaaatatt

SEQ ID NO: 174608 - DNA, 10 bp, Unknown
  misc_feature (1)..( 10): Result.005 file - promoters50/1533159
tataatatct

SEQ ID NO: 174609 - DNA, 10 bp, Unknown
  misc_feature (1)..( 10): Result.005 file - promoters50/1533159
tgtaaaatcc

SEQ ID NO: 174610 - DNA, 10 bp, Unknown
  misc_feature (1)..( 10): Result.005 file - promoters50/1533159
cctaatttct

SEQ ID NO: 174611 - DNA, 10 bp, Unknown
  misc_feature (1)..( 10): Result.005 file - promoters50/1533159
aaaaatgtct

SEQ ID NO: 174612 - DNA, 10 bp, Unknown
  misc_feature (1)..( 10): Result.005 file - promoters50/1533159
tctattttgt

SEQ ID NO: 174613 - DNA, 10 bp, Unknown
  misc_feature (1)..( 10): Result.005 file - promoters50/1533159
tcttttttgt

SEQ ID NO: 174614 - DNA, 14 bp, Unknown
  misc_feature (1)..( 14): Result.005 file - promoters50/1533159
gatgtaaaaaaaaa

SEQ ID NO: 174615 - DNA, 14 bp, Unknown
  misc_feature (1)..( 14): Result.005 file - promoters50/1533159
atagtaaaaaaatc

SEQ ID NO: 174616 - DNA, 14 bp, Unknown
  misc_feature (1)..( 14): Result.005 file - promoters50/1533159
tttttaacaaattt

SEQ ID NO: 174617 - DNA, 14 bp, Unknown
  misc_feature (1)..( 14): Result.005 file - promoters50/1533159
attttaaaaaaaaa

SEQ ID NO: 174618 - DNA, 14 bp, Unknown
  misc_feature (1)..( 14): Result.005 file - promoters50/1533159
acaataataaacaa

SEQ ID NO: 174619 - DNA, 14 bp, Unknown
  misc_feature (1)..( 14): Result.005 file - promoters50/1533159
aatataaataatta

SEQ ID NO: 174620 - DNA, 14 bp, Unknown
  misc_feature (1)..( 14): Result.005 file - promoters50/1533159
tttttaatatatag

SEQ ID NO: 174621 - DNA, 14 bp, Unknown
  misc_feature (1)..( 14): Result.005 file - promoters50/1533159
atagtcaaatatca

SEQ ID NO: 174622 - DNA, 11 bp, Unknown
  misc_feature (1)..( 11): Result.005 file - promoters50/1533159
aataaatgaag

SEQ ID NO: 174623 - DNA, 11 bp, Unknown
  misc_feature (1)..( 11): Result.005 file - promoters50/1533159
caaaaatgaat

SEQ ID NO: 174624 - DNA, 12 bp, Unknown
  misc_feature (1)..( 12): Result.005 file - promoters50/1533159
acaaaattgaat

SEQ ID NO: 174625 - DNA, 12 bp, Unknown
  misc_feature (1)..( 12): Result.005 file - promoters50/1533159
gtgaaattgtct

SEQ ID NO: 174626 - DNA, 12 bp, Unknown
  misc_feature (1)..( 12): Result.005 file - promoters50/1533159
acagaatatgtg

SEQ ID NO: 174627 - DNA, 12 bp, Unknown
  misc_feature (1)..( 12): Result.005 file - promoters50/1533159
gtagagtatatc

SEQ ID NO: 174628 - DNA, 12 bp, Unknown
  misc_feature (1)..( 12): Result.005 file - promoters50/1533159
actatttgatgt

SEQ ID NO: 174629 - DNA, 12 bp, Unknown
  misc_feature (1)..( 12): Result.005 file - promoters50/1533159
acttttttttta

SEQ ID NO: 174630 - DNA, 12 bp, Unknown
  misc_feature (1)..( 12): Result.005 file - promoters50/1533159
atttttaatata

SEQ ID NO: 174631 - DNA, 13 bp, Unknown
  misc_feature (1)..( 13): Result.005 file - promoters50/1533159
attttataatata

SEQ ID NO: 174632 - DNA, 13 bp, Unknown
  misc_feature (1)..( 13): Result.005 file - promoters50/1533159
tgacaataataaa

SEQ ID NO: 174633 - DNA, 13 bp, Unknown
  misc_feature (1)..( 13): Result.005 file - promoters50/1533159
atatttttataaa

SEQ ID NO: 174634 - DNA, 12 bp, Unknown
  misc_feature (1)..( 12): Result.005 file - promoters50/1533159
aactttaactat

SEQ ID NO: 174635 - DNA, 12 bp, Unknown
  misc_feature (1)..( 12): Result.005 file - promoters50/1533159
ttttttaacaaa

SEQ ID NO: 174636 - DNA, 12 bp, Unknown
  misc_feature (1)..( 12): Result.005 file - promoters50/1533159
gattttataata

SEQ ID NO: 174637 - DNA, 12 bp, Unknown
  misc_feature (1)..( 12): Result.005 file - promoters50/1533159
gattttaaaaaa

SEQ ID NO: 174638 - DNA, 12 bp, Unknown
  misc_feature (1)..( 12): Result.005 file - promoters50/1533159
atttttaatata

SEQ ID NO: 174639 - DNA, 12 bp, Unknown
  misc_feature (1)..( 12): Result.005 file - promoters50/1533159
atttttataaat

SEQ ID NO: 174640 - DNA, 12 bp, Unknown
  misc_feature (1)..( 12): Result.005 file - promoters50/1533159
tataataatatt

SEQ ID NO: 174641 - DNA, 12 bp, Unknown
  misc_feature (1)..( 12): Result.005 file - promoters50/1533159
aattataaagta

SEQ ID NO: 174642 - DNA, 12 bp, Unknown
  misc_feature (1)..( 12): Result.005 file - promoters50/1533159
agagatatagtc

SEQ ID NO: 174643 - DNA, 12 bp, Unknown
  misc_feature (1)..( 12): Result.005 file - promoters50/1533159
gattttaaaaaa

SEQ ID NO: 174644 - DNA, 12 bp, Unknown
  misc_feature (1)..( 12): Result.005 file - promoters50/1533159
aataataaacaa

SEQ ID NO: 174645 - DNA, 12 bp, Unknown
  misc_feature (1)..( 12): Result.005 file - promoters50/1533159
aatagtaaaaaa

SEQ ID NO: 174646 - DNA, 12 bp, Unknown
  misc_feature (1)..( 12): Result.005 file - promoters50/1533159
taatatatagaa

SEQ ID NO: 174647 - DNA, 12 bp, Unknown
  misc_feature (1)..( 12): Result.005 file - promoters50/1533159
atgtatttagaa

SEQ ID NO: 174648 - DNA, 13 bp, Unknown
  misc_feature (1)..( 13): Result.005 file - promoters50/1533159
tacataaaaattt

SEQ ID NO: 174649 - DNA, 13 bp, Unknown
  misc_feature (1)..( 13): Result.005 file - promoters50/1533159
gatttaagaatat

SEQ ID NO: 174650 - DNA, 13 bp, Unknown
  misc_feature (1)..( 13): Result.005 file - promoters50/1533159
catataaaaaata

SEQ ID NO: 174651 - DNA, 13 bp, Unknown
  misc_feature (1)..( 13): Result.005 file - promoters50/1533159
aaaaaaagaattt

SEQ ID NO: 174652 - DNA, 13 bp, Unknown
  misc_feature (1)..( 13): Result.005 file - promoters50/1533159
aaaaaaaaaatac

SEQ ID NO: 174653 - DNA, 13 bp, Unknown
  misc_feature (1)..( 13): Result.005 file - promoters50/1533159
cataagagaattt

SEQ ID NO: 174654 - DNA, 14 bp, Unknown
  misc_feature (1)..( 14): Result.005 file - promoters50/1533159
gattttataatata

SEQ ID NO: 174655 - DNA, 14 bp, Unknown
  misc_feature (1)..( 14): Result.005 file - promoters50/1533159
atttttataaatag

SEQ ID NO: 174656 - DNA, 14 bp, Unknown
  misc_feature (1)..( 14): Result.005 file - promoters50/1533159
ttttttttaacaaa

SEQ ID NO: 174657 - DNA, 14 bp, Unknown
  misc_feature (1)..( 14): Result.005 file - promoters50/1533159
gattttaaaaaaaa

SEQ ID NO: 174658 - DNA, 14 bp, Unknown
  misc_feature (1)..( 14): Result.005 file - promoters50/1533159
atatttttaatata

SEQ ID NO: 174659 - DNA, 14 bp, Unknown
  misc_feature (1)..( 14): Result.005 file - promoters50/1533159
tatataataatatt

SEQ ID NO: 174660 - DNA, 13 bp, Unknown
  misc_feature (1)..( 13): Result.005 file - promoters50/1533159
aaaacaatttata

SEQ ID NO: 174661 - DNA, 13 bp, Unknown
  misc_feature (1)..( 13): Result.005 file - promoters50/1533159
aaaagaatttata

SEQ ID NO: 174662 - DNA, 13 bp, Unknown
  misc_feature (1)..( 13): Result.005 file - promoters50/1533159
aaaaaaatacatt

SEQ ID NO: 174663 - DNA, 13 bp, Unknown
  misc_feature (1)..( 13): Result.005 file - promoters50/1533159
taaacaaacaaat

SEQ ID NO: 174664 - DNA, 13 bp, Unknown
  misc_feature (1)..( 13): Result.005 file - promoters50/1533159
ttaagaatattcc

SEQ ID NO: 174665 - DNA, 13 bp, Unknown
  misc_feature (1)..( 13): Result.005 file - promoters50/1533159
aagagaatttcat

SEQ ID NO: 174666 - DNA, 13 bp, Unknown
  misc_feature (1)..( 13): Result.005 file - promoters50/1533159
cttattttatgaa

SEQ ID NO: 174667 - DNA, 13 bp, Unknown
  misc_feature (1)..( 13): Result.005 file - promoters50/1533159
tttattttaagaa

SEQ ID NO: 174668 - DNA, 13 bp, Unknown
  misc_feature (1)..( 13): Result.005 file - promoters50/1533159
tttatttatttat

SEQ ID NO: 174669 - DNA, 13 bp, Unknown
  misc_feature (1)..( 13): Result.005 file - promoters50/1533159
tctattttgtcgt

SEQ ID NO: 174670 - DNA, 13 bp, Unknown
  misc_feature (1)..( 13): Result.005 file - promoters50/1533159
ctaatttcttcgt

SEQ ID NO: 174671 - DNA, 13 bp, Unknown
  misc_feature (1)..( 13): Result.005 file - promoters50/1533159
atttttttaaaaa

SEQ ID NO: 174672 - DNA, 8 bp, Unknown
  misc_feature (1)..( 8): Result.005 file - promoters50/1533201
aagagaaa

SEQ ID NO: 174673 - DNA, 8 bp, Unknown
  misc_feature (1)..( 8): Result.005 file - promoters50/1533201
cagagaag

SEQ ID NO: 174674 - DNA, 8 bp, Unknown
  misc_feature (1)..( 8): Result.005 file - promoters50/1533201
gagaaaag

SEQ ID NO: 174675 - DNA, 8 bp, Unknown
  misc_feature (1)..( 8): Result.005 file - promoters50/1533201
ctgacaaa

SEQ ID NO: 174676 - DNA, 9 bp, Unknown
  misc_feature (1)..( 9): Result.005 file - promoters50/1533294
aaatgaaaa

SEQ ID NO: 174677 - DNA, 9 bp, Unknown
  misc_feature (1)..( 9): Result.005 file - promoters50/1533294
aaattaaaa

SEQ ID NO: 174678 - DNA, 9 bp, Unknown
  misc_feature (1)..( 9): Result.005 file - promoters50/1533294
ttatgtaaa

SEQ ID NO: 174679 - DNA, 9 bp, Unknown
  misc_feature (1)..( 9): Result.005 file - promoters50/1533294
tttgatttg

SEQ ID NO: 174680 - DNA, 9 bp, Unknown
  misc_feature (1)..( 9): Result.005 file - promoters50/1533294
tttaatttg

SEQ ID NO: 174681 - DNA, 9 bp, Unknown
  misc_feature (1)..( 9): Result.005 file - promoters50/1533294
ttcgatttg

SEQ ID NO: 174682 - DNA, 10 bp, Unknown
  misc_feature (1)..( 10): Result.005 file - promoters50/1533294
gcccataacg

SEQ ID NO: 174683 - DNA, 10 bp, Unknown
  misc_feature (1)..( 10): Result.005 file - promoters50/1533294
gcccaaaact

SEQ ID NO: 174684 - DNA, 10 bp, Unknown
  misc_feature (1)..( 10): Result.005 file - promoters50/1533294
aaacaaaact

SEQ ID NO: 174685 - DNA, 12 bp, Unknown
  misc_feature (1)..( 12): Result.005 file - promoters50/1533294
catttattttcc

SEQ ID NO: 174686 - DNA, 12 bp, Unknown
  misc_feature (1)..( 12): Result.005 file - promoters50/1533294
catttatcttct

SEQ ID NO: 174687 - DNA, 12 bp, Unknown
  misc_feature (1)..( 12): Result.005 file - promoters50/1533294
agtccctcttct

SEQ ID NO: 174688 - DNA, 6 bp, Unknown
  misc_feature (1)..( 6): Result.005 file - promoters50/1533294
gatttg

SEQ ID NO: 174689 - DNA, 6 bp, Unknown
  misc_feature (1)..( 6): Result.005 file - promoters50/1533294
gatttg

SEQ ID NO: 174690 - DNA, 6 bp, Unknown
  misc_feature (1)..( 6): Result.005 file - promoters50/1533294
gatttg

SEQ ID NO: 174691 - DNA, 8 bp, Unknown
  misc_feature (1)..( 8): Result.005 file - promoters50/1533294
aaatatgt

SEQ ID NO: 174692 - DNA, 8 bp, Unknown
  misc_feature (1)..( 8): Result.005 file - promoters50/1533294
aaatttgt

SEQ ID NO: 174693 - DNA, 8 bp, Unknown
  misc_feature (1)..( 8): Result.005 file - promoters50/1533294
aaacttga

SEQ ID NO: 174694 - DNA, 12 bp, Unknown
  misc_feature (1)..( 12): Result.005 file - promoters50/1533330
atgagaatcaaa

SEQ ID NO: 174695 - DNA, 12 bp, Unknown
  misc_feature (1)..( 12): Result.005 file - promoters50/1533330
gactgaaacaag

SEQ ID NO: 174696 - DNA, 12 bp, Unknown
  misc_feature (1)..( 12): Result.005 file - promoters50/1533330
aattgaaccaaa

SEQ ID NO: 174697 - DNA, 12 bp, Unknown
  misc_feature (1)..( 12): Result.005 file - promoters50/1533330
tattgaacacat

SEQ ID NO: 174698 - DNA, 12 bp, Unknown
  misc_feature (1)..( 12): Result.005 file - promoters50/1533330
tagagaaacaaa

SEQ ID NO: 174699 - DNA, 12 bp, Unknown
  misc_feature (1)..( 12): Result.005 file - promoters50/1533330
tatcgaactcta

SEQ ID NO: 174700 - DNA, 11 bp, Unknown
  misc_feature (1)..( 11): Result.005 file - promoters50/1533352
taaaaaaacat

SEQ ID NO: 174701 - DNA, 11 bp, Unknown
  misc_feature (1)..( 11): Result.005 file - promoters50/1533352
taataaaccat

SEQ ID NO: 174702 - DNA, 11 bp, Unknown
  misc_feature (1)..( 11): Result.005 file - promoters50/1533352
gaaacaaacca

SEQ ID NO: 174703 - DNA, 10 bp, Unknown
  misc_feature (1)..( 10): Result.005 file - promoters50/1533352
ttttttataa

SEQ ID NO: 174704 - DNA, 10 bp, Unknown
  misc_feature (1)..( 10): Result.005 file - promoters50/1533352
atttctatct

SEQ ID NO: 174705 - DNA, 10 bp, Unknown
  misc_feature (1)..( 10): Result.005 file - promoters50/1533352
attttttttt

SEQ ID NO: 174706 - DNA, 9 bp, Unknown
  misc_feature (1)..( 9): Result.005 file - promoters50/1533352
aaagaagaa

SEQ ID NO: 174707 - DNA, 9 bp, Unknown
  misc_feature (1)..( 9): Result.005 file - promoters50/1533352
aaagaaaaa

SEQ ID NO: 174708 - DNA, 9 bp, Unknown
  misc_feature (1)..( 9): Result.005 file - promoters50/1533352
aaacaaaaa

SEQ ID NO: 174709 - DNA, 8 bp, Unknown
  misc_feature (1)..( 8): Result.005 file - promoters50/1533352
gaggaagg

SEQ ID NO: 174710 - DNA, 8 bp, Unknown
  misc_feature (1)..( 8): Result.005 file - promoters50/1533352
gagaaagc

SEQ ID NO: 174711 - DNA, 8 bp, Unknown
  misc_feature (1)..( 8): Result.005 file - promoters50/1533352
aagaaaaa

SEQ ID NO: 174712 - DNA, 7 bp, Unknown
  misc_feature (1)..( 7): Result.005 file - promoters50/1533384
catcaag

SEQ ID NO: 174713 - DNA, 7 bp, Unknown
  misc_feature (1)..( 7): Result.005 file - promoters50/1533384
catcaaa

SEQ ID NO: 174714 - DNA, 7 bp, Unknown
  misc_feature (1)..( 7): Result.005 file - promoters50/1533384
aatcaaa

SEQ ID NO: 174715 - DNA, 10 bp, Unknown
  misc_feature (1)..( 10): Result.005 file - promoters50/1533533
gttttggtaa

SEQ ID NO: 174716 - DNA, 10 bp, Unknown
  misc_feature (1)..( 10): Result.005 file - promoters50/1533533
cacttggtaa

SEQ ID NO: 174717 - DNA, 10 bp, Unknown
  misc_feature (1)..( 10): Result.005 file - promoters50/1533533
attttagtaa

SEQ ID NO: 174718 - DNA, 10 bp, Unknown
  misc_feature (1)..( 10): Result.005 file - promoters50/1533533
attctagaac

SEQ ID NO: 174719 - DNA, 10 bp, Unknown
  misc_feature (1)..( 10): Result.005 file - promoters50/1533533
gctctataac

SEQ ID NO: 174720 - DNA, 10 bp, Unknown
  misc_feature (1)..( 10): Result.005 file - promoters50/1533533
tttttagcca

SEQ ID NO: 174721 - DNA, 10 bp, Unknown
  misc_feature (1)..( 10): Result.005 file - promoters50/1533533
caattttttc

SEQ ID NO: 174722 - DNA, 10 bp, Unknown
  misc_feature (1)..( 10): Result.005 file - promoters50/1533533
taatatttca

SEQ ID NO: 174723 - DNA, 10 bp, Unknown
  misc_feature (1)..( 10): Result.005 file - promoters50/1533533
ttattttttt

SEQ ID NO: 174724 - DNA, 10 bp, Unknown
  misc_feature (1)..( 10): Result.005 file - promoters50/1533533
tcatttttat

SEQ ID NO: 174725 - DNA, 10 bp, Unknown
  misc_feature (1)..( 10): Result.005 file - promoters50/1533533
taatatgaag

SEQ ID NO: 174726 - DNA, 10 bp, Unknown
  misc_feature (1)..( 10): Result.005 file - promoters50/1533533
ggctttttat

SEQ ID NO: 174727 - DNA, 11 bp, Unknown
  misc_feature (1)..( 11): Result.005 file - promoters50/1533533
tgaatttacaa

SEQ ID NO: 174728 - DNA, 11 bp, Unknown
  misc_feature (1)..( 11): Result.005 file - promoters50/1533533
ttcatttccaa

SEQ ID NO: 174729 - DNA, 11 bp, Unknown
  misc_feature (1)..( 11): Result.005 file - promoters50/1533533
tttttttacaa

SEQ ID NO: 174730 - DNA, 11 bp, Unknown
  misc_feature (1)..( 11): Result.005 file - promoters50/1533533
tttatttcctt

SEQ ID NO: 174731 - DNA, 11 bp, Unknown
  misc_feature (1)..( 11): Result.005 file - promoters50/1533533
tctgtttacag

SEQ ID NO: 174732 - DNA, 11 bp, Unknown
  misc_feature (1)..( 11): Result.005 file - promoters50/1533533
tttttttccca

SEQ ID NO: 174733 - DNA, 10 bp, Unknown
  misc_feature (1)..( 10): Result.005 file - promoters50/1533533
tggttaaaac

SEQ ID NO: 174734 - DNA, 10 bp, Unknown
  misc_feature (1)..( 10): Result.005 file - promoters50/1533533
ccgttaaaaa

SEQ ID NO: 174735 - DNA, 10 bp, Unknown
  misc_feature (1)..( 10): Result.005 file - promoters50/1533533
ttattaaaaa

SEQ ID NO: 174736 - DNA, 10 bp, Unknown
  misc_feature (1)..( 10): Result.005 file - promoters50/1533533
actataaaaa

SEQ ID NO: 174737 - DNA, 10 bp, Unknown
  misc_feature (1)..( 10): Result.005 file - promoters50/1533533
ttcataaaat

SEQ ID NO: 174738 - DNA, 10 bp, Unknown
  misc_feature (1)..( 10): Result.005 file - promoters50/1533533
tttatgaaat

SEQ ID NO: 174739 - DNA, 10 bp, Unknown
  misc_feature (1)..( 10): Result.005 file - promoters50/1533533
aaaacaaaaa

SEQ ID NO: 174740 - DNA, 10 bp, Unknown
  misc_feature (1)..( 10): Result.005 file - promoters50/1533533
taaataaaaa

SEQ ID NO: 174741 - DNA, 10 bp, Unknown
  misc_feature (1)..( 10): Result.005 file - promoters50/1533533
taaacaatta

SEQ ID NO: 174742 - DNA, 10 bp, Unknown
  misc_feature (1)..( 10): Result.005 file - promoters50/1533533
aaaacaaagg

SEQ ID NO: 174743 - DNA, 10 bp, Unknown
  misc_feature (1)..( 10): Result.005 file - promoters50/1533533
actataaaac

SEQ ID NO: 174744 - DNA, 10 bp, Unknown
  misc_feature (1)..( 10): Result.005 file - promoters50/1533533
tatataaccc

SEQ ID NO: 174745 - DNA, 12 bp, Unknown
  misc_feature (1)..( 12): Result.005 file - promoters50/1533533
aaaaaacaaaaa

SEQ ID NO: 174746 - DNA, 12 bp, Unknown
  misc_feature (1)..( 12): Result.005 file - promoters50/1533533
ataaaacattta

SEQ ID NO: 174747 - DNA, 12 bp, Unknown
  misc_feature (1)..( 12): Result.005 file - promoters50/1533533
ttaaaacaaagg

SEQ ID NO: 174748 - DNA, 12 bp, Unknown
  misc_feature (1)..( 12): Result.005 file - promoters50/1533533
taaaaacattta

SEQ ID NO: 174749 - DNA, 12 bp, Unknown
  misc_feature (1)..( 12): Result.005 file - promoters50/1533533
ataaaacgtgtt

SEQ ID NO: 174750 - DNA, 12 bp, Unknown
  misc_feature (1)..( 12): Result.005 file - promoters50/1533533
atataacccaat

SEQ ID NO: 174751 - DNA, 15 bp, Unknown
  misc_feature (1)..( 15): Result.005 file - promoters50/1533533
tatacaagaaaactc

SEQ ID NO: 174752 - DNA, 15 bp, Unknown
  misc_feature (1)..( 15): Result.005 file - promoters50/1533533
gtaataagaaaaaaa

SEQ ID NO: 174753 - DNA, 15 bp, Unknown
  misc_feature (1)..( 15): Result.005 file - promoters50/1533533
acatgaagacttatt

SEQ ID NO: 174754 - DNA, 15 bp, Unknown
  misc_feature (1)..( 15): Result.005 file - promoters50/1533533
aataaaagaattaaa

SEQ ID NO: 174755 - DNA, 15 bp, Unknown
  misc_feature (1)..( 15): Result.005 file - promoters50/1533533
atcacaacaaattta

SEQ ID NO: 174756 - DNA, 15 bp, Unknown
  misc_feature (1)..( 15): Result.005 file - promoters50/1533533
gagaaaataaaaaag

SEQ ID NO: 174757 - DNA, 15 bp, Unknown
  misc_feature (1)..( 15): Result.005 file - promoters50/1533533
tctttttttaaaaaa

SEQ ID NO: 174758 - DNA, 7 bp, Unknown
  misc_feature (1)..( 7): Result.005 file - promoters50/1533684
aaaaaat

SEQ ID NO: 174759 - DNA, 7 bp, Unknown
  misc_feature (1)..( 7): Result.005 file - promoters50/1533684
aaataat

SEQ ID NO: 174760 - DNA, 7 bp, Unknown
  misc_feature (1)..( 7): Result.005 file - promoters50/1533684
gaaaaat

SEQ ID NO: 174761 - DNA, 7 bp, Unknown
  misc_feature (1)..( 7): Result.005 file - promoters50/1533684
cttttta

SEQ ID NO: 174762 - DNA, 7 bp, Unknown
  misc_feature (1)..( 7): Result.005 file - promoters50/1533684
cttatta

SEQ ID NO: 174763 - DNA, 7 bp, Unknown
  misc_feature (1)..( 7): Result.005 file - promoters50/1533684
cttctta

SEQ ID NO: 174764 - DNA, 8 bp, Unknown
  misc_feature (1)..( 8): Result.005 file - promoters50/1533684
ttttaggt

SEQ ID NO: 174765 - DNA, 8 bp, Unknown
  misc_feature (1)..( 8): Result.005 file - promoters50/1533684
ttttcggt

SEQ ID NO: 174766 - DNA, 8 bp, Unknown
  misc_feature (1)..( 8): Result.005 file - promoters50/1533684
atttcggg

SEQ ID NO: 174767 - DNA, 12 bp, Unknown
  misc_feature (1)..( 12): Result.005 file - promoters50/1533684
attcttaccaaa

SEQ ID NO: 174768 - DNA, 12 bp, Unknown
  misc_feature (1)..( 12): Result.005 file - promoters50/1533684
ttctttactaaa

SEQ ID NO: 174769 - DNA, 12 bp, Unknown
  misc_feature (1)..( 12): Result.005 file - promoters50/1533684
ttctttattaat

SEQ ID NO: 174770 - DNA, 15 bp, Unknown
  misc_feature (1)..( 15): Result.005 file - promoters50/1533750
tagaagagatattat

SEQ ID NO: 174771 - DNA, 15 bp, Unknown
  misc_feature (1)..( 15): Result.005 file - promoters50/1533750
cagaagattaagaaa

SEQ ID NO: 174772 - DNA, 15 bp, Unknown
  misc_feature (1)..( 15): Result.005 file - promoters50/1533750
cagaagtaataactc

SEQ ID NO: 174773 - DNA, 15 bp, Unknown
  misc_feature (1)..( 15): Result.005 file - promoters50/1533750
gagaaaattacgaaa

SEQ ID NO: 174774 - DNA, 12 bp, Unknown
  misc_feature (1)..( 12): Result.005 file - promoters50/1533750
gtgtacataaat

SEQ ID NO: 174775 - DNA, 12 bp, Unknown
  misc_feature (1)..( 12): Result.005 file - promoters50/1533750
caaaacaaaaat

SEQ ID NO: 174776 - DNA, 12 bp, Unknown
  misc_feature (1)..( 12): Result.005 file - promoters50/1533750
caaagcaaaaca

SEQ ID NO: 174777 - DNA, 15 bp, Unknown
  misc_feature (1)..( 15): Result.005 file - promoters50/1533750
aagtaataactctcc

SEQ ID NO: 174778 - DNA, 15 bp, Unknown
  misc_feature (1)..( 15): Result.005 file - promoters50/1533750
aagaaatgaggtact

SEQ ID NO: 174779 - DNA, 15 bp, Unknown
  misc_feature (1)..( 15): Result.005 file - promoters50/1533750
gagaaaattacgaaa

SEQ ID NO: 174780 - DNA, 8 bp, Unknown
  misc_feature (1)..( 8): Result.005 file - promoters50/1533750
ccaaaaat

SEQ ID NO: 174781 - DNA, 8 bp, Unknown
  misc_feature (1)..( 8): Result.005 file - promoters50/1533750
ccaaaaaa

SEQ ID NO: 174782 - DNA, 8 bp, Unknown
  misc_feature (1)..( 8): Result.005 file - promoters50/1533750
agaaaaaa

SEQ ID NO: 174783 - DNA, 7 bp, Unknown
  misc_feature (1)..( 7): Result.005 file - promoters50/1533762
tgaaaaa

SEQ ID NO: 174784 - DNA, 7 bp, Unknown
  misc_feature (1)..( 7): Result.005 file - promoters50/1533762
ggaaaaa

SEQ ID NO: 174785 - DNA, 7 bp, Unknown
  misc_feature (1)..( 7): Result.005 file - promoters50/1533762
ggaaaag

SEQ ID NO: 174786 - DNA, 6 bp, Unknown
  misc_feature (1)..( 6): Result.005 file - promoters50/1533762
gaatct

SEQ ID NO: 174787 - DNA, 6 bp, Unknown
  misc_feature (1)..( 6): Result.005 file - promoters50/1533762
gaatct

SEQ ID NO: 174788 - DNA, 6 bp, Unknown
  misc_feature (1)..( 6): Result.005 file - promoters50/1533762
gaatct

SEQ ID NO: 174789 - DNA, 11 bp, Unknown
  misc_feature (1)..( 11): Result.005 file - promoters50/1533878
accgcctaata

SEQ ID NO: 174790 - DNA, 11 bp, Unknown
  misc_feature (1)..( 11): Result.005 file - promoters50/1533878
ttctccttata

SEQ ID NO: 174791 - DNA, 11 bp, Unknown
  misc_feature (1)..( 11): Result.005 file - promoters50/1533878
ttctccttaga

SEQ ID NO: 174792 - DNA, 10 bp, Unknown
  misc_feature (1)..( 10): Result.005 file - promoters50/1533878
gaaattgatt

SEQ ID NO: 174793 - DNA, 10 bp, Unknown
  misc_feature (1)..( 10): Result.005 file - promoters50/1533878
ataatttatt

SEQ ID NO: 174794 - DNA, 10 bp, Unknown
  misc_feature (1)..( 10): Result.005 file - promoters50/1533878
ataattttat

SEQ ID NO: 174795 - DNA, 11 bp, Unknown
  misc_feature (1)..( 11): Result.005 file - promoters50/1533878
atacataccca

SEQ ID NO: 174796 - DNA, 11 bp, Unknown
  misc_feature (1)..( 11): Result.005 file - promoters50/1533878
atatatacaag

SEQ ID NO: 174797 - DNA, 11 bp, Unknown
  misc_feature (1)..( 11): Result.005 file - promoters50/1533878
aaacatgccca

SEQ ID NO: 174798 - DNA, 8 bp, Unknown
  misc_feature (1)..( 8): Result.005 file - promoters50/1533882
gttcaact

SEQ ID NO: 174799 - DNA, 8 bp, Unknown
  misc_feature (1)..( 8): Result.005 file - promoters50/1533882
tttcgact

SEQ ID NO: 174800 - DNA, 8 bp, Unknown
  misc_feature (1)..( 8): Result.005 file - promoters50/1533882
gttcaatc

SEQ ID NO: 174801 - DNA, 13 bp, Unknown
  misc_feature (1)..( 13): Result.005 file - promoters50/1533882
gatccatcacaat

SEQ ID NO: 174802 - DNA, 13 bp, Unknown
  misc_feature (1)..( 13): Result.005 file - promoters50/1533882
ttaaatccacaat

SEQ ID NO: 174803 - DNA, 13 bp, Unknown
  misc_feature (1)..( 13): Result.005 file - promoters50/1533882
ttagatcctcaag

SEQ ID NO: 174804 - DNA, 11 bp, Unknown
  misc_feature (1)..( 11): Result.005 file - promoters50/1533912
ctaaataaata

SEQ ID NO: 174805 - DNA, 11 bp, Unknown
  misc_feature (1)..( 11): Result.005 file - promoters50/1533912
ctatataaacc

SEQ ID NO: 174806 - DNA, 11 bp, Unknown
  misc_feature (1)..( 11): Result.005 file - promoters50/1533912
taaaacaaact

SEQ ID NO: 174807 - DNA, 11 bp, Unknown
  misc_feature (1)..( 11): Result.005 file - promoters50/1533912
ctatataatgg

SEQ ID NO: 174808 - DNA, 11 bp, Unknown
  misc_feature (1)..( 11): Result.005 file - promoters50/1533912
atatataaaga

SEQ ID NO: 174809 - DNA, 11 bp, Unknown
  misc_feature (1)..( 11): Result.005 file - promoters50/1533912
ttatttaaaca

SEQ ID NO: 174810 - DNA, 11 bp, Unknown
  misc_feature (1)..( 11): Result.005 file - promoters50/1533912
gtatatatacc

SEQ ID NO: 174811 - DNA, 8 bp, Unknown
  misc_feature (1)..( 8): Result.005 file - promoters50/1533912
tatatata

SEQ ID NO: 174812 - DNA, 8 bp, Unknown
  misc_feature (1)..( 8): Result.005 file - promoters50/1533912
tatatata

SEQ ID NO: 174813 - DNA, 8 bp, Unknown
  misc_feature (1)..( 8): Result.005 file - promoters50/1533912
tatataaa

SEQ ID NO: 174814 - DNA, 8 bp, Unknown
  misc_feature (1)..( 8): Result.005 file - promoters50/1533912
tatttaaa

SEQ ID NO: 174815 - DNA, 8 bp, Unknown
  misc_feature (1)..( 8): Result.005 file - promoters50/1533912
aatataaa

SEQ ID NO: 174816 - DNA, 8 bp, Unknown
  misc_feature (1)..( 8): Result.005 file - promoters50/1533912
tatataat

SEQ ID NO: 174817 - DNA, 13 bp, Unknown
  misc_feature (1)..( 13): Result.005 file - promoters50/1533912
agttaacatctaa

SEQ ID NO: 174818 - DNA, 13 bp, Unknown
  misc_feature (1)..( 13): Result.005 file - promoters50/1533912
ttttaacacttca

SEQ ID NO: 174819 - DNA, 13 bp, Unknown
  misc_feature (1)..( 13): Result.005 file - promoters50/1533912
ttttcacaaactt

SEQ ID NO: 174820 - DNA, 13 bp, Unknown
  misc_feature (1)..( 13): Result.005 file - promoters50/1533912
ttttcattgtagt

SEQ ID NO: 174821 - DNA, 13 bp, Unknown
  misc_feature (1)..( 13): Result.005 file - promoters50/1533912
tttttacatattt

SEQ ID NO: 174822 - DNA, 13 bp, Unknown
  misc_feature (1)..( 13): Result.005 file - promoters50/1533912
gttttattgtagt

SEQ ID NO: 174823 - DNA, 13 bp, Unknown
  misc_feature (1)..( 13): Result.005 file - promoters50/1534128
attctcaaccttg

SEQ ID NO: 174824 - DNA, 13 bp, Unknown
  misc_feature (1)..( 13): Result.005 file - promoters50/1534128
aatctaaacgcaa

SEQ ID NO: 174825 - DNA, 13 bp, Unknown
  misc_feature (1)..( 13): Result.005 file - promoters50/1534128
agtttcaatcttc

SEQ ID NO: 174826 - DNA, 13 bp, Unknown
  misc_feature (1)..( 13): Result.005 file - promoters50/1534128
atgttaaaagcat

SEQ ID NO: 174827 - DNA, 13 bp, Unknown
  misc_feature (1)..( 13): Result.005 file - promoters50/1534128
aatttaagggtct

SEQ ID NO: 174828 - DNA, 13 bp, Unknown
  misc_feature (1)..( 13): Result.005 file - promoters50/1534128
ataaacaaccttc

SEQ ID NO: 174829 - DNA, 10 bp, Unknown
  misc_feature (1)..( 10): Result.005 file - promoters50/1534228
taaactcttc

SEQ ID NO: 174830 - DNA, 10 bp, Unknown
  misc_feature (1)..( 10): Result.005 file - promoters50/1534228
aaaactattc

SEQ ID NO: 174831 - DNA, 10 bp, Unknown
  misc_feature (1)..( 10): Result.005 file - promoters50/1534228
taatctctga

SEQ ID NO: 174832 - DNA, 10 bp, Unknown
  misc_feature (1)..( 10): Result.005 file - promoters50/1534228
aaaactgata

SEQ ID NO: 174833 - DNA, 7 bp, Unknown
  misc_feature (1)..( 7): Result.005 file - promoters50/1534228
taatttc

SEQ ID NO: 174834 - DNA, 7 bp, Unknown
  misc_feature (1)..( 7): Result.005 file - promoters50/1534228
taattta

SEQ ID NO: 174835 - DNA, 7 bp, Unknown
  misc_feature (1)..( 7): Result.005 file - promoters50/1534228
aaattta

SEQ ID NO: 174836 - DNA, 18 bp, Unknown
  misc_feature (1)..( 18): Result.005 file - promoters50/1534228
ctcgtgtatataaattca

SEQ ID NO: 174837 - DNA, 18 bp, Unknown
  misc_feature (1)..( 18): Result.005 file - promoters50/1534228
tcattgacaataaattac

SEQ ID NO: 174838 - DNA, 18 bp, Unknown
  misc_feature (1)..( 18): Result.005 file - promoters50/1534228
ctcctgtctatatattca

SEQ ID NO: 174839 - DNA, 18 bp, Unknown
  misc_feature (1)..( 18): Result.005 file - promoters50/1534228
cactcgtgtatataaatt

SEQ ID NO: 174840 - DNA, 18 bp, Unknown
  misc_feature (1)..( 18): Result.005 file - promoters50/1534228
ttctaatctatttaaccc

SEQ ID NO: 174841 - DNA, 18 bp, Unknown
  misc_feature (1)..( 18): Result.005 file - promoters50/1534228
ctcctgtctatatattca

SEQ ID NO: 174842 - DNA, 7 bp, Unknown
  misc_feature (1)..( 7): Result.005 file - promoters50/1534228
taattta

SEQ ID NO: 174843 - DNA, 7 bp, Unknown
  misc_feature (1)..( 7): Result.005 file - promoters50/1534228
taatttg

SEQ ID NO: 174844 - DNA, 7 bp, Unknown
  misc_feature (1)..( 7): Result.005 file - promoters50/1534228
aaatttg

SEQ ID NO: 174845 - DNA, 8 bp, Unknown
  misc_feature (1)..( 8): Result.005 file - promoters50/1534269
tatcttct

SEQ ID NO: 174846 - DNA, 8 bp, Unknown
  misc_feature (1)..( 8): Result.005 file - promoters50/1534269
tatcttct

SEQ ID NO: 174847 - DNA, 8 bp, Unknown
  misc_feature (1)..( 8): Result.005 file - promoters50/1534269
tattttcg

SEQ ID NO: 174848 - DNA, 10 bp, Unknown
  misc_feature (1)..( 10): Result.005 file - promoters50/1534269
agattcttga

SEQ ID NO: 174849 - DNA, 10 bp, Unknown
  misc_feature (1)..( 10): Result.005 file - promoters50/1534269
ggatttttgt

SEQ ID NO: 174850 - DNA, 10 bp, Unknown
  misc_feature (1)..( 10): Result.005 file - promoters50/1534269
agattgttga

SEQ ID NO: 174851 - DNA, 8 bp, Unknown
  misc_feature (1)..( 8): Result.005 file - promoters50/1534269
tatcaaat

SEQ ID NO: 174852 - DNA, 8 bp, Unknown
  misc_feature (1)..( 8): Result.005 file - promoters50/1534269
tttcaaat

SEQ ID NO: 174853 - DNA, 8 bp, Unknown
  misc_feature (1)..( 8): Result.005 file - promoters50/1534269
ttttaaat

SEQ ID NO: 174854 - DNA, 11 bp, Unknown
  misc_feature (1)..( 11): Result.005 file - promoters50/1534269
gttgattgttc

SEQ ID NO: 174855 - DNA, 11 bp, Unknown
  misc_feature (1)..( 11): Result.005 file - promoters50/1534269
ccaaatttttc

SEQ ID NO: 174856 - DNA, 11 bp, Unknown
  misc_feature (1)..( 11): Result.005 file - promoters50/1534269
ccaaactttat

SEQ ID NO: 174857 - DNA, 9 bp, Unknown
  misc_feature (1)..( 9): Result.005 file - promoters50/1534269
tgaaagaat

SEQ ID NO: 174858 - DNA, 9 bp, Unknown
  misc_feature (1)..( 9): Result.005 file - promoters50/1534269
ccaaagaaa

SEQ ID NO: 174859 - DNA, 9 bp, Unknown
  misc_feature (1)..( 9): Result.005 file - promoters50/1534269
tgaaaaaat

SEQ ID NO: 174860 - DNA, 8 bp, Unknown
  misc_feature (1)..( 8): Result.005 file - promoters50/1534269
gatgtatt

SEQ ID NO: 174861 - DNA, 8 bp, Unknown
  misc_feature (1)..( 8): Result.005 file - promoters50/1534269
gatatata

SEQ ID NO: 174862 - DNA, 8 bp, Unknown
  misc_feature (1)..( 8): Result.005 file - promoters50/1534269
tatggatt

SEQ ID NO: 174863 - DNA, 10 bp, Unknown
  misc_feature (1)..( 10): Result.005 file - promoters50/1534276
atgaaattct

SEQ ID NO: 174864 - DNA, 10 bp, Unknown
  misc_feature (1)..( 10): Result.005 file - promoters50/1534276
atcaaattct

SEQ ID NO: 174865 - DNA, 10 bp, Unknown
  misc_feature (1)..( 10): Result.005 file - promoters50/1534276
atcaaattta

SEQ ID NO: 174866 - DNA, 7 bp, Unknown
  misc_feature (1)..( 7): Result.005 file - promoters50/1534276
aagcaac

SEQ ID NO: 174867 - DNA, 7 bp, Unknown
  misc_feature (1)..( 7): Result.005 file - promoters50/1534276
cagcaac

SEQ ID NO: 174868 - DNA, 7 bp, Unknown
  misc_feature (1)..( 7): Result.005 file - promoters50/1534276
aagcaaa

SEQ ID NO: 174869 - DNA, 8 bp, Unknown
  misc_feature (1)..( 8): Result.005 file - promoters50/1534276
taaataaa

SEQ ID NO: 174870 - DNA, 8 bp, Unknown
  misc_feature (1)..( 8): Result.005 file - promoters50/1534276
aaaataaa

SEQ ID NO: 174871 - DNA, 8 bp, Unknown
  misc_feature (1)..( 8): Result.005 file - promoters50/1534276
aaaataca

SEQ ID NO: 174872 - DNA, 13 bp, Unknown
  misc_feature (1)..( 13): Result.005 file - promoters50/1534341
caattaaactatg

SEQ ID NO: 174873 - DNA, 13 bp, Unknown
  misc_feature (1)..( 13): Result.005 file - promoters50/1534341
taattaagctatg

SEQ ID NO: 174874 - DNA, 14 bp, Unknown
  misc_feature (1)..( 14): Result.005 file - promoters50/1534341
tattttaaacagac

SEQ ID NO: 174875 - DNA, 13 bp, Unknown
  misc_feature (1)..( 13): Result.005 file - promoters50/1534341
caagtaaaaacca

SEQ ID NO: 174876 - DNA, 13 bp, Unknown
  misc_feature (1)..( 13): Result.005 file - promoters50/1534341
taattagaaaatg

SEQ ID NO: 174877 - DNA, 14 bp, Unknown
  misc_feature (1)..( 14): Result.005 file - promoters50/1534341
aaagttaaataaag

SEQ ID NO: 174878 - DNA, 8 bp, Unknown
  misc_feature (1)..( 8): Result.005 file - promoters50/1534341
tatatata

SEQ ID NO: 174879 - DNA, 8 bp, Unknown
  misc_feature (1)..( 8): Result.005 file - promoters50/1534341
tatatata

SEQ ID NO: 174880 - DNA, 8 bp, Unknown
  misc_feature (1)..( 8): Result.005 file - promoters50/1534341
tatataaa

SEQ ID NO: 174881 - DNA, 8 bp, Unknown
  misc_feature (1)..( 8): Result.005 file - promoters50/1534341
aatataaa

SEQ ID NO: 174882 - DNA, 8 bp, Unknown
  misc_feature (1)..( 8): Result.005 file - promoters50/1534341
tatataaa

SEQ ID NO: 174883 - DNA, 8 bp, Unknown
  misc_feature (1)..( 8): Result.005 file - promoters50/1534341
aatataat

SEQ ID NO: 174884 - DNA, 9 bp, Unknown
  misc_feature (1)..( 9): Result.005 file - promoters50/1534378
cgtcttctc

SEQ ID NO: 174885 - DNA, 9 bp, Unknown
  misc_feature (1)..( 9): Result.005 file - promoters50/1534378
tatcttctt

SEQ ID NO: 174886 - DNA, 9 bp, Unknown
  misc_feature (1)..( 9): Result.005 file - promoters50/1534378
tattttcaa

SEQ ID NO: 174887 - DNA, 9 bp, Unknown
  misc_feature (1)..( 9): Result.005 file - promoters50/1534378
tatgttttg

SEQ ID NO: 174888 - DNA, 9 bp, Unknown
  misc_feature (1)..( 9): Result.005 file - promoters50/1534378
tgtgttgat

SEQ ID NO: 174889 - DNA, 9 bp, Unknown
  misc_feature (1)..( 9): Result.005 file - promoters50/1534378
acttttcat

SEQ ID NO: 174890 - DNA, 9 bp, Unknown
  misc_feature (1)..( 9): Result.005 file - promoters50/1534390
gacggaaga

SEQ ID NO: 174891 - DNA, 9 bp, Unknown
  misc_feature (1)..( 9): Result.005 file - promoters50/1534390
cacggaact

SEQ ID NO: 174892 - DNA, 9 bp, Unknown
  misc_feature (1)..( 9): Result.005 file - promoters50/1534390
cactgaact

SEQ ID NO: 174893 - DNA, 9 bp, Unknown
  misc_feature (1)..( 9): Result.005 file - promoters50/1534455
tttttagtg

SEQ ID NO: 174894 - DNA, 9 bp, Unknown
  misc_feature (1)..( 9): Result.005 file - promoters50/1534455
gattttgtg

SEQ ID NO: 174895 - DNA, 9 bp, Unknown
  misc_feature (1)..( 9): Result.005 file - promoters50/1534455
gatgttgat

SEQ ID NO: 174896 - DNA, 12 bp, Unknown
  misc_feature (1)..( 12): Result.005 file - promoters50/1534455
aatcaaagattt

SEQ ID NO: 174897 - DNA, 12 bp, Unknown
  misc_feature (1)..( 12): Result.005 file - promoters50/1534455
tatcaaacaaac

SEQ ID NO: 174898 - DNA, 12 bp, Unknown
  misc_feature (1)..( 12): Result.005 file - promoters50/1534455
aataaaacattt

SEQ ID NO: 174899 - DNA, 9 bp, Unknown
  misc_feature (1)..( 9): Result.005 file - promoters50/1534455
tatataata

SEQ ID NO: 174900 - DNA, 9 bp, Unknown
  misc_feature (1)..( 9): Result.005 file - promoters50/1534455
catattata

SEQ ID NO: 174901 - DNA, 9 bp, Unknown
  misc_feature (1)..( 9): Result.005 file - promoters50/1534455
tatatatat

SEQ ID NO: 174902 - DNA, 9 bp, Unknown
  misc_feature (1)..( 9): Result.005 file - promoters50/1534455
atttttata

SEQ ID NO: 174903 - DNA, 9 bp, Unknown
  misc_feature (1)..( 9): Result.005 file - promoters50/1534455
ttttttata

SEQ ID NO: 174904 - DNA, 10 bp, Unknown
  misc_feature (1)..( 10): Result.005 file - promoters50/1534455
tttatttata

SEQ ID NO: 174905 - DNA, 12 bp, Unknown
  misc_feature (1)..( 12): Result.005 file - promoters50/1534455
tcttattatgat

SEQ ID NO: 174906 - DNA, 12 bp, Unknown
  misc_feature (1)..( 12): Result.005 file - promoters50/1534455
tctttttaggat

SEQ ID NO: 174907 - DNA, 12 bp, Unknown
  misc_feature (1)..( 12): Result.005 file - promoters50/1534455
tctgatttattt

SEQ ID NO: 174908 - DNA, 9 bp, Unknown
  misc_feature (1)..( 9): Result.005 file - promoters50/1534455
tgagtattc

SEQ ID NO: 174909 - DNA, 9 bp, Unknown
  misc_feature (1)..( 9): Result.005 file - promoters50/1534455
tgattattt

SEQ ID NO: 174910 - DNA, 9 bp, Unknown
  misc_feature (1)..( 9): Result.005 file - promoters50/1534455
tatttattt

SEQ ID NO: 174911 - DNA, 6 bp, Unknown
  misc_feature (1)..( 6): Result.005 file - promoters50/1534501
aaaaaa

SEQ ID NO: 174912 - DNA, 6 bp, Unknown
  misc_feature (1)..( 6): Result.005 file - promoters50/1534501
aaaaaa

SEQ ID NO: 174913 - DNA, 7 bp, Unknown
  misc_feature (1)..( 7): Result.005 file - promoters50/1534501
aaagaaa

SEQ ID NO: 174914 - DNA, 11 bp, Unknown
  misc_feature (1)..( 11): Result.005 file - promoters50/1534501
cacgttagttg

SEQ ID NO: 174915 - DNA, 11 bp, Unknown
  misc_feature (1)..( 11): Result.005 file - promoters50/1534501
aaaattaattg

SEQ ID NO: 174916 - DNA, 11 bp, Unknown
  misc_feature (1)..( 11): Result.005 file - promoters50/1534501
aaatttaatca

SEQ ID NO: 174917 - DNA, 9 bp, Unknown
  misc_feature (1)..( 9): Result.005 file - promoters50/1534501
tttttttta

SEQ ID NO: 174918 - DNA, 9 bp, Unknown
  misc_feature (1)..( 9): Result.005 file - promoters50/1534501
aatttatta

SEQ ID NO: 174919 - DNA, 9 bp, Unknown
  misc_feature (1)..( 9): Result.005 file - promoters50/1534501
aatttatat

SEQ ID NO: 174920 - DNA, 7 bp, Unknown
  misc_feature (1)..( 7): Result.005 file - promoters50/1534501
agatcaa

SEQ ID NO: 174921 - DNA, 7 bp, Unknown
  misc_feature (1)..( 7): Result.005 file - promoters50/1534501
ggatcaa

SEQ ID NO: 174922 - DNA, 7 bp, Unknown
  misc_feature (1)..( 7): Result.005 file - promoters50/1534501
agaccaa

SEQ ID NO: 174923 - DNA, 18 bp, Unknown
  misc_feature (1)..( 18): Result.005 file - promoters50/1534524
ctcctgtctatatattca

SEQ ID NO: 174924 - DNA, 18 bp, Unknown
  misc_feature (1)..( 18): Result.005 file - promoters50/1534524
ctcgtgtatataaattca

SEQ ID NO: 174925 - DNA, 18 bp, Unknown
  misc_feature (1)..( 18): Result.005 file - promoters50/1534524
aagtttgggatatatcat

SEQ ID NO: 174926 - DNA, 18 bp, Unknown
  misc_feature (1)..( 18): Result.005 file - promoters50/1534524
aatctctctataaatacc

SEQ ID NO: 174927 - DNA, 18 bp, Unknown
  misc_feature (1)..( 18): Result.005 file - promoters50/1534524
caaccttctataaatact

SEQ ID NO: 174928 - DNA, 18 bp, Unknown
  misc_feature (1)..( 18): Result.005 file - promoters50/1534524
tatatttatacaaatccc

SEQ ID NO: 174929 - DNA, 14 bp, Unknown
  misc_feature (1)..( 14): Result.005 file - promoters50/1534524
acgtattcagctat

SEQ ID NO: 174930 - DNA, 14 bp, Unknown
  misc_feature (1)..( 14): Result.005 file - promoters50/1534524
gaatatacagaatg

SEQ ID NO: 174931 - DNA, 14 bp, Unknown
  misc_feature (1)..( 14): Result.005 file - promoters50/1534524
tagtatacagttgg

SEQ ID NO: 174932 - DNA, 14 bp, Unknown
  misc_feature (1)..( 14): Result.005 file - promoters50/1534524
tcaaatatagtata

SEQ ID NO: 174933 - DNA, 14 bp, Unknown
  misc_feature (1)..( 14): Result.005 file - promoters50/1534524
gaaaatactttact

SEQ ID NO: 174934 - DNA, 13 bp, Unknown
  misc_feature (1)..( 13): Result.005 file - promoters50/1534524
caaacacaatcct

SEQ ID NO: 174935 - DNA, 13 bp, Unknown
  misc_feature (1)..( 13): Result.005 file - promoters50/1534524
aaaaaacaagaaa

SEQ ID NO: 174936 - DNA, 13 bp, Unknown
  misc_feature (1)..( 13): Result.005 file - promoters50/1534524
agttcacaaacct

SEQ ID NO: 174937 - DNA, 13 bp, Unknown
  misc_feature (1)..( 13): Result.005 file - promoters50/1534524
cacatacatgaat

SEQ ID NO: 174938 - DNA, 13 bp, Unknown
  misc_feature (1)..( 13): Result.005 file - promoters50/1534524
aaaaaagatgcaa

SEQ ID NO: 174939 - DNA, 9 bp, Unknown
  misc_feature (1)..( 9): Result.005 file - promoters50/1534570
ctaatttta

SEQ ID NO: 174940 - DNA, 9 bp, Unknown
  misc_feature (1)..( 9): Result.005 file - promoters50/1534570
tcaattttg

SEQ ID NO: 174941 - DNA, 9 bp, Unknown
  misc_feature (1)..( 9): Result.005 file - promoters50/1534570
gtaatttaa

SEQ ID NO: 174942 - DNA, 9 bp, Unknown
  misc_feature (1)..( 9): Result.005 file - promoters50/1534570
atcattttt

SEQ ID NO: 174943 - DNA, 7 bp, Unknown
  misc_feature (1)..( 7): Result.005 file - promoters50/1534570
atttaat

SEQ ID NO: 174944 - DNA, 7 bp, Unknown
  misc_feature (1)..( 7): Result.005 file - promoters50/1534570
atttaac

SEQ ID NO: 174945 - DNA, 7 bp, Unknown
  misc_feature (1)..( 7): Result.005 file - promoters50/1534570
gtttaac

SEQ ID NO: 174946 - DNA, 9 bp, Unknown
  misc_feature (1)..( 9): Result.005 file - promoters50/1534570
aatttattt

SEQ ID NO: 174947 - DNA, 9 bp, Unknown
  misc_feature (1)..( 9): Result.005 file - promoters50/1534570
aatgtatcg

SEQ ID NO: 174948 - DNA, 9 bp, Unknown
  misc_feature (1)..( 9): Result.005 file - promoters50/1534570
cattttttt

SEQ ID NO: 174949 - DNA, 9 bp, Unknown
  misc_feature (1)..( 9): Result.005 file - promoters50/1534570
cattttcgt

SEQ ID NO: 174950 - DNA, 9 bp, Unknown
  misc_feature (1)..( 9): Result.005 file - promoters50/1534570
tatttttac

SEQ ID NO: 174951 - DNA, 9 bp, Unknown
  misc_feature (1)..( 9): Result.005 file - promoters50/1534570
aattcttac

SEQ ID NO: 174952 - DNA, 9 bp, Unknown
  misc_feature (1)..( 9): Result.005 file - promoters50/1534570
aatccttga

SEQ ID NO: 174953 - DNA, 8 bp, Unknown
  misc_feature (1)..( 8): Result.005 file - promoters50/1534570
aatttgtt

SEQ ID NO: 174954 - DNA, 8 bp, Unknown
  misc_feature (1)..( 8): Result.005 file - promoters50/1534570
attttgtt

SEQ ID NO: 174955 - DNA, 8 bp, Unknown
  misc_feature (1)..( 8): Result.005 file - promoters50/1534570
attttgtg

SEQ ID NO: 174956 - DNA, 11 bp, Unknown
  misc_feature (1)..( 11): Result.005 file - promoters50/1534570
attagaaatat

SEQ ID NO: 174957 - DNA, 11 bp, Unknown
  misc_feature (1)..( 11): Result.005 file - promoters50/1534570
attaaaaaaat

SEQ ID NO: 174958 - DNA, 11 bp, Unknown
  misc_feature (1)..( 11): Result.005 file - promoters50/1534570
agtaaaagaat

SEQ ID NO: 174959 - DNA, 7 bp, Unknown
  misc_feature (1)..( 7): Result.005 file - promoters50/1534570
acacaga

SEQ ID NO: 174960 - DNA, 7 bp, Unknown
  misc_feature (1)..( 7): Result.005 file - promoters50/1534570
acagaga

SEQ ID NO: 174961 - DNA, 7 bp, Unknown
  misc_feature (1)..( 7): Result.005 file - promoters50/1534570
acagaaa

SEQ ID NO: 174962 - DNA, 8 bp, Unknown
  misc_feature (1)..( 8): Result.005 file - promoters50/1534591
tatataag

SEQ ID NO: 174963 - DNA, 8 bp, Unknown
  misc_feature (1)..( 8): Result.005 file - promoters50/1534591
tatataat

SEQ ID NO: 174964 - DNA, 8 bp, Unknown
  misc_feature (1)..( 8): Result.005 file - promoters50/1534591
aatacaat

SEQ ID NO: 174965 - DNA, 11 bp, Unknown
  misc_feature (1)..( 11): Result.005 file - promoters50/1534591
attattagaca

SEQ ID NO: 174966 - DNA, 11 bp, Unknown
  misc_feature (1)..( 11): Result.005 file - promoters50/1534591
attcttacaca

SEQ ID NO: 174967 - DNA, 11 bp, Unknown
  misc_feature (1)..( 11): Result.005 file - promoters50/1534591
gttattaatca

SEQ ID NO: 174968 - DNA, 8 bp, Unknown
  misc_feature (1)..( 8): Result.005 file - promoters50/1534591
aatcgaat

SEQ ID NO: 174969 - DNA, 8 bp, Unknown
  misc_feature (1)..( 8): Result.005 file - promoters50/1534591
aatagaaa

SEQ ID NO: 174970 - DNA, 8 bp, Unknown
  misc_feature (1)..( 8): Result.005 file - promoters50/1534591
gataaaaa

SEQ ID NO: 174971 - DNA, 10 bp, Unknown
  misc_feature (1)..( 10): Result.005 file - promoters50/1534615
tcaaataaaa

SEQ ID NO: 174972 - DNA, 10 bp, Unknown
  misc_feature (1)..( 10): Result.005 file - promoters50/1534615
tcaaatatta

SEQ ID NO: 174973 - DNA, 10 bp, Unknown
  misc_feature (1)..( 10): Result.005 file - promoters50/1534615
cgaaagaaag

SEQ ID NO: 174974 - DNA, 10 bp, Unknown
  misc_feature (1)..( 10): Result.005 file - promoters50/1534615
aagaataaaa

SEQ ID NO: 174975 - DNA, 10 bp, Unknown
  misc_feature (1)..( 10): Result.005 file - promoters50/1534615
gaaaatgtta

SEQ ID NO: 174976 - DNA, 10 bp, Unknown
  misc_feature (1)..( 10): Result.005 file - promoters50/1534615
ttcaataaac

SEQ ID NO: 174977 - DNA, 10 bp, Unknown
  misc_feature (1)..( 10): Result.005 file - promoters50/1534629
gtttatcagc

SEQ ID NO: 174978 - DNA, 10 bp, Unknown
  misc_feature (1)..( 10): Result.005 file - promoters50/1534629
ttttatcatc

SEQ ID NO: 174979 - DNA, 10 bp, Unknown
  misc_feature (1)..( 10): Result.005 file - promoters50/1534629
ttttatttat

SEQ ID NO: 174980 - DNA, 11 bp, Unknown
  misc_feature (1)..( 11): Result.005 file - promoters50/1534667
aaaacaaaaat

SEQ ID NO: 174981 - DNA, 11 bp, Unknown
  misc_feature (1)..( 11): Result.005 file - promoters50/1534667
tgcccaaaaaa

SEQ ID NO: 174982 - DNA, 11 bp, Unknown
  misc_feature (1)..( 11): Result.005 file - promoters50/1534667
aaaagaaaaat

SEQ ID NO: 174983 - DNA, 11 bp, Unknown
  misc_feature (1)..( 11): Result.005 file - promoters50/1534667
tactaattaac

SEQ ID NO: 174984 - DNA, 11 bp, Unknown
  misc_feature (1)..( 11): Result.005 file - promoters50/1534667
caataaataat

SEQ ID NO: 174985 - DNA, 11 bp, Unknown
  misc_feature (1)..( 11): Result.005 file - promoters50/1534667
caaaaaataat

SEQ ID NO: 174986 - DNA, 12 bp, Unknown
  misc_feature (1)..( 12): Result.005 file - promoters50/1534671
tctttagagctt

SEQ ID NO: 174987 - DNA, 12 bp, Unknown
  misc_feature (1)..( 12): Result.005 file - promoters50/1534671
ttattagaactt

SEQ ID NO: 174988 - DNA, 12 bp, Unknown
  misc_feature (1)..( 12): Result.005 file - promoters50/1534671
tcttttgagtat

SEQ ID NO: 174989 - DNA, 12 bp, Unknown
  misc_feature (1)..( 12): Result.005 file - promoters50/1534671
tcttaagatttc

SEQ ID NO: 174990 - DNA, 12 bp, Unknown
  misc_feature (1)..( 12): Result.005 file - promoters50/1534671
ttgtaatatttg

SEQ ID NO: 174991 - DNA, 12 bp, Unknown
  misc_feature (1)..( 12): Result.005 file - promoters50/1534671
tcattaaaattc

SEQ ID NO: 174992 - DNA, 10 bp, Unknown
  misc_feature (1)..( 10): Result.005 file - promoters50/1534671
caaaatgagt

SEQ ID NO: 174993 - DNA, 10 bp, Unknown
  misc_feature (1)..( 10): Result.005 file - promoters50/1534671
caagatgaga

SEQ ID NO: 174994 - DNA, 10 bp, Unknown
  misc_feature (1)..( 10): Result.005 file - promoters50/1534671
caacatgaat

SEQ ID NO: 174995 - DNA, 10 bp, Unknown
  misc_feature (1)..( 10): Result.005 file - promoters50/1534671
ttacatgagt

SEQ ID NO: 174996 - DNA, 10 bp, Unknown
  misc_feature (1)..( 10): Result.005 file - promoters50/1534671
aaaaatgcaa

SEQ ID NO: 174997 - DNA, 10 bp, Unknown
  misc_feature (1)..( 10): Result.005 file - promoters50/1534671
tacgatcaga

SEQ ID NO: 174998 - DNA, 19 bp, Unknown
  misc_feature (1)..( 19): Result.005 file - promoters50/1534671
tttctagtatttgttttgt

SEQ ID NO: 174999 - DNA, 19 bp, Unknown
  misc_feature (1)..( 19): Result.005 file - promoters50/1534671
gactagaactttgatttga

SEQ ID NO: 175000 - DNA, 19 bp, Unknown
  misc_feature (1)..( 19): Result.005 file - promoters50/1534671
atttttttatttatttttt

SEQ ID NO: 175001 - DNA, 19 bp, Unknown
  misc_feature (1)..( 19): Result.005 file - promoters50/1534671
ctaaatgacaatgatgtga

SEQ ID NO: 175002 - DNA, 19 bp, Unknown
  misc_feature (1)..( 19): Result.005 file - promoters50/1534671
attttcttaattattatga

SEQ ID NO: 175003 - DNA, 19 bp, Unknown
  misc_feature (1)..( 19): Result.005 file - promoters50/1534671
ctcaatttttttaattatt

SEQ ID NO: 175004 - DNA, 11 bp, Unknown
  misc_feature (1)..( 11): Result.005 file - promoters50/1535124
tcagacacaac

SEQ ID NO: 175005 - DNA, 11 bp, Unknown
  misc_feature (1)..( 11): Result.005 file - promoters50/1535124
ttgaacaaaac

SEQ ID NO: 175006 - DNA, 11 bp, Unknown
  misc_feature (1)..( 11): Result.005 file - promoters50/1535124
ttgatcaaaca

SEQ ID NO: 175007 - DNA, 9 bp, Unknown
  misc_feature (1)..( 9): Result.005 file - promoters50/1535124
gtttgcaag

SEQ ID NO: 175008 - DNA, 9 bp, Unknown
  misc_feature (1)..( 9): Result.005 file - promoters50/1535124
ttttacaat

SEQ ID NO: 175009 - DNA, 9 bp, Unknown
  misc_feature (1)..( 9): Result.005 file - promoters50/1535124
ttttataat

SEQ ID NO: 175010 - DNA, 6 bp, Unknown
  misc_feature (1)..( 6): Result.005 file - promoters50/1535124
tttatt

SEQ ID NO: 175011 - DNA, 6 bp, Unknown
  misc_feature (1)..( 6): Result.005 file - promoters50/1535124
tttatt

SEQ ID NO: 175012 - DNA, 6 bp, Unknown
  misc_feature (1)..( 6): Result.005 file - promoters50/1535124
tttatt

SEQ ID NO: 175013 - DNA, 9 bp, Unknown
  misc_feature (1)..( 9): Result.005 file - promoters50/1535124
tcagacaca

SEQ ID NO: 175014 - DNA, 9 bp, Unknown
  misc_feature (1)..( 9): Result.005 file - promoters50/1535124
tcaaacaac

SEQ ID NO: 175015 - DNA, 9 bp, Unknown
  misc_feature (1)..( 9): Result.005 file - promoters50/1535124
ttgaacaaa

SEQ ID NO: 175016 - DNA, 9 bp, Unknown
  misc_feature (1)..( 9): Result.005 file - promoters50/1535124
gtttggatg

SEQ ID NO: 175017 - DNA, 9 bp, Unknown
  misc_feature (1)..( 9): Result.005 file - promoters50/1535124
ttttgcatg

SEQ ID NO: 175018 - DNA, 9 bp, Unknown
  misc_feature (1)..( 9): Result.005 file - promoters50/1535124
ttttgcttt

SEQ ID NO: 175019 - DNA, 8 bp, Unknown
  misc_feature (1)..( 8): Result.005 file - promoters50/1535124
tttatttt

SEQ ID NO: 175020 - DNA, 8 bp, Unknown
  misc_feature (1)..( 8): Result.005 file - promoters50/1535124
tttatttt

SEQ ID NO: 175021 - DNA, 8 bp, Unknown
  misc_feature (1)..( 8): Result.005 file - promoters50/1535124
tttattgt

SEQ ID NO: 175022 - DNA, 8 bp, Unknown
  misc_feature (1)..( 8): Result.005 file - promoters50/1535124
gattttgg

SEQ ID NO: 175023 - DNA, 8 bp, Unknown
  misc_feature (1)..( 8): Result.005 file - promoters50/1535124
tattttgg

SEQ ID NO: 175024 - DNA, 8 bp, Unknown
  misc_feature (1)..( 8): Result.005 file - promoters50/1535124
tattttta

SEQ ID NO: 175025 - DNA, 9 bp, Unknown
  misc_feature (1)..( 9): Result.005 file - promoters50/1535124
gcccattaa

SEQ ID NO: 175026 - DNA, 9 bp, Unknown
  misc_feature (1)..( 9): Result.005 file - promoters50/1535124
tttcattaa

SEQ ID NO: 175027 - DNA, 9 bp, Unknown
  misc_feature (1)..( 9): Result.005 file - promoters50/1535124
tttcattat

SEQ ID NO: 175028 - DNA, 8 bp, Unknown
  misc_feature (1)..( 8): Result.005 file - promoters50/1535145
tagattct

SEQ ID NO: 175029 - DNA, 8 bp, Unknown
  misc_feature (1)..( 8): Result.005 file - promoters50/1535145
tagattca

SEQ ID NO: 175030 - DNA, 8 bp, Unknown
  misc_feature (1)..( 8): Result.005 file - promoters50/1535145
gagagtca

SEQ ID NO: 175031 - DNA, 9 bp, Unknown
  misc_feature (1)..( 9): Result.005 file - promoters50/1537300
cgaggcttt

SEQ ID NO: 175032 - DNA, 9 bp, Unknown
  misc_feature (1)..( 9): Result.005 file - promoters50/1537300
agaggcttg

SEQ ID NO: 175033 - DNA, 9 bp, Unknown
  misc_feature (1)..( 9): Result.005 file - promoters50/1537300
agaggattg

SEQ ID NO: 175034 - DNA, 10 bp, Unknown
  misc_feature (1)..( 10): Result.005 file - promoters50/1537314
ataagaaaag

SEQ ID NO: 175035 - DNA, 10 bp, Unknown
  misc_feature (1)..( 10): Result.005 file - promoters50/1537314
tgaagaaaaa

SEQ ID NO: 175036 - DNA, 10 bp, Unknown
  misc_feature (1)..( 10): Result.005 file - promoters50/1537314
ctaataaaaa

SEQ ID NO: 175037 - DNA, 10 bp, Unknown
  misc_feature (1)..( 10): Result.005 file - promoters50/1537314
tgatgaaaca

SEQ ID NO: 175038 - DNA, 10 bp, Unknown
  misc_feature (1)..( 10): Result.005 file - promoters50/1537314
tgaagaaaaa

SEQ ID NO: 175039 - DNA, 10 bp, Unknown
  misc_feature (1)..( 10): Result.005 file - promoters50/1537314
ttgtgaaact

SEQ ID NO: 175040 - DNA, 17 bp, Unknown
  misc_feature (1)..( 17): Result.005 file - promoters50/1537314
atatttgattttgtttg

SEQ ID NO: 175041 - DNA, 17 bp, Unknown
  misc_feature (1)..( 17): Result.005 file - promoters50/1537314
attaaaatgtttgttgt

SEQ ID NO: 175042 - DNA, 17 bp, Unknown
  misc_feature (1)..( 17): Result.005 file - promoters50/1537314
ttgtttttttttgtaag

SEQ ID NO: 175043 - DNA, 17 bp, Unknown
  misc_feature (1)..( 17): Result.005 file - promoters50/1537314
aaaatataaattgtttg

SEQ ID NO: 175044 - DNA, 17 bp, Unknown
  misc_feature (1)..( 17): Result.005 file - promoters50/1537314
catcggagatttgttag

SEQ ID NO: 175045 - DNA, 17 bp, Unknown
  misc_feature (1)..( 17): Result.005 file - promoters50/1537314
ttcatctaatttgtttg

SEQ ID NO: 175046 - DNA, 9 bp, Unknown
  misc_feature (1)..( 9): Result.005 file - promoters50/1537314
ataaaatgc

SEQ ID NO: 175047 - DNA, 9 bp, Unknown
  misc_feature (1)..( 9): Result.005 file - promoters50/1537314
caaaaatgg

SEQ ID NO: 175048 - DNA, 9 bp, Unknown
  misc_feature (1)..( 9): Result.005 file - promoters50/1537314
tgaaaatgc

SEQ ID NO: 175049 - DNA, 9 bp, Unknown
  misc_feature (1)..( 9): Result.005 file - promoters50/1537314
aaaaaatgt

SEQ ID NO: 175050 - DNA, 10 bp, Unknown
  misc_feature (1)..( 10): Result.005 file - promoters50/1537314
aaaaacatgt

SEQ ID NO: 175051 - DNA, 10 bp, Unknown
  misc_feature (1)..( 10): Result.005 file - promoters50/1537314
aaaacaattt

SEQ ID NO: 175052 - DNA, 9 bp, Unknown
  misc_feature (1)..( 9): Result.005 file - promoters50/1537314
ttttataaa

SEQ ID NO: 175053 - DNA, 9 bp, Unknown
  misc_feature (1)..( 9): Result.005 file - promoters50/1537314
ttttaaaaa

SEQ ID NO: 175054 - DNA, 9 bp, Unknown
  misc_feature (1)..( 9): Result.005 file - promoters50/1537314
ttttttaaa

SEQ ID NO: 175055 - DNA, 9 bp, Unknown
  misc_feature (1)..( 9): Result.005 file - promoters50/1537314
tattataat

SEQ ID NO: 175056 - DNA, 9 bp, Unknown
  misc_feature (1)..( 9): Result.005 file - promoters50/1537314
aattaaaat

SEQ ID NO: 175057 - DNA, 9 bp, Unknown
  misc_feature (1)..( 9): Result.005 file - promoters50/1537314
ggttttaat

SEQ ID NO: 175058 - DNA, 11 bp, Unknown
  misc_feature (1)..( 11): Result.005 file - promoters50/1537314
ggataacgtgg

SEQ ID NO: 175059 - DNA, 11 bp, Unknown
  misc_feature (1)..( 11): Result.005 file - promoters50/1537314
aacaaacatgg

SEQ ID NO: 175060 - DNA, 11 bp, Unknown
  misc_feature (1)..( 11): Result.005 file - promoters50/1537314
ggattacgtgg

SEQ ID NO: 175061 - DNA, 11 bp, Unknown
  misc_feature (1)..( 11): Result.005 file - promoters50/1537314
taaaaacatgt

SEQ ID NO: 175062 - DNA, 11 bp, Unknown
  misc_feature (1)..( 11): Result.005 file - promoters50/1537314
gaaaaaaatgt

SEQ ID NO: 175063 - DNA, 10 bp, Unknown
  misc_feature (1)..( 10): Result.005 file - promoters50/1537314
caaaacaatt

SEQ ID NO: 175064 - DNA, 10 bp, Unknown
  misc_feature (1)..( 10): Result.005 file - promoters50/1537336
ctatatatct

SEQ ID NO: 175065 - DNA, 10 bp, Unknown
  misc_feature (1)..( 10): Result.005 file - promoters50/1537336
caatagatct

SEQ ID NO: 175066 - DNA, 10 bp, Unknown
  misc_feature (1)..( 10): Result.005 file - promoters50/1537336
ttgtatatca

SEQ ID NO: 175067 - DNA, 10 bp, Unknown
  misc_feature (1)..( 10): Result.005 file - promoters50/1537336
caaaagaaac

SEQ ID NO: 175068 - DNA, 10 bp, Unknown
  misc_feature (1)..( 10): Result.005 file - promoters50/1537336
agaaagaacg

SEQ ID NO: 175069 - DNA, 10 bp, Unknown
  misc_feature (1)..( 10): Result.005 file - promoters50/1537336
atatagatac

SEQ ID NO: 175070 - DNA, 10 bp, Unknown
  misc_feature (1)..( 10): Result.005 file - promoters50/1537336
acatatatct

SEQ ID NO: 175071 - DNA, 10 bp, Unknown
  misc_feature (1)..( 10): Result.005 file - promoters50/1537336
aagtatatat

SEQ ID NO: 175072 - DNA, 10 bp, Unknown
  misc_feature (1)..( 10): Result.005 file - promoters50/1537336
gcagaaattg

SEQ ID NO: 175073 - DNA, 10 bp, Unknown
  misc_feature (1)..( 10): Result.005 file - promoters50/1537336
agcgaatttg

SEQ ID NO: 175074 - DNA, 10 bp, Unknown
  misc_feature (1)..( 10): Result.005 file - promoters50/1537336
taagaatttg

SEQ ID NO: 175075 - DNA, 10 bp, Unknown
  misc_feature (1)..( 10): Result.005 file - promoters50/1537336
ttagagttta

SEQ ID NO: 175076 - DNA, 10 bp, Unknown
  misc_feature (1)..( 10): Result.005 file - promoters50/1537336
taaaaattta

SEQ ID NO: 175077 - DNA, 10 bp, Unknown
  misc_feature (1)..( 10): Result.005 file - promoters50/1537336
gtataattta

SEQ ID NO: 175078 - DNA, 8 bp, Unknown
  misc_feature (1)..( 8): Result.005 file - promoters50/1537456
cttccttt

SEQ ID NO: 175079 - DNA, 8 bp, Unknown
  misc_feature (1)..( 8): Result.005 file - promoters50/1537456
ctttcttc

SEQ ID NO: 175080 - DNA, 8 bp, Unknown
  misc_feature (1)..( 8): Result.005 file - promoters50/1537456
ctttcttt

SEQ ID NO: 175081 - DNA, 7 bp, Unknown
  misc_feature (1)..( 7): Result.005 file - promoters50/1537605
attaaaa

SEQ ID NO: 175082 - DNA, 7 bp, Unknown
  misc_feature (1)..( 7): Result.005 file - promoters50/1537605
atttaaa

SEQ ID NO: 175083 - DNA, 7 bp, Unknown
  misc_feature (1)..( 7): Result.005 file - promoters50/1537605
attaaat

SEQ ID NO: 175084 - DNA, 9 bp, Unknown
  misc_feature (1)..( 9): Result.005 file - promoters50/1537605
aaattatta

SEQ ID NO: 175085 - DNA, 9 bp, Unknown
  misc_feature (1)..( 9): Result.005 file - promoters50/1537605
ccattatta

SEQ ID NO: 175086 - DNA, 9 bp, Unknown
  misc_feature (1)..( 9): Result.005 file - promoters50/1537605
aaattataa

SEQ ID NO: 175087 - DNA, 7 bp, Unknown
  misc_feature (1)..( 7): Result.005 file - promoters50/1537605
cttttgt

SEQ ID NO: 175088 - DNA, 7 bp, Unknown
  misc_feature (1)..( 7): Result.005 file - promoters50/1537605
cttttga

SEQ ID NO: 175089 - DNA, 7 bp, Unknown
  misc_feature (1)..( 7): Result.005 file - promoters50/1537605
tttttgt

SEQ ID NO: 175090 - DNA, 12 bp, Unknown
  misc_feature (1)..( 12): Result.005 file - promoters50/1537605
cctagtgatcca

SEQ ID NO: 175091 - DNA, 12 bp, Unknown
  misc_feature (1)..( 12): Result.005 file - promoters50/1537605
cctagtaatctc

SEQ ID NO: 175092 - DNA, 12 bp, Unknown
  misc_feature (1)..( 12): Result.005 file - promoters50/1537605
attgataaactc

SEQ ID NO: 175093 - DNA, 9 bp, Unknown
  misc_feature (1)..( 9): Result.005 file - promoters50/1537617
tgtatgcat

SEQ ID NO: 175094 - DNA, 9 bp, Unknown
  misc_feature (1)..( 9): Result.005 file - promoters50/1537617
agtaagcat

SEQ ID NO: 175095 - DNA, 9 bp, Unknown
  misc_feature (1)..( 9): Result.005 file - promoters50/1537617
tgtatggtg

SEQ ID NO: 175096 - DNA, 10 bp, Unknown
  misc_feature (1)..( 10): Result.005 file - promoters50/1537617
tcaattttat

SEQ ID NO: 175097 - DNA, 10 bp, Unknown
  misc_feature (1)..( 10): Result.005 file - promoters50/1537617
tcaatcttat

SEQ ID NO: 175098 - DNA, 10 bp, Unknown
  misc_feature (1)..( 10): Result.005 file - promoters50/1537617
ttaattttta

SEQ ID NO: 175099 - DNA, 8 bp, Unknown
  misc_feature (1)..( 8): Result.005 file - promoters50/1537617
taacatta

SEQ ID NO: 175100 - DNA, 8 bp, Unknown
  misc_feature (1)..( 8): Result.005 file - promoters50/1537617
taaaattt

SEQ ID NO: 175101 - DNA, 8 bp, Unknown
  misc_feature (1)..( 8): Result.005 file - promoters50/1537617
ataaattt

SEQ ID NO: 175102 - DNA, 8 bp, Unknown
  misc_feature (1)..( 8): Result.005 file - promoters50/1537617
ttataaat

SEQ ID NO: 175103 - DNA, 8 bp, Unknown
  misc_feature (1)..( 8): Result.005 file - promoters50/1537617
gtattaat

SEQ ID NO: 175104 - DNA, 8 bp, Unknown
  misc_feature (1)..( 8): Result.005 file - promoters50/1537617
taattaaa

SEQ ID NO: 175105 - DNA, 7 bp, Unknown
  misc_feature (1)..( 7): Result.005 file - promoters50/1537617
attattt

SEQ ID NO: 175106 - DNA, 7 bp, Unknown
  misc_feature (1)..( 7): Result.005 file - promoters50/1537617
attcttt

SEQ ID NO: 175107 - DNA, 7 bp, Unknown
  misc_feature (1)..( 7): Result.005 file - promoters50/1537617
tttattt

SEQ ID NO: 175108 - DNA, 8 bp, Unknown
  misc_feature (1)..( 8): Result.005 file - promoters50/1537617
tctcttaa

SEQ ID NO: 175109 - DNA, 8 bp, Unknown
  misc_feature (1)..( 8): Result.005 file - promoters50/1537617
tatcttaa

SEQ ID NO: 175110 - DNA, 8 bp, Unknown
  misc_feature (1)..( 8): Result.005 file - promoters50/1537617
tattttat

SEQ ID NO: 175111 - DNA, 9 bp, Unknown
  misc_feature (1)..( 9): Result.005 file - promoters50/1537617
aatcaatag

SEQ ID NO: 175112 - DNA, 9 bp, Unknown
  misc_feature (1)..( 9): Result.005 file - promoters50/1537617
aataaatag

SEQ ID NO: 175113 - DNA, 9 bp, Unknown
  misc_feature (1)..( 9): Result.005 file - promoters50/1537617
gatatataa

SEQ ID NO: 175114 - DNA, 7 bp, Unknown
  misc_feature (1)..( 7): Result.005 file - promoters50/1538641
ataaaat

SEQ ID NO: 175115 - DNA, 7 bp, Unknown
  misc_feature (1)..( 7): Result.005 file - promoters50/1538641
ataaaat

SEQ ID NO: 175116 - DNA, 7 bp, Unknown
  misc_feature (1)..( 7): Result.005 file - promoters50/1538641
gtaaaat

SEQ ID NO: 175117 - DNA, 9 bp, Unknown
  misc_feature (1)..( 9): Result.005 file - promoters50/1538641
atcaattct

SEQ ID NO: 175118 - DNA, 9 bp, Unknown
  misc_feature (1)..( 9): Result.005 file - promoters50/1538641
atctatttt

SEQ ID NO: 175119 - DNA, 9 bp, Unknown
  misc_feature (1)..( 9): Result.005 file - promoters50/1538641
aactatttt

SEQ ID NO: 175120 - DNA, 10 bp, Unknown
  misc_feature (1)..( 10): Result.005 file - promoters50/1538782
aatagaaagt

SEQ ID NO: 175121 - DNA, 10 bp, Unknown
  misc_feature (1)..( 10): Result.005 file - promoters50/1538782
tatataaaga

SEQ ID NO: 175122 - DNA, 10 bp, Unknown
  misc_feature (1)..( 10): Result.005 file - promoters50/1538782
aatataaaac

SEQ ID NO: 175123 - DNA, 10 bp, Unknown
  misc_feature (1)..( 10): Result.005 file - promoters50/1538782
tttataaaac

SEQ ID NO: 175124 - DNA, 10 bp, Unknown
  misc_feature (1)..( 10): Result.005 file - promoters50/1538782
catataaatt

SEQ ID NO: 175125 - DNA, 10 bp, Unknown
  misc_feature (1)..( 10): Result.005 file - promoters50/1538782
catatatact

SEQ ID NO: 175126 - DNA, 7 bp, Unknown
  misc_feature (1)..( 7): Result.005 file - promoters50/1538804
gtttgag

SEQ ID NO: 175127 - DNA, 7 bp, Unknown
  misc_feature (1)..( 7): Result.005 file - promoters50/1538804
gttagag

SEQ ID NO: 175128 - DNA, 7 bp, Unknown
  misc_feature (1)..( 7): Result.005 file - promoters50/1538804
gttggag

SEQ ID NO: 175129 - DNA, 8 bp, Unknown
  misc_feature (1)..( 8): Result.005 file - promoters50/1538843
aaaatcaa

SEQ ID NO: 175130 - DNA, 8 bp, Unknown
  misc_feature (1)..( 8): Result.005 file - promoters50/1538843
caaaacaa

SEQ ID NO: 175131 - DNA, 8 bp, Unknown
  misc_feature (1)..( 8): Result.005 file - promoters50/1538843
caaaacga

SEQ ID NO: 175132 - DNA, 11 bp, Unknown
  misc_feature (1)..( 11): Result.005 file - promoters50/1538947
tattgaaatat

SEQ ID NO: 175133 - DNA, 11 bp, Unknown
  misc_feature (1)..( 11): Result.005 file - promoters50/1538947
aatttaaattg

SEQ ID NO: 175134 - DNA, 11 bp, Unknown
  misc_feature (1)..( 11): Result.005 file - promoters50/1538947
aatctaatcag

SEQ ID NO: 175135 - DNA, 11 bp, Unknown
  misc_feature (1)..( 11): Result.005 file - promoters50/1538947
agtttaaattg

SEQ ID NO: 175136 - DNA, 11 bp, Unknown
  misc_feature (1)..( 11): Result.005 file - promoters50/1538947
tttttaaacga

SEQ ID NO: 175137 - DNA, 8 bp, Unknown
  misc_feature (1)..( 8): Result.005 file - promoters50/1538947
agaaaaga

SEQ ID NO: 175138 - DNA, 8 bp, Unknown
  misc_feature (1)..( 8): Result.005 file - promoters50/1538947
aaaaaaga

SEQ ID NO: 175139 - DNA, 8 bp, Unknown
  misc_feature (1)..( 8): Result.005 file - promoters50/1538947
gaaaaagt

SEQ ID NO: 175140 - DNA, 8 bp, Unknown
  misc_feature (1)..( 8): Result.005 file - promoters50/1538947
gaaaaagt

SEQ ID NO: 175141 - DNA, 8 bp, Unknown
  misc_feature (1)..( 8): Result.005 file - promoters50/1538947
gaacaaga

SEQ ID NO: 175142 - DNA, 12 bp, Unknown
  misc_feature (1)..( 12): Result.005 file - promoters50/1538947
acaaattattag

SEQ ID NO: 175143 - DNA, 12 bp, Unknown
  misc_feature (1)..( 12): Result.005 file - promoters50/1538947
acaatttattga

SEQ ID NO: 175144 - DNA, 12 bp, Unknown
  misc_feature (1)..( 12): Result.005 file - promoters50/1538947
acaaatcctagt

SEQ ID NO: 175145 - DNA, 13 bp, Unknown
  misc_feature (1)..( 13): Result.005 file - promoters50/1538947
caaactttcttga

SEQ ID NO: 175146 - DNA, 13 bp, Unknown
  misc_feature (1)..( 13): Result.005 file - promoters50/1538947
tgaactttctccg

SEQ ID NO: 175147 - DNA, 10 bp, Unknown
  misc_feature (1)..( 10): Result.005 file - promoters50/1557475
caaatttttt

SEQ ID NO: 175148 - DNA, 10 bp, Unknown
  misc_feature (1)..( 10): Result.005 file - promoters50/1557475
caattttttt

SEQ ID NO: 175149 - DNA, 10 bp, Unknown
  misc_feature (1)..( 10): Result.005 file - promoters50/1557475
aaaatttaca

SEQ ID NO: 175150 - DNA, 10 bp, Unknown
  misc_feature (1)..( 10): Result.005 file - promoters50/1557475
gtatttttta

SEQ ID NO: 175151 - DNA, 11 bp, Unknown
  misc_feature (1)..( 11): Result.005 file - promoters50/1557475
tactttatttt

SEQ ID NO: 175152 - DNA, 11 bp, Unknown
  misc_feature (1)..( 11): Result.005 file - promoters50/1557475
ttcttagtttc

SEQ ID NO: 175153 - DNA, 10 bp, Unknown
  misc_feature (1)..( 10): Result.005 file - promoters50/1557475
attaaaatac

SEQ ID NO: 175154 - DNA, 10 bp, Unknown
  misc_feature (1)..( 10): Result.005 file - promoters50/1557475
gtaaaaatac

SEQ ID NO: 175155 - DNA, 11 bp, Unknown
  misc_feature (1)..( 11): Result.005 file - promoters50/1557475
attaataatcc

SEQ ID NO: 175156 - DNA, 11 bp, Unknown
  misc_feature (1)..( 11): Result.005 file - promoters50/1557475
gttaaaaacta

SEQ ID NO: 175157 - DNA, 11 bp, Unknown
  misc_feature (1)..( 11): Result.005 file - promoters50/1557475
ttcaaaaatta

SEQ ID NO: 175158 - DNA, 11 bp, Unknown
  misc_feature (1)..( 11): Result.005 file - promoters50/1557475
ttcaaaaatct

SEQ ID NO: 175159 - DNA, 15 bp, Unknown
  misc_feature (1)..( 15): Result.005 file - promoters50/1557475
cgaaaaaacaaaaac

SEQ ID NO: 175160 - DNA, 15 bp, Unknown
  misc_feature (1)..( 15): Result.005 file - promoters50/1557475
cgacaaaacaaaaag

SEQ ID NO: 175161 - DNA, 15 bp, Unknown
  misc_feature (1)..( 15): Result.005 file - promoters50/1557475
cgccaaaccaaaaac

SEQ ID NO: 175162 - DNA, 15 bp, Unknown
  misc_feature (1)..( 15): Result.005 file - promoters50/1557475
taataaaacaaccag

SEQ ID NO: 175163 - DNA, 15 bp, Unknown
  misc_feature (1)..( 15): Result.005 file - promoters50/1557475
aagctgtccacaaat

SEQ ID NO: 175164 - DNA, 15 bp, Unknown
  misc_feature (1)..( 15): Result.005 file - promoters50/1557475
acccgaaccgaaatt

SEQ ID NO: 175165 - DNA, 9 bp, Unknown
  misc_feature (1)..( 9): Result.005 file - promoters50/1557486
aaaaatttc

SEQ ID NO: 175166 - DNA, 9 bp, Unknown
  misc_feature (1)..( 9): Result.005 file - promoters50/1557486
aaagatttc

SEQ ID NO: 175167 - DNA, 9 bp, Unknown
  misc_feature (1)..( 9): Result.005 file - promoters50/1557486
aaatattct

SEQ ID NO: 175168 - DNA, 8 bp, Unknown
  misc_feature (1)..( 8): Result.005 file - promoters50/1557486
attatatg

SEQ ID NO: 175169 - DNA, 8 bp, Unknown
  misc_feature (1)..( 8): Result.005 file - promoters50/1557486
tttatatg

SEQ ID NO: 175170 - DNA, 9 bp, Unknown
  misc_feature (1)..( 9): Result.005 file - promoters50/1557486
attaataca

SEQ ID NO: 175171 - DNA, 11 bp, Unknown
  misc_feature (1)..( 11): Result.005 file - promoters50/1557486
catctaagaaa

SEQ ID NO: 175172 - DNA, 11 bp, Unknown
  misc_feature (1)..( 11): Result.005 file - promoters50/1557486
tctctgagatg

SEQ ID NO: 175173 - DNA, 11 bp, Unknown
  misc_feature (1)..( 11): Result.005 file - promoters50/1557486
ccaataaaaaa

SEQ ID NO: 175174 - DNA, 11 bp, Unknown
  misc_feature (1)..( 11): Result.005 file - promoters50/1557486
tctctgatctt

SEQ ID NO: 175175 - DNA, 7 bp, Unknown
  misc_feature (1)..( 7): Result.005 file - promoters50/1557486
taagaaa

SEQ ID NO: 175176 - DNA, 7 bp, Unknown
  misc_feature (1)..( 7): Result.005 file - promoters50/1557486
aaagaaa

SEQ ID NO: 175177 - DNA, 7 bp, Unknown
  misc_feature (1)..( 7): Result.005 file - promoters50/1557486
taaaaaa

SEQ ID NO: 175178 - DNA, 13 bp, Unknown
  misc_feature (1)..( 13): Result.005 file - promoters50/1557486
ttataatttaacc

SEQ ID NO: 175179 - DNA, 13 bp, Unknown
  misc_feature (1)..( 13): Result.005 file - promoters50/1557486
tgatacttttttt

SEQ ID NO: 175180 - DNA, 13 bp, Unknown
  misc_feature (1)..( 13): Result.005 file - promoters50/1557486
ttatgatttccct

SEQ ID NO: 175181 - DNA, 13 bp, Unknown
  misc_feature (1)..( 13): Result.005 file - promoters50/1557486
tatgattttctga

SEQ ID NO: 175182 - DNA, 10 bp, Unknown
  misc_feature (1)..( 10): Result.005 file - promoters50/1557486
ttttctgttt

SEQ ID NO: 175183 - DNA, 10 bp, Unknown
  misc_feature (1)..( 10): Result.005 file - promoters50/1557486
ttttcttcag

SEQ ID NO: 175184 - DNA, 10 bp, Unknown
  misc_feature (1)..( 10): Result.005 file - promoters50/1557486
ttttatgttt

SEQ ID NO: 175185 - DNA, 10 bp, Unknown
  misc_feature (1)..( 10): Result.005 file - promoters50/1557486
ttttctgttt

SEQ ID NO: 175186 - DNA, 10 bp, Unknown
  misc_feature (1)..( 10): Result.005 file - promoters50/1557486
tcttcagttt

SEQ ID NO: 175187 - DNA, 10 bp, Unknown
  misc_feature (1)..( 10): Result.005 file - promoters50/1557486
ttttatgttt

SEQ ID NO: 175188 - DNA, 8 bp, Unknown
  misc_feature (1)..( 8): Result.005 file - promoters50/1557486
aaacaaaa

SEQ ID NO: 175189 - DNA, 8 bp, Unknown
  misc_feature (1)..( 8): Result.005 file - promoters50/1557486
taacaaaa

SEQ ID NO: 175190 - DNA, 8 bp, Unknown
  misc_feature (1)..( 8): Result.005 file - promoters50/1557486
taataaag

SEQ ID NO: 175191 - DNA, 10 bp, Unknown
  misc_feature (1)..( 10): Result.005 file - promoters50/1557486
tcttattcta

SEQ ID NO: 175192 - DNA, 10 bp, Unknown
  misc_feature (1)..( 10): Result.005 file - promoters50/1557486
tctcatttat

SEQ ID NO: 175193 - DNA, 10 bp, Unknown
  misc_feature (1)..( 10): Result.005 file - promoters50/1557486
cctcatatat

SEQ ID NO: 175194 - DNA, 8 bp, Unknown
  misc_feature (1)..( 8): Result.005 file - promoters50/1557486
tttctgac

SEQ ID NO: 175195 - DNA, 8 bp, Unknown
  misc_feature (1)..( 8): Result.005 file - promoters50/1557486
cctctgac

SEQ ID NO: 175196 - DNA, 8 bp, Unknown
  misc_feature (1)..( 8): Result.005 file - promoters50/1557486
tttatgat

SEQ ID NO: 175197 - DNA, 7 bp, Unknown
  misc_feature (1)..( 7): Result.005 file - promoters50/1557486
gatttcc

SEQ ID NO: 175198 - DNA, 7 bp, Unknown
  misc_feature (1)..( 7): Result.005 file - promoters50/1557486
gatttcg

SEQ ID NO: 175199 - DNA, 7 bp, Unknown
  misc_feature (1)..( 7): Result.005 file - promoters50/1557486
aatttcg

SEQ ID NO: 175200 - DNA, 11 bp, Unknown
  misc_feature (1)..( 11): Result.005 file - promoters50/1557501
aattatttatc

SEQ ID NO: 175201 - DNA, 11 bp, Unknown
  misc_feature (1)..( 11): Result.005 file - promoters50/1557501
atctatgtata

SEQ ID NO: 175202 - DNA, 11 bp, Unknown
  misc_feature (1)..( 11): Result.005 file - promoters50/1557501
gatcattgatc

SEQ ID NO: 175203 - DNA, 11 bp, Unknown
  misc_feature (1)..( 11): Result.005 file - promoters50/1557501
atgtatatatg

SEQ ID NO: 175204 - DNA, 11 bp, Unknown
  misc_feature (1)..( 11): Result.005 file - promoters50/1557501
atcaatttttt

SEQ ID NO: 175205 - DNA, 11 bp, Unknown
  misc_feature (1)..( 11): Result.005 file - promoters50/1557501
atcaattatca

SEQ ID NO: 175206 - DNA, 10 bp, Unknown
  misc_feature (1)..( 10): Result.005 file - promoters50/1557501
gtttaacaaa

SEQ ID NO: 175207 - DNA, 10 bp, Unknown
  misc_feature (1)..( 10): Result.005 file - promoters50/1557501
aaataaaaaa

SEQ ID NO: 175208 - DNA, 10 bp, Unknown
  misc_feature (1)..( 10): Result.005 file - promoters50/1557501
caataaaaaa

SEQ ID NO: 175209 - DNA, 10 bp, Unknown
  misc_feature (1)..( 10): Result.005 file - promoters50/1557501
gtttgacaaa

SEQ ID NO: 175210 - DNA, 11 bp, Unknown
  misc_feature (1)..( 11): Result.005 file - promoters50/1557501
gaagaaagaaa

SEQ ID NO: 175211 - DNA, 11 bp, Unknown
  misc_feature (1)..( 11): Result.005 file - promoters50/1557501
gccaaaataaa

SEQ ID NO: 175212 - DNA, 15 bp, Unknown
  misc_feature (1)..( 15): Result.005 file - promoters50/1557501
tttatcaaagagttt

SEQ ID NO: 175213 - DNA, 15 bp, Unknown
  misc_feature (1)..( 15): Result.005 file - promoters50/1557501
attatcaaggttacc

SEQ ID NO: 175214 - DNA, 15 bp, Unknown
  misc_feature (1)..( 15): Result.005 file - promoters50/1557501
ttaatcaaacagttt

SEQ ID NO: 175215 - DNA, 15 bp, Unknown
  misc_feature (1)..( 15): Result.005 file - promoters50/1557501
tttctcattgatttc

SEQ ID NO: 175216 - DNA, 15 bp, Unknown
  misc_feature (1)..( 15): Result.005 file - promoters50/1557501
gttctcaagagaaaa

SEQ ID NO: 175217 - DNA, 15 bp, Unknown
  misc_feature (1)..( 15): Result.005 file - promoters50/1557501
ataatcaatgaatgt

SEQ ID NO: 175218 - DNA, 14 bp, Unknown
  misc_feature (1)..( 14): Result.005 file - promoters50/1557501
acttttctagcaaa

SEQ ID NO: 175219 - DNA, 14 bp, Unknown
  misc_feature (1)..( 14): Result.005 file - promoters50/1557501
ggatttctagatct

SEQ ID NO: 175220 - DNA, 14 bp, Unknown
  misc_feature (1)..( 14): Result.005 file - promoters50/1557501
gtttttctttcttt

SEQ ID NO: 175221 - DNA, 14 bp, Unknown
  misc_feature (1)..( 14): Result.005 file - promoters50/1557501
ttgtttcttctcct

SEQ ID NO: 175222 - DNA, 14 bp, Unknown
  misc_feature (1)..( 14): Result.005 file - promoters50/1557501
gtttttgtttgttt

SEQ ID NO: 175223 - DNA, 14 bp, Unknown
  misc_feature (1)..( 14): Result.005 file - promoters50/1557501
ctatttctcttgtt

SEQ ID NO: 175224 - DNA, 9 bp, Unknown
  misc_feature (1)..( 9): Result.005 file - promoters50/1557561
ttttaattg

SEQ ID NO: 175225 - DNA, 9 bp, Unknown
  misc_feature (1)..( 9): Result.005 file - promoters50/1557561
ttttaattt

SEQ ID NO: 175226 - DNA, 9 bp, Unknown
  misc_feature (1)..( 9): Result.005 file - promoters50/1557561
gggtaattt

SEQ ID NO: 175227 - DNA, 8 bp, Unknown
  misc_feature (1)..( 8): Result.005 file - promoters50/1557561
attgtaaa

SEQ ID NO: 175228 - DNA, 8 bp, Unknown
  misc_feature (1)..( 8): Result.005 file - promoters50/1557561
tatgtaaa

SEQ ID NO: 175229 - DNA, 8 bp, Unknown
  misc_feature (1)..( 8): Result.005 file - promoters50/1557561
attttaag

SEQ ID NO: 175230 - DNA, 10 bp, Unknown
  misc_feature (1)..( 10): Result.005 file - promoters50/1557561
ttttgggtta

SEQ ID NO: 175231 - DNA, 10 bp, Unknown
  misc_feature (1)..( 10): Result.005 file - promoters50/1557561
ttttcggtac

SEQ ID NO: 175232 - DNA, 10 bp, Unknown
  misc_feature (1)..( 10): Result.005 file - promoters50/1557561
cattcgttac

SEQ ID NO: 175233 - DNA, 12 bp, Unknown
  misc_feature (1)..( 12): Result.005 file - promoters50/1557565
ctattaattatg

SEQ ID NO: 175234 - DNA, 12 bp, Unknown
  misc_feature (1)..( 12): Result.005 file - promoters50/1557565
aaattaattatg

SEQ ID NO: 175235 - DNA, 12 bp, Unknown
  misc_feature (1)..( 12): Result.005 file - promoters50/1557565
agtttatttata

SEQ ID NO: 175236 - DNA, 12 bp, Unknown
  misc_feature (1)..( 12): Result.005 file - promoters50/1557565
aaaataacgtca

SEQ ID NO: 175237 - DNA, 7 bp, Unknown
  misc_feature (1)..( 7): Result.005 file - promoters50/1557573
ttaaaaa

SEQ ID NO: 175238 - DNA, 7 bp, Unknown
  misc_feature (1)..( 7): Result.005 file - promoters50/1557573
ttataaa

SEQ ID NO: 175239 - DNA, 7 bp, Unknown
  misc_feature (1)..( 7): Result.005 file - promoters50/1557573
ttaaaag

SEQ ID NO: 175240 - DNA, 9 bp, Unknown
  misc_feature (1)..( 9): Result.005 file - promoters50/1557573
attttagta

SEQ ID NO: 175241 - DNA, 9 bp, Unknown
  misc_feature (1)..( 9): Result.005 file - promoters50/1557573
attgtagtc

SEQ ID NO: 175242 - DNA, 9 bp, Unknown
  misc_feature (1)..( 9): Result.005 file - promoters50/1557573
tatgtggtc

SEQ ID NO: 175243 - DNA, 8 bp, Unknown
  misc_feature (1)..( 8): Result.005 file - promoters50/1557573
gtatattc

SEQ ID NO: 175244 - DNA, 8 bp, Unknown
  misc_feature (1)..( 8): Result.005 file - promoters50/1557573
gtagattt

SEQ ID NO: 175245 - DNA, 8 bp, Unknown
  misc_feature (1)..( 8): Result.005 file - promoters50/1557573
cgagattt

SEQ ID NO: 175246 - DNA, 8 bp, Unknown
  misc_feature (1)..( 8): Result.005 file - promoters50/1557573
gtatttta

SEQ ID NO: 175247 - DNA, 8 bp, Unknown
  misc_feature (1)..( 8): Result.005 file - promoters50/1557573
atattttc

SEQ ID NO: 175248 - DNA, 8 bp, Unknown
  misc_feature (1)..( 8): Result.005 file - promoters50/1557573
ataatttc

SEQ ID NO: 175249 - DNA, 7 bp, Unknown
  misc_feature (1)..( 7): Result.005 file - promoters50/1557573
taatttt

SEQ ID NO: 175250 - DNA, 7 bp, Unknown
  misc_feature (1)..( 7): Result.005 file - promoters50/1557573
taatttt

SEQ ID NO: 175251 - DNA, 7 bp, Unknown
  misc_feature (1)..( 7): Result.005 file - promoters50/1557573
taatttc

SEQ ID NO: 175252 - DNA, 13 bp, Unknown
  misc_feature (1)..( 13): Result.005 file - promoters50/1557584
taacaaataaagt

SEQ ID NO: 175253 - DNA, 13 bp, Unknown
  misc_feature (1)..( 13): Result.005 file - promoters50/1557584
aacagaataaaaa

SEQ ID NO: 175254 - DNA, 14 bp, Unknown
  misc_feature (1)..( 14): Result.005 file - promoters50/1557584
tttgaaatataaat

SEQ ID NO: 175255 - DNA, 14 bp, Unknown
  misc_feature (1)..( 14): Result.005 file - promoters50/1557584
ttggatttataaat

SEQ ID NO: 175256 - DNA, 14 bp, Unknown
  misc_feature (1)..( 14): Result.005 file - promoters50/1557584
ttaatgatataatc

SEQ ID NO: 175257 - DNA, 14 bp, Unknown
  misc_feature (1)..( 14): Result.005 file - promoters50/1557584
tttaaaatatattt

SEQ ID NO: 175258 - DNA, 8 bp, Unknown
  misc_feature (1)..( 8): Result.005 file - promoters50/1557584
gaaataaa

SEQ ID NO: 175259 - DNA, 8 bp, Unknown
  misc_feature (1)..( 8): Result.005 file - promoters50/1557584
agaataaa

SEQ ID NO: 175260 - DNA, 8 bp, Unknown
  misc_feature (1)..( 8): Result.005 file - promoters50/1557584
aaaataat

SEQ ID NO: 175261 - DNA, 9 bp, Unknown
  misc_feature (1)..( 9): Result.005 file - promoters50/1557584
taaatgaaa

SEQ ID NO: 175262 - DNA, 9 bp, Unknown
  misc_feature (1)..( 9): Result.005 file - promoters50/1557584
caaaataca

SEQ ID NO: 175263 - DNA, 9 bp, Unknown
  misc_feature (1)..( 9): Result.005 file - promoters50/1557584
aaaaacagt

SEQ ID NO: 175264 - DNA, 14 bp, Unknown
  misc_feature (1)..( 14): Result.005 file - promoters50/1557584
ttttttatacaaaa

SEQ ID NO: 175265 - DNA, 14 bp, Unknown
  misc_feature (1)..( 14): Result.005 file - promoters50/1557584
tttgaaatataaat

SEQ ID NO: 175266 - DNA, 14 bp, Unknown
  misc_feature (1)..( 14): Result.005 file - promoters50/1557584
aacagaataaaaac

SEQ ID NO: 175267 - DNA, 14 bp, Unknown
  misc_feature (1)..( 14): Result.005 file - promoters50/1557584
ttggatttataaat

SEQ ID NO: 175268 - DNA, 14 bp, Unknown
  misc_feature (1)..( 14): Result.005 file - promoters50/1557584
ttaatgatataatc

SEQ ID NO: 175269 - DNA, 14 bp, Unknown
  misc_feature (1)..( 14): Result.005 file - promoters50/1557584
tttaaaatatattt

SEQ ID NO: 175270 - DNA, 12 bp, Unknown
  misc_feature (1)..( 12): Result.005 file - promoters50/1557595
aaatattaggaa

SEQ ID NO: 175271 - DNA, 12 bp, Unknown
  misc_feature (1)..( 12): Result.005 file - promoters50/1557595
aaattttaggaa

SEQ ID NO: 175272 - DNA, 12 bp, Unknown
  misc_feature (1)..( 12): Result.005 file - promoters50/1557595
taatattattat

SEQ ID NO: 175273 - DNA, 12 bp, Unknown
  misc_feature (1)..( 12): Result.005 file - promoters50/1557595
ctattttaacgg

SEQ ID NO: 175274 - DNA, 9 bp, Unknown
  misc_feature (1)..( 9): Result.005 file - promoters50/1557595
aagaagata

SEQ ID NO: 175275 - DNA, 9 bp, Unknown
  misc_feature (1)..( 9): Result.005 file - promoters50/1557595
aagaaaata

SEQ ID NO: 175276 - DNA, 9 bp, Unknown
  misc_feature (1)..( 9): Result.005 file - promoters50/1557595
tagagaatt

SEQ ID NO: 175277 - DNA, 9 bp, Unknown
  misc_feature (1)..( 9): Result.005 file - promoters50/1557595
aagaagaag

SEQ ID NO: 175278 - DNA, 10 bp, Unknown
  misc_feature (1)..( 10): Result.005 file - promoters50/1557606
ggttgcaaaa

SEQ ID NO: 175279 - DNA, 10 bp, Unknown
  misc_feature (1)..( 10): Result.005 file - promoters50/1557606
ttttgtaaat

SEQ ID NO: 175280 - DNA, 10 bp, Unknown
  misc_feature (1)..( 10): Result.005 file - promoters50/1557606
tattgcaatc

SEQ ID NO: 175281 - DNA, 10 bp, Unknown
  misc_feature (1)..( 10): Result.005 file - promoters50/1557606
agttgcagaa

SEQ ID NO: 175282 - DNA, 10 bp, Unknown
  misc_feature (1)..( 10): Result.005 file - promoters50/1557606
tatttcaagt

SEQ ID NO: 175283 - DNA, 10 bp, Unknown
  misc_feature (1)..( 10): Result.005 file - promoters50/1557606
ttgtgtaaat

SEQ ID NO: 175284 - DNA, 8 bp, Unknown
  misc_feature (1)..( 8): Result.005 file - promoters50/1557618
ataagatc

SEQ ID NO: 175285 - DNA, 8 bp, Unknown
  misc_feature (1)..( 8): Result.005 file - promoters50/1557618
ttaagatc

SEQ ID NO: 175286 - DNA, 8 bp, Unknown
  misc_feature (1)..( 8): Result.005 file - promoters50/1557618
atacgatg

SEQ ID NO: 175287 - DNA, 9 bp, Unknown
  misc_feature (1)..( 9): Result.005 file - promoters50/1557618
atttatttt

SEQ ID NO: 175288 - DNA, 9 bp, Unknown
  misc_feature (1)..( 9): Result.005 file - promoters50/1557618
atttttttt

SEQ ID NO: 175289 - DNA, 9 bp, Unknown
  misc_feature (1)..( 9): Result.005 file - promoters50/1557618
atttatcag

SEQ ID NO: 175290 - DNA, 6 bp, Unknown
  misc_feature (1)..( 6): Result.005 file - promoters50/1557618
tttctt

SEQ ID NO: 175291 - DNA, 6 bp, Unknown
  misc_feature (1)..( 6): Result.005 file - promoters50/1557618
tttctt

SEQ ID NO: 175292 - DNA, 6 bp, Unknown
  misc_feature (1)..( 6): Result.005 file - promoters50/1557618
tttctt

SEQ ID NO: 175293 - DNA, 9 bp, Unknown
  misc_feature (1)..( 9): Result.005 file - promoters50/1557618
actatcaat

SEQ ID NO: 175294 - DNA, 9 bp, Unknown
  misc_feature (1)..( 9): Result.005 file - promoters50/1557618
aaaatcaat

SEQ ID NO: 175295 - DNA, 9 bp, Unknown
  misc_feature (1)..( 9): Result.005 file - promoters50/1557618
aaaatcaaa

SEQ ID NO: 175296 - DNA, 8 bp, Unknown
  misc_feature (1)..( 8): Result.005 file - promoters50/1557618
gtgtttaa

SEQ ID NO: 175297 - DNA, 8 bp, Unknown
  misc_feature (1)..( 8): Result.005 file - promoters50/1557618
gtgtttaa

SEQ ID NO: 175298 - DNA, 8 bp, Unknown
  misc_feature (1)..( 8): Result.005 file - promoters50/1557618
ttgtttat

SEQ ID NO: 175299 - DNA, 7 bp, Unknown
  misc_feature (1)..( 7): Result.005 file - promoters50/1557618
ttttttc

SEQ ID NO: 175300 - DNA, 7 bp, Unknown
  misc_feature (1)..( 7): Result.005 file - promoters50/1557618
tttcttc

SEQ ID NO: 175301 - DNA, 7 bp, Unknown
  misc_feature (1)..( 7): Result.005 file - promoters50/1557618
tttcttg

SEQ ID NO: 175302 - DNA, 9 bp, Unknown
  misc_feature (1)..( 9): Result.005 file - promoters50/1557618
aagattaat

SEQ ID NO: 175303 - DNA, 9 bp, Unknown
  misc_feature (1)..( 9): Result.005 file - promoters50/1557618
aagagtaat

SEQ ID NO: 175304 - DNA, 9 bp, Unknown
  misc_feature (1)..( 9): Result.005 file - promoters50/1557618
tcgattaaa

SEQ ID NO: 175305 - DNA, 10 bp, Unknown
  misc_feature (1)..( 10): Result.005 file - promoters50/1557648
cgatttgtag

SEQ ID NO: 175306 - DNA, 10 bp, Unknown
  misc_feature (1)..( 10): Result.005 file - promoters50/1557648
aaattggtag

SEQ ID NO: 175307 - DNA, 10 bp, Unknown
  misc_feature (1)..( 10): Result.005 file - promoters50/1557648
aaatcggtca

SEQ ID NO: 175308 - DNA, 8 bp, Unknown
  misc_feature (1)..( 8): Result.005 file - promoters50/1557648
gtagaatt

SEQ ID NO: 175309 - DNA, 8 bp, Unknown
  misc_feature (1)..( 8): Result.005 file - promoters50/1557648
gtacaatc

SEQ ID NO: 175310 - DNA, 8 bp, Unknown
  misc_feature (1)..( 8): Result.005 file - promoters50/1557648
gtattaca

SEQ ID NO: 175311 - DNA, 11 bp, Unknown
  misc_feature (1)..( 11): Result.005 file - promoters50/1557648
taaatagtatc

SEQ ID NO: 175312 - DNA, 11 bp, Unknown
  misc_feature (1)..( 11): Result.005 file - promoters50/1557648
aatttagaatc

SEQ ID NO: 175313 - DNA, 11 bp, Unknown
  misc_feature (1)..( 11): Result.005 file - promoters50/1557648
aattttgaacg

SEQ ID NO: 175314 - DNA, 17 bp, Unknown
  misc_feature (1)..( 17): Result.005 file - promoters50/1557648
ttaaatatttaaatatt

SEQ ID NO: 175315 - DNA, 17 bp, Unknown
  misc_feature (1)..( 17): Result.005 file - promoters50/1557648
cggttatagaaaacatt

SEQ ID NO: 175316 - DNA, 17 bp, Unknown
  misc_feature (1)..( 17): Result.005 file - promoters50/1557648
gagagaaaaaaaacaaa

SEQ ID NO: 175317 - DNA, 18 bp, Unknown
  misc_feature (1)..( 18): Result.005 file - promoters50/1557648
aaagaaaagaaaatgata

SEQ ID NO: 175318 - DNA, 9 bp, Unknown
  misc_feature (1)..( 9): Result.005 file - promoters50/1557648
aaatctcac

SEQ ID NO: 175319 - DNA, 9 bp, Unknown
  misc_feature (1)..( 9): Result.005 file - promoters50/1557648
cattctcac

SEQ ID NO: 175320 - DNA, 9 bp, Unknown
  misc_feature (1)..( 9): Result.005 file - promoters50/1557648
caatatcaa

SEQ ID NO: 175321 - DNA, 9 bp, Unknown
  misc_feature (1)..( 9): Result.005 file - promoters50/1557648
caatattgg

SEQ ID NO: 175322 - DNA, 8 bp, Unknown
  misc_feature (1)..( 8): Result.005 file - promoters50/1557648
aaataaaa

SEQ ID NO: 175323 - DNA, 8 bp, Unknown
  misc_feature (1)..( 8): Result.005 file - promoters50/1557648
aaagaaat

SEQ ID NO: 175324 - DNA, 8 bp, Unknown
  misc_feature (1)..( 8): Result.005 file - promoters50/1557648
aaaaaaaa

SEQ ID NO: 175325 - DNA, 8 bp, Unknown
  misc_feature (1)..( 8): Result.005 file - promoters50/1557648
aaagaaaa

SEQ ID NO: 175326 - DNA, 7 bp, Unknown
  misc_feature (1)..( 7): Result.005 file - promoters50/1557648
aaaatga

SEQ ID NO: 175327 - DNA, 7 bp, Unknown
  misc_feature (1)..( 7): Result.005 file - promoters50/1557648
aaactga

SEQ ID NO: 175328 - DNA, 7 bp, Unknown
  misc_feature (1)..( 7): Result.005 file - promoters50/1557648
aaaatga

SEQ ID NO: 175329 - DNA, 8 bp, Unknown
  misc_feature (1)..( 8): Result.005 file - promoters50/1557648
aaaattga

SEQ ID NO: 175330 - DNA, 8 bp, Unknown
  misc_feature (1)..( 8): Result.005 file - promoters50/1557648
aaatttga

SEQ ID NO: 175331 - DNA, 8 bp, Unknown
  misc_feature (1)..( 8): Result.005 file - promoters50/1557648
tcatttga

SEQ ID NO: 175332 - DNA, 6 bp, Unknown
  misc_feature (1)..( 6): Result.005 file - promoters50/1557648
agaaaa

SEQ ID NO: 175333 - DNA, 6 bp, Unknown
  misc_feature (1)..( 6): Result.005 file - promoters50/1557648
agaaaa

SEQ ID NO: 175334 - DNA, 6 bp, Unknown
  misc_feature (1)..( 6): Result.005 file - promoters50/1557648
agaaaa

SEQ ID NO: 175335 - DNA, 10 bp, Unknown
  misc_feature (1)..( 10): Result.005 file - promoters50/1557648
caaaagaaat

SEQ ID NO: 175336 - DNA, 10 bp, Unknown
  misc_feature (1)..( 10): Result.005 file - promoters50/1557648
caaaaggaaa

SEQ ID NO: 175337 - DNA, 10 bp, Unknown
  misc_feature (1)..( 10): Result.005 file - promoters50/1557648
aaaaagaaaa

SEQ ID NO: 175338 - DNA, 9 bp, Unknown
  misc_feature (1)..( 9): Result.005 file - promoters50/1557648
ctttaaatg

SEQ ID NO: 175339 - DNA, 9 bp, Unknown
  misc_feature (1)..( 9): Result.005 file - promoters50/1557648
ctttaaatt

SEQ ID NO: 175340 - DNA, 9 bp, Unknown
  misc_feature (1)..( 9): Result.005 file - promoters50/1557648
aaataaatt

SEQ ID NO: 175341 - DNA, 10 bp, Unknown
  misc_feature (1)..( 10): Result.005 file - promoters50/1557660
ttacttatta

SEQ ID NO: 175342 - DNA, 10 bp, Unknown
  misc_feature (1)..( 10): Result.005 file - promoters50/1557660
ttatttaaca

SEQ ID NO: 175343 - DNA, 10 bp, Unknown
  misc_feature (1)..( 10): Result.005 file - promoters50/1557660
aaattgaaca

SEQ ID NO: 175344 - DNA, 9 bp, Unknown
  misc_feature (1)..( 9): Result.005 file - promoters50/1557672
aatttcttt

SEQ ID NO: 175345 - DNA, 9 bp, Unknown
  misc_feature (1)..( 9): Result.005 file - promoters50/1557672
aatttccca

SEQ ID NO: 175346 - DNA, 9 bp, Unknown
  misc_feature (1)..( 9): Result.005 file - promoters50/1557672
tatttattt

SEQ ID NO: 175347 - DNA, 9 bp, Unknown
  misc_feature (1)..( 9): Result.005 file - promoters50/1557672
agattcgtt

SEQ ID NO: 175348 - DNA, 9 bp, Unknown
  misc_feature (1)..( 9): Result.005 file - promoters50/1557672
aaattagtt

SEQ ID NO: 175349 - DNA, 9 bp, Unknown
  misc_feature (1)..( 9): Result.005 file - promoters50/1557672
agatttgtt

SEQ ID NO: 175350 - DNA, 9 bp, Unknown
  misc_feature (1)..( 9): Result.005 file - promoters50/1557672
ggattcgtt

SEQ ID NO: 175351 - DNA, 8 bp, Unknown
  misc_feature (1)..( 8): Result.005 file - promoters50/1557672
ttgaatta

SEQ ID NO: 175352 - DNA, 8 bp, Unknown
  misc_feature (1)..( 8): Result.005 file - promoters50/1557672
gggaatta

SEQ ID NO: 175353 - DNA, 8 bp, Unknown
  misc_feature (1)..( 8): Result.005 file - promoters50/1557672
ttggattc

SEQ ID NO: 175354 - DNA, 11 bp, Unknown
  misc_feature (1)..( 11): Result.005 file - promoters50/1557672
ttccaaaaaca

SEQ ID NO: 175355 - DNA, 11 bp, Unknown
  misc_feature (1)..( 11): Result.005 file - promoters50/1557672
ctccaaaatat

SEQ ID NO: 175356 - DNA, 11 bp, Unknown
  misc_feature (1)..( 11): Result.005 file - promoters50/1557672
ttcgaaagaca

SEQ ID NO: 175357 - DNA, 11 bp, Unknown
  misc_feature (1)..( 11): Result.005 file - promoters50/1557672
ttccaaaagaa

SEQ ID NO: 175358 - DNA, 8 bp, Unknown
  misc_feature (1)..( 8): Result.005 file - promoters50/1557672
caaatctg

SEQ ID NO: 175359 - DNA, 8 bp, Unknown
  misc_feature (1)..( 8): Result.005 file - promoters50/1557672
gaaaactg

SEQ ID NO: 175360 - DNA, 8 bp, Unknown
  misc_feature (1)..( 8): Result.005 file - promoters50/1557672
gaacacta

SEQ ID NO: 175361 - DNA, 7 bp, Unknown
  misc_feature (1)..( 7): Result.005 file - promoters50/1557672
tcgttaa

SEQ ID NO: 175362 - DNA, 7 bp, Unknown
  misc_feature (1)..( 7): Result.005 file - promoters50/1557672
tcgttat

SEQ ID NO: 175363 - DNA, 7 bp, Unknown
  misc_feature (1)..( 7): Result.005 file - promoters50/1557672
tcgatat

SEQ ID NO: 175364 - DNA, 8 bp, Unknown
  misc_feature (1)..( 8): Result.005 file - promoters50/1557672
tatgtcat

SEQ ID NO: 175365 - DNA, 8 bp, Unknown
  misc_feature (1)..( 8): Result.005 file - promoters50/1557672
tatttcaa

SEQ ID NO: 175366 - DNA, 8 bp, Unknown
  misc_feature (1)..( 8): Result.005 file - promoters50/1557672
gatttcaa

SEQ ID NO: 175367 - DNA, 8 bp, Unknown
  misc_feature (1)..( 8): Result.005 file - promoters50/1557672
taagagaa

SEQ ID NO: 175368 - DNA, 8 bp, Unknown
  misc_feature (1)..( 8): Result.005 file - promoters50/1557672
agagagaa

SEQ ID NO: 175369 - DNA, 8 bp, Unknown
  misc_feature (1)..( 8): Result.005 file - promoters50/1557672
agagggaa

SEQ ID NO: 175370 - DNA, 11 bp, Unknown
  misc_feature (1)..( 11): Result.005 file - promoters50/1557712
gtattttgatt

SEQ ID NO: 175371 - DNA, 11 bp, Unknown
  misc_feature (1)..( 11): Result.005 file - promoters50/1557712
ttatcttgcaa

SEQ ID NO: 175372 - DNA, 11 bp, Unknown
  misc_feature (1)..( 11): Result.005 file - promoters50/1557712
ttattttgaag

SEQ ID NO: 175373 - DNA, 11 bp, Unknown
  misc_feature (1)..( 11): Result.005 file - promoters50/1557712
aaattttaaag

SEQ ID NO: 175374 - DNA, 11 bp, Unknown
  misc_feature (1)..( 11): Result.005 file - promoters50/1557712
ggattgtaaca

SEQ ID NO: 175375 - DNA, 11 bp, Unknown
  misc_feature (1)..( 11): Result.005 file - promoters50/1557712
aaattttaaaa

SEQ ID NO: 175376 - DNA, 10 bp, Unknown
  misc_feature (1)..( 10): Result.005 file - promoters50/1557712
tgtttaaagc

SEQ ID NO: 175377 - DNA, 10 bp, Unknown
  misc_feature (1)..( 10): Result.005 file - promoters50/1557712
aattttaagt

SEQ ID NO: 175378 - DNA, 10 bp, Unknown
  misc_feature (1)..( 10): Result.005 file - promoters50/1557712
atgttaaaac

SEQ ID NO: 175379 - DNA, 10 bp, Unknown
  misc_feature (1)..( 10): Result.005 file - promoters50/1557712
atgtttaact

SEQ ID NO: 175380 - DNA, 10 bp, Unknown
  misc_feature (1)..( 10): Result.005 file - promoters50/1557712
ttcataaaac

SEQ ID NO: 175381 - DNA, 10 bp, Unknown
  misc_feature (1)..( 10): Result.005 file - promoters50/1557712
attctaatat

SEQ ID NO: 175382 - DNA, 10 bp, Unknown
  misc_feature (1)..( 10): Result.005 file - promoters50/1557712
gttttgagta

SEQ ID NO: 175383 - DNA, 10 bp, Unknown
  misc_feature (1)..( 10): Result.005 file - promoters50/1557712
gttgtgactg

SEQ ID NO: 175384 - DNA, 7 bp, Unknown
  misc_feature (1)..( 7): Result.005 file - promoters50/1557751
aaacata

SEQ ID NO: 175385 - DNA, 7 bp, Unknown
  misc_feature (1)..( 7): Result.005 file - promoters50/1557751
taacata

SEQ ID NO: 175386 - DNA, 8 bp, Unknown
  misc_feature (1)..( 8): Result.005 file - promoters50/1557751
gaatcatc

SEQ ID NO: 175387 - DNA, 11 bp, Unknown
  misc_feature (1)..( 11): Result.005 file - promoters50/1557765
atattttgaat

SEQ ID NO: 175388 - DNA, 11 bp, Unknown
  misc_feature (1)..( 11): Result.005 file - promoters50/1557765
aaattttgaaa

SEQ ID NO: 175389 - DNA, 11 bp, Unknown
  misc_feature (1)..( 11): Result.005 file - promoters50/1557765
aaaatttcaaa

SEQ ID NO: 175390 - DNA, 11 bp, Unknown
  misc_feature (1)..( 11): Result.005 file - promoters50/1557765
tttaaaaatta

SEQ ID NO: 175391 - DNA, 11 bp, Unknown
  misc_feature (1)..( 11): Result.005 file - promoters50/1557765
ttacaaaatta

SEQ ID NO: 175392 - DNA, 11 bp, Unknown
  misc_feature (1)..( 11): Result.005 file - promoters50/1557765
tttcaaaataa

SEQ ID NO: 175393 - DNA, 11 bp, Unknown
  misc_feature (1)..( 11): Result.005 file - promoters50/1557765
tttcttatttt

SEQ ID NO: 175394 - DNA, 11 bp, Unknown
  misc_feature (1)..( 11): Result.005 file - promoters50/1557765
ttttttaaaaa

SEQ ID NO: 175395 - DNA, 11 bp, Unknown
  misc_feature (1)..( 11): Result.005 file - promoters50/1557765
attctcatttt

SEQ ID NO: 175396 - DNA, 9 bp, Unknown
  misc_feature (1)..( 9): Result.005 file - promoters50/1557765
aaacaaaat

SEQ ID NO: 175397 - DNA, 9 bp, Unknown
  misc_feature (1)..( 9): Result.005 file - promoters50/1557765
aaagaaaaa

SEQ ID NO: 175398 - DNA, 9 bp, Unknown
  misc_feature (1)..( 9): Result.005 file - promoters50/1557765
attcaaaat

SEQ ID NO: 175399 - DNA, 8 bp, Unknown
  misc_feature (1)..( 8): Result.005 file - promoters50/1557765
ttttaaat

SEQ ID NO: 175400 - DNA, 8 bp, Unknown
  misc_feature (1)..( 8): Result.005 file - promoters50/1557765
tttgaaat

SEQ ID NO: 175401 - DNA, 8 bp, Unknown
  misc_feature (1)..( 8): Result.005 file - promoters50/1557765
tttcaaac

SEQ ID NO: 175402 - DNA, 8 bp, Unknown
  misc_feature (1)..( 8): Result.005 file - promoters50/1557765
ttaattga

SEQ ID NO: 175403 - DNA, 8 bp, Unknown
  misc_feature (1)..( 8): Result.005 file - promoters50/1557765
ttaattat

SEQ ID NO: 175404 - DNA, 8 bp, Unknown
  misc_feature (1)..( 8): Result.005 file - promoters50/1557765
gtaagtat

SEQ ID NO: 175405 - DNA, 11 bp, Unknown
  misc_feature (1)..( 11): Result.005 file - promoters50/1557765
attttttaaaa

SEQ ID NO: 175406 - DNA, 11 bp, Unknown
  misc_feature (1)..( 11): Result.005 file - promoters50/1557765
aaatttcaaaa

SEQ ID NO: 175407 - DNA, 11 bp, Unknown
  misc_feature (1)..( 11): Result.005 file - promoters50/1557765
aaattttgaaa

SEQ ID NO: 175408 - DNA, 8 bp, Unknown
  misc_feature (1)..( 8): Result.005 file - promoters50/1557765
attgaaaa

SEQ ID NO: 175409 - DNA, 8 bp, Unknown
  misc_feature (1)..( 8): Result.005 file - promoters50/1557765
tttgaaaa

SEQ ID NO: 175410 - DNA, 8 bp, Unknown
  misc_feature (1)..( 8): Result.005 file - promoters50/1557765
ttttaaat

SEQ ID NO: 175411 - DNA, 8 bp, Unknown
  misc_feature (1)..( 8): Result.005 file - promoters50/1557765
tttgaata

SEQ ID NO: 175412 - DNA, 8 bp, Unknown
  misc_feature (1)..( 8): Result.005 file - promoters50/1557765
ttttgaaa

SEQ ID NO: 175413 - DNA, 8 bp, Unknown
  misc_feature (1)..( 8): Result.005 file - promoters50/1557765
ttttgaat

SEQ ID NO: 175414 - DNA, 8 bp, Unknown
  misc_feature (1)..( 8): Result.005 file - promoters50/1557765
gtttcaaa

SEQ ID NO: 175415 - DNA, 9 bp, Unknown
  misc_feature (1)..( 9): Result.005 file - promoters50/1557765
aattttaaa

SEQ ID NO: 175416 - DNA, 9 bp, Unknown
  misc_feature (1)..( 9): Result.005 file - promoters50/1557765
aattataaa

SEQ ID NO: 175417 - DNA, 9 bp, Unknown
  misc_feature (1)..( 9): Result.005 file - promoters50/1557765
cgtttgaaa

SEQ ID NO: 175418 - DNA, 12 bp, Unknown
  misc_feature (1)..( 12): Result.005 file - promoters50/1557769
gatttttcattt

SEQ ID NO: 175419 - DNA, 12 bp, Unknown
  misc_feature (1)..( 12): Result.005 file - promoters50/1557769
taattttcaaat

SEQ ID NO: 175420 - DNA, 12 bp, Unknown
  misc_feature (1)..( 12): Result.005 file - promoters50/1557769
atctttacattt

SEQ ID NO: 175421 - DNA, 12 bp, Unknown
  misc_feature (1)..( 12): Result.005 file - promoters50/1557769
ccattttcgttt

SEQ ID NO: 175422 - DNA, 12 bp, Unknown
  misc_feature (1)..( 12): Result.005 file - promoters50/1557769
ttttttacagct

SEQ ID NO: 175423 - DNA, 12 bp, Unknown
  misc_feature (1)..( 12): Result.005 file - promoters50/1557769
ccattttatgtg

SEQ ID NO: 175424 - DNA, 9 bp, Unknown
  misc_feature (1)..( 9): Result.005 file - promoters50/1557769
cattttttt

SEQ ID NO: 175425 - DNA, 9 bp, Unknown
  misc_feature (1)..( 9): Result.005 file - promoters50/1557769
aatttttct

SEQ ID NO: 175426 - DNA, 9 bp, Unknown
  misc_feature (1)..( 9): Result.005 file - promoters50/1557769
acttttttt

SEQ ID NO: 175427 - DNA, 9 bp, Unknown
  misc_feature (1)..( 9): Result.005 file - promoters50/1557769
tcttttttt

SEQ ID NO: 175428 - DNA, 9 bp, Unknown
  misc_feature (1)..( 9): Result.005 file - promoters50/1557769
catttttgt

SEQ ID NO: 175429 - DNA, 9 bp, Unknown
  misc_feature (1)..( 9): Result.005 file - promoters50/1557769
aatctttac

SEQ ID NO: 175430 - DNA, 12 bp, Unknown
  misc_feature (1)..( 12): Result.005 file - promoters50/1557769
aacgatattaat

SEQ ID NO: 175431 - DNA, 12 bp, Unknown
  misc_feature (1)..( 12): Result.005 file - promoters50/1557769
acagatattact

SEQ ID NO: 175432 - DNA, 12 bp, Unknown
  misc_feature (1)..( 12): Result.005 file - promoters50/1557769
tgtaataataac

SEQ ID NO: 175433 - DNA, 12 bp, Unknown
  misc_feature (1)..( 12): Result.005 file - promoters50/1557769
tacgaaattgtg

SEQ ID NO: 175434 - DNA, 12 bp, Unknown
  misc_feature (1)..( 12): Result.005 file - promoters50/1557769
atcgttattaat

SEQ ID NO: 175435 - DNA, 12 bp, Unknown
  misc_feature (1)..( 12): Result.005 file - promoters50/1557769
taagacattttt

SEQ ID NO: 175436 - DNA, 12 bp, Unknown
  misc_feature (1)..( 12): Result.005 file - promoters50/1557769
taccaaactgaa

SEQ ID NO: 175437 - DNA, 12 bp, Unknown
  misc_feature (1)..( 12): Result.005 file - promoters50/1557769
ttgattagtaaa

SEQ ID NO: 175438 - DNA, 11 bp, Unknown
  misc_feature (1)..( 11): Result.005 file - promoters50/1557769
gaaaaaaaaga

SEQ ID NO: 175439 - DNA, 11 bp, Unknown
  misc_feature (1)..( 11): Result.005 file - promoters50/1557769
caaaaaagatg

SEQ ID NO: 175440 - DNA, 12 bp, Unknown
  misc_feature (1)..( 12): Result.005 file - promoters50/1557769
caaacaaaacta

SEQ ID NO: 175441 - DNA, 12 bp, Unknown
  misc_feature (1)..( 12): Result.005 file - promoters50/1557769
aaaagaaagaaa

SEQ ID NO: 175442 - DNA, 12 bp, Unknown
  misc_feature (1)..( 12): Result.005 file - promoters50/1557769
gaacgaagaggc

SEQ ID NO: 175443 - DNA, 12 bp, Unknown
  misc_feature (1)..( 12): Result.005 file - promoters50/1557769
tttcaaaaatac

SEQ ID NO: 175444 - DNA, 12 bp, Unknown
  misc_feature (1)..( 12): Result.005 file - promoters50/1557769
ctaaaaatcctt

SEQ ID NO: 175445 - DNA, 12 bp, Unknown
  misc_feature (1)..( 12): Result.005 file - promoters50/1557769
caataaaatata

SEQ ID NO: 175446 - DNA, 12 bp, Unknown
  misc_feature (1)..( 12): Result.005 file - promoters50/1557769
ctataaaaaatt

SEQ ID NO: 175447 - DNA, 12 bp, Unknown
  misc_feature (1)..( 12): Result.005 file - promoters50/1557769
caatcaaatcgg

SEQ ID NO: 175448 - DNA, 12 bp, Unknown
  misc_feature (1)..( 12): Result.005 file - promoters50/1557769
gaataaaaacag

SEQ ID NO: 175449 - DNA, 12 bp, Unknown
  misc_feature (1)..( 12): Result.005 file - promoters50/1557769
taagaaaaaaaa

SEQ ID NO: 175450 - DNA, 12 bp, Unknown
  misc_feature (1)..( 12): Result.005 file - promoters50/1557769
ccatcgaatttg

SEQ ID NO: 175451 - DNA, 9 bp, Unknown
  misc_feature (1)..( 9): Result.005 file - promoters50/1557783
gattgtaat

SEQ ID NO: 175452 - DNA, 9 bp, Unknown
  misc_feature (1)..( 9): Result.005 file - promoters50/1557783
tattataaa

SEQ ID NO: 175453 - DNA, 9 bp, Unknown
  misc_feature (1)..( 9): Result.005 file - promoters50/1557783
atttgtaaa

SEQ ID NO: 175454 - DNA, 9 bp, Unknown
  misc_feature (1)..( 9): Result.005 file - promoters50/1557783
ttttgtaaa

SEQ ID NO: 175455 - DNA, 9 bp, Unknown
  misc_feature (1)..( 9): Result.005 file - promoters50/1557783
tattaaagt

SEQ ID NO: 175456 - DNA, 9 bp, Unknown
  misc_feature (1)..( 9): Result.005 file - promoters50/1557783
gaatgtaaa

SEQ ID NO: 175457 - DNA, 12 bp, Unknown
  misc_feature (1)..( 12): Result.005 file - promoters50/1557783
gtttatgaatta

SEQ ID NO: 175458 - DNA, 12 bp, Unknown
  misc_feature (1)..( 12): Result.005 file - promoters50/1557783
gtatatgaattg

SEQ ID NO: 175459 - DNA, 12 bp, Unknown
  misc_feature (1)..( 12): Result.005 file - promoters50/1557783
agttataaataa

SEQ ID NO: 175460 - DNA, 12 bp, Unknown
  misc_feature (1)..( 12): Result.005 file - promoters50/1557783
tgtaataaattc

SEQ ID NO: 175461 - DNA, 12 bp, Unknown
  misc_feature (1)..( 12): Result.005 file - promoters50/1557783
gtagatgagatc

SEQ ID NO: 175462 - DNA, 12 bp, Unknown
  misc_feature (1)..( 12): Result.005 file - promoters50/1557783
gacgacgaagat

SEQ ID NO: 175463 - DNA, 10 bp, Unknown
  misc_feature (1)..( 10): Result.005 file - promoters50/1557806
aagaatctgt

SEQ ID NO: 175464 - DNA, 10 bp, Unknown
  misc_feature (1)..( 10): Result.005 file - promoters50/1557806
gataatttgt

SEQ ID NO: 175465 - DNA, 10 bp, Unknown
  misc_feature (1)..( 10): Result.005 file - promoters50/1557806
gatgatttga

SEQ ID NO: 175466 - DNA, 11 bp, Unknown
  misc_feature (1)..( 11): Result.005 file - promoters50/1565820
tagaataacac

SEQ ID NO: 175467 - DNA, 11 bp, Unknown
  misc_feature (1)..( 11): Result.005 file - promoters50/1565820
tagaaaaacaa

SEQ ID NO: 175468 - DNA, 11 bp, Unknown
  misc_feature (1)..( 11): Result.005 file - promoters50/1565820
cctaattacag

SEQ ID NO: 175469 - DNA, 11 bp, Unknown
  misc_feature (1)..( 11): Result.005 file - promoters50/1565820
tggaataattt

SEQ ID NO: 175470 - DNA, 11 bp, Unknown
  misc_feature (1)..( 11): Result.005 file - promoters50/1565820
tggtaaatcaa

SEQ ID NO: 175471 - DNA, 11 bp, Unknown
  misc_feature (1)..( 11): Result.005 file - promoters50/1565820
cagaaaaatgg

SEQ ID NO: 175472 - DNA, 9 bp, Unknown
  misc_feature (1)..( 9): Result.005 file - promoters50/1566423
tatattatt

SEQ ID NO: 175473 - DNA, 9 bp, Unknown
  misc_feature (1)..( 9): Result.005 file - promoters50/1566423
tattttatt

SEQ ID NO: 175474 - DNA, 9 bp, Unknown
  misc_feature (1)..( 9): Result.005 file - promoters50/1566423
tatattgaa

SEQ ID NO: 175475 - DNA, 10 bp, Unknown
  misc_feature (1)..( 10): Result.005 file - promoters50/1566423
cattgttaaa

SEQ ID NO: 175476 - DNA, 9 bp, Unknown
  misc_feature (1)..( 9): Result.005 file - promoters50/1566423
ttcaatatt

SEQ ID NO: 175477 - DNA, 9 bp, Unknown
  misc_feature (1)..( 9): Result.005 file - promoters50/1566423
ttccataaa

SEQ ID NO: 175478 - DNA, 9 bp, Unknown
  misc_feature (1)..( 9): Result.005 file - promoters50/1566423
atccaaaaa

SEQ ID NO: 175479 - DNA, 9 bp, Unknown
  misc_feature (1)..( 9): Result.005 file - promoters50/1566423
ctccaaata

SEQ ID NO: 175480 - DNA, 9 bp, Unknown
  misc_feature (1)..( 9): Result.005 file - promoters50/1566423
atttcttag

SEQ ID NO: 175481 - DNA, 9 bp, Unknown
  misc_feature (1)..( 9): Result.005 file - promoters50/1566423
atttgttag

SEQ ID NO: 175482 - DNA, 9 bp, Unknown
  misc_feature (1)..( 9): Result.005 file - promoters50/1566423
ctttcttct

SEQ ID NO: 175483 - DNA, 9 bp, Unknown
  misc_feature (1)..( 9): Result.005 file - promoters50/1566423
cttccttca

SEQ ID NO: 175484 - DNA, 10 bp, Unknown
  misc_feature (1)..( 10): Result.005 file - promoters50/1566948
ttaaaaacta

SEQ ID NO: 175485 - DNA, 10 bp, Unknown
  misc_feature (1)..( 10): Result.005 file - promoters50/1566948
ctaaaaatcc

SEQ ID NO: 175486 - DNA, 10 bp, Unknown
  misc_feature (1)..( 10): Result.005 file - promoters50/1566948
ctaaatacta

SEQ ID NO: 175487 - DNA, 10 bp, Unknown
  misc_feature (1)..( 10): Result.005 file - promoters50/1566948
ttaacaattt

SEQ ID NO: 175488 - DNA, 10 bp, Unknown
  misc_feature (1)..( 10): Result.005 file - promoters50/1566948
ctagatacag

SEQ ID NO: 175489 - DNA, 10 bp, Unknown
  misc_feature (1)..( 10): Result.005 file - promoters50/1566948
tgaaaaattt

SEQ ID NO: 175490 - DNA, 11 bp, Unknown
  misc_feature (1)..( 11): Result.005 file - promoters50/1567007
ttaaaaaaaat

SEQ ID NO: 175491 - DNA, 11 bp, Unknown
  misc_feature (1)..( 11): Result.005 file - promoters50/1567007
ctaaaaaaccg

SEQ ID NO: 175492 - DNA, 11 bp, Unknown
  misc_feature (1)..( 11): Result.005 file - promoters50/1567007
ttaaaatcaca

SEQ ID NO: 175493 - DNA, 11 bp, Unknown
  misc_feature (1)..( 11): Result.005 file - promoters50/1567007
agaaaacaatt

SEQ ID NO: 175494 - DNA, 11 bp, Unknown
  misc_feature (1)..( 11): Result.005 file - promoters50/1567007
ctaaaagaacg

SEQ ID NO: 175495 - DNA, 11 bp, Unknown
  misc_feature (1)..( 11): Result.005 file - promoters50/1567007
tgaaagaacct

SEQ ID NO: 175496 - DNA, 12 bp, Unknown
  misc_feature (1)..( 12): Result.005 file - promoters50/1567092
caataatttaca

SEQ ID NO: 175497 - DNA, 12 bp, Unknown
  misc_feature (1)..( 12): Result.005 file - promoters50/1567092
tgaaaatttata

SEQ ID NO: 175498 - DNA, 12 bp, Unknown
  misc_feature (1)..( 12): Result.005 file - promoters50/1567092
ttacaatttaca

SEQ ID NO: 175499 - DNA, 12 bp, Unknown
  misc_feature (1)..( 12): Result.005 file - promoters50/1567092
gtataattttat

SEQ ID NO: 175500 - DNA, 12 bp, Unknown
  misc_feature (1)..( 12): Result.005 file - promoters50/1567092
caacaatgtaca

SEQ ID NO: 175501 - DNA, 12 bp, Unknown
  misc_feature (1)..( 12): Result.005 file - promoters50/1567092
tgaaaattactc

SEQ ID NO: 175502 - DNA, 12 bp, Unknown
  misc_feature (1)..( 12): Result.005 file - promoters50/1567092
agaaaataaata

SEQ ID NO: 175503 - DNA, 13 bp, Unknown
  misc_feature (1)..( 13): Result.005 file - promoters50/1567092
ttcatgtttaatc

SEQ ID NO: 175504 - DNA, 13 bp, Unknown
  misc_feature (1)..( 13): Result.005 file - promoters50/1567092
cacatatttagca

SEQ ID NO: 175505 - DNA, 13 bp, Unknown
  misc_feature (1)..( 13): Result.005 file - promoters50/1567092
aagttgtttatat

SEQ ID NO: 175506 - DNA, 13 bp, Unknown
  misc_feature (1)..( 13): Result.005 file - promoters50/1567092
tatgagttcataa

SEQ ID NO: 175507 - DNA, 13 bp, Unknown
  misc_feature (1)..( 13): Result.005 file - promoters50/1567092
cacagattgaaga

SEQ ID NO: 175508 - DNA, 13 bp, Unknown
  misc_feature (1)..( 13): Result.005 file - promoters50/1567092
tctttgcttacaa

SEQ ID NO: 175509 - DNA, 13 bp, Unknown
  misc_feature (1)..( 13): Result.005 file - promoters50/1567092
gcgtgtttttctt

SEQ ID NO: 175510 - DNA, 10 bp, Unknown
  misc_feature (1)..( 10): Result.005 file - promoters50/1567092
aaactttaga

SEQ ID NO: 175511 - DNA, 10 bp, Unknown
  misc_feature (1)..( 10): Result.005 file - promoters50/1567092
aaagtttttg

SEQ ID NO: 175512 - DNA, 10 bp, Unknown
  misc_feature (1)..( 10): Result.005 file - promoters50/1567092
aaacttatca

SEQ ID NO: 175513 - DNA, 10 bp, Unknown
  misc_feature (1)..( 10): Result.005 file - promoters50/1567092
gaactttgtt

SEQ ID NO: 175514 - DNA, 10 bp, Unknown
  misc_feature (1)..( 10): Result.005 file - promoters50/1567092
aaggttttaa

SEQ ID NO: 175515 - DNA, 10 bp, Unknown
  misc_feature (1)..( 10): Result.005 file - promoters50/1567092
ccggttataa

SEQ ID NO: 175516 - DNA, 13 bp, Unknown
  misc_feature (1)..( 13): Result.005 file - promoters50/1567547
ctcttatgatttg

SEQ ID NO: 175517 - DNA, 13 bp, Unknown
  misc_feature (1)..( 13): Result.005 file - promoters50/1567547
ctcgtataattct

SEQ ID NO: 175518 - DNA, 13 bp, Unknown
  misc_feature (1)..( 13): Result.005 file - promoters50/1567547
ttcttattggaag

SEQ ID NO: 175519 - DNA, 13 bp, Unknown
  misc_feature (1)..( 13): Result.005 file - promoters50/1567547
ttcttaggattca

SEQ ID NO: 175520 - DNA, 13 bp, Unknown
  misc_feature (1)..( 13): Result.005 file - promoters50/1567547
gtccgataattta

SEQ ID NO: 175521 - DNA, 13 bp, Unknown
  misc_feature (1)..( 13): Result.005 file - promoters50/1567547
tgtgtatcattct

SEQ ID NO: 175522 - DNA, 14 bp, Unknown
  misc_feature (1)..( 14): Result.005 file - promoters50/1567547
aaaatttgtttttg

SEQ ID NO: 175523 - DNA, 14 bp, Unknown
  misc_feature (1)..( 14): Result.005 file - promoters50/1567547
tgtctttgttagtt

SEQ ID NO: 175524 - DNA, 14 bp, Unknown
  misc_feature (1)..( 14): Result.005 file - promoters50/1567547
aaagtttgttatca

SEQ ID NO: 175525 - DNA, 14 bp, Unknown
  misc_feature (1)..( 14): Result.005 file - promoters50/1567547
atcatttgtacaaa

SEQ ID NO: 175526 - DNA, 14 bp, Unknown
  misc_feature (1)..( 14): Result.005 file - promoters50/1567547
gaattttgtttttg

SEQ ID NO: 175527 - DNA, 14 bp, Unknown
  misc_feature (1)..( 14): Result.005 file - promoters50/1567547
gttgattgataggt

SEQ ID NO: 175528 - DNA, 12 bp, Unknown
  misc_feature (1)..( 12): Result.005 file - promoters50/1567949
aaacaaattaaa

SEQ ID NO: 175529 - DNA, 12 bp, Unknown
  misc_feature (1)..( 12): Result.005 file - promoters50/1567949
taacaaaaagtt

SEQ ID NO: 175530 - DNA, 12 bp, Unknown
  misc_feature (1)..( 12): Result.005 file - promoters50/1567949
gaacaaaaccca

SEQ ID NO: 175531 - DNA, 12 bp, Unknown
  misc_feature (1)..( 12): Result.005 file - promoters50/1567949
aaataaattaaa

SEQ ID NO: 175532 - DNA, 12 bp, Unknown
  misc_feature (1)..( 12): Result.005 file - promoters50/1567949
tgacaaaaagaa

SEQ ID NO: 175533 - DNA, 12 bp, Unknown
  misc_feature (1)..( 12): Result.005 file - promoters50/1567949
tgagaaagcacc

SEQ ID NO: 175534 - DNA, 8 bp, Unknown
  misc_feature (1)..( 8): Result.005 file - promoters50/1567957
tttcaaca

SEQ ID NO: 175535 - DNA, 8 bp, Unknown
  misc_feature (1)..( 8): Result.005 file - promoters50/1567957
tttcaaag

SEQ ID NO: 175536 - DNA, 8 bp, Unknown
  misc_feature (1)..( 8): Result.005 file - promoters50/1567957
tttaaaca

SEQ ID NO: 175537 - DNA, 8 bp, Unknown
  misc_feature (1)..( 8): Result.005 file - promoters50/1567957
gttcaaaa

SEQ ID NO: 175538 - DNA, 8 bp, Unknown
  misc_feature (1)..( 8): Result.005 file - promoters50/1567957
tttaaata

SEQ ID NO: 175539 - DNA, 8 bp, Unknown
  misc_feature (1)..( 8): Result.005 file - promoters50/1567957
tttaaaaa

SEQ ID NO: 175540 - DNA, 16 bp, Unknown
  misc_feature (1)..( 16): Result.005 file - promoters50/1567957
cttgtttcaatattgg

SEQ ID NO: 175541 - DNA, 16 bp, Unknown
  misc_feature (1)..( 16): Result.005 file - promoters50/1567957
attattttaattttgg

SEQ ID NO: 175542 - DNA, 16 bp, Unknown
  misc_feature (1)..( 16): Result.005 file - promoters50/1567957
aatttttcaaataaaa

SEQ ID NO: 175543 - DNA, 16 bp, Unknown
  misc_feature (1)..( 16): Result.005 file - promoters50/1567957
aggattaggcccaaaa

SEQ ID NO: 175544 - DNA, 16 bp, Unknown
  misc_feature (1)..( 16): Result.005 file - promoters50/1567957
atttttttaaaaatgt

SEQ ID NO: 175545 - DNA, 16 bp, Unknown
  misc_feature (1)..( 16): Result.005 file - promoters50/1567957
aagattttcaaagcaa

SEQ ID NO: 175546 - DNA, 14 bp, Unknown
  misc_feature (1)..( 14): Result.005 file - promoters50/1567957
ccaaatacgataat

SEQ ID NO: 175547 - DNA, 14 bp, Unknown
  misc_feature (1)..( 14): Result.005 file - promoters50/1567957
tcaaataaaacatt

SEQ ID NO: 175548 - DNA, 14 bp, Unknown
  misc_feature (1)..( 14): Result.005 file - promoters50/1567957
ccatatatattact

SEQ ID NO: 175549 - DNA, 14 bp, Unknown
  misc_feature (1)..( 14): Result.005 file - promoters50/1567957
agaaaaaaaacatt

SEQ ID NO: 175550 - DNA, 14 bp, Unknown
  misc_feature (1)..( 14): Result.005 file - promoters50/1567957
caaaacaaaacgac

SEQ ID NO: 175551 - DNA, 14 bp, Unknown
  misc_feature (1)..( 14): Result.005 file - promoters50/1567957
taaaacaaaatcat

SEQ ID NO: 175552 - DNA, 10 bp, Unknown
  misc_feature (1)..( 10): Result.005 file - promoters50/1568230
ttaatataaa

SEQ ID NO: 175553 - DNA, 10 bp, Unknown
  misc_feature (1)..( 10): Result.005 file - promoters50/1568230
acaatttaaa

SEQ ID NO: 175554 - DNA, 10 bp, Unknown
  misc_feature (1)..( 10): Result.005 file - promoters50/1568230
ttattataaa

SEQ ID NO: 175555 - DNA, 10 bp, Unknown
  misc_feature (1)..( 10): Result.005 file - promoters50/1568386
gtatttaatt

SEQ ID NO: 175556 - DNA, 10 bp, Unknown
  misc_feature (1)..( 10): Result.005 file - promoters50/1568386
aaattaaatc

SEQ ID NO: 175557 - DNA, 10 bp, Unknown
  misc_feature (1)..( 10): Result.005 file - promoters50/1568386
aaagtaattt

SEQ ID NO: 175558 - DNA, 10 bp, Unknown
  misc_feature (1)..( 10): Result.005 file - promoters50/1568386
aaaataaact

SEQ ID NO: 175559 - DNA, 10 bp, Unknown
  misc_feature (1)..( 10): Result.005 file - promoters50/1568386
caaataaatc

SEQ ID NO: 175560 - DNA, 10 bp, Unknown
  misc_feature (1)..( 10): Result.005 file - promoters50/1568386
gaagcaatag

SEQ ID NO: 175561 - DNA, 12 bp, Unknown
  misc_feature (1)..( 12): Result.005 file - promoters50/1568386
tcttaattgtat

SEQ ID NO: 175562 - DNA, 12 bp, Unknown
  misc_feature (1)..( 12): Result.005 file - promoters50/1568386
atttaatttcaa

SEQ ID NO: 175563 - DNA, 12 bp, Unknown
  misc_feature (1)..( 12): Result.005 file - promoters50/1568386
tgttatttgagt

SEQ ID NO: 175564 - DNA, 12 bp, Unknown
  misc_feature (1)..( 12): Result.005 file - promoters50/1568386
ttttattttttt

SEQ ID NO: 175565 - DNA, 12 bp, Unknown
  misc_feature (1)..( 12): Result.005 file - promoters50/1568386
tttttttttttc

SEQ ID NO: 175566 - DNA, 12 bp, Unknown
  misc_feature (1)..( 12): Result.005 file - promoters50/1568386
ttttcagattgc

SEQ ID NO: 175567 - DNA, 13 bp, Unknown
  misc_feature (1)..( 13): Result.005 file - promoters50/1568386
gttttatttataa

SEQ ID NO: 175568 - DNA, 13 bp, Unknown
  misc_feature (1)..( 13): Result.005 file - promoters50/1568386
tacatatatatgt

SEQ ID NO: 175569 - DNA, 13 bp, Unknown
  misc_feature (1)..( 13): Result.005 file - promoters50/1568386
gttttatttcacg

SEQ ID NO: 175570 - DNA, 13 bp, Unknown
  misc_feature (1)..( 13): Result.005 file - promoters50/1568386
ctttaattttgac

SEQ ID NO: 175571 - DNA, 13 bp, Unknown
  misc_feature (1)..( 13): Result.005 file - promoters50/1568386
tttttagttacag

SEQ ID NO: 175572 - DNA, 13 bp, Unknown
  misc_feature (1)..( 13): Result.005 file - promoters50/1568386
tcacaatacatgt

SEQ ID NO: 175573 - DNA, 13 bp, Unknown
  misc_feature (1)..( 13): Result.005 file - promoters50/1568386
aaactttttacgg

SEQ ID NO: 175574 - DNA, 14 bp, Unknown
  misc_feature (1)..( 14): Result.005 file - promoters50/1568386
ttaattgtataatt

SEQ ID NO: 175575 - DNA, 14 bp, Unknown
  misc_feature (1)..( 14): Result.005 file - promoters50/1568386
tcaattgtacttat

SEQ ID NO: 175576 - DNA, 14 bp, Unknown
  misc_feature (1)..( 14): Result.005 file - promoters50/1568386
ttatttgagttatg

SEQ ID NO: 175577 - DNA, 14 bp, Unknown
  misc_feature (1)..( 14): Result.005 file - promoters50/1568386
ttctttgaacttat

SEQ ID NO: 175578 - DNA, 14 bp, Unknown
  misc_feature (1)..( 14): Result.005 file - promoters50/1568386
atcttggaagcaat

SEQ ID NO: 175579 - DNA, 14 bp, Unknown
  misc_feature (1)..( 14): Result.005 file - promoters50/1568386
ccaactgtgtacgt

SEQ ID NO: 175580 - DNA, 13 bp, Unknown
  misc_feature (1)..( 13): Result.005 file - promoters50/1568386
gattcaatcagtt

SEQ ID NO: 175581 - DNA, 13 bp, Unknown
  misc_feature (1)..( 13): Result.005 file - promoters50/1568386
gattaaatatgtt

SEQ ID NO: 175582 - DNA, 13 bp, Unknown
  misc_feature (1)..( 13): Result.005 file - promoters50/1568386
aaataaataacat

SEQ ID NO: 175583 - DNA, 13 bp, Unknown
  misc_feature (1)..( 13): Result.005 file - promoters50/1568386
ttatatatatata

SEQ ID NO: 175584 - DNA, 13 bp, Unknown
  misc_feature (1)..( 13): Result.005 file - promoters50/1568386
atttttatgtata

SEQ ID NO: 175585 - DNA, 13 bp, Unknown
  misc_feature (1)..( 13): Result.005 file - promoters50/1568386
gtttaaattttaa

SEQ ID NO: 175586 - DNA, 8 bp, Unknown
  misc_feature (1)..( 8): Result.005 file - promoters50/1568386
gaaagttt

SEQ ID NO: 175587 - DNA, 8 bp, Unknown
  misc_feature (1)..( 8): Result.005 file - promoters50/1568386
aaaatttt

SEQ ID NO: 175588 - DNA, 8 bp, Unknown
  misc_feature (1)..( 8): Result.005 file - promoters50/1568386
gaatgttg

SEQ ID NO: 175589 - DNA, 8 bp, Unknown
  misc_feature (1)..( 8): Result.005 file - promoters50/1568386
ctattttt

SEQ ID NO: 175590 - DNA, 8 bp, Unknown
  misc_feature (1)..( 8): Result.005 file - promoters50/1568386
gaaacttt

SEQ ID NO: 175591 - DNA, 8 bp, Unknown
  misc_feature (1)..( 8): Result.005 file - promoters50/1568386
taatatta

SEQ ID NO: 175592 - DNA, 8 bp, Unknown
  misc_feature (1)..( 8): Result.005 file - promoters50/1568405
attaatac

SEQ ID NO: 175593 - DNA, 8 bp, Unknown
  misc_feature (1)..( 8): Result.005 file - promoters50/1568405
tttaataa

SEQ ID NO: 175594 - DNA, 8 bp, Unknown
  misc_feature (1)..( 8): Result.005 file - promoters50/1568405
ttttataa

SEQ ID NO: 175595 - DNA, 7 bp, Unknown
  misc_feature (1)..( 7): Result.005 file - promoters50/1568405
atagaaa

SEQ ID NO: 175596 - DNA, 7 bp, Unknown
  misc_feature (1)..( 7): Result.005 file - promoters50/1568405
ataaaaa

SEQ ID NO: 175597 - DNA, 7 bp, Unknown
  misc_feature (1)..( 7): Result.005 file - promoters50/1568405
ataaaat

SEQ ID NO: 175598 - DNA, 11 bp, Unknown
  misc_feature (1)..( 11): Result.005 file - promoters50/1568405
gaaatcagtgt

SEQ ID NO: 175599 - DNA, 11 bp, Unknown
  misc_feature (1)..( 11): Result.005 file - promoters50/1568405
tttatcattgt

SEQ ID NO: 175600 - DNA, 11 bp, Unknown
  misc_feature (1)..( 11): Result.005 file - promoters50/1568405
tttatcatatt

SEQ ID NO: 175601 - DNA, 11 bp, Unknown
  misc_feature (1)..( 11): Result.005 file - promoters50/1568409
tgtgaatctac

SEQ ID NO: 175602 - DNA, 11 bp, Unknown
  misc_feature (1)..( 11): Result.005 file - promoters50/1568409
tgtcaatcttg

SEQ ID NO: 175603 - DNA, 11 bp, Unknown
  misc_feature (1)..( 11): Result.005 file - promoters50/1568409
taagaattttg

SEQ ID NO: 175604 - DNA, 9 bp, Unknown
  misc_feature (1)..( 9): Result.005 file - promoters50/1568409
atatcattc

SEQ ID NO: 175605 - DNA, 9 bp, Unknown
  misc_feature (1)..( 9): Result.005 file - promoters50/1568409
caatctttc

SEQ ID NO: 175606 - DNA, 9 bp, Unknown
  misc_feature (1)..( 9): Result.005 file - promoters50/1568409
caatttttg

SEQ ID NO: 175607 - DNA, 8 bp, Unknown
  misc_feature (1)..( 8): Result.005 file - promoters50/1568409
aaagtctt

SEQ ID NO: 175608 - DNA, 8 bp, Unknown
  misc_feature (1)..( 8): Result.005 file - promoters50/1568409
aaagtcga

SEQ ID NO: 175609 - DNA, 8 bp, Unknown
  misc_feature (1)..( 8): Result.005 file - promoters50/1568409
aaaggctt

SEQ ID NO: 175610 - DNA, 9 bp, Unknown
  misc_feature (1)..( 9): Result.005 file - promoters50/1568409
ctttatttt

SEQ ID NO: 175611 - DNA, 9 bp, Unknown
  misc_feature (1)..( 9): Result.005 file - promoters50/1568409
cttgattgg

SEQ ID NO: 175612 - DNA, 9 bp, Unknown
  misc_feature (1)..( 9): Result.005 file - promoters50/1568409
cattatttt

SEQ ID NO: 175613 - DNA, 16 bp, Unknown
  misc_feature (1)..( 16): Result.005 file - promoters50/1568409
aattattatcttccta

SEQ ID NO: 175614 - DNA, 16 bp, Unknown
  misc_feature (1)..( 16): Result.005 file - promoters50/1568409
atttattaactttcta

SEQ ID NO: 175615 - DNA, 16 bp, Unknown
  misc_feature (1)..( 16): Result.005 file - promoters50/1568409
aattattatcgtctta

SEQ ID NO: 175616 - DNA, 9 bp, Unknown
  misc_feature (1)..( 9): Result.005 file - promoters50/1568409
tttttttat

SEQ ID NO: 175617 - DNA, 9 bp, Unknown
  misc_feature (1)..( 9): Result.005 file - promoters50/1568409
ttattttat

SEQ ID NO: 175618 - DNA, 9 bp, Unknown
  misc_feature (1)..( 9): Result.005 file - promoters50/1568409
ttagtttac

SEQ ID NO: 175619 - DNA, 8 bp, Unknown
  misc_feature (1)..( 8): Result.005 file - promoters50/1568409
tattaaac

SEQ ID NO: 175620 - DNA, 8 bp, Unknown
  misc_feature (1)..( 8): Result.005 file - promoters50/1568409
tataaaat

SEQ ID NO: 175621 - DNA, 8 bp, Unknown
  misc_feature (1)..( 8): Result.005 file - promoters50/1568409
tataaaac

SEQ ID NO: 175622 - DNA, 8 bp, Unknown
  misc_feature (1)..( 8): Result.005 file - promoters50/1568409
gaaatgtc

SEQ ID NO: 175623 - DNA, 8 bp, Unknown
  misc_feature (1)..( 8): Result.005 file - promoters50/1568409
gaaaagtc

SEQ ID NO: 175624 - DNA, 8 bp, Unknown
  misc_feature (1)..( 8): Result.005 file - promoters50/1568409
gaaacgtc

SEQ ID NO: 175625 - DNA, 8 bp, Unknown
  misc_feature (1)..( 8): Result.005 file - promoters50/1568508
tcttataa

SEQ ID NO: 175626 - DNA, 8 bp, Unknown
  misc_feature (1)..( 8): Result.005 file - promoters50/1568508
tcttataa

SEQ ID NO: 175627 - DNA, 8 bp, Unknown
  misc_feature (1)..( 8): Result.005 file - promoters50/1568508
acttatat

SEQ ID NO: 175628 - DNA, 9 bp, Unknown
  misc_feature (1)..( 9): Result.005 file - promoters50/1568924
aaaaagaaa

SEQ ID NO: 175629 - DNA, 9 bp, Unknown
  misc_feature (1)..( 9): Result.005 file - promoters50/1568924
aaaaagatt

SEQ ID NO: 175630 - DNA, 9 bp, Unknown
  misc_feature (1)..( 9): Result.005 file - promoters50/1568924
aaaaataaa

SEQ ID NO: 175631 - DNA, 9 bp, Unknown
  misc_feature (1)..( 9): Result.005 file - promoters50/1568924
aaaagaaaa

SEQ ID NO: 175632 - DNA, 9 bp, Unknown
  misc_feature (1)..( 9): Result.005 file - promoters50/1568924
aaaataaaa

SEQ ID NO: 175633 - DNA, 9 bp, Unknown
  misc_feature (1)..( 9): Result.005 file - promoters50/1568924
tttataaaa

SEQ ID NO: 175634 - DNA, 7 bp, Unknown
  misc_feature (1)..( 7): Result.005 file - promoters50/1568924
tatatat

SEQ ID NO: 175635 - DNA, 7 bp, Unknown
  misc_feature (1)..( 7): Result.005 file - promoters50/1568924
tatataa

SEQ ID NO: 175636 - DNA, 7 bp, Unknown
  misc_feature (1)..( 7): Result.005 file - promoters50/1568924
catataa

SEQ ID NO: 175637 - DNA, 14 bp, Unknown
  misc_feature (1)..( 14): Result.005 file - promoters50/1569568
taaataaacttaat

SEQ ID NO: 175638 - DNA, 14 bp, Unknown
  misc_feature (1)..( 14): Result.005 file - promoters50/1569568
attaaaaacttttt

SEQ ID NO: 175639 - DNA, 14 bp, Unknown
  misc_feature (1)..( 14): Result.005 file - promoters50/1569568
acttcaaaattaaa

SEQ ID NO: 175640 - DNA, 14 bp, Unknown
  misc_feature (1)..( 14): Result.005 file - promoters50/1569568
ataataaaattagt

SEQ ID NO: 175641 - DNA, 14 bp, Unknown
  misc_feature (1)..( 14): Result.005 file - promoters50/1569568
ttatataactattt

SEQ ID NO: 175642 - DNA, 14 bp, Unknown
  misc_feature (1)..( 14): Result.005 file - promoters50/1569568
gtatgctactattc

SEQ ID NO: 175643 - DNA, 14 bp, Unknown
  misc_feature (1)..( 14): Result.005 file - promoters50/1569568
ataacaaacatcgt

SEQ ID NO: 175644 - DNA, 11 bp, Unknown
  misc_feature (1)..( 11): Result.005 file - promoters50/1569568
tctatatatat

SEQ ID NO: 175645 - DNA, 11 bp, Unknown
  misc_feature (1)..( 11): Result.005 file - promoters50/1569568
cttatatattc

SEQ ID NO: 175646 - DNA, 11 bp, Unknown
  misc_feature (1)..( 11): Result.005 file - promoters50/1569568
cctataaatat

SEQ ID NO: 175647 - DNA, 11 bp, Unknown
  misc_feature (1)..( 11): Result.005 file - promoters50/1569568
cctatatatca

SEQ ID NO: 175648 - DNA, 11 bp, Unknown
  misc_feature (1)..( 11): Result.005 file - promoters50/1569568
ataataaatac

SEQ ID NO: 175649 - DNA, 11 bp, Unknown
  misc_feature (1)..( 11): Result.005 file - promoters50/1569568
aatataaatat

SEQ ID NO: 175650 - DNA, 11 bp, Unknown
  misc_feature (1)..( 11): Result.005 file - promoters50/1569568
cctttaaaaaa

SEQ ID NO: 175651 - DNA, 11 bp, Unknown
  misc_feature (1)..( 11): Result.005 file - promoters50/1569568
aatttagataa

SEQ ID NO: 175652 - DNA, 11 bp, Unknown
  misc_feature (1)..( 11): Result.005 file - promoters50/1569568
tatttatataa

SEQ ID NO: 175653 - DNA, 11 bp, Unknown
  misc_feature (1)..( 11): Result.005 file - promoters50/1569568
gattaataatt

SEQ ID NO: 175654 - DNA, 11 bp, Unknown
  misc_feature (1)..( 11): Result.005 file - promoters50/1569568
gattaaaaact

SEQ ID NO: 175655 - DNA, 11 bp, Unknown
  misc_feature (1)..( 11): Result.005 file - promoters50/1569568
ccttaatatcg

SEQ ID NO: 175656 - DNA, 11 bp, Unknown
  misc_feature (1)..( 11): Result.005 file - promoters50/1569568
tctctatataa

SEQ ID NO: 175657 - DNA, 11 bp, Unknown
  misc_feature (1)..( 11): Result.005 file - promoters50/1569568
atttaaaaatt

SEQ ID NO: 175658 - DNA, 11 bp, Unknown
  misc_feature (1)..( 11): Result.005 file - promoters50/1569568
tggtatttact

SEQ ID NO: 175659 - DNA, 11 bp, Unknown
  misc_feature (1)..( 11): Result.005 file - promoters50/1569568
gtttatttact

SEQ ID NO: 175660 - DNA, 11 bp, Unknown
  misc_feature (1)..( 11): Result.005 file - promoters50/1569568
ttttatttcat

SEQ ID NO: 175661 - DNA, 11 bp, Unknown
  misc_feature (1)..( 11): Result.005 file - promoters50/1569568
atttattcacc

SEQ ID NO: 175662 - DNA, 11 bp, Unknown
  misc_feature (1)..( 11): Result.005 file - promoters50/1569568
ttttatttcac

SEQ ID NO: 175663 - DNA, 11 bp, Unknown
  misc_feature (1)..( 11): Result.005 file - promoters50/1569568
taatatctcat

SEQ ID NO: 175664 - DNA, 11 bp, Unknown
  misc_feature (1)..( 11): Result.005 file - promoters50/1569568
aattattttca

SEQ ID NO: 175665 - DNA, 15 bp, Unknown
  misc_feature (1)..( 15): Result.005 file - promoters50/1569568
ttcttctatatatat

SEQ ID NO: 175666 - DNA, 15 bp, Unknown
  misc_feature (1)..( 15): Result.005 file - promoters50/1569568
gtctcctataataaa

SEQ ID NO: 175667 - DNA, 15 bp, Unknown
  misc_feature (1)..( 15): Result.005 file - promoters50/1569568
gtctcttatatattc

SEQ ID NO: 175668 - DNA, 15 bp, Unknown
  misc_feature (1)..( 15): Result.005 file - promoters50/1569568
ttgtcctataaatat

SEQ ID NO: 175669 - DNA, 15 bp, Unknown
  misc_feature (1)..( 15): Result.005 file - promoters50/1569568
aattcctatatatca

SEQ ID NO: 175670 - DNA, 15 bp, Unknown
  misc_feature (1)..( 15): Result.005 file - promoters50/1569568
gtagcctttaaaaaa

SEQ ID NO: 175671 - DNA, 11 bp, Unknown
  misc_feature (1)..( 11): Result.005 file - promoters50/1569568
ttttatttcat

SEQ ID NO: 175672 - DNA, 11 bp, Unknown
  misc_feature (1)..( 11): Result.005 file - promoters50/1569568
taatatctcat

SEQ ID NO: 175673 - DNA, 11 bp, Unknown
  misc_feature (1)..( 11): Result.005 file - promoters50/1569568
aattattttca

SEQ ID NO: 175674 - DNA, 11 bp, Unknown
  misc_feature (1)..( 11): Result.005 file - promoters50/1569568
gtttatttact

SEQ ID NO: 175675 - DNA, 11 bp, Unknown
  misc_feature (1)..( 11): Result.005 file - promoters50/1569568
ttttatttcac

SEQ ID NO: 175676 - DNA, 12 bp, Unknown
  misc_feature (1)..( 12): Result.005 file - promoters50/1569568
acctatattctt

SEQ ID NO: 175677 - DNA, 35 bp, Unknown; identical to SEQ ID NO: 133959
  misc_feature (1)..( 35): Result.005 file - promoters50/1569721

SEQ ID NO: 175678 - DNA, 35 bp, Unknown; identical to SEQ ID NO: 133958
  misc_feature (1)..( 35): Result.005 file - promoters50/1569721

SEQ ID NO: 175679 - DNA, 35 bp, Unknown; identical to SEQ ID NO: 164299
  misc_feature (1)..( 35): Result.005 file - promoters50/1569721

SEQ ID NO: 175680 - DNA, 35 bp, Unknown
  misc_feature (1)..( 35): Result.005 file - promoters50/1569721
aaccattttatagaaatattaaaatcaaaaatgat

SEQ ID NO: 175681 - DNA, 35 bp, Unknown
  misc_feature (1)..( 35): Result.005 file - promoters50/1569721
gaaatagtttggttatgccgtttaagtgataaacc

SEQ ID NO: 175682 - DNA, 35 bp, Unknown
  misc_feature (1)..( 35): Result.005 file - promoters50/1569721
ttccatttcataccttttttctctttcaagcttat

SEQ ID NO: 175683 - DNA, 11 bp, Unknown
  misc_feature (1)..( 11): Result.005 file - promoters50/1569721
tattctagatg

SEQ ID NO: 175684 - DNA, 11 bp, Unknown
  misc_feature (1)..( 11): Result.005 file - promoters50/1569721
gtttctagggt

SEQ ID NO: 175685 - DNA, 11 bp, Unknown
  misc_feature (1)..( 11): Result.005 file - promoters50/1569721
tattatagatg

SEQ ID NO: 175686 - DNA, 11 bp, Unknown
  misc_feature (1)..( 11): Result.005 file - promoters50/1569721
ttttctacaaa

SEQ ID NO: 175687 - DNA, 11 bp, Unknown
  misc_feature (1)..( 11): Result.005 file - promoters50/1569721
tcttcaaggtt

SEQ ID NO: 175688 - DNA, 11 bp, Unknown
  misc_feature (1)..( 11): Result.005 file - promoters50/1569721
cattataaaat

SEQ ID NO: 175689 - DNA, 8 bp, Unknown
  misc_feature (1)..( 8): Result.005 file - promoters50/1570085
ttatataa

SEQ ID NO: 175690 - DNA, 8 bp, Unknown
  misc_feature (1)..( 8): Result.005 file - promoters50/1570085
atatatac

SEQ ID NO: 175691 - DNA, 8 bp, Unknown
  misc_feature (1)..( 8): Result.005 file - promoters50/1570085
atatttac

SEQ ID NO: 175692 - DNA, 7 bp, Unknown
  misc_feature (1)..( 7): Result.005 file - promoters50/1570085
tttgttt

SEQ ID NO: 175693 - DNA, 7 bp, Unknown
  misc_feature (1)..( 7): Result.005 file - promoters50/1570085
tttattt

SEQ ID NO: 175694 - DNA, 7 bp, Unknown
  misc_feature (1)..( 7): Result.005 file - promoters50/1570085
cttattt

SEQ ID NO: 175695 - DNA, 16 bp, Unknown
  misc_feature (1)..( 16): Result.005 file - promoters50/1570107
caattaccttaattat

SEQ ID NO: 175696 - DNA, 16 bp, Unknown
  misc_feature (1)..( 16): Result.005 file - promoters50/1570107
caataaccataataaa

SEQ ID NO: 175697 - DNA, 16 bp, Unknown
  misc_feature (1)..( 16): Result.005 file - promoters50/1570107
acggtcacataataaa

SEQ ID NO: 175698 - DNA, 8 bp, Unknown
  misc_feature (1)..( 8): Result.005 file - promoters50/1570107
aattcttc

SEQ ID NO: 175699 - DNA, 8 bp, Unknown
  misc_feature (1)..( 8): Result.005 file - promoters50/1570107
aattgttc

SEQ ID NO: 175700 - DNA, 8 bp, Unknown
  misc_feature (1)..( 8): Result.005 file - promoters50/1570107
atttgttc

SEQ ID NO: 175701 - DNA, 8 bp, Unknown
  misc_feature (1)..( 8): Result.005 file - promoters50/1570107
ttttaaaa

SEQ ID NO: 175702 - DNA, 8 bp, Unknown
  misc_feature (1)..( 8): Result.005 file - promoters50/1570107
tttcaaaa

SEQ ID NO: 175703 - DNA, 8 bp, Unknown
  misc_feature (1)..( 8): Result.005 file - promoters50/1570107
aattaaaa

SEQ ID NO: 175704 - DNA, 7 bp, Unknown
  misc_feature (1)..( 7): Result.005 file - promoters50/1570107
caaaaaa

SEQ ID NO: 175705 - DNA, 7 bp, Unknown
  misc_feature (1)..( 7): Result.005 file - promoters50/1570107
caaaaaa

SEQ ID NO: 175706 - DNA, 7 bp, Unknown
  misc_feature (1)..( 7): Result.005 file - promoters50/1570107
gaaaaaa

SEQ ID NO: 175707 - DNA, 7 bp, Unknown
  misc_feature (1)..( 7): Result.005 file - promoters50/1570107
gaaaaaa

SEQ ID NO: 175708 - DNA, 8 bp, Unknown
  misc_feature (1)..( 8): Result.005 file - promoters50/1570107
cttttttt

SEQ ID NO: 175709 - DNA, 8 bp, Unknown
  misc_feature (1)..( 8): Result.005 file - promoters50/1570107
cttttttc

SEQ ID NO: 175710 - DNA, 8 bp, Unknown
  misc_feature (1)..( 8): Result.005 file - promoters50/1570107
tttttttt

SEQ ID NO: 175711 - DNA, 11 bp, Unknown
  misc_feature (1)..( 11): Result.005 file - promoters50/1570107
taagatacgta

SEQ ID NO: 175712 - DNA, 11 bp, Unknown
  misc_feature (1)..( 11): Result.005 file - promoters50/1570107
agagattcgta

SEQ ID NO: 175713 - DNA, 11 bp, Unknown
  misc_feature (1)..( 11): Result.005 file - promoters50/1570107
agagagtcggc

SEQ ID NO: 175714 - DNA, 8 bp, Unknown
  misc_feature (1)..( 8): Result.005 file - promoters50/1570107
tcaacaac

SEQ ID NO: 175715 - DNA, 8 bp, Unknown
  misc_feature (1)..( 8): Result.005 file - promoters50/1570107
tcaataac

SEQ ID NO: 175716 - DNA, 8 bp, Unknown
  misc_feature (1)..( 8): Result.005 file - promoters50/1570107
tcaataac

SEQ ID NO: 175717 - DNA, 7 bp, Unknown
  misc_feature (1)..( 7): Result.005 file - promoters50/1570107
aattaag

SEQ ID NO: 175718 - DNA, 7 bp, Unknown
  misc_feature (1)..( 7): Result.005 file - promoters50/1570107
aattaag

SEQ ID NO: 175719 - DNA, 7 bp, Unknown
  misc_feature (1)..( 7): Result.005 file - promoters50/1570107
aattaaa

SEQ ID NO: 175720 - DNA, 6 bp, Unknown
  misc_feature (1)..( 6): Result.005 file - promoters50/1570107
gaaatg

SEQ ID NO: 175721 - DNA, 6 bp, Unknown
  misc_feature (1)..( 6): Result.005 file - promoters50/1570107
gaaatg

SEQ ID NO: 175722 - DNA, 6 bp, Unknown
  misc_feature (1)..( 6): Result.005 file - promoters50/1570107
gaaatg

SEQ ID NO: 175723 - DNA, 8 bp, Unknown
  misc_feature (1)..( 8): Result.005 file - promoters50/1570107
gatattaa

SEQ ID NO: 175724 - DNA, 8 bp, Unknown
  misc_feature (1)..( 8): Result.005 file - promoters50/1570107
cataataa

SEQ ID NO: 175725 - DNA, 8 bp, Unknown
  misc_feature (1)..( 8): Result.005 file - promoters50/1570107
catcatac

SEQ ID NO: 175726 - DNA, 9 bp, Unknown
  misc_feature (1)..( 9): Result.005 file - promoters50/1570116
aaaataact

SEQ ID NO: 175727 - DNA, 9 bp, Unknown
  misc_feature (1)..( 9): Result.005 file - promoters50/1570116
aaagtaatg

SEQ ID NO: 175728 - DNA, 9 bp, Unknown
  misc_feature (1)..( 9): Result.005 file - promoters50/1570116
aaaataata

SEQ ID NO: 175729 - DNA, 9 bp, Unknown
  misc_feature (1)..( 9): Result.005 file - promoters50/1570116
aaaaaaact

SEQ ID NO: 175730 - DNA, 9 bp, Unknown
  misc_feature (1)..( 9): Result.005 file - promoters50/1570116
aaactaatt

SEQ ID NO: 175731 - DNA, 9 bp, Unknown
  misc_feature (1)..( 9): Result.005 file - promoters50/1570116
aaaatactt

SEQ ID NO: 175732 - DNA, 13 bp, Unknown
  misc_feature (1)..( 13): Result.005 file - promoters50/1570116
aaaaaaaaattct

SEQ ID NO: 175733 - DNA, 13 bp, Unknown
  misc_feature (1)..( 13): Result.005 file - promoters50/1570116
attgaaaaatcat

SEQ ID NO: 175734 - DNA, 13 bp, Unknown
  misc_feature (1)..( 13): Result.005 file - promoters50/1570116
gagtcaaaatttc

SEQ ID NO: 175735 - DNA, 13 bp, Unknown
  misc_feature (1)..( 13): Result.005 file - promoters50/1570116
aaaaaaaaatgga

SEQ ID NO: 175736 - DNA, 13 bp, Unknown
  misc_feature (1)..( 13): Result.005 file - promoters50/1570116
aaaaaaaaaatct

SEQ ID NO: 175737 - DNA, 13 bp, Unknown
  misc_feature (1)..( 13): Result.005 file - promoters50/1570116
tcataaaagtttt

SEQ ID NO: 175738 - DNA, 13 bp, Unknown
  misc_feature (1)..( 13): Result.005 file - promoters50/1570116
ctacaaaagttag

SEQ ID NO: 175739 - DNA, 12 bp, Unknown
  misc_feature (1)..( 12): Result.005 file - promoters50/1570116
tcgagacattat

SEQ ID NO: 175740 - DNA, 12 bp, Unknown
  misc_feature (1)..( 12): Result.005 file - promoters50/1570116
attagaaatttt

SEQ ID NO: 175741 - DNA, 12 bp, Unknown
  misc_feature (1)..( 12): Result.005 file - promoters50/1570116
cataaacattaa

SEQ ID NO: 175742 - DNA, 12 bp, Unknown
  misc_feature (1)..( 12): Result.005 file - promoters50/1570116
tttataaaagtt

SEQ ID NO: 175743 - DNA, 12 bp, Unknown
  misc_feature (1)..( 12): Result.005 file - promoters50/1570116
ttgaaaaagttt

SEQ ID NO: 175744 - DNA, 12 bp, Unknown
  misc_feature (1)..( 12): Result.005 file - promoters50/1570116
attaaaaagtct

SEQ ID NO: 175745 - DNA, 9 bp, Unknown
  misc_feature (1)..( 9): Result.005 file - promoters50/1570179
tcaccacat

SEQ ID NO: 175746 - DNA, 9 bp, Unknown
  misc_feature (1)..( 9): Result.005 file - promoters50/1570179
acactacaa

SEQ ID NO: 175747 - DNA, 9 bp, Unknown
  misc_feature (1)..( 9): Result.005 file - promoters50/1570179
acaatacaa

SEQ ID NO: 175748 - DNA, 7 bp, Unknown
  misc_feature (1)..( 7): Result.005 file - promoters50/1570179
ccaagaa

SEQ ID NO: 175749 - DNA, 7 bp, Unknown
  misc_feature (1)..( 7): Result.005 file - promoters50/1570179
acaagaa

SEQ ID NO: 175750 - DNA, 7 bp, Unknown
  misc_feature (1)..( 7): Result.005 file - promoters50/1570179
acaagat

SEQ ID NO: 175751 - DNA, 16 bp, Unknown
  misc_feature (1)..( 16): Result.005 file - promoters50/1570293
aatggatagtggctaa

SEQ ID NO: 175752 - DNA, 16 bp, Unknown
  misc_feature (1)..( 16): Result.005 file - promoters50/1570293
ccgggaaagtgtgatt

SEQ ID NO: 175753 - DNA, 16 bp, Unknown
  misc_feature (1)..( 16): Result.005 file - promoters50/1570293
aatagataactatgcc

SEQ ID NO: 175754 - DNA, 16 bp, Unknown
  misc_feature (1)..( 16): Result.005 file - promoters50/1570293
cgaggaaggtgtgatt

SEQ ID NO: 175755 - DNA, 16 bp, Unknown
  misc_feature (1)..( 16): Result.005 file - promoters50/1570293
gacagataacgttgtg

SEQ ID NO: 175756 - DNA, 8 bp, Unknown
  misc_feature (1)..( 8): Result.005 file - promoters50/1570293
gaatttta

SEQ ID NO: 175757 - DNA, 8 bp, Unknown
  misc_feature (1)..( 8): Result.005 file - promoters50/1570293
aaattttc

SEQ ID NO: 175758 - DNA, 9 bp, Unknown
  misc_feature (1)..( 9): Result.005 file - promoters50/1570293
aaagtttta

SEQ ID NO: 175759 - DNA, 9 bp, Unknown
  misc_feature (1)..( 9): Result.005 file - promoters50/1570293
aagatttaa

SEQ ID NO: 175760 - DNA, 9 bp, Unknown
  misc_feature (1)..( 9): Result.005 file - promoters50/1570293
aagaattaa

SEQ ID NO: 175761 - DNA, 9 bp, Unknown
  misc_feature (1)..( 9): Result.005 file - promoters50/1570622
aaacataac

SEQ ID NO: 175762 - DNA, 9 bp, Unknown
  misc_feature (1)..( 9): Result.005 file - promoters50/1570622
caacttaat

SEQ ID NO: 175763 - DNA, 9 bp, Unknown
  misc_feature (1)..( 9): Result.005 file - promoters50/1570622
aaaaataca

SEQ ID NO: 175764 - DNA, 9 bp, Unknown
  misc_feature (1)..( 9): Result.005 file - promoters50/1570622
tgacataaa

SEQ ID NO: 175765 - DNA, 9 bp, Unknown
  misc_feature (1)..( 9): Result.005 file - promoters50/1570622
taaaatata

SEQ ID NO: 175766 - DNA, 9 bp, Unknown
  misc_feature (1)..( 9): Result.005 file - promoters50/1570622
aaaaattca

SEQ ID NO: 175767 - DNA, 9 bp, Unknown
  misc_feature (1)..( 9): Result.005 file - promoters50/1570622
aaaaacagt

SEQ ID NO: 175768 - DNA, 20 bp, Unknown
  misc_feature (1)..( 20): Result.005 file - promoters50/1570622
ttaatacaattgagagataa

SEQ ID NO: 175769 - DNA, 20 bp, Unknown
  misc_feature (1)..( 20): Result.005 file - promoters50/1570622
gtaaaacaaaacacaccctt

SEQ ID NO: 175770 - DNA, 20 bp, Unknown
  misc_feature (1)..( 20): Result.005 file - promoters50/1570622
tcggtacaattctggttgaa

SEQ ID NO: 175771 - DNA, 20 bp, Unknown
  misc_feature (1)..( 20): Result.005 file - promoters50/1570622
gaaaaaaaaaaaaggaaaac

SEQ ID NO: 175772 - DNA, 20 bp, Unknown
  misc_feature (1)..( 20): Result.005 file - promoters50/1570622
ggaaaaatgactgctgacta

SEQ ID NO: 175773 - DNA, 20 bp, Unknown
  misc_feature (1)..( 20): Result.005 file - promoters50/1570622
gttaaacaagttttgtttag

SEQ ID NO: 175774 - DNA, 11 bp, Unknown
  misc_feature (1)..( 11): Result.005 file - promoters50/1570622
ttaattatatt

SEQ ID NO: 175775 - DNA, 11 bp, Unknown
  misc_feature (1)..( 11): Result.005 file - promoters50/1570622
ctaaatataaa

SEQ ID NO: 175776 - DNA, 11 bp, Unknown
  misc_feature (1)..( 11): Result.005 file - promoters50/1570622
tcaaatataga

SEQ ID NO: 175777 - DNA, 11 bp, Unknown
  misc_feature (1)..( 11): Result.005 file - promoters50/1570622
ataaaaagtta

SEQ ID NO: 175778 - DNA, 11 bp, Unknown
  misc_feature (1)..( 11): Result.005 file - promoters50/1570622
aaaaaaagtta

SEQ ID NO: 175779 - DNA, 11 bp, Unknown
  misc_feature (1)..( 11): Result.005 file - promoters50/1570622
gaaaacaaacc

SEQ ID NO: 175780 - DNA, 9 bp, Unknown
  misc_feature (1)..( 9): Result.005 file - promoters50/1570735
actaactct

SEQ ID NO: 175781 - DNA, 9 bp, Unknown
  misc_feature (1)..( 9): Result.005 file - promoters50/1570735
tttaaatct

SEQ ID NO: 175782 - DNA, 9 bp, Unknown
  misc_feature (1)..( 9): Result.005 file - promoters50/1570735
tttatatca

SEQ ID NO: 175783 - DNA, 10 bp, Unknown
  misc_feature (1)..( 10): Result.005 file - promoters50/1570735
tctttcttgt

SEQ ID NO: 175784 - DNA, 10 bp, Unknown
  misc_feature (1)..( 10): Result.005 file - promoters50/1570735
tctttctttt

SEQ ID NO: 175785 - DNA, 10 bp, Unknown
  misc_feature (1)..( 10): Result.005 file - promoters50/1570735
tatttgtttt

SEQ ID NO: 175786 - DNA, 8 bp, Unknown
  misc_feature (1)..( 8): Result.005 file - promoters50/1570735
gttgtttg

SEQ ID NO: 175787 - DNA, 8 bp, Unknown
  misc_feature (1)..( 8): Result.005 file - promoters50/1570735
tttgtttt

SEQ ID NO: 175788 - DNA, 8 bp, Unknown
  misc_feature (1)..( 8): Result.005 file - promoters50/1570735
tttctttt

SEQ ID NO: 175789 - DNA, 12 bp, Unknown
  misc_feature (1)..( 12): Result.005 file - promoters50/1570860
aagaaaaaattc

SEQ ID NO: 175790 - DNA, 12 bp, Unknown
  misc_feature (1)..( 12): Result.005 file - promoters50/1570860
tcaacaaaatta

SEQ ID NO: 175791 - DNA, 13 bp, Unknown
  misc_feature (1)..( 13): Result.005 file - promoters50/1570860
aaataaaacattg

SEQ ID NO: 175792 - DNA, 13 bp, Unknown
  misc_feature (1)..( 13): Result.005 file - promoters50/1570860
tgtgctgaaatta

SEQ ID NO: 175793 - DNA, 13 bp, Unknown
  misc_feature (1)..( 13): Result.005 file - promoters50/1570860
atccaaaccatat

SEQ ID NO: 175794 - DNA, 13 bp, Unknown
  misc_feature (1)..( 13): Result.005 file - promoters50/1570860
aagagtaccgtat

SEQ ID NO: 175795 - DNA, 13 bp, Unknown
  misc_feature (1)..( 13): Result.005 file - promoters50/1570860
ccatgaatgattt

SEQ ID NO: 175796 - DNA, 14 bp, Unknown
  misc_feature (1)..( 14): Result.005 file - promoters50/1570860
aaaccaaacatgtt

SEQ ID NO: 175797 - DNA, 14 bp, Unknown
  misc_feature (1)..( 14): Result.005 file - promoters50/1570860
caaaaaaaaatgtt

SEQ ID NO: 175798 - DNA, 14 bp, Unknown
  misc_feature (1)..( 14): Result.005 file - promoters50/1570860
aaactaaagatgac

SEQ ID NO: 175799 - DNA, 14 bp, Unknown
  misc_feature (1)..( 14): Result.005 file - promoters50/1570860
gagaaagagatgag

SEQ ID NO: 175800 - DNA, 14 bp, Unknown
  misc_feature (1)..( 14): Result.005 file - promoters50/1570860
ttgttaaagatgta

SEQ ID NO: 175801 - DNA, 14 bp, Unknown
  misc_feature (1)..( 14): Result.005 file - promoters50/1570860
aatacttaaattaa

SEQ ID NO: 175802 - DNA, 9 bp, Unknown
  misc_feature (1)..( 9): Result.005 file - promoters50/1570860
tctaaaaaa

SEQ ID NO: 175803 - DNA, 9 bp, Unknown
  misc_feature (1)..( 9): Result.005 file - promoters50/1570860
tgtaataaa

SEQ ID NO: 175804 - DNA, 9 bp, Unknown
  misc_feature (1)..( 9): Result.005 file - promoters50/1570860
attcgaaaa

SEQ ID NO: 175805 - DNA, 9 bp, Unknown
  misc_feature (1)..( 9): Result.005 file - promoters50/1570860
attcgaatc

SEQ ID NO: 175806 - DNA, 9 bp, Unknown
  misc_feature (1)..( 9): Result.005 file - promoters50/1570860
attagaaac

SEQ ID NO: 175807 - DNA, 9 bp, Unknown
  misc_feature (1)..( 9): Result.005 file - promoters50/1570860
ttgcgaaaa

SEQ ID NO: 175808 - DNA, 16 bp, Unknown
  misc_feature (1)..( 16): Result.005 file - promoters50/1570869
aacaatttttaaattt

SEQ ID NO: 175809 - DNA, 16 bp, Unknown
  misc_feature (1)..( 16): Result.005 file - promoters50/1570869
atatctttataagtat

SEQ ID NO: 175810 - DNA, 16 bp, Unknown
  misc_feature (1)..( 16): Result.005 file - promoters50/1570869
tatacgttttaaaagt

SEQ ID NO: 175811 - DNA, 16 bp, Unknown
  misc_feature (1)..( 16): Result.005 file - promoters50/1570869
ctcgcttcataacaaa

SEQ ID NO: 175812 - DNA, 16 bp, Unknown
  misc_feature (1)..( 16): Result.005 file - promoters50/1570869
ataactttatgttatt

SEQ ID NO: 175813 - DNA, 16 bp, Unknown
  misc_feature (1)..( 16): Result.005 file - promoters50/1570869
gaaaacttataattat

SEQ ID NO: 175814 - DNA, 16 bp, Unknown
  misc_feature (1)..( 16): Result.005 file - promoters50/1570869
cgaaatttgtaacttc

SEQ ID NO: 175815 - DNA, 11 bp, Unknown
  misc_feature (1)..( 11): Result.005 file - promoters50/1570869
taaatttttta

SEQ ID NO: 175816 - DNA, 11 bp, Unknown
  misc_feature (1)..( 11): Result.005 file - promoters50/1570869
ttaatcttttg

SEQ ID NO: 175817 - DNA, 11 bp, Unknown
  misc_feature (1)..( 11): Result.005 file - promoters50/1570869
gaaatttcctc

SEQ ID NO: 175818 - DNA, 11 bp, Unknown
  misc_feature (1)..( 11): Result.005 file - promoters50/1570869
ataattttgtt

SEQ ID NO: 175819 - DNA, 11 bp, Unknown
  misc_feature (1)..( 11): Result.005 file - promoters50/1570869
taaatttgtta

SEQ ID NO: 175820 - DNA, 12 bp, Unknown
  misc_feature (1)..( 12): Result.005 file - promoters50/1570869
tatattgtgtta

SEQ ID NO: 175821 - DNA, 13 bp, Unknown
  misc_feature (1)..( 13): Result.005 file - promoters50/1570869
tgcattagttctt

SEQ ID NO: 175822 - DNA, 15 bp, Unknown
  misc_feature (1)..( 15): Result.005 file - promoters50/1570869
ttttaaaatatatgg

SEQ ID NO: 175823 - DNA, 15 bp, Unknown
  misc_feature (1)..( 15): Result.005 file - promoters50/1570869
ttctaaaatattgtt

SEQ ID NO: 175824 - DNA, 15 bp, Unknown
  misc_feature (1)..( 15): Result.005 file - promoters50/1570869
ttttaaaagtaagat

SEQ ID NO: 175825 - DNA, 15 bp, Unknown
  misc_feature (1)..( 15): Result.005 file - promoters50/1570869
ttttgaaataatttc

SEQ ID NO: 175826 - DNA, 15 bp, Unknown
  misc_feature (1)..( 15): Result.005 file - promoters50/1570869
gtgttaaatatgaat

SEQ ID NO: 175827 - DNA, 15 bp, Unknown
  misc_feature (1)..( 15): Result.005 file - promoters50/1570869
ctgagaaatagattt

SEQ ID NO: 175828 - DNA, 15 bp, Unknown
  misc_feature (1)..( 15): Result.005 file - promoters50/1570869
atgttagataggaaa

SEQ ID NO: 175829 - DNA, 15 bp, Unknown
  misc_feature (1)..( 15): Result.005 file - promoters50/1570869
gtgttaaactgttag

SEQ ID NO: 175830 - DNA, 12 bp, Unknown
  misc_feature (1)..( 12): Result.005 file - promoters50/1570869
tttataaataaa

SEQ ID NO: 175831 - DNA, 12 bp, Unknown
  misc_feature (1)..( 12): Result.005 file - promoters50/1570869
cctataaatatc

SEQ ID NO: 175832 - DNA, 12 bp, Unknown
  misc_feature (1)..( 12): Result.005 file - promoters50/1570869
tatataaactct

SEQ ID NO: 175833 - DNA, 12 bp, Unknown
  misc_feature (1)..( 12): Result.005 file - promoters50/1570869
tatataaatgac

SEQ ID NO: 175834 - DNA, 12 bp, Unknown
  misc_feature (1)..( 12): Result.005 file - promoters50/1570869
tatataaacaaa

SEQ ID NO: 175835 - DNA, 12 bp, Unknown
  misc_feature (1)..( 12): Result.005 file - promoters50/1570869
actataaaatca

SEQ ID NO: 175836 - DNA, 12 bp, Unknown
  misc_feature (1)..( 12): Result.005 file - promoters50/1570869
tatataataacc

SEQ ID NO: 175837 - DNA, 12 bp, Unknown
  misc_feature (1)..( 12): Result.005 file - promoters50/1570869
cccataaaagca

SEQ ID NO: 175838 - DNA, 16 bp, Unknown
  misc_feature (1)..( 16): Result.005 file - promoters50/1570869
ggatagtaaaaaaaga

SEQ ID NO: 175839 - DNA, 16 bp, Unknown
  misc_feature (1)..( 16): Result.005 file - promoters50/1570869
aaatctgagaaataga

SEQ ID NO: 175840 - DNA, 16 bp, Unknown
  misc_feature (1)..( 16): Result.005 file - promoters50/1570869
ttagataggaaaaagt

SEQ ID NO: 175841 - DNA, 16 bp, Unknown
  misc_feature (1)..( 16): Result.005 file - promoters50/1570869
ataaattttaaaatta

SEQ ID NO: 175842 - DNA, 16 bp, Unknown
  misc_feature (1)..( 16): Result.005 file - promoters50/1570869
tactagtatatatatt

SEQ ID NO: 175843 - DNA, 16 bp, Unknown
  misc_feature (1)..( 16): Result.005 file - promoters50/1570869
taaattttgaaataat

SEQ ID NO: 175844 - DNA, 16 bp, Unknown
  misc_feature (1)..( 16): Result.005 file - promoters50/1570869
atatggatagtaaaaa

SEQ ID NO: 175845 - DNA, 16 bp, Unknown
  misc_feature (1)..( 16): Result.005 file - promoters50/1570869
tgttagataggaaaaa

SEQ ID NO: 175846 - DNA, 16 bp, Unknown
  misc_feature (1)..( 16): Result.005 file - promoters50/1570869
aaatagatttgaaaaa

SEQ ID NO: 175847 - DNA, 16 bp, Unknown
  misc_feature (1)..( 16): Result.005 file - promoters50/1570869
tcataaattttaaaat

SEQ ID NO: 175848 - DNA, 16 bp, Unknown
  misc_feature (1)..( 16): Result.005 file - promoters50/1570869
tgttaaatatgaatat

SEQ ID NO: 175849 - DNA, 16 bp, Unknown
  misc_feature (1)..( 16): Result.005 file - promoters50/1570869
tgtaaattttgaaata

SEQ ID NO: 175850 - DNA, 10 bp, Unknown
  misc_feature (1)..( 10): Result.005 file - promoters50/1570869
ttttgattct

SEQ ID NO: 175851 - DNA, 10 bp, Unknown
  misc_feature (1)..( 10): Result.005 file - promoters50/1570869
gttttattta

SEQ ID NO: 175852 - DNA, 10 bp, Unknown
  misc_feature (1)..( 10): Result.005 file - promoters50/1570869
ttttgaaata

SEQ ID NO: 175853 - DNA, 10 bp, Unknown
  misc_feature (1)..( 10): Result.005 file - promoters50/1570869
atttgaaaaa

SEQ ID NO: 175854 - DNA, 10 bp, Unknown
  misc_feature (1)..( 10): Result.005 file - promoters50/1570869
tattgtgtta

SEQ ID NO: 175855 - DNA, 10 bp, Unknown
  misc_feature (1)..( 10): Result.005 file - promoters50/1570869
attttaaaat

SEQ ID NO: 175856 - DNA, 9 bp, Unknown
  misc_feature (1)..( 9): Result.005 file - promoters50/1570966
aaagtttat

SEQ ID NO: 175857 - DNA, 9 bp, Unknown
  misc_feature (1)..( 9): Result.005 file - promoters50/1570966
aaattttga

SEQ ID NO: 175858 - DNA, 9 bp, Unknown
  misc_feature (1)..( 9): Result.005 file - promoters50/1570966
taagtttca

SEQ ID NO: 175859 - DNA, 9 bp, Unknown
  misc_feature (1)..( 9): Result.005 file - promoters50/1570966
atattctga

SEQ ID NO: 175860 - DNA, 9 bp, Unknown
  misc_feature (1)..( 9): Result.005 file - promoters50/1570966
taactttga

SEQ ID NO: 175861 - DNA, 9 bp, Unknown
  misc_feature (1)..( 9): Result.005 file - promoters50/1570966
gaagtatca

SEQ ID NO: 175862 - DNA, 10 bp, Unknown
  misc_feature (1)..( 10): Result.005 file - promoters50/1570966
aattaactta

SEQ ID NO: 175863 - DNA, 10 bp, Unknown
  misc_feature (1)..( 10): Result.005 file - promoters50/1570966
agttaacttt

SEQ ID NO: 175864 - DNA, 10 bp, Unknown
  misc_feature (1)..( 10): Result.005 file - promoters50/1570966
tattaacttt

SEQ ID NO: 175865 - DNA, 10 bp, Unknown
  misc_feature (1)..( 10): Result.005 file - promoters50/1570966
agtcaacttg

SEQ ID NO: 175866 - DNA, 10 bp, Unknown
  misc_feature (1)..( 10): Result.005 file - promoters50/1570966
cgttaatttt

SEQ ID NO: 175867 - DNA, 11 bp, Unknown
  misc_feature (1)..( 11): Result.005 file - promoters50/1570966
tattaaccttg

SEQ ID NO: 175868 - DNA, 12 bp, Unknown
  misc_feature (1)..( 12): Result.005 file - promoters50/1570966
tttattttttat

SEQ ID NO: 175869 - DNA, 12 bp, Unknown
  misc_feature (1)..( 12): Result.005 file - promoters50/1570966
aaacctttttat

SEQ ID NO: 175870 - DNA, 12 bp, Unknown
  misc_feature (1)..( 12): Result.005 file - promoters50/1570966
gttaatttttga

SEQ ID NO: 175871 - DNA, 12 bp, Unknown
  misc_feature (1)..( 12): Result.005 file - promoters50/1570966
ttctatttctat

SEQ ID NO: 175872 - DNA, 12 bp, Unknown
  misc_feature (1)..( 12): Result.005 file - promoters50/1570966
gttaactttgta

SEQ ID NO: 175873 - DNA, 12 bp, Unknown
  misc_feature (1)..( 12): Result.005 file - promoters50/1570966
attaaccttgag

SEQ ID NO: 175874 - DNA, 11 bp, Unknown
  misc_feature (1)..( 11): Result.005 file - promoters50/1570966
tatataacaca

SEQ ID NO: 175875 - DNA, 11 bp, Unknown
  misc_feature (1)..( 11): Result.005 file - promoters50/1570966
gatataataca

SEQ ID NO: 175876 - DNA, 11 bp, Unknown
  misc_feature (1)..( 11): Result.005 file - promoters50/1570966
catataaattt

SEQ ID NO: 175877 - DNA, 11 bp, Unknown
  misc_feature (1)..( 11): Result.005 file - promoters50/1570966
tatatatagaa

SEQ ID NO: 175878 - DNA, 11 bp, Unknown
  misc_feature (1)..( 11): Result.005 file - promoters50/1570966
tatatataaaa

SEQ ID NO: 175879 - DNA, 11 bp, Unknown
  misc_feature (1)..( 11): Result.005 file - promoters50/1570966
tatataagaaa

SEQ ID NO: 175880 - DNA, 11 bp, Unknown
  misc_feature (1)..( 11): Result.005 file - promoters50/1570966
tatatataacc

SEQ ID NO: 175881 - DNA, 12 bp, Unknown
  misc_feature (1)..( 12): Result.005 file - promoters50/1571014
tttttaacaaga

SEQ ID NO: 175882 - DNA, 12 bp, Unknown
  misc_feature (1)..( 12): Result.005 file - promoters50/1571014
tatttgacagac

SEQ ID NO: 175883 - DNA, 12 bp, Unknown
  misc_feature (1)..( 12): Result.005 file - promoters50/1571014
gtactaacaaga

SEQ ID NO: 175884 - DNA, 12 bp, Unknown
  misc_feature (1)..( 12): Result.005 file - promoters50/1571014
aacataactaga

SEQ ID NO: 175885 - DNA, 12 bp, Unknown
  misc_feature (1)..( 12): Result.005 file - promoters50/1571014
gttttaaggtga

SEQ ID NO: 175886 - DNA, 12 bp, Unknown
  misc_feature (1)..( 12): Result.005 file - promoters50/1571014
gttttaccacga

SEQ ID NO: 175887 - DNA, 12 bp, Unknown
  misc_feature (1)..( 12): Result.005 file - promoters50/1571014
aatttaaagaaa

SEQ ID NO: 175888 - DNA, 12 bp, Unknown
  misc_feature (1)..( 12): Result.005 file - promoters50/1571014
tgattctttgac

SEQ ID NO: 175889 - DNA, 12 bp, Unknown
  misc_feature (1)..( 12): Result.005 file - promoters50/1571014
ggatgcttttta

SEQ ID NO: 175890 - DNA, 12 bp, Unknown
  misc_feature (1)..( 12): Result.005 file - promoters50/1571014
tgattcatgcta

SEQ ID NO: 175891 - DNA, 12 bp, Unknown
  misc_feature (1)..( 12): Result.005 file - promoters50/1571014
agattctagaaa

SEQ ID NO: 175892 - DNA, 12 bp, Unknown
  misc_feature (1)..( 12): Result.005 file - promoters50/1571014
aaatgcttttta

SEQ ID NO: 175893 - DNA, 12 bp, Unknown
  misc_feature (1)..( 12): Result.005 file - promoters50/1571014
atatgatttagc

SEQ ID NO: 175894 - DNA, 12 bp, Unknown
  misc_feature (1)..( 12): Result.005 file - promoters50/1571014
ggatatagaaaa

SEQ ID NO: 175895 - DNA, 10 bp, Unknown
  misc_feature (1)..( 10): Result.005 file - promoters50/1571014
agataattaa

SEQ ID NO: 175896 - DNA, 10 bp, Unknown
  misc_feature (1)..( 10): Result.005 file - promoters50/1571014
agagaatttt

SEQ ID NO: 175897 - DNA, 10 bp, Unknown
  misc_feature (1)..( 10): Result.005 file - promoters50/1571014
agatatttaa

SEQ ID NO: 175898 - DNA, 10 bp, Unknown
  misc_feature (1)..( 10): Result.005 file - promoters50/1571014
gaataagtaa

SEQ ID NO: 175899 - DNA, 10 bp, Unknown
  misc_feature (1)..( 10): Result.005 file - promoters50/1571014
acataattca

SEQ ID NO: 175900 - DNA, 9 bp, Unknown
  misc_feature (1)..( 9): Result.005 file - promoters50/1571014
gatttttct

SEQ ID NO: 175901 - DNA, 10 bp, Unknown
  misc_feature (1)..( 10): Result.005 file - promoters50/1571014
tacaatttaa

SEQ ID NO: 175902 - DNA, 8 bp, Unknown
  misc_feature (1)..( 8): Result.005 file - promoters50/1571079
tttttcaa

SEQ ID NO: 175903 - DNA, 8 bp, Unknown
  misc_feature (1)..( 8): Result.005 file - promoters50/1571079
atttccaa

SEQ ID NO: 175904 - DNA, 8 bp, Unknown
  misc_feature (1)..( 8): Result.005 file - promoters50/1571079
tttttctt

SEQ ID NO: 175905 - DNA, 9 bp, Unknown
  misc_feature (1)..( 9): Result.005 file - promoters50/1571079
aaatttaaa

SEQ ID NO: 175906 - DNA, 9 bp, Unknown
  misc_feature (1)..( 9): Result.005 file - promoters50/1571079
agttttaaa

SEQ ID NO: 175907 - DNA, 9 bp, Unknown
  misc_feature (1)..( 9): Result.005 file - promoters50/1571079
agtattaat

SEQ ID NO: 175908 - DNA, 8 bp, Unknown
  misc_feature (1)..( 8): Result.005 file - promoters50/1571079
ccataaaa

SEQ ID NO: 175909 - DNA, 8 bp, Unknown
  misc_feature (1)..( 8): Result.005 file - promoters50/1571079
gcattaaa

SEQ ID NO: 175910 - DNA, 8 bp, Unknown
  misc_feature (1)..( 8): Result.005 file - promoters50/1571079
gcagtaat

SEQ ID NO: 175911 - DNA, 9 bp, Unknown
  misc_feature (1)..( 9): Result.005 file - promoters50/1571079
gaaaaatta

SEQ ID NO: 175912 - DNA, 9 bp, Unknown
  misc_feature (1)..( 9): Result.005 file - promoters50/1571079
taaacatta

SEQ ID NO: 175913 - DNA, 9 bp, Unknown
  misc_feature (1)..( 9): Result.005 file - promoters50/1571079
taaacacac

SEQ ID NO: 175914 - DNA, 12 bp, Unknown
  misc_feature (1)..( 12): Result.005 file - promoters50/1571422
tatatattaatg

SEQ ID NO: 175915 - DNA, 12 bp, Unknown
  misc_feature (1)..( 12): Result.005 file - promoters50/1571422
cataaattaatg

SEQ ID NO: 175916 - DNA, 12 bp, Unknown
  misc_feature (1)..( 12): Result.005 file - promoters50/1571422
tatatatgttgg

SEQ ID NO: 175917 - DNA, 12 bp, Unknown
  misc_feature (1)..( 12): Result.005 file - promoters50/1571422
tataaggttgcc

SEQ ID NO: 175918 - DNA, 12 bp, Unknown
  misc_feature (1)..( 12): Result.005 file - promoters50/1571422
tgtaaattatat

SEQ ID NO: 175919 - DNA, 12 bp, Unknown
  misc_feature (1)..( 12): Result.005 file - promoters50/1571422
agtaaataatta

SEQ ID NO: 175920 - DNA, 12 bp, Unknown
  misc_feature (1)..( 12): Result.005 file - promoters50/1571422
agtatatcacaa

SEQ ID NO: 175921 - DNA, 12 bp, Unknown
  misc_feature (1)..( 12): Result.005 file - promoters50/1571422
tctaaggtcagt

SEQ ID NO: 175922 - DNA, 13 bp, Unknown
  misc_feature (1)..( 13): Result.005 file - promoters50/1571422
tttatttgaacat

SEQ ID NO: 175923 - DNA, 13 bp, Unknown
  misc_feature (1)..( 13): Result.005 file - promoters50/1571422
tttttttgagttt

SEQ ID NO: 175924 - DNA, 13 bp, Unknown
  misc_feature (1)..( 13): Result.005 file - promoters50/1571422
ttaatttatcaat

SEQ ID NO: 175925 - DNA, 13 bp, Unknown
  misc_feature (1)..( 13): Result.005 file - promoters50/1571422
tatttttgatcat

SEQ ID NO: 175926 - DNA, 13 bp, Unknown
  misc_feature (1)..( 13): Result.005 file - promoters50/1571422
acttttcgagaac

SEQ ID NO: 175927 - DNA, 13 bp, Unknown
  misc_feature (1)..( 13): Result.005 file - promoters50/1571422
ctaattttgctaa

SEQ ID NO: 175928 - DNA, 9 bp, Unknown
  misc_feature (1)..( 9): Result.005 file - promoters50/1571422
tttatttta

SEQ ID NO: 175929 - DNA, 9 bp, Unknown
  misc_feature (1)..( 9): Result.005 file - promoters50/1571422
actattttc

SEQ ID NO: 175930 - DNA, 9 bp, Unknown
  misc_feature (1)..( 9): Result.005 file - promoters50/1571422
agtattttt

SEQ ID NO: 175931 - DNA, 9 bp, Unknown
  misc_feature (1)..( 9): Result.005 file - promoters50/1571422
attagttta

SEQ ID NO: 175932 - DNA, 9 bp, Unknown
  misc_feature (1)..( 9): Result.005 file - promoters50/1571422
actcttttt

SEQ ID NO: 175933 - DNA, 9 bp, Unknown
  misc_feature (1)..( 9): Result.005 file - promoters50/1571422
cttaattta

SEQ ID NO: 175934 - DNA, 7 bp, Unknown
  misc_feature (1)..( 7): Result.005 file - promoters50/1571916
aaagaaa

SEQ ID NO: 175935 - DNA, 7 bp, Unknown
  misc_feature (1)..( 7): Result.005 file - promoters50/1571916
aaataaa

SEQ ID NO: 175936 - DNA, 7 bp, Unknown
  misc_feature (1)..( 7): Result.005 file - promoters50/1571916
aaataac

SEQ ID NO: 175937 - DNA, 8 bp, Unknown
  misc_feature (1)..( 8): Result.005 file - promoters50/1571916
caaagaat

SEQ ID NO: 175938 - DNA, 8 bp, Unknown
  misc_feature (1)..( 8): Result.005 file - promoters50/1571916
caaagaaa

SEQ ID NO: 175939 - DNA, 8 bp, Unknown
  misc_feature (1)..( 8): Result.005 file - promoters50/1571916
gaaaaaat

SEQ ID NO: 175940 - DNA, 12 bp, Unknown
  misc_feature (1)..( 12): Result.005 file - promoters50/1571916
atatataagccg

SEQ ID NO: 175941 - DNA, 12 bp, Unknown
  misc_feature (1)..( 12): Result.005 file - promoters50/1571916
caatataaaccg

SEQ ID NO: 175942 - DNA, 12 bp, Unknown
  misc_feature (1)..( 12): Result.005 file - promoters50/1571916
ataaataatcta

SEQ ID NO: 175943 - DNA, 10 bp, Unknown
  misc_feature (1)..( 10): Result.005 file - promoters50/1572143
acatcaaagc

SEQ ID NO: 175944 - DNA, 10 bp, Unknown
  misc_feature (1)..( 10): Result.005 file - promoters50/1572143
tgatcgaagc

SEQ ID NO: 175945 - DNA, 10 bp, Unknown
  misc_feature (1)..( 10): Result.005 file - promoters50/1572143
agatggaatt

SEQ ID NO: 175946 - DNA, 10 bp, Unknown
  misc_feature (1)..( 10): Result.005 file - promoters50/1572143
agacggagga

SEQ ID NO: 175947 - DNA, 10 bp, Unknown
  misc_feature (1)..( 10): Result.005 file - promoters50/1572143
agatcgatga

SEQ ID NO: 175948 - DNA, 13 bp, Unknown
  misc_feature (1)..( 13): Result.005 file - promoters50/1572151
ttttaattaaaaa

SEQ ID NO: 175949 - DNA, 13 bp, Unknown
  misc_feature (1)..( 13): Result.005 file - promoters50/1572151
ttttaattttgtt

SEQ ID NO: 175950 - DNA, 13 bp, Unknown
  misc_feature (1)..( 13): Result.005 file - promoters50/1572151
ttttaaatcttag

SEQ ID NO: 175951 - DNA, 13 bp, Unknown
  misc_feature (1)..( 13): Result.005 file - promoters50/1572151
tattaattattat

SEQ ID NO: 175952 - DNA, 13 bp, Unknown
  misc_feature (1)..( 13): Result.005 file - promoters50/1572151
tagtaatttaaaa

SEQ ID NO: 175953 - DNA, 13 bp, Unknown
  misc_feature (1)..( 13): Result.005 file - promoters50/1572151
atataattttaga

SEQ ID NO: 175954 - DNA, 13 bp, Unknown
  misc_feature (1)..( 13): Result.005 file - promoters50/1572151
catctatttttat

SEQ ID NO: 175955 - DNA, 13 bp, Unknown
  misc_feature (1)..( 13): Result.005 file - promoters50/1572151
catttatttatat

SEQ ID NO: 175956 - DNA, 13 bp, Unknown
  misc_feature (1)..( 13): Result.005 file - promoters50/1572151
agtgtatatatat

SEQ ID NO: 175957 - DNA, 13 bp, Unknown
  misc_feature (1)..( 13): Result.005 file - promoters50/1572151
tttgtatatatat

SEQ ID NO: 175958 - DNA, 13 bp, Unknown
  misc_feature (1)..( 13): Result.005 file - promoters50/1572151
ccactatatatat

SEQ ID NO: 175959 - DNA, 13 bp, Unknown
  misc_feature (1)..( 13): Result.005 file - promoters50/1572151
gtagtatataagc

SEQ ID NO: 175960 - DNA, 10 bp, Unknown
  misc_feature (1)..( 10): Result.005 file - promoters50/1572151
aaagtttgga

SEQ ID NO: 175961 - DNA, 10 bp, Unknown
  misc_feature (1)..( 10): Result.005 file - promoters50/1572151
ttagtttgag

SEQ ID NO: 175962 - DNA, 10 bp, Unknown
  misc_feature (1)..( 10): Result.005 file - promoters50/1572151
ttaattttgt

SEQ ID NO: 175963 - DNA, 11 bp, Unknown
  misc_feature (1)..( 11): Result.005 file - promoters50/1572151
tgaatgttgat

SEQ ID NO: 175964 - DNA, 11 bp, Unknown
  misc_feature (1)..( 11): Result.005 file - promoters50/1572151
tttattttacc

SEQ ID NO: 175965 - DNA, 11 bp, Unknown
  misc_feature (1)..( 11): Result.005 file - promoters50/1572151
tatatgatgat

SEQ ID NO: 175966 - DNA, 11 bp, Unknown
  misc_feature (1)..( 11): Result.005 file - promoters50/1572151
ctaattttaat

SEQ ID NO: 175967 - DNA, 11 bp, Unknown
  misc_feature (1)..( 11): Result.005 file - promoters50/1572151
ttgaatattcc

SEQ ID NO: 175968 - DNA, 11 bp, Unknown
  misc_feature (1)..( 11): Result.005 file - promoters50/1572151
ttgaatatttt

SEQ ID NO: 175969 - DNA, 11 bp, Unknown
  misc_feature (1)..( 11): Result.005 file - promoters50/1572151
taaaattttca

SEQ ID NO: 175970 - DNA, 11 bp, Unknown
  misc_feature (1)..( 11): Result.005 file - promoters50/1572151
tataattttag

SEQ ID NO: 175971 - DNA, 11 bp, Unknown
  misc_feature (1)..( 11): Result.005 file - promoters50/1572151
ccttattttat

SEQ ID NO: 175972 - DNA, 11 bp, Unknown
  misc_feature (1)..( 11): Result.005 file - promoters50/1572151
tagtatatttc

SEQ ID NO: 175973 - DNA, 11 bp, Unknown
  misc_feature (1)..( 11): Result.005 file - promoters50/1572151
acgtacatttg

SEQ ID NO: 175974 - DNA, 11 bp, Unknown
  misc_feature (1)..( 11): Result.005 file - promoters50/1572151
ctcaattttaa

SEQ ID NO: 175975 - DNA, 15 bp, Unknown
  misc_feature (1)..( 15): Result.005 file - promoters50/1572151
agagaaagtgtctag

SEQ ID NO: 175976 - DNA, 15 bp, Unknown
  misc_feature (1)..( 15): Result.005 file - promoters50/1572151
ccaaaaaatgtacat

SEQ ID NO: 175977 - DNA, 16 bp, Unknown
  misc_feature (1)..( 16): Result.005 file - promoters50/1572151
tccaaacaatcatttt

SEQ ID NO: 175978 - DNA, 16 bp, Unknown
  misc_feature (1)..( 16): Result.005 file - promoters50/1572151
cgtttacaatttacct

SEQ ID NO: 175979 - DNA, 16 bp, Unknown
  misc_feature (1)..( 16): Result.005 file - promoters50/1572151
gtgatactatttacat

SEQ ID NO: 175980 - DNA, 16 bp, Unknown
  misc_feature (1)..( 16): Result.005 file - promoters50/1572151
tttttagacttttcat

SEQ ID NO: 175981 - DNA, 9 bp, Unknown
  misc_feature (1)..( 9): Result.005 file - promoters50/1572151
agtatataa

SEQ ID NO: 175982 - DNA, 9 bp, Unknown
  misc_feature (1)..( 9): Result.005 file - promoters50/1572151
agtatattt

SEQ ID NO: 175983 - DNA, 9 bp, Unknown
  misc_feature (1)..( 9): Result.005 file - promoters50/1572151
catatatta

SEQ ID NO: 175984 - DNA, 9 bp, Unknown
  misc_feature (1)..( 9): Result.005 file - promoters50/1572151
cgtacattt

SEQ ID NO: 175985 - DNA, 9 bp, Unknown
  misc_feature (1)..( 9): Result.005 file - promoters50/1572151
tatatatca

SEQ ID NO: 175986 - DNA, 9 bp, Unknown
  misc_feature (1)..( 9): Result.005 file - promoters50/1572151
agtatataa

SEQ ID NO: 175987 - DNA, 10 bp, Unknown
  misc_feature (1)..( 10): Result.005 file - promoters50/1572151
ataattttag

SEQ ID NO: 175988 - DNA, 10 bp, Unknown
  misc_feature (1)..( 10): Result.005 file - promoters50/1572151
aaaatattac

SEQ ID NO: 175989 - DNA, 10 bp, Unknown
  misc_feature (1)..( 10): Result.005 file - promoters50/1572151
atatttttag

SEQ ID NO: 175990 - DNA, 10 bp, Unknown
  misc_feature (1)..( 10): Result.005 file - promoters50/1572151
cttattttat

SEQ ID NO: 175991 - DNA, 10 bp, Unknown
  misc_feature (1)..( 10): Result.005 file - promoters50/1572151
aaaatattat

SEQ ID NO: 175992 - DNA, 10 bp, Unknown
  misc_feature (1)..( 10): Result.005 file - promoters50/1572151
tcaattttaa

SEQ ID NO: 175993 - DNA, 10 bp, Unknown
  misc_feature (1)..( 10): Result.005 file - promoters50/1572151
gcaatgttaa

SEQ ID NO: 175994 - DNA, 12 bp, Unknown
  misc_feature (1)..( 12): Result.005 file - promoters50/1572236
gtaaattaacca

SEQ ID NO: 175995 - DNA, 12 bp, Unknown
  misc_feature (1)..( 12): Result.005 file - promoters50/1572236
taaaattaaaaa

SEQ ID NO: 175996 - DNA, 12 bp, Unknown
  misc_feature (1)..( 12): Result.005 file - promoters50/1572236
agttattaactt

SEQ ID NO: 175997 - DNA, 12 bp, Unknown
  misc_feature (1)..( 12): Result.005 file - promoters50/1572236
taaaaataaaaa

SEQ ID NO: 175998 - DNA, 7 bp, Unknown
  misc_feature (1)..( 7): Result.005 file - promoters50/1572796
aatttca

SEQ ID NO: 175999 - DNA, 7 bp, Unknown
  misc_feature (1)..( 7): Result.005 file - promoters50/1572796
gatttca

SEQ ID NO: 176000 - DNA, 7 bp, Unknown
  misc_feature (1)..( 7): Result.005 file - promoters50/1572796
aatttcg

SEQ ID NO: 176001 - DNA, 8 bp, Unknown
  misc_feature (1)..( 8): Result.005 file - promoters50/1572796
tacagtaa

SEQ ID NO: 176002 - DNA, 8 bp, Unknown
  misc_feature (1)..( 8): Result.005 file - promoters50/1572796
tactgtat

SEQ ID NO: 176003 - DNA, 8 bp, Unknown
  misc_feature (1)..( 8): Result.005 file - promoters50/1572796
cgctgtat

SEQ ID NO: 176004 - DNA, 10 bp, Unknown
  misc_feature (1)..( 10): Result.005 file - promoters50/1573594
ttaaaaaaaa

SEQ ID NO: 176005 - DNA, 10 bp, Unknown
  misc_feature (1)..( 10): Result.005 file - promoters50/1573594
ttaaaacaag

SEQ ID NO: 176006 - DNA, 11 bp, Unknown
  misc_feature (1)..( 11): Result.005 file - promoters50/1573594
ttagaaaactc

SEQ ID NO: 176007 - DNA, 11 bp, Unknown
  misc_feature (1)..( 11): Result.005 file - promoters50/1573594
ttaaaacgtaa

SEQ ID NO: 176008 - DNA, 11 bp, Unknown
  misc_feature (1)..( 11): Result.005 file - promoters50/1573594
tgaaaatcgta

SEQ ID NO: 176009 - DNA, 11 bp, Unknown
  misc_feature (1)..( 11): Result.005 file - promoters50/1573594
ctaacacaccg

SEQ ID NO: 176010 - DNA, 7 bp, Unknown
  misc_feature (1)..( 7): Result.005 file - promoters50/1573651
ctacaaa

SEQ ID NO: 176011 - DNA, 7 bp, Unknown
  misc_feature (1)..( 7): Result.005 file - promoters50/1573651
ctacaat

SEQ ID NO: 176012 - DNA, 7 bp, Unknown
  misc_feature (1)..( 7): Result.005 file - promoters50/1573651
ctataaa

SEQ ID NO: 176013 - DNA, 7 bp, Unknown
  misc_feature (1)..( 7): Result.005 file - promoters50/1573651
ctacaaa

SEQ ID NO: 176014 - DNA, 8 bp, Unknown
  misc_feature (1)..( 8): Result.005 file - promoters50/1573651
caaactca

SEQ ID NO: 176015 - DNA, 8 bp, Unknown
  misc_feature (1)..( 8): Result.005 file - promoters50/1573651
caatctct

SEQ ID NO: 176016 - DNA, 8 bp, Unknown
  misc_feature (1)..( 8): Result.005 file - promoters50/1573651
caaactca

SEQ ID NO: 176017 - DNA, 8 bp, Unknown
  misc_feature (1)..( 8): Result.005 file - promoters50/1573651
taatctct

SEQ ID NO: 176018 - DNA, 9 bp, Unknown
  misc_feature (1)..( 9): Result.005 file - promoters50/1573651
aatcataac

SEQ ID NO: 176019 - DNA, 9 bp, Unknown
  misc_feature (1)..( 9): Result.005 file - promoters50/1573651
aatcataaa

SEQ ID NO: 176020 - DNA, 9 bp, Unknown
  misc_feature (1)..( 9): Result.005 file - promoters50/1573651
aatcataac

SEQ ID NO: 176021 - DNA, 9 bp, Unknown
  misc_feature (1)..( 9): Result.005 file - promoters50/1573651
aatcaaaaa

SEQ ID NO: 176022 - DNA, 8 bp, Unknown
  misc_feature (1)..( 8): Result.005 file - promoters50/1573713
taaacata

SEQ ID NO: 176023 - DNA, 8 bp, Unknown
  misc_feature (1)..( 8): Result.005 file - promoters50/1573713
gaaatata

SEQ ID NO: 176024 - DNA, 8 bp, Unknown
  misc_feature (1)..( 8): Result.005 file - promoters50/1573713
taaaaata

SEQ ID NO: 176025 - DNA, 8 bp, Unknown
  misc_feature (1)..( 8): Result.005 file - promoters50/1573713
tatatata

SEQ ID NO: 176026 - DNA, 10 bp, Unknown
  misc_feature (1)..( 10): Result.005 file - promoters50/1573713
ataaacgaca

SEQ ID NO: 176027 - DNA, 10 bp, Unknown
  misc_feature (1)..( 10): Result.005 file - promoters50/1573713
ataagcgaca

SEQ ID NO: 176028 - DNA, 10 bp, Unknown
  misc_feature (1)..( 10): Result.005 file - promoters50/1573713
ccaaacgatt

SEQ ID NO: 176029 - DNA, 10 bp, Unknown
  misc_feature (1)..( 10): Result.005 file - promoters50/1573713
taaaacaatt

SEQ ID NO: 176030 - DNA, 9 bp, Unknown
  misc_feature (1)..( 9): Result.005 file - promoters50/1573713
tttatatga

SEQ ID NO: 176031 - DNA, 9 bp, Unknown
  misc_feature (1)..( 9): Result.005 file - promoters50/1573713
tttatttga

SEQ ID NO: 176032 - DNA, 9 bp, Unknown
  misc_feature (1)..( 9): Result.005 file - promoters50/1573713
tttatatta

SEQ ID NO: 176033 - DNA, 7 bp, Unknown
  misc_feature (1)..( 7): Result.005 file - promoters50/1573713
taatctc

SEQ ID NO: 176034 - DNA, 7 bp, Unknown
  misc_feature (1)..( 7): Result.005 file - promoters50/1573713
taatctt

SEQ ID NO: 176035 - DNA, 7 bp, Unknown
  misc_feature (1)..( 7): Result.005 file - promoters50/1573713
aaatctc

SEQ ID NO: 176036 - DNA, 10 bp, Unknown
  misc_feature (1)..( 10): Result.005 file - promoters50/1573713
attaataatt

SEQ ID NO: 176037 - DNA, 10 bp, Unknown
  misc_feature (1)..( 10): Result.005 file - promoters50/1573713
attagtaatt

SEQ ID NO: 176038 - DNA, 10 bp, Unknown
  misc_feature (1)..( 10): Result.005 file - promoters50/1573713
gttattaagg

SEQ ID NO: 176039 - DNA, 10 bp, Unknown
  misc_feature (1)..( 10): Result.005 file - promoters50/1573713
tagagttatt

SEQ ID NO: 176040 - DNA, 14 bp, Unknown
  misc_feature (1)..( 14): Result.005 file - promoters50/1573980
aaaccaatagaaaa

SEQ ID NO: 176041 - DNA, 14 bp, Unknown
  misc_feature (1)..( 14): Result.005 file - promoters50/1573980
gttaaaatataaac

SEQ ID NO: 176042 - DNA, 15 bp, Unknown
  misc_feature (1)..( 15): Result.005 file - promoters50/1573980
tgtaaaattatatct

SEQ ID NO: 176043 - DNA, 15 bp, Unknown
  misc_feature (1)..( 15): Result.005 file - promoters50/1573980
tttaaagttaatcac

SEQ ID NO: 176044 - DNA, 15 bp, Unknown
  misc_feature (1)..( 15): Result.005 file - promoters50/1573980
cagtagcatacaaac

SEQ ID NO: 176045 - DNA, 15 bp, Unknown
  misc_feature (1)..( 15): Result.005 file - promoters50/1573980
ttttcctttacaaaa

SEQ ID NO: 176046 - DNA, 11 bp, Unknown
  misc_feature (1)..( 11): Result.005 file - promoters50/1573980
taattttgtta

SEQ ID NO: 176047 - DNA, 11 bp, Unknown
  misc_feature (1)..( 11): Result.005 file - promoters50/1573980
gaaatttgttc

SEQ ID NO: 176048 - DNA, 11 bp, Unknown
  misc_feature (1)..( 11): Result.005 file - promoters50/1573980
tctttttcttc

SEQ ID NO: 176049 - DNA, 11 bp, Unknown
  misc_feature (1)..( 11): Result.005 file - promoters50/1573980
aaaattagttt

SEQ ID NO: 176050 - DNA, 11 bp, Unknown
  misc_feature (1)..( 11): Result.005 file - promoters50/1573980
aaagttatgcg

SEQ ID NO: 176051 - DNA, 11 bp, Unknown
  misc_feature (1)..( 11): Result.005 file - promoters50/1573980
ttatttatttt

SEQ ID NO: 176052 - DNA, 11 bp, Unknown
  misc_feature (1)..( 11): Result.005 file - promoters50/1573980
aaagttatgaa

SEQ ID NO: 176053 - DNA, 10 bp, Unknown
  misc_feature (1)..( 10): Result.005 file - promoters50/1573980
ggaaatgact

SEQ ID NO: 176054 - DNA, 10 bp, Unknown
  misc_feature (1)..( 10): Result.005 file - promoters50/1573980
ttttatgact

SEQ ID NO: 176055 - DNA, 10 bp, Unknown
  misc_feature (1)..( 10): Result.005 file - promoters50/1573980
ttaaaagact

SEQ ID NO: 176056 - DNA, 10 bp, Unknown
  misc_feature (1)..( 10): Result.005 file - promoters50/1573980
ccaaaagaga

SEQ ID NO: 176057 - DNA, 10 bp, Unknown
  misc_feature (1)..( 10): Result.005 file - promoters50/1573980
ggaaatgact

SEQ ID NO: 176058 - DNA, 10 bp, Unknown
  misc_feature (1)..( 10): Result.005 file - promoters50/1573980
ggagatgtgc

SEQ ID NO: 176059 - DNA, 9 bp, Unknown
  misc_feature (1)..( 9): Result.005 file - promoters50/1573982
atatttttt

SEQ ID NO: 176060 - DNA, 9 bp, Unknown
  misc_feature (1)..( 9): Result.005 file - promoters50/1573982
atatctttt

SEQ ID NO: 176061 - DNA, 9 bp, Unknown
  misc_feature (1)..( 9): Result.005 file - promoters50/1573982
aagtttttg

SEQ ID NO: 176062 - DNA, 8 bp, Unknown
  misc_feature (1)..( 8): Result.005 file - promoters50/1573982
gattcatt

SEQ ID NO: 176063 - DNA, 8 bp, Unknown
  misc_feature (1)..( 8): Result.005 file - promoters50/1573982
aattgatt

SEQ ID NO: 176064 - DNA, 8 bp, Unknown
  misc_feature (1)..( 8): Result.005 file - promoters50/1573982
aattgatc

SEQ ID NO: 176065 - DNA, 9 bp, Unknown
  misc_feature (1)..( 9): Result.005 file - promoters50/1574021
gttaaataa

SEQ ID NO: 176066 - DNA, 9 bp, Unknown
  misc_feature (1)..( 9): Result.005 file - promoters50/1574021
cttagataa

SEQ ID NO: 176067 - DNA, 9 bp, Unknown
  misc_feature (1)..( 9): Result.005 file - promoters50/1574021
tataaatac

SEQ ID NO: 176068 - DNA, 9 bp, Unknown
  misc_feature (1)..( 9): Result.005 file - promoters50/1574021
gtttaatat

SEQ ID NO: 176069 - DNA, 13 bp, Unknown
  misc_feature (1)..( 13): Result.005 file - promoters50/1574021
tgttatctattgt

SEQ ID NO: 176070 - DNA, 13 bp, Unknown
  misc_feature (1)..( 13): Result.005 file - promoters50/1574021
acctatgtatcct

SEQ ID NO: 176071 - DNA, 13 bp, Unknown
  misc_feature (1)..( 13): Result.005 file - promoters50/1574021
tgttatcaattgt

SEQ ID NO: 176072 - DNA, 13 bp, Unknown
  misc_feature (1)..( 13): Result.005 file - promoters50/1574021
aattataaataat

SEQ ID NO: 176073 - DNA, 7 bp, Unknown
  misc_feature (1)..( 7): Result.005 file - promoters50/1574029
atgagga

SEQ ID NO: 176074 - DNA, 7 bp, Unknown
  misc_feature (1)..( 7): Result.005 file - promoters50/1574029
atgtgga

SEQ ID NO: 176075 - DNA, 7 bp, Unknown
  misc_feature (1)..( 7): Result.005 file - promoters50/1574029
atgtggt

SEQ ID NO: 176076 - DNA, 7 bp, Unknown
  misc_feature (1)..( 7): Result.005 file - promoters50/1574044
taataca

SEQ ID NO: 176077 - DNA, 7 bp, Unknown
  misc_feature (1)..( 7): Result.005 file - promoters50/1574044
taaaaca

SEQ ID NO: 176078 - DNA, 7 bp, Unknown
  misc_feature (1)..( 7): Result.005 file - promoters50/1574044
taagaca

SEQ ID NO: 176079 - DNA, 10 bp, Unknown
  misc_feature (1)..( 10): Result.005 file - promoters50/1574044
ttaattaaaa

SEQ ID NO: 176080 - DNA, 10 bp, Unknown
  misc_feature (1)..( 10): Result.005 file - promoters50/1574044
ataaataaaa

SEQ ID NO: 176081 - DNA, 10 bp, Unknown
  misc_feature (1)..( 10): Result.005 file - promoters50/1574044
ttaactaaac

SEQ ID NO: 176082 - DNA, 10 bp, Unknown
  misc_feature (1)..( 10): Result.005 file - promoters50/1574044
atacatagca

SEQ ID NO: 176083 - DNA, 12 bp, Unknown
  misc_feature (1)..( 12): Result.005 file - promoters50/1574044
tgtctaaaacaa

SEQ ID NO: 176084 - DNA, 12 bp, Unknown
  misc_feature (1)..( 12): Result.005 file - promoters50/1574044
tgtgtaaaagtt

SEQ ID NO: 176085 - DNA, 12 bp, Unknown
  misc_feature (1)..( 12): Result.005 file - promoters50/1574044
ccactaaaccaa

SEQ ID NO: 176086 - DNA, 11 bp, Unknown
  misc_feature (1)..( 11): Result.005 file - promoters50/1574044
atagtaaataa

SEQ ID NO: 176087 - DNA, 11 bp, Unknown
  misc_feature (1)..( 11): Result.005 file - promoters50/1574044
atagtcaataa

SEQ ID NO: 176088 - DNA, 11 bp, Unknown
  misc_feature (1)..( 11): Result.005 file - promoters50/1574044
ataataattgg

SEQ ID NO: 176089 - DNA, 7 bp, Unknown
  misc_feature (1)..( 7): Result.005 file - promoters50/1574059
ctaaaac

SEQ ID NO: 176090 - DNA, 7 bp, Unknown
  misc_feature (1)..( 7): Result.005 file - promoters50/1574059
gtaaaac

SEQ ID NO: 176091 - DNA, 7 bp, Unknown
  misc_feature (1)..( 7): Result.005 file - promoters50/1574059
gtaaaac

SEQ ID NO: 176092 - DNA, 11 bp, Unknown
  misc_feature (1)..( 11): Result.005 file - promoters50/1580171
aaaaaattcag

SEQ ID NO: 176093 - DNA, 11 bp, Unknown
  misc_feature (1)..( 11): Result.005 file - promoters50/1580171
gtaaaattccc

SEQ ID NO: 176094 - DNA, 11 bp, Unknown
  misc_feature (1)..( 11): Result.005 file - promoters50/1580171
tttaaattctt

SEQ ID NO: 176095 - DNA, 11 bp, Unknown
  misc_feature (1)..( 11): Result.005 file - promoters50/1580171
gacaaataaat

SEQ ID NO: 176096 - DNA, 11 bp, Unknown
  misc_feature (1)..( 11): Result.005 file - promoters50/1580171
cttatattttt

SEQ ID NO: 176097 - DNA, 11 bp, Unknown
  misc_feature (1)..( 11): Result.005 file - promoters50/1580171
tttgaattgtg

SEQ ID NO: 176098 - DNA, 10 bp, Unknown
  misc_feature (1)..( 10): Result.005 file - promoters50/1580171
aatttgtaaa

SEQ ID NO: 176099 - DNA, 10 bp, Unknown
  misc_feature (1)..( 10): Result.005 file - promoters50/1580171
tttttataat

SEQ ID NO: 176100 - DNA, 10 bp, Unknown
  misc_feature (1)..( 10): Result.005 file - promoters50/1580171
aatatgttaa

SEQ ID NO: 176101 - DNA, 11 bp, Unknown
  misc_feature (1)..( 11): Result.005 file - promoters50/1580171
cgtttgatata

SEQ ID NO: 176102 - DNA, 11 bp, Unknown
  misc_feature (1)..( 11): Result.005 file - promoters50/1580171
acattgatata

SEQ ID NO: 176103 - DNA, 11 bp, Unknown
  misc_feature (1)..( 11): Result.005 file - promoters50/1580171
acagtgatcac

SEQ ID NO: 176104 - DNA, 12 bp, Unknown
  misc_feature (1)..( 12): Result.005 file - promoters50/1580171
ttgggttgaaca

SEQ ID NO: 176105 - DNA, 12 bp, Unknown
  misc_feature (1)..( 12): Result.005 file - promoters50/1580171
ttggattgatga

SEQ ID NO: 176106 - DNA, 12 bp, Unknown
  misc_feature (1)..( 12): Result.005 file - promoters50/1580171
ctctgttaaacc

SEQ ID NO: 176107 - DNA, 12 bp, Unknown
  misc_feature (1)..( 12): Result.005 file - promoters50/1580171
ctttattgaatt

SEQ ID NO: 176108 - DNA, 12 bp, Unknown
  misc_feature (1)..( 12): Result.005 file - promoters50/1580171
agctgtcaaaac

SEQ ID NO: 176109 - DNA, 12 bp, Unknown
  misc_feature (1)..( 12): Result.005 file - promoters50/1580171
ttttgtgaaaaa

SEQ ID NO: 176110 - DNA, 10 bp, Unknown
  misc_feature (1)..( 10): Result.005 file - promoters50/1580263
ctaattttag

SEQ ID NO: 176111 - DNA, 10 bp, Unknown
  misc_feature (1)..( 10): Result.005 file - promoters50/1580263
ctaattaaat

SEQ ID NO: 176112 - DNA, 10 bp, Unknown
  misc_feature (1)..( 10): Result.005 file - promoters50/1580263
ttaatgaaat

SEQ ID NO: 176113 - DNA, 15 bp, Unknown
  misc_feature (1)..( 15): Result.005 file - promoters50/1580298
tgaaaacatttttag

SEQ ID NO: 176114 - DNA, 15 bp, Unknown
  misc_feature (1)..( 15): Result.005 file - promoters50/1580298
tgtaaacattacata

SEQ ID NO: 176115 - DNA, 16 bp, Unknown
  misc_feature (1)..( 16): Result.005 file - promoters50/1580298
atgaaatcatgtattt

SEQ ID NO: 176116 - DNA, 16 bp, Unknown
  misc_feature (1)..( 16): Result.005 file - promoters50/1580298
tcgaaatcatcacccc

SEQ ID NO: 176117 - DNA, 16 bp, Unknown
  misc_feature (1)..( 16): Result.005 file - promoters50/1580298
cacatgacattacata

SEQ ID NO: 176118 - DNA, 16 bp, Unknown
  misc_feature (1)..( 16): Result.005 file - promoters50/1580298
aaaaggttattccatg

SEQ ID NO: 176119 - DNA, 8 bp, Unknown
  misc_feature (1)..( 8): Result.005 file - promoters50/1580481
tttataca

SEQ ID NO: 176120 - DNA, 8 bp, Unknown
  misc_feature (1)..( 8): Result.005 file - promoters50/1580481
tttataaa

SEQ ID NO: 176121 - DNA, 8 bp, Unknown
  misc_feature (1)..( 8): Result.005 file - promoters50/1580481
attatact

SEQ ID NO: 176122 - DNA, 8 bp, Unknown
  misc_feature (1)..( 8): Result.005 file - promoters50/1580481
tttgtaaa

SEQ ID NO: 176123 - DNA, 8 bp, Unknown
  misc_feature (1)..( 8): Result.005 file - promoters50/1580481
tttgtatt

SEQ ID NO: 176124 - DNA, 10 bp, Unknown
  misc_feature (1)..( 10): Result.005 file - promoters50/1580481
tttctttaac

SEQ ID NO: 176125 - DNA, 10 bp, Unknown
  misc_feature (1)..( 10): Result.005 file - promoters50/1580481
tttctttatt

SEQ ID NO: 176126 - DNA, 10 bp, Unknown
  misc_feature (1)..( 10): Result.005 file - promoters50/1580481
cttcatttgt

SEQ ID NO: 176127 - DNA, 10 bp, Unknown
  misc_feature (1)..( 10): Result.005 file - promoters50/1580481
tttcatttgt

SEQ ID NO: 176128 - DNA, 10 bp, Unknown
  misc_feature (1)..( 10): Result.005 file - promoters50/1580481
ttttatctca

SEQ ID NO: 176129 - DNA, 11 bp, Unknown
  misc_feature (1)..( 11): Result.005 file - promoters50/1580481
ttcatttgtta

SEQ ID NO: 176130 - DNA, 11 bp, Unknown
  misc_feature (1)..( 11): Result.005 file - promoters50/1580481
tagctttttta

SEQ ID NO: 176131 - DNA, 11 bp, Unknown
  misc_feature (1)..( 11): Result.005 file - promoters50/1580481
ttcatttgtaa

SEQ ID NO: 176132 - DNA, 11 bp, Unknown
  misc_feature (1)..( 11): Result.005 file - promoters50/1580481
tcttgttgtta

SEQ ID NO: 176133 - DNA, 11 bp, Unknown
  misc_feature (1)..( 11): Result.005 file - promoters50/1580481
cttgtttgtat

SEQ ID NO: 176134 - DNA, 19 bp, Unknown
  misc_feature (1)..( 19): Result.005 file - promoters50/1580500
tgtaaagcatataaattgt

SEQ ID NO: 176135 - DNA, 19 bp, Unknown
  misc_feature (1)..( 19): Result.005 file - promoters50/1580500
agaaaatcattaacaaata

SEQ ID NO: 176136 - DNA, 19 bp, Unknown
  misc_feature (1)..( 19): Result.005 file - promoters50/1580500
tttaaatcatatagaatgg

SEQ ID NO: 176137 - DNA, 19 bp, Unknown
  misc_feature (1)..( 19): Result.005 file - promoters50/1580500
gtttaatccttaaccaata

SEQ ID NO: 176138 - DNA, 19 bp, Unknown
  misc_feature (1)..( 19): Result.005 file - promoters50/1580500
ttatcttcatataggaatt

SEQ ID NO: 176139 - DNA, 19 bp, Unknown
  misc_feature (1)..( 19): Result.005 file - promoters50/1580500
aacaaattttttttttaga

SEQ ID NO: 176140 - DNA, 14 bp, Unknown
  misc_feature (1)..( 14): Result.005 file - promoters50/1580500
taaagcatataaat

SEQ ID NO: 176141 - DNA, 14 bp, Unknown
  misc_feature (1)..( 14): Result.005 file - promoters50/1580500
gtcattatagaaaa

SEQ ID NO: 176142 - DNA, 14 bp, Unknown
  misc_feature (1)..( 14): Result.005 file - promoters50/1580500
atcttcatatagga

SEQ ID NO: 176143 - DNA, 14 bp, Unknown
  misc_feature (1)..( 14): Result.005 file - promoters50/1580500
agaagataataaat

SEQ ID NO: 176144 - DNA, 14 bp, Unknown
  misc_feature (1)..( 14): Result.005 file - promoters50/1580500
tattttttataaag

SEQ ID NO: 176145 - DNA, 14 bp, Unknown
  misc_feature (1)..( 14): Result.005 file - promoters50/1580500
taaatcatatagaa

SEQ ID NO: 176146 - DNA, 14 bp, Unknown
  misc_feature (1)..( 14): Result.005 file - promoters50/1580500
tttgacatttagtt

SEQ ID NO: 176147 - DNA, 11 bp, Unknown
  misc_feature (1)..( 11): Result.005 file - promoters50/1580511
tttcatttaat

SEQ ID NO: 176148 - DNA, 11 bp, Unknown
  misc_feature (1)..( 11): Result.005 file - promoters50/1580511
tttgatttgat

SEQ ID NO: 176149 - DNA, 11 bp, Unknown
  misc_feature (1)..( 11): Result.005 file - promoters50/1580511
tttgattaaaa

SEQ ID NO: 176150 - DNA, 11 bp, Unknown
  misc_feature (1)..( 11): Result.005 file - promoters50/1580511
tttaattgaca

SEQ ID NO: 176151 - DNA, 11 bp, Unknown
  misc_feature (1)..( 11): Result.005 file - promoters50/1580511
tttcattgaaa

SEQ ID NO: 176152 - DNA, 11 bp, Unknown
  misc_feature (1)..( 11): Result.005 file - promoters50/1580511
tattattcaaa

SEQ ID NO: 176153 - DNA, 15 bp, Unknown
  misc_feature (1)..( 15): Result.005 file - promoters50/1580511
gcaatttgtcttatg

SEQ ID NO: 176154 - DNA, 15 bp, Unknown
  misc_feature (1)..( 15): Result.005 file - promoters50/1580511
ttgatttgtatttgt

SEQ ID NO: 176155 - DNA, 15 bp, Unknown
  misc_feature (1)..( 15): Result.005 file - promoters50/1580511
gcaatttgtcttatg

SEQ ID NO: 176156 - DNA, 15 bp, Unknown
  misc_feature (1)..( 15): Result.005 file - promoters50/1580511
ttgttttgtttgtgg

SEQ ID NO: 176157 - DNA, 15 bp, Unknown
  misc_feature (1)..( 15): Result.005 file - promoters50/1580511
cacttttgtttttgg

SEQ ID NO: 176158 - DNA, 15 bp, Unknown
  misc_feature (1)..( 15): Result.005 file - promoters50/1580511
cttccatgtttttgc

SEQ ID NO: 176159 - DNA, 9 bp, Unknown
  misc_feature (1)..( 9): Result.005 file - promoters50/1580787
gatccttct

SEQ ID NO: 176160 - DNA, 9 bp, Unknown
  misc_feature (1)..( 9): Result.005 file - promoters50/1580787
catccatct

SEQ ID NO: 176161 - DNA, 9 bp, Unknown
  misc_feature (1)..( 9): Result.005 file - promoters50/1580787
catccacat

SEQ ID NO: 176162 - DNA, 9 bp, Unknown
  misc_feature (1)..( 9): Result.005 file - promoters50/1580870
tttccaaac

SEQ ID NO: 176163 - DNA, 9 bp, Unknown
  misc_feature (1)..( 9): Result.005 file - promoters50/1580870
tttctaaaa

SEQ ID NO: 176164 - DNA, 9 bp, Unknown
  misc_feature (1)..( 9): Result.005 file - promoters50/1580870
attctaact

SEQ ID NO: 176165 - DNA, 10 bp, Unknown
  misc_feature (1)..( 10): Result.005 file - promoters50/1580870
ggcctacaat

SEQ ID NO: 176166 - DNA, 9 bp, Unknown
  misc_feature (1)..( 9): Result.005 file - promoters50/1580870
aatgtctat

SEQ ID NO: 176167 - DNA, 9 bp, Unknown
  misc_feature (1)..( 9): Result.005 file - promoters50/1580870
cttgtatat

SEQ ID NO: 176168 - DNA, 9 bp, Unknown
  misc_feature (1)..( 9): Result.005 file - promoters50/1580870
aatatctga

SEQ ID NO: 176169 - DNA, 9 bp, Unknown
  misc_feature (1)..( 9): Result.005 file - promoters50/1580870
gaagtatat

SEQ ID NO: 176170 - DNA, 12 bp, Unknown
  misc_feature (1)..( 12): Result.005 file - promoters50/1580932
aattaaaataaa

SEQ ID NO: 176171 - DNA, 12 bp, Unknown
  misc_feature (1)..( 12): Result.005 file - promoters50/1580932
gatttaaattat

SEQ ID NO: 176172 - DNA, 12 bp, Unknown
  misc_feature (1)..( 12): Result.005 file - promoters50/1580932
aatgaaatttcc

SEQ ID NO: 176173 - DNA, 12 bp, Unknown
  misc_feature (1)..( 12): Result.005 file - promoters50/1580932
ggataaaaaaaa

SEQ ID NO: 176174 - DNA, 12 bp, Unknown
  misc_feature (1)..( 12): Result.005 file - promoters50/1580932
aatgaaatcatg

SEQ ID NO: 176175 - DNA, 12 bp, Unknown
  misc_feature (1)..( 12): Result.005 file - promoters50/1580932
tctgagatcggc

SEQ ID NO: 176176 - DNA, 12 bp, Unknown
  misc_feature (1)..( 12): Result.005 file - promoters50/1580932
tatgaaacgaag

SEQ ID NO: 176177 - DNA, 9 bp, Unknown
  misc_feature (1)..( 9): Result.005 file - promoters50/1580932
gaactaata

SEQ ID NO: 176178 - DNA, 9 bp, Unknown
  misc_feature (1)..( 9): Result.005 file - promoters50/1580932
aaactaatc

SEQ ID NO: 176179 - DNA, 9 bp, Unknown
  misc_feature (1)..( 9): Result.005 file - promoters50/1580932
aaacaaatt

SEQ ID NO: 176180 - DNA, 9 bp, Unknown
  misc_feature (1)..( 9): Result.005 file - promoters50/1580932
ccacttata

SEQ ID NO: 176181 - DNA, 9 bp, Unknown
  misc_feature (1)..( 9): Result.005 file - promoters50/1580932
gaaccaata

SEQ ID NO: 176182 - DNA, 9 bp, Unknown
  misc_feature (1)..( 9): Result.005 file - promoters50/1580932
caaccaact

SEQ ID NO: 176183 - DNA, 9 bp, Unknown
  misc_feature (1)..( 9): Result.005 file - promoters50/1580983
tatttttta

SEQ ID NO: 176184 - DNA, 9 bp, Unknown
  misc_feature (1)..( 9): Result.005 file - promoters50/1580983
aatttttgt

SEQ ID NO: 176185 - DNA, 9 bp, Unknown
  misc_feature (1)..( 9): Result.005 file - promoters50/1580983
tgtttttta

SEQ ID NO: 176186 - DNA, 9 bp, Unknown
  misc_feature (1)..( 9): Result.005 file - promoters50/1580983
gattttttt

SEQ ID NO: 176187 - DNA, 9 bp, Unknown
  misc_feature (1)..( 9): Result.005 file - promoters50/1580983
aattttaat

SEQ ID NO: 176188 - DNA, 12 bp, Unknown
  misc_feature (1)..( 12): Result.005 file - promoters50/1580983
tattcgacagaa

SEQ ID NO: 176189 - DNA, 12 bp, Unknown
  misc_feature (1)..( 12): Result.005 file - promoters50/1580983
ttttcaacattt

SEQ ID NO: 176190 - DNA, 12 bp, Unknown
  misc_feature (1)..( 12): Result.005 file - promoters50/1580983
tttttaactttt

SEQ ID NO: 176191 - DNA, 12 bp, Unknown
  misc_feature (1)..( 12): Result.005 file - promoters50/1580983
ctcacaacatgt

SEQ ID NO: 176192 - DNA, 12 bp, Unknown
  misc_feature (1)..( 12): Result.005 file - promoters50/1580983
aagtcaacagct

SEQ ID NO: 176193 - DNA, 14 bp, Unknown
  misc_feature (1)..( 14): Result.005 file - promoters50/1581038
ccaagaatattagt

SEQ ID NO: 176194 - DNA, 14 bp, Unknown
  misc_feature (1)..( 14): Result.005 file - promoters50/1581038
attcatatattagt

SEQ ID NO: 176195 - DNA, 14 bp, Unknown
  misc_feature (1)..( 14): Result.005 file - promoters50/1581038
atataaatatttaa

SEQ ID NO: 176196 - DNA, 14 bp, Unknown
  misc_feature (1)..( 14): Result.005 file - promoters50/1581038
tttaaaatctttca

SEQ ID NO: 176197 - DNA, 14 bp, Unknown
  misc_feature (1)..( 14): Result.005 file - promoters50/1581038
tctaaaatcttcca

SEQ ID NO: 176198 - DNA, 14 bp, Unknown
  misc_feature (1)..( 14): Result.005 file - promoters50/1581038
tttataatcatgct

SEQ ID NO: 176199 - DNA, 11 bp, Unknown
  misc_feature (1)..( 11): Result.005 file - promoters50/1581038
aataaataact

SEQ ID NO: 176200 - DNA, 11 bp, Unknown
  misc_feature (1)..( 11): Result.005 file - promoters50/1581038
tttaattaaaa

SEQ ID NO: 176201 - DNA, 11 bp, Unknown
  misc_feature (1)..( 11): Result.005 file - promoters50/1581038
aatatatatat

SEQ ID NO: 176202 - DNA, 11 bp, Unknown
  misc_feature (1)..( 11): Result.005 file - promoters50/1581038
tatatatatgt

SEQ ID NO: 176203 - DNA, 11 bp, Unknown
  misc_feature (1)..( 11): Result.005 file - promoters50/1581038
cctaattaacc

SEQ ID NO: 176204 - DNA, 11 bp, Unknown
  misc_feature (1)..( 11): Result.005 file - promoters50/1581038
gaactttaatt

SEQ ID NO: 176205 - DNA, 11 bp, Unknown
  misc_feature (1)..( 11): Result.005 file - promoters50/1581038
agaaattataa

SEQ ID NO: 176206 - DNA, 11 bp, Unknown
  misc_feature (1)..( 11): Result.005 file - promoters50/1581038
agaaattctat

SEQ ID NO: 176207 - DNA, 10 bp, Unknown
  misc_feature (1)..( 10): Result.005 file - promoters50/1581038
tatatataat

SEQ ID NO: 176208 - DNA, 10 bp, Unknown
  misc_feature (1)..( 10): Result.005 file - promoters50/1581038
tatttataac

SEQ ID NO: 176209 - DNA, 10 bp, Unknown
  misc_feature (1)..( 10): Result.005 file - promoters50/1581038
tatataaatc

SEQ ID NO: 176210 - DNA, 10 bp, Unknown
  misc_feature (1)..( 10): Result.005 file - promoters50/1581038
tataaataga

SEQ ID NO: 176211 - DNA, 10 bp, Unknown
  misc_feature (1)..( 10): Result.005 file - promoters50/1581038
gatataatac

SEQ ID NO: 176212 - DNA, 10 bp, Unknown
  misc_feature (1)..( 10): Result.005 file - promoters50/1581038
tgtttaaaac

SEQ ID NO: 176213 - DNA, 12 bp, Unknown
  misc_feature (1)..( 12): Result.005 file - promoters50/1581038
tatgtatttttc

SEQ ID NO: 176214 - DNA, 12 bp, Unknown
  misc_feature (1)..( 12): Result.005 file - promoters50/1581038
gttccatttttg

SEQ ID NO: 176215 - DNA, 12 bp, Unknown
  misc_feature (1)..( 12): Result.005 file - promoters50/1581038
cttatatttttc

SEQ ID NO: 176216 - DNA, 12 bp, Unknown
  misc_feature (1)..( 12): Result.005 file - promoters50/1581038
gtggtaatttga

SEQ ID NO: 176217 - DNA, 12 bp, Unknown
  misc_feature (1)..( 12): Result.005 file - promoters50/1581038
tagacattttat

SEQ ID NO: 176218 - DNA, 12 bp, Unknown
  misc_feature (1)..( 12): Result.005 file - promoters50/1581038
gtgttaattgtc

SEQ ID NO: 176219 - DNA, 9 bp, Unknown
  misc_feature (1)..( 9): Result.005 file - promoters50/1581165
taaaatacc

SEQ ID NO: 176220 - DNA, 9 bp, Unknown
  misc_feature (1)..( 9): Result.005 file - promoters50/1581165
aaaaataag

SEQ ID NO: 176221 - DNA, 9 bp, Unknown
  misc_feature (1)..( 9): Result.005 file - promoters50/1581165
taaaattag

SEQ ID NO: 176222 - DNA, 9 bp, Unknown
  misc_feature (1)..( 9): Result.005 file - promoters50/1581165
taaaataat

SEQ ID NO: 176223 - DNA, 9 bp, Unknown
  misc_feature (1)..( 9): Result.005 file - promoters50/1581165
acaaataaa

SEQ ID NO: 176224 - DNA, 9 bp, Unknown
  misc_feature (1)..( 9): Result.005 file - promoters50/1581165
ataaataag

SEQ ID NO: 176225 - DNA, 7 bp, Unknown
  misc_feature (1)..( 7): Result.005 file - promoters50/1581165
gaaaaaa

SEQ ID NO: 176226 - DNA, 7 bp, Unknown
  misc_feature (1)..( 7): Result.005 file - promoters50/1581165
caaaaaa

SEQ ID NO: 176227 - DNA, 8 bp, Unknown
  misc_feature (1)..( 8): Result.005 file - promoters50/1581165
taaataaa

SEQ ID NO: 176228 - DNA, 8 bp, Unknown
  misc_feature (1)..( 8): Result.005 file - promoters50/1581165
taaaaacg

SEQ ID NO: 176229 - DNA, 8 bp, Unknown
  misc_feature (1)..( 8): Result.005 file - promoters50/1581165
caaataaa

SEQ ID NO: 176230 - DNA, 8 bp, Unknown
  misc_feature (1)..( 8): Result.005 file - promoters50/1581165
caaacaaa

SEQ ID NO: 176231 - DNA, 8 bp, Unknown
  misc_feature (1)..( 8): Result.005 file - promoters50/1581165
aaattaaa

SEQ ID NO: 176232 - DNA, 12 bp, Unknown
  misc_feature (1)..( 12): Result.005 file - promoters50/1581165
tctatctctaag

SEQ ID NO: 176233 - DNA, 12 bp, Unknown
  misc_feature (1)..( 12): Result.005 file - promoters50/1581165
tctttctttttt

SEQ ID NO: 176234 - DNA, 12 bp, Unknown
  misc_feature (1)..( 12): Result.005 file - promoters50/1581165
tatatctccaag

SEQ ID NO: 176235 - DNA, 12 bp, Unknown
  misc_feature (1)..( 12): Result.005 file - promoters50/1581165
tttatttcggta

SEQ ID NO: 176236 - DNA, 12 bp, Unknown
  misc_feature (1)..( 12): Result.005 file - promoters50/1581165
catatttcagag

SEQ ID NO: 176237 - DNA, 12 bp, Unknown
  misc_feature (1)..( 12): Result.005 file - promoters50/1581165
tttatttactct

SEQ ID NO: 176238 - DNA, 12 bp, Unknown
  misc_feature (1)..( 12): Result.005 file - promoters50/1581165
cttcttttgtag

SEQ ID NO: 176239 - DNA, 9 bp, Unknown
  misc_feature (1)..( 9): Result.005 file - promoters50/1581165
aaaaaaaaa

SEQ ID NO: 176240 - DNA, 9 bp, Unknown
  misc_feature (1)..( 9): Result.005 file - promoters50/1581165
aaataaatg

SEQ ID NO: 176241 - DNA, 9 bp, Unknown
  misc_feature (1)..( 9): Result.005 file - promoters50/1581165
aaataaacc

SEQ ID NO: 176242 - DNA, 9 bp, Unknown
  misc_feature (1)..( 9): Result.005 file - promoters50/1581165
atatacatg

SEQ ID NO: 176243 - DNA, 9 bp, Unknown
  misc_feature (1)..( 9): Result.005 file - promoters50/1581165
acatatatg

SEQ ID NO: 176244 - DNA, 9 bp, Unknown
  misc_feature (1)..( 9): Result.005 file - promoters50/1581165
aaacacata

SEQ ID NO: 176245 - DNA, 9 bp, Unknown
  misc_feature (1)..( 9): Result.005 file - promoters50/1581165
aaataaggt

SEQ ID NO: 176246 - DNA, 8 bp, Unknown
  misc_feature (1)..( 8): Result.005 file - promoters50/1581223
tttaaatt

SEQ ID NO: 176247 - DNA, 8 bp, Unknown
  misc_feature (1)..( 8): Result.005 file - promoters50/1581223
tttgaatt

SEQ ID NO: 176248 - DNA, 9 bp, Unknown
  misc_feature (1)..( 9): Result.005 file - promoters50/1581223
tttcgaaat

SEQ ID NO: 176249 - DNA, 10 bp, Unknown
  misc_feature (1)..( 10): Result.005 file - promoters50/1581223
tcctagataa

SEQ ID NO: 176250 - DNA, 10 bp, Unknown
  misc_feature (1)..( 10): Result.005 file - promoters50/1581223
atctaaataa

SEQ ID NO: 176251 - DNA, 10 bp, Unknown
  misc_feature (1)..( 10): Result.005 file - promoters50/1581223
atcgaaatgt

SEQ ID NO: 176252 - DNA, 10 bp, Unknown
  misc_feature (1)..( 10): Result.005 file - promoters50/1581454
aagtaaaaaa

SEQ ID NO: 176253 - DNA, 10 bp, Unknown
  misc_feature (1)..( 10): Result.005 file - promoters50/1581454
tgtgaaaaaa

SEQ ID NO: 176254 - DNA, 10 bp, Unknown
  misc_feature (1)..( 10): Result.005 file - promoters50/1581454
acataaaaag

SEQ ID NO: 176255 - DNA, 10 bp, Unknown
  misc_feature (1)..( 10): Result.005 file - promoters50/1581454
cgtgagaaat

SEQ ID NO: 176256 - DNA, 10 bp, Unknown
  misc_feature (1)..( 10): Result.005 file - promoters50/1581454
cattaaacta

SEQ ID NO: 176257 - DNA, 12 bp, Unknown
  misc_feature (1)..( 12): Result.005 file - promoters50/1581987
atgtgtttctca

SEQ ID NO: 176258 - DNA, 12 bp, Unknown
  misc_feature (1)..( 12): Result.005 file - promoters50/1581987
ttatgtttctcg

SEQ ID NO: 176259 - DNA, 12 bp, Unknown
  misc_feature (1)..( 12): Result.005 file - promoters50/1581987
atgggtttgaaa

SEQ ID NO: 176260 - DNA, 12 bp, Unknown
  misc_feature (1)..( 12): Result.005 file - promoters50/1581987
gggcttttctcg

SEQ ID NO: 176261 - DNA, 12 bp, Unknown
  misc_feature (1)..( 12): Result.005 file - promoters50/1581987
tagtgattccac

SEQ ID NO: 176262 - DNA, 12 bp, Unknown
  misc_feature (1)..( 12): Result.005 file - promoters50/1581987
gattgattctca

SEQ ID NO: 176263 - DNA, 10 bp, Unknown
  misc_feature (1)..( 10): Result.005 file - promoters50/1582293
acatacatta

SEQ ID NO: 176264 - DNA, 10 bp, Unknown
  misc_feature (1)..( 10): Result.005 file - promoters50/1582293
atataaatta

SEQ ID NO: 176265 - DNA, 10 bp, Unknown
  misc_feature (1)..( 10): Result.005 file - promoters50/1582293
atatgaatca

SEQ ID NO: 176266 - DNA, 11 bp, Unknown
  misc_feature (1)..( 11): Result.005 file - promoters50/1582293
aaattacttac

SEQ ID NO: 176267 - DNA, 11 bp, Unknown
  misc_feature (1)..( 11): Result.005 file - promoters50/1582293
atattactata

SEQ ID NO: 176268 - DNA, 11 bp, Unknown
  misc_feature (1)..( 11): Result.005 file - promoters50/1582293
atagtacaata

SEQ ID NO: 176269 - DNA, 9 bp, Unknown
  misc_feature (1)..( 9): Result.005 file - promoters50/1582293
actaatgat

SEQ ID NO: 176270 - DNA, 9 bp, Unknown
  misc_feature (1)..( 9): Result.005 file - promoters50/1582293
tataatgat

SEQ ID NO: 176271 - DNA, 9 bp, Unknown
  misc_feature (1)..( 9): Result.005 file - promoters50/1582293
aataattac

SEQ ID NO: 176272 - DNA, 11 bp, Unknown
  misc_feature (1)..( 11): Result.005 file - promoters50/1582322
cacctttctct

SEQ ID NO: 176273 - DNA, 11 bp, Unknown
  misc_feature (1)..( 11): Result.005 file - promoters50/1582322
aatttttttct

SEQ ID NO: 176274 - DNA, 11 bp, Unknown
  misc_feature (1)..( 11): Result.005 file - promoters50/1582322
tctatttatct

SEQ ID NO: 176275 - DNA, 12 bp, Unknown
  misc_feature (1)..( 12): Result.005 file - promoters50/1582322
atgattgttttg

SEQ ID NO: 176276 - DNA, 10 bp, Unknown
  misc_feature (1)..( 10): Result.005 file - promoters50/1582322
aatatttata

SEQ ID NO: 176277 - DNA, 10 bp, Unknown
  misc_feature (1)..( 10): Result.005 file - promoters50/1582322
aatatatatg

SEQ ID NO: 176278 - DNA, 10 bp, Unknown
  misc_feature (1)..( 10): Result.005 file - promoters50/1582322
ggtatttgtt

SEQ ID NO: 176279 - DNA, 7 bp, Unknown
  misc_feature (1)..( 7): Result.005 file - promoters50/1582322
atttttt

SEQ ID NO: 176280 - DNA, 7 bp, Unknown
  misc_feature (1)..( 7): Result.005 file - promoters50/1582322
atttttc

SEQ ID NO: 176281 - DNA, 8 bp, Unknown
  misc_feature (1)..( 8): Result.005 file - promoters50/1582322
attgtttt

SEQ ID NO: 176282 - DNA, 10 bp, Unknown
  misc_feature (1)..( 10): Result.005 file - promoters50/1582322
ggtgtttgca

SEQ ID NO: 176283 - DNA, 10 bp, Unknown
  misc_feature (1)..( 10): Result.005 file - promoters50/1582322
ggtatttgtt

SEQ ID NO: 176284 - DNA, 10 bp, Unknown
  misc_feature (1)..( 10): Result.005 file - promoters50/1582322
tatatatgtt

SEQ ID NO: 176285 - DNA, 10 bp, Unknown
  misc_feature (1)..( 10): Result.005 file - promoters50/1582322
ttataattat

SEQ ID NO: 176286 - DNA, 10 bp, Unknown
  misc_feature (1)..( 10): Result.005 file - promoters50/1582322
ttacaataat

SEQ ID NO: 176287 - DNA, 10 bp, Unknown
  misc_feature (1)..( 10): Result.005 file - promoters50/1582322
aaataattat

SEQ ID NO: 176288 - DNA, 12 bp, Unknown
  misc_feature (1)..( 12): Result.005 file - promoters50/1582322
ccggaattttaa

SEQ ID NO: 176289 - DNA, 12 bp, Unknown
  misc_feature (1)..( 12): Result.005 file - promoters50/1582322
ataaaattataa

SEQ ID NO: 176290 - DNA, 12 bp, Unknown
  misc_feature (1)..( 12): Result.005 file - promoters50/1582322
atacaatgatat

SEQ ID NO: 176291 - DNA, 10 bp, Unknown
  misc_feature (1)..( 10): Result.005 file - promoters50/1582322
cttgaatcaa

SEQ ID NO: 176292 - DNA, 10 bp, Unknown
  misc_feature (1)..( 10): Result.005 file - promoters50/1582322
cttaaatatt

SEQ ID NO: 176293 - DNA, 10 bp, Unknown
  misc_feature (1)..( 10): Result.005 file - promoters50/1582322
aataaaaatt

SEQ ID NO: 176294 - DNA, 10 bp, Unknown
  misc_feature (1)..( 10): Result.005 file - promoters50/1582322
tcaatatttt

SEQ ID NO: 176295 - DNA, 10 bp, Unknown
  misc_feature (1)..( 10): Result.005 file - promoters50/1582322
taaatatttt

SEQ ID NO: 176296 - DNA, 10 bp, Unknown
  misc_feature (1)..( 10): Result.005 file - promoters50/1582322
taaaaattat

SEQ ID NO: 176297 - DNA, 12 bp, Unknown
  misc_feature (1)..( 12): Result.005 file - promoters50/1582339
cgaaagattaag

SEQ ID NO: 176298 - DNA, 12 bp, Unknown
  misc_feature (1)..( 12): Result.005 file - promoters50/1582339
agaaatattatt

SEQ ID NO: 176299 - DNA, 12 bp, Unknown
  misc_feature (1)..( 12): Result.005 file - promoters50/1582339
gaaaatgttatt

SEQ ID NO: 176300 - DNA, 12 bp, Unknown
  misc_feature (1)..( 12): Result.005 file - promoters50/1582339
atatatatgatt

SEQ ID NO: 176301 - DNA, 12 bp, Unknown
  misc_feature (1)..( 12): Result.005 file - promoters50/1582339
agaaatctcgac

SEQ ID NO: 176302 - DNA, 12 bp, Unknown
  misc_feature (1)..( 12): Result.005 file - promoters50/1582339
tatctaatatat

SEQ ID NO: 176303 - DNA, 12 bp, Unknown
  misc_feature (1)..( 12): Result.005 file - promoters50/1582339
cttttaatatta

SEQ ID NO: 176304 - DNA, 12 bp, Unknown
  misc_feature (1)..( 12): Result.005 file - promoters50/1582339
tatctaatttta

SEQ ID NO: 176305 - DNA, 12 bp, Unknown
  misc_feature (1)..( 12): Result.005 file - promoters50/1582339
ctttttataaat

SEQ ID NO: 176306 - DNA, 15 bp, Unknown
  misc_feature (1)..( 15): Result.005 file - promoters50/1582339
aaaaaaaactatcta

SEQ ID NO: 176307 - DNA, 15 bp, Unknown
  misc_feature (1)..( 15): Result.005 file - promoters50/1582339
attataaaatattat

SEQ ID NO: 176308 - DNA, 15 bp, Unknown
  misc_feature (1)..( 15): Result.005 file - promoters50/1582339
aaataaaacttctca

SEQ ID NO: 176309 - DNA, 15 bp, Unknown
  misc_feature (1)..( 15): Result.005 file - promoters50/1582339
ttttataaataaact

SEQ ID NO: 176310 - DNA, 9 bp, Unknown
  misc_feature (1)..( 9): Result.005 file - promoters50/1582349
atgttttta

SEQ ID NO: 176311 - DNA, 9 bp, Unknown
  misc_feature (1)..( 9): Result.005 file - promoters50/1582349
atgtttgct

SEQ ID NO: 176312 - DNA, 9 bp, Unknown
  misc_feature (1)..( 9): Result.005 file - promoters50/1582349
ttgttgtta

SEQ ID NO: 176313 - DNA, 10 bp, Unknown
  misc_feature (1)..( 10): Result.005 file - promoters50/1582349
ggtattattt

SEQ ID NO: 176314 - DNA, 10 bp, Unknown
  misc_feature (1)..( 10): Result.005 file - promoters50/1582349
tcaatttttt

SEQ ID NO: 176315 - DNA, 10 bp, Unknown
  misc_feature (1)..( 10): Result.005 file - promoters50/1582349
tcaagttttt

SEQ ID NO: 176316 - DNA, 11 bp, Unknown
  misc_feature (1)..( 11): Result.005 file - promoters50/1582551
aaaaaaaaaag

SEQ ID NO: 176317 - DNA, 11 bp, Unknown
  misc_feature (1)..( 11): Result.005 file - promoters50/1582551
aaaaagaaaag

SEQ ID NO: 176318 - DNA, 11 bp, Unknown
  misc_feature (1)..( 11): Result.005 file - promoters50/1582551
ttaaagtaaag

SEQ ID NO: 176319 - DNA, 9 bp, Unknown
  misc_feature (1)..( 9): Result.005 file - promoters50/1582551
aacacaaaa

SEQ ID NO: 176320 - DNA, 9 bp, Unknown
  misc_feature (1)..( 9): Result.005 file - promoters50/1582551
cccactaaa

SEQ ID NO: 176321 - DNA, 9 bp, Unknown
  misc_feature (1)..( 9): Result.005 file - promoters50/1582551
cccactaga

SEQ ID NO: 176322 - DNA, 9 bp, Unknown
  misc_feature (1)..( 9): Result.005 file - promoters50/1582576
aaagtaaaa

SEQ ID NO: 176323 - DNA, 9 bp, Unknown
  misc_feature (1)..( 9): Result.005 file - promoters50/1582576
agagtgaaa

SEQ ID NO: 176324 - DNA, 9 bp, Unknown
  misc_feature (1)..( 9): Result.005 file - promoters50/1582576
agagagaaa

SEQ ID NO: 176325 - DNA, 12 bp, Unknown
  misc_feature (1)..( 12): Result.005 file - promoters50/1582576
aaattaaaatat

SEQ ID NO: 176326 - DNA, 12 bp, Unknown
  misc_feature (1)..( 12): Result.005 file - promoters50/1582576
taattaatgggc

SEQ ID NO: 176327 - DNA, 12 bp, Unknown
  misc_feature (1)..( 12): Result.005 file - promoters50/1582576
aaaataatatat

SEQ ID NO: 176328 - DNA, 12 bp, Unknown
  misc_feature (1)..( 12): Result.005 file - promoters50/1582576
gaaaaaatgtat

SEQ ID NO: 176329 - DNA, 8 bp, Unknown
  misc_feature (1)..( 8): Result.005 file - promoters50/1582576
aataaaag

SEQ ID NO: 176330 - DNA, 8 bp, Unknown
  misc_feature (1)..( 8): Result.005 file - promoters50/1582576
aataaaaa

SEQ ID NO: 176331 - DNA, 8 bp, Unknown
  misc_feature (1)..( 8): Result.005 file - promoters50/1582576
aataaata

SEQ ID NO: 176332 - DNA, 8 bp, Unknown
  misc_feature (1)..( 8): Result.005 file - promoters50/1582576
aatagata

SEQ ID NO: 176333 - DNA, 7 bp, Unknown
  misc_feature (1)..( 7): Result.005 file - promoters50/1582576
aaagact

SEQ ID NO: 176334 - DNA, 7 bp, Unknown
  misc_feature (1)..( 7): Result.005 file - promoters50/1582576
aaaaact

SEQ ID NO: 176335 - DNA, 8 bp, Unknown
  misc_feature (1)..( 8): Result.005 file - promoters50/1582576
aaatgaca

SEQ ID NO: 176336 - DNA, 8 bp, Unknown
  misc_feature (1)..( 8): Result.005 file - promoters50/1582576
aaaataaa

SEQ ID NO: 176337 - DNA, 8 bp, Unknown
  misc_feature (1)..( 8): Result.005 file - promoters50/1582576
aaagtaaa

SEQ ID NO: 176338 - DNA, 8 bp, Unknown
  misc_feature (1)..( 8): Result.005 file - promoters50/1582576
aaaacaaa

SEQ ID NO: 176339 - DNA, 7 bp, Unknown
  misc_feature (1)..( 7): Result.005 file - promoters50/1582576
tatttag

SEQ ID NO: 176340 - DNA, 7 bp, Unknown
  misc_feature (1)..( 7): Result.005 file - promoters50/1582576
tatgtag

SEQ ID NO: 176341 - DNA, 7 bp, Unknown
  misc_feature (1)..( 7): Result.005 file - promoters50/1582576
tatttaa

SEQ ID NO: 176342 - DNA, 11 bp, Unknown
  misc_feature (1)..( 11): Result.005 file - promoters50/1582576
ttaaaatatat

SEQ ID NO: 176343 - DNA, 11 bp, Unknown
  misc_feature (1)..( 11): Result.005 file - promoters50/1582576
aaaaaatgtat

SEQ ID NO: 176344 - DNA, 11 bp, Unknown
  misc_feature (1)..( 11): Result.005 file - promoters50/1582576
ctaaaataata

SEQ ID NO: 176345 - DNA, 11 bp, Unknown
  misc_feature (1)..( 11): Result.005 file - promoters50/1582576
ctacaattttg

SEQ ID NO: 176346 - DNA, 8 bp, Unknown
  misc_feature (1)..( 8): Result.005 file - promoters50/1582576
gaataaat

SEQ ID NO: 176347 - DNA, 8 bp, Unknown
  misc_feature (1)..( 8): Result.005 file - promoters50/1582576
taattaat

SEQ ID NO: 176348 - DNA, 8 bp, Unknown
  misc_feature (1)..( 8): Result.005 file - promoters50/1582576
taactaat

SEQ ID NO: 176349 - DNA, 7 bp, Unknown
  misc_feature (1)..( 7): Result.005 file - promoters50/1582576
ttaaaat

SEQ ID NO: 176350 - DNA, 7 bp, Unknown
  misc_feature (1)..( 7): Result.005 file - promoters50/1582576
ctaaaat

SEQ ID NO: 176351 - DNA, 7 bp, Unknown
  misc_feature (1)..( 7): Result.005 file - promoters50/1582576
ctacaat

SEQ ID NO: 176352 - DNA, 7 bp, Unknown
  misc_feature (1)..( 7): Result.005 file - promoters50/1582576
taataat

SEQ ID NO: 176353 - DNA, 7 bp, Unknown
  misc_feature (1)..( 7): Result.005 file - promoters50/1582576
aaataat

SEQ ID NO: 176354 - DNA, 7 bp, Unknown
  misc_feature (1)..( 7): Result.005 file - promoters50/1582576
aaataac

SEQ ID NO: 176355 - DNA, 8 bp, Unknown
  misc_feature (1)..( 8): Result.005 file - promoters50/1582654
aaacaaag

SEQ ID NO: 176356 - DNA, 8 bp, Unknown
  misc_feature (1)..( 8): Result.005 file - promoters50/1582654
aaagaaag

SEQ ID NO: 176357 - DNA, 9 bp, Unknown
  misc_feature (1)..( 9): Result.005 file - promoters50/1582654
aaatcaacg

SEQ ID NO: 176358 - DNA, 8 bp, Unknown
  misc_feature (1)..( 8): Result.005 file - promoters50/1582654
aaaacaat

SEQ ID NO: 176359 - DNA, 8 bp, Unknown
  misc_feature (1)..( 8): Result.005 file - promoters50/1582654
taaacaaa

SEQ ID NO: 176360 - DNA, 8 bp, Unknown
  misc_feature (1)..( 8): Result.005 file - promoters50/1582654
aaaaaaaa

SEQ ID NO: 176361 - DNA, 8 bp, Unknown
  misc_feature (1)..( 8): Result.005 file - promoters50/1582654
taatcaat

SEQ ID NO: 176362 - DNA, 10 bp, Unknown
  misc_feature (1)..( 10): Result.005 file - promoters50/1582654
taaaaagaat

SEQ ID NO: 176363 - DNA, 10 bp, Unknown
  misc_feature (1)..( 10): Result.005 file - promoters50/1582654
aaaaaaaaat

SEQ ID NO: 176364 - DNA, 10 bp, Unknown
  misc_feature (1)..( 10): Result.005 file - promoters50/1582654
caaataaagg

SEQ ID NO: 176365 - DNA, 8 bp, Unknown
  misc_feature (1)..( 8): Result.005 file - promoters50/1582654
tgttttgt

SEQ ID NO: 176366 - DNA, 8 bp, Unknown
  misc_feature (1)..( 8): Result.005 file - promoters50/1582654
tgtttttg

SEQ ID NO: 176367 - DNA, 9 bp, Unknown
  misc_feature (1)..( 9): Result.005 file - promoters50/1582654
tgttcttgg

SEQ ID NO: 176368 - DNA, 11 bp, Unknown
  misc_feature (1)..( 11): Result.005 file - promoters50/1582658
cagcccagtca

SEQ ID NO: 176369 - DNA, 11 bp, Unknown
  misc_feature (1)..( 11): Result.005 file - promoters50/1582658
aataccaatca

SEQ ID NO: 176370 - DNA, 11 bp, Unknown
  misc_feature (1)..( 11): Result.005 file - promoters50/1582658
aatacaaatct

SEQ ID NO: 176371 - DNA, 11 bp, Unknown
  misc_feature (1)..( 11): Result.005 file - promoters50/1582658
gctacaaataa

SEQ ID NO: 176372 - DNA, 11 bp, Unknown
  misc_feature (1)..( 11): Result.005 file - promoters50/1582658
aaaacacataa

SEQ ID NO: 176373 - DNA, 11 bp, Unknown
  misc_feature (1)..( 11): Result.005 file - promoters50/1582658
tatacaaaaga

SEQ ID NO: 176374 - DNA, 8 bp, Unknown
  misc_feature (1)..( 8): Result.005 file - promoters50/1582786
ttcttttt

SEQ ID NO: 176375 - DNA, 8 bp, Unknown
  misc_feature (1)..( 8): Result.005 file - promoters50/1582786
atctattt

SEQ ID NO: 176376 - DNA, 8 bp, Unknown
  misc_feature (1)..( 8): Result.005 file - promoters50/1582786
ttcttttg

SEQ ID NO: 176377 - DNA, 8 bp, Unknown
  misc_feature (1)..( 8): Result.005 file - promoters50/1582786
ttcttttg

SEQ ID NO: 176378 - DNA, 8 bp, Unknown
  misc_feature (1)..( 8): Result.005 file - promoters50/1582786
gttttttg

SEQ ID NO: 176379 - DNA, 8 bp, Unknown
  misc_feature (1)..( 8): Result.005 file - promoters50/1583044
ttgtgtat

SEQ ID NO: 176380 - DNA, 8 bp, Unknown
  misc_feature (1)..( 8): Result.005 file - promoters50/1583044
ttgtatat

SEQ ID NO: 176381 - DNA, 8 bp, Unknown
  misc_feature (1)..( 8): Result.005 file - promoters50/1583044
aagtatat

SEQ ID NO: 176382 - DNA, 8 bp, Unknown
  misc_feature (1)..( 8): Result.005 file - promoters50/1583044
aaggatat

SEQ ID NO: 176383 - DNA, 9 bp, Unknown
  misc_feature (1)..( 9): Result.005 file - promoters50/1583350
tatagtttt

SEQ ID NO: 176384 - DNA, 9 bp, Unknown
  misc_feature (1)..( 9): Result.005 file - promoters50/1583350
catattttt

SEQ ID NO: 176385 - DNA, 9 bp, Unknown
  misc_feature (1)..( 9): Result.005 file - promoters50/1583350
tatatttaa

SEQ ID NO: 176386 - DNA, 13 bp, Unknown
  misc_feature (1)..( 13): Result.005 file - promoters50/1595585
attaaataattaa

SEQ ID NO: 176387 - DNA, 13 bp, Unknown
  misc_feature (1)..( 13): Result.005 file - promoters50/1595585
cccaaaaaatctg

SEQ ID NO: 176388 - DNA, 13 bp, Unknown
  misc_feature (1)..( 13): Result.005 file - promoters50/1595585
taaaaataattag

SEQ ID NO: 176389 - DNA, 13 bp, Unknown
  misc_feature (1)..( 13): Result.005 file - promoters50/1595585
aaaacaaaatcat

SEQ ID NO: 176390 - DNA, 13 bp, Unknown
  misc_feature (1)..( 13): Result.005 file - promoters50/1595585
taagaaaaaccat

SEQ ID NO: 176391 - DNA, 13 bp, Unknown
  misc_feature (1)..( 13): Result.005 file - promoters50/1595585
aaaaaaaaattat

SEQ ID NO: 176392 - DNA, 14 bp, Unknown
  misc_feature (1)..( 14): Result.005 file - promoters50/1595585
tgtgaaaaacgtgt

SEQ ID NO: 176393 - DNA, 14 bp, Unknown
  misc_feature (1)..( 14): Result.005 file - promoters50/1595585
taagaaaaaccata

SEQ ID NO: 176394 - DNA, 14 bp, Unknown
  misc_feature (1)..( 14): Result.005 file - promoters50/1595585
aaacaaaatcatta

SEQ ID NO: 176395 - DNA, 14 bp, Unknown
  misc_feature (1)..( 14): Result.005 file - promoters50/1595585
aaagataaattgtc

SEQ ID NO: 176396 - DNA, 14 bp, Unknown
  misc_feature (1)..( 14): Result.005 file - promoters50/1595585
gtaaaaaaaaaaat

SEQ ID NO: 176397 - DNA, 14 bp, Unknown
  misc_feature (1)..( 14): Result.005 file - promoters50/1595585
aaataaaaattggg

SEQ ID NO: 176398 - DNA, 9 bp, Unknown
  misc_feature (1)..( 9): Result.005 file - promoters50/1595635
acctgaatc

SEQ ID NO: 176399 - DNA, 9 bp, Unknown
  misc_feature (1)..( 9): Result.005 file - promoters50/1595635
accagaaaa

SEQ ID NO: 176400 - DNA, 9 bp, Unknown
  misc_feature (1)..( 9): Result.005 file - promoters50/1595635
tgctggatc

SEQ ID NO: 176401 - DNA, 7 bp, Unknown
  misc_feature (1)..( 7): Result.005 file - promoters50/1595635
caaactg

SEQ ID NO: 176402 - DNA, 7 bp, Unknown
  misc_feature (1)..( 7): Result.005 file - promoters50/1595635
aaaactg

SEQ ID NO: 176403 - DNA, 8 bp, Unknown
  misc_feature (1)..( 8): Result.005 file - promoters50/1595635
taacactc

SEQ ID NO: 176404 - DNA, 8 bp, Unknown
  misc_feature (1)..( 8): Result.005 file - promoters50/1595635
aaacatat

SEQ ID NO: 176405 - DNA, 8 bp, Unknown
  misc_feature (1)..( 8): Result.005 file - promoters50/1595635
aaatatag

SEQ ID NO: 176406 - DNA, 8 bp, Unknown
  misc_feature (1)..( 8): Result.005 file - promoters50/1595635
taacttat

SEQ ID NO: 176407 - DNA, 7 bp, Unknown
  misc_feature (1)..( 7): Result.005 file - promoters50/1595663
atctaac

SEQ ID NO: 176408 - DNA, 7 bp, Unknown
  misc_feature (1)..( 7): Result.005 file - promoters50/1595663
ttctaac

SEQ ID NO: 176409 - DNA, 7 bp, Unknown
  misc_feature (1)..( 7): Result.005 file - promoters50/1595663
ttctaaa

SEQ ID NO: 176410 - DNA, 7 bp, Unknown
  misc_feature (1)..( 7): Result.005 file - promoters50/1595663
tttcagt

SEQ ID NO: 176411 - DNA, 7 bp, Unknown
  misc_feature (1)..( 7): Result.005 file - promoters50/1595663
cttcagt

SEQ ID NO: 176412 - DNA, 7 bp, Unknown
  misc_feature (1)..( 7): Result.005 file - promoters50/1595663
cttcaga

SEQ ID NO: 176413 - DNA, 7 bp, Unknown
  misc_feature (1)..( 7): Result.005 file - promoters50/1595663
caatatg

SEQ ID NO: 176414 - DNA, 7 bp, Unknown
  misc_feature (1)..( 7): Result.005 file - promoters50/1595663
caatatt

SEQ ID NO: 176415 - DNA, 7 bp, Unknown
  misc_feature (1)..( 7): Result.005 file - promoters50/1595663
caaaatt

SEQ ID NO: 176416 - DNA, 9 bp, Unknown
  misc_feature (1)..( 9): Result.005 file - promoters50/1595663
caaacttat

SEQ ID NO: 176417 - DNA, 9 bp, Unknown
  misc_feature (1)..( 9): Result.005 file - promoters50/1595663
caaaattat

SEQ ID NO: 176418 - DNA, 9 bp, Unknown
  misc_feature (1)..( 9): Result.005 file - promoters50/1595663
caatatttg

SEQ ID NO: 176419 - DNA, 7 bp, Unknown
  misc_feature (1)..( 7): Result.005 file - promoters50/1595663
tttaatt

SEQ ID NO: 176420 - DNA, 7 bp, Unknown
  misc_feature (1)..( 7): Result.005 file - promoters50/1595663
tttgatt

SEQ ID NO: 176421 - DNA, 7 bp, Unknown
  misc_feature (1)..( 7): Result.005 file - promoters50/1595663
attaatt

SEQ ID NO: 176422 - DNA, 9 bp, Unknown
  misc_feature (1)..( 9): Result.005 file - promoters50/1595674
caaacataa

SEQ ID NO: 176423 - DNA, 9 bp, Unknown
  misc_feature (1)..( 9): Result.005 file - promoters50/1595674
taaagataa

SEQ ID NO: 176424 - DNA, 9 bp, Unknown
  misc_feature (1)..( 9): Result.005 file - promoters50/1595674
taaagacta

SEQ ID NO: 176425 - DNA, 9 bp, Unknown
  misc_feature (1)..( 9): Result.005 file - promoters50/1595678
aatgatttt

SEQ ID NO: 176426 - DNA, 9 bp, Unknown
  misc_feature (1)..( 9): Result.005 file - promoters50/1595678
tctgagttt

SEQ ID NO: 176427 - DNA, 9 bp, Unknown
  misc_feature (1)..( 9): Result.005 file - promoters50/1595678
aattattgc

SEQ ID NO: 176428 - DNA, 8 bp, Unknown
  misc_feature (1)..( 8): Result.005 file - promoters50/1595678
ctacaaaa

SEQ ID NO: 176429 - DNA, 8 bp, Unknown
  misc_feature (1)..( 8): Result.005 file - promoters50/1595678
tcacaaaa

SEQ ID NO: 176430 - DNA, 8 bp, Unknown
  misc_feature (1)..( 8): Result.005 file - promoters50/1595678
acacaaat

SEQ ID NO: 176431 - DNA, 8 bp, Unknown
  misc_feature (1)..( 8): Result.005 file - promoters50/1595678
ttataaat

SEQ ID NO: 176432 - DNA, 8 bp, Unknown
  misc_feature (1)..( 8): Result.005 file - promoters50/1595678
ttacaaaa

SEQ ID NO: 176433 - DNA, 9 bp, Unknown
  misc_feature (1)..( 9): Result.005 file - promoters50/1595678
ttacacaaa

SEQ ID NO: 176434 - DNA, 9 bp, Unknown
  misc_feature (1)..( 9): Result.005 file - promoters50/1595687
ttttgaaat

SEQ ID NO: 176435 - DNA, 9 bp, Unknown
  misc_feature (1)..( 9): Result.005 file - promoters50/1595687
tttggaaaa

SEQ ID NO: 176436 - DNA, 9 bp, Unknown
  misc_feature (1)..( 9): Result.005 file - promoters50/1595687
aaatgaaat

SEQ ID NO: 176437 - DNA, 9 bp, Unknown
  misc_feature (1)..( 9): Result.005 file - promoters50/1595687
caaggaaac

SEQ ID NO: 176438 - DNA, 9 bp, Unknown
  misc_feature (1)..( 9): Result.005 file - promoters50/1595687
aaagtaaag

SEQ ID NO: 176439 - DNA, 9 bp, Unknown
  misc_feature (1)..( 9): Result.005 file - promoters50/1595687
aaagaaaag

SEQ ID NO: 176440 - DNA, 10 bp, Unknown
  misc_feature (1)..( 10): Result.005 file - promoters50/1595703
aataatacaa

SEQ ID NO: 176441 - DNA, 10 bp, Unknown
  misc_feature (1)..( 10): Result.005 file - promoters50/1595703
cttaattcaa

SEQ ID NO: 176442 - DNA, 10 bp, Unknown
  misc_feature (1)..( 10): Result.005 file - promoters50/1595703
ctttatttta

SEQ ID NO: 176443 - DNA, 11 bp, Unknown
  misc_feature (1)..( 11): Result.005 file - promoters50/1595707
aataccaatca

SEQ ID NO: 176444 - DNA, 11 bp, Unknown
  misc_feature (1)..( 11): Result.005 file - promoters50/1595707
aatacaaatct

SEQ ID NO: 176445 - DNA, 11 bp, Unknown
  misc_feature (1)..( 11): Result.005 file - promoters50/1595707
cagcccagtca

SEQ ID NO: 176446 - DNA, 11 bp, Unknown
  misc_feature (1)..( 11): Result.005 file - promoters50/1595707
aatacaaatct

SEQ ID NO: 176447 - DNA, 11 bp, Unknown
  misc_feature (1)..( 11): Result.005 file - promoters50/1595707
tttactaatag

SEQ ID NO: 176448 - DNA, 11 bp, Unknown
  misc_feature (1)..( 11): Result.005 file - promoters50/1595707
tttactaatag

SEQ ID NO: 176449 - DNA, 11 bp, Unknown
  misc_feature (1)..( 11): Result.005 file - promoters50/1595707
gttattaactt

SEQ ID NO: 176450 - DNA, 12 bp, Unknown
  misc_feature (1)..( 12): Result.005 file - promoters50/1595707
attttcatttga

SEQ ID NO: 176451 - DNA, 12 bp, Unknown
  misc_feature (1)..( 12): Result.005 file - promoters50/1595707
actttcttttta

SEQ ID NO: 176452 - DNA, 12 bp, Unknown
  misc_feature (1)..( 12): Result.005 file - promoters50/1595707
attttaattttg

SEQ ID NO: 176453 - DNA, 12 bp, Unknown
  misc_feature (1)..( 12): Result.005 file - promoters50/1595707
tgattctttgac

SEQ ID NO: 176454 - DNA, 12 bp, Unknown
  misc_feature (1)..( 12): Result.005 file - promoters50/1595707
ctattctaaccc

SEQ ID NO: 176455 - DNA, 12 bp, Unknown
  misc_feature (1)..( 12): Result.005 file - promoters50/1595707
tatataatttta

SEQ ID NO: 176456 - DNA, 11 bp, Unknown
  misc_feature (1)..( 11): Result.005 file - promoters50/1595741
aatttcaataa

SEQ ID NO: 176457 - DNA, 11 bp, Unknown
  misc_feature (1)..( 11): Result.005 file - promoters50/1595741
aatttcatttg

SEQ ID NO: 176458 - DNA, 11 bp, Unknown
  misc_feature (1)..( 11): Result.005 file - promoters50/1595741
ttttttaataa

SEQ ID NO: 176459 - DNA, 11 bp, Unknown
  misc_feature (1)..( 11): Result.005 file - promoters50/1595741
tgtctaaaaag

SEQ ID NO: 176460 - DNA, 11 bp, Unknown
  misc_feature (1)..( 11): Result.005 file - promoters50/1595741
tattttattgt

SEQ ID NO: 176461 - DNA, 11 bp, Unknown
  misc_feature (1)..( 11): Result.005 file - promoters50/1595741
gctttcgtttt

SEQ ID NO: 176462 - DNA, 11 bp, Unknown
  misc_feature (1)..( 11): Result.005 file - promoters50/1595741
gtatttttgat

SEQ ID NO: 176463 - DNA, 11 bp, Unknown
  misc_feature (1)..( 11): Result.005 file - promoters50/1595741
ctattttccta

SEQ ID NO: 176464 - DNA, 11 bp, Unknown
  misc_feature (1)..( 11): Result.005 file - promoters50/1595741
ctattttattg

SEQ ID NO: 176465 - DNA, 11 bp, Unknown
  misc_feature (1)..( 11): Result.005 file - promoters50/1595741
ctatttgtaat

SEQ ID NO: 176466 - DNA, 11 bp, Unknown
  misc_feature (1)..( 11): Result.005 file - promoters50/1595741
taatttcattt

SEQ ID NO: 176467 - DNA, 11 bp, Unknown
  misc_feature (1)..( 11): Result.005 file - promoters50/1595741
agctttcgttt

SEQ ID NO: 176468 - DNA, 7 bp, Unknown
  misc_feature (1)..( 7): Result.005 file - promoters50/1595752
ataattt

SEQ ID NO: 176469 - DNA, 7 bp, Unknown
  misc_feature (1)..( 7): Result.005 file - promoters50/1595752
atatttt

SEQ ID NO: 176470 - DNA, 7 bp, Unknown
  misc_feature (1)..( 7): Result.005 file - promoters50/1595752
atatttc

SEQ ID NO: 176471 - DNA, 8 bp, Unknown
  misc_feature (1)..( 8): Result.005 file - promoters50/1595752
aaatctat

SEQ ID NO: 176472 - DNA, 8 bp, Unknown
  misc_feature (1)..( 8): Result.005 file - promoters50/1595752
aaatctaa

SEQ ID NO: 176473 - DNA, 8 bp, Unknown
  misc_feature (1)..( 8): Result.005 file - promoters50/1595752
acatctaa

SEQ ID NO: 176474 - DNA, 9 bp, Unknown
  misc_feature (1)..( 9): Result.005 file - promoters50/1595752
acaaccata

SEQ ID NO: 176475 - DNA, 9 bp, Unknown
  misc_feature (1)..( 9): Result.005 file - promoters50/1595752
acaaccacc

SEQ ID NO: 176476 - DNA, 9 bp, Unknown
  misc_feature (1)..( 9): Result.005 file - promoters50/1595752
ataaccacc

SEQ ID NO: 176477 - DNA, 9 bp, Unknown
  misc_feature (1)..( 9): Result.005 file - promoters50/1595752
atataaata

SEQ ID NO: 176478 - DNA, 9 bp, Unknown
  misc_feature (1)..( 9): Result.005 file - promoters50/1595752
atatatata

SEQ ID NO: 176479 - DNA, 9 bp, Unknown
  misc_feature (1)..( 9): Result.005 file - promoters50/1595752
ctatatata

SEQ ID NO: 176480 - DNA, 9 bp, Unknown
  misc_feature (1)..( 9): Result.005 file - promoters50/1595752
gaatctctt

SEQ ID NO: 176481 - DNA, 9 bp, Unknown
  misc_feature (1)..( 9): Result.005 file - promoters50/1595752
aaatttctt

SEQ ID NO: 176482 - DNA, 10 bp, Unknown
  misc_feature (1)..( 10): Result.005 file - promoters50/1595752
taagtttgca

SEQ ID NO: 176483 - DNA, 8 bp, Unknown
  misc_feature (1)..( 8): Result.005 file - promoters50/1595772
ataatttc

SEQ ID NO: 176484 - DNA, 8 bp, Unknown
  misc_feature (1)..( 8): Result.005 file - promoters50/1595772
gaaatttc

SEQ ID NO: 176485 - DNA, 8 bp, Unknown
  misc_feature (1)..( 8): Result.005 file - promoters50/1595772
atagttta

SEQ ID NO: 176486 - DNA, 8 bp, Unknown
  misc_feature (1)..( 8): Result.005 file - promoters50/1595772
ctaatttt

SEQ ID NO: 176487 - DNA, 9 bp, Unknown
  misc_feature (1)..( 9): Result.005 file - promoters50/1595772
agaacttta

SEQ ID NO: 176488 - DNA, 9 bp, Unknown
  misc_feature (1)..( 9): Result.005 file - promoters50/1595772
tacaatttt

SEQ ID NO: 176489 - DNA, 11 bp, Unknown
  misc_feature (1)..( 11): Result.005 file - promoters50/1595772
cttataaatac

SEQ ID NO: 176490 - DNA, 11 bp, Unknown
  misc_feature (1)..( 11): Result.005 file - promoters50/1595772
aatataaataa

SEQ ID NO: 176491 - DNA, 11 bp, Unknown
  misc_feature (1)..( 11): Result.005 file - promoters50/1595772
tatataaacaa

SEQ ID NO: 176492 - DNA, 11 bp, Unknown
  misc_feature (1)..( 11): Result.005 file - promoters50/1595772
cttaaaaacca

SEQ ID NO: 176493 - DNA, 11 bp, Unknown
  misc_feature (1)..( 11): Result.005 file - promoters50/1595772
tatataagtgt

SEQ ID NO: 176494 - DNA, 11 bp, Unknown
  misc_feature (1)..( 11): Result.005 file - promoters50/1595772
tatacaaatcc

SEQ ID NO: 176495 - DNA, 11 bp, Unknown
  misc_feature (1)..( 11): Result.005 file - promoters50/1595772
tatttaagtaa

SEQ ID NO: 176496 - DNA, 15 bp, Unknown
  misc_feature (1)..( 15): Result.005 file - promoters50/1595772
tttaaataaaattaa

SEQ ID NO: 176497 - DNA, 15 bp, Unknown
  misc_feature (1)..( 15): Result.005 file - promoters50/1595772
aataattaaattaaa

SEQ ID NO: 176498 - DNA, 15 bp, Unknown
  misc_feature (1)..( 15): Result.005 file - promoters50/1595772
aaacaataaaattaa

SEQ ID NO: 176499 - DNA, 15 bp, Unknown
  misc_feature (1)..( 15): Result.005 file - promoters50/1595772
tttaattaaacatat

SEQ ID NO: 176500 - DNA, 15 bp, Unknown
  misc_feature (1)..( 15): Result.005 file - promoters50/1595772
ttttaatatgaagaa

SEQ ID NO: 176501 - DNA, 15 bp, Unknown
  misc_feature (1)..( 15): Result.005 file - promoters50/1595772
acattataaaataca

SEQ ID NO: 176502 - DNA, 11 bp, Unknown
  misc_feature (1)..( 11): Result.005 file - promoters50/1595772
atgcaaaatta

SEQ ID NO: 176503 - DNA, 11 bp, Unknown
  misc_feature (1)..( 11): Result.005 file - promoters50/1595772
ttttaaaatta

SEQ ID NO: 176504 - DNA, 11 bp, Unknown
  misc_feature (1)..( 11): Result.005 file - promoters50/1595772
caataaaaaaa

SEQ ID NO: 176505 - DNA, 11 bp, Unknown
  misc_feature (1)..( 11): Result.005 file - promoters50/1595772
aaataaatttt

SEQ ID NO: 176506 - DNA, 11 bp, Unknown
  misc_feature (1)..( 11): Result.005 file - promoters50/1595772
agttaaaaagt

SEQ ID NO: 176507 - DNA, 11 bp, Unknown
  misc_feature (1)..( 11): Result.005 file - promoters50/1595772
gtatatattaa

SEQ ID NO: 176508 - DNA, 11 bp, Unknown
  misc_feature (1)..( 11): Result.005 file - promoters50/1595772
taataagactt

SEQ ID NO: 176509 - DNA, 12 bp, Unknown
  misc_feature (1)..( 12): Result.005 file - promoters50/1595772
atctaataattt

SEQ ID NO: 176510 - DNA, 12 bp, Unknown
  misc_feature (1)..( 12): Result.005 file - promoters50/1595772
gtttaaaaatta

SEQ ID NO: 176511 - DNA, 12 bp, Unknown
  misc_feature (1)..( 12): Result.005 file - promoters50/1595772
gtctagtaacta

SEQ ID NO: 176512 - DNA, 12 bp, Unknown
  misc_feature (1)..( 12): Result.005 file - promoters50/1595772
gtgtaacaattc

SEQ ID NO: 176513 - DNA, 12 bp, Unknown
  misc_feature (1)..( 12): Result.005 file - promoters50/1595772
ttgtcacaagtt

SEQ ID NO: 176514 - DNA, 12 bp, Unknown
  misc_feature (1)..( 12): Result.005 file - promoters50/1595772
gttaaaaaattg

SEQ ID NO: 176515 - DNA, 12 bp, Unknown
  misc_feature (1)..( 12): Result.005 file - promoters50/1595772
atgcaaagatta

SEQ ID NO: 176516 - DNA, 12 bp, Unknown
  misc_feature (1)..( 12): Result.005 file - promoters50/1595772
atacaaagagta

SEQ ID NO: 176517 - DNA, 9 bp, Unknown
  misc_feature (1)..( 9): Result.005 file - promoters50/1595772
ataaaatta

SEQ ID NO: 176518 - DNA, 9 bp, Unknown
  misc_feature (1)..( 9): Result.005 file - promoters50/1595772
ttaatattt

SEQ ID NO: 176519 - DNA, 9 bp, Unknown
  misc_feature (1)..( 9): Result.005 file - promoters50/1595772
ataaaatac

SEQ ID NO: 176520 - DNA, 9 bp, Unknown
  misc_feature (1)..( 9): Result.005 file - promoters50/1595772
gtaatgttt

SEQ ID NO: 176521 - DNA, 9 bp, Unknown
  misc_feature (1)..( 9): Result.005 file - promoters50/1595772
caaatatta

SEQ ID NO: 176522 - DNA, 9 bp, Unknown
  misc_feature (1)..( 9): Result.005 file - promoters50/1595772
ttaatatga

SEQ ID NO: 176523 - DNA, 12 bp, Unknown
  misc_feature (1)..( 12): Result.005 file - promoters50/1595772
tagattattttt

SEQ ID NO: 176524 - DNA, 12 bp, Unknown
  misc_feature (1)..( 12): Result.005 file - promoters50/1595772
atgtttatttaa

SEQ ID NO: 176525 - DNA, 13 bp, Unknown
  misc_feature (1)..( 13): Result.005 file - promoters50/1595772
ttctttaattttc

SEQ ID NO: 176526 - DNA, 13 bp, Unknown
  misc_feature (1)..( 13): Result.005 file - promoters50/1595772
tactgtaatgttc

SEQ ID NO: 176527 - DNA, 13 bp, Unknown
  misc_feature (1)..( 13): Result.005 file - promoters50/1595772
ttcattaataaga

SEQ ID NO: 176528 - DNA, 13 bp, Unknown
  misc_feature (1)..( 13): Result.005 file - promoters50/1595772
aaatttaattaac

SEQ ID NO: 176529 - DNA, 10 bp, Unknown
  misc_feature (1)..( 10): Result.005 file - promoters50/1595772
taattttatt

SEQ ID NO: 176530 - DNA, 10 bp, Unknown
  misc_feature (1)..( 10): Result.005 file - promoters50/1595772
gaatttttat

SEQ ID NO: 176531 - DNA, 10 bp, Unknown
  misc_feature (1)..( 10): Result.005 file - promoters50/1595772
taatttgtat

SEQ ID NO: 176532 - DNA, 10 bp, Unknown
  misc_feature (1)..( 10): Result.005 file - promoters50/1595772
ctctttttat

SEQ ID NO: 176533 - DNA, 10 bp, Unknown
  misc_feature (1)..( 10): Result.005 file - promoters50/1595772
ttattttgca

SEQ ID NO: 176534 - DNA, 10 bp, Unknown
  misc_feature (1)..( 10): Result.005 file - promoters50/1595772
atcttcttag

SEQ ID NO: 176535 - DNA, 12 bp, Unknown
  misc_feature (1)..( 12): Result.005 file - promoters50/1595772
aattttattata

SEQ ID NO: 176536 - DNA, 12 bp, Unknown
  misc_feature (1)..( 12): Result.005 file - promoters50/1595772
atttttattgcc

SEQ ID NO: 176537 - DNA, 12 bp, Unknown
  misc_feature (1)..( 12): Result.005 file - promoters50/1595772
ctttttatttct

SEQ ID NO: 176538 - DNA, 12 bp, Unknown
  misc_feature (1)..( 12): Result.005 file - promoters50/1595772
ttatttatttac

SEQ ID NO: 176539 - DNA, 13 bp, Unknown
  misc_feature (1)..( 13): Result.005 file - promoters50/1595772
tctggttattaat

SEQ ID NO: 176540 - DNA, 13 bp, Unknown
  misc_feature (1)..( 13): Result.005 file - promoters50/1595772
aatttgtatctat

SEQ ID NO: 176541 - DNA, 13 bp, Unknown
  misc_feature (1)..( 13): Result.005 file - promoters50/1595772
tataattattttg

SEQ ID NO: 176542 - DNA, 12 bp, Unknown
  misc_feature (1)..( 12): Result.005 file - promoters50/1595794
cagctaaacttg

SEQ ID NO: 176543 - DNA, 12 bp, Unknown
  misc_feature (1)..( 12): Result.005 file - promoters50/1595794
taattaatcttt

SEQ ID NO: 176544 - DNA, 12 bp, Unknown
  misc_feature (1)..( 12): Result.005 file - promoters50/1595794
aatttattctga

SEQ ID NO: 176545 - DNA, 13 bp, Unknown
  misc_feature (1)..( 13): Result.005 file - promoters50/1595794
gaagatatcgttt

SEQ ID NO: 176546 - DNA, 13 bp, Unknown
  misc_feature (1)..( 13): Result.005 file - promoters50/1595794
aatttatttctgc

SEQ ID NO: 176547 - DNA, 13 bp, Unknown
  misc_feature (1)..( 13): Result.005 file - promoters50/1595794
cttttatttcctc

SEQ ID NO: 176548 - DNA, 13 bp, Unknown
  misc_feature (1)..( 13): Result.005 file - promoters50/1595794
catttatttgact

SEQ ID NO: 176549 - DNA, 10 bp, Unknown
  misc_feature (1)..( 10): Result.005 file - promoters50/1595794
acagtctttc

SEQ ID NO: 176550 - DNA, 10 bp, Unknown
  misc_feature (1)..( 10): Result.005 file - promoters50/1595794
tttgtctttt

SEQ ID NO: 176551 - DNA, 10 bp, Unknown
  misc_feature (1)..( 10): Result.005 file - promoters50/1595794
acattcttca

SEQ ID NO: 176552 - DNA, 10 bp, Unknown
  misc_feature (1)..( 10): Result.005 file - promoters50/1595794
ttagtctttg

SEQ ID NO: 176553 - DNA, 10 bp, Unknown
  misc_feature (1)..( 10): Result.005 file - promoters50/1595794
tgcttctttg

SEQ ID NO: 176554 - DNA, 11 bp, Unknown
  misc_feature (1)..( 11): Result.005 file - promoters50/1595794
tagttctcttg

SEQ ID NO: 176555 - DNA, 11 bp, Unknown
  misc_feature (1)..( 11): Result.005 file - promoters50/1595794
cataatgtctg

SEQ ID NO: 176556 - DNA, 11 bp, Unknown
  misc_feature (1)..( 11): Result.005 file - promoters50/1595794
taaaatgtctt

SEQ ID NO: 176557 - DNA, 11 bp, Unknown
  misc_feature (1)..( 11): Result.005 file - promoters50/1595794
gtaaatgtatc

SEQ ID NO: 176558 - DNA, 11 bp, Unknown
  misc_feature (1)..( 11): Result.005 file - promoters50/1595794
gtaaaagtact

SEQ ID NO: 176559 - DNA, 11 bp, Unknown
  misc_feature (1)..( 11): Result.005 file - promoters50/1595794
agaaaagtaat

SEQ ID NO: 176560 - DNA, 11 bp, Unknown
  misc_feature (1)..( 11): Result.005 file - promoters50/1595794
cgtcaagaaat

SEQ ID NO: 176561 - DNA, 15 bp, Unknown
  misc_feature (1)..( 15): Result.005 file - promoters50/1595794
ttaaaaaatcaaaat

SEQ ID NO: 176562 - DNA, 15 bp, Unknown
  misc_feature (1)..( 15): Result.005 file - promoters50/1595794
atttgaaatcaaata

SEQ ID NO: 176563 - DNA, 15 bp, Unknown
  misc_feature (1)..( 15): Result.005 file - promoters50/1595794
ttaacaaaacaattc

SEQ ID NO: 176564 - DNA, 15 bp, Unknown
  misc_feature (1)..( 15): Result.005 file - promoters50/1595794
aaagtaattcaaata

SEQ ID NO: 176565 - DNA, 15 bp, Unknown
  misc_feature (1)..( 15): Result.005 file - promoters50/1595794
tgtcattttccaatc

SEQ ID NO: 176566 - DNA, 15 bp, Unknown
  misc_feature (1)..( 15): Result.005 file - promoters50/1595794
gcatataaccaaagt

SEQ ID NO: 176567 - DNA, 13 bp, Unknown
  misc_feature (1)..( 13): Result.005 file - promoters50/1595794
tttcttaaaaaat

SEQ ID NO: 176568 - DNA, 13 bp, Unknown
  misc_feature (1)..( 13): Result.005 file - promoters50/1595794
gaaatcaaataat

SEQ ID NO: 176569 - DNA, 13 bp, Unknown
  misc_feature (1)..( 13): Result.005 file - promoters50/1595794
ttaacaaaacaat

SEQ ID NO: 176570 - DNA, 13 bp, Unknown
  misc_feature (1)..( 13): Result.005 file - promoters50/1595794
taattcaaatacg

SEQ ID NO: 176571 - DNA, 13 bp, Unknown
  misc_feature (1)..( 13): Result.005 file - promoters50/1595794
attttccaatcct

SEQ ID NO: 176572 - DNA, 13 bp, Unknown
  misc_feature (1)..( 13): Result.005 file - promoters50/1595794
ataaccaaagttg

SEQ ID NO: 176573 - DNA, 13 bp, Unknown
  misc_feature (1)..( 13): Result.005 file - promoters50/1595829
ctaattttaaaac

SEQ ID NO: 176574 - DNA, 13 bp, Unknown
  misc_feature (1)..( 13): Result.005 file - promoters50/1595829
tgtattttacagt

SEQ ID NO: 176575 - DNA, 13 bp, Unknown
  misc_feature (1)..( 13): Result.005 file - promoters50/1595829
acaatttgaaaac

SEQ ID NO: 176576 - DNA, 13 bp, Unknown
  misc_feature (1)..( 13): Result.005 file - promoters50/1595829
gaaatattactca

SEQ ID NO: 176577 - DNA, 13 bp, Unknown
  misc_feature (1)..( 13): Result.005 file - promoters50/1595829
taaattttaaatt

SEQ ID NO: 176578 - DNA, 13 bp, Unknown
  misc_feature (1)..( 13): Result.005 file - promoters50/1595829
aaaaaattcaagt

SEQ ID NO: 176579 - DNA, 10 bp, Unknown
  misc_feature (1)..( 10): Result.005 file - promoters50/1595829
acaatttata

SEQ ID NO: 176580 - DNA, 10 bp, Unknown
  misc_feature (1)..( 10): Result.005 file - promoters50/1595829
ataattaata

SEQ ID NO: 176581 - DNA, 10 bp, Unknown
  misc_feature (1)..( 10): Result.005 file - promoters50/1595829
aaaataaata

SEQ ID NO: 176582 - DNA, 10 bp, Unknown
  misc_feature (1)..( 10): Result.005 file - promoters50/1595829
tcaataaaac

SEQ ID NO: 176583 - DNA, 10 bp, Unknown
  misc_feature (1)..( 10): Result.005 file - promoters50/1595829
aaaataaaaa

SEQ ID NO: 176584 - DNA, 10 bp, Unknown
  misc_feature (1)..( 10): Result.005 file - promoters50/1595829
tcaatcaaat

SEQ ID NO: 176585 - DNA, 16 bp, Unknown
  misc_feature (1)..( 16): Result.005 file - promoters50/1595829
gatatcttagagtaat

SEQ ID NO: 176586 - DNA, 16 bp, Unknown
  misc_feature (1)..( 16): Result.005 file - promoters50/1595829
cgtatctaagacctaa

SEQ ID NO: 176587 - DNA, 16 bp, Unknown
  misc_feature (1)..( 16): Result.005 file - promoters50/1595829
gatttcttagaatata

SEQ ID NO: 176588 - DNA, 15 bp, Unknown
  misc_feature (1)..( 15): Result.005 file - promoters50/1595829
tttttttaaaatata

SEQ ID NO: 176589 - DNA, 16 bp, Unknown
  misc_feature (1)..( 16): Result.005 file - promoters50/1595829
attttcttcgttaagc

SEQ ID NO: 176590 - DNA, 16 bp, Unknown
  misc_feature (1)..( 16): Result.005 file - promoters50/1595829
ttttttttagatagat

SEQ ID NO: 176591 - DNA, 14 bp, Unknown
  misc_feature (1)..( 14): Result.005 file - promoters50/1595829
atataattttaatc

SEQ ID NO: 176592 - DNA, 14 bp, Unknown
  misc_feature (1)..( 14): Result.005 file - promoters50/1595829
catctattttatat

SEQ ID NO: 176593 - DNA, 14 bp, Unknown
  misc_feature (1)..( 14): Result.005 file - promoters50/1595829
ttctttttttaaca

SEQ ID NO: 176594 - DNA, 14 bp, Unknown
  misc_feature (1)..( 14): Result.005 file - promoters50/1595829
atataagtttaaat

SEQ ID NO: 176595 - DNA, 14 bp, Unknown
  misc_feature (1)..( 14): Result.005 file - promoters50/1595829
tgcaaatataatca

SEQ ID NO: 176596 - DNA, 15 bp, Unknown
  misc_feature (1)..( 15): Result.005 file - promoters50/1595829
ttgacattttcaaca

SEQ ID NO: 176597 - DNA, 18 bp, Unknown
  misc_feature (1)..( 18): Result.005 file - promoters50/1595829
cgactaattttaaaacac

SEQ ID NO: 176598 - DNA, 18 bp, Unknown
  misc_feature (1)..( 18): Result.005 file - promoters50/1595829
aaactaatatattttgga

SEQ ID NO: 176599 - DNA, 18 bp, Unknown
  misc_feature (1)..( 18): Result.005 file - promoters50/1595829
aaattaaaatattggtca

SEQ ID NO: 176600 - DNA, 18 bp, Unknown
  misc_feature (1)..( 18): Result.005 file - promoters50/1595829
aaaagaaaaaattcaagt

SEQ ID NO: 176601 - DNA, 18 bp, Unknown
  misc_feature (1)..( 18): Result.005 file - promoters50/1595829
aatctgaaatattactca

SEQ ID NO: 176602 - DNA, 18 bp, Unknown
  misc_feature (1)..( 18): Result.005 file - promoters50/1595829
ggaagtgaatgttgatca

SEQ ID NO: 176603 - DNA, 7 bp, Unknown
  misc_feature (1)..( 7): Result.005 file - promoters50/1662819
acttatc

SEQ ID NO: 176604 - DNA, 7 bp, Unknown
  misc_feature (1)..( 7): Result.005 file - promoters50/1662819
acttatt

SEQ ID NO: 176605 - DNA, 7 bp, Unknown
  misc_feature (1)..( 7): Result.005 file - promoters50/1662819
actgatt

SEQ ID NO: 176606 - DNA, 9 bp, Unknown
  misc_feature (1)..( 9): Result.005 file - promoters50/1662819
ttatctaaa

SEQ ID NO: 176607 - DNA, 9 bp, Unknown
  misc_feature (1)..( 9): Result.005 file - promoters50/1662819
ttatctaaa

SEQ ID NO: 176608 - DNA, 9 bp, Unknown
  misc_feature (1)..( 9): Result.005 file - promoters50/1662819
ttatataac

SEQ ID NO: 176609 - DNA, 12 bp, Unknown
  misc_feature (1)..( 12): Result.005 file - promoters50/1662827
aaactatttaaa

SEQ ID NO: 176610 - DNA, 12 bp, Unknown
  misc_feature (1)..( 12): Result.005 file - promoters50/1662827
cttctatataag

SEQ ID NO: 176611 - DNA, 12 bp, Unknown
  misc_feature (1)..( 12): Result.005 file - promoters50/1662827
tgactattatcc

SEQ ID NO: 176612 - DNA, 12 bp, Unknown
  misc_feature (1)..( 12): Result.005 file - promoters50/1662827
aattcatttaag

SEQ ID NO: 176613 - DNA, 12 bp, Unknown
  misc_feature (1)..( 12): Result.005 file - promoters50/1662827
tgattatccttg

SEQ ID NO: 176614 - DNA, 12 bp, Unknown
  misc_feature (1)..( 12): Result.005 file - promoters50/1662827
gaattatccaaa

SEQ ID NO: 176615 - DNA, 12 bp, Unknown
  misc_feature (1)..( 12): Result.005 file - promoters50/1662827
aaaatatgcaaa

SEQ ID NO: 176616 - DNA, 10 bp, Unknown
  misc_feature (1)..( 10): Result.005 file - promoters50/1662827
ttttattttt

SEQ ID NO: 176617 - DNA, 10 bp, Unknown
  misc_feature (1)..( 10): Result.005 file - promoters50/1662827
tttcattcaa

SEQ ID NO: 176618 - DNA, 10 bp, Unknown
  misc_feature (1)..( 10): Result.005 file - promoters50/1662827
cttaatttaa

SEQ ID NO: 176619 - DNA, 10 bp, Unknown
  misc_feature (1)..( 10): Result.005 file - promoters50/1662827
atttattatt

SEQ ID NO: 176620 - DNA, 10 bp, Unknown
  misc_feature (1)..( 10): Result.005 file - promoters50/1662827
tttgattttt

SEQ ID NO: 176621 - DNA, 10 bp, Unknown
  misc_feature (1)..( 10): Result.005 file - promoters50/1662827
aataatgtaa

SEQ ID NO: 176622 - DNA, 11 bp, Unknown
  misc_feature (1)..( 11): Result.005 file - promoters50/1662827
attttacatta

SEQ ID NO: 176623 - DNA, 11 bp, Unknown
  misc_feature (1)..( 11): Result.005 file - promoters50/1662827
tttttaccatc

SEQ ID NO: 176624 - DNA, 11 bp, Unknown
  misc_feature (1)..( 11): Result.005 file - promoters50/1662827
cttttcattaa

SEQ ID NO: 176625 - DNA, 11 bp, Unknown
  misc_feature (1)..( 11): Result.005 file - promoters50/1662827
tttttaaaaaa

SEQ ID NO: 176626 - DNA, 11 bp, Unknown
  misc_feature (1)..( 11): Result.005 file - promoters50/1662827
catttataaag

SEQ ID NO: 176627 - DNA, 11 bp, Unknown
  misc_feature (1)..( 11): Result.005 file - promoters50/1662827
attctcttctt

SEQ ID NO: 176628 - DNA, 9 bp, Unknown
  misc_feature (1)..( 9): Result.005 file - promoters50/1662827
tttttttgg

SEQ ID NO: 176629 - DNA, 9 bp, Unknown
  misc_feature (1)..( 9): Result.005 file - promoters50/1662827
tttttttaa

SEQ ID NO: 176630 - DNA, 9 bp, Unknown
  misc_feature (1)..( 9): Result.005 file - promoters50/1662827
tttatttgt

SEQ ID NO: 176631 - DNA, 9 bp, Unknown
  misc_feature (1)..( 9): Result.005 file - promoters50/1662827
cttatttca

SEQ ID NO: 176632 - DNA, 10 bp, Unknown
  misc_feature (1)..( 10): Result.005 file - promoters50/1662827
ttctgtttga

SEQ ID NO: 176633 - DNA, 10 bp, Unknown
  misc_feature (1)..( 10): Result.005 file - promoters50/1662827
ttatatctgt

SEQ ID NO: 176634 - DNA, 17 bp, Unknown
  misc_feature (1)..( 17): Result.005 file - promoters50/1662827
gtataccaaatttaatg

SEQ ID NO: 176635 - DNA, 17 bp, Unknown
  misc_feature (1)..( 17): Result.005 file - promoters50/1662827
ggctaccaaacttatct

SEQ ID NO: 176636 - DNA, 17 bp, Unknown
  misc_feature (1)..( 17): Result.005 file - promoters50/1662827
gtatcccaaaaattatt

SEQ ID NO: 176637 - DNA, 17 bp, Unknown
  misc_feature (1)..( 17): Result.005 file - promoters50/1662827
ttaaaacaaactcttat

SEQ ID NO: 176638 - DNA, 17 bp, Unknown
  misc_feature (1)..( 17): Result.005 file - promoters50/1662827
ggcttttctacttctct

SEQ ID NO: 176639 - DNA, 17 bp, Unknown
  misc_feature (1)..( 17): Result.005 file - promoters50/1662827
taaataataacctatct

SEQ ID NO: 176640 - DNA, 10 bp, Unknown
  misc_feature (1)..( 10): Result.005 file - promoters50/1662843
ttcacattat

SEQ ID NO: 176641 - DNA, 10 bp, Unknown
  misc_feature (1)..( 10): Result.005 file - promoters50/1662843
ttcacatggg

SEQ ID NO: 176642 - DNA, 10 bp, Unknown
  misc_feature (1)..( 10): Result.005 file - promoters50/1662843
atcacactat

SEQ ID NO: 176643 - DNA, 9 bp, Unknown
  misc_feature (1)..( 9): Result.005 file - promoters50/1662843
taaatagta

SEQ ID NO: 176644 - DNA, 9 bp, Unknown
  misc_feature (1)..( 9): Result.005 file - promoters50/1662843
taaatacgg

SEQ ID NO: 176645 - DNA, 9 bp, Unknown
  misc_feature (1)..( 9): Result.005 file - promoters50/1662843
caaagagta

SEQ ID NO: 176646 - DNA, 10 bp, Unknown
  misc_feature (1)..( 10): Result.005 file - promoters50/1662843
aattcaactc

SEQ ID NO: 176647 - DNA, 10 bp, Unknown
  misc_feature (1)..( 10): Result.005 file - promoters50/1662843
aatacaatta

SEQ ID NO: 176648 - DNA, 10 bp, Unknown
  misc_feature (1)..( 10): Result.005 file - promoters50/1662843
aattccactc

SEQ ID NO: 176649 - DNA, 7 bp, Unknown
  misc_feature (1)..( 7): Result.005 file - promoters50/1662872
ttttctt

SEQ ID NO: 176650 - DNA, 7 bp, Unknown
  misc_feature (1)..( 7): Result.005 file - promoters50/1662872
tttcctt

SEQ ID NO: 176651 - DNA, 7 bp, Unknown
  misc_feature (1)..( 7): Result.005 file - promoters50/1662872
cttcctt

SEQ ID NO: 176652 - DNA, 9 bp, Unknown
  misc_feature (1)..( 9): Result.005 file - promoters50/1662872
taagatctt

SEQ ID NO: 176653 - DNA, 9 bp, Unknown
  misc_feature (1)..( 9): Result.005 file - promoters50/1662872
ctagatctt

SEQ ID NO: 176654 - DNA, 9 bp, Unknown
  misc_feature (1)..( 9): Result.005 file - promoters50/1662872
ctagatcat

SEQ ID NO: 176655 - DNA, 9 bp, Unknown
  misc_feature (1)..( 9): Result.005 file - promoters50/1662895
attcgtaag

SEQ ID NO: 176656 - DNA, 9 bp, Unknown
  misc_feature (1)..( 9): Result.005 file - promoters50/1662895
tttcctaag

SEQ ID NO: 176657 - DNA, 9 bp, Unknown
  misc_feature (1)..( 9): Result.005 file - promoters50/1662895
tttcataat

SEQ ID NO: 176658 - DNA, 9 bp, Unknown
  misc_feature (1)..( 9): Result.005 file - promoters50/1662895
attgagaaa

SEQ ID NO: 176659 - DNA, 9 bp, Unknown
  misc_feature (1)..( 9): Result.005 file - promoters50/1662895
taagagaaa

SEQ ID NO: 176660 - DNA, 9 bp, Unknown
  misc_feature (1)..( 9): Result.005 file - promoters50/1662895
attgagaaa

SEQ ID NO: 176661 - DNA, 11 bp, Unknown
  misc_feature (1)..( 11): Result.005 file - promoters50/1662899
aacatttttca

SEQ ID NO: 176662 - DNA, 11 bp, Unknown
  misc_feature (1)..( 11): Result.005 file - promoters50/1662899
tgaattgttca

SEQ ID NO: 176663 - DNA, 11 bp, Unknown
  misc_feature (1)..( 11): Result.005 file - promoters50/1662899
acaatttaaaa

SEQ ID NO: 176664 - DNA, 11 bp, Unknown
  misc_feature (1)..( 11): Result.005 file - promoters50/1662899
ccaatttttgg

SEQ ID NO: 176665 - DNA, 11 bp, Unknown
  misc_feature (1)..( 11): Result.005 file - promoters50/1662899
gtaatagttat

SEQ ID NO: 176666 - DNA, 11 bp, Unknown
  misc_feature (1)..( 11): Result.005 file - promoters50/1662899
ttaattttgta

SEQ ID NO: 176667 - DNA, 9 bp, Unknown
  misc_feature (1)..( 9): Result.005 file - promoters50/1662899
tatatgttt

SEQ ID NO: 176668 - DNA, 9 bp, Unknown
  misc_feature (1)..( 9): Result.005 file - promoters50/1662899
catatgtgc

SEQ ID NO: 176669 - DNA, 9 bp, Unknown
  misc_feature (1)..( 9): Result.005 file - promoters50/1662899
tatatgcag

SEQ ID NO: 176670 - DNA, 9 bp, Unknown
  misc_feature (1)..( 9): Result.005 file - promoters50/1662899
tatatttta

SEQ ID NO: 176671 - DNA, 9 bp, Unknown
  misc_feature (1)..( 9): Result.005 file - promoters50/1662899
tttatgtgt

SEQ ID NO: 176672 - DNA, 9 bp, Unknown
  misc_feature (1)..( 9): Result.005 file - promoters50/1662899
tttttgtag

SEQ ID NO: 176673 - DNA, 10 bp, Unknown
  misc_feature (1)..( 10): Result.005 file - promoters50/1662917
aaattctctt

SEQ ID NO: 176674 - DNA, 10 bp, Unknown
  misc_feature (1)..( 10): Result.005 file - promoters50/1662917
aaatcctcca

SEQ ID NO: 176675 - DNA, 10 bp, Unknown
  misc_feature (1)..( 10): Result.005 file - promoters50/1662917
aaattcaaaa

SEQ ID NO: 176676 - DNA, 10 bp, Unknown
  misc_feature (1)..( 10): Result.005 file - promoters50/1662917
aaacccttat

SEQ ID NO: 176677 - DNA, 10 bp, Unknown
  misc_feature (1)..( 10): Result.005 file - promoters50/1662917
ggacccgtat

SEQ ID NO: 176678 - DNA, 11 bp, Unknown
  misc_feature (1)..( 11): Result.005 file - promoters50/1662917
tttataagtat

SEQ ID NO: 176679 - DNA, 11 bp, Unknown
  misc_feature (1)..( 11): Result.005 file - promoters50/1662917
tttgtaacttc

SEQ ID NO: 176680 - DNA, 11 bp, Unknown
  misc_feature (1)..( 11): Result.005 file - promoters50/1662917
cttataattat

SEQ ID NO: 176681 - DNA, 11 bp, Unknown
  misc_feature (1)..( 11): Result.005 file - promoters50/1662917
tttaaaagtaa

SEQ ID NO: 176682 - DNA, 11 bp, Unknown
  misc_feature (1)..( 11): Result.005 file - promoters50/1662917
tttttaaattt

SEQ ID NO: 176683 - DNA, 17 bp, Unknown
  misc_feature (1)..( 17): Result.005 file - promoters50/1662917
aatcttttgattctaaa

SEQ ID NO: 176684 - DNA, 17 bp, Unknown
  misc_feature (1)..( 17): Result.005 file - promoters50/1662917
taaattttgaaataatt

SEQ ID NO: 176685 - DNA, 17 bp, Unknown
  misc_feature (1)..( 17): Result.005 file - promoters50/1662917
ttgatttagataccgga

SEQ ID NO: 176686 - DNA, 17 bp, Unknown
  misc_feature (1)..( 17): Result.005 file - promoters50/1662917
taaattttaaaattatt

SEQ ID NO: 176687 - DNA, 17 bp, Unknown
  misc_feature (1)..( 17): Result.005 file - promoters50/1662917
aattttttaaaatatat

SEQ ID NO: 176688 - DNA, 17 bp, Unknown
  misc_feature (1)..( 17): Result.005 file - promoters50/1662917
aaaatgttagataggaa

SEQ ID NO: 176689 - DNA, 14 bp, Unknown
  misc_feature (1)..( 14): Result.005 file - promoters50/1662917
cccttgtgaatgtc

SEQ ID NO: 176690 - DNA, 14 bp, Unknown
  misc_feature (1)..( 14): Result.005 file - promoters50/1662917
ttttgatgaatgta

SEQ ID NO: 176691 - DNA, 14 bp, Unknown
  misc_feature (1)..( 14): Result.005 file - promoters50/1662917
atttgctgaataag

SEQ ID NO: 176692 - DNA, 14 bp, Unknown
  misc_feature (1)..( 14): Result.005 file - promoters50/1662917
ttttgaagaatttt

SEQ ID NO: 176693 - DNA, 14 bp, Unknown
  misc_feature (1)..( 14): Result.005 file - promoters50/1662917
ataataataatgta

SEQ ID NO: 176694 - DNA, 17 bp, Unknown
  misc_feature (1)..( 17): Result.005 file - promoters50/1662917
ttgattctaaaatattg

SEQ ID NO: 176695 - DNA, 17 bp, Unknown
  misc_feature (1)..( 17): Result.005 file - promoters50/1662917
taaattttaaaattatt

SEQ ID NO: 176696 - DNA, 17 bp, Unknown
  misc_feature (1)..( 17): Result.005 file - promoters50/1662917
aattttttaaaatatat

SEQ ID NO: 176697 - DNA, 17 bp, Unknown
  misc_feature (1)..( 17): Result.005 file - promoters50/1662917
ccgggtctaaaactccg

SEQ ID NO: 176698 - DNA, 17 bp, Unknown
  misc_feature (1)..( 17): Result.005 file - promoters50/1662917
taaattttgaaataatt

SEQ ID NO: 176699 - DNA, 17 bp, Unknown
  misc_feature (1)..( 17): Result.005 file - promoters50/1662917
tttccataaaaatgtta

SEQ ID NO: 176700 - DNA, 20 bp, Unknown
  misc_feature (1)..( 20): Result.005 file - promoters50/1662917
gattctaaaatattgttcat

SEQ ID NO: 176701 - DNA, 20 bp, Unknown
  misc_feature (1)..( 20): Result.005 file - promoters50/1662917
taaattttaaaattattcat

SEQ ID NO: 176702 - DNA, 20 bp, Unknown
  misc_feature (1)..( 20): Result.005 file - promoters50/1662917
taaattttgaaataatttca

SEQ ID NO: 176703 - DNA, 20 bp, Unknown
  misc_feature (1)..( 20): Result.005 file - promoters50/1662917
acaatttttaaattttttaa

SEQ ID NO: 176704 - DNA, 20 bp, Unknown
  misc_feature (1)..( 20): Result.005 file - promoters50/1662917
cggatcgggtcataattccg

SEQ ID NO: 176705 - DNA, 8 bp, Unknown
  misc_feature (1)..( 8): Result.005 file - promoters50/1662981
aatcttag

SEQ ID NO: 176706 - DNA, 8 bp, Unknown
  misc_feature (1)..( 8): Result.005 file - promoters50/1662981
gatcttaa

SEQ ID NO: 176707 - DNA, 8 bp, Unknown
  misc_feature (1)..( 8): Result.005 file - promoters50/1662981
aatcttag

SEQ ID NO: 176708 - DNA, 10 bp, Unknown
  misc_feature (1)..( 10): Result.005 file - promoters50/1662981
aaagacagcg

SEQ ID NO: 176709 - DNA, 10 bp, Unknown
  misc_feature (1)..( 10): Result.005 file - promoters50/1662981
aaaaacagta

SEQ ID NO: 176710 - DNA, 10 bp, Unknown
  misc_feature (1)..( 10): Result.005 file - promoters50/1662981
aaaaataaaa

SEQ ID NO: 176711 - DNA, 11 bp, Unknown
  misc_feature (1)..( 11): Result.005 file - promoters50/1663082
aaatatataca

SEQ ID NO: 176712 - DNA, 11 bp, Unknown
  misc_feature (1)..( 11): Result.005 file - promoters50/1663082
aaatatttgtc

SEQ ID NO: 176713 - DNA, 11 bp, Unknown
  misc_feature (1)..( 11): Result.005 file - promoters50/1663082
aaatctttatt

SEQ ID NO: 176714 - DNA, 11 bp, Unknown
  misc_feature (1)..( 11): Result.005 file - promoters50/1663082
aaatttttaaa

SEQ ID NO: 176715 - DNA, 11 bp, Unknown
  misc_feature (1)..( 11): Result.005 file - promoters50/1663082
cattcttgatt

SEQ ID NO: 176716 - DNA, 11 bp, Unknown
  misc_feature (1)..( 11): Result.005 file - promoters50/1663127
ccaaaaatggg

SEQ ID NO: 176717 - DNA, 11 bp, Unknown
  misc_feature (1)..( 11): Result.005 file - promoters50/1663127
tcaagaatctc

SEQ ID NO: 176718 - DNA, 11 bp, Unknown
  misc_feature (1)..( 11): Result.005 file - promoters50/1663127
ccaagaataat

SEQ ID NO: 176719 - DNA, 11 bp, Unknown
  misc_feature (1)..( 11): Result.005 file - promoters50/1663127
tgaagattaat

SEQ ID NO: 176720 - DNA, 7 bp, Unknown
  misc_feature (1)..( 7): Result.005 file - promoters50/1663135
tacatag

SEQ ID NO: 176721 - DNA, 7 bp, Unknown
  misc_feature (1)..( 7): Result.005 file - promoters50/1663135
aacatag

SEQ ID NO: 176722 - DNA, 7 bp, Unknown
  misc_feature (1)..( 7): Result.005 file - promoters50/1663135
aacataa

SEQ ID NO: 176723 - DNA, 8 bp, Unknown
  misc_feature (1)..( 8): Result.005 file - promoters50/1663135
acactttc

SEQ ID NO: 176724 - DNA, 8 bp, Unknown
  misc_feature (1)..( 8): Result.005 file - promoters50/1663135
acattttc

SEQ ID NO: 176725 - DNA, 8 bp, Unknown
  misc_feature (1)..( 8): Result.005 file - promoters50/1663135
atactttc

SEQ ID NO: 176726 - DNA, 7 bp, Unknown
  misc_feature (1)..( 7): Result.005 file - promoters50/1663135
tttttaa

SEQ ID NO: 176727 - DNA, 7 bp, Unknown
  misc_feature (1)..( 7): Result.005 file - promoters50/1663135
tttgtaa

SEQ ID NO: 176728 - DNA, 7 bp, Unknown
  misc_feature (1)..( 7): Result.005 file - promoters50/1663135
tttttaa

SEQ ID NO: 176729 - DNA, 9 bp, Unknown
  misc_feature (1)..( 9): Result.005 file - promoters50/1663135
aataaaatt

SEQ ID NO: 176730 - DNA, 9 bp, Unknown
  misc_feature (1)..( 9): Result.005 file - promoters50/1663135
aataaatga

SEQ ID NO: 176731 - DNA, 9 bp, Unknown
  misc_feature (1)..( 9): Result.005 file - promoters50/1663135
tataaaatt

SEQ ID NO: 176732 - DNA, 10 bp, Unknown
  misc_feature (1)..( 10): Result.005 file - promoters50/1663135
caaaactagt

SEQ ID NO: 176733 - DNA, 10 bp, Unknown
  misc_feature (1)..( 10): Result.005 file - promoters50/1663135
caaaacaaaa

SEQ ID NO: 176734 - DNA, 10 bp, Unknown
  misc_feature (1)..( 10): Result.005 file - promoters50/1663135
aaaaagaaaa

SEQ ID NO: 176735 - DNA, 9 bp, Unknown
  misc_feature (1)..( 9): Result.005 file - promoters50/1663147
ccatccact

SEQ ID NO: 176736 - DNA, 9 bp, Unknown
  misc_feature (1)..( 9): Result.005 file - promoters50/1663147
acatacact

SEQ ID NO: 176737 - DNA, 9 bp, Unknown
  misc_feature (1)..( 9): Result.005 file - promoters50/1663147
ccatttata

SEQ ID NO: 176738 - DNA, 12 bp, Unknown
  misc_feature (1)..( 12): Result.005 file - promoters50/1663147
taactccataca

SEQ ID NO: 176739 - DNA, 12 bp, Unknown
  misc_feature (1)..( 12): Result.005 file - promoters50/1663147
taaatccattta

SEQ ID NO: 176740 - DNA, 12 bp, Unknown
  misc_feature (1)..( 12): Result.005 file - promoters50/1663147
tctttccacaca

SEQ ID NO: 176741 - DNA, 10 bp, Unknown
  misc_feature (1)..( 10): Result.005 file - promoters50/1663217
acatgatata

SEQ ID NO: 176742 - DNA, 10 bp, Unknown
  misc_feature (1)..( 10): Result.005 file - promoters50/1663217
tgatgatata

SEQ ID NO: 176743 - DNA, 10 bp, Unknown
  misc_feature (1)..( 10): Result.005 file - promoters50/1663217
acacgatctc

SEQ ID NO: 176744 - DNA, 9 bp, Unknown
  misc_feature (1)..( 9): Result.005 file - promoters50/1663217
accaaataa

SEQ ID NO: 176745 - DNA, 9 bp, Unknown
  misc_feature (1)..( 9): Result.005 file - promoters50/1663217
tccaaatcg

SEQ ID NO: 176746 - DNA, 9 bp, Unknown
  misc_feature (1)..( 9): Result.005 file - promoters50/1663217
accaaacca

SEQ ID NO: 176747 - DNA, 9 bp, Unknown
  misc_feature (1)..( 9): Result.005 file - promoters50/1663217
accaatcca

SEQ ID NO: 176748 - DNA, 7 bp, Unknown
  misc_feature (1)..( 7): Result.005 file - promoters50/1663217
tcataaa

SEQ ID NO: 176749 - DNA, 7 bp, Unknown
  misc_feature (1)..( 7): Result.005 file - promoters50/1663217
tcacaaa

SEQ ID NO: 176750 - DNA, 7 bp, Unknown
  misc_feature (1)..( 7): Result.005 file - promoters50/1663217
tcataat

SEQ ID NO: 176751 - DNA, 9 bp, Unknown
  misc_feature (1)..( 9): Result.005 file - promoters50/1663217
tttaaataa

SEQ ID NO: 176752 - DNA, 9 bp, Unknown
  misc_feature (1)..( 9): Result.005 file - promoters50/1663217
attaagtaa

SEQ ID NO: 176753 - DNA, 9 bp, Unknown
  misc_feature (1)..( 9): Result.005 file - promoters50/1663217
attatgtag

SEQ ID NO: 176754 - DNA, 12 bp, Unknown
  misc_feature (1)..( 12): Result.005 file - promoters50/1663221
gtttttaatctg

SEQ ID NO: 176755 - DNA, 12 bp, Unknown
  misc_feature (1)..( 12): Result.005 file - promoters50/1663221
gtttttattgct

SEQ ID NO: 176756 - DNA, 12 bp, Unknown
  misc_feature (1)..( 12): Result.005 file - promoters50/1663221
tattttattttt

SEQ ID NO: 176757 - DNA, 12 bp, Unknown
  misc_feature (1)..( 12): Result.005 file - promoters50/1663221
acttttatgggc

SEQ ID NO: 176758 - DNA, 12 bp, Unknown
  misc_feature (1)..( 12): Result.005 file - promoters50/1663221
ccttgtatttac

SEQ ID NO: 176759 - DNA, 12 bp, Unknown
  misc_feature (1)..( 12): Result.005 file - promoters50/1663221
atttgtaattac

SEQ ID NO: 176760 - DNA, 12 bp, Unknown
  misc_feature (1)..( 12): Result.005 file - promoters50/1663261
attcttttttac

SEQ ID NO: 176761 - DNA, 12 bp, Unknown
  misc_feature (1)..( 12): Result.005 file - promoters50/1663261
attctttaaatt

SEQ ID NO: 176762 - DNA, 12 bp, Unknown
  misc_feature (1)..( 12): Result.005 file - promoters50/1663261
catctataaatt

SEQ ID NO: 176763 - DNA, 12 bp, Unknown
  misc_feature (1)..( 12): Result.005 file - promoters50/1663261
cacatatatctc

SEQ ID NO: 176764 - DNA, 8 bp, Unknown
  misc_feature (1)..( 8): Result.005 file - promoters50/1663261
aatgtaat

SEQ ID NO: 176765 - DNA, 8 bp, Unknown
  misc_feature (1)..( 8): Result.005 file - promoters50/1663261
aatataaa

SEQ ID NO: 176766 - DNA, 8 bp, Unknown
  misc_feature (1)..( 8): Result.005 file - promoters50/1663261
tatataaa

SEQ ID NO: 176767 - DNA, 8 bp, Unknown
  misc_feature (1)..( 8): Result.005 file - promoters50/1663261
tatataag

SEQ ID NO: 176768 - DNA, 8 bp, Unknown
  misc_feature (1)..( 8): Result.005 file - promoters50/1663261
agaaaatt

SEQ ID NO: 176769 - DNA, 8 bp, Unknown
  misc_feature (1)..( 8): Result.005 file - promoters50/1663261
ataaaatt

SEQ ID NO: 176770 - DNA, 8 bp, Unknown
  misc_feature (1)..( 8): Result.005 file - promoters50/1663261
agaaaata

SEQ ID NO: 176771 - DNA, 11 bp, Unknown
  misc_feature (1)..( 11): Result.005 file - promoters50/1663261
taaaaaaaaaa

SEQ ID NO: 176772 - DNA, 11 bp, Unknown
  misc_feature (1)..( 11): Result.005 file - promoters50/1663261
taacaaacaaa

SEQ ID NO: 176773 - DNA, 11 bp, Unknown
  misc_feature (1)..( 11): Result.005 file - promoters50/1663261
agacatacaat

SEQ ID NO: 176774 - DNA, 8 bp, Unknown
  misc_feature (1)..( 8): Result.005 file - promoters50/1663261
aattaatc

SEQ ID NO: 176775 - DNA, 8 bp, Unknown
  misc_feature (1)..( 8): Result.005 file - promoters50/1663261
aataaatt

SEQ ID NO: 176776 - DNA, 8 bp, Unknown
  misc_feature (1)..( 8): Result.005 file - promoters50/1663261
actaaatt

SEQ ID NO: 176777 - DNA, 9 bp, Unknown
  misc_feature (1)..( 9): Result.005 file - promoters50/1663261
ttaatcttc

SEQ ID NO: 176778 - DNA, 9 bp, Unknown
  misc_feature (1)..( 9): Result.005 file - promoters50/1663261
taaattttc

SEQ ID NO: 176779 - DNA, 9 bp, Unknown
  misc_feature (1)..( 9): Result.005 file - promoters50/1663261
taaatttga

SEQ ID NO: 176780 - DNA, 8 bp, Unknown
  misc_feature (1)..( 8): Result.005 file - promoters50/1663261
aaatatgc

SEQ ID NO: 176781 - DNA, 8 bp, Unknown
  misc_feature (1)..( 8): Result.005 file - promoters50/1663261
aaatatat

SEQ ID NO: 176782 - DNA, 8 bp, Unknown
  misc_feature (1)..( 8): Result.005 file - promoters50/1663261
caatatat

SEQ ID NO: 176783 - DNA, 12 bp, Unknown
  misc_feature (1)..( 12): Result.005 file - promoters50/1663278
tatttaaaacgt

SEQ ID NO: 176784 - DNA, 12 bp, Unknown
  misc_feature (1)..( 12): Result.005 file - promoters50/1663278
aattgaaacttt

SEQ ID NO: 176785 - DNA, 12 bp, Unknown
  misc_feature (1)..( 12): Result.005 file - promoters50/1663278
tattgaaaaaga

SEQ ID NO: 176786 - DNA, 12 bp, Unknown
  misc_feature (1)..( 12): Result.005 file - promoters50/1663278
gagggaaagaga

SEQ ID NO: 176787 - DNA, 12 bp, Unknown
  misc_feature (1)..( 12): Result.005 file - promoters50/1663278
acaagaaaaaca

SEQ ID NO: 176788 - DNA, 12 bp, Unknown
  misc_feature (1)..( 12): Result.005 file - promoters50/1663278
tttcgaagaagt

SEQ ID NO: 176789 - DNA, 14 bp, Unknown
  misc_feature (1)..( 14): Result.005 file - promoters50/1663278
cgtcgagatcagtc

SEQ ID NO: 176790 - DNA, 14 bp, Unknown
  misc_feature (1)..( 14): Result.005 file - promoters50/1663278
cgttgagttcaata

SEQ ID NO: 176791 - DNA, 14 bp, Unknown
  misc_feature (1)..( 14): Result.005 file - promoters50/1663278
tgataagtagtaac

SEQ ID NO: 176792 - DNA, 14 bp, Unknown
  misc_feature (1)..( 14): Result.005 file - promoters50/1663278
acatgggttcaaat

SEQ ID NO: 176793 - DNA, 14 bp, Unknown
  misc_feature (1)..( 14): Result.005 file - promoters50/1663278
tcgtcaattcaaat

SEQ ID NO: 176794 - DNA, 14 bp, Unknown
  misc_feature (1)..( 14): Result.005 file - promoters50/1663278
acttagattcaatt

SEQ ID NO: 176795 - DNA, 7 bp, Unknown
  misc_feature (1)..( 7): Result.005 file - promoters50/1663332
acttttt

SEQ ID NO: 176796 - DNA, 7 bp, Unknown
  misc_feature (1)..( 7): Result.005 file - promoters50/1663332
actttta

SEQ ID NO: 176797 - DNA, 7 bp, Unknown
  misc_feature (1)..( 7): Result.005 file - promoters50/1663332
actctta

SEQ ID NO: 176798 - DNA, 10 bp, Unknown
  misc_feature (1)..( 10): Result.005 file - promoters50/1663332
ttttgtcaaa

SEQ ID NO: 176799 - DNA, 10 bp, Unknown
  misc_feature (1)..( 10): Result.005 file - promoters50/1663332
ttttgacaaa

SEQ ID NO: 176800 - DNA, 10 bp, Unknown
  misc_feature (1)..( 10): Result.005 file - promoters50/1663332
aaatgacaat

SEQ ID NO: 176801 - DNA, 13 bp, Unknown
  misc_feature (1)..( 13): Result.005 file - promoters50/1663353
ctccatttaattt

SEQ ID NO: 176802 - DNA, 13 bp, Unknown
  misc_feature (1)..( 13): Result.005 file - promoters50/1663353
gtggagttacttt

SEQ ID NO: 176803 - DNA, 13 bp, Unknown
  misc_feature (1)..( 13): Result.005 file - promoters50/1663353
tctagactaattt

SEQ ID NO: 176804 - DNA, 13 bp, Unknown
  misc_feature (1)..( 13): Result.005 file - promoters50/1663353
gaaactttaatga

SEQ ID NO: 176805 - DNA, 13 bp, Unknown
  misc_feature (1)..( 13): Result.005 file - promoters50/1663353
taaacgttactgt

SEQ ID NO: 176806 - DNA, 13 bp, Unknown
  misc_feature (1)..( 13): Result.005 file - promoters50/1663353
gaaagtttaaaaa

SEQ ID NO: 176807 - DNA, 8 bp, Unknown
  misc_feature (1)..( 8): Result.005 file - promoters50/1664727
caagtaaa

SEQ ID NO: 176808 - DNA, 8 bp, Unknown
  misc_feature (1)..( 8): Result.005 file - promoters50/1664727
aaagaaaa

SEQ ID NO: 176809 - DNA, 8 bp, Unknown
  misc_feature (1)..( 8): Result.005 file - promoters50/1664727
aaagaata

SEQ ID NO: 176810 - DNA, 10 bp, Unknown
  misc_feature (1)..( 10): Result.005 file - promoters50/1664731
tttttagatt

SEQ ID NO: 176811 - DNA, 10 bp, Unknown
  misc_feature (1)..( 10): Result.005 file - promoters50/1664731
ggcttagatt

SEQ ID NO: 176812 - DNA, 10 bp, Unknown
  misc_feature (1)..( 10): Result.005 file - promoters50/1664731
ggctttgatg

SEQ ID NO: 176813 - DNA, 7 bp, Unknown
  misc_feature (1)..( 7): Result.005 file - promoters50/1664755
attattt

SEQ ID NO: 176814 - DNA, 7 bp, Unknown
  misc_feature (1)..( 7): Result.005 file - promoters50/1664755
tttattt

SEQ ID NO: 176815 - DNA, 8 bp, Unknown
  misc_feature (1)..( 8): Result.005 file - promoters50/1664755
tttaattt

SEQ ID NO: 176816 - DNA, 8 bp, Unknown
  misc_feature (1)..( 8): Result.005 file - promoters50/1664755
taaaattt

SEQ ID NO: 176817 - DNA, 8 bp, Unknown
  misc_feature (1)..( 8): Result.005 file - promoters50/1664755
caaaattc

SEQ ID NO: 176818 - DNA, 8 bp, Unknown
  misc_feature (1)..( 8): Result.005 file - promoters50/1664755
caaagttc

SEQ ID NO: 176819 - DNA, 11 bp, Unknown
  misc_feature (1)..( 11): Result.005 file - promoters50/1664797
aatccaatata

SEQ ID NO: 176820 - DNA, 11 bp, Unknown
  misc_feature (1)..( 11): Result.005 file - promoters50/1664797
aatcaaataga

SEQ ID NO: 176821 - DNA, 11 bp, Unknown
  misc_feature (1)..( 11): Result.005 file - promoters50/1664797
tgctcaatata

SEQ ID NO: 176822 - DNA, 11 bp, Unknown
  misc_feature (1)..( 11): Result.005 file - promoters50/1664797
ctttaaaaaga

SEQ ID NO: 176823 - DNA, 11 bp, Unknown
  misc_feature (1)..( 11): Result.005 file - promoters50/1664797
atttttttttt

SEQ ID NO: 176824 - DNA, 11 bp, Unknown
  misc_feature (1)..( 11): Result.005 file - promoters50/1664797
atttatttata

SEQ ID NO: 176825 - DNA, 11 bp, Unknown
  misc_feature (1)..( 11): Result.005 file - promoters50/1664797
ctttttttttt

SEQ ID NO: 176826 - DNA, 7 bp, Unknown
  misc_feature (1)..( 7): Result.005 file - promoters50/1664797
tttctac

SEQ ID NO: 176827 - DNA, 7 bp, Unknown
  misc_feature (1)..( 7): Result.005 file - promoters50/1664797
tttctaa

SEQ ID NO: 176828 - DNA, 7 bp, Unknown
  misc_feature (1)..( 7): Result.005 file - promoters50/1664797
tttttaa

SEQ ID NO: 176829 - DNA, 10 bp, Unknown
  misc_feature (1)..( 10): Result.005 file - promoters50/1664870
gtttctgtgg

SEQ ID NO: 176830 - DNA, 10 bp, Unknown
  misc_feature (1)..( 10): Result.005 file - promoters50/1664870
tattctgtga

SEQ ID NO: 176831 - DNA, 10 bp, Unknown
  misc_feature (1)..( 10): Result.005 file - promoters50/1664870
ttttttgttg

SEQ ID NO: 176832 - DNA, 10 bp, Unknown
  misc_feature (1)..( 10): Result.005 file - promoters50/1664870
tatactggat

SEQ ID NO: 176833 - DNA, 10 bp, Unknown
  misc_feature (1)..( 10): Result.005 file - promoters50/1664870
tcttttgttt

SEQ ID NO: 176834 - DNA, 12 bp, Unknown
  misc_feature (1)..( 12): Result.005 file - promoters50/1664870
tgtttaatgact

SEQ ID NO: 176835 - DNA, 12 bp, Unknown
  misc_feature (1)..( 12): Result.005 file - promoters50/1664870
attctaataact

SEQ ID NO: 176836 - DNA, 13 bp, Unknown
  misc_feature (1)..( 13): Result.005 file - promoters50/1664870
gttctaagtaaaa

SEQ ID NO: 176837 - DNA, 13 bp, Unknown
  misc_feature (1)..( 13): Result.005 file - promoters50/1664870
ctagtaatatcca

SEQ ID NO: 176838 - DNA, 13 bp, Unknown
  misc_feature (1)..( 13): Result.005 file - promoters50/1664870
atcttaaaaactc

SEQ ID NO: 176839 - DNA, 12 bp, Unknown
  misc_feature (1)..( 12): Result.005 file - promoters50/1664870
aacaaatccaaa

SEQ ID NO: 176840 - DNA, 12 bp, Unknown
  misc_feature (1)..( 12): Result.005 file - promoters50/1664870
tacaaatttgtt

SEQ ID NO: 176841 - DNA, 12 bp, Unknown
  misc_feature (1)..( 12): Result.005 file - promoters50/1664870
aacaaacatctt

SEQ ID NO: 176842 - DNA, 12 bp, Unknown
  misc_feature (1)..( 12): Result.005 file - promoters50/1664870
gacatacatctt

SEQ ID NO: 176843 - DNA, 12 bp, Unknown
  misc_feature (1)..( 12): Result.005 file - promoters50/1664870
aacagattcaat

SEQ ID NO: 176844 - DNA, 11 bp, Unknown
  misc_feature (1)..( 11): Result.005 file - promoters50/1664931
aaagaattttt

SEQ ID NO: 176845 - DNA, 11 bp, Unknown
  misc_feature (1)..( 11): Result.005 file - promoters50/1664931
gtataatttta

SEQ ID NO: 176846 - DNA, 11 bp, Unknown
  misc_feature (1)..( 11): Result.005 file - promoters50/1664931
taaaaattttt

SEQ ID NO: 176847 - DNA, 11 bp, Unknown
  misc_feature (1)..( 11): Result.005 file - promoters50/1664931
acctaagttta

SEQ ID NO: 176848 - DNA, 11 bp, Unknown
  misc_feature (1)..( 11): Result.005 file - promoters50/1664931
ataaaagtttg

SEQ ID NO: 176849 - DNA, 11 bp, Unknown
  misc_feature (1)..( 11): Result.005 file - promoters50/1664931
tctgaagtttc

SEQ ID NO: 176850 - DNA, 15 bp, Unknown
  misc_feature (1)..( 15): Result.005 file - promoters50/1664931
ataaaaaattttttt

SEQ ID NO: 176851 - DNA, 15 bp, Unknown
  misc_feature (1)..( 15): Result.005 file - promoters50/1664931
agaaaaaaaaaaaag

SEQ ID NO: 176852 - DNA, 15 bp, Unknown
  misc_feature (1)..( 15): Result.005 file - promoters50/1664931
atataaaatggtgtt

SEQ ID NO: 176853 - DNA, 15 bp, Unknown
  misc_feature (1)..( 15): Result.005 file - promoters50/1664931
atgaaatattttttt

SEQ ID NO: 176854 - DNA, 15 bp, Unknown
  misc_feature (1)..( 15): Result.005 file - promoters50/1664931
gataaatattcaact

SEQ ID NO: 176855 - DNA, 15 bp, Unknown
  misc_feature (1)..( 15): Result.005 file - promoters50/1664931
agaagaaacaaagta

SEQ ID NO: 176856 - DNA, 13 bp, Unknown
  misc_feature (1)..( 13): Result.005 file - promoters50/1664931
aataacatatgac

SEQ ID NO: 176857 - DNA, 13 bp, Unknown
  misc_feature (1)..( 13): Result.005 file - promoters50/1664931
gcaaacatttgaa

SEQ ID NO: 176858 - DNA, 13 bp, Unknown
  misc_feature (1)..( 13): Result.005 file - promoters50/1664931
aatgacataaatt

SEQ ID NO: 176859 - DNA, 13 bp, Unknown
  misc_feature (1)..( 13): Result.005 file - promoters50/1664931
cataacagttgta

SEQ ID NO: 176860 - DNA, 13 bp, Unknown
  misc_feature (1)..( 13): Result.005 file - promoters50/1664931
agtttaagttgta

SEQ ID NO: 176861 - DNA, 13 bp, Unknown
  misc_feature (1)..( 13): Result.005 file - promoters50/1664931
gtgaacttttaat

SEQ ID NO: 176862 - DNA, 15 bp, Unknown
  misc_feature (1)..( 15): Result.005 file - promoters50/1664931
caataatttacgaaa

SEQ ID NO: 176863 - DNA, 15 bp, Unknown
  misc_feature (1)..( 15): Result.005 file - promoters50/1664931
acttaagttactacc

SEQ ID NO: 176864 - DNA, 15 bp, Unknown
  misc_feature (1)..( 15): Result.005 file - promoters50/1664931
aaatagtttactatt

SEQ ID NO: 176865 - DNA, 15 bp, Unknown
  misc_feature (1)..( 15): Result.005 file - promoters50/1664931
aaaaaagtttttgta

SEQ ID NO: 176866 - DNA, 15 bp, Unknown
  misc_feature (1)..( 15): Result.005 file - promoters50/1664931
ctcgactttagtttt

SEQ ID NO: 176867 - DNA, 15 bp, Unknown
  misc_feature (1)..( 15): Result.005 file - promoters50/1664931
caaatttttactttt

SEQ ID NO: 176868 - DNA, 15 bp, Unknown
  misc_feature (1)..( 15): Result.005 file - promoters50/1664931
tttattgttacaaat

SEQ ID NO: 176869 - DNA, 11 bp, Unknown
  misc_feature (1)..( 11): Result.005 file - promoters50/1664931
caccaatcata

SEQ ID NO: 176870 - DNA, 11 bp, Unknown
  misc_feature (1)..( 11): Result.005 file - promoters50/1664931
tgagaatcatt

SEQ ID NO: 176871 - DNA, 11 bp, Unknown
  misc_feature (1)..( 11): Result.005 file - promoters50/1664931
caccactcatc

SEQ ID NO: 176872 - DNA, 11 bp, Unknown
  misc_feature (1)..( 11): Result.005 file - promoters50/1664931
aaagagtcaaa

SEQ ID NO: 176873 - DNA, 11 bp, Unknown
  misc_feature (1)..( 11): Result.005 file - promoters50/1664931
ttagactcatc

SEQ ID NO: 176874 - DNA, 11 bp, Unknown
  misc_feature (1)..( 11): Result.005 file - promoters50/1664931
tgccactcgac

SEQ ID NO: 176875 - DNA, 15 bp, Unknown
  misc_feature (1)..( 15): Result.005 file - promoters50/1664981
tcaaaaattgaacca

SEQ ID NO: 176876 - DNA, 15 bp, Unknown
  misc_feature (1)..( 15): Result.005 file - promoters50/1664981
ttagaaatcgaaaca

SEQ ID NO: 176877 - DNA, 15 bp, Unknown
  misc_feature (1)..( 15): Result.005 file - promoters50/1664981
tatcaaattgaatga

SEQ ID NO: 176878 - DNA, 15 bp, Unknown
  misc_feature (1)..( 15): Result.005 file - promoters50/1664981
aatcttcttgaacgt

SEQ ID NO: 176879 - DNA, 15 bp, Unknown
  misc_feature (1)..( 15): Result.005 file - promoters50/1664981
ttacaaatctatcct

SEQ ID NO: 176880 - DNA, 15 bp, Unknown
  misc_feature (1)..( 15): Result.005 file - promoters50/1664981
ctggtggttgattga

SEQ ID NO: 176881 - DNA, 16 bp, Unknown
  misc_feature (1)..( 16): Result.005 file - promoters50/1664981
aaaataaatcgaaaac

SEQ ID NO: 176882 - DNA, 16 bp, Unknown
  misc_feature (1)..( 16): Result.005 file - promoters50/1664981
ttatcaaattgaatga

SEQ ID NO: 176883 - DNA, 16 bp, Unknown
  misc_feature (1)..( 16): Result.005 file - promoters50/1664981
aaagtaaatcattttt

SEQ ID NO: 176884 - DNA, 16 bp, Unknown
  misc_feature (1)..( 16): Result.005 file - promoters50/1664981
gtggttgattgatagg

SEQ ID NO: 176885 - DNA, 16 bp, Unknown
  misc_feature (1)..( 16): Result.005 file - promoters50/1664981
tgtacatattgagagg

SEQ ID NO: 176886 - DNA, 16 bp, Unknown
  misc_feature (1)..( 16): Result.005 file - promoters50/1664981
gaagtaaagttgatta

SEQ ID NO: 176887 - DNA, 12 bp, Unknown
  misc_feature (1)..( 12): Result.005 file - promoters50/1664981
gaactttggttt

SEQ ID NO: 176888 - DNA, 12 bp, Unknown
  misc_feature (1)..( 12): Result.005 file - promoters50/1664981
gaagtttctggt

SEQ ID NO: 176889 - DNA, 12 bp, Unknown
  misc_feature (1)..( 12): Result.005 file - promoters50/1664981
gaattttgtttt

SEQ ID NO: 176890 - DNA, 12 bp, Unknown
  misc_feature (1)..( 12): Result.005 file - promoters50/1664981
aaagtttgttat

SEQ ID NO: 176891 - DNA, 12 bp, Unknown
  misc_feature (1)..( 12): Result.005 file - promoters50/1664981
taagtttaagtt

SEQ ID NO: 176892 - DNA, 12 bp, Unknown
  misc_feature (1)..( 12): Result.005 file - promoters50/1664981
aaagttgattaa

SEQ ID NO: 176893 - DNA, 14 bp, Unknown
  misc_feature (1)..( 14): Result.005 file - promoters50/1664981
taatatataaagga

SEQ ID NO: 176894 - DNA, 14 bp, Unknown
  misc_feature (1)..( 14): Result.005 file - promoters50/1664981
atttatatagataa

SEQ ID NO: 176895 - DNA, 14 bp, Unknown
  misc_feature (1)..( 14): Result.005 file - promoters50/1664981
acatatatacttag

SEQ ID NO: 176896 - DNA, 14 bp, Unknown
  misc_feature (1)..( 14): Result.005 file - promoters50/1664981
ctatataaagataa

SEQ ID NO: 176897 - DNA, 14 bp, Unknown
  misc_feature (1)..( 14): Result.005 file - promoters50/1664981
tactataaatctaa

SEQ ID NO: 176898 - DNA, 14 bp, Unknown
  misc_feature (1)..( 14): Result.005 file - promoters50/1664981
tactataaattctt

SEQ ID NO: 176899 - DNA, 12 bp, Unknown
  misc_feature (1)..( 12): Result.005 file - promoters50/1665056
caaagaaataac

SEQ ID NO: 176900 - DNA, 12 bp, Unknown
  misc_feature (1)..( 12): Result.005 file - promoters50/1665056
gaaaaaaataac

SEQ ID NO: 176901 - DNA, 12 bp, Unknown
  misc_feature (1)..( 12): Result.005 file - promoters50/1665056
gaaagaagaaaa

SEQ ID NO: 176902 - DNA, 12 bp, Unknown
  misc_feature (1)..( 12): Result.005 file - promoters50/1665056
ataaaaaattga

SEQ ID NO: 176903 - DNA, 12 bp, Unknown
  misc_feature (1)..( 12): Result.005 file - promoters50/1665056
agaagaaaacgt

SEQ ID NO: 176904 - DNA, 12 bp, Unknown
  misc_feature (1)..( 12): Result.005 file - promoters50/1665056
tatacaaaagct

SEQ ID NO: 176905 - DNA, 10 bp, Unknown
  misc_feature (1)..( 10): Result.005 file - promoters50/1665056
tatctataaa

SEQ ID NO: 176906 - DNA, 10 bp, Unknown
  misc_feature (1)..( 10): Result.005 file - promoters50/1665056
cgactaaaaa

SEQ ID NO: 176907 - DNA, 10 bp, Unknown
  misc_feature (1)..( 10): Result.005 file - promoters50/1665056
taacaaaaaa

SEQ ID NO: 176908 - DNA, 10 bp, Unknown
  misc_feature (1)..( 10): Result.005 file - promoters50/1665056
agagaaaaaa

SEQ ID NO: 176909 - DNA, 10 bp, Unknown
  misc_feature (1)..( 10): Result.005 file - promoters50/1665056
tggtaataaa

SEQ ID NO: 176910 - DNA, 10 bp, Unknown
  misc_feature (1)..( 10): Result.005 file - promoters50/1665056
tttctacaaa

SEQ ID NO: 176911 - DNA, 10 bp, Unknown
  misc_feature (1)..( 10): Result.005 file - promoters50/1665056
cgaagacaaa

SEQ ID NO: 176912 - DNA, 16 bp, Unknown
  misc_feature (1)..( 16): Result.005 file - promoters50/1665056
atagatttaattgggc

SEQ ID NO: 176913 - DNA, 16 bp, Unknown
  misc_feature (1)..( 16): Result.005 file - promoters50/1665056
ttttattttatttagg

SEQ ID NO: 176914 - DNA, 16 bp, Unknown
  misc_feature (1)..( 16): Result.005 file - promoters50/1665056
ataaatttaacgaatg

SEQ ID NO: 176915 - DNA, 16 bp, Unknown
  misc_feature (1)..( 16): Result.005 file - promoters50/1665056
gcaatgtttattaaaa

SEQ ID NO: 176916 - DNA, 16 bp, Unknown
  misc_feature (1)..( 16): Result.005 file - promoters50/1665056
tccaaatttcttaaaa

SEQ ID NO: 176917 - DNA, 16 bp, Unknown
  misc_feature (1)..( 16): Result.005 file - promoters50/1665056
ccagtgtttattttaa

SEQ ID NO: 176918 - DNA, 11 bp, Unknown
  misc_feature (1)..( 11): Result.005 file - promoters50/1665056
tacctttttac

SEQ ID NO: 176919 - DNA, 11 bp, Unknown
  misc_feature (1)..( 11): Result.005 file - promoters50/1665056
tgaatttgtac

SEQ ID NO: 176920 - DNA, 11 bp, Unknown
  misc_feature (1)..( 11): Result.005 file - promoters50/1665056
tatatttttaa

SEQ ID NO: 176921 - DNA, 11 bp, Unknown
  misc_feature (1)..( 11): Result.005 file - promoters50/1665056
aatctttttat

SEQ ID NO: 176922 - DNA, 11 bp, Unknown
  misc_feature (1)..( 11): Result.005 file - promoters50/1665056
tcccttattat

SEQ ID NO: 176923 - DNA, 11 bp, Unknown
  misc_feature (1)..( 11): Result.005 file - promoters50/1665056
aatatttctat

SEQ ID NO: 176924 - DNA, 7 bp, Unknown
  misc_feature (1)..( 7): Result.005 file - promoters50/1665080
tttctta

SEQ ID NO: 176925 - DNA, 7 bp, Unknown
  misc_feature (1)..( 7): Result.005 file - promoters50/1665080
tttgtta

SEQ ID NO: 176926 - DNA, 7 bp, Unknown
  misc_feature (1)..( 7): Result.005 file - promoters50/1665080
tttgttt

SEQ ID NO: 176927 - DNA, 10 bp, Unknown
  misc_feature (1)..( 10): Result.005 file - promoters50/1665080
tcccttttgg

SEQ ID NO: 176928 - DNA, 10 bp, Unknown
  misc_feature (1)..( 10): Result.005 file - promoters50/1665080
tccctttttt

SEQ ID NO: 176929 - DNA, 10 bp, Unknown
  misc_feature (1)..( 10): Result.005 file - promoters50/1665080
cttctttttt

SEQ ID NO: 176930 - DNA, 9 bp, Unknown
  misc_feature (1)..( 9): Result.005 file - promoters50/1665080
attaaacta

SEQ ID NO: 176931 - DNA, 9 bp, Unknown
  misc_feature (1)..( 9): Result.005 file - promoters50/1665080
attcaacta

SEQ ID NO: 176932 - DNA, 9 bp, Unknown
  misc_feature (1)..( 9): Result.005 file - promoters50/1665080
tttaaacca

SEQ ID NO: 176933 - DNA, 11 bp, Unknown
  misc_feature (1)..( 11): Result.005 file - promoters50/1665080
aatcttccaag

SEQ ID NO: 176934 - DNA, 11 bp, Unknown
  misc_feature (1)..( 11): Result.005 file - promoters50/1665080
tttcttccaag

SEQ ID NO: 176935 - DNA, 11 bp, Unknown
  misc_feature (1)..( 11): Result.005 file - promoters50/1665080
tttcttcaagg

SEQ ID NO: 176936 - DNA, 13 bp, Unknown
  misc_feature (1)..( 13): Result.005 file - promoters50/1665080
taaaaatatttat

SEQ ID NO: 176937 - DNA, 13 bp, Unknown
  misc_feature (1)..( 13): Result.005 file - promoters50/1665080
gaaaaatatatat

SEQ ID NO: 176938 - DNA, 13 bp, Unknown
  misc_feature (1)..( 13): Result.005 file - promoters50/1665080
taaaaaaagattc

SEQ ID NO: 176939 - DNA, 8 bp, Unknown
  misc_feature (1)..( 8): Result.005 file - promoters50/1665080
attccttg

SEQ ID NO: 176940 - DNA, 8 bp, Unknown
  misc_feature (1)..( 8): Result.005 file - promoters50/1665080
atttcttc

SEQ ID NO: 176941 - DNA, 8 bp, Unknown
  misc_feature (1)..( 8): Result.005 file - promoters50/1665080
ttttcttc

SEQ ID NO: 176942 - DNA, 9 bp, Unknown
  misc_feature (1)..( 9): Result.005 file - promoters50/1665080
tgtcatttc

SEQ ID NO: 176943 - DNA, 9 bp, Unknown
  misc_feature (1)..( 9): Result.005 file - promoters50/1665080
tgtgattta

SEQ ID NO: 176944 - DNA, 9 bp, Unknown
  misc_feature (1)..( 9): Result.005 file - promoters50/1665080
aatgactta

SEQ ID NO: 176945 - DNA, 9 bp, Unknown
  misc_feature (1)..( 9): Result.005 file - promoters50/1665243
attattttc

SEQ ID NO: 176946 - DNA, 9 bp, Unknown
  misc_feature (1)..( 9): Result.005 file - promoters50/1665243
atttttttg

SEQ ID NO: 176947 - DNA, 10 bp, Unknown
  misc_feature (1)..( 10): Result.005 file - promoters50/1665243
tttcagtttc

SEQ ID NO: 176948 - DNA, 10 bp, Unknown
  misc_feature (1)..( 10): Result.005 file - promoters50/1665243
caagattttt

SEQ ID NO: 176949 - DNA, 9 bp, Unknown
  misc_feature (1)..( 9): Result.005 file - promoters50/1665243
ttaaagagt

SEQ ID NO: 176950 - DNA, 9 bp, Unknown
  misc_feature (1)..( 9): Result.005 file - promoters50/1665243
ataaaaagt

SEQ ID NO: 176951 - DNA, 9 bp, Unknown
  misc_feature (1)..( 9): Result.005 file - promoters50/1665243
ataaaacaa

SEQ ID NO: 176952 - DNA, 9 bp, Unknown
  misc_feature (1)..( 9): Result.005 file - promoters50/1665243
atcaaaagt

SEQ ID NO: 176953 - DNA, 11 bp, Unknown
  misc_feature (1)..( 11): Result.005 file - promoters50/1665272
aatttgatttt

SEQ ID NO: 176954 - DNA, 11 bp, Unknown
  misc_feature (1)..( 11): Result.005 file - promoters50/1665272
attttgatcta

SEQ ID NO: 176955 - DNA, 11 bp, Unknown
  misc_feature (1)..( 11): Result.005 file - promoters50/1665272
catttgaaatt

SEQ ID NO: 176956 - DNA, 11 bp, Unknown
  misc_feature (1)..( 11): Result.005 file - promoters50/1665272
aattcgattct

SEQ ID NO: 176957 - DNA, 11 bp, Unknown
  misc_feature (1)..( 11): Result.005 file - promoters50/1665272
attttgattca

SEQ ID NO: 176958 - DNA, 11 bp, Unknown
  misc_feature (1)..( 11): Result.005 file - promoters50/1665272
ccgttgttcta

SEQ ID NO: 176959 - DNA, 11 bp, Unknown
  misc_feature (1)..( 11): Result.005 file - promoters50/1673798
gtaaactaaaa

SEQ ID NO: 176960 - DNA, 11 bp, Unknown
  misc_feature (1)..( 11): Result.005 file - promoters50/1673798
caaaaataaaa

SEQ ID NO: 176961 - DNA, 11 bp, Unknown
  misc_feature (1)..( 11): Result.005 file - promoters50/1673798
aaaaagtaaac

SEQ ID NO: 176962 - DNA, 11 bp, Unknown
  misc_feature (1)..( 11): Result.005 file - promoters50/1673798
ttaaacaaaat

SEQ ID NO: 176963 - DNA, 12 bp, Unknown
  misc_feature (1)..( 12): Result.005 file - promoters50/1673798
ttagcaataaat

SEQ ID NO: 176964 - DNA, 12 bp, Unknown
  misc_feature (1)..( 12): Result.005 file - promoters50/1673798
ttaacaataagg

SEQ ID NO: 176965 - DNA, 11 bp, Unknown
  misc_feature (1)..( 11): Result.005 file - promoters50/1673806
taaagaatttt

SEQ ID NO: 176966 - DNA, 11 bp, Unknown
  misc_feature (1)..( 11): Result.005 file - promoters50/1673806
taaaaaatgtt

SEQ ID NO: 176967 - DNA, 11 bp, Unknown
  misc_feature (1)..( 11): Result.005 file - promoters50/1673806
aaaataataat

SEQ ID NO: 176968 - DNA, 11 bp, Unknown
  misc_feature (1)..( 11): Result.005 file - promoters50/1673806
gaaataatttt

SEQ ID NO: 176969 - DNA, 11 bp, Unknown
  misc_feature (1)..( 11): Result.005 file - promoters50/1673806
gaaagaataat

SEQ ID NO: 176970 - DNA, 11 bp, Unknown
  misc_feature (1)..( 11): Result.005 file - promoters50/1673806
tgaaaaattca

SEQ ID NO: 176971 - DNA, 10 bp, Unknown
  misc_feature (1)..( 10): Result.005 file - promoters50/1673826
ataggttcca

SEQ ID NO: 176972 - DNA, 10 bp, Unknown
  misc_feature (1)..( 10): Result.005 file - promoters50/1673826
atagattcta

SEQ ID NO: 176973 - DNA, 10 bp, Unknown
  misc_feature (1)..( 10): Result.005 file - promoters50/1673826
ataagttagc

SEQ ID NO: 176974 - DNA, 10 bp, Unknown
  misc_feature (1)..( 10): Result.005 file - promoters50/1673826
ggagtttaga

SEQ ID NO: 176975 - DNA, 8 bp, Unknown
  misc_feature (1)..( 8): Result.005 file - promoters50/1673826
atcgttat

SEQ ID NO: 176976 - DNA, 8 bp, Unknown
  misc_feature (1)..( 8): Result.005 file - promoters50/1673826
atctttag

SEQ ID NO: 176977 - DNA, 8 bp, Unknown
  misc_feature (1)..( 8): Result.005 file - promoters50/1673826
ttctttaa

SEQ ID NO: 176978 - DNA, 8 bp, Unknown
  misc_feature (1)..( 8): Result.005 file - promoters50/1673826
ttctatag

SEQ ID NO: 176979 - DNA, 8 bp, Unknown
  misc_feature (1)..( 8): Result.005 file - promoters50/1673830
aaccaaat

SEQ ID NO: 176980 - DNA, 8 bp, Unknown
  misc_feature (1)..( 8): Result.005 file - promoters50/1673830
aacaaaaa

SEQ ID NO: 176981 - DNA, 8 bp, Unknown
  misc_feature (1)..( 8): Result.005 file - promoters50/1673830
aacaaaaa

SEQ ID NO: 176982 - DNA, 10 bp, Unknown
  misc_feature (1)..( 10): Result.005 file - promoters50/1673830
attaaagaaa

SEQ ID NO: 176983 - DNA, 10 bp, Unknown
  misc_feature (1)..( 10): Result.005 file - promoters50/1673830
attaaaggaa

SEQ ID NO: 176984 - DNA, 10 bp, Unknown
  misc_feature (1)..( 10): Result.005 file - promoters50/1673830
agtaagggaa

SEQ ID NO: 176985 - DNA, 10 bp, Unknown
  misc_feature (1)..( 10): Result.005 file - promoters50/1673830
ttcttgtttc

SEQ ID NO: 176986 - DNA, 10 bp, Unknown
  misc_feature (1)..( 10): Result.005 file - promoters50/1673830
ttcttcttta

SEQ ID NO: 176987 - DNA, 10 bp, Unknown
  misc_feature (1)..( 10): Result.005 file - promoters50/1673830
aagatcttta

SEQ ID NO: 176988 - DNA, 10 bp, Unknown
  misc_feature (1)..( 10): Result.005 file - promoters50/1673830
aaaacaaaat

SEQ ID NO: 176989 - DNA, 10 bp, Unknown
  misc_feature (1)..( 10): Result.005 file - promoters50/1673830
aaaacaaaaa

SEQ ID NO: 176990 - DNA, 10 bp, Unknown
  misc_feature (1)..( 10): Result.005 file - promoters50/1673830
tcaacaaaaa

SEQ ID NO: 176991 - DNA, 8 bp, Unknown
  misc_feature (1)..( 8): Result.005 file - promoters50/1673847
taatataa

SEQ ID NO: 176992 - DNA, 8 bp, Unknown
  misc_feature (1)..( 8): Result.005 file - promoters50/1673847
aaatttaa

SEQ ID NO: 176993 - DNA, 8 bp, Unknown
  misc_feature (1)..( 8): Result.005 file - promoters50/1673847
taatatta

SEQ ID NO: 176994 - DNA, 11 bp, Unknown
  misc_feature (1)..( 11): Result.005 file - promoters50/1673847
atacatcttta

SEQ ID NO: 176995 - DNA, 11 bp, Unknown
  misc_feature (1)..( 11): Result.005 file - promoters50/1673847
atagatcttat

SEQ ID NO: 176996 - DNA, 11 bp, Unknown
  misc_feature (1)..( 11): Result.005 file - promoters50/1673847
tctaatcttat

SEQ ID NO: 176997 - DNA, 11 bp, Unknown
  misc_feature (1)..( 11): Result.005 file - promoters50/1673847
tttgtatgatt

SEQ ID NO: 176998 - DNA, 11 bp, Unknown
  misc_feature (1)..( 11): Result.005 file - promoters50/1673847
tttgtatacca

SEQ ID NO: 176999 - DNA, 11 bp, Unknown
  misc_feature (1)..( 11): Result.005 file - promoters50/1673847
tttgtttgatt

SEQ ID NO: 177000 - DNA, 14 bp, Unknown
  misc_feature (1)..( 14): Result.005 file - promoters50/1673849
tattaaataatcca

SEQ ID NO: 177001 - DNA, 14 bp, Unknown
  misc_feature (1)..( 14): Result.005 file - promoters50/1673849
aattacatactaaa

SEQ ID NO: 177002 - DNA, 14 bp, Unknown
  misc_feature (1)..( 14): Result.005 file - promoters50/1673849
tatcaaaggaaatg

SEQ ID NO: 177003 - DNA, 14 bp, Unknown
  misc_feature (1)..( 14): Result.005 file - promoters50/1673849
gagaaaattatcca

SEQ ID NO: 177004 - DNA, 14 bp, Unknown
  misc_feature (1)..( 14): Result.005 file - promoters50/1673849
aatcacacaattaa

SEQ ID NO: 177005 - DNA, 9 bp, Unknown
  misc_feature (1)..( 9): Result.005 file - promoters50/1673849
aaaattatc

SEQ ID NO: 177006 - DNA, 9 bp, Unknown
  misc_feature (1)..( 9): Result.005 file - promoters50/1673849
aaatttatt

SEQ ID NO: 177007 - DNA, 9 bp, Unknown
  misc_feature (1)..( 9): Result.005 file - promoters50/1673849
ttattaatt

SEQ ID NO: 177008 - DNA, 9 bp, Unknown
  misc_feature (1)..( 9): Result.005 file - promoters50/1673849
acttttatt

SEQ ID NO: 177009 - DNA, 8 bp, Unknown
  misc_feature (1)..( 8): Result.005 file - promoters50/1673853
agaatatt

SEQ ID NO: 177010 - DNA, 8 bp, Unknown
  misc_feature (1)..( 8): Result.005 file - promoters50/1673853
ggaagatt

SEQ ID NO: 177011 - DNA, 8 bp, Unknown
  misc_feature (1)..( 8): Result.005 file - promoters50/1673853
agaatact

SEQ ID NO: 177012 - DNA, 8 bp, Unknown
  misc_feature (1)..( 8): Result.005 file - promoters50/1673853
agattata

SEQ ID NO: 177013 - DNA, 7 bp, Unknown
  misc_feature (1)..( 7): Result.005 file - promoters50/1673853
ctttgaa

SEQ ID NO: 177014 - DNA, 7 bp, Unknown
  misc_feature (1)..( 7): Result.005 file - promoters50/1673853
atttgaa

SEQ ID NO: 177015 - DNA, 7 bp, Unknown
  misc_feature (1)..( 7): Result.005 file - promoters50/1673853
ttttgaa

SEQ ID NO: 177016 - DNA, 7 bp, Unknown
  misc_feature (1)..( 7): Result.005 file - promoters50/1673853
attagaa

SEQ ID NO: 177017 - DNA, 9 bp, Unknown
  misc_feature (1)..( 9): Result.005 file - promoters50/1710026
atttgaatc

SEQ ID NO: 177018 - DNA, 9 bp, Unknown
  misc_feature (1)..( 9): Result.005 file - promoters50/1710026
atttcaatc

SEQ ID NO: 177019 - DNA, 9 bp, Unknown
  misc_feature (1)..( 9): Result.005 file - promoters50/1710026
gtttcaaat

SEQ ID NO: 177020 - DNA, 9 bp, Unknown
  misc_feature (1)..( 9): Result.005 file - promoters50/1710026
ttttaaata

SEQ ID NO: 177021 - DNA, 9 bp, Unknown
  misc_feature (1)..( 9): Result.005 file - promoters50/1710026
atttcaatc

SEQ ID NO: 177022 - DNA, 8 bp, Unknown
  misc_feature (1)..( 8): Result.005 file - promoters50/1710026
tttcaaat

SEQ ID NO: 177023 - DNA, 8 bp, Unknown
  misc_feature (1)..( 8): Result.005 file - promoters50/1710026
tttcaatc

SEQ ID NO: 177024 - DNA, 8 bp, Unknown
  misc_feature (1)..( 8): Result.005 file - promoters50/1710026
tttcaatc

SEQ ID NO: 177025 - DNA, 8 bp, Unknown
  misc_feature (1)..( 8): Result.005 file - promoters50/1710026
ttttaaat

SEQ ID NO: 177026 - DNA, 7 bp, Unknown
  misc_feature (1)..( 7): Result.005 file - promoters50/1710051
tttttcc

SEQ ID NO: 177027 - DNA, 7 bp, Unknown
  misc_feature (1)..( 7): Result.005 file - promoters50/1710051
tttttca

SEQ ID NO: 177028 - DNA, 7 bp, Unknown
  misc_feature (1)..( 7): Result.005 file - promoters50/1710051
tttatca

SEQ ID NO: 177029 - DNA, 8 bp, Unknown
  misc_feature (1)..( 8): Result.005 file - promoters50/1710051
tttaaata

SEQ ID NO: 177030 - DNA, 8 bp, Unknown
  misc_feature (1)..( 8): Result.005 file - promoters50/1710051
cttaaata

SEQ ID NO: 177031 - DNA, 8 bp, Unknown
  misc_feature (1)..( 8): Result.005 file - promoters50/1710051
cttgaatc

SEQ ID NO: 177032 - DNA, 10 bp, Unknown
  misc_feature (1)..( 10): Result.005 file - promoters50/1710051
aaatctataa

SEQ ID NO: 177033 - DNA, 10 bp, Unknown
  misc_feature (1)..( 10): Result.005 file - promoters50/1710051
caatttataa

SEQ ID NO: 177034 - DNA, 10 bp, Unknown
  misc_feature (1)..( 10): Result.005 file - promoters50/1710051
caatttaaaa

SEQ ID NO: 177035 - DNA, 8 bp, Unknown
  misc_feature (1)..( 8): Result.005 file - promoters50/1710645
aatttcgt

SEQ ID NO: 177036 - DNA, 8 bp, Unknown
  misc_feature (1)..( 8): Result.005 file - promoters50/1710645
gatttcgt

SEQ ID NO: 177037 - DNA, 8 bp, Unknown
  misc_feature (1)..( 8): Result.005 file - promoters50/1710645
aatttcgg

SEQ ID NO: 177038 - DNA, 9 bp, Unknown
  misc_feature (1)..( 9): Result.005 file - promoters50/1710645
gaagatgaa

SEQ ID NO: 177039 - DNA, 9 bp, Unknown
  misc_feature (1)..( 9): Result.005 file - promoters50/1710645
tttgatgaa

SEQ ID NO: 177040 - DNA, 9 bp, Unknown
  misc_feature (1)..( 9): Result.005 file - promoters50/1710645
tttgttgac

SEQ ID NO: 177041 - DNA, 9 bp, Unknown
  misc_feature (1)..( 9): Result.005 file - promoters50/1710759
caccttttc

SEQ ID NO: 177042 - DNA, 9 bp, Unknown
  misc_feature (1)..( 9): Result.005 file - promoters50/1710759
atcctttta

SEQ ID NO: 177043 - DNA, 9 bp, Unknown
  misc_feature (1)..( 9): Result.005 file - promoters50/1710759
atcatttta

SEQ ID NO: 177044 - DNA, 9 bp, Unknown
  misc_feature (1)..( 9): Result.005 file - promoters50/1710759
atttaccaa

SEQ ID NO: 177045 - DNA, 9 bp, Unknown
  misc_feature (1)..( 9): Result.005 file - promoters50/1710759
ttttaacaa

SEQ ID NO: 177046 - DNA, 9 bp, Unknown
  misc_feature (1)..( 9): Result.005 file - promoters50/1710759
ttttaaagt

SEQ ID NO: 177047 - DNA, 8 bp, Unknown
  misc_feature (1)..( 8): Result.005 file - promoters50/1710759
caatttta

SEQ ID NO: 177048 - DNA, 8 bp, Unknown
  misc_feature (1)..( 8): Result.005 file - promoters50/1710759
aaattttt

SEQ ID NO: 177049 - DNA, 8 bp, Unknown
  misc_feature (1)..( 8): Result.005 file - promoters50/1710759
caatttta

SEQ ID NO: 177050 - DNA, 10 bp, Unknown
  misc_feature (1)..( 10): Result.005 file - promoters50/1711228
ttcttaagat

SEQ ID NO: 177051 - DNA, 10 bp, Unknown
  misc_feature (1)..( 10): Result.005 file - promoters50/1711228
ttcttaggtg

SEQ ID NO: 177052 - DNA, 10 bp, Unknown
  misc_feature (1)..( 10): Result.005 file - promoters50/1711228
atctttagat

SEQ ID NO: 177053 - DNA, 10 bp, Unknown
  misc_feature (1)..( 10): Result.005 file - promoters50/1711228
tgattagatt

SEQ ID NO: 177054 - DNA, 10 bp, Unknown
  misc_feature (1)..( 10): Result.005 file - promoters50/1711228
aattttagaa

SEQ ID NO: 177055 - DNA, 10 bp, Unknown
  misc_feature (1)..( 10): Result.005 file - promoters50/1711228
ttctttggat

SEQ ID NO: 177056 - DNA, 13 bp, Unknown
  misc_feature (1)..( 13): Result.005 file - promoters50/1711228
cattaggctttaa

SEQ ID NO: 177057 - DNA, 13 bp, Unknown
  misc_feature (1)..( 13): Result.005 file - promoters50/1711228
aattgggcccaat

SEQ ID NO: 177058 - DNA, 13 bp, Unknown
  misc_feature (1)..( 13): Result.005 file - promoters50/1711228
aaatgggcctaat

SEQ ID NO: 177059 - DNA, 13 bp, Unknown
  misc_feature (1)..( 13): Result.005 file - promoters50/1711228
aaataggcccatt

SEQ ID NO: 177060 - DNA, 13 bp, Unknown
  misc_feature (1)..( 13): Result.005 file - promoters50/1711228
gtttgggccaact

SEQ ID NO: 177061 - DNA, 13 bp, Unknown
  misc_feature (1)..( 13): Result.005 file - promoters50/1711228
agatgggcctgac

SEQ ID NO: 177062 - DNA, 19 bp, Unknown
  misc_feature (1)..( 19): Result.005 file - promoters50/1711318
aatttattttccaattccc

SEQ ID NO: 177063 - DNA, 19 bp, Unknown
  misc_feature (1)..( 19): Result.005 file - promoters50/1711318
catacggtttgcaaaatct

SEQ ID NO: 177064 - DNA, 19 bp, Unknown
  misc_feature (1)..( 19): Result.005 file - promoters50/1711318
gatctaacttccaaaaacg

SEQ ID NO: 177065 - DNA, 19 bp, Unknown
  misc_feature (1)..( 19): Result.005 file - promoters50/1711318
aatttattttccaaagctc

SEQ ID NO: 177066 - DNA, 19 bp, Unknown
  misc_feature (1)..( 19): Result.005 file - promoters50/1711318
gaaactcttttcaagaagt

SEQ ID NO: 177067 - DNA, 19 bp, Unknown
  misc_feature (1)..( 19): Result.005 file - promoters50/1711318
ccagggatgtgaaatatat

SEQ ID NO: 177068 - DNA, 19 bp, Unknown
  misc_feature (1)..( 19): Result.005 file - promoters50/1711318
tgattaatttctctacttg

SEQ ID NO: 177069 - DNA, 19 bp, Unknown
  misc_feature (1)..( 19): Result.005 file - promoters50/1711318
atatgcaacaccaaatatc

SEQ ID NO: 177070 - DNA, 13 bp, Unknown
  misc_feature (1)..( 13): Result.005 file - promoters50/1711318
ttttttgttgtta

SEQ ID NO: 177071 - DNA, 13 bp, Unknown
  misc_feature (1)..( 13): Result.005 file - promoters50/1711318
gaattttttggca

SEQ ID NO: 177072 - DNA, 14 bp, Unknown
  misc_feature (1)..( 14): Result.005 file - promoters50/1711318
gatttatgttgtta

SEQ ID NO: 177073 - DNA, 14 bp, Unknown
  misc_feature (1)..( 14): Result.005 file - promoters50/1711318
tacggctgttgttg

SEQ ID NO: 177074 - DNA, 14 bp, Unknown
  misc_feature (1)..( 14): Result.005 file - promoters50/1711318
attgtttgttgcgt

SEQ ID NO: 177075 - DNA, 14 bp, Unknown
  misc_feature (1)..( 14): Result.005 file - promoters50/1711318
atcgtttgtattat

SEQ ID NO: 177076 - DNA, 10 bp, Unknown
  misc_feature (1)..( 10): Result.005 file - promoters50/1711318
tatttgataa

SEQ ID NO: 177077 - DNA, 10 bp, Unknown
  misc_feature (1)..( 10): Result.005 file - promoters50/1711318
atttttataa

SEQ ID NO: 177078 - DNA, 10 bp, Unknown
  misc_feature (1)..( 10): Result.005 file - promoters50/1711318
tattagatcc

SEQ ID NO: 177079 - DNA, 10 bp, Unknown
  misc_feature (1)..( 10): Result.005 file - promoters50/1711318
catgttataa

SEQ ID NO: 177080 - DNA, 10 bp, Unknown
  misc_feature (1)..( 10): Result.005 file - promoters50/1711318
cggattataa

SEQ ID NO: 177081 - DNA, 10 bp, Unknown
  misc_feature (1)..( 10): Result.005 file - promoters50/1711318
gagcttatta

SEQ ID NO: 177082 - DNA, 9 bp, Unknown
  misc_feature (1)..( 9): Result.005 file - promoters50/1711318
aaattgaat

SEQ ID NO: 177083 - DNA, 9 bp, Unknown
  misc_feature (1)..( 9): Result.005 file - promoters50/1711318
taattgaac

SEQ ID NO: 177084 - DNA, 9 bp, Unknown
  misc_feature (1)..( 9): Result.005 file - promoters50/1711318
ggattgaag

SEQ ID NO: 177085 - DNA, 9 bp, Unknown
  misc_feature (1)..( 9): Result.005 file - promoters50/1711318
agattgaaa

SEQ ID NO: 177086 - DNA, 9 bp, Unknown
  misc_feature (1)..( 9): Result.005 file - promoters50/1711318
aaattgatt

SEQ ID NO: 177087 - DNA, 9 bp, Unknown
  misc_feature (1)..( 9): Result.005 file - promoters50/1711318
gcatttaac

SEQ ID NO: 177088 - DNA, 16 bp, Unknown
  misc_feature (1)..( 16): Result.005 file - promoters50/1711318
tataatactaattaat

SEQ ID NO: 177089 - DNA, 16 bp, Unknown
  misc_feature (1)..( 16): Result.005 file - promoters50/1711318
aataataataagtaaa

SEQ ID NO: 177090 - DNA, 16 bp, Unknown
  misc_feature (1)..( 16): Result.005 file - promoters50/1711318
taaagctttaattagc

SEQ ID NO: 177091 - DNA, 16 bp, Unknown
  misc_feature (1)..( 16): Result.005 file - promoters50/1711318
tataatttaatgcatc

SEQ ID NO: 177092 - DNA, 16 bp, Unknown
  misc_feature (1)..( 16): Result.005 file - promoters50/1711318
taaagagataagtctg

SEQ ID NO: 177093 - DNA, 16 bp, Unknown
  misc_feature (1)..( 16): Result.005 file - promoters50/1711318
aaaacttaaaagtaaa

SEQ ID NO: 177094 - DNA, 16 bp, Unknown
  misc_feature (1)..( 16): Result.005 file - promoters50/1711318
aagatggttatttatt

SEQ ID NO: 177095 - DNA, 16 bp, Unknown
  misc_feature (1)..( 16): Result.005 file - promoters50/1711318
ttgtctgttacttagc

SEQ ID NO: 177096 - DNA, 11 bp, Unknown
  misc_feature (1)..( 11): Result.005 file - promoters50/1711318
tgttttgacta

SEQ ID NO: 177097 - DNA, 11 bp, Unknown
  misc_feature (1)..( 11): Result.005 file - promoters50/1711318
tgtcttggacc

SEQ ID NO: 177098 - DNA, 11 bp, Unknown
  misc_feature (1)..( 11): Result.005 file - promoters50/1711318
gattttgataa

SEQ ID NO: 177099 - DNA, 11 bp, Unknown
  misc_feature (1)..( 11): Result.005 file - promoters50/1711318
tgtattttatc

SEQ ID NO: 177100 - DNA, 11 bp, Unknown
  misc_feature (1)..( 11): Result.005 file - promoters50/1711318
aatttttataa

SEQ ID NO: 177101 - DNA, 11 bp, Unknown
  misc_feature (1)..( 11): Result.005 file - promoters50/1711318
acatgttataa

SEQ ID NO: 177102 - DNA, 11 bp, Unknown
  misc_feature (1)..( 11): Result.005 file - promoters50/1711318
acggattataa

SEQ ID NO: 177103 - DNA, 10 bp, Unknown
  misc_feature (1)..( 10): Result.005 file - promoters50/1711318
gatgaattta

SEQ ID NO: 177104 - DNA, 10 bp, Unknown
  misc_feature (1)..( 10): Result.005 file - promoters50/1711318
gatcaatggc

SEQ ID NO: 177105 - DNA, 10 bp, Unknown
  misc_feature (1)..( 10): Result.005 file - promoters50/1711318
gattaatttc

SEQ ID NO: 177106 - DNA, 10 bp, Unknown
  misc_feature (1)..( 10): Result.005 file - promoters50/1711318
atctaacttc

SEQ ID NO: 177107 - DNA, 10 bp, Unknown
  misc_feature (1)..( 10): Result.005 file - promoters50/1711318
atgtaattta

SEQ ID NO: 177108 - DNA, 10 bp, Unknown
  misc_feature (1)..( 10): Result.005 file - promoters50/1711318
tatcagtggt

SEQ ID NO: 177109 - DNA, 12 bp, Unknown
  misc_feature (1)..( 12): Result.005 file - promoters50/1711318
gtatcgattatg

SEQ ID NO: 177110 - DNA, 12 bp, Unknown
  misc_feature (1)..( 12): Result.005 file - promoters50/1711318
ccatcaattagt

SEQ ID NO: 177111 - DNA, 12 bp, Unknown
  misc_feature (1)..( 12): Result.005 file - promoters50/1711318
atatctattggg

SEQ ID NO: 177112 - DNA, 12 bp, Unknown
  misc_feature (1)..( 12): Result.005 file - promoters50/1711318
tgcacaatcagt

SEQ ID NO: 177113 - DNA, 12 bp, Unknown
  misc_feature (1)..( 12): Result.005 file - promoters50/1711318
acatcaaatagt

SEQ ID NO: 177114 - DNA, 12 bp, Unknown
  misc_feature (1)..( 12): Result.005 file - promoters50/1711318
ccatgaatttaa

SEQ ID NO: 177115 - DNA, 11 bp, Unknown
  misc_feature (1)..( 11): Result.005 file - promoters50/1711318
gatgaatttat

SEQ ID NO: 177116 - DNA, 11 bp, Unknown
  misc_feature (1)..( 11): Result.005 file - promoters50/1711318
gtgaaatatat

SEQ ID NO: 177117 - DNA, 11 bp, Unknown
  misc_feature (1)..( 11): Result.005 file - promoters50/1711318
gattaatttct

SEQ ID NO: 177118 - DNA, 11 bp, Unknown
  misc_feature (1)..( 11): Result.005 file - promoters50/1711318
aacctatatat

SEQ ID NO: 177119 - DNA, 11 bp, Unknown
  misc_feature (1)..( 11): Result.005 file - promoters50/1711318
atctaacttcc

SEQ ID NO: 177120 - DNA, 11 bp, Unknown
  misc_feature (1)..( 11): Result.005 file - promoters50/1711318
atgtaatttat

SEQ ID NO: 177121 - DNA, 11 bp, Unknown
  misc_feature (1)..( 11): Result.005 file - promoters50/1711318
accaaatatca

SEQ ID NO: 177122 - DNA, 8 bp, Unknown
  misc_feature (1)..( 8): Result.005 file - promoters50/1711318
gttttttt

SEQ ID NO: 177123 - DNA, 8 bp, Unknown
  misc_feature (1)..( 8): Result.005 file - promoters50/1711318
gttattta

SEQ ID NO: 177124 - DNA, 8 bp, Unknown
  misc_feature (1)..( 8): Result.005 file - promoters50/1711318
attttttt

SEQ ID NO: 177125 - DNA, 8 bp, Unknown
  misc_feature (1)..( 8): Result.005 file - promoters50/1711318
tttaatta

SEQ ID NO: 177126 - DNA, 8 bp, Unknown
  misc_feature (1)..( 8): Result.005 file - promoters50/1711318
tttaatgc

SEQ ID NO: 177127 - DNA, 8 bp, Unknown
  misc_feature (1)..( 8): Result.005 file - promoters50/1711318
gttactta

SEQ ID NO: 177128 - DNA, 16 bp, Unknown
  misc_feature (1)..( 16): Result.005 file - promoters50/1711586
ttgcccaaaaaataat

SEQ ID NO: 177129 - DNA, 16 bp, Unknown
  misc_feature (1)..( 16): Result.005 file - promoters50/1711586
atatatgaaatataaa

SEQ ID NO: 177130 - DNA, 16 bp, Unknown
  misc_feature (1)..( 16): Result.005 file - promoters50/1711586
ttattcaaaacataaa

SEQ ID NO: 177131 - DNA, 16 bp, Unknown
  misc_feature (1)..( 16): Result.005 file - promoters50/1711586
agtgtcaaaaaataat

SEQ ID NO: 177132 - DNA, 16 bp, Unknown
  misc_feature (1)..( 16): Result.005 file - promoters50/1711586
ctttacggtatataat

SEQ ID NO: 177133 - DNA, 16 bp, Unknown
  misc_feature (1)..( 16): Result.005 file - promoters50/1711586
tatatcaaaagtgtat

SEQ ID NO: 177134 - DNA, 16 bp, Unknown
  misc_feature (1)..( 16): Result.005 file - promoters50/1711586
ttattcaaaacccaac

SEQ ID NO: 177135 - DNA, 11 bp, Unknown
  misc_feature (1)..( 11): Result.005 file - promoters50/1711586
gatatatcaat

SEQ ID NO: 177136 - DNA, 11 bp, Unknown
  misc_feature (1)..( 11): Result.005 file - promoters50/1711586
gatatagcaaa

SEQ ID NO: 177137 - DNA, 11 bp, Unknown
  misc_feature (1)..( 11): Result.005 file - promoters50/1711586
catatatcgtg

SEQ ID NO: 177138 - DNA, 11 bp, Unknown
  misc_feature (1)..( 11): Result.005 file - promoters50/1711586
aatacatccct

SEQ ID NO: 177139 - DNA, 11 bp, Unknown
  misc_feature (1)..( 11): Result.005 file - promoters50/1711586
tatattgcaag

SEQ ID NO: 177140 - DNA, 11 bp, Unknown
  misc_feature (1)..( 11): Result.005 file - promoters50/1711586
aatattgcaaa

SEQ ID NO: 177141 - DNA, 10 bp, Unknown
  misc_feature (1)..( 10): Result.005 file - promoters50/1711626
aattaatctc

SEQ ID NO: 177142 - DNA, 10 bp, Unknown
  misc_feature (1)..( 10): Result.005 file - promoters50/1711626
aataaattat

SEQ ID NO: 177143 - DNA, 10 bp, Unknown
  misc_feature (1)..( 10): Result.005 file - promoters50/1711626
tgttactctc

SEQ ID NO: 177144 - DNA, 6 bp, Unknown
  misc_feature (1)..( 6): Result.005 file - promoters50/1711626
attcga

SEQ ID NO: 177145 - DNA, 6 bp, Unknown
  misc_feature (1)..( 6): Result.005 file - promoters50/1711626
attcga

SEQ ID NO: 177146 - DNA, 6 bp, Unknown
  misc_feature (1)..( 6): Result.005 file - promoters50/1711626
attcga

SEQ ID NO: 177147 - DNA, 8 bp, Unknown
  misc_feature (1)..( 8): Result.005 file - promoters50/1711626
aattcaac

SEQ ID NO: 177148 - DNA, 8 bp, Unknown
  misc_feature (1)..( 8): Result.005 file - promoters50/1711626
aatacaat

SEQ ID NO: 177149 - DNA, 8 bp, Unknown
  misc_feature (1)..( 8): Result.005 file - promoters50/1711626
tatataat

SEQ ID NO: 177150 - DNA, 7 bp, Unknown
  misc_feature (1)..( 7): Result.005 file - promoters50/1711626
atttgat

SEQ ID NO: 177151 - DNA, 7 bp, Unknown
  misc_feature (1)..( 7): Result.005 file - promoters50/1711626
attcgat

SEQ ID NO: 177152 - DNA, 7 bp, Unknown
  misc_feature (1)..( 7): Result.005 file - promoters50/1711626
attcgac

SEQ ID NO: 177153 - DNA, 10 bp, Unknown
  misc_feature (1)..( 10): Result.005 file - promoters50/1711638
taattaatta

SEQ ID NO: 177154 - DNA, 10 bp, Unknown
  misc_feature (1)..( 10): Result.005 file - promoters50/1711638
caattaatta

SEQ ID NO: 177155 - DNA, 11 bp, Unknown
  misc_feature (1)..( 11): Result.005 file - promoters50/1711638
atatctattta

SEQ ID NO: 177156 - DNA, 11 bp, Unknown
  misc_feature (1)..( 11): Result.005 file - promoters50/1711638
cgatctttttg

SEQ ID NO: 177157 - DNA, 8 bp, Unknown
  misc_feature (1)..( 8): Result.005 file - promoters50/1711638
gtaaaaag

SEQ ID NO: 177158 - DNA, 8 bp, Unknown
  misc_feature (1)..( 8): Result.005 file - promoters50/1711638
agaaaaag

SEQ ID NO: 177159 - DNA, 8 bp, Unknown
  misc_feature (1)..( 8): Result.005 file - promoters50/1711638
agaataag

SEQ ID NO: 177160 - DNA, 8 bp, Unknown
  misc_feature (1)..( 8): Result.005 file - promoters50/1711638
agaaaaat

SEQ ID NO: 177161 - DNA, 10 bp, Unknown
  misc_feature (1)..( 10): Result.005 file - promoters50/1711638
tttggattta

SEQ ID NO: 177162 - DNA, 10 bp, Unknown
  misc_feature (1)..( 10): Result.005 file - promoters50/1711638
ttttgatgat

SEQ ID NO: 177163 - DNA, 10 bp, Unknown
  misc_feature (1)..( 10): Result.005 file - promoters50/1711638
catggaatta

SEQ ID NO: 177164 - DNA, 10 bp, Unknown
  misc_feature (1)..( 10): Result.005 file - promoters50/1711638
gtttgatatc

SEQ ID NO: 177165 - DNA, 12 bp, Unknown
  misc_feature (1)..( 12): Result.005 file - promoters50/1711638
attagatttttt

SEQ ID NO: 177166 - DNA, 12 bp, Unknown
  misc_feature (1)..( 12): Result.005 file - promoters50/1711638
attcgatctttt

SEQ ID NO: 177167 - DNA, 12 bp, Unknown
  misc_feature (1)..( 12): Result.005 file - promoters50/1711638
cgattgtttttt

SEQ ID NO: 177168 - DNA, 13 bp, Unknown
  misc_feature (1)..( 13): Result.005 file - promoters50/1711638
ttgatatctattt

SEQ ID NO: 177169 - DNA, 9 bp, Unknown
  misc_feature (1)..( 9): Result.005 file - promoters50/1711650
taaactttt

SEQ ID NO: 177170 - DNA, 9 bp, Unknown
  misc_feature (1)..( 9): Result.005 file - promoters50/1711650
taaacgttt

SEQ ID NO: 177171 - DNA, 9 bp, Unknown
  misc_feature (1)..( 9): Result.005 file - promoters50/1711650
gaaagtttt

SEQ ID NO: 177172 - DNA, 13 bp, Unknown
  misc_feature (1)..( 13): Result.005 file - promoters50/1711650
tgtgataaataag

SEQ ID NO: 177173 - DNA, 13 bp, Unknown
  misc_feature (1)..( 13): Result.005 file - promoters50/1711650
tgttataaatttc

SEQ ID NO: 177174 - DNA, 13 bp, Unknown
  misc_feature (1)..( 13): Result.005 file - promoters50/1711650
ccatgtaattttc

SEQ ID NO: 177175 - DNA, 10 bp, Unknown
  misc_feature (1)..( 10): Result.005 file - promoters50/1711650
tttttacttt

SEQ ID NO: 177176 - DNA, 10 bp, Unknown
  misc_feature (1)..( 10): Result.005 file - promoters50/1711650
tgtttatttt

SEQ ID NO: 177177 - DNA, 10 bp, Unknown
  misc_feature (1)..( 10): Result.005 file - promoters50/1711650
tgtttatttg

SEQ ID NO: 177178 - DNA, 7 bp, Unknown
  misc_feature (1)..( 7): Result.005 file - promoters50/1711650
aaatttc

SEQ ID NO: 177179 - DNA, 7 bp, Unknown
  misc_feature (1)..( 7): Result.005 file - promoters50/1711650
caatttc

SEQ ID NO: 177180 - DNA, 7 bp, Unknown
  misc_feature (1)..( 7): Result.005 file - promoters50/1711650
caattta

SEQ ID NO: 177181 - DNA, 16 bp, Unknown
  misc_feature (1)..( 16): Result.005 file - promoters50/1711662
tcggttaatttacata

SEQ ID NO: 177182 - DNA, 16 bp, Unknown
  misc_feature (1)..( 16): Result.005 file - promoters50/1711662
tcggttaatttgcata

SEQ ID NO: 177183 - DNA, 16 bp, Unknown
  misc_feature (1)..( 16): Result.005 file - promoters50/1711662
cagtctaaattgggtt

SEQ ID NO: 177184 - DNA, 7 bp, Unknown
  misc_feature (1)..( 7): Result.005 file - promoters50/1711666
gattaaa

SEQ ID NO: 177185 - DNA, 7 bp, Unknown
  misc_feature (1)..( 7): Result.005 file - promoters50/1711666
aattaaa

SEQ ID NO: 177186 - DNA, 7 bp, Unknown
  misc_feature (1)..( 7): Result.005 file - promoters50/1711666
atttaaa

SEQ ID NO: 177187 - DNA, 7 bp, Unknown
  misc_feature (1)..( 7): Result.005 file - promoters50/1711666
attattt

SEQ ID NO: 177188 - DNA, 7 bp, Unknown
  misc_feature (1)..( 7): Result.005 file - promoters50/1711666
attattt

SEQ ID NO: 177189 - DNA, 7 bp, Unknown
  misc_feature (1)..( 7): Result.005 file - promoters50/1711666
atttttt

SEQ ID NO: 177190 - DNA, 9 bp, Unknown
  misc_feature (1)..( 9): Result.005 file - promoters50/1711666
ttaatcaaa

SEQ ID NO: 177191 - DNA, 9 bp, Unknown
  misc_feature (1)..( 9): Result.005 file - promoters50/1711666
taaataaaa

SEQ ID NO: 177192 - DNA, 9 bp, Unknown
  misc_feature (1)..( 9): Result.005 file - promoters50/1711666
ttaataaaa

SEQ ID NO: 177193 - DNA, 9 bp, Unknown
  misc_feature (1)..( 9): Result.005 file - promoters50/1711666
ttatgtttt

SEQ ID NO: 177194 - DNA, 9 bp, Unknown
  misc_feature (1)..( 9): Result.005 file - promoters50/1711666
ttatttttt

SEQ ID NO: 177195 - DNA, 9 bp, Unknown
  misc_feature (1)..( 9): Result.005 file - promoters50/1711666
atatttttg

SEQ ID NO: 177196 - DNA, 11 bp, Unknown
  misc_feature (1)..( 11): Result.005 file - promoters50/1711691
tattgaacaca

SEQ ID NO: 177197 - DNA, 11 bp, Unknown
  misc_feature (1)..( 11): Result.005 file - promoters50/1711691
aattgaaccaa

SEQ ID NO: 177198 - DNA, 11 bp, Unknown
  misc_feature (1)..( 11): Result.005 file - promoters50/1711691
tatcgaactct

SEQ ID NO: 177199 - DNA, 11 bp, Unknown
  misc_feature (1)..( 11): Result.005 file - promoters50/1711691
gactgaaacaa

SEQ ID NO: 177200 - DNA, 8 bp, Unknown
  misc_feature (1)..( 8): Result.005 file - promoters50/1711691
gtaaattt

SEQ ID NO: 177201 - DNA, 8 bp, Unknown
  misc_feature (1)..( 8): Result.005 file - promoters50/1711691
tcaaattt

SEQ ID NO: 177202 - DNA, 8 bp, Unknown
  misc_feature (1)..( 8): Result.005 file - promoters50/1711691
gtacatta

SEQ ID NO: 177203 - DNA, 10 bp, Unknown
  misc_feature (1)..( 10): Result.005 file - promoters50/1711691
aaaccaaaat

SEQ ID NO: 177204 - DNA, 10 bp, Unknown
  misc_feature (1)..( 10): Result.005 file - promoters50/1711691
aaaccaaaat

SEQ ID NO: 177205 - DNA, 10 bp, Unknown
  misc_feature (1)..( 10): Result.005 file - promoters50/1711691
aaaacaagga

SEQ ID NO: 177206 - DNA, 8 bp, Unknown
  misc_feature (1)..( 8): Result.005 file - promoters50/1711691
ttttctta

SEQ ID NO: 177207 - DNA, 8 bp, Unknown
  misc_feature (1)..( 8): Result.005 file - promoters50/1711691
ttttttta

SEQ ID NO: 177208 - DNA, 8 bp, Unknown
  misc_feature (1)..( 8): Result.005 file - promoters50/1711691
tttttttt

SEQ ID NO: 177209 - DNA, 8 bp, Unknown
  misc_feature (1)..( 8): Result.005 file - promoters50/1711691
tttttttt

SEQ ID NO: 177210 - DNA, 8 bp, Unknown
  misc_feature (1)..( 8): Result.005 file - promoters50/1711691
ttttttct

SEQ ID NO: 177211 - DNA, 8 bp, Unknown
  misc_feature (1)..( 8): Result.005 file - promoters50/1711691
tttttttt

SEQ ID NO: 177212 - DNA, 25 bp, Unknown
  misc_feature (1)..( 25): Result.005 file - promoters50/1711691
ccgtgcacgtagaccacaccactct

SEQ ID NO: 177213 - DNA, 25 bp, Unknown
  misc_feature (1)..( 25): Result.005 file - promoters50/1711691
gcgttcacgtagacttccactagtt

SEQ ID NO: 177214 - DNA, 25 bp, Unknown
  misc_feature (1)..( 25): Result.005 file - promoters50/1711691
ccgtgcacgtacaccacacaactct

SEQ ID NO: 177215 - DNA, 9 bp, Unknown
  misc_feature (1)..( 9): Result.005 file - promoters50/1712122
agtactaat

SEQ ID NO: 177216 - DNA, 9 bp, Unknown
  misc_feature (1)..( 9): Result.005 file - promoters50/1712122
agttctaat

SEQ ID NO: 177217 - DNA, 9 bp, Unknown
  misc_feature (1)..( 9): Result.005 file - promoters50/1712122
agttataac

SEQ ID NO: 177218 - DNA, 9 bp, Unknown
  misc_feature (1)..( 9): Result.005 file - promoters50/1712122
tatattaca

SEQ ID NO: 177219 - DNA, 7 bp, Unknown
  misc_feature (1)..( 7): Result.005 file - promoters50/1712122
atataaa

SEQ ID NO: 177220 - DNA, 7 bp, Unknown
  misc_feature (1)..( 7): Result.005 file - promoters50/1712122
atataac

SEQ ID NO: 177221 - DNA, 8 bp, Unknown
  misc_feature (1)..( 8): Result.005 file - promoters50/1712122
atatgaat

SEQ ID NO: 177222 - DNA, 8 bp, Unknown
  misc_feature (1)..( 8): Result.005 file - promoters50/1712122
ataaaacg

SEQ ID NO: 177223 - DNA, 8 bp, Unknown
  misc_feature (1)..( 8): Result.005 file - promoters50/1712134
ctttttct

SEQ ID NO: 177224 - DNA, 8 bp, Unknown
  misc_feature (1)..( 8): Result.005 file - promoters50/1712134
atttttcc

SEQ ID NO: 177225 - DNA, 8 bp, Unknown
  misc_feature (1)..( 8): Result.005 file - promoters50/1712134
atttttga

SEQ ID NO: 177226 - DNA, 8 bp, Unknown
  misc_feature (1)..( 8): Result.005 file - promoters50/1712134
gtttgtga

SEQ ID NO: 177227 - DNA, 8 bp, Unknown
  misc_feature (1)..( 8): Result.005 file - promoters50/1712134
attttgaa

SEQ ID NO: 177228 - DNA, 8 bp, Unknown
  misc_feature (1)..( 8): Result.005 file - promoters50/1712134
tttttgaa

SEQ ID NO: 177229 - DNA, 8 bp, Unknown
  misc_feature (1)..( 8): Result.005 file - promoters50/1712134
tttttgcc

SEQ ID NO: 177230 - DNA, 9 bp, Unknown
  misc_feature (1)..( 9): Result.005 file - promoters50/1712134
ttttctgcc

SEQ ID NO: 177231 - DNA, 11 bp, Unknown
  misc_feature (1)..( 11): Result.005 file - promoters50/1712134
aagtttttaca

SEQ ID NO: 177232 - DNA, 11 bp, Unknown
  misc_feature (1)..( 11): Result.005 file - promoters50/1712134
aagtttttgaa

SEQ ID NO: 177233 - DNA, 11 bp, Unknown
  misc_feature (1)..( 11): Result.005 file - promoters50/1712134
ttttttttgcc

SEQ ID NO: 177234 - DNA, 12 bp, Unknown
  misc_feature (1)..( 12): Result.005 file - promoters50/1712134
gtcttttctgcc

SEQ ID NO: 177235 - DNA, 10 bp, Unknown
  misc_feature (1)..( 10): Result.005 file - promoters50/1712134
taactttttc

SEQ ID NO: 177236 - DNA, 10 bp, Unknown
  misc_feature (1)..( 10): Result.005 file - promoters50/1712134
taatttttga

SEQ ID NO: 177237 - DNA, 10 bp, Unknown
  misc_feature (1)..( 10): Result.005 file - promoters50/1712134
ttttttttgc

SEQ ID NO: 177238 - DNA, 10 bp, Unknown
  misc_feature (1)..( 10): Result.005 file - promoters50/1712134
cggtttgtga

SEQ ID NO: 177239 - DNA, 11 bp, Unknown
  misc_feature (1)..( 11): Result.005 file - promoters50/1712150
tctatataaat

SEQ ID NO: 177240 - DNA, 11 bp, Unknown
  misc_feature (1)..( 11): Result.005 file - promoters50/1712150
cccatataaaa

SEQ ID NO: 177241 - DNA, 11 bp, Unknown
  misc_feature (1)..( 11): Result.005 file - promoters50/1712150
caaatatatat

SEQ ID NO: 177242 - DNA, 11 bp, Unknown
  misc_feature (1)..( 11): Result.005 file - promoters50/1712150
tttatttattc

SEQ ID NO: 177243 - DNA, 11 bp, Unknown
  misc_feature (1)..( 11): Result.005 file - promoters50/1712150
cccaaataaag

SEQ ID NO: 177244 - DNA, 11 bp, Unknown
  misc_feature (1)..( 11): Result.005 file - promoters50/1712150
tagttataaaa

SEQ ID NO: 177245 - DNA, 12 bp, Unknown
  misc_feature (1)..( 12): Result.005 file - promoters50/1712150
tataaatacaga

SEQ ID NO: 177246 - DNA, 12 bp, Unknown
  misc_feature (1)..( 12): Result.005 file - promoters50/1712150
cccaaataaaga

SEQ ID NO: 177247 - DNA, 12 bp, Unknown
  misc_feature (1)..( 12): Result.005 file - promoters50/1712150
caaatatatata

SEQ ID NO: 177248 - DNA, 12 bp, Unknown
  misc_feature (1)..( 12): Result.005 file - promoters50/1712150
tttatttattcc

SEQ ID NO: 177249 - DNA, 12 bp, Unknown
  misc_feature (1)..( 12): Result.005 file - promoters50/1712150
cccatataaaac

SEQ ID NO: 177250 - DNA, 12 bp, Unknown
  misc_feature (1)..( 12): Result.005 file - promoters50/1712150
tagttataaaaa

SEQ ID NO: 177251 - DNA, 7 bp, Unknown
  misc_feature (1)..( 7): Result.005 file - promoters50/1712174
ttttatc

SEQ ID NO: 177252 - DNA, 7 bp, Unknown
  misc_feature (1)..( 7): Result.005 file - promoters50/1712174
atttatc

SEQ ID NO: 177253 - DNA, 7 bp, Unknown
  misc_feature (1)..( 7): Result.005 file - promoters50/1712174
ttttatc

SEQ ID NO: 177254 - DNA, 7 bp, Unknown
  misc_feature (1)..( 7): Result.005 file - promoters50/1712174
aaatcta

SEQ ID NO: 177255 - DNA, 7 bp, Unknown
  misc_feature (1)..( 7): Result.005 file - promoters50/1712174
gaatcta

SEQ ID NO: 177256 - DNA, 7 bp, Unknown
  misc_feature (1)..( 7): Result.005 file - promoters50/1712174
gaatctc

SEQ ID NO: 177257 - DNA, 8 bp, Unknown
  misc_feature (1)..( 8): Result.005 file - promoters50/1712174
actatttg

SEQ ID NO: 177258 - DNA, 8 bp, Unknown
  misc_feature (1)..( 8): Result.005 file - promoters50/1712174
attatttg

SEQ ID NO: 177259 - DNA, 8 bp, Unknown
  misc_feature (1)..( 8): Result.005 file - promoters50/1712174
attgtttt

SEQ ID NO: 177260 - DNA, 9 bp, Unknown
  misc_feature (1)..( 9): Result.005 file - promoters50/1712174
gtcaaatcc

SEQ ID NO: 177261 - DNA, 9 bp, Unknown
  misc_feature (1)..( 9): Result.005 file - promoters50/1712174
gtcaaaaaa

SEQ ID NO: 177262 - DNA, 9 bp, Unknown
  misc_feature (1)..( 9): Result.005 file - promoters50/1712174
ctcaaaaaa

SEQ ID NO: 177263 - DNA, 10 bp, Unknown
  misc_feature (1)..( 10): Result.005 file - promoters50/1713776
ttttgtcttt

SEQ ID NO: 177264 - DNA, 10 bp, Unknown
  misc_feature (1)..( 10): Result.005 file - promoters50/1713776
ttttatcttt

SEQ ID NO: 177265 - DNA, 10 bp, Unknown
  misc_feature (1)..( 10): Result.005 file - promoters50/1713776
atttatccgg

SEQ ID NO: 177266 - DNA, 14 bp, Unknown
  misc_feature (1)..( 14): Result.005 file - promoters50/1713780
tattcaaaacataa

SEQ ID NO: 177267 - DNA, 14 bp, Unknown
  misc_feature (1)..( 14): Result.005 file - promoters50/1713780
tgcccaaaaaataa

SEQ ID NO: 177268 - DNA, 14 bp, Unknown
  misc_feature (1)..( 14): Result.005 file - promoters50/1713780
tatacaaaatatat

SEQ ID NO: 177269 - DNA, 14 bp, Unknown
  misc_feature (1)..( 14): Result.005 file - promoters50/1713780
tcctttaaacatta

SEQ ID NO: 177270 - DNA, 14 bp, Unknown
  misc_feature (1)..( 14): Result.005 file - promoters50/1713780
catttctaatctat

SEQ ID NO: 177271 - DNA, 11 bp, Unknown
  misc_feature (1)..( 11): Result.005 file - promoters50/1713780
cacaaattatc

SEQ ID NO: 177272 - DNA, 11 bp, Unknown
  misc_feature (1)..( 11): Result.005 file - promoters50/1713780
aataaaatatg

SEQ ID NO: 177273 - DNA, 11 bp, Unknown
  misc_feature (1)..( 11): Result.005 file - promoters50/1713780
taaaaaataga

SEQ ID NO: 177274 - DNA, 11 bp, Unknown
  misc_feature (1)..( 11): Result.005 file - promoters50/1713780
aataaaataac

SEQ ID NO: 177275 - DNA, 11 bp, Unknown
  misc_feature (1)..( 11): Result.005 file - promoters50/1713780
tgtaaaagatg

SEQ ID NO: 177276 - DNA, 12 bp, Unknown
  misc_feature (1)..( 12): Result.005 file - promoters50/1713780
aacttaaaaata

SEQ ID NO: 177277 - DNA, 12 bp, Unknown
  misc_feature (1)..( 12): Result.005 file - promoters50/1713780
agactaaatata

SEQ ID NO: 177278 - DNA, 12 bp, Unknown
  misc_feature (1)..( 12): Result.005 file - promoters50/1713780
ataacaaatatg

SEQ ID NO: 177279 - DNA, 12 bp, Unknown
  misc_feature (1)..( 12): Result.005 file - promoters50/1713780
ttgtaaaaaata

SEQ ID NO: 177280 - DNA, 12 bp, Unknown
  misc_feature (1)..( 12): Result.005 file - promoters50/1713780
ttgtaaaagatg

SEQ ID NO: 177281 - DNA, 10 bp, Unknown
  misc_feature (1)..( 10): Result.005 file - promoters50/1713780
aaaaaaaatt

SEQ ID NO: 177282 - DNA, 10 bp, Unknown
  misc_feature (1)..( 10): Result.005 file - promoters50/1713780
taaaacaata

SEQ ID NO: 177283 - DNA, 10 bp, Unknown
  misc_feature (1)..( 10): Result.005 file - promoters50/1713780
accaactata

SEQ ID NO: 177284 - DNA, 10 bp, Unknown
  misc_feature (1)..( 10): Result.005 file - promoters50/1713780
taacacattt

SEQ ID NO: 177285 - DNA, 10 bp, Unknown
  misc_feature (1)..( 10): Result.005 file - promoters50/1713780
caaaacacgg

SEQ ID NO: 177286 - DNA, 10 bp, Unknown
  misc_feature (1)..( 10): Result.005 file - promoters50/1713804
cataagtttc

SEQ ID NO: 177287 - DNA, 10 bp, Unknown
  misc_feature (1)..( 10): Result.005 file - promoters50/1713804
tatatgtttc

SEQ ID NO: 177288 - DNA, 10 bp, Unknown
  misc_feature (1)..( 10): Result.005 file - promoters50/1713804
aatatttgta

SEQ ID NO: 177289 - DNA, 10 bp, Unknown
  misc_feature (1)..( 10): Result.005 file - promoters50/1713804
caaaattata

SEQ ID NO: 177290 - DNA, 11 bp, Unknown
  misc_feature (1)..( 11): Result.005 file - promoters50/1713804
ccatagattca

SEQ ID NO: 177291 - DNA, 11 bp, Unknown
  misc_feature (1)..( 11): Result.005 file - promoters50/1713804
taaaagaatca

SEQ ID NO: 177292 - DNA, 11 bp, Unknown
  misc_feature (1)..( 11): Result.005 file - promoters50/1713804
taaaaaaatta

SEQ ID NO: 177293 - DNA, 11 bp, Unknown
  misc_feature (1)..( 11): Result.005 file - promoters50/1713804
tattagaaata

SEQ ID NO: 177294 - DNA, 10 bp, Unknown
  misc_feature (1)..( 10): Result.005 file - promoters50/1713804
tgatatttat

SEQ ID NO: 177295 - DNA, 10 bp, Unknown
  misc_feature (1)..( 10): Result.005 file - promoters50/1713804
caatatttgt

SEQ ID NO: 177296 - DNA, 10 bp, Unknown
  misc_feature (1)..( 10): Result.005 file - promoters50/1713804
ttatatatgt

SEQ ID NO: 177297 - DNA, 10 bp, Unknown
  misc_feature (1)..( 10): Result.005 file - promoters50/1713804
caaaattata

SEQ ID NO: 177298 - DNA, 9 bp, Unknown
  misc_feature (1)..( 9): Result.005 file - promoters50/1713804
tatgattaa

SEQ ID NO: 177299 - DNA, 9 bp, Unknown
  misc_feature (1)..( 9): Result.005 file - promoters50/1713804
tatcatttt

SEQ ID NO: 177300 - DNA, 10 bp, Unknown
  misc_feature (1)..( 10): Result.005 file - promoters50/1713804
catcaatttt

SEQ ID NO: 177301 - DNA, 10 bp, Unknown
  misc_feature (1)..( 10): Result.005 file - promoters50/1713804
tactaatttt

SEQ ID NO: 177302 - DNA, 7 bp, Unknown
  misc_feature (1)..( 7): Result.005 file - promoters50/1713804
ttatatc

SEQ ID NO: 177303 - DNA, 7 bp, Unknown
  misc_feature (1)..( 7): Result.005 file - promoters50/1713804
ttagatc

SEQ ID NO: 177304 - DNA, 7 bp, Unknown
  misc_feature (1)..( 7): Result.005 file - promoters50/1713804
ttatatc

SEQ ID NO: 177305 - DNA, 7 bp, Unknown
  misc_feature (1)..( 7): Result.005 file - promoters50/1713804
ttatatt

SEQ ID NO: 177306 - DNA, 13 bp, Unknown
  misc_feature (1)..( 13): Result.005 file - promoters50/1713839
tatacaaaatata

SEQ ID NO: 177307 - DNA, 13 bp, Unknown
  misc_feature (1)..( 13): Result.005 file - promoters50/1713839
tattcaaaacata

SEQ ID NO: 177308 - DNA, 13 bp, Unknown
  misc_feature (1)..( 13): Result.005 file - promoters50/1713839
cattggatagata

SEQ ID NO: 177309 - DNA, 7 bp, Unknown
  misc_feature (1)..( 7): Result.005 file - promoters50/1713839
aaaatat

SEQ ID NO: 177310 - DNA, 7 bp, Unknown
  misc_feature (1)..( 7): Result.005 file - promoters50/1713839
aaattat

SEQ ID NO: 177311 - DNA, 7 bp, Unknown
  misc_feature (1)..( 7): Result.005 file - promoters50/1713839
aaaataa

SEQ ID NO: 177312 - DNA, 7 bp, Unknown
  misc_feature (1)..( 7): Result.005 file - promoters50/1713839
aaactaa

SEQ ID NO: 177313 - DNA, 10 bp, Unknown
  misc_feature (1)..( 10): Result.005 file - promoters50/1713839
actaaataaa

SEQ ID NO: 177314 - DNA, 10 bp, Unknown
  misc_feature (1)..( 10): Result.005 file - promoters50/1713839
ccaaaataac

SEQ ID NO: 177315 - DNA, 10 bp, Unknown
  misc_feature (1)..( 10): Result.005 file - promoters50/1713839
actaaagaaa

SEQ ID NO: 177316 - DNA, 10 bp, Unknown
  misc_feature (1)..( 10): Result.005 file - promoters50/1713839
tagaaaaaaa

SEQ ID NO: 177317 - DNA, 11 bp, Unknown
  misc_feature (1)..( 11): Result.005 file - promoters50/1713839
aaccaaagata

SEQ ID NO: 177318 - DNA, 11 bp, Unknown
  misc_feature (1)..( 11): Result.005 file - promoters50/1713839
aacgaaagatc

SEQ ID NO: 177319 - DNA, 11 bp, Unknown
  misc_feature (1)..( 11): Result.005 file - promoters50/1713839
aaagaaaaatc

SEQ ID NO: 177320 - DNA, 9 bp, Unknown
  misc_feature (1)..( 9): Result.005 file - promoters50/1713839
agaaaagaa

SEQ ID NO: 177321 - DNA, 9 bp, Unknown
  misc_feature (1)..( 9): Result.005 file - promoters50/1713839
ggaaaagag

SEQ ID NO: 177322 - DNA, 9 bp, Unknown
  misc_feature (1)..( 9): Result.005 file - promoters50/1713839
agagaagaa

SEQ ID NO: 177323 - DNA, 9 bp, Unknown
  misc_feature (1)..( 9): Result.005 file - promoters50/1713842
agatacagt

SEQ ID NO: 177324 - DNA, 9 bp, Unknown
  misc_feature (1)..( 9): Result.005 file - promoters50/1713842
agagacatc

SEQ ID NO: 177325 - DNA, 9 bp, Unknown
  misc_feature (1)..( 9): Result.005 file - promoters50/1713842
cgatccaga

SEQ ID NO: 177326 - DNA, 9 bp, Unknown
  misc_feature (1)..( 9): Result.005 file - promoters50/1713842
ttataaagt

SEQ ID NO: 177327 - DNA, 11 bp, Unknown
  misc_feature (1)..( 11): Result.005 file - promoters50/1713895
attttctttat

SEQ ID NO: 177328 - DNA, 11 bp, Unknown
  misc_feature (1)..( 11): Result.005 file - promoters50/1713895
aatttatttgt

SEQ ID NO: 177329 - DNA, 11 bp, Unknown
  misc_feature (1)..( 11): Result.005 file - promoters50/1713895
cttttctgcct

SEQ ID NO: 177330 - DNA, 11 bp, Unknown
  misc_feature (1)..( 11): Result.005 file - promoters50/1713895
aatatatgctt

SEQ ID NO: 177331 - DNA, 11 bp, Unknown
  misc_feature (1)..( 11): Result.005 file - promoters50/1713895
tgtttatgcct

SEQ ID NO: 177332 - DNA, 11 bp, Unknown
  misc_feature (1)..( 11): Result.005 file - promoters50/1713895
tttttctcatt

SEQ ID NO: 177333 - DNA, 13 bp, Unknown
  misc_feature (1)..( 13): Result.005 file - promoters50/1713895
taatttatttgtg

SEQ ID NO: 177334 - DNA, 13 bp, Unknown
  misc_feature (1)..( 13): Result.005 file - promoters50/1713895
tcgtttacttgct

SEQ ID NO: 177335 - DNA, 13 bp, Unknown
  misc_feature (1)..( 13): Result.005 file - promoters50/1713895
acatttattagtg

SEQ ID NO: 177336 - DNA, 13 bp, Unknown
  misc_feature (1)..( 13): Result.005 file - promoters50/1713895
acatttttttctg

SEQ ID NO: 177337 - DNA, 13 bp, Unknown
  misc_feature (1)..( 13): Result.005 file - promoters50/1713895
tactttattctta

SEQ ID NO: 177338 - DNA, 13 bp, Unknown
  misc_feature (1)..( 13): Result.005 file - promoters50/1713895
taaattattctca

SEQ ID NO: 177339 - DNA, 13 bp, Unknown
  misc_feature (1)..( 13): Result.005 file - promoters50/1713895
cgatttttcattt

SEQ ID NO: 177340 - DNA, 12 bp, Unknown
  misc_feature (1)..( 12): Result.005 file - promoters50/1713895
ttaatatcttct

SEQ ID NO: 177341 - DNA, 12 bp, Unknown
  misc_feature (1)..( 12): Result.005 file - promoters50/1713895
attatattttca

SEQ ID NO: 177342 - DNA, 12 bp, Unknown
  misc_feature (1)..( 12): Result.005 file - promoters50/1713895
tatttattttct

SEQ ID NO: 177343 - DNA, 12 bp, Unknown
  misc_feature (1)..( 12): Result.005 file - promoters50/1713895
gttagatttttg

SEQ ID NO: 177344 - DNA, 12 bp, Unknown
  misc_feature (1)..( 12): Result.005 file - promoters50/1713895
ccaatatttcat

SEQ ID NO: 177345 - DNA, 12 bp, Unknown
  misc_feature (1)..( 12): Result.005 file - promoters50/1713895
tttttatttctt

SEQ ID NO: 177346 - DNA, 12 bp, Unknown
  misc_feature (1)..( 12): Result.005 file - promoters50/1713895
gtttgatctttt

SEQ ID NO: 177347 - DNA, 13 bp, Unknown
  misc_feature (1)..( 13): Result.005 file - promoters50/1713895
ataagaaaacatt

SEQ ID NO: 177348 - DNA, 13 bp, Unknown
  misc_feature (1)..( 13): Result.005 file - promoters50/1713895
acaagaaataaat

SEQ ID NO: 177349 - DNA, 13 bp, Unknown
  misc_feature (1)..( 13): Result.005 file - promoters50/1713895
atatgaaattatc

SEQ ID NO: 177350 - DNA, 13 bp, Unknown
  misc_feature (1)..( 13): Result.005 file - promoters50/1713895
ataataaatatga

SEQ ID NO: 177351 - DNA, 14 bp, Unknown
  misc_feature (1)..( 14): Result.005 file - promoters50/1713895
gtaatgtaattata

SEQ ID NO: 177352 - DNA, 14 bp, Unknown
  misc_feature (1)..( 14): Result.005 file - promoters50/1713895
ataataggttttta

SEQ ID NO: 177353 - DNA, 16 bp, Unknown
  misc_feature (1)..( 16): Result.005 file - promoters50/1713895
atgaaaaagtcaaaaa

SEQ ID NO: 177354 - DNA, 16 bp, Unknown
  misc_feature (1)..( 16): Result.005 file - promoters50/1713895
aaaaaaaagttcgtaa

SEQ ID NO: 177355 - DNA, 16 bp, Unknown
  misc_feature (1)..( 16): Result.005 file - promoters50/1713895
atgagaaagagaaaga

SEQ ID NO: 177356 - DNA, 16 bp, Unknown
  misc_feature (1)..( 16): Result.005 file - promoters50/1713895
ttaaaagagtttttag

SEQ ID NO: 177357 - DNA, 16 bp, Unknown
  misc_feature (1)..( 16): Result.005 file - promoters50/1713895
aacaaaaactcataaa

SEQ ID NO: 177358 - DNA, 16 bp, Unknown
  misc_feature (1)..( 16): Result.005 file - promoters50/1713895
caataaaactgtgagt

SEQ ID NO: 177359 - DNA, 8 bp, Unknown
  misc_feature (1)..( 8): Result.005 file - promoters50/1714500
tattttta

SEQ ID NO: 177360 - DNA, 8 bp, Unknown
  misc_feature (1)..( 8): Result.005 file - promoters50/1714500
tatttttt

SEQ ID NO: 177361 - DNA, 8 bp, Unknown
  misc_feature (1)..( 8): Result.005 file - promoters50/1714500
cattgtta

SEQ ID NO: 177362 - DNA, 8 bp, Unknown
  misc_feature (1)..( 8): Result.005 file - promoters50/1714500
tattttcg

SEQ ID NO: 177363 - DNA, 9 bp, Unknown
  misc_feature (1)..( 9): Result.005 file - promoters50/1714500
tatgttttc

SEQ ID NO: 177364 - DNA, 12 bp, Unknown
  misc_feature (1)..( 12): Result.005 file - promoters50/1714500
tttaagaaaata

SEQ ID NO: 177365 - DNA, 12 bp, Unknown
  misc_feature (1)..( 12): Result.005 file - promoters50/1714500
ggaatgaacata

SEQ ID NO: 177366 - DNA, 12 bp, Unknown
  misc_feature (1)..( 12): Result.005 file - promoters50/1714500
ttcgaaaaaatc

SEQ ID NO: 177367 - DNA, 12 bp, Unknown
  misc_feature (1)..( 12): Result.005 file - promoters50/1714500
ttttcgaaaaat

SEQ ID NO: 177368 - DNA, 10 bp, Unknown
  misc_feature (1)..( 10): Result.005 file - promoters50/1714541
tctcattcat

SEQ ID NO: 177369 - DNA, 10 bp, Unknown
  misc_feature (1)..( 10): Result.005 file - promoters50/1714541
cgtcatccat

SEQ ID NO: 177370 - DNA, 10 bp, Unknown
  misc_feature (1)..( 10): Result.005 file - promoters50/1714541
tctaattatt

SEQ ID NO: 177371 - DNA, 9 bp, Unknown
  misc_feature (1)..( 9): Result.005 file - promoters50/1714541
aatgttaca

SEQ ID NO: 177372 - DNA, 9 bp, Unknown
  misc_feature (1)..( 9): Result.005 file - promoters50/1714541
gatgttaac

SEQ ID NO: 177373 - DNA, 9 bp, Unknown
  misc_feature (1)..( 9): Result.005 file - promoters50/1714541
aatggtgtt

SEQ ID NO: 177374 - DNA, 8 bp, Unknown
  misc_feature (1)..( 8): Result.005 file - promoters50/1714639
ttaaaaca

SEQ ID NO: 177375 - DNA, 8 bp, Unknown
  misc_feature (1)..( 8): Result.005 file - promoters50/1714639
ataaaacc

SEQ ID NO: 177376 - DNA, 8 bp, Unknown
  misc_feature (1)..( 8): Result.005 file - promoters50/1714639
atacaacc

SEQ ID NO: 177377 - DNA, 8 bp, Unknown
  misc_feature (1)..( 8): Result.005 file - promoters50/1714682
atcagatt

SEQ ID NO: 177378 - DNA, 8 bp, Unknown
  misc_feature (1)..( 8): Result.005 file - promoters50/1714682
ctcaaatt

SEQ ID NO: 177379 - DNA, 8 bp, Unknown
  misc_feature (1)..( 8): Result.005 file - promoters50/1714682
atcagaaa

SEQ ID NO: 177380 - DNA, 10 bp, Unknown
  misc_feature (1)..( 10): Result.005 file - promoters50/1714682
ccttataacc

SEQ ID NO: 177381 - DNA, 10 bp, Unknown
  misc_feature (1)..( 10): Result.005 file - promoters50/1714682
aattaaaacc

SEQ ID NO: 177382 - DNA, 10 bp, Unknown
  misc_feature (1)..( 10): Result.005 file - promoters50/1714682
ccttttaaat

SEQ ID NO: 177383 - DNA, 8 bp, Unknown
  misc_feature (1)..( 8): Result.005 file - promoters50/1714682
attatctg

SEQ ID NO: 177384 - DNA, 8 bp, Unknown
  misc_feature (1)..( 8): Result.005 file - promoters50/1714682
attttctt

SEQ ID NO: 177385 - DNA, 8 bp, Unknown
  misc_feature (1)..( 8): Result.005 file - promoters50/1714682
tttttctt

SEQ ID NO: 177386 - DNA, 8 bp, Unknown
  misc_feature (1)..( 8): Result.005 file - promoters50/1714682
gaaccaac

SEQ ID NO: 177387 - DNA, 8 bp, Unknown
  misc_feature (1)..( 8): Result.005 file - promoters50/1714682
gaaacaat

SEQ ID NO: 177388 - DNA, 8 bp, Unknown
  misc_feature (1)..( 8): Result.005 file - promoters50/1714682
aaaacaat

SEQ ID NO: 177389 - DNA, 8 bp, Unknown
  misc_feature (1)..( 8): Result.005 file - promoters50/1714682
gaaacata

SEQ ID NO: 177390 - DNA, 10 bp, Unknown
  misc_feature (1)..( 10): Result.005 file - promoters50/1714682
tctatttata

SEQ ID NO: 177391 - DNA, 10 bp, Unknown
  misc_feature (1)..( 10): Result.005 file - promoters50/1714682
tctatatata

SEQ ID NO: 177392 - DNA, 10 bp, Unknown
  misc_feature (1)..( 10): Result.005 file - promoters50/1714682
tgtatataaa

SEQ ID NO: 177393 - DNA, 7 bp, Unknown
  misc_feature (1)..( 7): Result.005 file - promoters50/1714682
atcaaaa

SEQ ID NO: 177394 - DNA, 7 bp, Unknown
  misc_feature (1)..( 7): Result.005 file - promoters50/1714682
gtcaaaa

SEQ ID NO: 177395 - DNA, 7 bp, Unknown
  misc_feature (1)..( 7): Result.005 file - promoters50/1714682
atcgaaa

SEQ ID NO: 177396 - DNA, 8 bp, Unknown
  misc_feature (1)..( 8): Result.005 file - promoters50/1714682
aaaacaat

SEQ ID NO: 177397 - DNA, 8 bp, Unknown
  misc_feature (1)..( 8): Result.005 file - promoters50/1714682
aaaagaat

SEQ ID NO: 177398 - DNA, 8 bp, Unknown
  misc_feature (1)..( 8): Result.005 file - promoters50/1714682
gaaacaat

SEQ ID NO: 177399 - DNA, 8 bp, Unknown
  misc_feature (1)..( 8): Result.005 file - promoters50/1714682
catataaa

SEQ ID NO: 177400 - DNA, 8 bp, Unknown
  misc_feature (1)..( 8): Result.005 file - promoters50/1714682
tatataaa

SEQ ID NO: 177401 - DNA, 8 bp, Unknown
  misc_feature (1)..( 8): Result.005 file - promoters50/1714682
tatatata

SEQ ID NO: 177402 - DNA, 9 bp, Unknown
  misc_feature (1)..( 9): Result.005 file - promoters50/1714682
tcttaaaga

SEQ ID NO: 177403 - DNA, 9 bp, Unknown
  misc_feature (1)..( 9): Result.005 file - promoters50/1714682
tctttaagt

SEQ ID NO: 177404 - DNA, 9 bp, Unknown
  misc_feature (1)..( 9): Result.005 file - promoters50/1714682
aatttaagt

SEQ ID NO: 177405 - DNA, 7 bp, Unknown
  misc_feature (1)..( 7): Result.005 file - promoters50/1714682
ctataaa

SEQ ID NO: 177406 - DNA, 7 bp, Unknown
  misc_feature (1)..( 7): Result.005 file - promoters50/1714682
atataaa

SEQ ID NO: 177407 - DNA, 7 bp, Unknown
  misc_feature (1)..( 7): Result.005 file - promoters50/1714682
atatagc

SEQ ID NO: 177408 - DNA, 7 bp, Unknown
  misc_feature (1)..( 7): Result.005 file - promoters50/1714694
attgctt

SEQ ID NO: 177409 - DNA, 7 bp, Unknown
  misc_feature (1)..( 7): Result.005 file - promoters50/1714694
tttgctt

SEQ ID NO: 177410 - DNA, 7 bp, Unknown
  misc_feature (1)..( 7): Result.005 file - promoters50/1714694
tttactt

SEQ ID NO: 177411 - DNA, 8 bp, Unknown
  misc_feature (1)..( 8): Result.005 file - promoters50/1714694
ttgtattt

SEQ ID NO: 177412 - DNA, 8 bp, Unknown
  misc_feature (1)..( 8): Result.005 file - promoters50/1714694
ttgtatat

SEQ ID NO: 177413 - DNA, 8 bp, Unknown
  misc_feature (1)..( 8): Result.005 file - promoters50/1714694
atgtctat

SEQ ID NO: 177414 - DNA, 11 bp, Unknown
  misc_feature (1)..( 11): Result.005 file - promoters50/1714694
gttcaattttt

SEQ ID NO: 177415 - DNA, 11 bp, Unknown
  misc_feature (1)..( 11): Result.005 file - promoters50/1714694
tatcatttttt

SEQ ID NO: 177416 - DNA, 11 bp, Unknown
  misc_feature (1)..( 11): Result.005 file - promoters50/1714694
tatgattaagc

SEQ ID NO: 177417 - DNA, 7 bp, Unknown
  misc_feature (1)..( 7): Result.005 file - promoters50/1714772
aaacaaa

SEQ ID NO: 177418 - DNA, 7 bp, Unknown
  misc_feature (1)..( 7): Result.005 file - promoters50/1714772
aaacaaa

SEQ ID NO: 177419 - DNA, 7 bp, Unknown
  misc_feature (1)..( 7): Result.005 file - promoters50/1714772
aaagaaa

SEQ ID NO: 177420 - DNA, 9 bp, Unknown
  misc_feature (1)..( 9): Result.005 file - promoters50/1714772
aaattaagt

SEQ ID NO: 177421 - DNA, 9 bp, Unknown
  misc_feature (1)..( 9): Result.005 file - promoters50/1714772
aaagtaaag

SEQ ID NO: 177422 - DNA, 9 bp, Unknown
  misc_feature (1)..( 9): Result.005 file - promoters50/1714772
aaagaaaag

SEQ ID NO: 177423 - DNA, 9 bp, Unknown
  misc_feature (1)..( 9): Result.005 file - promoters50/1714772
gtttgtaaa

SEQ ID NO: 177424 - DNA, 9 bp, Unknown
  misc_feature (1)..( 9): Result.005 file - promoters50/1714772
ttttttaaa

SEQ ID NO: 177425 - DNA, 9 bp, Unknown
  misc_feature (1)..( 9): Result.005 file - promoters50/1714772
atttgttat

SEQ ID NO: 177426 - DNA, 8 bp, Unknown
  misc_feature (1)..( 8): Result.005 file - promoters50/1714772
aaaaagaa

SEQ ID NO: 177427 - DNA, 8 bp, Unknown
  misc_feature (1)..( 8): Result.005 file - promoters50/1714772
aaaaagtt

SEQ ID NO: 177428 - DNA, 8 bp, Unknown
  misc_feature (1)..( 8): Result.005 file - promoters50/1714772
aaaataaa

SEQ ID NO: 177429 - DNA, 9 bp, Unknown
  misc_feature (1)..( 9): Result.005 file - promoters50/1714772
aaaagaaaa

SEQ ID NO: 177430 - DNA, 9 bp, Unknown
  misc_feature (1)..( 9): Result.005 file - promoters50/1714772
taaataaaa

SEQ ID NO: 177431 - DNA, 9 bp, Unknown
  misc_feature (1)..( 9): Result.005 file - promoters50/1714772
aaaataaat

SEQ ID NO: 177432 - DNA, 6 bp, Unknown
  misc_feature (1)..( 6): Result.005 file - promoters50/1714806
atggga

SEQ ID NO: 177433 - DNA, 6 bp, Unknown
  misc_feature (1)..( 6): Result.005 file - promoters50/1714806
atggga

SEQ ID NO: 177434 - DNA, 6 bp, Unknown
  misc_feature (1)..( 6): Result.005 file - promoters50/1714806
atggga

SEQ ID NO: 177435 - DNA, 12 bp, Unknown
  misc_feature (1)..( 12): Result.005 file - promoters50/1714806
aaagatgggaaa

SEQ ID NO: 177436 - DNA, 12 bp, Unknown
  misc_feature (1)..( 12): Result.005 file - promoters50/1714806
aaaaatgaaaca

SEQ ID NO: 177437 - DNA, 12 bp, Unknown
  misc_feature (1)..( 12): Result.005 file - promoters50/1714806
aaagaaataaaa

SEQ ID NO: 177438 - DNA, 10 bp, Unknown
  misc_feature (1)..( 10): Result.005 file - promoters50/1714831
aaataatagt

SEQ ID NO: 177439 - DNA, 10 bp, Unknown
  misc_feature (1)..( 10): Result.005 file - promoters50/1714831
aaaaaattcc

SEQ ID NO: 177440 - DNA, 11 bp, Unknown
  misc_feature (1)..( 11): Result.005 file - promoters50/1714831
cacataatatt

SEQ ID NO: 177441 - DNA, 11 bp, Unknown
  misc_feature (1)..( 11): Result.005 file - promoters50/1714831
aaacaaataga

SEQ ID NO: 177442 - DNA, 11 bp, Unknown
  misc_feature (1)..( 11): Result.005 file - promoters50/1714831
ccaaaaatggc

SEQ ID NO: 177443 - DNA, 11 bp, Unknown
  misc_feature (1)..( 11): Result.005 file - promoters50/1714831
ataaaaacagt

SEQ ID NO: 177444 - DNA, 11 bp, Unknown
  misc_feature (1)..( 11): Result.005 file - promoters50/1714831
ctataaatatg

SEQ ID NO: 177445 - DNA, 9 bp, Unknown
  misc_feature (1)..( 9): Result.005 file - promoters50/1714837
aaaacaaaa

SEQ ID NO: 177446 - DNA, 9 bp, Unknown
  misc_feature (1)..( 9): Result.005 file - promoters50/1714837
ataacaaag

SEQ ID NO: 177447 - DNA, 10 bp, Unknown
  misc_feature (1)..( 10): Result.005 file - promoters50/1714837
taaacacaaa

SEQ ID NO: 177448 - DNA, 8 bp, Unknown
  misc_feature (1)..( 8): Result.005 file - promoters50/1714837
aatttaaa

SEQ ID NO: 177449 - DNA, 8 bp, Unknown
  misc_feature (1)..( 8): Result.005 file - promoters50/1714837
aatataac

SEQ ID NO: 177450 - DNA, 8 bp, Unknown
  misc_feature (1)..( 8): Result.005 file - promoters50/1714837
gattcaaa

SEQ ID NO: 177451 - DNA, 9 bp, Unknown
  misc_feature (1)..( 9): Result.005 file - promoters50/1714837
taaattagt

SEQ ID NO: 177452 - DNA, 9 bp, Unknown
  misc_feature (1)..( 9): Result.005 file - promoters50/1714837
caaattagt

SEQ ID NO: 177453 - DNA, 9 bp, Unknown
  misc_feature (1)..( 9): Result.005 file - promoters50/1714837
caaattgtt

SEQ ID NO: 177454 - DNA, 8 bp, Unknown
  misc_feature (1)..( 8): Result.005 file - promoters50/1714837
tataatta

SEQ ID NO: 177455 - DNA, 8 bp, Unknown
  misc_feature (1)..( 8): Result.005 file - promoters50/1714837
tataatta

SEQ ID NO: 177456 - DNA, 8 bp, Unknown
  misc_feature (1)..( 8): Result.005 file - promoters50/1714837
gctaatta

SEQ ID NO: 177457 - DNA, 11 bp, Unknown
  misc_feature (1)..( 11): Result.005 file - promoters50/1714857
tcatgaatacg

SEQ ID NO: 177458 - DNA, 11 bp, Unknown
  misc_feature (1)..( 11): Result.005 file - promoters50/1714857
agatgaattta

SEQ ID NO: 177459 - DNA, 11 bp, Unknown
  misc_feature (1)..( 11): Result.005 file - promoters50/1714857
tcaagaagaaa

SEQ ID NO: 177460 - DNA, 11 bp, Unknown
  misc_feature (1)..( 11): Result.005 file - promoters50/1714857
gtttgaactta

SEQ ID NO: 177461 - DNA, 11 bp, Unknown
  misc_feature (1)..( 11): Result.005 file - promoters50/1714857
tggagaggaag

SEQ ID NO: 177462 - DNA, 11 bp, Unknown
  misc_feature (1)..( 11): Result.005 file - promoters50/1714857
acatgtagagg

SEQ ID NO: 177463 - DNA, 15 bp, Unknown
  misc_feature (1)..( 15): Result.005 file - promoters50/1714857
attaatattatttta

SEQ ID NO: 177464 - DNA, 15 bp, Unknown
  misc_feature (1)..( 15): Result.005 file - promoters50/1714857
tttagacttaatttg

SEQ ID NO: 177465 - DNA, 15 bp, Unknown
  misc_feature (1)..( 15): Result.005 file - promoters50/1714857
atatgatttaatgat

SEQ ID NO: 177466 - DNA, 15 bp, Unknown
  misc_feature (1)..( 15): Result.005 file - promoters50/1714857
acatcttttaattaa

SEQ ID NO: 177467 - DNA, 15 bp, Unknown
  misc_feature (1)..( 15): Result.005 file - promoters50/1714857
cttataaaaaatttg

SEQ ID NO: 177468 - DNA, 15 bp, Unknown
  misc_feature (1)..( 15): Result.005 file - promoters50/1714857
gccacagctgatttc

SEQ ID NO: 177469 - DNA, 13 bp, Unknown
  misc_feature (1)..( 13): Result.005 file - promoters50/1714865
caaaacaaaacag

SEQ ID NO: 177470 - DNA, 13 bp, Unknown
  misc_feature (1)..( 13): Result.005 file - promoters50/1714865
caaaaaaaaaaaa

SEQ ID NO: 177471 - DNA, 14 bp, Unknown
  misc_feature (1)..( 14): Result.005 file - promoters50/1714865
aaaaatcaaaacga

SEQ ID NO: 177472 - DNA, 14 bp, Unknown
  misc_feature (1)..( 14): Result.005 file - promoters50/1714865
aaaaaacaaatcag

SEQ ID NO: 177473 - DNA, 14 bp, Unknown
  misc_feature (1)..( 14): Result.005 file - promoters50/1714865
gtaaataaagtaca

SEQ ID NO: 177474 - DNA, 12 bp, Unknown
  misc_feature (1)..( 12): Result.005 file - promoters50/1714865
ctttctaataaa

SEQ ID NO: 177475 - DNA, 12 bp, Unknown
  misc_feature (1)..( 12): Result.005 file - promoters50/1714865
ctttcaaataaa

SEQ ID NO: 177476 - DNA, 12 bp, Unknown
  misc_feature (1)..( 12): Result.005 file - promoters50/1714865
tcataaaataag

SEQ ID NO: 177477 - DNA, 12 bp, Unknown
  misc_feature (1)..( 12): Result.005 file - promoters50/1714865
cataaaaataaa

SEQ ID NO: 177478 - DNA, 12 bp, Unknown
  misc_feature (1)..( 12): Result.005 file - promoters50/1714865
tggtgaaaaaaa

SEQ ID NO: 177479 - DNA, 11 bp, Unknown
  misc_feature (1)..( 11): Result.005 file - promoters50/1714865
ataaaattcaa

SEQ ID NO: 177480 - DNA, 11 bp, Unknown
  misc_feature (1)..( 11): Result.005 file - promoters50/1714865
tggaaatacaa

SEQ ID NO: 177481 - DNA, 11 bp, Unknown
  misc_feature (1)..( 11): Result.005 file - promoters50/1714865
ataaaattggt

SEQ ID NO: 177482 - DNA, 11 bp, Unknown
  misc_feature (1)..( 11): Result.005 file - promoters50/1714865
aagaaataccc

SEQ ID NO: 177483 - DNA, 11 bp, Unknown
  misc_feature (1)..( 11): Result.005 file - promoters50/1714865
ataaaataagt

SEQ ID NO: 177484 - DNA, 12 bp, Unknown
  misc_feature (1)..( 12): Result.005 file - promoters50/1714865
atttataaataa

SEQ ID NO: 177485 - DNA, 12 bp, Unknown
  misc_feature (1)..( 12): Result.005 file - promoters50/1714865
ttttataaaaaa

SEQ ID NO: 177486 - DNA, 12 bp, Unknown
  misc_feature (1)..( 12): Result.005 file - promoters50/1714865
ctatataaatgc

SEQ ID NO: 177487 - DNA, 12 bp, Unknown
  misc_feature (1)..( 12): Result.005 file - promoters50/1714865
tctaataaataa

SEQ ID NO: 177488 - DNA, 12 bp, Unknown
  misc_feature (1)..( 12): Result.005 file - promoters50/1714865
ctatttaaaccg

SEQ ID NO: 177489 - DNA, 11 bp, Unknown
  misc_feature (1)..( 11): Result.005 file - promoters50/1714865
aaaaatatcaa

SEQ ID NO: 177490 - DNA, 11 bp, Unknown
  misc_feature (1)..( 11): Result.005 file - promoters50/1714865
aaaaatcaaaa

SEQ ID NO: 177491 - DNA, 11 bp, Unknown
  misc_feature (1)..( 11): Result.005 file - promoters50/1714865
aaaaaaaaaaa

SEQ ID NO: 177492 - DNA, 11 bp, Unknown
  misc_feature (1)..( 11): Result.005 file - promoters50/1714865
gtaaataaagt

SEQ ID NO: 177493 - DNA, 11 bp, Unknown
  misc_feature (1)..( 11): Result.005 file - promoters50/1714865
ggaaatacaaa

SEQ ID NO: 177494 - DNA, 9 bp, Unknown
  misc_feature (1)..( 9): Result.005 file - promoters50/1714865
aaaaatgca

SEQ ID NO: 177495 - DNA, 9 bp, Unknown
  misc_feature (1)..( 9): Result.005 file - promoters50/1714865
aaaaatttg

SEQ ID NO: 177496 - DNA, 9 bp, Unknown
  misc_feature (1)..( 9): Result.005 file - promoters50/1714865
aaaaatcaa

SEQ ID NO: 177497 - DNA, 9 bp, Unknown
  misc_feature (1)..( 9): Result.005 file - promoters50/1714865
ataaatttt

SEQ ID NO: 177498 - DNA, 12 bp, Unknown
  misc_feature (1)..( 12): Result.005 file - promoters50/1714865
gaaaaaaaaaaa

SEQ ID NO: 177499 - DNA, 12 bp, Unknown
  misc_feature (1)..( 12): Result.005 file - promoters50/1714865
gaaaaaaaaaaa

SEQ ID NO: 177500 - DNA, 12 bp, Unknown
  misc_feature (1)..( 12): Result.005 file - promoters50/1714865
gaagaaactacg

SEQ ID NO: 177501 - DNA, 12 bp, Unknown
  misc_feature (1)..( 12): Result.005 file - promoters50/1714865
gaaatacaaaaa

SEQ ID NO: 177502 - DNA, 10 bp, Unknown
  misc_feature (1)..( 10): Result.005 file - promoters50/1714865
aaaataaaat

SEQ ID NO: 177503 - DNA, 10 bp, Unknown
  misc_feature (1)..( 10): Result.005 file - promoters50/1714865
aaaaaaaaac

SEQ ID NO: 177504 - DNA, 10 bp, Unknown
  misc_feature (1)..( 10): Result.005 file - promoters50/1714865
aatataaaat

SEQ ID NO: 177505 - DNA, 10 bp, Unknown
  misc_feature (1)..( 10): Result.005 file - promoters50/1714865
caaataaatg

SEQ ID NO: 177506 - DNA, 10 bp, Unknown
  misc_feature (1)..( 10): Result.005 file - promoters50/1714865
ctcataaaat

SEQ ID NO: 177507 - DNA, 11 bp, Unknown
  misc_feature (1)..( 11): Result.005 file - promoters50/1714865
aaataatatta

SEQ ID NO: 177508 - DNA, 11 bp, Unknown
  misc_feature (1)..( 11): Result.005 file - promoters50/1714865
aaatattattt

SEQ ID NO: 177509 - DNA, 11 bp, Unknown
  misc_feature (1)..( 11): Result.005 file - promoters50/1714865
aatgtttattt

SEQ ID NO: 177510 - DNA, 11 bp, Unknown
  misc_feature (1)..( 11): Result.005 file - promoters50/1714865
tgatatgattc

SEQ ID NO: 177511 - DNA, 7 bp, Unknown
  misc_feature (1)..( 7): Result.005 file - promoters50/1714877
ataattt

SEQ ID NO: 177512 - DNA, 7 bp, Unknown
  misc_feature (1)..( 7): Result.005 file - promoters50/1714877
ttaattt

SEQ ID NO: 177513 - DNA, 7 bp, Unknown
  misc_feature (1)..( 7): Result.005 file - promoters50/1714877
ttagttt

SEQ ID NO: 177514 - DNA, 11 bp, Unknown
  misc_feature (1)..( 11): Result.005 file - promoters50/1714912
aagaagaaaag

SEQ ID NO: 177515 - DNA, 11 bp, Unknown
  misc_feature (1)..( 11): Result.005 file - promoters50/1714912
aaaaagaaaaa

SEQ ID NO: 177516 - DNA, 11 bp, Unknown
  misc_feature (1)..( 11): Result.005 file - promoters50/1714912
aaaaataaaaa

SEQ ID NO: 177517 - DNA, 10 bp, Unknown
  misc_feature (1)..( 10): Result.005 file - promoters50/1714942
cattgcttag

SEQ ID NO: 177518 - DNA, 10 bp, Unknown
  misc_feature (1)..( 10): Result.005 file - promoters50/1714942
cattgctgtt

SEQ ID NO: 177519 - DNA, 10 bp, Unknown
  misc_feature (1)..( 10): Result.005 file - promoters50/1714942
tattgctcgg

SEQ ID NO: 177520 - DNA, 10 bp, Unknown
  misc_feature (1)..( 10): Result.005 file - promoters50/1714942
acttgattag

SEQ ID NO: 177521 - DNA, 10 bp, Unknown
  misc_feature (1)..( 10): Result.005 file - promoters50/1714974
ttgtatttat

SEQ ID NO: 177522 - DNA, 10 bp, Unknown
  misc_feature (1)..( 10): Result.005 file - promoters50/1714974
ttgaatttag

SEQ ID NO: 177523 - DNA, 10 bp, Unknown
  misc_feature (1)..( 10): Result.005 file - promoters50/1714974
gtggatttat

SEQ ID NO: 177524 - DNA, 11 bp, Unknown
  misc_feature (1)..( 11): Result.005 file - promoters50/1714974
tttgattatat

SEQ ID NO: 177525 - DNA, 10 bp, Unknown
  misc_feature (1)..( 10): Result.005 file - promoters50/1714974
aaacgaaatt

SEQ ID NO: 177526 - DNA, 10 bp, Unknown
  misc_feature (1)..( 10): Result.005 file - promoters50/1714974
aaaccaaata

SEQ ID NO: 177527 - DNA, 10 bp, Unknown
  misc_feature (1)..( 10): Result.005 file - promoters50/1714974
aaatgaaaaa

SEQ ID NO: 177528 - DNA, 10 bp, Unknown
  misc_feature (1)..( 10): Result.005 file - promoters50/1714974
cttgcaaata

SEQ ID NO: 177529 - DNA, 10 bp, Unknown
  misc_feature (1)..( 10): Result.005 file - promoters50/1714974
tattaaagga

SEQ ID NO: 177530 - DNA, 10 bp, Unknown
  misc_feature (1)..( 10): Result.005 file - promoters50/1714974
tataaaacca

SEQ ID NO: 177531 - DNA, 10 bp, Unknown
  misc_feature (1)..( 10): Result.005 file - promoters50/1714974
atttagagga

SEQ ID NO: 177532 - DNA, 10 bp, Unknown
  misc_feature (1)..( 10): Result.005 file - promoters50/1714974
aatacaacat

SEQ ID NO: 177533 - DNA, 11 bp, Unknown
  misc_feature (1)..( 11): Result.005 file - promoters50/1714974
taaaatttatt

SEQ ID NO: 177534 - DNA, 11 bp, Unknown
  misc_feature (1)..( 11): Result.005 file - promoters50/1714974
atgcattcatt

SEQ ID NO: 177535 - DNA, 11 bp, Unknown
  misc_feature (1)..( 11): Result.005 file - promoters50/1714974
aaaactttatc

SEQ ID NO: 177536 - DNA, 11 bp, Unknown
  misc_feature (1)..( 11): Result.005 file - promoters50/1714974
aaaccttgtgg

SEQ ID NO: 177537 - DNA, 10 bp, Unknown
  misc_feature (1)..( 10): Result.005 file - promoters50/1714974
aaattttact

SEQ ID NO: 177538 - DNA, 10 bp, Unknown
  misc_feature (1)..( 10): Result.005 file - promoters50/1714974
aaactttatc

SEQ ID NO: 177539 - DNA, 10 bp, Unknown
  misc_feature (1)..( 10): Result.005 file - promoters50/1714974
aaaccttgtg

SEQ ID NO: 177540 - DNA, 10 bp, Unknown
  misc_feature (1)..( 10): Result.005 file - promoters50/1714974
agccttgatc

SEQ ID NO: 177541 - DNA, 12 bp, Unknown
  misc_feature (1)..( 12): Result.005 file - promoters50/1714989
aatcaacatata

SEQ ID NO: 177542 - DNA, 12 bp, Unknown
  misc_feature (1)..( 12): Result.005 file - promoters50/1714989
aaactacatatt

SEQ ID NO: 177543 - DNA, 12 bp, Unknown
  misc_feature (1)..( 12): Result.005 file - promoters50/1714989
aataaacatatt

SEQ ID NO: 177544 - DNA, 12 bp, Unknown
  misc_feature (1)..( 12): Result.005 file - promoters50/1714989
accattcatata

SEQ ID NO: 177545 - DNA, 12 bp, Unknown
  misc_feature (1)..( 12): Result.005 file - promoters50/1714989
cccaaaaataag

SEQ ID NO: 177546 - DNA, 12 bp, Unknown
  misc_feature (1)..( 12): Result.005 file - promoters50/1714989
aacaaaaaaggt

SEQ ID NO: 177547 - DNA, 12 bp, Unknown
  misc_feature (1)..( 12): Result.005 file - promoters50/1714989
tacaaaaaaagc

SEQ ID NO: 177548 - DNA, 10 bp, Unknown
  misc_feature (1)..( 10): Result.005 file - promoters50/1714989
caaagattta

SEQ ID NO: 177549 - DNA, 10 bp, Unknown
  misc_feature (1)..( 10): Result.005 file - promoters50/1714989
aaaatattaa

SEQ ID NO: 177550 - DNA, 10 bp, Unknown
  misc_feature (1)..( 10): Result.005 file - promoters50/1714989
taaaaattaa

SEQ ID NO: 177551 - DNA, 10 bp, Unknown
  misc_feature (1)..( 10): Result.005 file - promoters50/1714989
aaaataagat

SEQ ID NO: 177552 - DNA, 10 bp, Unknown
  misc_feature (1)..( 10): Result.005 file - promoters50/1714989
agaatactaa

SEQ ID NO: 177553 - DNA, 10 bp, Unknown
  misc_feature (1)..( 10): Result.005 file - promoters50/1714989
taaacatatt

SEQ ID NO: 177554 - DNA, 10 bp, Unknown
  misc_feature (1)..( 10): Result.005 file - promoters50/1714989
gaaacaaatt

SEQ ID NO: 177555 - DNA, 10 bp, Unknown
  misc_feature (1)..( 10): Result.005 file - promoters50/1714989
aaaacaaacg

SEQ ID NO: 177556 - DNA, 10 bp, Unknown
  misc_feature (1)..( 10): Result.005 file - promoters50/1714989
gaaaaaaaag

SEQ ID NO: 177557 - DNA, 10 bp, Unknown
  misc_feature (1)..( 10): Result.005 file - promoters50/1714989
taaataaatt

SEQ ID NO: 177558 - DNA, 10 bp, Unknown
  misc_feature (1)..( 10): Result.005 file - promoters50/1714989
taaaaaaaga

SEQ ID NO: 177559 - DNA, 10 bp, Unknown
  misc_feature (1)..( 10): Result.005 file - promoters50/1714989
ttaactaatt

SEQ ID NO: 177560 - DNA, 10 bp, Unknown
  misc_feature (1)..( 10): Result.005 file - promoters50/1714989
taatataact

SEQ ID NO: 177561 - DNA, 16 bp, Unknown
  misc_feature (1)..( 16): Result.005 file - promoters50/1714989
tccaactaaagtatac

SEQ ID NO: 177562 - DNA, 16 bp, Unknown
  misc_feature (1)..( 16): Result.005 file - promoters50/1714989
tttaacaaaaaaaata

SEQ ID NO: 177563 - DNA, 16 bp, Unknown
  misc_feature (1)..( 16): Result.005 file - promoters50/1714989
aaaaaccaaagacaag

SEQ ID NO: 177564 - DNA, 16 bp, Unknown
  misc_feature (1)..( 16): Result.005 file - promoters50/1714989
tccaaataaaatatct

SEQ ID NO: 177565 - DNA, 16 bp, Unknown
  misc_feature (1)..( 16): Result.005 file - promoters50/1714989
agagacaaaaacaata

SEQ ID NO: 177566 - DNA, 16 bp, Unknown
  misc_feature (1)..( 16): Result.005 file - promoters50/1714989
ggttacaaaatatcaa

SEQ ID NO: 177567 - DNA, 16 bp, Unknown
  misc_feature (1)..( 16): Result.005 file - promoters50/1714989
tttctttaaactatga

SEQ ID NO: 177568 - DNA, 9 bp, Unknown
  misc_feature (1)..( 9): Result.005 file - promoters50/1714989
ttacaaaca

SEQ ID NO: 177569 - DNA, 9 bp, Unknown
  misc_feature (1)..( 9): Result.005 file - promoters50/1714989
agacaaacg

SEQ ID NO: 177570 - DNA, 9 bp, Unknown
  misc_feature (1)..( 9): Result.005 file - promoters50/1714989
ttaaaaaat

SEQ ID NO: 177571 - DNA, 9 bp, Unknown
  misc_feature (1)..( 9): Result.005 file - promoters50/1714989
ttaaaaagt

SEQ ID NO: 177572 - DNA, 9 bp, Unknown
  misc_feature (1)..( 9): Result.005 file - promoters50/1714989
ttaaaatcg

SEQ ID NO: 177573 - DNA, 9 bp, Unknown
  misc_feature (1)..( 9): Result.005 file - promoters50/1714989
caaaagagt

SEQ ID NO: 177574 - DNA, 12 bp, Unknown
  misc_feature (1)..( 12): Result.005 file - promoters50/1714989
catatacaagaa

SEQ ID NO: 177575 - DNA, 12 bp, Unknown
  misc_feature (1)..( 12): Result.005 file - promoters50/1714989
agtatacaaaaa

SEQ ID NO: 177576 - DNA, 12 bp, Unknown
  misc_feature (1)..( 12): Result.005 file - promoters50/1714989
aataaacatatt

SEQ ID NO: 177577 - DNA, 12 bp, Unknown
  misc_feature (1)..( 12): Result.005 file - promoters50/1714989
gaattacaaaac

SEQ ID NO: 177578 - DNA, 12 bp, Unknown
  misc_feature (1)..( 12): Result.005 file - promoters50/1714989
ttttaacaaaaa

SEQ ID NO: 177579 - DNA, 12 bp, Unknown
  misc_feature (1)..( 12): Result.005 file - promoters50/1714989
ctcccaaaaata

SEQ ID NO: 177580 - DNA, 12 bp, Unknown
  misc_feature (1)..( 12): Result.005 file - promoters50/1714989
agtacacagagt

SEQ ID NO: 177581 - DNA, 11 bp, Unknown
  misc_feature (1)..( 11): Result.005 file - promoters50/1714989
aattattttgt

SEQ ID NO: 177582 - DNA, 11 bp, Unknown
  misc_feature (1)..( 11): Result.005 file - promoters50/1714989
ttttatttctt

SEQ ID NO: 177583 - DNA, 11 bp, Unknown
  misc_feature (1)..( 11): Result.005 file - promoters50/1714989
aattattttgc

SEQ ID NO: 177584 - DNA, 11 bp, Unknown
  misc_feature (1)..( 11): Result.005 file - promoters50/1714989
gtttgtttaac

SEQ ID NO: 177585 - DNA, 11 bp, Unknown
  misc_feature (1)..( 11): Result.005 file - promoters50/1714989
acttatatctt

SEQ ID NO: 177586 - DNA, 11 bp, Unknown
  misc_feature (1)..( 11): Result.005 file - promoters50/1714989
gtatatatcca

SEQ ID NO: 177587 - DNA, 20 bp, Unknown
  misc_feature (1)..( 20): Result.005 file - promoters50/1714989
tccaactaaagtatacttac

SEQ ID NO: 177588 - DNA, 20 bp, Unknown
  misc_feature (1)..( 20): Result.005 file - promoters50/1714989
tttctttaaactatgacagt

SEQ ID NO: 177589 - DNA, 20 bp, Unknown
  misc_feature (1)..( 20): Result.005 file - promoters50/1714989
gggttacaaaatatcaaaga

SEQ ID NO: 177590 - DNA, 20 bp, Unknown
  misc_feature (1)..( 20): Result.005 file - promoters50/1714989
tccaaataaaatatctttaa

SEQ ID NO: 177591 - DNA, 20 bp, Unknown
  misc_feature (1)..( 20): Result.005 file - promoters50/1714989
aacaaaaaaaataagaatgt

SEQ ID NO: 177592 - DNA, 20 bp, Unknown
  misc_feature (1)..( 20): Result.005 file - promoters50/1714989
cggtctaaagtcatccaaag

SEQ ID NO: 177593 - DNA, 20 bp, Unknown
  misc_feature (1)..( 20): Result.005 file - promoters50/1714989
cacttatatcttataaccaa

SEQ ID NO: 177594 - DNA, 15 bp, Unknown
  misc_feature (1)..( 15): Result.005 file - promoters50/1714989
ccacaaaacgacgac

SEQ ID NO: 177595 - DNA, 15 bp, Unknown
  misc_feature (1)..( 15): Result.005 file - promoters50/1714989
agacaaaaacaatat

SEQ ID NO: 177596 - DNA, 15 bp, Unknown
  misc_feature (1)..( 15): Result.005 file - promoters50/1714989
ttacaaaatatcaaa

SEQ ID NO: 177597 - DNA, 15 bp, Unknown
  misc_feature (1)..( 15): Result.005 file - promoters50/1714989
taacaaaaaaaataa

SEQ ID NO: 177598 - DNA, 15 bp, Unknown
  misc_feature (1)..( 15): Result.005 file - promoters50/1714989
aaagaaaataataat

SEQ ID NO: 177599 - DNA, 15 bp, Unknown
  misc_feature (1)..( 15): Result.005 file - promoters50/1714989
aattttaataaacca

SEQ ID NO: 177600 - DNA, 11 bp, Unknown
  misc_feature (1)..( 11): Result.005 file - promoters50/1714989
ttgagtttagg

SEQ ID NO: 177601 - DNA, 11 bp, Unknown
  misc_feature (1)..( 11): Result.005 file - promoters50/1714989
gatagtttaaa

SEQ ID NO: 177602 - DNA, 11 bp, Unknown
  misc_feature (1)..( 11): Result.005 file - promoters50/1714989
ttgatttttgt

SEQ ID NO: 177603 - DNA, 11 bp, Unknown
  misc_feature (1)..( 11): Result.005 file - promoters50/1714989
ttgattttaaa

SEQ ID NO: 177604 - DNA, 11 bp, Unknown
  misc_feature (1)..( 11): Result.005 file - promoters50/1714989
tttatttttgt

SEQ ID NO: 177605 - DNA, 11 bp, Unknown
  misc_feature (1)..( 11): Result.005 file - promoters50/1714989
acaattctaat

SEQ ID NO: 177606 - DNA, 11 bp, Unknown
  misc_feature (1)..( 11): Result.005 file - promoters50/1715054
atattgattta

SEQ ID NO: 177607 - DNA, 11 bp, Unknown
  misc_feature (1)..( 11): Result.005 file - promoters50/1715054
gagtagattta

SEQ ID NO: 177608 - DNA, 11 bp, Unknown
  misc_feature (1)..( 11): Result.005 file - promoters50/1715054
caaatgattta

SEQ ID NO: 177609 - DNA, 11 bp, Unknown
  misc_feature (1)..( 11): Result.005 file - promoters50/1715054
atattgatttg

SEQ ID NO: 177610 - DNA, 15 bp, Unknown
  misc_feature (1)..( 15): Result.005 file - promoters50/1715054
atattatattattta

SEQ ID NO: 177611 - DNA, 15 bp, Unknown
  misc_feature (1)..( 15): Result.005 file - promoters50/1715054
taattatgttatcag

SEQ ID NO: 177612 - DNA, 15 bp, Unknown
  misc_feature (1)..( 15): Result.005 file - promoters50/1715054
taattttgttaataa

SEQ ID NO: 177613 - DNA, 15 bp, Unknown
  misc_feature (1)..( 15): Result.005 file - promoters50/1715054
cttttttcttaataa

SEQ ID NO: 177614 - DNA, 7 bp, Unknown
  misc_feature (1)..( 7): Result.005 file - promoters50/1715054
agcattt

SEQ ID NO: 177615 - DNA, 7 bp, Unknown
  misc_feature (1)..( 7): Result.005 file - promoters50/1715054
agccttt

SEQ ID NO: 177616 - DNA, 7 bp, Unknown
  misc_feature (1)..( 7): Result.005 file - promoters50/1715054
agcattt

SEQ ID NO: 177617 - DNA, 10 bp, Unknown
  misc_feature (1)..( 10): Result.005 file - promoters50/1715054
ccagaattta

SEQ ID NO: 177618 - DNA, 10 bp, Unknown
  misc_feature (1)..( 10): Result.005 file - promoters50/1715054
aaagaagtta

SEQ ID NO: 177619 - DNA, 10 bp, Unknown
  misc_feature (1)..( 10): Result.005 file - promoters50/1715054
aaaaaagaac

SEQ ID NO: 177620 - DNA, 8 bp, Unknown
  misc_feature (1)..( 8): Result.005 file - promoters50/1715054
aataatta

SEQ ID NO: 177621 - DNA, 8 bp, Unknown
  misc_feature (1)..( 8): Result.005 file - promoters50/1715054
tttaatta

SEQ ID NO: 177622 - DNA, 8 bp, Unknown
  misc_feature (1)..( 8): Result.005 file - promoters50/1715054
ttttattg

SEQ ID NO: 177623 - DNA, 7 bp, Unknown
  misc_feature (1)..( 7): Result.005 file - promoters50/1715054
aatcttc

SEQ ID NO: 177624 - DNA, 7 bp, Unknown
  misc_feature (1)..( 7): Result.005 file - promoters50/1715054
aatgttc

SEQ ID NO: 177625 - DNA, 7 bp, Unknown
  misc_feature (1)..( 7): Result.005 file - promoters50/1715054
aatgtta

SEQ ID NO: 177626 - DNA, 7 bp, Unknown
  misc_feature (1)..( 7): Result.005 file - promoters50/1715146
ttccata

SEQ ID NO: 177627 - DNA, 7 bp, Unknown
  misc_feature (1)..( 7): Result.005 file - promoters50/1715146
ttctata

SEQ ID NO: 177628 - DNA, 7 bp, Unknown
  misc_feature (1)..( 7): Result.005 file - promoters50/1715146
ttccata

SEQ ID NO: 177629 - DNA, 9 bp, Unknown
  misc_feature (1)..( 9): Result.005 file - promoters50/1715146
tttaaattc

SEQ ID NO: 177630 - DNA, 9 bp, Unknown
  misc_feature (1)..( 9): Result.005 file - promoters50/1715146
tataaattc

SEQ ID NO: 177631 - DNA, 9 bp, Unknown
  misc_feature (1)..( 9): Result.005 file - promoters50/1715146
tataaatat

SEQ ID NO: 177632 - DNA, 7 bp, Unknown
  misc_feature (1)..( 7): Result.005 file - promoters50/1715146
atccaaa

SEQ ID NO: 177633 - DNA, 7 bp, Unknown
  misc_feature (1)..( 7): Result.005 file - promoters50/1715146
atccaat

SEQ ID NO: 177634 - DNA, 7 bp, Unknown
  misc_feature (1)..( 7): Result.005 file - promoters50/1715146
atcaaat

SEQ ID NO: 177635 - DNA, 8 bp, Unknown
  misc_feature (1)..( 8): Result.005 file - promoters50/1715146
gaatttct

SEQ ID NO: 177636 - DNA, 8 bp, Unknown
  misc_feature (1)..( 8): Result.005 file - promoters50/1715146
gaatttaa

SEQ ID NO: 177637 - DNA, 8 bp, Unknown
  misc_feature (1)..( 8): Result.005 file - promoters50/1715146
aaatttaa

SEQ ID NO: 177638 - DNA, 9 bp, Unknown
  misc_feature (1)..( 9): Result.005 file - promoters50/1715146
agaaaatca

SEQ ID NO: 177639 - DNA, 9 bp, Unknown
  misc_feature (1)..( 9): Result.005 file - promoters50/1715146
agataataa

SEQ ID NO: 177640 - DNA, 9 bp, Unknown
  misc_feature (1)..( 9): Result.005 file - promoters50/1715146
tgatagtaa

SEQ ID NO: 177641 - DNA, 10 bp, Unknown
  misc_feature (1)..( 10): Result.005 file - promoters50/1715146
aaactatctc

SEQ ID NO: 177642 - DNA, 10 bp, Unknown
  misc_feature (1)..( 10): Result.005 file - promoters50/1715146
aaattattaa

SEQ ID NO: 177643 - DNA, 10 bp, Unknown
  misc_feature (1)..( 10): Result.005 file - promoters50/1715146
agattagtaa

SEQ ID NO: 177644 - DNA, 7 bp, Unknown
  misc_feature (1)..( 7): Result.005 file - promoters50/1715146
aagaaaa

SEQ ID NO: 177645 - DNA, 7 bp, Unknown
  misc_feature (1)..( 7): Result.005 file - promoters50/1715146
aagaaat

SEQ ID NO: 177646 - DNA, 8 bp, Unknown
  misc_feature (1)..( 8): Result.005 file - promoters50/1715146
aagtaaat

SEQ ID NO: 177647 - DNA, 8 bp, Unknown
  misc_feature (1)..( 8): Result.005 file - promoters50/1715146
aatttaag

SEQ ID NO: 177648 - DNA, 8 bp, Unknown
  misc_feature (1)..( 8): Result.005 file - promoters50/1715146
cctttaag

SEQ ID NO: 177649 - DNA, 8 bp, Unknown
  misc_feature (1)..( 8): Result.005 file - promoters50/1715146
aatttaat

SEQ ID NO: 177650 - DNA, 7 bp, Unknown
  misc_feature (1)..( 7): Result.005 file - promoters50/1715204
aaaagtc

SEQ ID NO: 177651 - DNA, 7 bp, Unknown
  misc_feature (1)..( 7): Result.005 file - promoters50/1715204
aaaagtt

SEQ ID NO: 177652 - DNA, 7 bp, Unknown
  misc_feature (1)..( 7): Result.005 file - promoters50/1715204
aaaattg

SEQ ID NO: 177653 - DNA, 9 bp, Unknown
  misc_feature (1)..( 9): Result.005 file - promoters50/1715204
aagtgttta

SEQ ID NO: 177654 - DNA, 9 bp, Unknown
  misc_feature (1)..( 9): Result.005 file - promoters50/1715204
aagtgttgg

SEQ ID NO: 177655 - DNA, 10 bp, Unknown
  misc_feature (1)..( 10): Result.005 file - promoters50/1715204
ctgtgcttat

SEQ ID NO: 177656 - DNA, 10 bp, Unknown
  misc_feature (1)..( 10): Result.005 file - promoters50/1715204
attcaacata

SEQ ID NO: 177657 - DNA, 10 bp, Unknown
  misc_feature (1)..( 10): Result.005 file - promoters50/1715204
attcaagatt

SEQ ID NO: 177658 - DNA, 10 bp, Unknown
  misc_feature (1)..( 10): Result.005 file - promoters50/1715204
gttcatgatt

SEQ ID NO: 177659 - DNA, 10 bp, Unknown
  misc_feature (1)..( 10): Result.005 file - promoters50/1715220
ctgtcattaa

SEQ ID NO: 177660 - DNA, 10 bp, Unknown
  misc_feature (1)..( 10): Result.005 file - promoters50/1715220
ctgtcaaagg

SEQ ID NO: 177661 - DNA, 10 bp, Unknown
  misc_feature (1)..( 10): Result.005 file - promoters50/1715220
ttgtctaagt

SEQ ID NO: 177662 - DNA, 10 bp, Unknown
  misc_feature (1)..( 10): Result.005 file - promoters50/1715220
ttgactaatc

SEQ ID NO: 177663 - DNA, 10 bp, Unknown
  misc_feature (1)..( 10): Result.005 file - promoters50/1715220
aagactagac

SEQ ID NO: 177664 - DNA, 11 bp, Unknown
  misc_feature (1)..( 11): Result.005 file - promoters50/1715220
ccaaacatgga

SEQ ID NO: 177665 - DNA, 11 bp, Unknown
  misc_feature (1)..( 11): Result.005 file - promoters50/1715220
agaaaaatgtg

SEQ ID NO: 177666 - DNA, 11 bp, Unknown
  misc_feature (1)..( 11): Result.005 file - promoters50/1715220
ccaaacagaaa

SEQ ID NO: 177667 - DNA, 11 bp, Unknown
  misc_feature (1)..( 11): Result.005 file - promoters50/1715220
caaaaggaaaa

SEQ ID NO: 177668 - DNA, 11 bp, Unknown
  misc_feature (1)..( 11): Result.005 file - promoters50/1715220
ccaaatttgta

SEQ ID NO: 177669 - DNA, 12 bp, Unknown
  misc_feature (1)..( 12): Result.005 file - promoters50/1715220
tttcactttaga

SEQ ID NO: 177670 - DNA, 12 bp, Unknown
  misc_feature (1)..( 12): Result.005 file - promoters50/1715220
aggttcttaaga

SEQ ID NO: 177671 - DNA, 12 bp, Unknown
  misc_feature (1)..( 12): Result.005 file - promoters50/1715220
tttcaatttaat

SEQ ID NO: 177672 - DNA, 12 bp, Unknown
  misc_feature (1)..( 12): Result.005 file - promoters50/1715220
gaccaattttag

SEQ ID NO: 177673 - DNA, 12 bp, Unknown
  misc_feature (1)..( 12): Result.005 file - promoters50/1715220
caacaattttga

SEQ ID NO: 177674 - DNA, 8 bp, Unknown
  misc_feature (1)..( 8): Result.005 file - promoters50/1715224
ttataaaa

SEQ ID NO: 177675 - DNA, 8 bp, Unknown
  misc_feature (1)..( 8): Result.005 file - promoters50/1715224
ttattaaa

SEQ ID NO: 177676 - DNA, 8 bp, Unknown
  misc_feature (1)..( 8): Result.005 file - promoters50/1715224
ctatgaaa

SEQ ID NO: 177677 - DNA, 10 bp, Unknown
  misc_feature (1)..( 10): Result.005 file - promoters50/1715224
ttttattaaa

SEQ ID NO: 177678 - DNA, 10 bp, Unknown
  misc_feature (1)..( 10): Result.005 file - promoters50/1715224
aattactaaa

SEQ ID NO: 177679 - DNA, 10 bp, Unknown
  misc_feature (1)..( 10): Result.005 file - promoters50/1715224
aattactata

SEQ ID NO: 177680 - DNA, 8 bp, Unknown
  misc_feature (1)..( 8): Result.005 file - promoters50/1715224
ggtgaaaa

SEQ ID NO: 177681 - DNA, 8 bp, Unknown
  misc_feature (1)..( 8): Result.005 file - promoters50/1715224
tatgaaaa

SEQ ID NO: 177682 - DNA, 8 bp, Unknown
  misc_feature (1)..( 8): Result.005 file - promoters50/1715224
tattaaag

SEQ ID NO: 177683 - DNA, 8 bp, Unknown
  misc_feature (1)..( 8): Result.005 file - promoters50/1715329
atctaaag

SEQ ID NO: 177684 - DNA, 8 bp, Unknown
  misc_feature (1)..( 8): Result.005 file - promoters50/1715329
ttctaaaa

SEQ ID NO: 177685 - DNA, 8 bp, Unknown
  misc_feature (1)..( 8): Result.005 file - promoters50/1715329
ttcaaaaa

SEQ ID NO: 177686 - DNA, 9 bp, Unknown
  misc_feature (1)..( 9): Result.005 file - promoters50/1715329
ccttcttct

SEQ ID NO: 177687 - DNA, 9 bp, Unknown
  misc_feature (1)..( 9): Result.005 file - promoters50/1715329
tctttttct

SEQ ID NO: 177688 - DNA, 9 bp, Unknown
  misc_feature (1)..( 9): Result.005 file - promoters50/1715329
ccttctcga

SEQ ID NO: 177689 - DNA, 10 bp, Unknown
  misc_feature (1)..( 10): Result.005 file - promoters50/1715329
agattttagc

SEQ ID NO: 177690 - DNA, 10 bp, Unknown
  misc_feature (1)..( 10): Result.005 file - promoters50/1715329
atattttatt

SEQ ID NO: 177691 - DNA, 10 bp, Unknown
  misc_feature (1)..( 10): Result.005 file - promoters50/1715329
atattttgcc

SEQ ID NO: 177692 - DNA, 10 bp, Unknown
  misc_feature (1)..( 10): Result.005 file - promoters50/1715329
gaatttcatt

SEQ ID NO: 177693 - DNA, 7 bp, Unknown
  misc_feature (1)..( 7): Result.005 file - promoters50/1715329
ttttatt

SEQ ID NO: 177694 - DNA, 7 bp, Unknown
  misc_feature (1)..( 7): Result.005 file - promoters50/1715329
ttttatt

SEQ ID NO: 177695 - DNA, 7 bp, Unknown
  misc_feature (1)..( 7): Result.005 file - promoters50/1715329
ttttatt

SEQ ID NO: 177696 - DNA, 10 bp, Unknown
  misc_feature (1)..( 10): Result.005 file - promoters50/1715329
ttaggtcaat

SEQ ID NO: 177697 - DNA, 10 bp, Unknown
  misc_feature (1)..( 10): Result.005 file - promoters50/1715329
ttagatcatt

SEQ ID NO: 177698 - DNA, 10 bp, Unknown
  misc_feature (1)..( 10): Result.005 file - promoters50/1715329
gcagatcatt

SEQ ID NO: 177699 - DNA, 11 bp, Unknown
  misc_feature (1)..( 11): Result.005 file - promoters50/1715347
tttttaataac

SEQ ID NO: 177700 - DNA, 11 bp, Unknown
  misc_feature (1)..( 11): Result.005 file - promoters50/1715347
gtgttaatagc

SEQ ID NO: 177701 - DNA, 11 bp, Unknown
  misc_feature (1)..( 11): Result.005 file - promoters50/1715347
ttgtaaatgta

SEQ ID NO: 177702 - DNA, 11 bp, Unknown
  misc_feature (1)..( 11): Result.005 file - promoters50/1715347
tcttaaatgct
